United States Patent Application Publication US 2003/0165831 A1 - sequence listing, part 3

SEQ ID NO: 15842 - DNA, 394 bp, Homo sapiens
tacgactcactatagggcgaattgggccctctagatgcatgctcgagcggccgccagtgtgatggatatctgcagaattcgccctttcgagcggccgcccgggcaggtacagtaaatcacaagagaaggtggtggcgaatccctgctcacactggaagttgctctgtggaccattcgaagaagctctggactgatcacaagggaaaccgagcagaactgtgaagcagacggacaggaacaaaaggctattctggtgtgaggagaaatcagtcacttcagctccacaggcagatgttgctactggactgacaagtggaacctactcctgctggagaaaggtaaagtttgccattggggcagacgcagagttcatacactgtctgtcgagaacttg

SEQ ID NO: 15843 - DNA, 593 bp, Homo sapiens
atacgactcactatagggcgaattgggccctctagatgcatgctcgagcggccgccagtgtgatggatatctgcagaattcgcccttagcgtggtcgcggccgaggtactttcaagtttttactcaaactcaatataatttcctttagaaaaatgtttttgagaaacacagtattaaatcaagaaagcccttgctgcttttattgtcactaaaatcatatattgttttccaaagaatactgccatttgtttatatttccctacagtttttgtttttgggagttttgttttgttatagtggcagctgaagtgattttgagtgtttgcagcatgatgttaattaaccaaatgtttcaacctggaactttgaacacctgggcttacataaattgctcagaatcagtgtggaaatcttcggaacagtggatgtagaagatttggggtaaaacaggcactagatggtgaggggttttatgctctactcattctttacgcaaaataaaaacagacgagtaagtgttggcctctttggaacagatgattcccagcagcagttggcatgctttatgtacctgcccgggcggccgctcgaag

SEQ ID NO: 15844 - DNA, 594 bp, Homo sapiens
atatggcgaatggggccctctagatgcatgctcgagcggccgccagtgtgatggatatctgcagaattcgccctttcgagcggccgcccgggcaggtacaagttgagagaaaattgttgagaagcttcaaaacctgctttgcatttttattttatgggcttccctaaacccagtagatcgagtgccaattaggaatgcctcgaacatctataagccttgtaggcttatacttgccttatataggctttgtagactatcacagtagtagatcatctattgttcattaaatctgctgcttttagaattcccagcatcagaattctgtgctttaaaagctgataccacatttttggaacattctaagactgtgggtcagtgacctcctatttgttttgatccccgccccgccttttatggaatctgatttggatttcataattcctatactcccatataacatctatgtcgtgaaagatttataagaccatagtacctcggccgcgaacacgctaaggggcgaattccagcacactggcggccgttactagtggatccgagctcggtaccaagcttggcgtaatcatggtcatagct

SEQ ID NO: 15845 - DNA, 444 bp, Homo sapiens
catgctcgacggccgccagtgtgatggatatctgcagaattcgcccttagcgtggtcgcggccgaggtacttaacattttggggctagactaatatatttactagtggacacaggaagaagcagacgccaaggcatatggtcaggaagggagttaacaggccaccaacaaagaggaagaaatgcggcagctgaaatcaactgagggtagatgaaaagaggataaaatggcaccgacagatccaaaggccttaagaaactcaaaaaacctcagtaataaggaaatgtgtttggaaatactgatattgttaccttcatttgggaagtgttcacgtgtgaatagggaagaaaataagggaagcaactgtgaattaccttaggctttcaccagatgagtatgagtaaaatgtgtgaagtgaaattcaggttaacccttcaagtcacat

SEQ ID NO: 15846 - DNA, 520 bp, Homo sapiens
  misc_feature 466: n = A,T,C or G
ctatagggtgaatggcgaattgtgccctctagatgcatgctcgagcggccgccagtgtgatggatatctgcagaattcgccctttggccgcccgggcaggtacagatgtctttgagggcagctctcaggtagaattgcttctttttgtaaaactgttaacagttttagattaaaaatttaaggggagtagattctgtctgcactcagaaaggcaaagtcacatgcctcaacttttgactaaagcacagcaactcactgtaaagcaaccacagaacaaaaacttacaaacatgacactggcaaataaaaagctgtcatgattttgatgaatgttaatcccgcgtacctcggccgcgaccacgctaagggcgaattccagcacactggcggccgttactagtggatccgagctcggtaccaagcttggcgtaatcatggtcatagctgtttgctgaaatttaaatatntttaattttcaactcaagaaaggcatttggcagaaaccatgtttggaaaaaaaa

SEQ ID NO: 15847 - DNA, 497 bp, Homo sapiens
gcgaattgggccctctagatgcatgctcgagcggccgccagtgtgatggatatctgcagaattcgccctttcgagcggccgcccgggcaggtacttcaaatacaactcaggcacttcagatggctttgtaaactgggtcaatgctattccatctgaaaggaaattacagaattattttcaattcaattatacatccctgcaaaataatttgagggcagctttgaatgctgtaagtgagttgtgatgccatctatattaatcctaaaacttatcttcaaattgattcccaaagtccaacacactttttatttaataaatatttacaggccaggcacggtggctcaagcctgcaatcccagcactttgggaggccaaggcaggcggattacaagatcaggagattgagaacatcctgaccaacatggtgaaaccccgcctctacttaaaatacaaaaattagccaggcgtggtggtacacacctgtattcccagccact

SEQ ID NO: 15848 - DNA, 579 bp, Homo sapiens
ccctctagatgcatgctcgagcggccgccagtgtgatggatatctgcagaattcgcccttagcgtggtcgcggccgaggtacagtctctatttctaagtcttgatttcctcatttataaaacaaagcatctaaatgatatcaaatacccttgttttgaaaatcaaagaataagcacggcacccaagacaactttttgtatcacaggcacacatgaatgcttttttccttttccttttcttatcataaaaacctatattttatgacttttacatttattcctagatgctctcatatgcattatctcatttttacaataacattataaatataaacactgttatgctattgtacagatgagagacttgaagcacagaaggctaaaactacctttaacttctaaagaaattttgtgagaagcatttgagactcttgacagttaagatccctatcattttagaaagtgcaactggggatcacatgtattttaaataattctagttgagaatagtcaaaagtcgcatttatgaagcgaaagatgacatttttaagcttcccaatgatttaatcaagcctattta

SEQ ID NO: 15849 - DNA, 545 bp, Homo sapiens
gactcactatagggctaattgggccctctagatgcatgctcgagcggccgccagtgtgatggatatctgcagaattcgcccttagcggccgcccgggcaggtacgcgggtcgctaccgtcggcttgatttatttcaagagcatatgtttgaagtattggaacgagcaagaaggatgaatcggacagattcagaaatatatgaagatgcagtagaacttcagcagttttttattaaaattcgtgatgaactctgcaaaaatggagagattcttctttcaccggcactcagctataccacaaaacatttgcataatgatgtggagaaagagagaaaggaaaaattgccaaaagaaatagaggaagataaactaaaacgagaagaagaaaaaaaaaaaaaaaaaaaaaaaagtacctcggccgcgaccacgctaagggcgaattccagcacactggcggccgttactagtggatccgagctcggtaccaagcttggcgtaatcatggtcatagctgtttcctgtgtgaaattgttatccgctcacaat

SEQ ID NO: 15850 - DNA, 587 bp, Homo sapiens
ctcactatatggcgaatggggccctctagatgcatgctcgagcggccgccagtgtgatggatatctgcagaattcgccctttcgagcggccgcccgggcaggtacctgcaatatatttggagtattatgtctttattgttgttaaaaagtttttattgaatgtatgaaaattatcaaattgtattcatcattattaacatgtcctggggaaggaagggaaactttctaggacagaagtcactttcagatgtcatgtatgtattgggtgttcaatcatatctaacactgttttgatttttgtgggaaaatattccaggaaacgctaattctctttagactccttgttcttttatgactacaatgaacatatgtctatgtgatagctaaagatatttttgaattgtatgtgtgcttaattatcggtaagtataaatatttgagaaaacacatggtctggatatttaaaaccctcataaacatgttggtacctcggccgcgaccacgctaagggcgaattccagcacactggcggccgttactagtggatccgagctcggtaccaagcttggcgtaatcatggtcatagc

SEQ ID NO: 15851 - DNA, 471 bp, Homo sapiens
actatagggcgaattgggccctctagatgcatgctcgagcggccgccagtgtgatggatatctgcagaattcgcccttagcgtggtcgcggccgaggtacttaaaaaatttttaatgtaaaatacccctttaaggatagaatttagggccttgaaattctactcagttgctctgaactgtggggaatttgagacaaatagcttttgtaattggaatgcacactgtgttgtaataatgtggaaagagaaacaaaaactttccttaatgtaatgagtttccattatctgcctaatctaaggtttgtaagtctacattgtcaggatttatattgaggagatagggggtgtcattttctgtacaagatagttttaagtatgttctaaatatttgtctgctgtagtctatttgctgtatatgctgaaatttttgtatgccatttagtatttttatagtttaggaaaatattttcta

SEQ ID NO: 15852 - DNA, 495 bp, Homo sapiens
  misc_feature 433, 451, 452: n = A,T,C or G
actatatggcgaatggggccctctagatgcatgctcgagcggccgccagtgtgatggatatctgcagaattcgcccttagcgtggtcgcggccgaggtacagaacacctcctgcaagccagactccacttaccactcatgttgagatttgttcccaacctcagagaagttcgtggttgggcacatatacctaaacatgtggcttaagtgatttaaaatagtgaaatgcttgttgattacaaaaatacatgtaacacatgtaagctgtaagaaataaaatatatatctctcacttcaccgctcaatttaaaaaactagaactgtagtagtattattgaagctacctgaatttcctaattccatctccactgccctggctctccaactgagagatcttgatttttttcatttattgttccctgcttttgaaaaanaaaaaaaaaaaaaaaaannggttttttgcgggggggggcttttaaggggggaaattcccccc

SEQ ID NO: 15853 - DNA, 480 bp, Homo sapiens
cccacgcgtccgagcaagccgagatctcaccactgcactccagcctgggcaacacagcaagactccatctcaaaaaataaataaatgaataagattcatatggcacctagttaatttcatttactcaatacttttcagaaattgaagaagctctttttcaccagctactaaacaaaagcaatttattcaactaggttttctttgcatgagttgttctgtatgtaacaagaaagcaagaaaataaatatttttaaatgtcacacttccctgcaaaaataatcacaataataataataataataatgaataagagtttataggctaggtatagtggctcacacctgtaatcctagcattttgagaggctaaggcgggtggatcacttgaggtcaggagctcaagaccagcctggccaacatggtgaaaccccatctgtacaaatacaaaatattactctaaaaaaaaaaaaatgcggccggt

SEQ ID NO: 15854 - DNA, 441 bp, Homo sapiens
atgcatgctctagcggacgccagcgtgatggatatctgctgaattcaacctttccagcggccgcccgggcaggcaccctacagagctttgtaagttccttccttatatagtatataaaaggtcatatagctatatctgcagaggacaataatgaaatatctggtattagtgagctcttattatatgccacgtcctttgctaactgctttccagtgatatcttataccaaccctatggaataagcactattatcctgctttgcagagtaggaattgaggcttagagcagttgagtaactttcctgagggcacacagctctacatatagtggaataagtcacattccagaatgttccttttacctgcacagggtaactctgtcagaatttataaaaccaataaataacagcagttacaaaaacctaatagcttccccatgtac

SEQ ID NO: 15855 - DNA, 507 bp, Homo sapiens
actatagtgtcgaattgggccctctagatgcatgctcgagcggccgccagtgtgatggatatctgcagaattcgcccttagcgtggtcgcggccgaggtacactggcagcctctactggccattgcaaagagcagcattgtcctctgttctttccattccaggttgcatatgcttttacttgggtttagctctttcttctttggtcctcaccctctttgttgtcctcttttgaagactagttattctgttggatgtcttgatttataattaataaagagctactagtccagtattttcattaataaattaatatcataagtgaatggaattcttcaggaccttagaagaagttatgaatataacctttccttgagaagtaattttcatgtaagagggaagatagatttatctttatgtaggttttaaaatactttctcaattgcaagccttaatgtatgatatagagattagtcttttacttatgactgacaaaaaaccctgatgcc

SEQ ID NO: 15856 - DNA, 536 bp, Homo sapiens
gcgaattgggccctctagatgcatgctcgagcggccgccagtgtgatggatatctgcagaattcgccctttccagcggccgcccgggcaagtactacttatacatctccagcttacataactcaaatttagtttgctttctgcggcattaacatttgactcattgaatggcttatagtagacatgaaggttattataatgtagaaagcagattaaactggattttaatttataaaatcaaggtgttagaagaggtgattatggacgtcttttctggcctaattttgtgactgctgttgaattccatgttacttgaaaagagtatttcaatagcagatgaacaataggcatcatacttttcattctgaagccattgaaggtttactgcataaaaattattctctaagcacatgactgttatccaatatcttaacaaaaaaggaggagatcattttctgggttattttttcctcagacttactatgccactgaggtagcatactaaattgtcaatgacacttttaaaatttgtacctc

SEQ ID NO: 15857 - DNA, 505 bp, Homo sapiens
acgactcactatagggcgaattgggccctctagatgcatgctcgagcggccgccagtgtgatggatatctgcagaattcgcccttagcgtggtcgcggccgaggtacagatggggtttcactgtgttagccaggatggtcttgatctcctgacctcgtgatctgcccgcctcggtctcccaaagtgctgcgattacaggcgtgagccactgtgcccaggcctattgggggttatgcaggttcctttgcttggccatggtagatggctaagtctttgcttccaagttcttttgaccatgagacatgtagagccagggaggaaagagaaaacccaaaccaggtcactgttacctgtgaataacatcttgatcgagttctgagaagaggagtgcccgcgtacctgcccgggcggccgctcgaaagggcgaattccagcacactggcggccgttactagtggatccgagctcggtaccaagcttggcgtaatcatgggcatagctgttt

SEQ ID NO: 15858 - DNA, 543 bp, Homo sapiens
  misc_feature 436, 437, 438, 439, 440, 441, 442, 443, 446, 447, 448: n = A,T,C or G
ggggccctctagatgcatgctcgagcggccgccagtgtgatggatatctgcagaattcgccctttcgagcggccgcccgggcaggtaccctagtaattggtggccctgatatttgaaacctttgtgtattttttggttaacgttcctgttcttcttggctgctgctagccacagaatatttatttttagagaaatttttcattggaacagaaaatggtggttgtgatgcagtcatggctctgtgacttagcaaactgataaaaagataaaagtatgaagcaaagacaaacagggtggaggtcggtgttctcccgcctaccctttctatgtggtgctcatcatcagtccccctgtgttgattctgatagagaactataaaatgaaacctatggggaatttgtcattctgaaatgaaagctaatgtaattagtacttnnnnnnnnttnnntttttttttttttttaaaaaaacccccgggaaaaaaaacctatttttttttttcaaaaaatttttttttcccaaaatttaattttttaaaaaaaa

SEQ ID NO: 15859 - DNA, 391 bp, Homo sapiens
tagggcgaattgggccctctagatgcatgctcgagcggccgccagtgtgatggatatctgcagaattcgccctttcgagcggccgcccgggcaggtactttttttttttttttttttttttgtttgactcagggtcttactctgtcacccaggctggagtgcagtggtgcaatctcagtttaaacccccaagtctgtggtattttgttatagtccccctggaaattaatacaggattcatggtctgccaaagtctcattccctgctcagaccgacaatggatagtgggatcctttgtgatatgtgctctgtgagttagaagtagtaacttagagctgttgaggacaatacctttgcaccccatccactgaattttgttttcaaagatacaa

SEQ ID NO: 15860 - DNA, 478 bp, Homo sapiens
ggggccctctagatgcatgctcgagcggccgccagtgtgatggatatctgcagaattcgcccttagcgtggtcgcggccgaggtacgcgggtaggagcaggaggagcagtgggggaagctggtattatttataccactctttgtattttatcactttttataagtctgaaattatttcaaaatgaaaatgtaaaaagaacaaggagtttctcactattctttgtccccctaaaaagaccatctttttaaaaagattaaggaattcatacaaaataagtaagaattaacaattataggaagtttgggccaagcacagtggctcatgcctgtaatcccagcgctttgggaagctgaggtgggtggattgcttgggcctaagagttcaagactaaccctggtaacagcgagaccctgtctcttcaaaaaataaaaaatactaactgggcatggtggtgcacacctatagtcccagatactc

SEQ ID NO: 15861 - DNA, 377 bp, Homo sapiens
agggcgaattgggccctctagatgcatgctcgagcggccgccagtgtgatggatatctgcagaattcgcccttagcgtggtcgcggccgaggtacttcggtattacagcgccacccactggctagaagtcctcatagcacatatgagatgtagccataaaatagatgaattcttgaaataaggaatataacactgactattctgattcagtagaacataaaaaatgtctaacaaaacagaaccagacacattatattatttctacaagtaaacagaatatctattagatatgttcacaagggttttatcaattttgaaatccaagtgtataatccccaaatgctgtaaggacttaaattttatagccaaaacaatta

SEQ ID NO: 15862 - DNA, 305 bp, Homo sapiens
taatacgactcactatagggcgaattgggccctctagatgcatgctcgagcggccgccagtgtgatggatatctgcagaattcgcccttagcgtggtcgcggccgaggtacaaaaggatatattaagaaaagtgtttcccttccactccagacaccctccccaaagcaacctattaacaatgactatttgtccagtttctttgcataagtacttttttttttttttttttttttttttttctttttttttttttttttttttttttttttttttttttttttttttttttttttttttttttttt

SEQ ID NO: 15863 - DNA, 393 bp, Homo sapiens
ctatagggcgaattgggccctctagatgcatgctcgagcggccgccagtgtgatggatatctgcagaattcgcccttagcgtggtcgcggccgaggtacattgtatactgcagtgtcgtctacatggcattggacaggacataatgtaaaacataaaagtgcaattgttacacttacatatgatagtgaatggcaacgtgaccaatttttgtctcaagttaaaataccaaaaactattacagtgtctactggatttatgtctatatgacaaatcttgatactgcatccacaacattattggcgtgctttttgctttgcttttgtgtgcttttgtgtgtctgcctattaatacgtccgctgcttttgtctgtgtctacatacacatcattaata

SEQ ID NO: 15864 - DNA, 464 bp, Homo sapiens
ctatatggcgaatggggccctctagatgcatgctcgagcggccgccagtgtgatggatatctgcagaattcgcccttagcgtggtcgcggccgaggtacctgggactacaggcatgtgccaccatgcccagctaattttttgtattattagtagagatggggttttaccatgttgcccagtctcaaactcctgagctcaagtgatctgcctgcctcagcctcctaaagtgctgggattgcaggtatgagccgccgcctctactttatactttcttgttgaagtggactgtattgctgattcccacccacactctctttttggatatccggcccctcctcgagtctctgggaagggcagcactataaatcgagggacaactagggaactcccacccccactgctaggcagatcagattctctatcctgctaactggaaatgatacagagtgttcgatagattttt

SEQ ID NO: 15865 - DNA, 392 bp, Homo sapiens
gggcgaattgggccctctagatgcatgctcgagcggccgccagtgtgatggatatctgcagaattcgcccttagcgtggtcgtggccgaggtactacgcaattttggaggctctatcatcgtacacattggagacacacataatagtttagacagcaatttttcaattgtttctctattttttccacatttatatcttactaatagtaacacaaccattccccatgaacatgctaaactttgaatgtgtaaatataaacaatattgttgtaatagtgtttttatactgtcagctatactgggtgtaagtccaaatgcagcaatacaccaatcgcaacacgttgatttattacttttaaatggtcttactaattctgtaaaactcaccccgta

SEQ ID NO: 15866 - DNA, 578 bp, Homo sapiens
tatagggcgaatagagccctctagatgcatgctcgagcggccgccagtgtgatggatatctgcagaattcgccctttcgagcggccgcccgggcaggtacttgctgattggagcaataggaagagaccatttggcagtgatcgtgtgcagtgtgactgtgtgatagaaactgtgcacttgtgatgcatcccaactgcatagtgggcggcaccctgcaatcctcggaccccgtcctactgcccttggtagggtgtgggaagttacccagacagaaacaggaaaagtataggaagttccttcccaggaacataggcattggaggacataatttccctcttagatccctggattgtggttcagaaatgtccacaagcaaaggcttagaaataatttgtggaagtgtgtttcagagctgacccagaaataatctggtttgacagaggcatgaggggcacacctttgagagtatacttcttaccttatttccctgagaatggcagagaattgtgtcaagcattcatcccagagaagcctctcataagaggaatggcagcctctccccttaatctgagtacctc

SEQ ID NO: 15867 - DNA, 514 bp, Homo sapiens
tagggagtccacgcgtccgcttaactggacggtcctggggccatcagagtaagagtgaagggaagagcttttttttttcttactagcgcggatgccactctgactgaagaagctgacagcaggggcagaggggctctgggacactgctgtgtggactctgggttaagggcgtgaagaggctggtgctgtgggattcggctcgatgaatgaagcactttatggactgcgggaatcagttactgccacacccaataaactggaagtgtttacaaaaaaagaaggcaaaaaaaacaagtgcggccgctagactagtctagagaaaaaaccttccacacctccccctgaacctgaaacataaaatgaatgcaattgctgttgttaactggtttattgcagcttataatggttacaaataaagcaattgcatcacaaatttcacaaataaagcatttttttcactgcattctaattggggtttggccaaactcatcaatgtatcttatcatgtctggat

SEQ ID NO: 15868 - DNA, 575 bp, Homo sapiens
atacgactcactatactatgaggcgaatcgtgccctctagatgcatgctcgagcggccgccagtgtgatggatatctgcagaattcgccctttcgagcggccgcccgggcaggtacatttaaaaggtgatgctaatactttaaaatgtttaagatatagatttaaaaagcattgtaaattgtatactgcagtgtcgtctacatggcattggacaggacataatgtaaaacataaaagtgcaattgttacacttacatatgatagtgaatggcaacgtgaccaatttttgtctcaggttaaaataccaaaaactattacagtgtctactggatttatgtctatatgacaaatcttgatactgcatccacaacattactggcgtgctttttgctttgcttttgtgtgcttttgtgtgtctgcctattaatacgtccgctgcttttgtctgtgtctacatacacatcattaatactattggtattactattggggataacagcagcctctgcgtttaggagttttattggatatattgcatttggttatataccattatttttaatacatacacatgc

SEQ ID NO: 15869 - DNA, 694 bp, Homo sapiens
  misc_feature 571, 658: n = A,T,C or G
acgactactatagggcgaattgggccctctagatgcatgctcgagcggccgccagtgtgatggatatctgcagaattcgcccttagcgtggtcgcggccgaggtacatttaaaaggtggtgctaatactttaaaatgtttaagatatagatttaaaaagcattgtaaattgtatactgcagtgtcgtctacatggcattggacaggacataatgtaaaacataaaagtgcaattgttacacttacatatgatagtgaatggcaacgtgaccaatttttgtctcaagttaaaataccaaaaactattacagtgtctactggatttatgtctatatgacaaatcttgatactgcatccacaacattactggcgtgctttttgctttgcttttgtgtgcttttgtgtgtctgcctattaatacgtccgctgcttttgtctgtgtctacatacacatcattaatactattggtattactattgtggataacagtagcctctgcgtttaggtgttttattgtatatattgtatttgtttatataccattatttttaatacatacacatgcacgctntttaattacataatgtatatgtacataatgtaattgttacatataattgtcgtataccataacttactattttttcttttttatttntatatataatttttttttggtttgtttgtttgtttt

SEQ ID NO: 15870 - DNA, 492 bp, Homo sapiens
  misc_feature 399, 401, 403, 404, 405, 406, 407, 425: n = A,T,C or G
cactatagggcgaattgggccctctagatgcatgctcgagcggccgccagtgtgatggatatctgcagaattcgccctttcgagcggccgcccgggcaggtacaattccctctctctcccaccagttgctagtttgttgatatgagaggagccttttgtgagaagggaaggttgataaactaaatgaagagtttactcacactagaaattgttatttggaggagtttttgtaatcatatttaaataccattcaaaacctaacagtttggttgagtagttataaaatgtatactgtgggagtatctgaaagggatatctaacacacagttgtttatctttcttcatttctgagaggtgtaagggtgtgataaaaggaagatcactgtaggtatgaataantncnnnnnaaaaaaaaaaaaaaaaanttttctttgggcggaacccccttggggggaatttcccaccccttggggggggttttttggggttccc

SEQ ID NO: 15871 - DNA, 570 bp, Homo sapiens
atacgactcactatagggcgaattgggccctctagatgcatgctcgagcggccgccagtgtgatggatatctgcagaattcgccctttcgagcggccgcccgggcaggtacatttaaaaggtgatgctaatactttaaaatgtttaagatatagatttaaaaagcattgtaaattgtatactgcagtgtcgtctacatggcattggacaggacataatgtaaaacgtaaaagtgcaattgttacacttacatatgatagtgaatggcaacgtgaccaatttttgtctcaagttaaaataccaaaaactattacagtgtctactggatttatgtctatatgacaaatcttgatgctgcatccacaacattattggcgtgctttttgctttgcttttgtgtgcttttgtgtgtctgcctattaatacgtccgctgcttttgtctgtgtctacatacacatcattaatactattggtattactattgtggataacagcagcctctgcgtttaggtgttttattgtatatattgtatttgtttatataccattatttttaatacatacacatgc

SEQ ID NO: 15872 - DNA, 334 bp, Homo sapiens
tgcatgctcgagcggccgccagtgtgatggtttactgcagaattcgcccttagcgtggtcgcggccgaggtactatgggtgtagtgttactattacagttaatccgtcctttgtgtgagctgttaaatgcagtgaggattggagcactgtccactgagtctctgtgcaacaacttagtggtgtggcaggtgtttccggtgtctggctctgatcttggtcgctggatagacaactgtgtttattaggtgcccaaggcgacggctttggtatgggacgcggcggagaggttagccaagagctgcctaatagtttcaggagaggatacttggttgct

SEQ ID NO: 15873 - DNA, 688 bp, Homo sapiens
  misc_feature 573: n = A,T,C or G
tacgactcactatagggcgaattgggccctctagatgcatgctcgagcggccgccagtgtgatggatatctgcagaattcgcccttagcgtggtcgcggccgaggtacatttaaaaggtgatgctaatactttaaaatgtttaagatatagatttaaaaagcattgtaaattgtatactgcagtgtcgtctacatggcattggacaggacataatgtaaaacataaaagtgcaattgttacacttacatatgatagtgaatggcaacgtggccaatttttgtctcaagttaaaataccaaaaactattacagtgtctactggatttatgtctatatgacaaatcttgatactgcatccacaacattactggcgtgctttttgctttgcttttgtgtgcttttgtgtgtctgcctattaatacgtccgctgcttttgtctgtgtctacatacacatcattaatactattggtattactattgtggataacagcagcctctgcgtttaggtgttttattgtatatattggatttgtttatataccattatttttaatacatacacatgcacgctntttaattacataatgtatatgtacctgcccgggcggccgctcgaagggcgaattccagcacactggcggccgttactagtggatccgagctcggtaccaagcttggcgtaatcat

SEQ ID NO: 15874 - DNA, 482 bp, Homo sapiens
ggggccctctagatgcatgctcgagcggccgccagtgtgatggatatctgcagaattcgcccttagcgtggtcgcggccgacgtaccttcatggttaagaacatgcattttttgtcattgcaattttattcccaaatctattcatgtattcagcagtgaaccgaatacccgttatatgccagataccttgctaggctgggctgtgggtgatacctgttccacaagacaaatgtgggctcaaagagacatgctctctgcccttgtaaagcttgcagggaagataggcaattgagtatttggtagataggaagtgttctgggaggcctctcatatagtatgtgagagctctcatataggggataaaggaagtcacacctcacaccaagacctgaagccacacacctggtgtagaaagggcggagagtcttctaggtggatggaatagcatgtggggaagagtttgtggtatttgaggagtaggg

SEQ ID NO: 15875 - DNA, 384 bp, Homo sapiens
ttgggccctctagatgcatgctcgagcggccgccagtgtgatggatatctgcagaattcgccctatgagcggccgcccgggcaggtactagcagtagttaaaattactgagatattttcaatgaaccttcaaaaaagaccaacaaatctatttttctgtccaatgtaattttgatacttaagtttataactgtgttaagattaagtcaaactccttagaaatgttcagagaaatattagtctatatttcttatattgctcaagttctatttctataagtgataaattatacaaaatcagatatatggctcagcctgcagaagtttaagaaaaatgtttaaactaattttcatctttattaagctttcccttaagcaaagatgac

SEQ ID NO: 15876 - DNA, 408 bp, Homo sapiens
acgactcactatagggcgaattgggccctctagatgcatgctcgagcggccgccagtgtgatggatatctgcagaattcgcccttagcgtggtcgcggccgaggtaccgtgctattaaattatcagtcctgttgaatgatagagattaaagatttatttttccaagtgtcatattataaatgttgcttaaaactaagcataattcttgggaaaaaagtgagcaaatgtgtctgtgtaatcacatttaacaattaagttatgtaaaatctcattactaaagccattagctaaataagcaaatttgattaggaaatttggattaatgcaaagttcaaatatgactgcaaccaatgttggttcattacagtttgcaaatttcaaatgcataaataaccttaggaaaaaatg

SEQ ID NO: 15877 - DNA, 391 bp, Homo sapiens
actatagggcgaattgggccctctagatgcatgctcgagcggccgccagtgtgatggatatctgcagaattcgcccttagcgtggtcgcggccgaggtactatgggtgtagtgttactattacagttaatccgtcctttgtgtgagctgttaaatgcagtgaggattggagcactgtccactgagtctctgtgcaacaacttagtggtgtggcaggggtttccggtgtctggctctgatcttggtcgctggatagtcgtctgtgtttcttcggtgcccaaggcgacgactttggtatgggtcgcggcggtgtggttggccaagtgctgcctaatagtttcaggagaggatacttcgttgctgctgcaggatcagccatggtagattatggt

SEQ ID NO: 15878 - DNA, 487 bp, Homo sapiens
  misc_feature 219: n = A,T,C or G
atatggcgaattgtgccctctagatgcatgctcgagcggccgccagtgtgatggatatctgcagaattcgcccttagcgtggtcgcggccgaggtacaaatatttggcaaaggaatgaaaaaagttagaaagttgtctgtctgtgggctaggctctgcctgcatgatacttagcaatctaggtcaggaggttgcctaaataccttctcaatggccgctngtcactggccctgatggaaagtgtgataaatgcaagactagttgtgagagtcttacatgatagctaaactttgttcatttatatcacattctctatgtattatgaagattatgtcgctctggcaggtttttggtaattaaaagtgtcttttactgataggataggtacaagttagatagtagctctgtttctgtgggaaaaaaaaaaaaaaaaagttacctgcccgggcggccgactcgaaagggcgaattccagcacactggcggcc

SEQ ID NO: 15879 - DNA, 518 bp, Homo sapiens
ctatatggcgaatggggccctctagatgcatgctcgagcggccgccagtgtgatggatatctgcagaattcgccctttcgagcggccgcccgggcaggtacgcgggcatttgccagtccctgtggacttaggccagatagtataaataatagtcacaaaaggagtatgaatgggataagaagccacttctagtctgagacaattaagagtagtagtgccttctctgcactctcacccctcattctgacagctgaagtgaaggactcccaacttctggaactgcccaatgaaagtagccttgtgtgagtgttagctggcctgctttggtctgggatgcaagtagaaataaactcctgtcatattaagccactaagactttagggatatgttgctgtagcatagcctaatgtagcctgattactgaacgagccaccccatcaactgaatctatgtatatactaaaaacattttaagatacacaaggtctcaaagagttcactcgatgcacactttttctc

SEQ ID NO: 15880 - DNA, 369 bp, Homo sapiens
gcgaattgggccctctagatgcatgctcgagcggccgccagtgtgatggatatctgcagaattcgcccttagcgtggtcgcggccgaggtaccatatgcgtggaacagagaaacaaagcaagccacatctttctatcggcaaggcattgggtggatgcaaagttaaagagctaaacatgaaggccgggcgcagtggctcatgtcacgtctgtaatcccaccactttgggaggctgaggcgggtggatcacttgaggtcaggagttcaagaccagcctggccaacatgatgaaaccccatctctacttaaaatacaaaaattagctgggcatggcgttgagcatctgtagtgacagctactcgggaggct

SEQ ID NO: 15881 - DNA, 501 bp, Homo sapiens
  misc_feature 438: n = A,T,C or G
ctatagggcgaattgggccctctagatgcatgctcgagcggccgccagtgtgatggatatctgcagaattcgcccttagcgtggtcgcggccgaggtacttcagcctgggcggcagaacaagaccctgtctcagaaataataataataataaattttgttataacaagaaagagcaatcaatacagaaaaagcaggacaatttaaatgtggaaaaaaccagaaagatgaaaatattaatgggccaaacttgccagttagaggagtgtgagatttgagtttaaaaggaaaacaacttctaggccaggcacagtggttcatgcctataatcccagtgctttgggaggtcaaagcaggaggaccagttgaggctgggaattcaagagctacacaggcaacatagcaagaccttgtcccaaaaaaaaaaaaaaaaaaaaaantttccctgccggggggggcctttaaagggggaaattcccaccccttggggggggttttttggg

SEQ ID NO: 15882 - DNA, 384 bp, Homo sapiens
ttgggccctctagatgcatgctcgagcggccgccagtgtgatggatatctgcagaattcgccctttcgagcggccgcccgggcaggtacatttaaaaggtgatgctaatactttaaaatgtttaagatatagatttaaaaagcattgtaaattgtatactgcagcgtcgtctacatggcattggacaggacataatgtaaaacataaaagtgcaattgttacacttacatatgatagtgaatggcaacgtgaccaatttttgtctcaagttaaaataccaaaaactattacagtgtctactggatttatgtctatatgacaaatcttgatactgcatccacaacattactggcgtgctttttgccttgcttttgtgtgcttttg

SEQ ID NO: 15883 - DNA, 667 bp, Homo sapiens
  misc_feature 613: n = A,T,C or G
tacgactcactatagggcgaattgggccctctagatgcatgctcgagcggccgccagtgtgatggatatctgcagaattcgcccttagcgtggtcgcggccgaggtacatgattctacactgaatctgcatttcactcccatatctataccagaaggttatcagtggaagagaaattcagttatctgaatggacatgatcttctcaggagcagtcagtggttaattgggacaagaaaacacaagtcattatcattgagaaatctgaagcaaattgaggcaggttgtcacctttcaccaggaaacaaattagccctgtctttaaaaagacttctttctctctctgctgactggggattcctgtcaactgccaatgaaatagggagagtgtagattaatggcactgtaacagtggccatgaaacaaccataaagccgttttctaatttttatgaatatttttaattgattcgaccagtgtgtttgaatgacaaaatttgtgctaagcttcagctccggaaaatcagggtgccatcttccagctgaaatcagtaggtgcaccagtctgtttggggaaagttctgtgtataaagaaaaagccataaaataccgacanagtagctcttcctcttggctaatttaccttcatgaactccttgcaactagggac

SEQ ID NO: 15884 - DNA, 376 bp, Homo sapiens
ttgggccctctagatgcatgctcgagcggccgccagtgtgatggatatctgcagaattcgccctttcgagcggccgcccgggcaggtacatttaaaaggtgatgctaatactttaaaatgtttaagatatagatttaaaaagcattgtaaattgtatactgcagtgtcgtctacatggcattggacaggacataatgtaaaacataaaagtgcaattgttacacttacatatgatagtgaatggcaacgtgaccaatttttgtctcaagttaaaataccaaaaactattacagtgtctactggatttatgtctatatgacaaatcttgatactgcatccacaacattactggcgtgctttttgctttgcttttgtg

SEQ ID NO: 15885 - DNA, 636 bp, Homo sapiens
tacactcactatatgactataggcgaattgtgccctatagatgcatgctcgagcggccgccagtgtgatggatatctgcagaattcgcccttagcgtggtcgcggccgaggtacattcttacaacttggaggataaggactacacacattcatctacccatacacacagtgaaacacatgtgtagcttaaataaaacagacattctccaaggatttctccaattataataattgattgggcttcaaaaactcaaggttgaatttcagcttctaacttgatgagaatggctgtcttaattctgtcattttttgttaattttacttccaggaagtcagggctgtgatttgaggctattttctctaagcttctgtgatggagatgaatttattaaagtggggccataatgtctttttgagcaacattaaaactgagtcatcagaattaggaagtatcagaagtcaagatcaattttcaagaacaggagcataaaattcgaactcaatctgtgttaacattaagagatttagaagctcattcagactgataactaatgaataatatagctttcatttgttggagactttatgtgagccagccaggtatacatgttatttaataatccccacagtaacact

SEQ ID NO: 15886 - DNA, 462 bp, Homo sapiens
gcgaattgggccctctagatgcatgctcgagcggccgccagtgtgatggatatctgcagaattcgccctttcgagcggccgcccgggcaggtacgagggcaagagaggaggtgtctccttaaaaaggaagacagtaaggtaacacaatttatctaaagtcaaaaaacttaaaacggacccggatgtcaaacccaggactgcccgagcacaggacctgtatttttactgctctgcctgcctgctaggcagcaccgacccaccaaaacaaaggatagcaagcaccaaatggacagtattttaaacagaaaaaaaattgaaaacagctcacaagtgtgtataataggtattcatagccataatgttttaatcaaacaaaaataagtttattttctttgactcaaattataattatgtattatgcgattaagtatgtcaatattttacagagttgtagaaagaatg

SEQ ID NO: 15887 - DNA, 523 bp, Homo sapiens
ctatatggcgaatggggccctctagatgcatgctcgagcggccgccagtgtgatggatatctgcagaattcgcccttaccgtggtcgcggccgaggtacgcgggggtggctacaagtaactgtggtgtggaagcagagtagagagaaaacttgttcctcattagagagagagccacacttctcactgcacacaatgagaggccaaagattacccttggacatccagattttctattgtgccaggcctgacgaagagccttttgtgaagatcatcactgttgaagaggcaaagcgcaggaagagcacatgccgctactatgaagacgaggacgaagaggtgctgcctgtcctacggccccacagcgcgctcctggagaatatgcacatcgagcagctggcccgacgccttcctgcaagggtgcaagggtatgcatggagactggcctatagcacgttagagcacgggaccagcttaaagacgctctaccggaaatcggcatcactagacagtcctgtcctattg

SEQ ID NO: 15888 - DNA, 599 bp, Homo sapiens
ctatatggcgaatggggccctctagatgcatgctcgagcggccgccagtgtgatggatatctgcagaattcgcccttagcgtggtcgcggccgaggtaccacaaaagcaagtatcaatcagtctgctatcacaagataagttctgtccttgattagtcaagatgaactctttattttcaaatcctattattaacgtatataaggatggaagcctcaaatttaaagccaaaggatgctggcaaactgacaccctgagagagtaaaaaacaaactagaaatagataaaagattctttcacacacagactgggaacagaatagggaacccagaaataagaccgcacacctacaatcatcatctttgacaaacctgacaaaaaaacaagcaatggggaatagattccctgtttaacaatggtgctgggagaactggctagccatatgtagaaaactgaaactagaccccttccttacatcttatacaaaaattaactcaagatggattaaagacttaaatgtaaaaccccaaactacgaaaaacttagaagaaaacctagacaataccattcaggacagaggcatgggcaaagatttcatgac

SEQ ID NO: 15889 - DNA, 603 bp, Homo sapiens
  misc_feature 537, 576: n = A,T,C or G
atacgactcactatagggcgaattgggccctctagatgcatgctcgagcggccgccagtgtgatggatatctgcagaattcgccctttcgagcggccgcccgggcaggtacatttaaaaggtgatgctaatactttaaaatgtttaagatatagatttaaaaagcattgtaaattgtatactgcagtgtcgtctacatggcattggacaggacataatgtaaaacataaaagtgcaattgttacacttacatatgatagtgaatggcaacgtgaccaatttttgtctcaagttaaaataccaaaaactattacagtgtctactggatttatgtctatatgacaaatcttgatactgcatccacaacattactggcgtgctttttgctttgcttttgtgtgcttttgtgtgtctgcctattaatacgtccgctgcttttgtctgtgtctacatacacatcattaatactattggtattactattgtggataacagcagcctctgcgtttaggtgttttattgtatatattggatttgnttatataccattatttttaatacatacacatgcacgctntttaattacataatgtatatgtacctc

SEQ ID NO: 15890 - DNA, 387 bp, Homo sapiens
tagggcgaattgggccctctagatgcatgctcgagcggccgccagtgtgatggatatctgcagaattcgccctttcgagcggccgcccgggcaggtacgcggggagcgcgcggaagaaaaaccagcaagaaggcggcgggggaagatggcggtcctggggtagagtttgcaagctttctgactaggctagtcgagcaactattcgggtcatggcgtcaaactcaactaagtctttcctggcagatgccggctatggcgaacaggaactggatgccaactctgcccttatggaattggacaaaggcctaagatctggcaaacttggtgaacagtgtgaagcagttgttcgctttcccagactttttcagaagtatccattccctattc

SEQ ID NO: 15891 - DNA, 601 bp, Homo sapiens
ctatagggcgaattgtgccctctagatgcatgctcgagcggccgccagtgtgatggatatctgcagaattcgcccttagcgtggtcgcggccgaggtacacctataggtaaccagtgtaggtcattagaacacaggcttcacactgcatgctgatctgcaaagtgaggacataccagtgacaactttggaatctgcatccagccacaggtaacagatgtattgcaccagactcagatctagattttgtgatgactatataatgaactagaagttcaaattagagaaagaaacaattcaaaatcagaagaaaggtaaaagcaagtggccacatgatcgcattaaaaaagaaaaaggcaaatatctcagtaagtacctgcccgggcggccgctcgaaagggcgaattccagcacactggcggccgttactagtggatccgagctcggtaccaagcttggcgtaatcatggtcatagctgtttcctgtgtgaaattgttatccgctcacaattccacacaacatacgagccggaagcataaagtgtaaagcctggggtgcctaatgagtgagctaactcacattaattgcgttgcgctcactgg

SEQ ID NO: 15892 - DNA, 461 bp, Homo sapiens
atagggcgaattgggccctctagatgcatgctcgagcggccgccagtgtgatggatatctgcagaattcgcccttagcgtggtcgcggccgaggtactgttaaggtcatgcacccgtgtgaggtctgttcacaacatcacacggcaggacgatcacctctcttgttctggacaatctgctcctttggctataaccttaaatttcacttggcttacacgaatacagtggaaagattaagaactctggagtgcaatgaaagtggattcaggccgggcgcggtggttcttgcctgtaatcccagtgctttgggaggccgaggagggagatcacttgaggacaggaatttcagaccagtctgggcaacgtagtgagacccgacttctaccaaaaaaaaaatggaaaaaaaaaaattttccttcccgggcgggcctttcaaaggggcaattcccaccaacttgggg

SEQ ID NO: 15893 - DNA, 477 bp, Homo sapiens
  misc_feature 418: n = A,T,C or G
ggggccctctagatgcatgctcgagcggccgccagtgtgatggatatctgcagaattcgcccttagcgtggtcgcggccgaggtacgcggggagtcatattggggagatagtgttaattctatcgatgtcagaactttaggcaagcaaatctcaacttacctatacataatgtgctgatataatggctgttgaagtaaataaatataaagaaaagttctgcacttcttttgtcctgatcagtgcttctctggtaaatgtgctaaccgcaatgatagttgagattttaagggctgggtaaaatagcaaaaaacaatgaaaaggaaacttgtttaacaagtgtgatgacagctatggatctgtgatttaaaggaagaaatgtaaatcccctttgagttggatatttaaaaaaaaaaaaancaaacaactggtccccccccggggggccctttaaaagggggaattcccgcccccggggg

SEQ ID NO: 15894 - DNA, 265 bp, Homo sapiens
atagtgcgaatggggccctctagatgcatgctcgagcggccgccagtgtgatggatatctgcagaattcgccctttcgagcggccgcccgggcaggtacagtaattagtgtcttatgatcctgcctataatatttttgaccgtcataagttacttttaaaaattttcaagatcttcataataatgcagtgtgttctactgattgcattgtcgaatgtcagcatatatttggtttttttgttgttttttgttttttgttttttttt

SEQ ID NO: 15895 - DNA, 377 bp, Homo sapiens
attgggccctctagatgcatgctcgagcggccgccagtgtgatggatatctgcagaattcgccctttcgagcggccgcccgggcaggtacatttaaaaggtgatgctaatactttaaaacgtttaagatatagatttaaaaagcattgtaaattgtatactgcagtgtcgtctacatggcattggacaggacataatgtaaaacataaaagtgcaattgttacacttacatatgatagtgaatggcaacgtgaccaatttttgtctcaagttaaaataccaaaaactattacagtgtctactggatttatgtctatatgacaaatcttgatactgcatccacaacattattggcgtgctttttgctttgcttttgtg

SEQ ID NO: 15896 - DNA, 541 bp, Homo sapiens
actcactatagggcgaatggggccctctagatgcatgctcgagcggccgccagtgtgatggatatctgcagaattcgccctttcgagcggccgcccgggcaggtacgcgggtgaaggagtgtgtgaagaaaacattgataagccatgcctatgtgaaaggaaaactatattatatttcaagtcattccatccctagtcactttttgattagcagccttggtcttcttcaggactaaccattataggcagagtgtgcacaggttccagataaaactgctcaaagcaaatggattaaaaaaactgtccaagagagtctaagaacttgttttatgaagagtcttggctctccaatggtgagtcccagtctgaatttattcaagactgaaagaagttggagcatgtctgtgcaagggtatttttcaagagattttctctaagaaatcgagccaaaggagaaaaaaggaaaaaaaaagtttcttgggccggcaccccctatgggggaaattcccccccgttggggggctttttttggggacccacc

SEQ ID NO: 15897 - DNA, 639 bp, Homo sapiens
actatatggcgaattgggccctctagatgcatgctcgagcggccgccagtgtgatggatatctgcagaattcgccctttcgagcggccgcccgggcaggtactacttatagatctccagcttacataactcaaatttagtttgctttctgcggcattaacatttgactcattgaatggcttatagtaaagatgaaggttattataatgtagaaagcaaattaaactggattttaatttataaaatcaaggtgttagaagaggtgattatggaggtcttttctggcctaattttgtgactgctgttgaattccatgttacttgaaaagagtatttcaatagcagataaacaataggcatcatacttttcattctgaagccattgaaggtttactgcagaaaaattattctctaagcacatgactgttatccaatatcttaacaaaaaaggaggagatcattttctgggttattttttcctcagacttagtatgccagtgaggtagcatactaaattgtcaatgacacttttaaaatttgtacctcggccgcgaccacgctaagggcgaattccagcacactgtcggccgttactagtggatccgagctcggtaccaagcttggcgtaatcatggtcatag

SEQ ID NO: 15898 - DNA, 576 bp, Homo sapiens
ctatatggcgaatggggccctctagatgcatgctcgagcggccgccagtgtgatggatatctgcagaattcgcccttagcgtggtcgcggccgaggtatgcgggcccttaaagacctagagaaaaatatagtaaacacattagatctcgcaggggaaatggtagaaagtaaatatctaggagaacaataaaatgaaatgtaaataattacagtgccaaattatactttctacaaaataattatatttcaaaaatatttcctacattatttggccattgtctctgcacttacagtttgattggtttcttttgcttatgtgcagtattgagataaagtcaaagaaaagttggaggccggtcatggtggttcgcatctgtggtcccagctactgtggaggctgaggcaggaggattgctcaagcataggagtttgaggctgcagtgagccatgattgtgccaatgcactccagcctgggcaacagagcaagacccagtctcaaaaaacaaacccaaagagaaaaaaaaaaaaaagaaaattcctcccggggggggcttttaaagggggaaattcccccc

SEQ ID NO: 15899 - DNA, 392 bp, Homo sapiens
actatagggcgaattgggccctctagatgcatgctcgagcggccgccagtgtgatggatatctgcagaattcgcccttagcgtggtcgcggccgaggtacattgtatactgcagtgtcgtctacatggcattggacaggacataatgtaaaacataaaagtgcaattgttgcacttacatatgatagtgaatggcaacgtgaccaatttttgtctcaagttaaaataccaaaaactattacagtgtctactggatttatgtctatatgacaaatcttgatactgcatccacaacattattggcgtgctttttgctttgcttttgtgtgcttttgtgtgtctgcctattaatacgtccgctgcttttgtctgtgtctacatacacatcattaa

SEQ ID NO: 15900 - DNA, 597 bp, Homo sapiens
actatatggcgaatggggccctctagatgcatgctcgagcggccgccagtgtgatggatatctgcagaattcgcccttcgagcggccgcccgggcaggtactcccattcatacctacccatccactcccaatttcaatacaaatttatatctctataaatgactaaaatactattgtgttggtttttctttctttttttttcttgctgccacaacaaattaccacttacttaaagaacataagattaaagtgatagattttaaagcataaaataaaaaaaaaaattattatcttaccattctgtgggtcaaacattcacatgactttggccaaaatttaaatggtggtagactgtgttcttttctggaggatctggggatttatttccttgcctttacagcctccaaaattctggacttgaatgggagtgacagggtttttcttctggtaatgagcataggtgtaggctggtgcaattaatagtcactacatgcaagaaagcaaaatcaagggaaatgaagagaacctagtcctgttaacttcaattgacactgaaatatcagtcatctctgaagttgaatatccatgaacttgtca

SEQ ID NO: 15901 - DNA, 601 bp, Homo sapiens
atacgactcactatagggcgaattgggccctctagatgcatgctcgagcggccgccagtgtgatggatatctgcagaattcgcccttagcggccgcccgggcaggtacacacgtgcacgcatctcccactcctgcctgtcatcctcgtgtctgtcattttcctgtctgagaaccaatggcagggtagagtcagcagaggttcctacaggatttcaatcctgaccctgctttttaccaaccgcgtgaccctgggaggtgtgttcagctttgagcttcagttccctcccctgtgaaacaggagtaataatttctacctcatggtgttgacatagggatttaaaaaaatgagatatgcaaggtgcttgcgcataggggggtgtggagggaagggctcactaaatgttacttcttccccagaggccactccagtctcacactataattggggccaggaggtagggaaaccaggagcagagcttgtggtttgtccccagagtttcagagggtccttgggtaagggaggaatctcctccctgtcctgttccagtaagagaactcatcctcttaaacacccacaaagaggacatttgacagcttcttg

SEQ ID NO: 15902 - DNA, 594 bp, Homo sapiens
tacgactcactatagggcgaattgggccctctagatgcatgctcgagcggccgccagtgtgatggatatctgcagaattcgcccttcgagcggccgcccgggcaggtacatatacattatgtaattaaaaagcgtgcatgtgtatgtattaaaaataatggtatataaacaaatacaatatatacaataaaacacctaaacgcagaggctgctgttatccacaatagtaataccaatagtattaatgatgtgtatgtagacacagacaaaagcagcggacgtattaataggcagacacacaaaagcacacaaaagcaaagcaaaaagcacgccagtaatgttgtggatgcagtatcaagatttgtcatatagacataaatccagtagacactgtaatagtttttggtattttaacttgagacaaaaattggtcacgttgccattcactatcatatgtaagtgtaacaattgcacttttatgttttacattatgtcctgtccaatgccatgtagacgacactgcagtatacaatttacaatgctttttaaatctatatcttaaacattttaaagtattagcatcaccttttaaat

SEQ ID NO: 15903 - DNA, 646 bp, Homo sapiens
gaattgggccctctagatgcatgctcgagcggccggcagtgtgatggatttctgcagaattcgcccttaccgtggtcgcggccgaggtaccttacataaagtatgcactaaataaactgaataaaattgacaatatgcaatgtcaaagacaaaacataatggcagtattatactatatagaaatctacttagagagttaaataatgtagtattgtaaatatgtatcttttaatacacaatgtcataaaatgcacgaatacccatatattaaccagactttttcttaaatggtctcactctgttgcgtaagctggagtgcagcagtgtcatcatagctcactgcagacttgacctgcacctacccaaccccaagttcaaaagatcctcttgactcaacctcccaagcagctgcccagcaagaccagctaatttttaactttatgtagagacgggccctcacaccgctgtccaggctagtcttgaactcctgggctcaagagatcctcctgccttggccttctgaagtgctgggattacggcatgagccaccacacccagccaatatatgtatttcaaaagatttgtgttgcacatgacaaaaacataatgttgtatggtacttttttaaaattaaaaagaaaaaaaa

SEQ ID NO: 15904 - DNA, 380 bp, Homo sapiens
agggcgaattgggccctctagatgcatgctcgagcggccgccagtgtgatggatatctgcagaattcgcccttagcgtggtcgcggccgaggtactatgggtgtagtgttactattacagttaatccgtcctttgtgtgagctgttaaatgcagtgaggattggagcactgtccactgagtctctgtgcaacaatttagtggtgtggcaggggtttccggtgtctggctctgatcttggtcgctggatagtcgtctgtgtttcttcggtgcccaaggcgacggctttggtatgggtcgcggcggtgtggttggccaagtgctgcctaatagtttcaggagaggatacttcgttgctgctgcaggatcagccatggtagat

SEQ ID NO: 15905 - DNA, 575 bp, Homo sapiens
ctatagtggcgaatggggccctctagatgcatgctcgagcggccgccagtgtgatggatatctgcagaattcgcccttagcgtggtcgcggccgaggtactgaaatggagttaatgagcctgaaacagggccagctgagctcaagttttggagtgcgccgaggcaacatgcctaagcagaggccagaatccaaaccaatcactgatacaagtttctagcaggagtctgctcaccagttagactcaaagcaagactagagttttctgagcaattaggctaaggaggaggcaggccagggtgctggggtgagggtggagagtaaggagagtgcagggcatgttctgagtctcaattattgattgcaaatcacttagagatcttgtaatcaaagattgttttctatatcatcaatacaggcacatatctaacagtctggtattattgctgatggtttgtctggattattataagactagtcaaaatctaactccaaacccttaagatatacaatctatttcagttaggactgctggttaatgttgtctggcattaactttctgagtacctgcccgggc

SEQ ID NO: 15906 - DNA, 327 bp, Homo sapiens
tggatatctgcagaattcgcccttagcgtggtcgcggccgaggtacattcattaacatgggaaaaaatgaaatgctgattctgaattcccagtatgaaatcccttattgaaacagttccatctcagcatgagctttatgggggatttcataagaggccgtcctctccaaagtccccaaataaagcatctggggatgattctcctcaaattctcctcaaatgcaatgttaacctttaagaaaaaccagaagaaacaaatttaaaataccaacaaatgatgcctgttttgcatgattaaccgaaagtgttcacattgagaaatccatac

SEQ ID NO: 15907 - DNA, 674 bp, Homo sapiens
  misc_feature 521: n = A,T,C or G
ctcactatagggtcgattgggccctctagatgcatgctcgagcggccgccagtgtgatggatatctgcagaattcgcccttcggccgcccgggcaggtacatttaaaaggtgatgctaatactttaaaatgtttaagatatagatttaaaaagcattgtaaattgtatactgcagtgtcgtctgcatggcattggacaggacataatgtaaaacataaaagtgcaattgttacacttacatatgatagtgaatggcaacgtgaccaatttttgtctcaagttaaaataccaaaaactattacagtgtctactggatttatgtctatatgacaaatcttgatactgcatccacaacattactggcgtgctttttgctttgcttttgtgtgcttttgtgtgtctgcctattaatacgtccgctgcttttgtctgtgtctacatacacatcattaatactattggtattactattgtggataacagcagcctctgcgtttaggtgttttattggatatattgtnatttgttatataccattatttttaatacatacacatgcacgctttttaattacataatgtatatgtacctcggccgcgaccacgctaagggcgaattccagcacactggcggccgttactagtggatccgagctcggtaccaagcttggcgta

SEQ ID NO: 15908 - DNA, 607 bp, Homo sapiens
gctggcgtgatgacacatgggcggagcaaaacatcgtccagccgctaaaaacactgatggccgatgatccggattacagtttcgatattctggaagcccgctacgccattgaagccagcaccgcatggcatgcggcaatgcgcgccacacctggcgacaaagaaaagattcagctttgctttgaagcaacgctaagtgaagacccggatatcgcctcacaagcggacgttcgttttcatctggcgattgccgaagcctcacataacatcgtgctgctgcaaaccatgcgcggtttcttcgatgtcctgcaatcctcagtgaagcatagccgtcagcggatgtatctggtgccaccggttttttcacaactgaccgaacaacatcaggctgtcattgacgccatttttgccggtgatgctgacggggcgcgtaaagcaatgatggcgcaccttagttttgttcacaccaccatgaaacgattcgatgaaaatcaggctcgccacgcacggattacccgcctgcccggtgagcataatgagcattcgagggagaaaaacgcatgattatttccgcagccagcgattatcgcgccgcagcgcaacgcatt

SEQ ID NO: 15909 - DNA, 595 bp, Homo sapiens
tcactatagggcgaattgggccctctagatgcatgctcgagcggccgccagtgtgatggatatctgcagaattcgcccttagcgtggtcgcggccgaggtacaaccttgagattacagatggttagcatagttatgtgcttttttgtctttgttttttaatcttaatcaaaataaaagcaactaaggaatcagattactgactctaagcttttaaaaaggagtgatttttttaatcagtgtccctcagtcagctagtgctatgccagcctgacttctcagctgcacctgttacattctccaaccctatgtgacttgcttttcaaattgttgagttgctaatgggaattttggattgtttgggggcatgcagatccataggaaatggtaatgaagaataagcagctcatgagagtgatggctcaagctgccatcatttaacttgaacttcttactgtcttgactttatgtttccgaaatgatgagccagatacattttaaataaaatttttagaattagagttaattccaaaaggataagacacagttttctgttagaacttgaagttacagagaagggaaagtacctgcccgggc

SEQ ID NO: 15910 - DNA, 608 bp, Homo sapiens
  misc_feature 551: n = A,T,C or G
tacgactcactatagggcgaattgggccctctagatgcatgctcgagcggccgccagtgtgatggatatctgcagaattcgcccttagcgtggtcgcggccgaggtacatttaaaaggtgatgctaatactttaaaatgtttaagatatagatttaaaaagcattgtaaattgtatactgcagtgtcgtctacatggcattggacaggacataatgtaaaacataaaagtgcaattgttacacttacatatgatagtgaatggcaacgtgaccaatttttgtctcaagttaaaataccaaaaactattacagtgtctactggatttatgtctatatgacaaatcttgatactgcatccacaacattattggcgtgctttttgctttgcttttgtgtgcttttgtgtgtctgcctattaatacgtccgctgcttttgtctgtgtctacatacacaccattaatactattggtattactattgtggataacagcagcctctgcgtttaggtgttttattgtatatattggatttgtttatataccattatttntaatacatacacatgcacgctttttaattacataatgtatatgtacctgcccgggcg

SEQ ID NO: 15911 - DNA, 462 bp, Homo sapiens
atatggcgaatggggccctctagatgcatgctcgagcggccgccagtgtgatggatatctgcagaattcgcccttagcgtggtcgcggccgaggtacaagagtatgaaggaggcttagtgtctgcggatatgatacaaatcacaccttcattaagactagagaatggaagtcatactgggtgatagtgtatgagggtggagaagacatagaaatgagaagaggaagtaaagaacttcaacaatttcctgggaaaaccaaagatctcagttggtcaagagcatgctctacaatcagcaacattttagtatctagtatcatgttatctttaagccataatttgtccttggtctttctaggttttgtttttattattttcttgaaggagaagggtgggaatgggtaaaacattctggtcttccttttgcaaatctagaaccacaaaaccaattacaaattgcgac

SEQ ID NO: 15912 - DNA, 676 bp, Homo sapiens
acgactactatagggcgaattgggccctctagatgcatgctcgagcggccgccagtgtgatggatatctgcagaattcgccctttcgagcggccgcccgggcaggtacatttaaaaggtgatgctaatactttaaaatgtttaagatatagatttaaaaagcattgtaaattgtatactgcagtgtcgtctacatggcattggacaggacataatgtaaaacataaaagtgcaattgttacacttacatatgatagtgaatggcaacgtgaccaatttttgtctcaagttaaaataccaaaaactattacagtgtctactggatttatgtctatatgacaaatcttgatactgcatccacaacattactggcgtgctttttgctttgcttttgtgtgcttttgtgtgtctgcctattaatacgtccgctgcttttgtctgtgtctacatacacatcattaatactattggtattactattgtggataacagcagcctctgcgtttaggtgttttattggatatattggatttgtttatataccattatttttaatacatacacatgcacgctttttaattacataatgtatatgtacctcggccgcgaccacgctaagggcgaattccagcacactggcggccgttactagtggatccgagctcggtaccaagctt

SEQ ID NO: 15913 - DNA, 527 bp, Homo sapiens
aatacgactcactatagggcgaattgggccctctagatgcatgctcgagcggccgccagtgtgatggatatctgcagaattcgccctttcgagcggccgcccgggcaggtactgtgcaatggttaatgcattatttgaggttcaatttaatgatgtttagtgtatatgattacagactgatacatgcatgccatgctgggtttctgaaaacaagtgctttagtggcagtagaaagaaattttaacaagtaacagattaaatgtataaggcttacagcacaatgattaaaaacaaaggaatacaaactaaatagtcgtgaacacaattagtttctcttcctgcagccacagtgtgtgtgctgaagatatacataaactgttggatttttcagtgtagtcataaaacaaagctaagatacaaaaatagttgaaagtctttgcaacaaaatctcaattacagtataaccaaatattaagcagaaattcttgtacaatatttctgaaacacttatgtctgaaatatatgct

SEQ ID NO: 15914 - DNA, 609 bp, Homo sapiens
tacgactcactatagggcgaattgggccctctagatgcatgctcgagcggccgccagtgtgatggatatctgcagaattcgccctttcgagcggccgcccgggcaggtacattttcatattctccacctttgttccttgccctttgccttcaaagatatgtagatgttccttaactccaaaaattataaaaacaaacaaaaaaactttaccactgttcattatcaaagttactattcatttatccattcaatatttagagtagctaacaagacaaaacaaaataattgctgctttcgtggcttatagtggggaagggtgataaacaccatgatgaaggagagaagagtgctattgtgggggcacaaattatggggatctgatccttttttttaagggaggcatcagggaaagtctctctgaggaagtaaggttgattctcaaaggacagatggcagagacccgggttaaggggtggattggcaccaggctgaagtctggtgctcacaagaaactaagtgacagcataggttggtatagtgtgtaagatcaccttattttcttcttcagggtaatttttgagaacctgggttatatttgcatcttactct

SEQ ID NO: 15915 - DNA, 577 bp, Homo sapiens
gctcgagcggccgccagtgtgatggatatctgcagaattcgccctttcgagcggccgcccgggcaggtacataagtgatttggattacctatattatctctctcttttttttttttaaccatgtgcatgtttttctttaaaatagaaatagtgaagttctgcttcagtcagaacctgcataggttaattaaatgcacgctttactccaactctacaacactaaaggacatgaaggctgcaaaacgactgggaagggctgcccccatacactcaactcctccagtttctcatgcatccgtccaccaagttttaccagacatttactatgtgccaggttctgcactgggcacaggagcagagggccggtggagacacagtccctgcccccacagagctcacagatggggcaggcagaagccacagaggccgtggtggtcacgcttcgggagaaaagaaccacaagtcaaaggggcacaaaagggggcaaccaactctatctgggatgctggaaaggattcctggggatggagatgactgagtgggaatagccctgattggaagaagaaagaggaaggga

SEQ ID NO: 15916 - DNA, 384 bp, Homo sapiens
ttgggccctctagatgcatgctcgagcggccgccagtgtgatggatatctgcagaattcgcccttcgagcggccgcccgggcaggtacaaaatggaacctacattaatcatctaaaacggcattatcataacagacttgcctgagccattacttaccacaatgaattggtatgacacttctaacaaggtcagaaaaatcagattctgttttcttaatattgaggatctttcccactttccctgagctaatgagacacaggtctgtggcaaatacatttagtattttcctacacatgaattcctaacaaaaccaagcaagagcatacaaagggaaacatactttagctaatttaaaggtgtcttatgttattttgcttattgaaa

SEQ ID NO: 15917 - DNA, 570 bp, Homo sapiens
actcactatagggcgaattgggccctctagatgcatgctcgagcggccgccagtgtgatggatatctgcagaattcgcccttagcgtggtcgcggccgaggtactattattttcatcctctccatttttcagataagagaactgagttgcagaagcattaatagcttcaccaaggacacacagtaataagcggcccaacaaagattctaacccaggccgactggatccagagcttggactcctaacaactagagattattgttcctttcgcaatccagccacatgaacctcctttatatttaatgcaaaatatgcattgtttttcacctccagccttctcaaatgacaatgtctcttcctatgcattcgcctactccacctaacctcactttcccttgggctccctcctatccatcctccaggattcttggtcagggtcagctgccccttctgtgtgtgctaccccatcaccctgtgcttccccttcccagcactcagcacataaactgggtatttcaactacaggttctctgtccacctcccacccttgacttgaagctgcacaggaca

SEQ ID NO: 15918 - DNA, 385 bp, Homo sapiens
ggcgaattgggccctctagatgcatgctcgagcggccgccagtgtgatggatatctgcagaattcgccctttgagcggccgcccgggcaggtacatttaaaaggtgatgctaatactttaaaatgtttaagatatagatttaaaaagcattgtaaattgtatactgcagtgtcgtctacatggcattggacaggacataatgtaaaacataaaagtgcaattgttacacttacatatgatagtgaatggcaacgtgaccaattttcgtctcaagttaaaataccaaaaactattacagtgtctactggatttatgtctatatgacaaatcttgatactgcatccacaacattactggcgtgctttttgctttgcttttgtgtgct

SEQ ID NO: 15919 - DNA, 590 bp, Homo sapiens
  misc_feature 502: n = A,T,C or G
tcactatagggtcgattgggccctctagatgcatgctcgagcggccgccagtgtgttggatatctgcagaattcgcccttagcgtggtcgcggccgaggtactaaccatatgaaaatagttgctaccttgttggacaggacagatatacaaagcatttccatttttacagaaaatgtgtatggataccatggaggtttgaaataaatgctttgttcattcaaactatagtgaaatacagcatgtgaaaaagtaattacttattgactataataaatgcttcataaaatataatagatgctgattctggccaagattgacaaaatctaatgcagcctacatgtctcagtggttaatactaagactctgaataaaatacaagcaaataaacacctttgaggactttgaacagtaaataacagagggcgggtttaagggtaatcaaaacttgaagaaacatctatatggtagtggtgaatttattatatttttcttgcttatctnctaggctgtgacctaaagactatctcaatgggaaaatgtgtaacaggcaaatttagcaaaacctatggggaaccacatatttcttggc

SEQ ID NO: 15920 - DNA, 666 bp, Homo sapiens
  misc_feature 536: n = A,T,C or G
tacgactcactatagggcgaattgggccctctagatgcatgctcgagcggccgccagtgtgatggatatctgcagaattcgccctttcgagcggccgcccgggcaggtacatttaaaaggtgatgctaatactttaaaatgtttaagatatagatttaaaaagcattgtaaattgtatactgcagtgtcgtctacatggcattggacaggacataatgtaaaacataaaagtgcaattgttacacttacatatgatagtgaatggcaacgtggccaatttttgtctcaagttaaaataccaaaaactattacagtgtctactggatttatgtctatatgacaaatcttgatactgcatccacaacattactggcgtgctttttgctttgcttttgtgtgcttttgtgtgtctgcctattaatacgtccgctgcttttgtctgtgtctacatacacatcattaatactattggtattactattgtggataacagcagcctctgcgtttaggtgttttattgtatatattgtatttgnttatataccattatttttaatacatacacatgcacgctttttaattacataatgtatatgtacctcggccgcgaccacgctaagggcgaattccagcacactggcggccgttactagtggatccgagctc

SEQ ID NO: 15921 - DNA, 629 bp, Homo sapiens
  misc_feature 17: n = A,T,C or G
actatagggcgaattgngccctctagatgcatgctcgagcggccgccagtgtgatggatatctgcagaattcgcccttagcgtggtcgcggccgaggtacgcgggtaattgattgggcttcaaaaactcaaggttgaatttcagcttctaacttgatgagaatggctgtcttaattctgtcattttttgttaattttacttccaggaagtcagggctgtgatttgaggtttttttctctaagcttctgtgatggagatgaatttattaaagtggggccataatgtctttttgagcaacattaaaactgagtcatcagaattaggaagtatcagaagtcaagatcaattttcaagaacaggagcataaaattcgaactcaatctgtggttacattaagagatttagaagctcattcagactgataactaacgaataatatagctttcatttgttggagactttatgtgagccagccagttatacatgttatttataatccccacagtaacactgcaaggtagttatcaactctatttttgcagttgaggaaattgaagctaagaaatatgccatttaacttttgctgcataacaaactaccccaaaagctaatggtttaaaaacaatatg

SEQ ID NO: 15922 - DNA, 584 bp, Homo sapiens
cgactcactatagggcgaattgggccctctagatgcatgctcgagcggccgccagtgtgatggatatctgcagaattcgcccttagagcggtcgcccgggcaggtccatttaacaggtgatgctcttactttaaaatgtttaacacatagatttaaaaagcatcgtacattgtatactgagtgtcgtctacatggcattggacaggacataatgtaaaacataaaagtgcaattgttacacttacatatgatagtgaatggcaacgtgaccaattttcgtctcaagttaaaataccaaaaactattacagcgtctactggatttatgtctatatgacaaatcttgatactgcatccacaacattactggcgtgctttttgctttgcttttgtgagcttgtgtgtgtctgcctattaatacgttcgctgcttttgtctgtttctacatacacatcattaatactattggtattactattgtggataacagcagcctctgcgtttaggtgttttattgtatatattgaatttgtttatataccattatttttaatacatacacatgcacgctttttaattacatta

SEQ ID NO: 15923 - DNA, 557 bp, Homo sapiens
tacgactcacttagggcgaattgggccctctagatgcatgctcgagcggccgccagtgtgatggatatctgcagaattcgcccttagcgggcgcccgggcaaggacagattctaggtggccttatttacataatagattggtggtgtttacatttactaatgagttttcatttgacgaaaactgaaatgcagtgtatgagctgaatgataagaactggaaatgctttttctcaaggacgtggtccagattaagtttgcacgacgacgaggacaaggaaaacgatggagactctttgccaacgtttaaatgtgtgtcaggacaaaatactaacacattatgaaaatgatagtacctaggccgcgaccacgctaagggcgaattccagcacactggcggccgttactagtggatccgagctcggtaccaagcttggcgtaatcatggtcatagctgttttctgtgtgaaattgttatccggtcacaattccacacaacatacgagccggaagcataaagtgtaaagcctggggtgcctaatgagtgagctaactcacat

SEQ ID NO: 15924 - DNA, 603 bp, Homo sapiens
  misc_feature 537, 576: n = A,T,C or G
atacgactcactatagggcgaattgggccctctagatgcatgctcgagcggccgccagtgtgatggatatctgcagaattcgccctttcgagcggccgcccgggcaggtacatttaaaaggtgatgctaatactttaaaatgtttaagatatagatttaaaaagcattgtaaattgtatactgcagtgtcgtctacatggcattggacaggacataatgtaaaacataaaagtgcaattgttacacttacatatgatagtgaatggcaacgtgaccaatttttgtctcaagttaaaataccaaaaactattacagtgtctactggatttatgtctatatgacaaatcttgatactgcatccacaacattactggcgtgctttttgctttgcttttgtgtgcttttgtgtgtctgcctattaatacgtccgctgcttttgtctgtgtctacatacacatcattaatactattggtattactattgtggataacagcagcctctgcgtttaggtgttttattggatatattggatttgnttatataccattatttttaatacatacacatgcacgctntttaattacataatgtatatgtacctc

SEQ ID NO: 15925 - DNA, 518 bp, Homo sapiens
ggcgaattgggccctctagatgcatgctcgagcggccgccagtgtgatggatatctgcagaattcgccctttcgagcggccgcccgggcaggtacaaatatttggcaaaggaatgaaaaaagttagcaagttgtctgtctgtgggctaggctctgcctgcaagatacttacaatctaggtcagaggttcctaaatccttctcaatgccgtttgcactggccctgaggaaagtgtgaaaatgaagactattgtagagtcttacatgaagctaaatttgttcatttatatcacttctcttttattatgagattatgtcctctgcagttttttggtattaaaatgtcttttatgaaaggatagtaagagttagatagtagtcttttttgtgaaaaaaaaaaaacaaaagaagttccttggccgcgaccacgctaagggcgaattccagcacactggcggccgttactagtggatcccagcttggtaccaaacttggcgttaatatgggcatagctgtttcc

SEQ ID NO: 15926 - DNA, 319 bp, Homo sapiens
ccctctagatgcatgctcgagcggccgccagtgtgatggatatctgcagaattcgccctttcgagcggccgcccgggcaggtacttacatattgcaaaagctatcttccttctatacatgaggctgtcagctgaatagtcttggaagagtgaggagtgaatttttctgctggcaactcggttagttttagcagttggtgctaaaacttggcaaagttttcaccaaatacatggaagatatacaaaaatagagggggcatgtaaaagaaaaacgttgacatagtctgagcattactttctcatctaatctttttatatac

SEQ ID NO: 15927 - DNA, 745 bp, Homo sapiens
  misc_feature 571: n = A,T,C or G
ttgtaatacgactcactatagggcgaattgggccctctagatgcatgctcgagcggccgccagtgtgatggatatctgcagaattcgccctttcgagcggccgcccgggcaggtacctaaacaggccaaatgttgcctttggggttcctgtttcaacagcatggtgtgaagcgctgcatcaaccttctctgcctcatcctgcaaggtggcaaattcctcaagaatatgaccaagcttatctctctgtcgagccctgttatgtccatggatctgaataagactacagaatggccgaacacagtgagtaacaaaggagtcgatacagtccttagcctggtgattattatataggtagcacttgggggaaagcaccggaggactgacaaaagaccgaagtgcatctttcaccatgtcttgtatgagatgagttccaaagacctttttgttatccaccaggaaagtggtttgtaacagagatcttgaaagaacacgtggtgactgttcactaaattcacagaaaaaaatccaggatacaatgtaaatttgttaaattcacaacctcacagacagnttttattctatctattaatcttgcaaaatagttcaccatttcttcccttttaattatttttgcatatcgagggaaggtaggtggaagtagcctctggttcacaaggggttcaaaacccatcataattggatgatctccttttgtagtatcattctgggcctggatgcccccgcg

SEQ ID NO: 15928 - DNA, 485 bp, Homo sapiens
actatagggcgaattgggccctctagatgcatgctcgagcggccgccagtgtgatggatatctgcagaattcgcccttagcgtggtcgcggccgaggtactactactactattgctactattacttataatagaacacttgatactgaacagtatctttggatactgacatagggtgatcattattgaattatttaaacattcatctgcttaaagattagatgctttcttacgcaatttttcaacataccttccagttcattttatcactctgttactttagaggaagcactgtggtcattagttcttactctatcaaaatgatatttaactctcagatacctcagtcagagcctgatccttactataattgaaataaaaattattgagcctcttctgtattttatactagagaccttgccctgcattgccagggaaaatcattaaccactgcaaaatttaaaaatccctattgctgctcatctt

SEQ ID NO: 15929 - DNA, 671 bp, Homo sapiens
gtaatacgactcactatagggcgaattgggccctctagatgcatgctcgagcggccgccagtgtgatggatatctgcagaattcgcccttagcgtggtcgcggccgaggtaccatatttcagatattggcacattcggcttgtataaggggagacgcttttttgcagttggacggccattgaagacaagttggtcaccccaagttttctttccagttcttctgaaaaactcactaaagaaaaagaaagcaagaaatacagaaaagtatagaaaaataatccatattcccaccacctaggattaagttgttaacaagatgaaaacttcatactgaaaaaccaccctttctagaggcgatttaccacttattccttgcctttcaaaatatttacttttcaaggtaatctctccttattaatttgaaaaaaaaatgtttcttttaaatagagattgttaacttggggtctggctaggctgtgaattctctgatattaaacaaaagattttggtgaaggtgcttataaggctttatttttcttcctttctgctctaaccccatatgtgcaggattttcattagatcctcaaagagttctgtgacccccaccctcttcctcctaccttgttactttgaaacattctcactacagaattagtggggaaatttggtca

SEQ ID NO: 15930 - DNA, 495 bp, Homo sapiens
gcgaattgggccctctagatgcatgctcgagcggccgccagtgtgatggatatctgcagaattcgcccttagcgtggtcgcggccgaggtacctaacggaaattttatcattgctttaaaatgtattttaatgaagatattaaaaaatacctttgatggattcttcaatattgtcgaactgctcaaaatgattatactgttatatgaagtctaaaatctttcatgcaacttacaagaatatttttgttgtatgcaccacagttggaaaattctagtgggaccatgtccatgcaattactgattatgtaatgctgtaaatttttgataagcatgttccaagttttcctgttctaaaaacaaaaacattaaaatcacccactgttgaagacaaaagatcattactttattaggagatattattagatatgtttagaactagtttaaaaaaaaaagtaaaagactggttaaaaaattaaattaactccaccaataaaa

SEQ ID NO: 15931 - DNA, 571 bp, Homo sapiens
agtgatgagggatatgctgaaaatgccctcttaaccgggcggccgggcgaggtaccaataaatgagtattacatgttaatataagatgatgtagctcttcagccacagcgggtataaacctggctagcatgacacaccagagctctgctcattgttgtttgatcattcgtttgcttttttgagatagtctcgctctgtcacccacgttgaagtgcagtggcacaatcttggctcactacaacacctgcctccccagttccagcaattctcatgcctcagcctcccgagtagctatgactacgggcacatgccaccaaccctggctaatgattgtgttgttagtagggacgagtttcctcatgttgcccaggctggtcttgaactcctggcctcaagtgatgcacccaccttggcctcccaaaatgctgggattgcaagtgtgagtcactggccccctgtaacttgttaatgttcatttttcaggctcctttcaaatgattcattaaaatgctagaatagaactcaggtcatttgatttccatagtttagaataatatcggcttattcagct

SEQ ID NO: 15932 - DNA, 509 bp, Homo sapiens
actatatggcgaatggggccctctagatgcatgctcgagcggccgccagtgtgatggatatctgcagaattcgccctttcgagcggccgcccgggcaggtactcagaaggagaaatagaaaatttaaggacaggcaaagatactggatctggataaaatatttaagtttgaactttatatattgaattcttcgttctatagagactatgcttttctatgcaacaagccaaggaacattaaaaaaattggtcatgtaatttacattgcacaatatggagattgtgcgttgctttaaaactattgttagcgtctgggaacagataacctgaggtcaggagttcgagagcagcctggacaaaatagcgaaaccatgtctctactagaaatacaaaatcagctgggtgtggtggcatggacctgtaatcccagatactcaggaggctgaggcaggagaaacacttgaacctgggaggcggaggttgccgtgaggcgacactggcccactgcac

SEQ ID NO: 15933 - DNA, 514 bp, Homo sapiens
tatagggagtcgacccacgcgtccgctgtgccctctgttgttggatcccaggcatgaaaactttgtgctttttagccccaagttaagtctgaatggtcatcttattctgtgataggtaagtatgactgagtcggggtgatttggcgtgggccttgggtggtagaagaaacatctttagggcttataaaatgttctacaatatttgtcagcacccatgaatttgagtactgcatcgaatagagtagagctctcaacagtatgtttgaaatgatccagaaggatattataaactattcagatattcacaatggcaatctatctcagagaggcgatcatttgcatatgttgatcaaattagcatctgatgctcataaataatggaatgacattaggtttaataagtaatttttaaagagaagtgctgacagtcattggggttataaagaaaaccaaaataggtaccaggccctgtgcagtttatcagaccttcgacctcgttcatcaagtttttcag

SEQ ID NO: 15934 - DNA, 397 bp, Homo sapiens
actatagggcgaattgggccctctagatgcatgctcgagcggccgccagtgtgatggatatctgcagaattcgcccttagcggccgcccgggcaggtacagattctaggtggccttatttacataatagattggtggtgtttacatttcctaatgagtttccatttgacgaaaacggaaatccagtgtatgagcttaatgataagaactggaaatcctttttctcaaggacgtggtccagattaagtttgcacgaggacgaggacaaggaaaacgatggagactctttgccaacgtttaaatgtgtgtcaggacaaaatactaacacattatgaaaatgatagtacctcggccgcgaccacgctaagggcgaattccagcacactggcggccgttac

SEQ ID NO: 15935 - DNA, 446 bp, Homo sapiens
ggtaccgggccccccctcgaggtcgacggtatcgataagcttgatatcgaattcctgcagcccgggggatccactagttctagagcggccgaggtgtcgacccacgcgtccgcacagttggaagggaaaaactgacatcattgctctgatggtaaaaagtatcctgtggctctcaaggcctgcagcatcaggggcaagcgaggagggcgggcctcgcatttctcaagcttttcactgcaggctaacactgggaaatcgcccttgatcggtttgctttgttacctgcccgggcggccgccaccgcggtggagctccagcttttgttccctttaatgagggttaattgcgcgcttggcgtaatcacgggcatagctgtttcctgtgtgaaattgttatccgctcacaattccacacaacatacgagccggaagcatatagtgtaaagc

SEQ ID NO: 15936 - DNA, 524 bp, Homo sapiens
tagggcgaattgggccctctagatgcatgctcgagcggccgccagtgtgatggatatctgcagaattcgccctttgagcggccgcccgggcaggtcctgagccacgatttgttctctcaacactctccaggctgtcagaaaagagatagaaactcaccaaggccaagaaatgcttgtgcgtggcacagaaggaatcaaagagtactttttttttttttttttttttttttatttttttttttttttttttttttttttttttttttttttttttttttttttttttttaaaaaaaaaaaattttttttgtttaacccccaagctttatatagctttggtttaaaaaaaatccaaaccaaaaaaaaattttaaccaaaaccggggaacccaaaacccttttccaagggtggggcccttccacccttcaaaaaaaaaaaggttttaaaaggtgtttttcccattgggaaaaacaagccaaaattttgaccggggccctgctttttttttaaaaaaattttttttaa

SEQ ID NO: 15937 - DNA, 583 bp, Homo sapiens
tacgactcactatagggcgaattgggccctctagatgcatgctcgagcggccgccagtgtgatggatatctgcagaattcgcccttagcgtggtcgcggccgaggtactagaattgcatccttccatagtgtaaataataatcaaacataaacatgttcaattactgatattttagtccaatgttttttgtttcaattacatatctttttgcatcctacctattatacataaactaacatcaaaatgaaaactccatttaagaaagagcataaggaaatgacccccaaattgtactttttttttttttttttttttggtttttttaaatgagaactcaattttatttacatctatttatttccattcagtgtatcacatcttcaggataggtaataacagtgtgaagggtgtgctcattttcttcagctgtgagtagaggagtcttcccgagagtagcagttgttgatccaaatgattgaagccttcaggtaagggaataactgctgcaggaattctttcttgaagaatttaagctgtttggtaggaattctgtaactacatacctttgaaacactattcaca

SEQ ID NO: 15938 - DNA, 414 bp, Homo sapiens
actactatagggcgaattgggccctctagatgcatgctcgagcggccgccagtgtgatggatatctgcagaattcgccctttcgagcggccgcccgggcaggtactttttttttttttttttttttttctgagacagggtctcactctgtgtccaggctggagtgcaactgcacgatcatagcccactgcggccccaacctcccaggctcaagccatcatcccacctcagcctcccaagtcactgagactacaggtatgtgccaccacacctggctactttttaaattttttgtagagaacccgcgtacttttacctacaaagaggctttttacccagaatgctcctgcacacactttgctgcttcttaaggtgcattttacctgaagactccagagtggagtggattaatatg

SEQ ID NO: 15939 - DNA, 367 bp, Homo sapiens
ccctctagatgcatgctcgagcggccgccagtgtgatggatatctgcagaattcgcccttcgagcggccgcccgggcaggtacgcgggcactcctcttctcagaactcgatcaagatgttattcacaggtaacagtttcctgttttgggtttctctttcctccctggctctacatgtctcatggtcaaaagaacttggaagcaaagacttagccatctaccatggccaagcaaaggaacctgcataacccccaataggcctgggcacagtggctcacgcctgtaatcgcagcactttgggagaccgaggcgggcagatcacgaggtcaggagatcaagaccattctggctaacacagtgaaacccca

SEQ ID NO: 15940 - DNA, 601 bp, Homo sapiens
  misc_feature 24, 574: n = A,T,C or G
acgactcactatagggcgaattgngccctctagatgcatgctcgagcggccgccagtgtgatggatatctgcagaattcgccctttcgagcggccgcccgggcaggtacatttaaaaggtgatgctaatactttaaaatgtttaagatatagatttaaaaagcattgtaaattgatactgcagtgtcgtctacatggcattggacaggacataatgtaaaacataaaagtgcaattgttacacttacatatgatagtgaatggcaacgtgaccaattttttgtctcaagttaaaataccaaaaactattacagtgtctactggatttatgtctatatgacaaatcttgatactgcatccacaacattactggcgtgctttttgctttgcttttgtgtgcttttgtgtgtctgcctattaatacgtccgctgcttttgtctgtgtctacatacacatcattaatactattggtattactattgtggataacagcagcctctgcgtttaggtgttttattgtatatattgtatttgtttatataccattatttttaatacatacacatgcacgctntttaattacataatgtatatgtacctc

SEQ ID NO: 15941 - DNA, 668 bp, Homo sapiens
  misc_feature 532, 645: n = A,T,C or G
atacgactcactatagggcgaattgggccctctagatgcatgctcgagcggccgccagtgtgatggatatctgcagaattcgccctttcgagcggccgcccgggcaggtacatttaaaaggtgatgctaatactttaaaatgtttaagatatagatttaaaaagcattgtaaattgtatactgcagtgtcgtctacatggcattggacaggacataatgtaaaacataaaagtgcaattgttacacttacatatgatagtgaatggcaacgtgaccaatttttgtctcaagttaaaataccaaaaactattacagtgtctactggatttatgtctatatgacaaatcttgatactgcatccacaacattactggcgtgctttttgctttgcttttgtgtgcttttgtgtgtctgcctattaatacgtccgctgcttttgtctgtgtctacatacacatcattaatactattggtattactattgtggataacagcagcctctgcgtttaggtgttttattgtatatattggnatttgttatataccattatttttaatacatacacatgcacgctttttaattacgtaatgtatatgtacctcggccgcgaccacgctaagggcgaattccagcacactggcggncgttactagtggatccgagctcg

SEQ ID NO: 15942 - DNA, 460 bp, Homo sapiens
ctactatagggcgaattgggccctctagatgcatgctcgagcggccgccagtgtgatggatatctgcagaattcgccctttcgagcggccgcccgggcaggtactaacttacataaaaaaggccctgttataaatcaaagaacttaatttcagtattgcattcaatggctccacacacaaaagctcttttggtttgtaaaagggataaagtagacttctaagattattttaagtaatatattctatgtgcttttatggcacggcccaaacaaaagaactcctagatggtttctgggaactgtttgttaatttaccattccaggatgaaacaatcagattgctccacctcaataaaatggcctttcacacacatcatccttgcaggacactctgcccaaattatttaaccttgaacacaaaaacctaccctgaggttgctgagattaaatggaataatatg

SEQ ID NO: 15943 - DNA, 665 bp, Homo sapiens
tacgactcacgactgactatagggcgaattgtgccctctagatgcatgctcgagcggccgccagtgtgatggatatctgcagaattcgcccttagcgtggtcgcggccgaggtacagtcatacatagctcactgaagccttgaactcctgaggtcaagttatcttcctgcctcagcaattcttgttatacgtaatatagactaaagcgcctgccctagaaatttatcttcaaaaatgaaacaaaatagaacaaaggttgtgattttagtttatctaaaatgtggagtttccttcctcttgccaccagatcagagaaaaaattttgtaatgatataagttgattgagattttttatggcattttgcgtaggaatatatattgcacaactaggcagttatccacatttattatccctgaactttgaattataattttacatatgatgaggctggctaaactttaatggtattttttattttagaaacctagtaaatacatatttacatttgtaattacttgctgtaatcttacattgaatcagttgtattctgtttcgtgtattgtgtcccccccccccctttttttaataaaggaagcactgtgactgtttttattttaaagactttttttttttttttaagagcagatttaggttgtcccctttt

SEQ ID NO: 15944 - DNA, 650 bp, Homo sapiens
  misc_feature 531: n = A,T,C or G
atacgactcactatagggcgaattgggccctctagatgcatgctcgagcggccgccagtgtgatggatatctgcagaattcgccctttcgagcggccgcccgggcaggtacatatcttttatatgctcatatgctcctgtagtcgttagttttaattcttaaaaatgtgataattgtaataaacttttattatatcttatgtaaaataattgtgtgtctgagagagactaaaactcatgccctacttctcatgatttctctttctcttttgtttccctttcacagacagaagaattatagcctcagtatttatgtatatttttgaaagagtgaagtggggactgagaaggtatatctacatgctatgccttttgatagcattctgtttcaaatctccttttctcatcattgactggaacacagttgaaaaaatattaaactgattttgtgacgatgaatttaggaattccagttagctaaggattagaaaaactgattttcggaggcatactctgatccagaatggggctntaatattgtattatactgaaatatagagcagaggtctactaaaatctagagtacctcggccgcgaccacgctaagggcgaattccagcacactggcggccgttactagtggatccgagc

SEQ ID NO: 15945 - DNA, 542 bp, Homo sapiens
tactatagggcgaattgggccctctagatgcatgctcgagcggccgccagtgtgatggatatctgcagaattcgccctttcgagcggccgcccgggcaggtacagccagctgggtactaaaccagaatttcccaccagcagctcaaatctatcgttatgtctttttccttctctgttaccatatcgcacatttcacttaaagctcaattggtttggccaagctagaaacctgaagtcctcttagactcactcttccctttaatgttgaacagagttagacctcaaggcttgttggttctactttttaaagatttctgaaatcagtatcacttatcctcacagtcagccttcgtttggaaacttaatagctcttacctggattacaacagctttgtaacttatttttgtcccaaggttctcacctgttgattctgacttccattgttataggagggccataggtggcagtaatgtttgttccacaaagcattaaattataagtgattctccccttccccctggagactttttctttggctgat

SEQ ID NO: 15946 - DNA, 679 bp, Homo sapiens
tacgactcactatagggcgaattgggccctctagatgcatgctcgagcggccgccagtgtgatggatatctgcagaattcgcccttagcgtggtcgcggccgaggcacccccaaataagcctcagttcccatatttaaacttttttctcataggaaagctacaggaattttaagatatcacatggttacatttgcttttcttccagatggagctaaattgctatatgatacagggtttattttatatttctcatattaaagatgaaaaagtgaaaattgagtagttgactcaaaattatatgtatatatatatatatatgttaacagttgaatacaaacaagattacaagcagtgaaacattcaaatagttttggcaactccaaatattttgtgtttcacaaaaggagttaggttaacttttctaaatataactcattttatactattttaataaggagaaacttaaggatgagaaggcatgaggaaaagtatacattagtgaaagctatatactaaagcagaccttcaacaacagctcataactaataaatgctttgtattttgttttcaagcagttatgtaaatcaatttggtgatttcttacactgtacctgcccgggcggccgtcgaaagggcgattccagcacactggcggccggtactagtggatccgagctc

SEQ ID NO: 15947 - DNA, 552 bp, Homo sapiens
  misc_feature 538, 542, 545: n = A,T,C or G
tatagggcgaattgggccctctagatgcatgctcgagcggccgccagtgtgatggatatctgcagaattcgccctttcgagcggccgcccgggcaggtactgctgatctattcccttagtcaacaagtaaattatttttattgtcagtttggcttggttgatctgtccttgcagcctaagtgatgcatgagcgaatggagaaatgaactagttgctacatagaagcttgaggtcaggttgaaattaggggctcaaactagatatgaaacccagggcatggaaatggtcacagtgcctcttgaataagaagcgctacttcaaattggaatgttgatgtaacagaatcaagagatagtattctcagggcttggtcagcaaggtctgaaggttcaaaatgtggctgtgttgtaaactactgagaaagccagtggggagaagagatttccctaagacagtctgacaactatgttccgtctcatgctagagatacctggctgctagtcaaaggccttcctagaaggtgctaagagaaaaaaangaanaanaaaaaaa

SEQ ID NO: 15948 - DNA, 507 bp, Homo sapiens
atacgactcactatagggcgaattgggccctctagatgcatgctcgagcggccgccagtgtgatggatatctgcagaattcgcccttcggccgcccgggcaggtacgcggggtggtaaaactcattgcagcgttgaagaacttaactgacgtttcaccagatttggacatcaggctgaagatggaagaatcccagaaggaacttgaatcatatatgatgagggctcagcagttactggggcaaagagagagccccggtgaactcatttcaaaacacaaggaagcactaataatttctaatacaaaaagtctggccaagtatttgaaagctgttgaagaactaaaaaataatgtaactgaagacataaagatgtctttagaagaaaagagtagagatgtctgtgccaaatgggagtctcttcatcatgaactgtctttatatgttcaacaactaaaaatagatattgaaaaaggaaagcttagtgacaatattttaaaacttgaaaag

SEQ ID NO: 15949 - DNA, 633 bp, Homo sapiens
  misc_feature 503: n = A,T,C or G
tacgactcactatagggcgaattgggccctctagatgcatgctcgagcggccgccagtgtgatggatatctgcagaattcgcccttagcgtggtcgcggccgaggtactgcagtgtcgtctacatggcattggacaggacataatgtaaaacataaaagtgcaattgttacacttacatatgatagtgaatggcaacgtgaccaatttttgtctcaagttaaaataccaaaaactattacagtgtctactggatttatgtctatatgacaaatcttgatactgcatccacaacattactggcgtgctttttgctttgcttttgtgtgcctttgtgtgtctgcctattaatacgtccgctgcttttgtctgtgtctacatacacatcattaatactattggtattactattgtggataacagcagcctctgcgtttaggtgttttattgtatatattgtatttgtttatataccattatttttaatacatacacatacacgctntttaattacataatgtatatgtacctgcccgggcggccgctcgaagggcgaattccagcacactggcggccgttactagtggatccgagctcggtaccaagcttggcgtaatcatggtcatagctgtttc

SEQ ID NO: 15950 - DNA, 394 bp, Homo sapiens
ctatagggcgaattgggccctctagatgcatgctcgagcggccgccagtgtgatggatatctgcagaattcgcccttagcgtggtcgcggccgaggtacatttaaaaggtgatgctaatactttaaaatgtttaagatatagatttaaaaagcattgtaaattgtatactgcagtgtcgtctacatggcattggacaggacataatgtaaaacataaaagtgcaattgttacacttacatatgatagtgaatggcaacgtggccaatttttgtctcaagttaaaataccaaaaactattacagtgtctactggatttatgtctatatgacaaatcttgatactgcatccacaacattactggcgtgctttttgctttgcttttgtgtgcttttg

SEQ ID NO: 15951 - DNA, 560 bp, Homo sapiens
actatagggcgaattgggccctctagatgcatgctcgagcggccgccagtgtgatggatatctgcagaattcgccctttcgagcggccgcccgggcaggtacatttaaaaggtgatgctaatactttaaaatgtttaagatatagatttaaaaagcattgtaaattgtatactgcagtgtcgtctacatggcattggacaggacataatgtaaaacataaaagtgcaattgttacacttacatatgatagtgaatggcaacgtgaccaatttttgtctcaagttaaaataccaaaaactattacagtgtctactggatttatgtctatatgacaaatcttgatactgcatccacaacattactggcgtgctttttgctttgcttttgtgtgcttttgtgtgtctgcctattaatacgtccgctgcttttgtctgtgtctacatacacatcattaatactattggtattactattgtggataacagcagcctctgcgtttaggtgttttattgaatatattgtatttgtttatataccattatttttaatacatacacatg

SEQ ID NO: 15952 - DNA, 449 bp, Homo sapiens
  misc_feature 247, 248: n = A,T,C or G
atatggcgaatggggccctctagatgcatgctcgagcggccgccagtgtgatggatatctgcagaattcgcccttagcgtggtcgcggccgaggaccccatggctgttgtggcttctgacagaggaggcaggaatgtggtggctggcttgggagttgtaggaggctcatctggaccaggttcattgtaaccgttaaggtagaggctgtctttgtccatagagtaggggcccacccgggtgatgcctnngtctgctggctcagctcatggaacacctgcttgataggcagacctgggccgctgaggggctgcaggtaggtgcacaggaggtccacccgtgtctgagcaccgttcttcacagaccttagtgcgatgaccctgcaacctgtgtacctgcccgggcggccgctcgaaagggcgaattccagcacactggcggccgttactagt

SEQ ID NO: 15953 - DNA, 369 bp, Homo sapiens
tagggcgaattgggccctctagatgcatgctcgagcggccgccagtgtgatggatatctgcagaattcgccctttcgagcggccgcccgggcaggtacccattaatcctctagaacatgcatttactctatattacagctttgcatgcaataactagttgtgtttcctcaatgatgtcaccttgaagtggcttttatttttcttatttcactgatgagagatgtgagggttacctgagggacatatcaagtggtcaaaccactattcagtagctatccttcttactttaaaactccgtggtctgctcaaaaccgtctgctaagtaaatatgctaaaaatgagttctcttctgttactgacctcttatct

SEQ ID NO: 15954 - DNA, 511 bp, Homo sapiens
actatatggcgaattgggccctctagatgcatgctcgagcggccgccagtgtgatggatatctgcagaattcgccctttcgagcggccgcccgggcaggtacacagttcagtccataccagggctgaatggggaatgatctgcatgtataacagggaaattttgaggtatttaagtgacatacactttgtgaatgtgctttgaaatatccaaagtgtcacataattataatataagctgctatcatgagctaatttcttgttttttcttttcttttcttttcttttttctttttctttttttttttttttttgggaaaagggcccttggtttaaaaataaaaaaatttttttttacccccaaatccccaaattttgaccctatttttcccctaaaaacttttttttttaaaaattttcccctagggctaaaaaccatttaaaagggttattttttgcccccaaaatttccaattggccccccccccttgggggaaaaaaatttccttcccc

SEQ ID NO: 15955 - DNA, 477 bp, Homo sapiens
gccctctagatgcatgctcgagcggccgccagtgtgatggatatctgcagaattcgcccttagcgtggtcgcggccgaggtacgcggggtaggttaagaatgtggatgggtttccattgcatagattcaggtttgctatcacagaaaaaagaagctagtgcttctatcttactaaattggaaaattatttttctcattgttcattctatcagtgccccctttcccctctgtatttatatagcacgggaatgtatagtttctatcaaataaatcattagaaaggcaatgttcaggccggacatggtggctcacgcctgtaatcccagcacttggggaggccgaagcgggcagatcgtgaggtcagggagatcacgaccatcctggctaacacggggaaaccccgtctctactataaatacaaaaaattagccaggcctggaggcgggcgcctgtagtcccagctatattgggaggctg

SEQ ID NO: 15956 - DNA, 415 bp, Homo sapiens
ctatagggcgaattgggccctctagatgcatgctcgagcggccgccagtgtgatggatatctgcagaattcgcccttagcgtggtcgcggccgaggtactgtggaaatcaatggtaagaaaaaaaatggacaggtcatctaatatgtaaacaatttaactttgatgtaatctcttgtttgctggatttggtcctggggaaagtcaaaggactttcttatttacttagttgaatctctcaccttttctctgtcttctcatttaacttctcttctcttaccttgcagagcattttgatgatgagtccagctgaaaatagagttgtgtcaggaattcagacttacggcctaaccctttttcttgtggggaaatctttacgtgtataggactgtgctaatggtgatttaaagtataacc

SEQ ID NO: 15957 - DNA, 600 bp, Homo sapiens
  misc_feature 570: n = A,T,C or G
atacgactcactatagggcgaattgggccctctagatgcatgctcgagcggccgccagtgtgatggatatctgcagaattcgccctttcgagcggccgcccgggcaggtacatatacattatgtaattaaaaagcgtgcatgtgtatgtattaaaaataatggtatataaacaaatacaatatatacaataaaacacctaaacgcagaggctgctgttatccacaatagtaataccaatagtattaatgatgtgtatgtagacacagacaaaagcagcggacgtattaataggcagacacacaaaagcacacaaaagcaaagcaaaaagcacgccagtaatgttgtggatgcagtatcaagatttgtcatatagacataaatccagtagacactgtaatagtttttggtattttaacttgagacaaaaattggtcacgttgccattcactatcatatgtaagtgtaacaattgcacttttatgttttacattatgtcctgtccaatgccatgtagacgacactgcagtatacaatttacaatgctttttaaatctatatcttaaacattntaaagtattagcatcaccttttaaatgtac

SEQ ID NO: 15958 - DNA, 555 bp, Homo sapiens
ctataaggcgaattgggccctctagatgcatgctcgagcggccgccagtgtgatggatatctgcagaattcgccctttcgagcggccgcccgggcaggtacatttaaaaggtgatgctaatactttaaaatgtttaagatatagatttaaaaagcattgtaaattgtatactgcagtgtcgtctacatggcattggacaggacataatgtaaaacataaaagtgcaattgttacacttacatatgatagtgaatggcaacgtgaccaatttttgtctcaagttaaaataccaaaaactattacagtgtctactggatttatgtctatatgacaaatcttgatactgcatccacaacattactggcgtgctttttgctttgcttttgtgtgcttttgtgtgtctgcctattaatacgtccgctgcttttgtctgtgtctacatacacatcattaatactattggtattactattgtggataacagcagcctctgcgtttaggtgttttattgtatatattggatttgtttatataccattatttctaatacataca

SEQ ID NO: 15959 - DNA, 637 bp, Homo sapiens
gtatacgactcactatagggcgaattgggccctctagatgcatgctcgagcggccgccagtgtgatggatatctgcagaattcgcccttagcgtggtcgcggccgaggtaccttctgataggtttacgtttcagtgaaaccagtgccactaagtatggacatggatgaagcattcaaaatcagccaatctgaatgatgggggaaaagggctagaaatacaactgacttaagagaaaacatcacagtcaaaacaattgagtttttcctccccacaatatgaaattctattttgtcttctctgaaataaaacataattgtttcagtgttaaaaaaaaaaaaaaaagctaaaatgcttaagataatttcatctgtggcttcatccttactccttcaacaaaattcctgaagatacagtgggaagatgttgatagaaaagtaacggttaagggaactgcagctaggaaaagatccctgcacagactgcagaggccacaggtgtcctgaagttggacatcgaaggtcattatcatgtcctatcaggagaggagttcttttcaatgtttcactaatatcaatgtctacttgctttcctcatgggccagattccccccaaaaccacacatcccttaaggatgtc

SEQ ID NO: 15960 - DNA, 566 bp, Homo sapiens
atactataatggcgaatggggccctctagatgcatgctcgagcggccgccagtgtgatggatatctgcagaattcgcccttagcgtggtcgcggccgaggtactactagttgtttcaagatataccaagaaacctcaggttctacatagctaaaaaagtttcttatattttgttaatgtcaatcaaacccatttttcacaggcaaaaatgtgtattttcatgccttatttgataattccatgaaaaaattaaaatattttagtcagcatattagaaatttattcttggagatgcaaatacgtattttcaaattgtaagtgttaaattgtggatataagaatcttcccacctattttttattttaacttaatattttcaaactttataaatatagataggataatttgcttatctttttttgacaaagccatcaaataatcagtgttgtgaataagggtatttctttggaaaacataaaaggggcacaattaatcagctgtcaacaaggaaaggaaacaaaattgggtatttaaataattgaacaggaataaatgcgtggagggaga

SEQ ID NO: 15961 - DNA, 485 bp, Homo sapiens
  misc_feature 410: n = A,T,C or G
ctatagggcgaattgggccctctacatgctatgctcgagcggccgccagcgtgatggatatctgtataattcgacctttccatgcgggacgcggccggcccgggcatgtacaaatatttggcaaaggaatgaaaaaagttagaaagttgtctgtctgtgggctaggctctgcctgcaagatacttacaatctaggtcagaggttcctaaatccttctcaatgccgtttgcactggccctgaggaaagtgtgaaaatgaagactattgtagagtcttacatgaagctaaatttgttcatttatatcacttctcttttattatgagattatgtcctctgcagttttttggtattaaaatgtcttttatgaaaggatagtaagagttagatagtagtcttttttgtgcaaaanaaaaaaaaaaaaaaaattttttggggcgaacccccttagggggaatttccccccccggggggggctttttttggg

SEQ ID NO: 15962 - DNA, 650 bp, Homo sapiens
acgactcactatagggcgaattgggccctctagatgcatgctcgagcggccgccagtgtgatggatatctgcagaattcgccctttcgagcggccgcccgggcaggtacaatgggcctacgataatgacatagtagacgatagtgaaattgcatataaatatgcacaattggcagacactaatagtaatgcaagtgcctttctaaaaagtaattcacaggcaaaaattgtaaaggattgtgcaacaatgtgtagacattataaacgagcagaaaaaaaacaaatgagtatgagtcaatggataaaatatagatgtgatagggtagatgatggaggtgattggaagcaaattgttatgtttttaaggtatcaaggtgtagagtttatgtcatttttaactgcattaaaaagatttttgcaaggcatacctaaaaaaattgcatattactatatggtgcagctaacacaggtaaatcattatttggtatgagtttaatgaaatttctgcaagggtctgtaatatgttttgtaaattctaaaagccatttttggttacaaccatcagcagatgccaaaataggtatgttagatgatgctacagggccctgttggactatatagatgacaatttaagaaatgcattggatggaa

SEQ ID NO: 15963 - DNA, 446 bp, Homo sapiens
gggcctctagagcatgctcgagcggccgccagtgtgatggatatctgcagaattcgcccttagcgtggtcgcggccgaggtactcgcaagcaacagttactgcgacgtgagcagcaacgaagtatcctctcctgaaactattaggcagcacttggccaaccacaccgccgcgacccataccaaagccgtcgccttgggcaccgaagaaacacagacgactatccagcgaccaagatcagagccagacaccggaaacccctgccacaccactaagttgttgcacagagactcagtggacagtgctccaatcctcactgcatttaacagctcacacaaaggacggattaactgtaatagtaacactacacccatagtacctgcccgggcggccgctcgaaagggcgaatttcagcacactggcggccagtactagtggatccgagctc

SEQ ID NO: 15964 - DNA, 406 bp, Homo sapiens
  misc_feature 332: n = A,T,C or G
gactcacttagggcgaattgggccctctagatgcatgctcgagcggccgccagtgtgatggatatctgcagaattcgccctttcgagcggccgcccgggcaggtacattatttaaaaaaccagagagttatttggtattaagaagaaagatgattagattgaaagattgaaagtggacactatggataggaagtaaatgaaaccacttctttaactggagtagtttttaatttttgagtttttttctataggtaacataaaatagggatgggttttgtagttggcttttcattcttggcactaatgccactgttgggaccttgagacagcanattgaactttctgatagttgtcctaatagctctttcaggctgtatttggtgtccttagtgaattaaagtttgca

SEQ ID NO: 15965 - DNA, 622 bp, Homo sapiens
tacgactcactatagggcgaattgggccctctagatgcatgctcgagcggccgccagtgtgatggatatctgcagaattcgccctttcgagcggccgcccgggcaggtacattgtatactgcagtgtcgtctacatggcattggacaggacataatgtaaaacataaaagtgcaattgttacacttacatatgatagtgaatggcaacgtgaccaatttttgtctcaagttaaaataccaaaaactattacagtgtctactggatttatgtctatatgacaaatcttgatactgcatccacaacattattggcgtgctttttgctttgcttttgtgtgcttttgtgtgtctgcctattaatacgtccgctgcttttgtctgtgtctacatacacatcattaatactattggtattactattgtggataacagcagcctctgcgtttaggtgttttattggatatattgggatttgttatataccattatttttaatacatacacatgcacgctttttaattacataatgtatatgtacctcggccgcgaccacgctaagggcgaattccagcacactggcggccgttactagtggatccgagctcggtaccaagcttggcgt

SEQ ID NO: 15966 - DNA, 596 bp, Homo sapiens
ctatatggcgaattgggccctctagatgcatgctcgagcggccgccagtgtgatggatatctgcagaattcgcccttagcgtggtcgcggccgaggtacagtgggaaaggctttctccagctgatggatggctgttctctttatttggagtatcttactggttatgtaagcgacctcgagagaaattatcctgacccagatcggaggatgcagtagtgcttcagctgcaggatttcttagtcgttaacaccacagtgctgatgacaaagagcgagttgtaatcctcatcactgccagggctgagccagagcagacagaaaatcgtcatttgctcgttggagacttgttaggttatagctcctgcttcgttctgtggtcttggcttttcttcctatacaatgacgccgctgcaagtgagctcacaaatgcttggtttgagagccatttgcctgtgatttttgaagactaaagaagtatttacactagatactcttccagaacaaaatagaaatttcagcaaatacttactgacctttaaagccttgttgtggatttctgagatttaaagatactttaaaattctcaagaacaaaact

SEQ ID NO: 15967 - DNA, 600 bp, Homo sapiens
ccctctagatgcatgctcgagcggccgccagtgtgatggatatctgcagaattcgcccttagcggccgcccgggcaggtacgcgggcctgacctcaggctgcagatattgagctgaggggagaacaatagggtctcaaaagatctttttggagaccagaaaaacacaacatataccattggaacattgaagcttttgggcatggggcagaaattaatcacatttaaatttgaattaatttaatcaggttattttcctaataattaacacaactcgagaatggaaatttttggccaggtgtggtggctcatgactgtaatctcggcactttgggaggctgaggcaggtggataacctgaggtcaggagttcaagaccagcctggccaacatggtaaaaccctgtctctacaaaaatacaaaattagctgggcgtggtggcacatgtctgtaatcttagctacttggggggctgaggcaggagagtcgcttgaactctggaggtggaggttgcagtgagtcaagattgtgccattgcactctagcctgggtggacagagtgagacttcatctcaaaaaaaaaaaataaagaaaaaaaaaagt

SEQ ID NO: 15968 - DNA, 292 bp, Homo sapiens
gtacatttaaaaggtgatgctaatactttaaaatgtttaagatatagatttaaaaagcattgtaaattgtatactgcagtgtcgtctacatggcactggacaggacataatgtaaaacataaaagtgcaattgttacacttacatatgatagtgaatggcaacgtgaccaatttttgtctcaagttaaaataccaaaaactattacagtgtctactggatttatgtctatatgacaaatcttgatactgcatccacaacattactggcgtgctttttgctttgcttttgtgt

SEQ ID NO: 15969 - DNA, 634 bp, Homo sapiens
tacgactcactatagggcgaattgggccctctagatgcatgctcgagcggccgccagtgtgatggatatctgcagaattcgcccttgagcggccgcccgggcaggtacgcgggtgcccctacctaactttgttgatagggccctacctaaccagtaaagtaattggtgtgcatcccccatttgccctgaatctcccagggaaagggctaataaacagtgactttataagcaagcaagagaagaggggccaaaggctgaacagcttttcacccggatacctactttggaaagaaacccgagtttgccatgaagaatgataatagatagtagggaagcctcccaggcttgtatgctgctggtagcaggcagtgtattaacaaccaagccagaaaattttcacagagatatctcctaaggcactgaaaataaactgctgtttattttttcagggacagtcaaagcagtcaaatactttttacaaacattttcttggactctttgcttcccctctcttacattcttttctataaaaatatttgtatttctctgttgatgagttttaagaggatatgttaatatactagcaattttatttttctatttagaatatcctccattttttatttttattttt

SEQ ID NO: 15970 - DNA, 396 bp, Homo sapiens
gactcactatagggcgaattgggccctctagatgcatgctcgagcggccgccagtgtgatggatatctgcagaattcgcccttcgagcggccgcccgggcaggtacacagatattagcaaactgcctagccaaaagaattcatataaaagaaaattagcattacagcccataggacttttggagacaaagacacacagcccgttttgtaaccagtgttaactgaaagtccgattgtgctggactgaagagaacactcaccaagcatgatgtcggtgctaactggaatttcttttataatttggacaattttaccacaaactctctaaacttcagttttctgatctgaaaaacgggcccaagaacagtaagtatcttcctgacaaggttgctatgag

SEQ ID NO: 15971 - DNA, 397 bp, Homo sapiens
tagggcgaattgggccctctagatgcatgctcgagcggccgccagtgtgatggatatctgcagaattcgccctttcgagcggccgcccgggcaggtacttttcttcttttttttttttttcttttttgagacgggctttcactccagcctgggtggcagagtgagaccctgtctctaaacaaaaacgaagcatgtctatagaaagaaactgaaaaatgttagcattaagaacccagatggagacctttcttttggtcaagattataatttagaaattttgagatggggtgtggtgaggaaagtgaggaagcttaactgcttggttctttcatctctgaaatttaggcagtgacattatttatttagagtgagataaattgtgatggctcaaagagac

SEQ ID NO: 15972 - DNA, 572 bp, Homo sapiens
ctagatgcatgctcgagcggccgccagtgtgatggatatctgcagaattcgccctttcgagcggccgtccgggcaggtacgagggcaagagaggaggtgtctccttaaaaaggaagacagtaaggtaacacaatttatctaaagtcaaaaaacttaaaacggacccggatgtcaaacccaggactgcccgagcacaggacctgtatttttactgctctgcctgcctgctaggcagcaccgacccaccaaaacaaaggatagcaagcaccaaatgaacagtattttaaacagaaaaaaaattgaaaacagctcacaagtgtgtataataggtattcatagccataatgttttaatcaaacaaaaataagtttattttctttgactcaaattataattatgtattatgcgattaagtatgtcaatattttacagagttgtagaaagaatggattattccaaaagctagcaccatactaagagaaaagctttgcaactcactgtgtaggacagtgaagaactttacctgtggagtagttagtacctcggccgcgaccacgctaagggcgaattcc

SEQ ID NO: 15973 - DNA, 385 bp, Homo sapiens
gactactatagggcgaattgggccctctagatgcatgctcgagcggccgccagtgtgatggatatctgcagaattcgccctttcgagcggccgcccgggcaggtacttttttttttttttttttttgagacagggtctcactctgccacccaggttggagtgcaatggagcaatcatagctcactgtaacctcgaactcctgggctcaagtgatccttccacctcagcctcccaagatgcaacacgggttttttccacgtttttttcttactcagaaaatgaggaaacagaaagtagagcaaatacaatatctgaagagattattgttgagaatttccaagaaacaatagtaacagacagtaatttacagattgaagaagctatt

SEQ ID NO: 15974 - DNA, 561 bp, Homo sapiens
  misc_feature 447, 448, 449: n = A,T,C or G
tatagggcgaattgggccctctagatgcatgctcgagcggccgccagtgtgatggatatctgcagaattcgccctttcgagcggccgcccgggcaggtacgcgggctttactaatagttcagccacactcgaagacctgaatatagtagaaacttgaataatttggacctgctaaaggagaggtcacatagcttggaagcggtcagaatcagcagacatttggcctggcgcagaggctcacaccagtctggccaatatggtgaaaccccatctctactaaaaatacaaaaaatatttagccgggcatggtagtgcatgcctgtagtcccagatactcaggaggctgaggctggagaatcacttgagcccaggaagcggaggttgcagtaagccaagatcgtgccactgcactccagcctgggtgacagagcaagactctgtcccaannnaaaaaaaaaaaaaaaaggtccttgggccgaacccccttagggggaaatttccacccctgggggggcgttttttggggaacccaacttgggcccaaatttggggaaaaaaggg

SEQ ID NO: 15975 - DNA, 493 bp, Homo sapiens
ccctctagatgcatgctcgagcggccgccagtgtgatggatatctgcagaattcgccctttcgagcggccgcccgggcaggtactttttttctttttttatttttttaatgagacagggtcttgctatgttgcctaggctggtctcgaactcctggagtcaagtgaatatctgacctaggacttttttgttgctacaccatgggggtcccagcaaaaacccatttaccactcatgcttgcacaacccagaaatgccagggagttcttgctgatggggccaactcttgaccaataggaaactggagcctatagataaattccacccccttagaaataagacactgcaaaatttgcaagggagatcctgagaaaaagaagtttcccccacttcccttttagggatgatttattttcttaaaataacttttattttcttaaaagtgcagtaacttcgtaagaactgcaaattttgttcgggggagaagcttggacc

SEQ ID NO: 15976 - DNA, 517 bp, Homo sapiens
ctatagggcgaattgggccctctagatgcatgctcgagcggccgccagtgtgatggatatctgcagaattcgcccttagcgtggtcgcggccgaggtacttaaaaaatttttaatgtaaaatacccctttaaggatagaatttagggccttgaaattctactcagttgctatgaactgtggggaatttgagacaaatagcttttgtaattggaatgcacactgtgttgtaataatgtggaaagagaaacaaaaactttccttaatgtaatgagtttccattatctgcctaatctaaggtttgtaagtctacattgtcaggatttatattgaggagatagggggtgtcattttctgtacaagatagttttaagtatgttctaaatatttgtctgctgtagtctatttgctgtatatgctgaaatttttgtatgccatttactatttttatagtttaggaaaatattttctaagaccagttttagatgactcttattcctgtaggaatattcaatttgc

SEQ ID NO: 15977 - DNA, 342 bp, Homo sapiens
gactcactatagggcgaattgggccctctagatgcatgctcgagcggccgccagtgtgatggatatctgcagaattcgccctttcgagcggccgcccgggcaggtacatcaccctgctgagggacatccaggacaaggtcaccacactctacaaaggcagtcaactacatgacacattccgcttctgcctggtcaccaacttgacgatggactccgtgttggtcactgtcaaggcattgttctcctccaatttggaccccagcctggtggagcatgtctttctagataagaccctgaatgcctcattgcattggctgggctccacctaccagttggtggaca

SEQ ID NO: 15978 - DNA, 578 bp, Homo sapiens
ggggccctctagatgcatgctcgagcggccgccagtgtgatggatatctgcagaattcgcccttagcgtggtcgcggccgaggtacacttacttttaaaaaaataataaaaaaaataataaaaatccttttcccaagcacccccgtctaaagttacagctgtatttggttactcgttggagaggaaggccggttgcctttcttcttggcttccaagccttgtttctgaatcctttccacacacacaactcttatttcaaagagaaaccccactgggagactggaagacaggactgtgagagaaggaagttatgttaattccccaaccccaaagacaccagtgggcacttcaaatacttagggagaaaaaaaaaagcttccttctaaatggattaaaagtttggtgatcacattggcaagttttaacagctccaccattacatccctcctcccccatggcaccagtcactggcttagtcacagatagtgtcgctgcttaaggagccaaataaggctgaatgtgacccctgtttccccgtggcagcctgggctccaaggtaattgaagacatgacggctg

SEQ ID NO: 15979 - DNA, 615 bp, Homo sapiens
gactcactatagggcgaattgggccctctagatgcatgctcgagcggccgccagtgtgatggatatctgcagaattcgcccttagcgtggtcgcggccgaggtacaaataaagtattccaagggttcagaatagaaaatgatttcttccagcttggggacatttgggaaattgggatatcctttggggaaatgtagtaatcagtatattctgggaaaacatagtagagaatgaataaataaattccattgaatttggaatatgttgtccattctccctgtaactaatgctatcaagataaagtagaaataccacatttcagaaacagctggagtagacaggtcttcataggctagcttggaaacctaatagctattaataatgaaattttaattatactctggattctaaacaatgaacacacagtgatctttttgacttgctgcttgtttataagttggggatggtctgaattcattgttgattcaaaagaaaacgaatagtgttttaaaccttttatttacagagactataatttgtcaccttcctaccaacatatcttaaatacaccaagaccttttacagaagcttaaacaagggtgtacctgcccgggcg

SEQ ID NO: 15980 - DNA, 460 bp, Homo sapiens
  misc_feature 365: n = A,T,C or G
ccctctagatgcatgctcgagcggccgccagtgtgatggatatctgcagaattcgccctttcgagcggccgcccgggcaggtactaacttacataaaaaaggccctgttataaatcaaagaacttaatttcagtattgcattcaatggctccacacacagaaagctcttttggtttgtaaaagggataaagtagacttctaagattattttaagtaatatattctatgtgcttttatggcacggcccaaacaaaagaactcctagatggtttctgggaactgtttgttaatttaccattccaggatgaaacaatcaggttgctccacctcaataaaatggcctttcacacacatcatccttgcangacactctgcccaaattatttaaccttgaacacaagaacctaccctgaggttgctgagattaaatggaataatatggatagtttagaagtacctc

SEQ ID NO: 15981 - DNA, 454 bp, Homo sapiens
  misc_feature 60, 108, 109, 112: n = A,T,C or G
ttgcgacccgtctccaccgtagtttttacgcccggtgagcgctccacccgcacctacaancgcgtgtgtgaggaggtgtacaaaaaaaaaaacttttttttcttgccnncgngcgcctcggggagtttgcctacggaaagcggcataaggacatgttggcgttgccgctggacgagggcaacccaacacctagcctaaagcccgtgacactgcagcaggtgctgcccacgcttgcaccgtccgaagaaaagcgcgtactaaagcgcgagtctggtgacttggcacccaccgtgcaactgatggtacccaagcgccaacgactggaatatgtcttggaaaaaatgaccgtggagcctgggctggagcccgaagtccgcgtgcggccaatcaaacaggtggcacccggactgggcctgcaaaaccgggacgttcaaatacccaccaccagtagcac

SEQ ID NO: 15982 - DNA, 468 bp, Homo sapiens
tatatggcgaatggggccctctagatgcatgctcgagcggccgccagtgtgatggatatctgcagaattcgccctttcgagcggccgcccgggcaggtacgcgggtctcctaaaatctgaaaaattgatgctttgccctaaaaaacaatctctcaaatgattgaggaaacaatggaataattgaataccctcaacttaattctaaattaagggagaatttgttggtcaagtgaagactgtgtatagctagaactgtaactgagaatttaggcagcagatttttaaacaatccaaataaaaaaaatttttgccccgcttaatacagagccagtgtctctgtagcacttggcccatggtagataatctaaaaatgtgatatgtgaaattccatgacttaagactgtaaaagactgcgtggtatttagtggacatagcaatattcatggaatgaatgaatgaatgaatgaa

SEQ ID NO: 15983 - DNA, 388 bp, Homo sapiens
  misc_feature 348: n = A,T,C or G
agcccgggggatccactagttctagagcggccgaggtactgtatttaaatatgacttataacttgtctgttttttttttctttgtctatttatatatctgggttctttgttaagtcatgaagaccaagcttagaaacacagcatttaactttcaaatgaaagcaatggaggttttatgcccctatatacatttgaggccactgttattttaaattggtttttctttattctgcttttagggttactttgtgttcacaagacatgccactgtaaccattatacattattgtaaattaaacccaaaacttattttttaattttctcagcaagcacattctcaaagagttntaatcctttccaaaaccagcatttgctcttaacaggagaa

SEQ ID NO: 15984 - DNA, 377 bp, Homo sapiens
ttgggccctctagatgcatgctcgagcggccgccagtgtgatggatatctgcagaattcgccctttcgagcggccgcccgggcaggtacatttaaaaggtgatgctaatactttaaaatgtttaagatatagatttaaaaagcattgtaaattgtatactgcagtgtcgtctacatggcattggacaggacataatgtaaaacataaaagtgcaattgttacacttacatatgatagtgaatggcaacgtgaccaatttttgtctcaagttaaaataccaaaaactattacagtgtctactggatttatgtctatatgacaaatcttgatactgcatccacaacattactggcgtgctttttgctttgcttttgtgt

SEQ ID NO: 15985 - DNA, 394 bp, Homo sapiens
actatagggcgaattgggccctctagatgcatgctcgagcggccgccagtgtgatggatatctgcagaattcgccctttcgagcggccgcccgggcaggtaccagcacagcaattgctgtatgtttgtttttaattatcggttttcacttggaggggccagttctctatattccaatctattttctatatcagaaatgagcaggcattttaaaaaatggttttcattgatggagaggtaaaagtgaaatggctttgttgtatttatattataaaaggccatttcccaaatctagaatttattactaaaaatcaagtttgcattgaggggaggagtatgatttgctcaagcttactttttttataggtggggtttttatattttcaatgtgatta

SEQ ID NO: 15986 - DNA, 525 bp, Homo sapiens
  misc_feature 237, 238: n = A,T,C or G
ggggccctctagatgcatgctcgagcggccgccagtgtgatggatatctgcagaattcgccctttccagcggccgccccggcgggtactcattgctattgaatgttgctgattctactattgcttggagacagagctagggcatatcattgtataaatacctacacataggtgataatatggacaaatctacagatagcgttcgatttcaattcagaaccatagttttagtttggtnntttatatttgtaacatccttctccaacaataagaaactagctctcattattcttaatatttatgtgattaatctccttggccataaccaatctgcctctcctgcactgatgcctctttaatcccagttggcccagacacctcacatcaggctgcatggcacacatccatgtcttgttgcaagctaaaagcctaccaagaaaaaggacaacacttaccctatattgagtcttcttccgagtatcaacttcactgtggcatctgcctatgttcattcaccccggtgcct

SEQ ID NO: 15987 - DNA, 433 bp, Homo sapiens
tatagggcgaattgggccctctagatgcatgctcgagcggccgccagtgtgatggatatctgcagaattcgcccttagcgtggtcgcggccgaggtacttctctttctatgcaggatctgaatgtgaccatatgagtaaaacagccatgatcatcttcccagtggaaaggccaccagtagttaacagttttgaatcaacaatacacctgcaaatgaggactgagctttgcatgcttcctatttcaggagattttccatccttttaaaaattccacacacaaatcaccagggctcctcaggaaaggttgctgagaacttgaaatttcagaccttcattcagaattctcttagttcgtcattatcttcgtgctctgctgaacaagaacttccatgagggaatcatcaaccacagaatcccgcgtacctgcccggg

SEQ ID NO: 15988 - DNA, 504 bp, Homo sapiens
aattgtaatacaactcactataaggcgaatggggccctctagatgcatgctcgagcggccgccagtgtgatggatatctgcagaattcgccctttcgagcggccgcccgggcaggtaccaacactcttctgttttcctttctccttgcttccggatctgaggatgagcaagaatatcaacaccaattgttgacttaacctctctaactgttataataagttccttgaatttcccactgtttctttctttttttctatgtaggcttatatgaattatggcatacttgatttatataactgatatgttgctaaaaagttacaagaatatacttcctttgataaattaatatcagtgccatttattggaattctgtggtgaaacattctttaaaaacaggcaatattagggaaaaaagctctaactatttttgggggggataaatctgaattttcatatatcattgtagcttgaaatggaatgcaattaaactaatttcttctttcc

SEQ ID NO: 15989 - DNA, 546 bp, Homo sapiens
ccctctagatgcatgctcgagcggccgccagtgtgatggatatctgcagaattcgccctttcgagcggccgcccgggcaggtacataaagcatgccaactgctgctgggaatcatctgttccaaagaggccaacacttactcgtctgtttttatttgcgtaaagaatgagtagagcataaaacccctcaccatctagtgcctgttttaccccaaatcttctacatccactgttccgaagatttccacactgattctgagcaatttatgtaagcccaggtgttcaaagttccaggttgaaacatttggttaattaacatcatgctgcaaacactcaaaatcacttcagctgccactataacaaaacaaaactcccaaaaacaaaaactgtagggaaatataaacaaatggcagtattctttggaaaacagtatatgattttagtgacaataaaagcagcaagggctttcttgatttaatactgtgtttctcaaaaacatttttctaaaggaaattatattgagtttgagtaaaaacttgaaagtacc

SEQ ID NO: 15990 - DNA, 384 bp, Homo sapiens
ctatagggcgaattgggccctctagatgcatgctcgagcggccgccagtgtgatggatatctgcagaattcgccctttcgagcggccgcccgggcaggtacatttaaaaggtgatgctaatactttaaaatgtttaagatatagatttaaaaagcattgtaaattgtatactgcagtgtcgtctacatggcattggacaggacataatgtaaaacataaaagtgcaattgttacacttacatatgatagtgaatggcaacgtgaccaatttttgtctcaagttaaaataccaaaaactattacagtgtctactggatttatgtctatatgacaaatcttgatactgcatccacaacattactggcgtgctttttgctttgcttt

SEQ ID NO: 15991 - DNA, 385 bp, Homo sapiens
ggcgaattgggccctctagatgcatgctcgagcggccgccagtgtgatggatatctgcagaattcgcccttagcgtggtcgcggccgaggtacattgtatactgcagtgtcgtctacatggcattggacaggacataatgtaaaacataaaagtgcaattgttacacttacatatgatagtgaatggcaacgtgaccaatttttgtctcaagttaaaataccaaaaactattacagtgtctactggatttatgtctatatgacaaatcttgatactgcatccacaacattattggcgtgctttttgctttgcttttgtgtgcttttgtgtgtctgcctattaatacgtccgctgcttttgtctgtgtctacatacacatcattaa

SEQ ID NO: 15992 - DNA, 472 bp, Homo sapiens
aatatactataagtcgaatcgggccctctagatgcatgctcgagcggccgccagtgtgatggatatctgcagaattcgcccttagcgtggtcgcggccgaggtacctgaaatcacaaacaacttttgtgaaaaacaaacagcattcctgtcatgggcccttatttaacccactctccaaaaaaaagagagcaaaaaagtttactccagatcaaatatgccattttaattttatttcctaagcttggaataaaatactgtaattaaatacaattgtattatatttcacaattttgaatttaagggatctgttctaaatatcaatagctcaaaaatccagagtttgttctgtttttggctagatgtttataggtaaatttcatggtaaaatgtttctatttcatgcacaatgtcactagagtttcaaaaaaaaataaaggtgggttatgataatttggatgacaagggtatgta

SEQ ID NO: 15993 - DNA, 465 bp, Homo sapiens
ctatagcgcgaattgagccctctagatgcatgctcgagcggccgccagtgtgatggatatctgcagaattcgcccttagcgtggtcgctttcgaggtactatgggtgtagtgttactattacagttaatccgtcctttgtgtgagctgttaaatgcagtgaggattggagcactgtccactgagtctctgtgcaacaacttagtggtgtggcaggggtttccggtgtctggctctgatcttggtcgctggatagtcgtctgtgtttcttcggtgcccaaggcgacggctttggtatgggtcgcggcggtgtggttggccaagtgctgcctaatagtttcaggagaggatacttcgttgctgctgcaggatcagccatggtagattatggtttctgagaacagatggggcacacaattcctaatgtgcccattaacaggtttttcaaagtacctgcccgggcgggc

SEQ ID NO: 15994 - DNA, 439 bp, Homo sapiens
agatgcatgcctcgacggccgccagtgtgatggatatctgcagaattcgcccttagcgtggtcgcggccgaggtacagcagacatgcgtctccgagagctcaccttggtccaaagacaaagcgttcctgcccagagaccacagagaggtgtctaacatgccttctatactcacaaattggttctgatccagtggagtcccatcagtaggctcatgcacttccccaagaagctccacaaaatgattaagaactaatcagcttttgggctgggcgcggtggctcatgcctgtaatcccagcattctgggaggccgaggtgggtggatcacctgaggtcaggagttcaagaccagcctggccaacatagtgaaaccccatctctactaaaaatacaaaaaataagctgggcgtggtggcgggtgcctgtaatcccagctgct

SEQ ID NO: 15995 - DNA, 371 bp, Homo sapiens
ttgggccctctagatgcatgctcgagcggccgccagtgtgatggatatctgcagaattcgccctttcgagcggccgcccgggcaggtacatttaaaaggtgatgctaatactttaaaatgtttaagatatagatttaaaaagcattgtaaattgtatactgcagtgtcgtctacatggcattggacaggacataatgtaaaacataaaagtgcaattgttacacttacatatgatagtgaatggcaacgtgaccaatttttgtctcaagttaaaataccaaaaactattacagtgtctactggatttatgtctatatgacaaatcttgatactgcatccacaacattactggcgtgctttttgctttgctt

SEQ ID NO: 15996 - DNA, 383 bp, Homo sapiens
ggcgaattgggccctctagatgcatgctcgagcggccgccagtgtgatggatatctgcagaattcgccctttcgagcggccgcccgggcaggtacatttaaaaggtgatgctaatactttaaaatgtttaagatatagatttaaaaagcattgtaaattgtatactgcagtgtcgcctacatggcattggacaggacataatgtaaaacataaaagtgcaattgctacacttacatatgatagtgaatggcaacgtgaccaatttttgtctcaagttaaaataccaaaaactattacagtgtctactggatttatgtctatatgacaaatcttgatactgcatccacaacattactggcgtgctttttgctttgcttttgtgt

SEQ ID NO: 15997 - DNA, 375 bp, Homo sapiens
gaaaaaaaccctatcaaaatgtaaatatcaattccacattacagccagttaaagaacaatgggaagaccaagaaggagatggcagtgacagaagaagggagaaggggaaataatgggcactaagaaagcagaaagagacatatttggagggagatggctacccgcgtacatttctaagtcaaacacttgtgacttttgctttaattccatgaatgttcctgcctccttgatatttgtatttattctttttttctctagaatagaggtataattgtgtgatatttcagaaatacggataaatgattcaaaaagtcacagtttaagagaatcatgtttctttgatcatgaataactgattaataagtcttgcctata

SEQ ID NO: 15998 - DNA, 320 bp, Homo sapiens
actatagggcgaattgggccctctagatgcatgctcgagcggccgccagtgtgatggatatctgcagaattcgcccttcgagcggccgcccgggcaggtactggtatctgattgttcttacagaaactcaggatgaaaaccgaagaagaggcccggactcatacagagattgaaatgttccttagaaaggagcagcagaaacttgaggagaggctggagttctggatggagaaatacgataaggacacagaaatgaaacagaatgaactaaatgctctcaaagccacaaaggccagtgacttagcacaccttcaagacct

SEQ ID NO: 15999 - DNA, 386 bp, Homo sapiens
gggcgaattgggccctctagatgcatgctcgagcggccgccagtgtgatggatatctgcagaattcgcccttagcgtggtcgcggccgaggtacattgtatactgcagtgtcgtctacatggcattggactggacataatgtaaaacataaaagtgcaattgttacacttacatatgatagtgaatggcaacgtgaccaatttttgtctcaagttaaaataccaaaaactattacagtgtctactggatttatgtctatatgacaaatcttgatactgcatccacaacattattggcgtgctttttgctttgcttttgtgtgcttttgtgtgtctgcctattaatacgtccgctgcttttgtctgtgtctacatacacatcattaa

SEQ ID NO: 16000 - DNA, 383 bp, Homo sapiens
ttgggccctctagatgcatgctcgagcggccgccagtgtgatggatatctgcagaattcgcccttcgagcggccgcccgggcaggtactatgggtgtagtgttactattacagttaatccgtcctttgtgtgagctgttaaatgcagtgaggattggagcactgtccactgagtctctgtgcaacaacttagtggtgtggcaggggtttccggtgtctggctctgatcttggtcgctggatagtcgtctgtgtttcttcggtgcccaaggcgacggctttggtatgggtcgcggcggtgtggttggccaagtgctgcctaatagtttcaggagaggatacttcgttgctgctgcaggatcagtcatggtagattatggtttct

SEQ ID NO: 16001 - DNA, 603 bp, Homo sapiens
gactactatagggcgaattgggccctctagatgcatgctcgagcggccgccagtgtgatggatatctgcagaattcgcccttagcgtggtcgcggccgaggtacatttaaaaggtgatgctaatactttaaaatgtttaagatatagatttaaaaagcattgtaaattgtatactgcagtgtcgtctacatggcattggacaggacataatgtaaaacataaaagtgcaattgttacacttacatatgatagtgaatggcaacgtgaccaatttttgtctcaagttaaaataccaaaaactattacagtgtctactggatttatgtctatatgacaaatcttgatactgcatccacaacattactggcgtgctttttgctttgcttttgtgtgcttttgtgtgtctgcctattaatacgtccgctgcttttgtctgtgtctacatacacatcattaatactattggtattactattgtggataacagcagcctctgcgtttaggtgttttattgtatatattgtatttgtttatataccattatttttaatacatacacatgcacgctttttaattacataatgtatatgtacctgcccgggc

SEQ ID NO: 16002 - DNA, 373 bp, Homo sapiens
tatatggcgaatggggccctctagatgcatgctcgagcggccgccagtgtgatggatatctgcagaattcgccctttcgagcggccgcccgggcaggtaccaccagccttgacacagagcccaggggcaacttgtgcttcagtcaacctgtgaattcttgatatttatttctacttgggagcataaaaaacccaaaggtaagtggagaaaacgctctttaccttcccacttctttctatggggattctcctttctcttgcattaggccaagagcagaaaatcctggagtccccagaaggtaaggtttagagctgactggaagccagaacaactgccttagaacgccaacgaggactgctacttttgccccctt

SEQ ID NO: 16003 - DNA, 458 bp, Homo sapiens
  misc_feature 13: n = A,T,C or G
acgactactatanggcgaattgggccctctagatgcatgctcgagcggccgccagtgtgatggatatctgcagaattcgcccttagcggccgcccgggcaggtacatctgtattaaggaataaaatgcaactacggaaaatgataaactagatggaggggtgcctatgacactgtaaagtttaacaaggatgttgtagaataatgtgtattgtatgatgctatttctatgtctttgcattaatctggaaagaatgttcctttttttttttggagacagagtttcactctgtcacccgggctggaatgcagtggtgcagtctcagctcaccgcaacctccgcctcccgggtttgagcgattcttctgcctcagcgtcccgagtagttgggactacaggcatgagccaccacgccctgctaatttttgtatttttagtagagacagtttcaccatgttgg

SEQ ID NO: 16004 - DNA, 622 bp, Homo sapiens
ctatatggcgaatggggccctctagatgcatgctcgagcggccgccagtgtgatggatatctgcagaattcgcccttagcgtggtcgcggccgaggtaccatttattaacagctttccttggaaactctgatatagagatacctttatatttgtcttctagggagtatattaagtaaaccaaaacatttacttttttggatgcaagatagaaaatgttaacgtttctttgctaatgacattcttttccataaaagtagcttgggtaggtagaggactaatatcacacttaatagtattgctttctggtttctaggaagattgctacatgtgtatatgaagtcctgtagttctccttttaaactgactagttcctactctgcttatgaaatttatagaacatattttagatttatggcaattaaagcaatctaagagcacctaaattttaaactattttaactactcaattcagggagaaatataataagaaaattccccccatattatttgttatatagtctatttaaaatagcatagcaacttatattttatagtaagaattttggctggatgaaaattaatttaaatactagaaacattcatgtaagaaaactgcaaaat

SEQ ID NO: 16005 - DNA, 606 bp, Homo sapiens
tcactatagggcgaattgggccctctagatgcatgctcgagcggccgccagtgtgatggatatctgcagaattcgcccttagcgtggtcgcggccgaggtacttgtgtgggtgtcttaccttacattagaatatcctaggcctttctaattcttcctcttgaattccctgtgtcactcatctgaggtcatctcttggatttaaatacatttggtctgaaattctcaaactgctgaataaaatgccatagtaagtccaactatatggtttcatgtagggtaaagtaaccattgtggaaggattacgataaaactgtgtgacaataaatagaataaaagatggcaaaacaatctgtaaattacaaagtgttataaaaatgcattgaatttctagtgttcttacactttcatatttctcattggcacatcaatcagaccttgccttcctaaagtgggaggaagaaaaaggctgcacctgtctgggctgagggtctgggcagaacactagcaaaacttttaataaatcttcatgtcaccaccccaaactcattagggcccaaacttatttcattatcttcactatccccatggttttcctctccattatt

SEQ ID NO: 16006 - DNA, 502 bp, Homo sapiens
gcgaattgggccctctagatgcatgctcgagcggccgccagtgtgatggatatctgcagaattcgcccttagcgtggtcgcggccgaggtactttcaagtttttactcaaactcaatataatttcctttagaaaaatgtttttgagaaacacagtattaaatcaagaaagcccttgctgcttttattgtcactaaaatcatatattgttttccaaagaatactgccatttgtttatatttccctacagtttttgtttttgggagttttgttttgttatagtggcagctgaagtgattttgagtgtttgcagcatgatgttaattaaccaaatgtttcaacctggaactttgaacacctgggcttacataaattgctcaaaatcagtgtggaaatcttcggaacagtggatgtagaagatttggggtaaaacaagcactaaatggtgaggggttttatgctctactcattctttacgcaaaataaaaacagaccagtaagtgt

SEQ ID NO: 16007 - DNA, 487 bp, Homo sapiens
gactcactatagggcgaattgggccctctagatgcatgctcgagcggccgccagtgtgatggatatctgcagaattcgcccttagcgtggtcgcggccgaggtacactcacacaggtggagagagcagaacaatgaattcttcctgagaattgtagggatttgcagagtggaggtgacatttgagtaggcctttatgagaaggattagaaagagtttgctagtagaaaaccggagtggacgtcctagggactagcttgagcagaggcctggaagcatgacaggttacacagactgctaagtctaataaaccaatccagctctacagcataatgagttttgagaattacagtcaagtatgattaactcatacttcaccacttccaaatgtgttgattatcatcctcttatgctaagctgaatttggcattatctaaacgagtttctaagcgaaaaaaaaaaaaaaaaaaaaaagtgcctgcccgggcg

SEQ ID NO: 16008 - DNA, 567 bp, Homo sapiens
atacgactcactatagggcgaattgggccctctagatgcatgctcgagcggccgccagtgtgatggatatctgcagaattcgcccttagcgtggtcgcggccgaggtacagacctacgtgaccatatagactattggaaacacatgcgcctagaatgtgctatttattacaaggccagagaaatgggatttaaacatattaaccaccaggtggtgccaacgctggctgtatcaaagaataaagcattacaagcaattgaactgcaactaacgttagaaacaatatataactcacaatatagtaatgaaaagtggacattacaagacgttagccttgaagtgtatttaactgcaccaacaggatgtataaaaaaacatggatatacagtggaagtgcagtttgatggagacatatgcaatacaatgcattatacaaactggacacatatatatatttgtgaagaagcatcagtaactgtggtagagggtcaagttgactattatggtttatattatgttcatgaaggaatacgaacatattttgtgcagtttaaagatgatgcagaaa

SEQ ID NO: 16009 - DNA, 352 bp, Homo sapiens
agtgtgatggatatctgcagaattcgccctttagcggccgcccgggcaggtacgtttaaaaggtgatgctaatactttaaaatgtttaagataccgatttaaaaagcattgtaaattgtatactgcagtgtcgtctacatggcattggacaggacataatgtaaaacataaaagtgcaattgttacacttacatatgatagtgaatggcaacgtgaccaatttttgtctcaagttaaaataccaaaaactattacagtgtctactggatttatgtctatatgacaaatcttgatactgcatccacaacattactggcgtgctttttgctttgcttttgtgtgcttttgtgtg

SEQ ID NO: 16010 - DNA, 567 bp, Homo sapiens
  misc_feature 385, 482: n = A,T,C or G
ctcactatagggcgaattgggccctctagatgcatgctcgagcggccgccagtgtgatggatatctgcagaattcgccctttcgagcggccgcccgggcaggtacattgagtgaaattttgatgtataagtgctggcagccgaaattgccctgagcacaaaatgagctttcctgtttgataatttgcttgattcactatgttgctacatgcagggcactttatgcctgacttatattaaatccagtcacctgcttaatgttagaagggtcataattatatacaagggttttgaacatacagcatgtcaatatttcagatctggcatataaaatatgtatacccattttcaatttaacaattttaaaatatgtttggtaataactntagggttataatacaacacaaaatcattctattttcaccaagaataaagtaagcaaatgtattggggttatgagacaaccatagccccatatattgngacgagcagaggcatggagttatgaattcaaattctctgccattatctggctgattttcagcagcaaaccctagtcttaatttct

SEQ ID NO: 16011 - DNA, 391 bp, Homo sapiens
tatagggcgaattgggccctctagatgcatgctcgagcggccgccagtgtgatggatatctgcagaattcgcccttagcgtggtcgcggccgaggtacattcaaagccctgctccacaccttgccctggccaggtccacctttgaggtgatgacgacagttgctgagaaaagagaaaagaccactggctcactacttgtttctgctgctataatagagaggagaaaatgatgaaatgctctttttaccttcctgtttgaagattgcctggtcataaaagggagtcagaggtctgacttctctatttccatcccttaggggactctttaacaacaaaaagaatgtattacaagtatgtcaagctgataacgcaaggcttttcctcctggaag

SEQ ID NO: 16012 - DNA, 558 bp, Homo sapiens
tatagggcgaattgggccctctagatgcatgctcgagcggccgccagtgtgatggatatctgcagaattcgccctttcgagcggccgcccgggcaggtacatttaaaaggtgatgctaatactttaaaatgtttaagatatagatttaaaaagcattgtaaattgtatactgcagtgtcgtctacatggcattggacaggacataatgtaaaacataaaagtgcaattgttacacttacatatgatagtgaatggcaacgtgaccaatttttgtctcaagttaaaataccaaaaactattacagtgtctactggatttatgtctatatgacaaatcttgatactgcatccacaacattactggcgtgctttttgctttgcttttgtgtgcttttgtgtgtctgcctattaatacgtccgctgcttttgtctgtgtctacatacacatcattaatactattggtattactattggggataacagcagcctctgcgtttaggtgttttattgtatatattgcatttgtttatataccattatttttaatacatacacatg

SEQ ID NO: 16013 - DNA, 601 bp, Homo sapiens
gactactatagggcgaattgggccctctagatgcatgctcgagcggccgccagtgtgatggatatctgcagaattcgcccttagcggccgcccgggcaggtactcacttcctcttggtgccttaagagctttcctcaaattgtatttctgagcagggacatttacaagcctgcatggaactgaaggatctcctgtctgaagattctcacaagtaattgatagaatgagatttatttgacaaataacaaaaccatctgccaaatccatgattaaatggcagggactctgggtctcttgtgcttagtgagggaaggaaggaggtggtatgttttcagtgaaacactcactgaatggaactccaggctggagggagagtgaagagggaagagaatacagtccttgctattttcctcagctgattcataatacattaacaccctcatttacatggcctattagaagttatttatattccaattacaggctatttgaatattgcatttgtagtcgaattacagggtttagggaaagctcgtttgttttcaagaaaggattctggtttaaagacaaaaatatgggcagcttgcagatacgggcagct

SEQ ID NO: 16014 - DNA, 367 bp, Homo sapiens
agggcgaattgggccctctagatgcatgctcgagcggccgccagtgtgatggatatctgcagaattcgcccttcgagcggccgcccgggcaggtcatgaactgctgggctcaagctatcctcccacctctgcctcctgaagtgctgggattacaggtgtgagccactgcaccctgtcctgacagtcattttctaagataagcttcacaaagatgaaaataacattctaagatccattatgtatatatcatttcactggaaggtgaattcctccagtaatcatctattcacctttactttggatcctgatttcatacatggggcctgatgaagtgtcaacttggaaaaattcagaatgtttcacatgt

SEQ ID NO: 16015 - DNA, 405 bp, Homo sapiens
atacgactcactatagggcgaattgggccctctagatgcatgctcgagcggccgccagtgtgatggatatctgcagaattcgccctttcgagcggccgcccgggcaggtacatttaaaaggtgatgctaatactttaaaatgtttaagatatagatttaaaaagcattgtaaattgtatactgcagtgtcgtctacatggcattggacaggacataatgtaaaacataaaagtgcaattgttacacttacatatgatagtgaatggcaacgtgaccaatttttgtctcaagttaaaataccaaaaactattacagtgtctactggatttatgtctatatgacaaatcttgatactgcatccacaacattactggcgtgctttttgccttgcttttgtgtgctttt

SEQ ID NO: 16016 - DNA, 384 bp, Homo sapiens
ggcgaattgggccctctagatgcatgctcgagcggccgccagtgtgatggatatctgcagaattcgcccttagcgtggtcgcggccgaggtactgttttccacagagtgggaagataagaacacatgtagagatgataaaatgtcattggctccaagagacaagcttccgaaatccatggtggttgaagaacatcaaagaggagcaattatttcagtcattagggcagttccacctgttctaattgaacatttttaggatgtagaagatgcatcatacattggtatctattcagaaggtggggacatctgctgtctgtcatgtatctgggagatgtttatctcaacaggaggcaataataatatggtaaaccaaacctaatatt

SEQ ID NO: 16017 - DNA, 618 bp, Homo sapiens
  misc_feature 422: n = A,T,C or G
gactcactatagggcgaattgggccctctagatgcatgctcgagcggccgccagtgtgatggatatctgcagaattcgccctttcgagcggccgcccgggcaggtaccttccccaaggacaagcagtgatggagaactagtctaagaagatgccagtcaggctctgaatggtcctaggtaatagtggagaaccagcctggactgggggatatccaagacatagcatgaatggggctagcagagtcctgactcatattttgaccattaaaaaaaaaaaaaatcctggctgagtgtagcggctcatgcctgtaatcttagcactttgggaggctgaggcaggtggatcacctgaggtcaggagttcaagacctgcctgactaacatggtgaaaccctgtctctactaaaaatacaaaaaattanccgggcgtggtggtgggtgcctgtaatcccagcaactcaggaggctgaggcacgagaatggcttgaacctgggatgcggaggttacagtgagccgagattgcgccactgtacctcggccgcgaccacgctaagggcgaattccagcacactggcggccgttactagtggatccgagctcgggaccaagcttggcgt

SEQ ID NO: 16018 - DNA, 457 bp, Homo sapiens
cactatatggcgaatggggccctctagatgcatgctcgagcggccgccagtgtgatggatatctgcagaattcgcccttagcgtggtcgcggccgaggtactcttcttagaatatataatatcaattaaatatagtaattctgtatagttgtaaatgcttaacattattaatctgttgattctttggagacttaaaataattctgcaaggtatgttacgcagacattgatccttatttttagaatgaagaaactgaactgacattcacagcagttaaaagcttgccagatggccaggcacggtggctcatgcctgtaatcacagcactttgggaggccgaggtgagtgggtcacctgaggtcgggagttcgagaccagcctgaccaacatggagaaaccccgtctttactaaaaatacaaaattagcctggagtagcggtgcatgcctgtaatccca

SEQ ID NO: 16019 - DNA, 379 bp, Homo sapiens
tacgactcactatagggcgaattgggccctctagatgcatgctcgagcggccgccagtgtgatggatatctgcagaattcgcccttagcgtggtcgcggccgaggtaccacttctatcttcagttgggcttggctgaaggagtcataacttctttgcctattgtcattgggcatttgcttccatttttcttttcttagcctttaatagttggggtccatatatgcactttactcatcccttctccaataatgggtccggttttcaagggcatggtcttaaattgtaaaatggagttacagcatatccaagcgaataggaaaatgaagaaaatctcaccctacaatttgttatttatctagttctttctctttctcccat

SEQ ID NO: 16020 - DNA, 573 bp, Homo sapiens
tgtcaatacgactcactatagggcgaattgggccctctagatgcatgctcgagcggccgccagtgtgatggatatctgcagaattcgccctttcgagcggccgcccgggcaggtacatttaaaaggtgatgctaatactttaaaatgtttaagatatagatttaaaaagcattgtaaattgtatactgcagtgtcgtctacatggcattggacaggacataatgtaaaacataaaagtgcaattgttacacttacatatgatagtgaatggcaacgcgaccaatttttgtctcaagttaaaataccaaaaactattacagtgtctactggatttatgtctatatgacaaatcttgatactgcatccacaacattactggcgtgctctttgctttgcttttgtgtgcttttgtgtgtctgcctattaatacgtccgctgcttttgtctgtgtctacatacacatcattaatactattggtattactattgtggataacagcagcctctgcgtttaggtgttttattgtatatattgtatttgtttatataccattatttttaatacatacacat

SEQ ID NO: 16021 - DNA, 391 bp, Homo sapiens
gggcgaattgggccctctagatgcatgctcgagcggccgccagtgtgatggatatctgcagaattcgcccttcgagcggccgcccgggcaggtacatttaaaaggtgatgctaatactttaaaatgtttaagatatagatttaaaaagcattgtaaattgtatactgcagtgtcgtctacatggcattggacaggacataatgtaaaacataaaagtgcaattgttacacttacatatgatagtgaatggcaacgtgaccaatttttgtctcaagttaaaataccaaaaactattacagtgtctactggatttatgtctatatgacaaatcttgatactgcatccacaacattactggcgtgctttttgctttgcttttgtgtgcttttgt

SEQ ID NO: 16022 - DNA, 581 bp, Homo sapiens
tacgactcactatagggcgaattgagccctctagatgcatgctcgagcggccgccagtgtgatggatatctgcagaattcgcccttagcgtggtcgcggccgaggtactaaaaactagtaatgcaaaggcagcaatgttagcaaaatttaaagagttatacggggtgagttttacagaattagtaagaccatttaaaagtaataaatcaacgtgttgcgattggtgtattgctgcatttggacttacacccagtatagctgacagtataaaaacactattacaacaatattgtttatatttacacattcaaagtttagcatgttcatggggaatggttgtgttactattagtaagatataaatgtggaaaaaatagagaaacaattgaaaaattgctgtctaaactattatgtgtgtctccaatgtgtatgatgatagagcctccaaaattgcgtagtacctgcccgggcggccgctcgaaagggcgaattccagcacactggcggccgttactagtggatccgagctcggtaccaagcttggcgtaatcatggtcatagcttgttcctgtgtgaaattgt

SEQ ID NO: 16023 - DNA, 382 bp, Homo sapiens
agggcgaattgggccctctagatgcatgctcgagcggccgccagtgtgatggatatctgcagaattcgcccttcgagcggccgcccgggcaggtacatttaaaaggtgatgctaatactttaaaatgtttaagatatagatttaaaaagcattgtaaattgtatactgcagtgtcgtctacatggcattggacaggacataatgtaaaacataaaagtgcaattgttacacttacatatgatagtgaatggcaacgtgaccaatttttgtctcaagttaaaataccaaaaactattacagtgtctactggatttatgtctatatgacaaatcttgatactgcatccacaacattactggcgtgctttttgctttgcttttgt

SEQ ID NO: 16024 - DNA, 575 bp, Homo sapiens
atacgactcactatagggcgaattgggccctctagatgcatgctcgagcggccgccagtgtgatggatatctgcagaattcgcccttagcgtggtcgcggccgaggtcatgctattttgtcttatgaaaagagataaattaggtaggaaaggtaagcatcaccatcttatagaagaagaaacctagacaaagtgaattttccaattgcccaagattgtgtctcttatttttggagttggaaatagaacccaagtctcctaatgctcagtccggaaagcattattactgtattgtttttaattctcccatatctcaatcacttatgataaatgaaagttataaggagaaacactttaaaatatttaaatgcttcagatgtttaaaaatattttttaaggtagtgatgagttttcaacaatatctgataaattgaaagccttaagagccagattctattttccacagaaagaaaaaaacctacatagccccagaccgttatcttcatgtcagtttagatgatctcttaaatgtaacataaacccttaaaatctatattttttgcaggaagaaatttc

SEQ ID NO: 16025 - DNA, 383 bp, Homo sapiens
agggcgaattgggccctctagatgcatgctcgagcggccgccagtgtgatggatatctgcagaattcgcccttagcgtggtcgcggccgaggtactatgggtgtagtgttactattacagttaatccgtcctttgtgtgagttgttaaatgcagtgaggattggagcactgtccactgagtctctgtgcaacaacttagtggtgtggcaggggtttccggtgtctggctctgatcttggtcgctggatagtcgtctgtgtttcttcggtgcccaaggcgacggctttggtatgggtcgcggcggagtggttggccaagtgctgcctaataatttcaggagaggatacttcgttgctgctgcaggatcagccatggtagattat

SEQ ID NO: 16026 - DNA, 655 bp, Homo sapiens
atatggcgaatggggccctctagatgcatgctcgagcggccgccagtgtgatggatatctgcagaattcgcccttgagcggccgcccgggcaggtactcgtggcccatgttggttcaatttttatagcttcagttatccaaaggtgacacagaatacccataatgatgactgggcatgcgttttacctttgggcagacaccccatctttttattctgaaatttaaaataattcagattcttttggggaggggattagtttaaacattaataaacagaatataaacaggcagatggatgggtagataagcggtattcgggaatttgagggcttgggacagaaatagattccttttcctttttaggttttctttcctaacttgctgcttccttctatcaaccttatctggtctgtaagaacctgggaaaatataagaaactgatggttgtggggagggaatagaagaagactgttctaggtcttaaaagatgcattaattaaaagttgctaaggcttgtaattaagaatcaagacccttgtaggtgtaggtgatagacctttgtgtgattttctcagttgcaccaaattataccaaatttcaacctcataaagattctgaagttttacaaaagtagagaagagagaaaagggaaaag

SEQ ID NO: 16027 - DNA, 512 bp, Homo sapiens
atatggcgaattgggccctctagatgcatgctcgagcggccgccagtgtgatggatatctgcagaattcgccctttcgagcggccgcccgggcaggtacgcggggagaggacacaactcaaggagagaaaaggacagtttgggacaacaggtgggtgggcagtcttgaaaattggtagccacagacgcccagcgagagtgaagaaggacaggtggcttcattctgtggttgatgattccctcatggaagttcttgttcagggaagaagaaaaaaggacatctcattaaagtgccaagatacaatgccggctcctacgtgcaccttgttttggaccctgaatgtaaatgatcactttcagcgtgttttaaaaagcattcgtgatttcagcgatcctttctgaaatgtgtaaaaataccatcgtctccaacgataaaaacaacaacaacatctgccgatggcaaaatatagtcaactttcagggccaagtttttggaagcagccaatgcgtttg

SEQ ID NO: 16028 - DNA, 562 bp, Homo sapiens
ggagtcagtcgacccacgcgtccgcatttattcatttaaaatacatttctagaacacctgtaaggtgtcagtcagcctctctgctggaggcacgtggtctggcagggagaaatatgaaggtgcacagaagtacctgacggatacagccctgctagagtgtgggcaacagacagatcagggtggattgccttctacacgactgcgtctgacccagcttcacacagctctgggggcttggggaatattccagagagaaagggtgcaggaactataaagacaggaaggtataagagacaaggtatgggatgaaaactgcacatgcttcagttttgtgacctgaaattttaaataggaagaggatggcagtaaaacaagacgatcaacctactggctaaaattctggctgggtgtcgcatcctaacacttgtaaggcaggggcaggtggatctctgtgagttcaaggccagcctggtctacaaagtgagttcagaacagctagggcttttacacagagaaaccctgtctgaaaaaaaaagcctaatataaattgcaattctttttc

SEQ ID NO: 16029 - DNA, 578 bp, Homo sapiens
  misc_feature 545: n = A,T,C or G
tacgactcactatagggcgaattgggccctctagatgcatgctcgagcggccgccagtgtgatggatatctgcagaattcgccctttcgagcggccgcccgggcaggtacatatacattatgtaattaaaaagcgtgcatgtgtatgtattaaaaataatggtatataaacaaatacaatatatacaataaaacacctaaacgcagaggctgctgttatccacaatagtaataccaatagtattaatgatgtgtatgtagacacagacaaaagcagcggacgtattaataggcagacacacaaaagcacacaaaagcaaagcaaaaagcacgccagtaatgttgtggatgcagtatcaagatttgtcatatagacataaatccagtagacactgtaatagtttttggtattttaacttgagacaaaaattggtcacgttgccattcactatcatatgtaagtgtaacaattgcacttttatgttttacattatgtcctgtccaatgccatgtagacgacactgcagtatacaatttacaatgctntttaaatctatatcttaaacattttaaagtatt

SEQ ID NO: 16030 - DNA, 227 bp, Homo sapiens
  misc_feature 164: n = A,T,C or G
gcgaatagggccctctagagcatgctcgagcggccgccagtgtgatggatatctgcagaattcgcccttagcgtggtcgcggccgaggtacctttgccagtttctggcatattaacagctgagatcagataagtgaacagcgatagaggtagtgaggtttaggnattcaggttctgccaccgggagccgcacactctggagctcagggtcttctcatttgataaaat

SEQ ID NO: 16031 - DNA, 570 bp, Homo sapiens
  misc_feature 483: n = A,T,C or G
ggcgaattgggccctctagatgcatgctcgagcggccgccagtgtgatggatatctgcagaattcgccctttcgagcggccgcccgggcaggtactgaattaatacttacttacaaaattggtgtttgtatttttaacaagaagatacatttttttgagttttaatttttatctccttagaaggcagtccaaaaacatattagaattatgatgcataaggaatttaattacagtttctaagtcttacaaagtaaaaagtattaattggtgttatttgttgaaatatgtcataaagaacaatatcctaactgggggtatggcttaagagcaatccgatttaagaaaaagacgaaaagcaggatcttagggtatcgtaattttgtaaatttttgtttcttggaatatttagaaaaattgattttaaaatgtctcttggaatagctgggctagaaatggtggttcaagggtgcaaggagattgtanaatcctctaaagggagcgttttttactacaatggcagggaatagatgccttatagatgggagctatgactcgtgttaaaaaccttca

SEQ ID NO: 16032 - DNA, 384 bp, Homo sapiens
ggcgaattgggccctctagatgcatgctcgagcggccgccagtgtgatggatatctgcagaattcgccctttcgagcggccgcccgggcaggtacattgtatactgcagtgtcgtctacatggcattggacaggacataatgtaaaacataaaagtgcaattgttacacttacatatgatagtgaatggcaacgtgaccaatttttgtctcaagttaaaataccaaaaactattacagtgtctactggatttatgtctatatgacaaatcttgatactgcatccacaacattattggcgtgctttttgctttgcttttgtgtgcttttgtgtgtctgcctattaatacgtccgctgcttttgtctgtgtctacatacacatcat

SEQ ID NO: 16033 - DNA, 610 bp, Homo sapiens
  misc_feature 175, 198: n = A,T,C or G
ccctctagatgcatgctcgagcggccgccagtgtgatggatatctgcagaattcgcccttagcgtggtcgcggccgaggtactgtctgtcaggtatcccactaaaatcccaaatgtttctcaaaagtcacatctaagtgcaatataaataccaaaacgaaagggtttgtctcaanttatttccacatgttatttatcnttacaaagcctcagttattaaccagaagttaaccagaaatcttaacagaaatattatttgctatgatttatattagattgagattcagaaaattttaattctggcattgttttccaaataagcagctgtatttttctatatgaacactaacgtctcagttttctcaccggtaaataataaaattggactcaatgtaatcccttagttattcttagttttagatagtgctcagtattccattttcagctcagtcatgtagaaaggtgaaaagaggttaactcctgcaaccacaacaagaaattggagaccaggcatggtggctcacgcctgtaatcccagcactttgggaggccgaagcgggcagatcacgaagtcagcagatcgagaccatcctggctaacacggtgaaatc

SEQ ID NO: 16034 - DNA, 604 bp, Homo sapiens
  misc_feature 469, 475: n = A,T,C or G
tacgactcactatagggcgaattgggccctctagatgcatgctcgagcggccgccagtgtgatggatatctgcagaattcgccctttcgagcggccgcccgggcaggtacattgtatactgcagtgtcgtctacatggcattggacaggacataatgtaaaacataaaagtgcaattgttacacttacatatgatagtgaatggcaacgtgaccaatttttgtctcaagttaaaataccaaaaactattacagtgtctactggatttatgtctatatgacaaatcttgatactgcatccacaacattattggcgtgctttttgctttgcttttgtgtgcttttgtgtgtctgcctattaatacgtccgctgcttttgtctgtgtctacatacacatcattaatactattggtattactattgtggataacagcagcctctgcgtttaggtgttttattgtatatattgnatttgnttatataccattatttttaatacatacacatgcacgctttttaattacataatgtatatgtacctcggccgcgaccacgctaagggcgaattccagcacactggcggccgttactagtggatccgagct

SEQ ID NO: 16035 - DNA, 584 bp, Homo sapiens
gactcactatagggcgaattgggccctctagatgcatgctcgagcggccgccagtgtgatggatatctgcagaattcgcccttagcgtggtcgcggccgaggtactcttcagtaatactccacttgcatgcagcagcttacgtggagagaatggctgatgtattgggcattgtgagaaaaaaaaaactgacgtttatactttcctcaaattttggcagatttccccaaatataaacaatggagacaatttattcacacaatcatttcctagaacttcataaaataatgaagtaacaccgtaatggtgaaggttgtggtgaggaaaagaaggttggggaagaaaggaatgcttctttttattttctacccactcgacctcaccaaattactagggctcaattgagcccttagcaaacaaaacaatcaaaaatgtattttatgcaaatgaagctctttttagaccaagtacctgcccgggcggccgctcgaagggcgaattccagcacactggcggccgttactagtggatccgagctcggtaccaagcttggcgtaatcatggtcatagctgtttcctgtgtgaa

SEQ ID NO: 16036 - DNA, 316 bp, Homo sapiens
gcgaattgggccctctagatgcatgctcgagcggccgccagtgtgatggatatctgcagaattcgcccttagcgtggtcgcggccgaggtactttttttttttttttttttttttttcttttttttttttttttttttttttttttttttttttttttttttttaaaaaaaaaatttaaataaactaaatagaggaaaaaaacaaaggaaaaaaagggactcacctgcgggcgcgtggaaaaaacaaaaaattacacccgtgaggggggatcgacacgtgccagggcaatgaagaatgagaatctacccccagaac

SEQ ID NO: 16037 - DNA, 464 bp, Homo sapiens
  misc_feature 443: n = A,T,C or G
agtgtgatggatatctgcagaattcgccctttcgagcggccgcccgggcaggtacgcggggataaccaagaaatagtgctggacaaagtctttatcaggccagcgggcaattttggcttagtttcttactccttttatggtcttgagctatctccataaatgcatccttcctggtaaccataggaacagtgtccactgtgatttcttgaagtggaagaacagctagtgcctaaagaatctacaaggaaatatatgaacataattacaccctaattattatatatgatatctcacattgtgtattagctgttaatgtcctctgtgcctgaatgaagaattagatctgtgacctttcctccacagatgattctgatggatgatattgaaagcatattcttgagatttgggggaaagaaaactaatgaagaataaagtttttaatntattcatgatggacttatgag

SEQ ID NO: 16038 - DNA, 446 bp, Homo sapiens
cactactatagggcgaattgggccctctagatgcatgctcgagcggccgccagtgtgatggatatctgcagaattcgcccttgagcggccgcccgggcaggtacaaaacagggctagattaaaaaaaaaaacaaaactattagggtctcatcaaaatgacaagatgacagggctccaaccagctcaagtcttcactccccattggaggaagactttccatcacaagcctaaatcacccagcaggaaaccagcccagccctgtcttctcagtgaggccttttctaacacgggtgcttatctccatctcaggatcaaaggatctattgcttctggcaaaagggcaaaagcaccgcttttactgggaggtacctcggccgcgaccacgctaagggcgaattccagcacactggcggccgttactagtggatccgagctcgggaccaagc

SEQ ID NO: 16039 - DNA, 387 bp, Homo sapiens
tagggcgaattgggccctctagatgcatgctcgagcggccgccagtgtgatggatatctgcagaattcgccctttcgagcggccgcccgggcaggtacatatcttttatatgctcatatgctcctgtagtcgttagttttaattcttaaaaatgtgataattgtaataaacttttattatatcttatgtaaaataattgtgtgtctgagagagactaaaactcatgccctacttctcatgatttctctttctcttttgtttccctttcacagacagaagaattatagcctcagtatttatgtatatttttgaaagagtgaagtggggactgagaaggtatatctacatgctatgccttttgatagcattctgtttcaaatctccttt

SEQ ID NO: 16040 - DNA, 605 bp, Homo sapiens
taatacgactcactatagggcgaattgggccctctagatgcatgctcgagcggccgccagtgtgatggatatctgcagaattcgcccttgagcggccgcccgggcaggtacatttgttacgtggtaggccttggaggttaatatatttaacattacagtgaatatcatcagtgatccatggagaatccattgttcaacagtttgtgattttggggaagcatacatgtgaatagaatatgctgtaggatggagcagggagcaagtcacttaggtggcaagtgtcttccatcactttttggaataacttagctacttgcccactatcaatgaatatcagatgaattacagagctacactgctagattttataaccttatagaaattataacaggaaggcttgcatgaatatggggtttgtaaagctcttcagatgtatctttcatacatgtcaaatatgaacagttatgggaactgttatatttaagagacatgcaagagaaataaagtagaaaataaaaataaaaattgtgccttcagaaggaaagtaacaatatgataactggatgtgttctcagcctgtgttaatgaagacacctgtattttta

SEQ ID NO: 16041 - DNA, 434 bp, Homo sapiens
atatggcgaatggggccctctagatgcatgctcgagcggccgccagtgtgatggatatctgcagaattcgccctttccagcggccgccccgacgggcacgcggggacagtccttcattctcagtaaacactgtgtgatacaatcagcctgccgcagatgctccttattctattactgcggcataatcatttgggtaaatctgtgaaactaatgcaaaatctcacaaggctattcagaaatatggattgaaaatggaagactggaaaaatagcttgtcatagcccattagcgactacacgctgcgatttaagaaactatttttcaaacgtttccattttgcacattgcccacaaaaaaaaaaaaaggatttttttttttttggccggaaccccctttgggggaatttccccccccggggggggcctttttggggg

SEQ ID NO: 16042 - DNA, 436 bp, Homo sapiens
tatagggcgaattgggccctcttacatgcatgctcgacggccgccagtgtgatggatatctgcagaattcgcccttagcgtggtcgcggccgaggtacaataggggatgacatttttgatgggatgccaaatgtttagcttctctgagaggcaacatttaagcaggaacctcaatgaagtgatggagcaagtgatacagatccctgagaagaggccactgagggggcaacatgcagagccctcatgggagtaggcttgatggaatctgggaaaggcaaggaggttggaattgctggagcagaatgagaaaggggtgagtttggagtagtagccaggaccagacagaggctttggattttctaagagggaagggaggatgttgggaagggttcaggatgggtatagacctgatctgagtgataaaaagatacactag

SEQ ID NO: 16043 - DNA, 503 bp, Homo sapiens
atggggccctctagatgcatgctcgagcggccgccagtgtgatggatatctgcagaattcgcccttagcgtggtcgcggccgaggtaccactcagtttcttagctaatgtgttgtaacactattcttatcccttacaactgtctaaaaggattctttttttagactttctctgctagttaccccaaaatattctgtggtagtgagttccaaaaactaattacatgtcacataaaaacaccgaccttgtatctatttcaagttggccatacctcactctttcttctagcatagatagtttacggatgttcctaggatttccgattcactagttcctgctattgtgggttgctaagttttattttgatttttgttttcttttctaaacatggctgctactgctgttcatatttgcattttgtttaccacactatcgatatcagaattgtgctctgggggcggcttcacactcttctatcttggcttgagaagtcatccatctctg

SEQ ID NO: 16044 - DNA, 290 bp, Homo sapiens
tacgactcatatagggcgaattgggccctctagatgcatgctcgagcggccgccagtgtgatggatatctgcagaattcgccctttcgagcggccgcccgggcaggtacgcgggggttcaaattaaagggctaaaatactatacatgccacctttgcattcctttgagttttgtttgttttgttctgtttgtgtcactacaaaacttatgttgcccttatatagcacatttttccttattgtgtccttttgattaattttaatgaccatttgttctcttttaaatcacct

SEQ ID NO: 16045 - DNA, 672 bp, Homo sapiens
ctcactatagggcgaattgggccctctagatgcatgctcgagcggccgccagtgtgatggatatctgcagaattcgccctttcgagcggccgcccgggcaggtacaatgggcaaggctataagagccagcaacaggtcatgtggcctcaaggggctcgtggccctacgaggccacagaagccagtgaacagagacaaagattgcttcatggacacctgtaaacatccacagggaagcttggaaccacctggggaaatgaaccctgagcaccacaaagtggaggtgacacctgtggaaaatgagtatataaatttaaagatctctaagctgtgctcgcaaatcaaggcagaactcagcacacagtaacacggacaacactagcgttcaatgacaggtatttttgagaggattggtgctggatatgtatctctaacactttgaggatgttcttttgtgggtaacatgatccttctgtctgcctatggaggctgtgtcagaggtggacattttccaagatttgggcttattttacctagaatttctttaagcatcttaatttcgtttgtaaaatgggaactatactccataactcacagggctgtcatgtgatcaagtgaaatcatggattaaaaagtgatgattattgttcatatggacctaccactgaacttt

SEQ ID NO: 16046 - DNA, 415 bp, Homo sapiens
gctcgagcggccgccagtgtgatggatatctgcagaattcgccctttcgagcggccgcccgggcaggtacgcgggatgatacattattagcaaaggtctgaatataatgctttaatgattattacctttatacttttgcctttagaacattcagttgaatgttctgcatatttctaagtatgtagaaaatattttacaaattaaagatttcatagcaagacaactttcaacaaaaaagaaaggtttatttttttcctttctttattaatttttggaataatgaattggtattactgtttttcagccaaatccacatttcaaaagtagaagttaaatatcactttaatcccaatagaattttggggcgggctagtacctcggccgcgaccacgctaagggcgaattccagcacact

SEQ ID NO: 16047 - DNA, 581 bp, Homo sapiens
ctatagtggcgaatggggccctctagatgcatgctcgagcggccgccagtgtgatggatatctgcagaattcgccctttcgagcggccgcccgggcaggtacccaaagatgtttacttgagagtagtttattcctttcagctcctcagctctatacattcttccagggaaccgtagatcttggtgcctatttgagccccaaaggatcagttagttttacaaaggacaatcgtattctctgtcacatcctttttggccatgcctcaaaagcagtcccacaatgtaagctactgctcataggctcaatgcagtccaccttcaaagcaagagaaataatttcatgagtaactccaactgccgccttgttatagggaaggcatcatgttggagcctcccagctcaaattctcacagtgaacaatttaagtctaaagttcaaaagtttcaatggcatttggtggaaaaaatatcactttactgtgtacctcggccgcgaccacgctaagggcgaattccagcacactggcggccgttactagtggatccgagctcggtaccaagcttggcgtaatcatggtcatag

SEQ ID NO: 16048 - DNA, 498 bp, Homo sapiens
ggggccctctagatgcatgctcgagcggccgccagtgtgatggatatctgcagaattcgcccttagcgtggtcgcggccgaggtacagttaattttttaaagttttaccattactatattccaaagaaaattctaacgtagaaataagggtctgaatatgaggacatgttcttcacgttggcctcatcataattttcctctaggtaggcaggaatgttgatggcctctactaagtctcctaacttccaggagggtgagtattaaaacatggttttgtaagaggataactgaacaaatgaccaagtcatgagtttcttctgcagagattctccatcccactcagaaatgacactgaaaatacttcttggggcaagaggagagaagaaagctatctaagaaagaggaagatttacatttagatattggcagagacaggccgaaacagtttcttcccatttttggttgccctatgtgtagaatagaatctaccaaactatg

SEQ ID NO: 16049 - DNA, 409 bp, Homo sapiens
tacgactcactatagggctaatggcgccttgtacatgcatgctcgagcggccgccagtgtgatggatatctgcagaattcgcccttagcgtggtcgcggccgaggtacttatcaaaaatgcttcaaaaatatttactgagtgagtcaggtaacaaaacgattaaaatgcttagccatcagcgtatgcctctattttttaagggctttttataagcaaatacgggtagaaaaacattggcagtttgagagtaaaataaacatatataactcaccaactgactgatcaggataattatctgggagtctctgggggtaaaaagcccccagtttgttccattttacaactcccaccatggcctcagtcaggccaccaacatgatacaactaaatgtggattttgaaagggtgt

SEQ ID NO: 16050 - DNA, 536 bp, Homo sapiens
ctcgagcggccgccagtgtgatggatatctgcagaattcgccctttcgagcggccgcccgggcagatacaaatctatcttaatgttactaacaacagatcagcgacaacaaaaacctcccaacattccaatatttaggtatttattggtgtccgagtttcctggcagtgtatgaatacatgggtcgaaatgaactggcctcatattatttcagggtagcatggctatgattattaaacaccacagacacccatttgcttatttttgatttttgacattctaagacatagactttttaaaaaatcttcttaaggggacaaatctcctaatttaagacctagataaacccaagatttaccagttttttgaaaaccagggatgttactttaaattcacaagaaacaccattctctttcagaatttattacttcaatggaatgcgaggagggggttaaagtttacaaaaattggaaaaaataactgacaattagatactggcttacttgttcaaaaaaaccatttttttttttttttttg

SEQ ID NO: 16051 - DNA, 573 bp, Homo sapiens
cactatagggcgaattgggccctctagatgcatgctcgagcggccgccagtgtgatggatatctgcagaattcgccctttcgagcggccgcccgggcaggtaccaaattatgaagaggtggcgttccacactgtgaaatctgagggcttttaaattagtatttttacttatgcaactcctttttccccacgcttaacagtgaacacaggaaatatattttcactcgttcagtcccttaatactgagcatctcttctgtgccaagcattgtcaacatctagagacacaatgccaaattcgaacatggtccttgcccttaaggaacttggtctaggccaggcgcggtgcttcatgcctgtaatcccagcactttgggaggccaaggcgggcggatcatgagttcaagagattgagaccatcctggccaacacggtgaaacaccatctccactgaaaatacaaaaattagatgggtggtggcacatgcctataatcccagctacttgggtggctgaggcatgagaattgcttgaacctgggaggtggaggttgcagtgaactgagatcatgccact

SEQ ID NO: 16052 - DNA, 549 bp, Homo sapiens
cactatatggcgaatggggccctctagatgcatgctcgagcggccgccagtgtgatggatatctgcagaattcgcccttagcgtggtcgcggccgaggtactgttccaggtgttttacctgtatttacatatgtgcctatgtttgctaatttaatgtttagataaacctataaggcaaatattattctttctcttttacaggtgaacatgctgaagctctaggagctaaagtaatttattgaaggttggaaagttagaatggaccagagtccattttgttttaattacaccaggggttctctctgaggcatcaaaatcttgatggatatagggcatgggggaagtgatattaaaacagcagcagtagtagcaacaacaacaacaacagcatacattgtatgatcctgcctaatttcttccaacaacaacaacaacaacatacattgtgtgatcctggctaatttcttccaacaacaacaacaacaacatacagtgtatgatcctgcctaatttattcccccgttccctggataggggtaggaggttgga

SEQ ID NO: 16053 - DNA, 504 bp, Homo sapiens
ctcgagcggccgccagtgtgatggatatctgcagaattcgcccttagcgtggtcgcggccgaggtacttctgtagaaagaccaggtttctggagtggtggagtggtggagggcaagttactgtgaattgaaagggaagtgagaaagtgtagatagttggctagactggcttctttcaaggaaggggaggaagaagaaaccacactgaggtaataggagttttcacggagtcagatttcttaagcaatgagcactttggagaggtagcagacttgtgctgtaggatgtagaaaatgggaaaagaaagagaaatgcagaggtcaaagaaaaacatcaccagtttaaaaatgttggtctctgtggtggtttaaaaatattttaaaattatttaacatatgaagaattatttaacatttctctcttcaagaaatatggccaggcctggtggctcacacctgtaatcccagcactttgggaggctgaggcaggaggatcacttgagttc

SEQ ID NO: 16054 - DNA, 605 bp, Homo sapiens
ggggccctctagatgcatgctcgagcggccgccagtgtgatggatatctgcagaattcgccctttcgagcggccgcccgggcaggtactggcattgatatgttaatgaaaaaacttttggagctcctttacttcatagaaacagctaaacaaagaatatttttaaaatatataactctgaaagctgtatttttgcttctcttttgtcctacaaattgttattgccatttgcatttaggttgagttttaattttaagtcttgtcattactcttaaaaaatgtaaatggtatattccagcatttagaacatctctcaaagttctattttctgtttaaagactatttctccagttgctttataattccgtcatacaggctcaatcttctatgacatttaacacgtcacttgcaacagactttcacacttattaatagaatcttcccagacaaaccaatgtgtagtccatattctaattatccacgtgtccaatactgttaaaggtgacataggagtcagctgttttctttgaagaaaataaaaacttccccaaaactaaacttaattaacatctattaagtgagtttataaactcttcttgttctata

SEQ ID NO: 16055 - DNA, 239 bp, Homo sapiens
atagggcgaattgggccctctagatgcatgctcgagcggccgccagtgtgatggatatctgcagaattcgcccttagcgtggtcgcggccgaggtacaaaaggatatattaagaaaagtgtttcccttccactccagacaccctccccaaagcaacctattaacaatgactatttgtccagtttctttgcataagtacttttttttttttttttttatttttttttctttttttatatt

SEQ ID NO: 16056 - DNA, 606 bp, Homo sapiens
  misc_feature 528: n = A,T,C or G
acgactcactatagggcgaattgggccctctagatgcatgctcgagcggccgccagtgtgatggatatctgcagaattcgcccttagcgtggtcgcggccgaggtacatttaaaaggtgatgctaatactttaaaatgtttaagatatagatttaaaaagcattgtaaattgtatactgcagtgtcgtctacatggcattggacaggacataatgtaaaacataaaagtgcaattgttacacttacatatgatagtgaatggcaacgtgaccaatttttgtctcaagttaaaataccaaaaactattacagcgtctactggatttatgtctatatgacaaatcttgatactgcatccacaacattactggcgtgctttttgctttgcttttgtgtgcttttgtgtgtctgcctattaatacgtccgctgcttttgtctgtgtctacatacacatcattaatactattggtattactattgtggataacagcagcctctgcgtttaggtgttttattggatatattggnatttgttatataccattatttttaatacatacacatgcacgctttttaattacataatgtatatgtacctgcccgggc

SEQ ID NO: 16057 - DNA, 440 bp, Homo sapiens
aatggtgccctctagatgcatgcttgagcggccgccattgtgatggatatctgcagaattcgcccttagcgtggtcgcggccgaggtacagttccatctttggccataaggagacaatgatgtcaagaggctaaggccatatgatctgtaggtgaaaaacctgggatgagaatcaaggcctcaaactttttccactacatcacagatttaggagcagttagagggaaggcttcaatctggagaacactaacaggctctagagattattgggtcatggtggctgggacagaaataaggattcacagaaagatgtttgttgtcaatgttcttttacagtaaatgttcttttgagattttgcttgataaaaaggttgagcagaagtgaaaaaaatttttttctttttttctttctttttcttttctttttgcttttttttttt

SEQ ID NO: 16058 - DNA, 689 bp, Homo sapiens
  misc_feature 658: n = A,T,C or G
acgactcactatagggcgaattgggccctctagatgcatgctcgagcggccgccagtgtgatggatatctgcagaattcgccctttcgagcggccgcccgggcaggtacatatacattatgtaattaaaaagcgtgcatgtgtatgtattaaaaataatggtatataaacaaatacaatatatacaataaaacacctaaacgcagaggctgctgttatccacaatagtaataccaatagtattaatgatgtgtatgtagacacagacaaaagcagcggacgtattaataggcagacacacaaaagcacacaaaagcaaagcaaaaagcacgccagtaatgttgtggatgcagtatcaagatttgtcatatagacataaatccagtagacactgtaatagtttttggtattttaacttgagacaaaaattggtcacgttgccattcactatcatatgtaagtgtaacaattgcacttttatgttttacattatgtcctgtccaatgccatgtagacgacactgcagtatacaatttacaatgctttttaaatctatatcttaaacattttaaagtattagcatcaccttttaaatgtacctcggccgcgaccacgctaagggcgaattccagcacactggcggccgttactagtggatncgagctcggtaccaagcttggcgtaatcatg

SEQ ID NO: 16059 - DNA, 470 bp, Homo sapiens
cgactcactatagggcgaattgggccctctagatgcatgctcgagcggccgccagtgtgatggatatctgcagaattcgcccttagcgtggtcgcggccgaggtacttgacgttaatgccgatgataattcatctgatctacagaatattcactttaatagagagatgagagtctgaaatgaccagaggaaaatagatactgaagccaatatagtcttgataccaaaataaaattaaaatgagaaactaacatgataggttcaaggccttttgggagcctgttttctttgccagatttcacattcttacagcttcatggtctttttcttctaacaaattaatcagctgagagaagctgtctttcagtgcatccatgtcatccagtgagcagggctgtagaatccagcgttttccacgtgcaagtggttcaagttcaaaatattttttgatctcttgtacctgcccgggcg

SEQ ID NO: 16060 - DNA, 386 bp, Homo sapiens
gggcgaattgggccctctagatgcatgctcgagcggccgccagtgtgatggatatctgcagaattcgcccttagcgtggtcgcggccgaggtacatttaaaaggtggtgctaatactttaaaatgtttaagatatagatttaaaaagcattgtaaattgtatactgcagtgtcgtctacatggcattggacaggacataatgtaaaacataaaagtgcaattgttacacttacatatgatagtgaatggcaacgtgaccaatttttgtctcaagttaaaataccaaaaactattacagtgtctactggatttatgtctatatgacaaatcttgatactgcatccacaacattactggcgtgctttttgctttgcttttgtgtgctt

SEQ ID NO: 16061 - DNA, 386 bp, Homo sapiens
ggcgaattgggccctctagatgcatgctcgagcggccgccagtgtgatggatatctgcagaattcgcccttagcgtggtcgcggccgaggtactccagcctgggtgacagagtgagaatatgtctcaaaaaaaattatcagcagaagataatatagaccccaaggctaaagggaaccattatcatctctaggcctgaaagcctaggagagggtgctgtatggagaggactgcttctgacagagggatatagccaaccttggtggcctaatagagaggaaagtagggaatagcttcaccttccttctctaatcttctgctagtatccctattaatttagcctaattagaagctggaaggtaggagagcctccatgggcaaaaagctg

SEQ ID NO: 16062 - DNA, 571 bp, Homo sapiens
  misc_feature 531: n = A,T,C or G
atacgactcactatagggcgaattgggccctctagatgcatgctcgagcggccgccagtgtgatggatatctgcagaattcgccctttcgagcggccgcccgggcaggtacatttaaaaggtgatactaatactttaaaatgtttaagatatagatttaaaaagcattgtaaattgtatactgcagtgtcgtctacatggcattggacaggacataatgtaaaacataaaagtgcaattgttacacttacatatgatagtgaatggcaacgtgaccaatttttgtctcaagttaaaataccaaaaactattacagtgtctactggatttatgtctatatgacaaatcttgatactgcatccacaacattactggcgtgctttttgctttgcttttgtgtgcttttgtgtgtctgcctattaatacgtccgctgcttttgtctgtgtctacatacacatcattaatactattggtattactattgtggataacagcagcctctgcgtttaggtgttttattgtatatattgnatttggttatataccattatttttaatacatacacatgca

SEQ ID NO: 16063 - DNA, 699 bp, Homo sapiens
tacgactactatagggcgaattgggccctctagatgcatgctcgagcggccgccagtgtgatggatatctgcagaattcgccctttcgagcggccgcccgggcaggtacatatacattatgtaattaaaaagcgtgcgtgtgtatgtattaaaaataatggtatataaacaaatacaatatatacaataaaacacctaaacgcagaggctgctgttatccacaatagtaataccaatagtattaatgatgtgtatgtagacacagacaaaagcagcggacgtattaataggcagacacacaaaagcacacaaaagcaaagcaaaaagcacgccagtaatgttgtggatgcagtatcaagatttgtcatatagacataaatccagtagacactgtaatagtttttggtattttaacttgagacaaaaattggtcacgttgccattcactatcatatgtaagtgtaacaattgcacttttatgttttacattatgtcctgtccaatgccatgtagacgacactgcagtatacaatttacaatgctttttaaatctatatcttaaacattttaaagtattagcatcaccttttaaatgtacctcggccgcgaccacgctaagggcgaattccagcacactggcggccgttactagtggatccgagctcggtaccaagcttggcgtaatcatggtcatagctg

SEQ ID NO: 16064 - DNA, 373 bp, Homo sapiens
gcgaattgggccctctagatgcatgctcgagcggccgccagtgtgatggatatctgcagaattcgccctttcgagcggccgcccgggcaggtaccatgtccagccaaggaagtcctagtgttgcgctttctacgacgacagtcagttcagttgctgtgcaggctggggactccaaaatcgttatagctgtcataaaggtaagctaacaacttccttttttctgtgcggctgtgggcttctagctgtgtgttgaaaaccctaaagaacattccatgcaatcggcaggacacagcatagagaagacaacgcagcaagcactcttactgctttctaaaatgggctactaagagaaacctctacaagtttcagcagt

SEQ ID NO: 16065 - DNA, 522 bp, Homo sapiens
ctatagggcgaattgggccctctagatgcatgctcgagcggccgccagtgtgatggatatctgcagaattcgccctttcgagcggccgcccgggcaggtacgcggggattcagataaggaggagttggctggagtgctgccctgccttggtatttggtgcacagtcctgggaggatcctggtgctgggacagtcctggttttgtagattcctagtgcctagaggacacaactcaaggagagaaaaggacagtttgggacaacaggtgggtgggcagtcttgaaaattggtagccacagacgcccagcaagagtgaagaaggacaggtggcttcattctgtggttgatgattccctcatggaagttcttgttcaggtttgtctgttgctactttgaaatttattgattatttgtattcttgttcttttgacattattctttttaatttcaatgccactgcttttgtatgtaaattaattcattctttaaaattttactcttttaggacattgcacattaacaa

SEQ ID NO: 16066 - DNA, 378 bp, Homo sapiens
agggcgaattgggccctctagatgcatgctcgagcggccgccagtgtgatggatatctgcagaattcgccctttcgagcggccgcccgggcaggtacatttaaaaggtgatgctaatactttaaaatgtttaagatatagatttaaaaagcattgtaaattgtatactgcagtgtcgtctacatggcattggacaggacataatgtaaaacataaaagtgcaattgttacacttacatatgatagtgaatggcaacgtgaccaatttttgtctcaagttaaaataccaaaaactattacagtgtctactggatttatgtctatatgacaaatcttgatactgcatccacaacattactggcgtgctttttgctttgct

SEQ ID NO: 16067 - DNA, 393 bp, Homo sapiens
tagggcgaattgggccctctagatgcatgctcgagcggccgccagtgtgatggatatctgcagaattcgcccttagcgtggtcgcggccgaggtacctaactcatgggattgaataagttaatgtatgtgaagcacttaggacacagtgtttaccatcatcactattattcctattgtaatcttgttcagaggtgagggtgcctgaattaaggcagtagcagtgaggatgatagaaagaagtggccagatggaggctctacacaggtgatagaattgacaggaatttatgattaattggatgtcagaagggtagataaaagagaataaaaagttgagggtgattgcaggttttggatttcatcagctgagtgaatggtggtttcagtccctgc

SEQ ID NO: 16068 - DNA, 471 bp, Homo sapiens
agggcgaattgggccctctagatgcatgctcgagcggccgccagtgtgatggatatctgcagaattcgcccttagcgtggtcgcggccgaggtacaaatatttggcaaaggaatgaaaaaagttagaaagttgtctgtctgtgggctaggctctgcctgcaagatacttacaatctaggtcagaggttcctaaatccttctcaatgccgtttgcactggccctgaggaaagtgtgaaaatgaagactattgtagagtcttacatgaagctaaatttgttcatttatatcacttctcttttattatgagattatgtcctctgcaggtttttggtattaaaatgtcttttatgaaaggatagtaagagttagatagtactcttttttgtggaaaaaaaaaaaaaaaaagtccctgtccgggcggccgttcgaaagggcgaattccagcacactggcggtcgttactagtggga

SEQ ID NO: 16069 - DNA, 378 bp, Homo sapiens
tacgactcactatagggcgaattgggccctctagatgcatgctcgagcggccgccagtgtgatggatatctgcagaattcgcccttagcgtggcgcggccgaggtaccctaaaacttaaagtataataataataataatttcctcattcatacatcctgtatattaagttgccatattaatttattgaaagattttttagtatactttcccacagtttagcattcttctaaggctccttacttctaacacaaagtccaagctctttaatctgacatttaagtttttccaccaacaggacccaattgatctcgtaatcttgtcttttttaattcttgataatcagctttttccactaaaaagctgaaatgattaaggag

SEQ ID NO: 16070 - DNA, 465 bp, Homo sapiens
tgggccctctagatgcatgctcgagcggccgccagtgtgatggatatctgcagaattcgccctgagcgtggacgcggccgaagtacttattaggttttctttagaagaaggagatatgaagaagcaaaagaagaataaagaacaacccattttcatttgcttttaggaaactctggtaagctcatggctcacataggatttaagtgtttgatccacatgttcagcttctcacttttctcacctcacttggatagaaggtatagcctgccgtctccttcagacatgcacataactaacccaacccactagatactagcctttgggaagacctcctgaaagtgattctatgcttgtatgactgttcatggtttaacaagactcacatgccacatacttcctatttcatggccaaagcctaattcctctttttctgtccacacaggcaatgcagaatagctgataatt

SEQ ID NO: 16071 - DNA, 368 bp, Homo sapiens
ggccctctagatgcatgctcgagcggccgccagtgtgatggatatctgcagaattcgccctttcgagcggccgcccgggcaggtactaaaacccctaactcaggaataaggaccatcctcctcatggtttccactgtgctctggcagcagagaaatggcctgaccctgtttgcccccactcatgtgatgccacctgagatctaccccatttctatgaatgtctggcagattcccacttaaaacagctgctggaataaagatcacattgatccattctgatggcaggtggggaagcagagacccataacaagcaccactccagcagaccagtcagggggatgaagatttctgcttacctccttagtgtg

SEQ ID NO: 16072 - DNA, 618 bp, Homo sapiens
  misc_feature 601: n = A,T,C or G
tacgactatacgactcactatagggcgaattgagccctctagatgcatgctcgagcggccgccagtgtgatggatatctgcagaattcgccctatgagcggccgcccgggcaggtactagcagtagttaaaattactgagatattttcaatgaaccttcaaaaaagaccaacaaatctatttttctgtccaatgtaattttgatacttaagtttataactgtgttaagattaagtcaaactccttagaaatgttcagagaaatattagtctatatttcttatattgctcaagttctatttctataagtgataaattatacaaaatcagatatatggctcagcctgcagaagtttaagaaaaatgtttaaactaattttcatctttattaagctttcccttaagcaaagatgagcaatcatcttaactgtatcaccaaggggctataagatatttctcagatttaataaaatttcaatacctgatttaaccaattaatgccaaaatcccattcctttcctgttttcattacacttatatctactttatcaggactggcaaaaacagaccttaccacaaagaagagcccatattatgcatctnctgaacaagcatgcact

SEQ ID NO: 16073 - DNA, 330 bp, Homo sapiens
tctgcagaattcgcccttcgagcggccgcccgggcaggtacgcgggcactgcactccagcctgggtgacggagcaagaccctgtctcaaaaaaaaaaaaaagaatgaatgaaataatgcaaacaaaactaaaagcatttgtgcttcaaggacactcaaaaaagttaagagaatcaactgaatggaaggaaatatttccacatcatatatttgaccttatatctagaatacataaagaatacttaacatctcaataataaaaacacaacccaacttaaaaatgggcaaagagggctgggcgcagtggctcacgcctctaattccaggactt

SEQ ID NO: 16074 - DNA, 614 bp, Homo sapiens
ctatagggcgaattgggccctctagatgcatgctcgagcggccgccagtgtgatggatatctgcagaattcgcccttagcgtggtcgcggccgaggtacattcttacaacttggaggataaggactacacacattcatctacccatacacacagtgaaacacatgtgtagcttaaataaaacagacattctccaaggatttctccaattataataattgattgggcttcaaaaactcaaggttgaatttcagcttctaacttgatgagaatggctgtcttaattctgtcattttttgttaattttacttccaggaagtcagggctgtgatttgaggcttttttctctaagcttctgtgatggagatgaatttattaaagtggggccataatgtctttttgagcaacattaaaactgagtcatcagaattaggaagtatcagaagtcaagatcaattttcaagaacaggagcataaaattcgaactcaatctgtgttaacattaagagatttagaagctcattcagactgataactaatgaataatatagctttcatttgttggagactttatgtgagccagccaggtatacatgttatttataatccccacagt

SEQ ID NO: 16075 - DNA, 508 bp, Homo sapiens
actatatggcgaatggggccctctagatgcatgctcgagcggccgccagtgtgatggatatctgcagaattcgccctttcgagcggccgcccgggcaggtacgcgggaatggtgtgaacccgggaggcagagcttgcagtgagtctagatcgcgccactgcactccagcctaggcgatggagcgggactccatctcaaaaaaaataaataaataaaaataacaaaaataaagaaaagtatttgatacatcaaaagacatgacatcttggaagtggattccagatgattcagcgaagcttctctaggtgctgtaaaaaataatgaccttactccttaattaaataagcactcaaaattttattccagtagagagaaagcaggggctggaacttgtttgcttggtccctttctggccgtgtaaaaatgggcaaaacttggcatgaccacatctgttttttaatttcaaaatctcttaattttacagttcatttcaaaacaaattttaaaa

SEQ ID NO: 16076 - DNA, 685 bp, Homo sapiens
  misc_feature 631: n = A,T,C or G
acgactactatagggcgaattgggccctctagatgcatgctcgagcggccgccagtgtgatggatatctgcagaattcgcccttagcgtggtcgcggccgaggtactgaaaatacagatggaattttaagcaaattcattatttacaaagcaaataagtgagtcctggtatctgacaatgggattcaccataaaattaattttaaaattactaggttttaaatttttacccgaaaatgatttgatgcatttttgcattaaaaactgtatttattacatgaagtataaataccccaggagattaaatccatcctgccatattcatgggagcctgatctagcccgaggtatgatgcccagcaggacacagtggccataggagaaaggttagcagccattcagagcagtcggtgttgtgctggaggcgttataggtattgtgagtatctctcttcatggtaagtagccataatataatgactcataggattcttctctccaaagaacactgtgctgagagtcaagttatcggctctggttttagtcatctaatttactctataatttcctacaaaattagaatgtacctgcccgggcggccgctcgaaagggcgaattccagcacactggcggnccgtactagtggatccgagctcggtaccaagcttggcgtaatcatggtcatagc

SEQ ID NO: 16077 - DNA, 523 bp, Homo sapiens
tatagggcgaattgggccctctagatgcatgctcgagcggccgccagtgtgatggatatctgcagaattcgccctttcgagcggccgcccgggcaggtactgggcagatctggcttcacgtaaaaataagagaaattaagaccaataggtaggccacaggatctagtttttagcccagagaagaaagctttagttaatttcaaagtcacatagacagaacagacttcagagctccaatttttaggaaacaagtaggcaaaaaaaagaggttctgggactcaggtatataagaagggtgagtcaagtcacagctttgaaattcttccattgtctctagctttctcttgactctcacccactaatgaagatctctaacctccctaatttctagcccaaaatatagatacacattttcagactccatgtgctctcttgttctcttcaaccacacctctaaatgagaaccagggcagatataatcacttctattcattgcttaataactgtttaaatctgtcttaac

SEQ ID NO: 16078 - DNA, 430 bp, Homo sapiens
gcgactggggccctctagatgcatgctcgagcggccgccagtgtgatggatatctgcagaattcgcccttagcgtggtcgcggccgaggtacatgctagtttatgttttaggagtttagtttctatttctctgtttagctaattctctatcttttggccactccttttttattcccctcaaacagtcgctttctcttcccatctctatagcaacttgtaatatactataggaataattatggcacatgcaacaatgcaacaatttaatatataagtgcattacatttcttatttttatttttcttaaaaaaaattacccgggtatggtggtctgtgtagagatggggtttctccatgttgcccaggccagttttgaactcctggactctagcaatccacccactttagcctctcaaagtgctgggattac

SEQ ID NO: 16079 - DNA, 602 bp, Homo sapiens
cactatagggcgaattgggccctctagatgcatgctcgagcggccgccagtgtgatggatatctgcagaattcgcccttagcgtggtcccggccgacgggctcatgttggataattctaatgatacatttcataagaaagtggctaagctggagagattcacttgtgaaccttgatgatgttttatttatctttgagcgtgctttacttccccttgccagtgctgttgttttgatagacaggggagtattgttgtcaggttgtgtagcagtcatagaccagaagtcagcaaaccggcttgcaggccacattcagtggagaccatttgtggtctggagaacctgaaatttttattattttgcccttttcagaaaacttgccaaaccttgtcattatactgtaaacatggtctgagactcagttttgcgcacaaattttgttaagctttaaaatggttttaacctcttgttgtcagttggcacccttcttttaagataccagtataggaatttatttaaatataaacagattatgaaaaaagtgtatactcatttcaaaacacccaggatgcccaaacacttgattttaaaacctgagtctccc

SEQ ID NO: 16080 - DNA, 565 bp, Homo sapiens
gcgaatggggccctctagatgcatgctcgagcggccgccagtgtgatggatatctgcagaattcgcccttagcgtggtcgcggccgaggtaccataaaaatataagggaaaataagctttcctagaatttttcagtgttctagtttttaaacagtgatgttttttattaacctatttcatccattcaaagacaggcctttctccacaccacattttcctctaaaatcatgataacacttttaaattgatggtgtcttccagtgtgtatcagccagatggcagtgtgttacagttccaggaaaactcgttcacatcttccgtaagatcaagaaggctctggcatcagataagatcaaatgttgtctttctgttttaaatatgtgccgcaaagagatttgcttacaatctattgagaaagctaaaacagagcagacattgtcctgttgcggggtagatgaatagcctaagaatagtttagacaaattctgaaaacgaatttaccttagaagatgttcatgttagatctggtaaaaataacatgttatttttctgtcaagcccttttt

SEQ ID NO: 16081 - DNA, 640 bp, Homo sapiens
tactatagggcgaattgggccctctagatgcatgctcgagcggccgccagtgtgatggatatctgcagaattcgcccttagcgtggtcgcggccgaggtacccaaattccgaaggccaaatatgtcaaaatgaacacaggaaaatcaaacagacttctatgacaactcacagcagcccaacattcctgttagtagcaaggagctgaccaacaagcaatgcaggtaagtaaatcatacagattgcaagagatgaacaccttttggcatagctctctctgctgcctcctaaggttagtcctaaagactgaagaagacagtgctgggaaaagcactgaaggtcccatcccaaacactaggaataagggaaacaaaaagaggagcatcattatcgtggttaaggtgaaggaaacaagcagtaacgagccataaatcaccagcaataaaacagaaacgcattgataagaaatctcggaataagattgcccagtgagagctccaacaacttcaaagggcctgtgagatgcacagctgactggaagtcagctcttcgtctctacttgcccgccagctaagcccagagctccagcctccctgaggctcttccctcctttgtaaaaagcaggaatgagtatgttttctc

SEQ ID NO: 16082 - DNA, 530 bp, Homo sapiens
ctctagatgcatgctcgagcggccgccagtgtgatggatatctgcagaattcgcccttagcgtggtcgcggccgaggtacagtcagactgtgacccaccatcagacagggacagctatgttcgcgagctgatgacttacatcgaggtcgattcctatggtgaatgtttacgaaacaaagacctccctcagcagctgaagaatccagcctctatggatgccgatggcttttataggatcattgcacagtataagtttatcctagcttttgagaatgcagtttgtgatgactacatcactgagaagttctggaggccactgaaactgggggtagtccctgtatattacggatcccccagcatcacagactggcttccaagtaacaaaagtgctattcttgtatcagaattttctcaccccagggaactggcaagttacatcagacgactggattctgatgacagattgtatgaggcctatgtagaatggaagctgaagggtgagatctctaaccagcgacttctgacagctc

SEQ ID NO: 16083 - DNA, 489 bp, Homo sapiens
ctatatggcgaatggggccctctagatgcatgctcgagcggccgccagtgtgatggatatctgcagaattcgcccttcgagcggccgcccgggcaggtactatcactgaattgaatgagattttagtccaaaccaaaaagtaaatattttttaaagtaaaatatattaatggaaggagagtttgctataaatgattgaattaatgtgacagtttaatttatgaatttttatagacatagtaaatgccttctcaaattatataaatgatttcataagtggtccttatgtgcaaggtaaaatgactgctttatctctctgatataaataaatgtgaaaaataactttgatacactttttatttgtttggatgattatttctaatcctggtgagtgaaaatgccatctggtgtgtccttttaactattctattatctcttaaatctaaaaactttttcatttaaatgactatttccaggcaatctgagattc

SEQ ID NO: 16084 - DNA, 469 bp, Homo sapiens
ctactatagggcgaattgggccctctagatgcatgctcgagcggccgccagtgtgatggatatctgcagaattcgcccttagcgtggtccggccgaggtacaaggcatttttgctaactgtaacttcccacttaatcaacaaaaacaaaaacactcatttctgaacattcagtgcattcatgattaatcttaattacaccacaaaggtatttttcaatggtgattttgcgggagtggggtaacagtttcgaaagcaacattgtcagaaacatagttgattttaaaggttctttctggtgaccttgacttctgctttttagaagaccttacacagagttgtatttatttctcctggaatatttcaagcaattcagagtgaaagggtatacattccaatttgcgtatgagataaaatttagttacattgagaagctattttctttagttacagggaaaaaattgtagggct

SEQ ID NO: 16085 - DNA, 391 bp, Homo sapiens
catatactggcgactggggccctctagatgcatgctcgagcggccgccagtgtgatggatatctgcagaattcgcccttagcgtggtcgcggccgaggtaccagaagggttacatgataagtagtaacaaaagcaatctaagaaaaggggataggaagtatatataatgtgggatggtttgtgcttttagataggataatgaacgatggtctcattgaggttacatttgcacaaagattggaaagggatgaagaagccacctaagagaaggaattccaagcacagtgaacagaaacctcaaagatactgagggttggagcatatctggtatagcggagaaatagtaatataaagtctagtgtggcaggagaaatgtgaacaaagagaaaag

SEQ ID NO: 16086 - DNA, 650 bp, Homo sapiens
acgactcactatagggcgaatagtgccctctagatgcatgctcgagcggccgccagtgtgatggatatctgcagaattcgcccttagcgtggtcgcggccgaggtacaatggtgtgatttcggcttactgcaacctctgcctcccaggatcaagcgattatcctgcctcagcctcctgagtagctgggactacaggcatgtgccaccatgcctggctaatttttgtatttttagtagagatggggttttgccgcgttggccaggctggtcttgaactcctgacctcaggtgattcacctgctttggcctcccaaagtgctgggattacaggtgtgagccaacgcgcctgacctacaatatgtatttctgagaggacatagcagtcaattgtatgatctctaatatatttctaatcagagacagaaaacttatttaacaattttcctttaagtgtggttaaaaaactgagtggtttttgggaagatattatacttgagaaaggacttgaattagttgggttgcctttgttgtcttcatgtctgataagttatcttactgtgcctacctaatgaagattaacattacttatgaaatgtttgattttaacagaaaccattgaccatttactgtttatttttattttaatattt

SEQ ID NO: 16087 - DNA, 633 bp, Homo sapiens
tatatggcgaatggggccctctagatgcatgctcgagcggccgccagtgtgatggatatctgcagaattcgcccttagcgtggtcgcggccgaggtacgcgggttaacccagacatctccatgcctcctctgtattggaggtggaattaggccagatccaacatggcatgtgagattgaagcttggaggacatgtcgctttgcaggaaacaatctggttaagcagaggacccggccatttattggtgggttctggcgctttcaagaatgtgaagaatgagtggccaaagttaacaaaggagcatgcacagggatgggggtcacacccactttgtagagtttaagaatagtaagggacctacgggaacttctcaaggtaataggtggcatgtcttctttccttggcatgacacagaatgtaaagataatgggaggatgaacctccaagcctggaactttgggagaagcttctcctcttggaagtgccagtagcagaaaagttcccaaatagaacagattccttcattccacctgaattcagagagagatccatgtggacacatgtgcctctccatcagagactgctatccagacattcatcttccacctaaaaatgcacttctgctgttgactg

SEQ ID NO: 16088 - DNA, 624 bp, Homo sapiens
ccctctagatgcatgctcgagcggccgccagtgtgatggatatctgcagaattcgcccttagcgtggtcgcggccgaggtactgaatacattacagtttcctttggttgttcctgctttagtaggaagttatgaagatatttaatattcaaaatcatttatccacagtcctggccttggggaaatattgcattttatcaaatcagctagctgccctgctcagaatcagacatcagatggagcaagtagagcttatttttatatttgaaatatttcttagtaagctaaaaaaataaagcttcactgctacataaagtgatataggttttatcattcaaagcacagagtagagatattggaaagcaggcttaatacttgcttcctgagttctttctatatatttctaaattatgtaatgatggtttatcctaaactatttttctaaatcataatgtcgtcatatttttatttatattgtatttaacgaatagagtcataacaaatgaacacattaataaaaatattcaatgaaaaattggtatgcaactcactgagtacacaaattatcagtgtccacacaaaagatgagttactaagaacagaaagttcaatggagagactgaaa

SEQ ID NO: 16089 - DNA, 393 bp, Homo sapiens
gactcactatagggcgaattgggccctctagatgcatgctcgagcggccgccagtgtgatggatatctgcagaattcgccctttcgagcggccgcccgggcaggtacaacgtgggcaagcatctgtgcatatgaaatgctgtttttctaaaagatttctcacattggcaaactgagagattttcttctggaacacaggaaagattatattaatgcttatagccataccatgtctgaatatgggaggatgacagacacagaacgagaccagatagaccaggatgcccagatattcatgaggacctgttcagaagcaattcagcaactacgaacagaagctcacaaggagatacattcccagcaagtgaaggagcacaggaccgctgttttggat

SEQ ID NO: 16090 - DNA, 481 bp, Homo sapiens
ctatagggcgaattgtgccctctagatgcatgctcgagcggccgccagtgtgatggatatctgcagaattcgccctttcgagcggccgcccgggcaggtactctctatttcccagtcacgagagtgtaaaggcagggtcctaggaggttttttgtcaggctggtctcctcctctgcccctgcagtgagagcctacattggtctgagaagccagggatggtctgttatggatcatattgctgactgtctctttaaaatctctcagcctgttggtgctgctggatggtttggaggcatttctaggagcctgcttctctttcagtgtttctccttcactgtggtatcccgaggcctggggctcatcgcctttcctcctaacccgaccagagctcctcttgcgctctatcagtgaccctttcttggatgtgtgtttctgattacattcactatcagtcaggtgtcctgaatcttcactgtcgtag

SEQ ID NO: 16091 - DNA, 593 bp, Homo sapiens
tacgactcactatagggcgaattgggccctctagatgcatgctcgagcggccgccagtgtgatggatatctgcagaattcgcccttagcgtggtcgcggccgaggtacaatggtgtgatttcggcttactgcaacctctgcctcccaggatcaagcgattatcctgcctcagcctcctgagtagctgggactacaggcatgtgccaccatgcctggctaatttttgtatttttagtagagatggggttttgccgcgttggccaggctggtcttgaactcctgacctcaggtgattcacctgctttggcctcccaaagtgctgggattacaggtgtgagccaacgcgcctgacctacaatatgtatttctgagaggacatagcagtcaattgtatgatctctaatataattttctaatcaaagacagaaaacttattaacaattttcctttaagtgtggttaaaaaactgagtgggttttgggaagatattatacttgagaaaggacttggattagttgggttgcctttgttgtcttcatgtctgataagttatcttactgtgcctacctaatgaagattaacattacttatga

SEQ ID NO: 16092 - DNA, 468 bp, Homo sapiens
agggcgaattgggccctctagatgcatgctcgagcggccgccagtgtgatggatatctgcagaattcgcccttagcgtggtcgcggccgaggtactcctcaaggctggagaagctacttggttgggttgtggcctactgtggtgccattgatttccccaaacattaagtccttgctgagcctcagccaaaatcaacagccgtcatgtctacaattaccttggagcccaagctgccaccgggaaacaggggtcacattcagccttacttggctccttaagcagcgacactatctgtgactaaacaagtgactggtgcgatgggggaggagggatgtaatggtggagctgtgaaaacttgcaaatgtgatcaccaaacttttaatcaatctagaaggaagcttttttttttctccctaagtatttgaagtgcccactggtgtctttgggggttggggaattaacaataac

SEQ ID NO: 16093 - DNA, 392 bp, Homo sapiens
ctactatagggcgaattgggccctctagatgcatgctcgagcggccgccagtgtgatggatatctgcagaattcgcccttagcgtggtcgcggccgaggtactccaaccaacaaatgtagacagaccataatcagtcacatacataattgtgggttctaaaatatcattttgtctaaaaaaaactccaacgaaacatgtaaaaataagattttggataaattaactttgacgacatttgactaacattatctcaaaaataattctacaggaatcattttatgaaaaaaatatacaatccatattggtttaattatgaaattttgactcaacgaaacttaagaaacgagccaacattttactcatggtctctagaggcatctccttattactc

SEQ ID NO: 16094 - DNA, 405 bp, Homo sapiens
atacgactcactatagggcgaattgggccctctagatgcatgctcgagcggccgccagtgtgatggatatctgcagaattcgcccttagcgtggtcgcggccgaggtacagcaattaaaggttattttatttctccaaacttaagagaaatagtatattctataggttaaaaatgtaaggtctgccgtcttatgatagtctcaaattaaaaaaaaaacaggccaaaactatcacatatttaatatatttcactcctagttgtgcaaatctgaggcttatccaggtccactaccctttgctcattgtctctcaaaaagcatttaggtcagacagagaatatgaacctttttactctgccttctaataaaaagttacacagggaaagaaaacgttatgtacctgccc

SEQ ID NO: 16095 - DNA, 473 bp, Homo sapiens
ccctctagatgcatgctcgagcggccgccagtgtgatggatatctgcagaattcgcccttagcgtggtcgcggccgaggtacaacgtgggcaagcatctgtgcatatgaaatgctgtttttctaaaagatttctcacattggcaaactgagagattttcttctggaacacaggaaagattatattaatgcttatagccataccatgtctgaatatgggaggatgacagacacagaacgagaccagatagaccaggatgcccagatattcatgaggacctgttcagaagcaattcagcaactacgaacagaagctcacaaggagatacattcccagcaagtgaaggagcacaggaccgctgttttggatttcattgaagattacttgaaaagagtatgtaaactttactcagaacagagagccatccgagttaaaagagtggtggataagaaaagattatctaagctggaacca

SEQ ID NO: 16096 - DNA, 391 bp, Homo sapiens
gggccctctagatgcatgctcgagcggccgccagtgtgatggatatctgcagaattcgcccttagcgtggtcgcggccgaggtacgcgggatagatttatatttaatatgttatattgggaaaaattaatatatttttcaatgctctttgagccacacatactcaaaattgggttttatcagccgtttattacactgtgcctaagtccatagtaatctgcagtgaatcatttagactggaaaaaatagcttaagaaacatgactaaatcttttgaagaaatacatgaaagcaaaaagtattctaataggatttcttatagagtcaacataaaagatgcattaaaaatcgaatagtcttggtttcaaatactgtgtgatggcagaaaactct

SEQ ID NO: 16097 - DNA, 376 bp, Homo sapiens
cactatctggcgactggggccctctagatgcatgctcgagcggccgccagtgtgatggatatctgcagaattcgcccttagcgtggtcgcggccgaggtaccagattgctgccacattgctagatgtgatcaggtcaggggaggaagagaggtgtccttccttgtatgtctatgtctccctgtgaagaaagttttctgagaagcctgcagagagttactcctcatattcccgcagccagaatcttgtcaaatgtccctgcctaacccaatctttggcaaggagaaatgcaacaccatgatcagcttagatgaaccaggatgaactcacagaaatgtggaccagatttgctttcacacagacacatagggaggggta

SEQ ID NO: 16098 - DNA, 475 bp, Homo sapiens
atacgactcactatagggcgaattgggccctctagatgcatgctcgagcggccgccagtgtgatggatatctgcagaattcgcccttcgagcggccgcccgggcaggtacgcgggggggtgagaagtgtgtgcttcccttcctgggaggtgggcacctggggcacttggagtatctgaggagctctccaaacatgagatttttgagctccaattgcagcagatgaatgtttcatttcattcaacacattctaaaacatcaggagatctcaaatgtgcgtagaagagacacttacctaccgggcttgcacagccctgcccttcacccgttctcacacatggctccttcctacccgtccctccatttttcccaccccaagtgattttgaagcaagtcccagatatgataaaagataaaattaggctgggcacagtggctcacagcactttgggaggccgagttgggcagatcacctg

SEQ ID NO: 16099 - DNA, 461 bp, Homo sapiens
tactcactatagggcgaattgggccctctagatgcatgctcgagcggccgccagtgtgatggatatctgcagaattcgcccttagcggccgcccgggcaggtacaacgtgggcaagcatctgtgcatatgaaatgctgtttttctaaaagatttctcacattggcaaactgagagattttcttctggaacacaggaaagattatattaatgcttatagccataccatgtctgaatatgggaggatgacagacacagaacgagaccagatagaccaggatgcccagatattcatgaggacctgttcagaagcaattcagcaactacgaacagaagctcacaaggagatacattcccagcaagtgaaggagcacaggaccgctgttttggatttcattgaagattacttgaaaagagtatgtaaactttactcagaacagagagccatccgagttaaaagagt

SEQ ID NO: 16100 - DNA, 527 bp, Homo sapiens
  misc_feature 354: n = A,T,C or G
ccctctagatgcatgctcgagcggccgccagtgtgatggatatctgcagaattcgccctttcgagcggccgcccgggcaggtaccattttttctgcttattgcaccctcatttctaatttgtttataatttcatgagatgttatcttcttcacatatacattttatttgtttttacttttaactttactcaggatgtataatcatgataatttcagttttttatagttccaataatgtcaattactcagcttaatgacttgttccatgctggactaacccatggctaaagcaatatttttcgatagtctcttcctaaatgtgaatggaggctcatgccaggaatgtcttaaatngtttcttaatggtttaaatggaagctcatttaagaatgctaagaagtatcttgccctaggacagactgagtccataacagtaaaacaaatctgctatagaggtgttgtatttccccaatgatgggcaaaaggatctacagacagtcaaataatttatgataagaagtgtacct

SEQ ID NO: 16101 - DNA, 552 bp, Homo sapiens
ccctctagatgcattgctcgagcggccgccagtgtgatggatatctgcagaattcgcccttagcgtggtcgcggccgaggtacgagaaaagtgacttaacatccaaataaagaaaaatagttagccaatccattcattatgttgatatgatcaggtctccaagatgcatttaatcaatatattctgccttgattagccatattgaaatacttgaaaacataacctacaatatgaaaatcagacatacttataaatgccaatagcttttatttagagtcaacaagtgatgaaaaagctcttacttaaataaattgactttgagaacaagaatgcgaacagaaacataattcgttcattgtataattgtttttccctgctgtggacattagcctttggcatatggtctttgaccataatctatgggtagatatagccagggcactggaggaacacgaaggtgaattccagttgggtaacactggagaattccagttaaaacaaggttgactaaaatctaaaatacactgtaacatagacaaaagaattcttatt

SEQ ID NO: 16102 - DNA, 540 bp, Homo sapiens
gactcactatagggcgaattgggccctctagatgcatgctcgagcggccgccagtgtgatggatatctgcagaattcgcccttgagcggccgcccgggcaggtacacctctgattctcactagttgaatgcaagaacttgaaaggttcaggtaagtgttttgaaaaattttgacttccaaacttttgccacttgctatctgaaactcaggaatcaaaaaataccgacaggcactgttactttcaaaattctttctataagttgagaatgggacagatttgcagagcaagggaaacttgaacagttacttctagtggtaggaaatgaggtggctaggatattacccagctggtgggtgacttgggcagtgtgttcctgctttcagtggttagcctttagcaaatctgctttagagtgagagtagagggcaagctgttgtattacagtgctcttgtttttgtaaaatttaattcactctactgttattttgtctccttgggtaaagggttatttaatttttcttcattttttagtaatatat

SEQ ID NO: 16103 - DNA, 683 bp, Homo sapiens
gactcactatagggcgaattgggccctctagatgcatgctcgagcggccgccagtgtgatggatatctgcagaattcgccctttcgagcggccgcccgggcaggtaccagggaccactatttaagagacatgaaaagaaatccagaatccccaagtgtctgtattgcctgggggtgatcatggactgttattgacctcttggtgtttggaaggctgcttttagatactcctgaatctgtttaccacataactacatgtattacatatttcatttgattactttcttagttatggttttcttttcttctttttggagatggagttttgctcttgttgcccaggctggagtgcaattgcgcgatcactgcaaccttcacctcccaggttcaaacaattgtcctgcctcagcctcccgagtagctgggattacagatgcctgccgccacgcccagctaatttttgtatttttagaagagacggtgtttcaccatgttgaccaggctggtctcgaactcctgacctcatgatctgctcaccttggcctcccaaagtgctgggattacaggcatgagccactgcacctggccatatttttttttggagatagggtctcactctgctgccccaacttgaatgcagtaaagtgatcatagctcactgcagcctcaaactcttgggctcag

SEQ ID NO: 16104 - DNA, 417 bp, Homo sapiens
tgggccctctagatgcatgctcgagcggccgccagtgtgatggatatctgcagaattcgccctttcgagcggccgcccgggcaggtacttcctccattcagcaccaaagtctcaggggcctacctgtcactcctacgggcactcgacaatggcatgggtgaacctcaacaatcggggggcatacggaatttcagataccaccgtggaggaggtatacctcaatatttcttttttttcttcaagctgatataacttgctgttccctttgaagaaatatgtgccatttttctaaaaaaatttttaaaatagttcacaaaattagaaaagcttaacattttttcagcactattcttatgtaagactgagaataaaatgttgccccaactagacagcacgtatcttttacatacagaaata

SEQ ID NO: 16105 - DNA, 663 bp, Homo sapiens
  misc_feature 445: n = A,T,C or G
agggcgaattgggccctctagatgcatgctcgagcggccgccagtgtgatggatatctgcagaattcgcccttagcgtggtcgcggccgaggtactcaagtcagtttgcctctcgcagacattcaagtttatttaggtcacagccttatatgtagtgaaaagcccttatatctgtttttcatgcaaaaacctctctcaaaggccttgttttccagctaatcactctcactgtcatcttctgaccattagaactcttgcctctcctggggccagtagccatcttatatcctaacccccgacttctccatcttcctactttccagtggattctgtttaagatttcatcctttttaggtcagcagcccgctctctgggtctgtcatgatctttgctctctgcacaattttccaggtagaaaactctagggcagagtttctctgcaatntggtgtattagatctcagaaggctttacggtaacacaggaaatgttggtgaccagatttgcgcataagcattatttgcacataagcattatttggtttgggccagatttgcacataagcattattttgtttggcccacattgtattttcaaaaatctagaaatttttcataatacagattcttggctttccttgaaatgtctggagacttggtaacac

SEQ ID NO: 16106 - DNA, 602 bp, Homo sapiens
  misc_feature 503: n = A,T,C or G
ctcactatagggcgaattgggccctctagatgcatgctcgagcggccgccagtgtgatggatatctgcagaattcgcccttagcgtggtcgcggccgaggtccaagtgggagctgaaatagagccagtgttctattctctaagccttagcccctgggtctggggctgcatcagcccagaggaagagttctctttctctgattagaccatccagaggagttgccttaattaaggtattacaaatgtgccagacgcgctactagtggccatccgtgagatttattgaatgaccatactgtcttctacattagggttactttcaagtattggaacagccattgccaacatcagatatggactgttttataaggtaatatggcatcactatggtaggaagctgaagagaggaggatggctcttccagcacactcctggtggcctcctgtttcgtcagcagggtatattggccacaaggattctttcatttcagtaagaatggatttnttttccctgcattttccttaatacccttgaaacaaccggagagaaaatctcccataattttgaaaactaatttatttcctgacaaaaaattaattctct

SEQ ID NO: 16107 - DNA, 448 bp, Homo sapiens
tacactacttagggcgaattgggccctctagatgcatgctcgagcggccgccagtgtgatggatatctgcagaattcgccctttcgagcggccgcccgggcaggtacgcgggtttccactttgtgagaaggacaatctgcctttgcatgtttatttcttcctcgttttagggtcagagtaggcagatattggtatcatgtatcaattattgttaactggtcttctgcagctagaacagaaagaaatacattgacttatctctatttgctaggtcttgtgctgagtcatgttgcattataccatttagttcttttgttgagctcctttatttccattttgtagatgaggagactgaggcttagaggtagtatggtgcacctaaagtcaagcagcatcaggatttgtaccttggccgcgaccacgctaagggcgaattccagcacactgg

SEQ ID NO: 16108 - DNA, 557 bp, Homo sapiens
atacgactcactatagggcgaattgggccctctagatgcatgctcgagcggccgccagtgtgatggatatctgcagaattcgcccttagcgtggtcgcggccgaggtacatcaccctgctgagggacatccaggacaaggtcaccacactctacaaaggcagtcaactacatgacacattccgcttctgcctggtcaccaacttgacgatggactccgtgttggtcactgtcaaggcattgttctcctccaatttggaccccagcctggtggagcaagtctttctagataagaccctgaatgcctcattccattggctgggctccacctaccagttggtggacatccatgtgacagaaatggagtcatcagtttatcaaccaacaagcagctccagcacccagcacttctacctgaatttcaccatcaccaacctaccatattcccaggacaaagcccagccaggcaccaccaattaccagaggaacaaaaggaatattgaggatgcgctcaaccaactcttccgaaacagcagcatcaagagttatttttctgact

SEQ ID NO: 16109 - DNA, 388 bp, Homo sapiens
gactcactatagggcgaattgggccctctagatgcatgctcgagcggccgccagtgtgatggatatctgcagaattcgccctttcgagcggccgcccgggcaggtacttcttattagtgaataatgattctctagtcataataacttagacattacatataaattttaagttaaaactactataacaatattgggaaaaatgaaaaaagggagtagatagtgtaaaagggccatatccttctctaccacagcaggaagtgaacagataacgtctcaaatcaaaaaactgtagtataggctttccaccccagctctgccccgcccatatagatacctattacagaaggagggaaatagcttttaaaaaaggagagttaaatgaaattgc

SEQ ID NO: 16110 - DNA, 355 bp, Homo sapiens
gccctctagatgcatgctcgagcggccgccagtgtgatggatatctgcagaattcgccctttcgagcggccgcccgggcaggtacattccaactgccctgcgtgcagaaacatcctgattgtcttcaaactgcagatctgcaatgctgtcgaaaagtttggcaaggtgacatgttacctgtttaggctgagctccttttgagagaatgtcaagtaaatcagcagaagagacgaaatagaagcgaggaaaggctatgcgcttggtttccaggtattcagcgagagctttttcacaaagagaaagcctggactgtaaatctttaagcttttcataagagattaggtctgcacgttgc

SEQ ID NO: 16111 - DNA, 503 bp, Homo sapiens
gactcactatagggcgaattgggccctctagatgcatgctcgagcggccgccagtgtgatggatatctgcagaattcgccctttcgagcggccgcccgggcaggtaccaagcgaaactgaaccagggatacaccaagaggtaaagtcggaaacatccagagagatgggagagtttttcaaagatttggaggcccctatggatgaaacgcataaagagtcagacctagagccaccagaggaggctaaaccaaatgttacagaggatgtgttcctagagtcagctatggaaacagatccagatccagtgccaccaacggaaaccatgtctgaggtttcgggggccacagtcagagagagaaatttagaattactagaggaggagactgaaccgggggttccagaggaatcacttatagtgcaacatgaagagacaggtcttgagcctccagagcagaccaaacaagattttccaagtgagaaactaggagaatcacttgaagaga

SEQ ID NO: 16112 - DNA, 499 bp, Homo sapiens
actactatagggcgaattgggccctctagatgcatgctcgagcggccgccagtgtgatggatatctgcagaattcgcccttagcgtggtcgcggccgaggtacgcgggggagtgtggctgagattcgacgcccactctgccatcctctgctctcctctagaggaagtgcctcttggggagctgagttcctgaaactaagcaaatgacaagtgctcctccagccgtgagatgagccagaggatggaatgccacaggccccacttcgtctcccagcccttcatctttcttccatgtccaaaggcggctccccagaggccaagggctcagctcttgtgttctctgagactgtggcacagctcaccctggcttccttagtaggaagcttttaagaactgctctgtagaaagaacaaaccctaatctagctccagcaaagagccaggatcatgctgaacttcctgtgagccttcgtgggggatcgaggctggagaaagtgctgc

SEQ ID NO: 16113 - DNA, 575 bp, Homo sapiens
aattgggccctctagatgcatgctcgagcggccgccagtgtgatggatatctgcagaattcgccctttcgagcggccgcccgggcaggtacatgtgcacattgtgcaggttagttacatatgtatacatgtgccatgctggtgcgctgcactttaatctgccaccaggcagatgtctggttctgaaacaggtgtgcccacaagttccctcggtggcctcctgacccataaaacatcctatacttctactgcccattacattcccctgttgagaaaaagcacagaaggggagccatcattttctgtttgcacatttcagtgactttgcggacacatatgggaaaagggcatgaaactgtaagtgatagaacttacactcatgggtcttgaaaatactgcactgcatgaagcctcactttgagagagagttctttaactctgaggttgttttcaagtaacaaactttaattagaaagtttaagttattgcaaacctaaagaatcttaacttattccactttggtaatttagattattttatacccccgtaccttggccgcgaccacgctaaggggcg

SEQ ID NO: 16114 - DNA, 601 bp, Homo sapiens
tatatggcgaattgggccctctagatgcatgctcgagcggccgccagtgtgatggatatctgcagaattcgcccttagcgtggtcgcggccgaggtacccagggatgttgcccctgtaaggggatgttcaggagaatattggagaagtcctgtctgcttctttgaagctcctttttccatattttaattcttgttactgctggaagttgcactaataccgatgtgatgagagtttcagtccttggagccttttatgaggactgtctttttattgctggttttagaagctgctagaataccataggatattacttcaactaggattatctaaaccaaagccacctgattaaatttgctccaagaagcactcttgttatatatccccatctcagaccgtgttctactagtctagcaggacttactagaaaagattacacagtgtattatgttgggtaaataatgacattattccaatgtccaaatatagttcagtgtccaatatagtttaaatgtagttcagtgctgacagtagaaaaatcccccttttcaaattttttactctcctcaatgttcctccctatgtttcctctcctattttaaa

SEQ ID NO: 16115 - DNA, 484 bp, Homo sapiens
ttgggccctctagatgcatgctcgagcggccgccagtgtgatggatatctgcagaattcgcccttagcgtggtcgcggccgaggtacgcggggaagcaagcctgggcaatggcgggcgccctctgctaaccttgctgccgccttgcagtttgatctcagactgctgtgctagcaatcagcgagattccgtgggcgtaggaccctccgagccaggtgtgggatatagtctcgtggtgcaccgttttttaagctggtctgaaaagcgcaatattcgggtgggagtgacccgattttccaggaaggcactggaggagtttgcagaaatgaaagaaagagaagagaagaaggctaacctcgaaagggaagagaagaaaagagattaccaagcccgaaagatgcattacctcctcagcacaaagcagattccaggaatatacaattcacccttcagaaaagagcctgatccatgggagctgcaattaca

SEQ ID NO: 16116 - DNA, 559 bp, Homo sapiens
atatggcgaatggggccctctagatgcatgctcgagcggccgccagtgtgatggatatctgcagaattcgcccttggccgcccgggcaggtacataggttgtgtatccccagcatatattcctatattgataggaaaaaactgaggctcagagtctatatattacttacctatggtcacacatttcaatttattatcagtagtgcctattctttggaccccattatatttgtaatatggaaatataacaaattattcaataattaaaataattatgaggtttcttagttgtcaaggtgaagttaagttacaattctgtttttatttcaaaagagaaaggcttagtatgttttacaacaattttccattcagtgtggtatatattacactgctaagaatactttggggccaggcactgtggctcctgcccataatcccagcactttgggaggccaaggcaggcggatcacttgaggtcaggagttcgagaccagcctggccaacatgtcgaaaccccgtctctactaaaaatacaaaaattagccaggtgtggtggcaca

SEQ ID NO: 16117 - DNA, 494 bp, Homo sapiens
ctatatggcgaatggggccctctagatgcatgctcgagcggccgccagtgtgatggatatctgcagaattcgcccttagcgtggtcgcggccgaggtacgcgggcatcaacctatattttttgacaaaccctcttaataagttacatttcttttttaaaagagcatgataaagatattttcagtcagtaaaaacaaatttttctaactgcagacccaatttagagatataattcaggcagaaacagttatcagatgaaagaattgagctgtaaaaagaaaataattgaaaaaaaacccagaaaatatgtcagtaaaaccaaataattattgaatatacaaagcaataataaaaatttacgaggcttaaaattgagaaaaatctaaaatataaaaataatgtataagtcagaaataggttgatcagggttaacgtgttacaaaattcttgtattgttcaagaggagggtaaagataagaattgactttaaacttt

SEQ ID NO: 16118 - DNA, 491 bp, Homo sapiens
ctatatggcgaatggagccctctagatgcatgctcgagcggccgccagtgtgatggatatctgcagaattcgcccttagcggccgcccgggcaggtacattgctgaaggagatctataaatttttgtgggaaagctaagaagtctaccagaagaccttgctggaattttaaactttgaaaatcttcctcagatataacaaggttatataaaaaaaatggatccgtgtcatcagtcagacgaataactaagtcctttctgtgaactggattagaaactgattgtagttcaatgctcattcttatacttactctcctgtagtcccagctatttgggaggctgaggttggagaaatgcggaacctggtaggcagaggctgcagtgagccaatactgcaccactgcacaccagcctgggcaacagagaccctctgctcacagtctttgcatttcacctgcaacgggactagttggtggaacagcacttggctcat

SEQ ID NO: 16119 - DNA, 459 bp, Homo sapiens
actatagggcgaattgggccctctagatgcatgctcgagcggccgccagtgtgatggatatctgcagaattcgcccttagcgtggtcgcggccgaggtacagagtctatacagtctctatgaaaaacaaaagcaaaactcaatctattattaaatgttaccaagtattaggaaaactgaggacactcatcctcctggttcctggacagagactacgttacatagtggaatacaccaaattcttctttaaaaagcgctagagtcctgctgaagccctttttaattcaagttgtgactcaagagaaaaaaggaaaagccacttctacattagaatagaaaaggacacaaaagtaattttatccattatggagaaaaactgggatgcaacaattccaaatgaagagatacagttacttatcatctataagatgaaaatcatgttttaagaaaaattcccttt

SEQ ID NO: 16120 - DNA, 443 bp, Homo sapiens
gcgaatggggccctctagatgcatgctcgagcggccgccagtgtgatggatatctgcagaattcgcccttagcgtggtcgcggccgaggtacgcgggtcataaggttaacccaggttcaagggagtggagaagaggatgtcttaggatgagaagagcagtgataacccgttgcagagaatatggcatgattctttggggagtcattatctgccacaatcaaaataactttaggataaaaatgtttcctaaaaagtctgaattagaagcatcattgggtgggaagatagccgagaacactctgggcaacatagtgagacccctgtctctacaaaacgtaaaataaaaattagcctgtagccaggcctggtggcacatgcctgtagtcccagctactcgggaggctgaggctgcagtgagccaaaatcacaccactgcactctca

SEQ ID NO: 16121 - DNA, 375 bp, Homo sapiens
actatagggcgaatggggccctctagatgcatgctcgagcggccgccagtgtgatggatatctgcagaattcgcccttagcgtggtcgcggccgaggtacagtcagaaggctacgtgatgccacctagagataaatgtgtagagaaggatgagttctgggaaaggatctctagacctgccaatatttatagatcagaaaatgatgaggactttgggaagatccagccaatgacttgataggacaataggaagatttcagagtcctagaagccaagtaaaaaaaaaaaaagtttttcaagaacgatagggggaaaaaaaaaaattgttttgaaagatccaccaattttttgaaattctttttggggatttaaaacc

SEQ ID NO: 16122 - DNA, 402 bp, Homo sapiens
gactactatagggcgaattgggccctctagatgcatgctcgagcggccgccagtgtgatggatatctgcagaattcgccctttagcggccgcccgggcaggtacgcgggggagccggatatatagagtgtcacgtttgggagccgaaagactggagccgtttccttgtggctggagcgcttcccgtagcctcggggaaggagcaggatttagaggaccactagttggaccccatcctcgtgctggaggaacaggaacctctttcaggagctataaaagaaagggaggaatcatgtccacaattgcagctttctatggcggcaagtccattctcatcacgggggccacaggctttctgggcaaagtgctaatggaggagctgtttcgcaccagcccagacctg

SEQ ID NO: 16123 - DNA, 535 bp, Homo sapiens
ctatagggcgaatggggccctctagatgcatgctcgagcggccgccagtgtgatggatatctgcagaattcgcccttagcgtggtcgcggccgaggtacctcccggggttctacagttcctcctgcccactggccagggggaatctggcgggagcctctcggtggatgctgtcacatgactgtgccttctgaaagaacatctgtgaagagcagtttctggtgtccctgagtaacccttttctaacaattcagccagtgtatttcctccaagagtagaaaacactggcttggaaaatctagtgaattttcagcttcttgtgaatgtgtatgaacaaaccaacctactcggtctgtgaaattctcgctaattcagatgggacatgggcaaggcttctaatactttcatcccatgaacataaattttgatatttcagctgcagattttttcaaatatacaatgacctgaggccaagaaagttaccttgtcaatttattttcttataatttgcatgtcttataaaagtagactacagca

SEQ ID NO: 16124 - DNA, 475 bp, Homo sapiens
gactcactatagggcgaattgggccctctagatgcatgctcgagcggccgccagtgtgatggatatctgcagaattcgcccttagcgtggtcgcggccgaggtacttttttttttttttttgttttttggagacggagtctcgctctgtcgcccaggctggagtgcagtggcgccatctcggctcactgcaagctccacctcccaggttcacgccattctcctgcctcagcctcccgagtagctgggactacacgcacccgccaccacacccggttaatttttttgtatttttaataaagacagggtttcaccatgttaaccacgatggtctctatatcctaaccccataatctacccacctcaacctcccaaagtggtgggattacaagcgtaaaccactgcgcccagccaacactctttttattattagcaaatatactttttcctggacacattctttcaaatactcaacaa

SEQ ID NO: 16125 - DNA, 406 bp, Homo sapiens
gactcactatagggcgaattgggtcttctagatgcatgctcgagctgccgccagtgtgatggatatctgcagaattcgcccttagcgtggtcgcggccgaggtagtagaaaggaaaaaggaggcgggcccccttcattcagtaaccagtgctagggggtagtccccaagaggtgggatagctctgcgctggattgtaactaatgatcgcttcaggcctagagtattttctctagtttctggaaagtacctgcccgggcggccgctaagggcgaattccagcacactggcggccgttactagtggatccgagctcggtaccaagcttggcgtaatcatggtcatagctgtttcctgtgtgaaattgttatccgctcacaattccacacaacatacgagccggaagca

SEQ ID NO: 16126 - DNA, 512 bp, Homo sapiens
actatagggcgaattgggccctctagatgcatgctcgagcggccgccagtgtgatggatatctgcagaattcgcccttagcgtggtcgcggccgaggtacgcgggggtgcaggttcagacaggccctgagcacagcctgtcaccatcctccatcttccctgctgtcttctgtgtcccctgagcttccgtgagggtttgtctttcctctgtggctctttaaaccacttcctgtccctaggagaatctcccccgtgggtggggaagccctaaatcagggcaggactttgggctctgatcagcagactacacttcttagcaccaccagcctccagcaagaacctgaggcaggagaatcgcttgaacctgggaggcggaggttgcagtgagctgagatcgtgccactgcactctaacctgggcaacagagcaacacttcatctcaaaaaaatgaaaataaatttaaaaaattgcttgattttattttttacaatttttggtatgataaaaatatac

SEQ ID NO: 16127 - DNA, 421 bp, Homo sapiens
  misc_feature 17, 22: n = A,T,C or G
ctctagatgcatgctcntaccngccccagtgtgatggatatctgcaaaattcccccttatcgtggtcgcggccgaggtactactcttttccactgatccatatggaatctgtcacattgagacttctggtcttgatggatagatcaatttaaaacataggcaggtggttcggggatatgcagaacaggactctgaagatgatcctgagaagtattccagtaggatagaatgtgaaagcccatacaatgacctcagcagattccaaggcttcctagaacattccaacaaagaacgcgtgggtctcagtaaagaaaatttgttgcttataggatgcaccattagaaacacagaggctgttgtgggcattgggagttatgcaggccatgaaaccaaagcaatgctgaacaacagtgggccacgg

SEQ ID NO: 16128 - DNA, 207 bp, Homo sapiens
atacgactcactatagggcgaattgggccctctagatgcatgctcgagcggccgccagtgtgatggatatctgcagaattcgcccttagcgtggtcgcggccgaggtaccatctactacagtctttgtttctgttgtaggttccttctcaaggacttatcctagtttaaaaatacgacttttgcccaaatttcttttgggtcctact

SEQ ID NO: 16129 - DNA, 262 bp, Homo sapiens
tatacgactcactatagggcgaattgggccctctagatgcatgctcgagcggccgccagtgtgatggatatctgcagaattcgcccttagcgtggtcgcggccgaggtacgcggggtattataataagatcgtagagctatttcttgagtcaattttgctatggaatttttttaccatctttaaacatttgagaaattcagcttatcagccatataatcatatgcttgtttaataatttaaactttttaaggtttttacaca

SEQ ID NO: 16130 - DNA, 498 bp, Homo sapiens
agggcgaattgggccctctagatgcatgctcgagcggccgccagtgtgatggatatctgcagaattcgccctttcgagcggccgcccgggcaggaagtgtgatgatagcagcacctggaagcggctttggatgccatgctgagttcttcagacggcaggcgaaaggtagaggggagccagagaagatttttaacaaaaaagtgacatgctcatttatgttttatttctaaagacgagaagacctggtccctcttgttaggtttgcagagtataaatgacaagctacaggcttttagaaggatgctagggcagtggtgcagagatcagagtggaattcgagggactacaacaaggaggtaagttaggaggctgccagccatgaagccttaaactaggagggtgtggatggaaacagaacatggttaggtgggagatactgagttagctgaatcaatgcaactcagtgacccatagggtggggatgcagagggattatga

SEQ ID NO: 16131 - DNA, 390 bp, Homo sapiens
ggcgactggggccctctagatgcatgctcgagcggccgccagtgtgatggatatctgcagaattcgccctttcgagcggccgcccgggcaggtacgcgggtgtgtatatatccaaatataaacagttaagaagaagtggaagagggattttactcccaagtattccgacttcagggcttgggctcttctatactaaactttctgaaagaaatgctaagtaaaattacaaacttcgagaacataatttagagaatattaatgatatatataattgagtaataatggtaatataactaataagaatcaggaagtaaagaaagaagtggcggaagaattggaagaggatcacttccctaaccttcataacagtgatcaatggatattatctta

SEQ ID NO: 16132 - DNA, 352 bp, Homo sapiens
ggccctctagatgcatgctcgagcggccgccagtgtgatggatatctgcagaattcgcccttagcgtggtcgcggccgaggtactcattttatacaggcaaaaatatttttgcaaaaatgaaaaaatattttgaggattgttatattccagatatatttttatatttttagctaccattttgatactgaaatctggataaaaaattaggcttcatgttttccatttaagtctccatacctgtcctcaaaaatcacattaatccaggtgtaattgaatatgaatttatagaagcacatgggaaatgaaattttatgtctaattagatatttttcacagttggatgagaagcca

SEQ ID NO: 16133 - DNA, 466 bp, Homo sapiens
gggccctctagatgcatgctcgagcggccgccagtgtgatggatatctgcagaattcgccctttcgagcggccgcccgggcaggtactgaaatgtaagcaaggtgggaaatttagatgtaggatttatttttttaagtgttcttgcaacttttcctttagtttttaacttttgctgggaaaaatacatctgagaaaatactgagagaattcctgttatgagttttccttatgttttattcctctatctgtggataactgagaattaaaacttggagttaaatatgaaatagctggatatacaatgacttatcttttttcacgcaaatatgtaattagaaattctggttgtatatgccgaattagaaattcttttacttaaaattttcggtttagtaaagtcttgtcaatttttttctgtcttaaaaaatcatacttagattaatgtatactttccttcaaaatatc

SEQ ID NO: 16134 - DNA, 488 bp, Homo sapiens
ggcgaatggggccctctagatgcatgctcgagcggccgccagtgtgatggatatctgcagaattcgcccttagcgtggtcgcggccgaggtacacattaaagaaaaatagtgagaacactaaagaaaattcaagtgtagcacaactaaaacttctggaactggggaaacagctataaaaataatagcaagcaagatttgggaaccaaaacaaaaaagaaaccaatagttgaaggaaaggctagtcacctttattagtggcttggaataacaagtagaagaaataactcaaaacagaccacactataaggaaattgacattgagattaaaaaaaaaaagacttaaaaggattagagatgcgtaactcccaaaaaaaaaaaaaaaaaaaaagttttcttcccggggggggcttttaaagggggaaattccccccccggggggggggttaattggggaccccacccgggccccaaatggggggaaaaaggg

SEQ ID NO: 16135 - DNA, 481 bp, Homo sapiens
  misc_feature 385: n = A,T,C or G
ccctctagatgcatgctcgagcggccgccagtgtgatggatatctgcagaattcgcccttagcgtggtcgcggccgaggtactcatactcacttttgagatgaagggaacaatacaatccttgctggcaaaccctcccctcactgggacagagcaccctgtcattcctgacctggctccttcatgcgcccctattcccatgtgtcaccataactgcagttctctgttactctattacagtagatatgctgccaacataaatgggattttgagtctggtggagaatgcaggagtcattttgaaagacacacaaaatagaacagaaatagctcacttggaaggctgatcttctgggatagttacctttcagacagacaacaatctangagagtatggacagaggccgatgcaatatacacaccagctggtgagaaaccagcacagaaattgtgtggacaagtttgtgacagtacctgcccggg

SEQ ID NO: 16136 - DNA, 528 bp, Homo sapiens
tgcatgcggccgccagtgtgatggatatctgcagaatacgcccttatcgtggtcgcggccgaggtactgtttcatgttatgctgacagacctatccttcattattctagtcactaatatagtccttttgttgtaatctagtcatacattctaagcttgatttagacacttgccaaaagaagttccaatccagtggtttcgagattccaaaggcacctttctctcatgacccaaaggagtaattttggcatcttaaatggattaatttgtcttcctgatgggagcacatcagaagaatggtgatgtggatgttagatagagctgagggggccatactcgaactcccagaggtatctgcaggggctggggcagggaaagtcttaacccagctctaaacactttccagaggtattttgtggggggtagggggagatactgctctaattaggaaataagattttgtcttagatgactttttttttattcctctggaaccaattttcaaacatagctggaactaccaactggc

SEQ ID NO: 16137 - DNA, 388 bp, Homo sapiens
tacgactcactatagggcgaattgggccctctagatgcatgctcgagcggccgccagtgtgatggatatctgcagaattcgcccttagcgtggtcgcggccgaggtacgcggggggactgggggttcgtctgctgggtttgtggagcagctagctactcggcgggatctcccggcaggatgggtaaaaagataaagaaggaagtagagcctcctcctaaggatgtgtttgacccattaatgattgaaagcaaaaaagcagcaactgtggtgttaatgcttaattctccagaagaggaaattttggctaaagcatgtgaagccatttataaatttgctttaaaaggtgaggaaaataaaacaaccctccttgaacttggagctgtggaa

SEQ ID NO: 16138 - DNA, 468 bp, Homo sapiens
ctactatagggcgaattgggccctctagatgcatgctcgagcggccgccagtgtgatggatatctgcagaattcgcccttcgagcggccgcccgggcaggtacgcgggtaacactaaaggcatcataggtttaactgaaatacgttatatgaagttttacaaaaaggtcaacagaaagctcatttgtgaaaacatactctcatgggagcttctttaacattagttcagaggttaatatatttcctggaggtgttttcctggaattgattgcactattgcatggtaataacatttaattgttaaggaaacattatatataggttcaaattatcccttaatgttgatttctccccttttccatggattttgatactaagaaacaaaatgctttgagattttggtaactattttgattttgataaaacatgttaaaatagaaggacatgatatttttctatagtttccatc

SEQ ID NO: 16139 - DNA, 516 bp, Homo sapiens
tacgactcactatagggcgaattgggccctctagatgcatgctcgagcggccgccagtgtgatggatatctgcagaattcgcccttcgagcggccgcccgggcaggtacactatcctgtggtttctaaattctgcttctttattaagaaacgattaactgtaaggtagaggaactaccatgttatacttctctgcaaatctcagaaacaagcacccaaatgtagatcaccctgctgaagctcaaatcacaggactccttgggtatagatgccttagaatgctacagggccgctaccgtcttcttcgactacgtaattcaaaagacagctgtggcttggtctcattcctacagaggggctgaagcatgaaactcaaaccctagtgctgcttctggagatactgcaggatgtgatgaaggaggtcacttaaacatcaatgtcactcaaatattttagaaatattgcccagaagacaggcctatcactaatcaggatttctgtgtctcaatcaataaat

SEQ ID NO: 16140 - DNA, 411 bp, Homo sapiens
ctatagggcgaattgggccctctagatgcatgctcgagcggccgccagtgtgatggatatctgcagaattcgcccttagcgtggtcgcggccgaggtacaggaaaacaccagcgagatgcacaggagagaaatgacttcattacatacatacagtggatgtcacatgaggctatgggttacagacaaggcacaacaatgcattacatacagtggatgcctacagcatcagggctaattctctcctcaagagttcttaggaattccagaggaaaggcaggaaaatacacagaggattaaagagtaacataggagattctctaataaccatccagacaaggtattagagacacaggggcaacatggcaagaccctgtctttacaaaaaaaaattataagccggctgtggtggc

SEQ ID NO: 16141 - DNA, 458 bp, Homo sapiens
atacgactcactatagggcgaattgggccctctagatgcatgctcgagcggccgccagtgtgatggatatctgcagaattcgccctttgagcggccgcccgggcaggtactggatagcatagacatagaggaccactcaagagttatcaggaagtcagagtccctacgctttgaagactccaggtataacatacatgtgttacctagaagccttctctcctcccacaggagtccattatcaaggtcaccttcacggatgaggcccttaatgctaggcagtaacaggcttggggtaggaaaatgggacagaaaaacacagaagtagtgaggtgtggctaggcaggaagagtgctagcggatggggcccctgacactaaggaagcggtgggaaaggcgtgaggctttgaagaccctctccaaggggcccaaggcttcagaaaaaaaaaaaaaaaaaggca

SEQ ID NO: 16142 - DNA, 353 bp, Homo sapiens
gccctctagatgcatgctcgagcggccgccagtgtgatggatatctgcagaattcgcccttagcgtgtcgcggccgaggtactccaaggcctaatgtagtaaaagcctgtggacttggtctaagagagacaggggacccctgagaagaaaacttctgttcctgttcctgggcacagaagcaagctagggccaatgctgaaaaaggtagctgctgagtagcgcagggagacaactgaacacactagatacctgggaatgtgcgaaacttgggaggggcacatggtcaggccagaagaggattagtaagaaaactcaaagggccgacaaataaattaatgttctgcttgtttaga

SEQ ID NO: 16143 - DNA, 555 bp, Homo sapiens
  misc_feature 158: n = A,T,C or G
ggccctctagatgcatgctcgagcggccgccagtgtgatggatatctgcaaaattcgccctttcgagcggccgcccgggcaggtacctgtgtttgggaaagattttaaaatgagtgacagttatttggaacaaagagctaataatcaatccactgcanattaaagaaacatgcagatgaaagttttgacacattaaaatacttctacagtgacaaagaaaaatcaagaacaaagctttttgatatgtgcaacaaatttagaggaagtaaaaagataaatgtgatgattggtcaagaaattatccagttatttacaaggccactgatattttaaacgtccaaaagtttgtttaaatgggctgttaccgctgagaatgatgaggatgagaatgatggttgaaggttacattttaggaaatgaagaaacttaaaaaattaatataaagacagtgatgaatacaaagaagatttttataacaatgtgtaaaatttttggccagggaaaggaatattgaagttagatacaattacttacctttgaaggaaataattgttg

SEQ ID NO: 16144 - DNA, 547 bp, Homo sapiens
ctatagggcgaattgggccctctagatgcatgctcgagcggccgccagtgtgatggatatctgcagaattcgcccttagcgtggtcgcggccgaggtactctagaaatgtgaagacattctatcaaccatgcttgagagtgttcgatgctccacactttggccaatctgaagcattttctgtattcttcacaattcccctgggtaaccaataagatgattttaaactaaaagatagcttgttgttaggtcatcacaaccatcccacaagtgtttgccttggtgttttcaaaggatctctgaagatgctttatgaatcatttcttgttgttagatgcctaagtgcagttgtcaaggctgtagaactgccaaggaggaagggaaggcagtgccagctgaaacagcagagagattcaggagagtgatgcagaaatactcgtggagactctcatttctgacctggatctcaaataataaatgatgatttattcctttatcattcagacagtcttgtgtacctactgcaaccagacccctgctggatcctga

SEQ ID NO: 16145 - DNA, 150 bp, Homo sapiens
  misc_feature 10: n = A,T,C or G
ggccgccagngtgatggatatctgcagaattcgcccttagcgtggtcgcggccgaggtacccatgagaaaccctcacaggaattcccacggttatgaggaaggatgtgaggacagaatagggattttcctggtgtgggcacagaactatg

SEQ ID NO: 16146 - DNA, 572 bp, Homo sapiens
tatagggcgaattgggccctctagatgcatgctcgagcggccgccagtgtgatggatatctgcagaattcgcccttagcgtggtcgcggccgaggtacctgaggagaatttcttcaatgttcctgctttcttaactgtctcaggacaacttcatctagaagtgatgtcaggagcttttactcaagtgtttacctttggtccgaccttccgagctgaaaattctcagagccggaggcacctggcagagttttatatgatagaagcagagatttcttttgttgacagccttcaagatcttatgcaggttatagaggaactgttcaaggctacaacaatgatggttctctcaaaatgtcctgaagatgttgaactctgtcacaaattcatagcacctggccaaaaggacagattagaacatatgctaaaaaacaactttttaatcatttcttatactgaagcagtggagatcttaaagcaagcatcccagaacttcacctttaccccagagtggggtgctgacctacggactgaacatgaaaagtacctgcccgggcggccgctaaaggcgaatt

SEQ ID NO: 16147 - DNA, 372 bp, Homo sapiens
ctcactatagggcgaattgggccctctagatgcatgctcgagcggccgccagtgtgatggatatctgcagaattcgccctttagcggccgcccgggcaggtactctgttgccagttattaaaaataattttggtgatgtcagttccttttacaacaaaccatacaaattctgcattgcctgtaggataaggttcaaacttcttggaaagccatacaaatctcaacaatataattttggcacatatatctcctacaatgtgtgtgtatatacgagttatgaagagttatgggccaggcacggtggctcatacctgtaatcccagaactttgggaggctgaggtgggtggatgacctgaggtcaacagtttgag

SEQ ID NO: 16148 - DNA, 268 bp, Homo sapiens
cactactatagggcgaattgggccctctagatgcatgctcgagcggccgccagtgtgatggatatctgcagaattcgccctttcgagcggccgcccgggtaggtacgcggggtctcctttgtaggtaacctgtcattggtctttggatttttttatagtctccctttgtatctggtgtaatttagtttcaattctggtggtgcctaacttgaaaacttctttgctttgaaaaagttcgttggattttcttgagttttgaattttttgg

SEQ ID NO: 16149 - DNA, 493 bp, Homo sapiens
agggcgaattgggccctctagatgcatgctcgagcggccgccagtgtgatggatatctgcagaattcgcccttagcgtggtcgcggccgaggtacgtagctttgtgctttgcccatagtagttattcaataaatatattgatggactattaaaggtgaattttcaaatgtatcagagaaagagcagagagaacaagggaagaatttaaccatcagagactgtcaggtatttgactaaactggtattagtcaatctccagattatactgatctactgtcttaaaattaataaaatctttattctattgtgaaattactgctcacagcacatagctaagagtttgatgggaccttagtaagtgcttcctccaaatattttacctatagccacaatcacccagcaaagctctccaaaactttgaagagagtagttgctttaatagtaattaaactactcaacaaaggtagcacagagctgcaattctgtgcatgaa

SEQ ID NO: 16150 - DNA, 585 bp, Homo sapiens
atatggcgaatggggccctctagatgcatgctcgagcggccgccagtgtgatggatatctgcagaattcgcccttcgagcggccgcccgggcaggtacttttccagtggacatttttcactggtttaaaggaaatgtgacattctctgctcagatactcacatgcatatataaaaagaagttgtgtaacttacattattttatgacttcaacaaccttgagcaagtgtgaaaagagattctgtgggtagccccaaaatggctctgtccaccttcccaatttctggttaagtaatccctaccacgaacttctaacatgtaactgttgctcagtaagatctggaggagctggggcattgaatggaagcagtaagttctctgtgagtaaattcttttttaggcatcacatgtgattttcagtgggatgaacatgcaaaatacacatgtcttccccatgcatcctgagaagccatcctactatggttcttccaaacacagtcaaatttctcatgcttactcaatgatgtatttgcacattcagcccttaccattttggaggtcatttctcatctatttaaaccattttt

SEQ ID NO: 16151 - DNA, 665 bp, Homo sapiens
aatacgactcactatagggcgaattgggccctctagatgcatgctcgagcggccgccagtgtgatggatatctgcagaattcgccctttcgagcggccgcccgggcaggtacatccatgttgtcagcgaggagaatctgaaattgtctgaggataggagaacacaaagaaaatctttaaaagaacatgaggtcaaaaatcagagctcgaaaatctactgcttcatagctgtgtgaccacaggcaaattcttttgcctcagttttttcatcctaataatgaagaatatcttatttgctttggagggctataagacatgatgagatataataaacataaggcactgagatacatcatagacacttaattgttgttagctattatattacttatcttagggttttccttcatggtattttgttggaaatgataaaaaaataaaacaaatatgtaagggcttgtaaaacccaagattcagtatacctactgcttctagctttaattctaggctctgccatagttaggatgtttactcatctgtagttcaaaactcacacagctcaagactgacacaactcacaattcagaagccatgtaagcacctcacagcctcgttccttgcccagtctccaaactcactccttccttgactgtgtttctaatactc

SEQ ID NO: 16152 - DNA, 469 bp, Homo sapiens
tacgactactatagggcgaattgggccctctagatgcatgctcgagcggccgccagtgtgatggatatctgcagaattcgccctttcgagcggccgcccgggcaggtgtcacactgatttacgatcactctcctaacccgacattagatatattcaatagatctggcagtaagtgtagtgcatactaacgggtcttgattttcaataattttatgcataagaagattttattgtgttttattgcgttggctgaatatatcaggataccaactgaaagcagatcttaaagttaataactccagctttttttggtttagtattcgataaacttctcttaggccactagggcttaatgaacaaaatacctctttggcaaagaattttgcaggcacaaaatgttactataaaattattttgttgaagaaactaaaatgaaagactaatttgatattgcagttatttaaaaaat

SEQ ID NO: 16153 - DNA, 423 bp, Homo sapiens
tatagggcgaattgggccctctagatgcatgctcgagcggccgccagtgtgatggatatctgcagaattcgcccttagcgtggtcgcggccgaggtcaggagggtggggttgggaggaggataagcatccatcccactcaaacagaaaactgctacttaatagaggaatggtggaatggtttctggggaggcaagaacaaagtctgttttagtagcaccatcataccaaccactttcttgcatctgcaggctctttgcaagagaagatagcaagcacatggtgcagatagtgggactgcaagagcttcaggtggacagtgtggagctcctcttagaggtaattaattcttccttctttattaccccaccacaacagtgtaagtactaaagtgaaaaaaaattattttattaacctatttgaaa

SEQ ID NO: 16154 - DNA, 575 bp, Homo sapiens
actatagggcgaattgggccctctagatgcatgctcgagcggccgccagtgtgatggatatctgcagaattcgccctttcgagcggccgcccgggcaggtacacaattgatagtcacatcatctacttcttaagatagatttcatgaaaatcaacttagcactggatctcattcacattgaaagctaaagaaacatgtttatacacatgctaaatttctgaggaggaccaatccatatgaaaataagttcagttctaggtggagcagactatatttaccacggcagtcttggacaataactcaatgtgagatgaacttgctgtaacagaaacacaaacttattttcaagtaaaaatgctttttctgaagataatacatttaaaaagtgtgaggcaaagaagacaaaagtctgatgaatctagtaggactcacacacaggtaatgcttgttcttttccatagacggcttttttctccaaccataactgttttgcataacttggcattaagtagaatgtaaaaaagaggcagtaattaataaataatgccaatgggtctcaagttgcaagataattt

SEQ ID NO: 16155 - DNA, 610 bp, Homo sapiens
tcactatagggcgaattgggccctctagatgcatgctcgagcggccgccagtgtgatggatatctgcagaattcgcccttcgagcggccgcccgggcaggtactcgaagtcgacaaggagaagaaagagatccagaagttgaactagaacaccaacaatgtttagcagtattcagcagagtgaaatttactcgtgtgttactgacagtgcttatagcctttactaagaaagagaccagtgctgttgcagaagctcaaaaattgatggttcaagcagcagatcttctttctgccattcataattcattgcatcatggcatccaggcccagaatgatactacaaaaggagatcatccaattatgatgggttttgaaccccttgtgaaccagaggctacttccacctaccttccctcgatatgcaaaaataattaaaagggaagaaatggtgaactattttgcaagattaatagatagaataaaaactgtctgtgaggttgtgaatttaacaaatttacattgtatcctggattttttctgtgaatttagtgaacagtccccatgtgttctttcaagatctctgttacaaaccactttcctggtggataacaa

SEQ ID NO: 16156 - DNA, 381 bp, Homo sapiens
agggcgaattgggccctctagatgcatgctcgagcggccgccagtgtgatggatatctgcagaattcgccctttagcggccgcccgggcaggtacgcgggggagccggatatatagagtgtcacgtttgggagccgaaagactggagccgtttccttgtggctggagcgcttcccgtagcctcggggaaggagcaggatttagaggaccactagttggaccccatcctcgtgctggaggaacaggaacctctttcaggagctataaaagaaagggaggaatcatgtccacaattgcagctttctatggcggcaagtccattctcatcacgggggccacaggctttctgggcaaagtgctaatggaggagctgtttcgcacc

SEQ ID NO: 16157 - DNA, 410 bp, Homo sapiens
ttgggccctctagatgcatgctcgagcggccgccagtgtgatggatatctgcagaattcgcccttagcgtggtcgcggccgaggtaccttttttttttttttattttttttttgagacggagtcttgctctgtcacccaggctggagtgcagtggtgcgatcttggctcactggaaaccttccgctcccgggttaacgccattctcttgcttcagattcccgagtggctgggactacaggcgcccgcctggctaattttttgtatttttagtaaaaacagggttttgccatgttagccaggatggtcttgatttattgacctcgtgatctgtttgccttggcctcccaaagtgctgggattacaggtgtgagccaccgcacccagcctgtttctccttttaatccatttt

SEQ ID NO: 16158 - DNA, 610 bp, Homo sapiens
ggggccctctatatgcatgctggagcggccgccagtgtgatggatatatgcagaattcgcccttagcggccgcccgggcaggtactatttgcagacactgttttgttggaaagaagagttggaaggactttaatatgttaatgcttttcttaaggattatgctgacaatttgtcatttgactgaagcctgtataaggaaagagactatatgagcaagttaagttgaaaaatgtttagttttagagtaggtggggagagtatttactttgagcagatagagaaattggggtttcttgcgctttggggaatactgggatgaagaaaatatgttatgggctgataatagggatattgccatacagatagtatttccagagacattttaaagcaaacacatttcttcgtgttttggctctttcaagagagatattcaagcatttttgtgtttctttttattgagttgccctctcttggtcaatgtgggatgactgtagttggaattgaaagtgcagagggatctccttccttaattcctgagtgctctatggaggagtaagagccatctggatatcagaagaggaagctcttaatgagctcctttttgttttgc

SEQ ID NO: 16159 - DNA, 528 bp, Homo sapiens
ctcactatagggcgaattgggccctctagatgcatgctcgagcggccgccagtgtgatggatatctgcagaattcgccctttcgagcggccgcccgggcaggtacgcgggggagacagtgttttcgcttggctgacattaatgacaacccaatgctatgtgctcactgagtgttttcatttcagaagagcatcaaaaccactgagtcctttcaagtcgtcttcttttcctgtgaaaccagaaaccatgccgacgactactttcagtaataacctgtgtcccaactgcaggctgaagtaaacttcttctcatataattttctaatttctgtgtaggggtagttgtagcaaacaacttagtttctttcagagcgtgacttcagaaagcgtattttcatgcagcagtgatgggtaatgaaatcagaatttccacaaagtctgccctaattgaacagcattatcaggaaaaataaaacatgagactcagagttttctcccaaagtcatttatgttattaggtaatgaagctg

SEQ ID NO: 16160 - DNA, 403 bp, Homo sapiens
ctactatagggcgaattgggccctctagatgcatgctcgagcggccgccagtgtgatggatatctgcagaattcgcccttagcgtggtcgcggccgaggtactccaaccaacaaatgtagacagaccataatcagtcacatacataattgtgggttctaaaatatcattttgtctaaaaaaaactccaacgaaacatgtaaaaataagattttggataaattaactttgacgacatttgactaacattatctcaaaaataattctacaggaatcattttatgaaaaaaatatacaatccatattggtttaattatgaaattttgactcaacgaaacttaagaaacgagccaacattttactcatggtctctagaggcatctccttattactcaccttgatctc

SEQ ID NO: 16161 - DNA, 330 bp, Homo sapiens
gcgaatagttccctctagatgcatgctcgagcggccgccagtgtgatggatatctgcagaattcgccctttcgagcggccgcccgggcaggtacctagcatagtatctgacccacgacagtcattgattgaatatctattaagagaataaatgaattatttttcactcatttcccggattgaaagcattgctttaataagattattatttcatatttaatatcttataataatataactaagcctccctaatcccaaaccctctatctacttacacaccacctactaaattataattcctaaattcttttttttctttctcttttttttt

SEQ ID NO: 16162 - DNA, 393 bp, Homo sapiens
ctatagggcgaattgggccctctagatgcatgctcgagcggccgccagtgtgatggatatctgcagaattcgccctttcgagcggccgcccgggcaggtacaacgtgggcaagcatctgtgcatatgaaatgctgtttttctaaaagatttctcacattggcaaactgagagatgttcttctggaacacaggaaagattatattaatgcttatagccataccatgcctgaatatgggaggatgacagacacagaacgagaccagatagaccaggatgcccagatattcatgaggacctgttcagaagcaattcagcaactacgaacagaagctcacaaggagatacattcccagcaagtgaaggagcacaggaccgctgttttggatttcatt

SEQ ID NO: 16163 - DNA, 189 bp, Homo sapiens
  misc_feature 175, 176: n = A,T,C or G
gcgaattgggccctctagatgcatgctcgagcggccgccagtgtgatggatatctgcagaattcgcccttagcgtggtcgcggccgaggtacttgtgttgtttgaatggtattttgaaagcaattgcatagttactattgattcctcaaaatgcataatggggatgcttctgacnncaacttgcgcttt

SEQ ID NO: 16164 - DNA, 469 bp, Homo sapiens
agggcgaattgggccctctagatgcatgctcgagcggccgccagtgtgatggatatctgcagaattcgccctttcgagcggccgcccgggcaggtacaggaaatggagaagatgactgatgaatataatagaatgaaagctattgtgcatcagacagataatgtaatagatcagttaaaaaaagaaaacgatcattatcaacttcaagtgcaggagcttacagatcttctgaaatcaaaaaatgaagaagatgatccaattatggtagctgtcaatgcaaaagtagaagaatggaagctaattttgtcttctaaagatgatgaaattattgagtatcagcaaatgttacataacctaagggagaaacttaagaatgctcagcttgatgctgataaaagtaatgttatggctctacagcagggtatacaggaacgagacagtcaaattaagatgctcaccgaacaagtag

SEQ ID NO: 16165 - DNA, 471 bp, Homo sapiens
agggcgaattgggccctctagatgcatgctcgagcggccgccagtgtgatggatatctgcagaattcgccctttcgagcggccgcccgggcaggtacttgagtaactcttagaatttcatagcatagcttggaattaagacctcagtgcagatcaactggatttttatttacattaatatcctgtggcatcagtaatatctagctgattcattttagtagctttctatttcttttaagtctccttagttgggctttagcagtttctccaaattttaaagtttctgcataataaagtaaaaattccaaaataattagggataagtgtcctaataataattagggtaagtatcctaataaaacattatcccttccaattacactatctttttgtgtaagggaataactgtgttgattttggataatcaaacagacataaactacattgggtaaaaatactttgaatagctggg

SEQ ID NO: 16166 - DNA, 409 bp, Homo sapiens
actatagtggcgaatggggccctctagatgcatgctcgagcggccgccagtgtgatggatatctgcagaattcgccctttcgagcggccgcccgggcaggtacgcggggacagtgggagagctcagcctcactgatagccggggatctctcctgttcgagggctgagatctccggtcccacaaccgcccacaaccaggggcacttctggaagtcccctttctagggacatttttcttctaagctctgtaacgcgggccgaggcagaccgaggcttctttcccggatccaatcccctgcccccatgcctaagaaagaaaaaatgaccaagacgcccctgcccgatgagaagcagctgcttctgtttcagcagaagttgctggcagagggggagatggccaaaaagaagga

SEQ ID NO: 16167 - DNA, 372 bp, Homo sapiens
ggcgacttgggccctctagatgcatgctcgagcggccgccagtgtgatggatatctgcagaattcgcccttagcgtggtcgcggccgaggtacaacgtgggcaagcatctgtgcatatgaaatgctgtttttctaaaagatttctcacattggcaaactgagagattttcttctggaacacaggaaagattatattaatgcttatagccataccatgtctgaatatgggaggatgacagacacagaacgagaccagatagaccaggatgcccagatattcatgaggacctgttcagaaacaattcagcaactacgaacagaagctcacaaggagatacattcccagcaagtgaaggagcacaggaccgctgt

SEQ ID NO: 16168 - DNA, 650 bp, Homo sapiens
atatggcgaatggggccctctagatgcatgctcgagcggccgccagtgtgatggatatctgcagaattcgccctttcgagcggccgcccgggcaggtacgggaagcagcagctctagccctggcaaacctaaccacttgcaaccctgctaatgcaaacgctgctgctgaagctgatggtattgatccattaataaacctcctgtctagtaaacgagatggagccattgccaacgctgctacagtattaacaaacatggccatgcaggagcccctgcgcctgaacatacagaatcacgacatcatgcatgccatcatcagcccactgcgttctgcaaacacagtcgtgcagagcaaagctgctctcgctgtcaccgcaactgcatgtgacgttgaagcccggactgagttaagaaattctggtggattggagcccctggtagagctgctacgctccaagaatgatgaagtgaggaagcacgccagttgggcagtgatggtctgtgctggtgacgagctgacggccaatgaattatgcaggctcggggctttagatatccttgaagaagttaacgtatcaggaactcggaaaaataaattcagtgaggcagcttataataagttgctcaataacaatctttccctgaaatac

SEQ ID NO: 16169 - DNA, 571 bp, Homo sapiens
ctcactatagggcgaattgggccctctagatgcatgctcgagcggccgccagtgtgatggatatctgcagaattcgccctttcgagcggccgcccgggcaggtgaattaaaaagttggtgcaaatcaagacaaagcagtttgattgttaacacatggcccagtttccgaaggcaaactcagctcatcagcctactgtgggattttcccctaggctgaaaagccaggtttgattctaataaacgtatacattgcagtgtaattaggcaagggaacagggttcttggagccacaaagccccatggtcagtatttgggtgacatctacttcctgactgtaaacagatttaaatataccatctgttttgcagatatttctcagaacctgtttttaatcagtttttctctctaattttcggatactgacaatcttgttttctttttctttatgtgttttaaaaaatgacataaaccagtattgcttttatttttttcatgtgcttggcttgattattttaagctaatttatataccttcattcgttcccgtacagccaaaagtgaaactttttttt

SEQ ID NO: 16170 - DNA, 543 bp, Homo sapiens
gggccctgtagatgcatgctcgagcggccgccagtgtgatggatatctgcagaattcgcccttagcgtggtcgcggccgaggtactgtttcatgttatgctgacagacctatccttcattattctagtcactaatatagtccttttgttgtaatctagtcatacattctaagcttgatttagacacttgccaaaagaagttccaatccagtggtttcgagattccaaaggcacctttctctcatgacccaaaggagtaattttggcatcttaaatggattaatttgtcttcctgatgggagcacatcagaagaatggtgatgtggatgttagatagagctgagggggccatactcgaactcccaaaggtatctgcaggggctggggcagggaaagtcttaacccaactctaaacactttccagaggtattttgtggggggtagggggagatactgctctaattaggaaataagattttgtcttagatgactttttttttattcctcttgaaccaatgttaaaacatggggtggaactacaact

SEQ ID NO: 16171 - DNA, 375 bp, Homo sapiens
tatagggcgaattgggccctctagatgcatgctcgagcggccgccagtgtgatggatatctgcagaattcgccctttagcggccgcccgggcaggtactttgttttgttttctgcctataatgtaaaaaatgctttctaaagacaaacttaaatctgctgaattgatgctgcaagagcagtgagccttgggtggaggaggatgcaggtataggaggtagaaagggcaacggccctgtgatcagtgaaaggatgccctgtgaattcaatccttgaaaatgacctttgattcccccccaaaagcactcaaggatgtcctgaggttgttactagttgctcataccacctgggggcacatagccggagcctcagagctc

SEQ ID NO: 16172 - DNA, 495 bp, Homo sapiens
tagatgcatgctcgagcggccgccagtgtgatggatatctgcagaattcgccctttcgagcggccgtccgggcaggtacaacgtgggcaagcatctgtgcatatgaaatgctgtttttctaaaagatttctcacattggcaaactgagagattttcttctggaacacaggaaagattatattaatgcttatagccataccatgtctgaatatgggaggatgacagacacagaacgagaccagatagaccaggatgcccagatattcatgaggacctgttcagaagcaattcagcaactacgaacagaagctcacaaggagatacattcccagcaagtgaaggagcacaggaccgctgttttggatttcattgaagattacttgaaaagagtatgtaaactttactcagaacagagagccatccgagttaaaagagtggtggataagaaaagattatctaagctggaaccagaaccaaatacaaagacaagagaat

SEQ ID NO: 16173 - DNA, 513 bp, Homo sapiens
actacttagggcgaattgggccctctagatgcatgctcgagcggccgccagtgtgatggatatctgcagaattcgccctttcgagcggccgcccgggcaggtacgcgggtggtcagatgggatgtataattcagcttgctgtgggagatgatggaaactttttcactctgaggcagtagggaagatcactgtggctgcaggaccttgtaggagagggaaagaaatagtgtgggtatgccaaagaaaaccagacctttcaagagattttttttccactgaattgcttttattattttatcataagatttgggttttttccttttttttccacccagctagaagtggatgcgtgcaagaggtgtgagagaagagtcaagcacaattctgtaaagtgggctgttgacttggttttatcctttttggggcagaggtttgaactcatcagccacagtcaggatttaacttgtttaggcatcagagttacagctcttatcaggaggtgcctcccccctt

SEQ ID NO: 16174 - DNA, 471 bp, Homo sapiens
cctctagatgcatgctcgagcggccgccagtgtgatggatatctgcagaattcgcccttagcgtggtcgcggccgaggtacaacgtgggcaagcatctgtgcatatgaaatgctgtttttctaaaagatttctcacattggcaaactgagagattttcttctggaacacaggaaagattatattaatgcttatagccataccatgtctgaatatgggaggatgacagacacagaacgagaccagatagaccaggatgcccagatattcatgaggacctgttcagaagcaattcagtaactacgaacagaagctcacaaggagatacattcccagcaagtgaaggagcacaggaccgctgttttggatttcattgaagattacttgaaaagagtatgtaaactttactcagaacagagagccatccgagttaaaagagtggtggataagaaaagattatctaagctggaacc

SEQ ID NO: 16175 - DNA, 531 bp, Homo sapiens
ccctctagatgcatgctcgagcggccgccagtgtgatggatatctgcagaattcgccctttcgagcggccgcccgggcaggtactcctacacacataaatccaggaaatgactagatgagcctgagtggctttatcattattgtgcaaatacagtttctataccaacaaacccaaattaaattattataggactaatggctgtaaggtgggtgagggaggaaaaaattcagaagctgttgcacgaatcacctatacaatgaatttcatccgcgtacctactattgagcactgaggataacagcagttaaaaaaaaaatccaaaaacatcttcctccatggagatgtcattgtaatgcatgagcaaagtagagaaaataagtaaaatatttggtatatcagatgataaaatgcacgatggagaaaatcagagcatggaggaattgaaaaggccaaggatggaaagaatttacaatgttaaaacgggctgtcggaaagttctgattgaaaactcaattgtgcagaaatgaaaa

SEQ ID NO: 16176 - DNA, 404 bp, Homo sapiens
actatagtggcgaatggggccctctagatgcatgctcgagcggccgccagtgtgatggatatctgcagaattcgccctttcgcgcggccgcccgggcaggtacagattatctggcaggctttaaaaaatttaagtgattcttaccaaaaagcaaatactatactaagtcatatgttatattaatttcaaagtatagatttaaaaataactataaacattatatctcaacatattaaatgcatatcctccttgtcccaacaattctacctctagcaatatctcccacagaaataagtcaaaggatgcaactcaatatgaacaaagttgttcactgcaccattatttaagagtgaaaggccagaaataatttaactctccatcaggagaaaggttaaataaataat

SEQ ID NO: 16177 - DNA, 366 bp, Homo sapiens
ggccctctagatgcatgctcgagcggccgccagtgtgatggatatctgcagaattcgcccttagcgtggtcgcggccgaggtacgcgggggtgcatatgaaatgctgtttttctaaaagatttctcacattggcaaactgagagattttcttctggaacacaggaaagattatattaatgcttatagccataccatgtctgaatatgggaggatgacagacacagaacgagaccagatagaccaggatgcccagatattcatgaggacctgttcagaagcaattcagcaactacgaacagaagctcacaaggagatacattcccagcaagtgaaggagcacaggaccgctgttttggatttcattg

SEQ ID NO: 16178 - DNA, 413 bp, Homo sapiens
tactatagggcgaattgggccctctagatgcatgctcgagcggccgccagtgtgatggatatctgcagaattcgccctttcgagcggccgcccgggcaggtaccatctggtttagcattttagcactctcaaaagtgtcctggtttagacaataaactctatagtcccccaattatgaggcaggtgcctggctgcagaggctgaggagcactggggtggtcctaagctaagtgtgggtctgtttgagaaattggtgatgctggtgacccagagatgtctgcttgttttgcgtgcagagaagggcatagaggagaaacttagacaccgagggccaagggcagaatcagtggaggagagtaaggagggtctccaagactacacctaaactctagaagaagagggctcctcttctc

SEQ ID NO: 16179 - DNA, 623 bp, Homo sapiens
ggggccctctagatgcatgctcgagcggccgccagtgtgatggatatctgcagaattcgcccttcgagcggccgcccgggcaggtactttgcataatattctgtcaatttaaaaagaaatgcaaaccacaagttttgcaggtcctgggagggcattgccctcaggatgctcactcctgtcccagtccaaactaactccaattcaaggaaggaaaaaattcatactggtttcatagaagtcgggaatcgatagttcttgacaatcacttcttccctataaaccttaagcccaggaggtcctcaagagaagactcagtgctcacagaaggaggggcaatttgagggcagacatattgtctttccatgcacaacctctgaagtatcctagcaactcctgagagcaaaccctttatgatctgagttcagggccatccagttctgtctccttaacgctgtcagtcagagctacccaggaaacatcattactcagaatttcaccttgcaaataaatagctctgaatggccaccaaaggcaatggaatctctcagaaacattatctggaaataatcagtggacagcacctcgagtcccattaatcatcctcatgcttacagtaatataaa

SEQ ID NO: 16180 - DNA, 469 bp, Homo sapiens
ctactatagggcgaattgggccctctagatgcatgctcgagcggccgccagtgtgatggatatctgcagaattcgcccttagcggccgcccgggcaggtactgagatccaatgagacataaaacagctaacatcttgatttctctatatcaagtgtgttttaaatacagtcatttgaatgcaaaaacaaaaacagacacatacaccttcatgcctgaatattaagagacaaaactcacactagagaaatttattttatggtccatttgctgcttcacttctattttacagaacaaaggctctttaggaagatgcttagaagtttctttaatattaggtttcttgaaggggggattaccaaattgcttttctagtttatgaatgactatgtaacttgccagataggcacatttatgcagtatcttgtcacaggactgtaagttaccttaaatcccacacattcaggcggg

SEQ ID NO: 16181 - DNA, 375 bp, Homo sapiens
ccctctagatgcatgctcgagcggccgccagtgtgatggatatctgcagaattcgcccttggccgcccgggcaggtacatcataaaggaaacttagacaaatgccaagcttaaatattttccttttgcaaacaatgctggctccagaaacacattacaaacagctgggattgtgaattttctctcctttagaaacaagaatgttctcatgtcaaaggtaacccattgtaaaaaaaaaaaaattactgattttgtaaaaaatgcacatcatcaattagttctaaagatgtagtcgcccataaaaccaagaccacatggtgaccttggggtgaagaaaaaaaggctgatttcccttttgtgaaaatttgcgcatttt

SEQ ID NO: 16182 - DNA, 379 bp, Homo sapiens
ggcgaattgagccctctagatgcatgctcgagcggccgccagtgtgatggatatctgcagaattcgcccttagcgtggcgcggccgaggtaccccattgctgtagaagttgagttcgaagactgatgggacagttgtgctgggggtgataaaaaactcatcattcctgctagtggggtgattgtgacacaatttcccagcagctgtatggcatgcattactacatgttctgaatttcctgagaaccccaggtcaatattactagccaggacttcctctttcatcacaaagaagtcttcgaccaatgtggagagatcatttccgtgcctgtgtctgtagaggagcatgcaagccacaatgtgtgtggacataatggcaca

SEQ ID NO: 16183 - DNA, 320 bp, Homo sapiens
atacgactcactatagggcgaattgcgccctctagatgcatgctcgagcggccgccagtgtgatggatatctgcagaattcgcccttcgagcggccgcccgggcaggtacgcgggaaactccatgtgcaaggcagggattgtcaccaagacccaactccatctacagacacccacgtaagatacaaagacaggttgggtgtctaaaggatagaaaaagatccacagtggtccaggagtggtcccagcattgtggtaggcacaagagtgaggatcacttgagtcttagagtttgacctgtaatccaagcactttgggaggc

SEQ ID NO: 16184 - DNA, 527 bp, Homo sapiens
tacgactcactatagggcgaattgggccctctagatgcatgctcgagcggccgccagtgtgatggatatctgcagaattcgccctttcgagcggccgcccgggcaggtacatgacacaagcaggggcttcaaacgtgcttatgctgttgagtgtggcctttcgtgccactgccattgccttgctggcggtcccaggagaagggtaagagacacatggaactgactgaagatcagcagacctgcctagcctgcatcaaccaaccaccaaaatgtatgcttattgttgaacattattgagattttgtggttgtatacagtaagcgcatagcttccatgaaaacagtaaccgggagctacaagaacagagtgaggagagatgctaacagagctaactaaaacatgaataaaatgtaaggaaaccaaaatgaagtagagaaatttaagtctttaaagcttcagagagaagatctgaatcactgatgtggagggaaaaacttttcttgatgaagaggaaaaagacgagatgc

SEQ ID NO: 16185 - DNA, 411 bp, Homo sapiens
ggcgaattgggccctctagatgcatgctcgagcggccgccagtgtgatggatatctgcagaattcgcccttagcgtggtcgcggccgaggtactgacaggttttctactgaatgcaaagtattcttttatggtcttctgttttcatttattttcctcctccgatcccccataattcttataatttaagggctctttgcgggtttcaacaattcattacttaccccagtcatgtgctgggaaattttattattgcttactaaggcaattttaccagggatttaaatccagactcttgctttcttgagtcaacttttgttctcactgaatgattctacaatgttatcttgtgaaagcccctctcacaacgatctgaaagtcatatcctttctaaatatgtaacacctatgatt

SEQ ID NO: 16186 - DNA, 380 bp, Homo sapiens
ggccctctagatgcatgctcgagcggccgccagtgtgatggatatctgcagaattcgccctttcgagcggccgcccgggcaggtacgtatattatgaatgtatattgctgtgcttctccttcctgcctgactccggaagactcctgtctcagtctctctcaacatgtctgaaggacttaggggcaagtgtcagtggtgaaggccctagtctgagtttaatgtctggggccagcttgaaacagcagctagtattttgagctctaagctaacactctggactttcagtcatgttttctttccccagtgaaatagaaaagtttgatttcaaagaggaaaagtgtgcaatacctgcaacatacataaaacctatttaattttac

SEQ ID NO: 16187 - DNA, 496 bp, Homo sapiens
atagggcgaatggggccctctagatgcatgctcgagcggccgccagtgtgatggatatctgcagaattcgcccttagcgtggtcgcggccgaggtggagaaggcactggtattgaccaggaaagttgtatgtaatagaaattgtagagcacagtaggagaagaaaagtgaaatgaagtagacatgggaggcagaaagacaaagagagaggagagaacaacctatgttgtaattgaagcttaagaaaataccatccttggacactttcttgtttctgattttatctaagtatcttctggttgattcttaaactgcatgtatttatggcacatgtatttgccagtttaatggacacttttccatctaggactgtttatattctggcacccatacgtacctgcccgggcggccgctcaagggcgaattccagcacactggcggccgttactagtggatccgagctcggtaccaagcttggcgtaatcatggtcatagct

SEQ ID NO: 16188 - DNA, 363 bp, Homo sapiens
agggcgaattgggccctctagatgcatgctcgagcggccgccagtgtgatggatatctgcagaattcgcccttagcgtggtcgcggccgagcagagagagagagatcacagcctgggaaacactgtgtgtgtagaggtggaaaaacacatgggagtgttctcatggcttgtgcataaaactcccaggaggtaggatatattgggaaggagattggtttgtgggagtcagattggccagtcaccagattgccttggtggtcaagctgaggactttgggtttggtgctagaacttttgaaaggttttgtgcataagaatgacatttgcaaagtagtatttatgatgcttgagttgaacaaccgtt

SEQ ID NO: 16189 - DNA, 406 bp, Homo sapiens
tacgactcactatagggcgaattgggccctctagatgcatgctcgagcggccgccagtgtgatggatatctgcagaattcgccctttcgagcggccgcccgggcaggtacaacgtgggcaagcatctgtgcatatgaaatgctgtttttctaaaagatttctcacattggcaaactgagagattttcttctggaacacaggaaagattatattaatgcttatagccataccatgtctgaatatgggaggatgacagacacagaacgagaccagatagaccaggatgcccagatattcatgaggacctgttcagaagcaattcagcaactacgaacagaagctcacaaggagatacattcccagcaagtgaaggagcacaggaccgctgttttggatttcattgaag

SEQ ID NO: 16190 - DNA, 379 bp, Homo sapiens
ccctctagatgcatgctcgagcggtcgcactgtgatagctatctgcacagtccgcccttagcggacacccgggcaggtacgctggtgaatttgaaaggtatgctccaaatgctcacccatccagtaaggtttataattctagattttaatttttattctataatattaatctgggaagtcaatatttaagtattgaaatagaacctttagtttatcatagttctttccagtctcaaaagctgtccccggccactattaaataattcagaggaggccgggcgtggtggctcatgcctgtagtcccagcactttgggaggccgaacgggtggatcacaaggtcaggagatcaagaccatcctcactaacacagtgaaaccg

SEQ ID NO: 16191 - DNA, 541 bp, Homo sapiens
atacgactcactatagggcgaattgggccctctagatgcatgctcgagcggccgccagtgtgatggatatctgcagaattcgcccttcgagcggccgcccgggcaggtacccctgtttaacaaggggtaggggccttctgagactgtttcctctacagagtaagggttcgttcagccttttccgtggcctgccaagaactcaactccatgttccctcacttcctgtaattgaccttgtccaggactttctgaccttggagaattcacctttgctctttctgctgcttcgtgcattcttccaccaaatgtctaactgactggctcctctccaaactcaaggctttgccaaatgccaccagctcagggaggcctttcctggccatgacacttgaagttgcaacactcccccgcagtctcccgtgccccagatgtaagttccatgagggcaagccctgtgcttttaccaccatatccccagcatcttgagctgtgcctggcccaagaaatattttgtgaatgaatgaatttaaagggatatcat

SEQ ID NO: 16192 - DNA, 393 bp, Homo sapiens
agggcgaattgggccctctagatgcatgctcgagcggccgccagtgtgatggatatctgcagaattcgcccttagcgtggtcgcggccgaggtactgaggacttgtagctagtaaggaggaaaatggaaagatgaagattgctttgaacaatgaaaagagacagggtctgatttataatcagctctcattgctatgttaataataggtggaatagggacaaggggagaattagagacaccatttttgtctgattgtgtgattgatgtgattgtgtgattgatgtgattgagatactccaactgacagatgatggtggactggaggggtggtaaaaatggaagtggtgagaatgagcacatttgagatatattttgaaagtagaggcaacagag

SEQ ID NO: 16193 - DNA, 525 bp, Homo sapiens
tacgactcactatagggcgaattgggccctctagatgcatgctcgagcggccgccagtgtgatggatatctgcagaattcgcccttagcgtggtcgcggccgaggtacgcgggagattaataggatagatgaaccttgactattctgctcctttagtttgattagtcttctaccagcagaaacactggagcactcctcctatatgtaaaatagagcatttggagagaataacttttggaaattgctgttagtaatctcaaaacagagcagtccaaacttagtgttctggattaattttccaaaactgagttgagaacgggatatgcattcattcttttagcaattttttttttcccgagacagtcttgctctgttgcccaggctggagtgcagtggcatgatcggctcactgcaacctcctcctcctggattcaagcgattcttgtgcctcagcctttgagtagagactacaggtgtgtgccaccatgcccagcataatttttctgggatttttattagagacag

SEQ ID NO: 16194 - DNA, 493 bp, Homo sapiens
atagggcgaattgggccctctagatgcatgctcgagcggccgccagtgtgatggatatctgcagaattcgccctttcgagcggccgcccgggcaggtacatgcctgaccttggcctacaagaggcccagatatgagtcttcctagactggcatccaattcaaagcagtcagggcacttttcagaagtagaaatcagcactgggctgctccaaagcaacagacacccacagcaagttaaaggtcatgagtcaaagaccatcactcgtgcacctgtaataacccgaagttagaattaggaggcactgcagaggaaccatggggtgttgcataaggagggagttgagatgggcttaataggacttggggttttgcttggtgattctaaagaggatttgaggaagagagggtcattctggattggatattggctggaagtgggtgcaattaatgactagttaccttaatcatttgtatctaggaggcaaagagattg

SEQ ID NO: 16195 - DNA, 401 bp, Homo sapiens
actatagggcgaattgggccctctagatgcatgctcgagcggccgccagtgtgatggatatctgcagaattcgccctttcgagcggccgcccgggcaggtacaaaggttagctatctttatagaactaagaactgtgaatttcagtgactcagcaatcaataaaaagtcaataacacacacatcttgtagatgatggtcattttaaattttctcaatgaatagtaaagagagattaacttagttatatttaaagcaaatagaatcaattaagtataaagaatgaatattataaattgatatatagaacgactattagaaaataaaaatgttgggctgggtgaggtggctcttgcttataatcccagcactttgggaggctgaggtgggcagttcacttgcg

SEQ ID NO: 16196 - DNA, 562 bp, Homo sapiens
  misc_feature 185, 222, 223, 268, 453: n = A,T,C or G
tacgactcactatagggcgaattgggccctctagatgcatgctcgagcggccgccagtgtgatggatatctgcagaattcgccctttcgagcggccgcccgggcaggtacaatgccagaagtattttttttctttcagctgtgaaccagcctgttttgtttgacaagcctttccagattcatgcnagctcaatcacgtgcccttgttgccagtttgagagtnngaacctattatttcaaacttgttggccgtgtaccaatttttacanaaactgaaagtagcactgtgaggtggattggacctagtgatgaggtgtctacacttgcatccttttcttccaagagaatattctgacactccaactctagaagtcatgtcattagtaaaatgaaaataataattgcttaatcactgtttagaattagttcatacttcttcagagcttgaagcctncacgactcaacatcagatccatggatagtattactatacctttacccaaagactggatttattttgtaaaaatatcagaatgggtctgggtccctttaaagcaactgac

SEQ ID NO: 16197 - DNA, 571 bp, Homo sapiens
ccctctagatgcatgctcgagcggccgccagtgtgatggatatctgcagaattcgccctttcgagcggccgcccgggcaggtacgcgggcagttgaatttgaggcacttgaggtgtccaagagacaactgaatgatctagaactcaaaatagagatctaggccagagatagaaagagagcatacggggataactgaatccatggggttggatgaaggtagccatgaagactgcataggaagggcagagccctaaacaatcatatttaggcaatagagtatgagctgctcacagaggagattaagaaggaacagctagagagatgaaaggaaaacaaggagaatgtgctgtatcggcaccgagggaaatgagtgtttaaaaaaatgacagagtgggtaaatttcccaaaggtaactaattgaataaagactaaaaggtgtgttcagataaagcaacaaggaggtccccaggtacctcatcaaggctgatgtctgtgcagtgcgggggcagagacgtccaaggtgatagtgagcatggatgccatttcctacagcttagctaagacggaaagg

SEQ ID NO: 16198 - DNA, 555 bp, Homo sapiens
cgactcactatagggcgaattgggccctctagatgcatgctcgagcggccgccagtgtgatggatatctgcagaattcgcccttagcgtggtcgcggccgaggtacatgtagtctataaattaaacagcaattgattctgaaaaaaacatgattgtggcttagtccaaatattaatatatgtattgagaacctgctattgtggacagtggaattatggcaataaataagatagacaatgtccctaccctcaagaaatatagtctatggcatagagagagactatcaataataaccttcacaaataaagatagtgatatgtgtaataaagacagtatattaaagagatgtgctagaaagtgatgatagaagaggaagctactttagatattctgaataacaagaagtcaagtgaacatttggggatcagagcaatctacacagagagcctaaagtaactttaatgctatacactgcagatttttaaatcctgacctcaccctaaaaacataacaagtaaattagtctcaattcagtgagatgatgatgatggtgac

SEQ ID NO: 16199 - DNA, 521 bp, Homo sapiens
ccctctagatgcatgctcgagcggccgccagtgtgatggatatctgcagaattcgcccttagcgtggtcgcggccgaggtacaacgtgggcaagcatctgtgcatatgaaatgctgtttttctaaaagatttctcacattggcaaactgagagattttcttctggaacacaggaaagattatattaatgcttatagccataccatgtctgaatatgggaggatgacagacacagaacgagaccagatagaccaggatgcccagatattcatgaggacctgttcagaagcaattcagcaactacgaacagaagcccacaaggagatacattcccagcaagtgaaggagcacaggaccgctgttttggatttcattgaagattacttgaaaagaatatgttaactttactcagaacagagagccatccgagttaaaagagtggtggataagaaaagattatctaagctggaaccagaaccaaatacaaagacaagagaatccacatcttctgagaaagtttca

SEQ ID NO: 16200 - DNA, 539 bp, Homo sapiens
cactatagggcgaattgggccctctagatgcatgctcgagcggccgccagtgtgatggatatctgcagaattcgcccttagcgtggtcgcggccgaggtacgcgggtattttctttagatgtgataatgatgtttggcagtggaatagtataatgtctgggatttgccttaaaatagttcagaggagagagcttggtgatagctgcatatacatatgggaacataatattctttctctgtttttatgtgtttgataattctaataaaaatgttaagaaaagataaaaatgacaaagccaaagatagtaacttatttagaattgaggttgtgtgatggagtttttactttaatgggaagaacttaaataaactgaaggtctgtcctaaattctttgggtgaagcttcagtctatacctgactactttttagttgtagcattgttaaaagcattaaatgagatacatgcatgttaaacacatttaaaaatgcctctatttagaaccaattccagatttgttagctatttattttattccca

SEQ ID NO: 16201 - DNA, 402 bp, Homo sapiens
actatagggcgaattgggccctctagatgcatgctcgagcggccgccagtgtgatggatatctgcagaattcgcccttagcgtggtcgcggccgaggtacaggacagctagcaccgtaaagacagtttttaaaaaatgtataactacagtaaatctaccatcaaagaaagtcaaatacaacgttttcgaagacaactcagctatttattgtaaagtcctagatatttacacaaaaatgtaaaatgttgtattactgtttatatacatccaaacttttttttaatgattaaaaagtctctcgtaaacattttataaacatgtttaaaaagtggtatattttctatgcagcttaatttcagatttaattctaatttttcaaaactatatgcatactgaataata

SEQ ID NO: 16202 - DNA, 565 bp, Homo sapiens
tactatagggcgaattgcgccctctagatgcatgctcgagcggccgccagtgtgatggatatctgcagaattcgccctttcgagcggccgcccgggcaggtaccagccataattcctacagaaggtcacttaacaaaatgtgcagtgtgtgtgttttcttagaggttttggtctaccatgtcttttactagaaatctattatgtcatggtttttcaagttgtatgcagctgataaaggatcttacatgtctaatagttaaagataaaatactgagtcactaagtcaactatatatactgctgttttctcagagactgtcagatttggtgagtttatgagctcacttcataaatagcatttccatttatggtaagcctgatgcatattcagtgacctattggattctaattctttggttgaattgctccgtaactggaattgcagtagagttgaacttcaagcaccttataatgggggactatgtgagctgccacagattttaaagatcagatgagggagttttgacatcagcataaaaggaagtgtgtcctcttatattcctaac

SEQ ID NO: 16203 - DNA, 540 bp, Homo sapiens
ctatagggcgaatagcgccctctagatgcatgctcgagcggccgccagtgtgatggatatctgcagaattcgcccttagcgtggtcgcggccgaggtacgcgggtccatgtgtttgtttttttctttttcaaatttttatcctttcttcactctgcatatacatcccaagatgcctgtcccctcagtgctatgtttatgtcatcagtgtttgacagaagagagtgtcttgggtaagggtgtccaatcgtcattcttatcaggctaactgtcctgaagaactgttgttctattgtttgggtcttcttgctatgaatttatactcatcattttatttgcatttgactttgctggtagataacatagagaatgaactcttgatctgcttgacagttgtatattgtgctataaattaacaaaatgccattcttattacagtttgactgttagtgcagcttccctgtgagcacaggacatagatgtaagctgggaaggtgcctgcccgggcggtcgctcgaaagggcgaattccagcacactggc

SEQ ID NO: 16204 - DNA, 526 bp, Homo sapiens
  misc_feature 145: n = A,T,C or G
tctagatgcatgctcgagcggccgccagtgtgatggatatctgcagaattcgcccttagcgtggtcgcggccgaggtacttctaccaaaatcaaaagtaaaagttgagattttgttgtgctaacatttgtcgttagaatgtatcnaccaagtgtgtagaatcagagtatgtgtttttattttagttagtaatgtgggttcatgcacatcttcagagtatttctttaatctttttgtgtttaatttaattttttgagtatttaaagtatttacatgttcaaaactcaaaattaagtgaaaagtagtagtcttgcttcaattttactacatcactctctacctatccaccaaatatataataaatatgttcattagcatcttgttttctcacttttttagcatttacattatatcctataattcactccatatcagctaaaaaataatatctttattccttttattaacattctcttttgaggtagttattgaattacatgtagtggcaataaataatcagattaaat

SEQ ID NO: 16205 - DNA, 594 bp, Homo sapiens
cgactcactatagggcgaattgcgccctctagatgcatgctcgagcggccgccagtgtgatggatatctgcagaattcgcccttagcgtggtcgcggccgaggtactgttttgatattgtagctctgcaggctgttggggtagctacacatggtgatgttctcattttctagtaaatcagaaagaataagatttagtatagagaaaaataatagttaacaacattttataattgttttatctagaatttttgacatatttgtcattcttaaaggcattataagaaattcctgttgtatttgtctagcaacataatgaaagaatgatgcacatttctgtttattattttataaatatggcctaaatgcagtatctttgttatttagtttatctgtattagtgtagattttattattaatattgtggttacatggttacaatctggatcttaggcacagtatggtttgcagttaaaatacgtcactttgtttcacttagtctaggaagcacttttaaaaaattagtctgacatattgactttgctaacaatacatgaaatgacattatcatctcacatgtatagaacatttacatt

SEQ ID NO: 16206 - DNA, 433 bp, Homo sapiens
agggcgaattgggccctctagatgcatgctcgagcggccgccagtgtgatggatatctgcagaattcgcccttagcgtggtcgcggccgaggtaccatcttctgattcagtcacagagaggtaggccatgagggaaataaggaaaaaagtagaaacaagaaataaagaaaaatcagaaacaatttaagaccctattggggtgcaaaagggaagtggaaagaagagacaagaaaatacataaaggggttaaaagagaggaaaataattagatagtattgctgttgtgttttggaaaaactcttaattagaaggaaaggaactaactttattaagctacctctatgtaggaaaactaaattaccaggtgatgtgggggtttttttttgaaagattttatttcaacttacaggcatcaccaaaattattttcctca

SEQ ID NO: 16207 - DNA, 534 bp, Homo sapiens
ccctctagatgcatgctcgagcggccgccagtgtgatggatatctgcagaattcgcccttagcgtggtcgcggccgaggtacaacgtgggcaagcatctgtgcatatgaaatgctgtttttctaaaagatttctcacattggcaaactgagagattttcttctggacacaggaaagattatattaatgcttatagccataccatgtctgaatatgggaggatgacagacacagaacgagaccagatagaccaggatgcccagatattcatgaggacctgttcagaagcaattcagcaactacgaacagaagctcacaaggagatacattcccagcaagtgaaggagcacaggaccgctgttttggatttcattgaagattacttgaaaagagtatgtaaactttactcagaacagagagccatccgagttaaaagagtggtggataagaaaagattatctaagctggaaccagaaccaaatacaaagacaagagaatccacatcttctgagaaagtttcacaaagtccttcaaa

SEQ ID NO: 16208 - DNA, 514 bp, Homo sapiens
  misc_feature 285: n = A,T,C or G
ccctctagatgcatgctcgagcggccgccagtgtgatggatatctgcagaattcgcccttagcgtggtcgcggccgaggtacccgggtgactagtatccatttggcccatagtgactacagcagtattgacagatactttaggatttgatcattcagtagtcttcttactattttggtagcaggattttatccaaatgttgacctggaagttcttaattgtgttttcaaatatttgattattttaaggtagtggtgtttgtttaaatatatgttatcagtatttntgttgttgttttcagcaagagtgttgacctgaataacctagcctgctattgccagaaaccagaagcctctgagggagtttataattgagtcttaataaaagcattttaaagatgaaagacaataatagcggtaagttattctgatttagagtagatgaaagaggtcaaggcttaattggcaaggaactgcataatggaatagtagctacattttaaaaggaagtgagac

SEQ ID NO: 16209 - DNA, 423 bp, Homo sapiens
attgggccctctagatgcatgctcgagcggccgccagtgtgatggatatctgcagaattcgccctttcgagcggccgcccgggcaggtacaaaataaacagaattttatggaggctacacagttctatttgttcaaatcaagtattatcctttttaaaaaaatgccactaaagctagtttcctctatctggatcccctttgctgtgcagtaacaatacaaggcccacaaaagagggctgagttccttcccacatgcactgctttttctccagtaatagactgcattttggatgactgccaggcaacaatagttgactcgtgctggccagctctcaacataggtctctgaagaagctggggaacagggcaaattgacgcttctagttttctctcaataatccctccccagggttcaggttcaca

SEQ ID NO: 16210 - DNA, 247 bp, Homo sapiens
  misc_feature 229, 235: n = A,T,C or G
ctagatgcatgctcgagcggccgccagtgtgatggatatctgcagaattcgccctttcgagcggccgcccgggcaggtacaatcttggatttccaatgacaatagtaaccaaggctgagaggaaatccttcaggagacaaaatctttacacttggcctgagacattccattcaagtgtggtaaagaggtggtgacaacagctagtggttgtgacaagacatcctcaggnactttntttttttttttt

SEQ ID NO: 16211 - DNA, 444 bp, Homo sapiens
atagggcgaattgcgccctctagatgcatgctcgagcggccgccagtgtgatggatatctgcagaattcgcccttagcgtggtcgcggccgaggtaccattcatttaaaggcataaatgtccaatggggccatcttgtgatacatgcactgtcacaggaaaagtttccaggaaaagtcaagccagggcttcacagaagatcaaaagaaagagacaaggagaagctaagtgtattagtcaggattctctaagggacagaactaatagaatatatatacacacacaaacacacacacacacacatatatatacatataaataaaagggagtttattaaggagtattaactcacacaatcacaaggtcccacaacaggccgggccatctgtaagctgaagaacaaggaagccagtctgaatcccaaagatgacaaacttggagttca

SEQ ID NO: 16212 - DNA, 663 bp, Homo sapiens
actactatagggcgaattgggccctctagatgcatgctcgagcggccgccagtgtgatggatatctgcagaattcgccctttcgagcggccgcccgggcaggtacgcgggggtttgtttcaatgttgcttgctcggaatggccctcctgagcaaacaacagacggtgctcaaagtaacaactggacttaataaaaggagcttacacgaaggaggagctgaaggctactgtggtcgtgtgctgggggctgccccagctccagctgcaggaccccggccgtctgccttccgactccggtgatgattcttcctgcggtctgatcaagattctatgcagttaactttgtatccaaggatctatagccaagaaatttggagctcagtttcaaacgtaagtattctgggtccaaattttctgccttttcccttaaaacaactgaattttattttattgggaaacagaaatacagaattcaagagttattagatattataaaatctaacactctaagttaacatacaaggagacatagcgtttcaatgacaaatgtcatacataaaactgcttcatatcagaggcagaaagagagcttgcttttcctgtagtttctgtaacacagagctgtccagctcattctatgtatgaaattgatatataatcaaga

SEQ ID NO: 16213 - DNA, 589 bp, Homo sapiens
  misc_feature 193: n = A,T,C or G
tacgactcactatagggcgaattgggccctctagatgcatgctcgagcggccgccagtgtgatggatatctgcagaattcgcccttagcgtggtcgcggccgaggtactctgctctgggaagtgcaacctttatttctccttcatgtttttaaagtcaccttcttaattctggtagaacataactcaaacaanctgaaaatgttaggaatggatttacagtccctctggctactctctatctgggatggaaaagaaagtgatgctggagataacttttcctgccatcaagggacatctatagaggagaggcaattaattgtaatgtgccaactagttttgattattcagggacttgtgatggaatttgtggattattcaggtccctggttttctgttttggctaatttcactgctcagtggcgcctccagaggtcagggacagctattctcctatggagtgtccccagagagacagtggcaaaagaaccacccccttttgagcaactactctgtgtcagacacagggaggatttttttttaacatttgtagtctttcattaatttcacaacaaacctccattctatttt

SEQ ID NO: 16214 - DNA, 520 bp, Homo sapiens
  misc_feature 25, 26: n = A,T,C or G
atacgactactatagggcgaatggnngccctctagatgcatgctcgagcggccgccagtgtgatggatatctgcagaattcgccctttcgagcggccgcccgggcaggtacgcgggtagcccatctcctgttccactgtttagtgaaaagaatcctccattgtcttttgttcattctctccccatcagtggacatgagagaaagatcccatagccctcttggtcttggttggaacaggaggaaaatgaaaactggacatccatcttaggacttaatcctacggagaccacaagctggaagaggcactcaatactagcatggcttctgtggcattttgatgagtagtatgggctccacactgaaatattaatatcttattgttttgatgatgatgatgatgttcattggcccagggcaaaaggtaaaggttgtgttataaagctgatctattcaatatctgtggatgttaactccaccccatccccttattgaacaattacgatgcctataaatattgtat

SEQ ID NO: 16215 - DNA, 502 bp, Homo sapiens
tatagggcgaattgggccctctagatgcatgctcgagcggccgccagtgtgatggatatctgcagaattcgccctttcgagcggccgcccgggcaggtacaatacttttaagtgattaaaaagatttgatgaaaaagtgcagttctgtgttgactttaggaaacattttctccgctaatgtcctaatactcagcaagcaaaattggaaaacagtttatattgctgtcaatatgtataagccatgtctcccaccattacttttccatattaaatatagaaaaaagcagaatcccatgtgtcccagtgactgtcagaaatcttccctcttcattaaataaaaatttaaataccacattagggcattgtactgagtgttattatacaaacaggttccttttggagttcctaggcattcacaataactgtaaaacaataggactgtagcaatcttttgtcctacctcagtgacttgatgtatatactaggaacagccctcagtctg

SEQ ID NO: 16216 - DNA, 579 bp, Homo sapiens
ctatagggcgaattgggccctctagatgcatgctcgagcggccgccagtgtgatggatatctgcagaattcgcccttagcgtggtcgcggccgaggtactacttcagtcattttcttaatttgcaaatcaatagctctcattttacttaataatgcctgatatttgcatgttcttcctcaaatgtgtccaactgcttaattttttcttcaagttccttttctttttcaaatacttgggtttgtaattggtcaagttgtgaaaaatcccagtttagtccaatatagtcaaacacttttttaagtttcaatacctgtaagatgcaacacttaatagcggtgagtctgtctttaagattatagatctcctctttaacacctttatttacttcttgattaagtaatagttcattgcgctgtatactgtcagcctcctcctgaagcgctgatgttttttcatggaattgtctgcaaaactttaccttgtgttccacttcattacatgtattctgaatgaatctttgtattctgttggtcctaatcttaagatttttcaactgatcttccagaaataatctttca

SEQ ID NO: 16217 - DNA, 644 bp, Homo sapiens
acgactactatagggcgaattgcgccctctagatgcatgctcgagcggccgccagtgtgatggatatctgcagaattcgcccttcgagcggccgcccgggcaggtacaaatgctctcccataggctcttttattgaatctatgaaatgattcaatctttcccaaaaggtatttgccaatatatacaaagtatttttaaaattcttatgttatttaactagtaactcaatttctaggaatctttccaaggaaaataaaatcagaactgtaaataaagttttatggattgggaagttggaaacaacttcacattcaaattaataccaatcttttttcttcatgaacatttatcaaacattatcattatcaaacattatttatcaagtcattatcaatgacttgttcactgttctacctgtatgttatatgctataaagtgcaaaagtaaaaagaaaatgtttaaatacatataaatcatatttttattaaaaagtcaatgaagtgaaaatgttcataattgaaaaagcagccatatgtatgatattacccaatttgtaaaaagtaattgtataaaagtaaaaaaaagttatagaatcttgtgttatagcaatgcattacatttattttatcatgttatctaaaata

SEQ ID NO: 16218 - DNA, 372 bp, Homo sapiens
atagggcgattgggccctctacatgcatgctcgagcggccgccagtgtgatggatatctgcagaattcgccctttcgagcggccgcccgggcaggtacatatacatatatatttatttatacacacacacacacacaatttttttcttggtagcacttagctatcctcatatccttacagatgaggaagtatttggttatccttccctaagtcacgtagctagtaggtggcagagctaggggagaggaatatcaaattaagtgctttaggcaacttgtttctcctacactgcagtgcaccttcccctcaaacacttacgatcagagacttgttaagatggtcttatcacgctaaagctaagtcaaatgggaa

SEQ ID NO: 16219 - DNA, 587 bp, Homo sapiens
tacgactcactatagggcgaattgagccctctagatgcatgctcgagcggccgccagtgtgatggatatctgcagaattcgccctttcgagcggccgcccgggcaggtaccaactactagcaaacataattaagggatcattgtattgtctaggtgcggcttagtagaatatgtaaagttttttagctgtccattaccctggtataatcttggagccataacccaaaactatattcctggcaagcatgttaagaagtggaaaatatgggttttcaaatcttgtggaaatactagcctttcaaatcatgggtgagaaaaaaatgctaaattattttcttactatgaggaagatttcttgccatttatctatgtatacaatattgtatcacaacagttaaggtataatatttctactcagaacaacagattacaaaaaaatcatatgcccctttcagtgttcatattgctttgttaggccatctctcagaatatattgtgtaaaaccagaagttttagttttgtgtttaaaaatgaatgcactatgattataccggaatattttctttaataaattatgcccgtgtgac

SEQ ID NO: 16220 - DNA, 403 bp, Homo sapiens
ctactatagggcgaattgggccctctagatgcatgctcgagcggccgccagtgtgatggatatctgcagaattcgccctttcgagcggccgcccgggcaggtacgcgggtgaaataaagaaataaacactgtaaaacccaacccccaaatgcttgaagatcactcctgggctgagttgttggtgtttcagggttggacatttaaaggggatttcatgaaaattaaatttcttgggtttgttttttcaaagttttaaaatatatgtttatagatgacatggataaaatgaactaaggtaatataaatagtgcctttcaaagagcaataaaagaatgcctttggtccataaaaggagagattatcaaaaagaataaacttgattagaagaaataaaagtagattt

SEQ ID NO: 16221 - DNA, 409 bp, Homo sapiens
gactcactatagggcgaattgggccctctagatgcatgctcgagcggccgccagtgtgatggatatctgcagaattcgcccttagcgtggtcgcggccgaggtacctagcttttattcattttattattcatctttattgctttcattgcacatgctgttaacttcttatgaactctttgttctaataaataagcatatccaggtttttcataaataaatgaggagtctataaattcttactagttttaatagaaacattgccactaaaatggtgtattctagctgtgtgagcttttggaaaatgttttcatttcctttatgtttgaatgttccttccaggtctttgaaaatatacattctgagttgaaaagctttataataggtaaaactcattaacccatatacttt

SEQ ID NO: 16222 - DNA, 406 bp, Homo sapiens
ctactatagggcgaattgggccctctagatgcatgctcgagcggccgccagtgtgatggatatctgcagaattcgcccttagcgtggtcgcggccgaggtacaattctttcatcttttctgtttgcaattttgcataataaaatgctaaagggaaaacatttgatgagcagagtatcaaacacaagagtaataatactactacttacatgaaattctaaaacaaagaaaactcatctatgatgtcaaaaatcagatgagtagttgcctgaggcaggagatgtgggtggctgatggcaaaagagcacaaaggaactttctagagtgatggaatgttttatgtcctgattggggtgctaactgcatggacagacacatttgccaaaattcatccaactatacataaaa

SEQ ID NO: 16223 - DNA, 643 bp, Homo sapiens
acgactcactatagggcgaattgggccctctagatgcatgctcgagcggccgccagtgtgatggatatctgcagaattcgcccttagcgtggtcgcggccgaggtactcactgcacacttctaggagtctctctcacctctaccctgttcctggtggaggactatgaaatcctcaaaagcaaaagtgacagtttattttctctgaacaacttctgcatatacttagttggctacacagaaatcaactgatcctgaatttgaattacccagcctttagaatgtgggagaggccttccttcacagtgctgttaagcagactggagactatctacgtaaaacgctagcacagttgctgacatgtagcagtcgctcagccaaatggaagcttttattattacctgttttttcaacattcaaaaacgtaaataactatgaaatgagaaattggctatacagttttatctcaagaaaatctgtatattgttcttaacttcctaatatgtataaaatcatcatttcgtgacatttactagtatttctggaggtaaaatgcctaatgtcttggttttttaaccattctacttaagtgggaccaacattcagaatggaatgtaataaagcaagactctatttggatactttg

SEQ ID NO: 16224 - DNA, 470 bp, Homo sapiens
  misc_feature 310: n = A,T,C or G
gctcgagcggccatctgtgtgatggatatctgcagaattcgccctttcgagcggccgcccgggcaggtacttactagaggagtatttcctgtgtaactgagcactgtgataaatccacctaatactttagctcacttgttcctcataacaatcctattttacagatgaggaaatgcacttagactaggaaacttgcccaaggcttaggataaatatatttcatcttaaaagataggtgtgattcgagctgtcactggcattatcagactttttatatcagattttattgatgatagatgacataaattgngttcttaatatgttaagcattgttctgttaattaacttatcttcacagcaacataaagagggaggtagattattacttgtattttggagatgaaaaatgccgacattgaggggtttagtagccaggcctcagaggtcctgtagctagctgctaaaatacc

SEQ ID NO: 16225 - DNA, 337 bp, Homo sapiens
  misc_feature 283, 287: n = A,T,C or G
atacgactcactatagggcgaattgggccctctagatgcatgctcgagcggccgccagtgtgatggatatctgcagaattcgccctttcgagcggccgcccgggcaggtactcctcattttagacatattctctatgcagtggagataaatctattaaaaggtgctaacagactctcttacaagtgtaagaggaatctactgttgctatgttagtgtgaatgttgaaggtgcaattatcacattgtttattaattgtataacagattattactagaaaggttnttgntgctagtctggaaaactggtgaacacactgtttattatgacaagttttca

SEQ ID NO: 16226 - DNA, 584 bp, Homo sapiens
actactatagggcgaattgggccctctagatgcatgctcgagcggccgccagtgtgatggatatctgcagaattcgccctttcgagcggccgcccgggcaggtactgaatcatatgtagtgtcaaaactggaagattccaatggcctattccaacatttcccaaaatgtgttccacacaatactagttccaagagatagacagtgttagctcccattgaagaggggcagggggagggatttattcattcaacaagtattttggttaaaaatttgggaaacagttcatactgtattccatcctggaaaatcataatgtatatcaatattttaaaggcttagagaagtcttatagtaaactgtcttagtttactttagtcaactgaacatttcccacactttttgatataggaactgtgtgtgtgggacacatgtatgtcaaatgttaacccacagggcaaattttggaaaacagtcatctgttctatggtatttatatacattaacactaaaaaaagtgaattagctcttacatttgtgtcacccaatatgaatatgttgaaaccctaatcccagtgtgatgata

SEQ ID NO: 16227 - DNA, 519 bp, Homo sapiens
  misc_feature 238: n = A,T,C or G
gactactactcactatagggcgaattgtgccctctagatgcatgctcgagcggccgccagtgtgatggatatctgcagaattcgcccttagcgtggtcgcggccgaggtactttataaatttaatctataatgatgtattagcaatcatagggaacaccatgatggtcagtgttcagacttgatgaagactgaagcatgagagagggccagacagatattgtggagtccgtgcagctntctactaatttctatttaccaataaatatgcctgggataatataggagaattatagaaaggaacaaggaaactaatcaaggagaaagtagagggtggtttccaatgagagaatttcatctgcttctaatctaaaaaaaaaagacattgacatattcaatttgtagtgtcttatataacagttcttcagtaatgtaaagaactatttcaaggtcatatattagcatttggaggaatatcaaaattaatatattcaagataacagaattaaatcagtataccc

SEQ ID NO: 16228 - DNA, 335 bp, Homo sapiens
tagggcgaattgggccctctagatgcatgctcgagcggccgccagtgtgatggatatctgcagaattcgcccttagcgtggtcgcggccgaggtactttttttttttttttttttttttttttgagacggagtctcactgtcgcccaggctggagtgcagtggcgccatctcggctcactgcaagctccgggttcacgccattctcctgcctcagcctccggagtagctgggactacaggcgccggccaccatgcccggctaatttttcgtatttttaatagagacgagggttcactgtgttagccaagatggtctcgatctcctgacctcgtga

SEQ ID NO: 16229 - DNA, 429 bp, Homo sapiens
agggcgaattgggccctctagatgcatgctcgagcggccgccagtgtgatggatatctgcagaattcgcccttagcgtggtcgcggccgaggtacatgagatggctcattgatacaagcaaagccttggtggctctgcgctgaattaaggaagagatttgaaagcaaggctatttccctggcggcagtaaaactgcctcctgaaaagagagcaagctatgggattagatacttaataaaattttaggcaagagaaagagtccaggtcttttacctaaattgcacaccaattgagctcatctgcttattctctacacactcaggctagggaaaaagtgggcacatttcaaaactcaatgcttaaactatagcttgatgtgaaaaagtagagacaaatttgcccatgctacatcaaagtgtaagaactgtc

SEQ ID NO: 16230 - DNA, 521 bp, Homo sapiens
atacgactcactatagggcgaattgggccctctagatgcatgctcgagcggccgccagtgtgatggatatctgcagaattcgcccttcgagcggccgcccgggcaggtacaacgtgggcaagcatctgtgcatatgaaatgctgtttttctaaaagaccatagaccttagacggaggcacctgtgaatacattctctctggacagaggcatattacctccttacattcttgtgtcttggaagatttctcacattggcaaactgagagattttcttctggaacacaggaaagattatattaatgcttatagccataccatgtctgaatatgggaggatgacagacacagaacgagaccagatagaccaggatgcccagatattcatgaggacctgttcagaagcaattcagcaactacgaacagaagctcacaaggagatacattcccagcaagtgaaggagcacaggaccgctgttttggatttcattgaaaattacttgaaaagagtatgtaaactttac

SEQ ID NO: 16231 - DNA, 421 bp, Homo sapiens
actcactatagggcgaattgtgccctctagatgcatgctcgagcggccgccagtgtgatggatatctgcagaattcgccctttcgagcggccgcccgggcaggtacttttgtgttcccagatgctatttatccaaggtggctagtaaattgccttagtgatccaatgggttccccccaccccaccttggccacagtctctgcattgcacagccagctccccaagacatgtggcctgaggggtgctatctgctatagggctgaatcatgcagcttcactttatggggaagaaacaggaaggagactgaatgcagataaagagagctttgggtttggggtcaaaatgcctgactccagtcctggctacagcacttgcctcaggcaagtgccttcccctgagattcctcacctatacaatggga

SEQ ID NO: 16232 - DNA, 419 bp, Homo sapiens
gggccctctagatgcatgctcgagcggccgccagtgtgatggatatctgcagaattcgccctttcgagcggccgcccgggcaggtacaaagaatagtcccctaactccctgagctcggtgagggcaggcagggatcactgctaataagaagtaacacagaagccaaatctttaaggataaaccagaaaagggaaaaaagcagaaaaatgcattattgtcaaaaagcagtcctacattcaaggagtcatgagataaaatgaagtgcctgggggaaactttgagaagcttagtttgaatgaacagaggagaattgggacttcttaaagagcgataacactggaaatgtgtggaagagtccaaaccacatactatccaaggacaatccactgtctgacatactcaactttttaactgtgttt

SEQ ID NO: 16233 - DNA, 543 bp, Homo sapiens
ctcactatagggcgaattgggccctctagatgcatgctcgagcggccgccagtgtgatggatatctgcagaattcgcccttagcgtggtcgcggccgaggtacgcgggtatttggtatttaaacagaatttcagtggaaatctttcaaaaacttaaacctttttatacagaaatccatattgaatatataaggcaacactttgttagtttgctttttgagttattattatgtttgttacttgtaagtttgtagcagctcttcctgttttcaaacagatgagtttttaaacagataacccagcatgtttcaattttttgtggaataatagatgactcacagtaaagttacaacatattttcttttaagtaaaaaacttaaggaataatgatacttgctttgccattcaagggcctttttttatctgtttactgtgtggatcttacacatacaccagatacgagttttggtgaaataaggtggttataattatttacttattgtcagcaattgctttgtggcctattcatttgacagtaggtgat

SEQ ID NO: 16234 - DNA, 569 bp, Homo sapiens
  misc_feature 488: n = A,T,C or G
gactcactatagggcgaattgggccctctagatgcatgctcgagcggccgccagtgtgatggatatctgcagaattcgcccttagcgtggtcgcggccgaggtacttggacttaagaagaccaagacacaccaatcattatgctagttttaaacgttatcccctttctctactgtatattctgcctcgaacctattcttacagcaccttcaaacttattttgggttccctgtgatttgcacattggaagtggaaataattgtgagagtgcttgtaagtgtttcgcactgtatgagatagtttttatgccatatgggaaaaacacaataaaaattcactattatgaaataaaatagcatcattggtcatataattcacttccttttcctacaaataaattttattttcttgtaaggagagaaactaacaataatttgagtagttagagaataaaggaaatatttgtgagccttactggaatttattcantatacctgaaaaaaattgatctgcctgtcctgattgctctcttttcatttaatatttccaggaatgtgaaagcttgtgggg

SEQ ID NO: 16235 - DNA, 597 bp, Homo sapiens
gactactatatggcgaattgggccctctagatgcatgctcgagcggccgccagtgtgatggatatctgcagaattcgcccttcgagcggccgcccgggcaggtacagggagcaaaggagagtcacagaaaataaagttttagaggaagtcaggagccaaaacatgtaatgtcttttacccatgaaaagaaacttgaaatttattttaaatgttatgtgaagttatttgaaacttttggacagataattaatttatgttttaagcaaatcaccggctattgtgtggaaaatagggaacagagactagcaatgaaaatggaaggcggggggctgatagatggaggcattagaagtaatgagaattgatagaagttgatgaggttgagccagcaagacttgctgatgaaagaatcaggcttttggccttagcagctactaaggcaaggaggactgcgagaggaacaggttgggaggatagtgaatcagtgtctttggtggcaggttagattttagatatctagtaggcatccagatgaaggtggctagtgggcaattgggtatcagtatctggggttcatgggaggggtcagtgttgatg

SEQ ID NO: 16236 - DNA, 455 bp, Homo sapiens
tatagggcgaattgggccctctagatgcatgctcgagcggccgccagtgtgatggatatctgcagaattcgccctttcgagcggccgcccgggcaggtactggttaaggaagagtattgttgaagatacacttagttttgtaagatatattaatttgatcacttgcacgtgtagttgaattattgcaaagaattggccagtatagaaatggcttccagagacactgcaatctctactgtgctgattcacactgcatcatatgatatagaggttgtatcttaatttagcatggtcctactggatttgctttttattactaaattactaaataaccttagagactaaaaacaacacagcattgtgagataattagggggtattgtctttagcctctagggttgtggtaaatctgagcatcgtctcactggattctcgactcaagatctcataaggct

SEQ ID NO: 16237 - DNA, 468 bp, Homo sapiens
actactatagggcgaattgggccctctagatgcatgctcgagcggccgccagtgtgatggatatctgcagaattcgcccttagcgtggtcgcggccgaggtacctagcttttattcattttattattcatctttattgcttacattgcacatgctgctaacttcttatgaactctttgttctaataaataagcatatccaggtttttcattaattaaatgaggagtctataaattcttactagttttaatagaaacattgccactaaaatggtgtattctagctgtgtgagcttttggaaaatgttttcatttcctttatgtttgaatgttccttccaggtctttgaaaatatacattctgagttgaaaagctttataataggtaaaactcattaacccatatactttccatgctgggcacagcaggtgtggtagggagaaatataagatgactcccaagatttttgc

SEQ ID NO: 16238 - DNA, 505 bp, Homo sapiens
acgactcactatagggcgaattgggccctctagatgcatgctcgagcggccgccagtgtgatggatatctgcagaattcgcccttagcgtggtcgcggccgaggtaccatcttcaccactccaggatttaaggcgtaaatcctcttaccaattagtcattcgttcaacagaacttcatggctaggaagtcacacttcaagttgcactagcacactattactttggggatgaaaagtttacatttcctaaaatgtgctacacaaaaacatttccataagtgtttttcagagagtcagttgcactacagcctgatgaaactttttcaaccataaaaagactcgagttccataaaccgtcacaaagatgtgaacaggagaaactgcagactctccatcagatatatttattgaataagctgaatggaaaaagcaatgtgcacagaacacacattagcaagggagaatatgttacttcatttactcaacaatctattttttcaaacaca

SEQ ID NO: 16239 - DNA, 400 bp, Homo sapiens
tatagggcgaattgggccctctagatgcatgctcgagcggccgccagtgtgatggatatctgcagaattcgccctttcgagcggccgcccgggcaggtactcaggtttcacatgaaccttagaaaacttggaagccactgtgtccccagatctcactccctcctggtagagccctgccacaagacagaacagatcaagaggcacgtggaagaaaatatgagccctccaggaatttcagtgaaaaccagctgagattcgagagtgagacatggcttttccaaatacagctggtgtgtgtgaattcttacaaaattacaggagcagcattgtcactgtgagtgagagatgatgtggtccatttgagaaaagtctgttttcttccttaaatcacattccaatt

SEQ ID NO: 16240 - DNA, 552 bp, Homo sapiens
  misc_feature 437, 438, 439, 440, 441, 443: n = A,T,C or G
ggcgaattgtgccctctagatgcatgctcgagcggccgccagtgtgatggatatctgcagaattcgcccttagcgtggtcgcggccgaggtacaaaagagatggtaatttaaacttttaaaaatttggaacttgttgaaaataaccgtgtgtctcataaaaaaaatatggggagggaggaatacatgtccactgaatgtcaatgctattaaatgaaataccattaatcagtgtttatccatcattttacagtcaggacttagaacatgcttagcaaagaagtcttccaaaatttgctgatatgcccaaaagaaagaaagtcagtatattgaagcgatatctgcactactatgtttgatgcagcactgttcacaatagccaagattttgaaccaacttacgtgttaactgataaatggataaaggaaatgtggtactnnnnntnttttttttttttttttctttttgaaaaagtcatggaggccatggggttggcttgaaaccagctttgggggggtcgattcctttcttttttgtctaaaatttatgtatac

SEQ ID NO: 16241 - DNA, 576 bp, Homo sapiens
acgactcactatagggcgaattgtgccctctagatgcatgctcgagcggccgccagtgtgatggatatctgcagaattcgccctttcgagcggccgcccgggcaggtaccaggacttcttaaaaacaatcatccctgtgttccatttactaaggaaaattccctcgtcgcgcatcagaaagactcaggacgctaaagagtatagctagctgctcatgtcagaaaggggggaaccaggaaggctatggtatcccacttaaccattagccagcacatattgtggacagatttaaattagaagacacttggtgatatcacttaagcctatttctggactcctgcaggaaaacaaatgctggcacaaaagaaaactgccaaacaccagctggtctggtagtcaacatttatgagctcttggcatttcataatgtgtcttacatgtgagaaaatccattgccattaaactcttttatccattcgtgatctcactttatagattatgtaagaaaacatcccagcaagtggacacatgcttaagtatctaatgagcgattaaaaatgaaatttaaaatgaaaa

SEQ ID NO: 16242 - DNA, 406 bp, Homo sapiens
tatagggcgaattgggccctctagatgcatgctcgagcggccgccagtgtgatggatatctgcagaattcgcccttagcgtggtcgcggccgaggtactgaagcatgtgaagaagcatctgcccaaagcacatgtgaaggagcttatcagttggctcgtgggtcaggaattcgaattagaaaaaatggagtccatatgccaggctcgagcaaaggagcttgaagactccttgcagcagctactgagactccaggatgaccatagaaacctgaggaagtggttgactaatcaagaagagaaatggaaaggaacggaagaaccaggggagaaaactgagctgttctgccaagctttagctagaaagagggaacagtttgaatctgtggcccaattgaacaactctttg

SEQ ID NO: 16243 - DNA, 406 bp, Homo sapiens
gactcactatagggcgaattgggccctctagatgcatgctcgagcggccgccagtgtgatggatatctgcagaattcgcccttagcgtggtcgcggccgaggtactttgaagtgtcttcttatgagttccattttcccatgcctggtccccattaaatatagtcctaatctatctgtcttgattaatttctattgctcagttacatgaacccttttctctagccagactacataactcactctgtctgccacatatcccctgtattcccataaccagacttgacatgggggactcaatttggctggattgaccagccccttttctctgagatctgcactctgtgttcctcattaaactatcagcagttatgtttctgccatatgaccctcctctcgatccataaaa

SEQ ID NO: 16244 - DNA, 598 bp, Homo sapiens
tacgactcactatagggcgaattgggccctctagatgcatgctcgagcggccgccagtgtgatggatatctgcagaattcgcccttagcgtggtcgcggccgaggtacttttttttttttttttttttatttgggtggttttgagacagagtctcgctctgtcacccagactggagtgcagtatgcaatctcatctcatttcaaccactgcttcccgagttcaagcaatcctcccacctcagtctcctgagtagctgggaataccggcaaataccaccacacttggctcatttttgtctttttgtagagacagattttaccacattgctcaggttggccttgaactcctgagatcaaataatccagccttttgggcctcccaaagtgctgagattacagtcatgagccactgtccctggcctgtgtgctcaatttttaatgaagagtaaatgaatgaataatttgctcttctttcatcaagactggaaatataagcattgtgtcagccaggaagctaaagagaaaccattcagctccaaatcttaactactttgcctattctagctggcctgtttatgatgcgcagacagttagctga

SEQ ID NO: 16245 - DNA, 511 bp, Homo sapiens
  misc_feature 223, 224: n = A,T,C or G
acgactcactatagggcgaattgggccctctagatgcatgctcgagcggccgccagtgtgatggatatctgcagaattcgcccttagcgtggtcgcggccgaggtactccattcaggagcacacaagggcctaacttatgccaagaatagagaagagttagaaatgactctcaatagtgtggatttgtagaagtcccccggatcccaaggcaaggggtctatnnggaacctgttcaggtcagggtgtttctgtggtgttcgctgccggtgtgcgtcagcagatgtggcaggaggaggtaaatagccacgtgcccttggggtgagtttcggtttctccagctttcagggacttctaaaaagtgagcctggttgcagcttctacaatgcagtaatcctggcccttctctgaaggtcctttgaatcattgctcttggaatcacttctgggttgctcatcacctcagcttttccaccctccctttccttacatccatgaatctcaggtgtgtgta

SEQ ID NO: 16246 - DNA, 531 bp, Homo sapiens
  misc_feature 25, 283: n = A,T,C or G
aatacgactactatagggcgaattnggccctctagatgcatgctcgagcggccgccagtgtgatggatatctgcagaattcgcccttagcgtggtcgcggccgaggtacacgtttacaaaaatcttctacgtgcctagtattcttgctatcctgtggcctagaaacaagcataagggctagagaataaggcacaaaatgtgcaacggagagaatctttgtcttatactagtgttcttataaatatgaccaagagaatcatcaaaacaaaatgaaacagcctgnggataacagcaagatggagggttcccaggagcagcacaggatgggagatggaaaaggacatcagtcagtgcctgtggtctgtcagctgcttgacatgggccatctcattcaacttccttaacacttgagaattaagtattggcatccctgctttagatgaagaaaaccaaggcacagcatgattaaattgtgcaactggtatgctgcagaaccaagatttttcatactggtgtgtacctgcccgggcg

SEQ ID NO: 16247 - DNA, 640 bp, Homo sapiens
  misc_feature 12: n = A,T,C or G
gactcactatanggcgaattgggccctctagatgcatgctcgagcggccgccagtgtgatggatatctgcagaattcgcccttagcgtggtcgcggccgaggtacgcgggaaagcagtggtaacaacgcagagtaaggtagagggtgcttgaagatcaatttcatcttcataagggattctccttgccttgggctctgaggaatgttgggatgccttaatcccttcagcacaggtcactgttgatttagagagttgggtgcagctaccatggcctgagttgttttctcagctgaatcagattcagacagggcttcttctgagacggtgggatgttcttctaacaggtgtgaggaataattatctcactgtgtctctctgagtttcacttacctttccttaactctgttattgccacaggctgtaatgccagaaatgagggtttttggaaagtcgctgcatgtctgcttggttgtgagtctgggcagctgatgaatgggttgctgttatggtgtttacttttctgaatcaggtgttcctttgcagaggcagggggcttccagccattatgtaagctttcagaaaatacccaatgatcttcttagagaaagagcaccatttaaatagaagctactaaaatcg

SEQ ID NO: 16248 - DNA, 503 bp, Homo sapiens
ctatagggcgaattgcgccctctagatgcatgctcgagcggccgccagtgtgatggatatctgcagaattcgcccttagcgtggtcgcggccgaggtacgcgggtgtcagaaagtagggtcagttttttgttcctatgtgctacttccagactatgatttttcctaactgttctctgagactcctaacatcaggtctgttaaaaaacgatgactttagccgggcatggtggctcacacctataatcccaacactttgggaggcagaggcaggctgatcaactgaggtcaggagttcaggaccagcctggccaacacagtgaaaccccatgtctactaaaaatacaaaaattagccgggtgtggtggcatgcacctgtagtactttatattgttttatcttttttttacacaatatatgattttattaataaatagtgcaaaagcatcagtgataactgtttgaacattaaattttttaaacaggcctgtcttggcattagtta

SEQ ID NO: 16249 - DNA, 425 bp, Homo sapiens
attgggccctctagatgcatgctcgagcggccgccagtgtgatggatatctgcagaattcgccctttcgagcggccgcccgggcaggtacatgagatggctcattgatacaagcaaagccttggtggctctgcgctgaattaaggaagagatttgaaagcaaggctatttccctggcggcagtaaaaactgcctcttgaaaagagagcaagctatgggattagatacttaataaaattttaggcaagagaaagagtccaggtcttttacctaaattgcacaccaattgagctcatctgcttattctctacacactcaggctagagaaaaagtgggcacatttcaaaactcaatgcttaaactatagcttgatgtgaaaaagtagagacaaatttgcccatgctacatcaaagtgtaagaactgtc

SEQ ID NO: 16250 - DNA, 423 bp, Homo sapiens
tacgactcactatagggcgaattgggccctctagatgcatgctcgagcggccgccagtgtgatggatatctgcagaattcgcccttagcgtggtcgcggccgaggtactagacaggtcaggcctgagtgattgttttatgtgccaaaggaagatatagcaaactgacctttttgctacattgagatgggggaatactctggcttcctgtcatttctaggtgactaaaactatcttgacacctatgcagactttctgacttagatttatagaatgaaagacatgaaagatgaaagataccttagaaattaactggctttagcactgcattttataatgaaaataataagactatgtgagaagaaaagaggcatgttggcaaatgggaagatttatggatatgacatcagagcatgggaagggtg

SEQ ID NO: 16251 - DNA, 255 bp, Homo sapiens
tagatgcatgctcgagcggccgccagtgtgatggatatctgcagaattcgcccttagcgtggtcgcggccgaggtaccctgactccctaatttgttcctacagattttaattttgacatggatggcttagggagaaagcagaaaggaagggaaaaagagaagaaaacagaaaggaagaaaggaaggaggggagccctggtagaaatttcattttgtccagggcaacttggggacttacaaaggaaagactagaga

SEQ ID NO: 16252 - DNA, 213 bp, Homo sapiens
actatagggcgaattgggccctctagatgcatgctcgagcggccgccagtgtgatggatatctgcagaattcgcccttagcgtggtcgcggccgaggtactaaagtgatattaggatgtaggacacctacacaacttggtaaatgtttgtatataaggaatttaggatgagttgtttatgagaataagttactggagacccagggctaccttg

SEQ ID NO: 16253 - DNA, 353 bp, Homo sapiens
actatagggcgaattgggccctctagatgcatgctcgagcggccgccagtgtgatggatatctgcagaattcgcccttagcgtggtcgcggccgaggtacatttggaggggaaaaaaatttatcttacctccagcaagaagagatttctaaaatattgtgctgaaacacaatatacctaggattagacacttttagatagttaaatataagaaatgctaggcaagcataatttgtatatgtataatacaccctgaaaattttattctcaacttcacttctgtttagatctgagacactaaaaatatttcctttagcagaaaattcttcaatgattatagaaagaaaatttgct

SEQ ID NO: 16254 - DNA, 571 bp, Homo sapiens
  misc_feature 426: n = A,T,C or G
gactcactatagggcgaattgggccctctagatgcatgctcgagcggccgccagtgtgatggatatctgcagaattcgccctttcgagcggccgcccgggcaggtacgcggggatgcccgagtggacatctctcattacacacccaaggcgaaacttagaaatagcagtggaggtagggatggatgtattgccagtcttcatattccgagctatttattctctatgagtgcttaaaaaggacagtaggaatgtgtttttaagtggggcatgtgtgctcctgtgagtccagagaagttggcaattctgtgtcaaaaacttgtatttttgcatatgtatggcaaaagtaaagacttgatttctgattttgaagacacataatctaattggcaacacaaaatttacattcactatacaagaatcagtanaagcaatatgtaatcaggtattctataattttatttggataataaatgccatggaaactttacaatggggcaaacaaatttggatggaaataaaggtaagtgacgtgttgcttgatttatttaaaaacctgaaagcttgtgcttt

SEQ ID NO: 16255 - DNA, 648 bp, Homo sapiens
acgactcactatagggcgaattgggccctctagatgcatgctcgagcggccgccagtgtgatggatatctgcagaattcgccctttcgagcggccgcccgggcaggtactaaaggtaagtctatgagaatgcaagcgggtttatttggttttaaacaacactttactcgttactctgcgtgtaactctgtgagatggcacgatgattttaggagagctgatgtaagtgaaaagttacactctcagcattgattgcttaataataagggaatactatggaaagaggaacatgggtttccctcagatttttcagaattgcctaaaagagcagcaattgttttagcggcgtctgtcaattccaaactattctgaaagaaatttctgcccatcttaaaagaaagcatcaaaatgtcataaaaagttggaagcccataagcttgcatagccgctgctgaaattctctggggtgaggagcgggaaaggggttaagatctaatcttgaacctcttctagagttacctgggggatctgaatctgcactttctgggtaaatcatagcttattagtgccagaagtgaggttagaattcatctggtgaaacgactgctattttacacatggagaaactgaattccagttaaaggaaaaa

SEQ ID NO: 16256 - DNA, 504 bp, Homo sapiens
  misc_feature 363: n = A,T,C or G
ctatagggcgaattgggccctctagatgcatgctcgagcggccgccagtgtgatggatatctgcagaattcgccctttcgagcggccgcccgggcaggtacgcggggtctttcttccgaggttttataaaagtcagagaacccagaaggcccataattaggttttttgcacttctgcctttcaggcacggtgtgtaggaaattccagtttggatgatatttgcacattttgatgtgtctcctgagttgagtatatgatactcttgtgggaactacaggtgtgttttcctctaagaaggaacagtgcttctgtgtttgggaaggcctttccaagacaccatgtgccatcattattacatctttntttatgtgtgtcttgggatctttccatcactaatttaataagcatagcttattatagtgagcagccatttttggacctgccctccttttcagtttcattattttcttgccttttgttgcccttgtcattcctctacttgag

SEQ ID NO: 16257 - DNA, 448 bp, Homo sapiens
gcgaattgggccctctagatgcatgctcgagcggccgccagtgtgatggatatctgcagaattcgcccttagcgtggtcgcggccgaggtacaggctctctcagtggccaactatttggtgatctgcacatttttagcatagaaccttgaaatgatacagctgtgctggtcattacggaattctctttttgtgtgacagaattgtgacaggctcccaggacctaaacccagaaggaagcaggaccatattgctgcctagagaaggggatggagcatattccaggacaccgatgaaacagaagcttccatcacagtgctttctgctaccttatgagacagttcgcatctcaacagctctaggatacaaaggaagcacatacatttatactttataaggtggccaaggaatcctactgtgaacaaagaatttctaagataataaaatccc

SEQ ID NO: 16258 - DNA, 415 bp, Homo sapiens
  misc_feature 253: n = A,T,C or G
ctactatagggcgaattgggccctctagatgcatgctcgagcggccgccagtgtgatggatatctgcagaattcgcccttagcgtggtcgcggccgaggtacctatcagatacagaaactgcaaaatgctacaaaaaattcatctaatgtataatatggagtgtaacattggaagagcagaggggctgtgaagtgagagtctctgttgactttgtctttcacagactcaaacaaaataccttcgatgtgactntactggcccctattttagtcccctgagcctcaactttctgtatttcattgggctttgatcactaatttacgtaaatttcactaatacttactggagttttcttacatttgtttgcttaaatgtcagcaaaaggaaaatgcaatactccagaataaaatcatg

SEQ ID NO: 16259 - DNA, 587 bp, Homo sapiens
tagggcgaattgggccctctagatgcatgctcgagcggccgccagtgtgatggatatctgcagaattcgcccttagcgtggtcgcggccgaggtacgcggggttcatttattaaaataatacatattgatctcttctgggttccagaccttatacttggcttggggtaaatgttggagagtaaaagagacattgtcaccaccgtcatgactgaccctttgattgtgtgattagaagtctctgtggcagcatggcccacaatgagcaacatacgcgatgtgtttcagtatccaatgccaatggagtggttaagtcatttggggacataatatgatggaatgttattaatcattcaaagtagtgttcattgacaattttgatgtaatatgttcaagatttaagtgaaaaagctggttacacgtgaactggaaaaaaattctactggatattatattagtgatttcatgggatgtggaattatgaagattttcattgtcttctgtgtctgtttctggattttctattagagaaatatttttctacaatgagcatatgctataatactaaaaaaatttgtgaaaacattct

SEQ ID NO: 16260 - DNA, 390 bp, Homo sapiens
ctactatagggcgaattgggccctctagatgcatgctcgagcggccgccagtgtgatggatatctgcagaattcgcccttcgagcggccgcccgggcaggtacgcgggggttaacaagatttctatgccaaattttcaaagtttttatcatccctacctcattaggcttagagcaagactttggtaacaacggaaataatttggagtcatgctctcagctgaaacacagagtttccttccataaggtctagaaacctgtgcagaacatgaaatgtaaacccttgagcagccataatttttctcaagtatcacacttctcagtttccagtgggatcttttcagctttcacggtctcagcatcctatttatcagtggaaagtaatcagggaa

SEQ ID NO: 16261 - DNA, 608 bp, Homo sapiens
acgactactatagggcgaattgggccctctagatgcatgctcgagcggccgccagtgtgatggatatctgcagaattcgccctttcgagcggccgcccgggcaggtacaagaccctcaaaatatgtaaaatctttgacacttaggtgtgtcaaagatgttgagctcacacagatatgcttcccattctgctgggcacagttgttgcttctaagaggctgctcagcagaaaataaatttcccagtatccattgcagttaggtgaagccaaaaaatggagttttcgccaaaaacatgtgaatggaagtgatgggtccatagaaactacccatgtaagcctcctccatgtgctctttcctttctggctgggttgaatggaaagaagcacaaagccatcatcattttgggacctcatatgattgcatgaagatggactatcatacccaccagctcattcaaagaggattgttctgtctgcaagattgtgattaagacacatgtttgtagatccaattattacaaagttagcctccactaactcagtaaatttagattttaaaagataagttgatcttctagctttagagtttttaatatgcaacgaattact

SEQ ID NO: 16262 - DNA, 543 bp, Homo sapiens
  misc_feature 167: n = A,T,C or G
gactcactatagggcgaattgggccctctagatgcatgctcgagcggccgccagtgtgatggatatctgcagaattcgcccttaagcgtggtcgcggccgaggtaccatgaaacacgtctatacaatatggcattgtaaattggtgtcacttttgcacaggaatatnggtaataacggagcaaaatttaaagtgttcatatgatttgactccaccataatctcaaaatttcatctaaaatatactggcaaaagcatgtcaagttatgaataagaaggcttgtcataacactacttgtttagcatcaaatttccagtttacaacaaattggaaacaaccaggacgtctctagctagtaacctagaaaaatatgtaacagattaaaaatttagttaaaactatatattttgtgtgtattggggatatatgaataatagtcacacttctgaagaaatggatacagatgtcataaatatgaacaactttcttattgacaaagatgactctaacaatgtggcataatcactagccagtttaactactt

SEQ ID NO: 16263 - DNA, 432 bp, Homo sapiens
ctactatagggcgaattgggccctctagatgcatgctcgagcggccgccagtgtgatggatatctgcagaattcgccctttcgagcggccgcccgggcaggtacgcgggtctgaaaacaatatctttaagaataaaggagatgaaactgggcatggtggcttgcatctatagcctcaatgacttgggagactgagggaggaacaatggttgaaacccaggaacttgaggctacagtgtgctatgagcatgtgtgtgaacagccactgcattccctccagcccagacaacacatcaaactgctgtctcaaaaaaaataataataataaataagaataaaggagaaattaacacatttccaaatattataaaaccctaagtagttcattactgatagacaaaaaatgcttcagcaggtccttcaggctgaaagg

SEQ ID NO: 16264 - DNA, 569 bp, Homo sapiens
tacgactcactatagggcgaattgggccctctagatgcatgctcgagcggccgccagtgtgatggatatctgcagaattcgccctttcgagcggccgcccgggcaggtactgggcttgcaaggtagacagcactgtgagaaaaggaatcatagaaaattagtgctgagatgaactactgagataatagaatctaacatcctcattttagagaaaagaaacctgttgtttataaggagttgactgatgtgcctagggtcacacagctagagccctttaagccaaattgttgctctattatcctacacatttcctcataaataagttcatgggcaggaggtgagagatgaagaaaatagatacaccagtcacaatgttaagagaaaagctctaagagccaggaagagaataaacaaaaatgaggggaataaaagaatcaagaaagaagtaaatctttctttgttcaaagacaagttccagacagaactgggaacatttaaagcagagaaggcagaaaaaaaaaaaaagatagattggcccctagaagcacaggtaaagcatgaaaaatgat

SEQ ID NO: 16265 - DNA, 421 bp, Homo sapiens
atacgactcactatagggcgaattgggccctctagatgcatgctcgagcggccgccagtgtgatggatatctgcagaattcgcccttagcgtggtcgcggccgaggtaccacacatatacacttctggtagttttctttcttcattttctaactattttgtgagtatgttaaatatttattgcaccttcatttttaatgaatttatctcccagtgcgtagctatagcaatgcttttagataagtaaccttgcacattttcattattttcaatatttcactgttacataaaataagggtgaccatcaaggttgattttgacttgagaaccaaaagttctcactggaggcaccaggaaaaaaaaatgtagtattgcccatagtttttcatatcatatacaatattatatacaatatattatat

SEQ ID NO: 16266 - DNA, 582 bp, Homo sapiens
actatagggcgaatggcgcctctctagatgcatgctcgagcggccgccagtgtgatggatatctgcagaattcgcccttagcgtggtcgcggccgaggtacgcgggggaaactgaaattgccctattgggttagaaacctataactgcccagaagtagcaacggagctgaagtcagaaaaacaatggaagaaaatgatggaagtcttaggatggcaacgaggacacattaatcatggtagcgctccaaatataaagcctgtggtcataagatgtgaccatttggaatcccttgacttgagtttgttcccgtcatccttccaacctttcagtttggaggcaaaggaggttgtatccagaaataagtataatcttcaaatgtgcctgtggtcaaagccttagcaccaaccacatgagtttaatccaacggcaaaattatacagtggaagaggaagtaacgtgcgtgccaacgtggaggtgagtttagttcaacatgaggtcccagtctcaaaaatgctctcatctgaaaagagttcaaacctctgcttctggcctgagatagccttgaataacaggggagaaga

SEQ ID NO: 16267 - DNA, 596 bp, Homo sapiens
  misc_feature 498: n = A,T,C or G
ctactatgggcgaattgggccctctagatgcatgctcgagcggccgccagtgtgatggatatctgcagaattcgccctttcgagcggccgcccgggcaggtacttggtttatgggaattttcgctttctgctccaaggctgaatctgtcagatgactgactactcagcaaacatttgctggtactctctgtgttctaggaactgttctgagtggtcgtgacaaaaagatgaaagtcagtgatccagaagaattgagcttagtggcagatcattgtttagtgttcttagactcaaagaattgaggattagaagaaccctttgaggatattcaatttgtctccttcctgcatagaaggctttacccaaacaattagcagattgatggattttttttttcttaaacagctctagagaactgtgtcctatacagagtgcatgttttagggtagacaggaatgccaacttgggaatcattctaaatacataacatgtttatgnttaactcttttcagatccaaaagttgtggacacatatataaaatttaatttgcttctgttaattcagagatggagtataaaacttcaggggaaaaata

SEQ ID NO: 16268 - DNA, 395 bp, Homo sapiens
gactactatagggcgaattgggccctctagatgcatgctcgagcggccgccagtgtgatggatatctgcagaattcgcccttagcgtggtcgcggccgaggtaccttcatcccccatttcaccagtcttttcctggcactttctccctctattcctcactctaagactgagtggggaatcaatatttggctgtaaaggagtatatggtgtcttaccttgtgtgctgaaacaatgtatttactcaaagtgttatggattttcttttttctctacattatgccaagacataaattctgagagtgtttatgagggtgcctcttttcccctctgctttctttccaagttagagacatcaaaataataagccttaaccattttcctgtttttaaaagaaa

SEQ ID NO: 16269 - DNA, 675 bp, Homo sapiens
ccctctagatgcatgctcgagcggccgccagtgtgatggatatctgcagaattcgcccttagcgtggtcgcggccgaggtacatgagatggctcattgatacaagcaaagccttggtggctctgcgctgaattaaggaagagatttgaaagcaaggctatttccctggcggcagtaaaactgcctcctggaaagagagcaagctatgggattagatacttaataaaattttaggcaagagaaagagtccaggtcttttacctaaattgcacaccaattgagctcatctgcttattctctacacactcaggctagggaaaaagtgggcacatttcaaaactcaatgcttaaactatagcttgatgtgaaaaagtagagacaaatttgcccatgctacatcaaagtgtaagaactgtccatcttaagctgggaaacctgaaaatcatggcaagtataaaatcactttttagtaataagacaaggaaataaaataacataaaagcacatgcaaagaaagtattaggaatccaccctacgaaatgcaatttttaaaaatgacacaatatcccaggaataattatacagaaagatgcaatgaaaacaaaaattcaagaatccatcaaggacatacacacaaaaattaaaatgaaatgagaaatcccaagcgaaagaaata

SEQ ID NO: 16270 - DNA, 401 bp, Homo sapiens
ctactatagggcgaattgggccctctagatgcatgctcgagcggccgccagtgtgatggatatctgcagaattcgccctttcgagcggccgcccgggcaggtactttgtttgaaatcttcttcccccaaatgtcacgtttggaaataggagcattttatttgacaaaggtaagagttggagatcattaactgctatctttaaataagttaaatttatggtatagcagagtaactggacttttaataaggttttagaagtcaaaataaagacactagtgtgaatgatggtgggtttcaattgtctcctgggcattttggtctattgggttaggagagtaggggtcccagaatgttctgtttcttttcctcctttaacaaattttattgaacacttactagtg

SEQ ID NO: 16271 - DNA, 415 bp, Homo sapiens
tacactactatagggcgaattgggccctctagatgcatgctcgagcggccgccagtgtgatggatatctgcagaattcgccctttcgagcggccgcccgggcaggtaccatgaaacacgtctatacaatatggcattgtaaattggtgtcacttttgcacaggaatatggtaataacggagcaaaatttaaagtgttcatatgatttgactccaccataatctcaaaatttcatctaaaatatactggcaaaagcatgtcaagttatgaataagaaggcttgtcataacactacttgtttagcatcaaatttccagtttacaacaaattggaaacaaccaggatgtctctagctagtaacctagaaaaatatgtaacagattaaaaatttagttaaaactatatattttgtgtgt

SEQ ID NO: 16272 - DNA, 360 bp, Homo sapiens
ctatagggcgaattgtgccctctagatgcatgctcgagcggccgccagtgtgatggatatctgcagaattcgccctttcgagcggccgcccgggcaggtacgcggggttacagcattttttccttctctgtgcaccactcacacagaccccacgaaatgcatacaatgcacacaattttatggtcataggagaatgattcattcttagaaaaaagattccactgatatccactcaatacttgtgtctcacttggcaattggcatacgtgactgttcctctatttttccatctacctaatttcaaaggatttccagaaggaaaagaagatttaaatgcttcatttcaatatttctgagttt

SEQ ID NO: 16273 - DNA, 620 bp, Homo sapiens
  misc_feature 517: n = A,T,C or G
ccctctagatgcatgctcgagcggccgccagtgtgatggatatctgcagaattcgccctttcgagcggccgcccgggcaggtacacaatctctgatttgcaagaatgagacatcatactcattcttagaaagttaaaaagcttactatccgtctcaaacaagcaataaaaggaaattagactgagaagatggaaaagtgagacagttaaaacttccaggatcatttatcaactccaataaccaagcatcataactttatctaactttagctccacaaccttgacgaaaaatcacagtaacaccgtaaaaggctaaaaaaaactacttaaacttagtgttatttctctcccttgttaacctgaaactaaacattttatcccacctcagagataatgtttaaataacaaatatgtatctaaattaaaattccagtgatttttttaaatttaaaaaccatagggtgctttttatactcattataaggaaaacattttttagcctctgcaggaagaagatnatactatttttaattatataggacattttacaaaaactcaaaatatttttgaaatagtaaagtctctgatatccctgggaggtaggtgaatatgattataccc

SEQ ID NO: 16274 - DNA, 524 bp, Homo sapiens
actatagggcgaattgggccctctagatgcatgctcgagcggccgccagtgtgatggatatctgcagaattcgccctttcgagcggccgcccgggcaggtacgcggggggaaacccattgaaagaaccgagtctgaaatagagtaaggtctttttaacaacaaaatgactttgcatgggtgtaaagccaaccaactaggtcagactttctaggaatgaacttcagtagaatttaaactttgttagagacaattcacacctcagtctctatccagtggatcaagctctttctggatgaagctctatgtaacctagtaaatcagagctttctttgggtgggcctggaagtttgatatcaagaataaccagcctgtaatcccagcactttgggagctggaggcaggaaaattgcttgaggccaggagtttgagaccaacttagataacatagcgagaccttgtctctacaaaaaataaaacattagctgggcatagtggcacatgcctgtaatcccaactacttggg

SEQ ID NO: 16275 - DNA, 480 bp, Homo sapiens
tgcatgctctagcggcctgctctgtcatggatatctgcagaattcgccctttcgagcggccgcccgggcaggtaccacctaacaaattggaggaaatgaaaagacgaatcaacaacattttggagaaaaaatttattctacttctagaatttcattactacaagtgcttagttcttggtttggtagatgaagtgaaatcaaaattggatatttggaacattaaatatgggagcagagaatctgtggaattattgctggaagactggcataaatttattgaagaaaaagaattcctagctctacttgatacttcttttcaaaaatgtggagaaatttataagaatttggctggagaatgtcagaatattaataaacagtatatgatggtgaaatctgatgtttgtatgtatagaaaaaatatatataatgtgaagtccactctacaaaaagtgctggcatgttgggctacttatgtggaaa

SEQ ID NO: 16276 - DNA, 480 bp, Homo sapiens
tgatggatatctgcagaattcgccctttcgagcggacctttcgggcaggtactagagacaatatcagaattcaaaaaaggacttatttatcatacataaaagatccataaagaatagtgaaatctgaataaagtctacagttttagtttacagtaacatatatataccaatgctggtttcttaattttgataaatgtaatataaggtaatttaggtcatattggtgagtaagacggtattgggaaataccttaaagttcagttaccttagtcagagaactggcctgctaggaagtgttgggaatttgtctttggggctttgtcttcctattatctgtgcaactttgctgtaaatctaaaattatcctaaaagaaaaagttactttaacaaaacaagattcataatgggtaaagaattcacatatctggaagatggcctttgcttttgaggacatcatcaccaagggggaaccatgttcac

SEQ ID NO: 16277 - DNA, 656 bp, Homo sapiens
tacgactcactatagggcgaattgggccctctagatgcatgctcgagcggccgccagtgtgatggatatctgcagaattcgcccttagcgtggtcgcggccgaggtactaaaaacaaaaactttctattgttttgaaaccttcaagtcctttacctattgcccttttcccactttgttttaataatacaaaaatgtaaaacatctcttaggaacgtaaattatagaccaggcatggtaactcaggcctataatcccagcactctgagaggccaaagcaggaggatcacttgacctcaggaatttaagaccaggaggagacctcttctctacaaaaagtaaaaaagtaaaaaaaaaaaaaaaaaattagccaggcgtggtggtgcacacgtgtggtcccatctactcaggaggctgaggtgggaggatcacttgggcccgagaggctgcaaggctacagtgagccatgatcatgccactgcactccagcctagacaacagagcaagactgtgtatctaaaaaaagaaaaaaaatagaaattttgttacagtaagggtgctgattatctcacgtatgttaatgttccaaaatgataaagctggcttaaaccacaatctccactaaggaaaaacactacattatataatccaaaaattt

SEQ ID NO: 16278 - DNA, 383 bp, Homo sapiens
  misc_feature 347: n = A,T,C or G
atacgactcactatagggcgaattgggccctctagatgcatgctcgagcggccgccagtgtgatggatatctgcagaattcgccctttcgagcggccgcccgggcaggtaccagggattaggatttcattatattttgttggggggcagaggagggtcacagctcaaaccacaccaatggctttgtcagatttcctgttttacttctgttgcagttttgtctgttctctctttagtaaactatccaaaaaaacctcttgattttattgcaacttagtgtaatacttaggtattcattccattatcagaatattttgtctatttttgtgagccagtgtcagggtgcantaaataatgtgctcttactgctcagttaattttttt

SEQ ID NO: 16279 - DNA, 479 bp, Homo sapiens
ctatatggcgaattgtgccctctagatgcatgctcgagcggccgccagtgtgatggatatctgcagaattcgccctttcgagcggccgcccgggcaggtacctatttaacacagaaaaaatatactagatggatgtatacaaatatgcaatctagaatagtttatgggagtgcattccactaaatgcatgttttaatttatcatttatattacagctagtaagaatttgcacatgctgcattcttttcaaatctgcctcactaccctgtatcttctatttttaccaggtcgggtcctagtagaaacagcaactctgggaccaggccacctaagcctgaccttcaggcagaaaatgtcccagtgtgaaaatttatcttagtcatcaatcatatcagccatataacatttttatccattaaaataaaaaaatacatatgttgagatgagcagctaatagctagtgctcccttcaatcggaa

SEQ ID NO: 16280 - DNA, 587 bp, Homo sapiens
ctatagggcgaattgggccctctagatgcatgctcgagcggccgccagtgtgatggatatctgcagaattcgccctttcgagcggccgcccgggcaggtactttcccaggctattagtattatctaatgagtggcttaaagataccagaaacactgactgaggtctccacctgcttctgctgaatgaatgggagcttctagccattgaataagaggcagtagccaatgtttcttattctgaatggtccaggttgacttttataagagaaacactcagccttttaattgctgaaggtctggcccatagactaagattgcacattcttagtctaggttacacttgaactagactgcacccactgacgatatattcagttcaggtgttaactcacttggattagcatctggcctgtcctatctgaatataggttgagacgtgtattggaatctctgactagtcagaatacgttcttagttatattctcaatactgaggaatttttacttgtagaaactgaaggctcggaagaggatgataaagaaaatgataagactgaagaaatgccaaatgattcagtccttgaaaac

SEQ ID NO: 16281 - DNA, 361 bp, Homo sapiens
cggccgcccgggcaggtacgcgggggcggaccgtgtcaaattcatggaacgtggcatcgtgctctgacaaggatagcaagaggtcaggatccacaaaacaggccggatgaaatcaccatctccgtgcggggaggtggagagagcatatccctccctgccagtctggcaactccagcaaagtcctcatgctcatcccacacactcggtgctagtcactgctgtgtgtttacatgagtaatggagctgccgggggaggggagttgtaagcagaacgctgagcctcgcatcttcgattctgagggaagctgacttcacaccaagttgagacttccagggatgtggccgtggagcaatcacatgc

SEQ ID NO: 16282 - DNA, 545 bp, Homo sapiens
ccctctagatgcatgctcgagcggccgccagtgtgatggatatctgcagaattcgccctttcgagcggccgcccgggcaggtacgcggggacagcgcgcggaagaaaaaccagcaagaaggcggcgggggaagatggcggtcctggggtagagtttgcaagctttctgactaggctagtcgagtaactattcgggtcatggcgtcaaactcaactaagtctttcctggcagatgccggctatggcgaacaggaactggatgccaactctgcccttatggaattggacaaaggcctaagatctggcaaacttggtgaacagtgtgaagcagttgttcgctttcccagactgtatcagaagtatccattccctattcttatcaattctgcattcctaaagttagctgatgttttcagagttggaaataatttcctgaggctatgtgttcttaaagttacccaacaaagtgagaaacatttggagaagattctaaatgtggatgaatatgtggagagaattgtttctgtgattcatagtaatgatcct

SEQ ID NO: 16283 - DNA, 608 bp, Homo sapiens
  misc_feature 545: n = A,T,C or G
gactactatagggcgaattgggccctctagatgcatgctcgagcggccgccagtgtgatggatatctgcagaattcgccctttcgagcggccgcccgggcaggtacgcgggtgctcccagggaggcgtcagcgggcaccgggcacacgacagagtgctcagcaccatcagccatgaggagccacagatccaaaccacaagacgccacttcactcccgcggggacggtgtcagtaaaaacaggtgagaaccagtttgggtgaggatgtgaagaaatgaagcctgagactgcgggtggcatggaagctgctgccgccacttcagaaaacagtctgacggtttttcaaacagttaagcagagtgaacccagtgcccacttggggcaggggaaggatgagcatgttccatatgcacacaatggactattaccctgcgagaaggaacgagctattgatattgatactcagaacgtcagcgatgaatactataaacatcctgctgtctgaatacagccagatacagaagaaggcctactgtagagtccatntgtagaaagttctggtaaaaaccaaattcagatgacagaactaagagcacttgtatcccctga

SEQ ID NO: 16284 - DNA, 404 bp, Homo sapiens
  misc_feature 322: n = A,T,C or G
tacgactcactatagggcgaattgggccctctagatgcatgctcgagcggccgccagtgtgatggatatctgcagaattcgcccttagcgtggtcgcggccgaggtacatctggtcaccaagtcctatatttttctcaaatgtctcttacattagttactttccaagttttacaatcagaaaaatagtctagatttttttcaccacctaaatattttctggcttccctttatccttactttaatttatccactaaaaagacaccagaattactccccaaattggccatttttctgatttttaaaaggatggatagtgtattntggtgggaaggatgagaaggttaaaaaatattatctaaaattaaaatgcaatattttggagagagagatctttggtttagat

SEQ ID NO: 16285 - DNA, 610 bp, Homo sapiens
  misc_feature 118: n = A,T,C or G
gtaatacgactcactatagggcgaattgggccctctagatgcatgctcgagcggccgccagtgtgatggatatctgcagaattcgccctttcgagcggccgcccgggcaggtactttnttttttttttttttttttttttagacagagtcttgctctgtcacccaggctggagtgcaatggctcaatctcggctcaccgcaaactccacctccaggttcaagcgactctcctgcctcagcctcctgagtagctgggattacaggtgcacatcaccatgcctggctaattttgtatttttagtagagatggggtttctccatgttgatcagcctggtctcgaactcccaacctcaggtgatctgcccacctcggcctcccaaagtgctgggattacaggcataagccaccgtgcccagcccagtaatgttttaataaatacccatttaataattttgtctgacacctaaactcataacaaagatattttaaaatgttagattttcactcacattagtatacatttacaatttaatgaaatgcaaaaacataatgcactactgatcctgtaaaattaatttaagggttttattttttgctctcccccataag

SEQ ID NO: 16286 - DNA, 565 bp, Homo sapiens
tatagggcgaattgtgccctctagatgcatgctcgagcggccgccagtgtgatggatatctgcagaattcgcccttagcgtggtcgcggccgacgtacaagataaataggatattactagagttatagcctacaatgtaattcattatttagaaccacataacatttattgtgaaatttccaaattctgtaatgatcaatttataaggtattgtcagtattattgcattatagtagttttcaaggcttaacttttatattcctagagtgctcactgtgttgaattcattataaagacaatgttccaacatatataaagaaaaagtagaagagacaagtcaacatactgccctcatattttggaacattttcttgcagtcttagcctattccgtgcatttacagttctgtatcctcccttaatactaatttaattagctacttccatattttttaatttaaattttattttattttgtaattttaaaaacaaagttgaaaaatagtcttaggaatacttcaaactggtggttattatatatttctgggtataagtctttttttcat

SEQ ID NO: 16287 - DNA, 469 bp, Homo sapiens
ccctctagatgcatgctcgagcgtgtcgatacatgctcgagcggccgccagagtgatggatatctgcagaattcgcccttagcgtgctcgcggccgaggtacgcgggtgaaaggatcagaacttaaaaaagctgcagaggtcccaaatgaggagctcatcaatcttctactcaagtttgaaattaaagaagtgattttggaatttactaaacagcagaaagaagaagatacaattctagtatttaatgttactcagttaggaacagaggccacaatgagaacatttgacttaactgtggtatcttatttaaagaaaatcagcttggattatcatgaaattgaaggatccaaaaggaagccccttcacttgattagctcttctgacaaacctggattagatcttttgaaagtggagtatattaaggctgataagaatggacctagttttcaaactgcttttggaaaaact

SEQ ID NO: 16288 - DNA, 437 bp, Homo sapiens
cgaattgcgccctctagatgcatgctcgagcggccgccagtgtgatggatatctgcagaattcgcccttagcgtggtcgcggccgaggtaccattcatttaaaggcataaatgtccaatggggccatcttgtgatacatgcactgtcacaggaaaagtttccaggaaaagtcaagccagggcttcacagaagatcaaaagaaagagacaaggagaagctaagtgtattagtcaggattctctaagggacagaactaatagaatatatatacacacacaaacacacacacacacacatatatatacatataaataaaagggagtttattaaggagtattaactcacacaatcacaaggtcccacaacaggccgggccatctgtaagctgaggaacaaggaagccagtctgaatcccaaagatgacaaacttggagttc

SEQ ID NO: 16289 - DNA, 652 bp, Homo sapiens
ccctctagatgcatgctcgagcggccgccagtgtgatggatatctgcagaattcgccctttcgagcggccgcccgggcaggtactcaaatatagtgagctctttcagttctacatttgaggaaaccttactctcaaagtgccttttacataatacttagatttgtcaatgaatatttctatgcatctaggcatcatgacaatggaagttaaaaataatgtcctggagacatttcaaaaccattaggtatcatctgaatcatcaagatacaattatgcttactatagtgttatcattaaacattaacatttacttttttcaaaatcagtgatctgtattgatacatatttagtagcactctattaataagaatatgtaattaaccacagcactccactgcttgaccatatcagatgttagagaatttgcttaagagttctgtttagccccctacttctaacagctttccgtctctctactgagagataaaagagtaatagaaaatagagtaatagaaactacttttatattcatcaaagccttaggatcatataaactctcgaactaaaatatcttctgagggtaaataaaaaagcccttctcttatttcttacctgctgctaccacacatgtgcacacacacatgcaatgaa

SEQ ID NO: 16290 - DNA, 687 bp, Homo sapiens
tgtatacgactcactatagggcgaattgggccctctagatgcatgctcgagcggccgccagtgtgatggatatctgcagaattcgcccttagcgtggtcgcggccgaggtactgggaccccaaaaatatcagaacctataacagtttttgttaactagacatctggaaaacacctcactgaatctttacgtgaatattttactttaaattatattttaatacctaagaacccagaacttcctcttgtgaaaaaaacaagagagtttgtcactgaagattcttcagtttatattccttgaggtttggacttagttcgttttagtaatcatttctccatgcccatttccttgttcttaatcacaaatctaatcatgtatttttataaatattcaaaattaaatatatttatctacttatgtaaatactttttagttactgtctaccaatagcatgtatagggatctcatcaacaaacagatttagaactttttagatttgttccagcagcttgtaaattcatcttagacttaattgtttaaatatatcaacattctaatcattttaaaaagtggacagaaaagattaattccaagttttcttttacttaccaagctctgccattccaccccgctgccttaacaatattatcagctctttggatactcattcttgctaagtaaaagcata

SEQ ID NO: 16291 - DNA, 532 bp, Homo sapiens
  misc_feature 381: n = A,T,C or G
gactactatagggcgaattgggccctctagatgcatgctcgagcggccgccagtgtgatggatatctgcagaattcgcccttagcgtggtcgcggccgaggtacgcgggatgtttctatatgccagtaacaaactagctaaaatagaaatcaaggaagaaattctatttacaatggctacaaaagtgaaatgcctaggaataaacttaaccaaggatgaggaaaaaaaaaacccaaaaggcctctacaatgaaaaccacaaaacactgataaaataaactgagaaggacacaaacaaatggaaaggcatcttatgctcgtgggttggagtaactaatactgttaaaatgaccatactgcccgaagcaatctaaagattcantacctgcccgggcggccgctcgaaagggcaaattccaacacactggcggccgttactagtggatccaaactcggtaccaaacttggcataatcatggtcataactgtttcctgtataaaattgttatcccctcacaattccacacaacata

SEQ ID NO: 16292 - DNA, 420 bp, Homo sapiens
atacgactcactatagggcgaattgggccctctagatgcatgctcgagcggccgccagtgtgatggatatctgcagaattcgccctttcgagcggccgcccgggcaggtacctaaagtcaatgtaattgaagatataaaattgttctttccatttttgtcagcaattttgactggagtcaaattaaagtgtgatgggcaaacttggtctgttgcattctataattattgctgtcaggatactttcaactacagataggattgtttctgcatttatcattctctgttcctgcttatgtatttgtcagtgcagctgtgattcatttattttacaatactgcagctaatcgtgtatgggctatttgattaaaaacaacattttaacaagaccaaaatagccaaggcaggggaaaatgtggtta

SEQ ID NO: 16293 - DNA, 508 bp, Homo sapiens
gactcactatagggcgaattgtgccctctagatgcatgctcgagcggccgccagtgtgatggatatctgcagaattcgcccttagcgtggtcgcggccgaggtacataaagtcaattagcactatatttgcaaacgatcagtgttaataaatgttagctttctctcttatcacattactacaaaaagaattagcaaatggaactcttggggaagtgagctgttttcagaaggaagagatttgaggagtttatgataggaataatagaatgtaaggtgagaaaggtggttctatttcataaagggtattcgttaccactcagggtatttttgtgcttttgttttctgggttctgcgtttttgtaattgtcttacgtttgtattacatacgctatttctgtttttcttaatagtagtagtataaaagcaatgtaataagattttttcttcagaaagacaaataggacagccatatacataaggcattggagtaaggaagaaatagaggaa

SEQ ID NO: 16294 - DNA, 601 bp, Homo sapiens
gactactatagggcgaattgggccctctagatgcatgctcgagcggccgccagtgtgatggatatctgcagaattcgccctttcgagcggccgcccgggcaggtacataactgaaactgttagcttcattacaacctacatgaagaaaatagaggaatgtgaagaatttatcagatgaatagcatttctacacaatgattttcctttactcccctaatgaatctttaacttcaggaaacttcagacttgagagagatttgcagaggtccaacaaataagcctgaaataaatgaagctatgagtaagattttggaaacaagtcctaagtagagacttcctaaaccaaagaaaacaaaaacacctccttagtcaattttgtctactttattctcccaggatatttttctgcttctcatgtaaatttagtaacatttaaggaataaaaagagagctgcctggatatattagcagtgtgattggtcatattattagagagattttacaatcagttctacaaatgccccactgaaattgcactgaactcactcttacaaccttgctctactgggctccaaaccaacccttttacattctgtacctc

SEQ ID NO: 16295 - DNA, 167 bp, Homo sapiens
tacgactcactatagggcgaattgggccctctagatgcatgctcgagcggccgccagtgtgatggatatctgcagaattcgccctttcgagcggccgcccgggcaggtactcctaaaattcagttaggggaattaaaataatatctttttactcagacagtattcat

SEQ ID NO: 16296 - DNA, 534 bp, Homo sapiens
tataggcgaatgggccctctagatgcatgctcgagcggccgccagtgtgatggatatctgcagaattcgccctttcgagcggccgcccgggcaggtacgagtaatttaaatttaaggtattttgcataggaattttacccctacataagcaattctacttcataagatatagccactggatatatacagtatatcttcatggaatattgattttccctgaaaactttgggggaaatccatttttacattaaatagataaaaggggacccaaaggtgcctcatttaaggaaggctaccttgcctctactctcaaaaccttctggggcgaaattatattccccattggtgtttaaaaaactagggaagaaaagctgaaaagagcactataattcgtaataaaaaacacatatggtgccggcttggtgattcacggcctgtaatcacagcactttgggaggccgaggtggggcagatcacttgaggtcaggagtttgagaccagcctgtccaacgtggtgaaaccccatttttacta

SEQ ID NO: 16297 - DNA, 681 bp, Homo sapiens
atacgactcactatagggcgaattgtgccctctagatgcatgctcgagcggccgccagtgtgatggatatctgcagaattcgcccttagcgtggtcgcggccgaggtacaattatgttttaatacagtgtgctgaactgagtatttctaccaagtgttgggttgttctaaatgctactgaaaaacacaactaccttatatcagttttatggcaaagctactaacaggtgtttttagaaatatgtcagagataaactttaaccagtgtcttcttagtggaattttaaaaatttgttaagttcattgtagagaacaccattcatagaccaagatggtcccctattagctgatattttcatttatgtaagatcctggacattctgttttgtgttggaacaaattttcaatgtttttaattctcccttttctgcctgttcctaaaaactttcaaaataaccatttcaatgtaatttgtcttgaagaagtttacccaatatctttgtcattgcaataatgtagtatggtgatggtcaatttaattattgcttataaaatgaacttgattgcagtaaccatggtatcgatgaaactaatgcagtgaagctttattactaatatatataggcttatcaaagcaagctaagaagcttgctttaataattaataatttaaaaatattatt

SEQ ID NO: 16298 - DNA, 331 bp, Homo sapiens
  misc_feature 322: n = A,T,C or G
agtacgactcactatagggcgaattgggccctctagatgcatgctcgagcggccgccagtgtgatggatatctgcagaattcgccctttcaagcggccgcccgggcaggtactgcctgcctttccctatctcttctagaatgtaggcagaattgcattttcaaagtgaaaaatgagcaaatggaatggtgccagagggattgctgcttaatccacatacatttttattttgtagtcacttgaagcttcttaattggtaatctctgctttgttttgctttattatttaatttttaactataggaggaatatatagtcaggcanaaaaaaaaa

SEQ ID NO: 16299 - DNA, 406 bp, Homo sapiens
tacgactactatagggcgaattgggccctctagatgcatgctcgagcggccgccagtgtgatggatatctgcagaattcgcccttagcgtggtcgcggccgaggtacttttttttttttttttttttttttttttgggatgggcttttgccattttgccccagctggtctcaaactcccagactcaagcaatccacccaccttggcaaaatgctaggattacacgcatgaaatacttcttgaattaataaatatagagtgtttaatcactacatgagaagcttgttttctgtttgttttcggtcaaaacccaaattcttcttcatacagtaagacaaaaaataaaccaagcttatttaatattgatagtcaaagccatgtgcttatctgcaaaaccaaagcagtta

SEQ ID NO: 16300 - DNA, 649 bp, Homo sapiens
acgactactatagggcgaattgcgccctctagatgcatgctcgagcggccgccagtgtgatggatatctgcagaattcgcccttagcgtggtcgcggccgaggtacaaatttcaactgaaaaacaacaaaaaaattcaactctgccaaaagcgattgtatcctccagagatagtgacattattgatttcaggctatttgccaagttgaatgctttctgtgtcattgtttgcaacgaaaagaacaatatcgccgaaatcaagattcaaggactggattcctccctttctctccagtcaagaaagcagtcactttttgcccgactagaaaatattattgtcacagatgttgatccaaagacagttcataagaaagctgtgtcaataatgggaaatgaagttttccgttttaatttggatttgtatccagatgctactgagggggatttgtatactgacatgtccaaagtggatggtgtgctgtctctgaatgttggctgtattcagattgtctatcttcataaattccttatgtcacttctgaacttcctgaataatttccagacagccaaagagtctctgagtgctgccactgcccaggctgcagaaagggctgccacaagtgtgaaagatcttgcccagaggagttttc

SEQ ID NO: 16301 - DNA, 497 bp, Homo sapiens
tacgactcactatagggcgaattgcgccctctagatgcatgctcgagcggccgccagtgtgatggatatctgcagaattcgcccttagcgtggtcgcggccgaggtacgcggggttacaagccagattaatataaaatttttcctgagggaaaagtatctatgagaattaaaaataaacttagccctcttcctctgcaaagtccagagacaaattaaactctttagttgccatattattattgttctttttctctgaaaaaaacctagaataaaactttactacaaaggatatatatacaagatagtaataaaatatgtcaatttctaaatttgctgtagaaatatatgcaagatagcaataaaatatggcaatttctatattttcatatattcttgtttctgctatatagcctataaagcaagagcaaaaaaactctcagattactcataaatattttaactcttccaactagtaagtgacattttgaactctatg

SEQ ID NO: 16302 - DNA, 539 bp, Homo sapiens
  misc_feature 505: n = A,T,C or G
gactcactatagggcgaattgggccctctagatgcatgctcgagcggccgccagtgtgatggatatctgcagaattcgcccttagcgtggtcgcggccgaggtaccaaatatagagacaccattaaattattcagttttcatgtcctttccccttaacttgggaattctgggtaagcagcaaaaccctgcctagccatccatgggtaacaagaagtcatgcttgggccagactatacagctgatgtccagtgtgtgactccctaagtaaaacaggttaggtcccatccatatgagagaaacagtttttcagaatatggggaaagaaaagtaatgttattagaaaaatcaaataaggaaatcgtgggaaaatataaaattactgatttgtcaatcttgtcttcaaatacaagataatcttggggacaagactaaatattttactcagcatctgaacaataccaagaaaaaaaatactgccctactgaagaacaccatttatagctntaactttgtccagcacacatttcagcccatcact

SEQ ID NO: 16303 - DNA, 552 bp, Homo sapiens
ctcactatagggcgaattgggccctctagatgcatgctcgagcggccgccagtgtgatggatatctgcagaattcgcccttagcgtggtcgcggccgaggtacttcacatgatttcaagtatggtttgatgcctggtccttcaaatgatttcaagtatggattgataccaggtccttcaaatgatttcaagtatggattgataccaggtgcttcaaatgatttcaagtatggattattgccagaatcttggccaaaacaagaaacctgggaaaatggtgaatcatctctaatcatgaacaagttgaaatgccctcattgtagctatgtagccaaatacagacgaacactataaaggcacttgctcattcacacaggagtgagatcatttagctgtgatatttgtggaaaactgtttactcgtagagaacatgtaaaaagacattccctggtgcataaaaaggataaaacatacaaatgtatggtgtggtaaaagatcttcatgtgagcagccagtgttggaataagacatggatctcgacattatggtgttt

SEQ ID NO: 16304 - DNA, 583 bp, Homo sapiens
gcgaattgtgccctctagatgcatgctcgagcggccgccagtgtgatggatatctgcagaattcgcccttagcgtggtcgcggccgaggtacacctctgattctcactagttgaatgcaagaacttgaaaggttcaggtaagtgttttgaaaaattttgactttccaaacttttgccacttgctatctgaaactcaggaatcaaaaaataccgacaggcactgttactttcaaaattctttctataagttgagaatgggacagatttgcagagcaagggaaacttgaacagttacttctagtggtaggaaatgaggcggctaggatattacccagctggtgggtgacttgggcagtgtgttcctgctttcagtggttagcctttagcaaatctgctttagagtgagagtagagggcaggctgttgtattacagtgctcttgtttttgtaaaatttaattcactctactgttattttgtctccttgggtaaagtgttatttaatttttcttcattttttagtaatatataacagtcagtgagagaatttggttttcagagatgtcatccaaagcagattttaca

SEQ ID NO: 16305 - DNA, 306 bp, Homo sapiens
  misc_feature 299: n = A,T,C or G
actatagggcgtattgggccctctagatgcatgctcgagcggccgccagtgtgatgtatatctgcagaattcgccctttcgagcggccgcccgggcaggtacaaaatcatgtggatagatgtgcatttgtgggtatctgtgaatacaaatacacaattttcagatagaagtagtataagaaaaagaaatcaaacaaagtcaaacattttaagtgtatctcttggtgcactttaaaaaaattattaaattgaagctgtagtttattctcatcattgtcatcctatattagtgattttctntagcttt

SEQ ID NO: 16306 - DNA, 567 bp, Homo sapiens
  misc_feature 356, 361, 362, 363, 392, 401, 402: n = A,T,C or G
gactcactatagggcgaattgggccctctagatgcatgctcgagcggccgccagtgtgatggatatctgcagaattcgccctttcgagcggccgcccgggcaggtacttcagtcgtgtttatttataatatgggtgtggggtaaaatatcaaaccacaatgcattatatacatccatgtgaacctttcctctctgcccagagctatttctgccgtccttcttaagcctaaatttaaaaagtgatcttgtcaaactgtgatgaattgttacctgaatggcaaagaacttgctaactggaggtggcttcagtcttctttgagtattcttttatgtaacaaattgaatatactctttgnacttnnnttttttttttttttttttttttccggggnttttgggtnnttttttttttttttttttttttttttttaaaacctcaaaagcaattttcctttattaaaagaatgcttataaaaagttcatttcacttctgcgtcattttttttggtcactcccaactaacttgcaacacttggccttccctttgtaacaggtgccttgaatttt

SEQ ID NO: 16307 - DNA, 571 bp, Homo sapiens
acgactcactatagggcgaattgggccctctagatgcatgctcgagcggccgccagtgtgatggatatctgcagaattcgcccttagcgtggtcgcggccgaggtacaagttgtgctaatcattattaaaaagagactaatctattatggatttggcaattgggggtaggaaacatgatgtttgggaatgaaatgattagaatataaataaattgtcctattattgtaggaatagtgaaagatgtgaataaattttagcttgtctttttcccaagggggtctcacgttttaaggcttcagtgttctttggtgatggattttaagaataggcatatttcaaaaatttcaattgaagttaataatgctagaattattgaaaaaaattatgtggatgtttctagttttggtatttaaacatagatgctggtcacttttcaaagtgttatagtggaactaattcaagtgtaataggtgtcttagttcatactgtgttactataaaggaaacctgaggctgggtaatttatacagacaagaggtttatttggctcgggggtctgcaggttgtacct

SEQ ID NO: 16308 - DNA, 390 bp, Homo sapiens
actatagggcgaattgggccctctagatgcatgctcgagcggccgccagtgtgatggatatctgcagaattcgccctttcgagcggccgcccgggcaggtacgcgggtgaatgagagatggttccttggaacagagctcccagttcagagacagagactaaaacataaacctatgtttctaaacatatggtcaatttcaggcgaaagaatttcagatggcttctggactaacatttgctttttattttaacgttacaagtttattttgatgatcaatttctatatatgatagaaatataaattttctttttaaatacatttaagcaaataaataaagagttaatttaaaaaaaaaaaaaaaaaaaaagtacctcggccgcgaccacgcta

SEQ ID NO: 16309 - DNA, 583 bp, Homo sapiens
gactcactatagggcgaattgggccctctagatgcatgctcgagcggccgccagtgtgatggatatctgcagaattcgcccttagcgtggtcgcggccgaggtacatatacacaaaaaaggagctaaaaacccttcgtgtggcttttagatagaatgtcacattctagccttcatagggatctagaattttttttcaaaaataaaatctgaaggacataatcattgttctccatactctcaagaaatctgttcaaccactctgatttcagggttgcttttcattagcaaaagttaggaagaggaggatttgtggagttttcagggctgacttatgagtttcaaataattaccttatagacactggagcaggcaatgcagtgagagggtattaataaggcctcgcacaaaaagtgtgcagaaagacagaaagggaaaataacaagcaaaccccgggctttcttccttaatttccagagtcctgattttcttattaaaaataagtgttaaaatatttatctttcctaacctctacaactaactttatattctaaataaagataactttcaattataaacaaaact

SEQ ID NO: 16310 - DNA, 189 bp, Homo sapiens
agggcgaattgggccctctagatgcatgctcgagcggccgccagtgtgatggatatctgcagaattcgcccttgagcggccgcccgggcaggtacaggattttctacccccaaatcagcagaatgctcatccttctcaagtgcgcatgaaacgttcttcagaatagatcatgtgttaggtcacaacaca

SEQ ID NO: 16311 - DNA, 377 bp, Homo sapiens
gactcctatagggcgaattgggccctctagatgcatgctcgagcggccgccagtgtgatggatatctgcagaattcgccctttcgagcggccgcccgggcaggtaccaaaaaaaagatctgtgaatattctctaacacctctcaacacaagggcaagtgtcacagatggaagtgaagactaaagagagacaatagaattcactgattaaggtttaaatatcttactttagcaactttttatttgcaaaaatagaaaactgatcatgtgaacacatttgcattaaaagatgtttctgcaaattaggggccctgaaattaagcttcatcaggttcatggtaagtctacctctctctttatctatagcacttggcaaagg

SEQ ID NO: 16312 - DNA, 635 bp, Homo sapiens
  misc_feature 554: n = A,T,C or G
actatagggcgaattgcgccctctagatgcatgctcgagcggccgccagtgtgatggatatctgcagaattcgcccttagcgtggtcgcggccgaggtacacctctgattctcactagttgaatgcaagaacttgaaaggttcaggtaagtgttttgaaaaattttgactttcaaacttttgccacttgctatctgaaactcaggaatcaaaaaatatcgacaggcactgttactttcaaaattctttctataagttgagaatgggacagatttgcagagcaagggaaacttgaacagttacttctagtggtaggaaatgaggtggctaggatattacccagctggtgggtgacttgggcagtgtgttcctgctttcagtggttagcctttagcaaatctgctttagagtgagagtagagggcaggctgttgtattacagtgctcttgtttttgtaaaatttaattcactctactgatattttgtctccttgggtaaagtgttatttaatttttcttcatttcttagtaatatataacagtcagtgaaagaatntggttttcagagatgtcatccaaagcagattttacagttgtttcctggttataaattgtctcaacaattctcttttagtca

SEQ ID NO: 16313 - DNA, 639 bp, Homo sapiens
cgactcactatagggcgaattgtgccctctagatgcatgctcgagcggccgccagtgtgatggatatctgcagaattcgcccttagcgtggtcgcggccgaggtactcaaacattgagggcagattttgaagttaccctttatgcttctatatttggcatatgtgtcatattacaagtttggaaaatgagcttactgacagaagggaccatggaaaaaaatcactttccttatttcaaaagaaaataaatctttttaaaaattagcccttaaaattatctccaaacttagccatttgtcttatgttcactgacagtatgcttgggacttgtagggaagggacacacacacaatggtaaataaaaactggctcagtgcctgactttgtaaagcacatgtttttaatagatgctaaattttatgcctggaaatgtaggctacgatggaaatgtgggaagggccaggtaaacaaggatcaaattacgccaagtcccccaaaaagactaacacaaagtgaacatcagaaggtcatcggaaaaaccaggagaatggggtattaaaacacaggaagacaggaaaagcagtgctaatttctgtaagtatggttatggatatttgtgggtcatggtatttttttttt

SEQ ID NO: 16314 - DNA, 453 bp, Homo sapiens
gcgaattgtgccctctagatgcatgctcgagcggccgccagtgtgatggatatctgcagaattcgcccttagcgtggtcgcggccgaggtactgagtcttggttttcttaggtctgaaacaagaagattggatttagttatctctaagttcttttccagctataaaatctttgtatttatgtaataaataaagggctgctagttctatgatcctgatgtttactttttcaatgcatgtttgattctgttcagagaaaatacctggtaagccctaatggaaaccatctgttagaaaaagaaggagacagaatcgtggagctctgttgacttccctcgtcttaccagcaaagagaagaggtgtagtaattcttaaaaaggaagaaagaagagagatcaaagtgggagaaggaaaaataaaaagaaaaaggactaagcactttcttctttcctctg

SEQ ID NO: 16315 - DNA, 472 bp, Homo sapiens
ccctctagatgcatgctcgagcggccgccagtgtgatggatatctgcagaattcgcccttagcgtggtcgcggccgaggtacagcaggaggagtcttcagtaatggctgggtttgcgactgatttggtagtgtttgaattctctgtgcattccatttaaaaggcatattaggattataagtagcttcaaccaatactctgtcacctacttggggggttttccctttgacagcactaagctgaaagaatacatcttcatccacaaatccaaatgtatcatgtagttttgtaaccacccctgtgaaaacacgctgcttctgaggctgggtttgctgttgactggaccttggtgttggatatgatacagttatttgtgctgttggctgaggagtagacaggctaaggcttgtaggcagtgcaacagctggctgtgttaagagggtttgctggggttgctgtaactgttgtaatgc

SEQ ID NO: 16316 - DNA, 474 bp, Homo sapiens
tacgactcactatagggcgaattgggccctctagatgcatgctcgagcggccgccagtgtgatggatatctgcagaattcgcccttagcgtggtcgcggccgaggtacgggggtaggcaaatccatagagacagaagacagactagagattgccagagggtgggaggaggaatggtaactgcttaatggggatggagtttcctctgggatgataaaaatgtcctgggactagatagtggtaatggctgcacaaagttatgaagacacttaacatcactaatgataaatctgacgttatgcatacgtcaccacagtaaacatacccctgcagtggaataggttctgagaccatttagaggtcacacagaaaattagaagatttaaaaagaaaaattgattcccagacaaggtgcctgaataggaacagctccagtctgcagctcccagtgagaccaacacagaaggcaggtgatt

SEQ ID NO: 16317 - DNA, 433 bp, Homo sapiens
tatagggcgaattgggccctctagatgcatgctcgagcggccgccagtgtgatggatatctgcagaattcgccctttcgagcggccgcccgggcaggtacagcaatttttcttgccacaaacctgaattaaccttacagattttttaataggagccctgagatataattttactttttggagaatatacttacccttttaatagctttttcttttttagaataaaaatgtttggaaaactagactcctgtttctccagattagaaatgaaatttgatcctgtggtggcagtttttctctctctcatcattacatatgttagaaattctgataaggagattgttagaagcagagataaagattatataaaagagagaggagacagaaaaggaggtgaaatgtaatctcacaattccctgcaccacttatttatt

SEQ ID NO: 16318 - DNA, 543 bp, Homo sapiens
gactcactatagggcgaattgggccctctagatgcatgctcgagcggccgccagtgtgatggatatctgcagaattcgcccttagcgtggtcgcggccgaggtacaattctttcatcttttctgtttgcaattttgcataataaaatgctaaagggaaaacatttgatgagcagagtatcaaacacaagagtaataatactactacttacatgaaattctaaaacaaagaaaactcatctatgatgtcaaaaatcagatgagtagttgcctgaggcaggagatgtgggtggctgatggcaaaagagcacaaaggaactttctagagtgatggaatgttttatgtcctgattggggtgctaactgcatggacagacacatttgccaaaattcatccaactatacataaaacgtgtgcctcatattgtatataaattatacatcaaacatcaacttggttggtttttaaaataagttcactatataaaatctggaatacacagaaaaagcaaagagaaattaagtcccaatcccatcaccccaat

SEQ ID NO: 16319 - DNA, 553 bp, Homo sapiens
tacgactcactatagggcgaattgggccctctagatgcatgctcgagcggccgccagtgtgatggatatctgcagaattcgcccttagcgtggtcgcggccgaggtacaacgtgggcaagcatctgtgcatatgaaatgctgtttttctaaaagatttctcacattggcaaactgagagattttcttctggaacacaggaaagattatattaatgcttatagccataccatgtctgaatatgggaggatgacagacacagaacgagaccagatagaccaggatgcccagatattcatgaggacctgttcagaagcaattcagcaactacgaacagaagctcgcaaggagatacattcccagcaagtgaaggagcacaggaccgctgttttggatttcattgaagattacttgaaaagagtatgtaaactttactcagaacagagagccatccgagttaaaagagtggtggataagaaaagattatctaagctggaaccagaaccaaatactaagacaagagaatccacatcttctgagaaagtttcacagagt

SEQ ID NO: 16320 - DNA, 359 bp, Homo sapiens
gggcgaattgggccctctagatgcatgctcgagcggccgccagtgtgatggatatctgcagaattcgcccttagcgtggtcgcggccgaggtacttgttactcttacagatgtctcaattaattttaacctctatccctaatggtgtttaaattttggtaaagaaaaattcattttttctttattttccaagaaatggtaagctatctttgtccctatgggagatgtggacagagagaactttctgtctctgatgtcttttgtgtgagacacgattttatgaaataaataactggcgcagggaattgtgagatacattttaacctcctttcctgtctcctttctcttttatataatcct

SEQ ID NO: 16321 - DNA, 551 bp, Homo sapiens
  misc_feature 415, 516, 517: n = A,T,C or G
ctatagggcgaattgggccctctagatgcatgctcgagcggccgccagtgtgatggatatctgcagaattcgcccttagcgtggtcgcggccgaggtacgcgggtgaggctggatgagaaggctgattgtcatctgtggttctgcttcttccttatgcatttttgacccatttcacagatttcataataactcattatgaaaattttattcttttcagaaccaccgatttttaaaactttaatcaagacagctttctttttgcaaaagatttcaataatgaggattccaggttggcacaggctgatttgggcaactgagaaaagtctttccgacctttgtcagagaagtagcttaactgagttcgttcttgttgccaccttgcttttgaatctcttggttaatgtatgaaagcanaagaactgctttcatctgaggcacacagtggcaaagttcccatggcaagaaatgtttgttcttacaaatctcatacatggtggtcacaagggaaaccttcnnattttgttttgcttgtctgggctttatcataatt

SEQ ID NO: 16322 - DNA, 670 bp, Homo sapiens
taatacgactcactatagggcgaattgggccctctagatgcatgctcgagcggccgccagtgtgatggatatctgcagaattcgccctttcgagcggccgcccgggcaggtaccttatatactactttcaacaaaaattagttaatgtttgtttgcatttgagttggaatgtcatgtgcttgatagaatgaaccttagtcttagttccttagtctaacctctggtttcttagtcttagttccttagtctaacctctggtttgagtctcaggaatatatttacatccaggtttggtcctttgaagatatcacagactagtccctttttcacatgatgtcctttaaatatttgagtaatatctgatattttaacatttactatgtgatacatcctgtgctaagcattttgtaactaaaataatgaagatttttgttatgcattataaattgttcttagtagccttcaaatacaccacaatctgtgcagttagttaaattcaacagcagttcatttttgcagaatctgtgaagtggggcaaaacgttcttcaattatcagtaagttacctacttagctcttgcaggcaggtaatgcattgcactccattttccatcaataatatgtgatgagcatccagagaattatataaaaatgattatgaagaaattatc

SEQ ID NO: 16323 - DNA, 381 bp, Homo sapiens
actatagggcgaattgggccctctagatgcatgctcgagcggccgccagtgtgatggatatctgcagaattcgcccttagcgtggtcgcggccgaggtactgggcttgcaaggtagacagcactgtgagaaaaggaatcatagaaaattagtgctgagatgaactactgagataatagaatctaacatcctcattttagagaaaagaaacctgttgtttataaggagttgactgatgtgcctagggtcacacagctagagccctttaagccaaattgttactctattatcctacacatttcctcataaataagttcatgggcaggaggtgagagatgaagaaaatagatacaccagtcacaatgttaagagaaaagctcta

SEQ ID NO: 16324 - DNA, 542 bp, Homo sapiens
tacgactcactatagggcgaattgggccctctagatgcatgctcgagcggccgccagtgtgatggatatctgcagaattcgcccttagcgtggtcgcggccgaggtacaaatgtgatcccagagtcaccaccagaactattttaattattcaggaaggaagaaatgtgggatgctcagaagtaaacaaaagtctcaattttcaaaaagaataaatttatggctacattagatattgacctctgggggaaaagttatagaatggatatcaaatagatttgtcttgtattttaaatttttttgtaaagtctaaatgaaaagattaagagaaataaatggaatactataaaatggccagaaatatgctattacatatgtttatatctatatatacagatacattaagagataaattcctttttcttcacaaattgttttataatttttcaaaatctgcaaagtgaatggtatagcctagagtcactgcagtctgcatattagcaagaagtcacacaggtagggtttcttgctacaatttttattg

SEQ ID NO: 16325 - DNA, 199 bp, Homo sapiens
cactactatagggcgaattgggccctctagatgcatgctcgagcggccgccagtgtgatggatatctgcagaattcgcccttagcgtggtcgcggccgaggtactgtcattggcccaggcctgacttgcctttcttactgacttttttcctaattttccttcaaaactcaagttaaccttttcttctgagacagctttt

SEQ ID NO: 16326 - DNA, 507 bp, Homo sapiens
ccctctagatgcatgctcgagcggccgccagtgtgatggatatctgcagaattcgccctttcgagcggccgcccgggcaggtacgcgggtgactcaatgactgtgtgtaacactggtaaaatatgaatagatagagtgtatcaatttctattttttagtcatgacaatgtaaaatagttatgcaaggtgttaccattgggggaaactgggtaaaactatataggatttatctgattatttattgccactacatgtaattcaataactacctcaaaagagaatgttaataaaaggaatgaagatattatttcttagctgatatggagtgaattataggatataatgtaaatgctaaaaaagtgagaaaacaagatgctaatgaaaatatttattatatatttggtggataggttaagagtgatggagtaaaattgaagcaagactactactttttacttaattttgagttttgaacatgtaaatacttttaatacttcaaaaattaaa

SEQ ID NO: 16327 - DNA, 553 bp, Homo sapiens
actatagggcgaattgtgccctctagatgcatgctcgagcggccgccagtgtgatggatatctgcagaattcgcccttagcgtggtcgcggccgaggtactcattctgttgatatgtaaacagattttatttatcatctgattaaagccacaaataagaatgctaagtgaaattttctaattcattaacattaggaagtaaacagttggcctctgaaataaacaccaatctttagtattgtgaagtcccagtttaaggtttctcagaatgtttgtctttcagtgttaacgtttgttctaatgcccagcttttattgtatgctttttctgaaggctgtgaaattctggtattactgggatattggggctggagggaggagtggcaaatgagatatctgtatctcaaatgcctttctggaatccttttctgttacatttcccagaatgtggctgttttcatttgatcgttacaaagagtggatgtttaactttggtgttaatgtcatttatgtgacatttcaaactgtcttttcaaactaacttgatcaatattg

SEQ ID NO: 16328 - DNA, 626 bp, Homo sapiens
atacgactcactatagggcgaattgcgccctctagatgcatgctcgagcggccgccagtgtgatggatatctgcagaattcgccctttcgagcggccgcccgggcaggtacaaaattttattcaaagattaagatgtgctgctttccatacaggtaattttgttcaaaagttggcatctaacctcttagacaagctgagtagtaaccaaatgatgccatgtgttactgtgcttttatttttaacctcatgaacctctgatattttaattcaatatcagattatttctttgtaggagatgctttggggatatggacaggaattgtatttatgaactgtagtggccattagccatttccaatttagtggaatcagaacttgtttttataatcacacaaatgctctgggtttaaaaactacttctttaggagtatgtgaggacttacagccaataatgtttgtcattagcttaccataaaaatatccagggtttatgacttgatgccttctatttttgctgcaatcctagtgactaatatgtacctcggccgcgaccacgctaagggcgaattccaacacactggcggccgttactagtggatccgagctcggtaccaagcttggcgta

SEQ ID NO: 16329 - DNA, 498 bp, Homo sapiens
tacgactcactatagggcgaattgggccctctagatgcatgctcgagcggccgccagtgtgatggatatctgcagaattcgccctttcgagcggccgcccgggcaggtacaaacattagccatgcatggtggcatgcgcctgtagttccagctactcagaaggctcaggcaagagaatgcttgaacctgggaggcggaggttgcagtgggctggtatggtgccactgcactccagtctgggcaacagagcaagactctgtctcaaaaacaaaaacaaaaaaaaaaaaacactttcttctataaaatggctcccatgagtagtaaaatgacacagtagttaggtttatgtccagtcacagcctctttccatttccactgggaatgccttacctaatgagttaagacaatgaaaaaagtaaaccagttagaatacttacactttctgatttaaaactcagtaaaactatagtaataaagacagtatgttactgacataag

SEQ ID NO: 16330 - DNA, 618 bp, Homo sapiens
ggcgaattgggccctctagatgcatgctcgagcggccgccagtgtgatggatatctgcagaattcgcccttagcgtggtcgcggccgaggtacaggttggtcccaaactcctggcctcaagcagttctcccacttccgcctcccaaagcactgggattataggcatgagccaccaccctcagcctcagttggtatattttgtaaaccatgcctgtgtaaccaacatccagcaatgagagtaaaaggtgaagtttagactgttctccagaaacaaacaatcatgaaatgagacttgcaaagcaaagaattacacaagtttttgtgtgctgttcgtgaaagaaggattttcttttattgaagaagattgttctctttgaccaagtttaagaatctatgtaaagaaggtagataaactgaaccaagtaggacaatggaagtcccagttagactgactgtcctcatatccacttatgtaactatagggagaagtctataattaaatttcaaaattttgtggcaagattctaaattctctgggagttgaagagaaagatcagtgggaagtggagtcattgggaaacgtgctttgggagaggatgaggcttctgaaccttgctt

SEQ ID NO: 16331 - DNA, 493 bp, Homo sapiens
acgactactatagggcgaattgggccctctagatgcatgctcgagcggccgccagtgtgatggatatctgcagaattcgcccttagcgtggtcgcggccgaggtacaacgtgggcaagcatctgtgcatatgaaatgctgtttttctaaaagatttctcacattggcaaactgagagattttcttctggaacacaggaaagattatattaatgcttatagccataccatgtctgaatatgggaggatgacagacacagaacgagaccagatagaccaggatgcccagatattcatgaggacctgttcagaagcaattcagcaactacgaacagaagctcacaaggagatacattcccagcaagtgaaggagcacaggaccggtgttttggatttcattgaagattacttgaaaagagtatgtaaactttactcagaacagagagccatccgagttaaaagagtggtggataagaaaagattatctaagctgga

SEQ ID NO: 16332 - DNA, 671 bp, Homo sapiens
gactactatagggcgaattgagccctctagatgcatgctcgagcggccgccagtgtgatggatatctgcagaattcgccctttcgagcggccgcccgggcaggtacgcggggcagatggagtagtttctgaaaatgacagggtccaaggtgtgaccacgggaccaagtggctgaactggaatgaagttaagaagcagtaagaaacatccgataatatggtgatcagttcaacagaatgacatattcatcatgtccccaaggaggagatgactgagatttcaaattctcaagcagcctcaatgcagccagagatttaagagggctatgtgtccagaaggagactctgggcaaacgcagaatggattcagattactcaaattcctgtcagatttcttaacctggtgggctataccaaacccaaaaagtttaagcagcctctacttttgcttattttctcctaagcccaaccttggctttcttttgaatctctatgagcggagacatggctccttaagaaaggagacacttcaatcctgttataggctaaactgtgtcccccaaaaatttatgcattgtggccctaacccccagtatttccaaatgcctatatttggagatagagcctttaagttaaatgaggtcattagtgtgggttctaatccaatatgact

SEQ ID NO: 16333 - DNA, 585 bp, Homo sapiens
gactactatagggcgaattgggccctctagatgcatgctcgagcggccgccagtgtgatggatatctgcagaattcgcccttagcgtggtcgcggccgaggtacatgagatggctcattgatacaagcaaagccttggtggctctgcgctgaattaaggaagagattgaaagcaaggctatttccctggcggcagtaaaactgcctcctggaaagagagcaagctatgggattagatacttaataaaattttaggcaagagaaagagtccaggtcttttacctaaattgcacaccaattgagctcatctgcttattctctacacactcaggctagggaaaaagtgggcacatttcaaaactcaatgcttaaactatagcttgatgtgaaaaagtaaagaccaaattgcccatgctacatcaaagtgtaagaactgtccatcttaagctgggaaacctgaaaatcatggcaagtataaaatcactttttagtaataagacaaggaaattaaataacataaaagcacatgcaaagaaagtattaggaatccatcctacgaaatgcaatttttaaaaatgacacaata

SEQ ID NO: 16334 - DNA, 528 bp, Homo sapiens
actatagggcgaattgggccctctagatgcatgctcgagcggccgccagtgtgatggatatctgcagaattcgccctttcgagcggccgcccgggcaggtactttctacagtcacacctgacaagccactctcacatttaaagcctctggcggctccccacagagcagatgccatgcagatgcctttgcttctgcactcagggccccgtgtaacggaactcctgcctgcctccctagcctcacattgttgtctcctgtttcagcctttgcaggtgctattctctccaccctgggttcccttctcctcattgctttcaacctatattcctccttatccttcaaaactcagctcaagggtgacttcttctgggaagctttccctccacctgcagactgatttattctgctccccaagaactttacgctatacttactgcaaatcagtggataccttatctgtctcttcccacttggttagaggacatgaagatcatgagccaccaaaaactgtccccacaaatgcacttt

SEQ ID NO: 16335 - DNA, 633 bp, Homo sapiens
  misc_feature 109, 110: n = A,T,C or G
ccctctagatgcatgctcgagcggccgccagtgtgatggatatctgcagaattcgcccttagcgtggtcgcggccgaggtactttttttttttttttttttttttgggnnctttcttcttttctttttattctttccctctctttctgtccttccctatctctctctcccaaccccctcactggccgccagctttccaccccccaccacatacacaccaacacacacacagagcttagcctcgttagttcctcttctttgcttctagccttttccactctacctctccaaaaacatccacgtccttctccttttcagggagagcagatgccttcttcttcagagcttctggttgccagtctgacactcagtcctagtcactaccctccaccttacagccgggttgtcatagcgttttcttaacaaaggctgccttctccctcttccaaggaattcttgcactgcttacaaaaaagacaatttttttttcaattaggttttctatggtttgaatgtgctccctctaaaattcagatgttggtgagcctttaagagatgatcaagccatgagggctcctccctcattaatgagattaagttcttcataaaaaggcttcaggcaacactgggctct

SEQ ID NO: 16336 - DNA, 619 bp, Homo sapiens
agtacgactcactatagggcgaattgggccctctagatgcatgctcgagcggccgccagtgtgatggatatctgcagaattcgccctttcgagcggccgcccgggcaggtaccgtagaaacataaaggaatgcctagataggagggaggaattgaaatgctgtgatttaaaggcaggtcttctggctcagagattgaaaatgagggtcctaaaagtaaaccaaagacactgtggtgggaagacagaaaaacaaaaagcatttcatttactctcactgttaccaaccaaccagaccagaggaaggagagagagatgaagaactaagactcctcctggaaatctgctgttgctaagctgtggaataaaacaaccacagaaaataaaagcaccaagtggatggaaaggacacccaaacacaaccacccacatgctttcttttatactgattcatgttagggattaaagtatcctaacagcaacttcaaaaataggaaggccaccagagatagtatgcttgcttgaaacaaaagaactgatacttttctgtgtgtattatattgagtcaccaccagactcaaagaaaaatctgattccacatccacattacttattcattagc

SEQ ID NO: 16337 - DNA, 677 bp, Homo sapiens
  misc_feature 178, 219, 220, 234, 235, 255, 259, 260: n = A,T,C or G
ccctctagatgcatgctcgagcggccgccagtgtgatggatatctgcagaattcgccctttcgagcggccgcccgggcaggtacacttaaaacttttgcctatttttgagttgtctgtctctctattattgtagaagttcattatgtgttttgcatgccaagtcctttacctggaccnatatttattattaatacccttttcccaacttttaccttgcnncttttcattttctnntaggtgtcttcaaagagcanctgnngtttttaattttgaataaagattatcgtcttttttcttttatggttttaaactttttgagtcctaatttaaaaatattttccacctcaaatttgcaaaaatgtcttctacatttttcttctggaagttttaaagttttaactgctacatttaggtctatggtctactttcagttaatttttgtgtagtgtgttaggtaagagtcaaagctgttgtttctcccacaacatcctccagcaggttttgcagaaatgactctcatttctccaattgattgctttacaacttttgttacaaatgaattaatataaagggtacctcggccgcgaccacgctaagggcgaattccagcacactggcggccgttactagtggatccgagctcggtaccaagcttggcgtaatcatggtcatagct

SEQ ID NO: 16338 - DNA, 392 bp, Homo sapiens
ttgtaatacgactcactatagggcgaattgggccctctagatgcatgctcgagcggccgccagtgtgatggatatctgcagaattcgcccttagcgtggtcgcggccgaggtactgggcttgcaaggtagacagcactgtgagaaaaggaatcatagaaaattagtgctgagatgaactactgagataatagaatctaacatcctcattttagagaaaagaaacctgttgtttataaggagttgactgatgtgcctagggtcacacagctagagccctttaagccaaattgttactctattatcctacacatttcctcataaataagttcatgggcaggaggtgagagatgaagaaaatagatacaccagtcacaatgttaagagaaaagct

SEQ ID NO: 16339 - DNA, 535 bp, Homo sapiens
ccctctagatgcatgctcgagcggccgccagtgtgatggatatctgcagaattcgccctttcgagcggccgcccgggcaggtaccagcattagaagagctattggaggaagctgcagccctcaacctttccatcatgttcgacttgcgccgacccccacagaaccacacatactatgacacttttgtgatccagacattggagactgtgctgaatgcaagggtgccccaagccatggtcttttggctaccagatgaagatcgggctaatgtccaacgacgggcacctggaatgcgccagatatatggacgtcagggaggcaacagaacggagaggccccagtttcttaacctcccctatcaagatctgccactattggatatcaaggcattgcataaggataatgtctcggtgaacctatttgtagtgaacaagccctggctcttctctctgctttggtgtgcaagggtggaattcgtcaccaccaacgactgccagctgctgcagcagatgcgttaccctatctggcttattac

SEQ ID NO: 16340 - DNA, 524 bp, Homo sapiens
ccctctagatgcatgctcgagcggccgccagtgtgatggatatctgcagaattcgccctttcgagcggccgcccgggcaggtacaacttcctgacttatgctatttcagtgtttgcttagagatgaaatatgcatttatctaattcaagcataaatctgccttaccaattcatgcatttttatttctgtagctctttgtgatgtatagagttaggcagccaaaggacacagggaaatgggagctgggagctgggaagggacggggcatattgagagatcctagagagcccatgctcagatgccttcaggtaaaatcgggccagtgaaagctggggcctggagggaagttactggaggttctggttcgtcttttgtttcttatatttagaaagcctaagtcagaggtttgtggttttgttgtgactgtggttatttttaaaccatgcttgcttctcagcaaatgtgtcaataattaattcagcactgcaaaattccaaattatgttgaggtcacttttaccttga

SEQ ID NO: 16341 - DNA, 579 bp, Homo sapiens
ctcgagcggtcgacatcgtcatagatctccctttcgagcggccgaccgggcacgtacaactcaggctccgaaatatcctgcttgtttgttttttttctaccatggtatacatctctacatattctacctgtgtaggaaattgtctgaaaacatctttagaagcagcaaaaaaaaaaaaaaaaaaaaaggagtgcccacagcacatttatatttgagagcactgacatctgctttatcacccttgtcagtcccaaatccagcaagggttgaatctaaaaactgtcagtttggctgacagtaggtgtgagtgacagcacatgcagctgaaagtgggcatgtaattttacagtttacttattgtgtgggtaatgttgataatatttctgtagctcatttcattcttaacactcagagtccttttgtataaaaacgttaagtttattttatagattaaagccaacatcttgattttggtctaggaaaacctaaaagataaactggagttgatttaaacagagagagagaagagttattctgtgcaatcatacaagttaagtgattgcatttcatttctaaaat

SEQ ID NO: 16342 - DNA, 565 bp, Homo sapiens
acgactcactatagggcgaattgtgccctctagatgcatgctcgagcggccgccagtgtgatggatatctgcagaattcgccctttcgagcggccgcccgggcaggtacatcctcattaattgcagatgtctgtatcagaaatgccaactaaatctttagcatcagacatgttgagaaaaatttacaaaattattttcatgaaaattttgtgatttttcaagtatcaacgcacccatatacagaatggccttcacaaaaacaaaaaaaacaaaaaataaacaaagaaaaacaaagtcaaaacaatgaataaaattttcatttcctttgaaagtgctaatcaccttcaaaccacaggattaagattgatacttgagctatcttggatttctaggatggaaatattggggttttaaaatcagacatctcttcaggtgtaggtatatgtgtatggataatattgcttttaacttccactaacctatttcagacagttcacaaaacaggtttttaaatatattcatatatttttggttacaaattatatcaaattcttctttaatgact

SEQ ID NO: 16343 - DNA, 577 bp, Homo sapiens
gggcgaattgggccctctagatgcatgctcgagcggccgccagtgtgatggatatctgcagaattcgccctttcgagcggccgcccgggcaggtactgtgccagggataatcattgatgagattatcaggggtcttcattcccatctgggtggtggaagatcaagctcaaaatcccatcttaggatctgctttcttgaaccactcctggcacccaactctgacaggttgcattccccagggaaaatttctgaaatgatatcagtatacaggtatttcttaagaagtattcatgagatcaacaccacagatgcaaggagaaggaagctgggtccatcactggatcctgctgaccccatggggaacccagacgctggaatggccctgtagattgtcaccacttggggcaaggggaccaggccttcatatccctgcgctgatcagtcattgggaggtaggctgcttctctgggagaaggaggtggatatgatatatggggtattccaagggcttctggaggactggcaatgttctgtcttgacctggatgcttgttaaactgtcacatttatgtagtatg

SEQ ID NO: 16344 - DNA, 372 bp, Homo sapiens
tatagggcgaattgggccctctagatgcatgctcgagcggccgccagtgtgatggatatctgcagaattcgcccttagcgtggtcgcggccgaggtactgttacattttcattatgattttctcatagtttttccttggaaatttccatgtattccttaaggatgtgtttgtcacatatgggagatttggatcttgcttttaacttagggaatgataatttttccattaaatatcccatcccatatactaaggcaaggtgaaaggctgaatggaaagatgaaatgggcaaatgtttagcctaggcaaaagtgcctgggaattacaggcggtgaggccaaccgcggcccaagcccaatcagtttccttttaga

SEQ ID NO: 16345 - DNA, 490 bp, Homo sapiens
acgactcactatagggcgaattgggccctctagatgcatgctcgagcggccgccagtgtgatggatatctgcagaattcgcccttagcgtggtcgcggccgaggtacttttttttttttttttttttttttttttttttttttttttttttttttttttttttttttaggtagaggctagtcacccaggctggaatacagtagtgggatcttagttaaccggaaccttcaccttccaggttcaagtgatttttctgcctcagcctcccgggtagctgggactacaggggcctgccaccacacccgggggatttttgtatttttagaaaaaacggggtttcgccatgttgctcaagctggtcttaaacttccgacctcaagtgacttgctcaccttggcctcccaaaaggctgggattacaggggtgagccactgtacccagcctgggaatcaattttaagcctcctattttccagggtttaagctaaaaa

SEQ ID NO: 16346 - DNA, 484 bp, Homo sapiens
  misc_feature 161: n = A,T,C or G
ccctctagatgcatgctcgagcggccgccagtgtgatggatatctgcagaattcgccctttcgagcggccgcccgggcaggtaccaggcttgctgtaaaaattagatgatttaaggtagtttgttaaacattttttattgcattaaacttttacgaaattntaagaataactgtgagagattcaatagatacataggtaaaggacacaagcatgttatctacaatagaggaactacaaatgtctagcacatagttgaaaaaaacatttggcccccacaattatgccagctatgtagtatttctatctcaagctcaggccactcccccaagctccagattcaaatgtccaatcgctcatgtgagatcacttagaagtctactggcatctcaattcaacatgtccaaaacagaatctttgattcactctcctttttcccacatacctggtctcctacctcaattaattgcattactttgttcatca

SEQ ID NO: 16347 - DNA, 390 bp, Homo sapiens
tagggcgaattgggccctctagatgcatgctcgagcggccgccagtgtgatggatatctgcagaattcgccctttcgagcggccgcccgggcaggtactctaaaaggagaatactgtaattgcaacataaaatttcaagcctctaagctaccaccagaaaaaaatgcagactagcaggaaacagaactttccttatgttgtttgttttgtatttttaatctgactcatgtaagaaaggttttgcaaaatttaggtggctttataatcacaataatacaaaagaaagtgaccctcgaaatgggttttaccactaattttcgattcttgaagatcacttcgaaacattaccagcccaaacatttttactgctcctcagaatacataacacct

SEQ ID NO: 16348 - DNA, 412 bp, Homo sapiens
  misc_feature 154, 294, 296, 299: n = A,T,C or G
gtgatggatatctgcagaattcgcccttacgagcggccgggcgggcgggcaccagtcaatgtgatgagttgagaaagtgaaataagattacaaatatgggaataaaattatcaacctacccagaactatacccaactgaaaaaggcgaaagaanataacaacagcaaaacctttagaataattcagtaactggctagttacaaaatcaataaccaatcgccaagttaaactattatacaactacacactactctcttatgcagaggtaagaatgaggtagattgatgtgtactntnctntttttaaattttttttctctcgctccatttcacacatactaagttccttctgtaatcgcttattttcttctatcagcttgccttcatccctctaaaacttttctacaatcatc

SEQ ID NO: 16349 - DNA, 452 bp, Homo sapiens
atagggcgaattgggccctctagatgcatgctcgagcggccgccagtgtgatggatatctgcagaattcgccctttcgagcggccgcccgggcaggtacatgctgccagcttgtcactcagcgttctaaattcagcctcacttggaactctattacacatgcaggccatcaaaaatcagagcaggccggacggagatgagagtttcgagaggaaaaaaaaaggaaatctgtggaggtaattgcctaaaacttctcttggtgctttcactttgtctttatggtgtgtgggaggatcagccaggtgtaaaagatgacagacagaagggacactatgaaactgtaatgggcctagtgctcaagtttttaaaacagtccacataagctctgttatggttagaatacaaatgccacctttttttagcattaacataattatattctaactccacatg

SEQ ID NO: 16350 - DNA, 603 bp, Homo sapiens
  misc_feature 183, 203, 213, 225, 226: n = A,T,C or G
acgactcactatagggcgaattgggccctctagatgcatgctcgagcggccgccagtgtgatggatatctgcagaattcgcccttagcgtggtcgcggccgaggtacgaaataaaaatctgggagaaacccatataccttagagtgatctaaattgaaatactaagattctagaaagaggagnaacccatcagggacttgatnaacgatgtcnagtgagagagcnnagagaggaacattcctgacagaacctctcaattagaacactaagttaacatcaatactacttacccttctttctagccatacctcctgccttttccattttttccctaaaattcttgctgtcttacaatatgtcacatgcttccacacacaaggatttgcacatggcattccttctgcctggaatattcttcctccaactctctccacccatcttgaatgcccctgtgactgttctagtccccaggtgccatgtctaattcatatctggtgagcacatagcaggtgataataatgaagtagagattaataggtaaacaggaaattacaatgtagggattcaaggacaatgatgggaacacacagaatgtcatgggca

SEQ ID NO: 16351 - DNA, 713 bp, Homo sapiens
atagggcgaattgggccctctagatgcatgctcgagcggccgccagtgtgatggatatctgcagaattcgccctttcgagcggccgcccgggcaggtacatgagatggctcattgatacaagcaaagccttggcggctctgcgctgaattaaggaagagatttgaaagcaggtatttccctggcggcagtaaaactgcctcctggaaagagagcaagctatgggattagatacttaataaaattttaggcaagagaaagagtccaggtcttttacctaaattgcacaccaattgagctcatctgcttattctctacacactcaggctagggaaaaagtgggcacatttcaaaactcaatgctttaactatagcttgatgtgaaaaagtagagacaaatttgcccatgctacatcaaagtgtaagaactgtccatcttaagctgggaaacctgaaaatcatggcaagtataaaatcactttttagtaataagacaaggaaataaaataacataaaagcacatgcaaagaaagtattaggaatccatcctacgaaatgcaatttttaaaaatgacacaatatcccaggaataattatacagaaagatgcaatgaaaacaaaaattcaaagaatccatcaaggacatacacacaaaattaaaatgaaatgagaaatccagagcgaaagaaatacatatgtggctaaaataacactg

SEQ ID NO: 16352 - DNA, 556 bp, Homo sapiens
ctatagggcgaattgagccctctagatgcatgctcgagcggccgccagtgtgatggatatctgcagaattcgcccttagcgtggtcgcggccgaggtacttcaaatgatttcaagtatggattgataccaggtgcttcaaatgatttcaagtatggattattgccagaatcttggccaaaacaagaaacctgggaaaatggtgaatcatctctaatcatgaacaagttaaaatgccctcattgtagctatgtagccaaatacagacgaacactaaaaaggcacttgctcattcacacaggagtgagatcatttagctgtgatatttgtggaaaactgtttgctcgaagagaacatgtaaaaagacattccctggtgcataaaaaggataaaaaatacaaatgtatggtgtgtaagaagatcttcatgttagcagccagtgttggaataagacatggatctcgacgttatggtgtttgggtaaactgtgcagataaatcacagccaggagggcaagaaggtgtaaatcagggacaggatacagaattccctcgggat

SEQ ID NO: 16353 - DNA, 623 bp, Homo sapiens
tacgactcactatagggcgaattgggccctctagatgcatgctcgagcggccgccagtgtgatggatatctgcagaattcgccctttcgagcggccgcccgggcaggtacgcgggtgaagatatgttacaaatggatatacaaaatatttcaagccaggagtcctttcaacatgttctcacactgggcttcaggcaaagattcaagaagctaaagagaaagtccagatcaatgtggtaaaactcattgcagcgttgaagaacttaactgacgtttcaccagatttggacatcaggctgaagatggaagaatcccagaaggaacttgaatcatatatgatgagggctcagcagttactggggcaaagagagagccccggtgaactcatttcaaaacacaaggaagcactaataatttctaatacaaaaagtctggccaagtatttgaaagctgttgaagaactaaaaaataatgtaactgaggacataaagatgtctttagaagaaaagagtagagatgtctgtgccaaatgggagtctcttcatcatgaactgtctttatatgttcaacaactaaaaatagatattgaaaaaggaaagcttagtgacaatattttaaaactca

SEQ ID NO: 16354 - DNA, 592 bp, Homo sapiens
tacgactcactatagggcgaattgggccctctagatgcatgctcgagcggccgccagtgtgatggatatctgcagaattcgccctttcgagcggccgcccgggcaggtacctaaatatattctacttccatcttttcaagctcggtgcctgcctaccacaataaaaagttacagctcaaactaatttaagttgttaagagacagtgtattaacaatgattggctacactgggtgggttgtctctgctgttccttttcccacagcccctcagtatttatcccagggagagaaatcacattttacctatagtaagactgtatttctctcactctgtaatcctctctctgtcagaaaaatgagcaaaggtaaaagatgaggctgacccttttgttttgatgcaagaatgctttgaacattgacttaaaatcagacaaagtgaagagtgctacgattgtggtttcactagatataaggttatcttatttaagtagcctttttaatgaaatgattagaaatacaactttaaatgtttaattcttttttccttcctttctaggatatagcatttccaacacaaatgaagatattatga

SEQ ID NO: 16355 - DNA, 532 bp, Homo sapiens
ctactattgctatagggcgaattgtgccctctagatgcatgctcgagcggccgccagtgtgatggatatctgcagaattcgcccttagcgtggtcgcggccgaggtacttgtgagcccagtatacaaaagataagctccagacccctcaggatactgtaaagttcacaaatacaatgatgaaaacatctagattgcttcatgaccccctcacacccccaaagcaggaagcaaacagcccgactgagataacaaagaatactccgcatcaagatgggaccaaatactctaataaacccacacccagttagcctcagggaattttaaatttttgatctgaaaaagacaaggatctcaaccctgagttccccttttccttcattataggaaacaaatatttcatagatatgcctgctatgtatatagggaatacaacacagaaaataaacttttgctacatgcttcaccttaatgagaaccacattatgcaccaattaatcaaaatacaatggatttgctttgatgttatgggtc

SEQ ID NO: 16356 - DNA, 384 bp, Homo sapiens
acgactactatagggcgaattgggccctctagatgcatgctcgagcggccgccagtgtgatggatatctgcagaattcgccctttcgagcggccgcccgggcaggtacttagtgttcctgtcaggaaaacctgcaacagcaagaccattctgccaaagtccagagactcttaatatattagccagcgttcattaacagtaagtgacagaaaccctaatcagcccaagcaacaaaggagaatgtcttgctcacagacctaaaaattccagaatagtagaattggcctcagggatggtgggatcctggtgctcagatggtctctcgggaagctgtttcatcacttagctttacacttctctagcccagtggttctcaaacttggac

SEQ ID NO: 16357 - DNA, 612 bp, Homo sapiens
acgactcactatagggcgaattgggccctctagatgcatgctcgagcggccgccagtgtgatggatatctgcagaattcgccctttcgagcggccgcccgggcaggtacgcgggttgagcagaaattctgagcctatatgtgtgaggggggatctttgattaattaaaacatcttcctcacagtatgcaggaacatggtaaaagaaagcatttactacttttgtaaacattttggattgaagagaacttttccatcatcctgaaaatcactttcaactcctgggatcagagaaatagcagtgaatacaccgaagtctggcctaagagggtcagatctaaccacagggccagattatagagaaaaatgaaagctcaagaagaaaccccataatatctgcagctgcctcaaaaaggtggttaatttccacccccacctacactcctgaaggtcctttcctagttgctttgaaactaatggctaaaattagattttgggtggcattcttgtggagaataaatctctcagtctttacatctctcccaacatctctgcctccttctttctgcttatttataaagcatactgcttattgtccattaaaacatcatttg

SEQ ID NO: 16358 - DNA, 404 bp, Homo sapiens
  misc_feature 252, 258: n = A,T,C or G
ccctctagatgcatgctcgagcggccgccagtgtgatggatatctgcagaattcgccctttcgagcggccgcccgggcaggtacaacatacaacagcttcgcaatagccagtgttggaggctccaagaacgagggtcctgtggctatgtggagagtaacagcagagccaggactgccactcagagctagttcacccttgctgccgccattcgaacccagagctcctggcccaaacagtctggaatgttctgnactttnttttttttttttttttttatttttttttttttttttttttttttggggctctagagggggtagagggggtgctatagggtaaataccggccctatttcaaagatttttaggggaattaattctaggaccatgggcatgaaactggg

SEQ ID NO: 16359 - DNA, 737 bp, Homo sapiens
gtattacgactcactatacggcgaattgggccctctagatgcatgctcgagcggccgccagtgtgatggatatctgcagaattcgccctttcgagcggccgcccgggcaggtacagcaatttttcttgccacaaacctgaattaaccttacagattttttaataggagccctgagatataattttactttttggagaatatacttacccttttaatagcttttcttttttagaataaaaatgtttggaaaactagactcctgtttctccagattagaaatgaaatttgatcctgtggtggcagtttttctccctctcatcattacatatgttagaaattctgataaggagattgttagaagcagagataaagattatataaaagagagaggagacagaaaaggaggtgaaatgtaatctcacaattccctgcaccacttatttatttcctaaaatcttgtctcacacaaaagacatcagagacagaaagttttctctgtccacatctcccataggggcaaaggtagcttaccatttcttggaaaataaagaaaaaatgaatttttctttaccaaaatttaaacaccattagggatagaggttaaaattaattgagacatctgtaagagtaacaagtacctcggccgcgaccacgctaagggcgaattcagcacactggcggccgttactagtggatccgagctcggtaccaagcttggcgtaatcatggtcatagct

SEQ ID NO: 16360 - DNA, 252 bp, Homo sapiens
catgctcgagcggccgccagtgtgatggatatctgcagaattcgccctttcgagcggccgcccgggcaggtacttgacaacagctgaatctgaggaggtctttgttcactcaaaaaattagttaatacaaggggttgttgtcagagattttaggggctaaaactgtctattccctatgaatttctaaaaatggactattctgggggagcttgatttaaaacaaaaaccaaacacctggaaacagttgctgtt

SEQ ID NO: 16361 - DNA, 572 bp, Homo sapiens
ccctctagatgcatgctcgagcggccgccagtgtgatggatatctgcagaattcgccctttcgagcggccgcccgggcaggtaccttttcacatttaagtctctcaagcctctttggcattattcagttatggtcaaataaataacctaatatcgaaaaggacaagtcacctgtcattgactcaatatatgtcatagagtgatatgaaattgtgaaatcagaaaaaatctctgtgcaaagacctggcctaccacctacagtctgggtgtctctctgagactcagattctttatcttgaaaactgtgaagaaaattctgcctcatagtgttgtaatgagcattaaagaaagaaagcagggaacttgtcaattaaagcatctttcacattgggggtgtttagaaatcttagtgttctttccttgtatctgttttgtttatagttttcctttgttttaccacattgagaaaactattgtatttgtttctgcgtattcggatagattcctgttgtttccttggggctttgggtgtgacctgtttagacaaaaaaaaaaaaagtgttccaaatttca

SEQ ID NO: 16362 - DNA, 609 bp, Homo sapiens
  misc_feature 357: n = A,T,C or G
agggcgaattgcgccctctagatgcatgctcgagcggccgccagtgtgatggatatctgcagaattcgcccttagcgtggtcgcggccgaggtacagtgttcagtggaaacagtcaattttagtgggcattcctgtattcctcaattaaaagggtatggtgaagtattaaagtttcaccattaagtatgaggctttctataggcttttgattattagccttactgatgttaaagaatttcaccctttgctagtttgcaaagatttttttttaatggaagttgaattttgtcaaatacattttctgtatattttgagatagtcatggggtttttcttcttaaatctcacgtggctttntctttaagtaaagcttactctttgaagtgttaaaatttaatcactctaaaaacacttttaataaatctcttagattaaaaacttttaaatcttgagcatactttaatcccttctccatgactcggattgtattatggaacatcatttatctatcatacgtgatgttaattcttgactataaatcgctcaaagtaggagccatgtcttaatcacatttgatttcccacaggatctagcacagtatattgcaaa

SEQ ID NO: 16363 - DNA, 305 bp, Homo sapiens
gactcactatagggcgaattgtgccctctagatgcatgctcgagcggccgccagtgtgatggatatctgcagaattcgcccttagcgtggtcgcggccgaggtaccattttaaatggcaacaaaactggaattattcagatacacatctaaatttgtccaaggttttaatgttggaaaattattaaatgagaaaaagaactaaaacaggaagtgttatcagaaaagactgtattgctaagataccacttctctccaaaatcatttattagattcgatgtaaacttagtcaaattcccaagtggct

SEQ ID NO: 16364 - DNA, 515 bp, Homo sapiens
ccctatagatgcatgctcgagcggccgccagtgtgatggatatctgcagaattcgcccttagcgtggtcgcggccgaggtacatctgcccaaggcacccttcagctaaggggttatgtataatcctttccccaactgccagtcccttgccttgctacaaatgcatttgtttgaaatcaatatatgtattcatttatcaaaatatcttcacttacatatttactacatgttagaattacagagtggttctccagacatctgctttgtgggttaggccaggctgaagttatcacatccattttgcagacagggttgccaggattcagaaaccccgtcacttgcccagaaacacagttgatagcagccacatggactttctgactcctactccggtgctcttttgctcattgtctttgtgaatattctgtgtaattatttgctcctttttgctccccagcccctccacctcagatctggttagtgattccaggacagaattattgcttgctcatctga

SEQ ID NO: 16365 - DNA, 485 bp, Homo sapiens
ccctctagatgcatgctcgagcggccgccagtgtgatggatatctgcagaattcgccctttcgagcggccgcccgggcaggtactcatgctcctggtagctgatatcattcgttatttctaacagaagtggtttctatgtgcacaaccttaagagaaaacatcaggaacctgattaaaaactatcctcatcaccgcaaactccctatttatagaagacttacctactgaatgatctccgattagtcctttaacaattcagatcctaaatctaaaggctaaaagagaatcatttagggcatttcaaaggtagaaatcttctggtgttatatactattctcagggaccgagcaatcagcagctatactaaaactggaaaactcgtgactttatttatttatttattatatttctatatagagataggggtcccatcatgttgctcaggctagtctcaaactcctgggctcaagccatcttcctcctg

SEQ ID NO: 16366 - DNA, 151 bp, Homo sapiens
agggagaattgggccctcttagatgcatgctcgagcggccgccagggtgatggatatctgcagaattcgccctttcgagcggccgcccgggcaggtacgcggggaggcattgaggcagccagcgcaggggcttctgctgagggggcaggcg

SEQ ID NO: 16367 - DNA, 503 bp, Homo sapiens
  misc_feature 221: n = A,T,C or G
ccctctagatgcatgctcgagcggccgccagtgtgatggatatctgcagaattcgcccttagcgtggtcgcggccgaggtacttatttcataaccagtaataccaatattctctaagcatcatatagttccaaactgtaatctaaaaaattaatctaactgaaatgatgcagtgttgatcatgatttcctttagtcctttaaacttacgagtctggctctntaatatcttcaacctcgttcagagtgactaccaaaaagtatatgactaagtgccacataaaataatcttgagtctcattttaatagagaataaatctgtccaagaaattttgttgaattatatactaaataataaaagttaaatatatgatcttccatttaactcattttttataaagtgagccagttctattttttttaatccttaaccaggagagtatgaatcacccacatttccaaacttggaatacttagagaatatgtttttaataactatatttaa

SEQ ID NO: 16368 - DNA, 398 bp, Homo sapiens
actatagggcgaattgggccctctagatgcatgctcgagcggccgccagtgtgatggatatctgcagaattcgcccttagccgtggtcgcggccgaggtaccaccttgagcctggcatttaacctctgtgggcctcagtctctgcacctataaaaggagggatttgggcgagatatgctgaggacactaacattctacacgtctaaacttcgaggaacttttctaaagcaagaaaaagaataagggctaaatttaattcgtcagagtggaaagagaacaaagagagaggactgggagtgggagattaaaaggctgtggaaagtggtcttgagatagatgttattggggaccaaccttctcaatgcactggtcaagcgccggacgttgttgagaacagc

SEQ ID NO: 16369 - DNA, 445 bp, Homo sapiens
tatagggcgaattgggccctctagatgcatgctcgagcggccgccagtgtgatggatatctgcagaattcgccctttcgagcggccgcccgggcaggtacgcgggtattcttagaattgtattcataatgaagtcaattcaggcaggcacagtttcaatgatattatgagcttcatcttaatagctttttccaaaagttttctgatataggtttgccatgttccatttaaacccagctgtggaattcattattgtgtgctaaattcatttggccactgactttttgaaaaggagaaaatcaggttttttatacacacatacccacataagagtatacactttaatcagtctttttttcttaaaagttcagttatttgctgaaaaaggaaatatactgcttaaaaaaggaaaatatattcaaataagcaaatatgattggaaataa

SEQ ID NO: 16370 - DNA, 319 bp, Homo sapiens
  misc_feature 267: n = A,T,C or G
gactcactatagggcgaattgggccctctagatgcatgctcgagcggccgccagtgtgatggatatctgcagaattcgcccttagcgtggtcgcggccgaggtacacttcaaaccacagcagccttggtgaattgtttagcatttgaaggcttgatcttttgtgccgtctactggacaatagaaaaactgcagccttgatgacaaactttaatcttgttttacgggggtgggaggtggtggttgggggtatgatttggtgctggtgnctaactagagaataccacaggtcacaacattgtggctgtcaatccttaaatg

SEQ ID NO: 16371 - DNA, 391 bp, Homo sapiens
agggcgaattgggccctctagatgcatgctcgagcggccgccagtgtgatggatatctgcagaattcgcccttagcgtggtcgcggccgaggtacttggatacctactagtgcttactcattagcatacagaagacaatacttgagggctgtagcaaaataactgagaggattttgaaatgggcaggggtcctgcagtaggatagggggtgaaactcagcaaaatgtcaggttatctgctgctaacataaccccatctgtaacctccaaggtccttgggcctttcaggaacatgtttttcacatttcatagaccactgtaaatctaaatagctaatacaacagctaaagatcttaaagcaatttggagacattcatatagtaaattccctt

SEQ ID NO: 16372 - DNA, 655 bp, Homo sapiens
ctactatagggcgaattgggccctctagatgcatgctcgagcggccgccagtgtgatggatatctgcagaattcgcccttagcgtggtcgcggccgaggtacaattctttcatcttttctgtttgcaattttgcataataaaatgctaaagggaaaacatttgatgagcagagttcaaacacaagagtaataatactactacttacatgaaattctaaaacaaagaaaactcatctatgatgtcaaaaatcagatgagtagttgcctgaggcaggagatgtgggtggctgatggcaaaagagcacaaaggaactttctagagtgatggaatgttttatgtcctgattggggtgctaactgcatggacagacacatttgccaaaattcatccaactatacataaaacgtgtgcctcatattgtatataaattatacatcaaacatcaacttggttggtttttaaaataagttcactatataaaatctggaatacacagaaaaagcaaagagaaattaagtcccaatcccatcaccccaataaaatcaccaacctttccttctcttgacaatgaccacgcctactggagataaaaatatactttagatggttttccttagaaggaaatacagaaatagtgacttcctaaattttgga

SEQ ID NO: 16373 - DNA, 546 bp, Homo sapiens
  misc_feature 256: n = A,T,C or G
gactactatagggcgaattgggccctctagatgcatgctcgagcggccgccagtgtgatggatatctgcagaattcgcccttagcgtggtcgcggccgaggtactgggaaacaggctggaggactatggtcctcaagtttagaccaagaggactatggtctcaaggttcaccatgagaaatgtgttgaacattttagtatgctctattgtataatttttttggagggggggatggagtttcgctgttgttgcccangctggagtgcaatagcacgatcttggctcaccgcaacctctgcctaccgggttcaagtgattcttgtgcctcatcctcctgagtagctgggattataggcatgcaccaccatgcccagttaattttgtatttttattagagacagggtttctccgtgttggtcaggctggtctcaaactcctgacctcaggtgatctgcctgtcttggccttcggcgtaacactttttaagaccagtgtaacagaaagagaatgtagccattctagccaccggttaaagatacacagtga

SEQ ID NO: 16374 - DNA, 560 bp, Homo sapiens
gactcactatagggcgaattgggccctctagatgcatgctcgagcggccgccagtgtgatggatatctgcagaattcgcccttagcgtggtcgcggccgaggtacaacaagtatacgcatcactttccttaagattacccctaagactaggtaagaatacaaggaggagatcagacatgctctaaatacatttgaataagttgcataaatatgtttgaataagttactcaatttaaaaattagactgtttacactaaatataagatctctaacttctttcaaaaaatcagaaggtctagcaacactaagtctatatttcagctggctgatcatgagcattaaccaagcagcagtctctccccttaagtctgtgtgctcaaggccattactgcccccacttagtctcttacccatttccactccatgcctcgcccctgtagtcacctaagtttgcaaaccttgaattaaaagatgatcatttatttctacagtaaatatatcagagggctttattgactttagctgcctcagaactacatttccattccctcttctttgga

SEQ ID NO: 16375 - DNA, 391 bp, Homo sapiens
tacgactcacttagggcgaattgggccctctagatgcatgctcgagcggccgccagtgtgatggatatctgcagaattcgcccttagcgtggtcgcggccgaggtacttattgccactggccgccactttgacttattttctctaatagtttatttgccacagtctttattttgaatatgctcctagtttttttttagggtgctgttcattatgaaggcttctttatagaggcctaataagaatgcctttttataaagcctgtgcatttaggtaggttgaagctaggaggattttctttagaatgctcttttgcatgtaaagcacaaagtatgtttcagtttaaatgcacttcttccggttaatttttatggggaagacaagtgagtcaca

SEQ ID NO: 16376 - DNA, 520 bp, Homo sapiens
tatagggcgaattgggccctctagatgcatgctcgagcggccgccagtgtgatggatatctgcagaattcgcccttagcgtggtcgcggccgaggtactttttcactctgaataaaaaaaaaaaagaaaatactctttgggaatcgtgctgccccctggtgatgaatggaataataaaatagaacctttaaataagtttactaataacatattgttcattaataaatgcaaaatttaacacaaagtctgcacaaaaggtaattcaataaaaagtgtgcatccacaacttagtcatctgatattacagtgattattaggccaatcttagaaatggaaagatggagaaagaaggataaatcacagaaaagggaccacaggcttgagaaaaataaggattccaactccccacaattgcaaatatgaagaaactttatgttacctcagtttagaaagccagtttcttcacggagggttaatggtaggcttcagataatgacagcaaaacaaaaactttacaatg

SEQ ID NO: 16377 - DNA, 474 bp, Homo sapiens
  misc_feature 10: n = A,T,C or G
cctctagacnagcggccgccagtgtgatggatatctgcagaattcgccctttcgagcggccgcccgggcaggtacgcgggatgatgtgaggtgtaaggcttatgacttcattatgagaaggatgaagacttgaataagatttggcacatttaggacaactagtctaactgcaagtgaaaaacggactgtaggtaaccaatggtgaaggacgatcatgatttgaactaaaatggtatcaacggacatagtaaggagttgagaaataaagaggaagtagtaattgattctggatatgttttgagagtaaaacaacataatttcctgagagtttggatctagagtgcaacaaaagtagagtcaaaaacaattaactttttggtttcaactacttgttgaatggtaatgccactaaataagacaaacaactctgaaggatgaaaaatttgagagaaaaatcagtctggataatttagt

SEQ ID NO: 16378 - DNA, 445 bp, Homo sapiens
  misc_feature 187, 216, 217, 326: n = A,T,C or G
tacgactcactatagggcgaattgggccctctagatgcatgctcgagcggccgccagtgtgatggatatctgcagaattcgcccttagcgtggtcgcggccgaggtacatttttctccacagagcaacaaagacacctatacaaagtcataggagatcaaggtcaataactaatatttaacacatanttcattcacagatatgaaattgagaacannaatagcaccaggaaaatttcaagaagtgaagaacaaatgtagagaagcataatgataacgaatagaaaaaaaaaagatgccccaaaaaacagaactcaaggaacagaanaatgtattttgagtttccttagagattccagaacattctgcagtaaataaaacaagatcaagcttatgttttaaaaaattatcagagaattagaaaatgttactggaaaagaaaaccat

SEQ ID NO: 16379 - DNA, 623 bp, Homo sapiens
  misc_feature 465: n = A,T,C or G
agatgcatgctcgagcggccgccagtgtgatggatatctgcagaattcgccctttcgagcggccgcccgggcaggtacagacaaaagtggaaaacaaaccaggaaaaaaaaattgtgaagcacagagctgcttaaaagaataaagtcacagtaaataagtcagtattttgtttagagactagaactccaactgctagccaactgcctagaatatagtaaatattttctagtttcttaaatgactagtaatattcctacattatgtgatggcatttcccaaactgtgtaattagatgttagatttgtagccaaatatgtctaggaaatgcttaaacaatataaaacagttttaatgattggctttttagaacgttatatattagtgtgctttatgcatatccaagaggtgagtgaggtatttggggtttttcagacttacttgattacagatctggagtatctcanaacagttgttttgtggaaaacactctggcaaactctgagtcttagtcattaaaaatagtttttgggtaaacaacagtgtaatagaaatggaaattactgattcacattgagccatgaagaatttatgttcagcaatttttatagaagttgctttatga

SEQ ID NO: 16380 - DNA, 552 bp, Homo sapiens
ctatagggcgaattgggccctctagatgcatgctcgagcggccgccagtgtgatggatatctgcagaattcgcccttagcgtggtcgcggccgaggtacgcgggtatctatggaaaggaggttatttttacttgattgggagatttatttttttaattaaacattgctctgggtttattttccatattccatcagtgagtaaattttagtttagaattacagctttacccagggtttatgtcatcaagttcccttcaagtagattacttgcaaggaaatcttactttgatatttcctaaatattaagcaattgatataaaagtttgacttaattacttgatttatagaattacttggtctataaggttaattatttggtcatattgaataaatcagattttttatattctttggagatacgtgctacatccttttgttaaaaagtctttttagtgatactaattctgtgttcagtgtgtgaaaagtaaaataccacaattttaaaagtctaattatttttaattttgtttaatgacagagatatagatcagc

SEQ ID NO: 16381 - DNA, 481 bp, Homo sapiens
ccctctagatgtttgctcgagcggccgccagtgtgatggatatctgcagaattcgccctttcgagcgggccgcccgggcatggtacaaagaggcagaagtaggactcctgctcagtcagcctcagcctctctcctctggatacaccaccagacttagaaagcttgcagcttacataccacctggtgaaagttcccttttctcatcttccatttctctcattttcatcaagtgctaatctgtctgttgtatggtatatagctctgaagtagttccagcaagacaatatgatcaagcttcctttaaataaatcatgatctctttctctctctgcaagcagcatcagctgtcaaaggtagaactgaagccaaggcagcaccaatggagcaggctgctaatgaaaatatgacaagaatatttgaaactagaagccttaagccacaactttgttaggtttcctgcactctccacctggggggcatt

SEQ ID NO: 16382 - DNA, 514 bp, Homo sapiens
atacgactcactatagggcgaattgggccctctagatgcatgctcgagcggccgccagtgtgatggatatctgcagaattcgccctttcgagcggccgcccgggcaggtaccctgactccctaatttgttcctacagattttaattttgacatggatggcttagggagaaagcagaaggaaggaaaaagagaagaaaacagaaaggaagaaaggaaggaggggagccctggtagaaatttcattttgtccagggcaacttggggacttacaaaggaaagacgagagagcagaggcagagagaggaaatggagcaagaagtgtgaaaataaaaggagaaacaaagaaaagaggaaaaagtatgaaaaataagttgtaacatttctctggagctttttgtttcagaagtgaccacagaaggaggatggagatactaagaaaaagttaacaggagaaacagtaatgaaaaggaaaatcctttgatgaggttgtatgttttgaaatgtcctaaaaaga

SEQ ID NO: 16383 - DNA, 604 bp, Homo sapiens
tagatgcatgctcgagcggccgccagtgtgatggatatctgcagaattcgccctttcgagcggccgcccgggcaggtactggttaaggaagagtattgttgaagatacacttagttttgtaagatatattaatttgatcacttgcacgtgtagttgaattattgcaaagaattgtccagtatagaaatggcttccagagacactgcaatctctactgtgctgattcacactgcatcatatgatatagaggttgtatcttaatttagcatggtcctactggatttgctttttattactaaattactaaataaccttagagactaaagacaatacagcattgtgagataattaggggggtattgtctttagcctctagggttgtggtaaatctgggcatcgtctcactggattctcgactcaggatctcataaggctaaactcaaggtgttggcttggttgcatccttatctggcattcagagttcctttccaagcttacatagtgtggccagattcatctccttggagtcattatttccctggtgggctcttacctgggagctgctcttaacaactagaggccacttaaacgacttaccacgtga

SEQ ID NO: 16384 - DNA, 405 bp, Homo sapiens
tacgactcactatagggcgaattgggccctctagatgcatgctcgagcggccgccagtgtgatggatatctgcagaattcgcccttagcgtggtcgcggccgaggtactattatctctctaatgaatcacatgtataacgattcaaatactgtgtttgaaatgcaaagtcattttaaccgctcaaactaggaaactggcataattatggtcacaaacttatcctacgtgcctaagcttatgaaccagcaaatgaacataccaccaaatattcgcttacctggtcaaaaactactactgcactcattagaaacttttaggatatcaaaatcataaaaccgttccaggactatagttttatttgcaaagcaaactattcaatgtgttttgaaacaagcagtcttctg

SEQ ID NO: 16385 - DNA, 403 bp, Homo sapiens
gggcgaattgggccctctgatgcatgctcgagcggccgccagtgtgatggatatctgcagaattcgcccttagcgtggtcgcggccgaggtactgagcctgtgtgtcaggtaatgtggttaacttaacattcattacagcatgtcatcaccacaaaggcctcttgtggctggtgctattttttttccattttgccgacaaggtttagagagattgaatcacctgcttagacccacacacccagtaagtgttggaatctggattgatgctgtaatgaccattatccagatccttatcaccgtttggggaaattgtctgaaaatccctctgggttatttagagtcaagctttcatctgggtcttcagaaagttggagtggagccatttgcaccaccacacacctg

SEQ ID NO: 16386 - DNA, 395 bp, Homo sapiens
tatagggcgaattgggccctctagatgcatgctcgagcggccgccagtgtgatggatatctgcagaattcgcccttagcgtggtcgcggccgaggtactaatgacttaggaacttccttctccatcaatctgtcttccatgttcaagttttatgaatttccattcctgtattcttgaatggaaacatttctgtcttagaaattccactcttccggtgtttacaacaccattttgaatggtgtttctccatctttttcaaatatactccagtattactgagctctatttattatacgtataggatcatgaattataaatgagtatgtgttaaatgaatgagaaggaagtggcttaatggtctataggagaaccgtaagttttcttttgaggtaacc

SEQ ID NO: 16387 - DNA, 562 bp, Homo sapiens
gactactatagggcgaattgggccctctagatgcatgctcgagcggccgccagtgtgatggatatctgcagaattcgcccttagcgtggtcgcggccgaggtacatcactcagatcctataactgagttttcagaaaaactgtttgggatctatggtatcatgaattaattttgttatgagggaagctatcttttgtgtgcccctgtaaggaccggactaccatgtcccacatttttcctcccaaagttgaaaaaatctccaaatctctgatttacacattttgggacccatcaaagtggtaactatctgtgttcagatttcacagtctttaggggctggtgacagagatgaagcaagcagcagtgcagataaacatgggagtggaatgtgacacacacctagctcccaaaaaataattagggaaagatgattcttgcacgatagaaaggctgacccttaaattactcaggtaaagtgtttaacatgatgtctgttccacagtaatgctcaataaatctttactaacaaaaaggaagtttcagaagaacagtcacaaggcaa

SEQ ID NO: 16388 - DNA, 331 bp, Homo sapiens
  misc_feature 315: n = A,T,C or G
actatagggcgaattgggccctctagatgcatgctcgagcggccgccagtgtgatggatatctgcagaattcgcccttagcgtggtcgcggccgaggtacaatgccagaagtattttttttctttcagctgtgaaccagcctgttttgtttgacaagcctttccagattcatgcagctcaatcacgtgcttgttgccagtttggagagtggaccctattattttcaaaacttgttggccgtgaccaaatttttacaaaaactgaaaagtagcactgtgagggtggattgggacctagtgattgaggtgttctacnacttgcattccttttt

SEQ ID NO: 16389 - DNA, 397 bp, Homo sapiens
agggcgaattgggccctctagatgcatgctcgagcggccgccagtgtgatggatatctgcagaattcgcccttagcggccgcccgggcaggcactatattatttatgcagtatggtaaaatgtcactttgcctcaaggtgacctttgaagttatagggagcctatgttttgattaaaatacattgtgtggggtgttaagcacttttagtgtataagggaagatgaaggatttcacagggcaagtgggtggctgtaaatttttacatagagatcaagatttgttttttagcatgagcagaatccacgtggtatttggagaagaattgtgtagacttatgctatgttatggctttttttttaagaaaatgcagaacaaggcaaagcgaacaagaaaaaa

SEQ ID NO: 16390 - DNA, 589 bp, Homo sapiens
ctatagggcgaatcgcgccctctagatgcatgctcgagcggccgccagtgtgatggatatctgcagaattcgccctttcgagcggccgcgggcaggtactcttcctgatggaaactatagaaaaatatcatgtccttctattttaacatgttttatcaaaatcaaaatagttaccaaaatctcaaagcattttgtttcttagtatcaaaatccatggaaaaggggagaaatcaacattaagggataatttgaacctatatataatgtttccttaacaattaaatgttattaccatgcaatagtgcaatcaattctaggaaaacacctccaggaaatatattaacctctgaactaatgttaaagaagctcccatgagagtatgttttcacaaatgagctttctgttgacctttttgtaaaacttcatataacgtatttcagttaaacctatgatgcctttagtgttatctctttcctagaaatgagatgtttggttattttatgtctgtgtgtgtgtatgtgtggctgtgatagcactggtatttatagtttcctgctaaattacgtatttctgaaccttggtaaactga

SEQ ID NO: 16391 - DNA, 568 bp, Homo sapiens
gactcactatagggcgaattgggccctctagatgcatgctcgagcggccgccagtgtgatggatatctgcagaattcgcccttagcgtggtcgcggccgaggtaccagatacttgaaggacccactgacctggaaaaaagtgggatctagtttcagcttgaaaaaatccttcttcataattacatttcccttaggcaaatctctaacatgcctaggcttttgtatatctgtttttactgcgtcacaaacctcccccaaagagaagggagacgataactggagaaaaccacaaattaatcttccaatatttttttcttccatataatcagcagtgcctcagaatcaaagcagtctctaaaaatattttgaagaaatttattttcttggatcttcaaagatccaaagttactgagatgcaaagaatcttccacagtatcatccaaggatactgaagggctccttcaaacctcgcccttgtatatttcttcttccagttgtgatactgcagttacatttgcaaaccaaatgatccctttgggtggtttttccaaaacaaatcgtctttccc

SEQ ID NO: 16392 - DNA, 435 bp, Homo sapiens
ctatagggcgaattgtgccctctagatgcatgctcgagcggccgccagtgtgatggatatctgcagaattcgccctttcgagcggccgcccgggcaggtacgcgggatttctttctttgacatggctcctcagaatgcatagagatttggagctgtgttgtctacactggatgtgtgagagtgattggtaatctggaggctgactacacttcaggcctgccccgtggtggagtcactgacttccaccttctggctgcaacctgcccaagcccatcctgagtcctaggctgtgtttacttagataggtcccttctctgactgacgaacatcagtccttgtgattgttcatttttttcactttagcttgtttgttttcaggcatccaagtcagaaagtgtcaaaaagaaacctttgaagaaatctttatggatctgt

SEQ ID NO: 16393 - DNA, 665 bp, Homo sapiens
ctatagggcgaattgcgccctctagatgcatgctcgagcggccgccagtgtgatggatatctgcagaattcgccctttcgagcggccgcccgggcaggtacgcgggttctgtcattttttgttaattttacttccaggaagtcagggctgtgatttgaggcttttttctctaagcttctgtgatggagatgaatttattaaagtggggccataatgtctttttgagcaacattaaaactgagccatcagaattaggaagtatcagaagtcaagatcaattttcaagaacaggagcataaaattcgaactcaatctgtgttaacattaagagatttagaagctcattcagactgataactaatgaataatatagctttcatttgttggagactttatgtgagccagccagttatacatgttatttataatccccacagtaacactgcaaggtagttatcaactctattttgcagttgaggaaattgaggctaagaaatatgccatttaacttttgctgcataacaaactaccccaaaagctaatggtttaaaacaatatgcatcttttgtgtctcagcattttgaggtcccagtgagtagctcttctggtctggattagttcaactatctgcagtctgctaacatatctggtgctagatgatctac

SEQ ID NO: 16394 - DNA, 380 bp, Homo sapiens
tacgactcactatagggcgaattgggccctctagatgcatgctcgagcggccgccagtgtgatggatatctgcagaattcgccctttcgagcggccgcccgggcaggtactcgctgaactgtgttcactaataaccactggggaatgattattccccaatgtctttctaatgtcttagaattcgtgacctagggtttgccaacctgagggcccatagcggccagttcaggatgtcggggactgcagtaaaccagaggatttatccggtggtcgctccttattttggccagcagggccgtctggaaatgacagttcagtgttgccaaatcttctaccagttttgaaacactgacgatatggtttggctctgtgtccccatc

SEQ ID NO: 16395 - DNA, 283 bp, Homo sapiens
tgtgatggatatctgcagaattcgcccttagcgtggtcgcggccgaggtacttatcattacaagtaagaatttctgatggctacacgtcattctattatgcttacagatgagaaagctctattattgaactgtaagagtcttttcaacctccaaataaagccccttccaaaaaaccccaccaaacccttcactataagaaagataataaattattgcttagactaatctatatgcaaagtataaaagtgctgcatcaagctgcagcccatggcagcatggaaa

SEQ ID NO: 16396 - DNA, 768 bp, Homo sapiens
tacgactcactatagggcgaattgggccctctagatgcatgctcgagcggccgccagtgtgatggatatctgcagaattcgccctttcgagcggccgcccgggcaggtaccaattcttaagtattcctgataggccactgccttcagcctagaacttgagaggacccagttcttagcatgcccatctaggaacacactgaatcacacattttggcatacctcctttattaccatgagatgtagggtttgctttcatgaagaaaacaaaagagtaaacaatcctggatctgaactgatagcactttataaataaaagcattttacatcaataaaagatttttattatttcaataccagaggtttcaaaaagcccaccatgtatccaaataaggtgtctttatttcccccctttcactcataagtcatctcagtttatcagtttgcaggaatgtaagcttcacacacaaaattccagtctgggaagaagaatgctgcttattacagggttttatgccacatgactcattgggatttcctgacggcctttgccttactataccaaattgaccctggagctcctaatggtgattcccagctgcatcaattttgagatttacattgcccctaggaaaaggacaagtgagatgtgacagaaattaaaccagtacctcggccgcgaccacgctaaaggcgaattccagcacactggcggccgttactagtggatccgagctcggtaccaagcttgggcgtatcatggtcatagct

SEQ ID NO: 16397 - DNA, 616 bp, Homo sapiens
acgactactatagggcgaattgggccctctagatgcatgctcgagcggccgccagtgtgatggatatctgcagaattcgcccttgtggtcgcggccgaggtacgcgggttacactggctacccagatctgcaaagcagctgaaacaaatgtagtttattagctgggcaggaaaccatctgaacaatacagaagttcacttactgaaaaaaagagtagctattagcaactggactctgagccacaaaacccaaggtttcactagaatgtgagctatcgccttttcttttggctgctgtcagcacacagtatgtaaaatagagaaaacagggaactttctaaaagaaaactaattttaattctaaaaagatatgagtatggcttagcaactaaatctgttagatggggttgacttcatcattactccttgtttttgggaccactcatccacgacttggaaacgtacctgcccgggcggccgctcgaaagggcgaattccagcacactggcggccgttactagtggatccgagctcggtaccaagcttggcgtaatcatggtcatagcttgttcctgtgtgaaattgttatccgctcacaattccacacaacatacgag

SEQ ID NO: 16398 - DNA, 551 bp, Homo sapiens
tacgactcactatagggcgaattgggccctctagatgcatgctcgagcggccgccagtgtgatggatatctgcagaattcgcccttagcgtggtcgcggccgaggtacagtagaaacattaagagagcaagtgagcctcatttccagacacatgggagatttctctcaggactgtgcaaagcatttcatgttccaagaccctgcctttgttaaaacatagatgcattttttttttctttggggatgttcagagccttccagaattatgctttcccaggagagataacaacagtcacatagccaaacgtctagcagtgcttctgcctaccgaacagaatttcctgagaatcttctggaaaagcagtgcccagtcactcattctgcaaaatgcactcagcagctcctctgagagaagccgtggatatagggggatggcaggagagaaaggcagctctccctgccaggcgggtgaggggcaggactatagacccttctactgagggcgagctggtggaatttctctcaatgctcaagaccgaggagtttatcat

SEQ ID NO: 16399 - DNA, 536 bp, Homo sapiens
acgactcactatagggcgaattgggccctctagatgcatgctcgagcggccgccagtgtgatggatatctgcagaattcgccctttcgagcggccgcccgggcaggtaccatatttgacataacacctcaattccagaggggaaacttggatgggagagaaaaatcctttttatgggttgcttctagagattacctagaacttaagcgaggtgattttactctttcttcttttcataagcagtaggattcacttcagagttgagggcctgttgcaatagagggacatgttgattataaaagaattgggttatttttggctaaagcaggcagatcacctgaggtcaggagtttgagaccagcctggtcaacatggcaaaaccccatctgtaataaaaatacaaaaattagttgggcatggtggcgcacacctgtcatcccagctacttgggaggctgaggcaggagaatcacttgaacccaggagatggaggttgcaatgggccaagatggcgcccctgcagtccaccctgggcaac

SEQ ID NO: 16400 - DNA, 625 bp, Homo sapiens
tagggcgaattgcgccctctagatgcatgctcgagcggccgccagtgtgatggatatctgcagaattcgccctttcgagcggccgcccgggcaggtactgagtctttatcagatcattgcagaaatactgcgtatctttagataatatttttaaaataaataatttgacaaatgactattgagtcagccagaaacaaagagaaattgttccattttgtttggttttactgttgccatttaaatttgattcccatagtggaaaatcatccctacttctgttcagagctgaactcataaaattataaaatgttaatcaaggtatagataaaatcattaattttcatgtcaatcctgccatactgctcaatccaaatcttagcaaacaatgtgtaaagagggcatctattattagaagaattattgactacctactagtagcttggattccattaatttttgaggttttatgtaaattgggggcatttgtcataatgacatttaaatctctatcgcatcatgagttagggttttatgtgtatattatatttcttcaatatacttacatacacatagcttcttttatgattttgtgtaaggatcccttttattaatcagcttttttccc

SEQ ID NO: 16401 - DNA, 412 bp, Homo sapiens
ctactatagggcgaattgggccctctagatgcatgctcgagcggccgccagtgtgatggatatctgcagaattcgcccttagcgtggtcgcggccgaggtactgaagacaaaggttgtaatcaatttatggtcttaggctatttgcacgactgaaatctgaaaacttcatgaaatcagggatcattacaaatatcccaatgccttgtgccagccacagaaactcagtaacagactatttgacagaatggtgtcaatttaatcatgacattgcaatggactataggaagagtcaataaaacactgatagtggagcaaaaatctggcgtgacacctgacattgaaaaagtcggatggaatacaaccacatccatttgttctatgttgtctatagcggctttcacacagaaactg

SEQ ID NO: 16402 - DNA, 552 bp, Homo sapiens
tacgactcactatagggcgaattgggccctctagatgcatgctcgagcggccgccagtgtgatggatatctgcagaattcgcccttagcgtggtcgcggccgaggtacctccaaagaggtaacactaggaaacaatatagatgaaccaccttttcaatagctagcataaatgtgaaatgcaaactagggcttcagtttcagaacctaacagagacatgcagaataataaaatgggaagtttggaaacacttggaaatggagaagcaaaaacgtctttaaattcttattttgataagtaagcctcaaatctaatagatacattttagatgccaataactggcaattcattgtcaaaatgactttttttagatcactattacaagatttacactatcagaactacttcactgacttcaaagtccaagactgttcttgaaaatattgttttaatgaagcagtcacttgatatctcaaagaaatacaagcacttatcagacttttattctcaacattactaacctatcatattaatttctgaattggtcaaacaca

SEQ ID NO: 16403 - DNA, 183 bp, Homo sapiens
tatagggcgaattgggccctctagatgcatgctcgagcggccgccagtgtgatggatatctgcagaattcgcccttagcgtggtcgcggccgaggtacctctataacgttggatgagttacttaacctttcagtgcctgtaaaacagataataatagtaattacttgcctcataggagttgtt

SEQ ID NO: 16404 - DNA, 431 bp, Homo sapiens
actactatagggcgaattgggccctctagatgcatgctcgagcggccgccagtgtgatggatatctgcagaattcgccctttcgagcggccgcccgggcaggtacgcctcacccaactcaactcttcacatagctcaagtcttggcataaatgatatttctcaagagatacattttctgaccactttatccttgtctttccttcataattaatccataacattatgcttgttagcttccttcatggtatatatcatagattgtcatcatatattaatatgtttgtctatagactgtctctcatattatattctaccaatatgagtgcagcatccatataccatagacctagcatggtcttagataactaagatcaaataaatacaaaggttcaagggcaaataataacgataataattaggattctcaaaa

SEQ ID NO: 16405 - DNA, 403 bp, Homo sapiens
tatacgactcactatagggcgaattgggccctctagatgcatgctcgagcggccgccagtgtgatggatatctgcagaattcgcccttagcgtggtcgcggccgaggtacgcggggggagaaatgtagcataaatttcatatctcaatgtgggagaggtgatgtcacattgtagaagactttgtgagatgggagatatttctgtggcaagcttgtgaagatataatatgtcacaagggcagaagcataatagatgtaacccaaaattttaaaaagaattatcaaaagccaatataaaatattttattcacacaaaatctgagacaattgattatgaaaaaaccatattaaaagatcttctataagatacacaccaggaaattgaatcaaaaatgaactaaaag

SEQ ID NO: 16406 - DNA, 491 bp, Homo sapiens
ctatagggcgaattgggccctctagatgcatgctcgagcggccgccagtgtgatggatatctgcagaattcgcccttagcgtggtcgcggccgaggtacatgactaccctggtctaagccaccatcatcaaaagcctaggcacccatagtatctcctaacttgtttttccctctacacttttgtcccattttctaaatgtaatcatgttgccctgtgctaacaatttcaattgttcttaaggaaaatatattattgagtgcttcttatatgttaggtattgtgctaaattccaagaataatacaaataacaaaactgaggaattatttttatgttgctcagcagcccctaactaatctgaagcctgagtattattccgaaatcagtgtctcagctccaagcacaccagctttctggacagatggcatgccctgtctgctcttctgtccattgagaattcgtggcatagtatagtcagcatacctatgaagt

SEQ ID NO: 16407 - DNA, 106 bp, Homo sapiens
acgactactatagggcgaattgggccctctagatgcatgctcgagcggccgccagtgtgatggatatctgcagaattcgcccttagcgtggtcgcggccgaagtac

SEQ ID NO: 16408 - DNA, 534 bp, Homo sapiens
  misc_feature 212, 229, 337: n = A,T,C or G
ccctctagatgcatgctcgagcggccgccagtgtgatggatatctgcagaattcgccctttcgagcggccgcccgggcaggtacgggaagcagcagctctagccctggcaaacctaaccacttgcaaccctgctaatgcaaacgaatttctgctcactcaccttgagttgattcgagtcaattaaaatacattgatcttctcagcaccgganatataaataagactcanatattacctctaagaggatgttttaaaaagtgaacattctcgagggaaaaccaccaagtgacaaaggaatcatgcattttggccaagcatatttataatgattaacanatacaagcgctgctgctgaagctgatggtattgatccattaataaacctcctgtctagtaaacgagatggagccattgccaacgctgctacagtattaacaaacatggccatgcaggagcccctgcgcctgaacatacagaatcacgacatcatgcatgccatcatcagcccactgcgttctgcaaacacagtcgtg

SEQ ID NO: 16409 - DNA, 431 bp, Homo sapiens
gggcgaattgggccctctagatgcatgctcgagcggccgccagtgtgatggatatctgcagaattcgcccttagcgtggtcgcggccgaggtacaacgtgggcaagcatctgtgcatatgaaatgctgtttttctaaaagatttctcacattggcaaactgagagattttcttctggaacacaggaaagattatttttatggcttatagccataccatggtctgaatatgggaggatgacagacacagaacgagaccagatggaccaggatgcccagatattcatgaggacctgttcagaagcaattcagcaactacgaacagaagctcacaaggagatacattcccagcaagtgaaggagcacaggaccgctgttttggatttcattgaagattacttgaaaagagtatgtaaactttactcagaacaga

SEQ ID NO: 16410 - DNA, 435 bp, Homo sapiens
gctcgagcggccgccagtgtgatggatatctgcagaattcgcccttagcgtggtcgcggccgaggtacccagggggcagagaagaagagtgcagcatctattgcctgtttcttggcagccaatggtgctgacctgagcattcgaaataagaagggtcaatcgccacttgatctctgccctgatccgaatctctgcaaagcactggcaaagtgtcataaggaaaaagtcagtggtcaagtgggttctcggagtccttctatgattagtaatgattctgaaaccttagaagagtgtatggtgtgctcagatatgaagagagatactctttttggtccatgtggacatattgctacctgttctttatgttctccacgtgtcaagaaatgcctcatcttgtaaagaacaggttgcgaggcaggacaaagattgaagaat

SEQ ID NO: 16411 - DNA, 497 bp, Homo sapiens
ccctctagatgcatgctcgagcggccgccagtgtgatggatatctgcagaattcgcccttagcgtggtcgcggccgaggtacctaaaagctgagccactacttctccagagcaattggtctccttgattgttttgcaacagggatattttaaattggaaaactgaaaagataatgaagagtttttatttctatttccagataagttagcttttacagcatttggatgttgcttccgcaaggggaagacaagccctcacttagctcagctaaagggttatcttaatgttttgaggggtaataagagaaattactgttagttggaaaaaaaatagaaagagacaaatagaaaatttcctaagactctgtaagagacattcttggctctcttctcactccacatttgccacagtgattggtgacttgaagcaccatgacttgaagtatcagctaagtgagtattagtctcaattttttcctttcaatattaatctatctc

SEQ ID NO: 16412 - DNA, 592 bp, Homo sapiens
actatagggcgaattgtgccctctagatgcatgctcgagcggccgccagtgtgatggatatctgcagaattcgcccttagcgtggtcgcggccgaggtacatgagatggctcattgatacaagcaaagccttggtggctctgcgctgaattaaggaagagatttgaaagcagggctatttccctggcggcagtaaaactgcctcctggaaagagagcaagctatgggattagatacttaataaaattttaggcaagagaaagagtccaggtcttttacctaaattgcacaccaattgagctcatctgcttattctctacacactcaggctagggaaaaagtgggcacatttcaaaactcaatgcttaaactatagcttgatgtgaaaaagtagagacaaatttgcccatgctacatcaaagtgtaagaactgtccatcttaagctgggaaacctgaaaatcatggcaagtataaaatcactttttagtaataagacaaggaaataaaataacataaaagcacatgcaaagaaagtattaggaatccatcctacgaaatgcaatttttaaaagtgacacaatatcccaggaat

SEQ ID NO: 16413 - DNA, 389 bp, Homo sapiens
ctactatagggcgaattgggccctctagatgcatgctcgagcggccgccagtgtgatggatatctgcagaattcgcccttttcgagcggccgcccgggcaggtactcagtttattgaattgatgaattgatttttttttagtaatcacataaatttctgtaagatttgttatacattgtttactgtcacagaatcatgttttatatcttcaagctcaaagcaagctttcaaacttgaatttagttcttgcataaatatggatgattgtttctccattactgaagcagtgtattatttccataatgatctgtaaagtaggtgggtttcatgacctaagtgttatagttgatctttatatatacaaggaaaacgcagagtcatcgttcatt

SEQ ID NO: 16414 - DNA, 385 bp, Homo sapiens
ctactatagggcgaattgggccctctagatgcatgctcgagcggccgccagtgtgatggatatctgcagaattcgcccttagcgtggtcgcggccgaggtacgcgggtaaccaaatgtttcaacctggaactttgaacacctgggcttacataaattgctcagaatcagtgtggaaatcttcggaacagtggatgtagaagatttggggtaaaacaggcactagatggtgaggggttttatgctctactcattctttacgcaaaataaaaacagacgagtaagtgttggcctctttggaacagatgattcccagcagcagttggcatgctttatgtactttctataatactaataaactagtttacagaaagtttcctttctttc

SEQ ID NO: 16415 - DNA, 518 bp, Homo sapiens
gactactatagggcgaattgggccctctagatgcatgctcgagcggccgccagtgtgatggatatctgcagaattcgcccttagcgtggtcgcggccgaggtactacttcagtcattttcttaatttgcaaatcaatagctctcattttacttaataatgcctgatatttgccatgttctcctcaaatgtgtccaactgcttaattttttcttcaagttccttttctttttcaaatacttgggtttgtaattggtcaagttgtgaaaaatcccagtttagtccaatatagtcaaacacttttttaagtttcaatacctgtaagatgcaacacttaatagcggtgagtctgtctttaagattatagatctcctctttaacacctttatttacttcttgattaagtaatagttcattgcgctgtatactgtcagcctcctcctgaagcgctgatgttttttcatggaattgtctgcaaaactttaccttgtgttccacttcattacatgtattctgaatg

SEQ ID NO: 16416 - DNA, 581 bp, Homo sapiens
ccctctagatgcatgctcgagcggccgccagtgtgatggatatctgcagaattcgcccttagcgtggtcgcggccgaggtacaaacgagttgtatttaaagagtgctttttgaattctagggctctctgtaagttacttcatcaggatcctgtttctttgatcaagtcagcatgggtgcctaccaaatcatttctactttgctgtgtagcttttaaatctattttctgggtcactgggcttactcatggaatttcttttccttagtttgtttctctactatagtcagagtaaaatgagatgaatggatctgtatttaaagtgtggcattttcccagaactgccatggcctttacattcattctcaagaagatcaagatgagcagaaatgatcttcacagaaccaacatttactccaaaggcatcaaaactctatgtcctgaaatgcatttgagtcacttaccagcccagtgggatctctgtgcaacaatttgaatttatatcagtttacaaattcactgaaaagaattgtgtcttttttggttagttcattcctgaagtcttcaggctctactgaataacc

SEQ ID NO: 16417 - DNA, 589 bp, Homo sapiens
gactcactatagggcgaattgggccctctagatgcatgctcgagcggccgccagtgtgatggatatctgcagaattcgcccttagcgtggtcgcggccgaggtaccttaatttatccacccacagaaagtttttcagatggggtgggaaggaatggagagagaatgtgtctatgagcttccagcgctcatctctgcggctcagaagccatcaatagctcgaacagaaaacgtcctcacatctgtcacacaaacacaccccatggaaccaaaaataaaccccacactgatgaaagccagcatgtcgaaagataattttagatctatttgaagactgcagagactgtctcgctgaaattttaaaaccacaccaccagaatacccaaccccttacgattatgctcagccctgatgaggaggcaaaaacacttcattccattttataaacctcccaggcacctcagctctgtctctagaatggggagagagcattcctgagttaccacgtgactccgaaggtcaaccgagtcacatctgaaccaacaccactgtccaatattcactaatggagttcacatatttttagctttc

SEQ ID NO: 16418 - DNA, 583 bp, Homo sapiens
gactactatagggcgaattgggccctctagatgcatgctcgagcggccgccagtgtgatggatatctgcagaattcgccctttcgagcggccgcccgggcaggtacagtggttgctatctgtcgattgagtgatctgatagaatttataatgactagaacacagattcaggttgtatgtgtgctgcattggaactgaaagttttcacataggaaatgcttaaattcaatccctaaaataaatgaacaatgagaagaacacgttgaaaatctactgagtgtgtattgatcatctgtagttgttcaaacgctctctgaagcttatgctcttgttcatgtgccatttttgagttgtgcctacatgatgctggcaacagataagacatgtagttttaataaatcactaacctttatattctgcttatttttaaattataaattccatctgtgtaaatagtttctctcttcttgcactttactaaaagcagttaaaagaaaccattctgaggctgggattacaggcgtgagccactacacccggcctcatctgctctttaggatatggcagcagatcatctatatatc

SEQ ID NO: 16419 - DNA, 563 bp, Homo sapiens
tatagggcgaattgggccctctagatgcatgctcgagcggccgccagtgtgatggatatctgcagaattcgccctttcgagcggccgcccgggcaggtacaacgtgggcaagcatctgtgcatatgaaatgctgtttttctaaaagatttctcacattggcaaactgagagattttcttctggaacacaggaaagattatattaatgcttatagccataccatgtctgaatatgggaggatgacagacacagaacgagaccagatagaccaggatgcccagatattcatgaggacctgttcagaagcaattcagcaactacgaacagaagctcacaaggagatacattcccagcaagtgaaggagcacaggaccgctgttttggatttcattgaagattacttgaaaagagtatgtaaactttactcagaacagagagccatccgagttaaaagagtggtggataagaaaagattatctaagctggaaccaggaccaaatacaaagacaagagaatccacatcttttgagaaagtttcacagagtccttcaaaagactctgaa

SEQ ID NO: 16420 - DNA, 357 bp, Homo sapiens
gatgcatgctcgagcggccgccactgtgatggatatctgcagaattcgccctttcgagcggccgcccgggcaggtacttatcaatcttttgattttaactcatgtgttacaatttcaaacagtatattatatcaccattatcaccacgctgaagtattaaatggtcagaatgacacagcccctgcgtatacattcatagtttttagacttaaactattaatcattttagttgagaaaagacttgagaacatatgcacaagacactctgtaaaacaactactctgttcacgtgaaaaatgattataaaatattcaatttaggactagcaaatacttatgtccatataagaaatttttt

SEQ ID NO: 16421 - DNA, 691 bp, Homo sapiens
gaattgggccctctagatgcatgctcgagcggccgccagtgtgatggatatctgcagaattcgcccttagcgtggtcgcggccgaggtacataagaccacacaatgatggcattcaagagaaagaaaagaggtaaggatgcaaaattaaaaaaaaaataggacttaatgaaagctaatttcatcaagcccaggtcactgatgagaaagatgtaaaatcaagaaaccagtgaaataacacgtaacaggtgagtcaaacattaccagccgcatcaaacagtggaagtgaaatggcaccatctagcccacctggtgaaatccaaagcgagaacttaaagggagtaaggatgattcacaaaatgcggtcgggacacaagaaaagtgagtttggaaggacagtgaagagagaaaaaagaataaggaaaccaccaaaatttcaactcaaagatacattttaaactgcatggtatggcccactgtcaataccgtggctgcctgggaacaaaaagggtggtctccagatcccccagaaccccactatacaccaggaggacaaggaggaaaggaagaaaccccctttgcctgccagaatgcacatgaggggaggaaggcaaacccctaacagttgctgctttgacacatcacctgccccaacagcaggcagctcgctacccactcacattccccaggact

SEQ ID NO: 16422 - DNA, 646 bp, Homo sapiens
ctactatagggcgaattgggccctctagatgcatgctcgagcggccgccagtgtgatggatatctgcagaattcgcccttagcgtggtcgcggccgaggtacatcaattcttatggcacaataaaataaatccataatagctgtgggattcagaaacaaagttatttacagaaatgtttttgatataaaaaataaacagctaatatgatgagtttctacatcagtaaaaataatttcatttgaaattgattacagtctgagcacatactactatgtaagagactccactgggggccctgagagatagaaagatggcttaaatacaatgttgacacctttagttattgataatttactataacatggcagtgtgcctagtagctggaacaatgtggcaaaaactaataaatctgctgcgtgagatccttagtaattactgttccatctgcctagaactatgcagccatataaaagtgtatcccaacatctttttagttgctcccttttagaattcctgtcttaactgaaatgtcccctcctcaataaaattttctctaatatttgatctatgttaaccctctctctcagttttcttcactgcaaacaacatttattattaattataaaagtctagcatttacttact

SEQ ID NO: 16423 - DNA, 538 bp, Homo sapiens
ctagatgcttgctcgagcggccgccagtgtgatggatatctgcagaattcgccctttcgagcggccgcccgggcaggtaccataaaaatataagggaaaataagctttcctagaatttttcagtgttctagtttttaaacagtgatgttttttattaacctatttcatccattcaaagacaggcctttctccacaccacattttcctctaaaatcatgataacacttttaaattgatggtgtcttccagtgtgtatcagccagatggcagtgtgttacagttccaggaaaactcgttcacatcttccgtaagatcaagaaggctctggcatcagataagatcaaatgttgtctttctgttttaaatatgtgccgcaaagagatttgcttacaatctattgagaaagctaaaacagagcagacattgtcctgttgcggggtagatgaatagcctaagaatagtttagacaaattctgaaaacgaatttaccttagaagatgttcatgttagatctggtaaaagtaacatgttatttttc

SEQ ID NO: 16424 - DNA, 365 bp, Homo sapiens
agggcgaattgggccctctagatgcatgctcgagcggccgccagtgtgatggatatctgcagaattcgcccttagcgtggtcgcggccgaggtacagattttcgtgatatatttatacacgcatgggtttgtagatccctgaaacttagaggtcatttagctaaaatctacattttttttaacttttaataggattgaaatgatattttacactgtatcacagatacagtattttatataactttttgtaactgaccttatcttggccttgagtcccatcctctctggtggtagcgtaaaactgaaaattccagtttgggtcaatatttagtgaaagttctactttcttttcagagagtttgttc

SEQ ID NO: 16425 - DNA, 403 bp, Homo sapiens
actatagggcgaattgggccctctagatgcatgctcgagcggccgccagtgtgatggatatctgcagaattcgccctttcgagcggccgcccgggcaggtactgtgggaaaataccatgggaacggcgctaagcccttggctttccgattgaagggagcactagctattagctgctcatctcaacatatgtatttttttattttaatggataaaaatgttatatggctgatatgattgatgactaagataaattttcacactgggacattttctgcctgaaggtcaggcttaggtggcctggtcccagagttgctgtttctactaggacccgacctggtaaaaatagaagatacagggtagtgaggcagatttgaaaagaatgcagcatgtgcaaattcttac

SEQ ID NO: 16426 - DNA, 403 bp, Homo sapiens
actactatagggcgaattgggccctctagatgcatgctcgagcggccgccagtgtgatggatatctgcagaattcgcccttagcgtggtcgcggccgaggtacaaatggctggactattctttgcatggatagctaaagatatcttggccctttgtcctgtaataaaagttgctgccagaaaatacaggagaccaactactataaaatataaaatgtaatttaatttttttctaacctacgcccttattctaggcctttaaaagcactaaattgagaatatgggaaaaggaatctatagagtttcggccagataatacaggaaagatcaacctagatcaggattcagaaagccatcctggctaggcatggtggctcacacctgtaatcccatcactttgggag

SEQ ID NO: 16427 - DNA, 532 bp, Homo sapiens
ctctagatgcatgctcgagcggccgccagtgtgatggatatctgcagaattcgcccttagcgtggtcgcggccgaggtaccaaccattttgcttttaaaatactgaggcaaacctctctgaggtttcttcaaagccaatggcaacaaacatatttcagcatctgttttgcttcactgtaggtctgtgtgtgggtaggttataaaataaaaatgagcttgccattacagatactacttaaaaaccaaaaaaactatgatcatgatgttgataattctgtattcattatcctaataaaaacacataaatgtctagaaagaaatagacaattatgtattaggccttccatctcttatttaataatagcagtgtcattgttctagttaaaacccgctctgatcttaataaatctgatgtaaaaacatatcaccagatggggactctgttaaacttatgcgatactttcaactatgatgactaatagttctataatatttaaatggatgctcttattgaggaaagagtaaccattta

SEQ ID NO: 16428 - DNA, 398 bp, Homo sapiens
actactatagggcgaattgggccctctagatgcatgctcgagcggccgccagtgtgatggatatctgcagaattcgcccttagcgtggtcgcggccgaggtactttttttttttttttttttttttgttttttgcctacaacacataggtgaaggttgccaaattaaatagtgtttctatatttgaaaatgggaaaaagtcattaagaaaaaaaaggataaagaaaaaagtatggtagctaatgtccaacaagttgaaatgacagtagctttgaaggccaattaagtcgatacaaaacgaaatcgagaatgacggcggtggttgtaggctgcatcctggggaataaaagagccactccgcgaacacagtattttcttcagagcaagatggagctcttt

SEQ ID NO: 16429 - DNA, 501 bp, Homo sapiens
ccctctagatgcatgctcgagcggccgccagtgtgatggatatctgcagaattcgcccttagcgtggtcgcggccgaggtacgcgggtgaaaatgtgagagctctgctcacatctgacaggtctattggttgaagtttcaagtggcaactggtttgttagaaccagtctcttccagtgaagaaagttgttcactatttagcaaacgctaaggaggaagttcatgtaattcagataattcctatggtgtctccacagatactacgtggaaaagatggggagtagtgagagaaaacacaagaatatgtgaacccttcgggtctgtgagggatggaaggattgggattattggagaaaaataaggatagcattccagctgggcagatctaattcgagaataaacaggatgtgcctgtagatcaatgaaaagaaaggccaactggagtaggggtggcctgttggaatggtcagtttaaagcagttaggaaaaaaaaaaaaaaaaa

SEQ ID NO: 16430 - DNA, 513 bp, Homo sapiens
ccctctagatgcatgctcgagcggccgccagtgtgatggatatctgcagaattcgcccttagcgtggtcgcggccgaggtaccgaaaagaacagaggaaactaaggcaagctgtgaaagatgctgtgtctaagaaacccattccattggagaacccaaaggaaaagcgaccaggtaaaaggattgagagggaagaagaggaagaagaagaagcccttcctttagatatgatggatgaagatgacttacagttaatgaaggatttaggacaaagagtatcttttctaacaagagatctttcttctagtgagcctgttcatgcgaagaaacggaagcatgaacgcattatagataaatatgaaaaaataccaagaactctgcaaactgcaccagagaaggaactgattcatttacttcctatcaaagataaaagtggtataatcccacagactagggagaagccagttactgatagtaacaaagatgaagaggatcaagaagaagagagggaact

SEQ ID NO: 16431 - DNA, 186 bp, Homo sapiens
agggcgaattgggccctctagatgcatgctcgagcggccgccagtgtgatggatatctgcagaattcgcccttagcgtggtcgcggccgaggtactatttctcttctactccttaattacattgaatacagattttaattttgcaattgcatattcagtttcctttcaatcatctatttttttact

SEQ ID NO: 16432 - DNA, 443 bp, Homo sapiens
ctactatagggcgaattgggccctctagatgcatgctcgagcggccgccagtgtgatggatatctgcagaattcgccctttcgagcggccgcccgggcaggtacgcggggtgtgtgtagtcgggtatgagaacgattgcaagcaaaagcagctgagggacgctgtccaaggagtaggctcagtagcacgaactgcaaatacttgaaaaaaggaaaaagttcagccttgggctggaaagtggtttaacatgctggagctggttttctgcttggtagccctacaactttggcccaactacttggcctctgggactcagattcctcctctttaaaatggtgctaataatagcacccaccctctgtgaggaggatgctgtgaggacaaaatgagatcatccacataagccgtgaaccctgttcctggtaaggtcacaatgatgcaag

SEQ ID NO: 16433 - DNA, 584 bp, Homo sapiens
ccctctagatgcatgctcgagcggccgccagtgtgatggatatctgcagaattcgccctttcgagcggccgcccgggcaggtacttacattgagtaaagttataccccactttcttggttgatactgtcatttgataaaattcatcagtggataaattgctatgtatgtgtgtgataaagatacttgccttaaaatagaacacttctgtcttgcaaacagtttatggtcaaattgccttttcagttactgttctttccatgcacctagtgaatttaagtctgataaagtccctggatgtaagaaagaagatgaaatgtcttttcattgttaattatctgcacctggattaaaaagtattttcaacatgtgaagactttatggaaaaaaataatatgtgtgtgttgtttgacttttactgctaaagacagcaagtgattgaacagataaaattatgtattggttttaaccattatttttattgaccctatcctcaatgagagtattcaattgtgtgtgtggtcagttgtacctcggccgcgaccacgcttaaggcgaattccagcacactggcgggcgttactag

SEQ ID NO: 16434 - DNA, 539 bp, Homo sapiens
  misc_feature 57: n = A,T,C or G
agtgtgatggatatctgcagaattcgcccttagcgtggtcgcggccgaggtactttntttttttttttttttttttttttttgggattttgtatttttagtagagatgggatttcgccatgttagccagtctggtctcaaaactcctgacctcacgtgatccgcccacctcggcctccctaagtgctgggattacaggcgtgagccacctcacccagccaataattattttttcacatatcatttgggcatccctaagtttcactggtaatggggtaatggcaatctaacatttttcacacatatatatatataaagtctgttgattttcctttctgaaatgctaacttgatatgtgcctcttaaggactttgacatgagcagatgatatggatgcttgcttccgggtggagtgagtgtctgtctgacctctagaatatgctctatttctgctgggactctaacttagtcttaagaagagacttgactgtttgaacatttaaatactctaaatagtccactggcactattaacaaataa

SEQ ID NO: 16435 - DNA, 403 bp, Homo sapiens
gactactatagggcgaattgggccctctagatgcatgctcgagcggccgccagtgtgatggatatctgcagaattcgcccttagcgtggtcgcggccgaggtacaccagaaagcagtatcattatttgagtcacacctggtaacttgacacctgctgacacctttctactgtttacttgcaatgtctcaattttccacccttctaaaggactcagtgtcatctgaaagcttggcactttcactatgtgcccagggctggagatcactgataaagacgttaaataaaacccattttagttccactctctacataatgctcgctatttaaaggactcactcaaagaagtgcctgtttccctctaccctttgtttcttctgtctgaactacttccttctctttgac

SEQ ID NO: 16436 - DNA, 649 bp, Homo sapiens
  misc_feature 426, 599: n = A,T,C or G
tacgactcactatagggcgaattgggccctctagatgcatgctcgagcggccgccagtgtgatggatatctgcagaattcgcccttagcgtggtcgcggccgaggtacctctaatgaagttgatggattctcttgggacagggttataatcatgctcatcaaaaagtcagaatatttagcagaatatgcaataggtcataaaaataatttaaatattttattaagaatgttttccttagccaagtgtggtggctcatgcctgtaatcctaacaatttgggaggctgaggcaggagaactatttgagctcaggaattcgagaccagcctgggcaacatagtgagaacttatttctacaaaaataaaaaataaaaaaattagctaaggcttggcgtggtggctcatgcctgtaaccccagcactttangaggctgaggcaggcagatcacttgaggtcaggagtttgagactagcctggccaacatggtgaaaccctgaggcaggagaatcacttgaacgcgggagacaggggttgcagtaagccaagattgcgccatttcacttcagcctgggcaacagagtgaggctccatctcaaaanaaaaaaaagaaaaagaaaaattaggtacctgcccgggcggccgctcgaaa

SEQ ID NO: 16437 - DNA, 569 bp, Homo sapiens
tagggcgaattgggccctctagatgcatgctcgagcggccgccagtgtgatggatatctgcagaattcgccctttcgagcggccgcccgggcaggtacttttttttttttttttttttttttttttttcctttttttttttttttttttttttttaattttttttccaatgaaatggttgggttttttggggcctttcctttcgggattccccttggttttgggtttgctttccaaaattccttttaattccttccctaagcctttagggggaaaaaaaattttcccggggttggccaaagtttatttttgggttcccaaaatctgggtgaaaatggaatggaaccgccaattttggtggttggccatccccctttattaccctttgccgggggggccagaatggggggttttttgggaaccggatgaaaacctgaaacctatccgccttcttggggccctgagccttttttggttcccagggtttggtgtgaaaccctcgggccttgtgaccgggatggacctttatggacctgtgaaaaccaccctttttttttttttttttttttg

SEQ ID NO: 16438 - DNA, 507 bp, Homo sapiens
ttagggcgaattgggccctctagatgcatgctcgagcggccgccagtgtgatggatatctgcagaattccagcacactggcggccgttactagtggatccgagctcggtaccaagcttggcgtaatcatggtcatagctgtttcctgtgtgaaattgttatccgttcacaattccacacaacatacgatccggaagcataaagtgtaaagcctggggtgcctaatgagtgagctaactcacattaattgcgttgcgctcactgcccgctttccagtcaggaaacctgtcgtgccagctgcattaatgaatcggccaacgcgcggggagaggcggtttgcgtattgggcgctcttccgctttcttgctcactgactcgctgcgctcggacgttctgctgttgcgagcggtatcagctcactcaaaggccgtaatactgttatccacaaaatcaggggataacgctagaaagaacatgtgagcaaaagggcagcaaaaggccattaacc

SEQ ID NO: 16439 - DNA, 458 bp, Homo sapiens
ctactatagggcgaattgggccctctagatgcatgctcgagcggccgccagtgtgatggatatctgcagaattcgccctttcgagcggccgcccgggcaggtactatgggaaaaattaaaggaggataaggaggatttggaaggatgggggacacagtttttgagggtgtcctaggaaggcctcattgaggaggcaatatttgagtatagaccacatctggccgcctcttgttagcccatgagctgagaatggttgttacagaacatttgcagctgggtatggtggctactgcctgtaatctcagcattttgggaggccaaagcaggtggatcacttgaggccaggagtttgagaccagcctggtcaacatggcgaaactccatctctactaaaaattaaaaaaaatcaaccaggtgtggtggggtgtgcttgtaatcccagctactcaggaggctga

SEQ ID NO: 16440 - DNA, 691 bp, Homo sapiens
gactcactatagggcgaattgtgccctctagatgcatgctcgagcggccgccagtgtgatggatatctgcagaattcgccctttcgagcggccgcccgggcaggtacgcggccacctcaggcatgcttagtgttcagcacagtgcctggggtatagcaagcgcccaaaaaatgtgagtggctgtgattggaataattattattaagtagcagagtctcccataggattagatacccaagtcgctatggcctttcccccaaaccctaagcaatcagtgttggcattttaaatggaaggcacagggctggcattggtggctcatgcctgtaatcccagcactttgggaggccaaggcaggcagatcacaaggtcaagagttcacaaccagcctggccaacatggtgaaaccccgtctctactaaaaatacaaaaaggaaattagctgggcatggtggcggcacctgtaatcccaactactcgggaggctgaggcaagagaattgcttgaatctgggaggcagaggctgcagtgagccgagattgtacctcgggcgcgaccacgctaagggcgaattccagcacactggcggccgttactagtggatccgagctcggtaccaaacttggcgtaatcatggtcatagctgtttcctgtggaaaattgtatccgctcacaattccacacaacatac

SEQ ID NO: 16441 - DNA, 691 bp, Homo sapiens
acgactactatagggcgaattgggccctctagatgcatgctcgagcggccgccagtgtgatggatatctgcagaattcgccctttcgagcggccgcccgggcaggtacctctttaggggacagaactattttacactttgtgtggtttccatggctgtaaacatttgttaaaactcactagccaggcgtggtggctcatgcctgtaaccccagcactgtgggaggccgaggcgagcggatcacgaggtcagcagttcgagaccagcctggctaacatggtgaaaccccatctctactaaaaatacaaaaattaaccgggtgtggtggcaggtgcctgtaatcccagggaggctgaggaaggagactcgcttgaacccgaggcagaggttgcagtgagccgagatcataccactgcaagccagcctgggcaacagagcaagactccgtctcaaacaacaacaacaacaacaacaacaacaacctcactcaactgtatatttaacatgggtgaattttatcatatgcagactatatttaataaagctaattaaaacaacctctatccaaatcccgcgtacctgagactacaggagcgcgccattatgccctgctcattttttttttcatattgtagagatggggtctcactatcttggccacactggctttaaacttctgggctcaagtgatc

SEQ ID NO: 16442 - DNA, 285 bp, Homo sapiens
  misc_feature 97, 129, 130, 131, 132, 133, 134, 135, 137, 138, 140, 141,142, 143, 145, 146, 147, 149, 150, 154, 156, 157, 158, 159,203: n = A,T,C or G
gattgtatacgactcatataggcgattgggggccccttctttaaaaagctgctcgagcgccgccatgtgatggtttctgaagaattcgccctttaancgggtcgcggccgaggaacttttttttttttnnnnnnntnntnnnntnnntnntttntnnnntttttttttttttttttttttttttttttttttttttttttttngggggggagaaaaaaaaaagcttttaaaaaaaaaaaagggggaatttttttatatttttttaaaaaaagggcccctttttgt

SEQ ID NO: 16443 - DNA, 418 bp, Homo sapiens
tagggcgaattgggccctctagatgcatgctcgagcggccgccagtgtgatggatatctgcagaattcgcccttagcgtggtcgcggccgaggtacatagcaaagttacattaattacattttcatattagcagactttgagtcggttgtgattaattataataagtgcctaagaactaatgtgttcatttagaaaatgaattatgccatgcatttctcatcactaaaagagtttagagttttgaaagtggctgtaggagagttttatcaaagatgaaggaataagatttctcttaactgctccatcaactcttcctcttagaaaccatttcagctctccagaggcctacaaagtcttctgtattatgtgatctcttgggctttagattgcttctagattactctttcaataaactaa

SEQ ID NO: 16444 - DNA, 430 bp, Homo sapiens
tactatagggcgaattgggccctctagatgcatgctcgagcggccgccagtgtgatggatatctgcagaattcgcccttagcgtggtcgcggccgaggtacattacaatttcagcaaagcatctgccagaagtaatatagtattacaaactaacaattagggctcttaacacagataaaactcttaaatgctggttctatcacttactctttatgtcactctgtccaagcatttaaactctctaagctatagcttcccccttatctctttaaaggggaaccatgatgataactatctcaccaggttttagtaaagaccgaatggtaaaaatctacagaatgcatttagcatagtacctgcccgggcggccgttcgaaagggcgaattgcaccacactggcggccgttactagtggatccgagctcggtac

SEQ ID NO: 16445 - DNA, 496 bp, Homo sapiens
ctactatagggcgaattgggccctctagatgcatgctcgagcggccgccagtgtgatggatatctgcagaattcgccctttcgagcggccgcccgggcaggtaccatacagactgtttgtggatggtgaaaaaccctttaagctttttgatttctctttccaaacttttgatgtccctttgggtatttggtggcgtggtttactgtccttgaaagggagttcagtggtttgggactgcaactaaagcaggaatagcagagtttgatatcaatctgagttctaggactgtgaataaactgtctttatcttatccaaacattgaatatatggtaattttatgaaagcggaggaaaccagaagccacatcaatctctgaacctcatgaatatatcagataaaattttagatatgatctttttgagaaaagtacctcggccgcgaccacgctaagggcgaattccagcacactggcggccgttactagtggatccgagct

SEQ ID NO: 16446 - DNA, 483 bp, Homo sapiens
gactactatagggcgaattgggccctctagatgcactgctcgagcggccgccagtgtgatggatatctgcagaattcgcccttagcgtggtcgcggccgaggtacaaaatataatttagactgctaatccacaggagacaaattacttactattacaaattacttcttagcttcccattagcttatattaagttctaaatcatagggaatgagttaaaatcatgagattctatggtccttttgccatgtatgcttgctgtgttgtaatagttttgttagagaagatagaaagcttaccactcagtgccataagtgagaaggaacaacaacaacaaaaaggactgtggccagacatggtggctcatgcctgtaattctagtgcttttggaggccaaggcagaagattatttgtggccaagaattcaaggttacagtgatctatgattgcaccactgcactccagcctgggtgacagagtgagac

SEQ ID NO: 16447 - DNA, 537 bp, Homo sapiens
gactcactatagggcgaattgggccctctagatgcatgctcgagcggccgccagtgtgatggatatctgcagaattcgccctttcgagcggccgcccgggcaggtacaatgtgacatccataggacgctactgaaaaaagccttggtttttttcatactttttctgctttgcagaaaggtgaggtgaagctttcaaacagcctgtggttgtagccttctttctattatttatggccatgtgttctggcaacagttacaactgcaactctgggcaaagaataggttggaagactgtttcaacgttttccatcaggacaagatcataccgacacagctgaggcctctccggatgggcaagggaccttaacttcattcggagaatcctgagcttgtacctcggccgcgaccacgctaagggcgaattccagcacactggcggccgttactagtggatccgagctcggtaccaagcttggcgtaatcatggtcatagctgtttcctgtgtgaaattgttatccgcttacaattccacacaa

SEQ ID NO: 16448 - DNA, 444 bp, Homo sapiens
ggccctctagatgcatgctcgagcggccgccagtgtgatggatatctgcagaattcgccctttcgagcggccgcccgggcaggtaccagtgtcaatactttctattttctaactatattactaggcatgagatttgaaatatcccatgtagatattggtagctggaatttcaaatctgtaaaaatagaaatggcaacaaaacaatgaatctggaagactactgtgttgtcattaattcctttaaaaaactgcaggctaacaatttttttagtgaaaagtttggggtgtaaatattaggagctttctataaatcacctaatatttaccaaaaaataaaacctatgagataggtgctactactgatctgtttcttagtaaggatacttaaagaggttaaaactggccaggcatggtggctcacacctgtaatctcagcactttggg

SEQ ID NO: 16449 - DNA, 514 bp, Homo sapiens
cactatagggcgaattgagccctctagatgcatgctcgagcggccgccagtgtgatggatatctgcagaattcgcccttagcgtggtcgcggccgaggtacttttagtagagacagggtttcaccgtgttagccaggatggtctcgatctcctggtctcgtgatccacctgcctcagcctcccaagtagttgggattacaggtgcccaccaccactcccagctaatttttgtatttttagtagagatggggtttcaccatgttggccaggttggtcttgaactcctgacctcgagatccacctgcctcggcctcccaaagtgctgggattacaagtgtgagccaccacgcccagcctctttactttcttaattgcctcttcataatgtatttaataaactatggcaatcccagaatgacagattgttaccactgccattggatttctaatttcaatttggaatttaaaaaccaaatacctgaattgttgtcctaattctgacattgcctattta

SEQ ID NO: 16450 - DNA, 439 bp, Homo sapiens
tactatagggcgaattgggccctctagatgcatgctcgagcggcccgccagtgggattgggttttttgcaaaattcgcccttagcgtggtcgcggccgaggtacttgaaatgtgggtatgggcagctgaggaacttaactcaatgttttaattttattaatttgaatttagccacatatggctagccagtggttaccatattggacagaacagatgtagactagtagagtgtcagtttcagtcatttgaaccatacatttgaaccatagctgagaaccagaaaatcagtaaataaggcctctgaacagaataaatactggtgtataatatcaaagaatccatgtaaagatacgtattttactgataggagctcctgtctggtagtccttagagtgtgttgctctttactatacaagattgttttccaaacttcagtgga

SEQ ID NO: 16451 - DNA, 441 bp, Homo sapiens
agggcgaattgggccctctagatgcatgctcgagcggccgccagtgtgatggatatctgcagaattcgccctttcgagcggccgcccgggcaggtacgcgggtatcagagggcaaacactgtgacaggagctgtcaggaggactatacaaagagaaagcattattgacatagcaaagacatgaggtgacctagatgtttgtaagccactctggcagctacagctgagggagcaggcctggttagagatttctcacaggtgttctccagacccgaacactgtagttttatgtagattgctcccctcttgggaaggaagtagagctgttttgtttctattcacgtgttatgtattacctctctcactatctcattaaccagtgttgtcaccaccacacccaactctgtgtaccttggccgcgaccacgctaagggcgaattcc

SEQ ID NO: 16452 - DNA, 493 bp, Homo sapiens
taatacgactcactatagggcgaattgggccctctagatgcatgctcgagcggccgccagtgtgatggatatctgcagaattcgcccttagcgtggtcgcggccgaggtacgcgggggagttctggatggagaaatacgataaggacacagaaatgaaacagaatgaactaaatgctctcaaagccacaaaggccagtgacttagcacaccttcaagacctggcaaagatgataagagagtatgaacaggtcatcattgaagatcgtatagaaaaggagaggagcaagaagaagctccaggcctggtggcgaggcactatgatacggagagaaattggtggtttcaagatgcctaaagacaaagttgatagcaaggattcaaaaggcaaaggtaaaggcaaggataagaggagagggcagaagaagtgaccaaggtctcttttgtgttttctgctgggattctggaggtgggaaagacttggagagagttaag

SEQ ID NO: 16453 - DNA, 83 bp, Homo sapiens
tcactatagggcgaattgggccctctagatgcatgctcgagcggccgccagtgtgatggatatctgcagaattcgcccttagc

SEQ ID NO: 16454 - DNA, 510 bp, Homo sapiens
ctcactatagggcgaattgggccctctagatgcatgctcgagcggccgccagtgtgatggatatctgcagaattcgccctttcgagaggacgcccgggcagatacagtcttttttatttgtaaatagccataatgaatgagaagtgaactgctaatggcagagaatgtagactacctgcttgagagatttggtgaaggaaagcaataaagtaatattttagtgggaattatgcctgagagactttatttagagtagactggtagtaggaacaaatttagagtctaaggcatagcttgaagatgaaagaaaaaagaaagttacaaatgtggcatggccccagaggagaaaactgaaaccaaactgggaagacagaatttatccttagaaagagagaaaaacatcctttttttgacacagaaggaatggagaaaagataggggaagacactaagaactggaaagaaaatgagtgaaaaggggctctttttttcccctcttgggggactgatc

SEQ ID NO: 16455 - DNA, 521 bp, Homo sapiens
ccctctagatgcatgctcgagcggccgccagtgtgatggatatctgcagaattcgcccttagcgtggtcgcggccgaggtaccctggattccacctctcggctcagatgagcatgccgcatggaacaggatatgctcccggcgttctcttgacggtcagagagatctccacatcaaacaggccatgcatgtctctgtttgtcctggagtctgtggacaaatcctgtccttgtggacctttccacttcgctgtgggccgggggaaccagcccgaggactgacagagtagctggatgtctctatcaacatatcccgcgatggaaatgataggaactgagcccagtgctgacacctgtagctcccagatggccttctggtagtaagactgggaactaatcctgcacccatagaggccagcatccaacacagtaatgtttttcagcctcagagagatgcgcccctccgcaataaaatccttcaccagttttgtcctgccttgatactgtggcatctgcataaatg

SEQ ID NO: 16456 - DNA, 603 bp, Homo sapiens
  misc_feature 469: n = A,T,C or G
ctcactatagggcgaattgggccctctagatgcatgctcgagcggccgccagtgtgatggatatctgcagaattcgcccttcgagcggccgcccgggcaggtactttgacagaatttttaagcagtgtttgacatcatagtatcctgtaaagtaagtaagaaaaggtttgttcttcccagaaattgaaagtggttgctctgaaaataaaactagtaattaaaaatattaattttgttctaatcctttctttgactaattaacatttatctctttctcttatatttccaccacacctcttcccactaccatttattctgtgacctaatcagttctgttgttttacttggctgtagtgttttggttttttttgttttgttttttttgagatggagtctcactctgtcacccaggctagagtgcagtggcatgatctcggctcaatgtaacctccgcctcctgggttcaagngattctcatgcctcagcctcccgaatagctgggattataggctcgtgccaccaaccccccgcgtaccttggccgcgaccacgctaagggcgaattccagcacactggcggccgttactagtggatccgagctcg

SEQ ID NO: 16457 - DNA, 374 bp, Homo sapiens
ggcgaattgggccctctagatgcatgctcgagcggccgccagtgtgatggatatctgcagaattcgcccttagcgtggtcacggacgaggtacaatcatgcactggggtaaagaagatacatctgctcttagctacctaccatgccaacactactgagaaagctcacagaggcccatgatgcccacctggatctgaggacctaaaaagccacaacaggcaaccataatctgggacttacctcaaacaactcccctgcataaagtgaatgaatgaaaaacccatgttatatgaatcagagtgctgtagagaaaaagaaccaatcaaatgggtgtgtatggaaagagagaattattttagggaattagctgacata

SEQ ID NO: 16458 - DNA, 541 bp, Homo sapiens
gactactatagggcgaattgcgccctctagatgcatgctcgagcggccgccagtgtgatggatatctgcagaattcgcccttagcgtggtcgcggccgaggtacctgtgtggccattacaatgccttacatgtaataagtccttgttaaacattagttgcagtgggttaatttgcaaatgattttgcaatgtaaaagtcatcgtagtattatattaagtatgttctattccacccgacttaaaacatgattcaattcaagaatttttaatgtaaataaattttcaaaaataaatgtctagggcaaaatcagacctgtctacttgttgcatcttgactaaaaattggtcaaggtatctgtaaataagttgctttatacagttgctgttcaacattatggatatacacagatgatcaggcaagttctgctttgtacctgcccgggcggccgctcgaaagggcgaattccagcacactggcggccgttactagtggatccgagctcggtaccaagcttggcgtaatcatggtcatagctgtttc

SEQ ID NO: 16459 - DNA, 450 bp, Homo sapiens
gactcactatagggcgaattgggccctctagatgcatgctcgagcggccgccagtgtgatggatatctgcagaattcgccctttcgagcggccgcccgggcaggtaccgggagagtgcttacagtctagcaggcaagattgatattaaacacatattcaaaaaaagggtatgagttttttaaagagaggtagtgctaaatcctctgggaacatcctctgatctcatctaaatttgaaaccctaggttctctgggaatctatagcaagaactaatccaagttaggggtcagagaagatgtgaagaatgagtaggatttagtcagctgaagagaatgaggctatggggaagcgtgttctaggaagaggagaaatatattcagcctcagagatgtgcaaaaaagaacttaaactgcagagactttcgggaaaaaaaaaaaaaaaaaaaaagta

SEQ ID NO: 16460 - DNA, 398 bp, Homo sapiens
atacgactcactatagggcgaattgggccctctagatgcatgctcgagcggccgccagtgtgatggatatctgcagaattcgcccttagcgtggtcgcggccgaggtaccgtgtgactgctttgagacatttctttattgaattctaacaaaaacaatcagtgaggcagaagttacagtaattttgatttgataggtaaaaatattacatctcagggaagccgagaaactcatctcagtccctgaaccagacgcaggggctctgatgcagacccactgggcgtgcctacctctgaactgcctttttggggagtctcggctctacctcgggtcctgcactgcaacctgggaatatgcttgtgcatgtcagtaaacctactgatattattaccactcttg

SEQ ID NO: 16461 - DNA, 551 bp, Homo sapiens
ctatagggcgaattgggccctctagatgcatgctcgagcggccgccagtgtgatggatatctgcagaattcgcccttagcgtggtcgcggccgaggtacctagacttattgttccactgaggcaggtagacttcaatgattccatctgactcctctctgcaatgtttactacaataaaacaagaggcctcattgctttgaataaaaatggggagatcctactttctggcctagggttcaaaattaagccttgcattttcctaggggcccataatcaatcacagaggcatttagatggacaaactatttgaaaaacctttccagatctttgcttaaccaattaataggctatccttaatacctatccattggaacctataaaaagatctgtaatcgaaactgcctttcaagagctgcagttttcagagtgtggtcccaggaccaacattatcagcatcaccttcttttattagtttattaggaatacacatctttgaacacaaccttggacccactgaatcagaaatggagggtggggtggacccacagcct

SEQ ID NO: 16462 - DNA, 415 bp, Homo sapiens
tatagggcgaattgggccctctagatgcatgctcgagcggccgccagtgtgatggatatctgcagaattcgccctttcgagcggccgcccgggcaggtactggaaccaatcttacttagataccgaggaatagccatattgtaaatacctccactgacctgtggcttgcattttcacatcttaaatatcttttgataaatttctatcagtgttgaaattgataaataattgggatatattcatatgagaattctatacagtaataaaaatgaataatcagcagttaattgcaaaacatgcatggatctcaaaaacatatttataaagaaaatagtctaacaaaaataaaatatcctttatgatcctctttcttacatgttacaaaacaggcaaagataacccatgcttttagaag

SEQ ID NO: 16463 - DNA, 572 bp, Homo sapiens
gtaatacgactcactatagggcgaattgggccctctagatgcatgctcgagcggccgccagtgtgatggatatctgcagaattcgcccttagcgtggtcgcggccgaggtactcttggtgtgagtcactgtggtgacagcagcatccaggacgtcgatgcccacccgttagccccctgaagctgccctccctaagaacagaaacatcctccttgttgaaaatgaaatggacactgtttagtctcgcattgactctgctgttgatcgtctctacttgaaagtaggatctattgcagtgcactctcctggttttccttcattcttttctgaatatgcaccttgcacatgtgtggtgtttatcatgtcagcagtcagtggtgccctcaaaggtcttgttcttagagttctctaggaactgggtctaaatatctcaggatgcatagtgggacctcacatttggcaaaaagaattaagagtaaaaattatgtgaggtcgatcacacttgaagaccttttatcctttctgatttagttggtgcacagcagtacctttttcttcttaaaaaggctttta

SEQ ID NO: 16464 - DNA, 459 bp, Homo sapiens
actactatagggcgaattgggccctctagatgcatgctcgagcggccgccagtgtgatggatatctgcagaattcgccctttcgagcggccgcccgggcaggtacacatatgcgaatttaacctcagcttaaaatggtaattcctcaccagggtttgaagtgcctgccaccttcataatgcatcttaaaggtcagctggcaatcagtgacaaattctacattcctgaatagttacttgtgaattcaggatttcatttagcttaatttgtgtgtttttttcctcctaagtgctcaggtctgaaatagtcaaattttaaccatctaattggaatgaaaagaaagccatggttcccggcgtgtccctaggaggtgaggatagaagagtgctgggaagaggaggcacagactcttttcatgaaggaatgcatctcacactaggagcagagacctgatcggaga

SEQ ID NO: 16465 - DNA, 429 bp, Homo sapiens
atagggcgaattgggtccctatagatgcatgctcagcggccgccagtgtgatggatatctgcagaattcgcccttagcgtggtcgcggccgaggtacaactatcaaaaaatgggataacatacgcaaaaaaggcaactttccagaaatcatattgtgatacttgattttgttaactaagactgttgtgtgcatacatgtggaatgatgcaaatgagtaattatgtgatattattattctaccattctcttgtgtccctgaacatcaggattcagatatggaagaaagagacagagataaaagatagaataggtaaaggtaaaaatgctgtacaaaaagggctacattctaaatagtaaaaaaatatgcaaactgaggtataaataagattatattctgtgtatcagtgactctagaggttaaaaatgac

SEQ ID NO: 16466 - DNA, 409 bp, Homo sapiens
tatagggcgaattgggccctctagatgcatgctcgagcggccgccagtgtgatggatatctgcagaattcgcccttagcgtggtcgcggccgaggtaccagctgtaaccaatacgattctggggcaggttgtgggcgagtagaagaacctccttcccctctgcgacattgaacggcgtggattcaatagtgagcttggcagtggtgggtgggttccagaaggttagaagtgaggctgtgagcaggacctccttccaggggacatgcaatctgcagggaggggctgaggggggtcccatggtctctgctgtcttctctgtccacctctttgtagaggagcttgagctccaggaatgctctggtcagggctgctgtgactgttggccctgctgtccttcctccttctcccc

SEQ ID NO: 16467 - DNA, 489 bp, Homo sapiens
atagggcgaattgggccctctagatgcatgctcgagcggccgccagtgtgatggatatctgcagaattcgcccttagcgtggtcgcggccgaggtactggactaaatgttttcattacctcatttaaagcctggagagttaagtattttctctgaagtcacataacttgtaaagaaagaagctgagattagttttacagccctcactcaaaaaaaaaaaaaaaaaaagtacccagcaccacctaggaagtatttttgccacaaaatcagacctccagatctaactaccattttataggaaagataagttcagagaaccatgtcaaatgacacctcgggatttcaaccagcaacgttcaaatgtgctaaactctgtagatggaaagagacttacagacctttcaaataaatgcaatatatgggccttgcttgaatcctaatacaaacaattcaactacaaaaacagccaaacatttgtgggacaatggga

SEQ ID NO: 16468 - DNA, 469 bp, Homo sapiens
gccctctagatgcatgctcgagcggccgccagtgtgatggatatctgcagaattcgtccttagcgtggtcgcggccgaggtacatggaggtcaaaagtcaggtaaagtcatcgaaacatgacattgatttaaagcaaactgagattttgttctaaaacaagagtttcaaaattatttatacacaaccaaacagactaacctgaggaataaacaattttgtgagtaacctttttggtatcctcatcctatcttattggatcatcagtagaatggagcaatgagttctttcaagtagcctcaggttatttcgaaataataccttgaggaaaaaaaacaccaatatgtttatcaggtccgcggggatccctgactcggggtcacctttggagcagagaggaggcaatggccaccatggaaaacaaggtgatctgcgccctggtcctggtgtccatgctggccctcggcaccc

SEQ ID NO: 16469 - DNA, 495 bp, Homo sapiens
atagggcgaatggggccctctagatgcatgctcgagcggccgccagtgtgatggatatctgcagaattcgcccttaccagcggccgccccgacgggcacagagacagtgaatactgtagggtcagagcttttatgtaataccttttcatatctacaatgtttagcacaatgcttggcacatagttagagctgttcaatagactcataaatttatctttctgttgggactactgaggaataaacttgaactggaggaaaaaaagtcaaggagagttgcctaccttctctctaaatccttacctataatccttcagctcctattatagagaccacttcattttggtaattctctttggggttgatattaaatacgaaacagaaaatcaagatagtacctcggccgcgaccacgctaagggcgaattccagcacactggcggccgttactagtggatccgagctcggtaccaagcttggcgtaatcatggtcatagct

SEQ ID NO: 16470 - DNA, 351 bp, Homo sapiens
cgactactatagggcgaatcgcgccctctagatgcatgctcgagcggccgccagtgtgatggatatctgcagaattcgcccttagcgtggtcgcggccgaggtactaatcagggcatgtgtgggaggaaaatacttgaggttgtggaaaaaaatcacctgaaggattagaggtgcccagtattcacacagggccgggaaaagtgtctgttcccactgaggctggaaacctcattattcacggggcacggggtagagtgcatagaaaggtgtttgcctgatagtggggaatactagccctaaattaagcactgctacagttctgcctaataaactgtaaaagcatgagctga

SEQ ID NO: 16471 - DNA, 386 bp, Homo sapiens
ctatagggcgaattgggccctctagatgcatgctcgagcggccgccagtgtgatggatatctgcagaattcgcccttagcgtggtcgcggccgaggtacccagaactactcatgcgttgtaactttccagagcaaaaaattggaatttgctcatgttttacagggggagggtcaaggccattctatgaaaattaacaaagggggttgggggaggagggctttcctttttgctaaaggaaaaataacacattcttttcgaatgatgacttatttttgaaaggcatgctgcccgagtacatgctaagacttcaccagtcaaagcgaactactatactcaattgatccaataacttgaccaacggaacaagttaccctagggataacag

SEQ ID NO: 16472 - DNA, 168 bp, Homo sapiens
actactatatagggcgaattgggccctatagatgcatgctcgagcggccgtcagtgtgatggatatctgcagaattcgcccttagcgtggtcgcggccgaggtacacatttggtgcggttctgttcgtgggctgggtcgctggaggtcctcacacttaattgggggtg

SEQ ID NO: 16473 - DNA, 472 bp, Homo sapiens
gactcactatagggcgaattgggccctctagatgcatgctcgagcggccgccagtgtgatggatatctgcagaattcgcccttcgagcggccgcccgggcaggtactttgacagaatttttaagcagtgtttgacatcatagtatcctgtaaagtaagtaagaaaaggtttgttcttcccagaaattgaaagtggttgctctgaaaataaaactagtaattaaaaatattaattttgttctaatcctttctttgactaattaacatttatctctttctcttatatttccaccacacctcttcccactaccatttattctgtgacctaatcagttctgttgttttacttggctgtagtgttttggttttttttgttttgttttttttgagatggagtctcactctgtcacccaggctagagtgcagtggcatgatctcggctcaatgtaacctccgcctcctgggttcaagtg

SEQ ID NO: 16474 - DNA, 572 bp, Homo sapiens
  misc_feature 169: n = A,T,C or G
atagggcgaattgagccctctatatgcatgctcgagcggccgccagtgtgatggatatctgcagaattcgcccttagcgtggtcgcggccgaggtacctttgagcccttgagaatgtctctgaatgtgcagttagactcttctcactgaactgctggttctgcttgggncctggaaggcacctgtcccacaaggcccactaggacagattcctatgcatctttcatgattccatgtggatcacatttcctctgacattcctctgaacatgtaaagatgctgaatatcattcatcattagggaaatccaaatcaaagccacaatgagataccacttcaaacccgcaaggaaacaaaaaagacattaaaaagtacctgcccgggcggccgctcgaaagggcgaattccagcacactggcggccgttactagtggatccgagctcggtaccaagctaggcgtaatcatggtcatagctgtttcctgtgtgaaattgttatccgctcacaattccacaacacatacgagccggaagcataaagtggtaagcctggggtgcctaatgagtgaggcta

SEQ ID NO: 16475 - DNA, 440 bp, Homo sapiens
acgactcactatagggcgaattgggccctctagatgcatgctcgagcggccgccagtgtgatggatatctgcagaattcgcccttagcgtggtcgcggccgaggtacgcgggtaattttgtttgaaattaaaagctatgctacctgttgcttaggcaaagagttaagagaggtgagatttctatcagctgtggaaatataaatgttcttatagaaggagagtggagctgtggaaatataaatgttctcatagaaggcctgagtggacttttcctgggggaaacgaatgggattgtcttagtaggtatatttgtaaatagtagagtcatagatggcctgtatttgagtacagtccagggctgcttttatggtttcagatccacctgcacagtcaagggcaaaatccacacctcccttggtcaattcaatgattacttcctg

SEQ ID NO: 16476 - DNA, 433 bp, Homo sapiens
atgcatgctcgagcggccgacagtgtgatggatatctgcagaattcgcccttagcgtggtcgcggccgaggtacctgtgtggccattacaatgccttacatgtaataagtccttgttaaacattagttgcagtgggttaatttgggaaatgattttgcaatgtaaaagtcatcgcagtattatattaagtatgttctattccacccgacttaaaacatgattcagttcatgaattgttaatgtcaatgaattttcaaaaataaatgtctagggcaaaatcagacctgtctacttgttgcatcttgactaaaaattggtcaaggtatctgtaaataagttgctttatacagttgctgttcaacattatggatatacacagatgatcacgcaagttctgctttgtacctgcccgggcggccgctctaaagggcga

SEQ ID NO: 16477 - DNA, 364 bp, Homo sapiens
aattgggccctctagatgcatgctcgagcggccgccagtgtgatggatatctgcagaattcgcccttagcagcggccgggccgacgggctccatatagacaatgtcaaagcagtgattttttcatttccttctatccacatgtaggggtgaggctatttcacagagatagtgtatcattttactaaaacattatttattttaactatattgaggacttaaattaaaaaaataattttctcattcatctagggacaatttctgacccgcgacagaaagaggactccagtggagagctcatgaaactcctaaaatggtgttgctgtaataagaacatgtcaacagcaatagaaaggtttggttgcc

SEQ ID NO: 16478 - DNA, 581 bp, Homo sapiens
actactatagggcgaattgggccctctagatgcatgctcgagcggccgccagtgtgatggatatctgcagaattcgcccttagcgtggtcgcggccgaggtacttttagtagagacagggtttcaccgtgttagccaggatggtctcgatctcctggtctcgtgatccacctgcctcagcctaccaagtagttgggattacaggtgcccaccaccactcccagctaatttttgtatttttagtagagatggggtttcaccatgttggccaggttggtcttgaactcctgacctggagatccacctgcctcggcctcccaaagtgctgggattacaagtgtgagccaccacgcccagcctctatactttcttaattgcctcttcataatgtatttaataaactatggcaatcccagaatgacagattgttaccactgccattggatttctaatttcaatttggaatataaaaaccaaatacctgaattgttgtcctaattctgacattgcctatttatagccttggttaggtaattgagctttctgagtctgtaatttcttaacttattaaatgagaaaaaa

SEQ ID NO: 16479 - DNA, 601 bp, Homo sapiens
tacgactcactatagggcgaattgggccctctagatgcatgctcgagcggccgccagtgtgatggatatctgcagaattcgccctttcgagcggccgcccgggcaggtacaattatgaaacctccatactgagcttgttttcaggggtatgcacactgttataatgcttgaatatacagcagtttgcttcataaacaaggcacaaagaatttataagtgatgatagccattggaggccacattgttccttgttttgacgaaaagtgtatgacttgtcacaatgagaaaatgatagaattggtcagaatttttatcatagattagcctcttatttaagaattttcatttttattttatgtgaatttatttgagttttggcaatgtgcccctttcttacaatattctgtgaatagcccatctgtgaataaattggtgtgaataaccttgcccacacttgaaaaaaagtaaaaaatagacactacaaattcattatttaacaagcaaagtttagcacatgtattcaaatgaatactaattgaatttgcccctttaatttgtatcgaactatcatttaaacgttattttcatagtatactaaagt

SEQ ID NO: 16480 - DNA, 580 bp, Homo sapiens
tacgactcactatagggcgaattgggccctctagatgcatgctcgagcggccgccagtgtgatggatatctgcagaattcgcccttagcgtggtcgcggccgaggtaccacttgcacaccaagcttaatagagatggggtggctattactatcttctgcttattggtggggatgcctgagacacaaaggagctgaggaacatggccacagccaagtggccaagcccagaccaagtgtctggtgtccagtcacctagtccccagatgtctcctgtgtctcttgcaactcagctcaaatcacaggttccttgtctcacccatgaacagatccatcatctgttcttgggacactgaggttcctcctcatcttgagggacattttccaaaaaaaaaaaagtgccttgacctttccttaaaggaaaaataaataataaataaaaagaaccctgaagtcaagtcacttatgtagtgatgtgatcccgcgtacctgcccgggcggccgctcgaaagggcgaattccagcacactggcggccgttactagtggatccgagctcggtaccaagcttggcgtaatcatgg

SEQ ID NO: 16481 - DNA, 463 bp, Homo sapiens
ccctctagatgcatgctcgagcggtcgccagtgtgatggatatctgcagaattcgcccttagcgtggtcgcggccgaggtacttttagtagagacagggtttcaccgtgttagccaggatggtctcgatctcctggtctcgtgatccacctgcctcagcctcccaagtagttgggattacaggtgcccaccaccactcccagctaatttttgtatttttagtagagatggggtttcaccatgttggccaggttggtcttgaactcctgacctcgagatccacctgcctcggactcccaaagtgctgggattacaagtgtgagccaccacgcccagcctctttactttcttaattgcctcttcataatgtatttaataaactatggcaatcccagaatgacagattgttaccactgccattggatttctaatttcaatttggaatttaaaaaccaaatacctga

SEQ ID NO: 16482 - DNA, 381 bp, Homo sapiens
agggcgaattgggccctctagatgcatgctcgagcggccgccagtgtgatggatatctgcagaattcgccctttcgagcggccgcccgggcaggtactctgtattttattgaggctgtttcccagtcagaacagcgtctctctttgtttgtcattccaaatctttcagtgtctttagggctctgagggccctggagagcctcatccaacctctcatccttccatggctgtccccacctctgtgcacttatgagtcaatgttgccgcacttcattacatgctgttcatattacagcattataagattttttcttttaaaagcctatcttcttcaatcgggtagtaagaccattgtgggttgaggcatgtttcatacttccca

SEQ ID NO: 16483 - DNA, 434 bp, Homo sapiens
agggcgaattgggccctctagatgcatgctcgagcggccgccagtgtgatggatatctgcagaattcgccctttcgagcggccgcccgggcaggtacctaatatagagttagcatccagatctattcaataattgcttctgggaacacagatacaaaaatgttgattagattccagtgggggttttttacacgatgtttatttataagactaatctgtaaaaaggaatgattacagccaggagttgaaggttatttgaagagatcattcagtgtttaagttcttggtttgaaacagttaatcactttaggttggattctcttcactctagaaaacaattcctttggatacaccaaggaaaaacatatttttgtcttgtgatttggtaacacatagtcacatcttggagtctgtcttataaaaccccaaacgatg

SEQ ID NO: 16484 - DNA, 333 bp, Homo sapiens
cgaattgggccctctagatgcatgctcgagcggccgccagtgtgatggatatctgcagaattcgccctttcgagcggccgcccgggcaggtacgcggatcggtctccagggccccagcacgtcttcccttcagttggtcccacttatctccactaggctagtttctcataaaatgctcatcaacctcatttctcccttctcagtagctggccccgttacagcaatgccatcacagacctagctctaatgtaaaatgctagctttcatcccgcccacctgtttctgaaatgtgctagtagaataccacagcagaggcaagcttagctgttaaaa

SEQ ID NO: 16485 - DNA, 540 bp, Homo sapiens
atagggcgaattgggccctctagatgcatgctcgagcggccgccagtgtgatggatatctgcagaattcgccctttcgagcggccgcccgggcaggtacgcgggactgccaaatgtcccctgttgttgcaaagttgccccctgttgatctagtggccactgcactggacggcacgagtccagcaagccagggaagatgcaattgagcaatggcatgcaagggtgagtgccagggaggggccgcacttcgaggaagagtgataccggactggcagctgaccagactggctcagaggaggttcccagagggctagggtttaagctgagacctttctcaagtccagcaaccacatgtcccacagaaggctaagccaggatccggtggccccaagagattacatcctggctctgagccttggttcaccatcccaccatacaccaaggctgctgggaggctcaaaggcaatttgggatgtaaatattactagtgcagaatgaaagtgtgcttcaaacaagacatatttgcactgctgttcttcac

SEQ ID NO: 16486 - DNA, 433 bp, Homo sapiens
agggcgaattgggccctctagatgcatgctcgagcggccgccagtgtgatggatatctgcagaattcgcccttagcgtggtcgcggccgaggtacgcggggaattactggaaattatctgaactgtgtccaaccagtaaatattgcataatttgaatagatttttataatcttaatcatattaaattcgaatagattttttcagaatgctttctaccaaaatttctagtcaaaattcacgaaagtacttttttttttttttttttttttttttgggatctatcttcttccttaacatattcagttggagtatgtagcatttagcaccactggctcaatgcgctcacctaggtgagagtgtgaccaaattcttaaagcatttagtgcttattatcaagttaccaccattttggggctttttaatccttcatggg

SEQ ID NO: 16487 - DNA, 297 bp, Homo sapiens
gtgatggatatctgcagaattcgcccttagcgtggtcgcggccgaggtacgcgggttggcctgaaaagccttgagcatagcaatgactcagtcaaaacattaacttggacacttgatataccgctccagaaacaacaatttagttggttggcctgcgctactgtatgttccaaatattgtttattcttatgtttttaaatataacacataaaaggtaatatatgtaggttgaaattactaattttcataactgactcttctgatctcacctgctgatgatataaggcctaggtgagc

SEQ ID NO: 16488 - DNA, 446 bp, Homo sapiens
acgactactatagggcgaattgggccctctagatgcatgctcgagcggccgccagtgtgatggatatctgcagaattcgcccttagcgtggtcgcggccgaggtactaggtgtgaatgcagatgccttatttcctgtggctacagcttagggtggaaagtggggagtggcaagataagcaactagagaggaaagaagccatgcacaagctaaactctatgcacagaacacaagaacttgttgaagaagttactctataatacaacatacaagagcagaatttatctgtctgcagaaaactctaccaaactcccatacagtgagatttcaaggtttggtagacatacaaagaggcaggtatcttgcttttagtccataaagctagactggacactactgtatctaaacactctttggcctcgaactattgagacatctaaatgcctg

SEQ ID NO: 16489 - DNA, 468 bp, Homo sapiens
ggcgaattgggccctctagatgcatgctcgagcggccgccagtgtgatggatatctgcagaattcgcccttagcgtggtcgcggccgaggtacagataggtgtggtctagagtagatgggtatgggatttgtttctgagctcaacttttctttccaatgaaaaacctactttcctttgcagtgatctttgagaggctgccagaaccaaggtcaggaagatgcccatgcttctggactggtgataagtgtttattctttggtaggtgcaatgaaacattatttgaagattgcatgttttaatttgtttctaaagcaatggctatattttaacaaaatgctaacaagtggtctctaggctactttattttgttggacagctccctttctggttccttggaaccctgaaaagaaagtgttactaaagcaaagaagtatcaagcttcaaccagaactttttctttgatttgc

SEQ ID NO: 16490 - DNA, 439 bp, Homo sapiens
tatagggcgaattgggccctctagatgcatgctcgagcggccgccagtgtgatggatatctgcagaattcgccctttcgagcggccgcccgggcaggtacatattatatgcaaggttacaaaaaaaaatcaatggttaatgattttttagctcaaccaagctaaaagatgtgaacaagaaattgaactcaaaacaacttaagatacaaagctcttgttactgataatgtctaataatattcatcaatttaccatatcttggtcttatattaaaatgttctatcattttcctaattattttaaagtcgattacaaaaatatatatatatattcttgtagtgccagaaaattgaatacattaataaatggggtagaatagatgaatctcccatgaagaagaattccaaataatttatgaactctgccctcaaggatatgga

SEQ ID NO: 16491 - DNA, 539 bp, Homo sapiens
tatagggcgaattgcgccctctagatgcatgctcgagcggccgccagtgtgatggatatctgcagaattcgcccttagcgtggtcgcggccgacgtaccactatgtggtaactctgttgctacaaggccaagaagttgcaaactataacacttactctcaaggagtccaatagtgaaacacaatgatatctgaacagacagttgtatccaggatgcccccccacccccagctatggcagaggaaagcacaaaggtcaagttttacctgctccaactcccaagtaaggatagctaacacccacagaggactctacaacttgtagagcacacggagcatcattaactttaccagatatcaatagcaacttcaactatgaaaaacatttttggctgggcgcagtggctcatacttgtaatcccagaacctgcccgggcggccgctcaagggcgaattccagcacactggcggccgttacttagtggatccgagctcggtaccaagcttggcgtaatcatggtcatagctgcttcctgtgtga

SEQ ID NO: 16492 - DNA, 516 bp, Homo sapiens
acgactcactatagggcgaattgtgccctctagatgcatgctcgagcggccgccagtgtgatggatatctgcagaattcgccctttcgagcggccgcccgggcaggtaccggttgctctctagaattggggcatagctgttaccctgggacttttgttccttgctctcctgggtaggaactgtttcttggatcccaggcttcttgtttttttgttttgttttgttttgttgttgtttttttaaaattaccagtcggttttgctgaattcccgtaaaacttcagtaactttaataactctcccacaaaagggaaatatactatttaagtccttgcatattagaaaatgtcttctgtcttcatgcttgattgatagtttggctggttatataattataggttgattagctttttctgtgtacatggggctaccccttccacgacggggattatctcaatgatgaggccttatggaacaagtgccgagagcctctcaatgtggttccctggaatctgac

SEQ ID NO: 16493 - DNA, 519 bp, Homo sapiens
ggcgaattgggccctctagatgcatgctcgagcggccgccagtgtgatggatatctgcagaattcgcccttcgagcggccgcccgggcaggtactatcttttcaacttttctgatggcttgatatttttcaaaattaaaaatatcagaaacaaacatccgacgatgggggtttaatgagattccagtatgtaaaatattctagaatggctgaaaataataaaatagtaatatttttgatatcggagagaccttcaagcaatgtattaaaaaggcaagctattgaacattgtttacattttgtaaaagcagatacaaccgcaaacacatgcagaagcactgggacaaactttaacagaaattgataataataaggagacggggaaaagcttttgtttttttgtttcacattatagctttcttcactatttgaattttctacacatgtgctacctacctttttatgtcagcaacagttatctgggtggtagttgggggggcattttttgtttactttatac

SEQ ID NO: 16494 - DNA, 510 bp, Homo sapiens
  misc_feature 187, 219, 220, 262, 263, 279, 322, 323, 346, 352, 353, 389,473, 474, 494, 495: n = A,T,C or G
tacgactcactatagggcgaattgggccctctagatgcatgctcgagcggccgccagtgtgatggatatctgcagaattcgcccttagcgtggtcgcggccgaggtaccttaagtatgactaaatgatggtttacactacaacaacccaccttgagctctctattctactttccaccatatgttttnctgtttggggggccttgggcccattactctannttatttgtgtttccatttattcaaactcttcaagaagagtanntctgattggcttgtcnagttactttctccagtatttaaatgccagaattggccatatcnntacttataagaattagcccacanggctgnnactttgggccagcccattgttccctgattcaatgcnaatgtgaccagtattagaaggggtaatgcaggtacctctgcccgggccggcccgcttcgaaaggggcgaaattccagcacaacnntggcggccgttacttagtgnngaatccgagctcggt

SEQ ID NO: 16495 - DNA, 413 bp, Homo sapiens
ccctctagatgcgtgctacgagcggccgccagtgtgatggatatctgcagaattcgccctttcgagcggccgcccgggcaggtacctagggagtggcagagtagtgatgtaaactcaggtctctattactcctcggttcccagacatcttcctctttgttccctctgttttcatagagaaagtctattcctctccacgagctcattttctttcctgggacagagtctgggaaaccctttcttcactctgtttctctcccctttttatacaattattcaggactcagctcagactttgctggggttgctgtgtcagttactctcagtgtaaacttgggaaagtcatttatactcatgctgtatggaaatgttctgtttaaatgtcgcaatcctgcattaatcctgggctttcta

SEQ ID NO: 16496 - DNA, 443 bp, Homo sapiens
tactatagggcgaattgggccctctagatgcatgctcgagcggccgccagtgtgatggatatctgcagaattcgccctttcgagcggccgcccgggcaggtacagattaaatagcttaaaggaagaaaaaatcatcatagtaaaagaatttgagaagataacaaagccaggagaaatggagaagaagatgaaaatattgagagaaagcactgaagaattacgtaaagaaataatgcagaagaaattagaaattaaaaatttacgagaagatttggcatctaaacaaaagcagttattaaaagagcagaaggaactagaagaattgttgggacatcaggtcgtcctaaaggatgaagtggcccaccatcaaaccattccagtacctcggccgcgaccacgctaagggcgaattccagcacactggcggccgttactagtggatc

SEQ ID NO: 16497 - DNA, 524 bp, Homo sapiens
gaattgggccctctagatgcatgctcgagcggccgccagtgtgatggatatctgcagaattcgccctttcgagcggccgcccgggcaggtacgcgggatccatattaatggagaagagctatggaatagttaatgccaatttatgaataatccaaaatcatttatgttggacttgattaaattatttataatgcaaagcacagccagctgtcatggccaatatgtttgatcacatttttctctaattgtttctttcttttgtctctggaaatctgctgttatgtataatgaatgtttcttctaatgcttaaaattgttagcagattactgtcatcatgagcagtaaattatcaaagtctgaacatatcagatcagcatttaatatcatactaagatgaaatttagaaagttaatatcaagcgataattatatgcatcatcattactgtgttgcatgttaattaggtatatgtagttagtatatcatataaatgactgcagttaccattatggttacacagacat

SEQ ID NO: 16498 - DNA, 533 bp, Homo sapiens
ggcgaattgggccctctagatgcatgctcgagcggccgccagtgtgatggatatctgcagaattcgccctttcgagcggccgcccgggcaggtacttttttttttttttttttttttttttttcgttggcttatttgtttggttagtttagtttattctggggcctttttgtagttaagttcatttttatggagaagaataatgcaagtaaaagttcaccttcctttaggccattccacagtctgttccgagtctttttccatgccctcttttctgggctgtccagctcaaactgggaggcagttgggtctgttgcaaagtcccttccttattcagggttggttcccagagctccaagatctaattatccactagttaaactgctgcctgcattgctgagctcttcttcttgattaattaaagaaaacagtgtttggtcaagtgcttgacattaaaagagttcctaagctcttctgagttctactgtctcatgcctatgaaacaccaagctattttgagcccctttgcccacc

SEQ ID NO: 16499 - DNA, 362 bp, Homo sapiens
gactcactatagggcgaattgggccctctagatgcatgctcgagcggccgccagtgtgatggatatctgcagaattcgccctttcgagcggccgcccgggcaggtaccttgggcctattagagatcctgtagagaacatcaaggaaattgcagccactttatccagatcttgattaaatcttgcaagtagactcacttggtgatacttctgaaatgtggtgggttcatgattgattttggattctgtggtgtttccagctttgtctctcaatttgatggtaatgtcccctcttcttacattcttgttccatgttataatatccacaaagtaatgatacatgcagaatgggctctcctcagct

SEQ ID NO: 16500 - DNA, 382 bp, Homo sapiens
ggcgaattgggccctctagatgcatgctcgagcggccgccagtgtgatggatatctgcagaattcgccctttcgagcggccgcccgggcaggtacgcgggtattgactacagactgagtaatctgagttacttcggaatccaggaggaaaaaacatactttagtaggatgatgatggtaaagacaagttgtgattttgaagttcaggtggaaatatgagatacaagaacaggattaagatagaggttggtgatacctagtcctctcagctgttagttcatgagataagaaactatgccaatcaggttgactgttgtcagaagctagcacagtgccagatatagagtgggaactgactcctaggtacctcggccgcgaccacc

SEQ ID NO: 16501 - DNA, 451 bp, Homo sapiens
atacactacttagggcgaattgggccctctagatgcatgctcgagcggccgccagtgtgatggatatctgcagaattcgcccttagcgtggtcgcggccgaggtacgcgggacctgggttccagtgttaactttgcctctagctggtgtcatgattgtgggaaactcttttatcttctctgttacctcacctatcaaattaaagagtatgagtctccacatttcttccttccataaattaaggcttagttataaccacaacatactgtatttcttagaatacgacatcactattttatacattactaaaaaattgaaaattctactaaactatgaagcaatgttttatcactttgaattttaactttctacatattttaaaagctttttaggtataaccaaataaagattttatcatatattacacttggatacatgtaaaaaggaaaatg

SEQ ID NO: 16502 - DNA, 543 bp, Homo sapiens
ctatagggcgaattgggccctctagatgcatgctcgagcggccgccagtgtgatggatatctgcagaattcgcccttagcgtggtcgcggccgaggtacatcttttgccagtttccaaatttgtgttgagttctatgaccaacattttacagaaacattgtgtgagacagaaaattttagggtattattaaattaaggcatcatttcctaactttactattgaaataaattattatattcacaatacacttttatatttaggtatacatcttaaaatctcttagcttagtgggcccgcttgttcaacttgaccttcatcaaccaatgctatcttaagataataaaaagaagaggcattgaatacattagagaaaaaagaattgatttattccaactcagggttggaactatgcctcttaactcttaattaaaaaatacttcaatgaataataaagacaatccttaaatgctactgaacgtataagcatgttataataaaatatgtcagagttattctgtctattacaaagaaataaaatcctt

SEQ ID NO: 16503 - DNA, 581 bp, Homo sapiens
ctatagggcgaattgggccctctagatgcatgctcgagcggccgccagtgtgatggatatctgcagaattcgccctttcgagcggccgcccgggcaggtacctagggagtggcagagtagtgatgtaaactcaggtctctattactcctcggttcccagacatcttcctctttgttccctctgttttcatagagaaagtctattcctctccacgagctcattttctttcctgggacagagtctgggaaaccctttcttcactctgtttctctcccctttttatacaattattcaggactcagctcagactttgctggggttgctgtgtcagttactctcagtgtaaacttgggaaagtcatttatactcatgctgtatggaaatgttctgtttaaatgtcgcaatcctgcattaatcctgggctttctaaggcgggagaataccttcatagcctcagtagctggcatgtggtaggtgcttcgttcttgtttttttgtttgtttgttttgttttctgtttttcattgtctagttttatacagggattgtaagaccgcataggcccagatcatgccaaatgta

SEQ ID NO: 16504 - DNA, 635 bp, Homo sapiens
tacgactactatagggcgaattgcgccctctagatgcatgctcgagcggccgccagtgtgatggatatctgcagaattcgcccttagcgtggtcgcggccgaggtacatagaaaagatatctacgttcccatgtttattgcagcactatttacaatagccaagatacggtaacaacctaagggtctaacaacaaatgaatggatgaagaaaatacagtaaatattcgcaaaatactactactctgacctaaggaagaatgaaatcctgtcatttgcagcaatatggcaacatagatgaaattggaggtcactttattaagtgatatatgccaggcacagaaaaacaataccgatactgcatgatctcactcgtatatcaaaattgttttttactgacattgatatcatagaagcagagagtattaccacagacactgcggaggggcgacacggtatgagggaaggacaaggagaagttggtcaacaggtacctgcccgggcggccgctcgaaagggcgaattccagcacactggcggccgttactagtggatccgagctcggtaccaagcttggcgtaatcatggtcatagctgtttcctgtgtgaaattgttatccgctcacaattccacacaa

SEQ ID NO: 16505 - DNA, 529 bp, Homo sapiens
ccctctagatgcatgctcgagcggccgccagtgtgatggatatctgcagaattcgcccttagcgtggtcgcggccgaggtacgcgggtgtgccatgtggttctatacaacatcagaaggacatttaaaattaaatggttttttcaatttttaaatcaagttcttagtttgcatgtcttgcataacatccttctattatttctgtatggagtgagggatggaatcagtgtgagcatgtattaacctcatggctaaaagtaggaaagaaaaagatttcctcatactgttatgtatgtgtctagtacctgcccgggcggccgctcgaaagggcgaattccagcacactggcggccgttactagtggatccgagctcggtaccaagcttggcgtaatcatggtcatagctgtttcctgtgtgaaattgttatccgctcacaattccacacaacatacgagccggaagcataaagtgtaaagcctggggtgcctaatgagtgagctaactcacattaattgcgttgcgctcact

SEQ ID NO: 16506 - DNA, 669 bp, Homo sapiens
gactcactatagggcgaattgcgccctctagatgcatgctcgagcggccgccagtgtgatggatatctgcagaattcgccctttcgagcggccgcccgggcaggtactggtgcctcagacgagtttgggtgcagcagaatagtgaaaagtaatttggaggtcaaaccaacaggacttgccacaggatggatggatgaaagaagtagaataaaaaatgaacccaagtttgggggttaatcaattgcatgactgatgatacaactgtcctaaatggagaagataatgaagaaacaggtctggtagaaataaagatgggttctacttggagcttaaagacatctaaatggagtttgtatacagggctagagctggagagaggttagagctaaagagaaccagaaagtattccccaattttcttcctaactctatttttgaccttgaaatatcatttaaatttctctgatttaatttattttgaaatatatttctaaaaaacgtttttcataaagaccaggtcttgctacgtcgctcaggttggacttgaaccactgggtttaagccttcctccgcctcagccttctgagtagcttggactacaggcacacaccaccacacccagccagatatttttaaaatatgtaaaatataacttgttacatatttacca

SEQ ID NO: 16507 - DNA, 293 bp, Homo sapiens
gactcactatagggcgaattgggccctctagatgcatgctcgagcggccgccagtgtgatggatatctgcagaattcgccctttcgagcggccgcccgggcaggtacgcggggtcattttctctctatgttatagaatgttttcagagcagaaatatattttgtggtggaaatcagagtagtgccttaacagtagagttttggttgatttctaagcctaagttatgttaatccttggctcactgatccttttaataatctgatgaaaactaaggattctctggggcttaaaaa

SEQ ID NO: 16508 - DNA, 539 bp, Homo sapiens
actatagggcgaattgggccctctagatgcatgctcgagcggccgccagtgtgatggatatctgcagaattcgccctttcgagcggccgcccgggcaggtacctgagagaaataattcagttaaggatttctacagttagtaaccacatattcattttttatcgcaaaacacaagttggaggttggccctatagagctacttcagctattcttgaggaactcattatgctccaatattcctgttccattgtccagtgtggcttctggactcatggtcatagatggctgccctactttctgaccagcatacttcttccaggcaagaggaagcctgaaaggagaagggcgtgtggctggaaggtgtgtacctcggccgcgaccacgctaagggcgaattccagcacactggcggccgttactagtggatccgagctcggtaccaagcttggcgtaatcatggtcatagctgtttcctgtgtgaaattgttatccgctcacaattccacacaacatacgagccggaagcataaagtgtaaag

SEQ ID NO: 16509 - DNA, 426 bp, Homo sapiens
atgctcgagcggccgccagtgtgatggatatctgcagaattcgcccttagcgtggtcgcggccgaggtactttttttttttttttttttttttttttggtatctgttccaagtttttttattgttaaattgaatgactaagaatcgtatctttcttgcctgatttttgtgagtagtaatgtaatgattcttagaatacttggtagaattattcttgtcataaagtgattgtcagtaaatgttcactgttattactatttttcttgtattgtgattttagaatctaagtggctttcagtattttactttgaggcatttgagttccatttgtttctagtttttgaaataattatggactaatagacaaagaataaggatgcatataagttttctcgctttccaagtcaaaaccaaaaagtgcttaaag

SEQ ID NO: 16510 - DNA, 437 bp, Homo sapiens
  misc_feature 312: n = A,T,C or G
ctctagatgcatgctcgagcggccgccagtgtgatggatatctgcagaattcgcccttagcgtggtcgcggccgaggtacgcgggttatttatgtgtaacattcaaatgtgtgcattaaatatgcttccacagtaaaatctgaaaaactgatttgtgattgaaagctgcctttctatttacttgagtcttgtactgggctctgtgtaagtgtcgttggggtaggacctatattttaatactgttcctaacatttcattttactagcgagaaatctttgatttcattttattctttgtaattctagacactangttgtagtttagccataaccgatgttgtttaaaaagggatatattttttttgcacagttgttcaaaaaagagacaaggttcaagcctcaatgcttgcctttgttttacaggtacctgcccgggcg

SEQ ID NO: 16511 - DNA, 379 bp, Homo sapiens
gggcgaattgggccctctagatgcatgctcgagcggccgccagtgtgatggatatctgcagaattcgcccttagcgtggtcgcggccgaggtaccattatcccagtggcagagatacacagaaagccaaggctcagaggcagtaagtcatgggtccgaggcctcttgctgatgacaaaactggaatctgaacccacgtcaggcttacatttacacatacatgtatacaaatgtactttttttttttttttttttttggcatatttaggttatttattaatgaaaatatatgacattttcaggaatacaaattctgcaccctgatgacctcaaatgcgtgcaacaagatgtttaatacagaaaataacacaaaaactgtt

SEQ ID NO: 16512 - DNA, 402 bp, Homo sapiens
ctactatagggcgaattgggccctctagatgcatgctcgagcggccgccagtgtgatggatatctgcagaattcgcccttagcgtggtcgcggccgaggtacacaagttttaaattttggtcaagtttatcagtattttcctttgcagtttatactttgtactttgtttggtgttaggaacattctctcatttttatcctaaaagaattttgaagatttgcttttcatatttgggatataattcacctagaaataaattttgtgtctaatgtaagatggatctaatttttttaaagttaaactgtgtaaacacaatttattaaatattctactctttccctactgatctgaaacactacatcagatatttacagtttccataaacacatatgtggctcgttt

SEQ ID NO: 16513 - DNA, 428 bp, Homo sapiens
  misc_feature 307: n = A,T,C or G
ccctctagatgcatgctcgagcggccgccagtgtgatggatatctgcagaattcgcccttagcgtggtcgcggccgaggtactcattttatacaggcaaaaatatttttgcaaaaatgaaaaaatattttgaggattgttatattccagattatttttatatttttagctaccattttgatactgaaatctggataaaaaattaggcttcatgttttccatttaagtctccatacctgtcctcaaaaatcacattaatccaggtgtaattgaatatgaatttatagaagcacatgggaaatgaaatnttatgtctaattagatatttttcacagttggatgagaagccagtgtttcagtgtttcctgccaggaacctcaattttctaagccaaaatatgtttgacattaacccaggttgctattacca

SEQ ID NO: 16514 - DNA, 460 bp, Homo sapiens
tacgactcactatagggcgaatagtgccctctagatgcatgctcgagcggccgccagtgtgatggatatctgcagaattcgcccttaacgtggtcgcggccgaggtactttttttttttttttttttttttgggcttttgaggctcctgttcttaggcagcaccagctccttctatttctgcagccaaggcatcaagatcaatgtcatccttggtgcttaaatgaaaacaaaaacatcctaaatgctacttaaaagcaaaataatcattcatttatatagattttatcattttaacctttttcatgcattagcagcacaatgagaaaaatcatttggcaagttctttcatcacaacacaagttacatctacttatcagcctccctacatctgcttcagtgaagtttctggattacactcaaataaggaacagacccgcgtacctgcccgggcggccgctc

SEQ ID NO: 16515 - DNA, 477 bp, Homo sapiens
acgactcactatagggcgaattgggccctctagatgcatgctcgagcggccgccagtgtgatggatatctgcagaattcgcccttagcgtggtcgcggccgaggtaccctggagaaggataaattggcaagaaaactggcatctttaactccagggttttcaggtgctgatgttgctaatgtctgtaatgaagctgcgttgattgctgcaaggcattctgtcagatttccataaattcagaaacacttttgaacaggcaatttgagcgagtgatttggtgtgctttagagaaagaaaacggcagggttctgcagtcctgagggagaagaaagacttgttggcatatccacgaagctaggccatgcggtttgcccggctggtattctggaagcactgcaggacccgctttttaaaggtaatccatcattcccaccgtggccaaagggactagggttaatgctcagtattttaccaaaa

SEQ ID NO: 16516 - DNA, 432 bp, Homo sapiens
catgctcgagcggccgccagtgtgatggatatctgcagaattcgccctttcgagcggccgcccgggcaggtacccggggttgcaaatttcttcattagcattaattggaacttatatttaaaacccatcagtggttgagatggatatgaattttttgcaaagaagcagttggtcactctgttttctgcgcccaattattgcggagagtttgacaatgcatgtgccatgatgagtgtggatgaaacactaatgtgttcttttcagattttaaagcctgcagagaaaaagaagccaaatgccacgagacctgtaacgcctacaaggggtatgatcacaaagcaagcaaagaaatagatgtcgttttgacactgcctagtcgggacttgtaacatagagtatataaccttcatttttaagactgtaatgtgttcc

SEQ ID NO: 16517 - DNA, 321 bp, Homo sapiens
gactcactatagggcgaattgggccctctagatgcatgctcgagcggccgccagtgtgatggatatctgcagaattcgcccttagcgtggtcgcggccgaggtaccctgtggtcagcatagtagataacatagttacagaagaattgacaacaggaaagttgttttatagaggagggaataagggctccgtaacatgacatcataatttctagacaaacgcttaacttccctgaagcagattccgccgagagggattgggccatgtcggaaagagaccagtttgcctgtaatattcttcctttctctaatcctgggctccc

SEQ ID NO: 16518 - DNA, 624 bp, Homo sapiens
  misc_feature 16: n = A,T,C or G
tatacgactactatanggcgaatggagccctctagatgcatgctcgagcggccgccagtgtgatggatatctgcagaattcgcccttagcgtggtcgcggccgaggtacttgcattaatacgtgcatactttctccctttttacaaaacctctattagaggctctggaaggtgtaagccatgatagcaatgaccgtgtcaaactctttttctctgtaactcagggcctaggactgtgcctggcacatagcagacacttgatacatatttgttaaataaatgggtagctggaacatatgctccatgaggaaaatgaatgtatttgcatgttgttagttaggaatctggccctgggagtcagaattgcagtgtttgagtcaggctgcattatttcctagctgtgagagctctctaaatctattccctcacttgcaaagtggaatgatattagaatctgactcatattgttacgtgaggattaatcgacataaatacctgacacatgggtagcactcaatacaggctagctgttattatcattatcaacatcatcactatcttcttcatttttcttggttactacttatctcctgttttaagcacataacatatgctcaataaaaat

SEQ ID NO: 16519 - DNA, 459 bp, Homo sapiens
ctactatagggcgaattgggccctctagatgcatgctcgagcggccgccagtgtgatggatatctgcagaattcgccctttcgagcggccgcccgggcaggtacttttttttttttttttttttgaaacggagtcttgctctgtagcccaggctggagtgcagtggcacgatctcggctcactgcaagctccgcctcccgggttcacgccattctcctgcctcagcctcccgagtagcggagcatttttataatagctgctttaaagtctttgtcagataattcaaatactgtgtcatctcagtgttggtgtctgtttattgtcccatgcaagttgatattttctgggtccttcatattctaagtaattttagattgcatcctgggcattttcaatattacattataagactctggatcttacttaaattccatggagaatgttgctatttgtgtttta

SEQ ID NO: 16520 - DNA, 636 bp, Homo sapiens
  misc_feature 580: n = A,T,C or G
gactactatagggcgaattgggccctctagatgcatgctcgagcggccgccagtgtgatggatatctgcagaattcgcccttagcgtggtcgcggccgaggtactgttccttccatgcatctaaaccctgtaacaattctgtgaggaaggcattactatccctagtttacaaataaagaacggagacacagaaaagttaagtcattcaccctaataattggaaagctgagattcaaacttgggccggcctgtccacccccaaagcctgagctcttaatcactgtagcacactgccttctaaaacttcagagtttttaagagctgtgcaagctactcttcccctaaattaagttgctccccctgaatgccccagaaacaacatctctcattggcttcctggcttctgctgcagtgaaagctaagctgtcagcagggctccctggtcatttaacttgttgatcaatcctgacatttctaccaccaaacaaattcttcttttccttgtggctctctctaacctgcatttcccgctgtgggctactgagcctggactaaaatttatgtattctctatcccccanatgagcaagagatgcagttctcatgtatctatcagctaaattaagaagagaaaatg

SEQ ID NO: 16521 - DNA, 421 bp, Homo sapiens
  misc_feature 154, 155: n = A,T,C or G
ctactatagggcgaattgggccctctagatgcatgctcgagcggccgccagtgtgatggatatctgcagaattcgcccttagcggccgcccgggcaggtacgcgggtgttcgtttacagttcttaggactccctgatagaaaaaaacacaaagnntaacacaaaaaaacccaaccaaccaaacaaacaaacaaaaaaaaaacacaggagtttctcccaaaaagaagtctgcagtgtcttttctgttttctctgaaggtatcccagggtgttagatttctgttgtttttcccttatgtggcaccgaagttggcaagaagaaggaagtgctgatataaataaatagggaaatgaacagagagagtaccttggccgcgaccacgctaagggcgaattccagcacactggcggccgttactagtg

SEQ ID NO: 16522 - DNA, 600 bp, Homo sapiens
  misc_feature 195, 327: n = A,T,C or G
actatagggcgaattgcgccctctagatgcatgctcgagcggccgccagtgtgatggatatctgcagaattcgccctttcgagcggccgcccgggcaggtactggaagtgctatataatgcagtgttaaaaaaaaagaaataaaatgcacatagatttgaaaggatgaaatacaactttgttcacaagtaacatngattgtctttgtagagaattctaaataacaaaaaccctgctgacattaataagcaattacagcaggattgcaggatacagtcctcaagtagatgataaaaaggaattggacatcaagtcattaaaagacacngagaaaccctaaatgcttattgttaagtgaaaaccaatctgaaaaggctttctattttgtatgattgcaattatatgacattttgggagaggcaaaactattgatccagagaaaggaccaatggttgctgatagttgaaggtataggcggtatggatgttgctgctgctacctttgggcctaaaaaccaaccacctgttgtgtatcaattaccttctttgataaaaggaaataaataaataatgttatccgaaaaaaaaaaaaaaaaaaaaag

SEQ ID NO: 16523 - DNA, 571 bp, Homo sapiens
ctcactatagggcgaattgtgccctctagatgcatgctcgagcggccgccagtgtgatggatatctgcagaattcgccctttcgagcggccgcccgggcaggtacatggctccatggaggttctccagtcggtgttgctgctgctgttttcgagtcttatctcgtctgtgctcctcataagtgtcgtcatcagtgggcagctcatagcggcacaagggacaggaatttgtcttgcttagccagggcagaatgcagctggaatggaaaaggtgatggcaaggcatctcaatggcagtctcctcctcctcaaattcccccgcgtactcaaaatgggattaagcccttcctgagggtggtgcccacctagtaaaatcccccttattaccttacctgttccccaaagacattcaaaatgtaattaagaccaactactatgaaggcagagataaactcaaatttccttttgaaccctcattcctccagttccttcctcagccaaagacttaagggctacatttcttttttgttttaaccaataaaacacaatgggaccacccctggtagaggtcta

SEQ ID NO: 16524 - DNA, 399 bp, Homo sapiens
ctactatagggcgaattgggccctctagatgcatgctcgagcggccgccagtgtgatggatatctgcagaattcgcccttagcgtggtcgcggccgaggtactagaaaccagaattgctgggtcattggacatgcatatgttgagtgtttctttgtcattgttagcctgcaccctccacattggctttaccatattatactctccatcttgctaatgattattcacctttttttcttcttcttcatagggtttactctcagaaacctacctggaagcccatcggattgtgaagatgaacaagagtgaggatgatgagtctggggctggagagctcaccagggaggagctgaggcaaattgcagaggaagatttctacgaaaagctggcagcttcaatcg

SEQ ID NO: 16525 - DNA, 356 bp, Homo sapiens
actatagggcgaattgggccctctagatgcatgctcgagcggccgccagtgtgatggatatctgcagaattcgccctttcgagcggccgcccgggcaggtacccacctattttgtgagatttctcaaagtatttctgttctcctcagtctgaatgaggttaattttcctgagcaacaagaacaagtgtgaatgcccactcctcaacttggagtcttctacataacttggatgttgagaacttaaatacactatggtgagctgcagactcttcttgcagatgtaacaatgctcttggtttaagcaggtgtacacgcatatggggccagttccacatatttggcaaccagaccagcat

SEQ ID NO: 16526 - DNA, 214 bp, Homo sapiens
atacgactactatagggcgaattgggccctctagatgcatgctcgagcggccgccagtgtgatggatatctgcagaattcgccctttcgagcggccgcccgggcaggtacctcagccagcagaacatcgctgggacgtgcctggcctaaggcatcctaccaacagcaccatcaaggcacgttggagctttcttgccagaactgatctctttttg

SEQ ID NO: 16527 - DNA, 585 bp, Homo sapiens
ttgtaatacgactcactatagggcgaattgggccctctagatgcatgctcgagcggccgccagtgtgatggatatctgcagaattcgccctttgcggccgcccgggcaggtacgcgggggctcgaggttagctcttcactgccctgtgtcttctttccaagggtctcggtgattcggccacagcctcagcctccatcacgcggtgaactgatggtgctggaagattcatagactccaggacattcctgaagccgagaaaaggttaagtagggtctggcctggaatactctcctagatgaagatagcccaaccatgagccaccttcgaagcagatgagatgaaattaaagctcttcaactcctaaaggcccagagactatcacaaaagaggtcagaaatcctgaaggtcactttctgacaaactcaggaaccccaggtttatcttggagcctcaagaggagataaattcacccaattcaagctggagtgcagtggaatgatcttggctcacttccgtctccgccttccagtttcgagtgattctcctgcctcagcctactgagtggttgggattgcaggtgcctgc

SEQ ID NO: 16528 - DNA, 517 bp, Homo sapiens
actcactatagggcgaattgtgccctctagatgcatgctcgagcggccgccagtgtgatggatatctgcagaattcgccctttcgagcggccgcccgggcaggtactacaaggactggttagagggttgaatgaatctgtatactcagcacttaacacagcactctgggtaaaagaaaaaagatcctcaaagatattagttggttacatcaagaaaggacaaacttaggttaatctataacttcatctcagaggaacaggaactttggagataaacagggctctgccacttgcaagttgcaccatccctggtttctccatctgtaaattgattaaaacactgcctatctaataagattaaataagttagaagcattcagttaaatgtcaactgaaactattgttcatgtaaattgtgcttgatgctttttctttctagattcaatgattattgtcattttacctccataggccctcaacagaaattagttgcagagggcaaaagcctaaatattttc

SEQ ID NO: 16529 - DNA, 699 bp, Homo sapiens
ctatagggcgaattgggccctctagatgcatgctcgagcggccgccagtgtgatggatatctgcagaattcgcccttagcgtggtcgcggccgaggtacgcgggggactgactccccggggacatgaggtggatactgttcattggggcccttattgggtccagcatctgtggccaagaaaaattttttggggaccaagtttttaggattaatgtcagaaatggagacgagatcagcaaattgagtcaactagtgaattcaaacaacttgaagctcaatttctggaaatctccctcctccttcaatcggcctgtggatgtcctggtcccatctgtcagtctgcaggcatttaaatccttcctgagatcccagggcttagagtacgtcttaaatagctcaataaaacagaagagatttaccctcaaatgaaagaattacatctatactatataacactataaatatttggcaagtgggtgagattattggctagcaattgggaaaatggtttagacctatacaacattatgaaaatcagtttcagagaatttacaaagttaaacactttaaaacagaaaatctagaagaaagtggaactgaatttcttcattttatgcattggaagagtttcctaaggatagaagcaacagaagtcaataaaagaaaaacacatggatttggttacagtgaaattttaaa

SEQ ID NO: 16530 - DNA, 645 bp, Homo sapiens
ctatagggcgaattgggccctctagatgcatgctcgagcggccgccagtgtgatggatatctgcagaattcgccctttcgagcggccgcccgggcaggtacaagcaataaactctggcctcgaattccactgatggtaagtgatataataatgagtctgtttcctattcactgtgccccttagtcaggaacctataataacatgatttgcctttcccatattgcattactaaaaggaaaatagagaaatattttttctttaattcatattatataaagattgttttttaaccaaaagctatcatttacatttaagtttacacatactattatttttctggccttttgataacatatatgtcaatatgaaaatgttattctttagagctagtttaaggtcccaagcaattatcagatctacagtgcccaattcacagctagtcactgctgatcttacaatctttccatacacaattaatacttaagaattcacactgctgacttcctcctgcctagatatacagagggtaataacaataaataatcacccctgagtttttttctcctaactactctggcaggcacagaatctttgaagcaatttaatttaaaccttaactaaccaaaatcaaagtaactgagtctg

SEQ ID NO: 16531 - DNA, 565 bp, Homo sapiens
ccagtgtgatggatatctgcagaattcgcccttagcgtggtcgcggccgaggtacaaggtgatacattctagccttctacaaagtgcacttagaccaggatattctttcatgatggcagacaaatgaggagtttcttttcattatctaatgaaaaaagagttggtctatattttctcagtgtattcctatagggaagagagtcttattgttgataacctttcagacaagtagatgcttctgcatcctatgaggtattcccaaagcccctctttaatctccaccattgtgcataattttgtgataatgaagcagttattttcttctcttgatagacattttatgaaggcagagactatgccactcttgcttacagttgtagctccagcatctaacatggtgtcttaacacatagaagatgctcagtaattacttgttaaatgaatggatgggtgggtggatatgccctaatatgatgcagcttgattatgctgtagtctggctggattaagacatcatccaagaagtaaatacagtatctttaactgttgcctgtatctacacact

SEQ ID NO: 16532 - DNA, 396 bp, Homo sapiens
ctactatagggcgaattgggccctctagatgcatgctcgagcggccgccagtgtgatggatatctgcagaattcgcccttagcgtggtcgcagccgaggtacttttttttttttttttttttttttttttgcacaggagtaagaaaaagggaatttgctttaggggcatgaaactaaaatatcagaatgataggactaaaatcaacagagtttagacttcagtagtcagaataaaatacttctgaaatattccagatatcgtataaaaccacagataaatatgcaaagaagtcattaagcatattttattataattaatgaatatgacttttaaagctatatgtattctccatgttaaaaacttccttagtgaataagcccagggctgcccataaa

SEQ ID NO: 16533 - DNA, 400 bp, Homo sapiens
gactcactatagggcgaattgggccctctagatgcatgctcgagcggccgccagtgtgatggatatctgcagaattcgcccttagcgtggtcgcggccgaggtactttgctttttaattgttagtaatttttccgcaacaggacacaaagagcaatctcattctttctggaggtccatgcagaatactgccctcaatggatgtcacctatgtgaccagttcccactgatgacccttacactgaaaaccggcttacacaggagtggtctatgatctatgatgtattaacatggacatttcctcttccattatgaatttgtaaagttttgatttccataattctttttttaatcagtgaaaacataaaataaggttctgggagagagatacaggaagccaat

SEQ ID NO: 16534 - DNA, 408 bp, Homo sapiens
cgactcactatagggcgaattgggccctctagatgcatgctcgagcggccgccagtgtgatggatatctgcagaattcgcccttagcgtggtcgcggccgaggtacttgagtggttatttcatcattcattccattggtcattgaaaaaaatcttgatatgacaaataataatgactgctaaatctctgattgttaacctgggaatgtcactacacagctcactttttcttttttatgtcttaggttgggttttttgtgaagagaggatgttctagaggcatggttgaaattgaattgtaagtgttaaaagtgctaaaactcctttttcctataaaattcttagtttatattcatgttttcctgatgattagaaaagagtattaatataatattatggcataaatatt

SEQ ID NO: 16535 - DNA, 505 bp, Homo sapiens
  misc_feature 171: n = A,T,C or G
cactatagggcgaattgggccctctagatgcatgctcgagcggccgccagtgtgatggatatctgcagaattcgcccttagcgtggtcgcggccgaggtacctgaaaagaatatcaacctgaaaagaatatcaactcacccagaaattagttctttgaaaaaaaagaaatntaagttgtggaatttctaaagaaccttgaaataagtgtttcaaatttaaagaacaaagaatgatgtgaaaatgagattatgattcctactacatgaattaacgtttcgagattgctgtttattacttcccagagtatctttaacagtattctctgaagcagttccaatctagttggagaattaacagccagtgatttaactatctcatttttattaactgtaatttacattaaaaatatttgcaaatcatactcattaggtatttgatcattgttctatgcattttaaaattaattttgtgttgttcctctcaatatttgtttttaacatttat

SEQ ID NO: 16536 - DNA, 604 bp, Homo sapiens
acgactcactatagggcgaattgtgccctctagatgcatgctcgagcggccgccagtgtgatggatatctgcagaattcgcccttagcgtggtcgcggccgaggtacctgcttttgccgcttctggtttttgcagacatccactactccccagctgattacaccaacttgaatgaaacgacttctcttgtgaactatcaaggggccgccagaatcacctctgcaagtattggggtcagcatagggactcactcctccagtacagagagataaaagctgcacagaaaataaaacaggattatgggataaagtggtgggaggtgatgaggatattattctaaaaagggtagtcaagaaggttcccttggaagataaaagggatggggaaacagcaaggagaaggcccaagtgaggagcaggtctgagggggagaaggaagacccatgtggctgcagacagcaagccaaatgggggtgacaggagtgggctgggtcaccatgagccttgaacgctgcagtatggagtcaggattgtattttactgttaacagaaggccaagggcaggtttttaagggggggagtgatttaaccctgatggatgttta

SEQ ID NO: 16537 - DNA, 498 bp, Homo sapiens
gcgaattgggccctctagatgcatgctcgagcggccgccagtgtgatggatatctgcagaattcgccctttcgagcggccgcccgggcaggtactataggaatggtaagttaagagacaaaagagcagctacacagatgaagaggaactgcaaaggagaatgttttgaaggagaagacaaatagaatttggcaaaagtagctggaaaggttgttgcagaaaaggacaaatggtgtcactgtgagaacacacaataaataaaactgaatggaagagtcaacagcagaaactgggatcagggagtaaaaagcatattatgggacaaaacagatacatgatgtgcaaaacactgtctgcaatttaaatgtgatgtgatggaatttgggagccattacaaatctgatttaaagagaaggaactggcccaatgatgcccaagcaggaggactcctgcttctgtggtcacttatccagagaagctgacaactagtgagagcaag

SEQ ID NO: 16538 - DNA, 528 bp, Homo sapiens
agatgcatgctcgagcggccgccagtgtgatggatatctgcagaattcgccctttcgagcggccgtccgggcaggtacaatatgaaggtaacataaatgtgtcagctgctgctttatttgatagaaagcggcttcagtatctgaaaaactcaaccttcctgagtccacacatgttgaatttgtaatgttctcgacagacgtgtcacactgtgttaaagacagacttccgaagtgtgtttctgcatttgcaaatactgaaggaggatatgtattttttggtgtgcatgatgagacttgtcaagtgattagatgtgaaaaagagaaaatagaccttacgagcttgagggcttctattgatggctgtattaagaagctacctgtccatcatttctgcacacagaggcctgagataaaatatgtccttaacttccttgaagtgcatgataagggggccctccgtggatatgtctgtgcaatcaaggtggagaaattctgctgtgcggtgtttgccaaagtgcctagttcctg

SEQ ID NO: 16539 - DNA, 584 bp, Homo sapiens
acgactactatagggcgaattgggccctctagatgcatgctcgagcggccgccagtgtgatggatatctgcagaattcgcccttagcgtggtcgcggccgaggtactgaaatgataggcgtgaaccactatgcccgaccttaatgttttactttaaattttgtctttattttacacatacttatttaataataaacacctgataattctattatttgaacttcccatgtgtaattcattatttgttgtattgactgactctcactcatatgtagttgtttcttcttgagttttgtaatttttaagagtgagttcgcttcatttgggcttcatatttgaaatactgagcaaccttgaattcctcacagataaattttggttttgctttgtctgggtgccctgagaccactcttttttttttttttttcgtgagatggagtctctctctgtcacccaggttggagtgcagtggcgcaatctcggctcactgcaagcaccatctcccgggttcacgccattgtcctgcctcagccttccaagtagctgggactacaagcgtgtgccaccatgcctggctaatttttt

SEQ ID NO: 16540 - DNA, 464 bp, Homo sapiens
tatagggcgaattgggccctctagatgcatgctcgagcggccgccagtgtgatggatatctgcagaattcgcccttagcggccgcccgggcaggtacgcgggctggttgtagaccccaaaagtagggaagaagataaacacctgaaatttcgtatttctcatgaattagatagtgcatcttctgaggtcaattaaaaggagaaaaaatacaatttctcactctgcatttaattcaaaagaaaaaaaatggctttatagcaaaatgaaagaaaacatgaaatgcttctttctcagtttattggttgaatgtgtatctatttgagtctggaaataactaatgtgtttgataattagtttagtttgtggcttcatggaaactccctgtaaactaaaagcttcagggttatgtctatgttcattctatagaagaaatgcaaactatcactgtattttaatatttggta

SEQ ID NO: 16541 - DNA, 395 bp, Homo sapiens
gactcactatagggcgaattgggccctctagatgcatgctcgagcggccgccagtgtgatggatatctgcagaattcgcccttagcgtggtcgcggccgaggtactcaggagactcaggtgggaggatcgcttgagcccaggaggtcaaggctatagtgaggcatgatcatgccaccgcactccacaccccaggcaacagagcaagaccccaatgcagaccaaaaagaaaaaaaaaaaaaaggaaaagaaaaccaccatttggaaaccactacagcaacagctacagacatacctcatgttacttcactttgcttcatctcactttacagatatttttcacaagtagaagtcctgtggcaatgtcatgtcgaataaatctataacaccatttttt

SEQ ID NO: 16542 - DNA, 495 bp, Homo sapiens
tgtatacgactcactataggcgaatcgggccctctagatgcatgctcgagcggccgccagtgtgatggatatctgcagaattcgccctttcgagcggccgcccgggcaggtactggagggggaggatgtcttgtggaattcatacgtaagcctaaccctgcattagaaaaaatgttcacacggagttagaagcatgtggttattccctggggattcttttatgcctaaaggattcttgagtttaccttacttcctgggaggtaggagagaaggcctcatttcattccctctggcgtgctgtcaatcaggcaattattgctaatattgactttccctttgtaggtatgttcagaactgttaagtcacaactggagagtaagttcccacttgtttataattcccttttaattctgagcagtaagacagtctgttcacggctaggaatcaagtttgaaagttggaattctgtatcccctggccgagggcaagttttgc

SEQ ID NO: 16543 - DNA, 466 bp, Homo sapiens
  misc_feature 415: n = A,T,C or G
cagaattcgcccttaccgtggtcccggccgaggtacgcgggttctagtgttcttcattttttgcagagatccatatttaatctgctattatttctcttctgcttgaagaaatctctttaacatttattatattgagagtcagttggtgttgagttctcttagcttttgcatgtctgaaaaagtatttgccttcggttttgaaagctattttcattggatataaaattctaggctgacagttttttatttcttttaatactttaaacaatattgcttcattctcctctgcagtgtttttgaagataaattagctctcattcttttccttgttcctctttgttttctctgcctgctacgaaacttttctctttacattgcttttgagcaatttgactatgatgcatgtgtacgcggngggcaatgttgacatttgaggtggcaggcaggatgcctgccttctaatata

SEQ ID NO: 16544 - DNA, 468 bp, Homo sapiens
actactatagggcgaattgggccctctagatgcatgctcgagcggccgccagtgtgatggatatctgcagaattcgcccttagcgtggtcgcggccgaggtacttcacaatatattcaagttaatcttttacccagtggtgccaaattcttctgagaatagctaagagggaatttcaggctttccttgactgtgggcaagtcaaatactttagtctcttccaattatcatatgtaaggagtagaatatttaaaataaaaataaaaataaaaaaaatacacgttaagttcattggaggactgctactagatctaaaatataagcagtaaaaaaactacatatatgtgattatatatacataaaatgtgtgtatttatattacatatatatgcagtgttcattttttgacatttctagttatcagattttttttgccagtgataaatttggaatgagtgacagaaggaaa

SEQ ID NO: 16545 - DNA, 450 bp, Homo sapiens
  misc_feature 181, 436: n = A,T,C or G
ccctctagatgcatgctcgagcggccgccagtgtgatggatatctgcagaattcgcccttggccgcccgggcaggtactagtttggcactgaactgtttgggtgcccatgaggtaggcagaccttatgctttttttttttgagacggagtcttgctttctgttgcccaggcttggagtgcnagtgatgtgatctcggcttcactggcaacctctggcctcccaggttcaaggtgattctcctggcctcagcttccccaatagcttgggactacaggtgtgcgccaccactcccagctaatttttgtatttttagtagagacagggttttgccatgttggtcaggctggtctcggaactcctgacctcaggtgatccacccggctctgcctcacaaagtgctgggattacaggcatgagctaccgtgcctggcctanaccttacgcttttg

SEQ ID NO: 16546 - DNA, 527 bp, Homo sapiens
tacgactactatagggcgaattgggccctctagatgcatgctcgagcggccgccagtgtgatggatatctgcagaattcgcccttagcgtggtcgcggccgaggtacacatttcctgatgtaggaaatagtaaaatttcagagcctatggcattggctttcaccacctatgcaattttctacacatctgaaaattaccagtttatctaactccttaaatgttcctctcttcaacaacaaaaaacacaaacaaaaattgctggaagaaacaggaagcatccaggtccaaatgacagcataacagactatgaagaaacagggcttaagtgcccatctagaacaagatggtctagattacaataaggaccccatgggacagaacatcaaaacattcaactttcaagtaaatgtcttggaagtaaacatttaaaatttataggacttcctctggcatgtaggtatgatattagaagagtttcctttgacaaaggacaatgacccaagaagtaggtttttttttttttttaa

SEQ ID NO: 16547 - DNA, 455 bp, Homo sapiens
  misc_feature 130, 131: n = A,T,C or G
tatagggcgaattgggccctctagatgcatgctcgagcggccgccagtgtgatggatatctgcagaattcgcccttagcgtggtcgcggccgaggtactccacgagattagaagtgcatattcaactgcnnagaccggaaccagcatggggggtctaaatgttaccagataaggtttttagggcattttggttatagtgctaagcatttttgggaaaccgtaaagagggttaggataggtggtgggaatagaggctgacagcagttttcagatgtccgtgtgttcatgcacgcagtatggcccaggtaagttcaaaaccttattcttaggctatttcgatcaaccctgccaggcaattttaaattcttggtgatgtagggcagggacactgtggatggctgaggaaactctgggctctgctggctaaccagcttcgctccactctgcagaggctg

SEQ ID NO: 16548 - DNA, 602 bp, Homo sapiens
tacgactcactatagggcgaattgggccctctagatgcatgctcgagcggccgccagtgtgatggatatctgcagaattcgcccttagcgtggtcgcggccgaggtactctctctgttcatttccctatttatttatatcagcacttccttcttcttgccaacttcggtgccacataagggaaaaacaacagaaatctaacaccctgggataccttcagagaaaacagaaaagacactgcagacttctttttgggagaaactcctgtgtttttttttgtttgtttgtttggttggttgggtttttttgtgttttttttttgtgtttttttctatcagggagtcctaagaactgtaaacgaacatgttagcactagagaacatatcctagtcatgtggcaccaaagtatgttactggtggcaaatgcatacacgtctgcagcaacctcaattcctgcctgctcagaagaaagaattcagctgaggggcataaggcacagtgagagactgaggcaagttttagagcatgagtgaaaatgtacctgcccgggcggacgctcgaaagggcgaattccagcacacctgcgggcgtaactagtggatc

SEQ ID NO: 16549 - DNA, 477 bp, Homo sapiens
agatgcatgctcgagcggccgccagtgtgatggatatctgcagaattcgcccttagcgtggtcgcggccgacgtacttcgggaaaacaagaactgtgcttcaatgtctttataaccacactatatggctcattgtaaatgttcaacaaatgcttgatgaatgactcaatgagcaaaattacgcgaaaacacttgctaacctatctctttttcatcaagtatgtagcaaacacatgcccacacctggcaccagaaactataagtgctatctaaatatcaacattttatttggcctgtgcacttatcagctagtggaaagcataaattattccaataaacagacgggaggtgtggacgcaaaatatcacacctaagtctatagaactaatgactttcaaatcaaagactgccttacctgataaagacttaacatcatgattatttcaacagggactaaaaaaagtacaggaaatcttgg

SEQ ID NO: 16550 - DNA, 466 bp, Homo sapiens
gggccctctagatgcatgctcgagcggccgccagtgtgatggatatctgcagaattcgccctttcgagcggccgcccgggcaggtactgtttttaaaatcctaatttttatacttagttatttttagcagtgtcatattgaattctgttacgagtttcatggttacttataataaccagtttcctcattacatagtagaatggtatttttccaatttgaactcttaattttaaattttcttctacctttaaaattctgtgattctgtttggtcaaaagggtctgtggaaataatacttgatatgtttatatagtggttattcaaaacttactcatatattatttgctgacatctgatgagatatagttctagagacattttttatttctggactttagtcttggatggatgaaaatttgatccgatttcaggaaagaaaaggattataaaatagaatccataacat

SEQ ID NO: 16551 - DNA, 403 bp, Homo sapiens
tacgactcctatagggcgaattgggccctctagatgcatgctcgagcggccgccagtgtgatggatatctgcagaattcgcccttagcgtggtcgcggccgaggtaccatagtatttggagcttctataggagtggagaggggcagctcattgttgagagttgcatgctgcaacctaatggtcagcaatgaaataaatacttgtagaatgttcacttcagtgtgaagttttgttatctagttaatttatatacatatatcctttgtagatacatttctatctaatcttgttgggctaattaagaaataaggggtggggtaattgtcaacaaagggagaagaaagtggtttaagatcagggcagcagaaaaattagagaacaagaatatcataatatggctcct

SEQ ID NO: 16552 - DNA, 621 bp, Homo sapiens
tacgactactatagggcgaattgggccctctagatgcatgctcgagcggccgccagtgtgatggatatctgcagaattcgcccttagcgtggtcgcggccgaggtactaattctgacagaagctgaaactaaagcctatgttttctttagtcaacataaggccttttttcagagatggtgtgaattaatagtttaaaccaccaaaataagaatagacaagtattttcttaacatatccatttccattgctagagctgcggtgatcagcagaagcatctgcctggctgtcaatatcaaggtggatccaggctgttggaactggtggatccaggggttggaacggaggaatactaaaaatgagacttggaacttggaaggcctacaccacgagggccaattctgccataagccctattgcccagatatgttacataaaacatccagatattacagtgaaggtcagtgtgtggccagacacagtggctcacaattgtaatccagcactttgggaggccgaggctggtggatcacttgaagtcaggagtttgagaccagcctgaccaacatggtgaaaaccccatctctactaaaaatacaaaaattagctgggcatagtgacac

SEQ ID NO: 16553 - DNA, 568 bp, Homo sapiens
attgtaatacgactcactatagggcgaattgggccctctagatgcatgctcgagcggccgccagtgtgatggatatctgcagaattcgcccttagcgtggtcgcggccgaggtactgatttttctaaaatcctggtttctttaagtaacaaatgggtcattggtaaatagtaggcagcagcaagacaaagtccaagtgtgtgaagtttaaagtgaaagaactggtttaaaatgctcactttgcccattagctctgtggtcccgagaaagtcatttaattctctgagcctgtttcatcacttacaaaatgtgaataacaacacttattcatagggttgtaataaggagtgggagatggtgttaggcataaaaccagcacagtgccctgaacctattttaacaaatggtatttccgaggtgttagtccatgccaacatgaaacgtgagtctaaggaagcttataaatactgtttctttttattacaaagattataattccagtataacaaaattcactggaagaaaaccatttaacacagcttattatcttgtcaaaaaatacccgcgta

SEQ ID NO: 16554 - DNA, 512 bp, Homo sapiens
tcgccctttcgagcggccgcccgggcaggtacgcggggcagaaggaatagaagatatagaaaaagaggacatcgaaagtcaggtccttagccagtttttttaaaacatgacacagataaattaagttttaaataataaaaagtatttttttctagttcaatttggaagtctcagaatttttaaaagatgtgttactaaagctacttataagtcatctaaaatcctaccaccttaggcaaccttttaaatttttgcttatttcatataatatatatttatacatagttgttatagagtaagttcctatttattctgtattttcacatgacgtataatttcataatttccccataatttattagactgctttctacatatctaatagacactcctttaattttggacattttaagttttaaggcttttttcctactccacgatgaatgaatgtacctcggccgcgaccacgctaagggcgaattccagcacactggcggccgttactagtggat

SEQ ID NO: 16555 - DNA, 569 bp, Homo sapiens
tgtagatgcatgctcgagcggccgccagtgtgatggatatctgcagaattcgcccttagcgtggtcgcggccgacgtactggtggagttgtggttcgcccccaggctgtcacagagcagtcctacatggaaagtgttgtgacttttctgcaggatgttgtgccacaggcttacagtggaacacctctaacagaagaaaaggagaaaatagtctgggtcagatttgaaaatgcagatttaaatgatacatcaagaaatctggaatttcatgaaatacatagtacatgaaaccccagatagactataaataattctaaacaaacaagtaggtagatatgtatgtaattgcttttaaatcatttaaatgcctttgtttttggactgtgcaaaggttggaagtgggtttgcatttctaaaatggtgacttttattctgcaagagttcttagtaacttcttgagtgtggtagactttggaacatgtaaattttttgcttgtaatgttatcctgtggtaggattttggcagggacctgcccgggcggccgctccaaagggcgaattccagcacac

SEQ ID NO: 16556 - DNA, 356 bp, Homo sapiens
gcggccgcagtgtgatggatatctgcagaattcgcccttagcgtggtcgcggccgaggtacgcgggatatttatgaagtatatgagatgttttgttacaatcatgtgatataaaataatcatcatggagaatgagttatccatcccctgaagcataaataaatgtaaattctgatgttgaatttatacaccaaattgttagattttagattttatcctcattttactttgcttattttcttatatactggtaagatcttatagatgctgtaatatagtaaaatgtagaatgtatgccataaaattaacctgaattagagtatttttgcatgcatgaggaagtctgttaaggacatc

SEQ ID NO: 16557 - DNA, 548 bp, Homo sapiens
  misc_feature 348, 425: n = A,T,C or G
gactactgtaatacgactcactatagggcgaattgcgccctctagatgcatgctcgagcggccgccagtgtgatggatatctgcagaattcgcccttagcgtggtcgcggccgaggtacgcgggtggtgaggaaattgggatccaatgtcacactgagacgtagtgcaagagctaaaacccaggattcgtagcacccctttcaccgcaatatggttcctcttagatgttaagacaacttttgtctttataggaaggagggtcgatcagacctgtcaaagggagatagacttttatatcgaaaagtctatatcgatatagacttttatatcgaacacgatttaacctgngaggcggaggttgcaatgagccaagatcgcaccactgcactccaacctgggcaacagagtgagactctgtatcaaanaaaaaaatagaaaaaaaaaaaggttcctgcccgggcggccgctcaaagggcgaattccagcacactggcggccgttactagtggatccgagctcggtaccaagcttggcgtaatcatgggcat

SEQ ID NO: 16558 - DNA, 399 bp, Homo sapiens
cgactcatatagggcgaattgggccctctagatgcatgctcgagcggccgccagtgtgatggatatctgcagaattcgcccttagcgtggtcgcggccgaggtacctgaggcctttctgtgcagcttagcattgccagaaggctatggcctcatagtagtcaaactactaatgcagtggctcagagctccaagtgtaaatgttttagtgaacaaagtggaagttgcatcatcttttattacccagacttgtatacgacttagcaccgcttctgctataatccattactcagagaaatcacagccctcctagattctataattaaggaattttgacttcatcttgttggggaataacaagggcacacttacagagtagcatatgaagctggagatattat

SEQ ID NO: 16559 - DNA, 403 bp, Homo sapiens
ctactatagggcgaattgggccctctagatgcatgctcgagcggccgccagtgtgatggatatctgcagaattcgcccttagcggccgcccgggcaggtaccctggcaggtgaggtggcagatctcttgaggccaggagttcgatacatgcctggttaatacggggagaccccatctccatttgaaaaattattttttaaaaatgaaaagaaaaagaagctagcaaagtgtaataacgcagtaagaatgttaccttgacagtagatgttacaaaactacttccatgaattttaggaacaggggaacctgttccttgggagacctgagaagccgtggagatcttgtttgtaggacttcctgataagcaaggcacaattaaaacataaacaaagtaaaatttaca

SEQ ID NO: 16560 - DNA, 533 bp, Homo sapiens
gactactatagggcgaattgtgccctctagatgcatgctcgagcggccgccagtgtgatggatatctgcagaattcgccctttcgagcggccgcccgggcaggtacaacatcattataatccacatcattaatcatcagggaactgcaaattaaaaccacaatgcgatacctaatgcatccactagaatagctaatatggaacctaggaatcattgttaaatttattgaagaagttaacggggcataattgctgggaccaaaactagagtgaatggctttatatattttggaaagatgttggaaagcaaactgcatttgcatcaatgacaatgacaatagtaagaggaaaagaggctactctttctgtgctcactcatgtgccaagcactgtgccttacatccatacacacacacgcatgcacacacacacacacacacacatattacacacccaaagaaaacacattcagaatagaagcaatggaataaagaaccactaaaataattatcaagactctagatagggaaaatg

SEQ ID NO: 16561 - DNA, 384 bp, Homo sapiens
ctactatagggcgaattgggccctctagatgcatgctcgagcggccgccagtgtgatggatatctgcagaattcgcccttgagcggccgcccgggcaggtacgcgggggtgtagtcgggtatgagaacgattgcaagcaaaagcagctgagggacgctgtccaaggagtaggctcagtagcacgaactgcaaatacttgagaagggaaaagttcagccttgtgctggaaagtggtttagcatgctggagctggttttctgcttggtagccctacaactttggcccaactacttggcctctgggactcagattcctcctctttaaaatggtgctaataatagcacccaccctctgtgaggaggatgctgtgaggacaaaatgaga

SEQ ID NO: 16562 - DNA, 612 bp, Homo sapiens
ctcgagcggtcgtcagtgtgatggatatctgcagaattcgcccttcgagcggccgcccgggcaggtacagtgcacagatgtttcacataaaatatgtgatcagtcaaagtcagagccacccttagagtcatcttttaacaatcttgaaacaaacagagttattctagagaaaagtagtttggagcatgccactgaaaaaagcacagctaacgatacgtgctcgtcagctgctattcaggaggatatttaccctcaggaaatagatgcatccagcaactatactccccaagatcctgcaagaaatgaaatccacagtgataaggcacctgtcttatacctacatgaccagctgtcagaacttctaaaagagtttccttatggcattgaggctgtgaatacacgtgaaggttctgtgggccagcaaactacataccagacctcagaagatcaaactgctgataaaaccagttctgactccaaagacccagcagatcaaatacaaattacaatattaagctcagagcaaatgaaagaaatatttcctgaacaggatgatcaaccctatgtagtagacaagttggcagaacctcagaaagaagagcccatcacaga

SEQ ID NO: 16563 - DNA, 473 bp, Homo sapiens
agatgcatgctcgagcggccgccagtgtgatggatatctgcagaattcgcccttagcgtggtcgcggccgaggtactttttttttttttttttttttttttttggagatgaggacttgccatgttggccaaggcagtcttgaactcttggcctaaagcaattttgccagcttggcctaccaaagtgctcaaattacagatgtgagccaccctgcccagcctatatgctttatttaaagccctaattgtatcaacagtgaggaatggtaaagaaaattatattagatgcagtaaaaagagaaagttactagtaagcaagagatctgggttcacatcctgactcatctacttactagatgtataaactcaggaaagttaaatctgaattaatttccttagcaaaataatgcttactttaaaaagttgttctaagggtttaaatgcaaaagtgactaatagagcgctatgtacctg

SEQ ID NO: 16564 - DNA, 382 bp, Homo sapiens
tatagggcgaattgggccctctagatgcatgctcgagcggccgccagtgtgatggatatctgcagaattcgcccttagcgtggtcgcggccgaggtacataactatctatatattttttttctttgggggagtgtgtagagctaaaggctggtatatgctgctcctgctccccgaaagtgacattattcccctaagctaatatttcaggctttcaatttattcgtggtttcacctgtttaaacataagtagaaattactttttctctccatatttagatttgatctatctactttaattgctaatagtgtcttagtcatagaatagattagttagaaaaaagtgtttttgacattataaatgattctttcaatttgtgtcta

SEQ ID NO: 16565 - DNA, 456 bp, Homo sapiens
ctactatagggcgaattgggccctctagatgcatgctcgagcggccgccagtgtgatggatatctgcagaattcgccctttcgagcggccgcccgggcaggtacagctcatgacaggtctggactcaaagatgcataaagtggacaaaatacaggcaagacaaattctgctgtcaagaacctgctgggctcctctcttggggggctaacagcgcagctaggttgacaaggcaggaatttaggcacaagagaattgatagccatctactaaaactagagtttggggtggggactctgtgccatgaacagggcagaaacccaagtcagaaccaaactgatgctggtagatgccttccattcaatctccttcacctcccgattacagcctgcaatgagacggaccagaggtggagatgtaggcacctcggcacgtcttcattgatttgctccttcattt

SEQ ID NO: 16566 - DNA, 611 bp, Homo sapiens
cgactactatagggcgaattgggccctctagatgcatgctcgagcggccgccagtgtgatggatatctgcagaattcgccctttcgagcggccgcccgggcaggtaccattggtagttgtttatgaaattaccagatattcataaatgtgacaaatgaacagcaggattatgaattatcaaaggaaaaagtatttgctgaggtgaaaaaatctgatgtttgaggaagtttttatttttatttatttgttttgtttttttttttttttgaggcagactctctgtcgccaggcttctcctgcctcagcctcacgagtagctgggactacaggcatgcaccaccacgcccagctaatttttgtatttttagcagagacagggaggaagtttttatttttataaacaaaatctgatgttcagaggccccgtttcttacaataaatgtggagtcttagttaagcaggaatttatgaacacccatttcctgactttttgctttaatttagatttttctccatcctgtttctagcacaaaaatttgcctgctgtgttacaaaaataaatttatgttggcctgtgccataaagtgatatatttaatatttttattcttt

SEQ ID NO: 16567 - DNA, 607 bp, Homo sapiens
  misc_feature 535, 541: n = A,T,C or G
gactactatagggcgaattgggccctctagatgcatgctcgagcggccgccagtgtgatggatatctgcagaattcgcccttagcgtggtcgcggccgaggtacgttatctaagacaggacagttactggacttatcttatgacaaaattatatataaattaggcaaaagagctacatataaaccagaaatggaatctagatgtcttattctcagttcttctaccctttcctagcgactccttgaaaaaagagtaagtcaaaatacttttatatttctcgctataaataaaattccctcacctatgtatgagtgaacacaatgcttattactcctaccttaacccattcaaaattgttcatctcagatatctgatttttgctttggaatttagtgaaatacaaataaagtaatatttagaagaagctaatattttagtaagtagaaaacataaaaactgtatttcctatctgggttcatctttgtctctaaaaaaaaaattaaaaagccagaaacaattaataccttttcaattntgattntaaaaaagtagttacagagtcaagcaggtatgcccaaatatgccatttgtccttacaggctcatga

SEQ ID NO: 16568 - DNA, 500 bp, Homo sapiens
atatggcgaattgtgccctctagatgcatgctcgagcggccgccagtgtgatggatatctgcagaattcgccctttcgagcggccgcccgggcaggtgcaaaatggctttcttaattttaaacttacacatcacttaaaccattactaaacaaattgcagttaggttactgacttcactagtgctccagtaacaaatctacaataaaacaaattcaaataggctggtattcagacgttcatttgaaatgcaaaatggaagtaagtcacatgaaggaatgacgtctacgtaacattacctatggtaaggagtgcttggttcatctattttcattaaaccatagtctttgtctgctggatgatgcgtcgccaagatgttcatttcatcccacttctgggattttttgctaaaattaaaaagaaaaaacgtttttcccaatgcagaaaaagataaacctgaatatcaaaattcacaaatgtccaaatttaacatttcaacttc

SEQ ID NO: 16569 - DNA, 371 bp, Homo sapiens
  misc_feature 84: n = A,T,C or G
ctagatgcatgctcgagcggccgccagtgtgatggatatctgcagaattcgcccttccgagcgggcgctcgggcaggcactttntaattagttaccactactcttaaaaatacagaaaactccttattttgatatatctgaaagtaatagaaggaagtaaaagaacaatgaagataattatacttgaaatgttttatgattgtgtgtttctcaaaattatttctcaattttctttatagataacatattcgcaataaaatcttgggccaaaagaaaatttgggtctgaagaaaataaaattgatagaacttttggaattccagaagactttgactacatagactaaaatattccacggtggtgaaggatgt

SEQ ID NO: 16570 - DNA, 532 bp, Homo sapiens
  misc_feature 372: n = A,T,C or G
ccctctagatgcatgctcgagcggccgccagtgtgatggatatctgcagaattcgccctttcgagcggccgcccgggcaggtacgcgggtgattttgaatacttctatccattatgtaaacatttatcagtagaaaaaggtggcagctcacacttctttgtatagcattttaaaaagcaaacaaaaatatttgaccatccaaattgtttttttccaaagtccttttaaattcaaaagggaaaataagattattaaaggtttgatgttttaaatcagtgtttcattacaatttaacaaataccattgactgcctactttgtgctaggttcagcaatagtgactgaaatactgtctttgcccatttacagaatntaatacatgatttaatattttaatgataattataatgatttcagatacctctgtttgctccatggatgtgttatttatcattcatgacttgcttttgaaattgagagcagcattactgttgtcatataacagtcatataacatgcaaataatatttttat

SEQ ID NO: 16571 - DNA, 384 bp, Homo sapiens
ttgggccctctagatgcatgctcgagcggccgccagtgtgatggatatctgcagaattcgccctttgagcggccgcccgggcaggtacttttttcacacagtcaggggatgaggatctgatccgaattacattttgtcgagtcactcattcccacagatttgagtttgaatgcagcttgtggggtactcatgaattagtatagtattcaaagcaaatatatatatatgatagttaaggaacattttgtaatattcatatgacacttaaatctatgtatatgtaggtctagttctaacatgtagcataataccaatataattttgtgcaataacaatttaatttctcttatgctactttgttactaaacttgaacatatatgcag

SEQ ID NO: 16572 - DNA, 611 bp, Homo sapiens
  misc_feature 507, 508: n = A,T,C or G
tacgactactatagggcgaattgggccctctagatgcatgctcgagcggccgccagtgtgatggatatctgcagaattcgccctttcgagcggccgcccgggcaggtacccggctatcttatcttctttatatagatatctaataagatgtaaaatactgacctgcattatctccatgttaacatttacacttcaaaatctgtaaacggacccacgttcatacgcgtgaacagaaatctttcagcaacaaaagagaaaattgtatttctcgatagaaaggaagtggtcagatcatgccagccaaacaaatctgtcaggctttgaaatatagaaccgttaggtaagatactgagaaaaaggataaagtaagatcagcctaaatgtttcagtctagttaagttgatttgtatattacttagaaatttcattttcagggaaatagttttcagatttaaataactgtaaagagctgagttattctttgacttggatttaaaaaaaaaaaannaaaaaaaaggtacctcggccgcgaccacgctaagggcgaattccagcacactggcggccgttactaatggatccgagctcggtaccaaagctggcgtaatcat

SEQ ID NO: 16573 - DNA, 504 bp, Homo sapiens
actatagggcgaatcgcgccctctagatgcatgctcgagcggccgccagtgtgatggatatctgcagaattcgccctttcgagcggccgcccgggcaggtgcatgggagggcaacctttactgagtagctaatatgtgggggtcactgagctagagatttctcatgttgctgtagtgaatcctcatgagtccaacgagggaggtcctcttctgccatttaagagatggctgcttcttagagagtgtatacgacctgctgaaggtcacacagctgataagtggtgggccaagattccaacttgggtctctctgaagatctggcaaggaccttcttgccagttccctgtgcaccttcttttcttttcccttctttttctaggttagggaagagggagaggagtcgcttattctacctttcttgatgaaagctgggggaagggaacactaaagcacatgggagaggaactctggggaaccagaaaggttttatttcctaatggaaag

SEQ ID NO: 16574 - DNA, 461 bp, Homo sapiens
ctatagggcgaattgggccctctagatgcatgctcgagcggccgccagtgtgatggatatctgcagaattcgccctttcgagcggccgcccgggcaggtacatacttttttccctaaccacaacaatagcagctaagaggacgcacagagaaacagaaactggggtataacatgaaaatgtagacagagagtgacaacagtgtctgtcgtctttcacagatttaaggaaaaagaagtgaaatacagtcgtggggctggggatcagttataaggtctcattggaatttaatgaaaagtataaacccacatacccaaggtgtttaaaaaactccaggatcccgcgtacctcgggcgcgaccacgctaagggcgaattccagcacactggcggccgatactagtggatccgagctcggtaccaagcttggcgtaatcatggtcatagctgttttctgtgtgaaa

SEQ ID NO: 16575 - DNA, 459 bp, Homo sapiens
  misc_feature 104: n = A,T,C or G
tatagggcgaattgggccctctagatgcatgctcgagcggccgccagtgtgatggatatctgcagaattcgccctttcgagcggccgcccgggcagggactttntttttttttttttttttttttaggagtaaaatggaaaacaggccttagagaattgtattcctcaggcctctgactgcctgcttccaagcttttgttaaagaacagaatgtgttgaattcttctcaattggcaggggatcaagcacaatactacataatgaggtagctgagaacagagtttttcctataaacacaaagaacaactgaataagtgcatgtaattctcatccaattaaacaggaaacatgataaagcaagttagtacctcggccgcgaccacgctaagggcgaattccagcacactggcggccgttactagtggatccgagctcggtaccaagcttggcgtaatcatg

SEQ ID NO: 16576 - DNA, 423 bp, Homo sapiens
  misc_feature 119, 120, 121: n = A,T,C or G
ggccgccagtgtgatttatatttgcagaattcgcctttaccagctggcttccgggcaggtactggccggaggaaccccacctgaacaagtggactaatgctgtaagccattatggaaannntatgacattcctcaaaacattaaaaatagatctgtcatatgatccagaaatccctacttctgactgtatatctgaaggaaacaaaattggcttcctttgagagatctcaaagagatatctgcacgccgtgttcattgcagcattcttcacaatagctaatatatggaaacattctatatgtgcaccaatggataaacagataaagaatatgtggtatatatcaatgtaatgaaatactatttagttataaaaaagaaggaattttgccatttgcaatcaattgagtgaaacttgagaacatt

SEQ ID NO: 16577 - DNA, 401 bp, Homo sapiens
gactcactatagggcgaattgggccctctagatgcatgctcgagcggccgccagtgtgatggatatctgcagaattcgcccttagcgtgagtcgcggccgaggtaccttagcaaacaagtggaaggatgggaaaagatgaggccagacatgtaggaggggccagatcatctgggtcttatggccattttatggaattgggtgtgacacgggggtgacatcagagagtatcaagcagaacactaatatcacctaatttatgtttttaaaacgtgagccaccatgcccggcctgagactctgtcttaaagaaaaaaaaaaaaaaaaaaaaaaggtccctttcagaacctgcaggagcagatcaatcccctcttggtaacacaccagagcctgcggataccgcg

SEQ ID NO: 16578 - DNA, 584 bp, Homo sapiens
acgactcactatagggcgaattgggccctctagatgcatgctcgagcggccgccagtgtgatggatatctgcagaattcgcccttagcgtggtcgcggccgaggtacatatagaatagtataaatacaataaatgtttgaattatcgtataactagagtcttatttttaagttagtatcctgtattaagaactgggttgatcaaatggttctttctttgcacatatcaaggctttcgactattcccaatcaggtcttcccaaatttgggcatattcctgcctctgcctaccctgttctaatttggcactctaaagatagttcataaaaagcaagccaaagatagaaaagagagctaaggctacaggaggaatttactctttaacatttgggggaaggaaaatgaggcttgtctacagcagggactggctgtcttccagaaatggtttcccaaggtgttccctacctctctttttcttggatatctttttgcattatagatagccttgggaagggtgtcacctttatcctatcagttccacctaatcaactgtagtcatctgagagccagaattattattgatag

SEQ ID NO: 16579 - DNA, 411 bp, Homo sapiens
tacgactcactatagggcgaattgggccctctagatgcatgctcgagcggccgccagtgtgatggatatctgcagaattcgcccttagcgtggtcgcggccgaggtacctgaaaagaatataacctgaaaagaatatcaactcacccagaaattagttctttgaaaaaaagaaattaagttgtgaatttctaaagaccttgaaataagtgtttcaaatttaaagaacaaagaatgatgtgaaaatgagattatgattcctactacatgaattaacgtttcgagattgctgtttattacttcccagagtatctttaacagtattctctgaagcagttccaatctaggttggagaattaacagcaattgatttaactatctcatttttattaactgtaatttacattaaaaat

SEQ ID NO: 16580 - DNA, 542 bp, Homo sapiens
gaatacgactcactatagggcgaattgggccctctagatgcatgctcgagcggccgccagtgtgatggatatctgcagaattcgcccttcgagcggccgcccgggcaggtacttacatttttttttttttttttgtgccagaatcaaactatttaattaaatgtttaaaataatacaataatcagttcgatttattccatcgcaacgaatatcttatttaccttgtggacatattttaaagattaaatgagataaaaaagctctatgccaattaagggcagttttatataaaacagaattaaagttttcacaaatgtcagcattagaagaacgctgaatgaacatccaaccaaaccctcttattttatcaatggagaaataaagctacctggagacagattttcatcaaatgatcatgttcccattttagatatttcattctggcaggagtgtgggggatgaacaggagatgaaaatgaaggcccatggcaacaacaaaggtgagacatggggggccacctgatctgtgcaaacaggatggg

SEQ ID NO: 16581 - DNA, 399 bp, Homo sapiens
gactactatagggcgaattgggccctctagatgcatgctcgagcggccgccagtgtgatggatatctgcagaattcgcccttagcgtggtcgcggccgaggtacaaaatcaatggtcagtctgtaaagtccagcacctttcagagtaaaccatctcactctgattcacttaaacaatttagatacactagtaggaaggtgaagtcccttttttggagggggtggaataagcaaatggatggatacatcaaaccaaaagcagaagaaacacctacattttttttacacggtgaaatgaatagttaacaacccagttatgtcttttgccccctcccggtggtttaaaaagcgtaaagagcgcagtgggaatattttggttttgaagccccttgcacaggga

SEQ ID NO: 16582 - DNA, 520 bp, Homo sapiens
  misc_feature 23: n = A,T,C or G
acgactactatagggcgaattgngccctctagatgcatgctcgagcggccgccagtgtgatggatatctgcagaattcgccctttcgagcggccgcccgggcaggtaccagccagttttgagatatacctggtttgctttaatgttattaaattgttttggtgagttttgcaaatggacaattgaactttgttctgccaaattcttttttattgcatttaaacttcagggttttttatttccggcttattatgaatggattagtcattttgtgaatataactcttcattgagtttagggagaaataggacgttagatccgaagatgctatttgtttaatcaccagaatggacaaaattatacttcatttactatcagggaggcatggggagaatagaggtctaggggtgcgtcttgtggctcttactgtttttgtgtatctggtttttttttttgagagggcttcccattatgttgcccgtgctggaccccaactcctgatttactggctctagagatct

SEQ ID NO: 16583 - DNA, 405 bp, Homo sapiens
gactcactatagggcgaattgggccctctagatgcatgctcgagcggccgccagtgtgatggatatctgcagaattcgccctttcgagcggccgcccgggcaggtacataaaagaaagatgcacattctaaccctgtatcttcttgaataccttttctagttcacatattattaaagcaagaaacatgtaagccctctcttcctagtccttaggttggcaatactgtggtgtcagtaatttataacatgctttctcatatataataagaagcactggactaaagagtctgctggtttgactcttcacgcaagtcaattcaaattaagtcactgtgcctctctgagcctcagtctccccaggtgtaaaaagggaaaatatggtcaactcttctgcgtccagtgttg

SEQ ID NO: 16584 - DNA, 504 bp, Homo sapiens
tactatatggcgaattgcgccctctagatgcatgctcgagcggccgccagtgtgatggatatctgcagaattcgccctttcgagcggccgcccgggcaggcactgtatgttttgtctaggttttatttttccttcttgcttaatctccctcagtcacacagacctcttgctctgtctctctgtatgctgagcacaagcccaccctaggccctttgcacatgctgtcggctcagcctggagtatttctcctccagttaactccttggctaactctttcctttccatcagatgtcttcccaaatgttctcttatcagataagccttctctggtgaccctctataaaatagtatctcggccaggcgtggtggttcacacctgtaaccccagcaccttgggattgcaggcgtgaatcagcgcgcttggcccctgtatgcattatttcatttaatgctcacaaacagcattctgcagttactactatttctagttcttatttaacaccc

SEQ ID NO: 16585 - DNA, 496 bp, Homo sapiens
tcactactatagggcgaattgggccctctagatgcatgctcgagcggccgccagtgtgatggatatctgcagaattcgccctttcgagcggccgcccgggcaggtacaaatatttggcaaaggaatgaaaaaagttagaaagttgtctgtctgtgggctaggctctgcctgcaagatacttacaatctaggtcagaggttcctaaatccttctcaatgctgtttgcactggccctgaggaaagtgtgaaaatgaagactattgtagagtcttacatgaagctaaatttgttcatttatatcacttctcttttattatgagattatgtcctctgcagttttttggtattaaaatgtcttttatgaaaggatagtaagagttagatagtagtcttttttgtgaaaaaaaaaaatatcatttacaattaaggttccttggccgcgaccacgctaagggcgaattccatcacactggcggccgttactagtggatccgag

SEQ ID NO: 16586 - DNA, 609 bp, Homo sapiens
tacgactcactatagggcgaattgggccctctagatgcatgctcgagcggccgccagtgtgatggatatctgcagaattcgcccttagcgtggtcgcggccgaggtaccatacagaataaaaatacatttgagaaaaactggaataaatctccagcaatcaaaccaattacatttaatttttcagaaaacagtaaattttaaaacatgccttaaaatattaatggcataaatatatcttcaaacgtgtgcttacaaattacaaaataagtggcaaaattgtcaaaagtaaagttttacttgttattaaattgtgatcaacattaaaacaaatacaaacacacaatgtgagaaagcgaggacagcagatccatagcagtgagggggtgtttctgtcatccctatcccagggtaaatatcaagaagcaatcatttcatgcctatgggctagtgaagaaaaaaaaaatcaatcatcgcactcttcctccctaggccaagataaaccctcggaatcatttaaaaaaaaaaaaaaatacttcaggaggccgggcgtggcagttcgcgcctgtaatcccagcactttgggaggccgaggcgggtggatcacctga

SEQ ID NO: 16587 - DNA, 464 bp, Homo sapiens
cgactactatagggcgaattgggccctctagatgcatgctcgagcggccgccagtgtgatggatatctgcagaattcgccctttcgagcggccgcccgggcaggtaccacaaagacagaagcttcacaggaagagcggtctgattcaagcggcctcacatctctcaagaaatcaccaaaggtctcatccaaggacactcgggaaaatcaaaacggatttctcactttctattagtaattcgtcagacgtgagtgctaaagatgagcatgctgaagacaatgagaagcgtttggcagccttggaagcgaggcaaaaagcaaaagaagtgcagaagaagctggtgcataatgctctggcaaatttggatggtcatccagaggataagccaacgcacatcatcttcggttctgacagtgaatgtgaaacagaggagacatcgactcaggagcagagccatccaggag

SEQ ID NO: 16588 - DNA, 431 bp, Homo sapiens
tgcatgctcgagcggccgccagtgtgatggatatctgcagaattcgcccttagcgtggtcgcggccgacgtaccgctaacctcattttgcatgtgagaaaaccaaggctctaggaggttaagcaacttttgcagggtcacacagttagcaactgggaaaggaagaaactcacgcccggtcaggtctgactccaagacccatgcttctcactttatatcaccccttgtccctcctcttcatcaaccttgccctccatttccactccaccaatcttggttcaaggtgagaaactgggatgggaatgagaggatgaagaaaactaggtaagatgcacggacaggttgggaaaaaatagtaatgcatacagcagatgcagggggaagttgggaaaaaaatagtaatggacacagcagctagggagaaacctcctt

SEQ ID NO: 16589 - DNA, 503 bp, Homo sapiens
gccctctagatgcatgctcgagcggccgccagtgtgatggatatctgcagaattcgccctttcagcggccgcccgggcaggtacttcttaatgctcttgctacactatcaccaacaacaatcacactggctaccatgtctttggacctactgagtgccaggtgctgtcctaggtgtcttgcagacattaacatatgtagtttaacgttcagagcaatattccatggcaagttatattatccctattttaagatggcaaaccatgtagcatgtgtacttggtcatgtttcatactgttttcagaggatggctaggaaaccagtgtttattctacaaacttgatcctgcttggtctcaaaatgatttttcagttatattaaagtggcagccagttcattgactaccatggaattaaaataagagaaagtggcaagcctattttcatcattctgatgtaaagcatttgactacaataaatacaagcagcaaaataaagacacagat

SEQ ID NO: 16590 - DNA, 379 bp, Homo sapiens
  misc_feature 28: n = A,T,C or G
ccctctagatgcatgctcgagcggccgncagtgtgatggatatctgcagaattcgcccttagcgtggtcgcggccgaggtacttcctctcttttatgcttgaagcagcctcacttcggttctagtttttgaaatttgattaagtcttattcattttcaccatgctcttaatgattttattgattttagttatattccttattcacgttcatttctttcattcagaaagtcctgttatcctgaataaatccagtctataattgtggtcattcagttctcttttgctagatcttctttacctctactctgttcatcacaggggagtcccgcactgactccaaatccatgaatgaaagagatgtccataacaccatagaaat

SEQ ID NO: 16591 - DNA, 563 bp, Homo sapiens
ctcactatatggcgaatggggccctctagatgcatgctcgagcggccgccagtgtgatggatatctgcagaattcgccctttcgagcggccgcccgggcaggtactttttttttttttttttttttttttttccccaatttaaaaaaaaaaggggaaaatgggaaaactcccctggaacggcccaaaaatgggggaaaaaaccggggcgtcttatttagaccccacctcaaaaaaatttatcccgttaaaatcttgggcaataaagcaattttgaggcgattttttccaccttctcaatataatattccaactggcgttaaaatgcattttaaacattggggaagactaaattaatttttttaactgacatttatgtttcatttgacaaccttttgctgtatattttatgtggacttttaagtattgtagtgattcctttaatgaagaaataaaataattgtcatttaaaaatgcatattattattaccttatgctataaaaatagttttaaaatagagtatgtttattaagatttaaaaataagtatagtcatgcactgcat

SEQ ID NO: 16592 - DNA, 553 bp, Homo sapiens
cgactcactatagggcgaattgggccctctagatgcatgctcgagcggccgccagtgtgatggatatctgcagaattcgcccttagcggccgcccgggcaggtacttgaagatagggcctatgaaaagataataaaggttacatgaagtcctaagagtatggcttttacccaacagggctagtgtaaagctcttatccaacagggctagtgtaaggctcctttccaacagggctagtgtaaggctcttatccaacagggctagtgtagggctcttatccaacaggactagtgtagggctcttatccaacagggctagtgtagggctcttatccaacagggctagtgtagggctcttatccaacagggctagtgtagggctcttatccaacagggctagtgtaaggctcttatccaatagggttagtgtagggctcttatccaacagggctagtgtaaggctcttatccaacagggttagtgtagggctcttatccaacagggctagtgtagggctcttatccaacagggctagtgtagggcttttatccaaca

SEQ ID NO: 16593 - DNA, 497 bp, Homo sapiens
gggccctctagatgcatgctcgagcggccgccagtgtgatggatatctgcagaattcgccctttcgagcggccgcccgggcaggtacagacatggtttcatcattttggccaggctggtatcgaactcctgacctcacgtgatctgcccaccttggccttccaaagtgccaggattacaggtgtaagccaccatgctgggccagccactgcgcccagccatctttccttttcttttccttttggttaaaatcctagagaaaaacttaggaaaaactctactggatgctggccaagatttgcatttctaacaagctcccaggtgaagctgatgctgctggtccggagaccacacttagagaaacgccaggttatgagttcgtgggctttacaattagacagacttgggtcggaaccttgatttttccatttgctttatgtgcaagtcacagaggcagagctacttatctaaaaaagagaatatcactattgaataaaa

SEQ ID NO: 16594 - DNA, 572 bp, Homo sapiens
atagggcgaattgagccctctagatgcatgctcgagcggccgccagtgtgatggatatctgcagaattcgccctttcgagcggccgcccgggcaggtactggggtggggtgatggtattttttactgctttaggacctatttttaagtgccataaaatctgctgtcattaaacttggcaggctggccaagattgggccagggcactttctgagttggttagtgcataatagcacaataggaaccagacccaaatgctttggggggatggagtggggggctggctcttccttgaggagaacggcttggaaaaaatctgcagctaactgaaactgctcagaaaaccaccctgtctagaggctgaagggaagccctgcttacctcagctttttagttctgggaagctatggtctgagaaggcagaggggaggaattgggctgagctgtgaaggtaagggggaagaaaaaaatcaaagtagaatttggtttaataagggccatgcagacctaatagtccagcccacagaggctgaaaaacaaatcaataaaacaaattggattctaactaatatcc

SEQ ID NO: 16595 - DNA, 465 bp, Homo sapiens
  misc_feature 425: n = A,T,C or G
actactatagggcgaattgggccctctagatgcatgctcgagcggccgccagtgtgatggatatctgcagaattcgcccttagcggccgcccgggcaggtacagtgtctcatctaaactaggcacctttgtgtagtatctcatctaattctaacactgtttgaggtaagacttgctactatctccatttggggttgagaaaactgaggcccagacagttcaaataaattgccaagtccatataactaagtgcagatattcaaatccaggaataagtgatccaaaagccactagcctatgttacattgaactatgttggtctgttttcttattgctcttctctactcatagtgggaatgctgagaggcaaaatcatcactcattatccatatctcagtattttctgcagtccctgatgcaaattangcatggagtaaatatttactgaactgaagcttagtacctc

SEQ ID NO: 16596 - DNA, 387 bp, Homo sapiens
atacgactcactatagggcgaattgggccctctagatgcatgctcgagcggccgccagtgtgatggatatctgcagaattcgccctttcgagcggccgcccgggcaggtactttccgcatactgttgcccgtatgactttcctgtcccatcggaaaccagagtttccccaggtgagcccttcctatctgcggttacatgatttagccaattttctcttctcttcctccatacgggaatggaaatgtattactcagtagatcagttctttctcaggctggtaacattacagaatccctgtcgaagtgcaagttgggctggtggaaatcagatttccacatccttttgtaagctttggttgtcaaggtaaatcccatacattttaaaag

SEQ ID NO: 16597 - DNA, 445 bp, Homo sapiens
agggcgaattgggccctctagatgcatgctcgagcggccgccagtgtgatggatatctgcagaattcgcccttagcgtggtcgcggccgaggtacgggaaggcatagtggcacagggaaggaatggcgaactgagaacacttatcagataagtgactggaagtgccaatcatagtgaaggcagctggaaaacaaacacaattattaactcccagaggccaggggttatcttctttggttatctagtcaacggatatcagatataaacacacattgcaaggaatccgccgtgctgaaacagacaaggcccagagaaggagattcatttcagatgtctaagcagcttactttcactggcttgaaaaaaaccattttgactacaaagttaataaaacaggattaaattacatatgtacctgcccgggcggccgctcgaaagggcgaat

SEQ ID NO: 16598 - DNA, 451 bp, Homo sapiens
ggggccctctagatgcatgctcgagcggccgccagtgtgatggatatctgcagaattcgcccttagcgtggtcgcggccgaggtactgctaacaagtattcattaagtgtatgatttcatttttaatgacagttgccacagatctgatgttgtgtctacttgttcactccagcccctgccccctacaaagatataatttgtctttattcatattgttaaaatgggtttagtttctctagggaaaattgttatctcagaatagggacctggaaagtgaacgatattttatactctacctgtgttcatattattttgtaaccaatgttttaaagatagagaagcagaggcggatagaacggataaagcagaagcgggcccagctgcaagaacttctcctacaggtaaagataccaagatgttttcattaccttccctgtttctccactggctg

SEQ ID NO: 16599 - DNA, 634 bp, Homo sapiens
cactatatggcgaatggggccctctagatgcatgctcgagcggccgccagtgtgatggatatctgcagaattcgccctttcgagcggccgcccgggcaggtacaaaagcagaagttctcatgttaatataagacaaacttgtatttaaggcaaaaagcattaaattggagagagaaagttactttttatcattaaaatttataacaaaatataatcgtcccttttttgcacattaatgctttcatttattacataaatattgagtgtctaccacgtgtcaggcacttttctgttactggaaaatttgaaaagtgagtcaatatttctgccatcaaaaagcttctagtggagatgcagaaagacacatgaaattaacaattatgaatgctgtaggaagatgtaaagtagggtgatataatacaagcatctatcagacaagggatttctgggatgcattattaaccatgcacaaaacaggaagaaagtgggactatccagcagagatgctctaatatgtgaatgagcttgtcctgtctgaggaagaaagagatggcgagtgtagttaagtgtgctgggaaaaggggaaatggtcactgtagccaaagagaaaggcataagtcacatctacatactt

SEQ ID NO: 16600 - DNA, 536 bp, Homo sapiens
  misc_feature 491: n = A,T,C or G
atatggcgaattgggccctctagatgcatgctcgagcggccgccagtgtgatggatatctgcagaattcgccctttcgagcggccgcccgggcaggtacttttcattagtctgttgtcttatctaattttttcttctgtaacagaatactacaacacatctttgcaggattctttgcaaattctgccattcctggatctccacaccctttttcctggtaagtaactaattgttttctatcttactctattggagtgacatattttaggtgctgtcatttctgtgcagtagagaaaaagagctgcataggccgggtgcggtggctcatgcctctaatcccagcactttgggaggccgaggctggcggatcacgaggtcaggagatcgaggccatcctggctaacatggtgaaaccccgtctctactaaaaatataaaaaattagccaggcgtggtggcatgcttctgtagtcccagctactcggaggctgangcaggaagaatcacttgaacccgggaggtggaggttgcagtgagc

SEQ ID NO: 16601 - DNA, 511 bp, Homo sapiens
ctatagggcgaattgggccctctagatgcatgctcgagcggccgccagtgtgatggatatctgcagaattcgcccttagcgtggtcgcggccgaggtacaagaccagaaatttgaactacactatgctgaagagttggaattaaatctattaatgaggatgttattaaaatgacatttgtggggtatttttgtgagtttttaaattgaataatataaactgggagttttacataatttatagatttgtagaaatatgtttaagtatacagaaatttcattgagtcattgaattttagggttaaagggacatctgatctagcctttttattttaacagatcaagacactgcagctcaggggttcagctatttacatgaggtcatacagtaagcattaatatttgtagtctcttaatgtagtatcatcttattgtagattgaaacatgacatttaatctgctatcaagatactgggtttgtaggggggatgaggagttgtcagaataacaaaa

SEQ ID NO: 16602 - DNA, 652 bp, Homo sapiens
ggcgaattgggccctctagatgcatgctcgagcggccgccagtgtgatggatatctgcagaattcgcccttagcggccgcccgggcaggtacttcttattagtgaataatgattctctagtcataataacttagacattacatataaattttaagttaaaactactataacaatattgggaaaaatgaaaaaggggagtagatagtgtaaaagggccatatccttctctaccacagcaggaagtgaacagataacgtctcaaatcaaaaaactgtagtataggctttccaccccagctctgccccgcccatatagatacctattacagaaggagggaaatagcttttaaaaaaggagagttaaatgaaattgcctgtaggaagtaggaggaatacttccgattttgtcataagcattgtaataccattttactttttcaaccatgtgtatgtattaatttgattttaaaaatttaaaacagaaaatgtagaaaaattttttgtgactgggaataaatataagatctcaaatcacaagcataaggtgaaaatattcgtgggctttatatcaaaattaaaaatgcttttacagtgaaagcattgttaacagatgatgacagactagtggaagatatctgcaatgtttaccacta

SEQ ID NO: 16603 - DNA, 391 bp, Homo sapiens
tatagggcgaattgggccctctagatgcatgctcgagcggccgccagtgtgatggatatctgcagaattcgcccttagcgtggtcgcggccgaggtactgggattagaggcgtgagtgaccgcacccggctggactggtaaactttcctaggaaaagatcttcctagagttggttttcccctatccaaacctatcttttccatttcttccattagacctttgctttgatgatgatgatgatgatgatgacgaccaggatgcttttgcatttactgagtttctactttgtgctcagaagtgtgttaaggtttttgcacttaataacataaactttcatttaatattcatgacaaccctacagagtcagcatcctattgtctccatattacac

SEQ ID NO: 16604 - DNA, 384 bp, Homo sapiens
tgtatacgactcacttagggcgaattgggccctctagatgcatgctcgagcggccgccagtgtgatggatatctgcagaattcgccctttcgagcggccgcccgggcaggtacgcggggcatgagccatcgcacccagtctccgaattcttttatcctctgagagcattggtcacactctccccctccatccttgggggtcctattccaaaccccctgccattgttctctcttggatggcgttcctcctggaccacaggtgcctcaaactcagcatccaaggccaacctcagcatcggcccccaggaaagactggccctctagcttctaccctttgtccctgtagcctatacagtttagaatatttatttgttaattttattaa

SEQ ID NO: 16605 - DNA, 460 bp, Homo sapiens
ctatatggcgaatggggccctctagatgcatgctcgagcggccgccagtgtgatggatatctgcagaattcgcccttagcgtggtcgcggccgaggaacttttttttttttttttatttttcccggatttttctttttttttttttgtttgatactaaagattttttgttacacatgatttatgaatattttttttttatatgggggggaaaaaaaacacccccttttttaaaaaaaaaaaagaggggtccttcacccctgccggggggggggaacccccttctctccaaggggggggaaaaaaaaatttttttttaaaaaaaaaaaaggggggggggcaaaaaccccgggggaaaaaaaaaaaattttttttttttatttaaaaaccccccccccccccgggggggttaaatgagggaaaataaccccccccccgggggggggttataaaaataaaaaa

SEQ ID NO: 16606 - DNA, 516 bp, Homo sapiens
tatatggcgaatggggccctctagatgcatgctcgagcggccgccagtgtgatggatatctgcagaattcgcccttagcgtggtcgcggccgaggtacacatgtatctagtattgtgctagcaataccacagtaaggaaaccccagtttcctttctatataaaatgaaaattttagttcacccatccagctgctagggcgttttataattagggccaggaagaagaactggattaggctaggaagtgaatttgtctcaggttagagaaataagagtttaattgttttatattttaaatggctttctctttcccaaggtgctgatagcttattggatataagttctgaagctgaccaacaagatcttctctctctattgcaagcaaaagttgcttcccttaccttacacaataaggagttacaagataaattacaggccaaatcacccaaggaggcggaagcagacctaaactttgactcataccattccacccaaactgacttgggcccatccctg

SEQ ID NO: 16607 - DNA, 591 bp, Homo sapiens
tacgactcactatagggcgaattgggccctctagatgcatgctcgagcggccgccagtgtgatggatatctgcagaattcgccctttcgagcggccgcccgggcaggtactatactcattattgggtgatgggatcattcataccctaaacctcagcatcacccaatatgccaatgtaacaaatctgcacatctaccccaaatctaaaataaaagttgaaattataaaaaaagactagccttaaaaattacttccaataaatacatacaaatatttcatatgtatgacagacagaaatatctgctttattatagataagaataatgtttgttgcttaatacgacagaagaatgtgtaagtgggtaacacagtgatctatctactataattttatatgtcatatgtcatatgtttacataacaccataatgatgttactaagattatacccaaaaaagtattctcatatacatgcactatcctatatttgaaaatactttttttaatcaaagttttcatttttcagtttcacacagcattgcttaattatctatttcaaatgtaaaacttttaaatgttcttgtgtaactga

SEQ ID NO: 16608 - DNA, 479 bp, Homo sapiens
gcgaatggggccctctagatgcatgctcgagcggccgccagtgtgatggatatctgcagaattcgccctttcgagcggccgcccgggcaggtactatgcacttcccatgctcctagggttaggaatagtttcaaacatgattggcagacataacaacggcaaatactcggactggggcataggactccagagtaggaaaaagacaaaagatttggcagcctgacacaggcaacctacccctctctctccagcctctttatgaaactgtttgtttgccagtcctgccctaaggcagaagatgaattgaagatgctgtgcatgtttcctaagtccttgagcaatcatggtggtgacaattgccacaagggatatgaggccagtgccaccagagggtggtgccaagtgccacatcccttccgatccattcccctctgcatcctcggagcaccccagtttgcctttgatgtgtccgctgtgta

SEQ ID NO: 16609 - DNA, 418 bp, Homo sapiens
  misc_feature 315: n = A,T,C or G
actactatagggcgaattgggccctctagatgcatgctcgagcggccgccagtgtgatggatatctgcagaattcgccctttcgagcggccgcccgggcaggtacgcggggtatgccattttctctacagtgagggtctgcaggctcatatcattgtggctactagctagactgaagtccatgaagttgataaattgcctattttatcagacatgataatctgccattaattaacaaaggaaatgcaggttacagaaatgatattatgctgtttcgtggcttcaaatgaggttacacagataatgctttcaatangatgtgtgtttagcttttctattaacatggttattttgttttgaaagatggaaaaacagggcccagccctactccctttgattcgtctctttaaaaatgactt

SEQ ID NO: 16610 - DNA, 601 bp, Homo sapiens
  misc_feature 500: n = A,T,C or G
ggggccctctagatgcatgctcgagcggccgccagtgtgatggatatctgcagaattcgcccttagcgtggtcgcggccgaggcacgcgggtcactcgcattactgcctgagttccagctcctgtcagatcagtggcattggattctcacagaagcataaactctattgtgaactacacatgtgagggatctaggttgcacactccttattagaatctaatggctgatgatctgtcactgtctccctctctgccctcatggagcttgtattctagctgggggagagaacaagcaagtaaactatatgtatgtcaaatgattaaaaggggaataggaagtgctggaggtgactgcagttacaaattgttgatccaggaaggtctcactgtgaaagtaacattttaatagagacctgaggaagggagggggctgaggttatgtagataactgggagaagagctgtccaggcaatgcagtgtggctggaggggcatgtgccanaggaagagattaggttggagaggtaagagggttttgcaggatgtagggggccttgaagactttttgtaaggagttttgtctttattttgagtaatttgggg

SEQ ID NO: 16611 - DNA, 505 bp, Homo sapiens
gcgaattgggccctctagatgcatgctcgagcggccgccagtgtgatggatatctgcagaattcgccctttcgagcggccgcccgggcaggtacctgaacaaaacctaccatcaactagatttactaagtgggtaaagtcattgtagatcatctagcaccagatatgttagcagactgcagatagctgaactaatccagaccagaagagctactcactgggacctcaaaatgctgagacacaaaagatgcatattgttttaaaccattagcttttggggtagtttgttatgcagcaaaagttaaatggcatatttcttagcctcaatttcctcaactgcaaaatagagttgataactaccttgcagtgttactgtggggattataaataacatgtataactggctggctcacataaagtctccaacaaatgaaagctatattattcgttagttatcagtctgaatgagcttctaaatctcttaatgttaacacagattgagttcg

SEQ ID NO: 16612 - DNA, 555 bp, Homo sapiens
aatacgactcactatagggcgaattgggccctctagatgcatgctcgagcggccgccagtgtgatggatatctgcagaattcgcccttagcgtggtcgcggccgaggtacctttttttttcttttttttttttttcttcttcctcctcttcatcctcttcctcttcttcctcctcttcttcctcctcctcgtcctcctcctcctcttcttcttcactgctctctttagacagctccagcagctgccctctctccgatctgggccgtctctcctacctggcatattggaagagcgtcatcttggagtatctctaccaccaccatgagaggcacatcagcatcaaggcaattagcagagcgacgggcatgtgcccacatgacattgccaccactctgcagcacctccacatgatcgacaagagagatggcagatttgtcatcattagacgggaaaagttgatattgagccacatggaaaagctgaaaacctgttccagagccaatgaacttgatccagacagtctgaggtggaccccaattttaatttctagtgctg

SEQ ID NO: 16613 - DNA, 617 bp, Homo sapiens
atagggcgaattgggccctctagatgcatgctcgagcggccgccagtgtgatggatatctgcagaattcgccctttcgagcggccgcccgggcaggtacacatctgtgtctaaatttcctcttctgtaaggacaccaggcctattagattcgggccacccagatcacctcattctaacgtttcctctttcaagcccttatctctaaatacagtcctgtttctgagagactagaggttgggacttaaacacatgatttttgggaggataaactcagctcataacacgactcggtaaagattcatggaatggattaattaacaaagtgtgtgctctgtttagattaggtttggcttttgctttcaaggcatggtttagccagacagtcctttgccagaactcactgctgttcccccttgcttctgggcaccactgctgcttcgacccctcagcatggaagttcctggacttcatggatgtttgttccctctgtagcccaagatcctgagttccacaaggtatgtgatgagttcggtttccagtgtcagaatggagtgtgcatcagtttgatttggaagtgcgaccggatggatgaatgccgcgaatattctgatgaagc

SEQ ID NO: 16614 - DNA, 479 bp, Homo sapiens
  misc_feature 335: n = A,T,C or G
ctatagggcgaattgggccctctagatgcatgctcgagcggccgccagtgtgatggatatctgcagaattcgccctttcgagcggccgcccgggcaggtaccctacaaaccagaaaacaagtttttaaggaagatgctgggcatgctgatagcttttctggtctcctaaggaagagtttttaaaactaaatccaaggaagaaaaatgtaacaacacgtggaagtgaacactggatgaataagcttgtttcccaaattagaatcctaacgtccatatttagcttcatgtattcccctttggcttccacagttcaactccttttattttgagacggngtctcgctgtgtcgccccagctggagtgtaatggcgtgaactcggctcactgcaatctccgcctcccaggttccagcaattctgtcttagcttcccaagtagctgggattacaggcatgcaccgctactccaggctaattttgt

SEQ ID NO: 16615 - DNA, 684 bp, Homo sapiens
  misc_feature 468: n = A,T,C or G
tatatggcgaatggggccctctagatgcatgctcgagcggccgccagtgtgatggatatctgcagaattcgccctttcgagcggccgcccgggcaggtacgcgggctggaaaccagctgtctttgtgtcttatgaaacctcaagtcaaaatgagaccgcatttaattattctgctttgctctttttttggggtgggggggagatagagtttcactctgtcacccaggctggagtgcagtggcacaatctttgctcactgtaacctctgcctcttgggttcaagtgattctcgtgccccagcctcccgagtagctgggactacaggcacgtgccaccacgcccagctaatttttatatttttagtagagacggggttttgctgtgttggccaggctggtctcaaactcctgacctcaagtaatccacctggcctgctcttttcatgtcttaacatggcatgtcttttantttcattattttcctactccttgtatgtcaagaaattacattttgcatgtcttatggagatgctgttaattgcttcagtgagtgcttttctaatctgcagaccatttacatttcctgtttgcagcatgctgtgtgcaaacactcaataatttggagtattcaattatttgttagggctcttcctatttccaaatgtgctgaattgtctattgatgg

SEQ ID NO: 16616 - DNA, 377 bp, Homo sapiens
atacgactcctatagggcgaattgggccctctagatgcatgctcgagcggccgccagtgtgatggatatctgcagaattcgcccttagcgtggtcgcggccgaggtacatacctgtatatgcatatatatatgtgtgtatatatataatagaaggtatgtctcatgcaatatttgggatatacttgtattgaaaaattacttgtttattgaagaatcaaatttgactgggccctgtatttttatttgctaatttggcaacttaggggttctggttaaaaaacatttcttacattgcatagataataaacagcctaaagaagtttgggaatggttacacaggggcccttcatgcttccatgtcagtgcctaagtacct

SEQ ID NO: 16617 - DNA, 527 bp, Homo sapiens
ggccctctacatgcatgctcgagcgggcgacagggtagatggataatctgcagaattcgccctttcgagcggccggccgggcaggtacgcgaggctctcggagctgcctctcctctgaccctcaggtcctcaccgagtttgctccaggagtatattgaaaacatacccagtgctctctcaagcacccactgcttagagggcccagatttcttttccttctttcccttgcagagctggagactgcatcgggcatctggtgtttaaactaaacaggaaaactgactaaaggtccacagtgctcattgtgtagactagctgccctccgatgggtgctctgattatcagtggttccagtgcagggcctgtcactaagcaggcctcacttcctccttgggggctttcccatgggaggtgtggctttttactctacatggaaatgactctctgcagccacagaacacagtcattttctgaattatcccagtctctcatgcgccctggattcctccagatgccttatatctctt

SEQ ID NO: 16618 - DNA, 570 bp, Homo sapiens
tatatggcgaatggggccctctagatgcatgctcgagcggccgccagtgtgatggatatctgcagaattcgccctttcgagcggccgcccgggcaggtacaacctcctcctagcgtttctggttaactatgtgaacacacaggcagacagatcaagccgctatgtgagggacaaataaacatactgaagacctaaaaatgtgaagtcagctgagcctcaattcaatccaaacctttgggggcttatgcaccattagtctgtatcatggcctccagtcatttgtccctctagaacaggaactctgaaaggcctgacaaagaagaatggacaatcacagatgctggttttgccttctcattccctgcaagtctactggatgcaggaagggggtggggggttcaagctgcctgcttaggagcttaaacatgacaaggattttctaatgaaaagctaacccagagattcctctttttcctatgataccacagcatccatcattcaaaaaccgaaaaaggacccacctgtataggcatctttaaaaagacaataaagggatccgagcaattgtct

SEQ ID NO: 16619 - DNA, 449 bp, Homo sapiens
agggcgaattgggccctctagatgcatgctcgagcggccgccagtgtgatggatatctgcagaattcgccctttcgagcggccgcccgggcaggtaccatttacgatttataaatcagccacagagtcctaggcacccagaatggacctccccttccttgtctacctaatgcctgtatagctccaaaatcacctcttggaaacactgccttattcctccccctcccaggagaggttgagtgccacactcacctcttttagattacttcagtggctatactgcaatcattgacttgtgtctgctccacttgactataagcaaattgaaggcagggtttgtgccttcataatctctgaatgatctgaagatggaaataactgctttgtgctttcagggagctcatataccttagctccgtgggctacgaagctcgttcttcaaatgaggtg

SEQ ID NO: 16620 - DNA, 379 bp, Homo sapiens
gcgaattgggccctctagatgcatgctcgagcggccgccagtgtgatggatatctgcagaattcgcccttcgagcggccgcccgggcaggtactgtgctttacagagtaagcatttctccaacaaagagaagtaaaatgtttataacaccacattgtatattataaatgtttagtattattttatacagcattttagctcagtaatttgtattttgaatggataaaaatgaattaagacactgacgcacacacacaccttataaaaaataattttaaaaaattgtagaaatggcatgttatcttttctttatatattttaaagatatgccttgttcttagcagttttttttttctgattgttttcagtttgggagctaa

SEQ ID NO: 16621 - DNA, 326 bp, Homo sapiens
atggatatctgcagaattcgccctttcgagcggccgcccgggcaggtactcaagttataaataagtaatttctttcatttcttattatgaagtaaaccactatatagtaatatacttttaagcatttataaaatttgatatgttctgataggactagaaaactgtgaatcttaataatttaaataaaaccttaaagtttataacttattttaaatagcaaacagtttgtggctttgatttgttacgggccaatggacagtcctatgtctgtgatgtcaatggcttcagttttgtgaaaaattccatgaagtattatgatgactgtg

SEQ ID NO: 16622 - DNA, 420 bp, Homo sapiens
gcgaatggggccctctagatgcatgctcgagcggccgccagtgtgatggatatctgcagaattcgcccttagcgtggtcgcggccgaggtactctgtctacaccttacttgtggaaagcttattttgccaaaataagccactgggactcggtaggtggagccccaacggcacttttagggacctatggggccttcgtggcatctctgagctgagtgctggggaggaggttgatgtaatggtgactcttttctgatcagcaccttggccgtgaagcccaaggtcccagccaaaccaaagggccagttgtttcagtttaaacagacatgtctttagtctaataaaattagttaactgccagtaaagttatttgttagctttgatgaaagctatgttggtatctttccctaatcatcaaagta

SEQ ID NO: 16623 - DNA, 469 bp, Homo sapiens
atagggcgaattgggccctctaaatgcatgctcgacggccgccagtgtgatggatatctgcagaattcgcccttagcgtggtcgcggccgaggtacaaagaaatggatgcattacctgaagaacattatgatagctgtggtcgagtctatgattaacaagtttgaagaagtgagaccgaatcaagaaggcagaaaaaatccaaaaggagaaaagccatagttaccgcacagacaattgctctgatagtgattcatcattgaatcaggtgtgttgttcagttttgcatttatgtcttgaaatgctgtttaataataattagcttcaataaattatttcttagccatatttttcctgccttcttaagattcaggagaaaaataataaaactaaataacctaatattaaatatttagtccatgaaataacatcttatagaattatatttggtgagtagctacgttatatctg

SEQ ID NO: 16624 - DNA, 501 bp, Homo sapiens
  misc_feature 213, 317, 437, 480: n = A,T,C or G
ccctctagatgcatgctcgagcggccgccagtgtgatggatatctgcagaattcgcccttgagcggccgcccgggcaggtactagagtggaaatcatccaatgttggcaaaatacacactccagcctttttctttttgtttcttgtcctttatttgttttcttggtttgaaagaactgaggtcttgcttctagttgcccagtgcctgaatgcnagcagccttgaacttcctggcttcaagctcctcttgccttagcttcttgagtagcagggactccaggcacgcaccaccctgcctggctgatgactgttcctttnttctaaagtcttttttgtttgtttaaagcagtttgtggactatcggatctttatttagaatgaacagttgcacaacaacaaaatggctcttccatacaaaatcagaatggatccacttgngaaaactcaggcttttagtgtggatattgatattccagagaanagggagtagagctcttcttac

SEQ ID NO: 16625 - DNA, 672 bp, Homo sapiens
  misc_feature 541: n = A,T,C or G
atacgactcactatagggcgaattgggccctctagatgcatgctcgagcggccgccagtgtgatggatatctgcagaattcgcccttagcgtggtcgcggccgaggtacctattataagaaactcagtgttgcagcaatgtatgtattataatggatttgaaatttgccctaaccaagagtcacagacagaaaaaaggaagttaatgtatctcttgatcactatcaagatgtggtattgaaccttcaagatccttttcagggaatatgtgagatcaaaatttttatactggcactatgatgttatttgccttttcctcatattcacaagtgaacagtggagttttacagaagctatataatgtcatgacatcactgatgggtaatagaatgtgtgcttgtatattccgaaactttcagttccaatttcttcgatcaatgtaatcctcataagtaaaagttatttgaggacctcagacatttttaaaaatgtaaagggggtggggtcaggctcagtggctcatgcctgtaatcccagcattntggaaggccgaggcgaacggatcacttgaggccaggagtttgaaactagtctggtcaacatggtgaaaccccgtctccactaaaacaaaaagttttctggatgtggtggcacacatacctgtaatcccagc

SEQ ID NO: 16626 - DNA, 561 bp, Homo sapiens
  misc_feature 553, 554: n = A,T,C or G
gactactatagggcgaattgggccctctagatgcatgctcgagcggccgccagtgtgatggatatctgcagaattcgccctttcgagcggccgcccgggcaggtacgcggggaaatagcttgagttagggcacaattttatagccatacaaattcatattgaagcaagtcagcaaacgtggtgcatttcagatggaacctcaacgtgaagatatatcagttttagaccaaagcagaagtttatataaaggatataagcttttgccctgtatactcaggaattaaactaaaaagaaatctacaaattcatttatagattatttcaatttgaggcctatagatatgtgagaaaggtttctttaaggtttaatgaccaagttccatgtgagctcttacttgggaaacaaaattctcacatggcattaatatactataaattgtgatttatcaaaacattctcatatcctatctagggtgaaatttaatattgccaataaactttccactcgaaaaaagtggtaaaagtgtgcatgctaagcatgttttgttttggnnaaaaaaa

SEQ ID NO: 16627 - DNA, 405 bp, Homo sapiens
gctcgagcggtctccagtgtgatggatctctgcagaattctccctttcgagcggccggccgggcaggtacacatctgagtctaaatttcctcttctggaaggacaccacgcctattagattcgggccacccagatcacctcattctaacgtttcctctttcaagcccttatctctaaatacagtcctgtttctgagagactagaggttgggacttaaacacatgatttttgggaggataaactcagctcataacacgactcggtaaagattcatggaatggattaattaacaaagtgtgtgctctgtttagattaggtttggcttttgctttcaaggcatgggttaaccagacagtccttttggcagaaactcacttgctgttcccccttgcttctgggcaccac

SEQ ID NO: 16628 - DNA, 512 bp, Homo sapiens
gcgaatggggccctctagatgcatgctcgagcggccgccagtgtgatggatatctgcagaattcgcccttcgagcggccgcccgggcaggtacataggcgttaatgttcagacttttttgttttcacttaagtatcattgttgtgtctgaaattcttttctattggagaattaggagaaatccagttttgggcactctgcctaaggaatagcccttcttttattcctttactttcttaataaacttgctttcacttaaaacaaaaagtcactgcaagttgggctgtcttatttttttaaaaaatcatcaattaattaattctatttatttgcatggagcccatctacacaaaccactggcactttggacggggcatttagctggctttacccacacgcttctgcccttttatgcttcatcaatctctgagcccacccaaaagcctcacagttactgggactcccactgctcattattcatctccccctaaatccacatcatttggcaatttc

SEQ ID NO: 16629 - DNA, 557 bp, Homo sapiens
cactatatggcgaattgggccctctagatgcatgctcgagcggccgccagtgtgatggatatctgcagaattcgccctttcgagcggccgcccgggcaggtacatttttttttggctatttcaatttgcatatttgaaaacaactgaaaaggcaattaattcaaatctaaataacttccatgctcagaattatgtttatggtcttccagcagacaaatttatggggacgtctggggaccaggcctctgacacagaataagcatcagtctctcctagagactagttgcgggtttatttctgaaacttgtgtggaatgagggagcaaatctagaatgtttaagacctaataataatcacacactttaacacattcaaatcatgatgttgcaggagacagccttggctttgcttatagttctaagcagggctgttcccagaggatgactgtccttccgaggaaagaagacacagagctggttacaatcccaggggaatgtctgtacatggatgaaaactaaaggctcgagttaatcacattgtaatttttaaatttctac

SEQ ID NO: 16630 - DNA, 455 bp, Homo sapiens
tacgactcactatagggcgaattgggccctctagatgcatgctcgagcggccgccagtgtgatggatatctgcagaattcgcccttagcggccgcccgggcaggtacgcgggggtattaaagcagtggcagccgctgcacgcagacatgagggctaggctaaaacagtaaagtcaagttgtttggacagaaaggctacagggggcggtcctggctcttggaaataagcacttggaacagaaaggagctctacccaactacccggaatgcaggcgggtctgggactatgtgactaccaccctctaagtgaggttttgaaaataaacacttgaaagtctgctcaaaaaaaaaaaaaaaaaggaaagttccttgggcggaaaccaccttagggggaaattccaccacattgggggccgttattaggggttccaacctgggtcccaagttgggggaaat

SEQ ID NO: 16631 - DNA, 439 bp, Homo sapiens
tatagggcgaattgggccctctagatgcatgctcgagcggccgccagtgtgatggatatctgcagaattcgcccttagcgtggtcgcggccgaggtacagtatattaaagcaagcagctcagcctctcactagtggtgagatgtatgaaaatcctggcaatgccagggggaaaagaatctatgagtcttcccttcggacatctctcctatttcttgcattagttttttcagggttaaatacacatctcacagaagagctagctatatatgggctgggtggtcttcagtgaatctgcaaatgtatcaaacaaaaatagcaagctggaactggaataaagggtcagggaatacaggaaagaagaaaacaaagggttctaggtgttcagaagtcaaatacatctcaaggctaaaaaaaaaaaagaaagtacctgcccgggcg

SEQ ID NO: 16632 - DNA, 375 bp, Homo sapiens
gactggggccctctagatgcatgctcgagcggccgccagtgtgatggatatctgcagaattcgccctttcgagcggccgcccgggcaggtacatacaagtgcgtgtttgttattatgaaggaaatcctatcactaaatacagaagctactcacagaacactgattacttcagtggatagaggaaaaatatcaagtctatttttagttcttcaaatcaagttaaagattgacaacatgactaatctcttttgtgatgtgttagaagactccctctacctacctgttaaaaaaaaaatgactttttttgcaattttttgctgtttccttaaaactaaagctgtgttcttctgttttgaagggtttccgcccccaaca

SEQ ID NO: 16633 - DNA, 453 bp, Homo sapiens
gggtaccgggccccccctcgaggtcgacggtatcgataagcttgatatcgaattcctgcagcccgggggatccactagttctagagcggccgcccgggcaggtgtcgacccacgcgtccgtggagacacacttataatctcagcactcaaaaagctgaggcaggagaattgcagcaggtccaaaggattgtctgggccacatagtgattcgttttctctctctctctctctctctctctctctctctctctctctctctcacacacacacacacacacacacacacacacacacacacactaaagtgtagctacttgaaagacctcggccgccaccgcggtggagctccagcttttgttccctttagtgagggttaattgcgcgcttggcgtaatcatggtcatagctgtttcctgtgtgaaattgttatccgctcacaattccacacaacat

SEQ ID NO: 16634 - DNA, 333 bp, Homo sapiens
agattcgcccttagcgtggtcgcggccgaggtacttttttttttttttttttttttttttttttttactaagttataaaaaaaaaccccatcaccaaagacacctgtgcacaagtgtctgtcccttctgtcaccaacctagggcactaactcctaacactgggaatggacacttgaaggaagatcagtaattatcctgtcttttctctacaaattgcaagtcagggaaaccttgttgattagggaaagttctttacataagaattcctgcaagtaagtgagtaaagaatgacagtttaagaattgtcccagcctggccaacatagtgaaacca

SEQ ID NO: 16635 - DNA, 472 bp, Homo sapiens
cctctacatgcatgctcgagcggccgccagtgtgatggatatctgcagaattcgccctttcgagcggccgcccgggcaggtactgaaaaccacttccagagtctaaagcagctcaatgtcatctctgggggaattagtgttcccctcatttagcaacctccataccacaaggtctctgtctgtagttactgggattatccagatacactatcaatgatacaaattcataggagtattaatgcatttctttaaacacaacttgattaagaagcaaatatgttaagcagttttctttttctgctgctaaattacagttagacacttcagtatcttctctttacatgtgtatataaattagtaagaacctgcatccaaagcaatgtagtgtgtgtatgtatctatatatatttattctaactcaacacttcaaaagcctttttgagttacaacaatattttagtttgcctcatct

SEQ ID NO: 16636 - DNA, 492 bp, Homo sapiens
  misc_feature 336: n = A,T,C or G
tacgactcactatagggcgaattgggccctctagatgcatgctcgagcggccgccagtgtgatggatatctgcagaattcgccctttcgagcggccgcccgggcaggtacaaatctatcttaatgttactaacaacagatcagcgacaacaaaaacctcccaacattccaatatttaggtatttattggtgtccgagtttcctggcagtgtatgaatacatgggtcgaaatgaactggcctcatattatttcagggtagcatggctatgattattaaacaccacagacacccatttgcttatttttgatttttgacattctaagacatagactttntaaaaaatcttcttaaggggacaaatctcctaatttaagacctagataaacccaagatttaccagtttttgaaaacagtgatgttacttaaattcacaagaaacaccattctctttcagatataattacttcaatggagtgcgaggagggggttaa

SEQ ID NO: 16637 - DNA, 379 bp, Homo sapiens
agggcgaattgggccctctagatgcatgctcgagcggccgccagtgtgatggatatctgcagaattcgcccttcggccgcccgggcaggtacttgcaggaagatggaattatgaaggaacagcattagttacagttggagaagatggacaaataaaaatttggtcaaagactgggatgcttagatcaactttagctcagcaaggaacaccagtgtattcagtagcgtggggccctgattcagaaaaggttctttatacagcaggcaagcagctaatcattaaacctcttcaaccaaatgctaaagttttgcagtggaaagctcatgatggcattattttaaaagtagattggaactcggtcaatgatcttattttatct

SEQ ID NO: 16638 - DNA, 563 bp, Homo sapiens
  misc_feature 254, 262: n = A,T,C or G
ctagatgcatgctcgagcggccgccagtgtgatggatatctgcagaattcgccctttcgagcggccgcccgggcaggtacttttttttttttttttttttgcttatcttatttttgaaatgatttattaaatggacactttaggaatttgagagaagcgagcttttcccacttcagatcacttttgtgtaccgtctgacaagagaacaatattctttcacaagggacctcaaagcctctgggtgtggaaaaaancctcagtnggtcattccgctcattcacctcatgcgagctggatcccactggtgcagattgactttgtgagcgctatgtgatttgcccacggctcaccttctccagtgcgtcattcagggcatccggtgtctgtattttggcaacatttgcaatggcactgtgaagatgaaaagaaactttgaacaggacttaaaaaattttcccactgaaaaggccacatgatttatagagggctgtctctccagccttttatgctttcactttgcttaggaacatctagaagacacagattttgcctctgtgtacctc

SEQ ID NO: 16639 - DNA, 464 bp, Homo sapiens
ctcactatagggcgaattgggccctctagatgcatgctcgagcggccgccagtgtgatggatatctgcagaattcgcccttagcgtggtcgcggccgaggtactccattaacattactatgacccccgggcaccctgcacatatagcggcagtccccaccggcgtcaccaaaaccttggatcatcttggtgtataaatgtcagcatcagctggctggcaggtaaaaacaaacagaacacaacaacttgactgtgtttcatttgttctgattatggctaccaaggttcggtgaaacccgagcagggacaagaaataaaaatgccattttatttggggagcccgtatgtgggcagtctgtccttacacaggtttctgtaagaacagattaagctagtttgaaagtcgtgccagattagaaaacttgtaaaaatctaaaacgaaatgttcctcaaaaggatttaagt

SEQ ID NO: 16640 - DNA, 705 bp, Homo sapiens
tacgactactatagggcgaattgggccctctagatgcatgctcgagcggccgccagtgtgatggatatctgcagaattcgcccttagcgtggtcgcggccgaggtacctccgtgaatgtgtattcctaaattcatgctggctgaattcaggtgtaattagagactgagacccataatgaggggcaaggagctaattactcttgtcggtaaccagctgtggccataagtaaccctgttttgacccaattaatagtaaatccaatttttaatcctacagacagttgatggtgcactcgtagctgcaaaatgaaggacattaaatttggctgtgacattgagtggttacacagaagacctgcttctacaacatttggaaacattgtgaaacattactattcagttgctatttttccatctcaaaatatttttttttagttgctgctcacttatggccacagaacagtccctttttgagtaaagcagcaaggttgcttaatgacatgctatgtggttaacaagattcaactgccacatcaaggactttaaataatttcaagattttaaatgtatttatgaaatgaactcattacagcagctaatcaatgcaaactttgtcctttttctttgtctttctaaaagaaactgaatttaatttaaatttaaattacagtgtctaaaacttgggaaaatattttaaattggaat

SEQ ID NO: 16641 - DNA, 497 bp, Homo sapiens
ggggccctctagatgcatgctcgagcggccgccagtgtgatggatatctgcagaattcgcccttcgagcggccgcccgggcaggtaccttaaaagaaatacattttacttgaaaatatttatcttttttaaataagcaacttatttttgctataacaaatttatagatctaatatgaaatccacaggtaacatttaattttaactaatatgatgaagtcagttgaaaatctttgagtttttttttttttgaaaaaatttaactttttcccccaggctggaggacaggggcgtgattttggctaactgaaaccttgggctccggggttaaaatgattctcctgtttaaccctcccaagtagctgggattacaggcccccaccaccacacaaagctttttttttttttggatttttaaaaaaattgggggttcccccttttaacccgggggggccaaaaaccctggacctacggggaacccccccccttgggcctccaa

SEQ ID NO: 16642 - DNA, 459 bp, Homo sapiens
gggcgaattgggccctctagatgcatgctcgagcggccgccagtgtgatggatatctgcagaattcgccctttcgagcggccgcccgggcaggtacgcggggactgctgagcataaatgctttaaagtgtcagcaattgatgtgtggagagaagtatgactgcattacagcttaaagagctttcacattcaggtctctacaggagaagacgagatcgccccgatagtttgagagtaaatgggttaccagaggaagagctaagcaacatggccaacgccctggccagcgccacttgcgagcgctgcaagggcggctttgcgcccgctgagaagatcgtgaacagtaatggggagctgtacctcggccgcgaccacgctaagggcgaattccagcacactggcggccgttactagtggatccgagctcggtaccaagcttggcgtaatcatggtcatagct

SEQ ID NO: 16643 - DNA, 501 bp, Homo sapiens
  misc_feature 442: n = A,T,C or G
ccctctagatgcatgctcgagcggccgccagtgtgatggatatctgcagaattcgccctttcgagcggccgcccgggcaggtacgcgggtatttaggcggatggtatgagggcctccattcacactcttgccctggaactggcaaatgtgaatggaaggctgagtaaaatcatagttttgtgttgttggcctttgagtgttccatctctcttacaattttagtttgtcacaccttgcaccttgtatgtgtaagtaaaattaatggcataggaaagaaaccaaaagaagtgaacaataagagactaaagaaactctacaggccgggcatggtggctcatgcaagtaatcctaacacttttgggaggccaaggtgggtggatcacctgaggttgggagttcaagaccagcctggccaacatggtgaaaccccgtctctccaaangaataaaaaacaggaattaaaagaaaagtcctcggccgcgaccacgctaagggcgaatt

SEQ ID NO: 16644 - DNA, 559 bp, Homo sapiens
cgaatggggccctgctatatgcatgctggagcggccgccagtgtgatggatatctgcagaattcgcccttcgagcggccgcccgggcaggtactggggggatgcacttgagtgccatttctgatactgtcattgtatgactgctgatgctcgtttatgttgttctttggaagctatagtgagcctgatgttttcacattttaaaaaatgcttcctgagacttctttaagctcctctaacttcttcagtgcatttgggatcaaacttagctcttagatcagcaaacctgacttgcttctacttttgcaatttttcaggccttaccatatttcttatctctgtcttcccacctgataggaaaatcttgcagatttgaaacagtggtttctggcctgctgctgcaacaaattccctatgtttatttaagaagtcgggcctatgcttttaacctacaaatgatgagtaatttacttgcaatgaacacaggtagcctgctgctgtttataacctgttgaggatatttatagcaggcaggaggcaggcctagtgtgttattgaca

SEQ ID NO: 16645 - DNA, 654 bp, Homo sapiens
tacgactcactatagggcgaattgagccctctagatgcatgctcgagcggccgccagtgtgatggatatctgcagaattcgcccttagcgtggtcgcggccgaggtacaatgggcagtgtttggatccttccctggaatcagtgacgaatgcatggtgttctgcccaatgagaatgaaccatttgaacaaatcaagtaacctcaaaggtgtaattctcttggcatcgttaatgattattggtaggagtaaataagtgcaattcttttgttgttcttttttggagatgaggtgtctctgtgttgcccaggctggcctcaaatccctgggcttaagcaatcctgctgcctcagccttgagtagctgggatcacagacatgtacgcggggagctcaaagcccgcaagagggttctggaagcaaaggagctggcgttacagcccaaagatgatattgtagaccgagcaaaaatggaagataccctgaagaggaggtttttctatgatcaagcttttgctattcatggaggtgttagtggtctgtatgactttgggccagctggctgcgctttgaaaaacaatattattcagacctggaggcagcactttatccaagaggaacagatcctggaaatcgattgcaccatgctcacccctg

SEQ ID NO: 16646 - DNA, 510 bp, Homo sapiens
atatggcgaatggggccctctagatgcatgctcgagcggccgccagtgtgatggatatctgcagaattcgcccttagcgtggtcgcggccgaggtacagcctgcagaactatgagcaaaaggcacctcttgtcttgataacttacccagcctctggtattcctttccagcaacacaaaggggctaaggcagtgacaacattcagaatattcttcatttgggggatgagtattgactggcaaggaccacatcagaactttgtggcatgggggaaaatgttctctgtctttaactgggtgttactttacaattataattatattaaaatttattaagctgtgcctttaggtttttttgcagtatactctacgcaaattttacctcagtgaagaactgttagcatacaacagacagataacaaacactcaaaaatgtgaaaattgacagaaaataggtaacaaatatttagcatataaataagagggatccgttgagaagaaaccaaaagcaa

SEQ ID NO: 16647 - DNA, 334 bp, Homo sapiens
tctgcagaattcgcccttagcgtggtcgcggccgaggtacaaaattaacaggattttaaagggaaatgaggaaatcacaaagagccagtgttagaggctgagtgaaccagagatctgaccccaacacacagcacacacccagatatgttgcctaatatgtgtaagggtttgttttttgttttaacttccaaactaaaacccctgatgatttcagaacactgtaacactggacagtttctcacagcatggttgtgaggatgaagtaaaaagagaatgtaaagaataagtgttttctttgtaagtgtggtccaggtatcacttatgcatatgcatg

SEQ ID NO: 16648 - DNA, 386 bp, Homo sapiens
atatggcgaattgggccctctagatgcatgctcgagcggccgccagtgtgatggatatctgcagaattcgcccttggccgcccgggcaggtacgcgggggtatttcggggccctaggcgcgcgagcggtcagcatccggaatctggcccctgcaggcgtggggttccacgtgggaggagacttgaatgaaaattctgtggagaatcttcaacagaaaacacttcaggatctgttacatgagctttcctcctgactagttttggaaggcatggccagtacctcggccgcgaccacgctaagggcgaattccagcacactggcggccgttactagtggatccgagctcggtaccaagcttggcgtaatcatggtcatagctgtttcct

SEQ ID NO: 16649 - DNA, 409 bp, Homo sapiens
atacgactcactatagggcgaattgggccctctagatgcatgctcgagcggccgccagtgtgatggatatctgcagaattcgcccttagcgtggtcgcggccgaggtactacaagaagttctccattcctgatctagatagacaccagctacctctggatgacgccttgctgagctttgcccacgccaactgcaccctgatcatctctgtaagattcacccagacttcttggacactgcatcagggagagtcttcctctttccctgcccacttcccatcccataagagtcctcagttctagccccaagccctagggtatgcttgtgggagaataggcatctctaattcagcatgggggagagcagggagggggctcaggaaggagcctgaccatataattcacagctag

SEQ ID NO: 16650 - DNA, 402 bp, Homo sapiens
actactatagggcgaattgggccctctagatgcatgctcgagcggccgccagtgtgatggatatctgcagaattcgcccttagcgtggtcgcggccgaggtaccttttaactatgtcaaagatagcaaatacagttcatctgtgtcaactttaatcagttgatagtggctgtctagcacattgtgaatggggtcaatcagaaagaatgtcattagatcaattagctattactttatattacctaaacttagtataatttaaaatttgataatgagtttattcagtttataaagagttctgtttttggcatggcctagtagctccattgcacaattccttctgcagaaaactactataacctatgaacaaaataggaaaaataactacccgaaagcactggag

SEQ ID NO: 16651 - DNA, 414 bp, Homo sapiens
ctactataagtactatagggcgaattgggccctctagatgcatgctcgagcggccgccagtgtgatggatatctgcagaattcgccctttcgagcggccgcccgggcaggtacatgctaaatttagtttagaaaattctgggttaattcgataaatatttaaggaacatcaattacatgccaggctgtctactagatgcagagtaagacagatttataccagaattttcttaaagcctcgaacaagctactgttcacaatgagcacagtgaccatatatcctaatttgctgtagacagccccagtttacaggcgctattccagcattaatatcatctctttttacctctataatcctacatatgactctctaagaggtgtgtgtgtgtgtgtgtgtgtgtgtgtgtatgtgtgt

SEQ ID NO: 16652 - DNA, 558 bp, Homo sapiens
atggggccctctagatgcatgctcgagcggccgccaatgtgatggatatcagcacaattctcccttagcgtggtcgcggccgaggtaccatttagagtgcaaacaacctgctactttcattcctaataacgtcatacttactaaacactagttccactctctatgcatgtcccaccattgccacatttcattaaactgcagggagaagcatgacactggccaacactgcgtccagcatttgggtggccctcaggatttcccagtcctctgaaatggccatccttctcagtgcgaacttgaagagtgaaaatacagccttgaagaaatgcaaaaacacttcgtgttaacaaacagaagaaatagaaaaaacaagaagaaggttatttttcatttttaaagtagaagtttttcaaaataaagtaatacatgtaaattttaaaagaaatataagaatacagaaatgcgcagagaaatttttttttaaaagtcattcatgatatcatttcacagcagacaactattaacattttggtgtgagtgtgtgtgtgtggtattttt

SEQ ID NO: 16653 - DNA, 531 bp, Homo sapiens
gggcgaattgggccctctagatgcatgctcgagcggccgccagtgtgatggatatctgcagaattcgccctttgagcggccgcccgggcaggtacctttaaaaatacatcttttaaatgaactcttactgagagaataactactaaaagtttaattgtagttttttattataatattttgctttgattttatactaaaaactgccaaccagataacatctaaatgtatctttttcaatatgacaaagttacataagaagactccccttgcacgtaaagaaaaatgcaattattttctattctgaatctccagactgctgttttagaaaatcatatctgattatttgctcagcagaagattattgagttgatttagctgtgattttacttaacaaagcttcaactgcattcctactgtggagtccgaaaaaggtagagagatataaatgatacattcaaactgtgatttttgtgaacagggccatcgatgcacccctcggagctaatagcggagatgagaaacagtgggttt

SEQ ID NO: 16654 - DNA, 438 bp, Homo sapiens
actatatggcgaatggggccctctagatgcatgctcgagcggccgccagtgtgatggatatctgcagaattcgcccttagcgtggtcgcggccgaggtacacctaggaggtaatactagaaacaattgggtatacccaaccctcataccacaatgcaaaagtaacattaattaacactgtcatgaaatgcagttctaccaaaacaataaagttgtttagtggagaaaatattttattttgctttcatttttaattttaaattaagtaaaatttgaaagttcttttgcactagcccacctatcaagtagtcagcagccacgtgactggtatagtggctctggccatcttttcctcatgtggaagaattttctatctttaataaactttttctttgttttttttttccagatggagtttcgctcttgtcccccaggctgg

SEQ ID NO: 16655 - DNA, 462 bp, Homo sapiens
actatagggcgaatggggccctctagatgcatgctcgagcggccgccagtgtgatggatatctgcagaattcgcccttagcgtggtcgcggccgaggtcctttttctttcttttttttttcccctttttttttttttttttttttttttttttttgtttggacaaaaaaaaaaaaaggttttgcggaactgaaaaaaaacccgctgaaaaaggggtttcttccaaaaaacatcccccccccggcgggggggcttaaatgtaaaacaatgcatttgggctgaaaccaaacaccccctttttcccccggggggggctgattaggggggggacctcccccccccggggggggggcaaatttaattccccccagggggccaagggggccctaatcaggcggaaaagggaaaagaaaaattttaattcaaaaactttaaaacctgatcaacttaaaatgaaactgcc

SEQ ID NO: 16656 - DNA, 408 bp, Homo sapiens
tgatggatatctgctgaattcacccttaccttggtcgcggccgacgtacacagagaaagcttgggtgatggaactagaatggctgattcaacaacaatgttatcaataagtgatccaattcatatggtgctaatcaaaacagacatatttggtgagacgactttagtagcaccatattttctggaatggcgatcggttttgggctcagaaaatggagtgaccagtctgactgtggaacttatgggtgtaggcacagaatcaaaagtttctgtgggaattttaaatataaaacttgaaatgtatccaccactcaatcaaacgttatctcaagaagtagtgaacacacagcttgctttggaacgtcaaaaaactgcagagaaagagcgattatttcttgtatatgctaag

SEQ ID NO: 16657 - DNA, 512 bp, Homo sapiens
ccctctagatgcatgctcgagcggccgccagtgtgatggatatctgcagaattcgccctttcgagcggccgtccgggcaggtacaatcttttagactaaaatggttttgctttgaccccaataatcacaattattattataacttcggaaagatttcaatcattcattcactcaatcattcaattggctttttttcttaattatctcatctgaacagtgttgctaatggcactgtgaaggattttataaaaggaggaaatataatcgttctctcatcaactgtagtagaattggagagaaaagaaaaccttgaagaactaattgaataatataataaaattactgttagcaatcataccttagtagtgtgaagggaaaagctatttctgcacaggtaggaagcagtattaacaatcaaatacaacttttaggctcagaatataggttcaaattatgtgttgtgagaataatgagaatattcagaataaaggctaattcttggaaatggattt

SEQ ID NO: 16658 - DNA, 297 bp, Homo sapiens
gcgaattgggccctctagatgcatgctcgagcggccgccagtgtgatggatatctgcagaattcgcccttagcgtggtcgcggccgaggtactcctatgatgtaatactaaaaacaattgggtatacccaaccctcataccacaatgcaaaagtaacattaattaacactgtcatgaaatgcagttctaccaaaacaataaagttgtttagtggagaaaatatattattttgctttcatttttaattttaaattaagtaaaatttgaaagttcttttgccctagcccacctatcaaa

SEQ ID NO: 16659 - DNA, 511 bp, Homo sapiens
  misc_feature 432, 433, 434, 435, 437, 454: n = A,T,C or G
ggggccctctagatgcatgctcgagcggccgccagtgtgatggatatctgcagaattcgccctttcgagcggccgcccgggcaggtacgcggggtatcatttatcagccaatatcatctgtttgaaaattacctgagacatagaaaacagttggggaggaagtcctgagcaacaaatagaaatgtctaaatgtggagattaagtagacacatatgtaatacaactagtggcttagagaaggtattcaataaatgatcactatattattatcatcattattgcctctgtatggctacacagagaacctgaaatcactaacaaacttatttagccttaaagcagataagaagcaatcagctgaaatggaggacacattttgctatagtcaggcctgcttacaatagcaaagagttacagctagcattctaacannnnanaaaaaaaaaaaaaaaanggtttcttgggccggcacccccttggggggaatttccccccccgggggggggttttt

SEQ ID NO: 16660 - DNA, 605 bp, Homo sapiens
  misc_feature 488, 489, 490, 491, 492, 493, 495, 496, 497, 498, 499, 500,501, 502, 505, 506, 507, 508, 510, 512: n = A,T,C or G
acgactactatagggcgaattgggccctctagatgcatgctcgagcggccgccagtgtgatggatatctgcagaattcgcccttagcgtggtcgtggccgaggtactacgcaattttggaggctctatcatcgtacacattggagacacacataatagtttagacagcaatttttcaattgtttctctattttttccacatttatatcttactaatagtaacacaaccattccccatgaacatgctaaactttgaatgtgtaaatataaacaatattgttgtaatagtgtttttatactgtcagctatactgggtgtaagtccaaatgcagcaatacaccaatcgcaacacgttgatttattacttttaaatggtcttactaattctgtaaaactcaccccgtataactctttaaattttgctaacattgctgcctttgcattactagtttttagtacctgcccgggcggccgcccgggcaggtactnnnnnntnnnnnnnnttnnnngntntttcgatgggtaaaaaaatttgggttttattgtttttgctaaataatactaaaaaaaaatttctttttgaaggcagggcttgaattatttaat

SEQ ID NO: 16661 - DNA, 466 bp, Homo sapiens
ctatatggcgaattgggccctctagatgcatgctcgagcggccgccagtgtgatggatatctgcagaattcgccctttcgagcggccgcccgggcaggtacgcggggtggactgaacaaacatttattaaaggagtaattgaataagtgtctgggcaactgaatgttacagtaggtaaactgaaggaattcaaaggagtgggggaagggggagattgagagagagttggaatgattaggtctttacctgcttaaggaaaaggtaaagcttattaaaaattgttatctctgtaatagaagcaccttgagttaaaaactttcttctttaaatgattctgaattttaaaagtttcaacatggaacttacatttaatgctagtaaaaatgattacttaaaaaatgctggccctcaacaagagctgttgtaagggtgagtagggtttggataaagaaaaggagtgagtttc

SEQ ID NO: 16662 - DNA, 338 bp, Homo sapiens
gcagaattcgcccttagcgtggtcgcggccgaggtacgcggggacttctagcctgcaaaactgtgagaaaataaatgttttcaacctcagtctgtggtattttgttgtggcaacccaagcagactaatacactggccatgggcaagacgccctgaccacagtgatcttgacaggggtgtgggcgcaggacatgctggggcatcttgaagctactgcaggccccacagaatctagagggtccagaataaagtctttatccctccatgagctatctctttctgttgcacatttttttctgcattaaaacagtttgattatttgccccatgcccatatagg

SEQ ID NO: 16663 - DNA, 402 bp, Homo sapiens
actactatagggcgaattgggccctctagatgcatgctcgagcggccgccagtgtgatggatatctgcagaattcgcccttagcgtggtcgcggccgaggtaccatcctccgctttccatttgtggggagtgggagattgattaagatgccttttatatgaattgacagtattggcattttataatatacttttttgttcccagatatctactctttatgtttcacatttgcctggtttctaagttttctaggtgtatttctaaccaaatcagaaaactttattatcccaggttaccttatcttggaaccagtttatagaatcctgttgagggaggatgataatttaaatagctgatacttcatgagtatgcctgttagcataagcatgcttccaacatgtg

SEQ ID NO: 16664 - DNA, 478 bp, Homo sapiens
ggcgaattgggccctctagatgcatgctcgagcggccgccagtgtgatggatatctgcagaattcgcccttagcgtggtcgcggccgaggtacgcggggagaccaacttaacactgaacccattacttttccaagaccagaaaaaaatattacatgaacaggaactactttccttcagataagaattcaagctttgacattgtaaaccacagacgaattggagcttggcattgaaaggaggtgttctgcaatgattttttttcttgtttagagaagtttacttctacaagaagaaatctgaaaaatgacaggagcaaagaggaaaaagaaaagcatgctttggagcaagatgcataccccccagtgtgaagacattatacagtggtgtagaaggcgactgcccattttggattgggcaccacattacaatctgaaagaaaacttgcttccagacactgtgtctgggataatgttggca

SEQ ID NO: 16665 - DNA, 591 bp, Homo sapiens
atacgactcactatagggcgaattgggccctctagatgcatgctcgagcggccgccagtgtgatggatatctgcagaattcgcccttcgagcggccgcccgggcaggtacaaaatggaacctacattaatcatctaaaacggcattatcataacagacttgcctgagccattacttaccacaatgaattggtatgacacttctaacaaggtcagaaaaatcagattctgttttcttaatattgaggatctttcccactttccctgagctaatgagacacaggtctgtggcaaatacatttagtattttcctacacatgaattcctaacaaaaccaagcaagagcatacaaagggaaacatactttagctaatttaaaggtgtcttatgttattttgcttattgaaaaaactgaaaaggtagtaaggaaaagatgtaatgtggtaatagcaaattgcatctgtggtctctaatgaataatctcgcttccagtaaaaaaaactatcaaaagagcttaaactcaaggtaaacaaaaggatgaaaatattaaaataagagcagaaatcaatgaaacagaaaacagaataaagaat

SEQ ID NO: 16666 - DNA, 376 bp, Homo sapiens
ctatagggcgaattgggccctctagatgcatgctcgagcggccgccagtgtgatggatatctgcagaattcgcccttagcgtggtcgcggccgaggtacttctacctttattataatgacttcttatagattcatttgcttatgattatacactgtttgggctggccagtttttcatgcatgcagcttgacgattgagcacagtcaggcctttgtattaaaaatgaaaaatgaaaaaacaaattcaaaacctattcaaatgggttctagttcaatttgtctaggataaaatggcataactgggttactgaaaaccaacacatttaaaaatggtttacctgaggatgacatgcataaaaatgggtgaaggataaacc

SEQ ID NO: 16667 - DNA, 594 bp, Homo sapiens
ctatatggcgaatggggccctctagatgcatgctcgagcggccgccagtgtgatggatatctgcagaattcgcccttagcgtggtcgcggccgaggtacaaagactagattggcttaaatatttaaatatccttacactttttttttaaaagatattttcaaaatatatattttgagattcttttctataagcaggttgctgcactctacacaaaggtttatttgttaaataaacagatgaggaaactatagcccactgtgtttttgttagttttattgaaacacagttttattggaacacactcatttatttgtatattatccacagctgctttcaccctacacaggcataaatgagcagttgtggcagagacagtatagcctacacaatttaaaatatttactctttgacctttaaagaaaagatttggcaacccccagattaaaagttttaatggcggccgggcatggtggctcacccctgtaatcccagcactttgggaggccgaagcgagcagatcacctgaggtcaggaattcgagaccagcctggccaacatggtgaaaccccgtctctactaatatacaaaaatca

SEQ ID NO: 16668 - DNA, 579 bp, Homo sapiens
atggggccctttagatgcatgctcgagcggccgccactgtgatggatatctgcagaattcgccctttcgagcggccgcccgggcaggtacaaattagccattcatgcaacaggcagtgttcaaagaggcttcaagttcaagggagctcagagttccattttccaccgaaaagctttaaacagactgaatattagtggacatttttgaatagttttaaaacataattttacacctgatcttagccagaaggctgagaagtgataacaaaagtgtcagtattctggagagatattcctcagttgttatcacttaccacagtaactaacatcgatgttggacatgctgtttttataacaacattctttttttatattattctttaattttataagacttcataggacacaggcaatacaaatctgctatgttattcctttttgtctctccttgtaatttacaacctgaaaatgttgactgtacctcggccgcgaccacgctaaaggcgaattccaacacactggcggccgttactagtggatccgagctcggtaccaagcttggcgtaatcatggtcatagc

SEQ ID NO: 16669 - DNA, 520 bp, Homo sapiens
ctatatggcgaatggggccctctagatgcatgctcgagcggccgccagtgtgatggatatctgcagaattcgcccttagcgtggtcgcggccgaggtacgcgggtatatcatgatcttacctgttgtttgactatgaaaaagaaatttgatgctgatccagttgaattatttgaaattccagtaaaagaattaacatttgaccaactccagttgttaaagctcactcatgtgactgcactgaaatctaaggatcggaaagaatctgtggttcaggaggaaaattccttttcagaaaatcagccatttccttctcttaagatggttttagagtctttgccagaagatgtagggtttaacattgaaataaaatggatctgccagcaaagggatggaatgtgggatggtaacttatcaacatattttgacatgaatctgtttttggatataattttaaaaactgttttagaaaattctgggaagaagagaatagtggtttcttcatttgatgcagatatttgc

SEQ ID NO: 16670 - DNA, 538 bp, Homo sapiens
  misc_feature 476: n = A,T,C or G
gcgaatggggccctctagatgcatgctcgagcggccgccagtgtgatggatatctgcagaattcgcccttagcgtggtcgcggccgaggtacgcgggattgtaatccaagaagactgatctcttctagtgattcagattggttttatctttgatttttagatttcatctgcatttcttgattaattactcattttggtttagttgacagttgagcaaaaaaaaaattactttctccggagtaaatcatctgttttatttatgctttctatgttgttctatgttgtagtgcagtagcacattaggaggtatctttgtggagtgaaaagatttttgtggctggacccggtggtggttcatgcctgtaatcccagcactttgggaggccgaaggcaggtggttcacctgaggtcaggagtttgagaccagcctggccaaaatggtgaaaccctgtctctactaaaaatacaaaaattanccgggcgtggtggcgggcgcctgtaatcccaactactcgggaagctgaggcaggaaaattgc

SEQ ID NO: 16671 - DNA, 519 bp, Homo sapiens
cactatatggcgaatggggccctctagatgcatgctcgagcggccgccagtgtgatggatatctgcagaattcgccctttagcggccgcccgggcaggtacataataggtgcataacacatcttaaagttgtttaataatagataagaaccaagaggaaaaagaaataagaaaagatgggggaaaggaaggagaaaataggaaatgaaaggattaggacttgggcatttatattaatacaaaatggtgtaaacggcctgaatatcactgtagtagtatcatgcgggggaaagtgtgatggaaaataggtttaaaaatcttaatttttaaaactttagtaagctttatttatattttttaggattttctgaacatagcatgaagggtttagattcatttttctgaaaaacgattaaaaaaactaccaatttttttttgagtgcccacacttgccgttgtgctgtatacatgattttaccttaatcctctataaggtaggtgctaattgtctccattttat

SEQ ID NO: 16672 - DNA, 728 bp, Homo sapiens
  misc_feature 713: n = A,T,C or G
tacgactcactatagggcgaattgggccctctagatgcatgctcgagcggccgccagtgtgatggatatctgcagaattcgcccttagcggccgcccgggcaggtattaacaatgtcccagcatcttcctctacagctacagcttccacacagacgcagcattcgggaatgtccccgtcacctagcaacagttatgatacttccccacagccttgcactaccaatcaaaatgggagggagaataatgagcgattatctacatccaatggaaagatgtcaccaactcgctaccatgcaaacagcatgggtcagaggtcatacagttttgaagcctcagaagaggacctagatgtagatgataaagtggaagaattaatgaggagggacagcagtgtgataaaagaggaaatcaaagcctttcttgccaatcggaggatttcccaagcagttgttgcacaggtaacaggtatcagtcagagccggatctctcattggctgttgcagcagggatcagacctgagtgaacagaagaaaagagcattttaccgatggtatcaacttgagaagacaaaccctggcgctacactaagtatgagaccagcccccattccaatagaggaccctgaatggagacaaacgcctcccccagtctctgccacatctggtacctcggccgcgaccacgctaagggcgaattccagcacactggcggncgttactagtggatc

SEQ ID NO: 16673 - DNA, 377 bp, Homo sapiens
agggcgaattgggccctctagatgcatgctcgagcggccgccagtgtgatggatatctgcagaattcgccctttgagcggccgcccgggcaggtacagggagtatcaaacggtctgggttctacatgtgctcttccctgagactgggttttctaatttataaagcaaagagtttagagggatgatcttcaagcctcttgtagttctagaattctgtagttctgggagtttgtaaactattaagttttcttttagcccagaacttccattttcctgctctctcgtgtctgctctagactcagctctagctcggctaagtgtggagctctctgctggggagatccctagaagctttgaaggagacattgtgaggctgga

SEQ ID NO: 16674 - DNA, 616 bp, Homo sapiens
tatagggcgaattgggccctctagatgcatgctcgagcggccgccagtgtgatggatatctgcagaattcgccctttcgagcggccgcccgggcaggtactggatgttagtatgcatggtggaccttttttgggccttttattacttgattgcaaatcattcttcattgttgccaaatttatggaaggacattgctccctgaggtgccatttcctttcaggtctgtaactgaacatgactgatggcaccagagtaacagttgcttattacagcgttcactgagctgtgattgctccaatactttatgttggcagatgtgtttccctaggaacagcatctctgagacagaggtcattgatcaaaccccctctggctgttccattatgtgcaaattattgctaaaagcagagaggctgcaagggaggtggtgtgtacaaaagatctcattgaaaatttaaagtcatcataatttgttgccataaatatgtaagtgtcaataccaaaatgtctgagtaacttcttaaatccctgttctagcaaactaatattggttcatgtgcttgggtatatgtaaaatcttaaattatgtgaactattaaatagaccctactgtacc

SEQ ID NO: 16675 - DNA, 686 bp, Homo sapiens
actatagggcgaatggggccctctagatgcatgctcgagcggccgccagtgtgatggatatctgcagaattcgcccttagcggccgcccgggcaggtacttaaccagagttcgtggattttgtggactttaattggactcaattcactctgtgagcatcctggattgcatcgatgaacactgaattactgtaagaacatagacaggctctcactatgacctggacagtttaagttgctacactggtaacattctagtatcaaggagaattccattcatcatgacattcacattttacttttctcaatggaatgcttgcttcaggcttaccaatcacacctagaactgaagtctgagtgagtggtattaataatttttctgaaaggaataaaattggaatgtttctaaatgtggagaaattcttcagtatcctaataatatacccaaatgctttttctgggagagagcattcttttacaaaagaactttccctataaaagcatcacagtataatgtgaattggcattaaaatctttggatgcttttgcattattaagttcatggagaaatatattctttttactatgtatgtattaataaaaagtgggcaaagtaaagtttgcaaaatttagtttctctaaatttttgcacagtgactgcagctggctatgggtcagctcttaatac

SEQ ID NO: 16676 - DNA, 389 bp, Homo sapiens
  misc_feature 323: n = A,T,C or G
gactactatagggcgaattgggccctctagatgcatgctcgagcggccgccagtgtgatggatatctgcagaattcgcccttagcgtggtcgcggccgaggtactgggattacaggcgtgagccctgcacccagcccagaccttcttcttatcagtcaccaactgagctttccctgggaccacttcaaaaatcggctgttcatgagccccggtgccaaatgcccggcttctaagagatacatgaaaaccctgattcctcttttcatggggaagacgtctctgtccacccagtggacagcacaaacagctccccgcgtactttnttttttttttttttttttttttgggttttttttttttttgagtttcacattaactggaactttatt

SEQ ID NO: 16677 - DNA, 302 bp, Homo sapiens
cgcagtgtgatggattctgagaattccccttcgagcggcgccggcaggtcataaatgaagagagttgaagtaatttgaaagactttgaccacagcccggtaatatgtctcatcctcggccttggctagggctcgaccacttcaacaaagccccaaagaggagtcgctacactgtaccttgaaaaggccattaaaatccataactgatttccaagctggtgtgttcaaggggaggacggtgtgtgggtgcgcccttacagcctagactttggtgccgtccctctaccgaatcttcacaagaga

SEQ ID NO: 16678 - DNA, 393 bp, Homo sapiens
  misc_feature 316, 366: n = A,T,C or G
tacgactcactatagggcgaattgggccctctagatgcatgctcgagcggccgccagtgtgatggatatctgcagaattcgcccttggccgcccgggcaggtactcaaaacagcacaacatacagtctaaaatcaagatttctgtcattcatttaaactttgcatatattgccatgatggcttaaacataaaatttctcttgcactaacaactttttaaaaccgatttcaaatcacttcatagttttattttttatattttgaattctagccagtcttaaaatcagctttgggaggggggtgcatataacatgttntttgttttgttttgttttttgtttttttaaattattgcactagaatttangggtttggtgcctctcccgtatttttt

SEQ ID NO: 16679 - DNA, 710 bp, Homo sapiens
gactactatagggcgaattgggccctctagatgcatgctcgagcggccgccagtgtgatggatatctgcagaattcgcccttagcgtggtcgcggccgaggtactccagcctgggtgacagagtgagaatatgtctcaaaaaaaattatcagcagaagataatatagaccccaggctaagggaaccattatcatctctaggcctgaaagcctaggagagggtgctgtatggagaggactgcttctgacagagggatatagccaaccttggtggcctaatagagaggaaagtagggaatagcttcaccttccttctctaatcttctgctagtatccctattaatttagcctaattagaagctggaaggtaggagagcctccatgggcaaaaagctgtgtagagaacatggatcctgagggggtaaatggcagataatctagcacagattggtatgattatctatacttttcagatgagaacactgagagtcaaaattaagtagatttgcccaaggccatatagctggtaggagctataaataattatctcaagaagtcattattacgtggatcattcaagaaatttctggatttagaaaatagccttaaaatatgaaacaaatattagcatttgttaatttgagatgttatgttcacagatattggtaagattatcatttttaatttatgtgttttaaaattctttttaaa

SEQ ID NO: 16680 - DNA, 402 bp, Homo sapiens
actactatagggcgaattgggccctctagatgcatgctcgagcggccgccagtgtgatggatatctgcagaattcgcccttagcgtggtcgcggccgaggtactattctctctcccagatcaaattttctccggtggctaaaaagttgtttgtggtaactgcagtgagtgctatatctgtaatttttctggctcatcactttaaaagaaaacgtggaaagaagaaaggaaaaatattaccataggaaccacagcacctcatacttgaatacactaaaagagcagcatcagacaaaggttcaagttgttccagtagcagacagaatttgacattatctttaagttctaccaaagacaaaggatctcaagtttgtaactatgctaatggaggacttttcagtaa

SEQ ID NO: 16681 - DNA, 385 bp, Homo sapiens
gcgaattgggccctctagatgcatgctcgagcggccgccagtgtgatggatatctgcagaattcgcccttagcgtggtcgcggccgaggtacgcgggatttgaagtcaattttgtctggaaaggattgatctgaggctttcaaggagaaccagaggaatgtatagtgtctcagaagccaagagtttggaattttaagatagagcatgatccccaaatgcacagaatcagtatcacctgggaaattatgaaaatgcatattctcaaactccacgtcagacttacagaatcagattctggaaatgggacctaacaatatgatttttttaaacagtccttcaaatgagtctttgagaaacccctgaggtaaaggaatccacctaaagt

SEQ ID NO: 16682 - DNA, 575 bp, Homo sapiens
ttgggccctctagatgcatgctcgagcggccgccagtgtgatggatatctgcagaattcgccctttcgagcggccgcccgggcaggtacgcgggagggaatttcatctctactgattgtctcctaaaatctgaaaaattgatgctttgccctaaaaaacaatctctcaaatgattgaggaaacaatggaataattgaataccctcaacttaattctaaattaagggagaatttgttggtcaagtgaagactgtgtatagctagaactgtaactgagaatttaggcagcagatttttaaacaatccaaataaaaaaaaattttgccccgcttaatacagagccagtgtctctgtagcacttggcccatggtagataatctaaaaatgtgatatgtgaaattccatgacttaagactgtaaaagactgcgtggtatttagtggacatagcaatattcatggaatgaatgaatgaatgaatgaaaaggtgattgagtgatggcctgtggatatgggaggctctaataataaaattctgacaataactgatacccaaagaaaaagagagtggttgtcta

SEQ ID NO: 16683 - DNA, 514 bp, Homo sapiens
  misc_feature 490: n = A,T,C or G
catgctcgacggccgccagtgtgatggatatctgcagaattcgccctttcgagcggccgcccgggcaggtacgcgggctagtagaagacacttaaagaaaataagcaacacaacaatatatttgtaatacaccttgtcttagtctatttgcattgctgtaaaggaatatctgaggctgggtaatttataaagaaaagagaggctgggcatggtggcttatgcctgtaatcccagaactttgggaggccaagggaggaggattgcttgagcccagtcttgacaacataggaagttcaagtccagtctggacaacataggaagactctgtctctacaataaatttaaaaattagagggcatggtggcacgtgcctctagtcccagctactcgggaggctgagcggggagaatcgcttgaacccgggaggcagaagttgcagtgagtcgagattgcgccactgcactccagccggagtgagactccgtctaanaaaaaaaaaaaaaaaaaaaaaaaa

SEQ ID NO: 16684 - DNA, 538 bp, Homo sapiens
ctatatggcgaatggggccctctagatgcatgctcgagcggccgccagtgtgatggatatctgcagaattcgccctttcgagcggccgcccgggcaggtactcctggatgttcagtaactgcttctaggagaaaaggtagagtcctatcactaagccgcagatatttatttgtgtgtggctagaatgggatgttttgaatcttctgttacaaccttgggaacgtggctgttatttcaatttatgagccagaaattttcacatcccgaaactacaaaagagaaaaagagccttattaagtgtcatgctttcccaagactaccttcaaagaaatatgaatcaggataacctgtgatctaaataatgtcatcttaaaactgaagagtttcttttgactcttctgctacaatagcttagaaaaaaatctgcttgcagacattttagagagaaaggacaatgaagtgattttctgaatgggaatgacagacctctgggaagccagctaccactgaatctcggtatcagttttttttaaagttt

SEQ ID NO: 16685 - DNA, 482 bp, Homo sapiens
ctggggccctctagatgcatgctcgagcggccgccagtgtgatggatatctgcagaattcgccctttcgagcggccgcccgggcaggtacttaacccttgtttttaatatgagttacagatttttttttttctggtatgtcatttgtcttttgaccttggtgttttgttatggatttttttttttctaaaacttattttttatggcttctgctttttaagtcatacttaaaaagggcctttccttgttcaaattttagggaatttactaggccaggcttggtacctcacacctatttgttaacactttgaaacctgaggggggggcatcgcttgacctttggagttcaaggctgcagtgacctttaattgctgccctccaccctgataaacagagcgagacctggtttccactccccccaaaaaaaactttatagggaattatccttcaatgtttatcttatactttcgggtttcttttttt

SEQ ID NO: 16686 - DNA, 373 bp, Homo sapiens
gactcactatagggcgaattgggccctctagatgcatgctcgagcggccgccagtgtgatggatatctgcagaattcgcccttagcgtggtcgcggccgaggtacaacatcatcaaggcagaaacagtttcccaacaggttatattttcttaatggtagtcatgaagtcaccccacctgctctcagttaaaacagagcttaaggcttttccacaggtgtaagatatcaaacttttagcctgccctgatatcctccgggtcttctgcagttttttctgtatccactagaaagtgaatgaataattcattttttaaaaatattttctttcctgtctcagtattcttgctgctgcatcccattgttagattgattt

SEQ ID NO: 16687 - DNA, 605 bp, Homo sapiens
  misc_feature 518: n = A,T,C or G
tacgactcactatagggcgaattgggccctctagatgcatgctcgagcggccgccagtgtgatggatatctgcagaattcgcccttagcgtggtcgcggccgaggtacttccatttgaaagcttaaaaaagtgagtgtaacaacaagcactcaggaaactttagaattaagacattaatagcttatttcttttaagttttaaaattatagaaaaatagtaagtggcatggtattgtttgacttaattagaatgtgaaaactctagtgcttttgtaatgctccaagaagaaatccaaatatttgaaataagacattattattggtcattttaagatacttcatgtttttcttagatgcctttgagtaatggacagatgggccagcctctcaggcctcaggcaaattatagtcaaatacatcacccccctcaggcatctgtggcaaggcatccctctagagaacaactaattgattacttgatgctgaaagtggcccaccagcctccatatacacagccncattgttctcctagacaaggccatgaactggcaaaacaagagattcgagtgagggttgaaaaggatccagaacttggatttagcata

SEQ ID NO: 16688 - DNA, 631 bp, Homo sapiens
taatacgactcactatagggcgaattgggccctctagatgcatgctcgagcggccgccagtgtgatggatatctgcagaattcgcccttagcgtggtcgcggccgaggtactctccttctagtgaaggattgtcacagagtttcactggatgaaactatgacccagtattcttactgtattttacatatgcctgtaaattatttgcaaaaaagaagaagaagaggaagaaagaaaagaaagaaaagaaagaaagaaagaaagaaagaaagaaagaaagaaagaaagaaagaaagaaaaagaaagaaagaataaaaaaaaatgataacatggcaaccaccaaactcccttaaaaacaaacattggtgacatggccaattaagtatcagtgagcctcctatctgggacttatctgttcctattgtttcaaaaccatttcatgtacctgcccgggcggccgctcgaaagggcgaattccagcacactggcggccgttactagtggatccgaacttcggacccagcttggcgtaatcatggtcatagctgtttcctgtgtgaaaatgttaatccgtcacaatttccacacaacataccaaccggaagcataaagtgtaaagcctggggtgcctaa

SEQ ID NO: 16689 - DNA, 553 bp, Homo sapiens
atctggcgactggggccctctagatgcatgctcgagcggccgccagtgtgatggatatctgcagaattcgccctttcgagcggccgcccgggcaggtactgtggaaatcagtggtaaggaaaaaaatggacaggtcatctaatatgtaaacaatttaactttgatgtaatctcttgtttgctggatttggtcctggggaaagtcaaaggactttcttagttacttagttgaatctctcaccttttctctgtcttctcatttaacttctcttctcttaccttgcagagcattttgatgatgagtccagctgaaaatagtgttgtgtcaggaattcagacttacggcctaaccctttttcttgtggggaaatctttaggtgtataggactgtgctaatggtgatttaaagtagaaccagcagaggtttggtctgagggaaggtgaaagcacgtattttatcaagttgagaaccctgtaagaatttgggggttctatgtttcaaacagagctcaaatcttttgaggctcaagttccatttgctcttggcaaaacac

SEQ ID NO: 16690 - DNA, 326 bp, Homo sapiens
atggatatctgcagaattcgccctttcgagcggccgcccgggcaggtactccctgcaagatcacatttatgattatagcaagaaaatgtgtgaggaaatgtgcaatttgaatttacctttagcctaaaatacgtagaatgtatgaagtctgaatttcaagatacatggggtatagcactacaaactacaatccactggacatgacctccaatgaactttggagattttggaagcagtcaaaagaacataagggccacggggttctacttttattacagcattaggttgtttgctgcttttatttctctactttgtttttctgtacc

SEQ ID NO: 16691 - DNA, 346 bp, Homo sapiens
agggcgaattgggccctctagatgcatgctcgagcggccgccagtgtgatggatatctgcagaattcgccctttcgagcggccgcccgggcaggtacttttttttttttttttttttttttttttaaccctctgggaagacaatgcaatagcctaggcaaggccataggacaataaaagaaggtgtcatcatgacaattacttcactattgtatatccaccccagaggctttatcattcttccattttcttatgattttcatctcatctggcatatttgggagtagatgatgaatagtattgaaataattatgtggaataacaaatagcaaaacgttcaaaacaca

SEQ ID NO: 16692 - DNA, 612 bp, Homo sapiens
ccctctagatgcatgctcgagcggccgccagtgtgatggatatctgcagaattcgcccttagcgtggtcgcggccgaggagcaagagcaagtctagtgtgagaagcacttttcaggcatcatgtttgctgaccaccctttggcccaaacactcacctcactaagcctagactcaaaatatgagggcactgcaaagattcacagcaaagattcatggcacagggcctagacacagggaggagtctctgtatttgttttttctttgtatttgttttatcaagtgaaaaacaaataaggatctctgcttccatcaacattattcatctttgtttcaggggtccctgtgattttagttggccaagatgtaactggcataatgaatacaaccaaatgagaaatattacctttttttgttgatgatgtgattgtatacctgtaagagtggaaggactccagtaaaaaactggagtgcaacaatcagtaagaatatttgacaaggctgttggactaaaaaataaatgtagaaaaatcagtaagtcttctttatagccattcgttcaacaaatatttattaaacactcactgaataataagcattcatctggtccctagt

SEQ ID NO: 16693 - DNA, 506 bp, Homo sapiens
ctatagggcgaattgggccctctagatgcatgctcgagcggccgccagtgtgatggatatctgcagaattcgcccttagcgtggtcgcggccgaggtaccagaattagaagagacaagcatagacttgtatcatagacttatatgcttgtaaagaggaggtatattcaacacataattacataaatatttactcatttttaaagtggcattttgaaatgattcagtgcacaataaccttgtctgggttgggttaaggggtagtgacaggaatgaaaatgatacctgaagaatgagtagaccagagtgggagtatgtcaaacaggtcagcatatgcaaggaccttagttagggagaagtttgataacttccaagaagaaaagccatatgatacacagtcaaaccaaaaagaaaaagatgtattaaaataatatctatagagatctaaaatattatctctagaaatgtacctgcccgggcggccgctcaagggcgaattccagcacac

SEQ ID NO: 16694 - DNA, 629 bp, Homo sapiens
tacgactactatagggcgaattgggccctctagatgcatgctcgagcggccgccagtgtgatggatatctgcagaattcgccctttcgagcggccgcccgggcaggtaccaaattcatcattgcatttctccacctggaaatggtaagaaaggaatatcttcatcatgctcttagacttatatgatggacactgtgatattggaattactctttcttggtcatatccatctgcttgcataggacgagactgaaaatctttagcaggatttataaacgtctttggaatgatgtagcacaacagtgttttactgtggggaatggggaatgactatctgaaagggaaaattgtttggcattttatattatttccaggcagtgcaaactgtctagcaagtagaatgttcatatatgaatctaatatagcaaatttatccctcataatactgtttttgaaacatcaagtttattctcaatgtgtggctctaatgacaatttcttgggaacgtaatagaactgcaataatgactaatggaaaagactctaaagctgtatctgatgggaaatgatttactttttaaactctttctatttaaggaattagcttaccgaaaggagatggtgagagctg

SEQ ID NO: 16695 - DNA, 446 bp, Homo sapiens
atggggccatttggacgcatgctatacctggccgcacactgtgatggatatctgcataattcgcccttagcgtggtcgcggccgaggtacctagaacaacccctctctgaaaagctggagccaaaacagtcccaaagacaacaagacccctctcccagcctccacagaatggaagatctaaaggttctcttgagatgatccagctagtatggaagatctaaaggttctcttgagatgatccagctagtgtcctattctcctgcagtccctgttcctaggtttcctcaacgaagtttgacaaaaatctaaaccaacatagccaacgaacttgccttgttacacaagagtggctaaaatagcatctcaaatattctttcagttcactgtaaaaatttttcccatgtacctgcccgggcggccgctcgaaagggcgaattccagcacac

SEQ ID NO: 16696 - DNA, 399 bp, Homo sapiens
tacgactcactatagggcgaattgggccctctagatgcatgctcgagcggccgccagtgtgatggatatctgcagaattcgcccttagcgtggtcgcggccgaggtactataggaatggtaagttaagagacaaaagagcagctacacagatgaagaggaactgcaaaggagaatgttttgaaggagaagacaaatagaatttggcaaaagtagctggaaaggttgttgcagaaaaggacaaatggtgtcactgtgagaacacacaataaataaaactgaatggaagagtcaacagcagaaactgggatcagggagtaaaaagcatattatgggacaaaacagatacatgatgtgcaaaacactgtctgcaatttaaatgtgatatgatggaatttggg

SEQ ID NO: 16697 - DNA, 501 bp, Homo sapiens
gactcactatagggcgaattgggccctctagatgcatgctcgagcggccgccagtgtgatggatatctgcagaattcgcccttagcgtggtcgcggccgaggtacgcgggtttacctgcagcatttgttgaagaagcagaatgctactgggagagagccacttgggaacatcatattttcctctctacaaaaacaaagcatttaagagattcaggttcaatcagccttgacacaaattccttaggtaataacatgctggaggtttacttttaagcttgaagacttcacccaactacaatacttggtaaacattattaactaaaaaaaatcaatttcttggctgggcgtggtggctcacacctgaagtcccagcactttgggaggttcaagcgggcagatcacctgagatcaggagttcaagaccagcctggccaacgtggtgaaaacactgtttctactaaaaatacaaaaaattagtcagtccgtggtggcaggcaccct

SEQ ID NO: 16698 - DNA, 473 bp, Homo sapiens
  misc_feature 398, 411, 412, 413: n = A,T,C or G
atatggcgactggggccctctagatgcatgctcgagcggccgccagtgtgatggatatctgcagaattcgccctttcgagcggccgcccgggcaggtacaaatatttggcaaaggaatgaaaaaagttagaaagttgtctgtctgtgggctaggctctgcctgcaagatacttacaatctaggtcagaggttcctaaatccttctcaatgccgtttgcactggccctgaggaaagtgtgaaaatgaacactattgtagagtcttacatgaagctaaatttgttcatttatatcacttctcttttattatgagattatgtcctctgcagttttttggtattaaaatgtcttttatgaaaggatagtaagagttagatagtagtcttttttgtgcaaaanaaaaaaaaaaaannnttttttggggcggaaccccctttgggggaatttcccccccccgggggggctttttttggg

SEQ ID NO: 16699 - DNA, 515 bp, Homo sapiens
cgactcactatagggcgaatggggccctctagatgcatgctcgagcggccgccagtgtgatggatatctgcagaattcgccctttcgagcggccgcccgggcaggtaccaaacatctgaaaataagaagacagcgctgcagagccctacacagtcaatggggcactttggccgagcctgtctcacctcatctttacaactcttggaggcaggtcctattacctccaatgaacacaggagaatatgagcgttagaaaggagagtgacttgggcagggccacagggcccccaaactggagagctgatccttatcctctgcttctcaactctttcactatgccatgctgcctttctgaccctgtcttagtcttgattgtctgctgaaaactgctgtgagtaagaacattcaccttccccaggtcgagcaacggttgcacctcagtccattctctgcaggcagcatctgcttggtgttatacaaagagcgacacattttcaaaactttattccccaatc

SEQ ID NO: 16700 - DNA, 544 bp, Homo sapiens
gactactatagggcgaattgggccctctagatgcatgctcgagcggccgccagtgtgatggatatctgcagaattcgcccttagcgcggtcgcgggcgcgggacctatacaattacttggttgctttactcccccggcaattctagccaagattgagcagactggattgaagactaacttacgtgaggtgtaaataaagagcttaatgtcttagaaaaggccttttgcactttttgaatcttctgtatccttctgggtcttaggccattagtaagggggcacaatcatcccataatggctccttcaaactagggacacagggcccgtgggttttagaagtttcagtgacaaaggtagaaatcaagtgcatttatgggctgtcaccacttactgctcctatggccctggtatggggtgactgtgtcagtcaaagactaattggccactcctctatggttacacagggaatgaaaaatccatttatgaacagaagttgttgctatcaaaagattataccagaaaaggggtaaaaatggaggtcaca

SEQ ID NO: 16701 - DNA, 648 bp, Homo sapiens
tacgactcactatagggcgaattgggccctctagatgcatgctcgagcggccgccagtgtgatggatatctgcagaattcgcccttagcgtggtcgcggccgaggtaccaggttgcagttaagaatttttctcttttctttggagagaagttaaagtccctggcagtgtttttcctcagatcatctgcatcacctaagctggggttggccagatctttgaacctacaacacttcattccggttttcattttctttgtgttcatggactctagagagcacggaagtaattgggtttcattgggtagcagagtaaggtagagtgcactttctcaagacatgttcattggtctgagcaaagttctgtctcttggaaggagacagtagcttggtggtgctattaggcagatgagggcttgttagatcaagatgtaaactctctttcttcagtctgattttaaaatgaactgtcatttgtagtaattattaaatgagaagcataaattaagtattttactttttttatttgtaggaaatacaactggagcacgcaaagcaagcctttgtgcaacgggacaatgctaggactgggagagtcacagccatcgacttccgagacatcatggtcaccatccgcccccatgtcttgac

SEQ ID NO: 16702 - DNA, 541 bp, Homo sapiens
  misc_feature 248, 249: n = A,T,C or G
ggcgaatggggccctctagatgcatgctcgagcggccgccagtgtgatggatatctgcagaattcgcccttagcgtggtcgcggccgaggtactccatgttgatgggtctatgtttctttccatttgttatgctcccaccactgactggccaatcttctctctaccaatacctgttatagatcaacagatcaccatttgcttctctgaaggcctccagatgatttctggatgaaccttccactgtctnnctaaaggcccacgttttccattctcccacactgcattgatccccatgacactttatgcccagaatgctactctctggccattcctgtcatccccaaacatttttgtttttaattccaacataacattttcaccttccaaaaacctttatagagaagatgaaaccttactttgccctcatggtctggcaatgacataccaatagctactgattctctctaaatgtttccccaaaacacttagccatgaaaaaaaaaaaaaaaaccatttaatttaaagggatttttgggaacc

SEQ ID NO: 16703 - DNA, 326 bp, Homo sapiens
ggatatctgcagaattcgcccttagcgtggtcgcggccgaggtacttctgtggccttgagtattttttaaaaggctcaactgtaagcctcttagccagttggataaatatttggggtcacctagccattgaaagcagaaagcagtagtgacacagctttcccttcaaagagtcattgagaaacatttctcaaacaggaaatccttcttttactaatgtggacatatagattattcgtattatagtttgtagaactacctagttcagaatcttgactgccagttttcttggtttcttaggcttgaattttcatagacaattgcaaca

SEQ ID NO: 16704 - DNA, 578 bp, Homo sapiens
cgactcactatagggcgaattgggccctctagatgcatgctcgagcggccgccagtgtgatggatatctgcagaattcgcccttagcgtggtcgcggccgaggtacaaaactaatgatcttcagttacacaagaacatttaaaagttttacatttgaaatagataattaagcaatgctgtgtgaaactgaaaaatgaaaactttgattaaaaaaagtattttcaaatataggatagtgcatgtatatgagaatacttttttgggtataatcttagtaacatcattatggtgttatgtaaacatatgacatatgacatataaaattatagtagatagatcactgtgttacccacttacacattcttctgtcgtattaagcaacaaacattattcttatctataataaagcagatatttctgtctgccatacatatgaaatatttgtatgtatttattggaagtaatttttaaggctagtctttttttataatttcaacttttattttagatttggggtagatgtgcagatttggtacattggcatattgggtgatgctgaggtttagggtatgaatgat

SEQ ID NO: 16705 - DNA, 409 bp, Homo sapiens
atacgactcactatagggcgaattgggccctctagatgcatgctcgagcggccgccagtgtgatggatatctgcagaattcgcccttagcgtggtcgcggccgaggtactcttatatttattattttacattacgattttaggaaagaaaaatattttctttgctttaataaataaatcattgtctgagtggcatttagcttaactgctgtgtaagacaaacaggatcagagtggtcagctagttttccatttggctttttccactgccaagtgggtttaaaggaaaactatttcatacttatatttgcttacttggttgaatattaccacctctgcttactaaacaagtctaaatatacctttctaggggtaactaaagagtatgttacgcctacttagttacactaa

SEQ ID NO: 16706 - DNA, 487 bp, Homo sapiens
  misc_feature 481: n = A,T,C or G
ccctctagatgcatgctcgagcggccgccagtgtgatggatatctgcagaattcgcccttagcgtggtcgcggccgaggtacacgccttgtatttataaaattaatgtaaacattagaaatcaggaagaatataatgtaacactgcactgttttcttatttatagccacttttctaaaaatacatattttttttttttaggtcccgatcacacagcaagaatccaaaaaggtaggtgtattacataagacaggtataagtagtgaagttgtctttttcaaaggtagtttttatagattgattaaatggtcctttaaaaattttcttttttggctgggcacggtgatgcatgcttgtgatcccagctactcaagaggctgaggcagaattgcttgaagccgggaggcagaggttgcagtgagccaagatagcaccactgcactccagcctgggcaacagaataagactctgtctttcaaaanaaaaaa

SEQ ID NO: 16707 - DNA, 609 bp, Homo sapiens
taatacgactcactatagggcgaattgggccctctagatgcatgctcgagcggccgccagtgtgatggatatctgcagaattcgccctttcgagcggccgcccgggcaggtacttttttttttttttgtttttttttttgccctttagcttcacaggtttgttctgaaatttatgaggtataaattcttaagagcagcaagaaaaatttcgaatctatttgtagaaactgcatatgatgatggttcataccagtagagagaaagattggatttgggggtattactagtagtaaggggattcactagtagtaagggacatgcaaaataaaatcacattgaactagttcaaaatcatcacattggcaaaagcattagagtgccaattactggaaagatgtggagcaataggaacactcatacggtgctataggaagtagttgtgtttagcataatttggcaatgtctagtaaagttgaagatgtgaataatctttgacccagcaattccatgtttaaacctctacatagtctctcctcgtgtttcaaggagatacatatgatggtccattgcagaactgtgagaatgagaagttgaaagcaatctaaccat

SEQ ID NO: 16708 - DNA, 381 bp, Homo sapiens
ctactatagggcgaattgggccctctagatgcatgctcgagcggccgccagtgtgatggatatctgcagaattcgccctttgagcggccgcccgggcaggtacaaaaagaaagagagagaaagaaaaggctacttggtatttctcacctcttactttcaaaccattcagttaagatgacttagtggcatacaaacttcattctataagaatatacctttccctggatgcttcatctgggatacctaggcatatttctcggtcgaaccttcccgcacgtctcaaagcagggtctaacgagtctggtcgattagtagctccaataactaggacccgggcttgtagcagccacattattcatgatcatccatgcaggttaggag

SEQ ID NO: 16709 - DNA, 345 bp, Homo sapiens
tagggcgaatggggccctctagatgcatgctcgagcggccgccagtgtgatggatatctgcagaattcgccctttcgagcggccgcccgggcaggtacttttttttctttttttttttttaatttttttttttttttttaattataatcgtttatacaatttaatcagggcgggggggcggaaactaaattaaatcaaacaaaaaaacccccctcaaaaagaaaaaaaaaaaaacaccccccccgaatgtaaaaaaaaaaaaaaaaccatttggtacttataaacccccgaaaaaaaaaactgggccctgaaaattcgggaaagggcgcgccaaaaaaaaaaaaa

SEQ ID NO: 16710 - DNA, 623 bp, Homo sapiens
ctcactatagggagtcgacccacgcgtccggtaggtttgtgagagaagatgaccacggccacatgaggaggtgacgagcagagatgtctttgaatgtcactttactttgagcatgaaaactcccatgtcacgtctctatctaccaccatctttaaacataaaatttgtagatatgctgattcattttaccttgaaatcacgaatgtaatacagataaagcaagacatcaaacaggaaagactaaggcttgtgataagcaataacagcttataatcaagaccccattcaatctgtcctagtccactgataaaataaatgtgcagtgctgtgctgcacagaagataaagcacatggcccgtcatgcagactttaatttcaataaaatcgttactctctgcaggagtgtacaaatgtcaagcctgtattgcatgcacaggttctgtcctcaaacatacattaatgattccagtgtgttgctcaaatagttggcttagcagctcaacttccttcctccccctccaaaaacaaaaaacaaaaacaaaaacaaacaaacaaaaaaaacccagcctaatacattccaagtagtctatgaaggtaagctgactaccttggatagttcacct

SEQ ID NO: 16711 - DNA, 403 bp, Homo sapiens
cctgcagcccgggggatccactagttctagagcggccgaggtgtataagctagcttgagtcgacccacgcgtccgctggaatatggcgagaaaactgaaaatcagggaaaatgagaaatatagactttaggacgtgaaatatggcgaggaaaactgaaaaagttggaaaatttagaaatgtccactgtaggacgtggaatatggcaagaaaactgaaaatcatggaaaatgagaaacatccacttgacgacttgaaaaatgacgaaatcactaaaaaacgtaaaaaatgagaaatgcacactgaaggacctggaatatggcgagcaaactgaaaatcacagaaaatgagaaatacacaatttaggacgggaaatatggcagcttgagtcgacccacgcgacct

SEQ ID NO: 16712 - DNA, 630 bp, Homo sapiens
ctatatggcgaatatggccctctatatacgtcgcgctagcgcgggcgacagtgataggtatatgtgcaaaattcccttttaagcgggcggccggccaggtacctgtaatcccaactactctagaggctgaagtgggaggattgctttagcttgggagttcaaaactgcagtaagccatgattgtgccactctactccagcctgggcaacaaagtgagaccccatctcaaaaaaatttattcagttaaaatctttaacaataaagcaattttgagtcgtattttgcgacattctcaatatagttttccaacttgcattaaaatacattttaaacatttttgaagactaaattaatttttttaactgacatttatgtttcatttgacaacctttcgctgtatattttatgtggacttttaggtattgtagcgattcctttaatgaataaataaaataattgtcatttaaaaatgcatattattattaccttatgctataaaaatagttttaaaatagagtatgtttattaagatttaaaaataagtatagtcatgcactgcataacagcgttttagtcagactgcataagattacgatggagctgaaaaattactgtcacacaaatacttac

SEQ ID NO: 16713 - DNA, 390 bp, Homo sapiens
tatagggcgaattgggccctctagatgcatgctcgagcggccgccagtgtgatggatatctgcagaattcgcccttagcgtggtcgcggccgaggtaccccctgtagtagtaggcaaatgcttcccctcctgcacccccaacaaagatgtcctcatcctaatcccagagatctttgaatgcgctatcttgcatgacacgtgggattttgcggattgcctgctctgaaatgcaggaactacacaggaggactagagagaggcttctaggagaaaagtccagcctctggttcacagtcagcaacaaatctgaacgtttagtcttacaactgtgaggaagtgaattcagccaacaacccaaaggagcaaggaaatgaattcttccccagagtc

SEQ ID NO: 16714 - DNA, 560 bp, Homo sapiens
ctactatagggcgaattgggccctctagatgcatgctcgagcggccgccagtgtgatggatatctgcagaattcgcccttagcgtggtcgcggccgaggtacagattgaggtttgtttatcctttttaattccagtttgttcttggctttcttagttctgaaaattgaaatctgccttcattttcactgatgcctgtgttgtaatgtgtcagtaaactgggtattcttccaagcagttggttgattccaggcttctgcatatctttgtgctgttctggaatttgttttctgtccatcaccgcatttacctgcccatactctgaggctaacatatccagaaacttttaaacttaacttccatttttcagaacagccatctgctttagaataaatgatttccgtttatccagagaaaagtaactaggtcttagagacttcgtgtattcgtccgttctcacatgtggcaaaatatggtttggtttttcttttttttttttgaaagtgttatttcttcgtccttttggtttaaaaaagttcacgtcttggtgccttttgtgtga

SEQ ID NO: 16715 - DNA, 673 bp, Homo sapiens
  misc_feature 620: n = A,T,C or G
tatatggcgaatggggccctctagatgcatgctcgagcggccgccagtgtgatggatatctgcagaattcgcccttagcgtggtcgcggccgaggtactctaaacaaaccctctactcgcaagtttttgtgtagatactcaatcagttggtatatctgggcaatgccttcctccgtcagtggggacccaaatatcactcctttttcctttcgcttgagagacatgagagaccggaagaatcctgatgctgggccagccccgccaggcaacttaaggtccacttcccccatcagctgagccaactcagttccaggtaaatcgatgagccttgtgatattgctgaccaccaactcagtgaaaatctcaggtttctcatgtcggagtttctccacaaaaaagtcaggattaaagataatgggctgacctcgaagggaagaatcattgcagatcacaaaactgcagatggcatcactccggccggattcgcgggctggcacctccccttcactctgtgcctcagtcgccatcttcgtcagcaaacttctttcaccgccccaccttacgtcccccccgcgtacctgcccgggcggccgaagggcgaattccagcacactggcggncgttacttatggatccgagctcggtaccaagcttggcgtaatcatggtcatag

SEQ ID NO: 16716 - DNA, 535 bp, Homo sapiens
tatatggcgaatggggccctctagatgcatgctcgagcggccgccagtgtgatggatatctgcagaattcgcccttagcgtggtcgcggccgaggtactcaggagaaaaacgaaaatgggctgctgtccaaagttcttaatggtcaagtgtctctcttctcctctcacagaaccatccacacgctcatagctgtagcctttacagagaggaagaaaaacagaaatcttaacccttttcaagtagtctttggggaataaaaaattaagcccaaaaccaaaggccaattttgtccctttccatatacaggcacagccctactttaagcaaatcccaaagggaaaaatttaaattaacagggacaattatcattttacaaaataactcaccataacatactcctctggattttttaaatacatgcagttgaagtctttggcacttatgaagttaatactcagttttggctattctcaagcaaccctgagcatctatcctgtgtgatagtttcaactttgctgagatgtaattcttatg

SEQ ID NO: 16717 - DNA, 383 bp, Homo sapiens
cagtgtgatggatatctgcagaattcgcccttagcgtggtcgcggccgaggtactgatacatactacaacaaagatgaatgttaaaaacattaaaagaaaccagtcacaaaagacaacatattgtatgatttcacttgcatgaaacgtccagaataggcaaatctaagagacaaaaaaaagtagattagtgggggccgggagggaatggagagaaatggggtgtctgctaccgggaacagggttttttggggggtatatgtgtttgaaaatttatacagttcactgtggtgatggctgcacaactctatagtatactaaaaatcatatcctctaaataggcaaactgtatggtatgtgaattatatctggataaagctgtcat

SEQ ID NO: 16718 - DNA, 629 bp, Homo sapiens
  misc_feature 256, 257, 258: n = A,T,C or G
cactatatggcgaatggggccctctagatgcatgctcgagcggccgccagtgtgatggatatctgcagaattcgcccttagcgtggtcgcggccgaggtacatcaccctgctgagggacatccaggacaaggtcaccacactctacaaaggcagtcaactacatgacacattccgcttctgcctggtcaccaacttgacgatggactccgtgttggtcactgtcaaggcattgttctcctccaatttggaccccannnggtggagcaagtctttctagataagaccctgaatgcctcattccattggctgggctccacctaccagttggtggacatccatgtgacagaaatggagtcatcagtttatcaaccaacaagcagctccagcacccagcacttctacctgaatttcaccatcaccaacctaccatattcccaggacaaagcccagccaggcaccaccaattaccagaggaacaaaaggaatattgaggatgcgctcaaccaactcttccgaaacagcagcatcaagagttatttttctgactgtcaagtttcaacattcaggtctgtccccaacaggcaccacaccggggtggactccctgtgtaacttctcgccactggctc

SEQ ID NO: 16719 - DNA, 517 bp, Homo sapiens
tcactatagggcgaattgggccctctagatgcatgctcgagcggccgccagtgtgatggatatctgcagaattcgcccttagcgtggtcgcggccgaggtacttttttttttttttttggggggggagaagttattttggatatatggctttaatcaggatagactagtttatattactgcctgattacttttgaaattccagaagatgtgtaatcctaactgcatgatcacagtgaatcttatataaggtgaaaaataccactattactgaattataatatgctagaaaagctgttgatggtaatgtggtctatttttaatttacttcatttggaccatcaccatgaaaataaatctcaggatggtttgaacaaatgaataacccacttgcccagcctatcctccaagaaaatatattgtggcaaattccattcttcagcttttgctgaccctgttgtgttattctccccattccctccctcctgccagtcaaatatttgtgtacctgcccgggcg

SEQ ID NO: 16720 - DNA, 397 bp, Homo sapiens
tacgactcactatagggcgaattgggccctctagatgcatgctcgagcggccgccagtgtgatggatatctgcagaattcgccctttcgagcggccgcccgggcaggtactgtttgataattgatgtttattatgatgactgagtcatgacttatgctcaagtgtgtcagtctgttttgttcagggacatcatcaagtattgggcaatgtttctcaaactgtgttccatgaactgtttataagtattctacaaatgtggtcgattaagttttagaaatactaaaatttattaattttagaaaattaataaatatattagaaatataggacagcttccttttgggaattcataatacacattagtatattaaatgctttgcaactttttatttcagta

SEQ ID NO: 16721 - DNA, 461 bp, Homo sapiens
tagatgcatgctccatcggccgccattgtgatgcgatatctgcagaattcgaccttagcgtggtcgccgtcgaggtaccacactggggagacagcatagaagttaagaatgaagatcagattcaagggcttcatcaggcttgcagctgcccgccacgtcctcctcttggctgggaagagtttaaaggtggcgtctcaccaatcctcataacgacttacataaggggcaacaaacactcctgtttttttccttctccttaactcttcttttaggttgacatctaatttgtcttaaaaatttatttgtttcaaattaatttgttcttaaaaattaagcacagccttgggatggggaaaatgaattttattatcttatgtgtctattcaacaagtaatttaaaatccaaattcaattttaactagcagaattctagagatactttggtctcagtcaacctatcc

SEQ ID NO: 16722 - DNA, 457 bp, Homo sapiens
  misc_feature 340, 363: n = A,T,C or G
actatatggcgaatggggccctctagatgcatgctcgagcggccgccagtgtgatggatatctgcagaattcgcccttagcgtggtcgcggccgaggtaccataaaaatgtgctgctaacctacaatacccttatagaaatacaattcaataagaaactcagttgggaagatgtctcaatagaacaacatgaaaaaaatggtcaatacaagaatgattcactttacttttacaagggatttcgatgctacgaatagaaatgcctttggaacttataaaataaaatccagataaacagagagtcacatttttaattcttacacatctctaatgtgcctttnttttttttttttttttttttttnaaaaaaaaaaaatttttttcaaaaaatttttttttttaaacccttttgtttggggggggttttaaccccccccccccggggaaaaaaaaatttt

SEQ ID NO: 16723 - DNA, 362 bp, Homo sapiens
tatagggcgaattgggccctctagatgcatgctcgagcggccgccagtgtgatggatatctgcagaattcgccctttcgagcggccgcccgggcaggtaccactgtctgttttcaggggttaaatttggagaatatctttagagcctcaatctggctattttggaagattattttgaaaataatttcaaggaaaatactagatgtcttttagataaggcttttcaatttgaactcgttatacatgtaaatgctttttcttcatctagatgaatttaaaggccactcgttgctgcaagctgcacgagaagctgatgttactcaaatcaaaaaacatctctttctggaaatggcgaatttcaag

SEQ ID NO: 16724 - DNA, 601 bp, Homo sapiens
  misc_feature 112: n = A,T,C or G
tacgactcactatagggcgaattgggccctctagatgcatgctcgagcggccgccagtgtgatggatatctgcagaattcgcccttagcgtggtcgcggccgaggtactttnttttttttttttttttttttttaacactacaggtttcaaatgaatacttttcttatgttgccttcagaggttcaggacttctgcttttaaaacctgcagcctaccgtgggaaaccaaaaaagcattccctatttccaactgcagtatgtataaatacatatcactacaaaatgtatagaaagtgtgatgagatacatgaatggcatttttattggtcataacattttgatgaaaagcatttaaagttttaactttataaggcttttcaaaatgtgtttttctgagatacattgttatttattcatatccagaaaaattacaaggataatacagaatataataaataatttatctgagggcaggaagtatcctctcatgcttaatcagtttggggtttttaattataacacaagaaactcataacaggacctggtcagagagcatcccagatccattaaagattggattcattgacttggagaaaagtac

SEQ ID NO: 16725 - DNA, 550 bp, Homo sapiens
  misc_feature 414, 493: n = A,T,C or G
ggcccttctagatgcatgcctcgacggccgccagtgtgatggatatctgcagaattcgcccttcggccgcccgggcaggtacagttttatataaaactctgagactagaagaaattattaactttttttcttttttaattctaattcacttgtttattttgggggaggaagactttggtatggagcaaagaaataccaaaactactttaaatggaataaaaccaactttattctttttttcccccatactggtagataaagcaaactttataagtgggctattgaaagaaaagtacaagcttaagatacagaagcatttgttcaaaggatagaaagcatctaaaagtttaggctcaagatcaatctttacagattgatattttcagtttttaatcgactggactgcagatgttntttcttttaacaaactggaattttcaaacagattatctgtatttaaatgtatagaccttgatatttttccaatactatnttttaaaaaattgtatgatttacatatgaacctcagttctgaaatcattacatatct

SEQ ID NO: 16726 - DNA, 583 bp, Homo sapiens
ggggccctctagatgcatgctcgagcggccgccagtgtgatggatatctgcagaattcgcccttagcgtggtcgcggccgaggtacagtctttatggtgggaatgcagtggtagagttagtcactgtcaagtcatttgacacctccctcattaggaagacaaggactatccttgaggcagaacaagcgaagaacccagcaagtccctataaccttgcatataagtataattttgaatattccgtggttttcaacatggtacagcctcctgaaatgattgggcctatgcggcccgagcagttcagtgatgaagtggaaccagcaacacctgaagaaggggaaccagcaactcaacgtcaggatcctgcagctgctcaggagggagaggatgagggagcatctgcaggtcaagggccgaagcctgaagctcatagccaggaacagggtcacccacagactgggtgtgagtgtgaagatggtcctgatgggcaggagatggacccgccaaatccaaaggaggtgaaaacgcctgaagaaagtgaaaagcaatcacagtgttaaaagaaggcacgttgaaatgatgc

SEQ ID NO: 16727 - DNA, 658 bp, Homo sapiens
tatgatacgccaagcttggtaccgagctcggatccactagtaacggccgccagtgtgctggaattcgcccttgcactgtgacaagctgcaccacgcccaccaggcgggtatgattgagcacccattttagtgacttgccgtagccttgttgcagggctaccaacatgcgaccaaaaccacgcagtcgcttttgctcgcgcggcttgctggctctcagcatccagccacacatcattggcgttaatgtcagagaaaccggcaacgatataccaatggcgacagaaagcgtcacggcaaattcgcgtaacagtcggcccggcaatccgcccatcaacagcagcggcaggaacaccgccaccagtgacagactcatcgacagcaccgtaaaaccgacttcgcgagtaccttgcagtgcggcttgcaacggtttcattcccgcttccagatgacgtgcaatgttttccagcaccacgatggcgtcatccaccacgaaaccagtagcgatggtgagcgccattaacgaaaggttattgagactgaatccgcacaggtacatcgccgcaaacgtaccaatcaacgaaaccggcaccgaaacggcgggaataatagtggcgcgacccgagcgcaggaataaaaacaccaccagaatcaccagcgc

SEQ ID NO: 16728 - DNA, 621 bp, Homo sapiens
tatatggcgaatggggccctctagatgcatgctcgagcggccgccagtgtgatggatatctgcagaattcgcccttagcgtggtcgcggccgaggtacacactagaaatcatctgaggggcttataaaaacacaaattgctgggcaccacccccagagtttctggctgagtggatgtggggtagagccaaaaatccgtatgtctaagttcccaggtgaatctgatgctgctggtgaaggaatcatatattgagaacacttctctatgatcctgtgacaacctcagcgctaatattcacccaaatgcattatataaagtcagccctctgttttcttagattcaatcaatagcagattgaaaatattcagaaaataaacaataaaaataacaatacagcaataaagataatacaaacaaaatacaacacagtataacagctatttaaatagcatttactttgtgttaggtattatacataatctacagattaaagtatatgggaggatatgtgtaggttatatgcaaatactacactattttatatcaggaacctgagcatcataaattttgctatcttgggggtcctggaaccaatcacttgtgaatatctaagaacaacta

SEQ ID NO: 16729 - DNA, 388 bp, Homo sapiens
  misc_feature 270: n = A,T,C or G
actactatagggcgaattgggccctctagatgcatgctcgagcggccgccagtgtgatggatatctgcagaattcgccctttcgagcggccgcccgggcaggtacaagcagttaacttagcaattaggcctgggcagggcataaagtcctcctcagcaagagttctttatcataaaagattggggacttaaatctcaacaagtaaattttaaccgtgatcatagtttctctttttccaactttggaaattctagactggacaggaccccnaaaaaaaaaaaaaaaaaaaaaaaaggtacaccctctgattctcactagttgaatgcaagaacttgaaaggttcaggtaagtgttttgaaaaattttgactttccaaacttttgccact

SEQ ID NO: 16730 - DNA, 543 bp, Homo sapiens
cgactcactatagggcgaattgggccctctagatgcatgctcgagcggccgccagtgtgatggatatctgcagaattcgccctttcgagcggccgcccgggcaggtacccaggtagcagcactcgaaaacttggatattcaagtctgattttggattccactggctctactttatttgctaattgcacagacgataacatctacatgtttaatatgactgggttgaagacttctccagtggctattttcaatggacaccagaactctaccttttatgtaaaatccagccttagtccagatgaccagtttttagtcagtggctcaagtgatgaagctgcctacatatggaaggtctccacaccctggcaacctcctactgtgctcctgggtcattctcaagaggtcacgtctgtgtgctggtgtccatctgacttcacaaagattgctacctgttctgatgacaatacactaaaaatctggcgcttgaatagaggcttagaggagaaaccaggaggtgataaactttccacggtgggttgggcc

SEQ ID NO: 16731 - DNA, 593 bp, Homo sapiens
tatagggcgaatggggccctctagatgcatgctcgagcggccgccagtgtgatggatatctgcagaattcgccctttcgagcggccgcccgggcaggtactgaattatgccttggcagaggggagactccaaaagagtcatcgcaggaagaagttaagaacactgaacatcagaacagtctaccaagaaggacattggcatcctgggaaagtccgccttttcccttgaccactatagggtgtataaatcgtgtttgcaaaatgtgttatgatgtgtttatattctaaaactattacagagctatgtaaagggacttaggagaaaatgctgaatgtaagatggtcccatttcaatttccaccatgggagagcctaaaaataaattatggcatttagtatctaaggttagaaaaccacgcccacatgctaaaatgggtgttgaaaactaggttacttataatgcaaggaatcaggaaactttagttatttatagtataatcaccattatctgtttaaaggatccatttagttaaaatcgggcactctatattcattaaggtttatgaattaaaaagaaagctttatgtagttatg

SEQ ID NO: 16732 - DNA, 556 bp, Homo sapiens
atacgactcactatagggcgaattgggccctctagatgcatgctcgagcggccgccagtgtgatggatatctgcagaattcgcccttagcgtggtcgcggccgacgtacgcgggatttgaagtcaattttgtctggaaaggattgatctgaggctttcaaggagaaccagaggaatgtatagtgtctcagaagccaagagtttggaattttaagatagagcatgatccccaaatgcacagaatcagtatcacctgggaaattatgaaaatgcatattctcaaactccacgttagacttacagaatcagattctggaaatgggacctaacaatatgatttttttaaacagtccttcaaatgagtctttgacaaacccctgaggtaaaggaatccacctaaagtaacatgttaagaaattgttatggaatgaggactgaaagaatactgttaagggtggcatttaaggtgttaagagtggcatttaaggtgtttagtgaccattggcatggtatggaaagttaaaggtctgccaaatagttgaaagatattcaataag

SEQ ID NO: 16733 - DNA, 550 bp, Homo sapiens
tatatggcgaatggggccctctagatgcatgctcgagcggccgccagtgtgatggatatctgcagaattcgcccttagcgtggtcgcggccgaggtacgcggatgttgggaacaccatcattttctgaggctgaatttggtctgggtttctgaggatgcctgaaatggcatcgctgaaaataaatcaccccaatcacatatgtgcttttaattttgtccacattgcatttcagaaaattgtgagtaacgtgaacataaacttctaactaagaaaaagggtaactgatgatcttgctttcttaacaaatatactgtctttttaatcatagttctattctagacctatatataaataagctgtattccactgtaatcatactgtgatgtttggctttattcaaaaactatgtattgtaagtatcattcctgtgactacagacttcatatttatcattttagtgactgcataatattccactgagaggatatactccttatggccctgttaatggacatttgttttatttgttttttattttaaaattctatg

SEQ ID NO: 16734 - DNA, 555 bp, Homo sapiens
tggggccctctagatgcatgctcgagcggccgccagtgtgatggatatctgcagaattcgccctttcgagcggccgcccgggcaggtactttttttttttttttttttgcagaattgttagtgactggggaaaaaatgaaaacaactgaaatgaccatcagtagaggaatggccaaataaattatgatatactcataatatataatatcaagtatctgttaaaataatgcagtagtttattctatacatcatgcccgcgtagtctgcgttgttaccactgcttactttttttttttttttttttttggggcccagaaatactatataaaaccgggtgatcaaaacaaaacttatgtcatgaattttaagagtttttagcaaaaaagatatttttgaactggcacagcaaaagcaaagttgaacatcatgatacacaagactaatcatgcaaacaactgtaagtgggatgtgttacttaaacactaagctcatgactgacattctcaatatataccactgatttttttaagccatggtggggtagatatagttcaa

SEQ ID NO: 16735 - DNA, 386 bp, Homo sapiens
atacgactcactatagggcgaattgggccctctagatgcatgctcgagcggccgccagtgtgatggatatctgcagaattcgccctttcgagcggccgcccgggcaggtacataataggtgcataacacatcttaaagttgtttaataatagataagaaccaagaggaaaaagaaataagaaaagatgggggaaaggaaggagaaaataggaaatgaaaggattaggacttgggcatttatattaatacaaaatggtgtaaacggcctgaatatcactgtagtagtatcatgcgggggaaagtgtgatggaaaataggtttaaaaatcttaatttttaaaactttagtaagctttatttatattttttaggattttctgaacatag

SEQ ID NO: 16736 - DNA, 668 bp, Homo sapiens
atagggcgaattgggccctctagatgcatgctcgagcggccgccagtgtgatggatatctgcagaattcgcccttagcgtggtcgcggccgaggtactatggaaacagtcatgtataaacattcgtgcagaagcacttacaaacatacactgtgcataaagttggttaagaagatgcttgttagaaatgatttatgtaggtgaactaagaatttgaaataacttaataccattgaagacatcatacacatacaactttggacattatgcattcttctggggatgaaccattgacaacttctggacttcattgctagctattttttacattgaggtgggaaaccaaagaagtgcagaacagaagcaatctactaggcacaaagctccctggttactgcccagatagactgtttccactcatcaaattgaagtacatacttaatttaggaagggcagaccagtgcaaaagctactgatagtgaactggagggcccggtttccatcccttactctgccacactccaaagttcgatcttctgtaagtcactctaaatttatggcctttagatttattgcctctattaaaaagggcattgcaacaagtgacttaaacctcccccttttttattctcaaggatttgggattttacatagacaaaagtgaacaat

SEQ ID NO: 16737 - DNA, 519 bp, Homo sapiens
tatagggagtcgacccacgcgtccgacgcactccgcaccaaccattaagctgaaaacaagctttttctagtgcgtccttcccttcacctgcatttacattccatggagttagtgacaaccccacgccattccaggccgtggactgttttatctgtatatcggaattataatgctttgcggttggttaagtgaaatagtgtttatacctcttactgatttttaaaaatcatgtggtaaatatattttcatttttatcctaatgatatttctcttttgttgatttatttttgttgttcctgttggggttttgtttctggtttttggtacaggtaactggacccagagccttgctcattgtaagcatgcactggactgtcatatgcccctagaccctaattaacttattggttttaactctaagccatggtgttttaaatttgttagaatagaattgtttcatgtagttgggcagccattggatagtttcaagaaaagaaaatgggtcaatttttagcgttt

SEQ ID NO: 16738 - DNA, 559 bp, Homo sapiens
ctatatggcgaatggggccctctagatgcatgctcgagcggccgccagtgtgatggatatctgcagaattcgccctttccagcggccgcccgggcaggacccgggggaaatagggtgttttcttcccgagagaggactgctaatagggggttaaagggggacgatgtgaaggatagaacctgcggtccttcagaaggcgaagaagaaagaaaggggaagcattgaagaaagggacggatatactgggacagggagaaaaaagttgtggaaagtagcttttaaggactcatttggtggccatggatccaacgtgctcttctgagtgcgtttataacctcatacccagtgacttgaaggagcctccccagcctcctagaaaaaaactttgatcggaacgtgcccaaaaagcctgctgtgccattgaagactgatcatcctgtcatgggaatacagagtggaaaaaattttataaatacaaatgcagctgatatcatcatgggagtggctaaaaagcctaaaccaatttatgttgataaaagaactggagacaagcatgatc

SEQ ID NO: 16739 - DNA, 539 bp, Homo sapiens
tcactatagggcgaattgggccctctagatgcatgctcgagcggccgccagtgtgatggatatctgcagaattcgccctttcgagcggccgcccgggcaggtactttcacaaacaaaggcttagaattccacatgaaagtccacatgaggtaagtgtgcattcatgagcatgtgtgcactctgggcaaaccaacagaagataaacagcaaggaagagcagttgttttgtgaaaaataatcatctgttagctgtaaatcagaaatattggccaaatcagaattcttgtttctaaaatgaggcttctaaaattttcacataactgccaaactcttatttgtaattcttaaatatgccctaaagatcatctttctcttttatagacatttagtgtatacagtccacataaatgcatatactgattacctacagacaataatgagacttcagaaagaatcaaaagcaatagtgatggtggaatttttaaataatattcagctggggggaaatagactgaatttgtgtgatttcaagttattta

SEQ ID NO: 16740 - DNA, 527 bp, Homo sapiens
atacgactcactatagggcgaattgggccctctagatgcatgctcgagcggccgccagtgtgatggatatctgcagaattcgcccttagcgtggtcgcggccgagggacttttttttttttttttttttttttgctacagcaggagaagcgtgcgtgctacaggcatctgtcaccaaggccagagcaacttcccagtgtggcaactgcacagacagcttcaaaatgacattttagaaagtataaaattcttcaagaagaaaagaagtcttcatataagaaaaggcaagagaagcctacaaaagtaatataaagcattactctttgcaccccataaaattccattccctgatccctcttggtagatggaagaggaaatataatgctgaaaaaaaatacaacttctgacaagatattttatttggcttacctttcccccaggtcttgctaacactggtgtttgaacgtggagcaatgttaatatcaagtagctgacaaacattattacccaaagttagaactaccctag

SEQ ID NO: 16741 - DNA, 559 bp, Homo sapiens
tggggccctctagatgcatgctcgagcggccgccagtgtgatggatatctgcagaattcgcccttagcgtggtcgcggccgaggtacccattcatacttgcatcatctcttgtgctggagaagcttgctcaggcatatggggtgtcacaggagctgcggcacctgccttccaggagcctgtatataacctatatcctcgtgttactgctttaaaatcaggccctggagctgggaggactctcaagagacgaccctgtcctctgggccagtcctgacccactctggcagcgagtctaccgcagcctgctggagcactatttcaccctggcagtcagagggttccactgcagccatttctgccaaaaacctctcccaggatgggcccagatcccgaacagaaaaggactttgttctttcacttcttgatgccctcttcaaaggagtcagaggcatcaagtgtcacctgggactggaaagaagggaaaggggaggggatgagttggaatgagactcaaggcccaaggctgatgggaaaggatgggggtctgttgggcatgct

SEQ ID NO: 16742 - DNA, 389 bp, Homo sapiens
gtcccggcacgaggcaacttaaaatgttattgctaatactttaaaatgttttgatttatatttaaaaagcattgtaaattgtatactgcagtgtcgtctacatggcatttgacaggacataatgtaaaacataaaagtgcaattgttacacttacatatgatagtgaatggcaacgtgaccaatttttgtctcaagttaaaataccaaaaactattacagtgtctactggatttatgactatatgacaaatcttgatactgcatccacaacattactggcgtgctttttgctttgcttttgtgtgcttttgtgtgtctgcctattaatacgtccgctgcttttgtctgtgtctacatacaccttattaatactattggtattactattg

SEQ ID NO: 16743 - DNA, 629 bp, Homo sapiens
ctatatggcgaatggggccctctagatgcatgctcgagcggccgccagtgtgatggatatctgcagaattcgcccttagcgtggtcgcggccgaggtgcactgtcagatcctttggcatccggagaaatgaaaagattgctgtccactgcacagttcgaggggccaaggcagaagaaatcttggagaagggtctaaaggtgagcctaatcccctaatggagtgatattgatcagcactcctttagtaacacatgtagataagttacatttaatgttctgttctttggtgtcttgatatttatttacttaagcttctaaaaggctttttctacaatcagcagggttaaactgttcttggtggtttaaaagatgcttgaggctgggcacggtggctcaacgcctgtaatcccaacactttgggaggccaaggcggttggatcatttgtggccaggagttcgagaccatcctggccaacatggtgaaacaccatctctactaaaaaaagataaaaattagccgggcttggtggcgggctcctgtagtcccagctactcgggaagctgaggcacgacaattgctagaacctgggaggtagaggttgcagtgagctgatattgtgccactgcac

SEQ ID NO: 16744 - DNA, 446 bp, Homo sapiens
  misc_feature 415: n = A,T,C or G
gggccctcgtacagcatgctcgaacggccgccagtgtgatggatatctgcagaattcgcccttagcgtggtcgcggccgaggtacagtcttttgggggtggggagagaatatgaaatgttgtaacattgattgtgatggttgcacactctgtgactatactaaaaatcactgaatggcactttcagtgggtgaattagatggtatgtgaattatattgcagtaaagctgttaaatacacacccactcacacacacacgcccgcacacacacgtaactcttctctgcatcaccttcaatggttcagcgcacattctgtgcttcggtcatcatctattaaggcgggttcttctgtaatcaaggtatgcagacttaatctgttattacatttcttcatgccagcccttattggcttanaatatatcttccacactcatgtcgatctttc

SEQ ID NO: 16745 - DNA, 619 bp, Homo sapiens
tacgactcactatagggcgaattgggccctctagatgcatgctcgagcggccgccagtgtgatggatatctgcagaattcgccctttcgagcggccgcccgggcaggtactttaaatatgcagattttatggtattaaattatatcttttaaaaattattatatatgttctaaaaagactaataacaaaattaaaagaaaccacagactatgaggaaatgtccacgtatcatatatttgataaattaaggacttgtaagccagagattattaagaactcatttaactcaataaaatgagaagacaagacagacaacccaaattaaaaatgagcaaatgatttgtatacatttcaccaaacaaagtcaaacaaatggccaataagcacataaaaaaagctcaacctaattagatattatggaaatgcaaattaaaaccaccatgagatgccactttgtacctcggccgcgaccacgctaagggcgaattccagcacactggcggccgttactagtggatccgagctcggtaccaagcttggcgtaatcatggtcatagctgtttcctgtgtgaaattgttatccgctcacaattccacacaacatacgagccggaagcat

SEQ ID NO: 16746 - DNA, 386 bp, Homo sapiens
atacgactcactatagggcgaattgggccctctagatgcatgctcgagcggccgccagtgtgatggatatctgcagaattcgcccttagcgtggtcgcggccgaggtacaaaactaatgatcttcagttacacaagaacatttaaaagttttacatttgaaatagataattaagcaatgctgtgtgaaactgaaaaatgaaaactttgattaaaaaaagtattttcaaatataggatagtgcatgtatatgagaatacttttttgggtataatcttagtaacatcattatggtgttatgtaaacatatgacatatgacatataaaattatagtagatagatcactgtgttacccacttacacattcttctgtcgtattaagcaaca

SEQ ID NO: 16747 - DNA, 586 bp, Homo sapiens
gcgaatggggccctctagatgcatgctcgagcggccgccagtgtgatggatatctgcagaattcgccctttcgagcggccgcccgggcaggtactgacagactttctggaagaaaaggcttgtaggaggaaacttcagaattctattaaatggtgtaaatgatgaaattatagttgatatatgctagagcatcagtgctgggtattttagaagggatggagtcatcattggctaatgttcccagtgaaggattgagggaggaacattgtgctgaaggatcaacagagtctggatgtgctctgagcaggagcacatgggctttgcaggccacgaaacagcaagagtaaggacaaggtgaacacgataggttgatgcagtgcattaatgcccatgagcggtttagagaagcagtcagagatgagaggatggcagctagctgaaagataaggacagacaatggaagaccttgagtggctggatgtagatcgagtgacattgcataggttgaacaggtgttttatacagttaatgaaatccatttttgttttgttaacttttagcattttttaaaagtatatattgtata

SEQ ID NO: 16748 - DNA, 622 bp, Homo sapiens
gactactatagggcgaattgggccctctagatgcatgctcgagcggccgccagtgtgatggatatctgcagaattcgcccttagcgtggtcgcggccgaggtactggagtcctatttcctgataaactttttagactagtgttattttgcagagatagttaatatcatgaccgtaccttttaccaggagtttttcagtaaaataattttaagaacctgcggaaaaatacaaaatgaaacataatttaattgatttttactcatgtagcacaataaatcacttcatttcgagaggacctctgagcacttatttctcccaaatgggatcctcaccaattagtggaatgaatacgggtctagtttctgttaatgaaaactcattgacatgataaatacaaggcctaacttgtgtgataaagtttacttgataagcagaaaccaacatgaatttagaggagaaaaacagacgagaaatgaaagaccttttaatttagttatactgatattgctgaagttaattgtttattttaggacgccaggagaagaaaatcacactgttacctttttctttccttctttttactttcatctaagctgaaaggtatcactgatactattagccc

SEQ ID NO: 16749 - DNA, 495 bp, Homo sapiens
atggcgaattgggccctctagatgcatgctcgagcggccgccagtgtgatggatatctgcagaattcgcccttagcgtggtcgcggccgaggtacaggaaggatgttaaatgaaggggtggtattgcaggagagcattttaaatggcagaagtaaaaagttataatatttataattttgatgggtttaagtttatttttgtagggaagatttttctcccctaaaatagtttctagaatggcaaaattgtttccattattaaaaattgaagttattagttaaaaaaaaaaaaaaaaaaaaaaaaaaaaaaaaaaaaaaaaaaaaaaaaaaaaaaaaaaaaaaaaaaaaaaaaaaaaaaaaaaaaaaaaaaaaaaaaaaaaaaaaagggccccccccccccccctgggggggggggcccccaaaatttataaaaaattttttttttaaaacccctctttttggaaaaaaaaacctttttttttttccttgagggggg

SEQ ID NO: 16750 - DNA, 389 bp, Homo sapiens
ctactcactgtagggcgaattgcgccctctagatgcatgctcgagcggccgccagtgtgatggatatctgcagaattctcccttagcgtggtcgcggccgaggtactacctccccacaatgtggactgcaaaatgctggctggctgtgttgcttggtagcaaaaggggttgcatgctgctcagctctctgtttctctccaacccaagcatttggatgtgggactgtgccccgcctggtgtctggggctctgggaggggcatttttacttccctgtttacaagaagggttacatcctattccaagtccaaagtggacacttgttcctttgctcagcatcccatgcagactcagcaggttacccgctcccctgggaggtggctgtggccaa

SEQ ID NO: 16751 - DNA, 552 bp, Homo sapiens
ggcgaatggggccctctagatgcatgctcgagcggccgccagtgtgatggatatctgcagaattcgccctttgagcggccgcccgggcaggtacccaaattaccttgatttaaaccccagctcgcccatttattagccgtatgaccttggacaagttatagaatctctttgggtctgttgtaacatggtaataataatacctacctacctaacacacagggtggttgtgaagattaaaggagttgccacatgttggaagcatgcttatgctaacaggcatactcatgaagtatcagctatttaaattatcatcctccctcaacaggattctataaactggttccaagataaggtaacctgggataataaagttttctgatttggttagaaatacacctagaaaacttagaaaccaggcaaatgtgaaacataaagagtagatatctgggaacaaaaaagtatattataaaatgccaatactgtcaattcatataaaaggcatcttaatcaatctcccactccccacaaatggaaagcggaggatggtacctc

SEQ ID NO: 16752 - DNA, 640 bp, Homo sapiens
  misc_feature 556, 598, 618: n = A,T,C or G
tacgactcactatagggcgaattgggccctctagatgcatgctcgagcggccgccagtgtgatggatatctgcagaattcgcccttagcgtggtcgcggccgaggtacttcggtattacagcgccacccactggctagaagtcctcatagcacatatgagatgtagccataaaatagatgaattcttgaaataaggaatataacactgactattctgattcagtagaacataaaaaatgtctaacaaaacagaaccagacacattatattatttctacaagtaaacagaatatctattagatatgttcacaagggttttatcaattttgaaatccaagtgtataatccccaaatgctgtaaggacttaaattttatagccaaaacaattaacacataaaatgctatttcatctctgtagctgaatacataaatagtatctttaagtaaaagatgcatacttgcatttcattgctaagcaattcataatatatttaaatgctggtaaaacctacaatggcatctgcttcacttctacctttactagagaagtaacanaatacactgagcaaaggatatgtccaaaaaactaaactgaanaacagtttctaaataaagtncacagaccattcagataagcta

SEQ ID NO: 16753 - DNA, 718 bp, Homo sapiens
ctatatggcgaatggggccctctagatgcatgctcgagcggccgccagtgtgatggatatctgcagaattcgcccttagcgtggtcgcggccgaggtactactgtgttatttctaaaaccctgcccgctttttccatccccgcacatgcacaacaacggatgcaatcctggacattttaaaaagttgatagttttcattttcgctcctcaaaggagcctggggtaggaggaatccgcagtgggagctaacgatcctaagcgttgtttctctgttcttcttttcttctatagaacattataaacatcactggttcccagaaaagccatgcaagggatcgggttaccgttgtattcgcatcaaccataaaatggatcctctgattggacaggcagcacagcggattggactgagcagtcaggagctgttcaggcttctcccaagtgaactcacactctgggttgacccctatgaagtgtcctacagaattggagaggatggctccatctgtgtgctgtatgaagcctcaccagcaggaggtagcactcaaaacagcaccaacgtgcaaatggtagacagccgaatcagctgtaaggaggaacttctcttgggcagaacgagcccttccaaaaactacaatatgatgactgtatcaggttaagatataatctgtggatggatcatctgatgatgatggataaatttgattttgctttgggt

SEQ ID NO: 16754 - DNA, 523 bp, Homo sapiens
  misc_feature 26, 109: n = A,T,C or G
cactatagggctgaattgggccctcntaaatgcatgctcgacggccgccagtgtgatggatatctgcagaattcgcccttagcggccgcccgggcagggtacccgggtnggaaaagtatacagattaacaaaagaaaccttggttaaaagaggaaatacaaatcaatttttataagaaattcatagtgcatctgctgggtgtaggagaggaggcaaaaaaacagtggaagcactctaggtatctctggtagaaaacagctttgattggtttttgatttgcattggcagggaaacctaaacgttagtcttcaaaaatcaaacatttctcaggtgtgagcaactttacttatttcttccccatcttttacaattttcttcaatattggtaaataaaatggattactatcaggctttaaaaactcttccttttgccaagttattctgaaataacttcttagactctaaagaaaattagccttgctctgggacttggagagagaggagccttcagtaagtaataaat

SEQ ID NO: 16755 - DNA, 218 bp, Homo sapiens
  misc_feature 190: n = A,T,C or G
atacgactcactatagggcgaattgggccctctagatgcatgctcgagcggccgccagtgtgatggatatctgcagaattcgcccttagcgtggtcgcggccgaggtacatgaacctattaataaaccattcatgcttcccagtttggcagatgtgagcaaactatgtataggaattccaaaggtaactntttcctttcattactttacagaaatact

SEQ ID NO: 16756 - DNA, 612 bp, Homo sapiens
gactactatagggcgaattgggccctctagatgcatgctcgagcggccgccagtgtgatggatatctgcagaattcgcccttggccgcccgggcaggtactcattaatcttaagtatgttcttaaggttatcgggtgatcttactgtgcttcctgagtctatatgatacttctcctctctccttaaacactcagtgcctctgtctacaccctcactctcagatgatggccatgcttcctattcactgataaaatggagaacatcagaaaggaacttccattgacactcactgccacatctatccatctaccagcacctgctcccacataatctacctcctttcaagttttctcacagagccctggtggaatttcaacagttgtatcttagtagaatgcaatgtagaaatgggtaaatgcaatttgccaatgaaaaagactattcccttagacctagaacttctatttttatttatttaaccttaggaaataatctgggtttcagtcaaaaatttatataaaggaaggttctttgaatactgtaaaattagaaacaatacatctgcccaaagatgggaaaaaagcatgtttatcatcattaaaaagcattttt

SEQ ID NO: 16757 - DNA, 557 bp, Homo sapiens
gactcactatagggcgaattgggccctctagatgcatgctcgagcggccgccagtgtgatggatatctgcagaattcgccctttcgagcggccgcccgggcaggtacgcgggccctacctgttttttaagcaaagttttattggaacacagccatgctctcttgtttatgtattgtctatggctgctttctcactgtaatggcagttgttagttgttagtagttgttacagagaaagtatgacctgcaaagccaaaaatatttactatctgtaaatattttggctacattatgctacttctgtgaacctccacagacttctaattctacgactcagttattctaagactttagttggaggagagtgacacagcacaagctaggttttgaaaacctactttcttctatactaacaagaaatgagggcagctctagtgctacttagctaaagcagatttcaaaaagtcctagggagagctgggtgtggtgtcatgtgactgtagtgcagctacttgggaggctgaggcaggaggatcacttgaacccaggattttgtct

SEQ ID NO: 16758 - DNA, 550 bp, Homo sapiens
gcgaatggggccctctagatgcatgctcgagcggccgccagtgtgatggatatctgcagaattcgccctttggagcggccgcccgggcgggtactctaaaaagtaggtattagcaagccccattcacaaatgtggaggtaaaaactaagaaaatgttgaggttaagtcacacacttaaaaatagaaggcaacatataaatcaagttagtctgatttcaaaattgagtgtgggccttgagaaagcaggaatgacagatgcaaagataaagcactagagagaggaccagcctatctggagggttggatagattgtatgagtctttcggaagtacctgggccgcgaccacgctaagggcgaatgccagcacactggcgggcgttactagtggatccgagctcggtaccgagcttggcgtaatcatggtcatagctgtttcctgatgaagagtatctgggctggaaaattttgcaaagctggtttacatgaaggtggttttgtcccaatttcagacaattcctccaacatgcattttttggtataaaactggtt

SEQ ID NO: 16759 - DNA, 505 bp, Homo sapiens
tgcatgctcgagcggtcgtcagtgtgatggatatctgcagaattcgcccttagcgtggtcgcggccgaggtactgacataggaagatctattgcaaagagaaaaatgctaacagcagaagggttgtctcatatggtcaaagtgctaaaacatactttaggaaaaaactgatgaatatgctgttgactttttctgggggaaagggattttaattatgggggactttaattttctacattatgtttttaaataatgtttacacttacataagtctaatgttttaaagtcataaaagcgatagatttaattttcattttttaaagtagtaggatctcatttacaatagtaaccacactaaaaaaatcacctatactagaaaagataggctgagaaacataaaacataaatttactgaaaggttaaatattataaagatgttagtcctcttgtgtaaaatatgtaaattttactcaatccaatttctaatttttctaaacataaaatta

SEQ ID NO: 16760 - DNA, 489 bp, Homo sapiens
ttgggcccctctagatgcatgcctcgacggccgccagtgtgatggatatctgcagaattcgcccttagcgtggtcgcggccgaggtcacaacttcaccttaaaattaagaatccttgtcaaaatgtttaacctaaaacaaatcattaaaaacaatgagacagatctaaaatgtggaaggcttgtattcttccaaacctcactgacaggacaaacaaaaagaaggggaaccattctagattaagacagactaagagaaatatcaaaccaactgcgattcataaatcatttggggatgttacattagaaacggcggggtgggaactacagaagacatttttgggacaagtttcaatatggactataaagtagctgacatgagattactgctaattttcttaagtgtgataaaatcgtggttatgtatgtgaatgttctcattcttaggaaattcatgctgaaatacgtaagagataaagtataatatctac

SEQ ID NO: 16761 - DNA, 607 bp, Homo sapiens
  misc_feature 424, 582: n = A,T,C or G
tacgactcactatagggcgaattgggccctctagatgcatgctcgagcggccgccagtgtgatggatatctgcagaattcgcccttcgagcggccgcccgggcaggtacatcaataaaaaggattatggtgtcacacctgaatacatatgtaagcgaaacgaggaaataaagaaagcccaagaagactatgatcgttatatccaggaaaaccttaagaaagcagctatgaaaaggctctccgatgaagaaagggaggcagttttgcaggggctgaaaaagaactggggagaggtgcataaagaattccagtccctctcggtctttatagattctataccaaagaagatccgcaggcagaggctggaagaagaaatgaaacaactagaacacgacattggcataattgaaaagcacaagattatntatattgccaataagtaagaatggatctttaaagtataacaatttcaatgtaagggaaaaaaacatggaaaatataaaaaacttcaagtttttcaaaaaggaaaatactatgaagaggataaaaatagtcttaatcagaatgcttaggcaatatgcanagaataattgagttattcacttaca

SEQ ID NO: 16762 - DNA, 400 bp, Homo sapiens
atacgactcactatagggcgaattgggccctctagatgcatgctcgagcggccgccagtgtgatggatatctgcagaattcgcccttagcggccgcccgggcaggtactttttttttttttttttttttttttttaggggttatatatttacatgccaatatttagggcaccaaaattaattctgtaagatgcttctctgtcttttcctctttcatctaacagccacagaatgcagctatacttaccccagggtgaggaggtagtccctggaaggataatactacatttagttaagaaggctcccaaggttaagtagagttacttggtcccaatttggctcatctctctgcctttgaacagtgtgtgtatctgcctcccatgcctcttttcttctccctc

SEQ ID NO: 16763 - DNA, 331 bp, Homo sapiens
tgcatgctcgagcggccgccagtgtgatggatatctgcagaattcgcccttagcgtggtcgcggccgaggtacgcgggacatatgtttttatatctcttgcatatacccaagagtgaaattgctgggtcaggtggttaaggcgtaagagttctttttatggccaggcacagtggctcatgcctataatcccagaactttgggaggccaaggcgggctgatcacctgaggttgggagtttgagaccagcctgactgaccaacatggagaaactctgtctctactaaaaatacaaaattagctgggtgtagtgacgcacaacctgtaatccca

SEQ ID NO: 16764 - DNA, 465 bp, Homo sapiens
  misc_feature 182, 359: n = A,T,C or G
gcgactactatagggcgaattgggccctctagatgcatgctcgagcggccgccagtgtgatggatatctgcagaattcgcccttagcgtggtcgcggccgacgtactattgaatttcgtttattcccttgtcttggctccattctgggacggagaggaaagacaggtgcctgagagcggagnccgcgtacctcagctgcgcagcctgtaaccagtttttttaatgtaaaagtaagaatgccagccttaacctagccctgcagataaaagctaacttttattaataccagccctgaataatggcactaatccacactcttccttagagtgatgctggaaaaataaaatcaggggcttcanattaaaaaaaaaaaacaaaataacaaaaaacaaaaaccaacattgcctggccctgagggtctgtttgcaaaacttcttgtaaatctaatttcttaacactcactgc

SEQ ID NO: 16765 - DNA, 382 bp, Homo sapiens
tatagggcgaattgggccctctagatgcatgctcgagcggccgccagtgtgatggatatctgcagaattcgcccttagcgtggtcgcggccgaggtacttaatattatgtcatttatttggttcctagtatacttgccctccactttatataaaactaatttatgaaaatctggatttattttaaaaagatatcttgccatgaaggtatttgttttatagaaatatttacctccagatttctttctctaataagatggtgaatttaaaacactgtgttatttagaaacactgcatttacacttcatttattgtataaagcaaattgcattgaatcttcgccacttgacccaaaggccaaaaattgacatgagaacaatttgg

SEQ ID NO: 16766 - DNA, 369 bp, Homo sapiens
tatagggcgaattgggccctctagatgcatgctcgagcggccgccagtgtgatggatatctgcagaattcgcccttagcggccgcccgggcaggtacgcggggggcgacggcgatgggaccccagcgagagatctgcagctaggctggctgcacttgctccacgggtcaggggatcggagggggattgaagaatgcgccattaaaaggaaagatcaaggagtaaaccagaagaagaagaaaaagaggacttcaaagctgggaaggatgagttcttgcagcaacgtctgtgggtccaggcaggcacaggctgcagctgagggtggttaccagcgctatggagtccggtcctacctgcaccagttttatga

SEQ ID NO: 16767 - DNA, 301 bp, Homo sapiens
actcactatagggcgaattgggccctctagatgcatgctcgagcggccgccagtgtgatggatatctgcagaattcgcccttagcgtggtcgcggccgaggtacaatagattgcagcaaaagttaactatctgcagtaacatgtgaaatagaattgttatattacaattattttaatacagcttcattttgaaattcatcataatgtagagttgactaaaataaagctaaagggggaattataaccgaaaataaacaaaacacccagatcacataccacttccccaacacacacattgcaa

SEQ ID NO: 16768 - DNA, 456 bp, Homo sapiens
tatacgactcactatagggcgaattgggccctctagatgcatgctcgagcggccgccagtgtgatggatatctgcagaattcgcccttagcgtggtcgcggccgaggtactcccaagtcatgttgcaaaatccttttcaacatgcttgaaataaagaaagctcttaaagttaattttcccttgagaaattcgcaaattcagaggcatctacagctctgaatcaaacatggggtatgagagaggatcagatcaaaacttgtaattttttagtataaggttcactctggcagggagaaagaaaagtttaaaagagggagaagaggtaaagtgagagaaagagaaagatgtgaaaaatttgcacatattgaacttcataagatttgtatatttaacatggaaataaattgaatatattatacttatttgtcacataaagagaattttaagtatcttcta

SEQ ID NO: 16769 - DNA, 481 bp, Homo sapiens
aatacgactcactatagggcgaattgggccctctagatgcatgctcgagcggccgccagtgtgatggatatctgcagaattcgcccttagcgtggtcgcggccgaggtacaaaataacatcataaataacataaatgagaagttttcaagtatttcaatgtgccttgaaaagtttcaaacagtaattctcacaattggttagacaatcattttttttcttttcttttcctctcatttagtctcagagcctaaaaagaaatgcctccagtctctgttagccccgatgcttggaatgaaattaacaagattctaccttaaaagagaaaacttatgtgggcttttcaaattgtgaaaatttgttccctcttataaaatataatctttcccctgctgctggtttataaatatgggcatatagcccagagccattataaagaaaaaacaaccaaccacaataaactaaggagcctcatctgatggc

SEQ ID NO: 16770 - DNA, 389 bp, Homo sapiens
gactcactatagggcgaattgggccctctagatgcatgctcgagcggccgccagtgtgatggatatctgcagaattcgccctttcgagcggccgcccgggcaggtacatacagtaagcttctgccttcccagctgctgtctggttagtggaactaacaatttccttgatggaaattgaataaggtaatccaaaaagaaggctcttttagatgaaaaaacatggatagattattaagcgccaagttttctcttcaacctactgctcaccagtgctccctcctcagctccaaggctgtggagggctcatgaagtcacaatgttctactgagaatttagctttttttttttttggagtgggtataccattttgtaattccacttgataatgg

SEQ ID NO: 16771 - DNA, 468 bp, Homo sapiens
atggggccctctagatgcatgctcgagcggccgccagtgtgatggatatctgcagaattcgccctttcgagcggccgcccgggcaggtacacttcccaacctgaaaatggaacaaggattttaaactctttccagtggttcctctcttataaacaattaaaagctaaaaataaaagctagatattaaggagaaaaaaagaacaaaaagatgaaagaggggtggttttcttttaatgcttccaataccatagactgaatgaggatctgagttttgatgcacagtcgtagtctagacttgatcttgttatatataaaaagaagaacatctgcaggacagctctagagtcacaaggaaaccggtctgatcttggctctgcaatttatcaaccatgtggcctcagggaagtgatttaagccttggttttctcatgtgtaaattgggaataaaaacagcatctaccttataag

SEQ ID NO: 16772 - DNA, 369 bp, Homo sapiens
ggccctctagatgcatgctcgagcggccgccagtgtgatggatatctgcagaattcgccctttcgagcggccgcccgggcaggtacaggtttttaaaagccccacagaagtttataatacgtttaaaaacccatattaaaatttgaaaacttaaaaaaaaaactaagaaaacaatggcatatattccttttcttaaacccgtgaagtccattactttttgttcttgttatattctgccaaaaatgggatggggtgggagagatgcatagaaattgttttatctgccttgttaacaaagtgaactcaaggaccagcttttcttttctttcttcttttctttttttttggaaactctgtcacccaggctgg

SEQ ID NO: 16773 - DNA, 477 bp, Homo sapiens
ctcactatagggcgaattgggccctctagatgcatgctcgagcggccgccagtgtgatggatatctgcagaattcgcccttagcgtggtcgggccgaggtaccctttcagacacagtatgctttaatatttaagatctcattcaaaaaaaatttttctgatttccctcataccctctctgtctgaaatatttaagatctaaggaatagttgagctgcttattttacatagaggcactattcttttaactcctacattctgaatgctgaagtcagtgttaatttacgttaggccagattgattgggctgcattggcccaagcttggattgcccaaagagaagcttcaggacagcaaagcatggtagaacaaccaccaggaatgatgccaaatggacaagatatgtctacaatggaatctggtccaaacaatcatgggaatttccaaggggattcaaacttcaacagaatgtggcaacc

SEQ ID NO: 16774 - DNA, 183 bp, Homo sapiens
cgactcatatagggcgaattgggccctctagatgcatgctcgagcggccgccagtgtgatggatatctgcagaattcgcccttagcgtggtcgcggccgaggtacatccagagggcaacagttatagccaacaaccagacaaactagtgaagttaatctgtgagtgatgattttatgatactt

SEQ ID NO: 16775 - DNA, 366 bp, Homo sapiens
ggccctctagatgcatgctcgagcggccgccagtgtgatggatatctgcagaattcgcccttagcgtggtcgcggccgaggtacgcgggggggcgctggcacctcctcttacagctttactcctgccagcttgggaaaaggccggagaaggtgaaattctgtgtgctccctccggcgagagactttgtcagctcccgcacagtaacgtaagttttcttgtattcttagtgtagtttcgttaccggaagggggtctcgatccagaccccaagagagggttcttggatcttgcacaggaaagaattcagggtgagtccgcatagcaaagcaaaagcaagtttattaagtacctgcccgggcggccgct

SEQ ID NO: 16776 - DNA, 411 bp, Homo sapiens
tcactatagggcgaattgggccctctagatgcatgctcgagcggccgccagtgtgatggatatctgcagaattcgccctttcgagcggccgcccgggcaggtactcggggactaagagccctctggcacaaatggaagaagaaagaagggagcatgtagctaaaatgaagaagatggagatggagatggagcaggtgtttgagatgaaggtcaaagaaaaagttcaaaaactgaaggactcttaaaactgagcttccaccggcgccatgagcaaatgaaaaagaatttggaagcaccagcacaaagaattggaggaaaaacgtcgttcagtttcgaggatgagaaaagccaaacttgggaagcttcaacaacgtattttttagaacaacaggaacttctttaaagaacctt

SEQ ID NO: 16777 - DNA, 549 bp, Homo sapiens
ccctctagatgcatgctcgagcggccgccagtgtgatggatatctgcagaattcgccctttcgagcggccgcccgggcaggtaccagtcgaggaagagtaaggagaaggagcacatcacgaggaagaagaggatccacacgcggaagccagcgttgtttaatggcctctcttatgtcttcgttgccttccttgatattttcagttgcccccacaactaactggtgaatgctgtcaatctcagcttcctgttgcaaaaccttttccgtgaatatctcttggagtctggaaatctcaaccactctcccttcgatttgcctcacttcatcaaacaagctgttcatttcaccaattagtcgctgattttcctgttcaaacatttgtatttcttctggggataactcatcttcgcctttgccatctccccacgttcccaattcaggttgtgtttcagccaaaattttttctggacgttcttcagtggcaggggttttcttcagagtcttttgaaaggactttgtgaaactttctcagaagatgtggattctctt

SEQ ID NO: 16778 - DNA, 375 bp, Homo sapiens
agggcgaattgggccctctagatgcatgctcgagcggccgccagtgtgatggatatctgcagaattcgcccttagcgtggtcgcggccgatgtaaagtgaaagcgcacacatatctgtaagctctgagctcaggatttcacgtgaggtcctttgttcgggaggcaggggggttctccctgttgctggctgaggtcactgcattcatagtgtgacaggaggcagcaccatacagcaaagcagctggagggattgccttgtagagtggaagaccttccgcagaacagaacgctctctgtcctgttctgctggagaatgaaaagggatgggtggcctgcgtgaaacctctttatggggcttgtgctttctgacactgt

SEQ ID NO: 16779 - DNA, 405 bp, Homo sapiens
atacgactcctatagggcgaattgggccctctagatgcatgctcgagcggccgccagtgtgatggatatctgcagaattcgcccttagcgtggtcgcggccgaggtactttttttttttttttttttttttttttatgggaaaaattgccatctgacaaatgaatcatagtaaggattaacatcagtggtgatgaaggaacgacgccagtctaccttcaaacccattctttttaaatcctgaatagccagtggcgggaaataatcaagccaatgttctgcttcagaaaattttactatctcttcatcagacaggccaagggatttcataatgccccactggtatttagaagatccagctttagcaacagctttactcttttttcctttagctttatccttaatta

SEQ ID NO: 16780 - DNA, 578 bp, Homo sapiens
gcgaatagagccctctagatgcatgctcgagcggccgccagtgtgatggatatctgcagaattcgcccttagcgtggtcgcggccgaggtacaagctgaaagctgctgaaagctacaggccaatggggctctgctttacttctgccttccatatcttgtgtcctgcatcttaatggtggaatcagatttgtatccagaatactagctataaaggagtctggaaaagacagtttttagttttccaacttctgcgtttcaggaaggcatactacaaggaggaagtcgctgagtgatggctgatcctttcccaagcactcatcttcttaaacatagtatattaattacaatttagcccattcttgatggctcattgtcatttctgtgagcttctcttttcataatggcctgtagttggaataatcatagggccaagggattttaacatctgtagtaactttttgtcctaggttagcttgtatctctcccaccttccataactgctgctgagacatctatgtttgatatcatttgacgtcaacctcccctgcaagccacaggcagggagagcaccttaccca

SEQ ID NO: 16781 - DNA, 365 bp, Homo sapiens
ggccctctagatgcatgctcgagcggccgccagtgtgatggatatctgcagaattcgccctttcgagcggccgcccgggcaggtacgcggggaccacaaagaacatgtgagtcttgtgaacaaggaatgttgttttgttcagcgctaccaagagcgcggcaaccgagaaaacacggagtcgcccctagtggcgaaagtgcggatgcgaaaccgctggctcggcgtaagagcagagccgcggaagagaaccctagcggcggggaactagctcgccttcagtgctcacgggagaaggcaagttagaaagaacctgagacgtgacactgaaaatcagtagaagaaatacgccacatttattctaccgg

SEQ ID NO: 16782 - DNA, 358 bp, Homo sapiens
ggccctctagatgcatgctcgagcggccgccagtgtgatggatatctgcagaattcgcccttagcgtggtcgcggccgaggtacgcggggggggacaataggtgtcaagcagctggctctggagctgggaagtccaaggcctcttagtgggaaagtgaggcagggtcttgcagagcccactctacacacggccagatacaaatggctgtagaggtcttagataacaccttctcggtcatttatttgcacctcagaagaagccagggcttcggttttctgtttgtttcatcacagttgacaggttaaaagcattcactgcagcgatagctgttaatcccagcactttgggaggccaagt

SEQ ID NO: 16783 - DNA, 344 bp, Homo sapiens
  misc_feature 223, 242: n = A,T,C or G
actatagggcgaattgggccctctagatgcatgctcgagcggccgccagtgtgatggatatctgcagaattcgcccttagcgtggtcgcggccgaggtactacaaagcatatctgaaaggaaagattgagcgcaccaactatttgcagaaacgagctgcagccattcaattaccaagctgcttttaggagactgaaagctcataatttatgtaaacaaattanagctgcttgtgttattcantcatactggagaatgagacaagacagagttcgatttttaaaccttaaaaagactattatcaaatttcatgcacatgtaagaaaacatcaacaactacataaa

SEQ ID NO: 16784 - DNA, 520 bp, Homo sapiens
atacgactcactatagggcgaattgggccctctagatgcatgctcgagcggccgccagtgtgatggatatctgcagaattcgcccttagcgtggtcgcggccgaggtactgtgggttgcagtgtgcttagcagaatgtttgaggcattacatgttgtccatgttggacaacatggacaacatgaaccatgttgtccaaaacaatggctaccaggcacatatggccaattaagcaattgcaatgtcccttagtaagaaatgggatgggcttacagagtataatacacatcagatttcaaagacttcgcaggaaaaaaaagaatgtaaaatatttcactaataattttttttatcgatcgcaggttgaaatgatgctattgcagagataatgagttgaataaaataaacaactaaatgtaatttaatttcacctttttctttttacttttttagtatgaccactagaaaattttaaattacatgtgtgactggcattgatggctcacagatttctactcaca

SEQ ID NO: 16785 - DNA, 374 bp, Homo sapiens
gcgaatggggccctctagatgcatgctcgagcggccgccagtgtgatggatatctgcagaattcgcccttagcgtggtcagcggccgaggtacaatgagagtgcactggactctccattctctggcacccacacactgcgggggccaatgacctgggtctcactcctgaatcaggtgggagatagggttagcaggaataacttcttgggcttccctgcctcagagctccaggcccggattcgaacttacaatcagcattacaacaacctgctacggggtgcagtgagccagcggctgtatattctcctcccattggactgtggggtgcctgataacctgagtatggctgaccccaacattcgcttcctggataa

SEQ ID NO: 16786 - DNA, 428 bp, Homo sapiens
tactatagggcgaattgggccctctagatgcatgctcgagcggccgccagtgtgatggatatctgcagaattcgcccttagcgtggtcgcggccgaggtacacttctagcttctgccttggcgcttacgacttcagcttttacacttacgacttaagcttttaaaaaatcaaaatgtgattctcagtagagtgttgatgaataatgaaataaaatgtttatatatggactaatttaggttgaagattattaagtaaaaatacagtttgttgttatcaggtgaatggtaggaagtgaacactgtcaactttttggtgagctctggtttgagagtatataattcatgataaagatgatttatttgaatatcctatccagatcttttaggtggaaagtgagcatgagtctaaactcataccaagtcccatc

SEQ ID NO: 16787 - DNA, 644 bp, Homo sapiens
atacgactcactatagggcgaattgggccctctagatgcatgctcgagcggccgccagtgtgatggatatctgcagaattcgccctttcgagcggccgcccgggcaggtactttttttttttttttttttttttccgtaggcgcatacaaattaaaccatgctgctaaactaaaaaaaaaaaaatcatcatcatcatcatctgtgcatttctttggcagatgaagaatctgattccaaaacaaatgatttctaaggtcctagggaagaacaaaacacatcccttcactaagtattattaatactttttgagaaaaacttcaccataagtaaaatttgaacgaagtcaaataacaatagaagttaagcttcaactgatcaattactagtcactctttgtcagttactatacacatgacacttgatagaataatcatttgtaagttaaagagaaagttgagcatattaaatacctacattaaaagtatatacacacttggcctcacgagaatgacatttaatcacactgccacacttttaacacatgccgatttccactcccctctgactgtggtcgtgcaggaatgaataccatacttcaactttcattttcagaatattgaatctttgttaaaattcatgctta

SEQ ID NO: 16788 - DNA, 312 bp, Homo sapiens
agatgcatgctcgagctgccgccagtgtgatggatatctgcagaattcgcccttagcgtggtcgcggccgaggtactcttggcagacatcactaatccatcacagcatgccttcccactgatcacagatgtagcttcagggcattcgagttaccactaagatggatatgagtgacccttccttatctcactcttctcctcctttcacagaagcaggatttgaggcccagagagggaagctataataaactcccctaagtcaggtcccttctaagaggcataggtaggtttaaaactcaagcctaagaaactt

SEQ ID NO: 16789 - DNA, 405 bp, Homo sapiens
gactcacttagggcgaattgggccctctagatgcatgctcgagcggccgccagtgtgatggatatctgcagaattcgccctttcgagcggccgcccgggcaggtacagtagacagttttcctgaggaggaagaggaagatgaagaggaagaaggtgaagaggatgaagaaggtgaaggggatgatggttatgaacaaatttccagtgatgaagatggaattgctgacttggaacgtgaaacatttaagtatccaaactttgatgttgaatacactgctgaagacttagcttcagttcctcctatgacatatgatccatatgacagggagcttgtacctcggccgcgaccacgctaagggcgaattccagcacactggcggccgttactagtggatccgagctcgg

SEQ ID NO: 16790 - DNA, 547 bp, Homo sapiens
ctatagggcgaattgggccctctagatgcatgctcgagcggccgccagtgtgatggatatctgcagaattcgcccttagcgtggtcgcggccgaggtaccctggtgctataggcaagtattcatgttgaagttagtattaagaccaaaattataatgcttttcttaatgggggaaccctaaggctactcactcagtccattgaggggataagagagatggctcattcccatccagttttgtttacaaacgatgttgctcaaatttaggtgactggctactagggaaataaatgaatgtggaattgaggatggaacaaagaattcaatgctttacaataaatggactgtatttgagagttcaagagaggattggagaaaataactgagtatgtaaaaaatggtaagtttctgattgttcagttgaaggcaagtggctggctcgatgaaatgacataactgatagttttcatctgtgaccctgatatcttagcctctatctcaaaattgagaaatgagcagagtttatcagaaaggaatttcattgctg

SEQ ID NO: 16791 - DNA, 574 bp, Homo sapiens
  misc_feature 532: n = A,T,C or G
tagggcgaattgggccctctagatgcatgctcgagcggccgccagtgtgatggatatctgcagaattcgccctttcgagcggccgcccgggcaggtacattttcaagacgctagcctcagccttgcacgagagaggccaccatacagtgttcctcctctctgaaggcagagacatcgccccatctaatcattacagcctccagcgctacccagggatctttaacagtaccaagaagacacctgctatggcgatgcgggcagtgcctttgccgttcacgacctggaggaggacacctggtatgcgactgggatcttaagctttgataagagctgtgctgtggctgagtatggtgtgtatgtgaaggtgacttccatccaggactgggttcagaagaccatagctgagaactaatgcaaggctggccggaagcccttgcctgaaagcaagatttcagcctggaagagggcaaagtggacgggagtggacaggagtggatgcaataacatgtggtttgaagctgatgggtgccanccctgcattgctgagtcaatcaataaagagctttcttttgac

SEQ ID NO: 16792 - DNA, 469 bp, Homo sapiens
  misc_feature 350: n = A,T,C or G
tcgaggcagtgctcgagcggacgccagtgtgatggatatctgcagaattcgcccttagcggccgcccgggcaggtacatatagaatagtataaatacaataaatgtttgaattatcgtataacttgagtctaaattttaagttagtatcctgtattaagaactgggttgatcaaatggttctttctttgcacatatcaaggctttcgactattcccaatcaggtcttcccaaatttgggcatattcctgcctctgcctaccctgttctaatttggcactctaaagatagttcataaaaagcaagccaaagatagaaaagagagctaaggctacaggaggaatttactctntaacatttgggggaaggaaaatgaggcttgtctacagcagggactggctgtcttccagaaatggtttcccaaggtgttccctacctctctttttcttggatatctttttgcattataga

SEQ ID NO: 16793 - DNA, 478 bp, Homo sapiens
ctagatgcatgctcgagcggccgccagtgtgatggatatctgcagaattcgcccttagcgtggtcgcggccgaggtacttttttttttttttttttttttgccgttaaaagaaaaagcagaaaataataaagtaatataatgtggtcttgcaaataaacaagtctgtagattcttacgattttcaataacaatgttcttgccccgttcccggcacctacaaggccaaatgagctacctgctccatccttcccattctccctgcacgtcccattcaagctcttctgcaagtggccatgttaaaaatttataaaaatatccgagtctgcctggcacgctcagagattctcatgacaagttcttcccttactgagcacttccctgaccacccaaaataatcaccccctccatttacctacacacatgtgcacgtgcgcgcgcgcgcacacacacacacacacacacacacacacacacaca

SEQ ID NO: 16794 - DNA, 609 bp, Homo sapiens
tacgactcactatagggcgaattgggccctctagatgcatgctcgagcggccgccagtgtgatggatatctgcagaattcgcccttgcggccgcccgggcaggtactttttttttttgttttttttttttttctataaggtagagtggatattcaggctcagattttagctaaattaagaaggacctttctctgtccagaatagtatcacaaaattaagactggctctggaagagagacagaggatgccctcttttcattgtcatacaccatttgaattgtatttgataaatttatattgtgaccttgaaaatgaaaccactcagaaatcctggttaatttctgccccatgcgtcagtctcaaaggggagacctgcctttgccaacagaccattcagtaagaaacaaaaatattaaaactccacaatcacaacttatatggtcaataatggtttcaaaaattaaaaaaattgatcctggcatatttacaagcaattatatataaatacaggaacatgtatattatgaattttctttaaactatttgcctgcattgattatagagagaatgaagcctcacaatgaaatctgattgaataaatttaaacac

SEQ ID NO: 16795 - DNA, 366 bp, Homo sapiens
gactggggccctctagatgcatgctcgagcggccgccagtgtgatggatatctgcagaattcgcccttagcgtggtcgcggccgaggtacgcggggctcttttctcgggacgggagaggccgtgtagcgtcgccgttactccgaggagataccagtcggtagaggagaagtcgaggttagagggaactgggaggcactttgctgtctgcaatcgaagttgaggtatctcatttgccatgaaactgctacacctgctcatggcgtttaaaatccttacaactttttgagaaaacgacgttgcactatgtggcaagagtcacaggatagattctatttttaagaatttatcctatggaaataattaaa

SEQ ID NO: 16796 - DNA, 598 bp, Homo sapiens
tatagggcgaatggggccctctagatgcatgctcgagcggccgccagtgtgatggatatctgcagaattcgcccttagcgtggtcgcggccgaggtacatggtaagggtttagctcatcctcaggaaccccagccatggtcaagagtcgagccacttcctctccaggctggcagtagcgcccactagctacaggtgcattcccctgcctattaatattctgcttgacccaaggcaactccagccagccccactgaactattcttaccagccgctgccatggcctgctatctctcagcagagtcaagcaacgctgcaaggctggagaatccagccaagagaagagccaggtagccttatccctccagcctaaccggtcacctagtcccaccagaaaccgccatcccaactgtagaaagcccaaaaagagggccagagccaggagcagcaaagcacccagcagcttaagaaaacgagtaaacagtcctactccacagtaaaacccctggcttagaaactgaaacatgacctgggcccagccccctaaccgccctgtccacactcccatccaaactcgaaaaaggtccaaatcactgcttt

SEQ ID NO: 16797 - DNA, 350 bp, Homo sapiens
ggccctctagatgcatgctcgagcggccgccagtgtgatggatatctgcagaattcgcccttagcgtggtcgcggccgaggtacagtaatcctgtgagaaagacaggacagaaaccactgtgcctattttacagatacgaaaactgagacacaggtaaaggggcttgtctgtagtcccatagctagcagatggctggagccaagactgaggctcgttcttcaatgctgagccagggctccttccgctgcaccacaagaacgctagtccactcgccaccagccttctcattccctcttcctccattctaatcatttctagctggctggcctccacagagcataggaaaaca

SEQ ID NO: 16798 - DNA, 236 bp, Homo sapiens
tacgactcactatagggcgaattgggccctctagatgcatgctcgagcggccgccagtgtgatggatatctgcagaattcgccctttgagcggccgcccgggcaggtccttctatggattatagaggtagggaggcacctcatatgaactacagagacagggatgctcacgctgttgacttcagaggtagggatgctcctccatctgacttcaggggccggggcacttatgattta

SEQ ID NO: 16799 - DNA, 558 bp, Homo sapiens
  misc_feature 415: n = A,T,C or G
acgactcactatagggcgaattgggccctctagatgcatgctcgagcggccgccagtgtgatggatatctgcagaattcgccctttcgagcggccgcccgggcaggtacttacatccccccagccctgggagcaagaggacagcgagacttcaagccttcacaccttagcacaaagtgtgtcagtccccacacatcactcctgtgagaactctaggacccagcatactaggaatatcttatggatcagagctgtcaccacaacggtatccattatggtaatgtggaaatcataattggcttgtgaggttaggagagagaagaaagttactgtatttgaagttcagggagcagtatttgcttctaaattgctataccaaagcagggaggaaaagacaaatgctatcctttttgttntaaatctgtaagaactaaagaaatggagcagtatttgatttatcctttttatctgattacaggaaaggcagactacaagttactgagcacctccctgagaaaattgaaagtagtttacaggaagatgaacctgagaatgatgc

SEQ ID NO: 16800 - DNA, 549 bp, Homo sapiens
actcactatagggcgaattgggccctctagatgcatgctcgagcggccgccagtgtgatggatatctgcagaattcgcccttagcgtggtcgcggccgaggtactatgctcttgcattcttttttcttgtctcttctaatctgctttgattttctattatacatcagataaattgccttccatagaagcaagggactagtgtaatttcaaagcaagaatttaccattaaattgcattaaattgtataggaaattgttgagataaagtagttaaggtatttatattaatgtgaccttgatagaactttagagaaacaaagtaatcagagtgggcaatactacttctgaatttccactctgagttaaaagcgaggttaagctttatttctaatataaatttgttttttcctgcttgttgtatgattataaattatattaagaatcgtgtttcttaggatttaccaaaagagtaatatgttattgagaaaagctctggggttaaaatgcttgtgtctattaattctttaaatatgattttaatggtgatact

SEQ ID NO: 16801 - DNA, 451 bp, Homo sapiens
tacgactcactatagggcgaattgggccctctagatgcatgctcgagcggccgccagtgtgatggatatctgcagaattcgcccttagcgtggtcgcggccgaggtactctattccttttacctagccccttatatttttatagcactttccctaatatcacatatgtatttgttgactttcttctctggcagaaggtaagttccatgaaagcagagttttgtttggttcatttgcctgttccaagtacgcgggggtagatcttcaatttggatatttggaggagtgaacatcgttgttttgctggagggaagatcttgatggtgtttctttccccaaaaattgacttagatattaaaatttggtgcttataagagagagttaaaaaaaaataggattgcttcaattcaaattacattcgagacaagctgagattttttattgaaaattat

SEQ ID NO: 16802 - DNA, 580 bp, Homo sapiens
  misc_feature 457: n = A,T,C or G
ctatagggcgaattgggccctctagatgcatgctcgagcggccgccagtgtgatggatatctgcagaattcgcccttagcgtggtcgcggccgaggtacaaaatcatgtggatagatgtgcatttgtgggtatctgtgaatacaaatacacaattttcagacagaagtagtataagaaaaggaaatcaaacaaagtcaaacattttaagtgtagctcttggtgcactttaaaaaattattaaattgaagctgtagtttattctcatcattgtcatcctatattagtgattttctttagcttttgaaattaaattcataatattacaattctgaattcctatgtatgtatatgttaagaatcctttaatgggactgactttcatatgtgtgtggctgcattctgaaatagttgtctagttgatacataaagcagtgagtgctatttgtaagatatatntatatttaaagtcttcatacaggtattaactagctccaatattactgaaatgatttctccaaatatcctatatttaaatatcatgctggcaaatttattataactttgggttgaaaaaatata

SEQ ID NO: 16803 - DNA, 405 bp, Homo sapiens
ctactatagggcgaattgggccctctagatgcatgctcgagcggccgccagtggtgatggatatctgcagaattcgccctttgagcggccgcccgggcaggtacatgattgttttggttataatttatttatagaatgtatcttttctatattacattcttaatattcgccagatattatattgaccattctctttaacttcttaatgtggcatatttcaactctcctttcccacaaacagcttcatctgtctccaaggttaacattctgaagctggagagtccttggagaaactctgctcagcttttttgtgacatttagaaaaatgcatttggtattctccaaaccagaatgatacattgtctcaaaatctgttagacagctgatgggtgtttttgagcaacg

SEQ ID NO: 16804 - DNA, 445 bp, Homo sapiens
acgactactatagggcgaattgggccctctagatgcatgctcgagcggccgccagtgtgatggatatctgcagaattcgcccttagcgtggtcgcggccgaggtacaatacatcatatgaaatagagaaaactaactataaaccagtatattacaaatccttgataccgttctcaaatgattaattcagtggtcttcaaatactaggtcttgtatgaccctcacatatatttaagttgccatctaaaactttatcataagcttcctagttataaaacatggagtttcctgtgtacaaagcagactgcccgcaaatcgaccggtggtaaagcacccaggaagcaactggctacaaaagccgctcgcaagagtgcgccctctactggaggggtgaagaaaccttatcgttacaggcctggtacctgcccgggcggccgctcgaaagg

SEQ ID NO: 16805 - DNA, 501 bp, Homo sapiens
tacgactcactatagggcgaattgggccctctagatgcatgctcgagcggccgccagtgtgatggatatctgcagaattcgccctttcgagcggccgcccgggcaggtacgcgggataaaggataatttatatcttattacagactgatattttgccttttcatgtgtcatcatactgtcagtatattaaaagaaattacagcctaaaacttaacatataccatacatatatattaaggtgtcaaatagctattctcactcatcttacaaatattgtaagagcaataaaaattaattgaggaattataagcctacaggtcatcagccttgaggtgattactgatgatttgggcttacacacatgtcagcaagatagggagtgtggataggggagggctggtagctaacaaggggcctcacagagaaatattagtgactttaaccaggtttcagaatctgggccttacctttacaggttcaacaaaagaatggcatcaatag

SEQ ID NO: 16806 - DNA, 359 bp, Homo sapiens
ggccctctagatgcatgctcgagcggccgccagtgtgatggatatctgcagaattcgccctttcgagcggccgcccgggcaggtacaccttcactaacctataataaatccttagaagctatcaaaaagagattactcttttaaaggtcccatctggagtaaaattccatgactacaatagtcattctcgctacgctttcttataatttctaaagtaaatctagtagttactcaaataacatttttcctctttgagttttttttttttttttttgaaaaggggtccccttttttccccagggagggggcccgggggggaaaaaaggccccctggaccccccaatccgggggcaaaaaaa

SEQ ID NO: 16807 - DNA, 460 bp, Homo sapiens
agggcgaattgggccctctagatgcatgctcgagcggccgccagtgtgatggatatctgcagaattcgccctttcgagcggccgcccgggcaggtacttttttttgttcgagaataaagactatacaattagtttgaacttctgttatgttttttaattaggacatggaaaggaatatagggtaaggtcaataagcctcgctgtttttgatctcaatgaaaaattctagggccaggcgcagtggctcacgcctgtaatcccagcattttgggaagctgagggaggcggatcacaaggtcaggagttcgagaccagcctggctaacacagtgaaaccctgtctctactaaaaatacaaaaaattagccaggtatggtggcgggcgcccgtaatcccagctactcgggaggctgaggcaggagaatggcgtgaacccgggaggtggaggttgcagtgagccg

SEQ ID NO: 16808 - DNA, 375 bp, Homo sapiens
ctatactggcgactggggccctctagatgcatgctcgagcggccgccagtgtgatggatatctgcagaattcgcccttcgagcggccgcccggggaggtacaagttgtgacattcgttcaagttgctgctacatgggtattctgagctggctaccaggaaggactcctgcgtttccgagagccaggtcagcgtctctaggagccgtggtgcaggtgcatggtgcccagcacggcactgtcgtaccacctcaagtgcctccccagctcaatctccttgttacagtaaccagtcagatgacggctcagatacagagatggcttctggttctaacagaacaccagttttttcctttttagatctcacttactggaaaa

SEQ ID NO: 16809 - DNA, 329 bp, Homo sapiens
atagggcgaattgggccctctagatgcatgctcgagcggccgccagtgtgatggatatctgcagaattcgccctttcgagcggccgcccgggcaggtacccagatgccacttgtcagcagcaggatactttttgcaacacgaaagcataattattttagaagaagagagtagaagggcagaatagaattcaacttacagaagcacggagtagtgtgtggttggctgttatctgtccccctgggaggaggactgttttgctcccttgttttgatgttaaacagtagcttaaaggctttcccccccataccaactaacagccaaatgacaa

SEQ ID NO: 16810 - DNA, 511 bp, Homo sapiens
agggcgaattgggccctctagatgcatgctcgagcggccgccagtgtgatggatatctgcagaattcgcccttagcgtggtcgcggccgaggtacacatcctgtatgtggggtccatgcctcttaagaactcctttcgaggaactatccggtaagaagtatccttttcacatataccttagcaactggaataagattaggatagactagggacaccagaatttttgagcaacaagtacaattcctatttttcttttgcccgtttttctttcttctttgtgctttgattctcccctagtagtatccaaaaaatacatggatgatctaggacaaaaggaaaatattaacgagagggtttaaaagtaaagcaaaggctgggcgcggtggctcacgcctgttatcctagcactttgagaagctgaggcgggtggatctcttgagatcaggagtttgagaccagcctagccaacatggtgaaaccccatctctgtaaaaaatacaaaaattagcca

SEQ ID NO: 16811 - DNA, 489 bp, Homo sapiens
agggcgaattgggccctctagatgcatgctcgagcggccgccagtgtgatggatatctgcagaattcgccctttcgagcggccgcccgggcaggtacgcggggggggcgcgggcctgtgagccagttggagttgcggcggcgggaacgattgggctgagcagaggacgacatgttgcttttcgtggagcaggtagcatctaaaggaactggtttaaatcctaatgccaaagtatggcaagaaattgctcctggaaatactgatgccaccccagtaactcatggaactgaaagctcttggcatgaaatagcagctacatcaggtgctcatcctgagggtaatgcagagctctcagaagatatatgtaaagaatatgaagtaatgtattcttcatcttgtgaaaccacaagaaatactacaggcattgaagaatcaactgatgggatgattttaggaccagaagatctgagttgccaaatatatgatgttt

SEQ ID NO: 16812 - DNA, 436 bp, Homo sapiens
atggatatctgcagaattcgccctttcgagcggtcgtttgggcatgtacctgattttatttccagttttcatccgaattcactggggaatgggacgattttgcttttgtttcttggccagaatcgcttaatcctgaaagtcttgtgagaagacatggcgagcagcggagtcaagaacacaccacgatggcggagaaaggaagagccccgcgtacgcgggcagaaagagctgaacactctgtgcagcgagttacatgttgagccatttcaggaagaaggagagacgaccatcttgcaactagaaaaagatttgcgcacccaagtggaattgatgcgaaaacagaaaaaggagagaaaacaggaactgaagctacttcaagagcaagatcaagaactgtgcgaaattctttgtatgccccactatgatattgacagtg

SEQ ID NO: 16813 - DNA, 494 bp, Homo sapiens
tacgactcactatagggcgaattgggccctctagatgcatgctcgagcggccgccagtgtgatggatatctgcagaattcgcccttagcgtggtcgcggccgaggtactcttctgacttttcccccacaagctgctaaaaagatcattgcttttcgttatattttggactggatacctggctaatcagcattcactggcaaacagcactgtgaggaagacagctgcctaaggcctgtttgtcaccctggaagggaagcagcaaagaggtagaagtatcctgagagaagaaaatagcgtcaagagggagaaagcagcagctcccatcaagcccttaccacatgctgtgcctggactttggtatctcatcactttgggtgaagaaactcaggctcaagaagttaatctctcttgattaaaccccttgctttgagcctcagtgaatttgtttcacaacccattagacagacagttgtaagtgaggtgactacattgc

SEQ ID NO: 16814 - DNA, 399 bp, Homo sapiens
  misc_feature 262: n = A,T,C or G
tacgactcactatagggcgaattgggccctctagatgcatgctcgagcggccgccagtgtgatggatatctgcagaattcgccctttcgagcggccgcccgggcaggtactcggtccgggacccttggcgacagaagacagcctccgagagcgcgggcttcctgtataaatgcctacttgtctggcaataaagcagctcccactaaccccaacccaggccttaagactggttggatgactgatttaagcctccattgagctntattttcgcacctgtttaatgggaaaataataaaagcttagatttattgagcactccctgtatatttgaagcatggtgctaagcatttaatacatattttgtcatttaattctcattaaaccaaatgagatagggat

SEQ ID NO: 16815 - DNA, 460 bp, Homo sapiens
agggcgaattgggccctctagatgcatgctcgagcggccgccagtgtgatggatatctgcagaattcgccctttcgagcggccgcccgggcaggtacctactttttgaggctgcaagattaaatgagatgatgtttgtaaggcccctaataaaattggtgtaagccaagccctcatcaagtggtattgataccatgttggagatgatggaggagaacaacttatgttaattgtctttaaaatgccttaacttcaatttttgggaaatttagcatatttcaaacagaaataagatgtaaatatatattcaacactttagtaacaggataattattccaacaacatattagttgatcttaggtatcaagataaaagaatacattgtaagtgtgataatataaataaatgtaaattctttaaaaaaatttttttaatttttaacttttgtggatacatagtag

SEQ ID NO: 16816 - DNA, 502 bp, Homo sapiens
gatacgactactatagggcgaattgggccctctagatgcatgctcgagcggccgccagtgtgatggatatctgcagaattcgcccttagcgtggtcgcggccgaggtacctttgtgtctagttttaaccttttgatcccaggtcctgccatgaccttcaacatgggggccaggtcttcagcatagcggcacataggaccagtgcacagaaacaactcttgggctcccacagccaagggaaactgacctttgttgggaaccacacctggagaaggcttgtgtccaaatataccattgaagaaagcaggcattcgaatgctaccaccaatatcagagcccacaccaataactgagcaggcagctgccagtgtgcagccctcaccaccagaactttcacctacaatatgctgtaaatcatatgggttgtttgatcggccatagatcttgttactggattcataccacatacacaactcactacagttggttatgccaagaggaat

SEQ ID NO: 16817 - DNA, 666 bp, Homo sapiens
tatagggcgaatggggccctctagatgcatgctcgagcggccgccagtgtgatggatatctgcagaattcgcccttagcgtggtcgcggccgaggtacgcggggggacaaacagtgtgcacccaggtgccactcagatcagtggtgcatgatcggccatgcagaccagagctgctggggttagaacattcttactttgtttcctccccatattctccattcaaggaggggtctttctcctggcatgattacaaaggatagatttttgcctgtttatggggaaatcacaaccagaaatattcaacttgagaagaaactaatgggcctagcaacttaatatagagcagactcacaccagaactacattccctggccctctgcctgtgtgcttctggccaggccttggttggcaagtctgacccgagaaaaggatctgcagaaaatcagactatgggatcactttgtttgtgcattgggaatgacattctttcccaccccaagaaaacctttgggactttcagagacattgtggctagccaaccacatggtcagcctcaaagttgagaggctcagtaaccctcctatccctagagaattccaaagtgtggatgtaatttaactagaaagccattggtgactatctgtgatcctctggaagtatgctatg

SEQ ID NO: 16818 - DNA, 491 bp, Homo sapiens
ctatatggcgaatggggccctctagatgcatgctcgagcggccgccagtgtgatggatatctgcagaattcgccctttcgagcggccgcccgggcaggtactaattgcacttaacacaatgaacctttagtttccaaccagttttcattctctgcagacccgggctttctttttataaaaactgctttcaaagggcatagagacaccacacatggtccacagtaaattcaaatagagaggtgcaatagttgcagtggtaaacacacaaaaaaatacatttttttggactaaaaatctggtcacggataaaagcatgtgccttttcattcttctctgggatgttacaacagcaacacgctctaaaacaattaagttacatgcataatgctaaaagaatgtgagcaatcctataaccagctttaagccatctgcttgatttcttttttttttttgtggggaacatatatgggaaaagagaattccccttttgt

SEQ ID NO: 16819 - DNA, 476 bp, Homo sapiens
ctcactatagggcgaattgggccctctagatgcatgctcgagcggccgccagtgtgatggatatctgcagaattcgcccttagcgtggtcgcggccgaggtacttcccacttttcataacgagttggagcctagagttgatctactccagcgactgtttcgacttctttgcggccaccatatgtcttacctgaattactgcaacagcctcttaatttgtcccccattgctaatcttatttcatatccttcaaattcgtgtccatagtttagctaaaatgatctttctagaatgtatgtgtgatctgtctagagcaccatttaagcctcccagtgctttccttgtctctctagcttttatccgtcaccaagcccaaactccacattctgaccataatacgtgctttctaagttccaccatgccatgatctcctgcttccatacatgccctttgcttttctttaaacctatcctactt

SEQ ID NO: 16820 - DNA, 501 bp, Homo sapiens
  misc_feature 369: n = A,T,C or G
ccctctagatgcatgctcgagcggccgccagtgtgatggatatctgcagaatatgctcttcggagcggacgtcatggctatgtgctcaattctccctttcgagcggccggcgggcaagtactttacttctacttattttgcgggggggaaagcagcacggaaatgccctgtgactggcagcggaaaaggcgaccaccgcttgtgtatcttcactttagatcttgcaggcataatcaactgtggttctaaatggctatgatgtaataaaggaatgccttgttcatcaaagcgaaatttttgcagacagaccatgccttcctttattcatgaagatgacaaaaatgggagatgagatggatcaaggtgaanatgacccatcatctactttctccaaagaaaacctaattttctcagtgggtgaactcatcattgctggaactgaaactacaaccaatgtgctacggtgggcgattcttttcatggccctttatcctaatattc

SEQ ID NO: 16821 - DNA, 432 bp, Homo sapiens
ctatagggcgaattgggccctctagatgcatgctcgagcggccgccagtgtgatggatatctgcagaattcgccctttcgagcggccgcccgggcaggtacaatattgtagctatctgtttacctgtctttattccccatccaactctaagctcggagaagacggaccactgtaatctccacaatctagcagagtgactggcatacagcacagtaaaggcttcacagctagttgctgaagaataaaatgatgcctaaagtaagacttttcaacaaaaaataattaatttaatgttttagagagccctccatgtaacttttgtaaatcatatttaatcctctcaaaatacaaagaactttgatattttcttctggttctttcaaatttcaataaaaaggctttaacttaaaccctttgtgctgatttttctta

SEQ ID NO: 16822 - DNA, 388 bp, Homo sapiens
acatatacggcgactggggccctctagatgcatgctcgagcggccgccagtgtgatggatatctgcagaattcgccctttcgagcggccgcccgggcaggtactgtggattgtattttcaatttttattgaaatctgtcctttgcccacagtcgggtttcttttcagcctggcccaatctctttcagttcctgggcttgaaggcctgtgctaatctgtatcagacatcaaggcagataattgaagggagaactctcagggggagagggaaagggaaggtcacctcaatctgtcccacttaactagggaaaaatttctagatgaaatttgtgaaatgttcaaattacaaaagggggaagatgaagatggtttgggtctgaaagaaaagt

SEQ ID NO: 16823 - DNA, 495 bp, Homo sapiens
  misc_feature 422: n = A,T,C or G
tatatggcgaatggcgccctctagatgcatgctcgagcggccgccagtgtgatggatatctgcagaattcgcccttcgagcggccgcccgggcaggtacaccactgtgcctgctttgaatcctttacgaagagaaaaaaaaaattaaagaaagcctttagatttatccaatgtttactactgggattgcttaaagtgaggcccctccaacaccagggggttaattcctgtgattgtgaaaggggctacttccaaggcatcttcatgcaggcagccccttgggagggcacctgagagctggtagagtctgaaattagggatgtgagcctcgtggttactgagtaaggtaaaattgcatccaccattgtttgtgataccttagggaattgcttggacctggtgacaagggctcctgttcaatantggtgttggggagagagagagcagtgattatagaccgagagagtaggagttgaggtgaggtgaaggaggtgct

SEQ ID NO: 16824 - DNA, 366 bp, Homo sapiens
ttgggccctctagatgcatgctcgagcggccgccagtgtgatggatatctgcagaattcgccctttcgagcggccgcccgggcaggtacttcgtgtaattccacctacccagacaggaatggcacaagtgattatacctcaggggcaacttgtggatgtgaatagtcctcgggatgtccctgaagagaaacccagtaacagaaacttaccaacttgtagagtggatactctagcagacaataccagcaattacattcttcattctcaaacattcttcccattgcccaaaaagtcagtgaccggaatgctggaagaaccccttatggggcctttttaaccacttttttctaatacacctatatgggc

SEQ ID NO: 16825 - DNA, 227 bp, Homo sapiens
agggcgaattgggccctctagatgcatgctcgagcggccgccagtgtgatggatatctgcagaattcgcccttagcgtggtcgcggccgaggtacgcggggtctatattctaactgtagccgttcctgtgttcctggttatcctattctgctgttctggaaagaaacagaccagtggtatggagtataagaaaactgatgcacctcaaccggatgtgaaggaagagg

SEQ ID NO: 16826 - DNA, 447 bp, Homo sapiens
acgactcactatagggcgaattgggccctctagatgcatgctcgagcggccgccagtgtgatggatatctgcagaattcgcccttagcgtggtcgcggccgaggtacttttcaatgtgggaaaggtatagaatcaatctccaagccttgaatagagcctgatgaaataaacgcgttacttatttatcaggctttattactagcgatcaaatatagcacagagaaggattagtagaggaagacattctgacatgaagggacatctgaaaaggctggagataggaagactaaaaactaaaaaggctatttagtgttagcgcaaatgttttactatctcacctcagaatttaatgaagtattttaaatatattgtgacaaagtgtgataagtaatcttagttaagtctttaagaatgatttaacacgatattcactttctctatttaaaa

SEQ ID NO: 16827 - DNA, 602 bp, Homo sapiens
ctatatggcgaatggggccctctagatgcatgctcgagcggccgccagtgtgatggatatctgcagaattcgcccttagcgtggtcgcggccgaggtacaactttctatttttagcctatatttggaaagaaagcacttaacattttaggaattctttttaaagctgcttgcaaagtgttggtgattttactgaaaacttttgagatcttcattttacaggcagacctgtctaactacaagccagacttgggttttctcctgtagtttgaagacacactgactcctgacaaaatgcagcctgcaacttcctggagaacaactcaatgtcacattaaagtttattatgtatttaatgatacactgtttaattgacagttttgcatagtttgtctaactttacagaattaagagcctctcaactgagcagtaaaggtaaggagagctcaatctgcacagagccagtttttagtgttcgatggaaataatatcatcatgcccacttgagacttcagattattctttagctcagtggttgtatgagtcacatcttattaaagtcgaaattaatgtagttctctgccttgataacatttcatatgtg

SEQ ID NO: 16828 - DNA, 280 bp, Homo sapiens
cactacttagggcgaattgggccctctagatgcatgctcgagcggccgccagtgtgatggatatctgcagaattcgcccttagcgtggtcgcggccgaggtaccaactagagtggggaaaaagaagaagaaaacaaagggaccagatgctgccagcaaactgccactggtgacacctcacactcagttgcgggttaaaattacttgaagttagagaagaattaaagactattcttctcatggaggaagaattcattagaaatcatggaacaatatgaaac

SEQ ID NO: 16829 - DNA, 573 bp, Homo sapiens
tacgactcactatagggcgaattgggccctctagatgcatgctcgagcggccgccagtgtgatggatatctgcagaattcgcccttagcgtggtcgcggccgaggtactcagtttattgaattgatgaattgatttttttttagtaatcacataaatttctgtaagatttgttatacattgtttactgtcacagaatcatgttttatatcttcaagctcaaagcaagctttcaaacttgaatttagttcttgcataaatatggatgattgtttctccattgctgaagcagtgtattatttccataatgatctgtaaagtaggtgggtttcatgacctaagtgttattgttgatctttatatatacaaggaaaacgcagagtcatcgttcatttgtagctgcatttatctctggttttcaagcatttctataaaataacaattaagcttagtgtgatggttaatactgagtgtcaacttgattggatggaaggaagcaaaatattaatcctgagtgtgtctgtgagggtgttgccaaaggagataaacatttgagtaattgtgctgggaaaggc

SEQ ID NO: 16830 - DNA, 580 bp, Homo sapiens
tggggccctctagatgcatgctcgagcggccgccagtgtgatggatatctgcagaattcgccctttcgagcggccgcccgggcaggtaccccatcgcggtgctcatagacgaactccgcaatgaggacgttcagcttcgcctcaacagcatcaagaagctgtccaccatcgccttggcccttggggttgaaaggacccgaagtgagcttctgcctttccttacagataccatctatgatgaagatgaggtcctcctggccctggcagaacagctgggaaccttcactaccctggtgggaggcccagagtacaaaggcatggggctgtccatgggcaccatgatctgtggctgggataagagaggccctggcctctactacgtggacagtgaagggaaccggatttcaggggccaccttctctgtaggttctggctctgtgtatgcatatggggtcatggatcggggctattcctatgacctggaagtggagcaggcctatgatctggcccgtcgagccatctaccaggccacctacagagatgcctactcaagaggtgcagtcaacctctaccacgtgcg

SEQ ID NO: 16831 - DNA, 326 bp, Homo sapiens
ggccctctagatgcatgctcgagcggccgccagtgtgatggatatctgcagaattcgccctttcgagcggccgcccgggcaggcaacacattaagttacttcctattatagcccttatgcctttgcctatgtcagctatcccaatggtctctaaacatttttgatcaagcatccttactactaaaaaaatttgtaacacaccctgaaaagttatatgtattatatccactttcttatgtatttacataataaatacatagtatacacactaatatataatgtatgtaatactaaagtattacatacttttcagtagcatcccccta

SEQ ID NO: 16832 - DNA, 560 bp, Homo sapiens
ccctctagatgcatgctcgagcggccgccagtgtgatggatatctgcagaattcgcccttagcgtggtcgcggccgaggtacaagacagctcataggagaagggggaaaaaattaaaaaaattaaaaaaagctctgggcagcatgcaccaatcaaaacgccagagcccgtaatgagggcgattgatggctgtttggcttttactgcagggtaatgaactagaatccagtctgaggagggggaaaaatatgaatattcatgagactgtgctcctgcctttgatgattaaagaaatttttaatattcaaataagcgcttgccaagtgattaacaaagaacaagcacgcagaaatatggaaatgggagccgggaaagatttgagaggcgaacgtacctgtggaagttacttcaaccctggaagtagggactttccagcagtcccatattctggatgggattttaatgatggtaaatgtaaaactggaagtggagatatcgaaaactataatgatgctactcaagtcaaagattgtcgtctgtctggtcttctcgatcttgcac

SEQ ID NO: 16833 - DNA, 351 bp, Homo sapiens
tgggccctctagatgcatgctcgagcggccgccagtgtgatggatatctgcagaattcgccctttcgagcggccgcccgggcaggtacaaaatcatgtggatagatgtgcatttgtgggtatctgtgaatacaaatacacaattttcagatagaagtagtataagaaaaagaaatcaaacaaagtcaaacattttaagtgtagctcttggtgcacttttaaaaaattattaaattgaagctgtagtttattctcatcattgtcatcctatattagtgattttctttagcttttgaaattaaattcataatattacaattctgaattcctatgtatgtatatgttaagaatc

SEQ ID NO: 16834 - DNA, 321 bp, Homo sapiens
gactactatagggcgaattgggccctctagatgcatgctcgagcggccgccagtgtgatggatatctgcagaattcgccctttcgagcggccgcccgggcaggtaccaagaaactgaatgctcatgtttccacctgcttctcgagaaagacaagacagaagcgtgatctcggatggctgcaagacaggtataacccccccgcgtacctcggccgcgaccacgctaagggcgaattccagcacactggcggccgttactagtggatcccagctcggtaccaagcttggcgtaatcatggtcattagctgtttcctgtgtgaa

SEQ ID NO: 16835 - DNA, 463 bp, Homo sapiens
agggcgaattgggccctctagatgcatgctcgagcggccgccagtgtgatggatatctgcagaattcgccctttcgagcggccgcccgggcaggtacaatagaggatcacgtaattgcaggaaatgtagaagaatttcgtaaagatttcatttctagaatatggctgacctacagggaagaattccctcaaatagaaggctcaactttgacaacagactgtgggtggggctgcacattgagaactggccaaatgctcttggctcaaggactcatactacactttcttggtagagcttggacctggcctgatgctttgaatattgaaaattcagactctgaatcatggacttcccacactgtcaaaaaatttactgcatcatttgaagcatcactttcaggggaaagagaattcaaaaccccaacaatttctctgaaggaaacaattgggaaatattctgatga

SEQ ID NO: 16836 - DNA, 485 bp, Homo sapiens
actatagggcgaattgggccctctagatgcatgctcgagcggccgccagtgtgatggatatctgcagaattcgcccttagcgtggtcgcggccgaggtactttttttttttttttttttttttttaacagatggtcatttcagctcctggctaaggccacaaagcaaagtgtcctttattcactgattgttgtttgagcaagggtgccctcctcccccttgccaggctgctgggagtgagacagatacagccttggcagcagtgtcttggagtgattgtgaataagggatgttttctctcctgtctctctcccagtgtctggatgccagccgcccatggctctgctattggatcctgcacagcttggaactgctagatgaacccatcccccagatagtggttacagagtgagtctgtctttgggaaatctggggtgttctctgaaattgtattttgagtttgggattttgttttgattctgtttt

SEQ ID NO: 16837 - DNA, 313 bp, Homo sapiens
ctcactatagggcgaattgggccctctagatgcatgctcgagcggccgccagtgtgatggatatctgcagaattcgccctttcgagcggccgcccgggcaggtaccttaattactactgtatttgcaaattaagggaaatttaggtcatcatttgattttctgaaatctaaaaggaactgaccatcattaccaagtctttctagataatcaagggtagatggctgtttttaatgtaggaaaattaatgttaggcatttcctgctttcaggtttaaggtatgaaatcaaagcattatttttaattttgctagtg

SEQ ID NO: 16838 - DNA, 510 bp, Homo sapiens
  misc_feature 44, 46: n = A,T,C or G
gcgaattgggccctctagatgcatgctcgagcggtcctcgagcngncggcaatgtgatggatatctgcagaattcgcccttagcggccgcccgggcaggtacgcggggatcgatgatgactataaaaaaaatggatctcatcggaatctgaacaaaatgagtgaccaaatcatttctgtgccacttctgtgagctgaggtccagcactgggaccatgccaggcaagcatgaggagggagtttacagggactagggtattggaaaactaacctacccatatatattagagcaaatgaattgttctcagttctgtaaatatccagctgtggtttgacatagcaactctctttgtatttgcttggcagcatttatagaaacagctggtagaccctggggaaccagggcatagtgagattcgtgggacgttatttcacctactcttgagccattcacacatttgagctcgcagaattatctggtcaatgagcagtctcttgagggtaatgagat

SEQ ID NO: 16839 - DNA, 344 bp, Homo sapiens
ccctctagatgcatgctcgagcggccgccagtgtgatggatatctgcagaattcgcccttagcgtggtcgcggccgaggtacgcgggagagaagcatgaaaaaggtgctcagaaaacagattgtcaaaaaacttgggaaccgtgggtgctgttgccttggactgcaaagggaatgtagcctacgcaacctccacaggcggtatcgttaataaaatggtcggccgcgttggggactcaccgtgtctaggagctggaggttatgccgacaatgacatcagagccagctcaaccacagggcatggggaaagcatcctgaaggtgaacctggctagactcaccctgtt

SEQ ID NO: 16840 - DNA, 445 bp, Homo sapiens
  misc_feature 103, 104, 105: n = A,T,C or G
cactactatagggcgaattgggccctctagatgcatgctcgagcggccgccagtgtgatggatatctgcagaattcgcccttcggccgcccgggcaggtactnnntttttttttttttttttttttttttctttaaatactattttccttatattgttatccactcactttctaaaaattcattaagtcatttaacataaatctgagcaccaatcatatgccaattatatattggcaataccaaattgaataagacatagtgtatcttccaagtaattagagaagatgttaacctacaaaatactgtatagcgctataattggctagaatatttttagtcattaggtaatgaatgcaaatcactgcatatcattgttaaatctactttggtatattttatgttttaatagaaaaatgtaaagctatgtatttgccatggagctta

SEQ ID NO: 16841 - DNA, 422 bp, Homo sapiens
tatagggcgaattgggccctctagatgcatgctcgagcggccgccagtgtgatggatatctgcagaattcgccctttcgagcggccgcccgggcaggtactgctccctgcacgatccagtcagcccctgcccggctggttatggaacaaacaagtctgtgtctgtgtggagtgttgcaggacgagtggaaatgactgtttccaagttcatggcaattcagaaggcccttcagccagactggttccagtgcctctccgatggagaagtatcttgtaaggaagcaacttccataaaaagggtcagaaagtctgttgaccgatcacttcttttcttggataactgtctgcggctgcaggaagagtcagaggttctttagaagagtgtgatcattggagtgattgaaggtggagatgtgatggaag

SEQ ID NO: 16842 - DNA, 493 bp, Homo sapiens
gactactatagggcgaattgggccctctagatgcatgctcgagcggccgccagtgtgatggatatctgcagaattcgccctttcgagcggccgcccgggcaggtacgcggggatacctctttacggactccacttatgactccctaaagcccatgtcgaagcccccatcgctgggtcaatagttatgctttgttgtttggatatatggaggatggggattattgctaggatgaggatggatagtaatagggcaaggacgccttctagtttgttagggacggatcggagagttgtgtaggcgaataggaaatatcattcgggcttgatgtggggaggggtgtttaagggggtggctagggtattattgtctgggtcgcctatgaggtctggtgagaatagtgttaatgtcattaatgagagaaggaagagaagtaagccgagggcggctttgattgtgtagtaagggtggaaggtgattttatctgaatggggg

SEQ ID NO: 16843 - DNA, 436 bp, Homo sapiens
  misc_feature 370: n = A,T,C or G
tacgactcactatagggcgaattgggccctctagatgcatgctcgagcggccgccagtgtgatggatatctgcagaattcgcccttagcgtggtcgcggccgaggtacgcggggcctgtagccaggcgccatctttgacgctggcagtcttggttttctgctagtgctgctgccgctggggggacgacggacggcagcggccaagcaagaagaaagacgtggcagcaagcgggagtcggggatagtgtcatcggttcggtaaagtttctgttctctgatttggggatattccctgcccaaaaaattcctggaaaattgactagtattaagtgtgagtaaaaggtgtccacttttttttaagttttgattntagttttgtcttggatagtatttggcaagatttagcctaaaaattatgtagtatttattacataag

SEQ ID NO: 16844 - DNA, 420 bp, Homo sapiens
  misc_feature 125: n = A,T,C or G
ccctctagatgcatgctcgagcggccgccagtgtgatggatatctgcagaattcgccctttcgagcggccgcccgggcaggtacatgtgcacaatgtgcaggttagttacatatgtatacatgtnccattttatattttttgtatataccttatttatcatagtttcccacactattctcaaacttctaaacttaaacaatcctcctatctcaacctccaattacaaacataacccaccttacctaatcacatctaatttatttcaattttactttttaaaaatttttccaagacataataacttcatttttccaaacatccaatatcaaataaaaaaatttttaaaaataatctaaatcaataccaaaaaccatccataacattataaattaaatttcttacttaactttctaaaaacc

SEQ ID NO: 16845 - DNA, 224 bp, Homo sapiens
tatagggcgaattgggccctctagatgcatgctcgagcggccgccagtgtgatggatatctgcagaattcgccctttcgagcggccgcccgggcaggtacttcacactactagatgttaaaactatatgattattggcatatactgactgactgcaatatttgtagtaaatagggaaaataagtatttagttggagggataatttgatcgaatcacctgaatgt

SEQ ID NO: 16846 - DNA, 432 bp, Homo sapiens
actatagggcgaattgggccctctagatgcatgctcgagcggccgccagtgtgatggatatctgcagaattcgccctttcgagcggccgcccgggcaaattcccatgatgtcagaccactggagtttccaggggcaacaccccataaccgtcccgctgcagaagagcatcagaagttcagaagaatgcaaaggatctcagtgggaacgcggacaggagagccccaaaccaacacatgctagggctctctaggccctttcaggctagatcttgacgagagaagagtaaagatctttctgaggttggtgcaactgaggaaacgaaagtttcggcctctgctgtcagatctatgaaaggaaagaactgtgaccttgtccccttttgttttctttgacttaaaacaaaagaaaatcactggaacaaagtcttaaag

SEQ ID NO: 16847 - DNA, 458 bp, Homo sapiens
ggggccctctagatgcatgctcgagcggccgccagtgtgatggatatctgcagaattcgcccttagcgtggtcgcggccgaggtacgcggggaaggttcttttccctcaacactgtggccagttgttttaacttcactacttgggatggtaattggcattaggcgttttaccaagttctttaagcctttcttaatataacatctgaattgggagatagctcattgtggcctgggtgctggacttttcatattaagtcctgtcttagccaagggagaagaatgtaaggataggaccaccaatatcacaggggctgtctgagcctttacctgtgattttctaccactctgtggccttctggagcaatggacaaccaagtcagctatgcagttcataaaagtggacctggttatatgtcatccaacagcatatggtccctgcaagcctgtttggaagccaa

SEQ ID NO: 16848 - DNA, 659 bp, Homo sapiens
ctactatagggcgaattgggccctctagatgcatgctcgagcggccgccagtgtgatggatatctgcagaattcgcccttagcgtggtcgcggccgaggtacctagcttttattcattttattattcatctttattgctttcattgcacatgctgttaacttcttatgaactctttgttctataaataagcatatccaggtttttcataaataaatgaggagtctataaattcttactagttttaatagaaacattgccactaaaatggtgtattctagctgtgtgagcttttggaaaatgttttcatttcctttatgtttgaatgttccttccaggtctttgaaaatatacattctgagttgaaaagctttataataggtaaaactcattaacccatatactttccatgctgggcacagcaagtgtggtaggtagaaatataagatgactcccaagattttgcaccctggcatacacatatgcctttccagttgttgaaacactaatttaggtgctgctgtgaagggattttgtagatgtgaataatgttccaaatcaggtggccttaagatagaaagatgatcctggatgggccaaaatctatcagttgagtccttaaagggaacagcaccctttctgacaaagagattcaaagcat

SEQ ID NO: 16849 - DNA, 418 bp, Homo sapiens
gctcgagcggccgccagtgtgatggatatctgcagaattcgccctttcgagcgccgcccgggcaggtacgcgggtgataaaaaaaaaaaaaaaaaaaatgactgcatttttaaggcctagcgcttcaaaggctatattgtcttatgtgtctgactttggcatctgccctttctgacttttgaccctgcagccttcagcatgccggaagtgaatgtggactataatgccagctcaaagaccttgcggtgtgaggctccccgatggttcccccagcccacagtggtctgggcatcccaagttgaccagggagccaacttctcggaagtctccaataccagctttgagctgaactctgagaatgtgaccatgaaggttgtgtctgtgctctacaatgttacgatcaacaacacatactcct

SEQ ID NO: 16850 - DNA, 271 bp, Homo sapiens
gactcactatagggcgaattgggccctctagatgcatgctcgagcggccgccagtgtgatggatatctgcagaattcgcccttagcgtggtcgccggccgaggtacatacaatataatgaaaacatgaagagattcaaaagcttcaatcatatctcaatatataaaatatttcagaacgtaaaatattaagtaaaaaagttgagaaataatatataaaatgatccaaaaaaaggaaagctagaataacatctcaacacattttaaaaaaaa

SEQ ID NO: 16851 - DNA, 490 bp, Homo sapiens
  misc_feature 86, 87: n = A,T,C or G
ccctctagatgcatgctcgagcggccgccagtgtgatggatatctgcagaattcgcccttcgagcggccgcccgggcaggtacttnntttttttttttttttttttttgcacaatgaaatacattacctcttcaaaaaaatttttgtgaattaatcaaaaccaagtttgatatgaaaataagaataacacactaaaatgatatgcagcagacaggtcgcaaacttggagtgatatttacaattcaaaaacctaaatgattaatgtcaaaatacataaaagactcctacaaatcagtgaaagaaagcaatccagtggtgaggtggaaatgaacaagagatgcacatacatttcactgatgatacaacaatcaataaacatgaaataatactaaacttattaatcagcagagtgaaaagtaaaatacctaggaggtatattattctcaactagatcatcaaaaatgcaggtataataatacgagctgctggc

SEQ ID NO: 16852 - DNA, 399 bp, Homo sapiens
ctactatagggcgaattgggccctctagatgcatgctcgagcggccgccagtgtgatggatatctgcagaattcgcccttagcgtggtcgcggccgaggtaccattcataaaatgcccaaaagagagttggaatggttatactatatgatgtgttttgtttttgttttcaatgaaattataaatgaaaatgaaaacaaattatgcaaaaatttatagaatgcagctgaagcagtgctcagaaggagattttacaggcctatttttaaaaagaagaaagatggcaaatcaataatgcagccttcaatcttatgaatttttttaaataaaaaaacatactaaacctggagcatgtattagtaataatacatactaatacatattaatacacaaggaacaag

SEQ ID NO: 16853 - DNA, 410 bp, Homo sapiens
atacgactcactatagggcgaattgggccctctagatgcatgctcgagcggccgccagtgtgatggatatctgcagaattcgccctttcgagcggccgcccgggcaggtacttttttttttttttttttttttctgttccccagcagaagaaaagaaaatctaataaaggatttcacaacctaccatcgggatgatcttggtcacgcacagaatgatctgtcacttcaccgccttttgtaatattttcatcctttgcaaaatctaacaacaaacaagcaaaacctttggtcagcatttttaacttggaaacagagcagctttcagcactaacatgatagatttatgtttgaggaaaaatagaatttattcgttttaaaaataaccactcaaatacatatgtttgccaata

SEQ ID NO: 16854 - DNA, 497 bp, Homo sapiens
  misc_feature 177, 209, 220, 325, 326, 349, 350, 365, 391, 392, 435, 490: n = A,T,C or G
gtatacgactcactatagggcgaattgggccctctagatgcatgctcgagcggccgccagtgtgatggatatctgcagaattcgccctttcgagcggccgcccgggcaggtacataagaaataaattcaagcagaagagcataatatttttattcttcatgaatacagtgtatatgntaaactacttttgtttggggtctcctagtttntaaaaaagcancttttggcttttcacttcagtaaccactccaagtaccaagacttcaagtaaatagaaagggcagctttcaatttcgcaaatcagtttttcaagattttagctgtnnggaagcatatttaatgcacacanntttgaatgttacacnataaataattttaaccgatggagtcnncaagttctggattttacattaagatctgcattatataagacanctttgtggtcaaatttcaaagaattggtaaaagccagtttcaaagctgcttatanttttgag

SEQ ID NO: 16855 - DNA, 447 bp, Homo sapiens
  misc_feature 302, 390: n = A,T,C or G
ctactatagggcgaattgggccctctagatgcatgctcgagcggccgccagtgtgatggatatctgcagaattcgcccttagcgtggtcgcggccgaggtacttccactcttgtttccaattcaccccaggtcattcaactctatagccactcctaatgcctctcctgaggtaggacaaaagtgggcttcccaaaccaaaaagattcacagatccatgaagaaactgaacattcacttcaaatttcctcctctgatcttggcaactgcaggaaatgaaagcatttgtccagatctctggcanagatggcactgtggtgttttctctggggccagttgtgcaaaaccttatagaagagaaagctgatctcattgcttcagacttggcccanattccacagaaggaagacccactacattatctgagacaatggggaaagctgacgtat

SEQ ID NO: 16856 - DNA, 520 bp, Homo sapiens
tactatagggcgaatagggccctctagatgcatgctcgagcggccgccagtgtgatggatatctgcagaattcgcccttggtcgcggccgaggtaccaagcattctgcttggtattgatgtgcattatcttttacaactattatctccattttacagatcaggacataacggtatagagaattagacagaggaccagttttccaacagagtgctatgtagcttccactaagaccaaaagcctccttctactgagcacttaataagtatgtagggccgagctaagcacttttcaaatattatcttttctactgtagggtaaaatgttaccttttctaaactagtcttaatagttttctaaggaagctgttaagctggatatatataaactaaagtaaaactcctggtaattatctaatgaaataagattctcaacataaatatgttttgaacttccgggctgaaaaattataaacataatacttaacctgcattattttttccatttcctttaaatataac

SEQ ID NO: 16857 - DNA, 483 bp, Homo sapiens
tacgactcactatagggcgaattgggccctctagatgcatgctcgagcggccgccagtgtgatggatatctgcagaattcgcccttagcgtggtcgcggccgaggtactttaaaaaaattttaacctgggaatattttaactctcagcattgagatgtataaggaaaagctctctgtgatatttacacaggtccatttacatttttaatgttgactttggagttggcacactggaaaagaattagaggtaagatgacttgataaagaagcttttttgctgcttacagaactaaatcccttcatattgagcctagagttggtccttcttatcacaaatgctatgcagtggcttggcagcaggatgctagctgacctttatgcaaattgttcaaacactgtggattcttctgagagggtggaattcagaaggtgctaatgctgctaacgagctggaagaagagtttatgtgctaagtgttattct

SEQ ID NO: 16858 - DNA, 399 bp, Homo sapiens
agggcgaattgggccctctagatgcatgctcgagcggccgccagtgtgatggatatctgcagaattcgccctttcgagcggccgcccgggcaggtactgatgttaatagatattcctgaaataaataaaggaattaggatggttaggaacgtccttccagaagaaatgcaaggctggccatgaaaggtgactatatcgtaataggcagaaggtggcagcgcaggtatgggtcgtaagaagaaccttataggaaaggaggtcaacttgccccagtgccatgagctcagcactacaacctggtgcaggacttcgaagtaatagaaagcgaggctgcaaaggtggacagggacctgaagacagagggccaggttagtgagagcagacttaccacgggcatag

SEQ ID NO: 16859 - DNA, 284 bp, Homo sapiens
gggcgaattgggccctctagatgcatgctcgagcggccgccagtgtgatggatatctgcagaattcgcccttagcgtggtcgcggccgaggtacaaaatcatgtggatagatgtgcatttgtgggtatctgtgaatacaaatacacaattttcagatagaagtagtataagaaaaagaaatcaaacaaagtcaaacattttaaggggaagcttttggtgcacttttaaaaaaattattaaacttgaagctcgtagtttatgtctcatcaattgtcatcgctata

SEQ ID NO: 16860 - DNA, 548 bp, Homo sapiens
ccctctagatgcatgctcgagcggccgccagtgtgatggatatctgcagaattcgccctttcgagcggccgcccgggcaggtacttgttactcttacagatgtctcaattaattttaacctctatccctaatggtgtttaaattttggtaaagaaaaattcattttttctttattttccaagaaatggtaagctatctttgtccctatgggagatgtggacagagaaaactttctgtctctgatgtcttttgtgtgagacaagattttaggaaataaataagtggtgcagggaattgtgagattaatttcacctccttttctgtctcctctctcttttatataatctttatctctgcttctaacaatctccttatcagaatttctaacatatgtaatgatgagagagagaaaaactgccaccacaggatcaaatttcatttctaatctggagaaacaggagtctagttttccaaacatttttattctaaaaaagaaaaggttagctattaaaagggtaagtattttctccaaaaagtaaaataatatc

SEQ ID NO: 16861 - DNA, 696 bp, Homo sapiens
  misc_feature 621: n = A,T,C or G
tatacgactactatagggcgaattgggccctctagatgcatgctcgagcggccgccagtgtgatggatatctgcagaattcgccctttcgagcggccgcccgggcaggtacatcagaaacttctccataaggaaagaaaactgactctctcttgaactagtgttgataaaatacactaatgtctttcttaattttattttattaggagaaaaatcagaatattaaatttgcaaacttttgaacagcagtaatagctccttagacactcagtatctttcttccctatctttcaagcacatttaatttctttcccctggtatttgtttgctttgtgttttttcaatattttgtttgctaaagaacaataacaacaacaaagctggtccagccctgacacctacttttgctttttttctttctttcttttaatttgttgaactataggtttctttctgagatgtatttttcattcttccaataatgctctctttttcatttcaaaaccattaccactttcaatatgtaattaacatcctcattcatcagaaagctggtaagtccacacagcatttgtgcagtatcccttctgtgtaaaatgttaagggctttagatgaaagaanaaagaacttcctgcaaaagatcaaaagcatcatactaaaataaatgatgacaatatgtgccttgatttttttctc

SEQ ID NO: 16862 - DNA, 556 bp, Homo sapiens
tctagatgcatgctcagcggccgcagtgtgatggatatctgcagaattcgccctttcgagcggccgcccgggcaggtacattttattgtggccggtggccaggggggagtgggggcggtagtcttttgcatttactaactccttatttagacattactctccaggtttagaaaaaaaaagccataattttttatgtcagcaactgctattgataacaacaacagtaataatagtagtagctatcttttataagatgccaactacatgtcagtcactatattgggtgtttttggctgcccggattcctttctggaataagagctctgtagactgtttttaatatagtaagtgacagagaaaggaggcaaaccagcttgtctacttcttaaactatgccttcagtatttattaggaacctcgatatgcttgaagtagatgatacattttccccagcattcagactcttgaacaacttgtgaaatctacccaagtgaattataattaactgcgtcacatttatcattatactgacctttgagcatttcccccaactcac

SEQ ID NO: 16863 - DNA, 428 bp, Homo sapiens
actatagggcgaattgggccctctagatgcatgctcgagcggccgccagtgtgatggatatctgcagaattcgccctttcgagcggccgcccgggcaggtacgcgggtaacaaagaagcaggtcttatggcctaatcatctcataaaagcaccacctcttaatactatcacattggcaataccttgattttggaggggacacattcaaaccatagcagagaccactaagtatagggaagactaaacccgagaaccaagtggccagaagcctgcactagctcagctgattctgctattacacttagataaagtatgagccttttgctactgaatcaacagaaaggctgcccgaaagcagtgagtctcagatgcctcccatgaagttcacacatcacaccagggacttctactcatacgtgaaaagctag

SEQ ID NO: 16864 - DNA, 425 bp, Homo sapiens
gcgaattgggccctctagatgcatgctcgagcggccgccagtgtgatggatatctgcagaattcgccctttcgagcggccgcccgggcaggtacgcgggggaaagtgtgtagcacctccaccttctctctctctctccctctccctctcctgccagccaagtgaagacatgcttacttccccttcaccttccttcatgatgttaccattggaatgacatactgcatcctatagttataccatccactctgaaatcaatgtgaatttaacttcagttccatacagaaactttttttccacaggagtttaagcccaagctggagtgcgatggtgcaatcccaactcactgcaacctctgcctcccaggttcaagctattttcctggcttagcctccggagtagctggaattacagatgtgcgccccc

SEQ ID NO: 16865 - DNA, 540 bp, Homo sapiens
ccctctagatgcatgctcgagcggccgccagtgtgatggatatctgcagaattcgccctttcgagcggccgcccgggcaggtactgaagataaagggccttcttatatagtctcccaattctatctgggccattttgaagatagatattggaatgttccctgcaaagaaaaacaagacaactctatcagaagccatcatttctagggatgacattatcattataattcaataacattataattagagaaattaatgagcacatcacattgaatgttagcctgtcgtagggatgcctccaaaattgaagtggagggctggtagttagccctgttattttaatgatgtgaggctttccatatcaggtatatgtcagagaaccatctgcgaaggcatcatagaaatgtagtgcatcttactgaagtattttctccatgatttttatattaagacacagacatattatgtaatggaatagaatacaaaattaagttgaaatattaaaaataagcagttaattaagacattttttcacttctacc

SEQ ID NO: 16866 - DNA, 513 bp, Homo sapiens
  misc_feature 116: n = A,T,C or G
gtatacgactcactatagggcgaattgggccctctagatgcatgctcgagcggccgccagtgtgatggatatctgcagaattcgcccttcgagcggccgcccgggcaggtactttntttttttttttttttttttttgcacaatgaaatacattacctcttcaaaaaaatttttgtgaattaatcaaaaccaagtttgatatgaaaataagaataacacactaaaatgatatgcagcagacaggtcgcaaacttggagtgatatttacaattcaaaaacctaaatgattaatgtcaaaatacataaaagactcctacaaatcagtgaaagaaagcaatccagtggtgaggtggaaatgaacaagagatgcacatacatttcactgatgatacaacaatcaataaacatgaaataatactaaacttattaatcagcagagtgaaaagtaaaatacctaggaggtatattattctcaactagatcatcaaaaatgcaggtataataatacgagct

SEQ ID NO: 16867 - DNA, 394 bp, Homo sapiens
tatagggcgaattgggccctctagatgcatgctcgagcggccgccagtgtgatggatatctgcagaattcgccctttcgagcggccgcccgggcaggtacgcggggttcacatggggccaatctgtctttgcaaaaaagaagtgagaaaggaatccttgatactttcccctagaagtccagcatctgcttgtttaaatacatatctcatgtaaaacgggaaagataaaaaatattgaaaagtgaagttttaaaaccttatactaaagatctttatactgcagtctgtctcacacaatatatcattgtctggctttcaacaacaaaaaattactaggcgttctaaaagacaaataagtcacagtttgaagaaacagagcaagcattagaaccagc

SEQ ID NO: 16868 - DNA, 672 bp, Homo sapiens
gactcactatagggcgaattgggccctctagatgcatgctcgagcggccgccagtgtgatggatatctgcagaattcgccctttgagcggccgcccgggcaggtacagaccgttcatttagcaaactcaaatccagcccacccttaccgtttccaccgcagccagctggagctctgtgacagcagcatacaattctttctttgaaagccgattctggtgataaatgtcacaaaggaaatctgcactaggctgctgagaatacttctctaaccggttgtcgatacaagctttgactattagagcagagaagaaagagaggaagtcagctgaaaattgggatgaggaaaatcacagaagaaaacctcagtccaaactccttcttgcaatatctaaatagtcttttcaggaacactgacaatttgctacacacactaattatattattgccttcttgtcaagtcggcaaggatttttcaataccgacatgagcaaggcttctcaaactttaatgtggataggagtcacctaggcatcttctcaaaatgcagaatctgaatcagggcttgggtaggcctggaactctgcattcctaataagcttctaggtgatgctgatgccactgggctgcaggtcatagttttgagtagtaagagtttagatcttgggaaaaaa

SEQ ID NO: 16869 - DNA, 398 bp, Homo sapiens
ctactatagggcgaattgggccctctagatgcatgctcgagcggccgccagtgtgatggatatctgcagaattcgcccttagcgtggtcgcggccgaggtacgcgggtatattggttttatttatggaattgttttatagtgcatacaaatcagcgatcagccagcaaatatttttctttgagcttgtgaaagctctgtgttcttttgccttcaatctgttgtcttcaaaacaaacaaacaaaaaaagcttcttgcgcctttccctcccctgttttcttcctttttctttttgcttgcatgcacaaggtaggacttacttcgtaagaaacaaaatgccagtattttcttaagccatgatgtgaaaccaatgaccctgtgaccacatggcacagaacac

SEQ ID NO: 16870 - DNA, 621 bp, Homo sapiens
cgactactatagggcgaattgggccctctagatgcatgctcgagcggccgccagtgtgatggatatctgcagaattcgccctttcgagcggccgcccgggcaggtacgcgggataaccatgcacactactataaccaccctaaccctgacttccctaattccccccatccttaccaccctcgtaaccctaacaaaaaaaactcatacccccattatgtaaaatccatttgccactccaccatccccccatttccagagcttgtttgaaattgctcatctaatggtatctctcctccaattttctttgttcttaaaaatacacatatttaaaatattttttaaaaataactcagtgcttattattttggtggcatcttgggcatagagggaggaactaaaggagcatcgtaaatatgccatgatgaggtgcaagtgatattaaagacactgcaatttttgaatgaaaagcagtttatccagctgtttaataattaatatcttgtaataatgtcgaaatgatagtatttggaaattgtaagggaagtatacttaaaggatatgctctttccatgttttgcttattagattccactgatgtttaccaaatgagaagaagcatag

SEQ ID NO: 16871 - DNA, 460 bp, Homo sapiens
  misc_feature 96: n = A,T,C or G
gcgaattgggccctctagatgcatgctcgagcggccgccagtgtgatggatatctgcagaattcgcccttagcgtggtcgcggccgaggtactttntttttttttttttttttttttgaaatgaacaaatatttatttatcttttataacaagtaaggcaatgttgcttaaaggaagacaaacaaacataaaagattccgttgacaatgcattttttcatctgttcggcacaatgcttttgtcataatggagatgtgacagcaaactttccaggacattcagtcttcggcggcagcacttagggcagatgactggccgctcagattctctatctttgttcaggacagtggaaaagctgcttatagatgaggccaaagcaccaggttggtggaaggtttttgtatgggttcgaaccccgacagcgcgccaacagacaacacgaggcagtggggagcaacat

SEQ ID NO: 16872 - DNA, 514 bp, Homo sapiens
gcgaattgggccctctagatgcatgctcgagcggccgccagtgtgatggatatctgcagaattcgcccttagcgtggtcgcggccgatgtactggttaaggaagagtattgttgaagatacacttagttttgtaagatatattaatttgatcacttgcacgtgtagtgaattattgcaaagaattgtccagtatagaaatggcttccagagacactgcaatctctactgtgctgattcacactgcatcatatgatatagaggttgtatcttaatttagcatggtcctactggatttgctttttattactaaattactaaataaccttagagactaaagacaatacagcattgtgagataattagggggtattgtctttagcctctagggttgtggtaaatctgggcatcgtctcactggattctcgactcaggatctcataaggctaaactcaaggtgttggcttggttgcatcctcatctggcattcagagttcctttccaagcttacatagt

SEQ ID NO: 16873 - DNA, 646 bp, Homo sapiens
ggcgaattgggccctctagatgcatgctcgagcggccgccagtgtgatggatatctgcagaattcgccctttcgagcggccgcccgggcaggtactcgtcctgagtgagttggaatttaaaaccttggtctcaggttcgtaaccttggtgctccagaatagattaggcttttctgagtggaatactaccatttcaaccattctaaggagtcaacgttcttatatgattaactacagaaatgactttcaagagctggtgtgatcagtctaaccctcttgcttaatgaccaaatcacttttactatttaattctgttcttctgggggtgagttaaatgataaaatatcttaagaaggaaatcttattgaacaaatattatcttggcaaaacatttgtcacacataggtgagtttatcctggcttcttagggaaaggaggcttggaatatatttaattgtgttaagataagctattttgcttcttttccctttctactgtattcccatttgtaaatttggtccccaaaccatgcagcttttacattcaaagtatacatatttcactctcctttttcccccttatgctagtggcctaaatcaggatcctattcgctctcattctgatctatagaaaaactttttaattaa

SEQ ID NO: 16874 - DNA, 461 bp, Homo sapiens
  misc_feature 193, 203, 204, 227, 267, 273, 334, 404, 405: n = A,T,C or G
gactcactatagggcgaattgtgccctctagatgcatgctcgagcggccgccagtgtgatggatatctgcagaattcgccctttcgagcggccgcccgggcaggtacgcgggtattcagacttaagaaacatcaggccttagacttttgaaaaaccacatctttaaattctggtagcagtgaaagtccagagnctctcacacnnaagctctgctcttgtcttaaagnaagggggaaagaaaaatatatctcacttttaccagtgagncttacnaactgagggaaaccaagaacaaaacttaattcctcagtcaagattaccctcggccccacanaatgtttgaagtagaaatttgggtaaagtatttcaaagatcccaataagaatggaaagaagggggcaacnnacacacaacacccacacacaacacaaccacaccacaacaacccaatgaatgaatga

SEQ ID NO: 16875 - DNA, 403 bp, Homo sapiens
ttgtatacgactcactatagggcgaattgggccctctagatgcatgctcgagcggccgccagtgtgatggatatctgcagaattcgccctttcgagcggccgcccgggcaggtacaaaacttgtggatccatcaatgaggcatctgccattttttctttcttcccctctatattacaagttctggaatgcctgttctaattctccaaggagaattagaaaataaaaggcagagtctagagccatgtcaatatcctcccacagaatgtgtatggagaatattccactgggaaccatgatagataaaaacttaccaggaagagcaaaacatcaagagagtctgacaaaagctctgccctcctctgtaacccagcagcctctgcagaatcatcctttcttcattgt

SEQ ID NO: 16876 - DNA, 434 bp, Homo sapiens
ggcgaattgggccctctagatgcatgctcgagcggccgtcagtgtgatggatatctgcagaattcgccctttcgagcggtcgcccgggcaggtacaagtgatacaaggggatgataacccactgttccatatgcaagagtttgttttccctaagaaacaataaatgtgctggggcaaatcttttgttatttgttctttaaaaaatcttcttctttcatctaaaaattgtttagaaaaaaaaatctacttatttatttatcacaacccatacatttcaaaaaactaactataataataaacatattttttaactttccaattcaaccccaaaatataatcaaaataaatattccattccacattaacaattccaatttaaatcatactttagaaaaaaaattttttaataaccctctttaactcaatataatttc

SEQ ID NO: 16877 - DNA, 592 bp, Homo sapiens
ctatagggcgaattgggccctctagatgcatgctcgagcggccgccagtgtgatggatatctgcagaattcgccctttcgagcggccgcccgggcaggtacggggaccggcaagatggcggcgcggacagcgttcggtgctgtgtgccggcgcctctggcagggattggggaatttttctgtaaacacttctaagggcaatacagccaaaaatggtggcttgcttctcagtacatacatacatttaggatttccatgtcttcttggagaatttataatgtgtcctgttggttcgcaataatacttcttattctgaagtctcctttatctgaaattaatatagccactctagctttccacactcacctaaattcagcctttattagttcattaaaaattattattttaatcttcctactgatttgtatggcatttggtggcatcaatccaaataagcagatgcataggtcctgtttctcccttcaagttcctgtctccctacagatttcagtaagctgtctgacttgcaactgtaattttttgaagaatgcaagaaaaatcgttaatattttaaatgctccggcttaatattt

SEQ ID NO: 16878 - DNA, 617 bp, Homo sapiens
  misc_feature 14: n = A,T,C or G
acgactcactatanggcgaattgggccctctagatgcatgctcgagcggccgccagtgtgatggatatctgcagaattcgcccttagcgtggtcgcggccgaggtactcatttctacttggtatatgaaaataatatatgtttgatgtattcagtgaaattccagttaactcataactcttgaggccatggatggagaggtggcattattagtctctacctccagtgcctcacacaattcctgggcacagaaagagacatacaattcatgttgggtcaatcaaagaatgattgatcattggcacctcctgattctatttggtggtcagagaaagtggcaggacttaagttattttacatataaacatttcttgcaaaatttggagaggatgttttgatggcttgagatcttttaatttctttgagttactttcattgtccttcccaccccccaattaaaggcaaacaatggcactttgctcttgcttaacctagattgtcttcaaaaactattaaaatggaaaaggcttaacaaaaaaaacaaaaagacgtttaacagatgtcaaaaagctccttagtgtttgaaaataaatgcttaaacaaaagacaacatatttt

SEQ ID NO: 16879 - DNA, 612 bp, Homo sapiens
ctatagggcgaattgggccctctagatgcatgctcgagcggccgccagtgtgatggatatctgcagaattcgcccttagcgtggtcgcggccgaggtacaaaaaggtatacagagtgacataatggacactagagactcaaagtggggagggtaagaggggggcaaggtataaaaaaccacatattgggtacgcggacttgtggcaattctcttgtcttgctgcaactgttattgaagccttacttccaatttcactttgaaaagcacataataatggcattaattttgctttgatctgaggctttctctgatgactgaatactataatttgcccaatgcgctgactttgatatgtttttcttgattaagcttacataggtattgcatgtcacaactggtgggctataataattttatagttgactgaatgtcaaattaaaaatgtgtatgagatagttaaggatcctatcccagttaattattcacatgggattcctaaaattttgtgttaatgagctgaaacattctgagaaccaaatgcctggaatgttttaaaagggagaatgagagaacctacaaactagaaaattccaattaagaataacagaata

SEQ ID NO: 16880 - DNA, 369 bp, Homo sapiens
  misc_feature 346: n = A,T,C or G
atacgactcactatagggcgaattgggccctctagatgcatgctcgagcggccgccagtgtgatggatatctgcagaattcgcccttagcgtggtcgcggccgaggtacaaataatatccaaagtctgaaggcttaagctgtcatcacagagttactagaggacacttatctttgacatgatctgatatcagaaacgagtgtagacttgtagtcatttagaactcaaaagagatcttagagtcttctagatcagtggctcctaaaagctactcaagaatagggctcatgtttttaatggggaactttaagtggttgtttagacccccaccccaagatataaactgnggtggggcatgggcctgagaagc

SEQ ID NO: 16881 - DNA, 367 bp, Homo sapiens
gcgaattgggccctctagatgcatgctcgagcggccgccagtgtgatggatatctgcagaattcgcccttcggccgcccgggcaggtaccccttcacatactcaaggtcaagatgggtttgcagaaatcatatctgaccatctggcctctgctagtagatatggccccatcccagcatttttaagagatgttttttgttgtaataatttccccaaggggtattaaaattctacccaaaaggaattataattgaattcacaataaaatcatgctcacttcacaaagaaaccgttcctggggtaaatggttttttaagttgactgtatctttaattttcagccccatttaattttaaaaagtggcaaaa

SEQ ID NO: 16882 - DNA, 586 bp, Homo sapiens
  misc_feature 273: n = A,T,C or G
tacgactcactatagggcgaattgggccctctagatgcatgctcgagcggccgccagtgtgatggatatctgcagaattcgcccttagcgtggtcgcggccgaggtacaaagaactattgggaaggtcacacaagagatatgacccaggcttaaaaggaaacatgcatcaaggatcattaatataaaacttggaatctagtaagaaaggaaaaaggaaagtggtatattcttaaagtaatgacagattgttggaagagatgatacaaactttntaaaaaaaaatgccttttaacaaatattaaaacctgcaaaatggcacttgtggtgattattctggagaataaacagattacataagattttgtcaggtgacaaatgtacaactcggactaaatactggtgaaaagtgtttaattggacaaataactgataagcttaaagataaccagcacaatttcacaagagaaccagctcagcccaactaaaaatttcttaatagcaattgacactgaagttgtattaagtgtataaattagttgatgaaactgaacaaatagaaaacccattcctccttttccttatttt

SEQ ID NO: 16883 - DNA, 649 bp, Homo sapiens
  misc_feature 547, 583: n = A,T,C or G
ggcgaattgtgccctctagatgcatgctcgagcggccgccagtgtgatggatatctgcagaattcgccctttcgagcggccgcccgggcaggtacaacgtgggcaagcatctgtgcatatgaaatgctgtttttctaaaagatttctcacattggcaaactgagagattttcttctggaacacaggaaagattatattaatgcttatagccataccatgtctgaatatgggaggatgacagacacagaacgagaccagatagaccaggatgcccagatattcatgaggacctgttcagaagcaattcagcaactacgaacagaagctcacaaggagatacattcccagcaagtgaaggagcacaggaccgctgttttggatttcattgaagattacttgaaaagagtatgtaaactttactcagaacagagagccatccgagttaaaagagtggtggataagaaaagattatctaagctggaaccagaaccaaatacaaagacaagagaatccacatcttctgagaaagtttcacagagtccttcanaagactctgaagaaaaccctgccactgaagaacgtncagaaaaaattttggctgaaacacaaccctgaattgggaacgtggggagaatggcaaaaggcgaaa

SEQ ID NO: 16884 - DNA, 392 bp, Homo sapiens
ctactatagggcgaattgggccctctagatgcatgctcgagcggccgccagtgtgatggatatctgcagaattcgccctttcgagcggccgcccgggcaggtactttaaaaaaattttaacctgggaatattttaactctcagcattgagatgtataaggaaaagctctctgtgatatttacacaggtccatttacatttttaatgttgactttggagttggcacactggaaaagaattagaggtaagatgacttgataaagaagcttttttgctgcttacagaactaaatcccttcatattgagcctagagttggtccttcttatcacaaatgctatgcagtggcttggcagcaggatgctagctgacctttatgcaaattgttcaaacac

SEQ ID NO: 16885 - DNA, 369 bp, Homo sapiens
ctatagggcgaattgtgccctctagatgcatgctcgagcggccgccagtgtgatggatatctgcagaattcgccctttcgagcggccgcccgggcaggtacttttttttttttctttttttttttttgtggtatatgtatataattccgtgggcatgaatataggcatatgttaataacaaaacagtatattccatcagtaatgctgtgtcattcttcttcctttccccactattcacaagtaacagtaacaactaccatttatcaatcataggtagatgctaaggggcttttatgcattatctgattaataactctatgaggacagttctattatccggataaggaaaaaggccaagagagatgaaat

SEQ ID NO: 16886 - DNA, 597 bp, Homo sapiens
  misc_feature 415: n = A,T,C or G
ctactatagggcgaattgggccctctagatgcatgctcgagcggccgccagtgtgatggatatctgcagaattcgcccttagcgtggtcgcggccgacgtacctgctgcctatccgctgcatctgaaagggtagcttatctaagaagttgaatgaaacagacttcaaatgataaacagaaagttatttcatcagtctttaacacttccacctaaaggttcacagaagaaataaaagtcatagagactagcctcaagttttcctcttttcttgttaaaggtctgtgggagagaaggtaaaaataatcaaaacatttttcttttaattcagttattcatgttctttctattttaaattgttgaagatgagctagctgtaggtttattgttttaaatcacagctctgacttgacatanctgttttaaaacttgtggatgtgtgtgtgtttttttttataaagataggagaagtcattactttgattttatattcatcatagtcatgaacttctgacctcaggggatctgcccaccttggccttccaaagtgctgggattataggcataagccattgcacctggcccaattctgtttaact

SEQ ID NO: 16887 - DNA, 406 bp, Homo sapiens
gactcatatagggcgaattgggccctctagatgcatgctcgagcggccgccagtgtgatggatatctgcagaattcgcccttcgagcggccgcccgggcaggtacgcggggggttttgtttgtttgtttgtttttcaagtagaggagtgacatttcaacagaatcactgtgcagtggtgagaatagactgaagggagaaagggacaacaggaggctgtttgataatctaggcaagaaatgatggtggcttgggctagggtcgtaacattggtagggatgagaaacagtagaatgctggaatactttgagggttgagccaaagagatttgctgctggattggatgtcatatgtgacaagtggaatagtcaagggtgacttcaaggtttttgacctgagcttctagaa

SEQ ID NO: 16888 - DNA, 501 bp, Homo sapiens
  misc_feature 390: n = A,T,C or G
ccctctagatgcatgctcgagcggccgccagtgtgatggatatctgcagaattcgccctttcgagcggccgcccgggcaggtacgcgggtgtcatgttcatcattttatctgaagttcttatcaacaaagtagctttcagtaaatatttattaaatgaagataaaaattttaagagccatctgcaatgtcaaatgtagcccacagttgaatgaatatgaggacagggaagtgtcccttgattttggtgttaagcagctgattgccaccttctgtagaacagcttcagtggagtctccataatagaaataaatgccaggttgctgaggactaagcgtggatatttgttgagagtggagacagtaagtgcaaacattcttttcagaaagctntgctctttttgaagctttgctcatagggagatacaagatagtaggtagaggggcaggctgtgtttagatgagagagacttcagcatgtttatatgctaaatgtaaaaaaaa

SEQ ID NO: 16889 - DNA, 423 bp, Homo sapiens
  misc_feature 205, 408: n = A,T,C or G
ccctctagatgcatgctcgagcggccgccagtgtgatggatatctgcagaattcgccctttcgagcggccgcccgggcaggtactgtggacacctgtcctgcctcttagagtttctacttggatgtggcctctgtcatgtctgcttttgttcctttggtcaaagccaaaagccgatgggacagggatgcatgggcctcccactgnggacatagaaagctgcatggcagtgggcaggaatgcactcctcttacagggagaggggtggtgtcaggttttaactggggtccgaggggagttggtggggtgagtggcgggtagctggagaaacactcaaagaatcgtagacagttttgacatggctttactctctctaagtgcgagtgagtctgggcatgagtgagcctggnggtgagccatatgta

SEQ ID NO: 16890 - DNA, 584 bp, Homo sapiens
tacgactcactatagggcgaattgggccctctagatgcatgctcgagcggccgccagtgtgatggatatctgcagaattcgcccttagcgtggtcgcggccgaggtacttttttttttttaaagaaagcgctttaaagtatggaaggcccacagactgtgcatttaattactgttcatatttcatgcagtcaaactgaatttcatttgaaaagaaaatgatttacctatctttaaaaagccttaatgttctgctttgttttgttttgtttttttcttccagggttatatatttacaaatagaaaaactaaatttatctctagaatttggaaaatcacaggacatatatgttaaataaagattctgaatattacagtgattgaaaagacatttacccccacttaatgcaataatttgaaccagaaaagccttgcattttgaaaaagtttagaaatctttcttttaggtttacaaagaaaaagcggccttcattttatcccttagacttctgtgtcctccacctgctacattacacttcaagaaatttaacttatatcaatcaaaatttgcttcttaatggatgta

SEQ ID NO: 16891 - DNA, 525 bp, Homo sapiens
tacgactcactatagggcgaattgggccctctagatgcatgctcgagcggccgccagtgtgatggatatctgcagaattcgccctttcgagcggccgcccgggcaggtacagagactgcagcagtttattctaggggagttggggaagactttcaaggtaagacatccaagctgcctcttgaagtaggaaagattcatcagttaaaatgttgtggaagaaggacatccaaaagggagagcttgcactgaagcaaggaggcataagaaatcctgatgagtcaaggaaacggggttttaggatgaatggacttctgagtgtgagatagagaaaggctagagactggtgtgttggatccagattgcagtggccttccgtgtagcctaagaagttttgaacactgcattcaattattcttatatcatttatactctgcctagattcagaaaggtattcagggccacaattttgaactaatgtttttttcaaaaataaggagctaatggaggtctcttaattggaaaaca

SEQ ID NO: 16892 - DNA, 550 bp, Homo sapiens
  misc_feature 201: n = A,T,C or G
ccctctagatgcatgctcgagcggccgccagtgtgatggatatctgcagaattcgccctttcgagcggccgcccgggcaggtactttttttttttttttttttttttttggggggaatacaagctttttatttaattacagggttcctccagaggtagcacgctgttgcgattctttcaagttgcacagaccatcagtttnctctacttccttcaaagcgtcttctgagaatgaacttactaccagaagattttaaggggctgacaggcatgtctgcccaggagacagtaatattcctaccttgacatctagcttggccaagtgctgtaaaacccagatgcgatgggaccaagcattatagttgcttgggtatctccctgctgcttcaccacagacctccatctcttcttgtatgagtcgctgtgccctttctgtgggaattgttcccaagtttcctttggtcacaaaggaaggcaaggaggtttcctgaattagctgttgtagcacccatcgcctgtgaatccatgtttctggactctttggaaacttg

SEQ ID NO: 16893 - DNA, 588 bp, Homo sapiens
ggcgaattgggccctctagatgcatgctcgagcggccgccagtgtgatggatatctgcagaattcgccctttcgagcggccgcccgggcaggtacgcgggggtctgcaccgaggagagcggcctgtcggaagtgggccaccatatctggaaactacagtctatgctttgaagccaaagggaataaacatctaaagactcccccggggacctggaggatggacttttccatggtggccggagcagcagcttacaatgaaaaatcagagactggtgctcttggagaaaactatagttggcaaattcccattaaccacaatgacttcaaaattttaaaaaataatgagcgtcagctgtgtgaagtcctccagaataagttaggctgtatctctaccctggtctctccagttcaggaaggcaacagcaaatctctgcaagtgttcagaaaaatgctgactcctaggatagagttatcagtctggaaagatgacctcaccacacatgctgttgatgctgtggtgaatgcagccaatgaagatcttctgcatgggggaggcctggccctggccctggtaaaagctggtggattt

SEQ ID NO: 16894 - DNA, 398 bp, Homo sapiens
ttgtaatacgactcactatagggcgaattgggccctctagatgcatgctcgagcggccgccagtgtgatggatatctgcagaattcgccctttcgagcggccgcccgggcaggtacagagggaaaagcatgtatgtgcaagggcctgtggcagaaagacccaatgtgctgaaattttgaaggccagcttgactggaatatagacaatgaaagggagcctggcacaggatgtggcccagaccacacaagactttgtagccatgataatgatttttacttttagcttaagagcaaagggaagccacaagtcaagagaatgacatgatgaactttgattttgattctgacttctgcgtgcagaatgaattgtagaggagcaagagtggaagcaggaacagc

SEQ ID NO: 16895 - DNA, 394 bp, Homo sapiens
agggcgaattgggccctctagatgcatgctcgagcggccgccagtgtgatggatatctgcagaattcgccctttcgagcggccgcccgggcaggtacagattgcagaggataatactcaagatgttctccaaggccaactagtcatcagtttattcatgtttctgggattggattcatgaactcatcctttgaactatttcaacaagcttcttcatgtaactaatctgcggaaggtagaaaggggaaaactgttgggtgctaaaatgacaactggttcaagacccaagtaggtgttcacagtcagtcctgcaggaagagattagaggatctagttacccaggaatcatctccattccttccaactgaaagggaaacaaacaaggaggagcacgc

SEQ ID NO: 16896 - DNA, 523 bp, Homo sapiens
ccctctagatgcatgctcgagcggccgccagtgtgatggatatctgcagaattcgccctttcgagcggccgcccgggcaggtatcagaatcggattgtcatcatattcacttcatcatagagttgatcataaatcttccactcctgtaaaactgactgcatggaggttttgagctgattgacctgagtgagaacactgcttctcttttgaaataactcatcaattcgggatgctgtatcttctaacaatggcactgccccactctccaaagtcagataactttgtttcaactcatctagtgctttggatttaattgcaagttgattttctatatcctgacagtccaggagcagcttctgcactgagatcacactttcaagtttttgtaaagttttcagtctctcttcttgtgcttccagccagttgttcaagatctgtattttattttcactctcagtgatactttctagaagttggtctaaatgttgtatctttctattcagcattccatgtactgaaagga

SEQ ID NO: 16897 - DNA, 658 bp, Homo sapiens
cgactactatggccctctagatgcatgctcgagcggccgccagtgtgatggatatctgcagaattcgcccttagcgtggtcgcggccgaggtactgaagacaaacgttgtaatcaatttatggtcttaggctatttgcatgactgaaatctgaaaacttcatgaaatcagggatcattacaaatatcccaatgccttgtgccagccacagaaactcagtaacagactatttgacagaatggtgtcaatttaatcatgacattgcaatggactataggaagagtcaataaaacactgatagtggagcaaaaatctggcgtgacacctgacattgaaaaagtcggatggaatacaaccacatccatttgttctatgttgtctatagcggctttcacacagaaactgcacagttgagtcattgtgacaaagactgtatatcccacaaagcttaaaatatttacaatttggccttttagagaaaaagttttatgacccttgcaatattaacacagaaatctcagagatgctgtcttcttcctaaactttaatatttaattctgattgtggatgaaattagattctccaactttccatgtttaagactcattcaaaaaattcataaatctcaaaatattagaaatgcacgatattgactgatg

SEQ ID NO: 16898 - DNA, 499 bp, Homo sapiens
  misc_feature 361, 362, 376, 379: n = A,T,C or G
gggcgaattgggccctctagatgcatgctcgagcggccgccagtgtgatggatatctgcagaattcgccctttcgagcggccgcccgggcaggtacaaagaaattgtggcattatcctagggggtaaactgggtaagactgcagatcaggtctcctcaccctcggccccaggttcttttctttcaactttgtttagtgagaatttaagtaaaaatgtcctggtgttgatttagaattggatattatagattaaatttatgcaggtatctcttacctgtttatcttattttctgtctcttacctgtgttcaattaaattgaacttgatattaatctttttcctcaggatacttatgcactanncccaaaactatagntgnttggagagaattcaatattcagtgacgataaatacatccccatatccttttacctattgataaaacttagtacccttcaaaaatttaaacaagaatccactgttgctactgaaaggcaaa

SEQ ID NO: 16899 - DNA, 625 bp, Homo sapiens
taatacgactcactatagggcgaattgggccctctagatgcatgctcgagcggccgccagtgtgatggatatctgcagaattcgcccttagcgtggtcgcggccgaggtacgcgggggtgtgtagtcgggtatgagaacgattgcaagcaaaagcagttgagggacgctgtccaagagaggctcagtagcacgaactgcaaatacttgagaagggaaaagttcagccttgtgctggaaagtggtttagcatgctggagctggttttctgcttggtagccctacaactttggcccaactacttggcctctgggactcagattcctcctctttaaaatggtgctaataatagcacccaccctctgtgaggaggatgctgtgaggacaaaatgagatcatccacataagccgtgaaccctgttcctggtaaggaaatgaataacatgaagtgaagtcttcgtctccattcccaacagtccccattctacttgcagaaaggttgcttacactgaaaatcagtttattttcccctggtgcaaaaaacagtcgtttctccaaaactgaagctggaaattatctgaaatatcaagtcctccggaaaagggacgcgaagccccctttgtaatt

SEQ ID NO: 16900 - DNA, 536 bp, Homo sapiens
  misc_feature 82, 88, 278: n = A,T,C or G
ccctctagatgcatgctcgagcggccgccagtgtgatggatatctgcagaattcgccctttcgagcggccgcccgggcaggnactttntttttttttttttttttttttttttttaaaggagagaccagacagtcctacatagcataatgggtcaggacacagatgactatgatacagcaaatatgttgctttggaagcactagtggaaaaccgcaattgtgagagtggggtcacacggtatgggtgggagtgagcgccctgctaaaagtgaatcccnccgagggcacggtgagcatgagctgtggactatccataatcaacagcatgcgagacagacacataatcagcgtccagggcattccctggacttgggctagcctaggttcactgaggcaaggtcttccttggcggtcaaaagccacctagtttccaaggaaaatgagaatcagatacgcacgtgataatcctggactctggaagtgggcttaacctctgcgttcttacctgtttttgttttccaattctgcaataaact

SEQ ID NO: 16901 - DNA, 404 bp, Homo sapiens
tacgactactatagggcgaattgggccctctagatgcatgctcgagcggccgccagtgtgatggatatctgcagaattcgccctttcgagcggccgcccgggcaggtactcagatgtgaataataccacatttgtaagttgacttaaaattctgaaatgatgcttcatcagacagggttcttgtataaaagagagtttaacctcgagttatgagcctgggagggaaaaaaataagggacagtgaagaaggattagtagcgttggtgagtcattaccacccttcaggctgaccagtccaaggagagttgaaatcatgaaggagagtctatctggagagagctgtagttttgagggttgcaaagacttaggatggagttggtggggtgtggttagtctctaaggtt

SEQ ID NO: 16902 - DNA, 629 bp, Homo sapiens
cgactactatagggcgaattgtgccctctagatgcatgctcgagcggccgccagtgtgatggatatctgcagaattcgccctttcgagcggccgcccgggcaggtacttttgagtagatgcattgagcctctcagtaatgtgaaagcaggctgcagagatcaccatcccagcaacaggattattctgtttgatatctgttgccaacagccacatttcccagcatcttggatgcaaaagggggtttactgacaaagcaaagcttttacattgggccttacaggcacaggaaaatcaccagctacctcaatgcacagtcccacggtagcattcctccggtcactcttagaaaaggcccaagtcatctgggcgcctggactcacccgccccaagcagagtggccctcatccttcagaatgtggatctgccgaattgaagaggcctgatttcagctccaccagatgcagatttgtgttttgttttcttgttatcactgtcacacagcttataacatgtatgcttttcagaatacagttgtctagccaagccatcaagtgtctgaaattcaatattggtttatgcaaatacagcaaacttttatttaagtagataggagaatatgtttaaaata

SEQ ID NO: 16903 - DNA, 427 bp, Homo sapiens
gactcactatagggcgaattgggccctctagatgcatgctcgagcggccgccagtgtgatggatatctgcagaattcgccctttcgagcggccgcccgggcaggtacctagcttttattcattttattattcatctttattgctttcattgcacatgctgttaacttcttatgaactctttgttctaataaataagcatatccaggtttttcataaataaatgaggagtctataaattcttactagttttaatagaaacattgccactaaaatggtgtattctagctgtgtgagcttttggaaaatgttttcatttcctttatgtttgaatgttccttccaggtctttgaaaatatacattctgagttgaaaagctttataataggtaaaactcattaacccatatactttccatgctgggcacagc

SEQ ID NO: 16904 - DNA, 404 bp, Homo sapiens
ctactatagggcgaattgggccctctagatgcatgctcgagcggccgccagtgtgatggatatctgcagaattcgccctttcgagcggccgcccgggcaggtacgcgggtgggaatatctttacagcagcagtggttacatgactttatatcactatatatctttgtcaaagctcagaattgtatagctagaaggttatattttactgtatgtaaacaatatctcaacaaacctgactttgaaaaataataaaaagaaaagaactaggctcaatagtgaattagactgaaattacctcatgaacaggcaagcacactgattatgtaaaaatctttctgatgtttacttttgaattgtttattctccatttttctacattaaagtattaagattaaatgtgttat

SEQ ID NO: 16905 - DNA, 583 bp, Homo sapiens
  misc_feature 304: n = A,T,C or G
ccctctagatgcatgctcgagcggccgccagtgtgatggatatctgcagaattcgccctttcgagcggccgcccgggcaggtactctatttcagatttcctcaaagctgggcagttgttagcgagaatgaccaatttcgctttgccttgtctgatcatcttcagagtctgcttgtacagtatagtcacttagagaagctttcaaaacaaaacaaacataaaccaatgtccaagatccaggttagaagaggggtccagagaagctgaccaacaaagttgggaagctctgagttctcttctcctgngacccaccacccttagtatattcagtaggagggtggtgatggctgcaggcagtggtcatggcagccgtgacattttggcttcaccataactaaactggccaacagatcagactgcaagtttttattatcctttattggatgcttacatctgaaatgacaaaatgagatagttcgaaagaatatatttgatctttttttctagttacagatatcatcattgttcacaggagaaaacttggaaacacacgaagagaaagttaaattcatgcccgttatatc

SEQ ID NO: 16906 - DNA, 472 bp, Homo sapiens
  misc_feature 23: n = A,T,C or G
atgtatgtatatgtatatgtggngatcgtgggtagggggaagaattcagagggaagaagcttgggacgtctttgcctggacgatttctaaaaactagctgactcgtcatctttaaaacaacaacaataaaagctatcatatgcatatgttactttgtttaatatttacaacaaccctttgtggtaaatattttcatttttcagatgaggaaattcaggcacagaatgattaataatttgctaatgagtcacagcagtgatggggatgtggagatttaaatcaatgcattttgagttgcctgagcaaagaattccaaaatttaggaagtcactatttctgtatttccttctaaggaaaaccatctaaagtatatttttatctccagtaggcgtggtcattgtcaagagaaggaaaggttggtgattttattggggtgatgggattgggacttaatttctcttttgctttttct

SEQ ID NO: 16907 - DNA, 691 bp, Homo sapiens
tacgactcactatagggcgaattgggccctctagatgcatgctcgagcggccgccagtgtgatggatatctgcagaattcgcccttagcgtggtcgcggccgaggtactttattaatatttttttcaagttttggtaaagtatgaaataactctggattaagaggagaagaactagaacttaataaccatgacatttgggcaaattgtttgaagcctcagtttcctcaacctaaaaataggaattataactttttgaattgttctgttgtatgagataatgacagtgaaatattttggagccaaaaagcaatgcatactattgggggttattattattttttgatctttcagcaagccagctatagtagcttttcctatataaacacagtatgaattcagtgccctcgctttactgaccctcacagcattcaagccctgtatggaccgctgagctctcccttgaagcaccccttagtccagtattctttactattttcccctttaacaatttaaacttctttcaaaacaactggcagtagttttttaaaaaagaaaacaggctactcttcaaattaaaaaaaattgtcttgctttaggaaaaatgttcttctgtcttttccaattatcttatttcttctgcctctcatctgccttgcctaggcagaattattctcaagcctgcacatgctg

SEQ ID NO: 16908 - DNA, 486 bp, Homo sapiens
gactcactatagggcgaattgggccctctagatgcatgctcgagcggccgccagtgtgatggatatctgcagaattcgcccttagcgtggtcgcggccgaggtacgtttatatgaaggcaaacgtttccaggagccatcttcacatttcttcataaactggtcaaagagcagtcttaggtccttgttccagctggggttggggacagaacagtccttaagaatgacttcctcagaagaaaatgacctttagcagcaagaatccaaagtatctttggtgtctgttgtcttcccatgttgtgcgtgcagatggaggcacgagcataacgtaaatctcttccatttataagaaaactgaatgtcagcgtgatgctagctgctttaatatttcttgctgaatttttcttggatttgttgtcgtaggtctcactcttggaaaggatgtattcttgaattgttatccatggggcaaggcaccaaaatgagtc

SEQ ID NO: 16909 - DNA, 397 bp, Homo sapiens
  misc_feature 339: n = A,T,C or G
ctatagggcgaattgtgccctctagatgcatgctcgagcggccgccagtgtgatggatatctgcagaattcgcccttagcgtggtcgcggccgaggtacaataacttcacctatctccttaaagctgggattaagggaaaaagaatcagtcaacaagaaggtaagttcacagaattatcagccataatagtgtaaatttgccattaaaattagaaaaataaatagatgaaatttttttcattcaaattttcataaattttctgatgcatatgaactttcaaagttaattaaaatgctatgaacttatatttttaaaaacttactctgcagactcaacanaataattaaaattgtattttctcttaagcacttgcttttttttttttaaggtaacatt

SEQ ID NO: 16910 - DNA, 178 bp, Homo sapiens
ggcgaattgggccctctagatgcatgctcgagcggccgccagtgtgatggatatctgcagaattcgccctttcgagcggccgcccgggcaggtacgcgggtattccaaacacagatcagccttatctagcgaaccatcactctgctcttgaattttcttttggcctcaaactctagag

SEQ ID NO: 16911 - DNA, 568 bp, Homo sapiens
  misc_feature 371, 424, 432: n = A,T,C or G
cgactcactatagggcgaattgggccctctagatgcatgctcgagcggccgccagtgtgatggatatctgcagaattcgccctttcgagcggccgcccgggcaggtacgcgggatgttaaatattaagaaaaaaagactaaataatggacacctatgtatctgcaaatacgcattcagttgtctttaataatcctttgctaatcttgcttcagatggattaagtgtgcgtgcctgtgtgtggtgtgtgttttacattacagattagaacttaggtcctctggattcacaaccccgaatcccatttgtttttcttcctttccaaagttgtcattatcgtgaatttggtgtttagctatcccatgcatatttntacactactgctataacatatgtagttataaaatagcattgttttgtatgctntaaaactntatttaaatgggaccaactgtttatattatcctgatcttctttcccttatcaacagtatgcttttgtgatttatctgtgatgttccatataggtcaaattctttcatttttattgctttataatatttcatcatat

SEQ ID NO: 16912 - DNA, 394 bp, Homo sapiens
tacgactcactatagggcgaattgggccctctagatgcatgctcgagcggccgccagtgtgatggatatctgcagaattcgcccttagcgtggtcgcggccgaggtacgcgggggttttgcaaaatttagatggctttataatcacaataatacaaaagaaagtgaccctcgaaatgggttttaccactaattttcgattcttgaagatcatttcgaaacattaccagcccaaacatttttactgctcctcagaatacataacacctgttttttgatactacttttgtaatcatggtaataacagagtatggatatgtatcattcttgtgcaatttacaatgtattggactgattttctttctgactttgggcttggggtaacatatagctttt

SEQ ID NO: 16913 - DNA, 563 bp, Homo sapiens
gactactatagggcgaattgcgccctctagatgcatgctcgagcggccgccagtgtgatggatatctgcagaattcgccctttcgagcggccgcccgggcaggtactttgtgtatgttccagcaaaacaagggttcctccagttttggtggtggaaatgtcacagacatcaagcattggtagtgcagaatctttaatttcactggagagaaaaaaagaaaaaaatatcaacagagatataacctccaggaaagatttgccctcaagaacctcaaatgtagagagaaaagcatctcagcaacaatggggtcggggcaactttacagaaggaaaagttcctcacataaggattgagaatggagctgctattgaggaaatctatacctttggaagaatattgggaaaagggagctttggaatagtcattgaagcgacagacaaggaaacagaaacgaagtgggcaattaaaaaagtgaacaaagaaaaggctggaagctctgctgtgaagttacttgaacgagaggtgaacattctgaaaagttgtaaacatgaacacatcataca

SEQ ID NO: 16914 - DNA, 430 bp, Homo sapiens
ctatagggcgaattgggccctctagatgcatgctcgagcggccgccagtgtgatggatatctgcagaattcgccctttcgagcggccgcccgggcaggtacaaagactattgtagagactatccgggttagtttgcaagggaagccaatgataagtattgaaagaaattcacctggtgagcaatgaggaccctactgttgctgcctttaaagctgcttcagaattcatcctagggaagagtgagctgggacaagaaaccaccccttctttcaatgcaatggtcgtgaacaacctgaccctccagattgtccagggccacattgaatggcagacggcagatgtaattgttaattctgtaaacccacatgatattacaggtggacctgtggcaaagtcaattctacaacaagcaagagttgaaatgaaatcg

SEQ ID NO: 16915 - DNA, 629 bp, Homo sapiens
actatagggcgaattgggccctctagatgcatgctcgagcggccgccagtgtgatggatatctgcagaattcgccctttcgagcggccgcccgggcaggtacctagcttttattcattttattattcatctttattgctttcattgcacatgctgttaacttcttatgaactctttgttctaataaataagcatatccaggtttttcataaataaatgaggagtctataaattcttactagttttaatagaaacattgccactaaaatggtgtattctagctgtgtgagcttttggaaaatgttttcatttcctttatgtttgaatgttccttccaggtctttgaaaatatacattctgagttgaaaagctttataataggtaaaactcattaacccatatactttccatgctgggcacagcaggtgtggtaggtagaaatataagatgactcccaagatttttgcaccctggcatacacatatgcttttccagttgttgaaacactaatttaggtgctgctgtgaaaggattttgtagatgtgaataatgttccaaatcagttggccttaagatagaaagatgatcctggatgggccagatcttatcaagtgagtccttaaagggaac

SEQ ID NO: 16916 - DNA, 395 bp, Homo sapiens
tatagggcgaattgggccctctagatgcatgctcgagcggccgccagtgtgatggatatctgcagaattcgcccttagcgtggtcgcggccgaggtaccaccctgagccatcaaccttgctctccagtcccttcttagtatccctttctggctctttttactactcctgacacacagacattttctaagattctgcccttggtcatcttctcttctgactttccaattcccgtagttatgttctgatcacttgattttgatctccaaatcttctagcacaatattttttctgagatctgaacttttatttctaacctcttgtagttactgtcacatatctattctactgccacctcaaatgtaaatttccaaatggctatctcttactctgcctc

SEQ ID NO: 16917 - DNA, 88 bp, Homo sapiens
cactatagggcgaattgggccctctagatgcatgctcgagcggccgccagtgtgatggatatctgcagaattcgctccttagacgtgg

SEQ ID NO: 16918 - DNA, 342 bp, Homo sapiens
catgctcgagcggccgccagtgtgatggatatctgcagaattcgccctttcgagcggccgcccgggcaggtacataattatcaaatgctgtgagttcagaaaagatgtttctgagtaattaagggattggggaggaggaagaccttgaaaaaccccgtgtgggatcatttagaagctacaaagcattgttagaatgaagagattcgggtgttagtctcaattctaacaaattaaggtagttaattctatcaaaaactggcagtgtaatgttgagcaagttactacctaggcctttactttttcaaggaggctggattctgatctatgaattatttttccacc

SEQ ID NO: 16919 - DNA, 348 bp, Homo sapiens
ccctctagatgcatgctcgagcggccgccagtgtgatggatatctgcagaattcgccctttcgagcggccgcccgggcaggtactgacacatgatgtcccctaccatgattacttctataccgtgaacagatactgtatcatccgatcttcaaaacagaaatgcaggctaagagtttccacagatttgaaatacagaaaacagccatggggccttgtcaaatctttaattgaaaagaattcctggagttctttggaggactatttcaaacagcttgaatcacatttgttaattgaagaatctgtattaaatcaggccgttgaagaccctggaaaacttactggcctac

SEQ ID NO: 16920 - DNA, 397 bp, Homo sapiens
tatagggcgaattgggccctctagatgcatgctcgagcggccgccagtgtgatggatatctgcagaattcgcccttagcgtggtcgcggccgaggtaccatatttcggaggatggatttctgatttccaacaatgacaattcctctacttgaggactaatcatggtttatcttaagaatatagatgcgataggttatatctgctcggttatatagagttttttctgtctttattatctcttaagtgcattgtctgtgatccacatcacatatttgtttgaggcttattcactaataaaaccattttctttcttttcttccttagctgggagctttgttgagcttgcagaatactttaatttaattacccgcgtacctgcccgggcggccgctcgaaa

SEQ ID NO: 16921 - DNA, 458 bp, Homo sapiens
ttttttttgattaataatttattcttttggatatctatatttaattgtttcatgtgattccatttaattttttcaaggaatacactgacattactaaattgtcagcaatgcacagaatttgaaaatacacttgaaaaatagaactttgatataaacttgtaaaatacgtaggatgtataccactgattaaatcaattaaaaaactccattcccctattcagtgctgtgttgggtagaaaaggggtaagtgaacaaacaagtggaaaagaaagttaaggaagaacatatagaaaaggattgttttgcgcagacatctggctttgctttcccaaagctactgagtacaaaatttattgcggtaaagagattaaaactatttcttatgtaaaccaaaatcaacatttgtttcacttgactaccagtagttggaaaaactatctattacaaatgcaaattct

SEQ ID NO: 16922 - DNA, 571 bp, Homo sapiens
  misc_feature 547: n = A,T,C or G
gactactatagggcgaattgggccctctagatgcatgctcgagcggccgccagtgtgatggatatctgcagaattcgcccttagcgtggtcgcggccgaggtaccagcttataaataccagcttctgttattgataagtagaaagatgaatggaaaacaaaaatactgtataatcaataggccaacagctagttttttgaaaagaccaatatgatacagaaaactcaggaaaaaggagtaataaaaatcaatatgctaaaaatgaaacagagatataacaatagtgatttttttggggaaaaatggaaaggttttacatgaaaaaatataattactcttaccgaagaataaagaggaacttgaattgaccatgaaacaatttgagttcataactaaaaaaagagatatgggccaggcgctgtggctcatgcctgtaatccgtgcactttgagaggccaagttgggagattgcttgaggccaggagttcgagactagcctgggcaacatggtgagatcctgtccctaatacaaataaaaagcaattanctgggcatggtggtgtatgcctgt

SEQ ID NO: 16923 - DNA, 528 bp, Homo sapiens
tagatgcggtgcgtcaagcggacggatatgtgcagaattcgcccttagcgtggtcgcggccgaggtacgcgggaccacattgtattgagttttgtgtataaaagctacagatgagtctaaataaaataaaaatggaatttagccacaaatgctgaactaagtcagatacctctagtcctataatggaataagctctatgatatgtgttagtattgcatatggtatgattgtaaggtttttggaaagcagtttaatatgccagtcttgcatgtgagcagatgagttttctccttgagctggatgtctctttgaaaactatcagtcacctagaaaatatatttgtcctcatatgggaaactaggtctaggaaagcaaggtgtagggagaggtcttagattcttgggttaacaatttaacaaaggagatttggctatcacagtcatctagtgaaagtagaataggacagaaaagaccttgtaacttgggaaataaatgttattttcttagtttatttagactttgatattc

SEQ ID NO: 16924 - DNA, 544 bp, Homo sapiens
  misc_feature 340: n = A,T,C or G
ggccctctagatgcatgctcgagcggccgccagtgtgatggatatctgcagaattcgcccttagcgtggtcgcggccgaggtacgtccaaagccacaggatgaaattatgcagaagtctatcttgaaaaggtcctgattactttcactaaaattctacctattagaaagatgacaatatcccaaaataataaaagctcagaactaaaactttaggaagtataggagaaaggaagaatgggtaggtagactggggtaaagacggaggagaggatagtttagtttattacctaacagaaaggctattaaaatggacgagttgtagtcctatccctgacattntatgtccttggttaatgtgcttagccatcttgtgcttcagaaatgtcctcctatctgttcaaacctgtaatttttgaaggtttaaaccatgattttctgataatctcaaactgctcacatctccttgttagaactagtatcttagaaatgctaaaacgattagttctgaaatcacattgctccttaaagaactaaatttttttg

SEQ ID NO: 16925 - DNA, 615 bp, Homo sapiens
tatagggcgaattgggccctctagatgcatgctcgagcggccgccagtgtgatggatatctgcagaattcgccctttcgagcggccgcccgggcaggtacgcgggaacctggaagattggagatctctctctaatccctaccccgcagctggttcggtgtgagtttatagaaaccttggggtctgagtttatgttaaaaaaaaaaaaaaaaaaaaagttgaataaatagatcagtgatatccagaccctgggatttcgtggctcaattaaaaactgtggggttaccatacatagtatctgactgcttattttgtcaagtaaagacatatacaggcataccttgttttttttgcatttcactttgttgtacatatcagtatgattaacggttcagtgttcattttcaggaatctgattggataactgtcgtttcatttgttgaaacatataattcaaaaagcattgatgaagttgtccaaaaaagagagcaatgcaagtccattttacttattatgaacaacaaagcttggtagtttattagtgtaaataggctctctatgccagtgtattccctggggataaactaggtgattgagatgggtcgtttaacttttt

SEQ ID NO: 16926 - DNA, 601 bp, Homo sapiens
  misc_feature 408: n = A,T,C or G
tacgactcactatagggcgaattgggccctctagatgcatgctcgagcggccgccagtgtgatggatatctgcagaattcgcccttagcgtggtcgcggccgaggtaccagaacctttcacaacctggagaatggcaataagacattgctgaaagtagtctacagatatgttacttcccaacaattacagtaatcgagagtgttgcatagtttgcaaagtacttcatgagttcttttaattagcaaaacaaggtattggctaggaagaaaagttattattattttcattttatagatgagaaaacagaaccacagaaactgagggagttacccaaggttacgtggcaaaggagtgacggtggcacatctagaatccaagtccactgactctcatcataatggcctttntatatcatgcttctcttgaactatgacttgtcttctagtatatgtagatatcgtttatacttaaaaatttgcctaatactatctcataatgatgctaagattattaaaatggaaattaaagtttgtagatatcgtttatacttaaatatttgcctaaaactatcttataatgatgctaagattattaaaatgg

SEQ ID NO: 16927 - DNA, 541 bp, Homo sapiens
ctcactatagggcgaattgtgccctctagatgcatgctcgagcggccgccagtgtgatggatatctgcagaattcgcccttagcgtggtcgcggccgaggtacctggctatcaattccacttggtcatgaggtttgttttaatacagtgctgaatttgatttcccagtattttgttaaggatgtttgcatctgtgtttttgaaatttatctttttaaattgataaactaagacttaatatacatttattgtgtggaacatgttgttttgaatctatgttaatgattaatacagatcttttgatttccttgtaatatttttggttttatttcaggctaatgatggctacttagaatgagttgggaagtattctcttttctgttttctggaactgtttgtgtagacttattccttacatgtttggttgagttcactagtgaagtcatctctttttggaaagttttaaaactgtgaagtcattttgtttaataaatacaggtcttttattgttacctctttcttcttgagtgagtttggtagtt

SEQ ID NO: 16928 - DNA, 386 bp, Homo sapiens
ctactatagggcgaattgggccctctagatgcatgctcgagcggccgccagtgtgatggatatctgcagaattcgcccttcgagcggccgcccgggcaggtactaagagctttacatgcacccgctctttaaataaccctatgagctatgcttattatcctcattttacaaattaggaccctgaagctgtggaagattaacctacttaactgtctggagtctctcaataaatatcaggcaggatcttatttgctaaaattgtattttatttctataagtgatgttttgaaagatataaaaaaattttatgcctatcatgaataaccattaaatggtgcaataaacataacattgtatacagtaattgtttaaatgaaagaacttct

SEQ ID NO: 16929 - DNA, 612 bp, Homo sapiens
cgactactatagggcgaattgggccctctagatgcatgctcgagcggccgccagtgtgatggatatctgcagaattcgcccttagcgtggtcgcggccgaggtaccattcatttaaaggcataaatgtccaatgggtcataaaggtcaaagctaatagacaaaaaaagctttagcatggatgatgagcaaattagatgcctctctgctcagcatgaggttttttcagctgcaaaagtaaaatgaatcaaccatggaattaccccaatgcactaatagctaccgctgtagtggtagatcgttatatatctgggcaattaaattttaaatgctaactgtgagaccaagtcagcaaattctaattgagacacgttctacaaaacacctgaccactactcctgaaacagtcaaggtcttcagaaataaagaaggtttaaaaaaattattacagtcaagatacacggcaactaaatgtgatgtggtataccgtatgggatacagaaactgaaaaaggacattagggccatcttgtgatacatgcactgtcacaggaaaagttttcaggaaaagtcaagccagggcttcacagaagatcaaaagaaagagacaaggag

SEQ ID NO: 16930 - DNA, 609 bp, Homo sapiens
  misc_feature 571: n = A,T,C or G
tacgactcactatagggcgaattgggccctctagatgcatgctcgagcggccgccagtgtgatggatatctgcagaattcgccctttcgagcggccgcccgggcaggtacagtagaaacattaagagagcaagcgagcctcatttccagacacatgggagatttctctcaggactgtgcaaagcatttcatgttccaagaccctgcctttgttaaaacatagatgcatttttttttctttggggatgttcagagccttccagaattatgctttcccaggagagataacaacagtcacacagccaaacgtctagcagtgcttctgcctaccgaacagaatttcctgagaatcttctggaaaagcagtgcccagtcactcattctgcaaaatgcactcagcagctcctctgagagaagccgtggatatagggggatggcaggagagaaaggcagctctccctgccaggcgggtgaggggcaagactatagacccttctactgagggcgagctggtagaatttctctcaatgctcaagaccgaggagtttatcattcccttgacccctgggctntagctagaaatgtccagaactcccccatcctaactgag

SEQ ID NO: 16931 - DNA, 674 bp, Homo sapiens
tagggcgaattgggccctctagatgcatgctcgagcggccgccagtgtgatggatatctgcagaattcgccctttcgagcggccgcccgggcaggtacgcgggatgttaaatattaagaaaaaaagactaaataatggacacctatgtatctgcaaatacgcattcagttgtctttaataatcctttgctaatcttgcttcagatggattaagtgtgcgtgcctgtgtgtggtgtgtgttttacattacagattagaacttaggtcctctggattcacaaccccgaatcccatttgtttttcttcctttccaaagttgtcattatcgtgaatttggtgtttagctatcccatgcatatttttacactactgctataacatatgtagttataaaatagcattgttttgtatgctttaaaactttatttaaatgggaccaactgtttatattatcctgatcttctttcccttatcaacagtatgcttttgtgatttatctgtgatgttccatataggtcaaattctttcatttttattgctttataatatttcatcatatgaaaatatcatgatttatttatctatttccctattgctagaaatgcatgtcattttaaactttttactattatcaataatgtcacaatgaaccattgtgtgactcttatgtgcttt

SEQ ID NO: 16932 - DNA, 397 bp, Homo sapiens
actactatagggcgaattgggccctctagatgcatgctcgagcggccgccagtgtgatggatatctgcagaattcgcccttagcgtggtcgcggccgaggtacacaataattttttgtggctactcaaattttcataattaatctagatttaaaatcaaggaatattcttacttgtagttggcaatcaatatgacatgccaaaattatatgtaagtattttattgttggtgaggatataagaaatttaccatcaaaagagagacgataatctatgcttgcagactccggaaagctgcctctcacataagaatttgcaatttctgggggaaaagaaaaagttgattgtgcaaataaacattaccatggagtcttctctatggcaacatcaaaaatgaa

SEQ ID NO: 16933 - DNA, 361 bp, Homo sapiens
actactatagggcgaattgggccctctagatgcatgctcgagcggccgccagtgtgatggatatctgcagaattcgccctttcgagcggccgcccgggcaggtacctagcttttattcattttattattcatctttattgctttcattgcacatgctgttaacttcttatgaactctttgttctaataaataagcatatccaggtttttcataaataaatgaggagtctataaattcttactagttttaatagaaacattgccactaaaatggtgtattctagctgtgtgagcttttggaaaatgttttcatttcctttatgtttgaatgttccttccaggtctttgaaaatatacattct

SEQ ID NO: 16934 - DNA, 623 bp, Homo sapiens
ctcactatagggcgaattgggccctctagatgcatgctcgagcggccgccagtgtgatggatatctgcagaattcgcccttagcgtggtcgcggccgaggtacgcgggattgtgcattttcctcagaaaattactgaaaggatttttgcctttcttggaattcctttgtctctgctagtttaaaccaaatattgtttgccacctctacaaaccttttttaccttccctatgaaggggaaatatcaccaactaatactaatgtttggaaacagaacttgcctagagatgaaattaaactaattgaaaacatctgctggactctgatggatcgcctaggatatccaaagtttatggactaaatgctgcaggtcagcagaaatttgcactaataatacttaccaacccactttgtggatatgaatcagaagagtttgtttattctttagtgtgtgtgtgtgtgtgtgcacgcgtgtatgtgttcagtgttgtttgcacagagagattgttttaaaaaatggcaccatatttggcctagcaggatttatttttatgtcatcacctcccttgcctttgtttctgaaaattttgtctgctaaaaagtttctgctacagagtggtagatg

SEQ ID NO: 16935 - DNA, 632 bp, Homo sapiens
  misc_feature 25: n = A,T,C or G
tacgactcactatagggcgaattgngccctctagatgcatgctcgagcggccgccagtgtgatggatatctgcagaattcgccctttcgagcggccgcccgggcaggtacttttttttttttttttttttggtgggggtagggtggcaaacaaaaattaaattagtattaacatgacttaacattgctaagcttctctttggatcccatgtttctggttctccaatgccactaatggaaaaagagtatggccacaataactagtctttggcatataatccttaccaagataagtggaaagattcaaaacctcactaatctatttttttctgttctaagaatatccacagtttcccaaatgtgattatgcatccccctcacattttcccttttcactaatgtcacctaaatattcggctctatcctattcaggaaaccaaagttcagagacataaacaaaagaaaaaaaacccacaaaacttcctcaagtcataggtccagtaataaggtaagctgggaatttaactcacattttctgacactaaaactattgttcattctcctgcactaagcttctaccataatttatacacaatggactttacctaaggttaatataattttgcaatcact

SEQ ID NO: 16936 - DNA, 605 bp, Homo sapiens
gactcactatagggcgaattgggccctctagatgcatgctcgagcggccgccagtgtgatggatatctgcagaattcgccctttcgagcggccgcccgggcaggtaccctagtcatccatcatagagattttagcatgagaggatattaagaaaatacatgtaattctgaataacatatatggaattaatgtgtctccatgagagtgtgtgcctgtgtgtgtgtataattccaatattaataaaaatgttatcttctttgaaaccatcagtgctgactctatccagcctctctccacacagtataaaatgtggaaaatgtaagtattatggtatggaattgactcttgctcatatgttgcacacctaggtgctatttctattatggagaactagaattatataatttagtttaattgtgcccccttttccccaaagttcatgtgtatttatgccatctgtttggccttgtttattttgttatcacagataaaatagaagttaaaatctgaattaacgtgctgatatgtttcatggtgataaaatataattgcttatatacatatgcaggtatttagtctatagcctgtgtgggtgtgtgtgtgtg

SEQ ID NO: 16937 - DNA, 556 bp, Homo sapiens
gactactatgggcgaattgggccctctagatgcatgctcgagcggccgccagtgtgatggatatctgcagaattcgccctttcgagcggccgcccgggcaggtacgcgggggtttgtggctttcagctctgaaggctgtcagctccctgatcccactctgcactctatttctgtgctgctttaattcttctagtgctgctgggttagggtcttcacgaccgaactggtctcggcagtggaagaacatggaaacactaggctgacttagtctcccagcctacatctttctcccatgctggacgctgcctgccctcaaacatcagactgcaagttcttcagcttttggactcttggacttacaccagtgatttgccaggagctctcaggccttcagcaacagactgaaggctgtgctgtcggcttccctacttttgaaggtttgggactcagactggcttcctggctcttcagcttgcagatggcctattgtgggacttcaccttgtgatcatgtgaatcaatactcctaataaactccccttcatgtataacatcta

SEQ ID NO: 16938 - DNA, 628 bp, Homo sapiens
actatagggcgaattgggccctctagatgcatgctcgagcggccgccagtgtgatggatatctgcagaattcgccctttcgagcggccgcccgggcaggtaccaagtttttggtccaaattttgtaggataagttaaacttaaattttactctattaaccaatatgagtgtatttctgaaagcatagttacgttgaaataaagttttaaaaagagaaaatatgaaagaagaatcagtatgaaaaatatctatactttatgtatattttatatatgcatggccactctaggaatgttttaataaggcagaattttgtttaatcatgatatgtgttatgataaaatatttgctctcaaccaattctaaaacataaaaggaaatttctcactttctatattaaaagtcaaaatataaaataacaaaagaaagagttaaaattaagcaaaaaatatgatacatgaccaaaccgtgtaacaattatatatacccaactttagtaatatatttgtttacatttattgtgcactctctatgtgtgagaaattatatggaaattatatgttcatttacttctcactgtttctttgctttgcatgtggtagtaactgtctataaacttgagggtacc

SEQ ID NO: 16939 - DNA, 630 bp, Homo sapiens
  misc_feature 171: n = A,T,C or G
tacgactcactatagggcgaattgggccctctagatgcatgctcgagcggccgccagtgtgatggatatctgcagaattcgcccttagcgtggtcgcggccgaggtactcagtttattgaattgatgaattgattttttttagtaatcacataaatttctgtaagatttgnatacattgttactgtcacagaatcatgttttatatcttcaagctcaaagcaagctttcaaacttgaatttagttcttgcataaatatggatgattgtttctccattgctgaagcagtgtattatttccataatgatctgtaaagtaggtgggtttcatgacctaagtgttattgttgatctttatatatacaaggaaaacgcagagtcatcgttcatttgtagctgcatttatctctggttttcaagcatttctataaaataacaattaagcttagtgtgatggttaatactgagtgtcaacttgattggatggaaggaagcaaaatattaatcctgagtgtgtctgtgagggtgttgccaaaggagataaacatttgagtcagtgtgctgggaaaggcagacccacccttaatctgggtgggcaccatctaatcagctgccattgcagctaggatatg

SEQ ID NO: 16940 - DNA, 381 bp, Homo sapiens
ctactatagggcgaattgggccctctagatgcatgctcgagcggccgccagtgtgatggatatctgcagaattcgcccttagcgtggtcgcggccgaggtactttttttatttttcattttttttttattttttactttaaacgttgggatcatttgttggtttttactgttattccaaaatgaatttcatagcactgaaaggaactgtgtattttctccatcagattcaaccaattgaagtatgttgctgttatgaaaaatgctcacagctaagctttgaaaaagttagtaaaaaacccaccccaatacttactttgatcagtgctctgtaaatctctaagctgatctagttgatctttttaaaactacctttaaaaaaa

SEQ ID NO: 16941 - DNA, 578 bp, Homo sapiens
ctatagggcgaattgggccctctagatgcatgctcgagcggccgccagtgtgatggatatctgcagaattcgcccttagcgtggtcgcggccgaggtacaatttgtagttgtttccaggtttggctaataatcattccttaacctagaattcagatgatcctggaataaggcaggtcagaggactgtaatgatagaattaaattagtgtcactaaaaactgtcccaaagtgctgcttcctaataggaattcattaacctaaaacaagatgttactattatatcgatagactatgaatgctatttctagaaaaagtctagtgccaaatttgtcttattaaataaaaacaatgtaggagcagcttttcttctagtttgatgtcatttaagaattactaacacagtggcagtgttagatgaagatgctgtctacaaggtagataatatactgtttgatactcaaaacatttttcattttgtttaaagtagaagttacataattctatattttaagtcttgggtaaaaaagtagttttacattttataaagtaaagatgtaaatgattcaggtttaaagctc

SEQ ID NO: 16942 - DNA, 617 bp, Homo sapiens
tatagggcgaactgctatagggcgaatcgggccctctagatgcatgctcgagcggccgccagtgtgatggatatctgcagaattcgccctttcgagcggccgcccgggcaggtactagtatatattaaagttcaataattatgatccttattataattattaattcatcattattacatcaatttaaatagaaatttcccagtattagtcttaattgtaatattgagcccacatggaactgtccctaatatagaatctacattcctatattgcatattgcatgtggtttgaatctattgtaagtttcaatatggtcacaaaaaactcattaacaccctaataatgagaaatcaggcattgcaatggactgtttgtgtctctcacaaatttatatgttgaagccttaattctcaaggtgatagtattaggaagtggggtctttgggagctagttatatcatgaggatggagccctcacaattaggattagcacctttataagaagagaagtttgttcccctctctctgctctccatcatgtgaggatatgagaagcagaccatttgcaaaagaggaagctgatcctcaccacccattgagtttgccggcaccttggtc

SEQ ID NO: 16943 - DNA, 579 bp, Homo sapiens
  misc_feature 500: n = A,T,C or G
gactcactatagggcgaattgggccctctagatgcatgctcgagcggccgccagtgtgatggatatctgcagaattcgcccttagcgtggtcgcggccgaggtactttattaatatttttttcaagttttggtaaagtatgaaataactctggattaagaggagaagaactagaacttaataaccatgacatttgggcaaattgtttgaagcctcagtttcctcaacctaaaaataggaattataactttttgaattgttctgttgtatgagataatgacagtgaaatattttggagccaaaaagcaatgcatactattgggggttattattattttttgatctttcagcaagccagctatagtagcttttcctatataaacacagtatgaattcagtgccctcgctttactgaccctcacagcattcaagccctgtatggaccgctgagctctcccttgaagcaccccttagtccagtattctttactattttcccctntaacaatttaaacttctttcaaaacaactggcagtagttttttaaaaaagaaaacaggctactcttcaaattaaaaaaa

SEQ ID NO: 16944 - DNA, 271 bp, Homo sapiens
atgcatgctcgagcggccgccagtgtgatggatatctgcagaattcgcccttagcgtggtcgcggccgaggtactttctctgttcatttccctatttatttatatcagcacttccttcttcttgccaacttcggtgccacatagggggaaaaacaacagaaatctaacaccctgggataccttcagagaaaacagaaaagacactgcagacttctttttgggagaaactcctgtgtttttttttgtttgtttgtttggttggttgggtttt

SEQ ID NO: 16945 - DNA, 185 bp, Homo sapiens
ggcgaattgggccctctagatgcatgctcgagcggccgccagtgtgatggatatctgcagaattcgcccttagcgtggtcgcggccgaggtactctttctgcccttgatattctaataaaaaactatagtgacagcttgacagctgccatgattgatgcagttctagatgagctcccacctctta

SEQ ID NO: 16946 - DNA, 259 bp, Homo sapiens
gggccctctagatgcatgctcgagcggccgccagtgtgatggatatctgcagaattcgccctttcgagcggccgcccgggcaggtacgcggggtcattggtggcggaggcaatggccggcaaccagctgtaagcggggcacggaagacatatgcttgtgagacaaaggtgtctctgaaactatggatggtacacattacattggttttgtattaagaaatgggaaatggataaagtttttcaggcaaatctaattgcac

SEQ ID NO: 16947 - DNA, 540 bp, Homo sapiens
  misc_feature 110: n = A,T,C or G
cgactcactatagggcgaattgggccctctagatgcatgctcgagcggccgccagtgtgatggatatctgcagaattcgcccttagcgtggtcgcggccgaggtactttntttttttttttttttttttaggaaagacggagtttcaccatgttggccagctggtcttgaactcctgaccttaagtgatctgcctgccttggcctcccaaagtgctgggattacaggcatgagccaccatacctagctgaccttttgtttaaaagcatttgtttctaagatcataattcaattgacaggaaaataccaggtaatgattgcctctaagaaaatcagtccctaaacttgtcccatctctagctcactgagggcataatccccagtgtagacccaatatgagatcactgaccttcccttcattttactcttgaaaagaaagacagaagttatgaagaaatagtcattccctgagggacacgcagaggaataactagcccaaaactctttaggggaattctatgtggaaagtgtttacttggat

SEQ ID NO: 16948 - DNA, 705 bp, Homo sapiens
tacgactcactatagggcgaattgggccctctagatgcatgctcgagcggccgccagtgtgatggatatctgcagaattcgcccttagcgtggtcgcggccgaggtacatcaccctgctgagggacatccaggacaaggtcaccacactctacaaaggcagtcaactacatgacacattccgcttctgcctggtcaccaacttgacgatggactccgtgttggtcactgtcaaggcattgttctcctccaatttggaccccagcctggtggagcaagtctttctagataagaccctgaatgcctcattccattggctgggctccacctaccagttggtggacatccatgtgacagaaatggagtcatcagtttatcaaccaacaagcagctccagcacccagcacttctacctgaatttcaccatcaccaacctaccatattcccaggacaaagcccagccaggcaccaccaattaccagaggaacaaaaggaatattgaggatgcgctcaaccaactcttccgaaacagcagcatcaagagttatttttctgactgtcaagtttcaacattcaggtctgtccccaacaagcaccacaccggggtggactccctgtgtaacttctcgccactggctcggagagtagacagagttgccatctatgaggaatttctgcggatgacccggaatggtacctgcccgggc

SEQ ID NO: 16949 - DNA, 606 bp, Homo sapiens
ccctctagatgcatgctcgagcggccgccagtgtgatggatatctgcagaattcgcccttagcgtggtcgcggccgaggtacaggaatagtcaattatgtgttcttctcatgctcagtaaatcagaactttacataagttcaggtgaacatagagtagctacctggggagatatttcacctttttatctgtagtgctctgcttaagaacaaaggaaaaaacagcttcttgcatgattcagcttttagcttaatttttttcctttaggcatagtgaattggggtcccaggtttttatttttctttcacaaattaaaactgatatttagactatttctcggtccactaaatttctctcatcctaaactcctgctaaccacatgtagtctctctgttcatttccctatttatatcagcatttccttcttgttgccaacttcagtgccacataagggaaaaacaacagaaatctaacaccctgggataccttcagagaaaacagaaaagacactgcagacttctttttgggagaaactcctgtgtttatttttgtttgtttgtttggacggatgggtttttttgggggttttttttggggttttttctat

SEQ ID NO: 16950 - DNA, 640 bp, Homo sapiens
acgactcactatagggcgaattgggccctctagatgcatgctcgagcggccgccagtgtgatggatatctgcagaattcgcccttagcgtggtcgcggccgaggtacgcgggttgtgacaaagactgtatatcccacaaagcttaaaatatttacaatttggccttttagagaaaaagtttatgacccttgcaatataaacacagaaatctcagagatgctgtcttcttcctaaactttaatatttaattctgattgtggatgagattagattctccaactttccatgtttaagactcattcaaaaaattcataaatctcaaaatattagaaatgcaggatattgcctgatgacttgtcaattacatgataaattatcttaactatagaattaatatgctggattaagaaatgacccttgtttatgcctaagcttctagggcaagaaaaaaatgatcagaaggaggaaggtagttcccctccacctcaagagaaaccctattgtcatctacatgtctctggaaaacattttttgaacaaatatgccaactaaccaaaagatgaacataagaaaagacccaggagaggaaagacactattgaaatgctaggggaatagcactggcaacagtaatatgacaa

SEQ ID NO: 16951 - DNA, 532 bp, Homo sapiens
ggcgaatagtgccctctagatgcatgctcgagcggccgccagtgtgatggatatctgcagaattcgcccttagcgtggtcgcggccgaggtactttttttttttttttttttttttgggtagagatgagttcttgctatgttgcccagaatggtcttcaactcctggcctcaagcgatcttcctacctcagcctcctgaagtgctgggattataggcatgagctaccaagcctagcctatatggtgtatttcatcaaacctaagacactgttgatcctaagatgcacccaggttttagagatgttaaaatgcacctccacctccacaaaaaagtatgctttttagaaatgaaaataaccactacctactcagaatctttagataaaaaatgttgtcaggccacaagcagaggggcttccctgcctctgaccttcttcacacgggggtttgttgaaggtgctggtgagacccgcttacagagccatccttttgggaggctacccacaccccagatttctagtcaagggggaac

SEQ ID NO: 16952 - DNA, 463 bp, Homo sapiens
  misc_feature 23: n = A,T,C or G
ccctctagatgcatgctcgagcngccgccagtgtgatggatatctgcagaattcgcccttagcgtggtcgcggccgaggtacgcggggacctgctgtgctcttgcttgcacagtgtcctggagctgggcctggctctgggtttccaggaagcagtttgactaaggcagcaagctgcttcctctgctgcctgagataccagaaccatacagaaagacatgcagagcacaccaaattgtctacagcttaagatcaacaaaaatcctttttcattaattataaattcacagagaatataaacaatgatccttattatcccctttactggctcacacagggagagagaagccaaaagcccaactgattcccaatggtgaagaatgagaaaaacgctcccacgatggaaaaaaagccagaactgtttaacatcatggaagtagatggagtccctacgttgatattatc

SEQ ID NO: 16953 - DNA, 528 bp, Homo sapiens
ccctctagatgcatgctcgagcggccgccagtgtgatggatatctgcagaattcgcccttagcgtggtcgcggccgaggtacttctgtggccttgagtattttttaaaaggctcaactgtaagcctcttagccagttggataaatatttggggtcacctagccattgaaagcagaaagcagtagtgacacagctttcccttcaaagagccattgagaaacatttctcaaacaggaaatccttcttttactaatgtggacatatagattattcgtattatagtttgtagaactacctagttcagaatcttgactgccagttttcttggtttcttaggcttgaattttcatagacaattgcaacagtttagatgccttttgaaaggaatgcaatgaagattcagcatctgactatatgtgtgtctatcctgaaataataatggagagtatactgtagattacatgtttacccatcaaatctgacttaaaaggttaaatggaaggttttataggtaaggtaattgattggg

SEQ ID NO: 16954 - DNA, 596 bp, Homo sapiens
  misc_feature 457: n = A,T,C or G
ggcgaattgggccctctagatgcatgctcgagcggccgccagtgtgatggatatctgcagaattcgccctttcgagcggccgcccgggcaggtacgcgggacctgaagtaagtcagtattctttggaactggaggtgctgtatgatggatcacttgagtgatttcctcagtctttttcacataatcataaatattatctggtaaacttggttccttgagattttgtcagatgtagtgagttcacctggcacttatttggcaccataaaccacgctggactagagactgagatatccttacatagtggtccatggacatggccccttcctggcactgccaggcatttggaaactattactttccttgagtatatttgcctcctcagctggggtttctcgtctgaaatcacagaacatagaaaatgatttgagggactcttctggagggcacctgactnttctctatacatatttcttgaatgatactaggtaatttattacatacaagagatgcctaaggaattaggggttaattctttccatgaaaccttggtttagaaggcccagtgtccatactatgtccagccaaatagatgc

SEQ ID NO: 16955 - DNA, 642 bp, Homo sapiens
atagggcgaattgcgccctctagatgcatgctcgagcggccgccagtgtgatggatatctgcagaattcgcccttagcgtggtcgcggccgaggtacgcgggcatgagtgtcaactgcaaaatctatgcattatgtagtgatttgaatcaattagtctttcttgatactccaaaattaccctttttcgagtgtctttatcagaaatttgataaatcggaactttcctgtctattcataaacaagagtggtgacttagaaagacacgcactccagagtggggcttctgcgtctcccttgtcgtgcccctttgtgagtaatgctttccccagagaactgcagaaaatgatcctgctgagctacagggtttcccattcattgggttccattccagtccttgcaagttcaacagcatctcagaacattctagtaagcttgctaacggcgtgtgaaaggttgatcttctcatctaaagcttttaaatttttaaaatcgaccatgtgcagtggctcacacatgtaaattccagcactttgggaggctgaggtgggtggatcacctgaggtcaggagttcaagatcagcctggtcaacatggtgaaaccctgtctttactaaaaattcaaaaaaatttacctgggtgtg

SEQ ID NO: 16956 - DNA, 635 bp, Homo sapiens
gtaatacgactcactatagggcgaattgggccctctagatgcatgctcgagcggccgccagtgtgatggatatctgcagaattcgccctttcgagcggccgcccgggcaggtacaatgtgccccctcctggctgctgcttcctgacgcagctggtcaaatgtaatttcagaagttttgcttaaaaccttctctgaaggtgtttttagctacaggtgaaaggatgaaacatcaggaactttggcagggttgtgcagagacaaaggaagggaaggattggccctagtgtgtgagctgtgagctgctattagcccagagttttgtttagtggatacttaacctgtgtgaggataaataatgcacagtttgacaggataaactgaagtcaacatggtagcttcttcttttagggttctccctttaaaaattttcttctattccccattttctttaaccactctgcgttcattttcccgtttttccccatctccctctttttcctcctgttcctgtccttttgtgtttttggaccccaacccatgttgccctcttttttatttggtttatttcttctttctacatttattctctttttttcctttcttttatttagtcctttcctttctccctcccccac

SEQ ID NO: 16957 - DNA, 643 bp, Homo sapiens
ccctctagatgcatgctcgagcggccgccagtgtgatggatatctgcagaattcgccctttcgagcggccgcccgggcaggtacttgcgctctgcacggtccaggagctgtgatgtggctgtggtctaggggaatcctgcctgccccatggagttgcgcagcacaaccccggctccaattgccagaaggctctttttaatgctgaaccaaaatgtgcctttttttttttgagatggagtttcactcttgttgcccaggctggagtgcaatggcgcgatctcagctcactgcagccactgcctcccaggttcaagtgattctcctgcctcagcctcccgagtagctgggattacaggcatgcgctaacacacccagctaattttgtatttttagtagagacgaggtttctccatgttcgacaggctggtctcgaactcccacctcagcctcccaaactgctgggattacaggtgtgagccaccgtgaccagccaatgtgccttcttatagtgtctactcattggtctttgttctgcccaatgataacaatgggataacgcctgctacacatcttcattgtgaaacccttcccctgtgctgagattaaatgaactctaagattattaaatagtatattttccttg

SEQ ID NO: 16958 - DNA, 395 bp, Homo sapiens
  misc_feature 116, 317: n = A,T,C or G
cgactcactatagggcgaattgggccctctagatgcatgctcgagcggccgccagtgtgatggatatctgcagaattcgcccttagcgtggtcgcggccgaggtactttttttttnttttttttttttttttttaacagaaggtaacagccacagttaggcactttggggtaacatgtgcaactgaacaaaatatttccaattttgaaaaatctggattctgtatcttgccagggcagaaaactttactgctcctgaactcccgtagcagtttgcatggacatcatggcactcatcacatcctactctggctttttngcactggggcacatgaagtctcctcctacccaaagtttaagcacagaagcccgtgcatggaggcaccgtggcgtctgg

SEQ ID NO: 16959 - DNA, 568 bp, Homo sapiens
  misc_feature 172: n = A,T,C or G
tacgactcactatagggcgaattgcgccctctagatgcatgctcgagcggccgccagtgtgatggatatctgcagaattcgcccttagcgtggtcgcggccgaggtactcagtttattgaattgatgaattgatttttttttagtaatcacataaatttctgtaagatttgnatacattgtttactgtcacagaatcatgttttatatcttcaagctcaaagcaagctttcaaacttgaatttagttcttgcataaatatggatgattgtttctccattgctgaagcagtgtattatttccataatgatctgtaaagtaggtgggtttcatgacctaagtgttattgttgatctttatatatacaaggaaaacgcagagtcatcgttcatttgtagctgcatttatctctggttttcaagcatttctataaaataacaattaagcttagtgtgatggttaatactgagtgtcaacttgattggatggaaggaagcaaatattaatcctgagtgtgtctgtgagggtgttgccaaaggagataaacctttgagtcagtgtgctgggaaa

SEQ ID NO: 16960 - DNA, 627 bp, Homo sapiens
ctactatagggcgaattgggccctctagatgcatgctcgagcggccgccagtgtgatggatatctgcagaattcgcccttagcgtggtcgcggccgaggtacaagacctgacagggacggaggccaacgccgggatcggagggcaatgaggcttgccaggaacagtggcgtcggcttcaatccagagccgaagagttctgatttgatctgatgtgataggcaaatgggaaactgctttgtaaacagggccatgatgtgaggaaatggtattctcagaaagactgacctggccacagtggtgtgcaagacaggctgcaagggagagaaagaatagtctggaaggctggctggggaggccaacccaagctaggttgccaaggagtaatgagggtggcctggatgttaatgcagagggagggagaggagcggaaggtggcccatgggatgagtctaagaaaacccccggctggcagtgctgagggaggcagaagccgcgctggtcaggtggcaggtgtgggggccaatgtacctgcccgggcggccgctcaagggcgaattccagcacactggcggccgttactagtggatccgagctcggtaccaagcttggcgtaatcatggtcatag

SEQ ID NO: 16961 - DNA, 416 bp, Homo sapiens
ctcactatagggcgaattgggccctctagatgcatgctcgagcggccgccagtgtgatggatatctgcagaattcgccctttcgagcggccgccgggcaggtactcacaaaatttttttaagtaaaaattagggtagtgggaaaaaaaaaaaattcttcccgttggtcttcatggggtagatccttctcattattcaggtctcagcttaaatatcacttcctcaaaggaatcttcctggtcactttatctaatgtgcttatagcctcagatggcaataactttccactttcttcccctaattttctttatagcacttaccagttgtgaaatgctcttgcctatttagaatttaagctctacagtagcaaagatgtatgtttgccaccatatttctggagactgaaatggttactgg

SEQ ID NO: 16962 - DNA, 657 bp, Homo sapiens
ctactatagggcgaattgggccctctagatgcatgctcgagcggccgccagtgtgatggatatctgcagaattcgcccttagcgtggtcgcggccgaggtgctatcagaacaaatacataaaataacttcccatagagaacaggatatagcaataatagctccttagatactcagtggttctgactccaatcaaggtcttgttgatattatatagtaaaaataaaaccaaaaataaatattattcaagtggctcttctaagcatgtgaatcatgaagcactgaaatatgtattttaatgatgatcttatttattcccatttttgcccttagttaacatttactggtgctcacctaggattggctattctgagggattgcatagaaaccaagctccacttgctgtccttggggaggttataactgaatgcagctctttatttggactaaagtgtcaggatatgcattagattctctcctgaaccaaaaacacaacagtcattatctgtgaaccataatttaaaaatctttctagaataacaacagcagactccactcttgtttgtctaaaagagccctactgggtatggatcattctgatgacagatttatacaaaatgattcaaaccagtaacttagtaaaattgaccttcgcaaaa

SEQ ID NO: 16963 - DNA, 323 bp, Homo sapiens
gcgaattgggccctctagatgcatgctcgagcggccgccagtgtgatggatatctgcagaattcgcccttagcgtggtcgcggccgaggtactaggaccacaggcataagccagcacaaccggcctaaaattttctagaaaagtagatcttatgttacttcttaccacaaatagtaacagtgggggtaggatggaaacttttgggagggtaatagatatggtttaatggccttgattggtggtggatgggtttcaccaggtggtattactgtaacatccataatttcattcaaatttgtattacatttaagttattgttacct

SEQ ID NO: 16964 - DNA, 653 bp, Homo sapiens
acgactactatagggcgaattgtgccctctagatgcatgctcgagcggccgccagtgtgatggatatctgcagaattcgccctttcgagcggccgcccgggcaggtacatatctctctgttgctaaacagagaataatataattaataaatggtaaaaggaatttttttaattttactttttctattatgaatttccacttctaatgatagtgcattgtcaagtcaggaggataagggtatctttgagtcacgaaactcaacatcaattaaaaagaatttatttcttaatcttctctgaagtcaggaggttctatttagtgaagttcatgtcctatcacatttcaaagaaataagtcttacatgtggaaaatattcaagcatatatgtatatattcagctttgaactcccaaagagctggctggaaattatattaatagtaactcccagctgggagtcactggtaagctggcttccaattatttaacacaatcggataaaatgcgcagtcctacctgccctagctttgcttgatgtggtgcaaataaagtctagtttcaaactaacatatcaccataggaaattggcttgtggttctactgattgctcagaaaaaaaaaattctctgaaacttgcttgattaaaaattctgtc

SEQ ID NO: 16965 - DNA, 664 bp, Homo sapiens
tatagggcgaattgagccctctagatgcatgctcgagcggccgccagtgtgatggatatctgcagaattcgcccttagcgtggtcgcggccgaggtactgtctccggctggggcactaccacgagcccagatgtgacctttccctctgacctcatgtgcgtggatgtcaagctcatctccccccaggactgcacgaaggtttacaaggacttactggaaaattccatgctgtgcgctggcatccccgactccaagaaaaacgcctgcgatggtgactcagggggaccgttggtgtgcagaggtacacttggaagagggccaagtgggcaacttgagaggttaaactgcatggtttgagttttgatttgaggttttacgtgttggcatgcattcaggggcttgtgtcccttctcccctgattcttccctccgggtaggagggaagaatccacctgagcagtggcctgccagcacttgagaggctccgcaagcacaagtgtgtttatgggagttgtgcacatgctcagttgaggcattcttcccttaccagtcgagtgtttctagaggaaggtcatagactaataggctaatagtctatgacctttaatcatactagtgcacatgcctgagcccactcacctgtgaacccccaaaatttgagacag

SEQ ID NO: 16966 - DNA, 596 bp, Homo sapiens
ctactatagggcgaattgggccctctagatgcatgctcgagcggccgccagtgtgatggatatctgcagaattcgccctttggtcgcggccgaggtacaatgtttaataaaagtgatgagagtagatatctttaccttgttctcaattttaggaagacatagatttttgtgtagatggcctgcatcctatgaggactcttcattttatccctggttttgtgagggcttttaatcatgactcaatgttgggttttactaagtgctttttctattaagatgatcatatgcatttttctttttagtccactaatatggtaaagttcatttattgatttttgaatgttaaatcaactttatcttcctgcaataaagtacaactttaatgctatatgaattttgccattttgctaacactggtatgctccgggcatccaccatcccactggaattatttattccgttcatattaatttttgttacaaatctaactgacggaggagcttctgggtatttaggtccacattctactttcaggctatatattctgttttcaataatttgtccttggtggcccaataatcgtgcctgtccacctt

SEQ ID NO: 16967 - DNA, 633 bp, Homo sapiens
tatagggcgaattgggccctctagatgcatgctcgagcggccgccagtgtgatggatatctgcagaattcgccctttcgagcggccgcccgggcaggtactgtgtcaacagtgaaccttattagatgcagggtgtcatcgaacttatagcatgattataaatcaatcagtaggaatgtcattttaaaaagtaaaatagtgggacggttgtggtggctcatgcctgtaatcccagcactttgggagactgaggtgggtggatcatttgaggtcaggatttcgaaacccgcctggccaacatggtgaaacctcacctcaactaaaaatacaaaaatcagccaggcatgctggagggcaccttgtagtcccagctatttgggaggctgaggtaggagaatcgcttgatcccagggggcggaggttgcactgagctgagatcacaccactgcactccagcctgggcaacacagcaagacgctatctcaaacaaaaaaaggaagtcaaatagagctttaaacctgaatcatttacatctttactttataaaatgtaaaactacttttttacccaagacttaaaatatagaataatgtaacttctactttaaacaaaatgaaaaatgttttgagtttca

SEQ ID NO: 16968 - DNA, 531 bp, Homo sapiens
ccctctagatgcatgctcgagcggccgccagtgtgatggatatctgcagaattcgcccttagcgtggtcgcggccgaggtacgcgggtgttttttatgaaggggctttctcgtgtggatagctgttcaatttggcattcctgttggggggtggacagtgattgctggagggttttatttggtcgtcttgctccacctcatttcctgacatagaatttttggttggagatacttttcaactggaattttgaatgggctacttcattgattgtttatgttcattgcagctgttaagatatctgatgcctgtttatcttaatttgggtttcaccaaaagctatgcttagtagatgacgagctgagaaaaggacttgggtgcaagtaattcatttgggaattgacctcggaaattaggggcaggtaagacataaggatgagaaaagtcaataaggaaggatattattgaaaaagttactcctgtgggcaactgcactcagtcctgctgggaccctctcagagcccatgaaacaca

SEQ ID NO: 16969 - DNA, 530 bp, Homo sapiens
acgactcactatagggcgaattgggccctctagatgcatgctcgagcggccgccagtgtgatggatatctgcagaattcgccctttcgagcggccgcccgggcaggtacgcgggtagtctacacaggtagaatggccttacatcactgttcagacaccttggcctcattgtataggaaaatcttaactctgtttttttgttttcgtttttttaattcttgtcagtcaaagaaatagcttccctggtttaatactgcttttcttcatagactgaaacaaataatacagctttccttttagtccttgttcagccacacaacacaaaccagtatggcctttggcattttactgcaagctttccattcgattattaatgtttccggtgcccatgatcaagcatggagaagacctataattaattgacttttcctttcctttaggtgcagtcgctttcaatctgaaatcaaacgcttgaaaatctcatccccggtgcgtgtttgtcagaactgttattataacttacagcatgag

SEQ ID NO: 16970 - DNA, 677 bp, Homo sapiens
actactatagggcgaattgggccctctagatgcatgctcgagcggccgccagtgtgatggatatctgcagaattcgccctttcgagcggccgcccgggcaggtaccaatattagcatgtggcaatgatgattgcagaattcacatatttgctcaacaaaatgatcagtttcagaaaggctttctctctgtggacatgaggattggattagaggaatggaatgggcagcctttggtagagatcttttcctagcaagctgttcacaagattgcctgataagaatatggaagctgtatataaagtcaacatctttagaaactcaggatgacgataacataagactgaaagaaaatacttttaccatagaaaatgaaagtgttaaaatagcatttgctgttactctggagacagtgctagccggtcatgaaaactgggtaaatgcagttcactggcaacctgtgttttacaaagatggtgtcctacagcagccagtgagattattatctgcttccatggataaaaccatgattctctgggctccagatgaagagtcaggagtttggctagaacaagttcgagtaggtgaagtaggtgggaatactttgggattttatgattgccagttcaatgaagatggttccatgatcattgctcatgctttccacggagcgttgcacc

SEQ ID NO: 16971 - DNA, 375 bp, Homo sapiens
gactcactatagggcgaattgggccctctagatgcatgctcgagcggccgccagtgtgatggatatctgcagaattcgcccttagcgtggtcgcggccgaggtacgcgggtgttttttatgaaggggctttctcgtgtggatagctgttcaatttggcattcctgttggggggtggacagtgattgctggagggttttatttggtcgtcttgctccacctcatttcctgacatagaatttttggttggagatacttttcaactggaattttgaatgggctacttcattgattgtttatgttcattgcagctgttaagatatctgatgcctgtttatcttaatttgggtttcaccaaaagctatgcttagtagatg

SEQ ID NO: 16972 - DNA, 611 bp, Homo sapiens
gactactatagggcgaattgggccctctagatgcatgctcgagcggccgccagtgtgatggatatctgcagaattcgccctttcgagcggccgcccgggcaggtacgcgggtgaataaggctgtcaaatgatttagtatagattaatgacatcttttttagaaatattaaagtgagtattcctcattatgtcatcatttctgataattagagtgctaatttgaatgttagataatgtttccacatctatacctatttctttctagggcacttctggccctggggcttggggatggcctttaggccacagtagtgtctgtgttaagttcactaaatgtgtatttaatgagaaacattcctatgtaaaaatgtgtgtatgtgaacgtatgcatacatttttattgtgcacctgtacactaggtaataaaactgattcatacagtctaatgatatcaccgctgttagggttttataaaactgcatttaaaaaaagatctatgaccagatattctcctgggtgctcctcaaaggaacactattaaggttcattgaaatgttttcaatcattgccttcccattgatccttctaacatgctgttgacatcacaccta

SEQ ID NO: 16973 - DNA, 497 bp, Homo sapiens
ctactatagggcgaattgggccctctagatgcatgctcgagcggccgccagtgtgatggatatctgcagaattcgcccttagcggcgtcccggccgacgtgctcaaaggccagaatggccaagggcctgcttgagatgaggtgtacaggaatatgctggctgagctgaacacattgcccaatttcaggcgtgcacagaaaaccgagaatatatacatttccaaattttcttcttaggagcaagactataatgcggacctaaaggtggctagtcgaggggaacggtgtcatgagcgtgccatcaggattataaggtgttccttgacttactgctcggttggactggtctatcatgggctgcactattcttctccgggcattaataaaccaattgttcacttgaaggatggtgagtcccgtgtcttgtgccaactgctatttctgttcttcagaagggtaagggtgtgttagatgctggaacagccacgccctcatgat

SEQ ID NO: 16974 - DNA, 623 bp, Homo sapiens
ttgtgccctctagatgcatgctcgagcggccgccagtgtgatggatatctgcagaattcgcccttcgagcggccgcccgggcaggtacagtggcgcagacagctcactggagcctcgacctcctgggctcaagtgatcctcccgcctcagccttcgagtagctgggaccacacacatgtgccaccatgccggctacgtttttgtagagatggggtcttgccttgttgcccagggtttcatcagctgttgagtgcgtcggggtgagaggcgcctgctgttctcgttgtaagagggaagtagttcctgacagagcccatcttaccctgacacaggcctccttttcttttccttgttttagccattgcacctttgtcatagaagcgttgaagtctttgccatcagatgtggagagccgagaccgccaggcccgatgcatatggtttctggataccctcatcaaatttcgagctcatagggtagttaagcggaaaagtaagtctatgataaacattttattctaattgtttccagtatattaattgtctgtaattcttagatgagttctgatgagagaagaaaatggatatgtctgtccaagtctttactgtcaactgtgagattca

SEQ ID NO: 16975 - DNA, 657 bp, Homo sapiens
acgactcactatagggcgaattgggccctctagatgcatgctcgagcggccgccagtgtgatggatatctgcagaattcgcccttagcgtggtcgcggccgaggtacctattgtgttccaggaatccttcttggcactgggaatacagaggtgatgggcaggaaaattcccggatttatagagcttaaattcttgtaggagagacagacaataacagtaagtaaatgctagacctttataattaataataaatgttgtttgcagtgaagaaaactgagagagagggttaacatagatcaaatattagagaaaattttattgaggaggggacatttcagttaagacaggaattctaaaagggagcaactaaaaagatgttgggatacacttttatatggctgcatagttctaggcagatggaacagtaattgctaaggatctcacgcagcagatttattagtttttgccacattgttccagctactaggtacactgccatgttatagtaaattatcaataactaaaggtgtcaacattgtatttaagccatctttctatctctcagggcccccagtggagtctcttacatagtagtatgtgctcagactgtaatcaatttcaaatgaaattatttttactgatgtaaaaactcatcat

SEQ ID NO: 16976 - DNA, 497 bp, Homo sapiens
ccctctagatgcatgctcgagcggccgccagtgtgatggatatctgcagaattcgcccttagcgtggtcgcggccgaggtaccaaagcaattatgtaagagtgttcaaatagttaaatagtgaatcagattgcatttgaacattaagagtgtggtagctagctaatagaggaatagctgggtcctttcttgtgaaaagtgagtttttgataatccgtgagtcctagtcgtaggtaatgcaaaatgaggtagcgaggagccttatttagatgagttataaaatccacaaattattttgaatataacacacttggtttcagtgcccaatatttcacttgttcaagaaaggaaaaagtatctctatgaatctaagaagcagatcgactgacaccaaactcttcaatgtgatccaaaatagacacttaaaatacagaatcttctcaggtcccaacgtagtatacctgcagtgcctgaatatggccctgtagtacctgcccg

SEQ ID NO: 16977 - DNA, 410 bp, Homo sapiens
ctatagggcgaattgggccctctagatgcatgctcgagcggccgccagtgtgatggatatctgcagaattcgccctttcgagcggccgcccgggcaggtacttttttttttttttttttttttggaacttagatccttctaaaagtaaaggaagttttattgcagtgacggggtttgagttgggagaaataacattttaaacgtgtattcaaaggcaagatgtagaaggtaaaggaatgaaaacaaatttggaggcctgcctactaggccatcttaaataagaatcgattccagcctagcacccagctagtaacttacggacggtcttttgtccatattttggccagttattcacagcactgttgagggcaataataatcctttcaatccacaagtaattaaaaaacatg

SEQ ID NO: 16978 - DNA, 598 bp, Homo sapiens
ccctctagatgcatgctcgagcggccgccagtgtgatggatatctgcagaattcgccctttcgagcggccgcccgggcaggtaccatctgttaaactgacaatgccactgtaaattaattgtaacctattttcaaagaagatttcagagagcccttttaaaaatattaagacatagttgctaaacaaaagcacttattggattcaagtagctatttaatgacaccaatatttgatctttgtgtccagggtcccatgagcctacgtggcatattgcaaatataataaaaccctccttttctctccccagccattacaacacaagctagcatggagtttcgacggaaaggggcacaaaatgtccacagacaccatggtttccaatcctatgtttgatgcaagtgaatttcctgataactatgaagcaagaagagctgaggcttgtgggacactgtgtaggattttttgtagcaagaagactggagaagagattctgccagcttatttatccaggtcttggaatatatgtttgttttttcatttatatagctttgatagtgaagccattggtggttggccgactgaaccgatgagtgatgt

SEQ ID NO: 16979 - DNA, 570 bp, Homo sapiens
  misc_feature 113: n = A,T,C or G
acgactcactatatggcgaattgcgccctgtagatgcatgctcgagcggccgccagtgtgatggatatctgcagaattcgccctttcgagcggccgcccgggcaggtactttntttttttttttttttttttgtttcccttagaggttatatgtttctaacaatcaatggcattttagattgatgaaatagggtataaatataatccagattaataatgcttgtctatggctggtgattgaagttgcctaacacactgagtataaaactttcaactggccatcatgggtccacacagtagaatcccaactacacttaacagtcttctctctcactcgctaccatttttctactcctgctgtgagcaataaactattcacaatgccctgaacattgactccatctacttgccttagaagtttctcatggtctgtttctgctaggactcattatcctcacactgctctagattttgctctagagtctttatttatccttcaaagtccatgtcaaacaccaggtcctctaagcaactttttctaatctctgcacttagatttgttctcactcc

SEQ ID NO: 16980 - DNA, 541 bp, Homo sapiens
  misc_feature 494: n = A,T,C or G
ggccctctagatgcatgctcgagcggccgccagtgtgatggatatctgcagaattcgccctttcgagcggccgcccgggcaggtactgctgtcattatttagcatgtattaagcaccccacagcacatgcggtgcacaaggaaagcatagttccaacccacatgctacaacaaggcaggacacagaaactgggccccctgacattcagtaactacactggcagaaaaaaaaatgtgaaaatgaagaaaagggaaacaagatgagtggggtgggttgaggatacttcagcattcagctcctctgagcttttgccaaagacgattaggacagacagctgtgccacctgggctgtgccttccctttctcctccatagctgggaagtgatggggacaagtgacaagactgaccccagaagccttgccccccactctcagtcctctgttgcaatcctcctacaaagaggagaagcttcacagtttcacttgcacctaanactattattattatgtggagggggtaaacttgttataaagggcaata

SEQ ID NO: 16981 - DNA, 650 bp, Homo sapiens
ccctctagatgcatgctcgagcggccgccagtgtgatggatatctgcagaattcgccctttcgagcggccgcccgggcaggtacggagacatctttgtggttttatacacacacacatatatatatttaacataagctgtctaaaataagtcacaaaacttgcagtattagaaaaggaagcacattttggctgttttggtgtcagcatcttaattaagtagaaaatattatggacctataaattgaacttgcgactgttcactcactagagagaacaatttccagggagttagaatagtttttcctgaaggagagtcaaataaatttgggaaataaggttgctcttgtaaaacagtaatagatttagcttgtatattttaatgataagaacattaaatgtcttctaagtcagaatcagagtatatctttgttaactgagctcaccaagacaaagtgataataacacataactgtggtttttggtagtctaatcaatttagaatgttttattgtcatgttagttgattttctgtcattatttggatttttacttatcctgggaatagagacttttaaaatctatgaattaaaataagttgtgttattcccccctaggttcttttgaagtaaccagtgaacttttttgctta

SEQ ID NO: 16982 - DNA, 418 bp, Homo sapiens
gggccctctagatgcatgctcgagcggccgccagtgtgatggatatctgcagaattcgcccttagcgtggtcgcggccgaggtacctgattagaagtccgtcttccgtctcatagggaagtgttagagatggataatgtttctgtgtagcagaagtagtcattatgtccccttaaattcgggccctttgccggagtaaagcttcttagtgagcagtctgtgatggagtatactttcggagaagctcatggtgggggaaacctggaatttatctaaatatttcatttctttgataaattacattaaaaaattaataagagtatctatttggtgaaatcattttcctccacgtgaccaaatgagaaatttagtgaaagatttaaaatcatttttctgactttttccacatttgttgggaa

SEQ ID NO: 16983 - DNA, 473 bp, Homo sapiens
gctcgagcggccgccagtgtgatggatatctgcagaattcgccctttcgagcggccgcccgggcaggtactcttacattaatgtttgcgttctaattacaaagttagctattagatcctcatcagatggctcccaggatgattgagaaaggaattggtttctgggagttgttatatattcagaagaatgtttgaaaatcggggaaatccaaaaggtattcaatatactttattttaaagtggtaattcccagccttgaatgagtaatgtaaatattatgcaaataatatgcatcacacagaaaccagcactttatctatgcaccttatctcgctccaggcttgcttggattgcccgacactttacttgagtgttttgatgtgtgtagtaagaggaggaagtagatgttcatttacccttgtgaattttgtgggtagggttttaaaattctaaggcatgtgattgcatgggtgt

SEQ ID NO: 16984 - DNA, 533 bp, Homo sapiens
  misc_feature 151: n = A,T,C or G
actatagggcgaattgggccctctagatgcatgctcgagcggccgccagtgtgatggatatctgcagaattcgcccttagcgtggtcgcggccgaggtacacgataattaaagagtaaagttgtgctcaacgctgtttacttctaattatnttcctgattcacaaattaatttttgcaattacaacttcaagaatacttggactattggattcaatccatagtaatctgcaaaagaagagaagcagaattatacctagaagtctactaatggacagttagtcacccacctacatttgagattcctgacattcagacaactgacttgtaactgacttataactgacttgtaatacactgctactatatcaaaccgacaatgaattggaattgaaaaaccaaagagtgctacattaccaccactgtatcctaaaagccagccacctttttttgcaccagtcttttaataaaccaaattaccacaacatctcagagttctttcagctatcctggaagtaaccaagaagcatgcatg

SEQ ID NO: 16985 - DNA, 570 bp, Homo sapiens
ccctctagatgcatgctcgagcggccgccagtgtgatggatatctgcagaattcgccctttcgagcggccgcccgggcaggtaccagtcgaggaagagcaaggagaaggagcacatcacgaggaagaagaggatccacacgcggaagccagcgttgtttaatggcctctcttatgtcttcgttgccttccttgatattttcagttgcccccacaactaactggtgaatgctgtcaatctcagcttcctgttgcaaaaccttttccgtgaatatctcttggggtctggaaatctcaaccactctcccttcgatttgcctcacttcatcaaacaagctgttcatttcaccaattagtcgctgattttcctgttcaaacatttgtatttcttctggggataactcatcttcgcctttgccatctccccacgttcccaattcaggttgtgtttcagccaaaattttttctggacgttcttcagtggcagggttttcttcagagtcttgtgaaggactctgtgaaactttctcagaagatgtggattctcttggctttggatttggttctggttc

SEQ ID NO: 16986 - DNA, 596 bp, Homo sapiens
gactcactatagggcgaattgggccctctagatgcatgctcgagcggccgccagtgtgatggatatctgcagaattcgccctttcgagcggccgccgggcaggtactttcacagcaaccagcttagtgctatcattgacttggtctgttccactttggggatgaagattgtaataagccaagctccttgagcaggatgaagacaatcttcacacaggaaatttttactgagcaggttgtcacagcatggtggctgggcccaggcaatttcctgcaaccagaggtccaagagaccagcacagatgttatcaggcatcttccgacctggggaaggggacctgagtgtttgcacctgttttgttatccatgggagtatctatcagcacacccatcccagggctgttagaatgaaatgaggaaatgcttgtaaggcactcagcactttcttaacacattatacatccccagtcactgactatttgttatttattaatgaagcatgtggggaggctgtgaccttgtgcttggccttcggcagtgctgctgagagagctgagcttcatctgaactggaccacatgggcttgcatctgatcag

SEQ ID NO: 16987 - DNA, 496 bp, Homo sapiens
actatagggcgaattgcgccctctagatgcatgctcgagcggccgccagtgtgatggatatctgcagaattcgcccttagcgtggtcgcggccgaggtacttttttttttttttttttttagacaaagggtatctttagtttcttcagtataaaacagttactcttttttcataaatttttagtgtttggcaagcatatataaatacgtataaagcagacttgctttaaaatgttctgaatctgaaaattttagtatgtttgtattataaaactttgagtataaaatattgaaggatacacacctgagatttttctcataggtatatccttgtaaggtcaggtctatgagatctttttaatgaaagttaatagctaaataacacatgccctcaggcaaagaataattagccagttcttgaattatttctgctgtagttcaaagctttttttttggattactgcttttaataaatacactattttgcaaattataac

SEQ ID NO: 16988 - DNA, 338 bp, Homo sapiens
actatagggcgaattgggccctctagatgcatgctcgagcggccgccagtgtgatggatatctgcagaattcgcccttagcgtggtcgcggccgatgtacacaagtcacgattatacagtttaatgagtaaacactgatcacacccatataaaccactgcccatgccaataagtaaatattacaagcaacccaaaaaaaactctaggcctctacctttaaaatgcgttggcagtatttaagactatggtagttccaaaattactaaaagtaatgaatcataaaggtatgtgtataacatgtaaaaaatttaattaattttttgaaccatgcattgtta

SEQ ID NO: 16989 - DNA, 398 bp, Homo sapiens
atagggcgaattgggccctctagatgcatgctcgagcggccgccagtgtgatggatatctgcagaattcgcccttagcgtggtcgcggccgaggtactctcaggaagctgttcgtgaaggatctccagcaaactggaaaagaaaagagaagttgcctcatgttacgaggtcttggcacaattatatgtgtaatgtaagtaaccctcattctctttacaaaaatgttacaggctttttgcatgactattaaaaaagttatatataggctgtaaatccttgaataaaatatgggcactttatattttcaagctctttattttttttattactaaatacattttgaagattaaatagaacatgatctcatggtcacactctatatttttaatgatatttta

SEQ ID NO: 16990 - DNA, 420 bp, Homo sapiens
ctatagggcgaattgtgccctctagatgcatgctcgagcggccgccagtgtgatggatatctgcagaattcgccctttcgagcggccgcccgggcaggtaccaagcattaactgttcttcattttcctgccttttatgggcatcagttttgattgattccttggctttcggaaaaaaaaggaaaaaaaaaaactttttaaagcttacataaaattaaattcatctttttggtgtatagttctgagtttttacaaatacatataatcatgtaaccattaccaaaatatacaatttaattactcccaaaacctcccacatgaccctttaaagttcaactcccaagcagccacaaatctcttttctgttccccaaagttttgccttttcaagaatgtcacataaatggaatcacaaaatacat

SEQ ID NO: 16991 - DNA, 482 bp, Homo sapiens
tactatagggcgaattgcgccctctagatgcatgctcgagcggccgccagtgtgatggatatctgcagaattcgcccttagcgtggtcgcggccgaggtacgtgaagagctcaagttcacataacgaggttttcctgccgggatcacgtggccctcggcgaaggaaatccaaacaacattttgtggaaaaaaacaagctcactttgggattacccaccccgaaaacggactcttatcttcaacttcacaataaaaaaagaggggaatctcatccagaactggtcattttgagagtaaattctctcccacgtgatggattcaaaaccttttggagccagtaaacttagttccatttcacaggtgcacataaagaccttcctgcccacctcctatggacatgtccagggatacaggacaagagtggggttagaatggtagagtccaccactcttactggaaagagcttgagatttatcacctgc

SEQ ID NO: 16992 - DNA, 644 bp, Homo sapiens
gactcactatagggcgaattgtgccctctagatgcatgctcgagcggccgccagtgtgatggatatctgcagaattcgcccttgcgtggtcgcggccgaggtacagttacctccagtctctgtgtatctggaaatgcacttacatgctattcaagttccttagagtgtaaggaaaacaaaagctgtagagttctgcatccatggggactgagacagagcaaagcacttcctagtatgttcaactggaacatggcccacactgatccatggtcacagtttggaatgtgctgagaagcttccatctacaatcaagtttctcagtaagaagtccccgcagagggagggagtccactgtgtacctgcccgggcggacgctcgaaagggcgaattccagcacactggcggccgttactagtggatccgagctcggtaccaagcttggcgtaatcatggtcatagctgtttcctgtgtgaaattgttatccgctcacaattccacacaacatacgagccggaagcataaagtgtaaagcctggggtgcctaatgagtgagctaactcacattaattgcgttgcgctcactgcccgttttccagtcgggaaacctgttgtgccagctgcattaatgaattggccaacgcgc

SEQ ID NO: 16993 - DNA, 690 bp, Homo sapiens
tatagggcgaattgggccctctagatgcatgctcgagcggccgccagtgtgatggatatctgcagaattcgcccttagcgtggtcgcggccgaggtactaatgacttaggaacttccttctccatcaatctgtcttccatgttcaagttttatgaatttccattcctgtattcttgaatggaaacatttctgtcttagaaattccactcttccggtgtttacaacaccattttgaatggtgtttctccatctttttcaaatatactccagtattactgagctctatttattatacgtataggatcatgaattataaatgagtatgtgttaaatgaatgagaaggaagtggcttaatggtctataggagaaccgtaagttttcttttgaggtaaccgggtaaatcatgcagttaaatgacaatgctgtgtgaatgcactgctagctaactggccttcatcaactcatgagggtatttctcttcctggcatctcttaaaagatgtcaactagcagcagagcagaggaagaatagagtggttaagagaatggcctccggtgctagactgaatttgacttccagctctagagtttactagtgttgtcactttgggcaaattgcttgatctctccacagtcagtttcatctacaaaatgaggaagatcatagtaatcacaccttctcactcgctt

SEQ ID NO: 16994 - DNA, 629 bp, Homo sapiens
ggcgaattgtgccctctagatgcatgctcgagcggccgccagtgtgatggatatctgcagaattcgcccttagcgtggtcgcggccgaggtacttatcttaatatcgttaagagatggcagccaagggtaaaactgagtcttcttgggctgactatgatgaaaatgccaagtgtaatctgagcacagccctgaacttgggctggtagcccttctgtccactttatctactgggaactcttgggacaccctgcagaaggagctcgggctggaagcagaaacaacccatctgagctaagagaaagaatttaacctttttaaaggcagcctgttatgcctgacagaataaacttacctttcctcactaaaactgtctatccttcacattccaggaatcccttctaaaaaacatattccatgccctttttcaagagaatccagccaatcatttcagctcagacatctctcccatgtaaatgctggaagctatcctccaagcctttcctttttctatagcacttgctgctaaggataattatatggtttctcatcaacagaatgtaaattctcccagtgcccatgaatacatactggcccagaggaaaacaggtgagaaaaatgtcaaaagaac

SEQ ID NO: 16995 - DNA, 390 bp, Homo sapiens
agggcgaattgggccctctagatgcatgctcgagcggccgccagtgtgatggatatctgcagaattcgccctttcgagcggccgcccgggcaggtacgcgggtcctgtctttgaaagtatcttaactggttcttttccccttatgtcacacccaagcagaagaggtcagtagcactggctccctggtagatataatgggtttaaggtcagtctaggaatattcattcaaggaggataagataaagcggaaattagagaatgtaaacacaagatgctgtaaagaaacatattggccactaatatagctactacatttatcatgctttcaaattattagaaaaattgacttgctttcttgctaggctcattgagaaaatgttgaaatgataa

SEQ ID NO: 16996 - DNA, 680 bp, Homo sapiens
  misc_feature 172: n = A,T,C or G
ctactatatggcgaattgttccctctagatgcatgctcgagcggccgccagtgtgatggatatctgcagaattcgccctttcgagcggccgcccgggcaggtacgcgggaactaagattccacgaacaactgaactagcaaagacaactcaggcgccacacagattttatanctactgtgagtgcccagaacatctgacaagccacacatcagacctgttctgaataggacaactacaagacctactaggcccaaacccagtgggatgcccagtgggaatggagtgggaacaggggtcaagcaagcacccaggccatcaggtgctgatagaaatgtatcagtggactctacccaccccactaaaaagccagggactcgccgcccacccttgccacccagacctacacacccacgaagaaaacctttaccaccaaataatgtcactggaaagccaggaagtgcaggaatcatttcatcaggcccaataactacaccacccctgaggtcaacacccaggcctactggaactcccttggagagaatagagacagatataaaacaaccaacagttcctgcctctggagaagaactggaaaatataactgactttagctcaagcccaacaagagaaactgatcctcttgggaagccaagattcaaaggacctcatgtgcgataca

SEQ ID NO: 16997 - DNA, 677 bp, Homo sapiens
tacgactactatagggcgaattgggccctctagatgcatgctcgagcggccgccagtgtgatggatatctgcagaattcgccctttcgagcggccgcccgggcaggtacagatgaggaaactgaggcacagaaagagattatgtaacatgtccagagttacacagctagtgagtgacagcactaggatttgaacctgggtagtctagctccaaaacctatgcttttaaccactcttctgcattgccaaagcagaaagaatttaaaggaataagacatatttacattgtcctcagaatatcttttttgactgtcacagcattggaactgtaatatattctctccattcatttctgtgttcattattttgtaagaattatagtggctccatatgtaagttagagtgctaggccttgttcggcagacaaaaagaatcaacagtcaggagcccggccaaaagagtgcagagtctttaagagggaaagtgagagctattcagaaatgcaaagtagaagtcagtatgagttaacaaaagtaaactagatagaagttcactagtaaaaaaagtattcatgagtcaagaaggcttactagaagtgtggaattataattggattttaaataatgttatatttaaatatgggaatggtatatttaaatatatgggatctagtgggag

SEQ ID NO: 16998 - DNA, 460 bp, Homo sapiens
atacgactactatagggcgaattgcgccctctagatgcatgctcgagcggccgccagtgtgatggatatctgcagaattcgccctttcgagcggccgcccgggcaggtacttttttttttttttttttagaatataagatttgaccatatattagtcatgttaacttgtttttctttaatgaagcgcattacagtaagagtcaatatatgcttacacatagttacagctctgacaaattagatatctaatagggtcatatctctgaaaagcattttaaaaccaggggcaaatagcctgtgtatcaacatggcaagcaccctttgtcccaagataggtaagtcagttggtaattttcttatcttaactggcattttaatacaatttttaagttgtttatttaaaatattgataaaatagttggaaagaggcatggtaacaaccatagggattactggggaa

SEQ ID NO: 16999 - DNA, 547 bp, Homo sapiens
ccctctagatgcatgctcgagcggccgccagtgtgatggatatctgcagaattcgcccttagcgtggtcgcggccgaggtacctatttaattgtcctccatctgagtggactgaaggagactcacatactaggctactggcaatttggccagcacaacaggtgcaccaggttcctcctaaggtggaaaaatttgggtcaaaattaatgataaatgaaaaaaaaagagataatacctgaatgcaaagtgtggaatatatggacactgttgaagggaatatccagcactatatcagtgccttgagagttcctcagagcaagagaataatgttttctctcagcttaaattccagatgttcagagggggacgtaatacttttgctaacgttgcaccaattctgaaatcttactaagtagaaaggcaaccagcatccctaagtgccatctctccaggggacacatttcttccatgttgtgctaaagaaaaaggaacaattcctgatgagtaagcaggactctttttttttctttcatgccaaacattttaat

SEQ ID NO: 17000 - DNA, 609 bp, Homo sapiens
ctcactatagggctataggcgaattgtgccctctagatgcatgctcgagcggccgccagtgtgatggatatctgcagaattcgccctttcgagcggcgcccgggcaggtacgtgtatttttattctatgggattgaaagattttttagggccaggaattatgtcttacctgattccatatctcatttctatcattgattttcattttgctcaagtaaccaactcaaattggcttgaaaataactaaaacaactaaggattttgacattagtgggttctttgcaacctggtatgggacctgtaaatgtttgagaaatgaaagtaatgccttattttccaagaagtttgcattatgctcacaggttaatttttatatcttctttcttaggaaaactacatctcagacccaactatcttatggagggcttatccccataacctgatgacgtaagtcatttttagcagccctttctttgttaaggaccatggtcatgtcactattaatcagaattcattcttgttattctctttaagaccttaggcaaatgcataaaatagatgaaaatatgtctttgacagtcccactgccgtaagaaaaaaaagctgtgta

SEQ ID NO: 17001 - DNA, 623 bp, Homo sapiens
  misc_feature 152, 533: n = A,T,C or G
ccctctagatgcatgctcgagcggccgccagtgtgatggatatctgcagaattcgcccttagcgtggtcgcggccgaggtacttggtggaacctgtgggtatacaagaggggttttgacctgtaagccaatcaattctgtttgttattcgtnatggagtataattgtttcatttgaaactgtcagtttcttcaagtcacttctctgaaaaaaattgtgatagattgatagcctgccagaaaatagtaatttctaaggtgctgccatccacacttacttattgtgaaatatgaaaatccagagtggtttgtatgagagggggaatactggctctaagctttctacagaaaacaggaaattcatgctgttgttgacataattttaaaggaaacttttaacaagaaaattcatgagggatacaatcaaacatagttaatctcttgagtgctaatcatttgagtatagtccacatcaggaagttttatgaggttgaaaactttactttgaaatatttaattgggagactagaccatntctttttccaagtcattctgatttattgtcctagtaaatgtatgtgtatgcatatatactgatgtattgactgaatgtgtgtgtgtgtgt

SEQ ID NO: 17002 - DNA, 552 bp, Homo sapiens
actatagggcgaatagggccctctagatgcatgctcgagcggccgccagtgtgatggatatctgcagaattcgcccttacgagcggccgcccgggcaggcacagatgctggcatgtcctgcctggggccagctgagtgtaccctgtcacggtcttgcttactcttcctctgaggttacagctcctagtgagccatggagaagagggtctttgacactgacccctcactggttatggcaactgcctcgaacagtcattgatttcaagcttgcctacaggcagaatgtatcccagaaagccaaggattatgttaatgtttacaggcctttgtagatcctcacaggagagctgaaatagtaatcctgaaaatgacagtaagggtgaccccttacccactctggggctcaaacctatggctcatgaggctattggtggctgccacagaattaagaataaaatgggaaaggtcaagtataaaagtcagaatatatttcactgaaaatatgtgtatgtgtgtgccttcaagagtgagtgctcctcaagggaaactcac

SEQ ID NO: 17003 - DNA, 534 bp, Homo sapiens
gactactatagggcgaattgggccctctagatgcatgctcgagcggccgccagtgtgatggatatctgcagaattcgccctttcgagcggccgcccgggcaggtacctagacatgcgcagacaaataaagatgaaaaacaaacacatcttctttaccaaagagtcagaaaaaccatttttcaagaaaagcaaaattctgagtaaggtagaaaaattcctcacatgggttaataaaccaatggatgaagaagcatcacaggaatcatcttctcatgacaatgtgcacgacgcttccacaagtagtgattcagaggaacaagacatgtctgttaaaaaaggtgatgacctactggagactaataatccagaacctgaaaagtgtcagagcgtatcttcagctggtgaacttgaaacagaaaactatgaaagagacagcttgctagcaactgttccagatgagcagggattgtgttactcaagaagtgccagactcccgccaggcagaaactgaagctgaagtgaaaaaaaaaaaaa

SEQ ID NO: 17004 - DNA, 685 bp, Homo sapiens
tacgactcactatagggcgaattgggccctctagatgcatgctcgagcggccgccagtgtgatggatatctgcagaattcgcccttagcgtggtcgcggccgaggtacttttttttttttttttttttggctatatacccagaagtgaaagtgttggatcatatgatatgttactttttcaaataagaacaagtataaaacagcaaagtagaaatgagaataaatattattaaaattacgttgtctcctgcttcttacacctaacttgcacacactagattttcagtggctggataaaaggtggtttagctgaagacagcaaaatctcattcccgccattactgaagagctcttcactatgtcttttacgtcatacacacttgaaccatggaaactatcaaaacaataaaattttaaaaacaaaatgaagtaatttttttcctttttactattttcctacttacttaaataggaataaggcaacaaaagcatataaagtataaagatcagaaaggaagaaataaaaccggagcatttacagataatttaactatttacatagaaatccccagagaatctaaaaataaagaagaataaatttagcagagtcacaagatgcaaggttcatatgcaaaaatcaactgtattcttatagactagcaaggaataatcaaaaataaaattt

SEQ ID NO: 17005 - DNA, 377 bp, Homo sapiens
agggcgaattgggccctctagatgcatgctcgagcggccgccagtgtgatggatatctgcagaattcgccctttcgagcggccgcccgggcaggtacattgaacaactctcagcagaataaggagaaggtgtatatcatagcacatgttccagtggggtatctgccatcttcacagaacatcacagcaatgagagaatactataatgagaaattgatagatatttttcaaaaatacagtgatgtcattgcaggacaattttatggacacactcacagagacagcattatggttctttcagataaaaaaggaagtccagtaaattctttgtttgtggctcctgctgttacaccagtgaagagtgttttagaaaaacag

SEQ ID NO: 17006 - DNA, 577 bp, Homo sapiens
gcgaattgggccctctagatgcatgctcgagcggccgccagtgtgatggatatctgcagaattcgcccttagcgtggtcgcggccgaggtacttttttttttttttttttttttttttccaggaaccatgtttaacatagggttcataagccagtaaattcacgcagcctttgcacttgctatgcagacctagggtaaacgttcaggcctgcaattagctcaccatagtggaactgatatgtattagacctccttagtggggaaatcacaattgaaatttgtatatattgacacactgacaagagtctggcgcctgaggaaagagattcatggatggcatgtgctgattacaagaagaaaaataatgacctctgacttgctgttcgtctccaaatattctacataataaatgattagcagccttagaaataatctcagccttttctttaaaatgtctaaatagtaaggagaatagaatgtaaatgcctacatctccagataaacaaatactatacactaggtgaaaacatagaataaatcattagatacatagcgttatttagctaagtagtaacgt

SEQ ID NO: 17007 - DNA, 605 bp, Homo sapiens
actatagggcgaattgggccctctagatgcatgctcgagcggccgccagtgtgatggatatctgcagaattcgcccttagcagcggccgggccgacgggcacagagctccgatgggtgaaaccaatgacatagagactgtccctgtccagtgagtaggggcccagctcagtgatgctggggtcagctggctcaactccaaatacagctgctctctgtccaacccacggcctgcggggtcatggcggcgggtgcagatggcatccactccggaggcttccccatctttatctggactgagcaaggtcagcctgcacccagaatacagagggccaacactggtgctcttgaacaagggcttgagcacaccctgcagaacactctacgtgatgttgaacttcctggagccagagtgacccatgttctcctcatactgtaagtgagtgatggtgaagttgattgtgaatggcatcacgagagggccgggggctgtagtttcagggagggaaggtgggatcccagaggttcccaggttcactatggaggtcccaggagtgctggtggttggtatggtgctccaatgagtgaaaccatcgacatagagact

SEQ ID NO: 17008 - DNA, 376 bp, Homo sapiens
gactactatagggcgaattgggccctctagatgcatgctcgagcggccgccagtgtgatggatatctgcagaattcgcccttagcgtggtcgcggccgaggtactgatactgtagaactccagtcaaacttcagtgcactgctttcttacaggaagacaactcagaacacacagccataatctgctttggtgtcagtcacatcacagtggttatacatttgtcctgaatggtgattcattcctttccatctaacttccttgtgacaaatagcatttactattgaaatagtcttaaaatagggaaaagagtgaaagttactcttatgcatgggagtgggcttaaagggttgacttccaccagctgagtacctgcccg

SEQ ID NO: 17009 - DNA, 716 bp, Homo sapiens
  misc_feature 556, 571, 679: n = A,T,C or G
gtaatacgactcactatagggcgaattgggccctctagatgcatgctcgagcggccgccagtgtgatggatatctgcagaattcgcccttagcgtggtcgcggccgaggtactgaacatggttgtctcttaaagatgtgaagattttctttttgtcgattctgctttgcttttgttctcttcctttagagagtgctgaactttgttttggcaagtaggaacttgtgcatcaccttgacataaattaactgagtagctcacgggtgggtggatttttataggggacatatttgaaaacaaaggttgcagctgcttttcatagctacaaagaatttatcatctcattgaaaaaaattctacttctacactaatttatctattctgtaatttattcattaattcattcattacctactaaatacctttttttttgttcaaggaactatgctggacacacgatgatatatcttattttccttctcatcctaccaaacctggagatggaacgcttaaagcttctagctgacaacacaatccttttattaggaacttaactntgctccctaactctntgatacactgaaactggaaggagttcctttgtttattaccagggtttattattatgggagtctgggtatgactctggacttttaattaccacctgtcctgtgtctcanaaaaattaacctcatataatataaactagttcatttt

SEQ ID NO: 17010 - DNA, 605 bp, Homo sapiens
tatacgactcactatagggcgaattgggccctctagatgcatgctcgagcggccgccagtgtgatggatatctgcagaattcgcccttagcgtggtcgcggccgaggtactttttttttttttttttttttttttcttgttagattctaccatattggtcttgaacattaagacccagtaacgaaggacacagaacatccagtctttccacaacctctagagagttaagggttaagcatgtgtgatgccctcgaagcagttttcctgaacctgctgagagtgaaatgtgaggaggaagcaccctgtccctttggtattaaaactctgtaggggaagggagaaggtggaaactgctaagagaatttgggggactgcctaagcagaagtgattcttgtctcaaatcctaatgtccagctcaaagaaagggcacatttctaggagaagcagggtcttgaagtgagggaggcgatggtgaatgggtgagctagacacagggcctttgtcagccccgaatctgcctgagttcccaataggtgaggaaggacacttgagggcttcctatgctttcctgagaaggctatgagcagacgggggtggtggtctt

SEQ ID NO: 17011 - DNA, 511 bp, Homo sapiens
gactactatagggcgaattgggccctctagatgcatgctcgagcggccgccagtgtgatggatatctgcagaattcgcccttagcgtgtcgcggccgaggtactgcatgcctccttgcagagtgttgtgcacaaggaagaaagcctggggcccaagagacagaaagttggattcctgggatgatttgcacatcaactgctcaactgtggattgttttttacttttccttttaaaccggttcgtatatatttttcttcgctgttacgaatttacagcagcatttgtaccttctcagaaaagaatgtttgcaatgttggccctctgtccagccacagtagtagtggtctaggttgtaattcagcctgatgactcctgttgttaggagtttcacaagtgtgtggtttttcttatagtaggtatttagaaatttgctgtggtaaccaggccctgagccctcaaccaaagggtaactttgttttattaaccttaaggcctatcttagctgtaaaag

SEQ ID NO: 17012 - DNA, 645 bp, Homo sapiens
tacgactcactatagggcgaattgggccctctagatgcatgctcgagcggccgccagtgtgatggatatctgcagaattcgccctttcgagcggccgcccgggcaggtaccacttaatgggcaagtttatgaacttttaactgtcttcatggactggatttcggatcatcatcttacaaagtgaaacatgaagaacctggaatggatggtaaaaaaccacaactcaaatttgcttcccagagaaatgatattcaggagaagtgtgtaaagcttttgcctctaatgacagagcagctacagtggatgccatttgtgaatatcaaacttcacgagccttttgtaaaatttatatattggtccctaaggcagctagatgctggagcacagcactcgactatgacatcaacattgaggagattgggtgaagacatttttaaaggagtggtaactaaaggaattcaggataattctccacagcattctgtggagaataaaccaaagacagctgctttctttaagagcctccaattgccattgagatttttatcaaccttaattgttctcaaaacagtcactcaagctgattacctggctcaagcatttgattctctttggttggacttgagaggcagaagaaggaaaaac

SEQ ID NO: 17013 - DNA, 82 bp, Homo sapiens
  misc_feature 62: n = A,T,C or G
cactatagggcgaattgggccctctagatgcatgctcgagcggccgccagtgtgatggatantctgcagaattcgcacctta

SEQ ID NO: 17014 - DNA, 349 bp, Homo sapiens
attgggccctctagatgcatgctcgagcggccgccagtgtgatggatatctgcagaattcgcccttagcgtggtcgcggccgaggtaccattcatttaaaggcataaatgtccaatggggccatcttgtgatacatgcactgtcacaggaaaagtttccaggaaaagtcaagccagggctttacagaatgatcaaaagaaagaagaccagggagaagcttaagtgtattagtcaaggattctttaagggacagaaactaattagaatatatatacacacacaaagcacacacagcacacacatatataatacataaattaaaaggggagtttatttaaggagtattaac

SEQ ID NO: 17015 - DNA, 471 bp, Homo sapiens
ctagatgcatgctcgagcggccgccagtgtgatggatatctgcagaattcgcccttagcgtggtcgcggccgaggtacttttttttttttttttttttttggtgctaagtagtaaccattttaagccaaaataaagtccaaatttcttgtagactgatatgcatacctgatcattatatcattttttttcccagagttttcttaaaactcaaatattgaatacctaatctttctaagctaagaggttggaattctggggaacccgtttataaaaatgaaaaggggtattaattacatcaacatgctggccataaggtaaaaaacattcacaatttcccccttataatttagaagcttttatacacaaggattgaaaacctttaaaacttaagatctgcgtgtctagtttaaggctctataaagagcacttacccaaaggaggttactaatatgaattaatttaaaaaaaac

SEQ ID NO: 17016 - DNA, 574 bp, Homo sapiens
  misc_feature 175: n = A,T,C or G
ctactatagggcgaattgtgccctctagatgcatgctcgagcggccgccagtgtgatggatatctgcagaattcgccctttcgagcggccgcccgggcaggtacatgcagcaggcccagaggccaccagagggcagagggcttctgtaacagttcaagcctctggctgacccagnactggctgcttcacacttgcccccatggctccgaagtggtaggagacaggttccctcacaccggaggcagattccagctccagctatgcccgcacacctgggtctgagccacagtctccacctctctcctccaacctctgcatcattaatactgctctggggtctgagaaaatacctgctttttcaggcagaggtcacacacagccacatgacacacacgccaaaccctgacagtgttgcccacgcaaccactcaaatcccgtggcacatacaccacagttcacttgactctgatatgacagcataatacacaccacggacacagtcacccctccacggacagtcacccctccacacacacacagtcagtcaacactcacacaggcacacatgcacaca

SEQ ID NO: 17017 - DNA, 636 bp, Homo sapiens
  misc_feature 388: n = A,T,C or G
ccctctagatgcatgctcgagcggccgccagtgtgatggatatctgcagaattcgccctttcgagcggccgcccgggcaggtacaatataaaataatacatatgaagccacaatattcaattacagttcaaactagaaattactaactacatgtagctgcttcatttttcgttttgcattttggcccctaattcattatttacaactgatacctgctgagaaaaagatccaaacttttaaactttgtatgttttgtggagggtgcacaatttcttctaatatatcttcaggtgttttaaaatttaatttgtttttaatcataagatatcatcatggccaagagactgggaaaataacaattttattctttctcctaagattgtgattntattattccaagatcttatgcttgaattacttagcaagaaggcatgattatgcagaagacagggaaatgaagagaaaagagcgggaatatacgaaaatgaagcttccttaacagaattcatggtggagatggtagacactggtggagtttttatccaagacttaaaacttaggaaacgcctatgatgccactttaactggaagtaatggagacatctgattccaaatcacaatttaaatgcctatttg

SEQ ID NO: 17018 - DNA, 600 bp, Homo sapiens
ctatagggcgaattgtgccctctagatgcatgctcgagcggccgccagtgtgatggatatctgcagaattcgccctttcgagcggccgcccgggcaggtacaattttccttgtagttcttttccttcagagatgagtagggaaatggagatcagcacataccatttgtaattatacatgttataaaacattatttccaaagccatatgttacaataacttatgtcagatttcttacatttctattcacttttgatgagcccatctttatccaaatccttatattttctaaagagaataaataagtggttactgaaaattaatatcacaataagtctttaataacattttattaataagtgcttaattacatttcagagtattcttaggttattggcaagtatccctcttcttgcatatatgtcttcaaaataatttcaaaccattattcatatatatctgttttatgcttttgggggctttctccctaattttatctgtgcctatttattgaactacttattatacagattgagcatccctaattagaaaatccaaaatgctccaaaatcccaaactttctgaacactgacatgctcaca

SEQ ID NO: 17019 - DNA, 477 bp, Homo sapiens
gactactatagggcgaattgtgccctctagatgcatgctcgagcggccgccagtgtgatggatatctgcagaattcgccctttcgagcggccgcccgggcaggtacttagtatacttaaaaaaatagtagtttcattacttcctttagacttttccaacctttcctctttctaaatgtgtccaatatagttacagtattttttttaagttttaatatgtaaaaatttcaaacacacagagagaaataatagcgcaatgaactaccatataccaactacctagattgaagttattattatctcatatttacttaattgctttcttttcttctgtgtccttattttttctctctctccctttctgtttctccccttttctcctttttctctctttatattttgttgttggtgttgctgacataacatttttctcttttggctgtagatactatttatgtcttcagcttcggcaggacat

SEQ ID NO: 17020 - DNA, 583 bp, Homo sapiens
gactactatagggcgaattgggccctctagatgcatgctcgagcggccgccagtgtgatggatatctgcagaattcgccctttcgagcggccgcccgggcaggtactgtctgaacatcaacacatacccaatgaagaaaacttgtaatgttttcatcaacataaaatgggtgacatatgtatgtgaggctgcatcctattaagagttcagagactccagatccatagcaatgaagtcgcctctagggacaggttcttccattaagtggtaagaaaaaagtagcttttgttgcttttaaaaggttatttaacacttggatatttctagcaccgtcaattctgaggaactctacatatttcaaagcaagtggcttttgatcctatgaataggttcacttctaattcagcatccttcagaagagcccattactggctctagaaagctgtcaatgtccagagcaacacattattactctgtaaactcagtgatttaggtggagaaataatatccacattttaagtaacaaaaacccgaagcagcttaaatgacttctccaagcgacctggtgactctaggacattta

SEQ ID NO: 17021 - DNA, 193 bp, Homo sapiens
tatagggcgaattgggccctctagatgcatgctcgagcggccgccagtgtgatggatatctgcagaattcgcccttcgagcggccgcccgggcaggtacaatcccctcggaatggtaggcagctgccatttagaactctgtgatgaataaagaaaaatctatatggaaacagaaatactatagaaatattata

SEQ ID NO: 17022 - DNA, 550 bp, Homo sapiens
ctactatagggcgaattgggccctctagatgcatgctcgagcggccgccagtgtgatggatatctgcagaattcgccctttcgacggccgcccgggcaggtacttagtgctaacagaagcagtgaaaaaccccggtgggcaagcaggaagagtgaagctgagcagcctaagaggatcttcatgggcaatgatgtgtcaaatttaggatcaaatacctataaacataagtaaaatgtttacttcttaagttttattaaaaattacaacttggctgggtgcggtagctcacgattttttttttttttttagctcatcagctattgttagtgttagtgtattttatgtgtggtccaagacaattcttcttccattgtggaccagggaagccaaaagattggacacccctgtctagggcaaggattccaaaagtatgttctgtataaaacttgcatagagattccaggaacacttgttcaaatgcaaattcctggtccagatcttaaagatcagtctctgcacgtttggacatttttaacaagcaaccctcatg

SEQ ID NO: 17023 - DNA, 380 bp, Homo sapiens
agggcgaattgggccctctagatgcatgctcgagcggccgccagtgtgatggatatctgcagaattcgccctttcgagcggccgccggcaggtacaaaaaaaacctaaaaattgtttcaggaatgtagagaaatatccaacttaaatagcgaaaaagtgcaccatacccgcgtacgcgggaatgaaacagatttatatacagagaagtgttatttataatcacaaaaagaaaatagaaaatatgccaagtgttatgggagtgtttaattataatttgtagagacaatgaaatatttgactaccaattaaaatgatatttaaggatttttatgatatgggaaatatttgtgacatatgctaagccaaatgcaggatacaaa

SEQ ID NO: 17024 - DNA, 670 bp, Homo sapiens
acgactactatagggcgaattgggccctctagatgcatgctcgagcggccgccagtgtgatggatatctgcagaattcgcccttagcgtggtcgcggccgaggtacttttgcaaaaagtcgactgtgactgtgtagcattatgttctgtagaatttttttcaagtagcataattattcattggtgtgaaaacagccaaaggttccgatatcctcacaaatcatttatgccaaacatctgagggcaaaatttagccggtgttatttactagattcttccctttgaactcacagactcaagagacagaccaagagttcttatatactcaccacagcggaccaatccaagtggcatttttaggaaaggttgcagcatttaatgccatgtggtacgtctgttcgtcaagtgggtggcaagggaatatccaagctggcattttggatatgatgggccttttactttcctgagtgacatgccacatgtcaagaaatactgctccccacccccccactcccatcacatttacgtgaacaattttcatttagttatttcccgttccatatggtgttaaaacagtcgtattaaataaagattatttctagttttcagtggtaatttaaatgagaggatatgtaataattgcttattagatacttatccaaatgaaatat

SEQ ID NO: 17025 - DNA, 348 bp, Homo sapiens
tatacgactcactatagggcgaattgggccctctagatgcatgctcgagcggccgccagtgtgatggatatctgcagaattcgcccttagcgtggtcgcggccgaggtactgggtgtaaaattctaagggtctaggattaaaagtccaaaaataatcattcaattttaaaaagtaatttatgaccttcataagggagagacctctaacctcccgcagttgagcaaatacactctgagagacattagggactgtggcaaaaagcaggcaatccatgtgtgtcacttaagccttgagcacagttcagtaggcaacaaaccaggaactgtcctggcagataagacagactg

SEQ ID NO: 17026 - DNA, 623 bp, Homo sapiens
tacgactcactatagggcgaattgggccctctagatgcatgctcgagcggccgccagtgtgatggatatctgcagaattcgcccttagcgtggtcgcggccgaggtacttttttttttttttttttttttttggcagattccttgtcatgaaatagttttgtattttaattagattcatggtcatttttattacttatgaaagtaagttgtggttcatgtgttcagcactattctgttttgtttttcagcgttccaacattccagagccttcctgaagagatcctcagcaagcttgctgatgtccttgaagaggtaattgtttttagcctttgaactttttgagatgggatccagcctgcttggctggcttctttcacagctgtgtgatgaggaatcacaaactgcagagatctttaaaaaatttctaagctctgggatgagctatatatttggcttcgtatagaaagcagcttatcatgtctgacatttatatgcagaaaggtgcaaatcaacctaattatagagggagacaaactttttgttgtgataaataccatgttactttgacttactagaataggaactggcatatttctcttattttaactagtgtaaagtaaaa

SEQ ID NO: 17027 - DNA, 529 bp, Homo sapiens
atagggcgaattgtgccctctagatgcatgctcgagcggccgccagtgtgatggatatctgcagaattcgccctttcgagcggccgcccgggcaggtactaatggaggaaataaggtaaaaaaaaaagatatgacatacagaaaagaaataaataataaaaaaagtaaagtaaggtctttctatattagtaattactttcatgataaatgggttaaattccccaatcaaaagtcatacatttgcagaatgaattaaaaaatggattaaattatacgcagtttgctagaggataattttgatctaaaagatgagtgggttgaaaaaaataaataatgatataacatgcaaatagtaaacaaaagagagcaggggcggctatacttattttagacaaaataaactctaaatcaaaaactggtataagaaccaaagaaaaatattatactttgataaaagagtcaaatcaccaaaaaggtataaaaattataaacatatatacaccaaaactcagagcttgaaaatgtatga

SEQ ID NO: 17028 - DNA, 630 bp, Homo sapiens
ccctctagatgcatgctcgagcggccgccagtgtgatggatatctgcagaattcgccctttcgagcggccgcccgggcaggtacacaccaccacgtccagctaatttttgtatttttagtagagatggggtttcagcatgttggccaggctggtctcaactcctgatctcaggtgatccgcccacctcagcctcccaaagtgctgggattacaggcatgagccaccgtgcccagcctcagaatggtttcttttaactgcttttagtaaagtgcaagaagagagaaactatttacacagatggaatttataatttaaaaataagcagaatataaaggttagtgatttattaaaactacatgtcttatctgttgccagcatcatgtaggcacaactcaaaaatgggacatgaacaagagcataagcttcagagagcgtttgaacaactacagatgatcactacacactcagtagattttaaacgtgttcttctcattgttcatttattttggggattgaattgaagcatttcctttctgaatactttcagttccaatggcagcaaaaatattacttgattttgtgttcccaacctacaaaattctaacccatttttcaagtgacagaaaaaa

SEQ ID NO: 17029 - DNA, 406 bp, Homo sapiens
gactcactatagggcgaattgggccctctagatgcatgctcgagcggccgccagtgtgatggatatctgcagaattcgcccttagcgtggtcgcggccgaggtacttgtttctctgcagaaagcagaagactatatgaaaacaacatccaacttcagtgggaagggatatatcattcagaaaagagaaataaaaccatgcttggaagcagataaaccagttgaagacatactgacgtatgaggaatttcatcctttcttgttttctcaacattcacaatgtccatatatagaatttgaatcatttgacaaggcggtggatgaattttattccaagatagaaggccagaaaattgacttaaaagctttacaacaggaaaagcaagcattgaagaaattagataatgt

SEQ ID NO: 17030 - DNA, 508 bp, Homo sapiens
  misc_feature 277, 337: n = A,T,C or G
gatgcatgctcgagcggccgccagtgtgatggatatctgcagaattcgcccttagcgtggtcgcggccgaggtacgcggtgcctcacaacaaagaattatctggccccaaaggacaataatgctcagattgagaaacccttggctatcaggtaaacacaggctctggaactagatttcctgggttgtaagctgcataatattggaagctctgtttggatggacacgtgggggtgatctgggacatagaaacctggaaaagctgatgaaagctgattntcccttgaagaagacatttggaatgaagcaatgtgacctttaatcaccctcagacctctntttgttcttgttccaggacattctggttttagccagatgataccaaaatgaccccagaaccagaagatggcagagccacaaagtgaaaaatacttgggtctctgaatcatagcttggaggagggcttcctggaaaaccatcccaacagagacatccgcattaaactttgtg

SEQ ID NO: 17031 - DNA, 549 bp, Homo sapiens
atgctcgagcggccgccagtgtgatggatatctgcagaattcgccctttcgagcggccgcccgggcaggtaccttgcccatcacaaatgtaaaagcacaaacatacttgtttttgtttctgacctcatggttgcaggaagctggctgagaacaggagagaatggcttgggggaaaaaaaagctctttcaagttggccaccccaaatcacccagatgggtgtccaggcaaatcagggcctctagacacttgctcttcttttcctcttctacttggctggtattgttttgagaggtgaatttctaggagggcaagatttttgtgtgtgtgtgaaacaagagaaaggttatctgcttaacctagctccctgaggaacttaatcaagtcactcccattctggcatttgggtgggtccaggcagcacccaagagtccaggacctcaccaggtccagctcaatgacagactttgtatggaagaactgggaaggagaaaatagtaagcatggattcctgtttattttggctgatgaacaaaggtatggcaataatt

SEQ ID NO: 17032 - DNA, 510 bp, Homo sapiens
  misc_feature 183, 203, 204: n = A,T,C or G
acgactcactatagggcgaattgtgccctctagatgcatgctcgagcggccgccagtgtgatggatatctgcagaattcgccctttcgagcggccgcccgggcaggtacctccctattcctttgataagccattgcaaagcctgtctaaaacaaagctatttgcttccattagctaagactancgactatttttcaacatgtnnctgaggaacgagaaccaggcttctctacttttcaaaactcctcaggtgattcttagcaaccagattagcatcagtccttagaacaacctcagacacccactaacacatgccctagagaggctaagtaacccgaaggtcacagaaccacagagttaattaacaacgacaacaaatacacccttggtgttcctgatttccgtcaaatagccgccttgctgagtcagcacaacaaagatttcataacaagttaaagtcgtcttagtaatgccccctttctaggagttacaaatattttaatgttaatca

SEQ ID NO: 17033 - DNA, 637 bp, Homo sapiens
acgactcactatagggcgaattgggccctctagatgcatgctcgagcggccgccagtgtgatggatatctgcagaattcgcccttagcgtggtcgcggccgaggtacatcaccctgctgagggacatccaggacaaggtcaccacactctacaaaggcagtcaactacatgacacattccgcttctgcctggtcaccaacttgacgatggactccgtgttggtcactgtcaaggcattgttctcctccaatttggaccccagcctggtggagcaagtctttctagataagaccctgaatgcctcattccattggctgggctccacctaccagttggtggacatccatgtgacagaagtggagtcatcagtttatcaaccaacaagcagctccagcacccagcacttctacctgaatttcaccatcaccaacctaccatattcccaggacaaagcccagccaggcaccaccaattaccagaggaacaaaaggaatattgaggatgcgctcaaccaactcttccgaaacagcagcatcaagagttatttttctgactgtcaagtttcaacattcaggtctgtccccaaccggcaccacaccggggtggactccctgtgtaacttctcgccactggctcg

SEQ ID NO: 17034 - DNA, 563 bp, Homo sapiens
ctactataggcgaattgggccctctagatgcatgctcgagcggccgccagtgtgatggatatctgcagaattcgccctttcgagcggccgcccgggcaggtacgcgggtctttcccaggccgcaccatttctgtcactcacatggacccaagataaaagaatggccaaaccctcacaaccctgatgtttgaagagttccaagttgaagggaaacaaagaagtgtttgatggtgccagagaggggctgctctccagaaggctaaaatttaatttcttttttcctctgagttctgtacgcgggtatggtagttttacattacttactggacattgtgggtgatagattttaaagtttatctcccactaaagaatgttgaattttgtcaagattggcagatcatcttgatcctatggatgctaggttttaggacacgttagggtgggcctacttctgttctgcccttagtccgatgacacaaatcttagtcatgggatagggctcttattcccaagatgtgacccttctaggggttcagtggaaagtgtgaggggcctaccaagcc

SEQ ID NO: 17035 - DNA, 461 bp, Homo sapiens
tacactactatagggcgaattgggccctctagatgcatgctcgagcggccgccagtgtgatggatatctgcagaattcgcccttagcgtggtcgcggccgaggtacagagggatattccaatgcctttagttagctcaggagtagagcatggtaacctgagagagctggcacttgcaagaatgaaagacctcggaatacagtggtgaaaatgtgagaaaccagaaaaagttggaatccaagaaattaatcacaaaagtacccagggttttatgtatacacttaagatttgggggaatgcaaaagggaagggtgactgtttagaatttccttggaaatgtctgtgcacattacaacgtcccacggagccaaattccttccaaactgatgagcaagctcttgattcttgagtcatgatgttattttcttctaatttttccgaacccgtttttgttttgactgg

SEQ ID NO: 17036 - DNA, 615 bp, Homo sapiens
tctagatgcatgctcgagcggccgccagtgtgatggatatctgcagaattcgccctttcgagcggccgcgggcaggtacctattgtgttccaggaatccttcttggcactgggaatacagaggtgatgggcaggaaaattccctgattttatagagcttaaattcttgtaggagagacagacaataacagtaagtaaatgctagacctttataattaataataaatgttgtttgcagtgaagaaaactgagagagagggttaacatagatcaaatattagagaaaattttattgaggaggggacatttcagttaagacaggaattctaaaagggagcaactaaaaagatgttgggatacacttttatatggctgcatagttctaggcagatggaacagtaattgctaaggatctcacgcagcagatttattagtttttgccacattgttccagctactaggcacactgccatgttatagtaaattatcaataactaagggtgtcaacattgtatttaagccatctttctatctcttagggccctcagtggagtctcttacatagtagtatggtgctcagactgtaatcaatttcaaatgaaattatttttactga

SEQ ID NO: 17037 - DNA, 501 bp, Homo sapiens
tacgactactatagggcgaattgggccctctagatgcatgctcgagcggccgccagtgtgatggatatctgcagaattcgcccttagcgtggtcgcggccgaggtacgaggttatctgtgttgtgcttaaaagggtctctacatagaccggaaaaaagacttttgtgaaattgttcataggctaacatttatcattcagagaaaatattctgtaaatgttgatttaatgtaatagtttcccttaaaatagaatttatagagaatttgaaaagaaaaccacaagttaattcactttttaaaaaacttcatgtcatctgaatacttaagctgctttgtttggaaagtgtctttctaaagaaaatagttaataaaattacagtaagataattgtcacaaaataaaaatcttaggtggccagttgtgtattacagagatttggttttaacagttatacaagttatttaaaggggaaacattaatattaaattttattaaaaaaaa

SEQ ID NO: 17038 - DNA, 412 bp, Homo sapiens
  misc_feature 322: n = A,T,C or G
ttgtaatacgactcactatagggcgaattgggccctctagatgcatgctcgagcggccgccagtgtgatggatatctgcagaattcgccctttcgagcggccgcccgggcaggtacttgttactcttacagatgtctcaattaattttaacctctatccctaatggtgtttaaattttggtaaagaaaaattcattttttctttattttccaagaaatggtaagctatctttgtccctatgggagatgtggacagagaaaactttctgtctctgatgtcttttgtgtgagacaagattttaggaaataaataagtggtgcanggaattgtgagattacatttcacctccttttctgtctcctctctcttttatataatctttatctctgcttctaacaatctccttatcaga

SEQ ID NO: 17039 - DNA, 651 bp, Homo sapiens
ctatagggcgaattgtgccctctagatgcatgctcgagcggccgccagtgtgatggatatctgcagaattcgccctttcgagcggccgcccgggcaggtacttttaaaaatgtaacttataaacacagggaaaaacaaaaggtagacctttccacagattgctagaactactttatgcatgaaaaaagtctgtttcactgatatgaaatgttaatgcactatttaatttttttctctttgttgcttcaaaatgaggttggtttaagataataataggacatctgcagataagtcatcctctacatgaaggtgacagactgttggcagtttcaaaataatcaagaagagaaatatccttagcaaagagatgactttggggatcatttgaggaatactaactctgttgcattaatgcttcaaaaaatcatcaaatgattcatgggggcccgatttgcatttgaaaaatgtttgaaattagagtctcatttgtttcaagaatgcagctacctgagttttttgtcttggcaaagtcacaaagcccatatactcacattgtgtgtctatatttgccaattaattctaaacttctaggaaatatgccctctcttaaaagagaattttttttaaatctttgagaaatgaaattctgag

SEQ ID NO: 17040 - DNA, 192 bp, Homo sapiens
gggcgaattgggccctctagatgcatgctcgagcggccgccagtgtgatggatatctgcagaattcgcccttagcgtggtcgcggccgaggtacgaaggatccccaagcccttcaggcccgagatcagagccagatcagccttaagtcacctcccatccaagaacttggcctaaaaatacctcccctatttt

SEQ ID NO: 17041 - DNA, 589 bp, Homo sapiens
ccctctagatgcatgctcgagcggccgccagtgtgatggatatctgcagaattcgccctttcgagcggccgcccgggcaggtacgcggggccactcagaagaccttcaccagatactgagccttgattttggacttctcagcctccagaactggagaaataaatttcagtttttataaattgcacaggctgtgatattctgtttcaacaacacaaaatggactaaaacagcctcttaaagctcaacgtccctggtgggtggtcagccttgtgctgtttggccctgcaaagccagttagttcactaatgccatgaatgggacagaaagtaagatcaagatgcccttgggaatttgtaagctttggtgcttttttctgcactcttgagagaaacacctctctgagttaacaatataatctctctttttaacactttaaaataattattactgtgcgggtgaagaaatttagtttgattctaaaacatcgggatttgagacttctcaactgaaatccagaggtaagtttttcctttactaaagcttacaaggtcacttgaacacatagcagttggaccacctggtccaagac

SEQ ID NO: 17042 - DNA, 571 bp, Homo sapiens
acgactactatagggcgaattgggccctctagatgcatgctcgagcggccgccagtgtgatggatatctgcagaattcgcccttagcgtggtcgcggccgaggtactttttatattaacgaactttataaaccagcaaaatatgcaataggaaaatgatttaaaagattatggtaaatattttagtaggttaataaagaggttgagaatgaattctgagaacccctgactattagattatgagttgcctctagctcccttgatcaaagagaaacaggctttcatgtgcatacttggcataatccctggagagaagtatattaagaaaatgttttgaaatgcttctttttaattaaaaaaacacacccgcgtacttccactgctgttttaaatttcccaatgtatggaatctggagatcaattctcagaaacctctacaaatgttcagattatgagaaaatactgcacagccttgaaacaacaataaacatttgatctctcacacaatttttgtgcatcagaaatctacgagcagcttacctgggtgattctgccttaaggtctctcatatg

SEQ ID NO: 17043 - DNA, 572 bp, Homo sapiens
tagcgtgttcgcggccgaggtacgcgggagagcagcacgtagcaggcccccgtggaggatccacacagtggctgaacactgggaaggaactggcgcttggagtctggacatctaaaagttggtaaagtgactgtgtcaggaattggtgggttcttggtctcactgacttcaagaatgaggccgcggcccctcgcgctccattgggttagagtctccccgagcgagctggtctcggcaagtggcgtccattcgtggaggctcgaatccaggtcaaagggttgctggagcgacggttggaatggaaaactagctggaagacacccaagcactcttaaagcaatccccgtgttctggaggctgggaagcccaaggtcaagatgctgacaaatgatgagagctttcttgctgcatcctcacatggaagaaggtggaagggcaagagagaagaaactaatgcttggaaatgccttttttaaagggacttagtcccattaacaaagaagcaggtcttatggcctaaacatctcataaaagcaccacctgttaattctcaaaaaaaaaaaaataaaaaa

SEQ ID NO: 17044 - DNA, 353 bp, Homo sapiens
  misc_feature 287: n = A,T,C or G
ggcgacaggagtgatggatatctgcacaattcgcccttagcgtggtcgcggccgaggtcttgcccaggatttgcactccactgagaatccaactataattgccaacattttccacttctgttgttgtaattattgcaaaattcagtaactataggcatcctgaaacagtatgcattcccttatattgcttcgaaatctcatatcacctttttgactacatttagaaggcacgaagtttggacctggaagcacaggtctactcctctcccatgggagaccaatagcanatggaatccaatggagcagctgcgactatcacttggaagccctctgtgagccactaacccaccact

SEQ ID NO: 17045 - DNA, 646 bp, Homo sapiens
  misc_feature 187: n = A,T,C or G
ctcactatagggcgaattgggccctctagatgcatgctcgagcggccgccagtgtgatggatatctgcagaattcgcccttagcgtggtcgcggccgaggtacaaatccctcagtgagaatcaaggtgtgtgccttggtttggaaaggagggagttgacactgtggaaggcataggaatactgaganggcaatctgtgagctgcaagaactccctgcaactgctctgggcttcagtgttctcacctgtaaaatgaggatgtgccaattagatgatgtctgttaactcaacaaaaaattacaagatataattttagaaaaggagaggcggagacaggactttatttctcctaaatggttgcagcctgccaagtggccagcccacaggctgggaagcatgcctctggccaaggcccagagacaggcactttgaaagaggaagaactttatactgaacaggctggctctctgcacttctcttcctagagaatctcctggctggctcagcgacttcagctctctgctcagaagtcatttcctctgaaaagtcttccctgctgaccctcctaaagtagacccacccctcatttactctttaatgcctcatcctgtttatttcctgcaattaattaacacttgcctcaatca

SEQ ID NO: 17046 - DNA, 412 bp, Homo sapiens
tacgactcactatagggcgaattgggccctctagatgcatgctcgagcggccgccagtgtgatggatatctgcagaattcgccctttcgagcggccgcccgggcaggtacactctaaagaaagccatgaggatgataatccactttgatacttccaatctgctggtcttgctgaactctttggatcatggatatcataagttcgacaaaatattttttttgtagaagcacaaatgtgaagtgtcactcgttctgagacttcctcctctgtgaaattccacaatctctttctatttatagacttttccacagcaaacattagtctacgcagggcattttgaaaatcatttgccagttctaaagtagtaataataaatactccaagaactaaaagtccccctggtagcattctg

SEQ ID NO: 17047 - DNA, 539 bp, Homo sapiens
cgactactatagggcgaattgggccctctagatgcatgctcgagcggccgccagtgtgatggatatctgcagaattcgccctttcgagcggccgcccgggcaggtactttttttttttttttttttttttgtcatgcatgcatccacgctggctttatcctgacttatgaatcacaggcccacagaggaacatctggttttgacattaatttcttctactctgcaggatggttgggtttttaactcattgggggcctttggctagaccttgaatttcctggcgcaacttgacagaggtgagagggcttgagggagttaaataaaactatgtgctgcccttgaaaggacttgcaaatgctttatatattaaacaaagaaactccacttggatcaagctcttgacaaagatccaaccaattaggtaaacggtatagtctcgaaaggcagtgacatttcatgcaaggaatactgaattggaagcatggagacttggactcttggtctacttctgacactgcaaaaggtttctgggtcaaagt

SEQ ID NO: 17048 - DNA, 676 bp, Homo sapiens
taatacgactcactatagggcgaattgggccctctagatgcatgctcgagcggccgccagtgtgatggatatctgcagaattcgcccttagcgtggtcgcggccgaggtaccttcttgagagatatcaaagaaagtccaatatccgttcttccccatcactctacagtgtatctagtaataattatttgtcttaatcataaggacaaataatgaaaattatatttcaaatttctaagcttttgtggttaaaaaaagcttctagaaactattgtttctcctcccatgcagttataatatgcttaactttctttaagatgggtgtttggtagtatcatttacaatatatttatttttgttttttaagcatgtttttatatttgtttaaggtggataggcatgtagacctgctagaagttgcccaggaaactgatgggttttcaggaagtgacctaaaagagatgtgtcgagatgctgccctcctctgtgttagagaatatgttaattctacatcagaagaaaggtatgttattttgacttgatttttaacacttgtcaaaatcttttagagcttttaggttagtttcttttattttgctttatattagaaacaccgcttatgaaataaaaagtaaatttggattatcaccccctgcaactttatttattggcattttt

SEQ ID NO: 17049 - DNA, 513 bp, Homo sapiens
  misc_feature 332, 346, 425: n = A,T,C or G
gtatacgactcactatagggcgaattgggccctctagatgcatgctcgagcggccgccagtgtgatggatatctgcagaattcgccctttcgagcggccgcccgggcaggtacccacacaatatagagcaaagaataaagaaacaaaaaaaaaggtaaaaaaagacaaagaaaatgtaaatcttgatagttgagaagacagaattcagcgtcaaaattctccttctgtggtattttctgcttccaacttgtccattattcacgcgacaagagaggctatctgggagaaagttcaatgctgctcgctgagtgtaaaaggaagatggcggcatntgattcaaggtagnggaatcatgaaaatatcctgtaaatggaaccaaccattgtatgcaggacgagctgcatgacaagaaccctctcagacanccgagttgtaagaaggaaaggagctttattcagctggggagcatcagcaagctactggtcgttaaaatctgaagctcccaccgcgtac

SEQ ID NO: 17050 - DNA, 558 bp, Homo sapiens
acgactcactatagggcgaattgggccctctagatgcatgctcgagcggccgccagtgtgatggatatctgcagaattcgccctttcgagcggccgcccgggcaggtacctagcttttattcattttattattcatctttattgctttcattgcacatgctgttaacttcttatgaactctttgttctaataaataagcatatccaggtttttcataaataaatgaggagtctataaattcttactagttttaatagaaacattgccactaaaatggtgtattctagctgtgtgagcttttggaaaatgttttcatttcctttatgtttgaatgttccttccaggtctttgaaaatatacattctgagttgaaaagctttataataggtaaaactcattaacccatatactttccatgctgggcacagcaggtgtggtaggtagaaatataagatgactcccaagatttttgcaccctggcatacacatatgcttttccagttgttgaaacactaatttaggtgctgctgtgaagggattttgtagatgtgaataatg

SEQ ID NO: 17051 - DNA, 645 bp, Homo sapiens
actatagggcgaattgggccctctagatgcatgctcgagcggccgccagtgtgatggatatctgcagaattcgccctttcgagcggccgcccgggcaggtactattacataacatgtcttaacccatttataaatataagttaatttctttagaaaaccagaggcaacttctctgttaaggactagacatttcacaacttttacaaggtatggtgtaaatgctcacatttgttttcaaagatttcagatagcatctaaaatgaacaatattaagattccacttccactgaccagtttattaaggaaaggggaaagcatttaaatcctggtcagcatattaaattattaacttaaaatccagcagttttatcatatttcaatgattcgagttaaaatttatagttcccaaaaatgcaaatcaagtagcagtacaataatattaggggactttgataccccactttcaacaatggacagattatctagacagaaaacaataaggaaacattggacttgaacttctgtttagaccaagcggaccagacagacatataaagaagattctatcaaacagcatcagcatacacatttttctcaagtgcacgtggaacattctccatgatagaacatatcttagatgatgat

SEQ ID NO: 17052 - DNA, 559 bp, Homo sapiens
  misc_feature 523: n = A,T,C or G
gtatacgactcactatagggcgaattgcgccctctagatgcatgctcgagcggccgccagtgtgatggatatctgcagaattcgcccttagcgtggtcgcggccgaggtacctagcttttattcattttattattcatctttattgctttcattgcacatgctgttaacttcttatgaactctttgttctaataaataagcatatccaggtttttcataaataaatgaggagtctataaattcttactagttttaatagaaacattgccactaaaatggtgtattctagctgtgtgagcttttggaaaatgttttcatttcctttatgtttgaatgttccttccaggtctttgaaaatatacattctgagttgaaaagctttataataggtaaaactcattaacccatatactttccatgctgggcacagcaggtgtggtaggtagaaatataagatgactcccaagatttttgcaccctggcatacacatatgcttttccagttgttgaaacactaatttangtgctgctgtgaagggattttgtagatgtgaataat

SEQ ID NO: 17053 - DNA, 442 bp, Homo sapiens
ctatagggcgaattgtgccctctagatgcatgctcgagcggccgccagtgtgatggatatctgcagaattcgccctttcgagcggccgcccgggcaggtactttttgttttttttgtttttttgtttttgtcagacaaggacttcagggggctcatagagcagagatgtcactgtagaagaagcaggctgccatatcattctctcctcatccagctccaaatagtaacatagcctatggggactgactgactttagaacagagcatgaaggaattcatgcctaaagttattgttgaaaacagcagagattatagtagtgaacattagagaattacatattagtagcagctagaagaaaaaagaccagccagacatttcagagagagacctgtggaaagagtttaaaaatgctctgctaagatcacatttgtctattggtctg

SEQ ID NO: 17054 - DNA, 391 bp, Homo sapiens
tgtatacgactcactatagggcgaattgggccctctagatgcatgctcgagcggccgccagtgtgatggatatctgcagaattcgccctttcgagcggccgcccgggcaggtacttttttttttttttttttttttctggattatatctaaatttaatattgaagacagcacttagcatttctctggcctaatcttattttccatgataaatgtgtgcatttgcctcaattaccttaggaattactagagattgcttcagagttttttcctgcactttaatgttctgccttcttttgctcattattgtgatcacatacaattttgtagctctattgcttggagagatttcacaaaaaaaattttaataaatgtcatgtgcaatatatttgc

SEQ ID NO: 17055 - DNA, 397 bp, Homo sapiens
agggcgaattgggccctctagatgcatgctcgagcggccgccagtgtgatggatatctgcagaattcgccctttcgagcggccgcccgggcaggtacctattgtgttccaggaatccttcttggcactgggaatacagaggtgatgggcaggaaaattccctgattttatagagcttaaattcttgtaggagagacagacaataacagtaagtaaatgctagacctttataattaataataaatgttgtttgcagtgaagaaaactgagagagagggttaacatagatcaaatattagagaaaattttattgaggaggggacatttcagttaagacaggaattctaaaagggagcaactaaaaagatgttgggatacacttttatatggctgcatag

SEQ ID NO: 17056 - DNA, 650 bp, Homo sapiens
  misc_feature 582: n = A,T,C or G
gactactatagggcgaattgcgccctctagatgcatgctcgagcggccgccagtgtgatggatatctgcagaattcgccctttcgagcggccgcccggcaggtacgcgggtgaatgaagccttagcaagtctgtccagagctcccctggtgccgcctggcatgctgctgatagtttgcaatgtcttcacaagaaatggtatcagaaacctcctgtcatatcagcatgggtctcttgcttcctgcaggaagggcgatatcctgggaggcacagaggtggagcccgagagacgcagtgttccagcgctgctcggctcaagactgggtcttttcttccgtatcctcaagcagcttcctttgacttactacttctttttgtttgtttttttcttcattgggctttaagcgttgcttctctttagtgtatgtgtgactgaagccaaacacaacattgctttccctttgcctgcaaataatcttgttgcccaagcccatctctgccattttcagtgacagctggctggccaatgagcctgagcactgggaatgcccagcagggcacatctagggggctgctttatatntggagctagcaggtctcttttctagggctttccaggaaagatttagaatttaacattggatggatttt

SEQ ID NO: 17057 - DNA, 412 bp, Homo sapiens
tacgactcactatagggcgaattgggccctctagatgcatgctcgagcggccgccagtgtgatggatatctgcagaattcgccctttcgagcggccgcccgggcaggtacttggtggggacggaggagctagggactaactgttgctcttggtgggcttggcagggactaggctgaagatgtgtcttctccccgccacctactgtatgaacaaccacattttttcctaacagcctggggttttgtgaaggaatatgaaaaaggagcccctaattcgatagctagaaggggaatattgaaagggtagaaagtgaccttcaagggtcaccgagggttccacctcccaacctctgttcacagggcttccttgactttacgtagtttgggagctattttcttttcccccagtcaaa

SEQ ID NO: 17058 - DNA, 538 bp, Homo sapiens
  misc_feature 216, 217: n = A,T,C or G
ctatagggcgaattgggccctctagatgcatgctcgagcggccgccagtgtgatggatatctgcagaattcgccctttcgagcggccgcccgggcaggtacctgagatttctcagagctctcttatcaagagtaaggagtgagattgcagaaggggcagtaatgtcaataccaagttattgggaaacctacttaaccagcccactgcattacatannctggagcccgtctaggacacttgcccttggaaatggtggaaagactttgttttatttctatttcatcaacagaacttttgtagcattgaatctaagcaaaggataacatcatattataatggaaagttatttttaactacaactgttattgttaaatttagaagaaaatattgtctttgaagtttcagtccaaaactctaaggagaacaaggtttttactgccatcggtaatcctgtgagaaatttgacactccagatcttatttgagacagataagtctatgataaatatatgtatgagacttaaaatattcttgatatt

SEQ ID NO: 17059 - DNA, 413 bp, Homo sapiens
tatacgactcactatagggcgaattgggccctctagatgcatgctcgagcggccgccagtgtgatggatatctgcagaattcgccctttcgagcggccgcccgggcaggtactgcttacaacagaatctacaaggacaacaactcaccgtgtttttcaattcagatttttaagttatgaattcaaatctactaaataaatatcagaaacaaacaaaaacagataaagctatagctcactgcattttagaacctgagtgatgtcatggttctctagagctttcattccacaggagagttcttgtctctagggcctcgcacactatgcacaggtgaagggacgaagtgtagccccacagggtagaattcatgatcagaggacagggaaatactgctttattcatttttctattat

SEQ ID NO: 17060 - DNA, 396 bp, Homo sapiens
actactatagggcgaattgggccctctagatgcatgctcgagcggccgccagtgtgatggatatctgcagaattcgccctttcgagcggccgcccgggcaggtacttttttttttttttttttttgaatttagaagtttcttacaagcagtaaaaaggtccaaaatgctttataggtaggtttctacataaatttcatagtttacattatggcataaggcaaaaaacttctcataaaagatattaggtaagtaaggctaccatcagttaaatctgcttctacacacattaaacttacttatgcttctctcacctgaagcacatttctgcaatctcacgcaaacaggattttacttttctttccttttataaattttctacccttttaagtttcctt

SEQ ID NO: 17061 - DNA, 644 bp, Homo sapiens
ctatagggcgaattgggccctctagatgcatgctcgagcggccgccagtgtgatggatatctgcagaattcgcccttagcgtggtcgcggccgaggtacaaaatcatgtggatagatgtgcatttgtgggtatctgtgaatacaaatacacaattttcagatagaagtagtataagaaaaagaaatcaaacaaagtcaaacattttaagtgtagctcttggtgcactttaaaaaaattattaaattgaagctgtagtttattctcatcattgtcatcctatattagtgattttctttagcttttgaaattaaattcataatattacaattctgaattcctatgtatgtatatgttaagaatcctttaatgggactgactttcatatgtgtgtggctgcattctgaaatagttgtctaggtgatacataaagcagtgagtgctatttgtaagatatatttatatttaaagtcttcatacagttattaactagctccaatattactgaaatgatttctccaaatatcctatatttaattatcatgctggcaaatttattataactttgggttgaaaaaatatattatgatacatatccactgattaatgccacctatctgctttcctgaattcaaagttatgatta

SEQ ID NO: 17062 - DNA, 547 bp, Homo sapiens
tacgactcactatagggcgaattgggccctctagatgcatgctcgagcggccgccagtgtgatggatatctgcagaattcgcccttagcgtggtcgcggccgaggtacctttcaaaatgctgaagtttcctgtgagggtctacaaccataccaccgtatgaataatctcaatcacagcattttagggctggaaagaccgttctccatccaacctctcatttcagatgagcggagactcaaatctctcacagggttccatagctagttggaaccagaaatccagcagaaatactgtaagcaagcttgtccaagatgtggtccaggacagctttgaatgtggctcaacacaaattcacaaactttcttaaaacgctatgagattttttttgcaattttttttttttagctcatcagctatcgttagtgtccgtgtattttacgtgtggcccaagacagttcttcttgttccagtgtggcccaaggaagccaaaagattggacactcctggaggtgcagcacagtatctaacactacctcaatacttttt

SEQ ID NO: 17063 - DNA, 602 bp, Homo sapiens
  misc_feature 506: n = A,T,C or G
acgactactatagggcgaattgggccctctagatgcatgctcgagcggccgccagtgtgatggatatctgcagaattcgccctttcgagcggccgcccgggcaggtacaggcagtcaaccctaaacagtggactcaacttcaaagacgttctcaaggagaaggcagacctgggggaggacaggaagaaacgaacgtgatagttctcagctacccccagtacctcggccgcgccacgctaagggcgaattccagcacactggcggccgttactagtggatccgagctcggtaccaagcttggcgtaatcatggtcatagctgtttcctgtgtgaaattgttatccgctcacaattccacacaacatacgagccggaagcataaagtgtaaagcctggggtgcctaatgagtgagctaactcacattaattgcgttgcgctcactgcccgctttccagtcgggaaacctgtcgtgccagctgcattaatgaatcggccaacgcgcggngagaggcggtttgcgtattgggcgctcttccgcttcctcgctcactgactcgctgcgctcggtcgttcggctgcggcgagcggtatcagctcactc

SEQ ID NO: 17064 - DNA, 573 bp, Homo sapiens
tacgactcactatagggcgaattgggccctctagatgcatgctcgagcggccgccagtgtgatggatatctgcagaattcgcccttagcgtggtcgcggccgaggtacttgccagccaacctgacctggaatgcggattttcaagggatctctttattcagtggtgtcaggaccctaaaactcaatcattctaacctacagaactactcctgggactttagcacgtttcctaattgataatccttctgaaaaaattacagaaatagagttgaggaaacgtgtgaagcttgaagggaaagaacttgaagaatacttggaaaaagagaaactaaagaaagaagctgccaaaaagcttgagcagtcaaaagaggcagatatagattccagtgatgagagtgatattgaggaagatattgaccagccatcagctcataagacgaagcatgacttgatgatgaaaggtgaaggcagtcgtaaaggaagttttttcaaacaggcaaaaaagtcctatcctatgtttcctgccccagaagaaagaattaaatgggatgaatatggagagattatcaaacc

SEQ ID NO: 17065 - DNA, 463 bp, Homo sapiens
  misc_feature 214: n = A,T,C or G
ctactatagggcgaattgggccctctagatgcatgctcgagcggccgccagtgtgatggatatctgcagaattcgccctttcgagcggccgcccgggcaggtacgcgggaacctggaagattggagatctctctctaatccctaccccgcagctggttcggtgtgagtttatagaaaccttggggtctgagtttatgttaaaaaaaaaaaaaanaaaaaaaaagttgaataaatagatcagtgatatccagaccctgggatttcgtggctcaattaaaaactgtggggctaccatacatagtatctgactgcttattttgtcaagtaaagacatatacaggcataccttgttttttttgcatttcactttgttgtacatatcagtatgattaacggttcagtgttcattttcaggaatctgattggataactgtcgtttcatttgttgaaacatataattcaa

SEQ ID NO: 17066 - DNA, 568 bp, Homo sapiens
  misc_feature 26: n = A,T,C or G
atacgactcactatagggcgaatggngccctctagatgcatgctcgagcggccgccagtgtgatggatatctgcagaattcgccctttcgagcggccgcccgggcaggtactttttttttttttttttttttttttttgcacagcattcaaaagaaccacaaaggagcagtagtttttaagcttccatgtaggtgaagacaaaaatttttataaatttcatgaatacttatatcccaactgttcaaaatttcaagatttttaagaaaacttgtaggactacagttaactattctttcctccaaatttttctttagacccagagagaccaaaattaaaaaatttaaaaaattaccattgctcctatataaatcataagaataaaatagagccaagaaaacttttttaggacccccttttttccaaagccaagagatttttcccacattgggcatgatcaataatgagaacattcctgagatcctatgagcttgtgtggccctgtctcataaagacagtaaagccacacaaataagggtttccactccctgggcctgagctttgaaaccc

SEQ ID NO: 17067 - DNA, 492 bp, Homo sapiens
  misc_feature 318: n = A,T,C or G
tgtatacgactcactatacggcgaattgcgccctctagatgcatgctcgagcggccgccagtgtgatggatatctgcagaattcgccctttcgagcggccgcccgggcaggtaccatattgtgtatatcatctgggatattttaaaggacaatttatctacctattaagtgtcactgggttctaaacaatgaaacttgttatctggatagcaaaaaacactaagttgtaaagccacaagcttcaattactttaaaaaaatgaaaaagccagtgtaaaaattcacactttgaaagaaaaaagttcacagtgatacctgngagcatcacttgctctgttttaggatttcccttaggaagtggcaagcgtctaaaacctcatttaaaaacaaaatgagctaagatgctgtctttctctgcagtttctgtttctttcataggtggtgggtgagtgcgtatgtgagtcaacctccagtgtttacattgtgacataca

SEQ ID NO: 17068 - DNA, 406 bp, Homo sapiens
tacgactcctatagggcgaattgggccctctagatgcatgctcgagcggccgccagtgtgatggatatctgcagaattcgcccttagcgtggtcgcggccgaggtacttttttttttttttttttttgttatctagatgggagatttagtcctggtgcctgaatttgagggtctctcacactgctcatctcaacaatcaatttttactgctgtagaagataataatggtaataacactatagaaaaaaactaccatgacctataagttattagtcttttaaaaataactgtagtgtatgcagcttcttcatttcctgaagtagaagagaagctgatagttggagcctctgaagctgttcatatatctcctgaatgcatgcaagaggttgatttgctcacaaaggac

SEQ ID NO: 17069 - DNA, 482 bp, Homo sapiens
  misc_feature 322, 452: n = A,T,C or G
gactcactatagggcgaattgggccctctagatgcatgctcgagcggccgccagtgtgatggatatctgcagaattcgcccttagcgtggtcgcggccgaggtacccagggggcagagaagaagagtgcagcatctattgcctgtttcttggcagccaatggtgctgacctgagcattcaaataagaagggtcaatcgccacttgatctctgtcctgatccgaatctctgcaaagcactggcaaagtgtcataaggaaaaagtcagtggtcaagtgggttctcggagtccttctatgattagtaatgattctgaaaccttanaagagtgtatggtgtgctcagatatgaagagagatactctttttggtccatgtggacatattgctacctgttctttatgttctccacgtgtcaaaaaatgcctcatctgtaaaaaacaggttcaatccangacaaagattgaaaaatgtgtggtatgctc

SEQ ID NO: 17070 - DNA, 574 bp, Homo sapiens
acgactcactatagggcgaattgggccctctagatgcatgctcgagcggccgccagtgtgatggatatctgcagaattcgcccttagcgtggtcgcggccgaggtactttttttttttttttttttttggtaaaaaatattcttcttggtaacttgttatttttgaaccagtttatttcccagaaaatgcctttttcttttgtgcttcttagaaggagaaattgctacacatcggtaggtatgcgtagatctgcatcaaactttattcagattatctcaggctaaacaactttcctttatcctacttctccttaattttccttcaattgtctttaattttgggctaaaatgtttaagtatagaaggatctagatacatttttgacaatgtgaactaaaatcaaacctaaaatttcagcttgtagtgacacatcaagaccaaatataatttaacccactgaagaaagtgacctgacctcaaagattttggtcctaatttcgagtgacctggcctgcaaaagagcatgactttaaatactttctttgtctctgttaatcttaactattgcctggag

SEQ ID NO: 17071 - DNA, 632 bp, Homo sapiens
  misc_feature 473, 475, 476, 477, 478, 480, 481, 482, 483, 484, 485, 486,487, 488, 489, 490, 491, 492, 493, 494, 495, 496, 497, 500: n = A,T,C or G
tacgactcactatagggcgaattgggccctctagatgcatgctcgagcggccgccagtgtgatggatatctgcagaattcgcccttagcgtggtcgcggccgaggtacgcggggtatattattcaaataagaaatcaaaagagaaattggaaagttcattgagctgaaaatgaaaacacgatatatcagaatcagggagttgcagctaatgtatgcttggaggcaaatttaagcactaagatcctatattataacaaaaaagaaaggtctcaaatcagtgacctgagttttcaccttcagaaactggaaagagaagagcaaattaaacacaatgtaagcagataaagaaaataataaaaagaacagaaatcaatgaaagaaaaaagggaaaattataagaaaaatccaagaaagtaaatgctaatcattttaaacaatcaattaaattgttagacttctagtcagctgatcanannnnannnnnnnnnnnnnnnnnngtnctccaaagattcaggtttactcacgtcatccagcagagaatggaaagtcaaatttcctgaattgctatgtgtctgggtttcatccatccgacattgaagttgacttactgaagaatggagagagaattgaaa

SEQ ID NO: 17072 - DNA, 466 bp, Homo sapiens
  misc_feature 176: n = A,T,C or G
actactatagggcgaattgggccctctagatgcatgctcgagcggccgccagtgtgatggatatctgcagaattcgcccttagcgtggtcgcggccgaggtactgaaatatagacaagacttaacagtgcatactcttaactgggacacatgctgcctcttaactgtgagcaaagngacaatttccgacatctaaaataaggactgaagttttcaccaaaaagtaagattaatgagatggctagggtagactgagactccaaaatattcactcaatattcatccctccctttatcttggcaatagaacctatatttttcaaagttttcctacggatagaggtggtcagagagatgtaagcagaattcactgggtaggattcctgaagaagccctttgaactctttggcttcattctgcggggaagcaaactccatggctggagcaaccacagccattttgtacctg

SEQ ID NO: 17073 - DNA, 366 bp, Homo sapiens
ccctctagatgcatgctcgagcggccgccagtgtgatggatatctgcagaattcgcccttagcgtggtcgcggccgaggtacaataattttatccattttatatattagatatctgaggcttccagaaataagtgatttgctcaaaatcagcactcaaaccaagactccgtggccctaaagcccaggctcttgcaatataagtatcatggttattgaaagcacggagagtcatgtttaagttaggtttatgatttccagaaaatattggatttaaatgattccttcaatgagggggcaggcatgagatagaggggagtggtagacagcagttgaagcataggaggctatgggaggtgagcaaaatc

SEQ ID NO: 17074 - DNA, 422 bp, Homo sapiens
tacgactcatatagggcgaattgggccctctagatgcatgctcgagcggccgccagtgtgatggatatctgcagaattcgccctttcgagcggccgcccgggcaggtacactaattccaagcagcaaaggaacagggcagcacccagtgtaactgataaggtaattcatgccacacaagacgcattaggtgaacctggtggtgccctctgcctgtaggggaacaagagaaaactatccccagaatcagccacctcagcccctagtattttttctatcaatgccttgtatcagcctcaaagcagcctgttcaagttaactccctgttgaactccagggcctatacctctcttggctgaatagatataagaacatccttgcctgatgggttcatattcctcttcaattctgctgtctaaaagaa

SEQ ID NO: 17075 - DNA, 293 bp, Homo sapiens
tatagggcgaattgggccctctagatgcatgctcgagcggccgccagtgtgatggatatctgcagaattcgaccttaccgtggtcgcggccgaggtacgactaacggcaactggcatggactcaaatattttggggaagaaaaagactaaaagttctaaggaagaaaatgcggaccttgatagtttgaaatattttaaaagacattgtagaaactgcttaggcagtttgattatggactattagatgatacttgggtctgataatggtataaggagaataaagtatttaggga

SEQ ID NO: 17076 - DNA, 543 bp, Homo sapiens
ccctctagatgcatgctcgagcggccgccagtgtgatggatatctgcagaattcgccctttcgagcggccgcccgggcaggtacctgctttgtcacataacgtgactgaaaatgactcttgcagacctcactattttattttcaactcacaggtaactaaatatgcttattttctcaaaagaagagtttagggaagaaaagagggaagctattcactcccagggtaaagggaggaggataataggtgctttatagaaaacatgtgattagctaattattgaggactgtgaagaaagttttggtttacatctgaaaatagattgagaattgagataatcgtatggtgctaataattgacacattcagaagtgaggatattgatcatacttcatgaacggattagaagaatggaagctaattacacaaaggaaacttaggctttgattctaagattgtttacataaaatatatgctgcggaaatgtgacagcatgagttcgttacatcagaattaagtagatttttacgtttactttcagactgt

SEQ ID NO: 17077 - DNA, 631 bp, Homo sapiens
gactactatagggcgaattgggccctctagatgcatgctcgagcggccgccagtgtgatggatatctgcagaattcgccctttcgagcggccgcccgggcaggtacgtccaaagccacaggatgaaattatgcagaagtctatcttgaaaaggtcctgattactttcactaaaattctacctattagaaagatgacaatatcccaaaataataaaagctcagaactaaaactttaggaagtataggagaaaggaagaatgggtaggtagactggggtaaagacggaggagaggatagtttagtttattacctaacagaaaggctattaaaatggacgagttgtagtcctatccctgacattttatgtccttggttaatgtgcttagccatcttgtgcttcagaaatgtcctcctatctgttcaaacctgtaatttttgaaggtttaaaccatgattttctgataatctcaaactgctcacatttccttgttagaactagtatcttagaaatgctaaaaccataagttttgaaatcacattgctcctaaaagaactaaattttttggattatcttccgttaactattccctttcgcttttataaagtcacaataagaagccctaaggtaaaa

SEQ ID NO: 17078 - DNA, 574 bp, Homo sapiens
  misc_feature 14: n = A,T,C or G
tacgactactatanggcgaattgggccctctagatgcatgctcgagcggccgccagtgtgatggatatctgcagaattcgccctttcgagcggccgcccgggcaggtacattccttatgagggctttcttcctcagtgttctctttagagggctattgctactggactttctgcaatgtcttgggtgtgccctcagagcctgcaacaagtgtatttggatatactctatttgtaaagtttaggcctctaagaaggccacaatgaagcaactaaaaatctgatgattaagggagtcaatcaagctgatgccatttttagtttaaaaatgaagcagagctctaaactcatagatgggttttcttactgggaagaagattggctctctgaagacagcttccaatgaggaatgtattgaacaatggcagcactgtctggccacccacaaactgttacagatgacccagttacactgttgcataggaacccaagtggaaagaagacagagtccatgtctgtccatggctccagctacagaaaggatagtatgggaacattacaagggggatacattact

SEQ ID NO: 17079 - DNA, 570 bp, Homo sapiens
ctatagggcgaattgggccctctagatgcatgctcgagcggccgccagtgtgatggatatctgcagaattcgccctttcgagcggccgcccgggcaggtacatattatatgcaaggttacaaaaaaaaatcaatggttaatgattttttagctcaaccaagctaaaagatgtgaacaagaaattgaactcaaaacaacttaagacacaaagctcttgttactgataatgtctaataatattcatcaatttaccatatcttgttcttatattaaaatgttctatcattttcctaattattttaaagtcgattacaaaaatatatatatatattcttgtagtgccagaaaattgaatacattaataaatggggtagaatagatgaatctcccatgaagaagaattccaaataatttatgaactctgccctcaaggatatggagcagaacttcctacttctctagtgtgagctgaatagtgacttccttccaaaaattacatatggaaagggggaaaataactttgtagtggagaaatctgataaacactatctcggctaggttatcaagatt

SEQ ID NO: 17080 - DNA, 467 bp, Homo sapiens
ctactatagggcgaattgggccctctagatgcatgctcgagcggccgccagtgtgatggatatctgcagaattcgccctttcgagcggccgcccgggcaggtacagattgtctcagttatacaagtggcaagaagaggacagtggaccagctcctgggaccttccaaaacattggctttgacatctgccaagatgatgattccatccacctggagtccatctatagtaatttccagccctccctgagacacatagaccctgaaacaaagatccgaattcagaggcctcaggtaatgacgacatcattttaaggcatggagctgagaagtctgggagtgaggagatcccagtccggctaagcttggtggagcattttcccattgagagccttccatgggaactcaatgttcccattgtaagtaccttggccgcgaccacgctaagggcgaattccagcacactggcgg

SEQ ID NO: 17081 - DNA, 573 bp, Homo sapiens
ctatagggcgaatcgggccctctagatgcatgctcgagcggccgccagtgtgatggatatctgcagaattcgcccttagcgtggtcgcggccgaggtacaaaagtcaggagttaacctgtgttcaatgcttcatcattgcttgtttacctaccagcattttaggaaggattagtttatcatcaaggccttgtttggagtgggagtaagggggtgatttgttctgatctcaggaaggaaaagtgagcaggatctggatagctccaaggagctcaaaagcctatgtgtgagcaccatggctggggacggctcaagggtaaaggccacttcggggcacaatccaatggacaccaaaaggataggtaaggaacacgagcttgcttccttcatagattagcctgggcccaagcccagcctactttgacagtcttttattctattcataaaggaggtcttatgcaagaaaactaagactctcatctaacagctttcttttcttaagctaagaaaaaggaatgtcataaaaaggtgaacatcactttggtgagctctgctattttttttttttaaaaaaa

SEQ ID NO: 17082 - DNA, 597 bp, Homo sapiens
gactactatagggcgaattgggccctctagatgcatgctcgagcggccgccagtgtgatggatatctgcagaattcgcccttagcgtggtcgcggccgaggtacgcgggcctcttcctttctccgccatcgtggagtgttcttgactccgctgctcgccatgtcttctcacaagactttcaggattaagcgattcctggccaagaaacaaaagcaaaatcgtcccattccccagtggattcggatgaaaactggaaataaaatcaggtacaagaaccagttggcagtatgtaaattcagagctttgtggaacagagtttcaaagtaaggctgccgtccgaaggcacgaagtgtccatagtccttttaagcttgtaacaagatgagtgaaaattggactcctgccttcagattccagttgtttgagttgctgtgaggtttggaggaaatatgctctcaacataataaaagccactatcactggcactgtagcaacaaagatgtagggttgtaaaactgcgacaactgcttttgctccaatcacaattaataacaactggatgaagtcaaatatgggaagaggcagaaggtcattcaaa

SEQ ID NO: 17083 - DNA, 590 bp, Homo sapiens
  misc_feature 492: n = A,T,C or G
ccctctagatgcatgctcgagcggccgccagtgtgatggatatctgcagaattcgcccttagcgtggtcgcggccgaggtactaggttttacagggtatacaacgtccaataatttcccttcatcaacatgccatgatttatcagccttgaaaagtatctcaaaggcttagaaaactttattcatttattcattcattcatttattctgtggatgatcattgaaagcctattgcatgccaagaaatatactagaaataaaggatcatcaaaatagtcatataatccctcttcccaggccagaaagcttacagttttacatccggatgagaatagaaggaatcaactcatttagcagatggagaagaggcccagaaaaattacataataatcgatgttactattgcattcttcatgacctaccacaccttgaatttttccttttctcctaacaacataattttccaccatataacctacagtattgggagatntctgggcatacagacttcactaactcatatcttagctgttatagggaatggataatgccaatcatgattctttgctaaataaatctttgtcttgagtc

SEQ ID NO: 17084 - DNA, 573 bp, Homo sapiens
acgactactatagggcgaattgggccctctagatgcatgctcgagcggccgccagtgtgatggatatctgcagaattcgcccttagcgtggtcgcggccgaggtacttgtattttgaatggtttcccactttcaaatgggaaaaccgactgtctttcttcccttccccagttattatccagctttgtattgcaaacaatgactctcctgttgttctcattgaagcgtgggttaaagtggaaggcaacatcattccctctttggaaatctaaagcaattctgtttgcattgggcttcaccgtgcccagaattgttatcagcatgcgaggcaccactcccccaggcaaaggcaggttataaggcacaatcagtggccccccgcgtacccagcaccacctaggaagtatttttgccacaaaatcagacctccagatctaactaccattttataggaaagataagttcagagaaccatgtcaaatgacacctcgggatttcaaccagcaacgttcaaatgtgctaaactctgtagatggaaagagacttacagacatttcaaataaatgcaatatat

SEQ ID NO: 17085 - DNA, 381 bp, Homo sapiens
agggatatctgcagaattcgcccttagcgtggtcgcggccgaggtactggtcagctattttatagactatccctcaattgggatttgtctgatgtttttcttataactatactgggatataggtttgggaggggaaaactacagagataaagcacctctttcatatcaagggtacactctatgatggtcacgtgacgatgaattcacgtcgcgacgtatttctcataatgtatctcctttgtcaagcatcacatgactgtataatattttacctaagaaagaattcttcggtgaaaataccaatgctgtaaaattactgtagtcaatttttaggttcaagggttaatcagaatagctccaagtatcattcttaataaattt

SEQ ID NO: 17086 - DNA, 521 bp, Homo sapiens
ctatagggcgaattgggccctctagatgcatgctcgagcggccgccagtgtgatggatatctgcagaattcgccctttcgagcggacgggggggcaggtactaaactaagtttgcattgctttttacattacaattccagatcaatataagcacctggagaagaaccctgacacatgtagcccaagctaaagaagtagtatttttcattaagatactatcataaaataaagtgattacagctactccacattttaaaagcaacatgtttttataagaaaattgttataaatgaaaaacgtgacttcttgaagacagttttgaatgtctaaaaatgttgttatcactactgagaggaaacttgcctatgaaaaatattataatgagtttgtggaaaaaagttaacaggttaaatattttaagccatttaactatagcataatattagtcatctgagcactttcagtatcactcttattttattaaatttatccaatttattaatagaaactaggccctgatt

SEQ ID NO: 17087 - DNA, 460 bp, Homo sapiens
tacgactactatagggcgaattgggccctctagatgcatgctcgagcggccgccagtgtgatggatatctgcagaattcgccctttcgagcggccgcccgggcaggtactccctagtaacatagtctgttgggtaatactgccgctggtggaactggaagcctgggaacggcttattaactgtgcaggtgtaggagaagtggagaggttgatagacgtttgggacatacttgactgctgtgtgacacttcctgtgggagatgtagatggtcttccactggacaaacttgcctgaacagcagcaaggctctgaagctgggagctgcttaaatgctgctgctgaagagctgcagtatgcagcatcaagtgctgttgttgggctgcatacatttgctgaaggtaccttggccgcgaccacgctaagggcgaattccagcacactggcggccgttactagtgga

SEQ ID NO: 17088 - DNA, 644 bp, Homo sapiens
tgtaatacgactcactatagggcgaattgggccctctagatgcatgctcgagcggccgccagtgtgatggatatctgcagaattcgcccttagcgtggtcgcggccgaggtacaattttgcctagggccagcttgagatataactgtttgtataaggtttgtataaggttgcagtgagccgagatcatgcagagaaccctaaatgcagagtaattatcacttatagacattcatcattactatatcaactctgtgacgaggggaataatgtgctatttacattaaatgtgcagtttataaatcaaaaaatggatttcagtagagtaaagtcgggtagaatgagagatatatttaccaaaaaatcaaaaacaaaaaagagtcctattcagccctggagtctaggttccaatcatttctaggatacagatattcaatatacaatatagttcttgctgtgctaaaagaatagaattattggagacgaccagtatgtattgtttttcataatatgacctctgccagaaaaattgtgatcttgcaagttttagtacctgcccgggcggccgctcgaaagggcgaattccaacacactggcggccgttactagtggatccgagctcggtaccaagcttggcgtaatcatg

SEQ ID NO: 17089 - DNA, 595 bp, Homo sapiens
gactcactatagggcgaattgggccctctagatgcatgctcgagcggccgccagtgtgatggatatctgcagaattcgcccttcgagcggccgcccgggcaggtacaatcatgcactggggtaaagaagattcatctgctcttagctacctaccatgccaacactcctgagaaagctcacagaggcccatgatgcccacctggatctgaggacctagaaagccacaacaggcaaccataatctgggtcttccctcagccaactcccctgcataaagtgaatgaatgaaaaacccatcttatattaatcagagttctctagagaaaaagaaccaatcagatgtgtatatatagaaagagagaattattttagggaattagctcacatcattatgcaggctggtcaatcaaaaatctgtggagtgggctagcaggctggagacccagggaaaggctaaattgcagtttaaatcagaaggtcatctactggcagaattccctcatcttccaggaaggtggatctttttctaccaaggccttcagtttattagaataggcccatgaacatgctggagggtaatctgctttactcaatac

SEQ ID NO: 17090 - DNA, 472 bp, Homo sapiens
ccctctagatgcatgctcgagcggccgccagtgtgatggatatctgcagaattcgccctttcgagcggccgcccgggcaggtacctgctttgcatttcatttgctctgtgtttcagaactacactttacgacatgagaaaaactggttaagcagaatgttcctacatttagttaatatcaattctaatttaatacataaatgacttgttcaaatacttacttagactccatgtaagggaggagaaaaggggagaaaattagagtgggggaagatgaatcaaatcacatttgtagaccacactacaacaattggaagctacttatcatatttcctaagaataagttttgttggatcctaatatgggaaggatttaaaagagatttataaaggttggacagctaatttataatcccaaaattctcaaccaagttgatctcattggcagatggttgatgatctgaatgactgtga

SEQ ID NO: 17091 - DNA, 398 bp, Homo sapiens
tacgactcactatagggcgaattgggccctctagatgcatgctcgagcggccgccagtgtgatggatatctgcagaattcgccctttcgagcggccgcccgggcaggtacgagatcagaaccttgaaagtcagtgaggactaggggaataggaagtagtatttgggctgacttgaagttgaggggaaggacatctacagttgagggaaatggtatgggcagagtcgtggtcagtggttaggaaatggtgtatggtgtatatggggtagtccgaagatccactgggataaaatagaaagcagcaaatgtgcatctgacaattttggagaacctttggatatctaactgtataatttattattcatttattattattttttgagatagggtcttgctttg

SEQ ID NO: 17092 - DNA, 493 bp, Homo sapiens
tacgactcactatagggcgaattgggccctctagatgcatgctcgagcggccgccagtgtgatggatatctgcagaattcgccctttcgagcggccgcccgggcaggtacatacttcggctttttgtctgaatttatttggaagtcactggaaggtaagatagggtgtgatctgatttacagtttttaacatttggaataatcccgaactttcagaatcattactaatattttaataaaagtaagttgccaaattgatgccccatcactcctgaatactttagtgtgtacaccacaatggctgagcacttcctgacgttgctggtagtgcctgccatcaagaaagattatggttcccaggaagacttcactcaagtgtggaacaccaccatgaaagggctcaagtgctgtggcttcaccaactatacggattttgaggactcaccctacttcaaagagaacagtgcctttcccccattctgttgcaatgacaa

SEQ ID NO: 17093 - DNA, 438 bp, Homo sapiens
cgaattgggccctctagatgcatgctcgagcggccgccagtgtgatggatatctgcagaattcgcccttagcgtggtcgcggccgaggtacactctgcattatacctctaggcgtcatcagaaatttgtgcttaatattggccactcacattccctgaacaacgctgcctactaagatccctagactaacaacatgaagtcttaggggtatagtctataatcattacaacacaggaagaaaatacctggtattccattaagcggcataaacattactttagcatagtgattgcagcttacaaatacacctgactcaaattttgaatattatagtaagcaaattaagtacctgggaagagtattttgaaaccttcatcaatggaaaagtgggttggggttcctggtttgaccacgtgaaaggatggtgggagatgaaag

SEQ ID NO: 17094 - DNA, 477 bp, Homo sapiens
  misc_feature 464: n = A,T,C or G
aatacgactcactatagggcgaattgggccctctagatgcatgctcgagcggccgccagtgtgatggatatctgcagaattcgcccttagcgtggtcgcggccgaggtactaacctgcctcctatacctagctggtctcctctctgttgctcaatgttaccacagcaggctttctagaagcactctgacagtgttactccctaatatccttcagtgacttcaggaactttcaggagaaagccaaactcctctgtttggtgtactcaggattattgttttgtaggcaaggtgattgtcttcgtgtttattattcatttgtggtaagttcaccttggactttttattttgggtaaacatcacatacatcatcattaatcaggctttggggctccttttccccattattcaatgtctctctgctctttttttaaattattattatacttaaattttagggtactttnttttttttttttt

SEQ ID NO: 17095 - DNA, 605 bp, Homo sapiens
gactactatagggcgaattgggccctctagatgcatgctcgagcggccgccagtgtgatggatatctgcagaattcgccctttcgagcggccgcccgggcaggtacgcgggtggttctagcatggcatatttttcacatatctagtatgaaattatataagtattctaaatttatatcttgtagctttatcaaagggtgaaaattattttgttcatacatatttttgtagcactgacagatttccatcctagtcactaccttcatgcataggtttagcagtatagtggcgccactgttttgaatctcataatttatacaagtcatattaatatatttccattaaaaaatcagttgtacctcggccgcgaccacgctaagggcgaattccagcacactggcggccgttactagtggatccgagctcggtaccaagcttggcgtaatcatgggcatagctgtttcctgtgtgaaattgttatccgctcacatttccacacaacatacgagccggaagcataaagtgtaaagcctggggtgcctaatgagtgagctaactcacattaattgcgttgcgctcactgcccgctttccagtcgggaaacct

SEQ ID NO: 17096 - DNA, 368 bp, Homo sapiens
ttgggccctctagatgcatgctcgagcggccgccagtgtgatggatatctgcagaattcgccctttcgagcggccgcccgggcaggtacacagttttaaagaaatatgagatttgcaagaaatttccaggtttccttttgggtactggcaacgtggctcttttcaccctgaaaactgagaaaactgccagtgcattcacaacatacacagcctcttctaaccatggggggaaaaaggctgggagatgcggtagtaacagaaagttggtagtcctaggaagttatcattcaacaagggtttttgctgaaagataaatcagcccctctgaggagttttatgactcaaactgctctaaagcccccaaggcc

SEQ ID NO: 17097 - DNA, 490 bp, Homo sapiens
ctatagggcgaattgggccctctagatgcatgctcgagcggccgccagtgtgatggatatctgcagaattcgcccttagcgtggtcgcggccgaggtacgcgggtctccatatatatttgttaaatatccactaggttccaggagctatgccagacaccaggggagtgtgtgatgagcaaaagcagtcatgctccctacccttgttgagcttaccaaaaaaaaaaagaaaacagagacatgaaacaagcaatcacaatctgatgatgatagtaaagggaacaagcaaggtgtcacaggagtgcagcacaagggaattttacccaggccagggtctttgatgaattgcagagcaggggatagtgccagagaagggcatgatgtaggtcaaagactggacccctaagaagaactgactggggtgttccctaaccttgtttcagtgtttgcctctattgatcattcctccaaatgctccaagctcccgcccaa

SEQ ID NO: 17098 - DNA, 631 bp, Homo sapiens
gagtcgacgacatgtaatacgactcactatagggcgaattgggccctctagatgcatgctcgagcggccgccagtgtgatggatatctgcagaattcgccctttcgagcggccgcccgggcaggtacatattatatgcaaggttacaaaaaaaatcaatggttaatgattttttagctcaaccaagctaaaagatgtgaacaagaaattgaactcaaaacaacttaagatacaaagctcttgttactgataatgtctaataatattcatcaatttaccatatcttgttcttatattaaaatgttctatcattttcctaattattttaaagtcgattacaaaaatatatatatatattcttgtagtgccagaaaattgaatacattaataaatggggtagaatagatgaatctcccatgaagaagaattccaaataatttatgaactctgccctcaaggatatggagcagaacttcctacttctctagtgtgagctgaatagtgacttccttccaaaaattacatatggaaagggggaaaataactttgtagtggagaaatctgataaacactatctcggctaggttatcaggattaacactaacagtaataagtcacactgatagtatgta

SEQ ID NO: 17099 - DNA, 620 bp, Homo sapiens
  misc_feature 11: n = A,T,C or G
gactactatanggcgaattgggccctctagatgcatgctcgagcggccgccagtgtgatggatatctgcagaattcgccctttcgagcggccgcccgggcaggtactttgaggaagtttctgatcgttactgttttatggatgagaagactaaacctcagagaagtttattccttatccatggtcacacagctaataatcagcagaatcaggatacggtctcaggtctgtctgactcctaaatctgtgctcttaaccagtcttatgtgctgactcaatgaaattagttgggaatagaatgaaattcactcagctaccctcagccttctggatggtgagccttccttcaaggaaaacagaacaacaaatcaagatagtaactgacatctctcgggagaattactttatattactacaaagtaatataaagtgataaatccttattcacatttactgttttctcttattggcttcagtgttgcatttccccataaactagaggattaatttagaaacatgaagaaccttgtcagcctttggccaattccttttgtttgtgaggaaacaaaaacaaattggataggaaaaaaaaaaacccaaataaaaaaaaaagaaaaaaaa

SEQ ID NO: 17100 - DNA, 549 bp, Homo sapiens
tacgactcactatagggcgaattgggccctctagatgcatgctcgagcggccgccagtgtgatggatatctgcagaattcgcccttaccagcggccgcccgggcaggtacctgctttgcatttcatttgctctgtttttcagaactacactttacgacatgagaaaaactggtataagcagaatgttcctacatttagttaatatcaattctaatttaatacataaatgacttgttcaaatacttacttagactccatgtaagggaggagaaaaggggagaaaattagagtgggggaagatgaatcaaatcacatttgtagaccacactacaacaattggaagctacttatcatatttcctaagataaagttttgttggatcctaatatgggaaggatttaaaagagaattaaaaaggtaggacagctaatttaaaatcccaaaattctcaaccaagttgatctcattggcagatggtagatgatctgaatgactgtgagcctagaaagttgaaagttattttttttttgagaaaataaagacatggtt

SEQ ID NO: 17101 - DNA, 384 bp, Homo sapiens
  misc_feature 334, 335, 336: n = A,T,C or G
ggcgaattgggccctctagatgcatgctcgagcggccgccagtgtgatggatatctgcagaattcgcccttagcgtggtcgcggccgaggtacatgcttctgcatagcaaaagccccccacaattacccaggtaaataaatgctacctcttcccagcaagggccaggaagtgcaggaaaatatcaagttgcctgaggatctgaatgcaatagaaaaagttctgaaagtcaaaggtcttgcaatagaacattcaagaggtgaagccttatgattcatcaacttgggttcactcagtggtcaaaccaaaaaaaaaaaaaaaaaaaaaaagtacttnnntttttttttttttttttttttttcacaaatagcactttttatttgcca

SEQ ID NO: 17102 - DNA, 603 bp, Homo sapiens
tacgactcactatagggcgaattgggccctctagatgcatgctcgagcggccgccagtgtgatggatatctgcagaattcgcccttagcgtggtcgcggccgaggtacattaaactacatgataattaaatatgagaaaggcaaattctatttcactcgttacgtttgaccaaaacacggtaaacagcattagcttgccttttgctctcccataccacctgtgaactcttcatcagcatcagaccaaagatccttatgtaaacttgaaaaccggaagaacattaccttcagaaacacagaaatctaaaagcaaaacagctgttgtgtatacaagcaattaaaatatgaaggctaaaccttctataaacctacagaatgccatttcttagatagaacttctaacagcccttacaaaataggaggtcaccataaagttaggcaacaagtgtcactgctatatgtaaggcggacagaagatatcttgttttggaactgaatattcctaacctcatccctacaagtatttaaggacacctttgatacttggcactgcaggagaattcagtttggaaagtagaataatttaaagcctgaaatatgcct

SEQ ID NO: 17103 - DNA, 461 bp, Homo sapiens
  misc_feature 325, 326, 329, 330, 335, 337, 338, 340: n = A,T,C or G
ctatcgactcactatagggcgaatagagccctctagatgcatgctcgagcggccgccagtgtgatggatatctgcagaattcgcccttagcgtggtcgcggccgaggtactgtcataaatattgttatcttttcttgcactcgataagacattttacactactgatacggacagaggctgtatcccctcaaagtatttgaagaaactacaaaaggagaggacaaaaggatgtgaattgtaggaagaatggggagaaggggtcattggcagtcatcttggggactggctattgcctcacaaaaggatatgtgatttgatttttgcnnccnnaaaancnnanaaaaaaaaaggttcctgcccgggcggccgctcgaaagggcgaattccagcacactggcggccgttactagtggatccgagctcggtaccaagcttggcgtaatcatggtcatagctgtttc

SEQ ID NO: 17104 - DNA, 442 bp, Homo sapiens
  misc_feature 393: n = A,T,C or G
tgggccctctagatgcatgctcgagcggccgccagtgtgatggatatctgcagaattcgcccttagcgtggtcgcggccgaggtacatgatttagagacacggaggattaaagactcaacgactgaaaatttggggactaacatgtaactatgttaagaaagtaattcttgaaaaattcacttacccgggacaaagaaatgatgttaataaaacatttgttttccacttctcacctccaaaggctatagaagaaaacaaaagttgtataaatacagattttctttaaagcaaaccaaatatccatattacaaatctgatatttgccaaactgtcagacagcaatgagtacctgcccgggcggccgctcaaagggcgaattccagcacactggncggccgttactagtggatccgagctcggtaccaagcttggcgtaatcat

SEQ ID NO: 17105 - DNA, 586 bp, Homo sapiens
atagggcgaattgggccctctagatgcatgctcgagcggccgccagtgtgatggatatctgcagaattcgcccttagcgtggtcgcggccgaggtacttgaaacatggtcatttttagcccttttccttaggaaccatgtctttattttctcaataaagaaattactttcaactttctaggctcacagtcattcagatcatctaccatctgccaatgagatcaacttggttgagaattttgggattttaaattagctgtcctacctttttaaatctcttttaaatccttcccatattaggatccaacaaaactttatcttaggaaatatgataagtagcttccaattgttgtagtgtggtctacaaatgtgatttgattcatcttcccccactctaattttctccccttttctcctcccttacatggagtctaagtaagtatttgaacaagtcatttatgtattaaattagaactgatattaactaaatgtaggaacattctgcttataccagtttttctcatgtcgtaaagtgtagttctgaaaagcagagcaaatgaaatgcaaagcaggtacctgcccgggcg

SEQ ID NO: 17106 - DNA, 202 bp, Homo sapiens
tatacgactcacttagggcgaattgtgccctctagatgcatgctcgagcggccgccagtgtgatggatatctgcagaattcgcccttagcgtggtcgcggccgaagtacgcgggcactacaaatcatgtaccgtatacgctccacattcttacacatagtgtatgtgaacttaaaaaagtgccagaggacacgcttgtgctc

SEQ ID NO: 17107 - DNA, 147 bp, Homo sapiens
actactatagggcgaattgggccctctagatgcatgctcgagcggccgccagtgtgatggatatctgcagaattcgcccttagcgtggtcgcggccgaggtacccaccaccactgtatgatgctcatgagctctggcatgccatgaa

SEQ ID NO: 17108 - DNA, 467 bp, Homo sapiens
tatagggcgaattgggccctctagatgcatgctcgagcggccgccagtgtgatggatatctgcagaattcgcccttagcgtggtcgcggccgaggtacatttggcatgatctgggcctatgcggtcttacaatccctgtataaaactagacaatgaaaaacagaaaacaaaacaaacaaacaaaaaaacaagaacgaagcacctaccacatgccagctactgaggctatgaaggtattctcccgccttagaaagcccaggattaatgcaggattgcgacatttaaacagaacatttccatacagcatgagtataaatgactttcccaagtttacactgagagtaactgacacagcaaccccagcaaagtctgagctgagtcctgaataattgtataaaaaggggagagaaacagagtgaagaaagggtttcccagactctgtcccaagaaaagaaaatgagctcgtg

SEQ ID NO: 17109 - DNA, 397 bp, Homo sapiens
tacgactcactatagggcgaattgggccctctagatgcatgctcgagcggccgccagtgtgatggatatctgcagaattcgcccttagcgtggtcgcggccgaggtacaatcatgcactgaggtaaagaagattcatctgctcttagctacctaccatgccaacactcctgagaaagctcacagaggcccatgatgcccacctggatctgaggacctagaaagccacaacaggcaaccataatctgggtcttccctcagccaactcccctgcataaagtgaatgaatgaaaaacccatcttatattaatcagagttctctagagaaaaagaaccaatcagatgtgtatatatagaaagagagaattattttagggaattagctcacatcattatgca

SEQ ID NO: 17110 - DNA, 526 bp, Homo sapiens
gaattgtaatacgactcactatagggcgaattgggccctctagatgcatgctcgagcggccgccagtgtgatggatatctgcagaattcgcccttagcgtggtcgcggccgaggtacatttggcatgatctgggcctatgcggtcttacaatccctgtataaaactagacaatgaaaaacagaaaacaaaacaaacaaacaaaaaaacaagaacgaagcacctaccacatgccagctactgaggctatgaaggtattctccggccttagaaagcccaggattaatgcaggattgcgatatttaaacagaacatttccatacagcatgagtataaatgactttcccaagtttacactgagagtaactgacacagcaaccccagcaaagtctgagctgagtcctgaataattgtataaaaaggggagagaaacagagtgaagaaagggtttcccagactctgtcccaggaaagaaaatgagctcgtggagaggaatagactttctctatgaaaacagagggaacaaag

SEQ ID NO: 17111 - DNA, 370 bp, Homo sapiens
ccctctagatgcatgctcgagcggccgccagtgtgatggatatctgcagaattcgcccttagcgtggtcgcggccgaggtacgcgggcttttagtccattctctaactgctgctagaatagtcttctactgtcttcttaatgattattagaataaagatccaacattctttagtgtgatatgtaagggacctcaatgatttcacacttccatgtcagatagcttatgctactttctctactggaaatgctccctcaccttggccttctaataagcatgtacttttttttttttttttttttcccttggaccataaatttttattggcaggtcacgagaagagccgggggtaagggtcccttccttcccat

SEQ ID NO: 17112 - DNA, 326 bp, Homo sapiens
atacgactactatagggcgaattgggccctctagatgcatgctcgagcggccgccagtgtgatggatatctgcagaattcgccctttcgagcggccgcccgggcaggtactttttttttttttttttttttttttttctgcttcagatcatgtttattgtggggccagggggtaggggagaatgttatttttttctactgaaatgcacctctaactttataatatctggtaatggtgaaacagaattcacttctagtaacaagacctaagccacagaatttcagagttggaagaaaatatgctggatactttaggcccacattcag

SEQ ID NO: 17113 - DNA, 399 bp, Homo sapiens
atacgactcactatagggcgaattgggccctctagatgcatgctcgagcggccgccagtgtgatggatatctgcagaattcgccctttcgagcggccgcccgggcaggtacctacccaccatacagccaagcttgctaaaggaaaacccagtttaagatttctccaggccaagaggaggaatgagagaaggattaatttcctcaagttaacactttccttaggtccaaggaatcaatgccttaaagcacactgaagtttagaacactgtggtgacaacagacattcctacctctcctgatttccactggattagcacctttgctaatcttctcgaagccttccttggctatagagcgtgccagtacctcggccgcgaccacgctaagggcgaattccag

SEQ ID NO: 17114 - DNA, 599 bp, Homo sapiens
ctagatgcatgctcgagcggccgccagtgtgatggatatctgcagaattcgccctttcgagcggccgcccgggcaggtacctccctttacctgtttccctactggaaagtgggataatactttttacctcatggacttgtcaggaggattcattaaaacgactcgcataaagcctatgccacatggtagatgccaattcagggtctcaagaaagaacagcccacaggattgacactgaaccttaacaaagttaacaggaccaaggtgcagagagggtgctaggacagcgaagccaaagaggacccctcaaacccaacaagagctgtgcggctccctgattcctcgccagtgttgctaccgcccttggctcttcttgcatggctggctcttgagaccctggaagctgatggaggcaacgtgagaagcacatggacatccgaccttgagcttgagaggcagaggcctgagttctagttacagccccagcagtaccttggccgcgaccacgctaagggcgaattccagcacactggcggcccgtactagtggatccgagctcggtaccaagcttggcgtaatcatggtcatagctgtttcct

SEQ ID NO: 17115 - DNA, 604 bp, Homo sapiens
gaatggggccctctagatgcatgctcgagcggccgccagtgtgatggatatctgcagaattcgcccttagcgtggtcgcggccgaggtactcttgctctatcaaagggacgttccagcacttctgacatgagctttttatacctaaccttgctgggaatagaaatggattctatatgagccaagcccataccttatgcactggacttactatgaccacattcacgatgatcacagactctggaagtgctgctgacctttcagctgcggccagcgttggcatcactagagcagtgctggtcatggtggctttgatatacccactctggcgtattctcgatatttcatgaagaacggtgaattctagcacactgtgggccgctactaatagaagcgagctcgataccaaactagccggcatggtcgtcatagcaggggttgccaggctgaatggagttgcaaagggatttattataccatgatctctgcttgtgcatatgtttggagaatttcataatcaaatgtgaaaatttttgattttcatagtcagaaatcaattcaaaatatgaatggataacgtaattccttcatcatggcgggggtggg

SEQ ID NO: 17116 - DNA, 378 bp, Homo sapiens
atgcatgctcgagcggccgccagtgtgatggatatctgcagaattcgccctttcgagcggccgcccgggcaggtacgcgggtatttggcaaaggaatgaaaaaagttagaaagttgtctgtctgtgggttaggctctgcctgcaaatacttacaatctaagtcagaggttcctaaatccttctcaatgccgtttgcactggccctgaggaaagtgtgaaaatgaagactattgtagagtcttacatgaagctaaatttgttcatttatatcacttctcttttattatgagattatgtcctctgcagttttttggtattaaaatgtcttttatgaaaggatagtaagagttagatagtagtcttttttgtggaaaaaaa

SEQ ID NO: 17117 - DNA, 497 bp, Homo sapiens
cgactcactatagggcgaattgggccctctagatgcatgctcgagcggccgccagtgtgatggatatctgcagaattcgcccttagcgtggtcgcggccgaggtacccaccacatccggctaatattttttcttattttttgtagagcaggtgtctctctcgttgcccaggctagtctcagactcatgacctcaaagagtcctcccacctctgcctctcaaagtgctggaattatagatgtgagccactgtgctggaccagtgaaagctattttaaaatgtttttataattttgtgcttctcttttagtggctgctatggtctgaatatttgtgtaccagctctgcttcattcctgtctgaagaagggcagatagtttggctgctcctgtgttgtcacctgcaattctcccttatcagggccattggcctttcccttctctctgtgagggatattttctctgacttgtcaatccccatcttcccattccctcaagat

SEQ ID NO: 17118 - DNA, 532 bp, Homo sapiens
ctcactatagggcgaattgggccctctagatgcatgctcgagcggccgccagtgtgatggatatctgcagaattcgccctttcgagcggacgcccgggcaggtacacggggaggctgtgggagcggatggagctgctacagtcagcgcttggggctggcctcagcttgtagacccgagccctgcagaacaaccccccgtggcgcacgagagcagaagaaagggggcctttatgcccttttgagggaagcacacattctgcaaggccgtggaaacaaagggaggaactggttgtagccctcgtccagacgccccaaacaaacaatggagaaggaaaggcaagtgacttgtccagagccactctgtcaaaaggggacttgagtcctcagggctgttgactccaaagctgacaagcaggtggcattcttcttcaaagcagggcaagtgtaattctggaccaatgtgtgattctgagaccagaccaaaccaactgaaggagccaagttacaccctgtttaaccctgccttttaaaa

SEQ ID NO: 17119 - DNA, 503 bp, Homo sapiens
aattgggccctctagatgcatgctcgagcggccgccagtgtgatggatatctgcagaattcgcccttagcgtggtcgcggccgaggtacttctctttggtggcctcaagatgccaggatagaatttgaggtagtgggatgccccaatagctattgacccagaccagttaacagaagccacctcatgaggaaaatgagctctactctctcctacttttggattttatcccatgcagtggccaccagattgaataggtgaggcagtgtggattcacaaaagcattgagtttatatgtacctgcccgggcggccgctcgaagggcgaattccagcacactggcggccgttactagtggatccgagctcggaaccaagcttggcgtaatcatggtcatagcttgtttcctgtgtgaaaatgttatccgttcacaatttcacacaacatacgagccggaagcattaagtgaaaagcctggggtgcctaatgagtgagctaacttacat

SEQ ID NO: 17120 - DNA, 489 bp, Homo sapiens
actcactatagggcgaattgggccctctagatgcatgctcgagcggccgccagtgtgatggatatctgcagaattcgcccttagcgtggtcgcggccgaggtacatttggcatgatctgggcctatgcggtcttacaatccctgtataaaactagacaatgaaaaacagaaaacaaaacaaacaaacaaaaaaacaagaacgaagcacctaccacatgccagctactgaggctatgaaggtattctccggccttagaaagcccaggattaatgcaggattgcgatatttaaacagaacatttccatacagcatgagtataaatgactttcccaagtttacactgagagtaactgacacagcaaccccagcaaagtctgagctgagtcctgaataattgtataaaaaggggagagaaacagagtgaagaaagggtttcccagactctgtcccaggaaagaaaatgagctcgtggagaggaatagactttc

SEQ ID NO: 17121 - DNA, 461 bp, Homo sapiens
tatagggcgaattgggccctctagatgcatgctcgagcggccgccagtgtgatggatatctgcagaattcgcccttagcgtggtcgcggccgaggtacagatcctggtctggcaagtccatgggtgggaacaagcactgtgctgagatgagctccaataacaactttttaacttggagcagcaacgaatgcaacaagcgccaacacttcctgtgcaagtactagcttcataaagtatggtgcctgcagtcttagatatatttatgtttatgtttaaatacagatatatttaaaaggctacagcaacatctacccgctccttacagcctggtccagtgaggggtattccctcctctcaaagtccacctccaggcttcttgttctacttcaggtacctgcccgggcggccgctcgaaagggcgaattccagcacactggcgggcgttactagtggatccgagc

SEQ ID NO: 17122 - DNA, 481 bp, Homo sapiens
tacgactactatagggcgaattgggccctctagatgcatgctcgagcggccgccagtgtgatggatatctgcagaattcgcccttagcgtggtcgcggccgaggtacagctctaatttcaaattttattgtttcgtatttcagtatttttaggggaggaaggagagtcgtgattgatgcatcccttttcttccttgttaaaagcaaaaagaacattactaccatgcaagtgactagggtgttatatggcgctgtggaataaaagttaagcctcctcccaccccagcaaaccagaatttctggcataaacataccttatagaacagatatatcaaatctactatgaaatatttagcattctggatatctttagaagtttattctagtcctgggctgtttatttcacacatatttaaataactaaaagagatatttataaattaaattatatttatggaacaattactttacacatattaata

SEQ ID NO: 17123 - DNA, 409 bp, Homo sapiens
tacgactcactatagggcgaattgggccctctagatgcatgctcgagcggccgccagtgtgatggatatctgcagaattcgccctttcgagcggccgcccgggcaggtactttttttttttttttttttttttttcccctctatgccctacaagggagttcatcacttcagattattttaaagatgaatgtggaggcagagacattccaaagtgggagttagatagcaagtcagtggcaaggcccaggggtagagacctgggaagaccagctgcaatttgtgctgtttaatactagcagcctcgaagagagcagacccattacagctgcaggcttgttcaattattctaactttatctttaaatattgctagagcatctcataagctaaagtgctttaatatatatacc

SEQ ID NO: 17124 - DNA, 529 bp, Homo sapiens
ggcgaattgggccctctagatgcatgctcgagcggccgccagtgtgatggatatctgcagaattcgccctttcgagcggccgcccgggcaggtacatattatatgcaaggttacaaaaaaaaatcaatggttaatgattttttagctcaaccaagctaaaagatgtgaacaagaaattgaactcaaaacaacttaagatacaaagctcttgttactgataatgtctaataatattcatcaatttaccatatcttgttcttatattaaaatgttctatcattttcctaattattttaaagtcgattacaaaaatatatatatattcttgtagtgccagaaaattgaatacattaataaatggggtagaatagatgaatctcccatgaagaagaattccaaataatttatgaactctgccctcaaggatatggagcagaacttcctacttctctagtgtgagctgaatagtgacttccttccaaaaattacattatggaaagggggaaaataactttgtagtggagaaatc

SEQ ID NO: 17125 - DNA, 346 bp, Homo sapiens
gggccctctagatgcatgctcgagcggccgccagtgtgatggatatctgcagaattcgccctttgagcggccgcccgggcaggtacgtatattattcagccgagttttttattatcgttccaaattacatttggggtttcggatacgatttgaggctacgatccttttatgtttattgtagtagggccttagattgcaccgaaaaggctagggtaatagtgtctgtttaccttaccacttttattttgagttcctcggccgagaccacgcttagggcgaattccagcacactggcggccgatactagtggatccgagctcggtaccaaagcttggggtaaatcatg

SEQ ID NO: 17126 - DNA, 574 bp, Homo sapiens
gaattgtaatacgactcactatagggcgaattgggccctctagatgcatgctcgagcggccgccagtgtgatggatatctgcagaattcgccctttcgagcggccgcccgggcaggtacctggaactacaggcacatatcactacagggggctatttattgtatttttagtaaacagtgttcatcatgttggccaggctggtcttgaactcctgacctcaaatgatctgcttgccttggcctcccaaagtgctgagaccacaggcgtgaaccactgcaccagaccagataggataatttagccctctataaaattgaaaattggagaccattttctcttagaacttcaaacattattttttgtcttctggcctctattgtgctattaaaaaatgtgttataattttaattgtaaacccattgtagatcattgttcccactttaactgattttaatatcttattctctttatagtatttagtttcaatgatgtatctatattttaaacaacttataggatatttgcttatcctataagttttgataaaattcttaagtctatgacatctttgaat

SEQ ID NO: 17127 - DNA, 509 bp, Homo sapiens
ccctctagatgcatgctcgagcggccgccagtgtgatggatatctgcagaattcgccctttcgagcggccgcccgggcaggtactgtatttttaaattaaggagttttagttataatgaaattgatttgtagtctgttttgccgtaaactttttttctttaaattgttcttacagtgatatcttactatttttaactgtctggggtttctgatatggggatttcagcccctggttaatcagtcttgtccctacaagtccctgatgcagtatgtttatttgtgatgtttaaagaacatttcttggctgggcgctgcggcttgcgcctgtaatctcagcactttgggaggctgaagtgggtggatcacctgaggttgggagttcgagaccagcctgacaaaacatagtgaaaccccgtctctactaaaaatacaaaaattagctgggcgtggtggtgggtgtctgtaatcccagctattccggaggctgatgcaggaaaatcgcttgaacc

SEQ ID NO: 17128 - DNA, 446 bp, Homo sapiens
acgactactatagggcgaattgtgccctctagatgcatgctcgagcggccgccagtgtgatggatatctgcagaattcgccctttcgagcggccgcccgggcaggtacagtggatggaacccaaaaaggccacgttactcaaatgtttcagaacaaacttctcgattaaaaggaactctgatgaaattacagcttctttagaaatgaatgccagtgaaaatattattcatcaaagtccgcagggagcagccaggagcacacaggaaacacagccggaaatgcgcttacaaagacttggcgggcacgtgggctcacgcctggaatcctggcactttgggagactgaggcaggtggactgcttcagcccaggagttcagaccggcctaggcaacacagcaagactccatccatctctacaaaaaattaaaaaagttaactggtgtgat

SEQ ID NO: 17129 - DNA, 578 bp, Homo sapiens
cgactcactatagggcgaattgggccctctagatgcatgctcgagcggccgccagtgtgatggatatctgcagaattcgccctttcgagcggccgcccgggcaggtactgcttcttctcttcgttttcctccagcttccggatatggcgcaggacaggctgcagattcatatagaggcggtggctgttgctcagaagttgcaggaggtgtctggagcgcatggggcaccccgtgtagtatatgagcttccgggctgaaggcaagccatctggcaaaatctcaaatttcttacccacaaacaccaattttccaacatttgtccaggggaaatcataaagtaattgtttctcttcatctaaattctgaaaaatctgtattcccctcatggtcaatccaagagtcagcgatgcttcaatttcccttttatccttatacaatctgtagtaatgaacagcgacgtcatccagtcggacagcctctttgatatatttaagatgagcttcggaagctgttagtgcaaactgatctttgtgcatgtttggaatgtgcttcaggatgtagtccttccccctcttgga

SEQ ID NO: 17130 - DNA, 457 bp, Homo sapiens
tatagggcgattggggcccctctagatgcttgctcgagcggccgccagtgtgatggatatctgcagaattcgccctttcgagcggccgcccgggcaggtactcgccccggattgataaattctggggtgcataaccattgatgaagaggctatccctgtccaggacatagaagcccagttgggtgacaccatgggtcagctgactcagctcccagtaaagctgctgtatgtccagcccggggcccacagggtcagggtggtaggtgcaggtggtgtccacaccagtggctgccccatccttctcaggcctgagggagatcagttggcaacccaagtagaaggggcccatgctgctcttctggaacaagggtctgagcaggtgctgaaggaccccctcggtggagttgaatgtaactgagcccttgcccatatctggtgaatactggagattggagat

SEQ ID NO: 17131 - DNA, 576 bp, Homo sapiens
actatagggcgaattgggccctctagatgcatgctcgagcggccgccagtgtgatggatatctgcagaattcgcccttggccgcccgggcaggtactcgccccggattgataaattctggggtgcatagccattgatgaagaggccatccctgtccaggacatagaagcccagttgggtgacaccatgggtcagctgactcagctcccagtaaagctgctgtatgtccagcccggggcccacagggtcagggtggtaggtgcaggtggtgtccacaccagtggctgccccatccttctcaggcctgagggagatcagttggcaacccaagtagaaggggcccatgctgctcttctggaacaagggtcaggtgctgaaggaccccctcggtggagttgaatgtagctgagcccttgcccatatctggtgaatactggagattggagatggtgaagttgagtgtgagggtcttcaggtggtacctcggccgcgaccacgctaagggcgaattccagcacactggcggccgttactagtggatccgagctcggaccaagcttggcgtaatcatggtcat

SEQ ID NO: 17132 - DNA, 633 bp, Homo sapiens
tatagggagtcgactcaagctctttctttctgttcaagaaaggtgatgcctatccctacatgcaccaaagattaaagttccaaggtccacaatgtaaggcagaattctccctgagtgctgtgaccccaaacattgggggtatctttacgtgctttggttctcaaagctcatctccttacctgttgtcacaccccagtgttcctgtggagatcaaagtttcaggactggcaaagtaccagaagtctttgatatgggtctccgtagtcttcttcctactgttctttgtcctcaccctcttctttttcctcagactctggcatcagaacaagcacaggaaaggagtacagacaaagattgacttgcaacatccagaaggagctgtagagccaaagagcattgttggacacctgcagaagagttccagaccagctcctgccatccaggaagaaatcttgtgtgagaaaagatggcctgggagggagataactgaggtctcagcatctgatgctactgtgaaggtcacaaggtctgcagacaatgtggagctaggcatactgagccaacatcaggatgacccctccatacacttgtatgcccaggtgaaacctgctagactcagaagggcacagacta

SEQ ID NO: 17133 - DNA, 373 bp, Homo sapiens
agaacgttatacgactcactatagggcgaattgggccctctagatgcatgctcgagcggccgccagtgtgatggatatctgcagaattcgcccttagcgtggtcgcggccgaggtacagcacaggagcgaagacacaggtggcttgtctaatatcttgcattttcgtccttatagtcatctatgcaataggacctttgctttactggctgcccatgtgtgtccttgcaagcattattgttgtgggactgaagggaatgctaatacagttccgagatttaaaaaaatattggaatgtggataaaatcgattggggaatatgggtcagtaagcagtggtaacaacgcagagactgttgtttttttttattacaag

SEQ ID NO: 17134 - DNA, 539 bp, Homo sapiens
gacccacgcgtccggaaattttgaagaatattagaaaatatctgaaactgaatgaaaataaaacacaacatatcaaaattagtgaaatagaaataaagtagtacttagtggtaagtttataattaatttacttacgttagaattaattacttttattcggaaagaataaaggtctcaagtcaacactttaagcttttgctttaagaaatctaaaaaaaaagtgcggccgctagactagtctagagaaaaaacctcccacacctccccctgaacctgaaacataaaatgaatgcaattgttgttgttaacttgtttattgcagcttataatggttacaaataaagcaatagcatcacaaatttcacaaataaagcatttttttcactgcattctagttgtggtttgtccaaactcatcaatgtatcttatcatgtctggatccccgggtaccgagctcgaattaattcctcttccgcttcctcgctcactgactcgctgcgctcggtcgttcggctgcggcgagcggtatcagctcactc

SEQ ID NO: 17135 - DNA, 630 bp, Homo sapiens
ggagtcgacccacgcgtccgacctgaccggcacgatggctcgctcggtgaccgtgatctttctggtgcttgtctctctggccgtcgtgcttgccattcagaaaactccccaaattcaagtgtactctcgccatccaccggagaatgggaagcccaacttcctcaactgctacgtgtctcagttccacccacctcagatagaaattgagctactgaagaatggaaagaagataccaaatatcgagatgtcagatctgtccttcagcaaggactggtctttctacatcctggctcacactgaattcacacccaccgagaccgatgtatatgcttgcagagttaaacacgtcactctgaaggagcccaaaaccgtcacctgggaccgagacatgtaatcaagctctatggagctctgaatcatctggaccagtttaactccagatccggtttctaatatgctatacaatttatccacaaagtaaagaatagcaatgagcacaccatcttcttcatatcttaccttaaatattttatgcatgttttaaaaaaaattggagactaatatcctagatttccggaataataaagcttcaatgagtgttttgatcagaataattaaaaaaaaaaaaaa

SEQ ID NO: 17136 - DNA, 579 bp, Homo sapiens
actcactatagggcgaattgggccctctagatgcatgctcgagcggccgccagtgtgatggatatctgcagaattcgccctttcgagcggccgcccgggcaggtacgaatgcgatcactgtgggaaggccttcagcataggttccaacctgaatgtgcacgggcggatccacaccggggagaagccctacgaatgccttgtctgcgggaaagtcttcagcgaccactcatccctcaggagccacgtgaaaactcaccggagagagaagctctttgtgtcatccgtgtggaaaaggctccagtgagcgcgcctgctttagagacacaggatgattcagaccggaaacagacctcgtgggtgtaagaggaagcctctgtgagctcgcaccttactgggtgcaaaagaatccacggaacttgggagaagtccagttcctgtaaaaactgggaagacgaggcgttctcatcccataggaggtttgtgagaactcacgccgggggtgaaaatgtacctcggccgcgaccacgctaaaggcgaattccagcacactggcggccgttactagtggatccgagctcg

SEQ ID NO: 17137 - DNA, 405 bp, Homo sapiens
tacgactcctatagggcgaattgggccctctagatgcatgctcgagcggccgccagtgtgatggatatctgcagaattcgccctttcgagcggccgcccgggcaggtactctgctgaaattccctatctatacaaaaatgtaattcaccttttctactggatccttaaacatatttataaaaaggattttacaatccttgtctgttagtttcaacatatggctcatctgtggatctgcttctattgactattttttccctcagtcttattttttctgcttcttcctgagtcttgtaactttttattttatgccagatgttgtgtgtaaaagtgtggcaataggtatatccagaaaaggacatgtcccttccgctgttaggctgctaggattgagaactgagtcag

SEQ ID NO: 17138 - DNA, 600 bp, Homo sapiens
  misc_feature 512, 524: n = A,T,C or G
gtaatacgactcactatagggcgaattgtgccctctagatgcatgctcgagcggccgccagtgtgatggatatctgcagaattcgccctttcgagcggccgcccgggcaggtacgcgggcggaggttgcagtgagctgagatggagccattgcactccagcctggacaacagggcgaactccatctcaaaaagaaagaaaggaatgtccccacatctcctttgtgatgacagattatggaggaattgagggacatcctctgggaattaggggtgatgcttgctatctacactgagcattaccgaggccctgacaaggagcttttcactgcgggcatgagaaatgccatcttacagtaggcacactaccaatggtgtggcacactggcgtctatcttgagtcccttcataggaatcacttgaacctgggaggcggaggttgcagtgagccaagatcgtgccactgcactccagcctggaccacagagtgagactccgtctcagaaaaaaaaanaaaaaaaaaaanggtacctcggccgcgaccacgctaagggcgaattccagcacactggcggccgttactagtggatccgagctcggta

SEQ ID NO: 17139 - DNA, 600 bp, Homo sapiens
ctatagggcgaatggggccctctagatgcatgctcgagcggccgccagtgtgatggatatctgcagaattcgccctttcgagcggccgcccgggcaggtacctacacttggaataagacactgttctgaatttgtggcatagttttttttttcatattgacattaatagaggcttctattggggttaggctaaaaatcttttgtaaaaattttaaatgacactgctgatttttatccgttaattatcagtttataagctaataaaaactttggcttgatattacattctagtggttaaatttgtcataaaaggaatatgtgctgagttacttatgtattgtaatcttgagattacaattttttatttgaaaattagacaaagttggtttttaatttttatttcattttaataattgagttcaaattaaatgggaaggctaaattggaattctgtttttctctcaaaatactgtttttctattattttaaggcattccttggaggtctaaattgggcatttataggtgttgatgaaccacaccgattaaagaatgatgactcccttctgtataaaactttaatagattttaaatccaatca

SEQ ID NO: 17140 - DNA, 384 bp, Homo sapiens
tatacgactcatatagggcgaattgggccctctagatgcatgctcgagcggccgccagtgtgatggatatctgcagaattcgcccttagcgtggtcgcggccgaggtacgcgggaatcagaggattaaaaataataaaaaagcataaaggaagtccaagtgacttctgggacaccatcaaatgaaccaatttgtgtgtatggaagttccagaaggaggaaagtgagaggggcagaaagcatatttaaagacatactggctgaggccaggtgtagtggctcacacctgtaatcccagcactgtgggaggccaaagtggacggatcacatgaacacaggagttcgagaccagcctggccaacatggtaaaatcccgtctctactaa

SEQ ID NO: 17141 - DNA, 373 bp, Homo sapiens
actatagggcgaattgggccctctagatgcatgctcgagcggccgccagtgtgatggatatctgcagaattcgccctttcgagcggccgcccgggcaggtacttttttttttttttttttttttttttttctttttttttttttttttttttttttttttttttttttttttttttttatatattttttttttttttttcgaaaaaaattttatagatttttttttgggtttgtggggaaaaaatttaagttttaaagaaaaaccttttttttttaaaaaaaaaaaaaaaagggtttttgggggggatttttttttttttttgaaaaaccccaaaaaataaacccctctttttaaaaaaaaaaaaaaattttt

SEQ ID NO: 17142 - DNA, 413 bp, Homo sapiens
  misc_feature 334, 335, 336, 337, 338, 339: n = A,T,C or G
tatatggcgaatggggccctctagatgcatgctcgagcggccgccagtgtgatggatatctgcagaattcgcccttagcgtggtcgcggccgaggtacagcacaggagcgaagacacaggtggcttgtctaatatcttgcattttcgtccttatagtcatctatgcaataggacctttgctttactggctgcccatgtgtgtccttgcaagcattattgttgtgggactgaagggaatgctaatacagttccgagatttaaaaaaatattggaatgtggataaaatcgattggggaatatgggtcagtaagcagtggtaacaacgcagagactnnnnnntttttttttttttttccccctttttttttttttttttttttttttttttttttttttttttttttttttttttt

SEQ ID NO: 17143 - DNA, 692 bp, Homo sapiens
tacgactcactatagggcgaattgggccctctagatgcatgctcgagcggccgccagtgtgatggatatctgcagaattcgccctttcgagcggccgcccgggcaggtaccacacagaactgtttcatcgtcctaactactactactttttgttattctttctcctcctcctcctgcttttctccgtctccccttctccttctccttctgctttcttcttcttttttttaggaaggtcttgttatattgcccaggctgctcttaaaatccctgactcaaacaactctctcacctcagcctcccaacatgctgagattataggtttgagctatcaagcctagcttgattataatcaatctctataactttctttttctacaatgccatataagtggatcatgtaatatgtagccttttggatcttacttccttcactgaaggaaatgcatgtctgactcatgcatactgtggcgtagatcaataatttgttttttgttgttgttgacaactaggatgctattttatggatgcaccacagtttattcaactgctataaagcatctggtttatacccagctttttgcaattgaaaataaagttagcaatacacagccccaaaaaggtttgcatttaacattagttttcactttgctttagtaatgacctaggagtggatatcctggtaatatgat

SEQ ID NO: 17144 - DNA, 505 bp, Homo sapiens
atacgactcactatagggcgaattgggccctctagatgcatgctcgagcggccgccagtgtgatggatatctgcagaattcgccctttcgagcggccgcccgggcaggtactacagttttgagactacctagtcaattttctttctgtagatatacaagatctatgaagatcagtgtttcctggctctcctcatccacctccctgtccaatatatttattctgttttcactggtgcctcctcctttgcataacctgtggacactagtcttttccaggtttctactctaaattatctttgcttttcttctatatcattctttttgagtaagttcatctactcctattcattcatttgcaaacttaacaaaactatttattgagtgtctacaatgtgctaacaccattctagatgctgggaatggggtggtaaacaaaacaaagttctttccttcatggagcttatctgctaaaaggaagatagacaaataagtttataatataatt

SEQ ID NO: 17145 - DNA, 471 bp, Homo sapiens
cgactcactatagggcgaattgggccctctagatgcatgctcgagcggccgccagtgtgatggatatctgcagaattcgccctttcgagcggccgcccgggcaggtaccacctgaagaccctcacactcaacttcaccatctccaatctccagtattcaccagatatgggcaagggctcagctacattcaactccaccgagggggtccttcagcacctgctcagacccttgttccagaagagcagcatgggccccttctactcgggttgccaaccgatctccctcaggcctgagaaggatggggcagccactggtgtggacaccacctgcacctaccaccctgaccctgtgggccccgggctggacatacagcagctttactgggagctgagtcagctgacccatggtgtcacccaactgggcttctatgtcctggacagggatagcctcttcatcaatggttatgcaccc

SEQ ID NO: 17146 - DNA, 150 bp, Homo sapiens
  misc_feature 86: n = A,T,C or G
ccctctagatgcatgctcgagcggccgccagtgtgatggatatctgcagaattcgcccttagcgtggtcgcggccgaggtactttntttttttttttttttttttagagacgaagtcttgctctgttgcccaagctggactgcagtggca

SEQ ID NO: 17147 - DNA, 489 bp, Homo sapiens
ctcactatagggcgaattgtgccctctagatgcatgctcgagcggccgccagtgtgatggatatctgcagaattcgccctttcgagcggccgcccgggcaggtactgtatttttaaattaaggagttttagttataatgaaattgatttgtagtctgttttgccgtaaacttgtttttctttaaattgttcttacagtgatatcttactatttttaactgtctggggtttctgatatggggatttcagcccctggttaatcagtcttgtccctacaagtccctgatgcagtatgtttatttgtgatgtttaaagaacatttcttggctgggcgctgcggcttgcgcctgtaatctcagcactttgggaggctgaggtgggtggatcacctgaggttgggagttcgagaccagcctgacaaaacatagggaaaccccgtctctactataaatacaaaaattagctgggcgtggtggtgtgtgtctgtaat

SEQ ID NO: 17148 - DNA, 403 bp, Homo sapiens
tatagggcgaattgggccctctagatgcatgctcgagcggccgccagtgtgatggatatctgcagaattcgcccttagcgtggtcgcggccgaggtaccctctctcactgtgggtcccctgtatttcttatctcccactcaagatcagtgtttctgaggctaaaatccaagcaagtgtggcctagaggtagggggctttcttcttctacccaccctccactcacagagtcatgctctacggtaggcatggcaggctgagaatacaggggtctctcctgctctcatttcagctcacagggcagaagttttgcaccagatgaggcaagccaagaccagaggctgctgtcactgtctagtccctagcttcagagcagtgggttagagatttttttcccaggggaag

SEQ ID NO: 17149 - DNA, 594 bp, Homo sapiens
gactactatagggcgaattgggccctctagatgcatgctcgagcggccgccagtgtgatggatatctgcagaattcgccctttcgagcggccgcccgggcaggtacgcgggtcaaggaacagaaaattgtattttgagtttccttagagattccagaacattctgcagtaaataaaacaagatcaagcttatgttttaaaaaattatcagagaattagaaaatgttactggaaagaaaaccattaaaaaagtgttagaaaataaaagaaaaaaagtctcaaaagatagagcaaaaaagtcaaaaaaaatgagaaaactctgagagaaacatcaaagagaaacatcgagatagagaggctagaattccatcatgtgactaatgcgaactttggaaagatcagaaaaaatagagacaagaaactagtcaaaaaactaattgacattatttcacaacatttaacaacaaatatcaaattgggagaacctgacaagttcctagaatgatggaaaaagtcctatttctaaacacattcatgaaatttcagaacattaaagatacaaagatggtcttaaaggtgattggggaaaaaaatg

SEQ ID NO: 17150 - DNA, 485 bp, Homo sapiens
atagggcgaattgtgccctctagatgcatgctcgagcggccgccagtgtgatggatatctgcagaattcgcccttagcgtggtcgcggccgaggtactcctccttgggctgcagtaagcatgtcaggtgccacatggttctgcaggacaactgtgcgcagttgagcacgttgatctaataataacataagcccagaactactatcattaatagccttttctgtgtgcaagcttaagactttggtttgctgctggagtaagacagtgcctgcagcaggatagagtattgtgacaggataccaccaccatggggttcgacgcacttgcaaccagcgatatttataagtttctaaattactatggagagaaatgtcatcatggaccgtcaatggaattaatggccacccccaagtgcatttttctgtccagagtggggggagatatcggcaccctgagaacccgcatacccatagggccccccaaggg

SEQ ID NO: 17151 - DNA, 628 bp, Homo sapiens
ctatagggcgaattgtgccctctagatgcatgctcgagcggccgccagtgtgatggatatctgcagaattcgccctttcgagcggccgcccgggcaggtacgcgggtcaaggtcaataactaatatttaacacatattcattcacagatatgaattgagaacaaaatagcaccagaaattttcaagaagtgaagaacaaatgtagagaagcataatgataacaaatagaaaaaaaaagatgccccaaaaaacagaactcaaggaacagaaaattgtattttgagtttccttagagattccagaacattctgcagtaaataaaacaagatcaagcttatgttttaaaaaattatcagagaattagaaaatgttactggaaagaaaaccattaaaaaagtgttagaaaataaaagaaaaaaagtctcataagatagagcaaaaaagtcaaaaaaaatgagaaaactctgagagaaacatcaaagagaaacatcgagatagagaggctagaattccatcatgtgactaatgcgaactttggaaagatcagaaaaaatagagacatgaaactagtcaaaaaactaaatgacattatttcacaacatttaacaacaaatatcaaattgggaga

SEQ ID NO: 17152 - DNA, 596 bp, Homo sapiens
actatagggcgaattgggccctctagatgcatgctcgagcggccgccagtgtgatggatatctgcagaattcgcccttagcgtggtcgcggccgaggtacgtttgtctccacagagcggcaaagacacctatacaaagaacatattgttatcatatgtcaataactaatatttaacacatattcattcacagatatgaattgagaacaaaatagcaccagaaattttcaagaagtgaagaacaaatgtagagaagcataatgataacaaatagaaaaaaaaagatgccccaaaaaacagaactcaaggaacagaaaattgtattttgagtttccttagagattccagaacattctgcagtaaataaaacaagatcaagcttatgttttaaaaaattatcagagaattagaaaatgttactggaaagaaaaccattaaaaaagtgttagaaaataaaagaaaaaaagtctcaaaagatagagcaaaaaagtcaaaaaaaatgagaaaactctgagagaaacatcaaagagaaacatcgagatagagaggctagaattccatcatgtgactaatgcgaactttggaagatcagaaaaa

SEQ ID NO: 17153 - DNA, 407 bp, Homo sapiens
gcgaattgggccctctagatgcatgctcgagcggccgccagtgtgatggatatctgcagaattcgcccttagcgtggtcgcggccgaggtacaacatggatgcatgaaattttagacatgattctaaatgatggtgatgtggagaaatgcaaaagagcccagactctagatagacacgctttccttgaactgaaatttccccataaagaaaaaccagatttggagttcgttcttgaaatgtcctcaccacaactgataaaaacacatctcccttcacatctgattccaccatctatctggaaagaaaactgcaagattgtctatgtggccagaaatcccaaggattgcctggtgtcctactaccactttcacaggatggcttcctttatgcctgatcctcagaactt

SEQ ID NO: 17154 - DNA, 568 bp, Homo sapiens
  misc_feature 153: n = A,T,C or G
ccctctagatgcatgctcgagcggccgccagtgtgatggatatctgcagaattcgcccttagcgtggtcgcggccgaggtacgtttttctccacagagcaacaaagacacctatacaaagtcataggagatcaaggtcaataactaatatttncacatattcattcacagatatgaattgagaacaaaatagcaccagaaattttcaagaagtgaagaacaaatgtagagaagcataatgataacaaatagaaaaaaaaagatgccccaaaaaacagaactcaaggaacagaaaattgtattttgagtttccttagagattccagaacattctgcagtaaataaaacaagatcaagcttatgttttaaaaaaattattcagagaattagaaaatgttactggaaagaaaaccattaaaaaagtgttagaaaataaaagaaaaaaagtctcaaaagatagagcaaaaaagtcaaaaaaaatgagaaaactctgagagaaacatcaaagagaaacatcgagatagagaggctagaattccatcatgtgactaatgcgaactttggaaaga

SEQ ID NO: 17155 - DNA, 405 bp, Homo sapiens
catgctcgagcggccgccagtgtgatgtatatctgcagaattcgcccttagcgttttcgcggccgaggtaccgcagtatggttggccatgggattatccttcattacatcaaatgaggtatggtggacaatcttgtttataacatcacctgaccaagttttctccaagaattccaacaccttgtggatctcatgttttggattttttttaatatcctcgtagaagaggtagaggatccggtgcatgtcttttgcagcccaccatcctttcacatggtcaaaccaggacccgccaacaacttttccggacatgaatttctcataaaattcctctaagttctgaggatcaggcataaaggaagccatcctgtgaaagtggtagtaggacaccaagcaatccttggga

SEQ ID NO: 17156 - DNA, 620 bp, Homo sapiens
ctatagggcgaattgcgccctctagatgcatgctcgagcggccgccagtgtgatggatatctgcagaattcgccctttcgagcggccgcccgggcaggtacgaaatatcgtatcaggaattgttaaattttatcagctgcttttccagcatcagatggtatatttgacttttgatcaatatcaatagcatattaattttattatattaatagatttcccagtattgaatcaccctgcattcttgggttaaatactatttgcctgtggtaggttgttgaatgaatatgatcttatagtatttgtttatacaatcatatatatgagacaatgaatatttatgctcatgtacctcggccgcgaccacgctaagggcgaattccagcacactggcggccgttactagtggatccgagctcggtaccaagcttggcgtaatcatggtcatagctgtttcctgtgtgaaattgttatccgctcacaattccacacaacatacgagccggaagcataaagtgtaaagcctggggtgcctaatgagtgagctaactcacattaattgcgttgcgctcactgcccgctttccgtcgggaaacctgtcgtgccagctgcattaatgaatc

SEQ ID NO: 17157 - DNA, 309 bp, Homo sapiens
actatagggcgaattgggccctctagatgcatgctcgagcggccgccagtgtgatggatatctgcagaattcgcccttagcgtggtcgcggccgaggtacttgaaatgtgggtatgggcagctgaggaacttaactcaatgttttaattttattaatttgaatttagccacatatggctagccagtggttaccatattggacagaacagatgtagactagtagagtgtcagtttcagtcatttgaaccatacatttgaaccatagctgagaaccagaaaatcagtaaataaagcctctgaaacagaata

SEQ ID NO: 17158 - DNA, 559 bp, Homo sapiens
cgactcactatagggcgaattgggccctctagatgcatgctcgagcggccgccagtgtgatggatatctgcagaattcgccctttcgagcggccgcccgggcaggtactttttgttcggctgtttattgttggaagtttgagttgggatcttctgtagcatcctgcctgagatatatgagaggaaatacggaaaaacagggaactcattgccatgccattcttcaaatctaaaggtccctaggaagcccaccttctttttctacttttctgagacttcctatacttgtttgtttcgttatatatggtttttgttatttctggttttgttatacctcttcaggtaaaagagggaggacacgggaggaaggggatactccatcttggcacaactagaagtctctaagttgcttttttgtaaatataaaactctcaaataagagaaataatcaatggtggaaatgatggtacctcggccgcgaccacgctaagggcgaattccagcacactggcggccgtttctagtggatccgagctcggtaccaagcttggcgtaatcat

SEQ ID NO: 17159 - DNA, 415 bp, Homo sapiens
tacgactcactatagggcgaattgggccctctagatgcatgctcgagcggccgccagtgtgatggatatctgcagaattcgcccttagcgtggtcgcggccgaggtacttataacagtgcctggcctgaagtaagcattcagtaaaaattaccaattggttattattattttaaggcaaaaacatgggcagataatgttataatcttggggcagagaaggcctttctaagcataactctcaacctagtgaccacaaaagaaaagattaattatttgatttcataaaaactaaaagcttttacatggcaaaatctccatgataagaatcaatgaacaaatacccaagtgggggagaataattgcaatatggttgacagaaggaggattgatatcattaatatttagggatcactga

SEQ ID NO: 17160 - DNA, 534 bp, Homo sapiens
taatacgactcactatagggcgaattgggccctctagatgcatgctcgagcggccgccagtgtgatggatatctgcagaattcgcccttagcgtggtcgcggccgaggtactaatttttttttttttttttttgtagagacagggtttcctcatgttggccaggatgttctccagctcctggcctcaaattacctgcccgtctcagtctcccaaagtgctgggattacaggtgtgaaccactgtgcccggtccagtccaggagcaagttctaaccaggatcaggggtcaaggtctgggtttgtccattatcataggctaagtcagggtcagggttcagccagggatcagggctcagttcaggattggggctcagccagggtcagggctcatcttggagtcagagctgagcctggggtcaggcatcagtctaggttggaggttgggattgggacctgggggtcttggtccaagattggaggctgtgtctgggattagggttcagtctaggatgtggaccaagcctgggatcagca

SEQ ID NO: 17161 - DNA, 450 bp, Homo sapiens
atacgactactatagggcgaattgggccctctagatgcatgctcgagcggccgccagtgtgatggatatctgcagaattcgcccttagcgtggtcgcggccgaggtactttgtagagattgacttcctaagctacttaagacaacctgcaccactaagaaaaaaatgtagaaccatttggaaaaatgaaatttagtagttccaagtttcaaagaaatgtcaacattttattccattcaataaagaacaaaaccaatagtgtttttattactttcatctgaaacattccatgttttaatctgagccttgcagactttcatttggagtttgaacccgttttggttgcatttcatttttggagaacttaattaacgtgagattggcaattgaaatgcaggtgcagttttctgttaatgtcatgctgttgtttaggtaataagaaatattaagt

SEQ ID NO: 17162 - DNA, 415 bp, Homo sapiens
tatagggcgaattgggccctctagatgcatgctcgagcggccgccagtgtgatggatatctgcagaattcgcccttagcgtggtcgcggccgaggtacttttttttttttttttttttttttcctgtagtttattcaaagttgaaaaaaaaacattcattattctttaatattacatgaaaatcttgttcaagagtgaaagccaaattttatccttgcattattgccatttactactggttttcttctgacccagtcagatgtaagaggcctctaactggatccaagccacttaattaccagatctaatttgattctggacccagttcagtttttggcatgacttccaaacgcagtttggattaaaaatgggctcatagaaacttggagagctcaaaacacaaatttgcggagct

SEQ ID NO: 17163 - DNA, 443 bp, Homo sapiens
gccctctagatgcatgctcgagcggccgccagtgtgatggatatctgcagaattcgccctttcgagcggccgcccgggcaggtactttttttttttttttttttttattaagagaaagcttgtttctaagatccttttgggagcaaaggcaagtaagtattcattaaatgtttaccttcttgactttaattcacttcagcagatgataactcaggtgggattatgttatgacagtgatctgacaaggtccttgttcagggtagttactgacttttccagtatcaaccttctagatacagcatgaagctaacatccttgtgtctgaactatataaggaactggcttttttataattttatgtgttttgagtttgaggaagatccatattttgccaagatgtggcttttgagacttccgagctgaactcatttggtctgaaaact

SEQ ID NO: 17164 - DNA, 279 bp, Homo sapiens
gggcgaattgggccctctatatgcatgctcgagcggccgccagtgtgatggatatctgcagaattcgcccttagcggccgcccgggcaggtacttttttttttttttttttttttgctagtttagtgtttgcatttattttaaaaatacacaaaatagaagtttttacatcaaagtgtgataacctgacttacacattgttacatacttacctggttttgtttgcatctttctgcaaacattaaaaggagatggattggattctgatttttttgctatg

SEQ ID NO: 17165 - DNA, 613 bp, Homo sapiens
actatagggcgaattgggccctctagatgcatgctcgagcggccgccagtgtgatggatatctgcagaattcgcccttagcgtggtcgcggccgaggtaccagcctgatctctcttttccccacatttacaaacgccacagtgaagaactttgttgcaaacacatgcggctgtgaaaagaactctgtgcctaaagtcctttcatttctttgctggagtttttttgaggcagattctagaattgctgagtcaaagggcaaatgccatgtagttttgttagacgctgccaaatcctcttccatgaggctgcaatattctgcattccatagtgacgtatgagagtccttgtatcccacagcttcataaacaaagcatgacggcacatctgcacgtttaccaatcacacaggtgagaaatcttatcctagcttcacctttgtttttggtttgcatttttgtgaccagcttttttatggtataatgcacagaaggtaatgaacacattctacccacaagcttcttcctgtgcctttggaatctgctcctaccagtctgcaggcaaccacggatctgctttccgtcacgtaggaggcattcttgacaccctctgtacct

SEQ ID NO: 17166 - DNA, 564 bp, Homo sapiens
atacgactcactatagggcgaattgggccctctagatgcatgctcgagcggccgccagtgtgatggatatctgcagaattcgcccttcgagcggccgcccgggcaggtaccttgttggatgatggatatttttgtatccctataaatatccttgatctttgttctgggacacaggtatttggaaacaggtttgatccttcccaggcttgcttttcagctttgttaggctgggaccacggaaacatttagtcaaatgccagttttgctccactattgagacaaactcctgaatactttatccgatgccccatgaataatattttccactttggttgaaggaaacaggaaatattcccagccctgtgtaaaccataggaattgttccttgtaatcactttgagtggtcctttctctggtcttcagtaatttcctcacagccatgcacttattagctgaagactgaagagggccactccgcaagtctccggcgagctttctctctgcagctctctgctcaccagccctgaccctggtaaactccagctaccttggtgtcttcagaat

SEQ ID NO: 17167 - DNA, 539 bp, Homo sapiens
ggcgaattgggccctctagatgcatgctcgagcggccgccagtgtgatggatatctgcagaattcgcccttggccgcccgggcaggtacacagaaaggcagaagttgaaattagtttgaagactacattgtatattacacaatatacattgcttaagcatcagcaacgtgaagcaacatcaatgccgtttctggatggttacagcagttatgtcaaaattagatttttaaaagtaaaaaggcaaagaaatttgccacatatttaataattactcttgggaatgactgcaaattagagatgttaggtattattgattcatttattctttagcaaatgtgtattgaacacatactatgtatcaggcaaatggatatcacctcccctactatggaagaataacagtaatcagataattaaaaattatatactccagggtggcagaatgacaatcagtaatcaaaattattacaaattatatactacaaggaaaacaaagaaataaaggaataatggaggatttaccctagggtggttagaaa

SEQ ID NO: 17168 - DNA, 531 bp, Homo sapiens
ctactatagggcgaattgggccctctagatgcatgctcgagcggccgccagtgtgatggatatctgcagaattcgcccttagcgtggtcgcggccgaggtacagtgacacaatcacaattcactgcagccttgacctgctggactcaagtcatcctcccacctcagcctccaagttgctagggacaggcatgtgccaccacgcacagctaatttttaaaatttttctgtagagattaggtctcactatgttgcccaggctgctctcaaaactcctgagctcaagggatcttcccaccttggcctctcaaaatgctaagattacaggatgagccactgtgcctggcatgcttttggtttttttcttgcaatttaacaaagtggtgtcccatatatttaagtatcaaatgtataactgaattttcttgcttttcagggatctcaagggtatttccctttgcccacctcaccttttcatatttggtaaactgtatgcatttgccttcagcccaagattataaatatgaactgat

SEQ ID NO: 17169 - DNA, 458 bp, Homo sapiens
atacgactactatagggcgaattgggccctctagatgcatgctcgagcggccgccagtgtgatggatatctgcagaattcgccctttcgagcggccgcccgggcaggtacctcagccagcagaacatcgctgggacgtgcctggcctaaggcatcctaccaacagcaccatcaaggcacgttggagctttcttgccagaactgatctcttttggtgtgggaggacatggggtacccattatcttagaaaatctagtttaaactgttttctttcaccgcaaaagaattaaatgggaaaatcatttgtttatctctaagttatactaattagtagaaccaaacaaattatcttcttttaaaaaataaatcttataggaaaatagacagtccaaagtcatgtctttgaacagtggattggatctgtgccagtaatgacaaaattatttttttgacttgctt

SEQ ID NO: 17170 - DNA, 475 bp, Homo sapiens
tatagggcgaattgcgccctctagatgcatgctcgagcggccgccagtgtgatggatatctgcagaattcgcccttagcgtggtcgcggccgaggtacttttttttttttttttattttttttgaaagagataggggtctcattatgttgccccagctggagtgcagtggctacacacagggacaatcatggcccgatcattgcttcaggctcctgggctcaagcaatgctcctgcctcagtgtcctgagtagctgggactacaggtgcatgccaccacgcctggcttattttttatttttcttttcgtgtggctgggaatattacaacagagacgtgggagtccagcaacaaatggttcttaaactgcacaattaaaatgcaacagagaagggcttcctttcaatcaaaggaataaagggatgctttgcttttaaagggggccattcaaatcgatgactgcttgccttaattca

SEQ ID NO: 17171 - DNA, 206 bp, Homo sapiens
gactcctataagtactagagtgcgaattgggccctctagatgcatgctcgagcggccgccagtgtgatggatatctgcagaattcgccctttcgagcggccgcccgggcaggtactttttttttttttttttttttttttactagcacaaatggcattttattaaagaaaatctaatttacaaagctttgtaaattttaagaaaaa

SEQ ID NO: 17172 - DNA, 415 bp, Homo sapiens
tatagggcgaattgggccctctagatgcatgctcgagcggccgccagtgtgatggatatctgcagaattcgcccttagcgtggtcgcggccgaggtacttttttttctttttttttttttttttggtatttttagtagagacggggtttcactgtgttagccacgatggtctcgatctcctgacctcgtgatctgccgcctcagcctcccaaagtgctgggattacaggcgtgagccaccgcgcccggccgacttctctttacttaggtgggtatatatgccactaatttgtttgattgtgtttttcccttgtttcattttgttttggccaagtaatatcctattgattgtatgattatcacacaatttgatatccatttttctgatgggagacaggtttacttgttaactactg

SEQ ID NO: 17173 - DNA, 619 bp, Homo sapiens
atacgactcactatagggcgaattgggccctctagatgcatgctcgagcggccgccagtgtgatggatatctgcagaattcgcccttagcgtggtcgcggccgacgtacatatcagaaacgggatctaactcacagtattattataaagcatactgattacataatttactaagtaggtaaagttatctatattcattactactttgcttggaatcatttatctagattacacatcctatgtatatccaaaagctacctaatacgtctattacacctccccctacaaactacaagaaaaactcaagtcagcaactgagggtgtaacgtgcctgcccggttcaagcgattcttgcgtctcagcctcctgaatagccaagactacaggcacacgccatcacacctggcttatttttaccttttttttgtagagtcagggctttgccatgttggccaggctcgtcttaaactcctgacctcatatgattcacccgccttggcctctcaaagtgctgggataacaggcgtgagccaccgcgcctggccaaaataagtatttttaacatacaagttaagcattctagttgtattccaaaggaaatacagtatgctcaacaaaca

SEQ ID NO: 17174 - DNA, 493 bp, Homo sapiens
  misc_feature 113: n = A,T,C or G
atacgactcactatagggcgaattgggccctctagatgcatgctcgagcggccgccagtgtgatggatatctgcagaattcgcccttagcgtggtcgcggccgaggtactttnttttttttttttttttggtttttgagatggagttaagctcttgtcacctgggctatggagtgcaatgccacgatcttggctcactgcaagctccacctccccggttcaagtgattctcctgcctcagccccccaaatagctggaattagaggtgcccgccaccacctctggctaatttttgtatttttagtagagacaaggttcgtcatgttggtcaggctggtttcgaactcctgaccttaggtgatccacctgccttggcctttcaaagtgctgggattacaggcatgagccactgtgcccggcgagttcaaagtttaattcacaggatgctcaaagcagctgggaaagtgttttcttttcttaatagaatttcattt

SEQ ID NO: 17175 - DNA, 376 bp, Homo sapiens
agggcgaattgggccctctagatgcatgctcgagcggccgccagtgtgatggatatctgcagaattcgccctttcgagcggccgcccgggcaggtaccaagaaaaataaagaagaggctgcagaatatgctaaacttttggccaagagaatgaaggaggctaaggagaagcgccaggaacaaattgcgaagagacgcagactttcctctctgcgagcttctacttctaagtctgaatccagtcagaaataagattttttgagtaacaaataaataagatcagactctaaaaaaaaaaaaaaaaaaaaaaaaaaaaaaggtccgcgggatcgccagagtccctgaactctcgctttctttttaatcccctgcatcgg

SEQ ID NO: 17176 - DNA, 214 bp, Homo sapiens
acgactcactaagggcgaattgggccctctagatgcatgctcgagcggccgccagtgtgatggatatctgcagaattcgcccttagcgtggtcgcggccgaggtacattgcatgttctgacaaggtttcatttatttcatttagatgatttctgctgttttcacaggtaacctcctttctcactgccagtgtcccagttatatctatcttgggc

SEQ ID NO: 17177 - DNA, 589 bp, Homo sapiens
atacgactcactatagggcgaattgggccctctagatgcatgctcgagcggccgccagtgtgatggatatctgcagaattcgcccttagcgtggtcgcggccgaggtactttgggagcccaaggcaggagatcacttgagctcaggggttcaagaccagcctagtaacatagtgagacctcgtctctactaaaaatttaaaaaatcaggtgtggtggtggacgcctgtagtccctacttgggaggctgaagtaggaggactgcttgaacccaggagatggaggctacagtgagttatgatggcgccattgcactccagcttgagactgtttcaaaaaaaaaagctaggtaagagtaataggttaaagtgatcccactggccctcccccatccttatttttaactttgaaagttattagaaatacctcaggaaagctttcttgaaaggttatgtgtgaagtctttccctctagactagtggttctcaatacctatgcggtatcagaattacctgggaagcttaaaaacaaacaaaactccagatgcttgggcctcaccctcaaaaactgattcaactgatgtggggtggg

SEQ ID NO: 17178 - DNA, 495 bp, Homo sapiens
acgactcactatagggcgaattgggccctctagatgcatgctcgagcggccgccagtgtgatggatatctgcagaattcgccctttcgagcggccgcccgggcaggtactggcacaggactccccagaataatggaatagaataggtagtctagaactagactcagtacatgtagaaatttgtatatggtaaagtagtatcttaaataggtagggaaaagatgggccattcagtataagtttgggggacatataataggtatttggaaaaaaatttagatacataccttacaccttacagcaggatacgttgcaaatggattaaaattttaagtgaaaaaaaaaaaaataaaaaaaggtacctcggccgcgaccacgctaagggcgaattccagcacactggcggccgttactagtggatccgagctcggtaccaaacttggcgtaatcatggtcatagctggttcctgtgtgaaattgttatccgctcacaatt

SEQ ID NO: 17179 - DNA, 579 bp, Homo sapiens
  misc_feature 417, 420, 422: n = A,T,C or G
acgactactatagggcgaattgggccctctagatgcatgctcgagcggccgccagtgtgatggatatctgcagaattcgcccttggccgcccgggcaggtacacattagcctcccagaaatggttcttaaccagagtgagctgactgtggacatagaattcagaagttggatgacaaggaagctcagtgagaatgaggagaaagttgaaacataatccaaggaatccaataaaacaattcagtagctgaaagataaaatatccattttaagaaagaaccaaattaaatttttggaactgaaaaatttacttccagatctccacaatagaatctgaagcatcagcagcagaaaaattaagatgaagaaagaatctctgagctggaagaccagcttatacaatcaactcagtcagaccnaananaaaaaaaaaaaaaaaaaaaggtacctcggccgcgaccacgctaagggcgaattccagcacactggcggccgttactagtggatccgagctcggtaccaagcttggcgtaatcatggtcatagctgtttcctgtgtgaaattgttatccgctcacaat

SEQ ID NO: 17180 - DNA, 488 bp, Homo sapiens
gcgaattgggccctctagatgcatgctcgagcggccgccagtgtgatggatatctgcagaattcgcccttgagcggccgcccgggcaggtacctgcctctcagaggtattttaattgatatgtagttaatgaaggacgtggtgatgttcttagaaattgctgtgaaatgtgaattaaagaatgatcaacgggactagtgggcacagcttgtcaggcatgtttttaattagcatttatgtaactttcctatttctgggcatccttgggaagacacatttaatttaagaaattaaaaaggaagatttatttttccaaaacgcttcctgaccttcacagaataaaaaccaatgaacccgagcttcggagacgacagactgtcgggaattgtaaagatgatttgggcagcgcattgtttggcgggaggagctcagccttccactaacagaaaagtctacgtcagtatttacttagaaaatttattttaaaag

SEQ ID NO: 17181 - DNA, 484 bp, Homo sapiens
ccctctagatgcatgctcgagcggccgccagtgtgatggatatctgcagaattcgccctttcgagcggccgcccgggcaggtactaattttcttttgatgttgtatcaaattaccacacacttcatgatttaaaatagtgtggatgtattatcttacaattttgtatgttagaaacccaacacaggtctctcagtagggtaaaatcaagatgtcagcaaggctgtgcttctttctggaagctttaggggagaattcattcccttggcttttccattttatataaactgcccacattcctcggctcatgggcccaatgggaaatgctgggaagagtccttctcatgctgtcgttccctgtttttctcttccaagtttctctttattacttttaaggactcttgtaattacaacaggtccactggaatactccaggataatctcattgttttaatgttagctgattagctagctaacattaaatga

SEQ ID NO: 17182 - DNA, 217 bp, Homo sapiens
agatgcatgctcgagcggccgccagtgtgatggatatctgcagaattcgcccttagcgtggtcgcggccgatgtacattcggcctgagggccaggacagtgctttctcctggacggacctgctgctgaagaataattctgagctgcttaacagacctgggcaaacttcatcaacaagagctgggatgttatgtgtctaaagttcttttagggggcta

SEQ ID NO: 17183 - DNA, 508 bp, Homo sapiens
ccctctagatgcatgctcgagcggccgccagtgtgatggatatctgcagaattcgccctttcgagcggccgcccgggcaggtacaactatacataacaacaaacttggaagaaatcagaagaataaaaaaaagactgacagtttggaccacacatacatgcacaaaatgaaaaataataacttctattagtaaaaaaaaaaaacctcactgttataaaaagggaaatggcaaattgaaaaaggatactggtgagattataaaagattaatatcagttctcacttcttataagccaataaaataaaaattaaacaaaagagagggaccaaggataaaaataaaggtaaataacaaaaggagatacaaatggttaatgagtatggaaaatgtctaaatcccatagaaataaaacatgtacctcggccgcgaccacgctaagggcgaattccagcacactggcggccgttactagtggatccgagctcggtaccaagcttggcgtaatcat

SEQ ID NO: 17184 - DNA, 570 bp, Homo sapiens
tactatagggcgaattgggccctctagatgcatgctcgagcggccgccagtgtgatggatatctgcagaattcgcccttcgagcggccgcccgggcaggtacaaaccctgcctggaaccgcagccctgctctcagaatcaaattcctgaaagtgggcaagcggaagcggaaataagccctctcccaacgccagctgactcgatttcgtctcggtcttccccagagctggacacgaggcaccatgatcagagagacacattccctgcggacggcgctcccatcggatactggagggacgcgacactagaggcaggcagtacctcggccgcgaccacgctaagggcgaattccagcacactggcggccgttactagtggatccgagctcggtaccaagcttggcgtaatcatggtcatagctgtttcctgtgtgaaattgttatccgctcacaattccacacaacatacgagccggaagcataaagtgtaaagcctgtggtgcctaatgagtgagctaactcacattaattgcgttgcgctcactgcccgctttccagtcgggaaacctgtc

SEQ ID NO: 17185 - DNA, 472 bp, Homo sapiens
gactactatagggcgaattgggccctctagatgcatgctcgagcggccgccagtgtgatggatatctgcagaattcgcccttagcggccgcccggcaggtacagaaagatctggaagaaggcctggcagtgaatccaaggactctgggcccccaacaatagatggtagcgtaagtctggagcagcggtgtttcaccaccaaatgcctttccaggctgcccttccaacactcaggagagcatccagatccctgggcagaggctctacattcttggctttagaggtggtggcagcggcagcaggtcagagccacttctggcggtttccctcccctttttagtgcccatagtttttggatcctcccttgagttttaccagcacaagccattctttgcccctgttcacataactgagctcaagctcttgccaaacaccaacaagcaagatggttgcaacctggcaacattgaatcc

SEQ ID NO: 17186 - DNA, 568 bp, Homo sapiens
  misc_feature 180, 201, 202, 221, 227: n = A,T,C or G
ccctctagatgcatgctcgagcggccgccagtgtgatggatatctgcagaattcgcccttagcgtggtcgcggccgaggtactacacattatcaatcccaaactgattttatgactcttgtcatagaaacccccaaaacatcagggagggtaagtatattccaatatggacccaatcacnaaaaaggattacctgtgattnncaactatccaatacttatnggctantgcaatttagtctggctttggggcctgttttttacagtggaggtggctctcccatggtcgcacaatgttgtttttctaaagctatccaagaatggccacagctaatctgttggacatggggatcagtatgttcatgatctttgatgttgtataaatgctgcaatcctccttcttcaatcagcatgctgcaataccttgaagctgaaaaagaaaaaaaaacacacacaaaacaggagaaatagcttttcttaaaacacttgaaaattattccacaaaaaaatgacttctaggagccatttttttttaacttgtttgttattgatcactaacatgctacagct

SEQ ID NO: 17187 - DNA, 386 bp, Homo sapiens
cgactcactatagggcgaattgggccctctagatgcatgctcgagcggccgccagtgtgatggatatctgcagaattcgcccttaccagcggccgcccgggcaggttctaggatattgttcaccccgtcaacggaaagtgaaaaaacagcgacccctggaacctcattacatttgagggacacggtcaccgcccagtgcaggtaaagagagcagccaccagccaaccggaaaaggaatccaatgcgggaggcgggaattttccttaagagagaagaagggccttccctttgctgtaggtggagtcaatcttaacgtctgggcttacggagaaccaaatgcctaaaattctggaaggaataaataaggcgactttgggagaatgaaa

SEQ ID NO: 17188 - DNA, 621 bp, Homo sapiens
tacgactcactatagggcgaattgggccctctagatgcatgctcgagcggccgccagtgtgatggatatctgcagaattcgcccttagcgtggtcgcggccgaggtacattctattcacaaagttggggcaaggtgtggtggctcctgcctataatcccagcactttgggaggctgggtgggagaatcacttgaggccaggagttcgagaacagcttgggcaacatcatgagaccttatctcatttttttaaaagtgggcaatgataaataaaatgatactgaaatttttgaacacttcatatttcatatacgtttacaaacctgttataattggctaccaaaatcttcacatttttatccccttccagtctctacttactccttgtattttagagcatctgggttttttggttttggttttgggatttttttttttttttttttttttggtcattaccctatcatgctcttgtccttgaattttttctcaatttccttattatctccaaaaatatctgcagcacattgataaagggaatggtatagatagacaataggggaaaacatcccacaaaatattctaacaatactaaattcttatctgcagttttctcttgctg

SEQ ID NO: 17189 - DNA, 600 bp, Homo sapiens
tactatatggcgaattgcgccctctagatgcatgctcgagcggccgccagtgtgatggatatctgcagaattcgccctttcgagcggccgcccgggcaggtacgcgggactgacactataggtcacatataggaaaaagtatttccctacaaaggctgcttcctaaaattgaaagaagcaactgtttcaccggaggcacagattttaatgttgtgacacaagaaacatgaaaaagcaaggaaacaacaccccaaaagaacacaataattcctcagtagtagaccctaaagaaaataattatgaaatgcttaaaagaaattcaaaataataatcttaagaaaactcagcaagatataagagagtatagatagataattcactgaaatcaggaacacaattcattatctgaatgagattcaacagagatagatataaaaggaaacaaacagaaatcttggagctgaataattcaatgaatgaaattttaaaatataatagtgatcttcaacaatagtctagatcaagaagaaaaatttctgaccttgaaggcaagtattctaaaatactccagtagtcaaaaaaaaaaaaaaaaaaagtacc

SEQ ID NO: 17190 - DNA, 398 bp, Homo sapiens
tatagggcgatagagccttctagcatgcatgctcgagcggccgccagtgtgatggatatctgcagaattcgcccttagcgtggtcgcggccgaggtacgcggggtcttaattcttacatgcaggaacactcagcagacacacgtatgcgaagggccagagaaaccagacccaaaaaaaaaaaaataaatagaaggaggtacgcggggggccttatatatcaagagcaccataggcaagccccaacgcctatattaaggcacatttgaataaattctattaccagttcaaaaaaaaaaaaaaaaaaaaaaagtacctgcccgggcggccgctcgaaagggcaaattccagcacactggcggccgttactagtggatccgagctcggtaccaagcttggc

SEQ ID NO: 17191 - DNA, 400 bp, Homo sapiens
aattgggccctctagatgcatgctcgagcggccgccagtgtgatggatatctgcagaattcgccctttcgagcggccgcccgggcaggtactttttttttttttttttttttttttttttattttttttttttttttttttttttttttttttttttccttcatatttaactgggccaaaatttttcctagtaaattacccccaaaaggttttttccacaacaaacttgcttattcaacgctgggggggtcacccctttaagggggagccccccccaatggagaaaataaagcccatgcttttggccagcacagcatccagggaaagcccgggggggaggacccaaataaacccagggccctaaatagttaaccctggctgagggaaaatgagtttgaaa

SEQ ID NO: 17192 - DNA, 596 bp, Homo sapiens
actatagggcgaattgggccctctagatgcatgctcgagcggccgccagtgtgatggatatctgcagaattcgcccttagcgtggtcgcggccgaggtactttcccacaccagcctagagacttctgcttattttctgccgcatcctcagttcccagctctgaggtgttcacaagcatgaattcaacactgtgcgaaagaactgaagctcacgtagtccacaacttcccccagtgtggggtgtgtgccaccagtgctacacaaagtgttaggtggtgtgcaaacattttgtattttaatagttatacacttgttttaatgtgaattagaaaaaatataagaaagacaacaaaggtgttatagatactaataattaggacaagttgaaaggtttaaaaaaatacgttactaagtaaatgatggtatagagatcatttaagcatggcaaatgtaataaaaatgacacacacacaacagtttaagtaaaactgactcaatggcaaagaaaaaagatagaagcctatagacagttcctcacaacagcagcgaaatgagacactgcaactaggagtcctgcttttcgtccttggtatgtac

SEQ ID NO: 17193 - DNA, 423 bp, Homo sapiens
ggcgaattgtgccctctagatgcatgctcgagcggccgtgattgtgatggatatctgcagaattcgccctttcgagcggccgcccgggcaggtacgcggggacgcactgcggccgcgtagcgccgcgggtttgatgaacgcggttcccggggagactgtatatttttcaaatttttatcagtctaagtataagagaagaactctaacctccccaggtgatttggatatctactctggagataaagttggttcatcgttaaaatattctgatgaaagcaagcattgtagaacaccattgggcagcttattcaagcacgtaaatgtgaattgatgatgaactggattctttccatgattttgagaaacaggaaacagaagaagagttaattgaaaatgattatagagttagtaccttctgtgtgg

SEQ ID NO: 17194 - DNA, 429 bp, Homo sapiens
gactactatagggcgaattgggccctctagatgcatgctcgagcggccgccagtgtgatggatatctgcagaattcgcccttagcgtggtcgcggccgaggtactgccgtagccgctcctcccgcagctgtgccgcctccttgtcctcctcctcattgtcactgccaaacaggtcaatgtcatcatcctcgtcatcctctgctggtgtggctggcttcttggctggggcccgtgggctacggtatccggaagctacagattcagtgtgtggtggagggcgacaaggtggggacagacttgctggaggaggagatcaccaagtttgaggagcacgtgcagagtgtcgatatcgcagctatcaacaagatctgaagcctgagtgtgtgtacctgcccgggcggccgctcaaagggcgaattccagcacact

SEQ ID NO: 17195 - DNA, 528 bp, Homo sapiens
tacgactcactataagtatagggcgaattgggccctctagatgcatgctcgagcggccgccagtgtgatggatatctgcagaattcgccctttgagcggccgcccgggcaggtacattgttttttagtttttattatttttcagcaatttgggttaaaacctgaattgtatcctggctacaacaaatctctaaaaaaggaccagctttttaattttattcatgatgtttttagttgactgccccaagggaatttttttttttacttctgaaatacaaatttgctttttaccaaaattcttatgtatagaatacttctactatgcatctgttttacttctgagaaaagtaaattcatgctactacaacatgtagagatgacagcagctatagatcaaccactttgacaggacgatcgaggatcgagccttcccagtgatgagggataccttgacactcagattttgttcatcaatgcgttcaagaagaaagatttttgatcaaaaggggggaaatgagaaaagaacttt

SEQ ID NO: 17196 - DNA, 577 bp, Homo sapiens
agatgcatgctcgagcggccgccagtgtgatgtgttatctgcagaattcgcccttagcgtggtcttgtccgaggtacctaaggtgatggggaactccattcagataataaaattctctttcagctagagaagttaacaggaataaatatatgaacaaaaaagctgcaaggataaatgtggagaaaatgatgagaattagctaacatttttaagtttttttaaactttcttcccctcagttgtacagttaaaaaggaaaaaaaaagaaaaccagcttggcatttcagaattgtcttattcctttttagtgtattggaccgagttccagatgggccagtatttattgctatgtgttttctagtgggagtaatggatgcagttagctttgctgcagcaatgactgcatcttcttctatcctggcaaaggcttttccaaataacgtggctacggtattgggaagtcttgagactttttctggactggggctaatactaggtcctcctgtaggtggctttttgtatcaatcctttggctatgaagtgccttttattgttctgggatgcgtcgttttgctgat

SEQ ID NO: 17197 - DNA, 383 bp, Homo sapiens
tacgactactatagggcgatttgggccctctagatgcatgctcgagcggccgccagtgtgatggatatctgcagaattcgcccttagcgtggtcgcggccgaggtacagatggagtctcaccatgttggccaggctggtccttgaagtcctaacctcaggtggtccacccacctaggatctcccacagtgctaggattacaggcatgagtcaccatacccgtccgcttatatgcagtgatcaattctaatattagctacatgaatattattaacctacagaattccatgtactatgacgaaatgaggtgtgagagacacctgtaaccagcacaaaatcagcttaagatacacaccttaacgctgggtacttattcaaacaggc

SEQ ID NO: 17198 - DNA, 405 bp, Homo sapiens
atacgactcactatagggcgaattgggccctctagatgcatgctcgagcggccgccagtgtgatggatatctgcagaattcgcccttagcgtggtcgcggccgaggtacgtggctgagcctagaacttgaagcttccaaactcagtgctcgctttaacgcagctccctgaaacgttttggaatcggatggtctcaggttgaactttgcagttttcctcaactgtaaaatggggatgacagtgcatgagggtgttgcgaggatcaaatgaaataaagcatggtaaacatccaaaaaaaaaaaaaaaaaaaaaaggtcccaggaacaacaggtggcctaaatacatgaaaagcagtgtaagctagtgacactaaagccagtcttgtattactgtatttttgacagaa

SEQ ID NO: 17199 - DNA, 621 bp, Homo sapiens
gggccctctagatgcatgctcgagcggccgccagtgtgatggatatctgcagaattcgccctttcgagcggccgcccgggcaggtacgcgggtgcaagggatgcagttattaaatgctgttcttctctcctaagttgaaaatcagaaacttgtggaaacagagcacgttgaatgtttggtacatgagggaattcttatcaaagatcatgcacaatccatgccacttaaatgggttttagctgaggttttgctcatgttactctgaatttctaaggacagatcagtgaccctcttagcctgagcagaaagcatattcttcccactgcagtttcctacacaatttagtcctgattagatgaggcattatagcagcacctgaagtagagccttcagaatccactgcccttttcatcaaaggctatttggttccaccctcaggattggcatactcacgagacatttcacaatcctaatgcatactttaggttacttaattaaccaagccatatggctctgtcaagaactttatttcaagtcaaagcaaaaaaggcctttatgcggaacaaaaacaaaacataaaagccctatccaaataaaaagatttccaaaaaaaaaaaaaaa

SEQ ID NO: 17200 - DNA, 531 bp, Homo sapiens
atacgactcactatagggcgaattgggccctctagatgcatgctcgagcggccgccagtgtgatggatatctgcagaattcgccctttcgagcggccgcccgggcaggtactgttgctatttttccttgtgggtgattgattgatggatgagtgctgacacttcaatgaagctatttcgactgccatctcaatccgatgatgtgaggggtatattttctgtccatgcctcattacttcagaatgacattcctggaacttcatttactttttccctccttccccgaagcgccatattttttcccatctaggttatgcatgccataaaaaaagcaatttgctattatatgtggcataagggcaacactttccctaggaggtaaataagaagtttttttttttttttaatcccaatgttgaatttagggatcatgtcaaaatttccaaaacaattccaacaggcagcctccttgagaaatggtgaggaagagatatttggtttcattttgtcagtgttgagattaaaaaaaaat

SEQ ID NO: 17201 - DNA, 417 bp, Homo sapiens
ctctagatgcatgctcgagcggccgccagtgtgatggatatctgcagaattcgccctttcgagcggccgcccgggcaggtacaaaaggccaaaaaaaaaaaaaagtcccaaaacaccaagagacaaaaggtaggaggaaagacaagaaaggaagatacaaaaggagcaggaagaaacttacttagggacaagattagcatcatacatacctaagagtggggggtgagggggaagaacaagatgagagagcatttaaaagcatttacccacacagccctggtgataattggattggaatcaaaacaaacacagcatgagattattaagaggttttaaaaggcaacagtggtgtggactggttattgccagtgttaagagagaaataaacttgggttttaggcaccagagattggagca

SEQ ID NO: 17202 - DNA, 582 bp, Homo sapiens
tatagggcgaattgtgccctctagatgcatgctcgagcggccgccagtgtgatggatatctgcagaattcgcccttgagcggccgcccgggcaggtacaaaacacttattgagctttcatggccactgtaaggggcttgcagaatagcctctttgcaacccagagaattaatctgattcccctttcctcatcccacgcctacctccaacttcaattttacaggagtagtttcccaagagtccccaccccctccatttgcataattaacgaagtggaaggactggagagttcactgtggaaaaacgtgtggagtaatctgcttgagacaactgtgttttagaaaaattcatgctgaagtgtggtctcatgtctatgtggctctccatgaacttttttttttggtattttggcaatacagtcttggtctgttgctcacgctatagtgtagtgggacaatcatagcgcactgcaaacttgaactcctgggttcaagcaatactcctacctcagcctcccaaagctctgggattacaagtgtgagccacagtgcccagccgggaaatgaaaattaaagctacaatg

SEQ ID NO: 17203 - DNA, 360 bp, Homo sapiens
tagggcgaattgggccctctagatgcatgctcgagcggccgccagtgtgatggatatctgcagaattcgccctttcgagcggccgcccgggcaggtaccgagcaaatgccaggtctagcaaacataatgctagtcctagattacttattgatttaaaaacaaaaaaacacaaaaaatagtaaaatataaaaacaaattaatgttttatagaccctgggaaaaagaattttcagcaaagtacacgggtctatttggcagtgaccttgctctggagacgatgatattccttcagcctgagggaattgatgttgatgaacccggtggcatcagttggctcataatcaccctgcacgttcatgc

SEQ ID NO: 17204 - DNA, 450 bp, Homo sapiens
tacgactactatagggcgaattgggccctctagatgcatgctcgagcggccgccagtgtgatggatatctgcagaattcgccctttcgagcggccgcccgggcaggtacgtgagccagtcatccatacgctaaggcctagttgagaaaaacctttgattcaggatggctgggttactaaccttgaaatgtaagagatctggttttgaatgtaaaagttgcaacacacaaacggaagtcttaaaaactttttgctctggtcagttacaggtggatccccaataatctgtttttggttttctgatggaaataatagaattaggggaaatcaaatctggttggtaggtgtctacagtattagaagagggtataagggcactgtttaacactaagttctaatacttccagaaactgtgcattccagatctacatactaaatgctcttatcattt

SEQ ID NO: 17205 - DNA, 493 bp, Homo sapiens
ggcgaattgggccctctagatgcatgctcgagcggccgccagtgtgatggatatctgcagaattcgcccttagcgtggtcgcggccgaggtactggaaacaaaaataaagttttctacattattttcagccttgggttatggtatagtttctttgtgtttgtcgtaatatgcacattgtccttctaggacctgtcaccccaccatggagaaaagagtcttttggttctttttaacataagtgattagtttaagagtatgctgaggagccactgggcttaaagaaggatgtaaataagacccaaatacatagggaccaggcgctgctttctcatgttcacaaaagcagtcctccaccactgaactcccccgcgtacctcatttattatttgtgaaataattacaacttctgagtgccattatgagttaagagagaaggggtctagcttttggactttaagttctccccatctaccacctgcctgctacccatca

SEQ ID NO: 17206 - DNA, 592 bp, Homo sapiens
  misc_feature 382: n = A,T,C or G
ccctctagatgcatgctcgagcggccgccagtgtgatggatatctgcagaattcgccctttcgagcggccgcccgggcaggtacggtaacctgggaggtggaggatggagagttgatatcaccagagttgggaagaaggcaggaaaacaagtagaagaaataaaaaactataattatgaatgtttttagttcagtgttctagggcctatttgataccataaattacttttaataatgaattggaataattagacaaagattaaataacgttctgagcttcctgccaaggaaagtaggtaaatgtgtaattgattctggagaaatttttgttcaagatatcataactatcttaaataactgatgccctgaaggttttgaattntagaagtttttgatgtatttttaaagcgatgcacaaataattgaaagttgaaatagtaaataatactgttttccaaagtttaattaaaatactttataaagcttaaaagaatctcaagttacttaaatttgaaaaaatgagtttatattgtgatatatgccattaccattgcatttcaacaagttataagaatgatataggtcgggtggg

SEQ ID NO: 17207 - DNA, 572 bp, Homo sapiens
  misc_feature 492: n = A,T,C or G
ctatagggcgaattgggccctctagatgcatgctcgagcggccgccagtgtgatggatatctgcagaattcgccctttcgagcggccgcccgggcaggtacttacctcatcaggtggtggtgatgaactgtttatttatttaaaaaaaatttttttgagacagggtgtagctctgtcacccaagctggagggcattggcatgatcacagctcactgcaaccttgacctcttggactcaagcaatccttccgtctcagcctcctaagtagctaggaccataggcatgcaccaccacacccagctaattttttattctttgtagagaaggagtcttgctatgttacccaggttagtatcaaactcttggactcaagcaatcctcctgccttgacctctcaaagtgttggcattacaggtgtgagccgccatggccagcctatgaactgtttaagtggatgaccagcctaggcaagaaagatgccatctccgggnatataaaaaaaaaaaagggttccttggccgcgaccacgctaagggcgaattccagcacactggcggccgttactagtgga

SEQ ID NO: 17208 - DNA, 540 bp, Homo sapiens
ccctctagatgcatgctcgagcggccgccagtgtgatggatatctgcagaattcgcccttgagcggccgcccgggcaggtacgcggggttttataaaactgcatttaaaaaaagatctatgaccagatattctcctgggtgctcctcaaaggaacactattaaggttcattgaaatgttttcaatcattgccttcccattgatccttctaacatgctgttgacatcacacctaatattcagagggaatgggcaaggtatgagggaaggaaataaaaaataaaataaataaaatagaatgacacaaatttgagttttgtgaacccctgaacagatggtcttaaggacgttatctggaactggagaaaagcagagttgagagacaattctatagattaaatcctggtaaggacaaacattgccattagaagaaaagcttcaaaatagacctgtggcagatgtcacatgagtagaatttctgcccagccttaactgcattcagaggataatatcaatgaactaaactttaactaaaaattttt

SEQ ID NO: 17209 - DNA, 625 bp, Homo sapiens
  misc_feature 22: n = A,T,C or G
gactcactatagggcgaatggngccctctagatgcatgctcgagcggccgccagtgtgatggatatctgcagaattcgcccttagcgtggtcgcggccgaggtaccgccatctctagctatctgtagcaccaaccctctgctactactgctgccttctcccgtgggatgaatgtggtgaattgtgcattcatatttcaggaatgattaacattcaaggttggagatattccagaatcacaatttgattttataagatgctttgcagaaatatcttagataatctaaggattcctaatggcttatacaaaagaactaaagtgagtgtgactatccagcttcttctatttctccctactctttcgcttcttttgttcccttcatgattctgctgcatgccaggaatggactcacatgacttctcaaactcctagccaatgtaaacatagtgaaacataataaagtggtaaaaagctatctggacctagatttgagtctaagccctgtcttttcttgtgaacatttgaacaaattccctcacctctctgagttacaatgtccttatgtatgaaatggggtgataactaataaagagctattgtgagagttaaatgaaatgatacatgt

SEQ ID NO: 17210 - DNA, 424 bp, Homo sapiens
  misc_feature 93: n = A,T,C or G
tactggcaggttcttttttttttttttttgggaatgaaaataaatgttttttattaggcagaatccagatgctcaaggcgccttcataatatncccccagtttagtagttggacttagggaacaaaggaacctttaatagaaattggacagcaagaaagcgagcttagtgatacttgtgggccagggcattagccacaccagccaccactttctgataggcagcctgcactggtggggtgaattctttgccaaagtgatgggccagcacacagaccagcacgttgcccaggagcctgaagttctcaggatccacgtgcagcttgtcacagtgcagctcactcagtgtggcaaaggtgcccttgaggttgtccaggtgagccaggccatcactaaaggcaccgagcactttcttgccatgagcct

SEQ ID NO: 17211 - DNA, 584 bp, Homo sapiens
tacgactcactatagggcgaattgagccctctagatgcatgctcgagcggccgccagtgtgatggatatctgcagaattcgcccttagcgtggtcgcggccgaggtactttttagaaacttctgctttgcaggtggcatacaaagcacagtatgtctacccttggctttctctggggaagatgcattcttttcagcagtatcttgatgagcactgccttcttcctctggcttctttttgttgttagaaactttcattttcttagagggtagaatttcatcgatgattacaggagtggcacatctcttggctttcatttttacatgatgcttttctttctgttccaaatccttctgagcagaaagcctaagagatcttctctgaggctgggctggagtttttcttgatatggctgcctcaacttccagggaagaacaagcatttgacggaatggattgttccacaagattttctttttctgcctctttgtagtaagtgttgtcaactggtttcaaaggtgtgacaatagcttgctgaagattagcctttctcaaaggagttttgccctgaaaaagccctccagtt

SEQ ID NO: 17212 - DNA, 351 bp, Homo sapiens
  misc_feature 106: n = A,T,C or G
actatagggcgaattgggccctctagatgcatgctcgagcggccgccagtgtgatggatatctgcagaattcgccctttcgagcggccgcccgggcaggtactttnttttttttttttttttttttttacaacattgccctttgatgtccccatgagggccaggcccaggcagaacccatcccattttatccttaaactcagaaggaaatttgtctaaatattaaaggattaatatgggaataaaaaatgaaccttaaaccccgccactgatacacaagctgtctctcttagagttcaatgaacacttcaggagagtatttccaacaatatttagatattggaatatctaa

SEQ ID NO: 17213 - DNA, 394 bp, Homo sapiens
ctcactatagggcgaattgggccctctagatgcatgctcgagcggccgccagtgtgatggatatctgcagaattcgccctttgagcggccgtccgggcaggtaccatggagggcaagagaaggacttgagaaaatggtagctgaggacaatgagcgctaccgattagtgagcgacaccatcactcagaaggtggaggagatcgatgcagccattctgcgatcacagcagtttgaccaagcagctgatgctgagttatcctggattactgaaacagaaaaaaaattgatgtctctgggtgacatcaggcttgagcaagaccagacttctgctcagcttcaagttcaaaagacattcaccatggagattttgagacacaaggatattattgatgac

SEQ ID NO: 17214 - DNA, 441 bp, Homo sapiens
actactatagggcgaattgggccctctagatgcatgctcgagcggccgccagtgtgatggatatctgcagaattcgcccttagcgtggtcgcggccgaggtacttttttttttttttttttttttttttggtcaaggcactaaataggttgcttgatcaaacttaggttattttattttattttattttattttacattactttaagttctgggataaatgtgcagaacatgcaggtttgttacataggtatacatgtgccatggtggtttgctgaacctatcaacctatcatctaggttaaacttagttttgaagggctacttatgtcatgtccatattacaagtaagatcaattactaagttggaaagaacaattgatggaaaaaaacatgaatcattatcaaatgataggtcatgcttttacagccattgcaagtgat

SEQ ID NO: 17215 - DNA, 399 bp, Homo sapiens
  misc_feature 252: n = A,T,C or G
gactcactatagggcgaattgggccctctagatgcatgctcgagcggccgccagtgtgatggatatctgcagaattcgccctttcgagcggccgcccgggcaggtacaatttgctctcatgttttaaaaaaaaaaaggtaaatgtaacttaatagttttgtaaatgggagagggggaatctataaactataaatacagttattttattttttgcacatttttaaggagaaaaaataaatattcataacatangacaaaaaaaaaaaaaaaaaaaaaaggtacctcggccgcgaccacgctaagggcgaattccagcacactggcggccgttactagtggatccgagctcggtaccaagcttggcgtaatcatggtcatagctgtttcctgtgtgaaatt

SEQ ID NO: 17216 - DNA, 234 bp, Homo sapiens
  misc_feature 84, 153, 163: n = A,T,C or G
ctctagatgcatgctcgagcggccgccagtgtgatggatatctgcagaattcgcccttagcgtggtcgcggccgaggtactttnttttttttttttttttttttttttaccttatctctttaatttgtctaatttttggttaagagaatgggnaaccttgatncccgctgcgctggatgtaacctccacggttacctggactgattacttcccacaagttcacacgtttcctca

SEQ ID NO: 17217 - DNA, 562 bp, Homo sapiens
actatagggcgaattgggccctctagatgcatgctcgagcggccgccagtgtgatggatatctgcagaattcgcccttagcgtggtcgcggccgaggtactagtaagaaattggcactcaaaggaaaaatgcaaaagtattttcaacatgaaaacacaagacagtggaattgaaactttcggataaaacactgtaacccagttagctctgtgggggtgtggggggagagatgggccctcaacatttctgcagataacttttttcccctaaattcatctaaattacctatcattatcccaaacaggcacttcaaactattaaactaaaacacagatcttaatctagttatgactattcttcaagaactcatgtgagtatctttctttagaaagaaagtttcattttatgacagctattcaagttctcaatgtagaattcatgctatccagtattaacacagaagttactaaatataaattcagctttaaggtaactgctgggttctaaaaaacattactacacaattatcaagaaaccattactttttgacaaatggaaatcg

SEQ ID NO: 17218 - DNA, 883 bp, Homo sapiens
  misc_feature 321: n = A,T,C or G
tgtgaatcgactactataggggcgaattggccctctagatgcatgctcgagcggccgccagtgtgatggatatcttgcaaaattcgcccttcgagcggccgcccggccaggtccaattcgtgtcaatttggccaaaccaatgagaattaaggaaggctcttccaggccagtttggcagatgatgactggttgaagaagttttttgggaagacgcttgaagagaataaagaggaagaagggtcaaagcctcccaaagcagagacccaggaggtgtacctcggccgcgaccacgctaagggcgaattccagcacactggcggncgttactagtggatccgagctcggtaccaagcttggcgtaatcatggtcatagctgtttcctgtgtgaaattggattcccctcacaattccacacaacataacaaccggaagcataaagtgtaaagcctggggtgcctaatgagtgagctaactcacattaattgcgttgcgctcactgcccgctttccagtcgggaaacctgtcgtgccagttgcattaatgaattggccaacgcgcggggagaaggcggtttcttattgggcgcttttccctttcctcgcttactgactcgttggctctgtctttcggtttctgcaaagcgtattcagttacctcaaagtcggtttttccgttttttcactagagtctgggattacagtaggatgatatcttttgtacaaaagggcttcgtcatgtcacgttatctgtataataggcgcggtttctggtgattttacctagaggtctcgtgccttcgtagagtggtctagtagatattgccgctcattataggtggtgttgatacctctcctagattattaatactttcctgttctcttc

SEQ ID NO: 17219 - DNA, 388 bp, Homo sapiens
tagggcgaattgggccctctagatgcatgctcgagcggccgccagtgtgatggatatctgcagaattcgcccttagcgtggtcgcggccgaggtacttgccttcatgttctggtttggttttccctttttctgctgctcttggcagcagcctggtcatcatctgcttgtgggagtgggaaatgggtattttagacccaacacaggttctaaatttaaaacaaataataattggaacaaataaaggttcttgtacgtgttagttcttttgttttttgttttttttttattgcgaagtgctctctctttccttgaaactttgtgagaatattttgagggttgagttgaggttgatttcgtccacagaggttttgtctttgctttttgcct

SEQ ID NO: 17220 - DNA, 461 bp, Homo sapiens
ctactataggggcgaattgggccctctagatgcatgctcgagcggccgccagtgtgatggatatctgcagaattcgcccttagcgtggtcgcggccgaggtacgcggggatgatgctgaagctatccttgctgcagacttcgaaattggtcactttttacgtgagcgtataatcccaagatcagtgttatattttactggagaagctattgaagatgatgatgatgattatgatgaagaaggtgaagaagcggatgaggaaggggaagaagaaggagatgaggaaaatgatccagactatgacccaaagaaggatcaaaacccagcagagtgcaagcagcagtgaagcaggatgtatgtggccttgaggataacctgcactgtaatagcctaaacacaactcttatttacttacagccttatgtttttgtattttcttggtagactaggtaattttttttt

SEQ ID NO: 17221 - DNA, 653 bp, Homo sapiens
gcgaatagggccctctagatgcatgctcgagcggccgccagtgtgatggatatctgcagaattcgccctttcgagcggccgcccgggcaggtacttttttttttttttttttttacagtagagatggggtttcaccatgttggccaggctggtctcgaactctgacctgaggtgatccgcctgccttggcctccccaaagtgctgggattacaggcatgagccaccgcgcccggccccgccaaagcaactcttattcactgttggtgggaatgaaaaacgatgcagccactttggaagacagtttggcaatttcttataaaactaaacatcccgcgtaccagacactccaagtgcttagaaaattaaattaactcatttaattttactaaaaacctgtgagataagggactattgttatgcccatttttcagatgaggaaagtgggacagagtttactgagtggtagagatgagatttgaacccaggcaagcaggctctaggtctggactcttggtcactctgctctgtccccacactaagccaggtatctgggcttgtgtacctcggccgcgaccacgctaagggcgaattccagcacactggcggccgttactagtggatccgagctcggtaccaagcttggcgtaatcat

SEQ ID NO: 17222 - DNA, 253 bp, Homo sapiens
atgcatgctcaagcggccgccagtgtgatggatatctgcagaattcgcccttagcgtggtcgcggccgaggtacttatttttttttttgggggagggttttgagacggactctcactgtcactctgtttgttggagtcaatgggtggtctcggctcactgcaacctccgccttccgtgttcaagcgattctacaaccttcacctccctgggactacaggcacgtgcaccacacctggttaatttttgtatttt

SEQ ID NO: 17223 - DNA, 693 bp, Homo sapiens
  misc_feature 13: n = A,T,C or G
acgactactatanggcgaattgggccctctagatgcatgctcgagcggccgccagtgtgatggatatctgcagaattcgcccttagcgtggtcgcggccgaggtacaaatggctgtaaaatgcagtggtttaagataataactttggggtctatcagactgaaatcaaactcagctctgtaagtgtatgcacttgagcctctataaatctaattttcttcattggaaaatggatataataatagcttatacttcaaaagattaagaggataaaaggaaataatgtaagtaatgtgtttaacagagttcctgacacattgggcatactcaataaacacaacttggtttttttaaaaaaaggtatcaatttttaaattagaaagcatggtatcagataagttactcagcctctctgctccccctttacctcatatgtaatgacagtaataactaccactagcatcatggtacctgcccgggcggccgctcaagggcgaattccagcacactggcggccgttactagtggatccgagctcggtaccaagcttggcgtaatcatggtcatagctgtttcctgtgtgaaattgttatccgctcacaattccacacaacatacgagccggaagcataaagtgtaaagcctggggtgcctaatgagtgagctaactcacattaattgcgttgcgctcact

SEQ ID NO: 17224 - DNA, 579 bp, Homo sapiens
atacgactactatagggcgaattgggccctctagatgcatgctcgagcggccgccagtgtgatggatatctgcagaattcgcccttagcgtggtcgcggccgaggtacattgaaacaacacctcttacgataaaaggaaaaagtgtgaaaatatgtgttccaggaaagaaaaaagcacagaacaaagaggtgaagaaaaagactttagagtcaaagaaagtatctgcatctgccttaaaaagagatgcagatgcttcaaaagctgttgaaattgttacttcaacttctgctgccaaaactggacaagccaaggcatctgtagccaaagtaaacaaatctacggggaaatcagcaagttctgtaaaatctgtggtaacggtagctgttaaaggtaataaagcttcaatcaaaacaggtaagactattggggaggagagattttattggttattctttatttatgttttaaattcgtataataatttttagcatctaatacttgaagagtttagtagatatttccttgatatttaaaacctgacccattttgttggaattttatctttggcagataggcag

SEQ ID NO: 17225 - DNA, 588 bp, Homo sapiens
  misc_feature 110: n = A,T,C or G
acgactactatagggcgaattgggccctctagatgcatgctcgagcggccgccagtgtgatggatatctgcagaattcgcccttagcgtggtcgcggccgaggtactttnttttttttttttttttttttggaaaaataagcataattaaaaactgttagatttggaactttctatttcataattaacacatatttaacaaatatttataaagcctataaatctacaaaaaaagataaatagtgtgctgtgtaatgtttggttatatgtctgtttggattttatagccttactaatatatactataaaacattaaaaaattcagaatacaaagctgtcttccagagaaagctttgtttagatacactaaaaaaaaaaatcaagtaacttataaataataatgtgctttacaaataacttcaatgtaatagatgacaattgtatattttagccaaatccattattctgcttatacaattcatcttctaatttttaccagtggaaagaaactttggagacaggtgaaaatgaatttagcagacatattcctaaaaactggagagttttattttttattaaacctttttta

SEQ ID NO: 17226 - DNA, 578 bp, Homo sapiens
tatagggcgaattgggccctctagatgcatgctcgagcggccgccagtgtgatggatatctgcagaattcgcccttcgagcggccgcccgggcaggtaccaggccaacgggctcggtttctatggttttctggggagacggctgagggaaggtcggcttccggcgtcgcgctgcaaacgtctcgctgaggtcatcctttacggcaggcgtccgcgtcgctagctagtcgttctgaagcggcggccagaggagagtcaagggcacgagcatcgggtagccatgcctttcttggacatccagaaaaggttcggccttaacatagatcgatggttgacaatccatagtggtgaacagccctacaagatggctggtcgatgccatgcttttgaaaaagaatggatagaatgtgcacatggaatcggttatactcgggcagagaaagagtgcaagatagaatatgatgatttcgtagagtgtttgcttcggcagaaaacgatgagacgtgcaggtacctcggccgcgaccacgctaaggggcgaattccagcacactggcggccgttactagtggatccgagc

SEQ ID NO: 17227 - DNA, 624 bp, Homo sapiens
tacgactcactatagggcgaattgggccctctagatgcatgctcgagcggccgccagtgtgatggatatctgcagaattcgcccttagcgtggtcgcggccgaggtacggacttcctttaggatctcaggcttctgcagttctcatgactcctacttttcatcctagtctagcattctgcaacatttatatagactgttgaaaggagaatttgaaaaatgcataataactacttccatccctgcttatttttaatttgggaaaataaatacattcgaaggaacctgtgttatcacagtaacccagagctgtatttggctagcaatctgcctgtatctctcactattatctaaaagaaaccttccaatgcttctgttgatctcagtattgtcaggggaacagagaagttgggaaaagattactgaaatataccttttgcatttctttctagagtagctcccatatatggagatgggtgattctcttgatgccaccttcagatccttttattctccagaataattcttaacagtggttcaaatttcctttcataccttgaagtatgtggttagtagcctcaattctccattaattaaaaatgtgggctgggcgtgggggctcatgc

SEQ ID NO: 17228 - DNA, 286 bp, Homo sapiens
aggcgatggtgccctctacatgcatgctcgagcggccgccagtgtgatggatatctgcagaattcgcccttagcgtggtcgcggccgacgtaccgccagctctatgatctccacagggctccccgccaaacccggtctgttaaagcgcgccgactgggctacaaagccaagcaaggttactttatatataggattcaggttcgccgtggtggccgaaatcgcccagttcctaagggtgcaacttacggcaatgcctgtccatcatggtgataaccagctaaagttt

SEQ ID NO: 17229 - DNA, 213 bp, Homo sapiens
ctactatagggcgaattgggccctctagatgcatgctcgagcggccgccagtgtgatggatatctgcagaattcgccctttcgagcggccgcccgggcaggtactttttttttttttttttttttttttttgggattacttgatactttggttttggttttggcctggcatggatttcctgaatactctgattttgggtttgattctggtttg

SEQ ID NO: 17230 - DNA, 583 bp, Homo sapiens
ggcgaattgggccctctagatgcatgctcgagcggccgccagtgtgatggatatctgcagaattcgccctttcgagcggccgcccgggcaggtactacaaccaattccaagttttaatttttaacaccatggcgccttttgcacataacatgctttagattatatattcccactcaaggagtaaccaggtcgtccaagcaaaaacaaatgggaaaatgtcttaaaaaatcctgggtggacttttgaaaagcttttttttttttttttttgagacggagtcttgctctgttgcccaggctggagtgcagtagcacgatctcggctcactgcaccctccgtctctcgggttcaagcaattgtctgcctcagcctcccgagtagctgggattacaggtgcgcactaccacgccaagctaatttttgtattttttagtagagatggggtttcaccatcttggccaggctggtcttgaattcctgacctcaggtgatccacccaccttggcctcccaaagtgctagtattatgggcgtgaaccaccatgcccagccgaaaagcttttgaggggctgacttcaatccat

SEQ ID NO: 17231 - DNA, 487 bp, Homo sapiens
atacgactactatagggcgaattgggccctctagatgcatgctcgagcggccgccagtgtgatggatatctgcagaattcgccctttcgagcggccgcccgggcaggtacatggcagttgggacttagcgaaaatttgggctggcctggatcatgaaaagaagctgctatcttcttacctccagagagtcatcagcattcaccatccaacagtcagtccaggtggccacaatcaaaaacccagcagagaaaaaggcaaagaagcaagcgatgtattgaagaagatccctcattgtggcaagcagcccatcaggatggcaacatgggcagacaccagccctggccccacttaagtggcgggtgtcagtcttctgtgtttctggtacttgctaagggcatgatcctcttatgaatccaccagaattcagccatcaacaaaaatcccgtgagtggaaaattgtatggatctctaacatgacataaaaacg

SEQ ID NO: 17232 - DNA, 327 bp, Homo sapiens
  misc_feature 86, 109, 110, 159: n = A,T,C or G
ccctctagatgcatgctcgagcggccgccagtgtgatggatatctgcagaattcgcccttagcgtggtcgcggccgaggtactttntttttttttttttttttttattnntttttttttttttttttttttttttttttttgtttttttttttttgggnaaaaaggatttcacccattcttttttttacccacccccggcccttcttttgggggggattgatccctttccaaatgggcccttccttttcaaggggggttttaaaatggtcccttggttttacctccccccctccaccaaaattaaggttttccccccccccggggaa

SEQ ID NO: 17233 - DNA, 684 bp, Homo sapiens
ctatagggcgaattgggccctctagatgcatgctcgagcggccgccagtgtgatggatatctgcagaattcgccctttcgagcggccgcccgggcaggtactctgatgttaggtgtgcatatgtagttaaatttattataacatttctttgaattgatcctatattattatatagtgaccgtctttgtctccttttacagtctttgacttgtttattttatctggtataagtatgtgtaaccttgttctttttagtttctaattacattaaatatgttatttttcttccttcacttttggtctatgtgtgtctttataggtgacatgggtttcttataggcagtatgtaattaagtcttgctatttaaaaatttattgaaccaaagtatattttttaattggagaatttagttcatttacatacattttattattgatagataaggacttactactgccattttgttacttgttttgtggttgtcttgtaattcctgtcttcttttctttctcactgtctttattcatgcttaagtgagtttctccagcagtatgttttaatttgttgcccgcgtacctcggccgcgaccacgcttaaggcgaattccagcacactggcggccgttactagtggatccgagctcggtaccaagcttggcgtaatcatggtcatagctggttcct

SEQ ID NO: 17234 - DNA, 531 bp, Homo sapiens
actcactatagggcgaattgggccctctagatgcatgctcgagcggccgccagtgtgatggatatctgcagaattcgcccttagcgtggtcgcggccgaggtacaaaatggctgttaaacagatttttgaattaaacttaaaacctcttgcaatttttaaaagcgtgtatcaatactttaagaaaactttgttgtttacacagactctggtcctgtatcatgtgatccctgacagcaacattttaatttttagaatatcgtataaacaatttcttttcaatctcaggggacccagtcacacatgaaacttttttcatgagaccagtgcttttaaaaaaccctcttctatttggttagttcttttcaccacttttttaacccgccaccctccaagtcttaatttctggaaattattcttttttaaaaaaattattgaaacaacaatttttaaattatgggtaaaattttaccacatacaattttttacacaaaaattatttccttttaaattcatattttgattaatagaca

SEQ ID NO: 17235 - DNA, 758 bp, Homo sapiens
acgactactatagggcgaattgagccctctagatgcatgctcgagcggccgccagtgtgatggatatctgcagaattcgccctttcgagcggccgcccgggcaggtaccccttagatggctcttgaaaattatcccctgtgccttctgtgttacacctgcatcttagttaaataaagtgtagattcttaacctttttttgtgcgatggatcccttagctgtctggtgaagcctatggatcccttctcagaataacatttttaaacctataaataaaatgcacagaactaagtgcacttacatttgagaatgattatcaagctattaaaaaccaaatttgtgatacagtaatacatagttctttagtaggtcattaaatatcaaaagctactggtggtggtttcattgctgtaatttcaaagtagtgatgagtgttacaaatgatattttgcaatacctgtaacagctagatgtaacatggtataaaattatctgtgatctcttttggtaacaaagtcacagatacatctactgctgttgttattatctaaagttagttgaaaaaagtaattttgtgttcacatctcatttaatggacccactgaatctttgggttaaagtaattgaactagaaatgtaaatagttatactttcttactttaataaaaatataacttattaaaagcttaaggctgaatacagtggctcttgcctataatctgagcactttgggagtccgaggtaagaggatcacttgag

SEQ ID NO: 17236 - DNA, 453 bp, Homo sapiens
  misc_feature 126, 127, 128, 152, 154, 155: n = A,T,C or G
agggcgaattgggccctctagatgcatgctcgagcggccgccagtgtgatggatatctgcagaattcgcccttagcgtggtcgcggccgaggtacgcgggtattccctttgttactgcagacaatnnntaatagaaatgtttaaaggtgccntnntttatcaaataaggtcagatgttctcaccctgtttgaaatggaaactaggagtggattccattaactctcttgttcacacaacacacacacatgcacacacgcacacacacacacatctcagtggttggccagagcattcaacaaataagatttgctccaatccctgtttttagctatgaaaatatgagcagagagttcatgtgatatgtagacaattaccgggccaatctgaatacaaccacccaactcatcaaccaactaactaactagccacaatctttgagcactcaagtaatt

SEQ ID NO: 17237 - DNA, 296 bp, Homo sapiens
  misc_feature 224, 226, 229, 230, 231, 255: n = A,T,C or G
ccctctagatgcatgctcgagcagccgccagtgtgatggatatctgcagaattcgcccttagcgtggtcgcggccgaagtacgcgggatacaaactttgacttttgtgaaaaaaaaaaaaaaaaaaaaaaaaaaaaaaaaaaaaaaaaaaaaaaaaaaataaaaaaaaaaaaaaaaaaaaaaaaaaaaaaaaattatttttaaaaaaaaaaaaaaaatataaantnggnnnttttttttttttttaatattttgngaaaaaaaaaaaaaaaggttataaaactaacgctgaaaaaa

SEQ ID NO: 17238 - DNA, 464 bp, Homo sapiens
  misc_feature 157: n = A,T,C or G
tatagggcgaattggggccctctagatgcttgctcgagcggccgccagtgtgatggatatctgcagaattcgcccttagcgtggtcgcggccgaggtacgcgggggtgtccgcacagaggtctgcgaggagagagagtgtcttcattctttccgccntcttgattctttctcactgaccaagactcagccgtgggaaatatgagtgagcttgtaagagcaagatcccaatcctcagaaagaggaaatgaccaagagtcttcccagccggttggatctgtgattgtccaggagcccactgaggaaaaacgtcaagaagaggaaccaccaactgataatcagggtattgcacctagtggggagattgaaaatcaagcagtgcctgcttttcaagggcctgacatggaagcttttcaacaggaactggctctgcttaagatagaggatgagcctggagatggtcctg

SEQ ID NO: 17239 - DNA, 664 bp, Homo sapiens
  misc_feature 365: n = A,T,C or G
ctactatagggcgaatagtgccctctagatgcatgctcgagcggccgccagtgtgatggatatctgcagaattcgccctttcgagcgccgcccgggcaggtacgaaatgaccaccatgaaaacctgaacttgcatcaccagctccaccatagccatgtcctcccatacctgaaaacacaatttgccaagattataaactattacagatacaagtagggaagtatacatacatactatacaaggtataaagctctatataggaatgcactgaaatttgtctgaattaactctatacaagtttcctatattaccactaagagcttgcaaagcaaatactaaaatttacctatgaataaaaatgtctntaatatttattttacctcttccatctctcattctgtcatcaaagccatcattcccatagccgtaattattatagccaccatagtcatcaaaacctccataacctgtgtaatttaaggagaaacacatgactacacactttccagagataaattgtataatttagtttacaaaaacattttgtggtaacagtctgtgtaacttgattgcaagtttgcaattcccaacttaaaacctatgaaaaaagcagtcaacgtgatggaaatttaaaatctcagaaagttaattaagttcagacatg

SEQ ID NO: 17240 - DNA, 366 bp, Homo sapiens
gagcggccgccagtgtgatggatatctgcagaattcgccctttcgagcggccgcccgggcaggtacttttttctttttttttcttggcctaagacaaaccacagaactttattcggggaaatgattgcttttttcgtggcaaactataggctcctatgaaatactcttagagatgtttatcctgagctagttttttttgcggggaggtgctgtttacatgctatgttaaaaataacacgcaggagttcacgagacattgatgatgatgacggttattcatataacgagaatactgatattggcatacatcatgggagcggaaaaaagaaattgatgggggcgatgacaatacgatcgaaactgctt

SEQ ID NO: 17241 - DNA, 353 bp, Homo sapiens
actatagggcgaattgggccctctagatgcatgctcgagcggccgccagtgtgatggatatctgcagaattcgcccttagcgtggtcgcggccgaggtacatgccaaaaatgcctgaataagctttgaaatgtaaaacaaaaatgttttaaagaagtttaattgcagttggcaatatatacttaatatggcttgcattttttttttttttttgaaataacattgtgacttaaaggatttctaggtcctaaaatctggaaaagggatctggaaaaatttggactccatgagtagtttggattcaatctctctgcgcttttttttttatttataacatgaatgggatggggggtg

SEQ ID NO: 17242 - DNA, 499 bp, Homo sapiens
  misc_feature 442: n = A,T,C or G
acgactcactatagggcgaattgggccctctagatgcatgctcgagcggccgccagtgtgatggatatctgcagaattcgcccttagcgtggtcgcggccgaggtacagccacaaattcatgtcttcccagaatctatgaatgtggccttatttggaaacagaatctttgagatgtcatcaagttaagaagaggttacactggattcaggcaggccctaaatccattatgacctgtgtatttgtaagaaaaattcagacacagagattcagacacacagaaacattgttatgtggtggcagaggcagatattgtagtgatgcatttccatgccgggaaatgctaaggatggctgttaataaccagaagctgggagacaggcatggggcagattcccactctggatgcccaagaaagaatcaaccctgccatcctcctgactntagacttctagactcctgaactgtgaaagaacatctttgtattgccttaaatcaccc

SEQ ID NO: 17243 - DNA, 458 bp, Homo sapiens
agggcgaattgggccctttagatgcatgctcgagcggccgccagtgtgatggatatctgcagaattcgcccttagcgtggtcgcggccgaggtacacatttaatgatggtccagtattctcaaaaaaaaaaaagcctactttaaagactaatcaataaattaaacaaaacaaaacccacacaatgttcccccaccccccaaagctagcagttgtgagttgtatttatattgaaacctaatgttttaaaaatagttctggttctccaaccaccccatcccaccccgggtatgcagcaatagtaatcaattattttattctaccctcccaaaagattattaatccagtgttctttagctttttaaaatataaattgggaaagtgttattaataagcttttttaaaaggcatattcttctataacaagaatggcattttaaccaatcaataaaagtttttg

SEQ ID NO: 17244 - DNA, 333 bp, Homo sapiens
  misc_feature 284: n = A,T,C or G
gactcactatagggcgaattgggccctctagatgcatgctcgagcggccgccagtgtgatggatatctgcagaattcgccctttcgagcggccgcccgggcaggtactttggtagtgagagagtttcactatgttgcccaggatggtctcaaactcctgagctcaagtgatctgcccatctcagcctcccaaagtgctgggattacaagtgtgagctactgcatccagcctgcaattggttttgactgcacaagaaaaaacataaaaaggttccatgaaccttntataacctcttataattgttacgggtttatttctttcctcaatttctat

SEQ ID NO: 17245 - DNA, 595 bp, Homo sapiens
  misc_feature 18, 521: n = A,T,C or G
cactatagggcgaatggngccctctagatgcatgctcgagcggccgccagtgtgatggatatctgcagaattcgcccttagcgtggtcgcggccgaggacagatgaacagactcaggttgtgattgatgcaggagcactcgccgtctttcccagcctgctcaccaaccccaaaactaacattcagaaggaagctacgtggacaatgtcaaacatcacagccggccgccaggaccagatacagcaagttgtgaatcatggattagtcccattccttgtcagtgttctctctaaggcagattttaagacacaaaaggaagctgtgtgggccgtgaccaactataccagtggtggaacagttgaacagattgtgtacgcgggtccaagcaataccataaaagcttgaagcaaaacagcttttaaatcaaaagcaaaatttttaaaattaaaacttttaaagaaaaaataaattaggcatgaaaatagtaattatctctgtaagtttcaagtagataagacttangtgattatgtaaagaataaatggaaataatggacataatcaatggataaactaagcaataaaagaaaaatctga

SEQ ID NO: 17246 - DNA, 383 bp, Homo sapiens
ctactcactatagggcgaattgggccctctagatgcatgctcgagcggccgccagtgtgatggatatctgcagaattcgcccttagcgtggtcgcggccgaggtacgcgggcatttggctttctctctcttttctcccctccttcttcccaggcctggctggctggtgcctggacaccatttggggctctgagagggttgtggctgccagcccccagtcgccaatgcctggtcaggcactcgtatcccctgtcctgttcaccatttctcctttctcattgttctcataatatgtcctgcttaaaactcctaggttctaaaggacgcccctgcattgcttgcctttcctttgctagacaccagagagaggctaaaaagtgaaat

SEQ ID NO: 17247 - DNA, 513 bp, Homo sapiens
ccctctagatgcatgctcgagcggccgccagtgtgatggatatctgcagaattcgcccttagcgtggtcgcggccgaggtacaccaccaaagaccaataataaaaaagaaggttccagggagggcatgacctctgaaattccccatgatctttgggtgtttaaatcccattttcccttctgagtcattggtcatccttggtctcagtagatcaggcacgttagaactgtggcagaagagataagaatgaagcagccaaaattgagcctttgcttcttaggtaatgctgaaaagtttccaacttggtctgtttactcaacactttatttttcccactttgccagcttaaaatcagacagcggctgggcttttgttgttgctgtttctgttcttttgatcccaaagccccatgaaaaataaaccgtgtgttggatgggatctcgccacgtctcgcattgggtggggggaggaattattaaacttgggtccctagtcgcttctttgggaaaacgaa

SEQ ID NO: 17248 - DNA, 603 bp, Homo sapiens
gcgaattgggccctctagatgcatgctcgagcggccgccagtgtgatggatatctgcagaattcgccctttcgagcggccgcccgggcaggtacatttgtggctgatccaggcgtttgcccatgtagctggaatctttatctccgaggcatggtactggatgacagggatagtgccccaggccgagcttcctcttaaaccactattcctgacagtcccggtgactgatgaggcttcagagactccaccactcgctagttccaacacagcaagaatttttttaaaaaacaaaacaaaacaaaaaacacacaccaaaggaaaaaaaaaaaagggcgaggagtgagatctgtagaaaaaaacacccacacacagccttcccagatcttgcctggcttcccccagctgccggggtccacttgggatgaggcagtttgttctctaaccaggctgtctgtagtgatgtcaattgccagcgttcgtaaagggggaaaaaaaatcaaagtccttttagcacaactccgaatccttgcagatcagcttcctgtctcttggttgtctctttccccaccttaaagaaaaagaaaaaagagagagagaaagagaa

SEQ ID NO: 17249 - DNA, 289 bp, Homo sapiens
  misc_feature 139: n = A,T,C or G
gactactatagggcgaattgggccctctagatgcatgctcgagcggccgccagtgtgatggatatctgcagaattcgcccttagcgtggtcgcggccgaggtactttttttttttttttttttttttttgtcctttttnaaaaaggtatcaaaggcctttattgatttaattttctttcaacttatcaatgctatcacaaattctaaggaaacaggacttggccaaatatccatttccccaccatgaacatggggcttgggaagacagatcttcggctacatcatatat

SEQ ID NO: 17250 - DNA, 420 bp, Homo sapiens
  misc_feature 116: n = A,T,C or G
aatacgactcactatagggcgaattgtgccctctagatgcatgctcgagcggccgccagtgtgatggatatctgcagaattcgccctttcgagcggccgcccgggcaggtactttntttttttttttttttttttttttttaaaaagtaagctaaagtccttgtggtaggcagcctctaacaaatagaatatagcagaaataatgagataccacttccaagattaggttataaaaattcttaggcgtcaccttctctcactcatttgctcagagggaggcagatgccaaactgtggtgccctttggagaggcccatatggcaaagaactgagaaaagcctctggccaacagccagcaacaattgatttcttcagtccaagagccccaggaaactgaaccctgcaagagccacatgaatga

SEQ ID NO: 17251 - DNA, 565 bp, Homo sapiens
tactatagggcgaattgggccctctagatgcatgctcgagcggccgccagtgtgatggatatctgcagaattcgccctttcgagcggccgcccgggcaggtacaaaacacttccagcaaaaaatctttatttttaagaaaaaagtatttattctcattttctattttcgtcataaatttttattctttccagtggaaccaaaacttgaacttccttttggttgatacatgcccagcaagactgatcaaagaaaagatggcacagataaacagtgttagaaatgaaaatggaaacataaccatagataactacagattaaaaagataaaacattatacaaataaattgaaaattgcatgtaatagataaatttgtggaaaaatttaacttgccaaaattgatgcaagaataaataacttgaataagattcaagtaaattggatttgtaggttaaaattttctcaaaatgaaaacaccaggatcagatggagttattccagacaacctagtaacaaattatctcttggactaatccacaatatgttaaaaaaaaaaaaaaaaaaaaa

SEQ ID NO: 17252 - DNA, 408 bp, Homo sapiens
gtaatacgactcactatagggcgaattgggccctctagatgcatgctcgagcggccgccagtgtgatggatatctgcagaattcgcccttagcgtggtcgcggccgaggtacaaatggagttttaccatgtgggccaggctggtgttgaagtcctaaccttatgtggtccacccacctaggactcccacagtgctaggattacaggcatgagtcaccatacctatccgcatatatgcagtgatcaattctaatatgagcttcatgaatattattaacctacaaaattcactattatcttatgacgaaatgaaggtcgtggagagacacctgtaaccagcacaaaatcaggttaagatacacaccttaacgcttggtacttattcaaacaggcatattcttagcaaata

SEQ ID NO: 17253 - DNA, 448 bp, Homo sapiens
  misc_feature 40: n = A,T,C or G
gcgaatgagccctctatatgcatgctcgagcggccgccantgtgatggatatctgcagaattcgccctttcgagcggccgcccgggcaggtacttttagtagagacggggtttcaccgtgatagccaagatggtctcattcctctgaccttgtgatccacccacctaggcctcccaaagtgctgggattacagacgtgagtcaccgcgcgcagcccgcttttgtggtttcaaaagttctcacttgctaatgtcatgttagagatacaaatttaaagtatgctaaatcagtggagagaacagatgtgtaatctataaacacttatacatgcactaaaaaagttgactactatactgaagtcccttataaaaagggagttgttaaggataaagaatgtggattgggctctttcatagactccatacaggtatatttaattagcaaaggag

SEQ ID NO: 17254 - DNA, 617 bp, Homo sapiens
tacgactcactatagggcgaattgggccctctagatgcatgctcgagcggccgccagtgtgatggatatctgcagaattcgccctttcgagcggccgcccgggcaggtacgcgggtgctgtgttttaatataatatccaggatttttatatgcatttagcagaaggatgtctactctgcctttgtagaagtgtctcactgatttttacatatttttccagcacacaaacatacacaatttaactcaaagcatcttagcagagcttaattaaatggatagatgtctgttccctttgctggacgccaagaatacaaaaaagaacaagtgacaattttctccgtcttagggagaagagacagcagaagtgtaaatgatccctaaagagtgatagatgttatcatgaagccacaggaggggtgccaggctgcacaaaagagacactggatgcttcttggtagtagaggcagtggcttcccagccttggggctaaggcttgtagggtgaattggaacttttcagatgagcaaggcaaagaagggaccttctaacattccttggatggaacatttttgacattttcccatttacagctacttatattttctacaagtgtcact

SEQ ID NO: 17255 - DNA, 414 bp, Homo sapiens
  misc_feature 106, 131: n = A,T,C or G
actcgagcggccgccagtgtgatggatatctgcagaattcgccctttcgagcggccgcccgggcaggtacactttataataaaattgtagtaaaatactgacattngatagttagtaaacaaagtatgagncatgtaaaaatcatgttatagcatgtaaaatttaattagaaaattcatagctcacaaaagtacctcggccgcgaccacgctaagggcgaattccagcacactggcggccgttactagtggatccgagctcggtaccaagcttggcgtaatcatggtcatagctgtttcctgtgtgaaattgttatccgctcacaattccacacaacatacgagccggaagcataaagtgtaaagcctggggtgcctaatgagtgagctaactcacattaattgcgttgcgctc

SEQ ID NO: 17256 - DNA, 542 bp, Homo sapiens
atacgactcactatagggcgaattgtgccctctagatgcatgctcgagcggccgccagtgtgatggatatctgcagaattcgcccttagcgtggtcgcggccgaggtacaaaacacaacaaaggttcaaacatcgagatgttcccttagcaaggctgaaaatttcagtctctggtatttggaatttaggctgcagtccttgtttttggatggatcactgggtgtgtggcacagtccatgcttttaaccagatttgaacagaagaatggccacttggcccaggtagaagtagatgaagtgtttggtttcatgtgtcacataactaccgaagttcctccccacgatgcaatgccaggtgggattgtacatcattaagaggtcggtatgtcttctcatttactggcaacttctccaactcatctagagtttccagaccatctattacctttccaaatacggtgtatttcatgtccaaatgtggctgtttgccataggtgatgaagaactgagatccattggtgttcgggccattattagccatag

SEQ ID NO: 17257 - DNA, 681 bp, Homo sapiens
  misc_feature 623: n = A,T,C or G
acgactcactatagggcgaattgggccctctagatgcatgctcgagcggccgccagtgtgatggatatctgcagaattcgcccttgagcggccgcccgggcaggtaccgccgttcttgtcaccaccaactggttttgtaacagttgcgagaaccttctccttctttttcttttcaaccttggatttagcggctgagtacaagccagaattactatttctttgacttattattagcttggcagttgcttttgatttgattgttttatgacatggtatactactatatttactcagtttgaaactattcatttctacacactatttttaaaaattgcctactaggtgaaacattacaataaaactacctgtgctgaaatttgggggaagtttaggtcctttaaaaaaacatattaatcattgactacatctatgataaaagtgcttattttggtttactaagataatgcagttggtggaaatgataaacgttttaagtgttaacatcctttgaatgcgttggatttcagagaataaacattttgtaaaaatcacttggtaaggattataaacttaattactgcacttaaaatgaaacattactttttttaaacaatgtgtcacanatgtaggtctgtattacttgtatgcttgtgtgacttactgttagtccagctctaaaaa

SEQ ID NO: 17258 - DNA, 451 bp, Homo sapiens
catacgactcactatagggcgaattgggccctctagatgcatgctcgagcggccgccagtgtgatggatatctgcagaattcgccctttcgagcggccgcccgggcaggtactgaagtctaagaaatctacatcaaactgagccttttgttttcttttcaaaaacagatgaaaaaaccatctaccttctcttcaatgagactgagaatttacactaacaatatcttaaacctggttgcataataactgcagcttcctcagcccctggtttacagatcctgaatcagtcggtgggaggtttgggaactggaatcgagttgtcctccttctgttctggtgtctttgacctgctcccttccttttgtggctacttctctgtgtcccctttgctgccccttctctttctcttactcctctccctttcccccttgccttttctttcctttgccctt

SEQ ID NO: 17259 - DNA, 651 bp, Homo sapiens
actatagggcgaattgggccctctagatgcatgctcgagcggccgccagtgtgatggatatctgcagaattcgcccttagcgtggtcgcggccgaggtacactctagcctgggtgacagaacaagatcttgtgttaagaagaaaaaacaaaaaacaaaaaaaacttgccaatctgatgtgtgtgaaatggtagttcatcagttaaatctgcattttccttgatttttaagtatcttattttatatttgttctattggtcatttaagttttctttttggcaaatttcctatgcatattcttattttttctgttggattgtctttttcttattcatttaagtttgttgtggtgcctttcattgagcaaaaactttaaattttaatgtagcaaaagatatatttttctttataatttgtatgttttatgacttgtttaagaaattcttccttaatgtctcaacatattcaatttaataatgtatcagaaactgtcctgcccgggcggccgctcgaaagggcgaattccagcacactggcggccgttactagtggatccgagctcggtaccaagcttggcgtaatcatggtcatagctgtttcctgtgtgaaattggtatccgctcacaaattcacacaacatacgagccggaag

SEQ ID NO: 17260 - DNA, 458 bp, Homo sapiens
atagggcgaattgggccctctagatgcatgctcgagcggccgccagtgtgatggatatctgcagaattcgcccttagcggccgcccgggcaggtaccctaatcgttcaacagcaatcatctttggggaatgggcattttggtaggtaaagtgtggtggacgtccttattattatttttgagacagtgtcttgctctgtcccccaggctggaggtcagtggcacaaatctcagctcactctaacctgcacctcccgggttcaggtgattctcatctcagcctcccaagtagtgtgaactgagggcgtgtgccaccacgcctggctagtttttgtatttttagtagagacagggtttcaccatgttggccaggctggtctcgaactcctggcctcaggtgatccacccaccttagccgcccaaggtgttgggattgcaggcatgacccaccatgcccggc

SEQ ID NO: 17261 - DNA, 533 bp, Homo sapiens
ctcactatatggcgaattgcgccctctagatgcatgctcgagcggccgccagtgtgatggatatctgcagaattcgcccttagcagcggccgcccggacaggcacaaggtaaattgtctcacctgtggaagtttcagaggattctgttgaatttgaatcagtgccagttttgtctttcaaggtctgtttggcaagagtctcatctctattttcttgtgcttggctttcttcttcttcctcttcaccatctggaaactcccactgagactcgcccgactgttcgtttacatagaaataccgtctatgatcccaagtttcagatgtccggactccaagtgccagtttcttcccggtgttcagccactgtgttaatcctccacagggaactgctacacgctgctctggtgaggcattccaccggggcaatttcctacccgggagtgctctttggatcgcgtcactcgggctggccggagtccgcctcagggatgctccacaggggaggcctaagccgcctaaggggctgcctcggc

SEQ ID NO: 17262 - DNA, 448 bp, Homo sapiens
ccctctagatgcatgctcgagcggccgccagtgtgatggatatctgcagaattcgcccttgagcggccgcccgggcaggtaccagggcaagtcagacatcatgtcagcacccttttctcttgtctttcttgcacatattcagagacaaatagtttggaaatgggcactttagaagctaaacctggaattctgccacctgtaatacaggccaagcaatgaaatctgataggtggagtcaaaggggtccacttttggaggttcctgtgtcacttctccccctcccagatgtctcctcatcctgagtgtcatcaccaagttcttgggcctgtacctcggccgcgaccaacgctaagggcgaattccagcacactggcggccgttactaagtggatccgagctcggtaccaagcttggcgtaatcatggtcatagctgtttcctgtgtgaaa

SEQ ID NO: 17263 - DNA, 495 bp, Homo sapiens
agggcgaattgggccctcgtatatgcactgctcgagcggccgccagtgtgatggatatctgcagaattcgcccttgcccgggcaggtacccaagtgttttgtcagatactttgcatggaaatacctgcagtttgggagactggtgtgtattgaatgcttcttttagcatatttcaggttggactagcgatgcagcttcttcagactcttcatatgaaacgctgctccacaacacaacatgccggccaaggcacaggtgagttgcaagcatgcgactctgcaaagcggcggcatcccaaactcctggccaaagcccttgagatggttcctttactgacgagcacaaaagatttggtcatcagtcttagtggaatactacataagttggatccttatgactatgaaatgattgaagttgtcttgaaagttatagaacgagctgatgaaaagataaccaattttaatatttaatcaggcattgagtattctgaaacat

SEQ ID NO: 17264 - DNA, 633 bp, Homo sapiens
  misc_feature 240, 333, 385, 396, 397, 404: n = A,T,C or G
tgtatataataagattgacaggacattcgcgccgtcgctagatatcataggctttcagcagagcgcaccaatgtatcaacgctcttttcgcctgtcgtccaactcagcattgtacctatatgaagtcagcgcaggaatcgtaaacagtgcagtcttttgagtgcgtccgtagtgactgactcttccacttcataggtgatgtttcggccgccacaatccgacgaccacatgagaactctncgcttgcgtataattatgtatgatgatggcgagataaatataatccgtatacttcctcccgggattatatggtttgccttataagaaccgggnaaactcacccccattttttaacagaaggggggcccgggaaaattattggggnggccccccctnncttgagntaaggccattggccttccgaaaccggggccccggcccagagttgttggaatggggattatttcttgccagaaattttccgcccccttttaccgaggccgggcccgccccccgggccagggtaccctggcaccacctccacctttaaggggtttccaaacccccaaccaggggaacccagaacccaaaggtttttttggccttttccctggaaccaaaaaaaagtttcca

SEQ ID NO: 17265 - DNA, 559 bp, Homo sapiens
tggcgaattgtgccctctagatgcatgctcgagcggccgccagtgtgatggatatctgcagaattcgcccttagcgtggtcgcggccgaggtacatgacttagatctcaatatagttgtttaaaacaaaaaaatccatgtgtatggagatggggagtggctggaaaaagcttaacctcccaattaggcaaaagacaaacaggatagggagggggactaggggcttgtgagtggcaatagctgcagcagcagccctggcaggacagcctgtgggttacagaccgccctcctgtcaatgaagtcaagtcctctgcttcctgaaaaccgcctcttttttctaacaatgttctttcccccaaactaggaagacaggctgatggtaaacacaaagttctctgaaccaaagccttatatgtatgtttctgagggggctctttataacctagttgcaagcaatctgaacacagcccggcgaatttccagcttttgaaactcagatttccttttgcgacccaggttctgctgagaaagttatctttggctcctctctctctcacacc

SEQ ID NO: 17266 - DNA, 465 bp, Homo sapiens
  misc_feature 427: n = A,T,C or G
tagggcgaattgggccctctgatgcatgctcgagcggccgccagtgtgatggatatctgcagaattcgccctttcgagcggccgcccgggcaggtacttttttggttttttttttttttaactccactgggtcagtggatcacacctgtgatccttgcactttgggaggctgaggtgagaggattggctgagaccaggagtctcctgggaatcttctcgtctcctgtaacccagttcacgacagacccttggactttactatattggaaaaatctacataaaacaatgtcagtgtgtcaaagcattatgtctgtcacaagcttgtgaaaggaaaataaaaattactaagccaaagagaaaagtcaagctgggaactgcagcagacaaacctgccttccattttattcttaaacaagatagctagaangacttaataaaaaaaaaaaaaagcttcatagaggccgg

SEQ ID NO: 17267 - DNA, 453 bp, Homo sapiens
tatagggcgaattgggccctctagatgcatgctcgagcggccgccagtgtgatggatatctgcagaattcgcccttagcgtggtcgcggccgaggtactattacctgaatgcttctattccttttttgatcttcgaaaagaattcaagaaatgttgccctggttcacctgatattgacaaactggacgttgccacaatgacagagtatttaaattttgagaagagtagttcagtctctcgatatggagcctctcaagttgaagatatggggaatataattttagcaatgatttcagagccttataatcacaggttttcagatccagagggagtgaattacaagtttgaaagtggaacttgcagcaagatggaacttattgatgataacaccgtagtcagggcacgaggtttaccatggcagtcttcagatcaagatattgcaagattcttcaa

SEQ ID NO: 17268 - DNA, 624 bp, Homo sapiens
  misc_feature 25: n = A,T,C or G
tacgactcactatacggcgaatggngccctctagatgcatgctcgagcggccgccagtgtgatggatatctgcagaattcgcccttagcgtggtcgcggccgaggtaccatgatctgcaggctccggataaccagcagactaaagacatctggaagaaagtggcagaaaaggaggaactggagcaaggatcgaggccagcaccaaccctggaagaagagaaaatccgatcactctccagttcttcaagaaatattcaacaaatgttgacagattcaatcaatcgtatgaaggcatatgcatttcaccagaagaaagaatctatgaagaaaaaacaagatgaagaaataaatcaaatagaagaagagagaacgaagcagatttgtaagagctggaaagaagactcggaatggcaggcatctctgcgaaaatccaaagcagctgatgagaagagacgctccttggctaaacaagcacgagaagactacaagaggttatccctcggggcccagaaaggaagaggcggtgagaggctgcaaagccccttgcgtgttccgcagaaaccagaaagaacctcccttccacccaagcctcagttcctaaactcaagggcatatcctcaaaaa

SEQ ID NO: 17269 - DNA, 398 bp, Homo sapiens
ctactatagggcgaattgggccctctagatgcatgctcgagcggccgccagtgtgatggatatctgcagaattcgcccttagcgtggtcgcggccgaggtacatggatgggagcagcttcaccaacccctgcaaagtgactctgaagaagacgacaagccctgctccagtcacacccggaagctgactggtccacgcacagctgaagcatgaggaaactcatcgcgggactaattttccttaaaatttagacttgcacagtaaggacttcaactgaccttcctcagactgagaactgtttccagtatatacatcaagtcactgagagaacatcaccaccctgaagccagagactaacactgcaggactcagcaggactatttaagaaacaactgaggc

SEQ ID NO: 17270 - DNA, 582 bp, Homo sapiens
  misc_feature 410: n = A,T,C or G
tacgactcactatagggcgaattgggccctctagatgcatgctcgagcggccgccagtgtgatggatatctgcagaattcgcccttagcgtggtcgcggccgaggtacccaagttttaaacttagatgtgcttcatcttagtgaaatttaattcacaaggaatcataaattgtgtttttgaggctgggcgcagtgactcacacctgtatcccagcaatttgggaggccgaggtgggcagatcacttgaggtcaggagttcaagactagcctggtcaacatggtgaaaccctgtctctactaaaaatacaaaaattagtcggcatggtggtgggtggctgtaatcccagctactcaggaggctgaggcagaagaatctgagccaagataacaccattgtactccagcctgngcgacagagtgagactatctcaaaaataaataaataaataaataaatagtatttttgagccttcaagatacagttcctgaatattctaatttaaattgttataattggattacctaatattcttttcaagactcctgatgtattaacttcatgttattgtcacttttcaaaa

SEQ ID NO: 17271 - DNA, 344 bp, Homo sapiens
  misc_feature 183, 187: n = A,T,C or G
aatacgactcactatagggcgaattgggccctctagatgcatgctcgagcggccgccagtgtgatggatatctgcagaattcgcccttagcgtggtcgcggccgaggtacttttttttttttttttttttgagacagagtctcgctctgcactccagactgggtgacagagtgagaacctgtntcanagaagatgggaattgaggatatgacagggagggagaaacctatgaaatttaacaaccatttctgctaaaatctctcagtaaacacagaatcgataggaacttccctaacttgataaagtgtatctaccaaaaacctatagcaacctgcatatgaaag

SEQ ID NO: 17272 - DNA, 502 bp, Homo sapiens
  misc_feature 86: n = A,T,C or G
gatacgactcactatagggcgaatagagccctctagatgcatgctcgagcggccgccagtgtgatggatatctgcagaattcgccncttcgagcggccgcccgggcaggtacttttttttttttttttttttttatttttttttttttttattttaattttttttttttttattttttttttttttattttttttttttttaaaaaaaaattttttttattttttcatttttaaaagtgtaaaaaaaaaaaaaaaattttgtttgggggcaaaattaaaaaagggaataaaaaaaaaaatgggggggggggggaaaattatataaaaaagataaattttaaacgaaagtttcccagaaggatggtaataaaaaaaaggggtctctaaaaaagaaatttttttgaatattaaaaataagggggggggggaattagagagtatatttttttttaaaaaaaattagggggggagagaaaaaaatgacccccccccttttaaaaaa

SEQ ID NO: 17273 - DNA, 376 bp, Homo sapiens
  misc_feature 145: n = A,T,C or G
tgctcgagcggccgccagtgtgatggatatctgcagaattcgccctttcgagcggccgtccgggcaggtacatgtggaggctggaatctgctctggttgatgttgtagtgcgtgaatgcctgggtggggtttgagctgtactttnatttttttttttttttttttggaaatttttttttttttttttttttttttttaaaaccccaacgtacctttgccgtgaccacgcttagggtgaattccataacactggcagtcgttgctagtggttccgaactcgggtccaagcctggccttatcatggtcatagctttatcctgtgtgaaattgaaattcggttccaattccaaaaaaaatacaaagccgaagcctaaag

SEQ ID NO: 17274 - DNA, 380 bp, Homo sapiens
gcagattgggccctctagatgcatgctcgagcggccgccagtgtgatggatatctgcagaattcgcccttagcgtggtcgcggccgaggtactgctaaatgataacttagatgcaggggccatcatgaaaatattcatcccatatcttacattaagcaaactactagcaactgtttgttaaaaagtataaatgaataaatcaaaataggacagataggcagtgtgggaagctaaaatatggaagtgttattgctttgctttatgtggtataatgatctgattttatcttcccaactctcccaggaagtatgcaaaataatatttatctcatattgtgggtgtggcaatcaagacagaggggctagatgctttacctaaag

SEQ ID NO: 17275 - DNA, 393 bp, Homo sapiens
actatagggcgaattgggccctctagatgcatgctcgagcggccgccagtgtgatggatatctgcagaattcgccctttcgagcggccgcccgggcaggtacacccagtggctcatatttaacttcccccagcttcccaattcaaactggggggaaaaaaactaaatcattgggagttacttgccaacttggaagttgatatttctttactttttccccgcgtactctccttctagtgaaggattgtcacagagtttcactggatgaaactatgacccagtattcttactgtattttacatatgcctgtaaattatttgcaaaaaagaagaagaagaggaagaaagaaaagaaagaaaagaaagaaagaaagaaagaaagaaagaaagaaaga

SEQ ID NO: 17276 - DNA, 563 bp, Homo sapiens
tacgactcactatagggcgaattgggccctctagatgcatgctcgagcggccgccagtgtgatggatatctgcagaattcgccctttcgagcggccgcccgggcaggtaccagttcttttgtggattttcaggaacatccatgactgattactgggttttgatcttcttcaacctcctcttcacgtctgcccctcttgtcatttatggtgttttggagaaagatgtgtctgcagagaccctcatgcaactgcctgaactttacagaagtggtcagaaatcagaggcatacttaccccataccttctggatcaccttattggatgctttttatcaaagcctggtctgcttctttgtgccttattttacctaccagggctcagatactgacatctttgcatttggaaaccccctgaacacagccgctctgttcatcgttctcctccatctggtcattgaaagcaagagtttgacttggattcacttgctggtcatcattgggagcatcttgtcttattttttatttgccatagtttttggaaccatgtgtgttacttgcaaccca

SEQ ID NO: 17277 - DNA, 415 bp, Homo sapiens
ccctctagatgcatgctcgagcggccgccagtgtgatggatatctgcagaattcgcccttagcgtggtcgcggccgacgtaccatggaaggggctggggctggggagtgggcctgccaacaggcacgtgtcatgagaggttttctggaactagcctcagcttctcaaatgggccttaggacccgtgtacctgcccgggcggccgctcgaaagggcgaattccaccacactggcggccgatactaatggctgccagctcggtaccaagcttggcgtaatcatggtcatagctgttttctgtgcgaaactgctatccggtcacaattccacacaacatacgagccggaagcataaagtgtaaagcctggggtgcctaatgagtgagctaactcacattaattgcgttgcgctcactg

SEQ ID NO: 17278 - DNA, 632 bp, Homo sapiens
gcgaactgtgccctctagatgcatgctcgagcggccgccagtgtgatggatatctgcagaattcgcccttagcgtggtcgcggccgacgtacttgtttctgtgcagagagcagagtactatatgaaagcaacatgcaacttcagtgggaagggatatatcattcagaaaagagaaataaagccatgcttggaagcagataaaccagttgaagacatactgacgtatgaggaatttcatcctttcttgttttctcaacattcacaatgcccatatatagaatctgaatcatttgacaaggcggtggatgaattttattccaagatagaaggccagaaaattgacttaaaagctttacaacaggaaaagcaagcattgaagaaattagataatgttcgaaaggatcacgaaaacagattggaagctcttcagcaggctcaggaaatagacaaactgaaaggagagctcatagaaatgaacctacaaatagttgacagagccattcaggtagttcgaagtgctttagctaaccagatagattggacagaaattgggttaattgtgaaagaagcccaagctcaaggagaccctgttgcaagtgcaatccaagaattaaaacttcaaacaaaccatg

SEQ ID NO: 17279 - DNA, 474 bp, Homo sapiens
  misc_feature 264: n = A,T,C or G
gctcgagcggccgccagtgtgatggatatctgcagaattcgcccttagcgtggtgcggccgaggtacacatccaggcactttttgggtcatatggtgctttccaacatgggcccacccagtcttcacaataagcctgtaaggcagatgggccagaaatggagaaaaagggaaacagagggtctttgattcaaggaaggagcaagcgagagtcaagcctctctcttttggctattaatccactttctttctataaaaccatctangccaatggattttctggaggccttggggcttatgcctctttaggaaacactttgttttattatgtcaaggtgtatggttactggccgaggtttctagttttttaggcatttatgaaaatccagctgctgagtcacaacacgtgtgtaattgtattggtaagttaatggctatttatgtttggaggtgtttggaaaacaagaaggaggcaa

SEQ ID NO: 17280 - DNA, 472 bp, Homo sapiens
gactcactatagggcgaattgggccctctagatgcatgctcgagcggccgccagtgtgatggatatctgcagaattcgcccttagcgtggtcgcggccgaggtactttttttttttttttttttttttttgggagagatgcggtctccaagtgtttcccaggctggtcttgaactcttgagcttaaggaatcttcccaccttagcctccccaaatgctgggattacagatgtgaaccaccatgcctagctagaggctcgagttttttaaagatagttttgtgggctagggaaggggtggtgctgattggttggggatatcataggggtgtgaaaaatggtcctcctgtgctgagtccacttctgggtggggcccacaggacctctgagtcatgagtcttgggtctggggggagccatccgatcatcaaaaatacaaaagcctgaaaagacgtttcaaaaggttaatcttcgc

SEQ ID NO: 17281 - DNA, 395 bp, Homo sapiens
actactatagggcgaattgggccctctagatgcatgctcgagcggccgccagtgtgatggatatctgcagaattcgcccttagcgtggtcgcggccgaggtacttgtttttttttttattcttttattttcattataaaactaacagctgttacaatctatatttctttttgcccttatttcttttcccaactacaaaatactctggggagatgcattattatttaaaatatataatattgcacaaacaaccaaacggttaattaaactcaagaaataattacaaagagaaaaaccccattccgtcaaaaaaaatattcagcattctctccatcccaccctctaactgaaggtttgaagtggaagtgacctcactctatcggtgtccctgaccca

SEQ ID NO: 17282 - DNA, 496 bp, Homo sapiens
cactactatagggcgaattgggccctctagatgcatgctcgagcggccgccagtgtgatggatatctgcagaattcgcccttcgagcggccgcccgggcaggtacgcgggcttgtggccggacacgatggctcacgcctgtggtcttagccctttggtaggccaaggcgggcggatcactttagcccaggagttctagactatcttgggcaacatggtgaaaccctgtctctacaaaaaacaaaacaaaacaaagaaattagctaggtatggtggtgctacctgggaggctgaggttttcacaggttgaaccccaaaattagggttcagtccaggaggccatttgggttcttggcttcatgaaggaaggaattcaagaataagctgacagtaaagtagaagcaagtatattaagaaaagtaaaggaatagcgccgggcgtggtggctcacgcctgtaatcccagcactttgagagggtgaggcgggtggattgctt

SEQ ID NO: 17283 - DNA, 467 bp, Homo sapiens
gggccctctagatgcatgctcgagcggccgccagtgtgatggatatctgcagaattcgcccttagcgtggtcgcggccgaggacatggaatgcttgtattctttttaattatcaaggcatcagtgtggttcttaaagccatgtgcctgtgtatgcttgcctaagtgtgaatgacatacacagacataaccttacattgctttcccaaaaggggaatgccaccaacaaatcaactaattggtactttattatttttttttttttttttttagggggactataacccattttctattaatgagcacatggaatctttattgcatttttctatcataaacacttctacaataattgtgcctgcataagatttattctatatttatactgctgtatttctgaaatagaattccaaaattcataattttgtcaggtacctgcccgggcggccgctcgaaagggcgaattcca

SEQ ID NO: 17284 - DNA, 211 bp, Homo sapiens
actcactatagggcgaattgggccctctagatgcatgctcgagcggccgccagtgtgatggatatctgcagaattcgccctttcgagcggccgcccgggcaggtacttgtcctcagcttgggcttcttcctcctccatcacctgaaacactggacctgggggtagccccgccccagccctcagtcacccccacttcccacttgcagtcttg

SEQ ID NO: 17285 - DNA, 457 bp, Homo sapiens
  misc_feature 129: n = A,T,C or G
ctactatagggcgaattgggccctctagatgcatgctcgagcggccgccagtgtgatggatatctgcagaattcgcccttagcgtggtcgcggccgaggtacttggtagacaagttctagatctctganagatgagcatatgctcatggctgactgaaaaaacttatcatcatccgggtcctttggagaaaatctctttcccattaattcattcattatatcataaatgatgaaggatgatctctttaaagggtctccaggttgatcaaacaggcgaataatatggtgatatgttgcaagcgagggttctcaaattaccaggtagacagaaaaaataaacaatgaggtaaaaacacagcaatccaaaacatagtttactgagacgcactgaattaaaaacatattgttaatatttaagcaaaatatgcatttctattcctttgaacaaagttatttt

SEQ ID NO: 17286 - DNA, 405 bp, Homo sapiens
tacgactcactatagggcgaattgggccctctagatgcatgctcgagcggccgccagtgtgatggatatctgcagaattcgcccttaaccgggcccccgcccaggtactttttttttttttttttttttttttggggaccaggtaatcaaatttattttaaaacaaaaggtttggtgggcttccttaaatgcgcagaaaaaaagaatacctaagggccttaataaaatacccaggggcctaacaatgagggattccctaaaaaaacccttaaaactttataaaccggacctaaaccaacccctgccgtaataatttttcaaggcttctaaagaaaaaaaaaaattaaagccctccccggaaatttaccatatgaccaaacttggtacctttaccctttgaccctt

SEQ ID NO: 17287 - DNA, 597 bp, Homo sapiens
tatagggcgaattgggccctctagatgcatgctcgagcggccgccagtgtgatggatatctgcagaattcgccctttcgagcggccgcccgggcaggtacttttttttttttttttttttttttttaaggagagagaaggtttcaccatgttggccaggctggtctcgaactcctgacctcaggtgatctgcctgccttggccttccaaagtgctaggattacagatgttttgattccatagtttaattaattctgtgggcaatttatttcggcattccaatttgaacacacaagcccactatgaggcccattctctgtgtctgacacacacacacacacacacacacacacacacacacacactctgtccctgctctctcgctctcatttgcttgctcatcaaaacatctgctctgtatctcactgaaatatctgtcttctgtttcattcctccaagtaaaatggtaacaactcgttagaaagagttgcataggccagacatggtggttcacgcctataatcccagcagtttgggaggctgaaattacaagcgtgaagccactgcgtctggcctttacctttacaattaaataata

SEQ ID NO: 17288 - DNA, 462 bp, Homo sapiens
ccctctagatgcatgctcgagcggccgccagtgtgatggatatctgcagaattcgcccttagcgtggtcgcggccgaggtacgcgggttacagctgcttttatacccccttgccccgccaacgtagttaagagaacagcagcataagcggctggcagaggcaaggaaagaccagtagagagaaaaaaaggccatctataccaattctaagttaatttagactaaacaaggtcttaatagcaaaggataattgaaatcccaaacttacaaggttttcaacaaaagtgaagtttgcttaaagttaacagtgtaacatgtattatggtaacttctaatcttgtggccttagacagtctagtccaaaggcataaagaaagtttgctttaaaaaaaaaaaaaaggaatggttattttcaaaaaaaaaaaaagtggggggagacagaattcatgtaaaaagagtggta

SEQ ID NO: 17289 - DNA, 531 bp, Homo sapiens
  misc_feature 97, 98: n = A,T,C or G
ggcgaattgggccctctagatgcatgctcgagcggccgccagtgtgatggatatctgcagaattcgcccttcgagcggccgcccgggcaggtacttnntttttttttttttttttttttttgagacggagtcttgctctgttgcccaggctggagtgcagtagcacgatctcggctcactgcaccctccgtctctcgggttcaagcaattgtctgcctcagcctcccgagtagctgggattacaggtgcgcactaccacgccaagctaatttttgtattttttagtagagatggggtttcaccatcttggccaggctggtcttgaattcctgacctcaggtgatccacccaccttggcctcccaaagtgctagtattatgggcgtgaaccaccatgcccagccgaaaagcttttgaggggctgacttcaatccatgtaggaaagtaaaatggaaggaaattgggtgcatttctaggacttttctaacatatgtctataatatagggtttaggttctttttttttcaggaat

SEQ ID NO: 17290 - DNA, 491 bp, Homo sapiens
cactactatagggcgaattgggccctctagatgcatgctcgagcggccgccagtgtgatggatatctgcagaattcgcccttagcgtggtcgcggccgaggtacattagttccgtccggaaaggcggagacagctcaaagcaagaccccctattgggggcttcgaagtaacaggtaggtgagagacagatggttgcattcttttgagtttctgataagtctttccaaaggaggcaatcagaatatgcatctgtctctgtgagcaaatggatgacttgaatagaatagaaggcagatttgccctgagcagttcccatcttgaagggacccaagatatttttctttcacattttccccttttcttttttaacatctttggagaaagcatttttacaacagaatgagtctccagtctcaggaaaggtcatctgacctttcctggctaggacggtttattcctagattggtaggtctggaaagttcatttttagc

SEQ ID NO: 17291 - DNA, 410 bp, Homo sapiens
tacgactcctatagggcgaattgggccctctagatgcatgctcgagcggccgccagtgtgatggatatctgcagaattcgccctttcgagcggccgcccgggcaggtacaagttgaaatgtagttattggaaaagtctgtaacctgtggatcatatatattcaaagtgagacaaaggcaaataaaaagcagctattttcatgaatagacaaagttgatttcaggaagtataaattatattctgcaccgaacaaggaacagaaattattgcatctgtggaacatatatctggagttactatactttactgaagagcaaggcataaatttagactaaaatccatccagattacactcattctttaggctactcctggatacttcatttaaatttgattttcgaggtagtgag

SEQ ID NO: 17292 - DNA, 443 bp, Homo sapiens
ctataaggcgaatcgggccctctagatgcatgctcgagcggccgccagtgtgatggatatctgcagaattcgccctttgagcggccgcccgggcaggtacggccagggctattggttgaatgagtaggctgatggtttcgataataactagcatggggataaggggtgtaggtgtgccttgtggtaagaagtgggctagggcatttttaatcttagagcgaaagcctataattaccccgcgtacgagctcatgaaagtgttgtgaagggcgaagacttttcgctcccagcttatatggatcggcgtgaccaccccttgccggaggtggcccatgtcaagcacctgtctgccagccagaaggcactgaaggagaaggagaaggcctcctggagcagcctctccatggatgagaaagtcgagttgtatcgcattaagttcaaggg

SEQ ID NO: 17293 - DNA, 689 bp, Homo sapiens
ctatagggcgaattgggccctctagatgcatgctcgagcggccgccagtgtgatggatatctgcagaattcgccctttcgagcggccgcccgggcaggtacaggaagcatggctgggaggcctcaggaaacttacaatcatggtggaaggataaaggggaattaagcacgtcttcacatggcagcaggagagagagagagcaaagggggaagtgcaacatacttttaaacaaccggatctcatgagaattcactgtcacaagaacagcaagagggaaatctgcccccatgttccaatcacctcccaccaggtccctcccccaacactggggatttccagtcaacatgagatttgggtggagacacagagccaagaccatatcagtatcctcacataacagaagagaaactgagtcataagtaaatgaagtaatgtgcccacttcccacagtcaagaagtggtagagctgagattcagcagatgaagccttactcagagcctgtgctctgaacaccagtgtgatcctgcctcctggctaaaacctttggtgggtaggggagggaacagccttattctctctattcttttatcttcagtgcccaaccgcagagtaatcctcatcaaacatgaaattaagttcattattaggtggctctaggtcacatcttatactggtcactttgcaatat

SEQ ID NO: 17294 - DNA, 547 bp, Homo sapiens
ccctctagatgcatgctcgagcggccgccagtgtgatggatatctgcagaattcgcccttagcgtggtcgcggccgaggtacctagaagtggattgctgctgaccaagtaagttttaaacctagtgcttttatattacgccctgagctaaagataagaactgtgaataaaaactgaattctggttagttgatttttaaaaagagtggtatgagttatcaattctgagagtagcttatattttaatctaggattgagcacgtgctatttttgcaagtgatgaaagatagctacagacaagggaatttggaaagcaggaaataacccagcagtgctgcagtggaattaaaagtgttggcttgtggtcatgtttttaatatagaaatagagttattaatgtgtggatacgtatatataattttgtatgtctttgccatatcctccatagagaagacctaaaagccagggcactattacctaggaacaccttcctacacagagactgcagcttctaaatagtattctccattaaaataaattacatttttt

SEQ ID NO: 17295 - DNA, 557 bp, Homo sapiens
  misc_feature 10: n = A,T,C or G
ctcactatanggcgaattgggccctctagatgcatgctcgagcggccgccagtgtgatggatatctgcagaattcgcccttagcgtggtcgcggccgaggtactgattgtcttttcttgattgtcagctttcttgtgggcatcatccagttgctgttgaagcaacctattttcactttgtagttgagcacatctgtcctctatagattcctgcttcttcagcgtatttatttactttgctttgttcatttttatacattcgttcaatttctttcttttgacactgtgtttggccaaggtctctttggaaacattctaaaactgacgtcttttctctgagtgtttctcttgcatgatgaaacttaatttttaggctgttaattttactgtcagcattagagagttttttcagaaacaatctgttatcttttaggttagacatatcagaattcattttctcctgtaaatgaacccattcatgtcctgttctctggaaagcaagttctaggttttcttatgctgtctgactttgatcacaatcatgtacctgcccgggcg

SEQ ID NO: 17296 - DNA, 412 bp, Homo sapiens
ctatagggcgaattgcgccctctagatgcatgctcgagcggccgccagtgtgatggatatctgcagaattcgccctttcgagcggccgcgcgggcaggtacgcgggcaaaaatgttttccttttgttttaccaggaatgagttcgggctatactctttgaaactgcctttgtgagcaaagtgctttggcaaggcaagggtctccctcagcagggctaggtgcactacagcctctttccccgtgtcccgttggatctgagctgtgtagcacttgttgcattacaaagaaaaagacttctgcaggaaataaggtagagaacaggctgtctagtcagatgcagcttgatctgtggcaaaaccaagtgtggtctttcagcttcagtgtgttaacatcccagcacctgggatggggt

SEQ ID NO: 17297 - DNA, 486 bp, Homo sapiens
attgggccctctagatgcatgctcgagcggccgccagtgtgatggatatctgcagaattcgcccttagcgtggtcgcggccgaggtacctctgactggcacttctggcttgctgttgtccttggagaagtctgggcctgggacagaggagggatgtaatctgaacactcctttgtcacaggtcaccagggtgtgcttgaggggacggtagacataaacggaattcagaggcagggaagactgcagagtagaaaggtgatgtgccacaagctcccgacaatggatcaactgggagctatccatctgggccaggaaaaaaaaaaaagccacacacagttgatcattaattaacataggctgctctgttatctctggtggccatttttcctccctgtgctttccgtccccgctgagtcttttctctccccacatctacctccaactcatttatttatccagctacccatccatcaacatcatcttagaa

SEQ ID NO: 17298 - DNA, 481 bp, Homo sapiens
atacgactcactatagggcgaattgggccctctagatgcatgctcgagcggccgccagtgtgatggatatctgcagaattcgccctttgagcggccgcccgggcaggtacatgtgggcaggtaaaggtgcagtggttcacgcctgtaatccttgcactttgggaggccgaagcaggaggatcacttgagcccaggaacttgagaccagcctgggcaacaaagcaagatcctgtctctatttggaaaaaaaaaaaaagaaaacaggcacggtggctcacgcctgtaatcccagcactttgggaggccgaggcaggtggatcacttgaggtcaggagtttaagacaagcctggccaacatagtgaaacctagtctctactacaaatacaaaaattagccaggtgtagtggcatgtgcctgtagtcccagctacttgggaggctgagactggacaaaaattagcaaggtgtggtggtaccacag

SEQ ID NO: 17299 - DNA, 440 bp, Homo sapiens
tacgactcactatagggcgaattgtgccctctagatgcatgctcgagcggccgccagtgtgatggatatctgcagaattcgccctttcgagcggccgcccgggcaggtacctgaaaagaatatcaacctgaaaagaatatcaactcacccagaaattagttctttgaaaaaaaagaaattaagttgtgaatttctaaagaccttgaaataagtgtttcaaatttaaagaacaaagaatgatgtgaaaatgagattatgattcctactacatgaattaacgtttcgagattgctgtttattacttcccagagtatctttaacagtattctctgaagcagttccaatctagttggagaattaacagcaattgatttaactatctcatttttattaactggtatttacattaaaaatatgtgcaaatcatactcattagttat

SEQ ID NO: 17300 - DNA, 482 bp, Homo sapiens
actcactatagggcgaattgggccctctagatgcatgctcgagcggccgccagtgtgatggatatctgcagaattcgcccttcgagcggccgcccgggcaggtacttttttttttttttttgttttggggaaatgtttagagacctgcaatttatccatccactgatgaagctggttagaagctggcagggaactccaaattattcttgcatacactgtcccccctgcctggacatgagcacagtcaggcaaggtctgcgagtatgccctccaaattaagttttcactttctctctttatgctctaagaagtttaagtgacttgtacataaactgtgtttcacttccagatcagtctgacactctccaacaaaaccaaatacatttcgtatgaggcaacacaattttttttttttttttgagatggagtctcgctctgttgtccaggttggagtgcaagggtgtgatcttggcttactgcaa

SEQ ID NO: 17301 - DNA, 422 bp, Homo sapiens
tacgactcactatagggcgaattgggccctctagatgcatgctcgagcggccgccagtgtgatggatatctgcagaattcgcccttagcgtggtcgcggccgaggtacgcggggtggaagaagagaaaaaaaaagaaaaaaaaaaaaaaaaaaaaaaaaaaaaaaaaaaaaaaaaaaaaaaaaaaagaaggaaaagaaaaaaaaaaaaaaaaaaaaaaaaaaaaaaagttcctaaacatttataataacgggggaataaaaaaaaaaaaaaaaaaaagctttaaataaaattattatgcaaaaaaaaaaagggggttaataaaaaggggttttaaaaataaaaaaaaacttttaatagggctaaaaaaaaaaaaacggattaaatggggggagataattttaaaaaaaaatgttggggttaa

SEQ ID NO: 17302 - DNA, 305 bp, Homo sapiens
atacgactactatagggcgaattgggccctctagatgcatgctcgagcggccgccagtgtgatggatatctgcagaattcgcccttagcgtggtcgcggccgaggacatagaaaagaaagataaatgcttgattcctgattaaaagaatcttaagagactgattaaccagctataacacatggaaattttctggatcccaattcaaaagtatcagctgttaaaaaaaagtaagataaatgagatcacttataagacagtcaagaaatatgcgcactgattaaatatttgatgatattaagaaaac

SEQ ID NO: 17303 - DNA, 449 bp, Homo sapiens
gaatacgactactatagggcgaattgggccctctagatgcatgctcgagcggccgccagtgtgatggatatctgcagaattcgcccttagcgtggtcgcggccgaggtacttttttttttttttttttttttttttttagaaactgatgtttattttccatcaaccatttttccatgctgcttaagagcctatgcaagaacagcttaagaccagtcagtggttgctcctacccattcagtggcctgagcagtgggagctgcagaccagtcttccgtggcaggctgagcgctccagtcttcagtagggaattgctgaataggcacagagggcacctgtacactgtatgcatcatcagtccaaagtttttcaaagttctatgtgactggttgaggaaacactgcttgaatttccccatagcctctgcagcggcatcactgtctatgaactc

SEQ ID NO: 17304 - DNA, 647 bp, Homo sapiens
cgaattgggccctctagatgcatgctcgagcggccgccagtgtgatggatatctgcagaattcgcccttagcgtggtcgcggccgaggtactagaagaggctattgagactatgagctcacagacagggcttcgcacaaactcaaatcataattgacatgttttatggattactggaatcttgatagcataatgaagttgttctaattaacagagagcatttaaatatacactaagtgcacaaattgtggagtaaagtcatcaagctctgtttttgaggtctaagtcacaaagcatttgttttaacctgtaatggcaccatgtttaatggtggtttttttttttgaactacatctttcctttaaaaattattggtttctttttatttgtttttaccttagaaatcaattatatacagtcaaaaatatttgatatgctcatacgttgtatctgcagcaatttcagataagtagctaaaatggccaaagccccaaactaagcctccttttctggccctcaatatgactttaaatttgacttttcagtgcctcagtttgcacatctgtaatacagcaatgctaagtagtcaaggcctttgataattggcactatggaaatcctgcaagatcccactacatatgtgtggag

SEQ ID NO: 17305 - DNA, 574 bp, Homo sapiens
ccctctagatgcatgctcgagcggccgccagtgtgatggatatctgcagaattcgcccttagcggccgcccgggcaggtacactgatctacaaaaattttaaaatgagccgggcgcggtgactcacgcctgtaatcccagcactttgggaggcaaagcaggcggatcatgaggtcaggagatcaagaccatcctggctaacacggtgaaaccccgtctctactaaaaatacaaaaaattagccgggtgtggtggcgggcacctgtagtcccagctactcgggaggctgaggcaggagaatggcgtgaagccgggaggtggagcttgcagtgagccgagatcacaccactgcactccagcctgggcaacaaagcaagactctcaaaaaagaaaaaaatttttttttaaatgagctgggtgtacctcggccgcgaccacgctaagggcgaattccagcacactggcggccgttactagtggatccgagctcggtaccaagcttggcgtaatcatggtcatagctgtttcctgtgtgaaattgttatccgctcacaattccacacaacatacgagcc

SEQ ID NO: 17306 - DNA, 435 bp, Homo sapiens
agggcgaattgggccctctagatgcatgctcgagcggccgccagtgtgatggatatctgcagaattcgcccttagcgtggtcgcggccgaggtacatatgcagatgatattatttaaccagcaaaccacctgccatgcaatgcattgacagcatcaatagctgcagacattgatgggcacttcacatacacattgacctgagctgaatttatgtcaacataaatatgaataactcctgcatgtttattacattcttcaatcacatcatccttaatctcggtttcccatccaacttcttcttatatgtaagaaagtattaatgactcttaaatactattgaaactaacaaactatatatatacaaatgtttcaaaaaatttaaatgttttatgaatttaaaaaaatactttggaaaaaaagcacattgtcagaacg

SEQ ID NO: 17307 - DNA, 309 bp, Homo sapiens
gggcgaattgggccctctagatgcatgctcgagcggccgccagtgtgatggatatctgcagaattcgcccttagcgtggtcgcggccgaggtacactgcctcatcgatctaatctaatccctatgacgacctacagagatagatactattatctttgttttatagatgaggaagctgaggcctaatgttaagtaatccccctgaggactcagtcctgggaaattaaagagagcaggattagactcaggtctcagatgccatcatcggcggacttaaccattatcccatattttatattagtcaaaagac

SEQ ID NO: 17308 - DNA, 566 bp, Homo sapiens
ccctctagatgcatgctcgagcggccgccagtgtgatggatatctgcagaattcgccctttcgagcggccgcccgggcaggtacgcgggatggaaaaactgcaggaaatagacaagagaaaacctgaaaacactgctgagcttgagatcttccaagaaggcataaaggtcttagaaacactggttactgttgctgaagaacaccatcgcgctcagctggtggcctgtcttttgcccatcctcatttccttccttttggatgaaaattctctgggatcagcaacttccataatgagaaatttacatgactttgctctacaaaatctcatgcaaattggacctcagtattcatctgtttttaaaagtttagtggcttcttctccagccctaaaagcccgtcttgaggctgctataaagggcaatcaagaaagtgttaaagtcaagaataccaacatctaaatatactaagaggcctggaaaaaactcaagcattcaattaaagaccagttttctctgaatttttttttggaataagtaagcacccttaatataataaatacttgatca

SEQ ID NO: 17309 - DNA, 409 bp, Homo sapiens
ctactatagggcgaattgggccctctagatgcatgctcgagcggccgccagtgtgatggatatctgcagaattcgcccttagcgtggtcgcggccgaggtaccattccgggtcatccgcagaaattcctcatagatggcaactctgtctactctccgagccagtggcgagaagttacacagggagtccaccccggtgtggtgcctgttggggacagacctgaatgttgaaacttgacagtcagaaaaataactcttgatgctgctgtttcggaagagttggttgagcgcatcctcaatatttcttttgttcctctggtaattggtggtgcctggctgggctttgtcctgggaatatggtaggttggtgatggtgaaattcaggttagaagtgctgggtgctggagctgc

SEQ ID NO: 17310 - DNA, 386 bp, Homo sapiens
gactcactatagggcgaattgggccctctagatgcatgctcgagcggccgccagtgtgatggatatctgcagaattcgccctttcgagcggccgcccgggcaggtacaggggacagcaatctatggctctcaggccaaatccagccactgcctgcttttgtgtggcctgcaggctgaaaatggtttgtccatttttaaatagttaaaaagaatcaacagaaaaacagtattttatgatatatactgtattacatattattttatataaaattcaaatttcagtgtccataaataaaatttttggaacaaattgtgtatgtattgcctatagctgttttcactctaccatagcatagtcaaatagttgcaacagagatgtgtatggc

SEQ ID NO: 17311 - DNA, 531 bp, Homo sapiens
tacgactcactatagggcgaattgggccctctagatgcatgctcgagcggccgccagtgtgatggatatctgcagaattcgcccttagcgtggtcgcggccgaggtacttttttttttttttttttaagacggagtcttgttcagctgcccaggctggagtgcagtggctcgatcttcgctcactgcaaccaccgtctcctgggttcaagcgattctcctgtctcagcttcccaagtagctgggattacaggccaccaccatcatgcccggctaatttttgtatattggtagagacggagtttcactatgttgggcaggctggtcttgaactcctcacctcaggtgatccgcccgtcttggcctcccaaagtgctaggattacaggcgtaagccaccatgcctggccagatgatgtatttaaatatcataccaaactctgtgtatttatataaaaagagactgttaaaagacttcataatttaaaaaaaaacaaaaacaaaaaaaaactttacgcttaccattgctgcata

SEQ ID NO: 17312 - DNA, 467 bp, Homo sapiens
atagggcgaattgggccctctagatgcatgctcgagcggccgccagtgtgatggatatctgcagaattcgccctttcgagcggccgcccgggcaggtacatcatattgaattaatatgaaaaatacagagaatgtaaacatctctgagttaaaatattcccaaaagttttaaagcatggataatatatctttaaaattggataaaatgtgcttggatgctttaaacatatactcaaaatagtaaataaatgtttgtggccaggcatggtggctcatgcctgtaatctcagcactttgggaggctgagacaggcagatcacttgaagtcaggagtttgaaaccagcctggacaacatggtgaaaccccgtctctactaaaaacaaataataatgataataataataataatgcagaaaaatctgggcatggtggagcatgcctgtaatcccagctactcaggaggttg

SEQ ID NO: 17313 - DNA, 510 bp, Homo sapiens
ggcgaattgggccctctagatgcatgctcgagcggccgccagtgtgatggatatctgcagaattcgcccttcgagcggccgcccgggcaggtacatgtgtgtatgtgtatctttgggaaaagaagaagacatcttgtttactatttttttggagagaggctgggacatggacaatcacataatttgctattattacttcaatctgacttgaagaaccgtttaaaaataaaatttagcatgtcatatattccttatagtaggcttatttcaccttttttctgtccagagagagtatcagtgagaaagattttacgggtgaaaacatgaattggtgggacttaataaagagctgaaaaactactacaatgtgggctacggttattataaaatgatagagatggaaactagagtaagtttattttgtctgttaaacctggaagtgagctaggcatggtcactcacgcctttaatcccaacactttgggagcccaagacaggaggatcccttga

SEQ ID NO: 17314 - DNA, 320 bp, Homo sapiens
gactcactatagggcgaattgtgccctctagatgcatgctcgagcggccgccagtgtgatggatatctgcagaattcgcccttagcgtggtcgcggccgacgtgtcgctgagactcggggagccattgaccatcgtctctgaggatggagactggtggacggtgctgtctgaagtctcaggcagagagtgtaacatccccagcgtccacgtggccaaagtctcccatgggtggctgcatgatggcctgagcacggagaaagcagaggaactgctgttgttacctgggaaccctggatgggcctttctcatccgggagagc

SEQ ID NO: 17315 - DNA, 592 bp, Homo sapiens
tatacgactcactatagggcgaattgtgccctctagatgcatgctcgagcggccgccagtgtgatggatatctgcagaattcgcccttagcggccgcccgggcaggtaccttttatgtaaattttgcacagaaatttttggcataagtttattttctttcagtttagttcagtgcatgcactaataaaactggttgtttaatttaaaaggaatatataagactttacccatgttattttcttggtttttatttcagatgtagattttgtttttgaggtaaattcgttcttcagggattgaacactattgttagcaagtgcctaaaaaagatgtgaaacagtttacatatgtcaactgtaacagtaggtcccaaaggcaactttaaagttctggaaccaagacggagggcgaatatgggggcaaataaaaacaatagatacctcctaaaactctttttcataagtgttatttaaagccatcaaactgtccaggtgcagtggcttatatctgtaatcccagcacttttggagtctgaggtgggaggattgcttgaggccagaactttgagaccagcctgggcaacatagacccc

SEQ ID NO: 17316 - DNA, 473 bp, Homo sapiens
ctatagggcgaattgggccctctagatgcatgctcgagcggccgccagtgtgatggatatctgcagaattcgcccttagcgtggtcgcggccgaggtaccaatatctgtattagtcgtggttcttgaaaaggacagaactcatagcatagatgagtttattaaggagtattgactcacacgatcacaaggtgaagtcccacaataggccatctgcaagctgaggagcaaggaagccagttcgagtcccaaaacctcaaaagtggggaagctgacagtgcagccttcagtctgtggctgaaggtcagacagcccctggtaaaccattggtgtaagtccaagggtccaaacattgaagaacttggagtccaatgttccagagcaggaagcatccagccaggaaaaagatgaaggccagaggactcagcaagtctgttctttccactttcttctgcctgcttttattctagccacg

SEQ ID NO: 17317 - DNA, 608 bp, Homo sapiens
  misc_feature 25: n = A,T,C or G
tacgactcactatagggcgaattgngccctctagatgcatgctcgagcggccgccagtgtgatggatatctgcagaattcgccctttcgagcggccgcccgggcaggtactttttttttttttttttttttttggtttttttttttttttttttttttttttttttttttttttttttttttttttttttttttttttttttttttttttttttttttttttttttatagagggggggactttaaaaaaaaagggttaaaacaacttgccaaggaaaacaattttttttccaccccctttggagggaaaaaaaaaagtttttaatttttaaagggggggaaaaaaaaaggggaaagggggggcaaaaaattttttttttaaaaaaaaaaaaaataaaatttttttttggggaaaaaaaaaaaaaattttttttttttttttttacaaaaagaatgggtttttccccccccttgggaaaaagggaaaaaacctcccctttttttttaaaaaaaaaagggggggtttttttatttaggaagggattttttaaaaaaaaaatattttttttgagaatattttttaaaaaaaaaaatttgtgtaaaaaaaat

SEQ ID NO: 17318 - DNA, 367 bp, Homo sapiens
  misc_feature 110: n = A,T,C or G
cctctacatgcatgctcgagcggccgccagtgtgatggatatctgcagaattcgcccttcgagcggccgcccgggcaggtactttttttttttttttttttttttttttncccctgcatttctttggagtaatcagttatttttttactattccattttctcctctattagcttttcgttatatattcttttttcatttagaggttgctctagagattacaaatacacttttgactgattaccacccgcctccagccttttgttctacagttgtcgtatttttgtttccacatattttaaatcccacaagccacaactattattttaaacagtcagaatttgtatttactcacatttatccttacca

SEQ ID NO: 17319 - DNA, 338 bp, Homo sapiens
tacgactactatagggcgaattgggccctctagatgcatgctcgagcggccgccagtgtgatggatatctgcagaattcgcccttagcgtggtcgcggccgaggtactttttttttttttttttttttttttttattaaaaatttagtagtgtttattatacacagtcttttaataaataaaagaggacacgtaataaagattcagttttcagtaattttcaattttcaagactaacagccttaatctttgattgagtttctaaattctccacagtatcttttcagaaaatctttattttttaaaaaattttcatagaattctctttccatttgatgt

SEQ ID NO: 17320 - DNA, 422 bp, Homo sapiens
tacgactactatagggcgaattgggccctctagatgcatgctcgagcggccgccagtgtgatggatatctgcagaattcgcccttagcgtggtcgcggccgaggtacagatttgctttctcttacaaaaagaaaaaaaaaaatcctgttgtattaacttttaaaaacagaattgtgttatgtgatcagttttgggggttaactttgcttaattcctcaggctttgcgatttaaggaggagctgccttaaaaaaaaataaaggccttattttgcaattatgggagtaaacaatagtctagagaagcatttggtaagctttatcatatatatattttttaaagaagagaaaaacaccttgagccttaaaacggtgctgctgggaaacatttgcactcttttagtgcatttcctcctgcctttgc

SEQ ID NO: 17321 - DNA, 565 bp, Homo sapiens
ccctctagatgcatgctcgagcggccgccagtgtgatggatatctgcagaattcgccctttcgagcggccgcccgggcaggtacttttttttttttttttttaaattgggtttttggtctttttttctcaattagaaaggtcttcggaaattagatatattggcctttcatctatgaagtatattacacatatctctcccaatttgtttatcttttgactttgattacagtgttttattttcttttcagtcatataaaatttttatacttatagagacaaatttaagaatcatttcttttattgcttctggactttggtcgtagttagagagcatttcttaacacccgcgtacctcggccgcgaccacgctaagggcgaattccagcacactggcggccgttactagtggatccgagctcggtaccaagcttggcgtaatcatggtcatagctgtttcctgtgtgaaattgttatccgctcacaattccacacaacatacgagccggaagcataaagtgtaaagcctggggtgcctaatgagtgagctaactcacattaattgcg

SEQ ID NO: 17322 - DNA, 404 bp, Homo sapiens
tacgactcactatagggcgaattgggccctctagatgcatgctcgagcggccgccagtgtgatggatatctgcagaattcgcccttagcgtggtcgcggccgaggtacgcgggggacaagatcctgtctcaaaaaaaaaaaaaaaatccttaaaaaaaagatgaaagatactataataacaacaaccaaaataaaaaacacttcagggtgtttattagctaaaaagtattatccgtaatacgttttatattagccaaaatataatatttatcttatgctaacagtacgaggcaaaatcgtgattaacaagctttggaagtttaataccagtgagctgcgtaagattgctttaaaaaaaaaaagcagtcctggcgcatggctcacccggctttgggaggccatgg

SEQ ID NO: 17323 - DNA, 336 bp, Homo sapiens
tacgactcactatagggcgaattgggccctctagatgcatgctcgagcggccgccagtgtgatggatatctgcagaattcgccctttcgagcggccgcccgggcaggtacatttactgtggattctgtttaatttattgtgtatgtgtggggaaaagattggattctaaaataaaagtttaccctgtggcaaaaaaaaaaaaaaaaaaaagtacctcggccgcgaccacgctaagggcgaattccagcacactggcggccgttactagtggatccgagctcggtaccaagcttggcgtaatcatggtcatagctgtttcctgtgtgaaattgttat

SEQ ID NO: 17324 - DNA, 389 bp, Homo sapiens
cgctcgagcggccgccagtgtgatggatatctgcagaattcgcccttagcgtggtcgcggccgaggtactccatcctgggtaatgggagtgaaaccctgtctcaaaagtaataataataataataagggaacgttccaaaacctcatctggacttgtatttatctgaatcttttacaatatactaaagtagtggttaccaaattctggctgcattattattatataggtgtgttattaaaaatagagaatttgcagccgggcgtggttgttaattcctgtaatcccagcactttgggaggcccaagtgggtggatcacgaagtcaggagatggaaacaatcctggcttacacagtgaaacactgtctttactaaaaaatcaaaaaaaat

SEQ ID NO: 17325 - DNA, 492 bp, Homo sapiens
tgcatgctcgagcggccgccagtgtgatggatatctgcagaattcgcccttagcggccgcccgggcaggtactttttttttttttttttttttttttttttagggtctgccttcaatgaaattaatggttttaacctaagacttatgtttagtataatggctctgaatgagtccccctggccaggtgacatcatttcaagatgagactcatttttagctccactagaacttgcttgacgaccttgaataagctacttaacctctcattgacttatttttatcttctgcaaattggatataataggttcagccttcctcatgatgatactgaaagatagttaacataatattttaaaaatgctttaggaccccaaggaaccatgctgtaagagagccgttgtattggaagtcagaccctagaccacccttgcaacacttaaattgtatcatttatgcacatctagattgacctcagtccattttaactttaaa

SEQ ID NO: 17326 - DNA, 537 bp, Homo sapiens
  misc_feature 151: n = A,T,C or G
tacgactcactatagggctaactatagcggcgaattgtgccctctagatccgtgcgtcaggtgacggatatctgcagaattcgcccttagcgtggtcgcggccgaggtacttctttttttttttttttttatgaggcagggtgttgctcantcacccaggctagagagcagtggctccatctgggctcactgcagtctcaaacccctgggctcaggcgatcctcccacctcaaccccccaagtagctgggattacaggcatgcaccaccatgtccagctaatttttgtagagatgggggtttcaccgtgttacccaggctggtctcgaactcctgagctcaagtgatcctctcaccttggcctcccaaagtgctgggattacagatgtgtgccaccttgcccagccagattttatgactgctgtatacttttgtgagtcagttttccacaagcaagacatgatgattacaccaatatgagtttcattatttaattagaccttgttaatagatgtaggagagaagagtctttgttccc

SEQ ID NO: 17327 - DNA, 442 bp, Homo sapiens
gcatgctcgagcggtcctcaatgtgatggatatctgcagaattcgccctatcgagcggtcggccgggcaggtacccgaaaagaaaggaagctatagtaatgaaaggattgctgccaaaatcctgtttcccccttgcagatcttacagaaaacagccacagaatcccaaggcatcagcaccaagagagcctgtagaaactatctggtctaagctcctgaagcccagagataagaatgacttaacccaagctggacagcctcttaacagtccactgttaaccccagaaacagatgcatttgaatctgaaaggagacaggaatccttaatcctactgctcagggactttgctgatttacttttgctggctattaacctttctgtgacatggattttctaccaagcaaaggcttttattcaagtctcccagagatttcctatttaa

SEQ ID NO: 17328 - DNA, 453 bp, Homo sapiens
cactatagggcgaattgggccctctagatgcatgctcgagcggccgccagtgtgatggatatctgcagaattcgcccttcgagcggccgccgggcaggtacttttttttttttttttttttttttaaactctgatcgttgtggtggtctgaaaatatacccacacattttttgatatttctcccctcaggggtggagcctaattcctccctccctgagtatgggctagatttagtgacttgtttctaacttgcaaaagtgacagagtgcacctatagagactaagtcagaaaagacattggggcttccttttcgctctcttttttgggatactcgggaaaagcccgcttccatttcatggaacactcaagtatctctatggaaaagtccatgtggcaaggagccaaggccatgagtgaggagctaaggccttctgccaacagccacctgagtg

SEQ ID NO: 17329 - DNA, 495 bp, Homo sapiens
tacgactcactatagggcgaattgggccctctagatgcatgctcgagcggccgccagtgtgatggatatctgcagaattcgcccttagcgtggtcgcggccgaggtaccttcaaactagagaccaaaactgggcacttacaatgaaaaggcaattttcttatccagctataatcctaaataaggcaggatatatccaccaaattacccacaaaattcagcaaagtaaaatagctcatgggaaaacataagctggaaaaatactaataaaaaaactgaattacttcgaagtagtcatctgaatattcacagacttgttttcatttacaaatgtaagtcaaaaaagtctcctcatctttctaaccactacgaggattaaggatttaagttattcactaagttaatcatgaaaaaaatagaaaacattttaattctaaatttgtatacacaacagctaaaagacacaaggctgggaaattatcaccaggagaaaaatc

SEQ ID NO: 17330 - DNA, 461 bp, Homo sapiens
  misc_feature 123, 131, 160, 404, 405: n = A,T,C or G
gactactatagggcgaattgggccctctagatgcatgctcgagcggccgccagtgtgatggatatctgcagaattcgcccttagcgtggtcgcggccgaggtactccaccatttaatagggtnaagaaganaaaccacgtgattatagcagttgatgcanaaaaaccatttgacagaattcaacacccatacatatttaaaaactctcagaaaaataggaattgaggaggacttcctcaacttgttaaagagcacgtgaacacacaccaaaaaaaaccccacaactaatgttatacttaagggcaaaaggtcgaaggccttgttccttagattaggaacaaagcagtaatgtctcttctcaacattaatcaacatattgatggaagttctagccagtgcagtannagctaaaataaaaaaaaaaaggaaagggcatacaactaagaaaggaagaaataaaa

SEQ ID NO: 17331 - DNA, 365 bp, Homo sapiens
ctagatgcatgctcgagcggccgccagtgtgatggatatctgcagaattcgcccttgagcggccgcccgggcaggtacgcgggaccacactgaatctcccctcctcacagttgccatgtagaccccttgaagaggggggggcctatgagccgcaccttgtcatgtacttgcacaaaaaaaacaagcagttattactatttaaaattctattccttcacccagttttctcactcaagtagaaactcatgaatatctgtgattttggctataggaccaggccacaggaaagggctgaaatatctctaaaagttagggaaaagtggtttcttgagacttgaaggcagtcattcatcactttgtgcttg

SEQ ID NO: 17332 - DNA, 569 bp, Homo sapiens
tatacgactcactatagggcgaattgggccctctagatgcatgctcgagcggccgccagtgtgatggatatctgcagaattcgccctttcgagcggccgcccgggcaggtacacacatgtcctggctgcacagctgcttcattcctctagtgcctcccaagatcagggcaggccgtgttgccctctggacttccaagggggaagtgagttactggcccaagtcactcactcatcaagaacactgaagccaggtctgctgactccagggagagccttgtagattgtgaggaccgaatgcatataaagtccttagtcaacaccagcacatggtaggtgctaacacatgttggctactattgtttctaagagagggttttcttgaatggaaagaaaggagaaaagacagagaggaagtcaggaatgtcacagagacactttctggggcacacaggtgagcaagcacagagagcagagctgcccaggccagctgctgacttcattccgtgtgtcctccaggggcacttttaggcttcttggcaggattgggaaagtcaatctcatctgggctg

SEQ ID NO: 17333 - DNA, 535 bp, Homo sapiens
ggcgaattgggccctctagatgcatgctcgagcggccgccagtgtgatggatatctgcagaattcgcccttagcgtggtcgcggccgaggtactttttttttttttttttttttttttggagatggaggtttgctcttgttgctcaggccggagtgcagtggcgtgatctcggttcactgcaacctccgcctcctgggctcaagtgattcttctgcctcagcctcctgaggagctgggattacaggcgcatgccaccacgcctggctaattttcatatttttagtagggacagggtttcaccatgctggccaggctggcctcgaactcctgacctcaggtgatccaccggcctgggcctcccaaagtgctgggattacaggtgtgagccacgtgcctggccacttttcttttttttatttttaaaaatttagttgtataataccaaattcttcacttgtcttttaactgaaacctttcccaatttgtgcttttaaaggcatttgaagataaaaaggttatgtagtcaaatggaaa

SEQ ID NO: 17334 - DNA, 486 bp, Homo sapiens
gcgaattgggccctctagatgcatgctcgagcggccgccagtgtgatggatatctgcagaattcgcccttagcgtggtcgcggccgaggtactgggattacgcgtgagctactgcacccggctgagtgatttttttttttttttttaagatagagaaagtccctcatactgaggagccttgcagttgagagagaacagaattccagttggaggatcaaggaatttgagggaggcagcatgcttgcagtgttcctaggatttttacaggaactacaatagaaagttagggatgaaattatattgaaaggggaaagctggactgctcaggtttggaggtcatggggaattccaggattcagtatgtggttgctctcttatttttaacttctgcttagcagtaaaaccacatccttccttcttcctgaaagtaatgtttaacttcctctccctgcagcatttcactctatgtaatgggagtggggtgga

SEQ ID NO: 17335 - DNA, 496 bp, Homo sapiens
atacgactactatagggcgaattgggccctctagatgcatgctcgagcggccgccagtgtgatggatatctgcagaattcgcccttgagcggccgcccgggcaggtaccaagcctcaaaatacttgaactagaagccatctcttaaagttaaaagtaagaagctccaggaaaaataaagattgcatagtaaaaagggatagatggcaggattaattcaactcaacaaatatttatcaaatgtctactctggtcaggtgctgtgttagcagccagcttccctaaagggaggaaaggctagacacgaggacattgaggattgtttatttaaagtcactcataggcatgccataatggatttattaaggggaaattggggtttctgtgaatctttacaggacatagccatggagacaatcactatgttaagtaagttgctgttttcccaattgggcttcagtttcctgagaacaaaaagtgaggaagttggattaattg

SEQ ID NO: 17336 - DNA, 396 bp, Homo sapiens
tacgactcactatagggcgaattgggccctctagatgcatgctcgagcggccgccagtgtgatggatatctgcagaattcgccctttcgagcggccgcccgggcaggtaccacttacatgttttactttccaagttccaacctaactacttataaacttgcaagtagttatgaattgtgggttacctatagtcaaatagtagggtttttttttttcagtcaattggaaatgaaagggcaggtattggcaaggcttcgggactaatttaatgccattaggaaagcacaagataatgtaagggctaaaagcctcaaaaaaaaaaaaaaggtgaaatgaggagttgttgctgattggtgcaggaacctgaaagatggcacctgaaaactcaaattacat

SEQ ID NO: 17337 - DNA, 445 bp, Homo sapiens
ctactatagggcgaattgggccctctagatgcatgctcgagcggccgccagtgtgatggatatctgcagaattcgcccttagcgtggtcgcggccgaggtacacttggaagagggccaagtgggcaacttgagaggttaaactgcatggtttgagttttgatttgaggttttacgtgttggcatgcattcaggggcttgtgtccctttctcccctgattcttccctccgggtaggagggaagaatccacctgagcagtggcctgccagcacttgagaggctccgcaagcacaagtgtgtttatgggagttgtgcacatgctcagttgaggcattcttcccttaccagtcgagtgtttctagaggaaggtcatagactaatagtctaatagtctatggcctttagtcatactagtgcacatgcctgagcccactcacctgtgaacc

SEQ ID NO: 17338 - DNA, 378 bp, Homo sapiens
gggcgaattgggccctctagatgcatgctcgagcggccgccagtgtgatggatatctgcagaattcgccctttcgagcggccgcccgggcaggtacaaggcatgatgagtccttttgcttttaggcttttgacttctggttttagactttctttagcttctgttgttagacaacattgtgcaagcttggtttttataagtttgcatggattaaactgaacttaatgaaattgtccctccccccaaattctcagcacaatttttaggcccgcaaggagtcaagcacctcaaggagatcttcagtttgaacttggtgtagacacagggatactgatgaatcaatattcaaattagctgttacctacttaagaaagagagg

SEQ ID NO: 17339 - DNA, 481 bp, Homo sapiens
gaattgtgccctctagatgcatgctcgagcggccgccagtgtgatggatatctgcagaattcgccctttcgagcggccgcccgggcaggtacaatggtgtgatctcagctcactgcaacctccgcctcccaggttcaagcgattctcctgcctacctccgagtagttgggattacaggcatgtgccaccacccctggctaattttgtatttttagtggagccggggtttcttcatgttggtcaggctggtcttaaactcccgacctcaagtgatctgcccgtctcggcctcccaaagtgctgggattacaggcgtgagccattgcacctgtcccttgccagtgtgttattaaaataatttagggggttgagaaaagatgcagtgagccattattctactttagcaagtagtctcttaaaaattgatgtggattttaaaaaatataccattgagaacacgtatttttcttaaaacttgacct

SEQ ID NO: 17340 - DNA, 589 bp, Homo sapiens
acgactcactatagggcgaattgtgccctctagatgcatgctcgagcggccgccagtgtgatggatatctgcagaattcgcccttagcgtggtcgcggccgaggtacaaaataacatcataaataacataaatgagaagttttcaagtatttcaatgtgccttgaaaagtttcaaacagtaattctcacaattggttagacaatcattttttttcttttcttttcctctcatttagtctcagagcctaaaaagaaatgcctccagtctctgttagccccgatgtttggaatgaaattaacaagattctaccttaaaagagaaaacttatgtgggcttttcaaattgtgaaaatttgttccctcttataaaatataatctttcccctgctgctggtttataaatatgggcatatagcccagagccattataaagaaaaaacaaccaaccacaataaactaaggagcctcatctgatggctaaggttctcaggaaaaaatgagaagagcaccttgatcaggaaaggaaaaaaggatagaggataaaaacagtaacctttaacttctatgccctcactcagccagtaactta

SEQ ID NO: 17341 - DNA, 443 bp, Homo sapiens
tatagggcgaattgggccctctagatgcatgctcgagcggccgccagtgtgatggatatctgcagaattcgccctttcgagcggccgcccgggcaggtacgcgggcaacattcatatttattaaagaaatattttagagtggagctgagaagactttctgtaagaaatctttaaagcagcaaaataagtgattttgccagtaactttcacctgtagaagtcagaataaccaagcacagatcttttttcaaactttctatgatattttgactttgcttccatcctttctattgcttagtctagagattaaggtattacttctaataatagtcatttacattatttatgttgctaatctcttgatgacaagacctctacatgtgtcttgaaataaaatcaaatggctctgtgcttcatatagagactaatttctaagacataaat

SEQ ID NO: 17342 - DNA, 398 bp, Homo sapiens
tacgactcactatagggcgaattgggccctctagatgcatgctcgagcggccgccagtgtgatggatatctgcagaattcgcccttagcgtggtcgcggccgaggtaccctcagaatatccttaagaagcaggaaggaaacaagttttcctcttcccacttccaagactgagaaagagtccagatgagctggtttgcccaagcaattcttatcaccagatactccgttattaaacgtgtctcctgccttctttgaaagcaacaggagaaatgaagcataggaaagtctgcaagctaacagtgtatcacctaggaggcttgtatataaatatgaagctctgcaaaatgtagttataatgaaaggcacttcctattaccagctccctaactctttttaaa

SEQ ID NO: 17343 - DNA, 318 bp, Homo sapiens
  misc_feature 90, 94: n = A,T,C or G
ccctctagatgcatgctcgagcggccgccagtgtgatggatatctgcagaattcgcccttcgagcggccgcccgggcaggtacctttttntttnttttttttgtgttggttggttggttggttgttattaagagatggggtttctgccggttgcggtagcttacaactgtaatcccatctagttgggaggctgtggcgggtggatcacctaagttcaggagttcgagaccagcctggccagcacggagaaaccctatctctgctaaaaataaaaaattagccggtcatgggggcccatacctgtaatcccagctactc

SEQ ID NO: 17344 - DNA, 439 bp, Homo sapiens
ctctagatgcatgctcgagcggccgccagtgtgatggatatctgcagaattcgcccttagcgtggtcgcggccgaggtactaatctgtaaatagtagatataaaaagggaagagtgatttagagcaaggattgaagaaaggagtccttgtagtggaattggtttcatatggcattctaatgacacaggaaaatgtgttctcgccccattgacttgcataccagtaagagtcttgcctttgattaactgaagctaatctgggtgcagggaggtggtggacagtgaataaagtcatctcttctcttcctccaagacacaccagtgtcaacatgggaacagcaatgccataatcttcttcccaactcacaactttcaaatagtagttaagctgactaattcaaactcaaaaaaaaaaaaaaaaaaaaagtacctgcccgggc

SEQ ID NO: 17345 - DNA, 398 bp, Homo sapiens
actactatagggcgaattgggccctctagatgcatgctcgagcggccgccagtgtgatggatatctgcagaattcgcccttagcgtggtcgcggccgaggtacttggagggttagacctacttctgtgtcaggtagcacccaaatcctaacatctattttggagacctgtctgtgcctcttcatgctcacaccattgttctgatagatgatgccagtggaacttccaaagaagcattccacctgatcttcaccaccctctttgatcctctttttaaatctgtgtgtggaaggcaactgcaatatagaggatttggaaggttgtctgtttctgttgtctggggaaatgataaaaaaaaaaaaaaaaagagagagatgtgaaaatgaaaaagatggacca

SEQ ID NO: 17346 - DNA, 661 bp, Homo sapiens
gactactatagggcgaattgggccctctagatgcatgctcgagcggccgccagtgtgatggatatctgcagaattcgcccttagcgtggtcgcggccgaggtactttgggtcttcattttgaaggcttccatagttatataaaacgatgattaaataaacgtgctatgcttctcgcttgttaacctgccttattatagccgtgtcagctgtgacccttttgataggaaggaaagagatcacactatttctgcccttatagttctgatgatgaagatgggatgtctgaagcacctgactcacctattgatgaggtcctgggacaactgataaagagctggcaaataaaggtaagaatttttaccaaggtgagttctgaatctctgcctgtagtttctggtcaagaactaaaggtaaaaatttatctttatatcttactttccaaatgcaggtcagcaggagatcatttgtttgaactgttctcttatgtaaatttggatttcagggactcatttgttattgatcctttcccttcaacgaacagctgtcattttcctgttttgtgtcctgagaacccaacttggcttgctgcctgtcaggacacactttggtgtgtgaagggggctaaacaaatgttggaggctcccattaaaagcttacata

SEQ ID NO: 17347 - DNA, 511 bp, Homo sapiens
cactacttagggcgaattgggccctctagatgcatgctcgagcggccgccagtgtgatggatatctgcagaattcgccctttcgagcggccgcccgggcaggtaccatggctgaaaaaaagagtcacaagtggctgagacactgctccatacaggactcatgtgtggtcattgcccacccaatcttatgactccatcatcttgggaccctggaacaaacatgactttttttgatcgatattttgtcctcggtgttttcaaggtctgatgttggagccctgtggcccaccctcccttctccaccagcatgttggtttgaaaaggatagggaatttagaaacagttctgtacctcggccgcgaccacgctaagggcgaattccagcacactggcggccgttactagtggatccgagctcggtaccaagcttggcgtaatcatggtcatagctgtttcctgtgtgaaattgttatccgctcacaattccacacaacatacgagccggaagcata

SEQ ID NO: 17348 - DNA, 504 bp, Homo sapiens
cactactatagggcgaattgggccctctagatgcatgctcgagcggccgccagtgtgatggatatctgcagaattcgcccttagcgtggtcgcggccgaggtacaaagacggccacagcccctgcccgggtttaacttacatatatacagagtgggcggggcaggcatggccacagaggtggtattacaaaatatacaaagtggtttctttctttacatttcatagaagaagcctgcctcatttccaaatgagagcactagaagcacaaatcatgcagaccatttactatataacttatgaaaaatgctgtactgggacagcgccgccaagatccaggccatggaggctaacgtgcagctgagctttgacaagcactgtgatccaaagcagcctaattactggccggtcatccccccgaagttctgagctcggggcacagggcacccagcctcttcctcttccttttggatacgccctcttcatctctccttctgtacctgccc

SEQ ID NO: 17349 - DNA, 450 bp, Homo sapiens
  misc_feature 212: n = A,T,C or G
atacgactactatagggcgaattgggccctctagatgcatgctcgagcggccgccagtgtgatggatatctgcagaattcgcccttagcgtggtcgcggccgaggtactactcgattgtcaacgtcaaggagtcgcaggtcgcctggttctaggaataatgggggaagtatgtaggagttgaagattagtccgccgtagtcggtgtactttnttttttttttttttttttttgaaaaagtagttagcatttaatgaaactccctccatgtggcttcaagccaccaggacacaggcccccccaacactcttaatcttctcctcagctcttctgctgaagaatttggccttcacgatgacaggctgctttgggagctttccctttcccagaactttatagtagcccgatcgcaccacattaatgatgggagcagccccagtcttgtttttag

SEQ ID NO: 17350 - DNA, 398 bp, Homo sapiens
agggcgaattgggccctctagatgcatgctcgagcggccgccagtgtgatggatatctgcagaattcgcccttagcgtggtcgcggccgaggtactgagcgatacaaatcagtgttctcctgttatcctaacaaaaactactatatatgtttatccccattctaaaatgtggaactaatacatatatgagtgtaactaggccccaaatcacactctctaatcatgcaaacctatatattttacaccacagtcttaacctaaaaaaagaggggactaagggccatctctacctatattatccgctggtgaaagattcacaaactcaaaacatacattatgactaggctcataacaatgagcaaagatggactccctcaaaacaaagcagcataagtagg

SEQ ID NO: 17351 - DNA, 499 bp, Homo sapiens
  misc_feature 271: n = A,T,C or G
atacgactcactatagggcgaattgggccctctagatgcatgctcgagcggccgccagtgtgatggatatctgcagaattcgcccttcgagcggccgcccgggcaggtacaacgcagagtcccgggaagcagtggtaacaacgcatagtcccgggaagcagtggtaacaacgcagagtcccgggaagcagtggtaacaacgcagagtcccgggaagcagtggtaacaacgcagagtcccgggaagcagtggtaacaacgcagagtcctttntttttttttttttttttttttttttttcagaaataaacactatcactaaccatctggtatcctatgattcctgaaaataaaatctatttctaggaacaatttaaaccgtaaaaaaacttcactgtgtcatgaattaaactttcctattttttcgtctttggatgacatcctctgggaaagtgccccatttatatttcagggacttcaattttggtcccgggtaccttg

SEQ ID NO: 17352 - DNA, 401 bp, Homo sapiens
gactcactatagggcgaattgggccctctagatgcatgctcgagcggccgccagtgtgatggatatctgcagaattcgcccttagcgtggtcgcggccgaggtactttttaatggaaacaacttgaccaaaaatttgtcacagaattttgagacccattaaaaaagttaaatgagaaaaaaaaaaaaaaaaaaagtacctgcccgggcggccgctaagggcgaattccagcacactggcggccgttactagtggatccgagctcggtaccaagcttggcgtaatcatggtcatagctgtttcctgtgtgaaattgttatccgctcacaattccacacaacatacgagccggaagcataaagtgtaaagcctggggtgcctaatgagtgagctaactcacat

SEQ ID NO: 17353 - DNA, 489 bp, Homo sapiens
gagtcgacgcatggcgaattgggccctcgtgccctctagatgcatgctcgagcggccgccagtgtgatggatatctgcagaattcgcccttagcgtggtcgcggccgaggtacaatggtgaatagtggtataagtagaaattctcgtcctgttttcaaacttgcagataaagcccctagtcattcaccattaagtatattagcttttggtgtggagtttttcatcttggctcactgcagcctcaacctcttaagctcaagtgatcctcccaccttaactgcctgagtagttgggacaataggcatgcaccaccatgcccagataattttttttttaatattttgtaaagatggggattccctatattgtccagaatggtcttgaactcctggctttatgcagtctttccacctcagcctcccaaagttctgggttacaggtgtgagccactgcgccgggccaattttggtttttcatggaggactttta

SEQ ID NO: 17354 - DNA, 519 bp, Homo sapiens
  misc_feature 440: n = A,T,C or G
ctcactatgggcgaattgtgccctctagatgcatgctcgagcggccgccagtgtgatggatatctgcagaattcgcccttagcgtggtcgcggccgaggtacataagccactttcatacctgcctactattatggactgcagagtaatgtggcctatatcaatttttcaggattgttcttttgtttgttgtttttttcatcccttcctcccccatattttctcttcacaggacatgagacttcacaacctgctaaaaatgaactttccagacctaccaatctaggaataaaccgtcctagccaggaaaggtcagatgacctttcctgagaccggagactcattctgttgtaaaaatgctttctccaaagatgttaaaaaagaaaaggggaaaatgtgaaagaaaaatatcttgggtcccttcaagatgggaactgctcanggcaaatctgccttctattctattcaagtcatccatttgctcacagagacagatgcatattctgattgcctcctttgga

SEQ ID NO: 17355 - DNA, 397 bp, Homo sapiens
tacgactcactatagggcgaattgggccctctagatgcatgctcgagcggccgccagtgtgatggatatctgcagaattcgcccttagcgtggtcgcggccgaggtactgaatttcagtcctggctctgccacttagccgaatatctgaccttgagcaaggcacttaactttgctggaccttgggtttctcatctttaaaatggagataatttcatcttcttatgatggatctcttcagagaagtaagaataatgaagattttaaatcatcccaatatagtgaagttattcgaagtcattgaaactgaaaaaacactctacctaatcatggaatatgcaagtggaggtgaagtatttgactatttggttgcacatggcaggatgaaggaaaaagaag

SEQ ID NO: 17356 - DNA, 584 bp, Homo sapiens
  misc_feature 526: n = A,T,C or G
tacgactcactatagggcgaattgggccctctagatgcatgctcgagcggccgccagtgtgatggatatctgcagaattcgccctttcgagcggcccccgggcaggtacacacattttttaatttataaaataaatactgccaggtggctacttaaaaaaaaagaaaagaaaagaaaaggccaggcgcagtggttcacgcctgtaatcccagcactttgggaggccaaggcaggcagatcacctgaggtcgggagttcgagaccagcctgaccaacatggagaaaccccatctccttactaaaaatacaaaattagctgggcatggtggcgcatgtctgtaatcccagctactggggaggctgaggcaggagaatcgcttgaacccgggaggcagaggttgcagtgagccgagatcccaccattgcactccagcctgggcaacaagagtgaaactccgtctcaaaaaaaaaaaaaaaaggtaaattaggttaaaagaaaaaaagtgttatggtggaagtggagtanggtgccattttagttagggtagtctgggaaggcctctctgaggaggagctatttgaat

SEQ ID NO: 17357 - DNA, 538 bp, Homo sapiens
aggcgaattgggccctctagatgcatgctcgagcggccgccagtgtgatggatatctgcagaattcgcccttcgagcggccgcccgggcaggtactttgtttatatggatattttttatgatgcaaaaaaaaatttattggaaatcccttgaatacattttgaagtgttgctcggtattttcaaacaaagtatgttggagaggttggaggaagaggagggactctgacacctggagacaaacagctggtcccaacctgtcccgggggtgctgcaggagtcagtttagggctcattcctttcatggcaggactgaggggcaagggctggccttaacagttgctttacttatcccaagctcaactcaaagtcatggctgagactcttcacagaaggagccctggtgaaaggctgctgccacctgtaaatgccaaagattgctgcctcagacaatggctagggcctttccatgcaaggtcttggaaaagaaaacaatatctgaaatattggggggcattaataacctaaccagggggcctt

SEQ ID NO: 17358 - DNA, 509 bp, Homo sapiens
ccctctagatgcatgctcgagcggccgccagtgtgatggatatctgcagaattcgccctttgcggccgcccgggcaggtggatcacttgaggtcaggagttcaagaccaacctggccaatatggtgaaaccccatctccactaaaaatctaaaaattagctgggcatggtggtgcacacctgtaatcccagctacctgggaggctgagacagagaatagcttgaacctgagaggcggaggttgcagtgagttggattggcatcactgcactccagccgggcaatagagcaagattccgtctcaagaaagaaaagaaaagtgaaatttctaaatgaaaaatgcttgactatatttgtcttgtgggaattatcgtcaataataagaagctttttgagtgcttattatgttccaggcttatacataattactcatttagtgcacacaaccactatcttaagctgtctatttttatcatcattttacggattgagaaaataggggctgggcac

SEQ ID NO: 17359 - DNA, 359 bp, Homo sapiens
gggccctctagatgcatgctcgagcggccgccagtgtgatggatatctgcagaattcgcccttgcgagcggccgcccgggcaggtacttatatttttttttttttttttttttttttttttttttttttttttttttatatttttatttttttaaatttttttttttttttttgaatatattttttttttatttttaaaaatattatttttaaaataaaaaaaaagggaaaaaaaaaaaaaaaaaatttagtttattcttgtagggttttacctaatcctcctgggagaaacaaaaattgagtatgatacacaatctggaaaagaataaaaacaacccttatgatgtcggatgaaccct

SEQ ID NO: 17360 - DNA, 344 bp, Homo sapiens
atacgactcatatagggcgaattgggccctctagatgcatgctcgagcggccgccagtgtgatggatatctgcagaattcgccctttcgagcggccgcccgggcaggtacttttttttttttttttttttttttgtgttatcttttttttttttttttttatcttgtgtgcatgcggggggggagcaaaaagggtgtttatttcacctgggtgcaggcgggctgattcctaaaaaaaagtcagggaacagaaataaggggggggctgttttataggatttgggtagggaaaggaaaaaggggggttggtatctggtgggccagaatgggggtcaaaaaggactt

SEQ ID NO: 17361 - DNA, 491 bp, Homo sapiens
cactactatagggcgaattgggccctctagatgcatgctcgagcggccgccagtgtgatggatatctgcagaattcgcccttagcgtggtcgcggccgaggtacttttttttttttttttttttatttaaaatattttttttttttttttttttttttttttttttttttttttttttttttttttttttttttttttttttaaaaaaaaaaaaatttttaattgaaaaaaaccaaccataaaaaaattttttttttttttgggggggagcttaataaaaaaaaacacccccctttttttttttttatcaaaagaaaaaaaaatatagcaaccaacaattttgtttgtcttagctgtttgctttacaaaaccccgggtgtttttaaaaaatgcccactccatcacaaaaacacaactgatttttccgcgcaattttaataaaaaaaaaaaaattttttaaagaaacaccccaaccccctttttaaaaaaaa

SEQ ID NO: 17362 - DNA, 478 bp, Homo sapiens
tagggcgaattgtgccctctagatgcatgctcgagcggccgccagtgtgatggatatctgcagaattcgcccttagcgtggtcgcggccgaggtacaagtatgatagattattttctatttgctgtgggaatttaaatgtaaaataaatacaaaatacatgtgtggtttaatgaacactcaatgaagcacccgcgtacctaaatgaaccaaactatgaggctctgattagtattcagattggaataatggaacaaaccattgctgttttagataagatgcacaaaaagaatgtggaaaactgcaagaaactactcaaaaaacttggaaagttcagcaatcaaaaagatatagcaaattatgccctaagctgcaatctacgagaagagttggtagctgtctcagagagaaaagacatctgtaatgcaatggggtctaaactgacttgtgaaaagattgtcaaagaacggtatgaaaaca

SEQ ID NO: 17363 - DNA, 438 bp, Homo sapiens
  misc_feature 114, 351, 352: n = A,T,C or G
cggccgcccgggcaggtacttttttttttttttttttttttttccttttttttttttttttttttttttttttttttttttttttttttttttttttttttttttttttttttnccccgccccccccccccccctgggggggggggggggcccccccccccccccaaaaaaaaaattttttccttttttttgggggaaaaaaaaacaccccccggggggggttttttttttaaaaaaggggggggggggggggtttttaaaaaaaaacccctttttttttttttttttaaccccccccccaaaaaaaaaaaccttttttggggggaaaaaaaaaaaattttttttttggtnncccccccccccccccccccccccggggggggaaaacccccccggggggggggccttttaaaaaaacccccccccccccccccccgg

SEQ ID NO: 17364 - DNA, 694 bp, Homo sapiens
acgactcactatagggcgaattgtgccctctagatgcatgctcgagcggccgccagtgtgatggatatctgcagaattcgcccttagcgtggtcgcggccgaggtacccagaagagtttgcacttcgagatcaagagaagtatctgtatcgatatcctggtggggagtcataccaggacctggtgcagcggctggagcctgtcatcatggagctggaacgtcagggcaatgtcctcgtcatctcccaccaggctgtcatgcgctgcctcctggcctacttcttggataagggcgcagatgagctaccatacttgagatgccctctccataccatcttcaaacttactcctgtggcctatgggtgcaaagtggaaacaattaaacttaacgtggaggctgtgaacacgcaccgtgacaagccaactgcagcagagaccacactggctgtgcgcagacgcccctccgcagcgtccctcatgttgccttgctaatgatgtggatgttcaggcctcacctctccaaacgactgggatctactgaaaagcttgtgatgtcagcttcacagaggctagaacaggaagttaagtgggaactggactttgggggccaccaaaacgaggcctggagaaacgtcaccatatttcctccccccctgcctaatgggaatatcagttacactgaaaaaattaacttc

SEQ ID NO: 17365 - DNA, 336 bp, Homo sapiens
ttgggccctctagatgcatgctcgagcggccgccagtgtgatggatatctgcagaattcgccctttcgagcggccgcccgggcaggtactccagcctgtgtgacagagtgagaccttgattaagacaaaacaaaacaaaaacaaaacataaaaacaaacacaaggtgactttaagttgaagagcaagcacttgccatttgagccttagccagaactataaactggtaatgtgggtgaggttatccttttccatatttccttcttcttcacagaggttgattttaagaaaacttagagaaaaacaaccaagtgttgactttagtaacttctatgatc

SEQ ID NO: 17366 - DNA, 457 bp, Homo sapiens
ctatagggcgaattgggccctctagatgcatgctcgagcggccgccagtgtgatggatatctgcagaattcgccctttcgagcggccgcccgggcaggtactagaaagtcatttttctaaagagcattaacatttcaaataagcaaattttatttagagatgtaaacatgtaaacattaaaaactcaactaaattttatctttattatgatggtcgctgatttaaactattaatgaaaatatgtcatgtcagagatataaagaagaatatatcacccagatagtaacatgcaattaatttccatttgattaatataattggtgatttaacacacatacatatacccgcgtacctcggccgcgaccacgctaagggcgaattccagcacactggcggccgttactagtggatccgagctcggtaccaagcttggcgtaatcatggtcatagctgtttc

SEQ ID NO: 17367 - DNA, 362 bp, Homo sapiens
  misc_feature 49: n = A,T,C or G
ccctctagatgcatgctcgagcggccgccagtgtgatggatatctgcangattcgccctttcgagcggccgcccgggcaggtacttttttggttttttttttttttttttattttttttttttttttttttttttttttttttttttttttttttttttttttttttttctttttttttttttttttttttttaccccaaacccctgttttttttttaaaactgttcccccccccaattttttttttaaaaaaattatttaacttttccccttttttcccccggcccttttcccaaattaacccccctttttggggtccccctgcccgaggggcctttttaaaattttttccccgggggggg

SEQ ID NO: 17368 - DNA, 619 bp, Homo sapiens
ctatatggcgaatggggccctctagatgcatgctcgagcggccgccagtgtgatggatatctgcagaattcgccctttcgagcggccgcccgggcaggtaccatcatctcatttgactcttgaaataaccctctgaggtatgctagaagggcatccttatccctgttttgcagatgagcaaactgaagtgcagaaagtcacacaatgagttgggcgagaaattgagtgttaaaactcctgaatgcttctagtccaatactctccccatgatactaggtatataacaagtgtgggacaatcatggttaaccaagagtatcatctgattatattacagatgcattgtgagaggtttctatgtatcctgagaataattggaaccacactctttggagtctctctcctccttggaatcacggctgcttatattgttggctaccagtttatccaaacggataattactatttctcttttggactgtatggtgcctttttggcatcacacctcatcatccaaagcctgtttgcctttttggagcaccgaaaaatgaaaaaatccctagaaacccccataaagttgaacaaaacagttgccctttgcatcgctgcctatcaagaag

SEQ ID NO: 17369 - DNA, 333 bp, Homo sapiens
ccctctagatgcatgctcgagcggccgccagtgtgatggatatctgcagaattcgcccttagcgtggtcgcggccgacgtacaatcagtgggagccctgagcctgttttcctgtggtcactgagaggaggcgagtcatgtgtgaggctccaggcaggggtgggcagtgactactcagtcaattgctccatgtctcagtggtttcatctataaaatgggtggtgtggaattcactcaggtatccacaagataatgcatgtcagttaggaaatctggaggtccatccccgacattgtgtgaccttgaattaagcacttcatctttatgtttgtct

SEQ ID NO: 17370 - DNA, 684 bp, Homo sapiens
gactcactatagggcgaattgggccctctagatgcatgctcgagcggccgccagtgtgatggatatctgcagaattcgcccttcgagcggccgcccgggcaggtacttcttagataaaacagaatacttgaagttaccagttacagaaaacaagaatctataaactaataccataaagcaaaggaaaatttgttttttgtctccatgtgttgaaggagtgctgggagagtctccagagcacattcctttgtgtcctagcttcttagatagtgtttaccaagccttttcctgggtctgggctgtgcctgttgctgcctctgggaccagtcagcctaatacaggaaagcttatttctttctctttttaattttatttttccttatttctttaatttcccacctcaaaacatttcctactctatttcatcaactaagatttatatgattcatccattaaatatttatttgaatttctaattttggtattatggtaatcataattaagtaaacatttcctactgtacctcggccgcgaccacgctaagggcgaattccagcacactggcggccgttactagtggatccgagctcggtaccaagcttggcgtaatcatggtcatagctgtttcctgtgtgaaattgttatccgctcacaattccacacaacatacgagcccgaagcata

SEQ ID NO: 17371 - DNA, 380 bp, Homo sapiens
atagggcgaatggggccctctagatgcatgctcgagcggccgccagtgtgatggatatctgcagaattcgccctttcgagcggccgcccgggcaggtactttttttttttttttatagggctttttattattttttattttttatattttttgttttttttttttggtaaaaaaggggaaaagataagaaaaaacaaaaaaaaaaaaccaccccacattcggaaggggagagagtggtcacccgcaccccggaggaggaaatcattgattcccaccccctgcttactgggtcctacgccaacagatatgggagggatccacccacttaagtttcccttggactgcaaatggaaaaaatgattttcaacttggcagacaca

SEQ ID NO: 17372 - DNA, 481 bp, Homo sapiens
ctatatggcgaatggggccctctagatgcatgctcgagcggccgccagtgtgatggatatctgcagaattcgccctttcgagcggccgcccgggcaggtactttaccaagtaggcacttgggaaatgctgtgtccacatacttaggaaatggcttcagttaacactgggcttgggaagggctctcttatccaaggagcagtcttctctggagccatgaaaccagcctggcagcactggtaataaactagtctgtgaaatctggcaaagcctctgtcctgtttggatatacgcaaaactgccttttaccatttccattgctttttattacttaatctcccaactttgtgcctggtgtctttttttttttttaaaataaaaaatttttgagggaattatgttttcataaaaaagtcttggggggatatcctttttcccacaaacccttgtttaaaagggcccattacccaattgggtaatttt

SEQ ID NO: 17373 - DNA, 657 bp, Homo sapiens
atacgactcactatagggcgaattgggccctctagatgcatgctcgagcggccgccagtgtgatggatatctgcagaattcgccctttcgagcggccgcccgggcaggtacataggactgtgaccatgtccactattcctgggtcagcatcccaggggaagtagaaaccactgacatacacactcacattcaagcacacacactcactcaggcgcacacacccacacacacataccccagagccaccgaggaagggaaacaccaagggtcgctgcacataaaaatatcacctcaactcatccctgacacacgcatgtcctcccaaggccacgctcacacaacacacactataagcactttgcctgattcactcactgggtctgtcttttgtgggaaggagaggaagaattcatcaaaggtctcctccccacccgcgtaccagcccggagcctgatagacctgctgggtggttagatccagaagaacaataacaatcactacagctcagctctcatgaagccacatccctaggaaaaggggaaagtgctatgtcaagggaacaccccatgggcaaaagaatctgaacaacagcctttgaccctagacttttcctttgacatagtctacccaaatgagaaggaactagaaaaacaattc

SEQ ID NO: 17374 - DNA, 488 bp, Homo sapiens
tggcgaattgggccctctagatgcatgctcgagcggccgccagtgtgatggatatctgcagaattcgcccttagcgtggtcgcggccgaggtactttcagacaatcgatgtcagactgtcatatcttattctttggggtatgaagcaaggtattttacaatgcccaaaaataactttcaaaatagtatttagcaaactgtctggagcctctttccccccaaattagagtatccaacacagatgatacacaagatataactggaagattactgattttttaaatgcctccccagaatttacatattaaatcgattattttctccttcataatagttaccttttgacacttacacattcaccccaagtacctgcccgggcggccgctcgaaagggcgaattccagcacactggcggccgttactagtggatccgagctcggtaccaagcttggcgtaatcatggtcatagctgtttctgaaaagtaattt

SEQ ID NO: 17375 - DNA, 566 bp, Homo sapiens
gcgaatggggccctctagatgcatgctcgagcggccgccagtgtgatggatatctgcagaattcgcccttagcgtggtcgcggccgaggtacaaatgtgcatcctcactaaattattgctaagactgaccttttaataaaaaggaaaatcacaaaggaggggaaccgaacaaagatactgctttctcaaaatttggaagaccacatatacatttatatagataaagctccatgaatccatatctatacacacatatctctttagatttttttttaaaacttccgttttcctgttcttagttttattgttttagcacaaaaacaaaagcatgtgtcgaagcatcctgtgtaagccgtgctaactcctccttccattcatcttgcagtgcacagctctgagtcaaggcatcagtccttgctccacactaacaagcagcaccgcatctcctagcaccgatagcccctgctcaaccttgaatagctgtgtcagcaagacggcagccaacaaaagtccctgtgagaccattagcagccctagttccaccctggaaagcaaggacagtggaa

SEQ ID NO: 17376 - DNA, 440 bp, Homo sapiens
ctatatgggagtcgacccacgccacgcgtccgtggtttcctccctcagcgccattttgtggctgcgagacccgcaaataaaggctatctccggggctgcggcgggaggagtgcgggggggggccggcggcggcgcggcctcggcctgtgtgactggcggcgcccgcgcagcctcgggctgggaagggtacaagatgaccaacgaagaacctcttcctaaaaaggtccgactgagtgaaacagacttcaaagttatggcacgggatgagttaattctgagatggaaacaatatgaagcatatgttcaagctttggagggaaagtacacagaccttaattcaaacgatgtgactggcttaagggaatttgaagaaaaactaaagcagcaacagcaggaatctgcacgcagggagaacatccttgtcatgcggctagcaacca

SEQ ID NO: 17377 - DNA, 516 bp, Homo sapiens
cactatagggcgaatggggccctctagatgcatgctcgagcggccgccagtgtgatggatatctgcagaattcgccctttcgagcggccgcccgggcaggtactttttttttttttttttttttttccctttttttttttttttttttttttttttttttttggaaaaaaactttttttaaaagggggaaaaaaaagcccccccccaaaaaaatggggggaaaaaggggccaaaagggggggccaaaagggggcccctttcctttttttttttccccccccggaggggttttttttctttttcccccccaaaaaaaaaaattccccgggaaaaaaccccccaatttaaaccccccccccccctggggggggctttttttttataaaaaaaaattcccccccccccccaaaatgtttccccccccccggggggtttaaaaaccctttttttaaaaaagggggaggggggaaaaaaaatttttaaaccccctgggggggggttaaaaaaaattttaaa

SEQ ID NO: 17378 - DNA, 617 bp, Homo sapiens
actatagggcgaattgggccctctagatgcatgctcgagcggccgccagtgtgatggatatctgcagaattcgccctttcgagcggccgcccgggcaggtactttttttttttttttttttttaaaaaaaacttttttttttgggtttattttaaattttaaaaaaactttccaaaagggtttaaaaaccctttttttccaaaacccattttccctaacctaggggtttttacaaaaaaggggcccctttttttaccaaacaaccggaattttagtttttccaaaaaacctcttttttaatttaaaaaataaagggggggtccattttttaaaaaaattcccccaagtaaaaacccccaacctggggcttttttttttaaaaacaaaccaattttaaggatttttaaaattttaaaaattttttttttttggggggtttttccttacttttccttaaaaaggacccctcccggttttggtaaaaaaaatcttttttaaaggggcacccttaaacagggccccccgtttggggaacccccaaaaaggggaaccccgtttgcccccttcaaaatttttaaacccttttttcggaaaaaacaaccccttgggtttttttt

SEQ ID NO: 17379 - DNA, 316 bp, Homo sapiens
  misc_feature 14: n = A,T,C or G
atagggcgaattgngccctctagatgcatgctcgagcggccgccagtgtgatggatatctgcagaattcgcccttcgagcggccgcccgggcaggtacctgagaataatcgaggggagagacctggtggttaacatgcatttaggtaaaatgtcaggaacaactttcctcttattaatactataaatccatctcaagcatattttaaaataatgagagatggaggaaacaatctagaagataaaagaaaaagatgtgcataacttgttttcagtttccctgtttatgacaagttgtcatttggcgggttgggggat

SEQ ID NO: 17380 - DNA, 703 bp, Homo sapiens
atacgactcactatagggcgaattgggccctctagatgcatgctcgagcggccgccagtgtgatggatatctgcagaattcgcccttagcgtggtcgcggccgaggtactcttacagttttggaggctagaaatctgaaatcaaggtgttggcaggaccatgccccctctgaagcctctaagtggggatccttccatgcttcttccagcttctggtagccttaggtgttccttggcttgtggtagcctctctccaatctatcctctgtcttcccctggccacccttctgctgtgtctgtgtcttctaataaggacatattattttagattagagtctacctaatccagtaagacatcattttaatttgactacatctgcaaagtccctatttctgaataaggtcacattcataaatattgaggattgcgacctcaacatattttttggtgggacaggattcaacccacgccagactgtttagaggactgctatctggttaattcagtacctgcccgggcggccgctaagggcgaattccagcacactggcggccgttactagtggatccgagctcggtaccaagcttggcgtaatcatggtcatagctgtttcctgtgtgaaattgttatccgctcacaattccacacaacatacgagccggaagcataaagtgtaaagcctggggtgcctaatgagtgagct

SEQ ID NO: 17381 - DNA, 372 bp, Homo sapiens
acgcggccgccagtgagatggatatcagcagaactccgcccttagcgcggccgcgcgccgaggtactttatttttttttttttgttaaaaccggcctctctctttccttttttgtttattttactttttttttttttttttttttattttgtcttggctggttcgaccccccccccccccgccggctgcccgtaggcccccccccccccccccaaaaaaaactgcccgggggggggggggggtctatcaacgggggccgccccccccccgagaaaaaaaaccccccttataaaaaaaaggggggggggggggggggggggcccccagacgggggaggggggggggactcaaaaaaaaacccccccccccccc

SEQ ID NO: 17382 - DNA, 760 bp, Homo sapiens
  misc_feature 433, 434: n = A,T,C or G
tatagggcgaatggggccctctagatgcatgctcgagcggccgccagtgtgatggatatctgcagaattcgcccttagcgtggtcgcggccgaggtacttttttttttttttttttttttttttttatagttttttttttttttttttttttttttttttttttttttttttaaaaaaagggggggggttttattaaaaagggggggcaaaacccccccaaaaaaaaatatccccccccccccccccaaaaaaaaaaaaaagtaaaaaaaaaagggggggggggggtaaaaaacccccgggggggccaagggggaaaaaaaaaaaaaaaacttttgggggggggaaaaaaaccccaaaaaaaaaaaattcccgaagagggaaaaaagggggacaaaaggggggaaaaaaaaaaaaaaaaaatttattaggggnnctccccctttttttccttttaaaaaagggggggaaaaaaaaaccccacaaaaaaaaccccccccccaaaaaaaaaaaagggggggttttttcttttgggggggggggggaaaaaaaggggggcccccctttttttttaaaaaaaaaaaaaacccccctaagggggggggggggataaaaaaaaaaaaaaaaaaatttttttggggggggaagaaaaaaaaaaaaaaaattttttttgggggccccggacaaaagcgcggggggagtaaaaaaaaaaaaaaaaaaaaaaaaaggggggaaaaaaaaaaaaaaaaaacccaaaaaaag

SEQ ID NO: 17383 - DNA, 281 bp, Homo sapiens
tgggccctctagatgcatgctcgagcggccgccagtgtgatggatatctgcagaattcgcccttagcggccgcccgggcaggtacttttttttttttttttttttttttttttttttttttttttttttttttttttttttttttttttttttttttttttttttttttttttttttttttttttttttttttttaaaaattttaaaaaaaaaaattttaaattataaaaaaattcaattaaaaaaaaaaaaaaatctttattgaaaaaaaaaaaaagggg

SEQ ID NO: 17384 - DNA, 613 bp, Homo sapiens
tatatggcgaatggggccctctagatgcatgctcgagcggccgccagtgtgatggatatctgcagaattcgcccttagcggccgcccgggcaggtacaggacaataaagactactcctatctgcggaacaactagctttctatttagttctagatgttgaaactgacgatggctgacataaaagtcacatttacaaaaagtgtctccaaatgcttgactagggaaaaacccctttcaatagaggagcatgtgcaacaattccacaaataatcgctatccagggcaaggcacattgatatggaatttttgttttcgtgcaaattaaggaaaaaaaacaaaacaaaacaacattgtttcggggagaaagatgaggagcaaagtgtcttcccaagaatttcagttacttgattgtataggacagtagtagaacccttctgaagggctgaaaaacatagtttaaaggcaagtgcctagagtagggattacaatattgtgtcttaatgcactctactttatcctacattaactatataaaaattagttactaacactagaacatgcagagactttctctgatcagcagggcttgccaaccagaacgtatatatatgta

SEQ ID NO: 17385 - DNA, 509 bp, Homo sapiens
ctatatggcgaattgggccctctagatgcatgctcgagcggccgccagtgtgatggatatctgcagaattcgccctttcgagcggccgcccgggcaggtacacttcaccacagcaatagcttgcctattagtctgctgagcagtcatgaattttattgtatttcttgggtaaggacaggccagaatgagtgtcaccagtgggtaattgaatcaacttctcacacatactgaaggctttatatgtctcatgcatacttagtgtatcatgaatatttggtatctttgtggcttttcatatttttagtgcttcatgaatatttggtatctcttgctcctttctatctgtggtcacacatacacgctctattaactttgcctaataagtctcctaggttactaacttacttacctaaatgtaacacaatgaattccagccttctcatttgttctataccagaatgggaaatttccccaaatcagaaaatcacatcctaacaaagaagtctgtc

SEQ ID NO: 17386 - DNA, 364 bp, Homo sapiens
gtggtcgcggccgaggtactttttttttttttttttttttttggcctttttttttttttttttttttttttttttggggggaaaaaaaactttttttttttttttccccccccccccctaaaaaaaaaaaaacccggggggggggggggggggggaaaaaaaaaaaccccccccccccccttgggggggcccccccccaaaaaaaaaggcccccccccaaaagggggggggggggctcctaaaaaaaaaaaaagagggggggccccccccccccaaaagccccccccctaaaaaaattttttaaaaacccccaccccccccccttgggggaaacccccccccacaaacttttttttttttaaaa

SEQ ID NO: 17387 - DNA, 472 bp, Homo sapiens
ccctatagcatgatgctcgagcggccgccagagtgatggatatctgcagaattcgcccttagcgtggtcgcggccgaggcaccttttctctaatagaaggtattatccttaaaacaaacctgtgcttatcttctatacattggtttagacagatgtatagtattctctcatttttgtaaataattaaaaatctgtataaaaggataatttataatatgtttatatgaggccaggtgcagaggctcacagctgtaatcccaacactttggtaggccgacgcgggtggatcacgaggtcaggagatcgaaaccatcttggctaacgcaagcgaaaccctgtctctactaaaaatacaaaaagtacgccaggcgtggtggtgggcgcctgtcgtcccggctacttgggaggctgaggacagaaaatggtgtgaactcagaatgtggagcttgcagtgagccaagattgcaccact

SEQ ID NO: 17388 - DNA, 598 bp, Homo sapiens
tacgactcactatagggcgaattgggccctctagatgcatgctcgagcggccgccagtgtgatggatatctgcagaattcgccctttcgagcggccgcccgggcaggtactgcaagcaacagttactgcgacgtgaggtgcattaactgtcaaaagccactgtgtcctgaagaaaagcaaagacatctggacaaaaagcaaagattccataatataaggggtcggtggaccggtcgatgtatgtcttgttgcagatcatcaagaacacgtagagaaacccagctgtaatcatgcatggagatacacctacattgcatgaatatatgttagacttgcaaccagagacaactgatctctactgttatgagcaattaaatgacagctcagaggaggaggatgaaatagatggtccagctggacaagcagaaccggacagagcccattacaatattgtaaccttttgttgcaagtgtgactctacgcttcggttgtgcgtacctcggccgcgaccacgctaagggcgaattccagcacactggcggccgttactagtggatccgagctcggtaccaagcttggcgtaatcatggtcatagct

SEQ ID NO: 17389 - DNA, 513 bp, Homo sapiens
ctatagggcgaattgggccctctagatgcatgctcgagcggccgccagtgtgatggatatctgcagaattcgcccttagcgtggtcgcggccgaggtaccactcactacattacaaaatagtctctaacataaaattgccttaataactatactattatagaatctgataaaccttacattattaaattgattataaaatcttcttggaaaaactttggtatgtatcttcagaaggttttttaaaaataatattttaagggcctgtaagcattccattctattaaagcacagcagaataagtaatggatattcaactgcatacagaatatagactcaaaaaaacaatttattatgtatttgtagaaaatcattaccagagtaagcaaaaaaaccaactatttaaaagtatcaaacttttaaacagttctttttccattctgataaaaaatgttataaaatcaccatactccattcatgtacctgcccgggcggccgctcgaaagggcgaattc

SEQ ID NO: 17390 - DNA, 577 bp, Homo sapiens
ccctctagatgcatgctcgagcggccgccagtgtgatggatatctgcagaattcgccctttcgagcggccgcccgggcaggtactttttttttttttttttttttttttgaaagagatgggggtcttactatgttggctaagctggtctcaaactccttgcctaggtaatccttctgcctcagcctcccaaagtgctgagattacaggcatgagccaccatgcccgacttccctttgtgtaaaatgagataatatgtatgtcacagaattgttttaaggatgataaaggactaagtgagataatgtaggtgaagtttagtttgatgcctggctcatagttaagtgctgaattatgatagtaattaattttctaactccaaacctttttttttaacagattttaagcttctgtctttctagggggttaagagtcataaaccaaaattacacttttcctctgctaggtttcctccctttcctcttcttgacagtctgatgggaaacaaaggcacacattagagcctatttccaagttgtcaaatatctctgaaaggaagggatatgggagagtaatcct

SEQ ID NO: 17391 - DNA, 482 bp, Homo sapiens
tacgactcactatagggcgaattgggccctctagatgcatgctcgagcggccgccagtgtgatggatatctgcagaattcgccctttcgagcggccgcccgggcaggtacttttttttttttttttttttttttttttttagcctatttagacttctctgattgagggttctaatttaaattatagatatatactgggcacagtggctcacgcctataatcccagcactttgggagactgaggcatgagaatcgcttgaacctgggaggtggaggctgtagtgagccaagatcgtgccacttacagcctcaaacttccggactcaggcaatcctcccataaactgtgattaattcctttctggttattttttcctttttttttttttaattaaaaaataaagtcctgctcagtcgcccaggctagagtgcaggacgttgtctaaataaataaataaaagacttaaaattcttcaaatgttac

SEQ ID NO: 17392 - DNA, 571 bp, Homo sapiens
actatagggcgaattgggccctctagatgcatgctcgagcggccgccagtgtgatggatatctgcagaattcgccctttcgagcggccgcccgggcaggtacatgaaagaattcacactggagagaagccgtatgaatgtgaggactgtgggaaagccttcagtcatcccacgacctttcatagacataaaattacccacaccgcagagaaaccttatgaatgtcaggaatgtggggaagccttccgttatcctgttgcttttcgtagacataaaattacccacactgcagagaaactttgagtgtaaggaatgtgggaaagccttctgttatcacagttcccttcaaagacatgaaaggactcataacggagaaaagttgtgtggatataaaaaatgtaaagccggctgggtgcggtagctgacgcctgtaatcccagcactttgggaggccaaggcgggcggatcatgaggtcaagagattgagaccatcatggccaacatggtaaaaccccatctctactaaaaatacaaaaattagctgggcgtggtggcatgtgcctgtagtacct

SEQ ID NO: 17393 - DNA, 454 bp, Homo sapiens
ctactatagggcgaattgggccctctagatgcatgctcgagcggccgccagtgtgatggatatctgcagaattcgcccttagcggccgcccgggcaggtaccagctagtggacaagatagtgcactgcatgagaccgttgatacagccagaaaacagggagatcttgaggcatggcagtatccggtaatgttacaaccgataccggccgggaaagggccaggaaagggagtcaagcaggagcgtctgtccgaacggaggctaggtaagaatatttcaccatgaaaatgttaaaagacataaaggaaggagttaaacaatatggacccaactctccttatatgagaacgttattagattccattgctcatggaaatagactcattccttatgattgggaaattttacctaaatcttccctttcaccctctcagtatctacagtttaaaacctggt

SEQ ID NO: 17394 - DNA, 546 bp, Homo sapiens
  misc_feature 495: n = A,T,C or G
ttactatacggcgaattgggccctctagatgcatgctcgagcggccgccagtgtgatggatatctgcagaattcgcccttagcgtggtcgcggccgaggtacttatgactgagatgatatcaatttaaggcaggatcatgtattgtgtctgttatgattggctattagaaaaaggaaaaaatctggcagacacaatctgtatttgttttttattgctgcctaacaaattattacatacatagcagcttaaaacaacaccattgattatttgtagatcaaaagtcctggtgtaggttagatggcttctctgattaggatgtcttcaggttgaatcaaggtgtcacctgagactgtgatctctgaggctttgggatcctcttccaagatcactggttcttggcagaattcagttccttgtggctacagggctgaagtccccattttcttactggctgttagccaaagacattctcagcttttagaggactgcttcangtccctgtctgaggctctagccgtgggcagctcacaatacgttgtttgctt

SEQ ID NO: 17395 - DNA, 391 bp, Homo sapiens
  misc_feature 287, 293: n = A,T,C or G
tatacgactcactatagggcgaattgggccctctagatgcatgctcgagcggccgccagtgtgatggatatctgcagaattcgcccttcgagcggccgcccgggcaggtacttttttttttttttttttttttttttttttaggaattcctttcatttttatttgataagccaaaaatgcaaatctgatttaaattcaagacaaagttttaaaaatcattctcaacactacagaaaaaaagccagtaactatacaaatactcactataaagcgatgaagtccatagnactttnttttttttttttttttttttttttgggaaaagctacaaacctcaaggttgttttatttaaaccaaataatctgagcaagacgtatatacattaaaaac

SEQ ID NO: 17396 - DNA, 385 bp, Homo sapiens
ccctctagatgcatgctcgagcggccgccattgtgatggatatctgcagaattcgcccttagcgtggtcgcggccgaggtactttattctcctgctgtctagctaagcagcccacacaggacagaaatgggtagcactgaggaatgatcacattatttttctatccccaatatttctgccccctccctaagccctgacccaaccctatcttaataatcacgaatggttagtactgcattgctttttataaagttcaaaataaaaatttatttttaaacaagtgactttggtttatttcatacattacacttttttttgcagaaaaaaataaaattgtacctgcccgggcggccgctccaaagggcgaattccaacacactggcgg

SEQ ID NO: 17397 - DNA, 597 bp, Homo sapiens
atacgactactatagtgcgaattgggccctctagatgcatgctcgagcggccgccagtgtgatggatatctgcagaattcgccctttcgagcggccgcccgggcaggtacatacccaacagaaatgaaatgaccacctcataaaaatactgcactcccatgtttaatgcagaattagtcacaataaccaagatatggaaacaatctaggtgtccatcaatggacaaatgaataaggaagctgtggtatatatacaatggaatattttattcagccttaaaaaagaggaactcctgccatttgtccctgcatggatggacctggagggcattacactaagtgaattaagtcagacacaaaacatattgcatagtcttacttacatgtggaatcttttttaaaaggtcaaatatatagagaataaaacagtggttaccaagaccagagttatggggcaggggaatgggaagatgtaggtcaaaggacactgagtatccctaattgatttgcagattcaatctaattcctaacaaaattccaaccgcctttttttttgcgcagaaatataaaagctaattctaaaattcaggctaggcat

SEQ ID NO: 17398 - DNA, 481 bp, Homo sapiens
tatagggcgaattgggccctctagatgcatgctcgagcggccgccagtgtgatggatatctgcagaattcgccctttcgagcggccgcccgggcaggtacgtgaggatccggagcagacgcctcgggatttatcagcgatgctggttagtattcaagaaagcttcaagcaaaggtccaaaaagactggagaaattttctgatgaacgtgctgcatatttcaggtgttatcataaggttacagaactcaataatgtgaagaacgtagctcgattgccaaaaagcaccaagaaacatgccatagggatttatttcaatgacgatacctccaagacttttgcttgcgaatcagatcttgaggctgatgagtggtgcaaagtacctcggccgcgaccacgctaagggcgaattccagcacactggcggccgttactagtggatccgagctcggtaccaagcttggcgtaatcatggtcatagctg

SEQ ID NO: 17399 - DNA, 436 bp, Homo sapiens
atagggcgaatggggccctctagatgcatgctcgagcggccgccagtgtgatggatatctgcagaattcgcccttagcgtggtcgcggccgagggactatgtttttttttttttttttttttgttaaaatgtttttttttttttttatttttttttttttttttttttttttttataggaggggggccccggagggcttttaaaaaaaaaaaccccttcagatggatgataaaaaagagcggaaaaaaaaaaaaaaaaaaaaatcggggggggggcaccccccccccccccgagggaagttaataaaaaaaccccccccccaaaaaaaaaaacaattttccctgccggggcggccgtaggggggggaattcccccccccggggggggggaattaggggacccaaccggggaaccaaatgggggaaaaaaaagggga

SEQ ID NO: 17400 - DNA, 380 bp, Homo sapiens
ctatatggcgaattgggccctctagatgcatgctcgagcggccgccaatgtgatggatatctgcagaattcgccctttcgagcggccgcccgggcaggtacaacttatagaaaaggtaaaggaaaccccaacatgcatgcactgccttggtgaccagggaagtcaccccacggctatggggaaattaacccgaggcttagctttcattatcactgtctcccagggtgtgcttgtcaaaaagatattccgccaggccagaatcgggcgctcccatcttgcgcaagttgggcacggtggtcacccaattctttgatggctttcacctgctcattcaggtaatgtgtcttaaatgaagtcccacaaatgggggggcatttttg

SEQ ID NO: 17401 - DNA, 547 bp, Homo sapiens
tatatggcgaatagggccctctagatgcatgctcgagcggccgccagtgtgatggatatctgcagaattcgccctttcgagcggccgcccgggcaggtacttcatttgcctaatttttgccattctcataatgtggcaattgttcaattttgcatttcttccattttatttttttgcatctctgcttttcttttggttagctttgccagttctgcctattatattaatctcccagaatcagcttttagttttgttaaatctctgacatgtttcgttgattcctgctttcatcttaaacatttcttcgttgttaatttgtgtttgctataaaataagcaacatcttaaatgcttgatttgctttcgatgtttattctgtaataagatatttaaagatataattttttccctaaatgctttattagacttttctcataagttttgactggtacctcggccgcgaccacgctaagggcgaattccagcacactggcggccgttactagtggatccgagctcggtaccaagcttggcgtaatcatggtcat

SEQ ID NO: 17402 - DNA, 246 bp, Homo sapiens
actatagggcgaattgggccctctagatgcatgctcgagcggccgccagtgtgatggatatctgcagaattcgcccttagcgtggtcgcggccgaggtactaggagctgagaacacgatgatgagcacaacacagttcttccctttggaaacatagataagtggagggaatgtcatcacaaatgtaaaacttcactatgagatgagttccgtgataggattttcttagggaaacctgagaaagagt

SEQ ID NO: 17403 - DNA, 386 bp, Homo sapiens
ttgggccctctaaatgcatgctcgacggccgccagtgtgatggatatctgcagaattcgccctttcgagcggccgcccgggcaggtacgcgggcatctcacaagttagtccactcattgtagtcttggctatactttatcatccaaaaattcatcaacattctggtgaatggacggcatcttttgagggttgattgtattctatgtcatttaaagggattcaggaagaatgctttcatgggattcatatgccatcctgaattagaagtttaagttttattcctaaagattctcctcactctgacattctcttagccaataattctttaaaatttttcaatcctggtcaggcacggtggctcacgcctgtaatcccagcactttggg

SEQ ID NO: 17404 - DNA, 378 bp, Homo sapiens
actatagggcgaattgggccctctagatgcatgctcgagcggccgccagtgtgatggatatctgcagaattcgcccttagcgtggtcgcggccgacgtactcttttttttttaacactgtctttggttttggtgtcagggtaatacaggcttcataaaagtgttaaaaaaatgtccctttctattttctagaagggactatgtagcattggtattaattctttaaatgttaggtagaattatccagtgaagccatctgaacctgtaaatttattttttggggaagtttaaaattatgaattgaattttcttaatagttaaaaggctattcaaattatgcatttcctattaagttgaggtaatttctacttttcaagga

SEQ ID NO: 17405 - DNA, 568 bp, Homo sapiens
gggccctctagatgcatgctcgagcggccgccagtgtgatggatatctgcagaattcgcccttgagcggccgcccgggcaggtacctttttcagtaatcaatagaccagttagaacacctcagccaaaaatagcagaatataaattatttttgagctctcacagaactttgctgagatacattataacctgggccataaaacaaacctcaaccaattaatacagttgaaaccagagtgtgctctctgaccacagtagaatcaaactattaattagtaatataataatgaaaatctccacactcttaaaaataaacaacatgcttttaaattatccatgattagggaagaagtctcaagagggaaagaaacatagaactgagtgtaaaggaaaatacgacatcaaaatatgtggaatgtggctaaagcagtcctgagacggaaatctgttgcactaaaaactgaaagaaagatgggttcaagtcataacctaaaggtctaaactcaagaaactagataggaaaaaaaggcagaataaatgccaagttagaagaagggaaaacataaaaa

SEQ ID NO: 17406 - DNA, 467 bp, Homo sapiens
  misc_feature 16, 26: n = A,T,C or G
atacgactcactatanggcgaattgngccctctagatgcatgctcgagcggccgccagtgtgatggatatctgcagaattcgcccttagcgtggtcgcggccgaggtaccctctctgaaatagaaaaaggcctttattcgtatcattttatgttaaatactggttagttactggtattgataagatctgggcagcagacaactaaccacatatgcattttcacagtatattcagatttcccataagacttggcaatgtgtattaccagtgaaaatctaaagtttctacttgggaaggaatacccaatgatgggtaatccttcattctgagaacacagtcagaatatcttggagctaccaacattgtgcttggctcttaatgcgaagttttcagggttggggatgcgctaaaaacactcttaaccaatcgatctgcgaaccattcttacacgttgctattctttattc

SEQ ID NO: 17407 - DNA, 535 bp, Homo sapiens
  misc_feature 486, 487: n = A,T,C or G
atagggcgaattgggcccttctacagcatgcctcgacggccgccagtgtgatggatatctgcagaattcgcccttagcgtggtcgcggccgaggtacgaattaaagaccgcaataaactttctacagaggaacgccggaagttgtttgagcaagaggtggctcaacgggaggctcagaaacaacagcaacagatgcagaacctgggaatgacatcaccactgccctatgactctcttggttataatgccccgcatcatccctttgctggttacccaccaggttatcccatgcaggcctatgtggatcccagcaaccctaatgctggaaaggtgctcctgcccacacccagcatggacccagtgtgttctcctgctccttatgatcatgctcagcccttggtgggacattctacagaacccctttctgcccctccaccagtacctgcccgggcggccgctcgaagggcgaattccagcacactggcnngccgttactagtggatccgagctcggtaccaagcttggcgtaatcatg

SEQ ID NO: 17408 - DNA, 445 bp, Homo sapiens
gccctctagatgcatgctcgagcggccgccagtgtgatggatatctgcagaattcgcccttagcgtggtcgcggccgaggtacttttttttttttttttttttttttttttaaaatttttttttttttttttttttttttttttttttttttttatttttttttttttttttttttgttaaaaaaaaaaaaaaagttttttggaaaaaatttttaaagaaaggggggggaaaaaaaaaaaaaaatttttttttttgggaaaaaaaaaaaattttttttttatgaaacaaccatttaaaattttcccttaaaaaaagttttttttacaaaagaaacctttttttttgttaaaaaaaaaaaaaaaggatttctttcttaaaaaaaaaaaaaaatgttttctacaaaaaaaacattttttaaaaataaaaaggggggaaacccttttt

SEQ ID NO: 17409 - DNA, 420 bp, Homo sapiens
tcactatatggcgaattgggccctctagatgcatgctcgagcggccgccagtgtgatggatatctgcagaattcgcccttagcgtggtcgcggccgaggtacccgggatcctgtgactttgtaaccacactcattcctttcaaacacataggaggaattattgcttcatctgactttattcaaaactagttatgtattggcctaaattatccgcgcaaaatttgaaatgttgtttatttaaatattcgaaataacgcaaagtcatggagttcttaaaaattgttataatcaagtaaaaataaagctgaatcgtgtcaaacttcataatgtgcacacaatccctgaggatgtgtgtaggagctcctaatagcttggtgaaggctattaacgtattagctttaaatggtggtcctgcaactc

SEQ ID NO: 17410 - DNA, 275 bp, Homo sapiens
ccctctagcatgcatgctcgagcggccgccagtgtgatggatatctgcagaattcgcccttagcgtggtcgcggccgaggtacttactctttcttttcacttgatctttacgggcatattaatgagtggagtaaagcactcagaagaacagcaggaaaagaggattcatgtatgtcagaggagctgaaggctctcaataggttcagagaatgcaggtcttccagctgctgagggtgtatgcttccactatgcctcataacaacccctgaacaaag

SEQ ID NO: 17411 - DNA, 479 bp, Homo sapiens
atagggcgaatggggccctctagatgcatgctcgagcggccgccagtgtgatggatatctgcagaattcgcccttagcgtggtcgcggccgaggtactcctgttctcctaaccccttgggaagcctacggctgacgatcgctcgtgatcacgagtgagagaccagcctgtgctgcattcggagccttatggatactaatggtcctaataatatggctgggtgcgggggggtccacgagatctactggacttttaccaggttccagaggtatggaggccatcttaccacagggtcagaggataccacatggaggatctacaactgtcactttccctcagaatgtatgaggagaccctgcccctccttgagtgtcaatggaacctggacttgtacctgcccgggcggccgctcgaaagggcgaattccagcacactggcggccgttactagtggatccgagctcgggaccaagcttggcgt

SEQ ID NO: 17412 - DNA, 532 bp, Homo sapiens
ctcgacggccgccagtgtgatggatatctgcagaattcgccctttcgagcggccgcccgggcaggtacttgaatgaaggactgtggctggattggccttttagtttgaccccctacattaggccccaaattttcttaccctgaggtgctgatatctgtatggatgagttatttgtcactaaagttatgagttgtgcctaaaagttaaaactgttgactgtattatgtaatgatcagtatttcagttgggaagatattttagagtctagataattatgtttgtatattgaaaaaatggtggccagtttttaagttccttaatagaagagaattatgtctcagcacatataacagtaatgctaatttattgaaactactgctgttagagcacttcttattcattgtcttttagtgaaatttatggcgtaacactttgtcagagaggaggctatataatttggagcggaaattgtctataagtaggcatttatttcatgattgatatgtcacagaaatcatggtagtaaatcaca

SEQ ID NO: 17413 - DNA, 632 bp, Homo sapiens
atatggcgaatggggccctctagatgcatgctcgagcggccgccagtgtgatggatatctgcagaattcgcccttctgccgcccgggcaggtacctcattggctaaagctagttacgtggacaagcaaaattcagtgtagaaagagatttttacaagggtgtgaataccaggatgcatggcttattgtaggccaccaaagaaacagcataccacagctattcaatatgtatttcaccagtataccacagctatttaatgtgtattggagcagtataccacatctatttaatgtgtattttaacagactaccacatctatggaatgtgtatttcagtactataccacatgtatggaatgtgtatttaaatagtataccacaactattctatgagtatttcataactatgccacaggtatttaatgtgggttaaatccatctgacacacctatttaatgtgtgtatcagcactctgccacaactatgtaatgtgtattgtcagcagctatgctacagctatttaatgtgtatttcagcagtatgccacaactatttaatgtgtatttcagcagtatgccacagctatttaatatgtatttcaaaatgcaggcagtccttgctttgcatggtaat

SEQ ID NO: 17414 - DNA, 140 bp, Homo sapiens
tacgactcactatagggcgaattgagccctctagatgcatgctcgagcggccgccagtgtgatggatatctgcagaattcgcccttagcgtggtcgcggccgaggtacttttttttttttattgtatttttaactttttt

SEQ ID NO: 17415 - DNA, 590 bp, Homo sapiens
gagtcagtcgacccacgcgtccggcctgagcgcgtaggcgcagcgggcctagcctagtcaacatgccggtcgccagaagctgggtttgtcgcaaaacctatgtgaccccacggagacccttcgagaaatcgcgtctcgaccaggagctaaagttgattggagagtatgggctccggaacaaacgtgaggtgtggagggtcaaatttaccctggcgaagattcgtaaggctgcccgggagctgttgacgctggacgagaaggatcctcggcgtctgtttgaaggcaacgctctgctgagacgacttgttcgaattggggtgctggatgagggcaagatgaagctggattacattctgggcctgaagattgaggatttcttggagagaaggctgcagacccaggtctttaagctgggcctggccaaatctattcaccatgcccgtgtgctcatccgccaacgtcacatcaaggtccgcaagcaggtggtgaacattccatctttcattgttcgcctggactctcagaagcacattgacttcttcctccgttctccttatggtggcggccgctagactagtctagagaaaaaa

SEQ ID NO: 17416 - DNA, 532 bp, Homo sapiens
gggccctctagatgcatgctcgagcggccgccagtgtgatggatatctgcagaattcgccctttgagcggccggccgggcaggtacctcacaagttcaaattattgttttttggggaaatgtaaaggaatatagtaatattgaagactgtttccagcaacttgactttgtgaaaaatgatttcttctttgaacagatttataaaaccttaaacatccatgtgacgttggttggcattgaaatatggacacatgaagataaaatagaactatattcaaatatagaaactaccttattgcgtttttcattttggcaagaaaagatccttaaaacacggaaggattttgatcatgttgtattactcaggttggtgattgctctattttcttgcatacctttggtggattattccaaagaaaatgaatagtaaaacaaaaaggttccttggccgggaccaccctaagggcgaattccaacacactggcggccggtactagtggatccgagctcggtaccaagcttggcgtaatcat

SEQ ID NO: 17417 - DNA, 620 bp, Homo sapiens
ctcactatagggcgaattgggccctctagatgcatgctcgagcggccgccagtgtgatggatatctgcagaattcgcccttagcgtggtcgcggccgacgtacaaccagttccctaatagatacccccattcgtcaaaaatgggcacattttaaaaatcgcttttcccttttcttttttttttagaaaataaaaagtaattgtgaatctatataaaaccatttgtaaatatgttgtttcttactattcaatagtatgaaagtaaacacaaaaaagaatttttagacttacatcattggctccatctacttttggtaaatttacatcctgatcaccacccatgttgttcatcatctatttgaagtgtaaaaattagttttaaaaatgatgctaagttaggccctaattattaatgctgtatgcttcaaaataaaccttaagtctgccacagatatcaaaaaatgcaaaatgcaaatataaacatttttcccttctggaaaaggaagattatcggtaattatacaaaatcctaaaaacccatatggaaattaaaactaaattttccctaaagaaaagcaaagctattcatgcaacaggtttgacaaacattaaaaattctac

SEQ ID NO: 17418 - DNA, 507 bp, Homo sapiens
actatagggcgaattgggccctctagatgcatgctcgagcggccgccagtgtgatggatatctgcagaattcgccctttcgagcggccgcccgggcaggtacatagtctcctcagaagaacttttcagttatttatatttactaagaatggctctactttccacccccaactccattttaatccattctgaatttaaaccattgttaaactttatttttaaattatgaatggtaaaggagcatttcaaaatcatctcaataaacgatctttaaaaacatgagcttaacttcaattgcttgacatgccctttggctccttttctttgggtcaagatcccgaagatcttgtttcacaccaacactctccattcatacctgcaagtgaaaagtgcctcagcttgacaccttatacagtacctcggccgcgaccacgctaagggcgaattccagcacactggcggccgttactagtggatccgagctcggtaccaagcttggcgtaatcat

SEQ ID NO: 17419 - DNA, 350 bp, Homo sapiens
cgacactgtgatggatatatgcataattcgcccttagcgtggtcgcggccgaggtacgcgggcaataaaagaatttgagaagagtggtcaaaaatagtctatctatcttgaaacctgtaaacgcctttgatatacaggatatggcacaaatttaataattataacatttaaaaaataaacaacaacgctgacatcactacatattaaaagctgtggtgtgtgggaaaagtggcatcctatgcgaaatttacaggcatgaaagtatttatcagaaacttataaaaactgaaagtaagtgacctaagtcttcagcttaaagaataaaaatgattaaaacataacatcaaaag

SEQ ID NO: 17420 - DNA, 476 bp, Homo sapiens
gccctctagatgcatgctcgagcggccgccagtgtgatggatatctgcagaattcgccctttcgagcggccgcccgggcaggtacttttttttttttttttttttttttatttttttttttttttttttttttttttttttttttttttttttttttttttttttttttttttttttttttttttttttttttttttttttttggggggggggggccaaaaaaaaaaaaaaaaaatttattttttttttttttaaaaaaaaaaaaaaaagtttttgaagaagaaaacaaaaatattttttttttaaaaaaataataaaaagagagttttttttttttcctcccccaaaaaaggtgaattaagtccttcccccaaaaaaaaaaaaaatttttttaatatcaaaaaaaaaaaaaaaatttttcaaaaaaaaaaggataggaggaaaaaaaaaaaaaaaaaaaaatacccctttttttt

SEQ ID NO: 17421 - DNA, 280 bp, Homo sapiens
ccctctagatgcatgctcgagcggccgccagtgtgatggatatctgcagaattcgccctcgagcggccgcccgggcaggtacccagacatgctcaaaatgtgctttcccttatctttcaaaacccaccaccaggaaaccaaaacggaccccactctgagagttccatgatgaaggtgtttaagaatcacattaaccccaagttaaggcagtagatgaaattatccatttcttttttctttttattttttttaagtgagactacaattggcaaatggggaa

SEQ ID NO: 17422 - DNA, 580 bp, Homo sapiens
acgactcactatagggcgaattgggccctctagatgcatgctcgagcggccgccagtgtgatggatatctgcagaattcgcccttagcgtggtcgcggccgaggtacagaagaaacagaattggcaaatgttcagttgacaattatgaaagctggataaacaaatacctgcagggtttatttttactacttttctactattgaatatatctgatatttatataataaaaagtttaagttaccaaaatctcttcactgtcttttttttttttttgagatttctcctactcacctcaaaccctctaagactgccaaaagctacgccacaatcaaattctgcaggttctttcaaatatcatttcacttagctcttctacaataaagcctcactactcaaagtatggtccttagaatagcgtcatcataattgtttggaatgctattagaaaaataaaatgtttttcttctgataattgaaaatgttcctcttcaaagcattttaccaaagaagacagtcaaataaccaataaacatatagaaaagtgttcaagttaattacttgtcagggaaatgcaaattat

SEQ ID NO: 17423 - DNA, 492 bp, Homo sapiens
tatggcgaatggggccctctagatgcatgctcgagcggccgccagtgtgatggatatctgcagaattcgccctttcgagcggccgcccgggcaggtactttttttttttttttttttttggggggggggtttttttttttttttttttttttttttttttttttttttttttttatttttttttttttttttttgaaaaaaaaaaaaaaaaaccaatttttttttttgaaaaaaaaaaaaaaaaaacggcgaggggtttttgtttgggaaaaaaaaaaaaaaaaaattttgtttttttggccaacccccccaaaaatttttttttttaaaaaaaggggggggggggggccaaaaaaaaaaaaggggggggggggggcccccaggggaacctcatgaaaaaaaaagggtgggtaaaaaaaagggggttttttttttttttaaggcaaattcccgcgcacccgccgggggggggaatagaacccaacccggggg

SEQ ID NO: 17424 - DNA, 464 bp, Homo sapiens
tatagggcgaattgggccctctaaatgcatgcctcgacggccgccagtgtgatggatatctgcagaattcgcccttggccgcccgggcaggtactttttttttttttttttttgggttttttttttttttttttttttttttttttttttttttttttttttttttttggaaaaaaaaaaaaattttttttttttccggggggggggggggaaaaaataaaaaaaccccccccccttttttgggggggggccccccctttaaaaaacggggttttttaaaaccccccgggggggggggggcccccccccttttttttttaaaaaaaaaaaggggggtttttttttttttaaaaggggccccttttttttttcccccggggtttttttttttttttttttttttttttttttcccccccccccccctttcttttggaaaaaaaaaaaggggggggggcccccaaa

SEQ ID NO: 17425 - DNA, 482 bp, Homo sapiens
gactcactatagggcgaattggggcttctagatgcatgctcgagcggccgccagtgtgatggatatctgcagaattcgcccttagcgtggtcgcggccgaggtacaaaaaggatcaataccctatgtgagttgcaatatacacagaaagcatagcaaggaaaaatttcctggagtaattggtgtcagtgtccagagcaggattcgttcagcctcctgagttgtcctcttcagcatcccccaggtccggggcttgtgtcatctgtggaagctgctttgttcagggctgcgggtacctgcccgggcggccgctcgaaagggcgaattccagcacactggcggccgttactagtggatccgagctcggtaccaagcttggcgtaatcatggtcatagctgtttcctgtgtgaaattgttatccgctcacaattccacacaacatacgaaccggaagcataaagtgtaaagcctggggtgcctaat

SEQ ID NO: 17426 - DNA, 163 bp, Homo sapiens
  misc_feature 130, 131, 132, 133, 134: n = A,T,C or G
tatatggcgaattgggccctctagatgcatgctcgagcggccgccagtgtgatggatatctgcagaattcgcccttagcgtggtcgcggccgaagtacttttttttttttttttttttttaaagaagggnnnnnaaaaaaaaaaaaaaaattttttttttttt

SEQ ID NO: 17427 - DNA, 320 bp, Homo sapiens
tttttttttttttttttttttttgggcttttttttttttttttttttttttggggggccccccctttaaaaaaaaaaaaaaccccccttttttttccccgggggggaaaaaaaaaaaaaccccccaaatttcccccccttcccccctttttggggaattttttgggggggggggggggccccaaaaacccccttttttgggaaaaaggtttttttttggggggaaaaaccccccccccccccctaaaaaatttttgggggggccccccccttaaaaaaaacccccccgaaaaaaaattcccccccccccccccgcccccc

SEQ ID NO: 17428 - DNA, 595 bp, Homo sapiens
atggggccctctagatgcatgctcgagcggccgccagtgtgatggatatctgcagaattcgcccttagcgtggtcgcggccgaggtacttgcacatccttaaagttatctttttttatataagtaaagaacacacaaataaattcacttgaatttgataatttggaacattggcaatgaatacagtgcctgttgaggcctgaaagagaggggaaatcaagaacagtgtgggagaagaaaggcaatccttcgttgaaaagcttttctcttaacaatccttagtgcctgaaaaataagccattttgataacaagagtataaaaagccatatgatctgcaaagtaaatcgtatctggtttaaatttcatcccaagtctcaggttatggctgaggagctatactaagtatctttgtaacacatttctttgaatttttataactaagacaagaaaatttttttatcagatctaggcagaaatactgatcttcatttacaagtatagtaattacttgcactcaggactatatagacatggggctctgaaaaccaaacagaaggaaacgccaaaccataaccacaaggcaaaattaaagtaa

SEQ ID NO: 17429 - DNA, 612 bp, Homo sapiens
tacgactcactatagggcgaattgggccctctagatgcatgctcgagcggccgccagtgtgatggatatctgcagaattcgccctttcgagcggccgcccgggcaggtactttagcttacatcattttggataaaaaaaaattcagttttcccagcttttagaaggtaagtctgagtgaggcctttagggactccctagtctccagtttgtttaaaacaccgatgaatgaatttttaaaaacagacaagtgagagatgaatggaaaacttttatgaataaagacacaagaaattagcctttcaaagtaaagttattcataatgtataaacccatttgtacctcggccgcgaccacgctaagggcgaattccagcacactggcggccgttactagtggatccgagctcggtaccaagcttggcgtaatcatggtcatagctgtttcctgtgtgaaattgttatccgctcacaattccacacaacatacgagccggaagcataaagtgtaaagcctggggtgcctaatgagtgagctaactcacattaattgcgttgcgctcactgcccgctttccagtcgggaaacctgtcgtgccagctgcattaatgaatc

SEQ ID NO: 17430 - DNA, 513 bp, Homo sapiens
attgggccctctagatgcatgctcgagcggccgccagtgtgatggatatctgcagaattcgcccttaccgtggtcgcggccgaggtacagcttggtcaaatttccatgatatgaagtatttgagttttaaaatatactgttattaaaaggaaaaagacatggccattattccatgtgcttaaatgataatttccttattcagtttcagaagaaaaagaatgaaattgggtaactgtcattgcgttagctttatgttgaattgggaaattgtggcataaagcttaaattcgtgtttatcaaatgtggaccatagtagtataatgctgctttgtatataatgtaagtgctacaaatagtctcagcactgaaaatgtattgatacctcttaaatgaatgcaacttttgatgtaagtgttttgctatgcctcagaaactatctgtctgagaatttgttaatctgtttgataatgaagatacttcctgttttcttgtttcatattttcatgttcaaaa

SEQ ID NO: 17431 - DNA, 283 bp, Homo sapiens
  misc_feature 184: n = A,T,C or G
tatagggcgaattgggccctctagatgcatgctcgagcggccgccagtgtgatggatatctgcagaattcgccctttcgagcggccgcccgggcaggtactttttttttttttttttttttttttttttttttttttttttttttttttttttttttttttttttttttttttttttttttttnccaaccaaaaaaccccatttttttttttttttttccacacccttttcctttttaaaaaccctttttttaaaagggtttttttttgtttaaacaaaaaaa

SEQ ID NO: 17432 - DNA, 630 bp, Homo sapiens
taatacgactcactatagggcgaattgggccctctagatgcatgctcgagcggccgccagtgtgatggatatctgcagaattcgccctttcgagcggccgcccgggcaggtacagactccaagtccaaagcaaatacccatggcatgaacaaataggatgcctaagattctaacattgcttcggcatggctttcctcctcacttccctacctcacaacaagaaaaaatttcctagatgggacaatggcaagatattgtgctaatacatttcataggatttctagatgctgggctataacatccaggttacaatttggtgacggatttttttatttctattgcaaatggactacactccaaacacaaaaagattcttgccatagcatccaaacatccctatgtagacccacacttcctctcaatacagaaagagaatcactcagaaaggacaaagctggcagaccaagaaaggaggcaagggtaaactctgtcactgaccaattatctaaaacaaaaatagcagcctctgttatcaaagttgtcagttaaaactgtcagctgtcaggcacagtgacacacacctgtaatcccaacactttgggagcccaaggtgggtggatcgcttgagcc

SEQ ID NO: 17433 - DNA, 423 bp, Homo sapiens
ctatagggcgaattgggccctctagatgcatgctcgagcggccgccagtgtgatggatatctgcagaattcgcccttagcgtggtcgcggccgaggtactggaacccaggaccaggaaaaaactaaagggtggctgaggacacatcaccccatagatttttccaaaccaaaaccttgacccaaaaacattctgataaatctctgtgcctagagaaggtaaaaggaaaagagacacagagattttctacaatacagtgtcagaggattagtctttgtttccttttcgtgggaaatatttacaagcggataacacatcttcttaaaagcgccatttaatgctttgtcaaaaacaattaattaaaatatggtataaacaagtacctgcccgggcggccgctcgaaagggcgaattccagcacactg

SEQ ID NO: 17434 - DNA, 251 bp, Homo sapiens
acgactcactatagggcgaattgggccctctagatgcatgctcgagcggccgccagtgtgatggatatctgcagaattcgcccttagcgtggtcgcggccgaggtactgaggagagctggggaggccagtgtgcctgcagtgaatgaaggaaggggagggtgattgaaatgatgtcagaggggcacgacggttgaccatgtccagggcgttgtggcgaggcggaatcaacatcatttatgtctccacacca

SEQ ID NO: 17435 - DNA, 452 bp, Homo sapiens
  misc_feature 104: n = A,T,C or G
acgactcactatagggcgaattgggccctctagatgcatgctcgagcggccgccagtgtgatggatatctgcagaattcgcccttagcgtggtcgcgtgccgangtactggacacttctttacccacccctttcctgattgttttatgtgagtgattttaaattctcacactgcctcttctttaaaaaattaaatcctttctttgcttgacaaaaaaaagaacggattaaactttagaaataaacgaacgtttagctaagctatactaaccccagggttggtcaatttcgtgccagccaccaaggttacaccatttacccaagacaatataagcccgcgtaaaaaatgttttacattaccccctccccattcaaactaaaacttacctgagttgtaaaaaacttcggttgacacaacttaaactactaaagtggctttaacatttgtgaaca

SEQ ID NO: 17436 - DNA, 435 bp, Homo sapiens
  misc_feature 105, 111: n = A,T,C or G
gactcactatagggcgaattgggccctctagatgcatgctcgagcggccgccagtgtgatggatatctgcagaattcgccctttcgagcggccgcccgggcaggnactttntttttttttttttttttttttttcctttttttttttttttttttttttttttttttttaaaatctatttccttatatttacagtggggtaacattttccaataacaaacactttttaatcatgaaaaatggggttaaaacaaaaatattgtcatgattgagccaatgggaaaacataaaaaatgctgtattccataatttttccgaaagaaaaagtctagtttgtttaaaggcaacaaatcctggtttaaattcactttataaaccatacaccccttcttggcttttttttaaacacaattctggaaggcccctgttaaaaacg

SEQ ID NO: 17437 - DNA, 547 bp, Homo sapiens
ccctctagatgcatgctcgagcggccgccagtgtgatggatatctgcagaattcgccctttcgagcggccgcccgggcaggtactcttctttttttttttttttgagacggagtttcgctcttgtcaccccagctggagtgcagtagcacgatcttggctaactgcaacctccagctcctgggttcaggtgattctcctgcctcagcctcccaagtagctggcactacagacacgcgccaccatgcccggctaatttttgtatttttagtagagacggagtttcaccatgttggccaggctggcctcaaactcctgacctcaggtgatccacctgcctcggccttccagagtgctgggattacaggcgtgagccactgtgcctggcttccatcctcttctatcatttttttaaatctcttctcctatcataaaattaatttctcattttttggtcaggtagaattgggaaagtcccacactgtcctcctattaccttaacatcccaagcttcctttccttttttggtctttatgaatatatttatat

SEQ ID NO: 17438 - DNA, 508 bp, Homo sapiens
atagtggcgaattgggccctctagatgcatgctcgagcggccgccagtgtgatggatatctgcagaattcgccctttcgagcggccgcccgggcaggtacccttttaacaaaggaaagtgggtttgggcttcgagggacaataaattgtggggaagtgactaggaaagacatggggagctaatgcgagataagagctactgtagtgaggtcagtttaggcaaattcgtcttcaaggataagaatcactcttctctccttggtgcaaggcgtggggggcacctttctctaagtgaaattatatttatttttatggtcaccctctgtttatgacaagcgatacttgttttccctatgccagagggatatgaatttccttcttaaataaacccttaaataaataaatttaggccaggcgtggtggctcacgcctgtaatcccagcactttgggaagccaaggcaggtggatcacctgaggtcagaagttcgagaccagcctggccaacatg

SEQ ID NO: 17439 - DNA, 561 bp, Homo sapiens
gcgaatggggccctctagatgcatgctcgagcggccgccagtgtgatggatatctgcagaattcgcccttagcgtggtcgcggccgaggtacatagcgccttggtctaggccaataataggtcgatcttcctcgccaactcatatttcacacagatgaatctcagtagaggaaaaagagtccggacggcaggaaccacacagcactgcctcacagctccctggcgttcttccccgcgtacacagagtggtcttttcaacactcctccccctactccaccggacctcaaccaggacttcagtggatttcagcttctagtggatgttgcactcaaacgggctgcagagatggagcttcaggcaaaacttacagcttaacccattttcaagcaaaacagttctcagaaatgtcatgattgccggggtgaaggcaagagatgaattgcattattttatatattttttattaatatttgcacatgggattgctaaaacagcttcctgttactgagatgtcttcaatggaatacagtcattccaagaactataaacttaaagctact

SEQ ID NO: 17440 - DNA, 351 bp, Homo sapiens
ttgggccctctagatgcatgctcgagcggccgccagtgtgatggatatctgcagaattcgcccttagcgtggtcgcggccgaggtacagcagaggccttaggtgaatggcttgtctgctatggcagagattagaggtgctgccagactgccataagtattaggcagtaacagcagcagctgcttatatgcgtgcgaacagctggggaattaatttggtatgcattctcaggagccactcatctgctggcagaggtagcagaagaatgcccttagtgtaaatcctctacaaccatacaccaaatgtgctccctgcatttcaaattccattgtagaaagtctctgataatctc

SEQ ID NO: 17441 - DNA, 681 bp, Homo sapiens
  misc_feature 585, 647: n = A,T,C or G
atacgactcactatagggcgaattgggccctctagatgcatgctcgagcggccgccagtgtgatggatatctgcagaattcgccctttcgagcggccgcccgggcaggtacgtgaccaggcccagctaatttttgtatttttagtagagacagggtttcaccatgttggccaggctggtcttgaactcctgacctcagatgatccgcccaccttggcctcccaaagtgctgggattacaggtgtgagccaccaacgcctagcctcagagacttctagtaacatcatatagttagtaaaggggacagctggttttcaagtaaaggtctgtttgattttttctattatagaaatcctttcccctttcttaatgtctctttggtattcttgaaaaaaacaaaagagagccaacaaataaaagtaattcctcagaatttatgctaattttgtagcaatataacttgcgcatttgattgctgcttgatttttaaaatcaaatattttcctacattgctttttaagggcaaggtgtgtcctgtgagtgtttctcactgttagactagggcagaagctcaacaataacaaanaaggctggtgactaggaatcctaatttccttccaaccagggcgtgtgataacaaagacactnttcctataatcctttgctagtcaggatgtgaact

SEQ ID NO: 17442 - DNA, 384 bp, Homo sapiens
tatacgactcactatagggcgaattgggccctctagatgcatgctcgagcggccgccagtgtgatggatatctgcagaattcgccctttcgagcggccgcccgggcaggtacctgatgtccaaaaaagcacaacaatttaagactttgggcactttatgtagcagatatataaaaagcaaagcaggaattaagagcaaatgaatttaataatactgatataaggcagcttttaatctattcacaggaaaaggaaaaatttatattatctcctaaatattatagcatgtaatatgaagagttaataatctcgtccattctgaatgaaaaaaactaactttaaataagttaattctatgctccttgaacgccttaaaaaaaagaaa

SEQ ID NO: 17443 - DNA, 340 bp, Homo sapiens
gcatgctcctacggccgccagtgtgatggatatctgcagaattcgcccttagcgtggtcgcggccgaggtacaaaagataaattttaaagctgggcgtccgggggagacatcacacgttggtaggatccatgatgccccacagccaccgaaaccagcaggttttttagggattttcaaaaggagaattgcttgaacctgggaggccgaggttgcggtgagctgaaatcaccacattgcactccagcctgggcaacatgagcaaaatgccatccgaaatagacagaaaaaaagttcctgcccgggcggccgctttaaagggcgaattccagcacactggcg

SEQ ID NO: 17444 - DNA, 567 bp, Homo sapiens
  misc_feature 528, 529: n = A,T,C or G
ccctctagatgcatgctcgagcggccgccagtgtgatggatatctgcagaattcgcccttgagcggccgcccgggcaggtacttgtgcaggtatttctggcagtatagaaacagtaagtggacttgctggtcaaatggtagctacatttaaaaaacagtgatggctactgcttaattgtatatcaaaagagatttataccagtaactttcatacatttctgtttccttattctctcacttaaattcaacaacatcattcctcttaacatttttgccaatggtgaaaagtatttcgtatacaaatttacatattcttactcatgtggttaagtttcttacatgtatttgttgaacttcctgtgaattgcttattcatatctttttctcactttttcctaatgagttttgttatttttctttaatgaattttaggaatgctttatgtattggtgctattaatcttcaattttacgtatatttgcatagtaattgcctacttttagctcttcgttgtcatacagacatttnntacattttatttacttaaatttatcaatctttttcttt

SEQ ID NO: 17445 - DNA, 587 bp, Homo sapiens
tacgactcactatagggcgaattgggccctctagatgcatgctcgagcggccgccagtgtgatggatatctgcagaattcgcccttagcgtggtcgcggccgaggtacttttttttgtttttattttattttatttttgtttgttttctccgtgtgtgtgttttcctaatttatttacctctgtttcccctttttcctttttttttttaattaaagagcaaagctttttattactttgtaatttaaaaaactgaaaaaaaaaaactgaagaactttggggggaattttgtacctgcccgggcggccgctcgaagggcgaattccagcacactggcggccgttactagtggatccgagctcggtaccaagcttggcgtaatcatggtcatagctgtttcctgtgtgaaattgttatccgctcacaattccacacaacatacgagccggaagcataaagtgtaaagcctggggtgcctaatgagtgagctaactcacattaattgccgtgcgctcactgcccgctttccagtcgggaaacctgtcgtgccagctgcattaatgaattggccaacgcgcggggagaggcg

SEQ ID NO: 17446 - DNA, 279 bp, Homo sapiens
atacgactcctatagggcgaattgggccctctagatgcatgctcgagcggccgccagtgtgatggatatctgcagaattcgcccttagcgtggtcgcggccgaggtactttttttttttttttaaagcaaaccattgtatgtgtaagtgtttaagttacctttttgtctattggtctctatgccagccctcccctttcccaatgaaagccatgtcaaattaatcactggattgactgcttcatctttttatttctaatgaaaggtgtactttctttttt

SEQ ID NO: 17447 - DNA, 480 bp, Homo sapiens
atagggcgaatggggccctctagatgcatgctcgagcggccgccagtgtgatggatatctgcagaattcgccctttcgagcggccgcccgggcaggtacgacattactttgttttttcaggtgaagcttaaacaaatgtgaggcagaaaaatgtattaatgcggcactaatgagaagacggaatcaaactccctgcaaatacacacacacacacacacacacacacacacacacacacaaggggaaaacttggggctttttttttgtcaaaaaaaaactctgacgcgcacgctaacaaaatatcaataaggtgggaaaaactgggcccgagtgaggggtctcacgcctaaaaccccctctctttgagaggccagggcgggtgtatctttgggggccgggggttagaaaccagccgggccaacgtggaaaaaccccgtcttcactaaaaacacaaaacttccccgggcgtggagacacgca

SEQ ID NO: 17448 - DNA, 585 bp, Homo sapiens
aattgtaatacgactcactatagggcgaattgggccctctagatgcatgctcgagcggccgccagtgtgatggatatctgcagaattcgccctttcgagcggccgcccgggcaggtacctttgagagagggtccagttaatctttgttttgaatgaactgatggttttgaagcaggtgacctggaggactgcatgtagaacacagtgatgtcaaggagtaaaggagagaacagaagtgagattagcactaatcacctctaatgccttatttccagtaaagtttagagaagaggaaaagctacttggcttgctcctttgaaggttttgtttccctcttaacacagaaattaaaaggtagaggagagatgctgaatgatgctttttttcttcttaatcttggggggtcattatgattaagttattgaatccatatcaccgtatgacagcacatgatgaaagaaaatcagatgtttgtttcaatcaaagtgaaacaaaatgagaataactatttgggcaaaacacttttatcactgctaagatactactagaactgagcagagaaatactcagagagagccatggcat

SEQ ID NO: 17449 - DNA, 373 bp, Homo sapiens
atgctcgagcggccgccagtgtgatggatatctgcagaattcgccctttcgagcggccgcccgggcaggtactggaattacaggcatgagtcacccctcccaggcccccccctttttttttaatcctaaaaagcttcctaagggttggtcagggcagttaactccagtgaatacctcttctaaagactcagcaaaagggtcatttgtgcctctttaactgttcttaccaaactgtcctgtctcttttctgctgccaactaagcagcttcctagggacaaaaaaatatacaatattttttttttttttggcttacaaagcaaaaccaccctgttttttctttcttaaaaatggtcttggggaaaaataggaaac

SEQ ID NO: 17450 - DNA, 482 bp, Homo sapiens
actatatggcgaatggggccctctagatgcatgctcgagcggccgccagtgtgatggatatctgcagaattcgccctttcgagcggccgcccgggcaggtacgcgggaacccagtggaaggatctactgataggcaggttaccatcactggatctgctgccagcattagcctggctcaatatctaatcaatgtcaggctttcctcggagacgggtggcatggggagcagctagaacaatgcagattcatccataatccctttctgctgttcaccaccacccatgatccatctgtgtagtttctgaacagtcagcgattccaggttttaaatagtttgtaaattttcagtttctacacactttatcatccacttgtgattttttaattaaagcgttttaattcctttctctgttcagctgttgatgctgaaatccatatttagttttataggcttctccctggtttttttttttcggtttttt

SEQ ID NO: 17451 - DNA, 556 bp, Homo sapiens
actatacggcgaattgggccctctagatgcatgctcgagcggccgccagtgtgatggatatctgcagaattcgcccttagcgtggtcgcggccgaggtactaatgtcatgataaatggaacaattgtcttagatatgagccatttcatttagacatttaattatgtcctatttctctggctaaatacattgaaagttataagctgttcatgtagaaggcatgtaataaatgtataggataacaatatgggcaatagtcaccctccagactcttaaaaattcccacctgcccgggcggccgctcgaaagggcgaattccagcacactggcggccgttactagtggatccgagctcggtaccaagcttggcgtaatcatggtcatagctgtttcctgtgtgaaattgttatccgctcacaattccacacaacatacgagccggaagcataaagtgtaaagcctggggtgcctaatgagtgagctaactcacattaattgcgttgcgctcactgcccgctttccagtcgggaaacctgtcgtgccagctgcattaatga

SEQ ID NO: 17452 - DNA, 549 bp, Homo sapiens
ctcactatatggcgaatggggccctctagatgcatgctcgagcggccgccagtgtgatggatatctgcagaattcgcccttagcgtggtcgcggccgaggtacttttttttttttttttttttttttttcctcttttttttttttttttttttttttttccccccaccaaaatttttagggggggcaaaaaaatttgaaaaaaaatttgggggggggttttccccccaaaaaaaaaggccgcaaaaaaaaaaaacattgtcacccccccttcccccccaaaaaaaaaaggggggggggggttttccaaaaaaaaaattttccccccccaatcattttggggagaacagagggagatctccccccccccaaacccctttttccccccttgtaaaaaccccccccccccttttttttttttttttttaaaacccttaaccccccccgggggggtgttttaaaaaaattccccaccaccgggggggccaaggaaaaaaatataaaaggggggggcccccccaaaaaaaaaaacccttttttcccccgggggg

SEQ ID NO: 17453 - DNA, 402 bp, Homo sapiens
gactactatagggcgaattgggccctctagatgcatgctcgagcggccgccagtgtgatggatatctgcagaattcgcccttagcgtggtcgcggccgaggtactttgacagaggttccagtaaacgaaaacttgattgtttccttgtatattttcagcgttatgtttggtggaagaaaagtttggaggtttggacaaaagaccatccatttcctattgatatagattacatgatcagtgatacactagaactgctaagaccaaagatcaaactctgtaattctctggaagaatccatcaggcaggtacaatttttttttctttttttagtaatagagttctactaatgggaataatgggattttttggcgggggacgggaggtaacattttgctcaatttg

SEQ ID NO: 17454 - DNA, 512 bp, Homo sapiens
actatagggcgaattgggccctctagatgcatgctcgagcggccgccagtgtgatggatatctgcagaattcgccctttcgagcggccgcccgggcaggtacttttttttttttttttttttttgtgacggagtcttgttcagctgcccaggctggagtgcagtggctcgatcttcgctcactgcaaccaccgtctcctgggttcaagcgattctcctgtctcagcttcccaagtagctgggattacaggccaccaccatcatgcccggctaatttttgtatattggtagagacggagtttcactatgttgggcaggctggtcttgaactcctcacctcaggtgatccgcccgtcttggcctcccaaagtgctaggattacaggcgtaagccaccatgcctggccagatgatgtatttaaatatcataccaaactctgtgtatttatataaagagagactgttaaaagacttcataatattaaaaaaaaaccaaaacccaaaaaaaacttta

SEQ ID NO: 17455 - DNA, 389 bp, Homo sapiens
tagggcgaattgggccctctagatgcatgctcgagcggccgccagtgtgatggatatctgcagaattcgccctttcgagcggccgcccgggcaggtacatgtaatccactgtagtgaaggcactaaaacctgttgtattttccacatttcgatagatctctcacaggatttaacacttttggaatgctcagtaaattattattgactgcttgataatacctctttgttcctgcctttccccaagtccttcaacagaagtttcttctagcactttgcaggtcagttgagtggactatttgagtccctcacagtaatgagcttgtgtgtttttgtcattcttttttctttttttgaaaaaacaatagagtcatttaaggaagcaaaaaggt

SEQ ID NO: 17456 - DNA, 670 bp, Homo sapiens
actactatagggcgaattgggccctctagatgcatgctcgagcggccgccagtgtgatggatatctgcagaattcgccctttcgagcggccgcccgggcaggtactttcccctggaaattctagctgctgtggcctccccaactgccagtcctgtctcttcaattcagcgagatttattgtttcccttccctgaactgcaacctaggaactgccgtgcgggggcaggctgagaaaccatggtgctcacctcactctgtctgcagtctcctgaggatcacaaacctgtgcttgtcctatgtctaaaaaccattacctattatacgtattgtatagcttccagttgtttaaggcaggagaggaaatctgacccttgttattccatcacagcagtaaggagaactcttcacatctaagtaaacacacctcacacttacaattcactgctttttgtaataattgatgtataaagaacaccacttccttacagaactatttcaatagcatcatgcttgtcaaattctttacattattgagactactcttcagtatgaacctctgtaggtattattctcaagtgtacctcggccgcgaccacgctaagggcgaattccagcacactggcggccgttactagtggatccgagctcgtaccagcttggcgtaatcatg

SEQ ID NO: 17457 - DNA, 282 bp, Homo sapiens
tatagggcgaatggggccctctagatgcatgctcgagcggccgccagtgtgatggatatctgcagaattcgccctttcgagcggccgcccgggcaggtactttttttttttttttttttttttttttttaaaccttttttttttttttttttttttttttttttttttttttttttttttttttttttttttttttttttttttttttttttaaaataatataaattttaacccttttcaagaagggggggggaattaaaaattaaaacaaaaacaaaggcc

SEQ ID NO: 17458 - DNA, 301 bp, Homo sapiens
  misc_feature 18, 117: n = A,T,C or G
ttagggcgaattgggccntctagatgcatgctcgagcggccgccagtgtgattgatatctgcagaattcgccggggaggacagcagggccgaagaaaaaatatactgcttttttttngaccttgaagccatcaataaaagagtaaaagacactatggctctatcagaagatttggacaattccattgataaaacagaagctggaattaaggagcttcagaagagtatggagcgctggaaaaatatggaaaaagaacatatggatgctataaatcatgagactagagaactggaaaagatga

SEQ ID NO: 17459 - DNA, 223 bp, Homo sapiens
atgctcgagcgccgcagtgtgatggatatctgcagattcgccctagcgtggtcgcggcgaggccgcgggtgaatatctaaagtaaaacttgaaatggatgctcaacatataaaggatgagttttttcatgaacgggaagacttatagtttaaaatgaatgaatcattactagctaaagaagaacggggctgtgaaattgaaaaattaaaatacttgatctagc

SEQ ID NO: 17460 - DNA, 528 bp, Homo sapiens
tacgactcactatagggcgaattgggccctctagatgcatgctcgagcggccgccagtgtgatggatatctgcagaattcgcccttagcgtggtcgcggccgaggtactctaaagaaaatcctgaaagtcaccaccttggtcttttataatcgggaccatgaggaagcccaagaaaaagggagaaaaggaacgagaaaaaggcagaggcactaatagctgccatacaggcatataaacctctcgatcccagggagcttctcattctatgaccgactgttatcagtgtgggagcactaaaagagagtctgcccccgaaatcagaagcagcccccacggccctgtccaatctgtaagggagactactggaagacaaactgcctccagaaacatacgtcccaaggttcagagccggcttctcaaatggtccagcaggactgatgggtcccagggctctcctccccagctctgacagcccaagctgcattaccatccaagagtcccgggtgagtctggaggtcaagggactc

SEQ ID NO: 17461 - DNA, 589 bp, Homo sapiens
tgtaatacgactcactatatggcgaattgggccctctagatgcatgctcgagcggccgccagtgtgatggatatctgcagaattcgccctttcgagcggccgcccgggcaggtacttttttttttttttttttttttttttaatttaaaaaaggggaaaaaagggtttttttttttggtttaaaaaattttggcccggaaaaatttaaacccaaccccccaaaaaaaatttttttgggaaaattttctttttaaaaaattaaaaaaatttttttttacggggcccccaaaaaaaaaggaatttggttttaaaacccaaattttaaaaaaattttccaaaaaaaaaaaaaccctttttaaaaatttgggaattttttctttattttaaaattggaaaggtccttttttaaaaaaaaaaaaatttttcaaaaagggggccttggtaaaatttttttttttaggggcccactgggaaaaaaaaaattccttttttttgggggattttttaaaagttttattttttttttaaaaaaggggatttaaaacttttttttcaaaaaattttaaaaaattaacccaaattttttttt

SEQ ID NO: 17462 - DNA, 467 bp, Homo sapiens
ctatagggcgaattgtgccctctagatgcatgctcgagcggccgccagtgtgatggatatctgcagaattcgcccttagcggccgcccgggcaggtactttataatttatattttttcctatagaggcttttctatttatgtgtattccacttccccatatcactaaactgtctttttccacaggattcaattcttgaactagtaggagtgaagggcagtctgttgaaacctgtaatctcttaggcttgtattttctttgaacatagtttccacagaattcttccctgtaggggaaggcctgggcacttcttgatgtcagaacatgttgtctttagtttggaatctgccaaaacaaaagtttaatcaaaaatgttaattcctgtcaccccagcacttcgggaggccaaagcaagaagattgcttgagcccaggagtccgagactggcctgggttacatagcgagacc

SEQ ID NO: 17463 - DNA, 371 bp, Homo sapiens
agggcgaattgggccctctagatgcatgctcgagcggccgccagtgtgatggatatctgcagaattcgcccttagcgtggtcgcggccgaggtacgcgggttgataataataaaatcacttacttggttgactaaaaaaaaaaaaaaaagaaaaaggttcctgcccgggcggccgctcgaaagggcgaattccagcacactggcggtcgttactagtggatccgagctcggtaccaagcttggcgtaatcatggtcatagctggttcctgtgtgaaattgttatccgatcacaattccacacaacatacgaaccggaagcataaaatgcaaagcctggggtgcctaaagagtgagctaactcacattaatt

SEQ ID NO: 17464 - DNA, 387 bp, Homo sapiens
actcactatatggcgaattgggccctctagatgcatgctcgagcggccgccagtgtgatggatatctgcagaattcgcccttgagcggccgcccgggcaggtactttattttttttttttttttttttttttttttttttatttttatttttttttatttttttttttttttttttaatttttttttttaaaaaaaaaaagaaattttaatattttattttattattaaaaaacattttttgtaatgtattacaccaatttctattaatttaaaaaaaaaaaaaaataactacagaagaactttaaaaataaaaaatatgcctaccttggattcttggcttaaagtagaaggtttttttaaattatggcaggaaacatttttgtaaa

SEQ ID NO: 17465 - DNA, 580 bp, Homo sapiens
acgactcactatagggcgaattgggccctctagatgcatgctcgagcggccgccagtgtgatggatatctgcagaattcgcccttcgagcggccgcccgggcaggtacccagagacacagactgaaaaccaggaagttggatgggacttagagcccttgatcaacccagaacgccatgaccgcaggctgaatcacttcagggtctgcagtgacatcactctgtacctcggccgcgaccacgctaagggcgaattccagcacactggcggccgttactagtggatccgagctcggtaccaagcttggcgtaatcatggtcatagctgtttcctgtgtgaaattgttatccgctcacaattccacacaacatacgagccggaagcataaagtgtaaagcctggggtgcctaatgagtgagctaactcacattaattgcgttgcgctcactgcccgctttccagtcgggaaacctgtcgtgccagctgcattaatgaatcggccaacgcgcggggagaggcggtttgcgtattgggcgctcttccgctttctcgctcactgactcgctgcgctcggtcgttcg

SEQ ID NO: 17466 - DNA, 552 bp, Homo sapiens
ctatagggcgaattgggccctctagatgcatgctcgagcggccgccagtgtgatggatatctgcagaattcgccctttcgagcggccgcccgggcaggtacgttattaggttatgaaaaaaaaaaccattaaatcatgatatactaaccattaaataatgatacactgaaatagattcctgaggattctattatattcttacaactcactgtaaaaaaacatcactagaacatattctctatgtatcacataaattcttctgatagagaaacagctcagataccttcatatctgaacatgagaaaatactggaggctgcaggtgttaagggctgaatagaactgtgcagatttaaaacatttctaaatagcaaaatacttcataattgaaaattcagaaatgagcagctacaaattattgagaatttaaatgcaggctgggcgcagtggctcacgcctgtaatcccagcactttgggaggccgaggtgggcggatcatgaggtcaggagtttgagaccagcctgaccaacatggtgaaacactgtctctact

SEQ ID NO: 17467 - DNA, 615 bp, Homo sapiens
ctatagggcgaattgggccctctagatgcatgctcgagcggccgccagtgtgatggatatctgcagaattcgccctttcgagcggccgcccgggcaggtaccctaacctgacaggaattaactactgtttttttgtggggcagaaagcaaaacctggtgttgtgacttttatcctaatggttcttaggcaaggttagtgagaagaaacacaaacccagatgcatgcattgtgcattattttgtagacaagctactttttcttctgtccctttaacaaatttgcagcaattaccctccctttggggtctagagtgaaagctaatttgtgggtagatgagattgcagaagaatggatgtccatggctgtgaacactgcacactgcacatccatctccagtgctcacactgtgcagctaccactccctggctgcgtgccatgctgtcgggttgcagatttgcacacataaattcctcaggaagagtttgcatgagcatcacctcgcaatattctgtacctcggccgcgaccacgctaagggcgaattccagcacactggcggccgttactagtggatccgagctcggtaccaagcttggcgtaatcatggtcatagct

SEQ ID NO: 17468 - DNA, 390 bp, Homo sapiens
atacgactcactatagggcgatattgggccctctagatgcatgctcgagcggccgccagtgtgatggatatctgcagaattcgcccttagcgtggtcgcggccgaggtactttcaagtttgtgtgactaaaccttgctttgggaaaattagtctaaaaatcaaggagcgggtgtgggagaaattagcttactaattgaaccatcaagccagttggcagttctaaggcttctttatcagcatattacagagtttgtattcctgttcttttcctccttgttgtgggaaacaagctatgcaaccatttgacattctgtattttagatgtaacagtacctgcccgggcggccgctcgaagggcgaattccagcacactggcggccgttactagt

SEQ ID NO: 17469 - DNA, 640 bp, Homo sapiens
acgactcactatagggcgaattgagccctctagatgcatgctcgagcggccgccagtgtgatggatatctgcagaattcgccctttcgagcggccgcccgggcaggtactcaactagtgcaaacctgcccgtcatgggccatgagaagttccccagcgacttggacctggacatgttcaatgggagcttggaatgtgacatggagtccattatccgtagtgaactcatggatgctgatgggttggattttaactttgattccctcatctccacacagaatgttgttggtttgaacgtggggaacttcactggtgctaagcaggcctcatctcagagctgggtgccaggctgaaggatcactgaggaaggggaagtgggcaaagcaggtcagtgccgaatgctatggcataaaaataacaatatggggatgaggggggatctctgggggagcctgtcttctctttactttgaactttattccacactgaaaaccatggagcagtggtgcacataatatggctcccagccagttccatctcagggttttacctgcaaaccaaatagggctgtcaggtgccccccttcccccgcacagtttgctgatagttcataaatctactgctcgggaagagaacacgta

SEQ ID NO: 17470 - DNA, 342 bp, Homo sapiens
ctatatggcgaatggggccctctagatgcatgctcgagcggccgccagtgtgattggattatctgcagaattcgcccttatcgtggtcgcggccgaggtaccatttgggattatggtttttaaaagcttgagaatattacttatttacttttgcagctttccatgcagctgttattttttctctctgtttttgactttggagatcaagttactgatttttatctttacttttctctttattttgtgccttggtcttgaaaaagtaataaatatttcttactgaggccccctcctgctttgttctgccatctaaggtgattacaatgctcaagtctctttgtt

SEQ ID NO: 17471 - DNA, 541 bp, Homo sapiens
ctcactatagggcgaattgggccctctagatgcatgctcgagcggccgccagtgtgatggatatctgcagaattcgccctttcgagcggccgcccgggctggataggactaaaaatcaaaggactaattatatcaggacatcccatattcccttcactgattaagacaaaacaatggggccccttattttactttgtggagccaaattaacaaagctgaaatagaagttctccttataagaaaggctacaaacactggaaggattagtcacagtgagcaaaaatcgccgatgaacccaaagtatgcatatgagcagggattccattgggtatctataaggctggcaagagctttagaatttggttctcaaggaaatgaggtgggtaaggaatcccctcaaatgtcaatgtatcttcttaccatctcaacaatcctgggtacctcggccgcgaccacgctaagggcgaattccagcacactggcggccgttactagtggatccgagctcggtaccaagcttggcgtaatcatggtcatagct

SEQ ID NO: 17472 - DNA, 503 bp, Homo sapiens
cgtccgtgcaccccaaatgggatctgtgggacatgagatgccggctgcatgtgagcatcttggtaaccaaataataggaaagaatgtaggagcaggcaatcctggggcaaaagctgacgccaacgtacctattcatcttagaattgagactctgatctgtctttcccaaggccagatctacagagaaactttctgtcttgggcagaatagctggctgagacatcagagagagagactgaggaaatatcccaggagcctgttgacacagaggccctgataactaaagagaagtcccagctgggcgtggtggctcatgcctgtaatcccagcactttgggaggctgaggcgggcggatcacttgaggtcaggagttcgagaccagcctggccaacatggcgaaaccctgtctctactagaaaatacaaaaattaactgggggtggtggcatgtgcctgtaatcccagctgctcaggaggctgaggcaggaagatggcttgaaccc

SEQ ID NO: 17473 - DNA, 451 bp, Homo sapiens
attgggccctctagatgcatgctcgagcggccgccagtgtgatggatatctgcagaattcgcccttagcgtggtcgcggccgaggtactcagaattctgacaagaaacatcacaagtttatataaatacccatttgcatagcagcttacaaattcaatagttgtcagaggcttgacgcggtgggtcatgcctgtaatctcagcactttgggaggccgaggcgggcagatcacttgaggtcaggagtttgagatcagcttggccaacatggcaaaactccgtctctactaaaaatacaaaaattacctgggtgtggtgacgggcgcctgtaatcccagctaccccgcgtacctgcccgggcggccgctcgaagggcgaattccagcacactggcggccgttactagtggatccgagctcggtaccaagcttggcgtaatcatggtcatagct

SEQ ID NO: 17474 - DNA, 568 bp, Homo sapiens
ctatagggcgaattgggccctctagatgcatgctcgagcggccgccagtgtgatggatatctgcagaattcgccctttcgagcggccgcccgggcaggtaccaggcaaacactacaaccacaactccacacactgaaatgagataatatttatgtttttgccatagtgatagctcaactgccacttcatctcttttcctgttcttcttccgacgacccttcagtctgttttcaaaagcttctagttcagcctgttgtcttcgtttttcttcttcaagagcagctttggcttctgcttcttttatctcagatgctttccgcttcatttccttgcacgttgtgtcacattctattgaaacctgattttcacgtacctcggccgcgaccacgctaagggcgaattccagcacactggcggccgttactagtggatccgagctccgtaccaagcttggcgtaatcatggtcatagctgtttcctgtgtgaaattgttatccgctcacaattccacacaacatacgagccggaagcataaagtgtaaagcctggggtgcctaatgagtgagct

SEQ ID NO: 17475 - DNA, 600 bp, Homo sapiens
gactactatagggcgaattgggccctctagatgcatgctcgagcggccgccagtgtgatggatatctgcagaattcgcccttagcgtggtcgcggccgaggtacaaatttcaaaccaagctgcagttactcctttgagacaccaaaaaaagttgcttccatatggttacattgttaattccataatcgcatttacaatatcattactgttgttcttcagggctcggactgcctttgctctcgacacatttgcttgtgacatgaccaattcaatgtccttaacttctacacctgtttcatcgacctcttcctcttcactctcctcttgtacagtttaaaaacaaatcttacacagccttacatttcaatttttttctttaaaaggagtgagttgtgtacctgcccgggcggccgctcgaaagggcgaattccagcacactggcggccgttactagtggatccgagctcggtaccaagcttggcgtaatcatggtcatagctgtttcctgtgtgaaaatgttatccgctcacaattccacacaacatacgagccggaagcataaagtgtaaagcctggggtgcctaatgagtgagctaactc

SEQ ID NO: 17476 - DNA, 394 bp, Homo sapiens
tacgactcactatagggcgaattgggccctctagatgcatgctcgagcggccgccagtgtgatggatatctgcagaattcgcccttagcgtggtcgcggccgaggtacctggaaactgaattctagaaagattattttggaaagcctgtagttacgtgtattaccactagatgaccttccctcattattgtctctaaagtggagctgctagttatatggactttctagaggactgtaggaaatttatgaataatccctctaaagcaacaacgacaacaacaacaaaaaagtctactttatatggtgttgagtgtacctgcccgggcggccgctaaagggcgaattccagcacactggcggccgttactagtggatccgagctcggtaccaagct

SEQ ID NO: 17477 - DNA, 648 bp, Homo sapiens
  misc_feature 606, 615: n = A,T,C or G
agggagtcgacccacgcgtccggtcaagatggcagctgccgacggcgacgattcgctctaccccattgcggtgctcatagatgaactgcgcaatgaggacgttcagcttcgtctcaatagtatcaagaagctctccaccattgccttggcccttggggttgaacggaccagaagtgagctcctgccctttcttacagataccatctatgatgaagatgaggtcctcttggctttggctgaacagctgggaaccttcaccactttggtgggaggacccgagtatgtgcactgtctgctgccacctcttgagtcactggccacagtggaagagacagtagtgcgagacaaggcggtagaatccttgcgggccatctctcatgagcactcaccttccgatctagaggctcactttgtgcctctggtgaagcggctggcgggtggagactggttcacctcccgtacctcagcctgtggtctcttctcagtttgctacccccgagtatccagtgccgtgaaggcagaacttcgacagtacttccggaacctgtgctcagatgatacccccatggtgcggcggccgctagactagtctagagaaaaaacctnccacacctncccctgaacctgaaacataaaatgaatgcaatt

SEQ ID NO: 17478 - DNA, 595 bp, Homo sapiens
  misc_feature 577, 578: n = A,T,C or G
actatatggcgaatggggccctctagatgcatgctcgagcggccgccagtgtgatggatatctgcagaattcgccctttcgagcggccgcccgggcaggtacaagtgacgaggaagattctgttttgggtatagccagagaaaacaaggatggagaaaaatctaggacagtgtcttctgagaaaccaccaggcttgaagtgtcttctcggaaaaaaccatccttggaggccacaagtgatgagaaggattctttttcgaatataaccagagaaaaaaaggatggagaaatatctaggaaagtgtcttctcagaaaccaccagcctcaaagactgcaagtgacaagacagattctgctttgaatacagctacagaaataaaggatggactacaatgtgggacagtgtcttctcagaaacaacaagccttgaaggctacaactgacgaggaaggttctgtttctaatatagccacagaaataaaggatggagaaaaatctgggacagtgtcttctcagaaaaaaccagccttgaaggccacaagtgatgagaaagattctttttcgaatataaccagannaaaaaaaaaaaaaaaaa

SEQ ID NO: 17479 - DNA, 343 bp, Homo sapiens
atagggctgaatggggccctctagatgcatgctcgagcggccgccagtgtgatggatatctgcagaattcgccctttcgagcggccgcccgggcaggtactttattttttttttttttttttgagttttttttttttttttttttttttttttttttttttttttttttttttttttttttttttttttttttttttgttttaaaaaaaaaacaccttggaggttgggacccaccaaaagaaaaaaaaaggacatgcaacaaaaaaaaaaaaaaatatataaatgaaaaaaaatacttatttttatttttcttaaaaaaaaaaaaacgggggggggggggggg

SEQ ID NO: 17480 - DNA, 414 bp, Homo sapiens
acgactcactatagggcgaattgggccctctagatgcatgctcgagcggccgccagtgtgatggatatctgcagaattcgcccttagcgtggtcgcggccgaggtacttgacgttaatgccgatgataattcatctgatctacagaatattcactttaatagagagatgagagtctgaaatgaccagaggaaaatagatactgaagccaatatagtcttgataccaaaataaaattaaaatgagaaactaacatgataggttcaaggccttttgggaacctgttttctttgccagatttcacattcttacagcttcatggtctttttcttctaacaaattaatcagctgagagaagctgtctttcagtgcatccatgtcatccagtgagcagggctgtagaatccagcgttttc

SEQ ID NO: 17481 - DNA, 479 bp, Homo sapiens
  misc_feature 461: n = A,T,C or G
gcgaatggggccctctagatgcatgctcgagcggccgccagtgtgatggatatctgcagaattcgccctttcgagcggccgcccgggcaggtactatttattttttttattttttttttttttttttttttttttattttattttattttcttatcaaattttttttaataattttttatggtttttattatatttaactataaccttccccatatttttaaaaataacccgaaatgccactattggggaaataagataattgtaattgtgaaaaaataattttaaggaaatcttacaagtattacattaaaaagatactatgactgccacctgccatttaccttctaataaccctgccatgtggtttgcagaaagaaatggatatagtagcctcagaagaaatattttatgtgggttttttgtttttcgttactagaattcaaggatgaggggatatggntgaccttttactttttaa

SEQ ID NO: 17482 - DNA, 470 bp, Homo sapiens
atatggcgaatggggccctctagatgcatgctcgagcggccgccagtgtgatggatatctgcagaattcgcccttagcgtggtcgcggccgaggtactttattttttttaattttttgtaatttttttttttttattttattttttttattttttatttatattgggggccccccccccccgggggggaaaaggttttgaaaaaaaaaaaaaaaaacggggggaaaaaaaggggggttttttgacccccaccccccaaaaaaagggaaaaaaaaaaaaaaaggcctttttaaaaaaaaaaaaaaaacccgggggaaaaaaaaaaaaaagaaaataaaggggagggtgtttgagccaaaaaaaaaaaaaaagggtgtccccccaaaaaatatttaaaggcccccaaaaaaaaaaattttcgcgcgggaaaaaatattttattcccaaagcaaaaaaaaattttttttttgt

SEQ ID NO: 17483 - DNA, 329 bp, Homo sapiens
tggatatctgcagaattcgcccttgcggccgcccgggcaggtacgcggggttattgcagtgtagattatgcaaaaaaagaatcattaggatagggcaatcagcttccattaaataagcctaaaagcagcagcttgggggataaaaaaaaaaaaaaaagaaaaaaaaaaaaaagtacctcggccgcgaccacgctaagggcgaattccagcacactggcggccgttactagtggatccgagctcggtaccaagcttggcgtaatcatggtcatagctgtttcctgtgtgaaattgttatccgctcacaattccacacaacatacgagccg

SEQ ID NO: 17484 - DNA, 582 bp, Homo sapiens
tacgactcactatagggcgaattgggccctctagatgcatgctcgagcggccgccagtgtgatggatatctgcagaattcgccctttcgagcggccgcccgggcaggtacatgttcattgtagagaatttggaaactgtaggagagaatcaagaagaaaaataaaaatcagctgttgtaatcacctaaaaaaaaaaaaaaaaaaaaaaaaaaaaaggtcctgttctagacattggagataaagtagtaaccaggaaagaccctgctttcatggaacttgcattccaatgagagaaagatagtaattaaacaaataaatgaatatatatgttagttcattcttgcattgctataaagaaacattcgaggctgggtaatttatttaaaaaaaaaaaaaaaaaagaagtttcagccaggtacctcggccgcgaccacgctaagggcgaattccagcacactggcggccgttactagtggatccgagctcggtaccaagcttggcgtaatcatggtcatagctgtttcctgtgtgaaattgttatccgctcacaattccacacaacatacgagccggaagcataaa

SEQ ID NO: 17485 - DNA, 582 bp, Homo sapiens
gactcactatagggcgaattgggccctctagatgcatgctcgagcggccgccagtgtgatggatatctgcagaattcgcccttcgagcggccgcccgggcaggtacttggaccaagaaaaagaagatggaaaatatcacaagcaaattaaaatagaagagaatgcaacaggtttcagttatgagtcactttttcgcgaataccttaatgagacagttacagaagtttggatagaagatccttatattagacatactcatcagctgtataactttcttcgattttgtgagatgcttattaagagaccatgtaaagtaaaaactattcaccttctcacctctctggatgaaggcattgagcaagtgcagcaaagtagaggcctgcaagaaatagaagagtcactcaggagtcacggagtgctgttggaagttcagtacctcggccgcgaccacgctaagggcgaattccagcacactggcggccgttactagtggatccgagctcggtaccaagcttggcgtaatcatggtcatagctgtttcctgtgtgaaattgttatccgctcacaattccacacaacata

SEQ ID NO: 17486 - DNA, 423 bp, Homo sapiens
atagggcgaattgggccctctagatgcatgctcgagcggccgccagtgtgatggatatctgcagaattcgcccttagcgtggtcgcggccgaggtacttttttttttttttttttttttttttccaaaaccaaatctttattctctagtttgaaaaggaggggtaaatggttgttctgtttagttccagagaacagaacaaggcccaataggtagaaattataggaaagcagaattcattcattataaggaaggatttctaacaattagaatttctaacaattagaatcatccagggcctcaggaggtgcggaagttcctgtcacctaagtgctcaagcagaggccaggtgtccatatgctagaaatggagaaaaggaaactcaccagcaacttcccctcagctggccctccatcaccaatgc

SEQ ID NO: 17487 - DNA, 209 bp, Homo sapiens
atacgactcactatagggcgaattgggccctctagatgcatgctcgagcggccgccagtgtgatggatatctgcagaattcgccctttcgagcggccgcccgggcagggacttttttttttttttttttttttttttttctttttttttttttttttttttttttttttttttttttttttttttttttttttttaaggattttttttt

SEQ ID NO: 17488 - DNA, 351 bp, Homo sapiens
ctcgagcggccgccagtgtgatggatatctgcagaattcgcccttagcgtggtcgcggccgaggtactcttattgctttacaagtgattgctggactgggctgggaacagagtgatcctggggcagtagtgaggaacaggcacggtcctacttgtggatgaggtgaggagagctgcagaccccgtatggaatccctcagcctgcctgtgagtaacaactctgaagggctttctgagggccctgggaaagtctgatgaccggagctgaaaggcgattctgtccaaggaagatcacgatggccaagaaccaatgtatggtcaagtttcaggtgtctggtgcggaggaatcaag

SEQ ID NO: 17489 - DNA, 626 bp, Homo sapiens
tacgactactatagggcgaattgggccctctagatgcatgctcgagcggccgccagtgtgatggatatctgcagaattcgccctttcgagcggccgcccgggcaggtacaaagcatcagattcagcagaagcaattgaggcttttcaactaactcctcaacagcaacatctcatcagagagattgtcaaaaccagaagctgtgggatgaagtgctttcacatcttgtggaaggaccaaattttctgaaaaaattggaacaatcttttatgtgcgtttgctgtcaggagctagtttaccagcctgtgacaactgagtgcttccacaatgtctgtaaagattgcctacagcgctcctttaaggcacaggttttctcctgccctgcttgccggcatgatcttggccagaattacatcatgattcccaatgagattctgcagactctacttgaccttttcttccctggctacagcaaaggacgatgatctgcctgctttcactgtgttgttcatggtggctttttggacaataaagaatctaaaatgggtggggagggtggaagaaatggtggactggatctctcacgttctgaagcagctaatcctctttcccacataggccccatctt

SEQ ID NO: 17490 - DNA, 535 bp, Homo sapiens
ctatagggcgaattgggccctctagatgcatgctcgagcggccgccagtgtgatggatatctgcagaattcgccctttcgagcggccgcccgggcaggaactttttttttttttttttatttttttttaaaattttttttttttttttttattttttttttatatattttttttttttatttttttaaaaaaaaaaaaaaaaaacagggcccccaaaaaaaaacccccctttattgaattaaaaaaaaaaatttcccttttttgggggaaaagaaaaaacaaaaaaatttaatccccaaaaaaaaaaaaaaaacccccggggggagagggggaaaaaaacccccccccaatttttcacctagggaaacacaaacccctttttttgtagggtaaatgaaaaaaaaaaaaaacctcccagtgggtttgaaaaaaaaaaaccccccccgaaagggggggcaaaaaaaaaaaaacccccccccccccaaaaaaggggaaaaaaaaccccccggggggaattttttttgaaaacaaaaaa

SEQ ID NO: 17491 - DNA, 380 bp, Homo sapiens
aattgggccctctatagcatgctcgaagcgccgccagtgtgatggaaatctgcagaattcgcccttgagcggccgcccgggcaggtactttttttttttttttttttttttggggttttttttttttttttttttttttttttttttttttttttttttttttttttttttaaaaaaaaaaaaaaaaaaatttttttttttttttaaaaaaaaatttaaaaaaaaagattttttcccggggggaaaaaaattttttttttaaaaaaaaaaaaggggttccccccccccccccccccgggggggaaaaaaccccccggggggggggttttataaaaaaacccccccccccccccccggggggaaaaaaaaaaaaaattttt

SEQ ID NO: 17492 - DNA, 519 bp, Homo sapiens
gactactatagggcgaattgtgccctctagatgcatgctcgagcggccgccagtgtgatggatatctgcagaattcgcccttagcgtggtcgcggccgaggtaccattccgggtcatccgcagaaattcctcatagatggcaactctgtctactctccgagccagtggcgagaagtaccagggagtccaccccggtgtggtgcctgttggggacagacctgaatgttgaaacttgacagtcagaaaaataactcttgatgctgctgtttcggcccgcgtacctgcccgggcggccgaagggcgaattccagcacactggcggccgttactagtggatccgagctcggtaccaagcttggcgtaatcatggtcatagctgtttcctgtgtgaaattgttatccgctcacaattccacacaacatacgagccggaagcataaagtgtaaagcctggggtgcctaatgagtgagctaactcacattaattgcgttgcgctcactgcccgctttccagtcggg

SEQ ID NO: 17493 - DNA, 401 bp, Homo sapiens
  misc_feature 29: n = A,T,C or G
cactatagggccgaattgggccctctaanatgcatgctcgacggccgccagtgtgatggatatctgcagaattcgccctttcgagcggccgcccgggcaggtactggattcaggccctaaggcgggggacagcacagtgttcccttctcctccagagttcaggaagacgtccagggcctcctggtccgatatgtccatcaggtccatctgctccagcatgtccacgttcacttccatggatgacatgctgcctatgggctctcgccgctctgcaatctgcaggtagccagtggacaggtacctcggccgcgaccacgctaagggcgaattccagcacactgggcggccgttactagtggatccgagctcggtaccaagcttggcgtaatcatggtcatagc

SEQ ID NO: 17494 - DNA, 571 bp, Homo sapiens
  misc_feature 13: n = A,T,C or G
acgactactatanggcgaattgggccctctagatgcatgctcgagcggccgccagtgtgatggatatctgcagaattcgccctttagcggccgcccgggcaggtacatgttagacatctactgtttagaggggatagggaaattctcaatgtccttcttacattgttctaattctttctcaagtttggataggaatctaagagagcattgggtttacctccttcggccgggcgtggtggctcacgcctgtaatcccagctctcagggaggcaagaggctggaggatagcttgagcccaagagttcgagacctgcctgggcaatatagcgagaccccattctccagaaaaaggaaaacaaacaaacaaacaaacaaaaaagacagaaaaaaaaattagtgtaactcccctccttcatgacccccagattcctcttcctctcatcttcctgttgtgccctgatctccatgtcttctactttgtgagatgtatgggggtggggtcaagcattttaagggatcccaaggcttttcattgagtgacagctctttactatgctctttttttttcttc

SEQ ID NO: 17495 - DNA, 539 bp, Homo sapiens
agatgcatgctcgagcggccgacagtgtgatggatatctgcagaattcgccctatcgagcggccgcccgggcaggtacttttttttttttttttttttttttcacaagttacagtttattacacaatagcaagaggcaaagtatttgaaacaataactgctgtagagctatattctgtaattagtttgtcatttgaagaatattccttaacaaatgtaacatttaacattacaaaaaagaaaacagacatagttacaaagagcaaaggcagtaatattgtttctctagctataaataatacaaaaatataaaaatatataaaaataagttttttgtagtaatataagcttcttaatacactacataaatacatcaataactatctaccaagctacttactgtgtagctacaactgtgaaataactaaaattcagtatcagagtcttggatttacaatactgtattttttcacagatctcttcatccgcttaattttcttccctaagatttggtgatcttgctttaaaatataccggaaa

SEQ ID NO: 17496 - DNA, 543 bp, Homo sapiens
cgaattgggccctctagatgcatgctcgagcggccgccagtgtgatggatatctgcagaattcgcccttagcgtggtcgcggccgaggtactttttttttttttaacagatgtaatttcacttaaccctttgcgctttcccttagttgtcatttaacatacaatactggctttacttatctctagaaagaagaaggcatgctacaaataggaaggaattgtaataatgatatttggcctctactttgtcttagctgttaaactgtttttagtatttttgttaaatatttgcaaagggaagcattttctacagaggataattaatttcaagaaaaatatcttgagttttaagaaataaacatctccagaaaaggagaaagtcgattttataaaatgttgcaactttccaacatttggggtagtgactcctttttgttaggacatttgaaactagcaagcagccattgtttctaaagaatcctggcttcacatagactcatggttctttcactccattttgaaatagctaaaaattattaaaact

SEQ ID NO: 17497 - DNA, 389 bp, Homo sapiens
tagggcgaattgggccctctagatgcatgctcgagcggccgccagtgtgatggatatctgcagaattcgcccttagcgtggtcgcggccgaggtacatgaacctattaataaaccattcatgcttcccagtttggcagatgtgagcaaactatgtataggaattccaaaggtaactttttcctttcattactttacagaaatactgtcaagtccaatagagagcacagacttgggaggcggattgggtgggtttgaatctctgctctgccacttttattaatcatgtgagttgagtatgtgacttaatctcttttagctcaatttccccatctgtaaaataggaataataaaaatactgacttcagagaggtttgtgaggatcaattag

SEQ ID NO: 17498 - DNA, 140 bp, Homo sapiens
cacttgttcagttctttcttccctgtttgtggccaggtggccaccctaaacatacgaaatttctttagaggctagtcacaaacagactctaagattcctacgcacggaatttgcctctattcttatgcaaagaaataaca

SEQ ID NO: 17499 - DNA, 677 bp, Homo sapiens
tacgactcactatagggcgaattgggccctctagatgcatgctcgagcggccgccagtgtgatggatatctgcagaattcgcccttagcgtggtcgcggccgaggtacagtagagtatgagttgctaagttagatgacaaagcactgggtttattatgtattagtgctgtagttatactaaaggaatataatatatgttgacattaccagactaagcattgatcacaatattctcaagtagggaaaattagaatattaaagtggaatataagctgattttctttacgaaagtaataaatgaaaataaggctgtgaccaaaaagtaagtttctaagtggttctcttgttagccaagcaaataaatccatttaagatatggttagctaattaaatcatatttgattgcaggaactgaaaaaatgtatctagagaaaataaacattaagccttttggtgggaacagtttctcaaagagttgagggtattgggagcagcatttctagtcagttacaaaacacaacaagtgatttttgagtggttttccttgactcttggtgaattgacaaatgttatcaatacttttctgttagtttttattttaggagttagtattgagttttaataagcctctgaatagtcagtgtggaacaattagtggcaagaacattttcaaataa

SEQ ID NO: 17500 - DNA, 316 bp, Homo sapiens
gccgcccgggcaggtactttttttttttttttttttttgggggtttttttttttttttttttttttaaatgtttaaattctcccttttatttttattataagaaaacaatctcttaatgctgaatgggaaccaccccccccccgaaacaaacaaaaaccccgacccaggaaaaaaaaaaaaaaaaaaccccgaccccgcgaaaggaaaaaaaaaaaccacacccctgcttgggggagaaaacgcccaaccaaaaaaaaaaaaaaaacaactggcgtggaaaaaaccaacaccgggggggagcaccctggggggggg

SEQ ID NO: 17501 - DNA, 296 bp, Homo sapiens
agtgtgatggatatctgcagaattcgccctttcgagcggccgccgggcaggtacgcgggtgggggagacctttctgacgtggagttcgattcttctctgtcaaatgcttcaggagcagagagtttagccatccaaccgcagaagcttttgatcttggatgcacgctcctatgcagctgctgtggcaaaccgagccaaaggaggaggctgcgaatgcccagagtattacccaaactgtgaagttgtgtttatggggatggcaaacattcattctattcggaggagttttcagtctct

SEQ ID NO: 17502 - DNA, 442 bp, Homo sapiens
tactatagggcgagtcgggccctctagatgcatgctcgagcggccgccagtgtgatggatatctgcagaattcgcccttagcgagggcgcggccgaggtacacagaatatttgagatttggctaaatgctttctgaggtcctttggagtcctgtagctccatggtaatgtgctcctttccttgaaaactgggggttttgtaatgttgagatactttgcctctatgcttctcagctcatgaccagtcctaggagaggagtcgagacataagccaccttcagaggttcaatggaaactttaaaaccataccaaactcttttttaaaattagaattaactaataaaaaaaataaaaattagttacctgcccgggcgggcgttcgaaagggcgaaaattccagcacactggcggccgttactagtggatccgatctcggtaccaag

SEQ ID NO: 17503 - DNA, 323 bp, Homo sapiens
  misc_feature 281: n = A,T,C or G
tacgactcactatagggcgaattgggccctctagatgcatgctcgagcggccgccagtgtgatggatatctgcagaattcgcccttagcgtggtcgcggccgaggtacttttttttttttttttaaacaaaacaacaaatcaacaacagcaacaacaacaacaaaaattaaaaacttttttctaaaaaaaaagtgaaaataaaaaaaattatatgcgcttcatgggactgagtcaccaccttcccttacatacttcagttcagattgtagccatacttaanaaaaaaaaaaaagccaaaagatgatgacaacatttttatcag

SEQ ID NO: 17504 - DNA, 451 bp, Homo sapiens
tacactacttagggcgaattgggccctctagatgcatgctcgagcggccgccagtgtgatggatatctgcagaattcgcccttagcgtgggtcgcggccgaggtacttttttttttttttttttttttttttatttttttttttttttttttttcttttttacatttttataagagtatataaaaaatgatataaatggacatttacggtagggggggaaggcatatatttacgttaaaaggcaggacatttttaaaagctctattttctaaatgaaaactacgaaagcggggtgggttgtggcgggggcagttgtggccctgtaggaccttcggggactgatgatctaagtttccggaggtttctcaaagcctctctggttctttcaatcggggatgtctgagggaccttccgcgggacccgggtacctgcccgggcggtcgttctaaag

SEQ ID NO: 17505 - DNA, 528 bp, Homo sapiens
gactactatagggcgaattgggccctctagatgcatgctcgagcggccgccagtgtgatggatatctgcagaattcgcccttagcgtggtcgcggccgaggtactttttttttttttttttttttttttttttttaaaatcgaatcacttattttttttaaagccctgcatagaaattcccaaggtatcaaaaacaaatgagagaagccttattcattacattagccaagaatgggtgtggacgtgaacattctggaagggtgacgctgatgacttgagaatgtctaaggcacactttgtgttctttgcaacatcccatgagcaagtacattttatccacttaggtaagaaaagtataattgtaactcaatctttgattcaataaaaaatatcttcagcaaaagtggataaccttacatgaaagtgagaaatcatgttttacaactttaaatcagacaacttttggtatattcttaaaattatataaaaatagttttagtgataaaatgcattggtcccctggatttc

SEQ ID NO: 17506 - DNA, 160 bp, Homo sapiens
  misc_feature 127: n = A,T,C or G
atagggcgaattgggccctctagatgcatgctcgagcggccgccagtgtgatggatatctgcagaattcgcccttagcgtggtcgcggccgaggtactaaaaataaaaaaaaaattagccaggtgtnggtggtgcacagcctgtaagtcctaagctgctg

SEQ ID NO: 17507 - DNA, 535 bp, Homo sapiens
acgactcactatagggcgaattgggccctctagatgcatgctcgagcggccgccagtgtgatggatatctgcagaattcgcccttagcgtggtcgcggccgaggtacccaaaagaaaaatttaaaatcaagatgagtaaaaggagaatggtctcaatatcctcaaaaatgcagtaagagaagtaattccccactgaaaatgtctctctttctttctatgttataccctggagtcctggttgaggggtgggggaatcagaaaagtaggtttacatttaacatttttcttaactacattcacttcttaaaaaggaacaagaagtgtaaataagtatgtatagagtgagggattaagcatatttgcattggggactcgtgtattatgcttttaagtcaaaattaatattctcaaattcgaatttgatagctattatttctaaatctttttaatcctcaattttcctggtaaccttctttcaagagtctccttcttctaaaagttgccaaaccctttatatttaaactttttccactca

SEQ ID NO: 17508 - DNA, 355 bp, Homo sapiens
  misc_feature 304, 309, 312, 313, 320: n = A,T,C or G
atacgactcactatagggcgaattgggccctctagatgcatgctcgagcggccgccagtgtgatggatatctgcagaattcgccctttcgagcggccgcccgggcaggtacgcgggtagcccttttctgttggtgcagctgctggcattccccccatgcaagttttcagcttgcttatctatgtttgtagctcaagttttcaggtcgctctttgttaggaaagaaattattttggggctgctttttgttaaaagggaaattctgcctaaataattttttctaacttctgtattattagggtgtntattnttnncttttanggaccacaagattgttcctatcaatcttgaactag

SEQ ID NO: 17509 - DNA, 552 bp, Homo sapiens
acgactcactatagggcgaattgggccctctagatgcatgctcgagcggccgccagtgtgatggatatctgcagaattcgcccttagcgtggtcgcggccgaggtacttttttttttttttttttttttttggagacggagtcttgctctgtcacccaggctggagtgcagtggtgccgtcttggcttactgcaacctccacctcccaggttcaagcaattctcctgcctcagcctcccgagtagctggggctacaggtgcccgccaccacccccggctaatttttgtattttagtagagactgggtttcaccatattggccaggctggtctcgaactactgaccttgtgatctgcccgcctcaggttcccaaagtgctgggattacaggtgtgagccaccgtgcctggccctatattttcaaagtctaaggcatgtaggatgtaaatgagttctggcaactaacaagtgcagagctccattttagtctattcccaatttaaaaaatgtacctgcccgggcggccgctcgaaagggcgaattccagcacact

SEQ ID NO: 17510 - DNA, 566 bp, Homo sapiens
  misc_feature 422: n = A,T,C or G
ctatagggcgaatggggccctctagatgcatgctcgagcggccgccagtgtgatggatatctgcagaattcgcccttagcgtggtcgcggccgaggtacttttttttttttttttttttttttttttttttttttttttttttttttttttttttttttttttttttttttttttttttttttggggggggggaaaaaacttttttaaaaaaaaaaccccccccaaaaaaaaaaaaaagtggggtgttttttttttccccccccccctgggggggggggggacccccccccccttttttttttttttttcccaccaccccgcggggggggggccccccccccccccggggaaaaaccccggggggggggggggggggccccccccctttttttttttgggggggggggggggcgaaaaaaanaaatttttttttttttgggggggggggagaaaaaaccccccctttttccccccccccccaaacttgttttaaaaaagagaaaaaaaaaaaagaggtaatccctctcccccccccacccggggggggggggggggcccccccccc

SEQ ID NO: 17511 - DNA, 521 bp, Homo sapiens
actcactatagggcgaattgggccctctagatgcatgctcgagcggccgccagtgtgatggatatctgcagaattcgcccttagcgtggtcgcggccgaggtacctttggttttcttaaagtgaaagtcagctatatctatcaacctttgtatttgaatagtcccgctttacactctaagaagggtcataaacagtaatttaatataattatgaccatgctaatgtgaattcttaggctttactatatttacaacagcacaattttgattcaaaatcagctcttccaactgtaataactatcttcaaaaactggtttccaggccaggcacagtggctcacgccagtaatcccagcactttaggaggccaaggcaggaggatcacttgaggccacaaattcaaaaccagcctgggcaacagagcaagattccatctccacaaaaacaagttttgaaattaatcaagtatgatggcatgtacctgcccgggcggccgctcgaaagggcgaattccaacacact

SEQ ID NO: 17512 - DNA, 651 bp, Homo sapiens
acgactcactatagggcgaattgggccctctagatgcatgctcgagcggccgccagtgtgatggatatctgcagaattcgcccttggccgcccgggcaggtactaattatcctcttctagtctctttgttaatgtgcaatgtcctgaaagagtaaaattttaaaaaatgaattaatttacatacaaaagcagtggcattgaaattaaaaagaataatgtcaaaagaacaagaatacaaataaacaataaatttcaaagtagcaacagacaaacctgaacaagaacttccatgagggaatcatcaaccacagaatgaagccacctgtccttcttcactctcgctgggcgtctgtggctaccaattttcaagccccgcgtacctcggccgcgaccacgctaagggcgaattccagcacactggcggccgttactagtggatccgagctcggtaccaagcttggcgtaatcatggtcatagctgtttcctgtgtgaaattgttatccgctcacaattccacacaacatacgagccggaagcataaagtgtaaagcctggggtgcctaatgagtgagctaactcacattaattgcgttgcgctcactgcccgctttccagtcgggaaacctgtcgtgccagctgcattaatgaat

SEQ ID NO: 17513 - DNA, 392 bp, Homo sapiens
actatagggcgaattgggccctctagatgcatgctcgagcggccgccagtgtgatggatatctgcagaattcgcccttagcgtggtcgcggccgaggtactggtctgtggcctgctaggatccagggtgcacagcaggaggtgaatgtaggatgagcaaacattactgcctgagctcaactttctgtcagatcagcagtggcattagattctcataggagcatgaactttattgtgaactgcacatgcaagggatctagggtgcacactccttatgagaatctaatgcctgatgatctgaactggaacagtttaatcccaaactccagtccgtgggaaaaaggtcttccacgaaactggtccctggtgccaaaaagttaggggaccactgat

SEQ ID NO: 17514 - DNA, 316 bp, Homo sapiens
  misc_feature 236, 237, 238: n = A,T,C or G
ggccctctagatgcatgctcgagcggccgccagtgtgatggatatctgcagaattcgcccttagcgtggtcgcggccgaggtactttttttttttttttcttttttataaattctttgttttgttgtgtttttttatttttttcaaatttatggatatcgggggggggccgggcaagacccaaacaaaagcaaaacccgcaagcggggttataaaaaaagggggggccccccccannngacacagccaccaagaaacaccaccgggggggggccgggaaaaaaaaaacagggggggggggaaacatgtgggggggg

SEQ ID NO: 17515 - DNA, 562 bp, Homo sapiens
acgactcactatagggcgaattgtgccctctagatgcatgctcgagcggccgccagtgtgatggatatctgcagaattcgccctttcgagcggccgcccgggcaggtacacggcaggcaatcggagacacttttgctgttgcctaggaatggatacaccctggttagagtaaagcgtatctcttctccacgccttccattgtctactttctctttgaaacatcttagggataattattaggaataaatactgagaaaaatagcaccggcaataaaagtagctgcaataataatagtaaaagctaatattgatgtacctcggccgcgaccacgctaagggcgaattccagcacactggcggccgttactagtggatccgagctcggtaccaagcttggcgtaatcatggtcatagctgtttcctgtgtgaaattgttatccgctcacaattccacacaacatacgaaccggaagcataaagtgtaaagcctgtggtgcctaatgagtgagctaactcacattaattgcgttgcgctcacttgccgctttccagaccggaaacc

SEQ ID NO: 17516 - DNA, 461 bp, Homo sapiens
actaaagggaataagctagcggccgcaccaattttttttttttttttttttttttttcaatgcttttaagacctttaataatgcccacgtgccctaaggttggccctcttaactccctcagctctttctggctttaagccatcaccccaggtgtgcagtttatgtcagagggggccatcaggtagggaaacttatcagctgctctaagagaaaaggccgtccctgctattatcagtgggcacaggctggagctcagccagcaggggctacagtcgggttacctggagacatgatcccctggtcctctgagggcctaggcaggacatgggggaggacacggtcccccgggacagagtcctctggccaggagcagcctttcaggttgctcttgtgtgctagaaaaaaatattttctctatgtgccatgtcatgaaaaagacaaaagcactgagttaatgggat

SEQ ID NO: 17517 - DNA, 385 bp, Homo sapiens
tatagggcgaattgggccctctagatgcatgctcgagcggccgccagtgtgatggatatctgcagaattcgcccttagcgtggtcgcggccgaggtaccaggttgcagttaagaatttttctcttttctttggagagaagttaaagtccctggcagtgtttttcctcagatcatctgcatcacctaagctggggttggccagatctttgaacctacaacacttcattccggttttcattttctttgtgttcatggactctagagagcacggaagtaattgggtttcattgggtagcagagtaaggtagagtgcactttctcaagacatgttcattggtctgagcaaagttctgtctcttggaaggagacagtagcttggtggtgc

SEQ ID NO: 17518 - DNA, 545 bp, Homo sapiens
cactatagggcgaatggggccctctagatgcatgctcgagcggccgccagtgtgatggatatctgcagaattcgccctttcgagcggccgcccgggcaggtactttttttttttttttttttttttttaaattttttttttttttttttttaaaaaagaaaaaaaatttttttttaaaaccttaaaaccccgggggtggtgggcaaaaaaaaaaccaaaaaccattttcccaaaaggggggttccccaccgggtttaaaaaccccaaagggggcccccccccccaaaaaaccccttttggggggtcccccaaaaaaaaaaaaccccccccccccccgggggtttaaaaaaccccaaaaaaaaagggggggggggttttttttggggggaaaaaccccccctggggggggggggaaaaaaacccccccccccccccggggggggggggcccccccgggttcctggggggaaaccccctgggggggaaattccccccccggggggggggttttagggggtcccccccctggacccaaggggggggaa

SEQ ID NO: 17519 - DNA, 466 bp, Homo sapiens
atatggcgaatggggccctctagatgcatgctcgagcggccgccagtgtgatggatatctgcagaattcgccctttcgagcggccgcccgggcaggtacaacaaaatccttttacaaaatataaatttattatgaaaacctggaaggataatccaaggaaggtaaagaaagagaaaaggaggccggcagaagaaggcaggaaggagaggaaaagagaaaaagacaaagaggagatgagagaagaaaatacagttcagcacaacagaagtgcagaagctcacctacccaaatggcattaaagcctcgctgtgtaatcgtgtcagaaaacaaagcatactgacacatagtgctctacttcccatccacttgagttctaagaggtaaattaaaaagctccctgggaaggggacatgaggttgctcaaaaacccaacaaagaaaatttaaaaaaaaagagagagagaaac

SEQ ID NO: 17520 - DNA, 641 bp, Homo sapiens
  misc_feature 505: n = A,T,C or G
ccctctagatgcatgctcgagcggccgccagtgtgatggatatctgcagaattcgcccttgagcggccgcccgggcaggtactcggggagtgactccacacccacagaaggagagggggatgaagaaatctgccaggagggtgcctcccgccgtatctgatgaagagtgactcagccctggcctcatggaccctccacaggctctccctccctcaagggtgcagaatgatgaggattccaacctccagcacgacaaaagcaaaacacactcgctctgagaaaccgaggaacgagccagacgactggagttgccaagagcaagtcaaaaaacattctggtgagaatggtgagcgaagctgggacaggtttctgcttcaacaccaagagaaaccgactgcgggaaaaactgactcttttgcattatgatccagttgtgaaacaaagagtcctcttcgtggaaaagaaaaaaatacgctccctttaaacggtggattgaaaatgactntgatttataaagagaagactgaaggcggagatactgattcagaaatcctgtaacgtgtaataaaagaagaggaaatggcatggaatcactgcctactgtgatttgaaagccattgtgaaggaaaacaatgcagtga

SEQ ID NO: 17521 - DNA, 576 bp, Homo sapiens
tatatggcgaatggtgccctctagatgcatgctcgagcggccgacagtgtgatggatatctgcagtattcgcccttagcgtggtcgcgggcgaggtactatgtgtactttttcatttttaaaaaatcatcaggactgcctgtgaatgaagtgcatttgctgtattgaaccaaaaccatagagctcagaaaaatcaaaaccatgacaagacattttagcatttaactactttctataactaagtactctttaaatatttttatttcaatactgtggatggaaatgagaagcattctaaatttgagttaatatatttttatgaagatatttgagaaaagaaaaaaatagctagtattcatgaccatggacttgctcttgatcatgcacttatgtatgttacctaatttggccttttaaaaaaggtgtaagtgtttattatagctactttcaaggaaagtttgaatatgattctagtctctaaagttcttcacgttttctgacattccctggaaggtgactggggaaaaattgctccaggttgaaacaaccaagcccaaaactttaccattctgatcta

SEQ ID NO: 17522 - DNA, 534 bp, Homo sapiens
gagtcgacccacgcgtccgggcggcgtccgcagtctgccgagcggcctgctctgggacgcaagcgctacttcgcacctgccgctcgccggccctgctgaggctacctgccttgcggggtaccgcaaccttcgtccaggccctccagagcgtgccggagacacaggtcagcgtattggacaacgggctgcgtgtggcctcggagcagtcctcgcatcctacctgcacggtgggagtgtggattgacgttggcagtcgctatgagactgagaagaacaatggagcaggctactttttggaacatctggctttcaagggaacaaagaaccgtcctggcaatgccttagagaaggaggtagagagtattggcgcccatcttaatgcctacagcactcgggagcacactgcttacctcatcaaggcactgtccaaggacctgccaaaagttgtggagctcctggcagatattgtgcagaacattagtctggaagactcgcagattgaaaaggagcgagatgtgatcctgcgggagatgc

SEQ ID NO: 17523 - DNA, 313 bp, Homo sapiens
atgcatgctcgagcggccgccagtgtgatggatatctgcagaattcgccctttctagcggccgcccgggcaggtacttctagaggctgaggcaggtggattacttaagctcagtagttccagaccagcctgggcaagatggcaaaactctgtctctacaaaaattctaaaaatgtaggcaggcatggtggtgtgtgcctgtagtcctggctacccagggggctgaggtgggaggattgcttgagcctatgagttcaaggctgcagtgagctgtgattgtgccactgcactcctgcctgtgtgacagagtgacc

SEQ ID NO: 17524 - DNA, 558 bp, Homo sapiens
gactactatagggcgaattgggccctctagatgcatgctcgagcggccgccagtgtgatggatatctgcagaattcgcccttagcgtggtcgcggccgaggtactcctgcctggatgacagaatgagactctgtctcaaaaaaaacaaaagcaaacaaacaaaaaaaaacagatatttctcacagttgtggagactggaagtgcaagatcaaagtgttggcaggtgcctgtaatcccagctattccagaggctgaggcaggagaatcacttgaacctgggaggcagaggtttcagtgagtccagatcatgccactgcactccagcctgggtgacagagcgagattctatctcaaaaaaaaaaaaaaaacaacagaagcaaatgagagtgcctgggagtggtcattgtggggcatttctgttcgtgtgacccaggtcatgtccctccctaagccctggtctctcttgcctcctgcagggctggtgaattaccatatctccgtcaagtgcagtaaccagttcaagttggaagtgtgtcttttgaaatcagacaacaaagt

SEQ ID NO: 17525 - DNA, 388 bp, Homo sapiens
ctactatagggcgaattgggccctctagatgcatgctcgagcggccgccagtgtgatggatatctgcagaattcgccctttcgagcggccgcccgggcaggtacttttttttttttttttttttttttctttttttttttttttttttttttttttttttttttttttttttttttttttttttttttttttttttttttttttttttttttttttttttaaaaaaaaaaaaaaaaaagccttttttttgaaaaaaaaaaaaaacatttgatttccccttaaaaaaaataataaaatagagaacgtgttttttaaaatccttgaaaacaaaaaaaaaggggcaaaaattttttttttattaaaaaaaaaaaaagggggggggggggac

SEQ ID NO: 17526 - DNA, 261 bp, Homo sapiens
  misc_feature 156: n = A,T,C or G
ctactcactatagggcgaattggagccctctagatgcatgctcgagcggccgccagtgtgatggatatctgcagaattcgcccttagcgtggtcgcggccgaggtaccctgccatcatctataacatcctgctctttgggctgaccagtgccctgngtcagagcttcatctttatgacggttgtgtattttgggtcccctgacctgctccatcatcactacaactcaaaagttcttcacaattttggcctctgtgatcctc

SEQ ID NO: 17527 - DNA, 228 bp, Homo sapiens
gggcgaattgggccctctagatgcatgctcgagcggccgccagtgtgatggatatctgcagaattcgccctttcgagcggccgcccgggcaggaacttttttttttttttttgggttttttttttttttttttttttttttttttttttttgattttgctgaacctaatatttggggaaaacccccaccccaagcaaggggggggaagcaaaaaaaaaaaaaaggaaa

SEQ ID NO: 17528 - DNA, 439 bp, Homo sapiens
atatggcgaattgggccctctagatgcatgctcgagcggccgccagtgtgatggatatctgcagaattcgccctttcgagcggccgcccgggcaggtacttttttttttttttttttttttttttttttttttttttttttttttttttttttttttttttttttccctaaaaccttcccctttcctttaaaaatttgggggggggcccccccccttttaaaaaggaaaagggggggggcctttaaaaaaaacttttaaaaaacccttaattgggtcctttggggcccccccccaaaaaaattggggcaaaaaattttttttaaaagcccctttttaaaacccccacccggggggtttttttaaaacgggaaaaaaaattttttttccccgttccttggggccaaccccccttgggggaaaatcccccccccggggggg

SEQ ID NO: 17529 - DNA, 565 bp, Homo sapiens
  misc_feature 222, 223, 224, 226, 227, 447, 448, 449: n = A,T,C or G
attgtaatacaactcactatatggcgaattgggccctctagatgcatgctcgagcggccgccagtgtgatggatatctgcagaattcgcccttagcgtggtcgcggccgaggtactttattttttttttttttttttttttttttttttttttttttttttttttttttttttttttttttttgcatttttttttttttttttttttttttttttttttttnnnanngagggggggcacaaccccctttttattttttttcttaaaaaaaaattttttaaaaaaattttttttttaaaaaaacgagaaaaaaaggccagaaaaaaaggggggggtattttttttttttttttccccaaaaaaattttttttgtggctttttttaaaaaaaaaaaaaattcacctggaactgaacccggggggggggggaaaaatatttttatataannngccccctttaagttttttttaaaaaaaaaaggcccccccccgcgtgtttttttataaaaaaaaaaacccccccctttttttttttttttattaaaaaaaaaaaaaaaacccccccc

SEQ ID NO: 17530 - DNA, 545 bp, Homo sapiens
ctcactatagggcgaatggggccctctagatgcatgctcgagcggccgccagtgtgatggatatctgcagaattcgccctttgagcggccgcccgggcaggtacttttttttttttttttttttttttttttttaattttttttttttttttttttttttttaaaaaaaaaaaaccccctttttttttttggggaaaaaaaacccccgccaagggggggttttttggggggaaaaaaaaaaaaacccacccccttttttccccccccccccccccatttttttggggggaaaaccaagggggggggggccaccaaaaaaaaaaccttggggggggggcccccccggggggggcccccccccgggggggggggggtccccaaaggggggctcctttttttggggggggggggggggttcccctccccaaaaaaagggggggggttttttttttttttggggccccccccccgggggggggatttccccccccgggggggggtttttagggagcccccccgggggccccaagggggggaaaaagggg

SEQ ID NO: 17531 - DNA, 446 bp, Homo sapiens
tgtatacgactcactatagggcgaattgggccctctagatgcatgctcgagcggccgccagtgtgatggatatctgcagaattcgccctttcgagcggccgcccgggcaggtacattttttttttaagaaaaatggaatcacactaaatatttcagaaaaatatttctgaaatgttaattaccaaaggatacaaaactgtattgaaaccatgattcagttgtgtaaaagaaaatctgtaaggagatatgtgaaaagattggttgcaagggaataatgaaattacaagtattagaaggaatggctgggcatggtggctcacgcctgtaatcccagcactttcggaggctgaggcaggtggaccacctgaggtcagaagttcgagagcagcctggctaacatggtgaaaccccgtttctattaaatatacaaaaaattagccgggcat

SEQ ID NO: 17532 - DNA, 586 bp, Homo sapiens
ctatagggcgaattgggccctctagatgcatgctcgagcggccgccagtgtgatggatatctgcagaattcgcccttagcgtggtcgcggccgaggtacaggtaagccctggctgcctccacccactcccagggagaccaaaagccttcatacatctcaagttgggggacaaaaaagggggaagggggggcacgaaggctcatcattcaaaataaaacaaaataaaaaagtattaaggcgaagattaaaaaaattttgcattacataatttacacgaaagcaatgctatcacctcccctgtgtggacccgcgtacttgaagctttcaatttaagtggaccttcaggctgggaagaccatttctctgttttatcctccatgctggcaaggtcatgtcctggcttggaaagaggagtctcatctatttctcctggaagaacctgggtttctggaagcctcatgccaggcatttgaaaagggagaggtcctttggatggatggatcctgacctcagaagtggaaagctcattcccagtcatcccagcagtggaaaggtgcagctttaagcctgtgctgtcaagatcaca

SEQ ID NO: 17533 - DNA, 545 bp, Homo sapiens
ggggccctctagatgcatgctcgagcggccgccagtgtgatggatatctgcagaattcgcccttgagcggccgcccgggcaggtacttttttttttttttttttttttaattttttttttttttttttttccggggaaaaaaaaaggaacttttttttttttttttgggggggggggccccccaagggggggttttccccccccgggggggggggggcctgaaaaaaaaaaaaaaaagggtttaaaaaaagggggggggttttaaaccccccccccagggggcccccacccccctttttgggaggggccccctttgaaaaaggattttggggcccccttttttggcccccccttaaataaaaaaattttggaaaaatttggggccccctcttggggggggccaatttttttattaagggggaagggaacccaggggcctttttttttttttagaaggccctttttttttttttttaaaaaattaaaaacccttttttgaaaaaaaggtttttttaaaaccttttttcagaatttttttgggaaaa

SEQ ID NO: 17534 - DNA, 403 bp, Homo sapiens
tacgactcactatagggcgaattgggccctctagatgcatgctcgagcggccgccagtgtgatggatatctgcagaattcgcccttcgagcggccgcccgggcaggtactttttttttttttttttttttttgctttctgttttttttttttttttttttttttttttttttttgttttttttttgtttttttgttttctccccaaaaaaacccggcggatttatcccggggaaaaaagggtttttggggggataaattaaaagggggtggaaaatgttttattttttaaaaaggccccttaccgggagggggggcaccaggaatttggggaaaccaaaaactcccccttttataaaaaaaaaaaaaggcccccacagggctcccccgggggggggggggaac

SEQ ID NO: 17535 - DNA, 573 bp, Homo sapiens
  misc_feature 425: n = A,T,C or G
cactatatggcgaatggggccctctagatgcatgctcgagcggccgccagtgtgatggatatctgcagaattcgccctttcgagcggccgcccgggcaggtactccttcttccgccgccgactgtcctgagctgactgcttgttacggattttcctcctgaccttcttgaggaccctctcctctgccttggtgaggggcaggtgagagggcagggaaaccccttcctgccccagcagacgcttctcctcatcggccaggaacagggtttgacagggcagctgggggtaggggcaggagaagatgcaataggagtgaggagggggtcatcccatttgcagcacccaggctactccccccacatgccttctggagagtgtttcctcactgggagacaactttaatctaaaggtgaggtgaggggcanagactttaattcagacaggctctagatcaagccaaagggacatcctgaggccaagaagggagagaggagggtattgtcatatccttcacccagacactgaggaccttggcactctgagcaagctagaaaaggcttattctggtccatg

SEQ ID NO: 17536 - DNA, 672 bp, Homo sapiens
  misc_feature 584: n = A,T,C or G
atatggcgaatggggccctctagatgcatgctcgagcggccgccagtgtgatggatatctgcagaattcgcccttcggccgcccgggcaggtacgcgggagtcctgataggactcctaaaaagcatttcagtgccatcacaaaacaagtagagctgggtagagctgggcgcggtggctcacgcccgtaatcccagcactttgggaggccaaggcgggtggatcacgaggtcaggagttcaaaaccagtctggccaagatggtgaaaccctgtctctactaaaaatgcaaaaaaatcagccggacatggtggcgggtgcctgtaatcccaggactttgggcaaggcgagaggatcacctgaggtcaggagttcaagaccagcctggccaacatggcaaaaccccatctctactaaaaatacaaaaattagctgggtttggtggtggacacctgtagtcccagctacttgggaggctgcggcaggagaatcacttgaaccccggaagtggaagttgcagtgagccaagatcgtgccattgtacccagaccaattttatgtatatatattctgaaatgctccctttntaatgtggtcatttgttgccttctaagttgagaggacaaaactgaataaagtgaatgttaattgtcaaaaaaaaaaaaaaaaaaaaaa

SEQ ID NO: 17537 - DNA, 261 bp, Homo sapiens
agtgtgatggatatctgcagaattcgcccttagcgtggtcgcggccgaggtacagttactaaaatgtgcttactacaaaacagtaaaatatttcactctgtaaatcatcactaagtagttattctgtcctgttgattatgagcctccaaaaatgtttaatgcttgaaggatggtttgggaggcagggaatccttttcttaaaacactttaatgaggcatatgttacatatcataaaacacccatttcaagtgtacctgccc

SEQ ID NO: 17538 - DNA, 308 bp, Homo sapiens
  misc_feature 229: n = A,T,C or G
gcgaattgggccctctagatgcatgctcgagcggccgccagtgtgatggatatctgcagaattcgccctttcgagcggccgcccgggcaggtactggggattaagtttccaacacatgctttttgtgaaacatgttcaaaccatagcattttcaaattccaaaataagattcccttacaatagtatcttaccaaacacagtggctcatgcctgtaatcccagcacttanggaggcagaggcaggaggattgcttgagcccaggagtttgagaccaacctgggcaacatagtgagatctcatctctacg

SEQ ID NO: 17539 - DNA, 467 bp, Homo sapiens
gcgaatggggccctctagatgcatgctcgagcggccgccagtgtgatggatatctgcagaattcgccctttcgagcggccgcccgggcaggtactttttttttttatttttttttggggctttttttttttttttttttttttttttaaaaaaggggggaaaaaaaaattttttgggggacccccaaacgaccaaaagggggggggggggaaaaaaaaaaaggggggggaaacctttttttgggggggggtttttttttgcggcgcccccggggggggaaaaaagggggccctttttcaaaaaaagaaaaaaggggggtccccccccaaaaaaaaatttttaaaaaaaggggcacggggggggaaaaaccccattttttggggcacaaacccgggggggggaaatccacccccgggggggggggttttaaaagagaacgcccgggaacaaaatggggggaaaaaaaa

SEQ ID NO: 17540 - DNA, 626 bp, Homo sapiens
gacccacgcgtccgacagggtctgatctagggagaggccaactctgatacccctatgtgcgctgctaggagctaaggacattcagagagacatggcctggaaacagacaccactcctgcttttggtctacatgatcacaacatgcagtgcccgggacagaacagacctgctcaacgtttgcatggatgccaagcaccataagacaaagccaggcccggaggacaagctgcatgaccagtgtagtccatggaagagaaatgcctgctgctcagtcaacaccagccaggagctacacaaggacaactcccgtctgtacaatttcaattgggatcactgtggcgagatgacgcccgcctgtaagcgtcacttcatccaagacgcctgcctgtatgagtgttcccccaatcttgggccttggattcagcaggcaggccagagctggcgcaaagagcgcttcctggatgtgcccttatgcaaagaggactgtcaggagtggtgggaagcctgtcgtacctcctttacctgcaagagagactggcataaaggctgggactggacctcaggcattaacaagtgcccagacacagcaccctgccgcacatttcagtactatttcccgacaccag

SEQ ID NO: 17541 - DNA, 516 bp, Homo sapiens
cactatagggcgaatggggccctctagatgcatgctcgagcggccgccagtgtgatggatatctgcagaattcgccctttcgagcggccgcccgggcaggtactctctaaaattaaaatcattagaaaatatcttaaataaaatgttttacataaataagtgttaaatttcagattcaaactatattttcttctgtatctcaatttgggaaaaatctcacaattattaactcttctcagttacatttatttttgagcatttaaatctactatacaccagtttgtaaaattcaccttggttacctctccccatgcctatgtgctgtctttcctcaggtaagtccattatatgcatctaagtgctggggaggtttaaatagcacttaaagaatattcatgagagttctgaaatgaaggtttcgtctttagctattgactgtaggatttgtaattcaaatcatcacagcatcctaaagaaatactgtgtgaatggaatgcacacaattcctacagaaca

SEQ ID NO: 17542 - DNA, 379 bp, Homo sapiens
tttaccctgatacctgatttttcgtttgggctgacgaccctttctggacttattccgcttttgggttggtctctaacagtaaggtatgcttgaggtgtggctgtgtgctgatacacacagtggaaggagaaagctcctcatcccagctgtctgtagcactgctatccccacctgatatgttgtcctgcttccgccgatgaagtctaataaccttccccctgctcattcccctaaagagggaaaattaacttatagtagtccttccaacagcatgcatcacatcatagcacacatgggcgaagtgtctgtgcatatgctaccccctctcttccacctaccaaatgtttccaggacattaaatgtcatatcaaattcaata

SEQ ID NO: 17543 - DNA, 392 bp, Homo sapiens
  misc_feature 207, 208, 209, 210, 211, 212, 213, 214, 215, 216, 217, 218,219, 220, 221, 222, 243, 244, 245, 250, 253, 288, 289, 290,292, 293, 294, 295, 316, 317, 335, 337, 341, 363: n = A,T,C or G
cctctagatgcatgctcgagcggccgccagtgtgatggatatctgcagaattcgccatacgagcggtcgcccgggcagggacttagttttttttttttttttttaaatttttttttttttttttttttttttttttttttttttttttttttttttttttttttttttttttttttttttttttttttttttttttttttttgatgnnnnnnnnnnnnnnnnaaaaaaaaaaaaaaaaaaaannnatatnttntttttttttttttaaaaaaaaaaaaattttttttnnnannnnaaaaaaaaaataaaataattnnttttattttttttttttnanttgnggaaaaatatattttttaattntaaaaagaaaaggggggaaaaaaaaaaaa

SEQ ID NO: 17544 - DNA, 745 bp, Homo sapiens
tacgactactatagggcgaattgggccctctagatgcatgctcgagcggccgccagtgtgatggatatctgcagaattcgccctttcgagcggccgcccgggcaggtacgcgggtagcataaaaataaaggtataaagaaagatataccatgttaatactagtcaaaagaaaactggagtagcagtattgatatcagataaggcaaacttcagagggagaaaaatgatcagggataaagaggggcattatataataagagggtcaatactccaagaagacattgttaaatccttaatgtgtatgcacctaacaacagcatcaacgtatgtgaagcaaaaactaatagaactgcaagagaaatagacaagtccactattatagttggagacttcaacactcttctatcagtaattgacacatttagcaggcaaaaaaatcagtaaggatatagctgaactggacaatactgtcaagccactgaatctaattgacatttacagtatacttcattcaacagagtacctcggccgcgaccacgctaagggcgaattccagcacactggcggccgttactagtggatccgagctcggtaccaagcttggcgtaatcatggtcatagctgtttcctgtgtgaaattgttatccgctcacaattccacacaacatacgagccggaagcataaagtgtaaagcctggggtgcctaatgagtgagctaactcacattaattgcgttgcgctcac

SEQ ID NO: 17545 - DNA, 533 bp, Homo sapiens
ctatatggcgactggggccctctagatgcatgctcgagcggccgccagtgtgatggatatctgcagaattcgccctttcgagcggccgcccgggcaggtactggggataacttaatatcctatgttgtgtcaagactctttgaagactttcttgaattgctttcgtaaaggtctgaacactgttaaggagaaagctgagtatcaacttgcctttctgatagaaatgtttcttgtgccagttttattgttgagatatactatttttttccttttttaattcagttttttaaaaaaacaaatgtattgtggcttccagttaccaggttgtctaggtaatgacagtaaactgactgtagaatgataattgtggtatagtgaccaatagatgccaaacagcttgtggcctcactaaaggtggggtcgcttagtccccgggagtaaaatgagtgacctcagaaacaagaattcctggaaaggcacatgccgaagaggaatatggtataattttaaattttaatgcaaaattttaattt

SEQ ID NO: 17546 - DNA, 458 bp, Homo sapiens
cactactatagggcgaattgggccctctagatgcatgctcgagcggccgccagtgtgatggatatctgcagaattcgccctttcgagcggccgcccgggcaggtacgcgggtaatcaaaccactacatctggatcagagacaaatgacctcccagattgactagttttgtaaggaacttcagttgaaattgaagcagtcatcagctgcttctcaaaccagctacactacataaggaggagcccaagggaaactgcaggacaacaggtccactgggaaacttcagggggccaagctgtcaaagacaagcacagaaaaattcctgcaatgtgcgttagaccttgaggcagcttttaatggcaaaagtcagtacctcggccgcgaccacgctaagggcgaattccagcacactggcggccgttactagtggatccgagctcggtaccaagcttggcgtaat

SEQ ID NO: 17547 - DNA, 512 bp, Homo sapiens
tataggcgaattgcgccctctagatgcatgctcgagcggccgccagtgtgatggatatctgcagaattcgccctttcgagcggccgccctggcaggtacaaaaagtagccgggcgtggtggctggcatgtgcctgtagtcccagctactcaggaggctgaggcaggagaatcacttgaacctgagaggcggaggttgcagttagccaagatcacgccattgcactccagcctgggcgacagagtgagactccatctcagaaaagaaaaaaaataataaaaaaaaaaaaatgtacctcggccgcgaccacgctaagggcgaattccagcacactggcggccgttactagtggatccgagctcggtaccaagcttggcgtaatcatgggcatagctgtttcctgtgtgaaattggtatccgctcacaatttcacacaacatacgagccggaagcataaagtgtaaagcctggggtgcctaatgagtgagctaactcacattaattgcgttgcgc

SEQ ID NO: 17548 - DNA, 513 bp, Homo sapiens
  misc_feature 448: n = A,T,C or G
ctatagggcgaatggggccctctagatgcatgctcgagcggccgccagtgtgatggatatctgcagaaattcgccctagcgtggtcgcggccgaggtactttttttttttttttattttttcccttttttttttttttatttttttttttttttttttttttattatatttttttttattttttaaccacaaaaaaaaaaaatttatggggggggggggggccagaaaaaagaacaaaaaaaaaaagaagggggggggtaagaaaaaaaaaaaaccgcaaggaaggttatgggaaaaaaaaaaaacccaaaaagggggccgccccccggggaaagaaagaaaagggggcatatttaataatggggaggggggggggttttttttgaaaaaagaaaatctttttttcatttcgcaccacaaaaaaataaaaatttttatgggggggggnccccccccccccggaaaaaaaaaaaggctttttttaaacaaaggggggggggggttttttttttt

SEQ ID NO: 17549 - DNA, 562 bp, Homo sapiens
tacgactcactatagggcgaattgtgccctctagatgcatgctcgagcggccgccagtgtgatggatatctgcagaattcgcccttagcgtggtcgcggccgaggtacgcggggatacttgacaatttgttttattatgtaattgataaaatggtgatgtgtattaatgttagttcaaccatatatttatactgtctggggatgtgtggttatagttctgtgggagaaataattttgtcagtgttcaccagcttgtaaaaacttagtgcgagagctgaaacatctaaataaataatgacatgcatttatcatcaaaaaaaaaaaaaaaaaaaaaaaagtacctgcccgggcggccgaagggcgaattccagcacactggcggccgttactagtggatccgagctcggtaccaagcttggcgtaatcatggtcatagctgtttcctgtgtgaaattgttattccgctcacaattccacacaacatacgagccggaagcataaagtgtaaagcctggggtgcctaatgagtgagctaactcacattaattgcgttgggctcact

SEQ ID NO: 17550 - DNA, 656 bp, Homo sapiens
tatatggcgaatggggccctctagatgcatgctcgagcggccgccagtgtgatggatatctgcagaattcgcccttagcgtggtcgcggccgaggtacatctaggtccggcgtggtggctcactttgggaggccgaggcgagcagcactttgggaggccaaggcgagcagaacacttgaggtcaggagtttgagaccagcctgaccaacatggagaaaccccgtctctattaaaaacacaaaatttacccgggcatggtggggcatgcctgtaatcccagccacttgggagtctgaggcaggagaattgcttgaacccgggagacggaggttacattgagccgagatggcgccattgcactccagcttgggcaacaagagcgaaactctgtctcaaaaaaaaaaaaaaattccaaattgactccggggttaacctccgggggctcacccccaacttggggaacccccgtttttactaaaaatccaaaatttacctggacgtgctagggcccccctgtattcccacctcctggggaccctgaggcaggaaaatggtttaaccccaggagggggaggttgcattgacccaaaatcaccccttagcactccaccctgggggacaaagcaaaactccgtctaaaaaaaaaaaaaaaaaaa

SEQ ID NO: 17551 - DNA, 409 bp, Homo sapiens
tacgactcactatagggcgaattgggccctctagatgcatgctcgagcggccgccagtgtgatggatatctgcagaattcgccctttcgagcggccgcccgggcaggtactgtttgatcccctcgctcttttaaataatttcgcatagcttccctagtaagtcgtttaggtggaggccgctcgccaaatttccttttaatccacgccatggtacgcgggtcggaaaccacgcgtcctactacaaagatgctctgcggtttttgggctgtgttgacatcaaggatctaccagtgtctgagcagcaggagagagccttcacgctggggctagcaggacttctcggcgagggagtttttaactttggagaactcctcatgcaccctgtgctggagtccctgaggaatactga

SEQ ID NO: 17552 - DNA, 653 bp, Homo sapiens
ccctctagatgcatgctcgagcggccgccagtgtgatggatatctgcagaattcgcccttcgagcggccgcccgggcaggtacaaaatattgaaatgaccaacgttacatgatttcaagggttgtcctttctgtgcttttatctgtcacgacaggaaggtgtggaaagtttatatcgtttatatccttaatttgactactcttggatattaaaatctttctattaattaaaaagacttttagacaacctcttaaatggaattacactatggaaaacagggctcccccaaaaacacctaggcagaactgagagttctttgaaaaccattcccaataaaaactaaatgaaaaataaatataaaacaaagcttaaaaaaatatgcattacctgacaccaaccttttctggctgacaatatttattcatgaaaacatatcagctgtctaccttttatatgcaaaccaagtcctgaggttaactaggggctgaagcaaactagcatttaggatgcaaacattcttggatttgtgatgtaaacttgccttgcacagggaagtttgctggtctatacagaatgagaaattcaagccctattttaacccctgccctctttagctttcacaaaacattggtccacaaaataaaattttcaaa

SEQ ID NO: 17553 - DNA, 284 bp, Homo sapiens
gcgaatggggccctctagatgcatgctcgagcggccgccagtgtgatggatatctgcagaattcacccttcgagcggccgcccgggcaggtacttttttttttttttttttgggtttttttttttttttttttttttttttttttttttttttttttttttaataaaaaaatttttttttttaaaaaaaaaaaaaaaaaaaaaaaaaaaaaaaaaagaaagaatttttttttaaaaaaaaaaaatttttttttaaaaaaaaaaaaaaattttgggaaggaaaaa

SEQ ID NO: 17554 - DNA, 606 bp, Homo sapiens
atatggcgaattgtgccctctagatgcatgctcgagcggccgccagtgtgatggatatctgcagaattcgccctttcgagcggccgcccgggcaggtgttaagtttgtgaaaagtgatgcaatttgttatacattcaaatgcaaattagaactagctgccttacgatgagatttcactgtcatttttttagcaccctaatttttgtcggttctgtaggtttcaagtagcagaaacttacatctatttccttcagaaaattaaggagcagatattttaatatgctttatgtaaataggattctgataattttagctttagttaatgcaacacacttgcctgggcacaaccatgacctctctgagaactggaaaatactgcataattttaaaaatcagagtgtaatgacattccctgacaacttcaaataagttatgtgaggaggatgaactatgggtagtctagaccaccagtcatatttgtctagccgtagaaacagtgacaacttaaagatctgcaaagatcagagcagagctggctgaaggtgcagcattctatacatgtcctcatggagcttcagaaaggttataagatgacccactcattct

SEQ ID NO: 17555 - DNA, 526 bp, Homo sapiens
ggggccctctagatgcatgctcgagcggccgccagtgtgatggatatctgcagaattcgcccttagcgtggtcgcggccgaggtacttgctcgctcagatcctgccaggtcaatgagtgacatcttggcaatacggacattttgattgatacttgctgttttgtcttgttgtcgcaagtaaatttggaaaacagcatgagaacgagaagatgtggcattcatatcagtgggatgttgtgtcctgtttttgtttccattatccaataaatgcaaaatttcttctgaggatttgggctggtgtaaagtaagtccatgaacgaccacccctttttgggtatcttcccggacagcaagtggccctgaatttactaagagatcacaaatctgttcattatatacctccagatatgaaactgcagtacctgcccgggcggccgctcgaaagggcgaattccagcacactggcggccgttactagtggatccgagctcggtaccaagcttggcgtaatcatggtcatagctgt

SEQ ID NO: 17556 - DNA, 381 bp, Homo sapiens
gggccctctagatgcatgctcgagcggccgccagtgtgatggatatctgcagaattcgcccttagcgtggtcgcggccgaggtacgcgggtaaatcaggaatggccatattagtgtcagataaagaagactttagagcaaagaaaattaccagagacagagagggctgttacattgtaataaaagtgtcaaacaaccgagaagacaacaatcctaaatgtgtatgcagaaaataacacagctgccaaaatacatgaaggaaaaactgtcataactaaaaggaaaaagacaaatctacaattacagttgcagacttcagcacgcctccctctcttactgataggtagaacaactagacagaaatagcaaagaggtagaactc

SEQ ID NO: 17557 - DNA, 544 bp, Homo sapiens
  misc_feature 22: n = A,T,C or G
atagggctgaattgggccctcntaaatgcatgctcgacggccgccagtgtgatggatatctgcagaattcgcccttagcgtggtcgcggccgaggtacagatttagataaccagcttcaagaacaatcagaaactgaggaagattccaatcctaatgttagctggggtaaaaaggtccagcctatagactccatattagcagactggaatgaagatatagaagcatttgaaatgatggagaaggatgagctatgacttgctaaacaatctgttggtaggtatttaaaaagaaaaggtaaactgtgtgtggttaatagacatcctaatactaagcaggctttctaatgggaggctttaagtatggtgatgaacaaccacgttctgactggcgtagttatcgtaggaatctggagcatgctgtgttagaattgaccttgtttaaaactgtcccatcaaaaatggaaatccacagttcccccttcaaatgcagcactgcaccaccctgcaacacctcaggccagggaaagattactgagcattcctg

SEQ ID NO: 17558 - DNA, 545 bp, Homo sapiens
  misc_feature 496, 497, 498: n = A,T,C or G
gagtcgacccacgtgtcctcatgattttgatatcattattctaaggagttatctcaaaggcacaaaatatgaattctgcaagaaggctattttttattgtagtttgaatgggttaggaaaagcctcaatttttcactcttaagtccttcagtacatttttctttcatcttattacttatgcaagttaaggttctttggtaacagaattcttgcaactgtaaaataaaactacatagatgtaagaagtcatgtaaacggttaacaagcttaccaaggttagcaaaactttcattgtaaatcagtctgtactgagcaaataaaaatcattattagttgtataaacacaaattccattttgactttcaggatgtcatactacttctgtacctagcattttcagtccttatatttgcaatgttacacaaactgtactattttcttttatgtgcagtttgcatgagtaaaccatcagagaataaattctatctttaaattnnnaaaaaaaaaaaaaaaaagggggggccgttaaatttttttaaaaaaaa

SEQ ID NO: 17559 - DNA, 465 bp, Homo sapiens
tagatgcatgctcgagcggccgccagtgtgatggatatctgcagaattcgcccttagcgtggtcgcggccgaggtacttttcacatagcttgttgccccgtaaaagggttaacagcacaattttttaaaaataaattaagaggtatttataggattaaagtgacttcatttgtatacatttggaatctaaaccagcttaaaaacagtttcctcaatgacttagatacacagtataactgatgctcttctggaataccacatgagacatggtcagaaacagtgcttggaaggacattacacaagaaattcagagtaatgctttgaagatttccccccttttgttttattcctgaaggaacatcagtacctgcccgggcggccgctcgaaagggcgaattccagcacactggcggccgttactagtggatccgagctcggtaccaagcttggcgtaatcatggtcat

SEQ ID NO: 17560 - DNA, 380 bp, Homo sapiens
gaattgggccctctagatgcatgctcgagcggccgccagtgtgatggatatctgcagaattcgcccttagcgtggtcgcggccgaggtactatattacttcaagatatgtgtaggcaaatatgctaagcttctacagtttagagggttttacaaaactgaaaagtgaaattgagggtcacatgaacctgccatgaagtaaatgtcacatttctgtcactgctcactagacttgtgcactactagagtatttgtaaactaaaatgttatatagaaaataaccacatatttggtcatttactcaaacatttatcaagtgcctattttgtgccaaacatagcaataggggctgtgaataaaaggatgaaaacgtgcccttatc

SEQ ID NO: 17561 - DNA, 444 bp, Homo sapiens
tactatatggcgaattgggccctctagatgcatgctcgagcggccgccagtgtgatggatatctgcagaattcgccctttcgagcggccgcccgggcaggtactttctttttttttaatttttttttttttttttttttttttttttttttttttttttatttatttcttttattttttcaaaaaaaaaaattcatgttttttttcattacaaaactggtataaaaaaattttttgttttaaggttttaatctgggtgtctacttagacaccatttctgtaaactactatgtaactttgatataaaccgtattttctttctttaaaaaaaataaatgttttttccacaaactagccatacaaccattgaatatctttctcttaaaaatggtttaaaacccagaacaattaataggcttttggttgtcttctctttcaataaaag

SEQ ID NO: 17562 - DNA, 418 bp, Homo sapiens
tatagggcgactggggccctctagatgcatgctcgagcggccgccagtgtgatggatatctgcagaattcgccctttcgagcggccgcccgggcaggtacttttttttttttttttttttttttttcccttttttgtttttttgtttttcatcttttttttatttggtttctttttctgcgccggggggaaaaaaaaattataaaggggccccaaaaaagacggggggggggcgcccgggcggggtttaaataaaggggggcccggacctcgcggcttttttttcacccccgcccccaaaaaatgggccccccgggggtattaaacaccccccccgggggggggttgggtaaaaaaaacaacagcacccaaaaaaaaaaaaaccctttttaataaaaaccacgggggggggacccccc

SEQ ID NO: 17563 - DNA, 560 bp, Homo sapiens
ctatagggcgaattgggccctctagatgcatgctcgagcggccgccagtgtgatggatatctgcagaattcgcccttagcgtggtcgcggccgaggtacacctataggtaaccagtgtaggtcattagaacacaggcttcacactgcatgctgatctgcaaagtgaggacataccagtgacaactttggaatctgcatccagccacaggtaacagatgtattgcaccagactcagatctagattttgtgatgactatataatgaactagaagttcaaattagagaaagaaacaattcaaaatcagaagaaaggtaaaagcaagtggccacatgatcgcattaaaaaagaaaaaggcaaatatctcagtaagtacctgcccgggcggccgctcgaaagggcgaattccagcacactggcggccgttactagtggatccgagctcggtaccaagcttggcgtaatcatggtcaatagctgtttcctgtgtgaaattgatatccggtcacaattccacacaacatacgagccggaagcataaaatgtaaaagcctgggggtgc

SEQ ID NO: 17564 - DNA, 526 bp, Homo sapiens
ctatagggcgaatggggccctctagatgcatgctcgagcggccgccagtgtgatggatatctgcagaattcgcccttagcgtggtcgcggccgaggtacttttttttttttttttttttttttttttttttttttttttttttttttttttttttttttttttttttggggggccccccaaaccccttttttgggggagaaaatggggggggggggggaaaaaaaaaactggggggggggggaaaccaccccccagaaaaaaaggccccccccccaaaaacagatttagaggaggcttctttttaagggggggaaacccccttttgggggcagagggggggggaaaaaaagaccaccggggggcctctttttggaagcgggggggggggaaattttttcccggggggggggaaaacccgggggggaaaaaaaaaaaaccccccccaaaaaaaaaaaaaaatgcccgggggggggggggatatagcccccccccggggggggggggggggcttccccccgggggggg

SEQ ID NO: 17565 - DNA, 397 bp, Homo sapiens
atacgactcactatagggcgaattgggccctctagagcatgctcgagcggccgccagtgtgatggatatctgcagaattcgcccttagcgtggtcgcggccgaggtactttttttttttttttttttttttttttgtttttttttttttttttctttttattttaaaggttaaaaaaaaattttttaaaggggattaaaaaaaaaaatgaaaaaaaaaataaaagagaaaaaaaacaaaacatttaaaaaaagcatcccaaaagacttattgaaggcttaacaaacataacgtgaaaggtttagggttaaaaacggaaaccttctaaaatgaaaaggaaaaacaaaaaaaaggaaaaaggaaaggtaaaaaggttcataccccaaaacaaaggggga

SEQ ID NO: 17566 - DNA, 554 bp, Homo sapiens
ctcactatagggagtcgacccacgcgtccgccgcacttttttttttttttttttttttttttttttttttttttttggagaaagggttttactatggagccaggctggccttgaactcacagcagtcctttagctccagcctcttgaatgctgggattacaggtgtgagccaccatgctgggctgtgtctggaatgtctccttgaacaagatgtgcaaggatgtgtctgagagaaagacagtctgagtgggctctgctgtacatcaagcaaaacaccaaccccttgcttaacgccatgagacctcggctcaccctgtccaggtcccagggacccaaaccacactcacttacacagaacccacatccttgccgcccctcctagataaaatgctcaagcaaggccgcacaggctgagcccagcatcaaacccagtgacatgtagaacagcatcaccacactggtggccttagccagctcccggggcacaatcttgggcccatacatgagccccagcgtgctgaggtagccattactgagccccaagaggcaggtga

SEQ ID NO: 17567 - DNA, 312 bp, Homo sapiens
tacgactcctatagggcgaattgggccctctagatgcatgctcgagcggccgccagtgtgatggatatctgcagaattcgccctttcgagcggccgcccgggcaggtacaacagaaaaacaacagcaaagcaagcagaaagaaggcagaagaaggaaggaaaccataaagataaggagagcaattaatgagctagaaaacaaagtaataatgcagaaatcaacccaactaaaagccggttccttgaaaagagtgataaagccatctctggcaagaatgacccaagggcgagagaagaaaaaagccttggaaa

SEQ ID NO: 17568 - DNA, 633 bp, Homo sapiens
tacgactcactatagggcgaattgggccctctagatgcatgctcgagcggccgccagtgtgatggatatctgcagaattcgcccttcgagcggccgcccgggcaggtacactggcgcaatcttggctcacagcagcctacacctcccgggctcaggccatctttccacttcagcctcctgagtagctgggaccacagttgtgcaccaccatgtctggctactttttgtattttttgtagagagagagtttcactatgttgccccggcaggcccggaactcctgagttcaagcaatccacctgcctcaggcctcccaaagtgctgggattacagtcgtaagccaccacgcttgtccaataaatggattttaatggaggagttagaaaagttctttggtgtggtttcagattacacttcacaaccaaccttaaagaaactactactggatagtattaaagaagaatatccacaattatctgtaagggctagcccttttccatctatatatttgtaaaagactggatttctttcatatgcttcagccaaatcaacattttaaaacagactaaaaacagatatagatatgagtacctcggccgcgaccacgctaagggcgaattccagcacactggc

SEQ ID NO: 17569 - DNA, 370 bp, Homo sapiens
gcgaattgagccctctagatgcatgctcgagcggccgccagtgtgatggatatctgcagaattcgcccttagcgtggtcgcggccgaggtacttcttctgtctacatgggggtcttattatgttgcccaggctggtcttgaactactgggctcaaacaatttacccgtccgtcatggtcataccaaagtgcgtcatattataggcatgtaccactgtgcctggccaacatcaaaccatgtgttatatacacaagaagcctgagagatgaaagaagggtatgcgccctgctcatgccgatgaagcaggagcccgatgttcagaagggctgggtccccagtggtcacactgtgggagccaatactggggctt

SEQ ID NO: 17570 - DNA, 471 bp, Homo sapiens
  misc_feature 108, 109, 110: n = A,T,C or G
cgactcactatagggcgaattgggccctctagatgcatgctcgagcggccgccagtgtgatggatatctgcagaattcgcccttagcgtggtcgcggccgaggtactnnnttttttttttgggtggttttttttagcaaagattcactttatttattcattctcctccacattagcataattaaagccaaggaggaggaggggggtgaggtgaaatatcacgccactgcactccagcctggacaacaagagtgaaactccgtctcaaaaaaaaaaaagattccattttaaccaacagagagctgcaccaacatgtttgattctggggttgaagagactgggggaagtagggattaggtgcacattctcacatatattttgtaggagtataaattggccctgcatctgtagagagtaatttggcaatattgaccaagatttaaaatgcacaagcccgcgtacctgcccgggc

SEQ ID NO: 17571 - DNA, 627 bp, Homo sapiens
atacgactcactatagggcgaattgggccctctagatgcatgctcgagcggccgccagtgtgatggatatctgcagaattcgccctttcgagcggccgcccgggcaggtacactgctaagctatatattgagcacatccagttatatttaaggtggttctgttagtccaatttcatactgatataaagaactgcctgagactgggtaatttcaaaaagaaagaggtttaattgactcacagtgcagcatgactggggaggcctcaggaaacttacaatcatggtgcaaggcaaaggggaagcaaggcaccttcttcaaaaggtggcagaaaggagaagagctgagcaaagggggaagagcaccttataaaaccatgagatctcaatcattgtgcaaaaatcacaagcattcttatacaccaataacagacaaacatagagccaagagtgaactcccattcacaattgcttcaaagagaataaaatacctaggaatccaacttacaagggacatgaaggacctcttcaaggagaaccacaaaccactgctcaatgaaataaaagaggatacaaacaaatggaagaacattccatgctcatgggtaggaagaatcaatattgtgaaaat

SEQ ID NO: 17572 - DNA, 526 bp, Homo sapiens
ctatagggcgaattgggccctctagatgcatgctcgagcggccgccagtgtgatggatatctgcagaattcgcccttagcgtggtcgcggccgaggtaccacaactgggtttagcaattcgggtaggcacagcaggtccggcttggccctgcctgctttgactgccttttcgggagttttaaacctcctacactcggaatgtagccctgattgtggtttctctgcatagcaagttcggacttaagcggaataagtatcggcttatttcgcctgcgataaagatgcttaattctgcgttcgaaatattctgagcgagtcctgggttagggatttcttagagtaacaagtgcatgcttcgattttaagtgcccctgtgaatgtgatttcttagctcttgcaagtccatatttggtcgcaaccagtacctgcccgggcggccgctcgaaagggcgaattccagcacactggcggccgttactagtggatccgagctcggtaccaagcttggcgtaatcatggtcatagc

SEQ ID NO: 17573 - DNA, 573 bp, Homo sapiens
gactactatgggcgaattgggccctctagatgcatgctcgagcggccgccagtgtgatggatatctgcagaattcgcccttagcgtcgtcccggccgacgtacacttaatatgattcaatataatctgcagtctcatgtatggcttatcaataatgccatcatcactgtatgtcaaacaacctcactgcttactagaaatgctaaacactggaaaaaatggaattttatacatttgttttcttaaattttgacagatattcttcagaaagttaaaactgccttccacaaaattttgtgtgtatatggcacaaggtgacagccaaaaagtgtgattccatcgaaaaggcgctgttaacaatactcagaataatctgacaagtctacatcaatgtctgaataaagaataggtaaatagacaaacccctataaaagatagtattatggtttaaatatactatagctatataaaaagaaagtaacacacagaaatgacccttttatgacaagcctataaacaccttgaatcacattatagttctgtaacacaaaaaatgacaaaaaatattttctta

SEQ ID NO: 17574 - DNA, 605 bp, Homo sapiens
  misc_feature 388, 389, 391: n = A,T,C or G
aatacgactcactatagggcgaatggggccctctagatgcatgctcgagcggccgccagtgtgatggatatctgcagaattcgcccttagcggccgcccgggcaggtactttttttttttttttttttttaaaattttttttttttttttttttttttttttttttttttttttttttggggggggccccccaaaaaaaaaaaaaaaaaccccccccaaaaaaaaaaaaaacccccccccccggggggtgaaaaaaaaaacccccccgggggggggggcccccgggggggggaaaaaccccccaaaaaaaaaaaaccccatttttttttggggggggggggctcccaaaaaaactccccccaggggggggaaaaccaaaaaaaaaaanntngttttttttttttccccccccccccccgggggggggaaaaaaccctggggggggcgctttaaaataccccctaaaaaggggggcaaaaacccccttttttttgggggggattttttgggggggggaaaggggaaccccccccccccccccccttggggggaaaaaaaaaccccccgcggggggttttattttgggggcccccccccgggggggg

SEQ ID NO: 17575 - DNA, 481 bp, Homo sapiens
  misc_feature 19: n = A,T,C or G
ctactatagggcgaatggngccctctagatgcatgctcgagcggccgccagtgtgatggatatctgcagaattcgccctttcgagcggccgcccgggcaggtacactgcaggcaaatgtggtttggtgcctgtcctggcagagaactacaaatcccaacaaagcagtgaccctgatcctactgtgtggatagacctgtggaaggatatcttgctgtggcggtggttaggagatcagacactagccttacctggaactctgtgaaaggcaagaagtcctgccacaccgccgtggacaggactgcaggctggaatatccccatgggcctgctcttcaaccagacgggctcctgcaaatttgatgaatatttcagtcaaagctgtgcccctgggtctgacccgagatctaatctctgtgctctgtgtattggcgacgagcaaggtgagaataagtgcgtgcccaacagcaacgagagatactac

SEQ ID NO: 17576 - DNA, 433 bp, Homo sapiens
  misc_feature 141: n = A,T,C or G
ctcgcgcggccgccagtgtgatggatatctgcagaattcgcccttagcgtggtcgcggccgttgtaccagaatcggcagaagaatcagccccataaattttaaagacttcctcaatcgggatactgttcattaagattccncataagatgataaaatcatagcttctcgttctctacgatttggatatatgggtctgccatggagtggtattttcagttcctcccactccagccaagttaagtcttctgagggatccagccattgcaaagcaacactgatggccaaatcatagtgtgccatatcatctagaaaggtgagttgccgtcttccttttgggtcaaattccattttcccgaagtctgatgccaatataatctcccaagagccttttcatttccttctttatgagccttctttccatgttaaagggct

SEQ ID NO: 17577 - DNA, 473 bp, Homo sapiens
tatatggcgaatcgtgccctctagatgcatgctcgagcggccgccagtgtgatggatatctgcagaattcgcccttagcgtcgtcccggccgacgtacgccaaatacttcatactaaactgtctagagaattaaactttaatgatgggctcaaaggacacataaccatgttgctaatttgttcctgcccgggcggccgctcaaaagggcgaattccatcacactggcgggcgttactagtggatccaagctcggtaccaagcttggcgtaatcatggtcatagctgtttgctgtgtgaaattggtatccgctcacaattcctcacaacatacgagccgggagcataaagtgcaaagcgctggggagcctaatgagtgagctaactcacattaatggcgttgggctcactgcccgcttaccagttgggaaacctgtcgtgccagttgcattaatgaatcgtccaactctcgggg

SEQ ID NO: 17578 - DNA, 328 bp, Homo sapiens
ttttttttttttttttttttttttttttttttttttttttttttttttttttttttttttttttttttttttttttttttttttttttttttttttttttttaaaaaaaaaaaggggggtttttttttttttttgccccccccccccccccgggtggtttaaaaaaaaaaaagaaaaaaaacccccctcccccccgggggggggggggtttttttggtgggggggggggaaccccccccccccccccccacaaaaagggggggggggcccggggggggggaaaaaaaaaaaaccggggggtttttttcaccacccccccccccccccc

SEQ ID NO: 17579 - DNA, 351 bp, Homo sapiens
ctcactatagtggcgaattgggccctctagatgcatgctcgagcggccgccagtgtgatggatatctgcagaattcgccctttcgagcggccgcccgggcaggtactttttttttttttttttttttttttttttttttttttttttttttttttttttttttttttttttttttttttttttttttttttttttttttttttttttttttttttttttttttttttttttttttttttttttttttttttttttttttaataaaaatatattataaaaaattcctaccattttacttaataaagataatttaaaataaaaaaaaattaaagaagggggggtagaaaaaaa

SEQ ID NO: 17580 - DNA, 263 bp, Homo sapiens
tcactatagggccgaattgggccccctctacatgcatgctcgagcgccgccagtgtgatggatatctgcagaattcgcccttagcgtggtcgcggccgaggtacctcaaatacttctgttatgtatctgtgattttatttcttctttgggtatagggttgaggggaaataagttttgagtgagaaataaacgttttagctaaaaaaaaaaaaaaaaaaaaaaaaatcccccccccggccgccccttagggccaattccccccc

SEQ ID NO: 17581 - DNA, 558 bp, Homo sapiens
cactataggcgaattgagccctctagagcatgctcgagcggccgccagtgtgatggatatctgcagaattcgccctttcgagcggccgcccgggcaggtgcctgtctgtgactgttgctatgatcaggacgtttggcactagaagagcagttttggttttctttattaggttaccgagaaagctggaatagagatctttgtgtcttttccaaagactttggaatgaaaacaaatccagttttctgatacaaagagctttccttggtatagtatttctttctgtagagcacaggtaaagctttgcttcagtggttcctccgttgggacactaagaaacaacttgtgaaagtgcatattggccttgtacctcggccgcgaccacgctaagggcgaattccagcacactggcggccgttactagtggatccgagctcggtaccaagcttggcgtaatcatggtcatagctgtttcctgtgtgaaattgttatccgctcacaattccccacaacatacgagcccgaagcataaagtgtaaagcctggggtgcctaatgagtg

SEQ ID NO: 17582 - DNA, 471 bp, Homo sapiens
cactatctggcgaatggggccctctagatgcatgctcgagcggccgccagtgtgatggatatctgcagaattcgccctttcgagcggccgcccgggcaggtacagtggtgcgatcttgactgactgcaacctgcaacctctgcctccggactcaagcgattctcttgccttagcctcctgagtagctgggattacaggtgcgtgctaccacgcctggctaatttttgtatttttagtgagacgaggtttcaccatgttggccaggctggtctcgaactcctgacctcaagtgatccacctgcctcggcctcccaaagtgctgggattacaggcgcgagccactgcacacaggcaaaagccccttgcttctcatgggtctgctgtcgtttccttcagccactttggttttcagggagggttcaggaaaccatcctccactgtgcttctttctggcctttgctacccctgttt

SEQ ID NO: 17583 - DNA, 332 bp, Homo sapiens
ccctctagatgcatgctcgagcggccgccagtgtgatggatatctgcagaattcgcccttcggccgcccgggcaggtactttttttttttttttttgttttttttgtttttttttttttttttttttttttttttttttttttttttttttttaacaccaacataaataaaaacattttatttaaatatcaccccaccaccttaaatattacttaaaaaaattcacccctatatttaaaaaaggtgccctgataacttccaaaatattattcaaaacacccttttcccaaaatacaataagtccatttcccaattctaaaaaaacttccccc

SEQ ID NO: 17584 - DNA, 562 bp, Homo sapiens
  misc_feature 500: n = A,T,C or G
ctactatagggcgaattgcgccctctagatgcatgctcgagcggccgccagtgtgatggatatctgcagaattcgcccttagcgtggtcgcggccgaggtactactcaagtgaaaacatcaataataagaaagcaaaaaagcttcttcctgatatgaagaaagtttgggtggtctggatagaaaataaaaccagccacacattctcttaagccaaagtccaaagcagaacaaggacctctcttcaattctctgaaggctgagagaagtgaagaaactgcagaagaaaagttggaaaccagtagaggctggttcataagcattaagatagaagccttcttcatatgaaaaactacaagatgaagcagcaagagctaatgtagaagctgcggcaagttatgcagaagatcaggttaagatcatttaaagaaggaggctacactaaacaagagactttccatgcagacaaaacatcttcctattggaagaagatgccatgtangactttcataggtggagggaagtaattgctgccttcgaagcttcaaaggatatgctgactct

SEQ ID NO: 17585 - DNA, 305 bp, Homo sapiens
gggccctctagatgcatgctcgagcggccgccagtgtgatggatatctgcagaattcgcccttagcgtggtcgcggccgaggtacgcgggttacaaggacttactggaaaattccatgctgtgcgctggcatccccgactccaagaaaaacgcctgcaatggtgactcaggggggaccgttggtgtgcagaggtacctgcccgggcggccgctcgaaagggcgaattccagcacactggcggccgttactagtggatccgagctcggtaccaagcttggcgtaatcatggtcatagctgtttcct

SEQ ID NO: 17586 - DNA, 659 bp, Homo sapiens
tatagggagtcgactcaagctgccgcggtttcctgcttaacagtgcttgaacggaacccggtgctcgacccctccgacccccgccggccgctttgagcctgagccctttgcaacttcgtcgctccgccgctccagcgtcgcctccgcgcctcgcccagccgccatcatgaccaccgcgtctccctcgcaagtgcgccagaactaccaccaggactcggaggctgccatcaaccgccagatcaacctggagttgtatgcctcctacgtctatctgtccatgtcttgttattttgaccgggatgatgtggccctgaagaactttgccaaatactttctccatcaatctcatgaagagagggaacatgctgagaaactgatgaagctgcagaaccagcgaggtggacgaatcttcctgcaggatataaagaaacctgaccgtgatgactgggagagcgggctgaatgcaatggagtgtgcactgcacttggaaaagagtgtgaatcagtcactactggaacttcacaaactggctactgacaagaatgatccccacttatgtgacttcattgagacgcattacctgaatgagcaggtgaaatccattaaagaactgggtgaccacgtgaccaacttacgcaagatgggagcccctgaatctg

SEQ ID NO: 17587 - DNA, 608 bp, Homo sapiens
ggctaatggggccctctagatgcatgctcgagcggccgccagtgtgatggatatctgcagaattcgcccttagcgtggtcgcggccgaggtaccctaacctgacaggaattaactactgtttttttgtggggcagaaagcaaaacctggtgttgtgacttttatcctaatggttcttaggcaaggttagtgagaagaaacacaaacccagatgcatacattgtgcattattttgtagacaagctactttttcttctgtccctttaacaaatttgcagcaattaccctccctttggggtctagagtgaaagctaatttgtgggtagatgagattgcagaagaatggatgtccatggctgtgaacactgcacactgcacatctatctccagtgctcacactgtgcagctaccactccctggctgcgtgccatgctgtcgggttgcagatttgcacacataaattcctcaggaagagtttgcatgagcatcacctcgcaatattctgtacctgcccgggcggccgctcgaaagggcgaattccagcacactggcggcccgtactagtggaatcgagctcggtaccaagcttggcgtaatcatgggcatagc

SEQ ID NO: 17588 - DNA, 228 bp, Homo sapiens
gatgcatgctcgagcggccgccagtgtgatggatatctgcagaattcgcccttagcgtggtcgcggccgaggaacttttttttttttttttttttttttttctttttttttttttttttttttttttttttttttttttttttttttttttttttttttttttttttatttttgattaaaaaatctaaaaagataaaaaaaaaaaaaaagaggataaaaaaaacacca

SEQ ID NO: 17589 - DNA, 596 bp, Homo sapiens
tacgactcactatagggcgaattgggccctctagatgcatgctcgagcggccgccagtgtgatggatatctgcagaattcgcccttagcggccgcccgggcaggtacagattctaggtggccttatttacataatagattggtggtgtttacatttcctaatgagtttccatttgacgaaaacggaaatccagtgtatgagcttaatgataagaactggaaatcctttttctcaaggacgtggtccagattaagtttgcacgaggacgaggacaaggaaaacgatggagactctttgccaacgtttaaatgtgtgtcaggacaaaatactaacacattatgaaaatgatagtacctcggccgcgaccacgctaagggcgaattccagcacactggcggccgttactagtggatccgagctcggtaccaagcttggcgtaatcatggtcatagctgtttcctgtgtgaaattgttatccgctcacaattccacacaacatacgagccggaagcataaagtgtaaagcctggggtgcctaatgagtgagctaactcacattaattgcgttgcgctcactgcccgctttccagtcggga

SEQ ID NO: 17590 - DNA, 463 bp, Homo sapiens
ggccctctagatgcatgctcgagcggccgccagtgtgatggatatctgcagaattcgccctttcgagcggccgcccgggcaggtacctaagagactatggaagaatttcagggtagctgggatgtcttttacataatacagcatctagaaaggaggaaaaagagaaatgagctgcttctgtatgttgaagtctttattgcttgggctagatactcctagaaagtttgattttctagttgagtgaattttacccaagaaaacacttaagaaatttaaagattaaagacgttgcatgaagacatagaacaataatgtgagaaaatatttggggaaatggaaaagtatggtatttgttcgactagagtcaaatggttttaaatttactctttctggcttccatagcacagacatttatagctggaaacacttagtcaccattccacatggggacatgaatcctatg

SEQ ID NO: 17591 - DNA, 496 bp, Homo sapiens
ccctctagatgcatgctcgagcggccgccagtgtgatggatatctgcagaattcgcccttagcgtggtcgcggccgaggtactctctgctgaggctgtaagttttgttttgtgagaaataggtaaagacattagcatttaatctactggaataagctggttgctgtggcttatacctgtagtcccagatacttgggaggctgaggcaggagaatcgcttgagaccagcctgggcaatatagtgagacctcacctctaaaaaagttttttataaatttacttgtctaaagtggggaaagggaaattattctgttttcttattcttgcttcaagactatgacagatttgaaagagaattctaaagcagatttagagaacctgcttctcttcttatctcctaatccctaaattgtaatttaactcttatctgtattggtgatttggtttggtaaagggatgatttttacattgagttttaaagtagaataagaaaagct

SEQ ID NO: 17592 - DNA, 335 bp, Homo sapiens
actatagggcgaattgggccctctagatgcatgctcgagcggccgccagtgtgatggatatctgcagaattcgcccttagcgtggtcgcggccgaggtacaaggtgtcctgagaaagttaagccaatttaacaactatttccaacatctttctagcctgctttctctttagtatagggtcatgtatttgtgagcctatgtgttttataaacatgtattagtatttgcacttgtatagtgcttactatgggctagaaactttctagaagctttagagatgtgaactcatctaatatatgattattaaccccccattttacagatgagaaaatggag

SEQ ID NO: 17593 - DNA, 375 bp, Homo sapiens
cgactcctatagggcgaattgggccctctagatgcatgctcgagcggccgccagtgtgatggatatctgcagaattcgccctttcgagcggcccccgggcaggtactgccaaccagagatgctcacccaagatttggtgtccagggtttttactggggtctctcgtctaggtatgcagctcccacatgagtgacactagctactctccctttaccatcccagaagccaaaccaatactgcgtggcccaagacctcagcataaaaaaacactcttatcaggtggcatattccaagggcttagaggttctctctcaggagctggtcaagggcctgtctttggcatgtgcagggtttgagcaactcaggcctgctgtg

SEQ ID NO: 17594 - DNA, 320 bp, Homo sapiens
ccctctagatgcatgctcgagcggccgccagtgtgatggatatctgcagaattcgccctttcgagcggccgcccgggcaggtactatattttgtttgtttttgttatgtttttactttggcgcagacctggtcaacaggaagtaattgcctgagcttctttaaagcaacttgagttgaatgtcaggaaactgggatcctaatccaggcccttttttgactgactgagttgggataagactttttacctcgaggatcatcaggtgcaaaatgaaaaggtttgaaaaaattaggagtttatggggttggtattttggcctcc

SEQ ID NO: 17595 - DNA, 483 bp, Homo sapiens
  misc_feature 100, 106: n = A,T,C or G
actatagggcgaattgggccctctagatgcatgctcgagcggccgccagtgtgatggatatctgcagaattcgccctttcgagcggccgcccgggcaggnactttnttttttttttttttttttttcttattattattattttttgccagtccctatggctacatcgcacctgctaccccccaaatacatgctaatggcagtatcttaaagggacaggaatcaccagaaaagaaatgcacatagttggatttcttatgcaactcattgattgcatatgcctgtagtaatcttttacaacagaacttgtcaggttaaaattataaatgacttcaagctgctgctatccatttcatttggctattagggtggtcaggatgtctaactcaggaaagataaaatgacaaaatgtcccaggaatcaataggtctttattttgccttgattttactgaataaaatccacctataacttgactgcttggg

SEQ ID NO: 17596 - DNA, 446 bp, Homo sapiens
gcgaatggggccctctagatgcatgctcgagcggccgccagtgtgatggatatctgcagaattcgccctttggccgcccgggcaggtacaggccaacatgatcaaaggcatgctggaaacaagcgtattaaagatcagcttggatcaagctttcatttgcatctgcctgaaccgcacatatttcagtctgaagggaaaattggtaatcaagttgagaagtctatcaacaatgcttcctcagtttcaacatcccaaagaatttgttgtaggcccaaaacccatatttctaataagtatggaaataattccctccattcttcattactcacacaaaaatgggaagtacctcggccgcgaccacgctaagggcgaattccagcacactggcggccgttactagtggatccgagctcggtaccaagcttggcgtaatcatggtcatagct

SEQ ID NO: 17597 - DNA, 615 bp, Homo sapiens
tatagggagtcgacccacgcgtccgggttgatgaactggactctgttgctgaaaggagctggcacaatgaagtttctcctcgtgctggtgctgcttgtgtccttacaggtatctgcctgtggggctgctcccatgaacgagagcgaatttgctgaatggtacttgtcaagattttttgactatcaaggggacagaattccaatgacaaaaacaaaaaccaatagaaacctcctagaagaaaaactccaggaaatgcagcagttctttgggctagaagtaactgggcaactggacacctcaactctgaaaataatgcacacgtctcgatgtggagtgcctgatgtacagcatcttagagcagtgccccagaggtcaagatggatgaagcggtatctcacttacaggatctataattacactccagacatgaagcgtgcggatgtagactacatatttcagaaagcttttcaagtctggagcgatgtcactcctctaagattcagaaagattcataaagatcatggagacttctacgattttgatggcaaaggtggtaccttaacccatgctttttatcctgggcccggtattcaaggagatgcacattttgatgag

SEQ ID NO: 17598 - DNA, 535 bp, Homo sapiens
tacgactcactatagggcgaattgggccctctagatgcatgctcgagcggccgccagtgtgatggatatctgcagaattcgcccttagcgtggtcgcggccgaggtaccaaagacacttattattctaacatgcatcaagtaaagtaaaacaaggagagaggctgcggtgtgtgggtaggggatgcaggagaagctgtgtaaggtagtggacagctgtgtggctctggggatgagacagactagaccaggcaagtgcttcaggcaggtgccccgtcgggaggcctgtggagttactcatcttgcagcctcgggctactcaccatcagggagccccgcgtacctgcccgggcggccgctcgaaagggcgaattccagcacactggcggccgttactagtggatccgagctcggtaccaagcttggcgtaatcatggtcatagctggttcctgtgtgaaattgttatccgctcacaatgtcacacaacatacgagccggaaacataaagtgtaaagcctggggtgcctaatgagtga

SEQ ID NO: 17599 - DNA, 670 bp, Homo sapiens
tatagggcgaatggggccctctagatgcatgctcgagcggccgccagtgtgatggatatctgcagaattcgcccttagcgtggtcgcggccgaggtaccaaatgaaaggggcaccatttcaagagcactaggactacattaaacttaaatatattcccacattcttaaaaatgtaactcaaaaccaaatctagtcttaaagaagctccaataactaaaactacattaacaggcacgatgaacagtgtaaacactgttaatgggcaccaagtttaacagggcagacaatatttgcttctgcattcacacttattcaattacattttttaaaaaaatgatgctgcttaaactattaatgttttaccaaaaaaataataattttaataaatacagcaaatgctagaaatctggctaggttatcatgcaaggtataaccaagacaaactcaaatttataataaaggcaacttgcattcaaaatgaactctacccttatattttattaaaagggcaaacatcatgaattaacccagccgcttacttgaattacaaaagtaacatgattcaatatgaaaataagaaactgtctacaaatctctgacagtaataaattgcaatatacaatgcatacaggagtcatacagagcaacaaactctcgtacctgcccgggc

SEQ ID NO: 17600 - DNA, 269 bp, Homo sapiens
ctatatggcgaatggggccctctagatgcatgctcgagcggccgccagtgtgatggatatctgcagaattcgccctttcgagcggccgcccgggcaggtactttgggaggcataggctggcggatcgcttgagttcagaagttggggaacagcgtgggcaacatggcggaaatcccgtctctacaaaaaaaaaaaataaaaaaacttaaattcctcccgagggggccccctcttttttggccccaattttttggggcacagagggaaaa

SEQ ID NO: 17601 - DNA, 394 bp, Homo sapiens
ctactatagggcgaattgagccctctagatgcatgctcgagcggccgccagtgtgatggatatctgcagaattcgcccttagcgtggtcgcggccgaggtacgcgggtgatgggaagggtcttgtgttttaatgccaataaatgtgccagctgggcaaaaaaaaaaaaaaaaaaagtacctgcccgggcggccaagggcgaattccagcacactggcggccgttactagtggatccgagctcggtaccaagcttggcgtaatcatggtcatagctgtttcctgtgtgaaattgttatccgctcacaattccacacaacatacgagccggaagcataaagtgtaaagcctggggtgcctaatgagtgagctaactcacattaattgcgttgcgct

SEQ ID NO: 17602 - DNA, 648 bp, Homo sapiens
atacgactcactatagggcgaattgggccctctagatgcatgctcgagcggccgccagtgtgatggatatctgcagaattcgcccttagcgtggtcgcggccgaggtactatgggtgtagtgttactattacagttaatccgtcctttgtgtgagttgttaaatgcagtgaggattggagcactgtccactgagtctctgtgcaacaacttagtggtgtggcaggggtttccggtgtctggctctgatcttggtcgctggatagtcgtctgtgtttcttcggtgcccaaggcgacggctttggtatgggtcgcggcggagtggttggccaagtgctgcctaataatttcaggagaggatacttcgttgctgctgcaggatcagccatggtagattatggtttctgagaacagatggggcacacaattcctagtgtgcccattaacaggtcttccaaagtacctgcccgggcggccgctaagggcgaattccagcacactggcggccgttactagtggatccgagctcggtaccaagcttggcgtaatcatggtcatagctgtttcctgtgtgaaattgttatccgctcacaattccacacaacatacgagccggaagcataaagtgtaaagcctggggtgcctaatga

SEQ ID NO: 17603 - DNA, 455 bp, Homo sapiens
  misc_feature 113: n = A,T,C or G
atacgactcacttagggcgaattgtgccctctagatgcatgctcgagcggccgccagtgtgatggatatctggcagattcgcccttcgagcggccgcccgggcaggtactttntttttttttttgtttttttttttttttatttgtattttttttgtttttttttttttcttggtcctttggggtgtgtttttttgtttttgcagtttggctgtggaggttttgagcttgggggccaccgggggctttcctgccgcgggggcgggcctgccctgtgccccccccttcttcatcccgggaggtgaggggggcttttttaagccgctcgggggctcgtccgcgggggggcgctgggtttcccccggcgccccgcccggccatgggtgggggggggggggggcggtcccccccggcccccaggggctgtgtacggggggggcttaacgttcccccccc

SEQ ID NO: 17604 - DNA, 355 bp, Homo sapiens
tgtatacgactcactatagggcgaattgggccctctagatgcatgctcgagcggccgccagtgtgatggatatctgcagaattcgcccttagcgtggtcgcggccgaggtaccgtaaaagaagaaggaatgcctaaagaaacagacatagaaatcatcccagaaatcccggaaactctagagccactgtcccttccagatgtgctgaggatctcggcagttctggaggacaccacagaccagctctctattctgaactacatcatgcccgttcagtacctgcccgggcggccgctcgaaagggcgaatgccagcacactggcggccgttactagtggatccgagctcggtaccaa

SEQ ID NO: 17605 - DNA, 560 bp, Homo sapiens
actatatggcgaatggggccctctagatgcatgctcgagcggccgccagtgtgatggatatctgcagaattcgccctttcgagcggccgcccgggcaggtacgcgggggttatattcttaagcctctctttattgagaacccctagaattgcaggataaacttgatcgaagtaaaatccaaatcttacactaagttctgtgagatttaagagcaataatcaacagttctaagcctaataaagagagctcttaatcagctcagtggtggttaaaaccagctatcttttaaagaagagaaaaaacaaaacacagcaatgccctgtctcttcagaaaattgttttaaaaagttagccaggcatagttagtggcccacgcctgtagtccgagctgtttgggaggttgaggtgggaagattggttgagcccaagattttgaggctgcagtaagccataattgtacctcggccgcgaccacgctaagggcgaattccagcacactggcggccgttactagtggatccgagctcggtaccaagcttggcgtaatcatggtcatagct

SEQ ID NO: 17606 - DNA, 502 bp, Homo sapiens
  misc_feature 385: n = A,T,C or G
ctatagggcgaatggggccctctagatgcatgctcgagcggccgccagtgtgatggatatctgcagaattcgcccttagcgtggtcgcggccgaggtactttttttttttttttttttttgggggtttttttttttttttttttttttttttttttttttttcaaaaaaaaaccccccttttttaaaaaaaaaacccgccgccaaaaaaaaaaaaaaccttttcccaaaaaaaaaaaaaaaggggggcccaaaaaaaatatggggggaaaaaaaagccttccccttgtggggaatgctccgggaaaaaaaaaaaaaactcccccccccccgggtaaaattttaaaaaaaacccccccccacaggggggggggaaaaaaaaacccnttttcccccccggggggtgtggaaaaaaaaaaaaaattttggggggggggccccaaaaccccccccggataattcccggggggggaatttaggggaaatactccccccccggggggg

SEQ ID NO: 17607 - DNA, 552 bp, Homo sapiens
aatacgactcactatagggcgaattgggccctctagatgcatgctcgagcggccgccagtgtgatggatatctgcagaattcgcccttagcgtggtcgcggccgaggtaccagaaatggctgtgttgacatggagcacttcaaagtaattaagacccatcagatcgaggatgaaagggaaagacgggagaagaaattggactttttttttttttttttttttttggaggacaatggtatatttatttacaatccgaccaaaaaaaggcatacaggcatttttttaattaaaaataataatgataatgatttaaaaagtcagaaaaattgatgatctttgaaccctttatgaggtgtccgtttcccattccccctaaaaagagaatctcttagggaaaaaaaaaaatccaagatttgaatgaacaaaagactccaatatcgctctctactgcttgggttcccttttctccaacttgatgcttggtggatgccgcttggcgctgcaatcactgtgaggcaagattgagaaattcactggtttgatgggtgaggc

SEQ ID NO: 17608 - DNA, 590 bp, Homo sapiens
  misc_feature 168, 554: n = A,T,C or G
actatagggcgaattgggccctctagatgcatgctcgagcggccgccagtgtgatggatatctgcagaattcgccctttcgagcggccgcccgggcaggtactttttttttttttttgagacagtcttgctctgttgcccaggctggagtgcaatggcatgatcttgngctcactgcaacctccgccttcctgggttcaagccgattctcctgcctcagcctcccgagtagcggggattacaggtgctgccaccacgcccggctaatttttgtatttttagtagagacgggttttcaccgtgttggccaggctgatctcaaactcctgaccttgtgatctgcccacctcagcctcctgaagtgctgggattacaggcatgagcctggttgagacatggttatttcatcgcaatatcttggggaacccatgaatgctctgaaatgcctttggtttagaaatggatgaaggagaggccatggaaatatttagaccttttggagagatcgaaaggacaggtgatttatctccaagttcacctcgaggcatgacttgngctgtcaaatgttcttacggtagcctggcaacatgt

SEQ ID NO: 17609 - DNA, 412 bp, Homo sapiens
  misc_feature 316, 319, 320, 323, 325, 343: n = A,T,C or G
atacgactcactatagggcgaattgggccctctagatgcatgctcgagcggccgccagtgtgatggatatctgcagaattcgccctttcgagcggccgcccgggcaggtacaatttatttcagaaaaaactacagacatgatactgcttttcctacactaaaaatacttcagtgtatatttcccaaaaataggagtaatcccttatgtaaccacagtgtaattatcaaaattcacaaatagtgttacaaaactattatctgatctatggaccttattcagattttaccacttgtcccaacaatgcccttctcagtnaannaananaaaaaataaacaaaaatnaggttcctcggccgcgaccacgctaagggcgaattccagcacactggcggccgttactagtggatccga

SEQ ID NO: 17610 - DNA, 290 bp, Homo sapiens
tatagggcgaattgggccctctagatgcatgctcgagcggccgccagtgtgatggatatctgcagaattcgccctttcgagcggccgcccgggcaggtacttgcagttactgcagatgctcccaggaaagccaccatcattagtcttcgccggatctggatgggctgtggtcctccatagtacctcggccgcgaccacgctaagggcgaattccagcacactggcggccgttactagtggatccgagctcggtaccaagcttggcgtaatcatggtcatagctgtttcct

SEQ ID NO: 17611 - DNA, 531 bp, Homo sapiens
  misc_feature 378: n = A,T,C or G
tctagatgcatgcctcgacggccgccagtgtgatggatatctgcagaattcgcccttagcgtggtcgcggccgaggtacagtggaacagtctcagctcactgcaacttccgtcttccaggctcaagtgatcctccctcctcagcctcctgagtagctggactacaggtgcttgtcattacacccagcaaattttttgtatttttaatagagatgaagtttcactatgttgccgaggctggtcttgaacccctgagctcaagcgatccgccagccttggcctcctaaagtgctgggattacaagtgtgaactcccgtgcctggcctgatgatagtttctgctgacttgtagcattaatcattacagcaggtttctgctntgcatactggatatatttgctaattaaactcagcaaaatacatgttgagagggatctcattttccacgtgtaatatagcagatcattacacattccttttacactgtgttcacttgccttttggaataacactcagtcttttgtcttatccta

SEQ ID NO: 17612 - DNA, 520 bp, Homo sapiens
  misc_feature 107: n = A,T,C or G
ctcactatagggcgaattgcgccctctagatgcatgctcgagcggccgccagtgtgatggatatctgcagaattcgcccttgagcggccgcccgggcaggtactttntttttttttttttttttttttttttaactactgatttctaatatacttctgttgtggtcaaaaaccatgttatatgtcagggcctgcggaaggtttatcacgtgcttctcaggaaaagatcaggctgaaaaatcccgccgctgagaaaaaacaatataaataaaatgataagtctacaggccagctaaaagataattaggaaataacaacaaaaattaatcttaatactaaaatatttatgaataaattgatgtcttggatttccttcaaaataatccaagattatagggagtagataagggaagagatcaaacaagactggccagggaatgaattgaagctagatgacagttcatggtggttcattacactattttacttttttaaacctttaaaatttttccataataaat

SEQ ID NO: 17613 - DNA, 438 bp, Homo sapiens
attgggccctctagagcatgctcgagcggccgccagtgtgatggatatctgcagaattcgcccttagcgtggtcgcggccgaggtacattgcaaaggctgttcatatacctcttcacctcagggtcacgttcatttatgctttctttcctacccaaacttgcccccctcccccctgaagaaagtaaacaaacaaaaaactagttcaaagctttgtttcacagtgggcagtaatttcatcgccaacaaacaactcaatttatgcttctatttaaaatgttttaatttatttatttaaaaaaaatatatgtccatgaacatcaagtgcactggcttgggttactgcctttttctcctgcaactttctgccatgcctgataaactcaggtttaaacacaatgccggctgttttactttattttcaattgtgtaaaactttt

SEQ ID NO: 17614 - DNA, 504 bp, Homo sapiens
gcgaattgggccctctagatgcatgctcgagcggccgccagtgtgatggatatctgcagaattcgcccttagcgtggtcgcggccgaggtacgcggggctttctagacaaggcagttgaggaggagggagcgcttgagggggactggcctggcgtgcactccgcacctcggggacattattgcgcgtggaacggctgcttttggaagactattgcccagaagaaaagatgtttggttttcacaagccaaagatgtacctgcccgggcggccgctcgaagggcgaattccagcacactggcggccgttactagtggatccgagctcggtaccaagcttggcgtaatcatggtcatagctgtttcctgtgtgaaattgttatccgctcacaattccacacaacatacgaaccggaagcataaagtgtaaagcctggggtgcctaatgagtgagctaacttacattaattgcgttgcgctcactggccgctttccagtcgggaaacc

SEQ ID NO: 17615 - DNA, 595 bp, Homo sapiens
ctatagtggcgaatggggccctctagatgcatgctcgagcggccgccagtgtgatggatatctgcagaattcgcccttagcgtggtcgcggccgaggtactttcatcctcaaagtgtctaactttagtttcatcagattaagagctttagtgcctgggaggctgaggcagaagaatcgcctgaacctgggaggcagagattgaagcgagtcgagatcgcgcctctgcactctagcctgggcgacagagcgagactccgtctcaaaaaaaaaaaaaaggagagagagagtggggatttttgcttttttccccgggctaaattgaaatcccgggcctaaagggaccctccaagtagcggggactacaaaaatattttgggcccggctttattttctaggccttaaaaaaaaaaaaatttcccccgggggggggggggatccctgaaaccccccctcctttgggggctgaggcaaaaaattgcttgaccccagggggcaaaggttgcagggacctaaaataacccctttggacttcaccctgggcaacaaaaactcctccccaaaaaaaaaaaaaaaaaaatttttttcccggggggg

SEQ ID NO: 17616 - DNA, 620 bp, Homo sapiens
  misc_feature 601: n = A,T,C or G
tacgactcactatagggcgaattgggccctctagatgcatgctcgagcggccgccagtgtgatggatatctgcagaattcgcccttagcgtggtcgcggccgaggtactaagtctatcgccatgctgtgtcacgtgggcaggtcttcttggcattcatcttgaacatgacccaaatcctggctccatcttccctcttacttttcctttgccccatttttcttccttattttttatgtatgtttaccttgccctgtaggcgcatttgtaagctggctcaaatccttttgggaacaaggtgggttataaatgcacacgttcctacacaggatgttgttagtcatttcataaggtctcttgtggaggagattagccaatagcttcttttgtaaccttaggcacaccctccttccataagggtcaagtgagagtatgggtctatagggtctgtgaggggcccagcaactttgacaggctgagtattcttctatttccaacccggttagagtcacacagtacctgcccgggcggccgctcgaaagggcgaattccagcacactggcggccgttactagtggatccgagctcggtaccaagcttggncgtaatcatggtcatagct

SEQ ID NO: 17617 - DNA, 558 bp, Homo sapiens
  misc_feature 153, 155, 156: n = A,T,C or G
tagggcgaatggggccctctagatgcatgctcgagcggccgccagtgtgatggatatctgcagaattcgcccttagcgtggtcgcggccgaggtacttttttttttttttttttttttggggttttttttttttttttttttttttttttttngnnaaagaaaaaccccccccattttgggggaaataggggcccccccccccccccaaaaaaaaaacccctctttaaggggggggtttttttttaaccccccggttttaaaaaaggggaaaccccccccctttcccgggggggaattttttaaaccccccaaaaaaagcgcgaagtcccccccccccctaaaaaaaaggggggcttttcccccccgaaaaaccccccttttttaaaaaaaaaatttttttttttccccccgggggaaaaaaaaaaccccccccggggggttttaaaaggggaaaaattttcccccccccaaaagggggggggggccccctttttttttttaaaaaacccttttttggttaacccccccccccccccaaaaacccccggggaaaaaaa

SEQ ID NO: 17618 - DNA, 619 bp, Homo sapiens
ctatatggcgaatggggccctctagatgcatgctcgagcggccgccagtgtgatggatatctgcagaattcgccctttgccgcccgggcaggtaccacaaggtgatagatggtaaacatctaaccgaaagctttagatagacttctttctagtaaaatataacataatgaatattatttcattcttactttgtttttgatctttcatacaagtaaaaaatgtaaaatactacacagatttataagtgtgcttagtaatcacttttatgaaagacacttgtgaggataaatataatacagtgcacagactatggctgtattagtctgtctgatgctgctaacaaagatatacccgagactgggtaacttataaaggaaagaggtttaattgactcacagtttggcatggctagggaggcctcaggaaacttagaataatggcaaaaggcacctcatcacagggtggtgggagagagaatgagtgcccagtgaagggggaatccccatataaaaccattagatcttgtgagaactaactcactatcatgagaacagtattgggggaactgtccctcatgatttaaatggtttttctcatgacacgtggggattatgggaac

SEQ ID NO: 17619 - DNA, 525 bp, Homo sapiens
atacgactcactatagggcgaattgggccctctagatgcatgctcgagcggccgccagtgtgatggatatctgcagaattcgccctttcgagcggccgcccgggcaggtacttggagctaaattagtccccaaaccaaattcattattttcttcttaaaaatgtcttttacttccttgaatctgcttctgtatttcccatgtaaatttacaatgtattttgtccagttactgagataaatacctctacttttgcacctagacatttaggagccattgtttactaaattcatttgatgctgtcttctaaaagaactaaaatctagcatctcctcttcatacctcctgccactgtctttcattttccatacctggagttatgatagtagatttttaacgagcttttcccgtctctgtcttctacctagatccagtatacttctgcagtctggtatgtttttccccctaagaacctcagctgagaaataaagcaggttaacaaagctgtatgaaatgtcactggcagt

SEQ ID NO: 17620 - DNA, 534 bp, Homo sapiens
aatacgactcactatagggcgaattgggccctctagatgcatgctcgagcggccgccagtgtgatggatatctgcagaattcgcccttagcgtggtcgcggccgaggtacagtggcacaatcttggctcactgcaacctctgcctcctgggttcaagcaattctcatgcctcagcctcccaagtagctcagattacaggcatgtgccaccacgtcttgctaatttttatatttttagtagagatggggttttgccatgttggccaggatggttttgaactcctggcctcaatgatccacccacctcagcctcccaaagttttgggattacaggcgtgagccaccgcacctggccacaaatcagaatttctattatcaaaggaagttttatattagttgagaaatgactgtttctgacatagtcaacctctctggtcaccatgaaaatgcatggtggcaaccatgaaaatgctccatttacatattgttcggtgaggaaattgacaaccccagctaccattgttctggatctact

SEQ ID NO: 17621 - DNA, 469 bp, Homo sapiens
  misc_feature 15, 99, 101, 168: n = A,T,C or G
tatagggcgaattgngccctctagatgcatgctcgagcggccgccagtgtgatggatatctgcagaattcgcccttagcgtggtcgcggccgaggactntntttttttttttttttttatttttttttaaacttaaatttttgtaaattattttgtttcttccatggngatttagagggactatcttcaaaccagccataaataatatctggctattttgtaaccaattgagtaatttgttgcacaataagccacctcacatttttcagcaagaaatacattaaatttgaatagtaaagacgttacacagtgaattaggacacgattaaaatttgctttaaatatttctttgggggaagggacaccacacttctactcaatgaagaggaacatttttacatttcagaggtcttttattatttttcacacctattatgccatgaattcatagggaataggttccagcagc

SEQ ID NO: 17622 - DNA, 473 bp, Homo sapiens
tacgactcactatagggcgaattgggccctctagatgcatgctcgagcggccgccagtgtgatggatatctgcagaattcgcccttagcgtggtcgcggccgaggtactctaaagaaaatcctgaaagtcaccaccttggtcttttataatcgggaccatgaggaagcccaagaaaaagggagaaaaggaacgagaaaaaggcagaggcactaatagctgccatacaggcatataaacctctcgatcccagggagcttctcattctatgaccgactgttatcagtgtgggagcactaaaagagagtctgcccccgaaatcagaagcagcccccacggccctgtccaatctgtaagggagactactggaagacaaactgcctccagaaacatacgtcccaaggttcagagccggcttctcaaatggtccagcaggactgatgggtcccagggctctccttcccagctctgacag

SEQ ID NO: 17623 - DNA, 592 bp, Homo sapiens
agggcgaattgggccctctagatgcatgctcgagcggccgccagtgttatggatatctgcagaattcgcccttagcgtggtcgcggccgaggtacgcggggtgaatggccctttcctagaatcagtgtctttaactgcaaaccaggggtgtccaatcttttggcttccctggaccacattgaaagaagaagaattgtcttgggccacatataaaatacactaacactaacaatagctgatgagtttttgtttgtttgttgtttgtttgtttggtgtttgtttgcttgcttgtttttgagacggagttttgctcttgttgcccaggctatagtgcaatggtgcaatctcggctcaacgcaacctccgcctcccaggttcaagcaattctcctgccttagccttccgagtagttgggattacaggcatgcgccaccatgcctgattttgcatttttatttgagatggggtttctccatggtgatcaggctggtctcgaactcctgaccttagtgatccacctgccttagcctcccaaagtgctgggattgcaggcctgagccaccgtgcccggccttttttgtttgtttgttta

SEQ ID NO: 17624 - DNA, 624 bp, Homo sapiens
tgggccctctagatgcatgctcgagcggccgccagtgtgatggatatctgcagaattcgcccttcgagcggccgcccgggcaggtacttttaaaaacctattttccttccagttagataaaaattccttgagtccaggaactatttgattgaatatgtatcatcataatcttgcttgatttttgacactcacttaaaacaatttgaatcgaacagaaaaaaagctctagtttcttttttaaaaattttaattctagtttctttttgaatctcacgtattgtctctcttctttcagctctggatgagggggatattgccttgttgaaaacttatggtcagagcacttactctaggcagatcaagcaagttgaagatgacattcagcaacttctcaagaaaattaatgagctcactggtattaaagaatctgacactggcctggccccaccagcactctgggatttggctgcagataagcagacactccagagtgaacagcctttacaggttgccaggtgtaccttggccgcgaccacgctaagggcgaattccagcacactggcggccgttactagtggatccgagctcggtaccaagcttggcgtaatcatggtcatagctgtt

SEQ ID NO: 17625 - DNA, 327 bp, Homo sapiens
ggatatctgcagaattcgcccttagcgtggtcgcggccgaggtacaagtctacctacattatcgaagaggctagagaagtcccttttgcccaaccctcatatgtgagaaatcaagaaaagcaatgttcatgggatcctgacaaatctactatataaagtgagagcccttatttaaatttgagcaatttaagtttttccccagaatgtctcctttgttggttccacaaaatgtattttgtttttagtgtttaaagtcaacaaactggcattgcattttccttaacttacataaactcatcagaattacatgaatattcctactgctta

SEQ ID NO: 17626 - DNA, 498 bp, Homo sapiens
  misc_feature 432: n = A,T,C or G
gtatacgactcactatagggcgaattgggccctctagatgcatgctcgagcggccgccagtgtgatggatatctgcagaattcgcccttagcgtggtcgcggccgaggtacgcggggctcttttaccaaggacccgccaacatgggccgcgttcgcaccaaaaccgtgaagaaggcggcccggtcatcgtagaaaagtacatcccggtgaatcaaagacggtggcagcaggagaattaaggtgacgcatccaaatgagcaagggagatgggggtggacaaaaaaaaccaatgaaatgttccttgaccccaaggtctcagcagaagtttgaagtccttcctgcgttaagagtctgcaatgtgtgtctacacacaccaagacatccagagtgtcacagcctgtcttcactgggcaaaagtccaagtcactaatntagtgcaaagggcagttctgtttcttgtttcttaaaaacaaacaaacaaaaaattttcattccact

SEQ ID NO: 17627 - DNA, 478 bp, Homo sapiens
ggccctctagatgcatgctcgagcggccgccagtgtgatggatatctgcagaattcgccctttcgagcggccgcccgggcaggtacgcgggcactcctcttctcagaactcgatcaagatgttattcacaggtaacagtgacctggtttgggttttctctttcctccctggctctacatgtctcatggtcaaaagaacttggaagcaaagacttagccatctaccatggccaagcaaaggaacctgcataacccccaataggcctgggcacagtggctcacgcctgtaatcgcagcactttgggagaccgaggcgggcagatcacgaggtcaggagatcaagaccatcctggctaacacagtgaaaccccatctgtacctcggccgcgaccacgctaagggcgaattccagcacactggcggccgttactagtggatccgagctcggtaccaagcttggcgtaatcatggtcatagct

SEQ ID NO: 17628 - DNA, 625 bp, Homo sapiens
  misc_feature 565: n = A,T,C or G
ctatatggcgaatggggccctctagatgcatgctcgagcggccgccagtgtgatggatatctgcagaattcgcccttagcgtggtcgcggccgaggtactttatctgtaggtattaataaatacataggaaattgaattgaatttgtaactcaaagcagaggggtggagagaagtgcttcctagccaggaatacaggatttaggccatatctatttaaaagaagactaacaaacagactagaaacgataacactggtaaaaagatctctttacctgagctacaaaagtcatacattaggtagaggcttcaatagtgtagaaaatatactaatgtgttatctccttagagacagatttagaaccatgtcagttatgttgcagatgacagagaacagaaacctagtgaaatcaactcaagacaatgagggctaccataaggaggcccaaggagtagttggatggacctgaggaaggacaggagccagaggccccctgaggagctctgcgccgccccgcgtacagccgttgtcaatggagagttcaaagacctaagccttgatgactntaaagggaaatatttggtgcttttcttctatcctttggatttcacctttgtgtgtcctac

SEQ ID NO: 17629 - DNA, 555 bp, Homo sapiens
cactatagggcgaatggggccctctagatgcatgctcgagcggccgccagtgtgatggatatctgcagaattcgcccttagcgtggtcgcggccgaggtacgcgggttagcaaatacttttgcagaaaagcgccctgtaaaccttcactagagagtccctctgcaccacaacaacacttctgttccttcctctcatcaaacatgggtaattttgcaagagttttcatgggaaattattaggcatcaacattacagtcctgatttggtttcttctgacattttttccctaatcttaaaataactgtaaagggcacccatttttctttagttaataatagaagactgcattgacacggttaaattcccattaccctcagttctttagcaatggaatgaatgactgggatcatcgcttaatggagtgtctggacctcagtagagcttaaattgaaaaataaagtttatatttatatttttaaaaaaacccaaaaaaaaaaaaaaaaaaatcccctcccggggggggcctttaaagggggaaattcccccccctggggg

SEQ ID NO: 17630 - DNA, 446 bp, Homo sapiens
gcgaattgggccctctagatgcatgctcgagcggccgccagtgtgatggatatctgcagaattcgcccttagcgtggtcgcggccgaggtacgatattgcatttagcattttaaaaaatatggttgtttttccttgagttgtgagagtttcattatatgttatggatacaagttactttattaaacgccactttttcacttggcacagttctccaaattaattgtattagtagcagagtcattattcgtattagatttgggtgtgaaagaaagaggacttaaggatgacttgaaagtttctggatggctggggatgttaattattggagaaaaggacttcaggaagaccaggtttgattaagagggtgaacagtgggtgttgctggtggtggtagtgattaggagtttagctttacaacaaggagaagttgggatgcttatttgta

SEQ ID NO: 17631 - DNA, 420 bp, Homo sapiens
gcgaattgggccctctagatgcatgctcgagcggccgccagtgtgatggatatctgcagaattcgcccttagcgtggtcgcggccgaggtacttttttttttttttaacagatgtgatttcacttaaccctttgcgctttcccttagttgtcatttaacatacaatactggctgtacttatctctagaaagaagaaggcatgcttcaaataggaaggaattgtaataatgatatttggcctctactttgtcttagctgttaaaccgaatttagtattaaagttaaatatttgcaaagggaagcattttctacagaggataattaatttcaagaaaaatatcttgagttttaagaaacaaacatctccagaaaaggaaaaagtcgatggtataaaatgtcggaactcttcaacatttgggg

SEQ ID NO: 17632 - DNA, 397 bp, Homo sapiens
acgactcctatagggcgaattgggccctctagatgcatgctcgagcggccgccagtgtgatggatatctgcagaattcgcccttagcgtggtcgcggccgaggtacagtgcatattggcggcgcacgcctcattacgattcgcctgcttgcttctcctgttcaatcgtttctttggaaggcagtggatttttctcttgcgtctctgtcttcttcagtttcgacttatcgaatttctcgatctcagccatatcgggtttgtcagacatggttgcggaggaaaagcgaagcgaggcgcacgagtacatcctagaatctgtttccttttaaaaatgtctaaatttgcttttgccatggcgctaatgctaatggtaaattattgattgcgtggcccatgtc

SEQ ID NO: 17633 - DNA, 623 bp, Homo sapiens
agggagtcgacccacgcgtccgcgctgttgttcttttgttttaaaattgttcttcgtttcttttcattaaaggtttaatcagctagattagagagcatcatttgtatttaacagctgaaacttcggtacgttgccgtttaatgaatgaacttgcattgtgtagccagggcctacaaaagctcttgtcaagaatacaaacactgcctggggctggtgctcaaaagaattttcagtggcaccacatataactcccttgggtgatgcctaactcagttaaaaaggggatgctggtacacttctaggtatgagggtatgcgactttggatcttaaaattatgctagactagtctagagaaaaaacctcccacacctccccctgaacctgaaacataaaatgaatgcaattgttgttgttaacttgtttattgcagcttataatggttacaaataaagcaatagcatcacaaatttcacaaataaagcatttttttcactgcattctagttgtggtttgtccaaactcatcaatgtatcttatcatgtctggatccccgggtaccgagctcgaattaattcctcttccgcttcctcgctcactgactcgctgcgctcggtcgttcggc

SEQ ID NO: 17634 - DNA, 445 bp, Homo sapiens
actatagggcgaattgggccctctagatgcatgctcgagcggccgccagtgtgatggatatctgcagaattcgccctttcgagcggccgcccgggcaggtactgaccctggccaaaactgggataagacggatagtcctgctgtgaactattaaatccagaggaatttgtgagtgaattatttcctgtatatattcctgatgatgttgtaaaactgctaccttgcatctggtagctgtatggcgcctgtccaggttgaggggtacctcggccgcgaccacgctaagggcgaattccagcacactggcggccgttactagtggatcccagctcggtaccaagcttggcgtaatcatggtcatagctgtttcctgaagggatagtgttgttgactttaaaaatatctcttctgttgtaagattcagcaaggtctttatctttttaaa

SEQ ID NO: 17635 - DNA, 604 bp, Homo sapiens
ctatagggcgaatggggccctctagatgcatgctcgagcggccgccagtgtgatggatatctgcagaattcgccctttccagcggccgcccgggcgggcaccttttatttatttttgtttagttttattccttagtttcactcagccacttcaaaattagaatttctctgttgtaggaatgctagccttatagatctgtgaaatgatctagttgctttatctatagttgctggagaattgagtgttttgatcaaaggtagcctatttagctgtaaaactgtctagaattatttcattcctaggataaaggaaaatttgtgtccaaaatatctctaaaggtattacactgtattcctttaatcttaatgatacacttttttttcttataaatgtagcacattatacactagcggtcttcagtatgataaacagatcaactaccaatttcattgccattactctttgaaatagtcctcattgagagttcttgaaacctgtgtctaataacaaagtaaaatataatcaaaaatttcacacaagtagaagaaaaaacattgacaaatctcttgggagaccacatacttatttttaacaagatgaatga

SEQ ID NO: 17636 - DNA, 395 bp, Homo sapiens
actactatagggcgaattgggccctctagatgcatgctcgagcggccgccagtgtgatggatatctgcagaattcgcccttagcgtggtcgcggccgaggtactgctggcagacagccctcagctgtcagccctctttgggaattacctagcaaaaaggagtcacttcggcccaagatcatactccttcctggggcagcttgcatctaatgattggggatataaacgtccagctcctctcaccccaacttgagacaactctgagggaccatcccagcttcagagctctccgtgtgggttactgaaactgtatcacagtccaacttctcccatggaaatctggctttcttcctttacatggcattggtcccaagaggcctccctagtaaatttgct

SEQ ID NO: 17637 - DNA, 666 bp, Homo sapiens
ggcgaattgggccctctagatgcatgctcgagcggccgccagtgtgatggatatctgcagaattcgcccttagcgtggtcgcggccgaggtactggggggatgcacttgagtgccatttctgatactgtcattgtatgactgctgatgctcgtttatgttgttctttggaagctatagtgagcctgatgttttcacattttaaaaaatgcttcctgagacttctttaggctcctctaacttcttcagtgcatttgggatcaaacttagctcttagatcagcaaacctgacttgctcctacttttgcaatttttcaggccttaccatatttcttatctctgtcttcccacctgataggaaaatcttgcagatttgaaacagtggtttctggcctgctgctgcagcaaattccctatgtttatttaagaagtcgggcctatgcttttaacctacaaatgatgagtaatttacttgcaatgaacacaggtagcctgctgctgtttataacctgttgaggatatttatagcaggcaggaggcaggcctagtgtgttattgacaggtgactttagagaatgtacctgcccgggcggccgctcgaaagggcgaattccagcacactggcgggcggtactagtggatccgagctcggtaccaagcttggcgta

SEQ ID NO: 17638 - DNA, 490 bp, Homo sapiens
gcgaatggggccctctagatgcatgctcgagcggccgccagtgtgatggatatctgcagaattcgccctttcgagcggccgcccgggcaggtactttttttttttaaaattatttttttggggataatttttttttttttttttttttattttttttttttttttttttttttatttttagggagaaagcccccccccttttaaaaaaaaaaaaaaaaacataatataaaaaaaaaaaaacccaggggggggaaaaaaaaaaaaaccccccaccccaccggggaaaaaaaaaaaaaaatccccccccccccctttttttttggggggggggggaaaaaaaaaaaccccaaaagggtacccccccccgggggttttttttttaaaaaaaaaaaaatgtttttcaaccttcccccccaaaaaaaagaaaaggccaaccccccctctctggacgggagaaaaaaaaaaaaaaaccctttttaaaaaaaaaaaa

SEQ ID NO: 17639 - DNA, 490 bp, Homo sapiens
tgggccctctagatgcatgctcgagcggccgccagtgtgatggatatctgcagaattcgccctttcgagcggccgcccgggcaggtcaagtgagcaggccacctgttgcagcaagtaaagtggctgtgtgaggcctaggtgggggcatcactggctgaaggtccgtggcttacaaagtgactgagaaaaatcatgtgtcataaggtgctttgggctactttatgatatactctgaagtccctgtttcatgaaaaatgcagtttacgagttttccaatttttgttgtttttgttctatggctttgtttgttctatgtttgttcaatgttactgtgtatgttactctgtggtactgttctatggcttccaacatgaaatgggggaggggagaattatacattatacgtccatgtgcatatcagaaatattgtacctcggccgcgaccacgctaagggcgaattccagcacactggcggccgttactagtgga

SEQ ID NO: 17640 - DNA, 310 bp, Homo sapiens
ccctctagatgcatgctcgagcggccgccagtgtgatggatatctgcagaattcgcccttagcggccgcccgggcaggtacatattaacttaagtttctctgtaaatgaatgaaataattggtgcattattttcacctaaaacaggtagggttgaggatattctgagacttatgttaagatgacaattctggattcattctaccaaccatgaagagagacttctaatcttactcataacatatacaccatgctctgctgaaactctaagcttttcatagtttgtgaggggcagttacatatcactattga

SEQ ID NO: 17641 - DNA, 525 bp, Homo sapiens
atacgactcactatagggcgaattgggccctctagatgcatgctcgagcggccgccagtgtgatggatatctgcagaattcgccctttcgagcggccgcccgggcaggtactttatgtaagatatgacagtttttgacttaagatgtagcttttgtaatactattttgacctcttctgctctcatttggttaatatttgcatgcaatgtctaaatctatcttgccaccttcagtatgtttttaatcattagatgtcagctgacccttgtagaaaggcaaattggatcttggtttttaataattttaaataaatttctttattgaaagtatgtctcttgattggaaagttttctgaaacaaagagacttactaattttttttgttgttctatttgattcttgcatctttgtcccacattttctctctttgtttctctctgtggctgttttatttttactttgatatgcttttacttctttcttatgttgttttctgtatctatacaggcatattctttgtggtacc

SEQ ID NO: 17642 - DNA, 628 bp, Homo sapiens
cctctagatgcatgctcgagcggccgccagtgtgatggatatctgcagaattcgcccttagcgtggtcgcggccgaggtactgctaagaattcaaacttcagcagtcatgggtgagtaaggaagtcttataaatgtattttagccacctaacaagaaactagaaatttagcaagttctttcacattcaggacagttgtgttcactagatcagaggcactgagacatgaagaacagacccctaaaaagggaaagtgttcctttcagttttaggacaccactggaatattagggaagtggaaacacagctgcccactctacagtatgggttgcctttgtgtccggaatgtgcctaacgtcctgacctccatgcccttttcagggagccttgggaggagcccgaatcactgatggaatcggacagtgcatggagatggttcatcaggacgagggtaagtgcaggggcaagtccaggtcatactgagagacaacgagtggcgctggcagagacagacaaagataaaatcaaaagtttgtgcttcatctttaaaaactcaaactaataacaacacttggccttatgagaaaataataggttttttctatttacatgagaatttaatctcaaaa

SEQ ID NO: 17643 - DNA, 585 bp, Homo sapiens
ctcactatagggcgaattgggccctctagatgcatgctcgagcggccgccagtgtgatggatatctgcagaattcgcccttgccgcccgggcaggtacttcaatcacatagcttaaaatatggagaaaagacaggtaaaaaaattatcttaacctgtagtagtcttttttctttttaaaatttttataaaatacactaatttcccaaaataaagaatattatgacacattggtgtcaacttacacagatgaaagctgatgccagctttttcctaactaaagttcatttcaccaaacctttatatattacatgaatatccaagtaaagtatttttttttttaaattcaacacacaggaacataatatacattgtttttttttaaaaaaaaggttaatttaggaatgatttcatcttcaaccacataaagtatctttttaagaccatgaaacctcttgtcattgcaagacttttcagttcatgtttctatttcccagttttaattcttaaaggaaaaaaaaaaagatgaaagggtttattatgtatttcccatgaaaaaactgtggtaaggatcttattcattacca

SEQ ID NO: 17644 - DNA, 615 bp, Homo sapiens
ctactatatggcgaatggggccctctagatgcatgctcgagcggccgccagtgtgatggatatctgcagaattcgccctttcgagcggccgcccgggcaggtactttttttttttttttttttttggggctttttttttttttttttttttttttttttttttaaaaaaaaaaaaaaaattttttttcaaaaaaaaaaaattaaaaaattttgcccccccccccccaaaaagggccccccttttttttttggggggggggaacccccccccccccaattttttttaggggggggggggggttttttaaaaaccccccttttggggaaaaaaaaaaagggtttgttttttacggggattaaaaaaaaaaaacgggggggaaaaattttttaacacccgcgggtccttttttttccccaccctttttttcccccaaaagggggggggggggcccccctaaataaaaccccccccccccccaaaaaaaaaaaaattcggggaaaaaaaaacccccccccccccccccgggaaaaaaacaagaacccctttttttaaagggggtttttttcacaccaggggggggggaaaaaaaaaaaaagggggggggcccccctttt

SEQ ID NO: 17645 - DNA, 276 bp, Homo sapiens
  misc_feature 15, 180: n = A,T,C or G
tatagggcgaattgngccctctagatgcatgctcgagcggccgccagtgtgatggatatctgcagaattcgcccttagcgtggtcgcggccgaggtacattcataagaaagattgatctaaaattttattgtattgtccttttccagtgtttcaggataatatcatagcctcataaaatntaaatgggtagctttccttgcacctcttaaccttttttcttttttctttttcttttttcaagagacccatgatctcactttctgtcactttcatgc

SEQ ID NO: 17646 - DNA, 330 bp, Homo sapiens
aaaaacttaataactgactatatggcgaattgggccctctagatgcatgctcgagcggccgacagtgtgatggatatctgcagaattcgcccttagcgtggtcgcggccgaggtacttttttttttttttttttttttttttttttttttttttttttttttttttttttttttttttttttttttttttttttttttttttttttttgaaaagaaggagcatactttttttagagtataaaaaaaaaaaaaaaaaacaaaaagcctaggcggccggagattctaacaatgtttttttaatcactaggagttctttatgtttaaagagca

SEQ ID NO: 17647 - DNA, 540 bp, Homo sapiens
tacgactcactatagggcgaattgggccctctagatgcatgctcgagcggccgccagtgtgatggatatctgcagaattcgcccttagcgtggtcgcggccgaggtaccaagtgctctgtaattgattacaaaggttaattcattaagaatatttttccagtcattttacaaaaaatattctcaataaaatcaccaattataccaaataaacataaaacactcaaatccttctaacaatactttatatattttaaataccattttgaagatgagtcagaaaattacctgtttctgaacctccacctgctcatacacaaggggtataggtgtacgcggggaaagaattcaagagtctatatgattagttacagagaatattttcatcccctctccctgaatagaaaagcaggggtcaccatttgtatccttacccttgaggtgtttttgaagatgctgtaactcttgaagttgagctgaggcagaaaggttggaaaaatgcagccctctgggtattgtggggagggatgtgatgtagtaag

SEQ ID NO: 17648 - DNA, 540 bp, Homo sapiens
tgatggatatctgcagaattcgcccttagcgtggtcgcggccgaggtacttcttttttgtttttttttttaaaatttttttttttttttttttttttttttttttttttatttgttttttttttttttttttttttttttttttttttttttcccaacaaccttttttttttttttcaggccttgccaaaactacggcctgagacaactgttggtttttttttttttttgcccggggggggtttttaatttttttctcccggcccggaaaaccccttttttttttaaaaaactttcactccccaaacaaccccccagattttttctttttgagggggggggggcggaaaaacgccgctgaaagttaaaaaaccccgccctggtttttttccctagaaaaacttttttttttggggggggaaaaaaaaacaaagctggggggggttctggaaaggattgtggggttttttttccccacccaaaaaaatttttttaaaaaaaaaaacttttttttttggttattaagcgggggggggggggg

SEQ ID NO: 17649 - DNA, 530 bp, Homo sapiens
ctactatagggcgaattgtgccctctagatgcatgctcgagcggccgccagtgtgatggatatctgcagaattcgccctttcgagcggccgcccgggcaggtacattttgctggggggttcagacaagcaagtatctcttttcaccaaggatggagtgcggcttgggactgttggggagcagaactcctgggtgtggacgtgtcaagcgaaaccggattccaactatgtggtggtcggctgccaggacggcaccatttccttctaccagcttattttcagcacagtccatgggctttacaaggaccgctatgcctacagggatagcatgactgacgtcattgtgcagcacctgatcactgagcagaaagttcggattaaatgcaaagagcttgtcaagaagattgccatctacagaaatcgattggctatccaactgccagagaaaatcctcatctatgagttgtattcagaggacttatcagacatgcattaccgggtaaaggagaagattatcaagaagtttgagtgc

SEQ ID NO: 17650 - DNA, 628 bp, Homo sapiens
tacgactactatagggcgaattgggccctctagatgcatgctcgagcggccgccagtgtgatggatatctgcagaattcgcccttagcgtggtcgcggccgaggtacttaaaaaatttttaatgtaaaatacccctttaaggatagaatttagggccttgaaattctactcagttgctatgaactgtggggaatttgagacaaatagcttttgtaattggaatgcacactgtgttgtaataatgtggaaagagaaacaaaaactttccttaatgtaatgagtttccattatctgcctaatctaaggtttgtaagtctacattgtcaggatttatattgaggagatagggggtgtcattttctgtacaagatagttttaagtatgttctaaatatttgtctgctgtagtctatttgctgtatatgctgaaatttttgtatgccatttagtatttttatagtttaggaaaatattttctaagaccagttttagatgactcttattcctgtagtaatattcaatttgctgtacctgcccgggcggccgctcgaaagggcgaattccagcacactggcggccggtactagtggatccgagctcggtaccaagcttggcgtaatcatggtcat

SEQ ID NO: 17651 - DNA, 488 bp, Homo sapiens
tactatagggcgaattgggccctctagatgcatgctcgagcggccgccagtgtgatggatatctgcagaattcgcccttgagcggccgcccgggcaggtacttttttttttttttttttttttaaaaatatataagaaatttattaaaatacgtattcaagactcacaaatgtatgcattttattcatacttctaaataatataatcatagaaattaccctgtagtcaatgtctatttatttattcattttgagacaaagtctcgctctgccacccatgaagatggttctatttgaaagtaatatttaggccgggcgtaatctcagcactttgggaggccaaggtggtcagattgcatgaactcaggagttcgagaccagcctctgcaacatggcaaaaccctgtctctacaaaaaatacaaaattagccaggcatggtggtgggaacctgtagtcccagactcagaaggctgaggtggggggatggc

SEQ ID NO: 17652 - DNA, 434 bp, Homo sapiens
  misc_feature 189, 195, 266, 378: n = A,T,C or G
gactcactatagggcgaattgagccctctagatgcatgctcgagcggccgccagtgtgatggatatctgcagaattcgccctttcgagcggccgcccgggcaggtacaaaaattagcaaggtgtgttggcgggcgtctgtaatcccagctactcaggaggctgaggcacgagaaattgcttgaacctgngagaantagaggttgcagtgagccgagatcatgccattgcactccagctggggcaacagtgcaagactttgtctcanaaacaaaacaaaacaatacaaacaaaaaacctttgactcttgaaaaaattatatccacttccaactgatgaggggttaaatgattgaaattatcccaaagaatatgatgcangtcatcaaaatctgagttccaaatatgtcttgaacaatagaaaacatgagaaaaac

SEQ ID NO: 17653 - DNA, 561 bp, Homo sapiens
acgactcactataggtcgaattgggccctctagatgcatgctcgagcggccgccagtgtgatggatatctgcagaattcgcccttagcgtggtcgcggccgaggtacgtccttcatgacagcaggaagacccccggcacagaagaacaaccgggatgtcagcaccgcggggatggctgccggaaatgctcactcacttccccccgcgtacgttagtctggggatagtaagtctgggttaatctattattaaattattagcctgggtctccttggaagcagacagtgagacaaggacttgacttcaaatggtttatttgagatataatcccagaatataatgattaaaaagtacctgcccgggcggccgctcgaagggcgaattccagcacactggcggccgttactagtggatccgagctcggtaccaagcttggcgtaatcatgggcatagctgtttcctgtgtgaaaattgttatccgctcacaattccacacaacatacgagccggaagcataaagtgtaaagcctggggtgcctaatgagggagctaactcacatta

SEQ ID NO: 17654 - DNA, 610 bp, Homo sapiens
gtaatacgactcactatagggcgaattgggccctctagatgcatgctcgagcggccgccagtgtgatggatatctgcagaattcgcccttagcggccgcccgggcaggtacctcatatatgtatgtatcttccctgaacctgtaaatttggacttctttacaacttaagctcatttgctatttgttgatgcaatgttcttaaaggcaatagatgtcccagatattcgcttgaagcgaaccccattaagtgacagtcgtggcaacttgcagacttccatctcccactgcacgaggctatcctgtctagcgtctccatggacacagaaaagcaaaaatctctctttttgctcataatcacagttatttgcatctaacacttttcggatttctctcatcatgtcattagggtccattgaactagtggtcttcatactccatgtgaaccgcaaagaacgcggcttagaatctttaccctcttccttgtctctttcttttggttcccctgatgtacctcggccgcgaccacgctaagggcgaattccagcacactggcggccgttactagtggatccgagctcggttccaagcttggcgtaatcatggtcatagc

SEQ ID NO: 17655 - DNA, 635 bp, Homo sapiens
atacgactcactatagggcgaattgggccctctagatgcatgctcgagcggccgccagtgtgatggatatctgcagaattcgccctttcgagcggccgcccgggcaggtaccagcacagcaattgctgtatgtttgtttttaattatcggttttcacttggaggggccagttctctatattccaatctattttctatatcagaaatgagcaggcattttaaaaaatggttttcattgatggagaggtaaaagtgaaatggctttgttgtatttatattataaaaggccatttcccaaatctagaatttattactaaaaatcaagtttgcattgaggggaggagtatgatttgctcaagcttactttttttataggtggggtttttatattttcaatgtgattactcacccatacaatttcagctctttcaaagcattcttgttggctattttcagagtccaaaaaaaaaaaaaaaaaaaaaaaaagtacctcggccgcgaccacgctaagggcgaattccagcacactggcggccgttactagtggatccgagctcggtaccaagcttggcgtaatcatggtcatagctgtttcctgtgtgaaattgttatccgctcacaattccacacaacata

SEQ ID NO: 17656 - DNA, 581 bp, Homo sapiens
attgggccctctagatgcatgctcgagcggccgccagtgtgatggatatctgcagaattcgccctttcgagcggccgcccgggcaggtacctattaagagccaagtgtagctctttacatgtagtaactcatttatctttacaagggctctctgtggtagataccataatccccattttgtaactaatgaaactgaggatcagagaggttaagtaacttggcaaggttacatagtaaattctgggcccagatttacacccaggcagtctgacttcacagcccttgctcttggcagatattaaaatgccatgcagtaaatacaaggaataatgtgaatatgaagaaagaaactcctgaatgggggtgggatggggatactgttgttagagaagggagagaaaagtggagtagagaaggttctccttagagctgactgtttgatctaagctgggaaggaagagtaggaatcattcacatggataaaggagaaaagggcatcctaggtagaacatatgctgaagcacaaaagaacctagaatacttacataacagatcaggatgtctagagtttgtgtggagtt

SEQ ID NO: 17657 - DNA, 326 bp, Homo sapiens
actggggccctctatagcatgctcgagcggccgccaatgtgatggatatctgcagaattcgccctttcgagcggccgcccgggcaggtaccccagtcccattccttctcactgactggggcctccagccacccctgccagtgttctccagctgacaaatacttgaattctccctgggagagagctcccagagggaggggcaggctgccatcattgctgtttgggcgacttagctgttccagccttcaggctttggggagcttaagcaggggtggaaggggaaccccaacacagaacagctgcccgacaaaaatgtggccacactgc

SEQ ID NO: 17658 - DNA, 369 bp, Homo sapiens
  misc_feature 313, 314: n = A,T,C or G
gccagtgtgatggatatctgcagaattcgcccttagcgtggtcgcggccgaggtactgcactgcaatcaagaaggactcttcaaagagagaatcagctcaaactggtcagctctagattagaatggaagttcttggtgccggcttttcttgatttggaagcttcagtcactcactgctatcaattgatgaggttcaatccatgatattttgatctttaggtgaattctaaaacatgtttaaagttaaaaaggccgggcgtacccgcgtacctgcccgggcggccgctcgaaagggcgaattccagcacctggnncggccgttactagtggatccgagctcggtaccaagcttggcgtaatcatggtcat

SEQ ID NO: 17659 - DNA, 555 bp, Homo sapiens
tattgggcgaattgggccctctagatgcatgctcgagcggccgccagtgtgatggatatctgcagaattcgcccttagcgtggtcgcggccgaggaacttcatttattttccttctttatacacacatattacttttttttgatacagggtctctgttgcacaatttgtattttgtgttttttaactttttttattgtttccttgcgccccggggctcaggagaacacaagatttatattttaatttaattgggaccacaggcatgtgccaccatgaccggctaattttttttacttttcaaagagaggagggggaatctcactttgttgccaggctggtctaaaactcctgggctcaggcaatccacctgcctcggtggccacagtgctgggattacaggtgtgagttgttttttttttaaaaaaacagtcttacctcattctgtcacccaaaatggaatgactttctaaaattgcagaaagcaaaacatattccttgctggtaataaaataataggcgtatcaaagggaaagagtttttctccttaaataaaa

SEQ ID NO: 17660 - DNA, 386 bp, Homo sapiens
tatagggcgaatggggccctctagatgcatgctcgagcggccgccagtgtgatggatatctgcagaattcgccctttcgagcggccgcccgggcaggtactttttttttttttttttgggttttttgggctttttttttttttttttttttttttttttctgccccgcaaaaagacccgttttttaaaaaaaaaacgcccccaaaaaaggcccccccttggggaaaaaaccaaaaaaaaagcttctccccggggtctttttcctggggggagggggttttttgggggagggtcttttaagggggcggttttattgaggagggggtttttttatccccaaaaaggttgttttttttttaaaaacccaacgggagatttttttttttt

SEQ ID NO: 17661 - DNA, 544 bp, Homo sapiens
ggcgaattgtgccctctagatgcatgctcgagcggccgccagtgtgatggatatctgcagaattcgcccttagcgtggtcgcggccgaggtaccacttgtcttgtctacattattctaacaaacaaaattattcaaacaaacagatctctcagtcttgagcacaactttcaatccagccacatcagccaaaatgatcatactaaagcaaatcctgttatacctgtgtttaagatactttctttgctcccatgtccttgagttagctgacaaggtccccagctcacttcaggctgccctctctgtacctgcccgggcggccgctcgaaagggcgaattccagcacactggcggccgttactagtgggatcgagcctcggaaccaagcttggcgtaataatggtcataagctgttcctgtgtgaaattgttatccgctcacaattccacacaacaatacgagccggaagcataaagtgtaaagcctggggtgcctaatgagtgagctaactcacattaattgcgttgcgctcactgcccgctttcc

SEQ ID NO: 17662 - DNA, 344 bp, Homo sapiens
gactcactatagggcgaattgggccctctagatgcatgctcgagcggccgccagtgtgatggatatctgcagaattcgcccttagcggccgcccgggcaggtacaaccatagaaaacattcgagattactattaagtcttcagagaaaaatcgaagaagtcctgtcacctgaaggctcccctttcaaaatcgccctccaagaaaaagaagaaattccgcactccttcttttctgaaaaggaacaaaaaaaaggagaaagttgaggcctaaattaagtctttttattattattattattacaatgggacattgcacatcctaataccacatttaagttggtcatt

SEQ ID NO: 17663 - DNA, 512 bp, Homo sapiens
atatggcgaatggggccctctagatgcatgctcgagcggccgccagtgtgatggatatctgcagaattcgccctttcgagcggccgcccgggcaggtacttttttttttttttttttttttttggggttttttttttttttttttttttttttttttttttttttttttttttttttttatattttttttattttttttttttttgttttttttttttttttgaaaaaaggacaaaaaaaaacctctaaattttgaagcaataaataaaacagcgcagcaaacaaattaaattaaatagagcaagttatgaaataaacctcgcgttgcgcacccttaaaaaaacgggaaaaaaaattttttgttagcaaagaaaaaaaaaaaatgatcttttttttttttattaaaaaagacacttttttaattttaaaaaacaaagggggggggaaaaaaaaaaaatttttttttagagaaaaaaaaaaaaaaccattttttatttttggaaaaaaaaaaa

SEQ ID NO: 17664 - DNA, 602 bp, Homo sapiens
ctcactatagggcgaattgggccctctagatgcatgctcgagcggccgccagtgtgatggatatctgcagaattcgccctttcgagcggccgcccgggcaggtacatcctcggccgggagtccccactgtctctctacaatgaggagctggtgagcatgaacgtgcagggtgattatgagccatctgatgccaccgggttcatcaacatcaattccctcaggctgaaggaatatcatcgtctccagagcaaggtcactgccaaatagacccgtgtactatttgatttttgccttagtgattaaaggaggaacatatgtggaaacaatcatcagatctgaatgctacctcgtctgcttcctatttttgtcatctaggatgggtcacaatattcttgagcctatttcttcatcttaaatctcagtatagaagttcccaaggttgttacgagattgagaggccacgtaagcattgctttgtgcatgctacagctctttttgcacaaaagtcgttataattgttgcaacccacaaataaaaggaaacgcatttttgtaacaaccttggcaccatatttctcctacttgtagaatactattcacaca

SEQ ID NO: 17665 - DNA, 646 bp, Homo sapiens
ccctctagatgcatgctcgagcggccgccagtgtgatggatatctgcagaattcgcccttagcgtggtcgcggccgaggtacctacattattaaagatagtcaagaactctaacccaagcatatgggcattaaagaaacttattaagccttcttctttgcaggagccaaaggagacaggggagccccaggttttcctggcctcccgggcagaaaaggggccatgggagatgctggaccttgaggacccacaggcatagaaggattcccagggccaccaggtctgcccggtgcaattatccccggccagacaggaaatcgtggtccaccaggctcaagaggaagcccaggtaaagggtttacttttaaacagcataaaataacaaaaatcatgtttgacctcaaaagttttcaaccttctactcatgttaccttgttgcttcttctttccctgtggtcatcttcattcccccactacctgtggttcccatacccagcagttgtcaaggtaaggtagcctgtttgagggatgcatagttaataaattaacgaacctggctggacgcagtggctcacaacccgtaatcccagcactatggtaggccaaggcagatggatcacttgaggtcaggagttcaagactagcct

SEQ ID NO: 17666 - DNA, 649 bp, Homo sapiens
  misc_feature 257, 258: n = A,T,C or G
cactatatggcgaatggggccctctagatgcatgctcgagcggccgccagtgtgatggatatctgcagaattcgcccttagcgccgtccgggccggtgcgcgggtgacatggacatatttaactgggacctggatgaggaatatgaccaaagcctaccatgccccatgctcagcaaggagctgatagaggttgttgaccctgatgtcttgatggactcactgtatagatgttatgaaactccttccagtagacttgnnagctctagactcctgcaccccctatggaagttccttttatgcattgctaggaaaagcctgtaggcttttctcttgacgtgggagaaatactaaagaaggggaaggggaagataagaaggggaagatgatctttgattactatacaatgacgccgctgcttgggagctcacaaatgctgggttagttagccatttgcctgtgatttttgaagactaaagaagtttttacactagatgctcttccagagcaaaatagcaaatttcagcaaatacttactgacctttaaagccttgttgtggatttctgagatttaaagatactttaaaattctcaagaacaaaactttcaaacctctggttgaaagaaatatacccagttcagtcactgcagt

SEQ ID NO: 17667 - DNA, 500 bp, Homo sapiens
acgactactatagggcgaattgtgccctctagatgcatgctcgagcggccgccagtgtgatggatatctgcagaattcgcccttcgagcggccgcccgggcaggtaccagacctggaaaatgcttcagactttacacagagaaagcttataaaacagaaatgcaggataacacctatcctgagattttgcgttctaatttaggatcagttgtgttacaattgaagaaacttggtattgatgacttggtacatctgaaactcaagactctcactgattggagagcttgtggaaaacaaaacacaccatgccaataaatgagatgaaaacttgagtttgcctttttaactatttatgttctaagttaagctttgataacattcaaatgtcaaattctctcattcttataaaaagttgaattaattgcctgtatttattttagcaattattcaatgtatttccagtataggatgtatagtataattaattttttgtaaataaa

SEQ ID NO: 17668 - DNA, 356 bp, Homo sapiens
ccctctagatgcatgctcgagcggccgccagtgtgatggatatctgcagaattcgcccttagcgtggtcgcggccgaggtacttttttttttttttttttttttttttcctttttttttttttttttttttttttttttttttttttttttccaaaccaagggtttttttttttttttccaaaattttttccccaaatccagttgcccaaagggtttaaaaacaccccaaatttttccacccttattccttttttaaataaaaggaaacctgtggttttcctcacccccgggggacccctttttaaaaaacctcccttccccttgaagggtccaaatttttggtcccacccccaaa

SEQ ID NO: 17669 - DNA, 537 bp, Homo sapiens
ggccctatagatgcatgctccagcggccgccagtgtgatggatatctgcagaattcgcccttagcgtggtcgcggccgaggtacaatatgacaggctgggcatggtgctgtaggaatacagaagacagattctatatttgttctggaggggcctaaagttgcacatttaaatcttgaggaaagacagggaatttgctgaaaaagctaatatcaagtgtaaagaccctgggtcaaaacagagtagcttaggaagtcataggttcttaagtgctgctggatcacggagtgcacttaaagagtgcattaaagatctattactgtgtaaatagtgatttaaattctcaactaattatttgttaattaggaactttaaaaaaaaatccctgctttgtctaccgactcaattcacctttaacatatgttgaatttttcttatatactatggtttctttgggggctattcctttgttgcttttgggatttttaaaaatctgtttttgaactagattcaaatggttttccttaatgtagctttat

SEQ ID NO: 17670 - DNA, 619 bp, Homo sapiens
tggggccctctagatgcatgctcgagcggccgccagtgtgatggatatctgcagaattcgcccttagcgtggtcgcggccgaggtacttagacccaacatacaggaggtgttgattctcatcccttgactcaggacatgtgtgtaattgttaatgtcatcacaagacctttctacaaatgtcttgtgacatacaccttggcccagcatctgagttatttgtctctttttcctgggcccagttcacagtgctgtatcactggacccagacccttggtaatgtgattgtattctgccttgatacagcccataagggtcattgtgacatatcacagggtgttgcacccaggtggtttgagtctcctcttctgccttggtgctacccacaggtgtattgtgacatattgctgggtctgtgttatgagaatcttttgcttttgccctaaacatataggccattgtaacattgctgagtccaacacccaagtgatgtaacgcttcatcctggacctgtctacagaggggattgtacctgcccgggcggccgctcgaaagggcgaattccagcacacttgcggccgtactaatggatccgaactcggtaccaagcttggcgtaatc

SEQ ID NO: 17671 - DNA, 652 bp, Homo sapiens
gtgccctctagatgcatgctccagcggccgccagtgtgatggatatctgcagaattcgccctggagcggccgcccgggcaggtactaaatgagtgactccacacccacagaaggagagggggatgaagaaatctgccaggagggtgcctcccgccagtatctgatgaagagtgactcagccctggcctcatggaccctccacaggctctccctccctcaagggtgcagaatgatgaggattccaacctccagcacgacaaaagcaaaacacactcgctctgagaaaccgaggaacgagccagacgactggagttgccaagagcaagtcaaaaaacattctggtgagaatggtgagcgaaagctgggacaggtttctgcttcaacaccaatagaaaccgactgcgggaaaaactgactcttttgcattatgatccagttgtgaaacaaaaagtcctcttcgtggaaaagaaaaaaataccctccctttaaacggtggattgaaaatgactttgatttataaagagaagactgagggcggggatactgattcaaaaatcctgtagcgtgtaataaaagaagaggaaatggcatggaatcactgcctcctgtgatttgaaggccattgtgaaagaaaacaatgcagtgaaagaaa

SEQ ID NO: 17672 - DNA, 573 bp, Homo sapiens
gactcaagctctacacgggacgggacgaccggcactttgtgcccacaggtgtctacattgtcaggactgtgactgagccgtggaccatggcattcagcaagggctggaagaagaagttcttctacaacaagaaaaccggcgagtccttctttacactccccccagagtccattgccccattccatacctgctactacacccggctcttctgggagtggggagatggcttccatatgcgcgattcccagaagccccaggatccagacaagctgtccaaggaggacgtcctttccttcatccagagtcacaatcctctaggcccttagatttccacctgatgaatgtcctgtcattcttaaggcagggcccagtgactgggttccttctgcctcttagaaaggcactgggactgttctccctggtcacagggagatgggctcctctccattcccaaggagctcaattgggaccttagaggacgtatccttgtggaactctgctgcctgagagctgacaccagcagcaggcagcctcacaagcagctgctcggggcaagtcagtgcttagcacttg

SEQ ID NO: 17673 - DNA, 404 bp, Homo sapiens
ctactatagggcgaattgggccctctagatgcatgctcgagcggccgccagtgtgatggatatctgcagaattcgcccttagcgtggtcgcggccgaggtacgcgggctttcattttttgatgatgtgagggccaagagccttggccttggttcactgaaaaactgagacagctgagtataaaggggtccccagagaacctccgaccagcctgcgcatggggagaacgggatggagcctcagaaagtttgtgccattgttttgcagtggggaggagcctggcctctcctgttctggggtggagtctcgctttgctgagagtccttgtttcccttttgttcccttttcctccctcagccccttctcacccctttgctgtcctatgtagtgatttggtgagaaata

SEQ ID NO: 17674 - DNA, 490 bp, Homo sapiens
ggggccctctagatgcatgctcgagcggccgccagtgtgatggatatctgcagaattcgccctttcgagcggccgcccgggcaggtacctagctgttgcttatacctattatgccagataattatctctatcctttttttctagtattgtgccacacacacacacacacacacacacacacacacacacatatatattatgaagggagattttttctcacagaatccataacaagagaagagtgtgtccctctgtgtatcacaccctacctgtgaggggccagtttctctctggggcgctcaatgtggagcgctgctcaagaaagaacctagcgctgcaaaaaaatacaccatctggggtgggtaggggggcttatacgtgtactcacaaatctttgagacgctggcgcgcacatatcacttggcgccgagttttaaacaccactctggccaagatggagacaccctgtctctactaaaaataaaaaaaa

SEQ ID NO: 17675 - DNA, 303 bp, Homo sapiens
atgctcgagcggccgccagtgtgatggatatctgcagaattcgccctttcgagcggccgcccgggcaggtacagatttgctttctcttacaaaaagaaaaaaaaaatcctgttgtattaacatttaaaaacagaattgtgttatgtgatcagttttgggggttaactttgcttaattcctcaggctttgcgatttaaggaggagctgccttaaaaaaaaataaaggccttattttgcaattatgggagtaaacaatagtctagagaagcatttggtaagctttatcgtatatatattttttaa

SEQ ID NO: 17676 - DNA, 346 bp, Homo sapiens
  misc_feature 246: n = A,T,C or G
cgactcctatagggcgaattgggccctctagatgcatgctcgagcggccgccagtgtgatggatatctgcagaattcgccctttcgagcggccgcccgggcaggtacttttttttttttttttttttttttcttttttttttttttttttttttttttttttttttttttttttttttttttaaaaaaaaaaaaaaaaaagttttaaatggaataaaaaaaaaaaaaacttacaaaaaaaaaaaanagggaaggaatttttattttgggagggttttttttagaaaaaaaaaaaaaaaaaaaaaaccctttctcgggggcaaaacaagggaaagggaaaaaaaaaa

SEQ ID NO: 17677 - DNA, 336 bp, Homo sapiens
attgggccactttggatgcatgctctgaccggtcgacacgggcgatggatatatgcagaattcgccctttcgagcggccgcccgggcaggtacaagtgttgaatagagaccacattctggttgaagacactaagccatcttatttcagcctgaatctagtaatcagaagctcactaactcttgatgcctcctgcttgctagttagataactccaaagattagagagtacctcggccgcgaccacgctaagggcgaattccagcacactggcggccgttactagtggatccgagctcggtaccaagcttggcgtaatcatggtcatagctgtttcct

SEQ ID NO: 17678 - DNA, 563 bp, Homo sapiens
atacgactcactatagggcgaattgggccctctagatgcatgctcgagcggccgccagtgtgatggatatctgcagaattcgccctttcgagcggccgcccgggcaggtactttttttttttttttttttgcagaattgttagtgactggggaaaaaatgaaaacaactgaaatgacatcagtagaggaatggccaaataaattatgatatactcataatatataatatcaagtatctgttaaaataatgcagtagtttattctatacatcatgcccgcgtagtctgcgttgttaccactgcttactttttttttttttttttttttgggccccagaaatactatataaaaccgggtgatcaaaacaaaacttatgtcatgaattttaagagtttttagcaaaaaagatatttttgaactggcacagcaaaagcaaagttgaacatcatgatacacaagactaatcatgcaaacaactgtaagtgggatgtgttacttaaacactaagctcatgactgacattctcaatatataccactgatttttttaagccatggtggggt

SEQ ID NO: 17679 - DNA, 560 bp, Homo sapiens
gcatgctcgagcggccgccagtgtgatggatatctgcagaattcgcccttagcgtggtcgcggccgaggtacttcccatgtgccagaggaacttaagcagccgttacacagaaagtccaaatcgcaggcatatgctatgatgctgtcactgtctgacaaggagtccctccattctacatcccacagttcttccaacgtgtggcacagtatggccagggctgcggcggaatccagtgctatccagtccataagccacgtatgacgttatcaaggttgaccagagtgggaccaagtccaacagtagcatggctctttcatataggactatttacaagactgctgagcagaatgccttataaacctgcagggtcactcatctaaagtctagtgaccttaaactgaatgatttaaaaaagaaaagaaagaaaaaagaaactatttattctcgatattttgttttgcaccaacaaaggcagctggctgacttctggaaagatcaaatcatgccactttaaagggattcaagtgaaaaacaaaaaaacttgggggggctgaaagca

SEQ ID NO: 17680 - DNA, 247 bp, Homo sapiens
tacgactcactatagggcgaattgggccctctagatgcatgctcgagcggccgccagtgtgatggatatctgcagaattcgcccttagcgtggtcgcggccgaggtacattctgttcaggtgataactgagcctcaatcaagcagaaactttttgcttgaaattaaaaaaaaaatttctattagtgaaatttcttttttttttttttggaagcaccctgttatctaaagaatctttgtaagattttt

SEQ ID NO: 17681 - DNA, 585 bp, Homo sapiens
actatatggcgaatggggccctctagatgcatgctcgagcggccgccagtgtgatggatatctgcagaattcgccctttcgagcggccgcccgggcaggtacgcggggggagccagagagacgcagctaggcctccacggctgtggagagatcctgccacgggccttgttcaccatgtcggtgctggatgcgctttgggaggatcgggatgtccgtttcgacctgtccgcgcagcaaatgaaaacaagacctggagaagtccttattgattgtttagattccattgaagacaccaaaggaaataatggagatagaggtagactcttggtaacaaatttaagaattctctggcactctttggcattatcaagagtcaatgtttctgtcggttacaattgcatattgaatattacaacaaggactgctaactctaaattacgaggccaaactgaagctctctatatactaacaaaatgtaacagtacctcggccgcgaccacgctaaaggcgaattccagcacactggcggccgttactagtggatccgagctcggtaccaagcttggcgtaatcatggtcatagct

SEQ ID NO: 17682 - DNA, 578 bp, Homo sapiens
tgggccctctagatgcatgctcgagcggccgccagtgtgatggatatctgcagaattcgcccttagcgtggtcgcggccgaggtacaggacgtctccccattacaactacccaatccgaagtgtcaactgtgtcaggactaagaaaccctggttttgagtagaaaagggcctggaaagaggggagccaacaaatctgtctgcttcctcacattagtcattggcaaataagcattctgtctctttggctgctgcctcagcacagagagccagaactctatcgggcaccaggataacatctctcagtgaacagagttgacaaggcctatgggaaatgcctgatgggattatcttcagcttgttgagcttctaagtttctttcccttcattctaccctgcaagccaagttctgtaaaagaaatgcctgagttctagctcaggttttcttactctgaatttagatctccagacccttcctggccacaattcaaattaaggcaacaaacttataccttccatgaagcacacacagacttttgaaagcaaggacaatgactgcttgaattgaggccttgaggaa

SEQ ID NO: 17683 - DNA, 518 bp, Homo sapiens
  misc_feature 202, 203: n = A,T,C or G
atggatatgtatataattcgaccttaccgttcgcgtgggcgaggcccaagtgcatagacgcctaagcttgggaggcgatgacggggggaatattagggagcgagtaaaaaactgctctggcccacacggtgaaatccaggccctcctagtaggacggtaaaaaacccgtgcgaagctggtggccaatctatggaggaggcgnnccggtgacgtcaaactaggggttaacttgattggctgaggattcaacgctcagggacatccccagtgtactctggccagacccaataaaggatactatgtttggagggaagtggaaagatggtataaattggatcccttggtgaggcaaccaagaggcctatctgcaacatgtagggtgtggggcgacagtattgtggggcttccattcatcttaatacctcggccgcgaccacgctaagggcgaattccagcacactggcggccgttactagtggatccgagctcggtaccaagcttggcgtaatcatggtcat

SEQ ID NO: 17684 - DNA, 566 bp, Homo sapiens
actatagggcgaatggggccctctagatgcatgctcgagcggccgccagtgtgatggatatctgcagaattcgcccttagcgtggtcgcggccgaggtactccagaggctaaaacaggagaatcgcctgaacctaggaggcggagattgcagtgagccgagattgcaccactgcattccagcctgggcaacagagggagacgccctcttaaaacaaacaaacaaacaagcaaaagcccagatcactgggccccatcctcagagtttgtaattcagtagatttggagggtagtccaaaatttctgtttctaaaaattctcagatgatgctgatgctgcttgttcagggaccacactttgagaatcactggtgtaggatactgttaagtgagatgagtgaatgtaaaaatatatttaatctggtccaatttttgtaaaataaacaactccccaaatgctatacatatgtgtattcatatgaaaaaatatgacaaatgctacacagtaggacattaacatgagcccgagtacctgcccgggcggccgctcgaaagggcgaattccagca

SEQ ID NO: 17685 - DNA, 607 bp, Homo sapiens
  misc_feature 515: n = A,T,C or G
tcactatagggagtcgacccacgcgtccgattctattccccaaattaactgaaaacatgaacgctagatgggaatgatgggagaaataatatatttatttcggtgaaattttgcatgtgtgaaagttttgttaactaggaccttcgagatcctagactgcttttgtcttactgtgggaaacagagtctcttgtagacactagcattttaaggtgacaaaagtcaaaggttgtttcctttggtttaagcggcagccaagcattcttcaattgggggcttagggtgtggctgttgacaacacattttattatggggtctttaatgataaaatattaatctaaaaataagccaaaaattacaggtttatttttcactaaacagacaattgaaatacatggtacaaaaataagtggtaagattattgtaaaatgaaaaatggacagaataaatattcaatttaattttccatctatgagaatttcacaataaaatcatagtttactttgtattataaanaaaaaaaaaaaaaaagtgcggccgctagactagtctagagaaaaaacctcccacaccttcccctgaacctgaaacataaaatgaatgcaatt

SEQ ID NO: 17686 - DNA, 365 bp, Homo sapiens
  misc_feature 106: n = A,T,C or G
actatagggcgaattgggccctctagatgcatgctcgagcggccgccagtgtgatggatatctgcagaattcgccctttcgagcggccgcccgggcaggtactttntttttttttttttttttttttttttacggagatagagcctcactctgtctcccaggctggagtgcagtgatgtgatcttggcttacagcaatctctcccttctaggctcaagcgattctcccacctcagcatcccaagtagctgggactacaagtgtgccaacttagaattatattagccacacccagctaatttttgtatttttttgtagaggcagggtctcgccatgttgcccaggttggtcttgaactcctgggct

SEQ ID NO: 17687 - DNA, 394 bp, Homo sapiens
atacgactcactatagggcgaattgggccctctagatgcatgctcgagcggccgccagtgtgatggatatctgcagaattcgcccttagcgtggtcgcggccgaggtacaattaggttctgacttaaagattagagattgaaacaaacagaaaaaaatgcaaccgcttgcatttcttgctaaaagtaaaccaaaagcagtttaatttgaaggatgtgctatggtagccgtgattaggttttaggtcaaataaccaatgggcccaactcaatgtgagacagggggagcctcattaagaagagtggctgagaaggaggcagcatgaccagtacctgcccgggcggccgctcgaaagggcgaattccagcacactggcggccgttactagtggatcc

SEQ ID NO: 17688 - DNA, 320 bp, Homo sapiens
acgactcactatagggcgaattgggccctctagatgcatgctcgagcggccgccagtgtgatggatatctgcagaattcgccctttcgagcggccgcccgggcaggtactttttttttttttttttttttttttaattttttttttttatttttttatttttttttttgtgctttgcggaagaaaaatttttacctcaagcgggggaatggaaatcctagtcacacaattgacatttctgtaggccgaattttttgcttaggggaacaaacctggaaaaaatactgcacttctggaaataccccagaatttggtttttta

SEQ ID NO: 17689 - DNA, 358 bp, Homo sapiens
ctatagggcgaattgggccctctagatgcatgctcgagcggccgccagtgtgatggatatctgcagaattcgccctttcgagcggccgcccgggcaggtactttatttttttattttattttttttttttttttttttttttttttttttatttttttttttatttattttatttatttttttttttttatttttttttttttttatttttttttttattgacaaaaaaaaaaaacctattgcataaatagaagcctagggctcacactactagtaagcctttacatgcataatgggggtgtgaaaacaataaaaaactttactctgagcatctaaagtggaatgttgattatcctga

SEQ ID NO: 17690 - DNA, 652 bp, Homo sapiens
cgactcactatacggcgaatcgagccctctagatgcatgctcgagcggccgccagtgtgatggatatctgcagaattcgccctttcgagcggccgcccgggcaggtactcaggtctgaaggcaaccacactgattatggaggctccactttttcactacccaactcaaaactgtcattgtcagtctttttttgaattctttttaaagacaaaactaaacccagaagatcgaactggaaataaaagcagacaaagagaccaccaaatatactgtttaaaaaaacaacaacaacactgctcatggtttacagtatgtggacagttcctttgttcatgatagagtaaacaaaagtcccttttgtgtgcttgagcaaatgaaaaccaagaggagaaaaacacacaccacctcccatcccctaaaaacataattaacaaaataaaaaataaaataaaaaatcctttgccccagtcaacgtttttgcagcatccattgtggtcggccttgtacctcggccgcgaccacgctaagggcgaattccagcacactggcggccgttactagtggatccgagctcggtaccaagcttggcgtaatcatggtcatagctgtttcctgggtgaaattgtaatccccttacaattccccacaacat

SEQ ID NO: 17691 - DNA, 413 bp, Homo sapiens
ccctctagatgcatgctcgagcggccgccagtgtgatggatatctgcagaattcgccctttcgagcggccgcccgggcaggtacgcgggtgagtttgctattcctgttttataacctgttctgcagaaacctatttttattaaagattttataagaaagggaaaaaaaaaaaaaaaaaaaaaagtacctcggccgcgaccacgctaagggcgaattccagcacactggcggccgttactagtggatccgagctcggtaccaagcttggcgtaatcatggtcatagctgtttcctgtgtgaaattgttatccgctcacaattccacacaacatacgagccggaagcataaagtgtaaagcctggggtgcctaatgaaggagctaactcacatttaattgggttgcgctcactgc

SEQ ID NO: 17692 - DNA, 578 bp, Homo sapiens
cgaattgggccctctagatgcatgctcgagcggccgccagtgtgatggatatctgcagaattcgcccttagcgtggtcgcggccgaggtacatcgtatagcagaccgcgggcactgccgccgctaggtagagtctgagggcttgtagttctttaaactgtcgtgtcatactcgagtctgaggccgttgctgacttagaatccctgtgttaatttaagttttgacaagctggcttacactggcaatggtagtttctgtggttgcctgggaaatcgagtgccgcatctcacagctatgcaaaaagctagtcaacagtacgcgggccttttttttcacaagatggcgccgaaagcgaagaaggaagctcctgcccctcctaaagctgaagccaaagcgaaggctttaaaggccaagaaggcagtgttgaaaggtgtccacagccacaaaaagaagaagatccgcacgtcacccaccttccggcggccgaagacactgcgacttcggagacagcccaaatatcctcggaagagcgctcccaggaaaaacaagcttgaccactatgctatcatcaagtttccg

SEQ ID NO: 17693 - DNA, 639 bp, Homo sapiens
tacgactactatagggcgaattgggccctctagatgcatgctcgagcggccgccagtgtgatggatatctgcagaattcgcccttagcgtggtcgcggccgaggtacactggcagcctctactggccattgcaaagagcagcattgtcctctgttctttccattccaggttgcatatgcttttacttgggtttagctctttcttctttggtcctcaccctctttgttgtcctcttttgaagactagttattctgttggatgtcttgatttataattaataaagagctactagtccagtattttcattaataaattaatatcataagtgaatggaattcttcaggaccttagaagaagttatgaatataacctttccttgagaagtaattttcatgtaagagggaagatagatttatctttatgtaggttttaaaatactttctcagttgcaagccttaatgtatgatatagagattagtcttttacttatgactgacaaaaaaccctgatgccttgaaagaaagccttggctcagtgatagacttaattacacacacacacacgtacctgcccgggcggccgctcgaaagggcgaattccaacacactggcggccgttactagtggatccgagctcggt

SEQ ID NO: 17694 - DNA, 616 bp, Homo sapiens
tatatggcgaatggggccctctagatgcatgctcgagcggccgccagtgtgatggatatctgcagaattcgccctttcgagcggccgcccgggcaggtactttattgtattccaatttaaaaaaacaaaattaagtctatattttaaaaactctgacaatagcaagatatttaatgaactctacttcatatctagttcattttttttttctggtttgaaaaaaagatcagctttccctgaataaacaaaaatgaatgtaaataaacatgaaaatacaaaaccataatttccaaaaacgaaatgaatgggccaacagtaaaatgcacaatgagccacaactgccctggtatttaaaaaaataaaggtcaactgtgggtcataaagaagtatcaacttttaaaaatatatgtatgtattgctactcatagcatactctgacctaaaagaggcagatactgattttatagccagtgacaaaaaatttgaacggaattgcaaaaccccctgcttgtgatcactatatgaaatggaagaataattgaaatattaaaatagatcctgagcccctcagccgctaatattgctgaaaaagtgctccaaaaaaataaaattatgc

SEQ ID NO: 17695 - DNA, 639 bp, Homo sapiens
ggcgaattgggccctctagatgcatgctcgagcggccgccagtgtgatggatatctgcagaattcgcccttagcgtggtcgcggccgaggtactttttttttttttttttgagacggaatttcgctcctgttgcccaggctggagtgcaatggtgcaacctccgtctcctgggttcaagcgattgtcctgcctcagcttcccaagtagctgagaccacaggcatgcaccaccacacctgactaattttgtatttttagtagagacgggatttctccatgttggtcaggccggtctcgaactcctgacctcagatgatcctcccgccttggcatcccaaagtgctgggactacaggtgtgagccaagatcacaaaagagagaaaagaaaaaagtctatcgggctaatgggaagctgccagggaagacagggtcttaccacccgcgtacctgcccgggcggccgctcgaaagggcgaattccagcacactggcggccgttactagtggatccgagctcggtaccaagcttggcgtaatcatggtcatagctgtttcctgtgtgaaattgttatccgctcacaattccacacaacatacgagccggaagcataaagtgtaaaacctggggtgcctaatgagt

SEQ ID NO: 17696 - DNA, 475 bp, Homo sapiens
ccctctagatgcatgctcgagcggccgccagtgtgatggatatctgcagaattcgcccttagcgtggtcgcggccgaggtactagctgggtgacctggggtaagctacttaatctctctgaatttcattttgtcatcagcaaaatgggcataataatacctactttataggtttgttttatagattaaatatggtaagccatgttaaatattcactttagtgaatggctcattgttaagtcctcaaaagtagttgttaacaataataaatgtatacataagttatacatttccttaagcaatacaaaataggtcacactgaatggaaacacctcaaaccatctgtggtttacccctagagaaaatcctgattgccagacataatatatagggcaggtccttaacgtgtggtctacccactctctctaggtggtagtctcctctagggggtgtgcaaaggtacctggggccccttt

SEQ ID NO: 17697 - DNA, 563 bp, Homo sapiens
  misc_feature 348: n = A,T,C or G
ctatatggcgactggggccctctagatgcatgctcgagcggccgccagtgtgatggatatctgcagaattcgcccttagcgtggtcgcggccgatgtaccactctttggatgtgattgggttcctgctggtctgtgtggcaactgagatatttatcgccacaaaatgttgtctgtttttgtctctggaagtttgctagaaaaccaaagaagggaaaaaatgattagttatatctgagatttgaagctggaaaacctgataagtgagactacttcagtttattccagcaagaaagattgtgatgcaagatttctttcttcctgaaattaaatatacaaaaatggaatantttcctgatcggcctttattaccatggggaaagttaccaccctttggaggtaataatgtatattctttcatgcttttttctgtgcacttacctaagtgtgaatatgtaaagggtttgttttgtatacaaatgggattatactaaaataagtaatgcctatttttaaggataggttaaatttgtgaacgatcatttcaaatatattgaataaaata

SEQ ID NO: 17698 - DNA, 423 bp, Homo sapiens
  misc_feature 327: n = A,T,C or G
ggggccctctagatgcatgctcgagcggccgccagtgtgatggatatctgcagaattcgcccttagcgtggtcgcggccgaggtactttatttttttttttgtttttaaaaatatttttttcttttttttttttctttttaattttctgttttttttttttaatttaattttttataaaaaggggggggggtttttttaaaaaaaaaaacactatgagaccttggttccaaaaaaaaaaaaaaagggggttttcccccaaagacactaaagttttttattcccccccccccccccccaaaaggacagggggaaacgggggggggttntgggtaaaaaaaaaaacctccccccccaaagcccaaaaaaaaaaaactgggaggcataaaaaacaccccccccttaagggggtgcaagcccccccc

SEQ ID NO: 17699 - DNA, 556 bp, Homo sapiens
gactcactatagggcgaattgggccctctagatgcatgctcgagcggccgccagtgtgatggatatctgcagaattcgcccttagcgtggtcgcggccgaggtacagaccaaccatggagaagatgaagcaggtggtgacacagactcggtggatgaggccagatgcaaagagagcaacaggaggcacaggagaactagggaggcaagaagaacaaggagggcaacggtcagaatggaaatactaggcatctgcacatggagtccaggagaaatccggggctctctgaatcctggggaacctgcttagaagggtaagcgtgactacagcaggaggattctgattaccttaatgatacccaaaacatggaagtaggaggttgagtgtggtggcttgcacctggaatcccagcacttcgggaggctgaggtgggcagatcacttgagcccaggagtttgagaccagcctgaacaacaaagtgagacccatcttttaaaaaaaaaaaaaaaattgaattaaaaaaaagtacctgcccgggcggccgctcgaaagggcga

SEQ ID NO: 17700 - DNA, 396 bp, Homo sapiens
actactatagggcgaattgggccctctagatgcatgctcgagcggccgccagtgtgatggatatctgcagaattcgccctttcgagcggccgcccgggcaggtacgcggggatcttggggctgctgggactcgcgtcggttggcgactcccggacgtaggtagtttgttgggccgggttctgaggccttgcttctctttacttttccactctaggccacgatgccgcagtacctattagaaaaatgctacaaactttccattaaaaatatatattttctccttcatttgtcataataaacagaatataattttctttctaaaattaagtcataccgtttctttataggatgataatatgtacctcggccgcgaccacgctaagggcgaattccagc

SEQ ID NO: 17701 - DNA, 139 bp, Homo sapiens
ccctctagatgcatgctcgagcggccgccagtgtgatggatatctgcaggattcggccctagcggccgcccgggcaggtactttttttttttttttttttttttttttttctttctttttttttttttttttttttttt

SEQ ID NO: 17702 - DNA, 374 bp, Homo sapiens
gctgaattgggcccctctagaatgcatgctcgacggccgccagtgtgatggatatctgcagaattcgccctttcgagcggccgcccgggcaggtactctacttcgtgtgcaagagataactatgaaagccaaattcaaatactggcaacatttcctaaaggggctcaatatctatcattcgtcttcttttccaaactacacatcactgtatgactcaaccagtagcagttatattgccccttggtttttattcagtttaactactgtttccaagataaatgagctaaaaaaaaaaaaaaaaaaaaaaaaaaattcccttggcccccccccccccttgggggaaattccccccccctgggggggccttttttagg

SEQ ID NO: 17703 - DNA, 539 bp, Homo sapiens
atctggcgactggggccctctagatgcatgctcgagcggccgccagtgtgatggatatctgcagaattcgcccttagcgtggtcgcggccgaggtacatccctactcaaaattatatcacaaattcagctgggagcttcttttaccctgtgacccctccctgagctcattggctaactttcttgagggctcctgtgagatatagtcaggaatggctttccttggttcatactagagactcagaatacctgcaaggcacttcctgcgactgcttctacttttattttcacgaggctccctaaatttgttccagctcttggtagcattaaggccttctcctgtggcctggattttcagattccttagtggggatatgtgctcaaaggtagaatctccccgtctcatactctgggaacttttattttttttcctatctcatggagtaggctgcagcctatcacttccttcaaaaggtctgtggatttttccagttttcccagtgggagaggcatgctaacactgcctcctatctgctatctt

SEQ ID NO: 17704 - DNA, 728 bp, Homo sapiens
  misc_feature 255, 256: n = A,T,C or G
tatatggcgaatggggccctctagatgcatgctcgagcggccgccagtgtgatggatatctgcagaattcgcccttagcgtggtcgcggccgaggtactatactcagtatttaaatatgtcccagtatagaagcataacttcaattaatttgctgacactaacttcttaaaaacttacaaatattcaaaacaaagggaaaaaattttagatagccaagatttaaaaagccatcgccttgaacatggagcctcctnncaaaagaggagatatacttgtatactcattatattttatttagtagccatgtaaggaaacacacactcacttatcccaaatatttttctacttttaatggacatccacttgaaaacaaatcttaattttaatgtcaatttagtttcaaatacttttccagctgcctagtatattccaattaaatgctattattatatctgttttaaaactgggaattaaaggttagaaatactttgcagagtggtatccaaatcatttgagaggccaacattaaaatttgactttaatgtcttattaatatatcaacaggcaattgttccgacttttgaggaacactaacactgcttccaaaagcacccctgcttttctttcttcatcccactaatattgtcttagatgttgtcaaccaagaaacatttatggtaaggagagcttgctgcataaaactgtattgataatatattcttatgtc

SEQ ID NO: 17705 - DNA, 620 bp, Homo sapiens
actatagggcgaattgggccctctagatgcatgctcgagcggccgccagtgtgatggatatctgcagaattcgccctttcgagcggccgcccgggcaggtacttaagagagaggttccactgctcttaagaaattgaatcttttcagcagactcctcttctatttccataacaggctgagaagtcttctttgttttcaaatagctcacatttgttccaagaagtccatccccgcgtacctcggccgcgaccacgctaagggcgaattccagcacactggcggccgttactagtggatccgagctcggtaccaagcttggcgtaatcatggtcatagctgtttcctgtgtgaaattgttatccgctcacaattccacacaacatacgagccggaagcataaagtgtaaagcctggggtgcctaatgagtgagctaactcacattaattgcgttgcgctcactgcccgctttccagtcgggaaacctgtcgtgccagctgcattaatgaatcggccaacgcgcggggagaggcggtttgcgtattgggcgctcttccgcttcctcgctcactgactcgctgcgctcggtcgttcggctgcggggagcggtatcagctcactc

SEQ ID NO: 17706 - DNA, 600 bp, Homo sapiens
taatacaactcactatagggcgaatggggccctctagatgcatgctcgagcggccgccagtgtgatggatatctgcagaattcgcccttagcgtggtcgcggccgaggtacagtggcatgatctcagctcactgcaacctctgcctcccgggttcaattctcctgcctcagcctcctgagtagctgggattacaggcatgcgccaccatgcccagctaatttttttgtattttcagtaaagatggggtttctctatattggccaggctggtctcaaactcctgaccttgtgatcctcctgcctcggcctctcaaagtgctgggattacaggcatgagccaccactcccggcctaaaaaagaaaagattttcaacccattcgtaatatagcaggattttttttaattccagtgtatagaagtctaattaagaagagcaaatttattaatatttctagttaaatttatatattttagtctaagagaaaatattaaagcgttgaataaataaatgtataaaaacaaaaaaatcacatattttgtttggttatttatgattcatttattcaacaaatacctaccatgtgcctgcagttcattca

SEQ ID NO: 17707 - DNA, 586 bp, Homo sapiens
cactatagggcgaattgggccctctagatgcatgctcgagcggccgccagtgtgatggatatctgcagaattcgccctttcgagcggccgcccgggcaggcacttttttttttttttttttttttccacttaactatattttcttacttatctgcattaaactaccaaaaacaaatcaaaaaaggattctggatctaattcttcctaatggctctagttagtcggaaaagttgtattattactgtttctgaaaggtaaaaccttcaccataaaacaaaattagatggattagaagagtaaatgtgaggctgggcgtggtggctcacatctgtaatgtgcttcaaaaacagtaccttgagaatcaaaagcagagtaggatgtgttcactgcttccagtgactatggacagcacaccgatgataaaaaactaacctccacgaggcaatgagctgagaatagagcgttctcaagacaactctagcaaggtacctcggccgcgaccacgctaagggcgaattccagcacactggcggccgttactagtggatccgagctcggtaccaagcttggcgtaatcatggtcata

SEQ ID NO: 17708 - DNA, 364 bp, Homo sapiens
  misc_feature 164: n = A,T,C or G
tgcatgctcgagcggccgccagtgtgatgtcctgtctgcggaattagacctttcgagcggccgcccgggcaggtacttatttaaaagatttttaaagattggcctgttagaaaaagcataatgtgagctttggattactggatttttttttttttttaaacacnacctggagaggacattttttttcacttttttttccctcgaaccctgatgtggttccattatgtaaatatttcaaatattaaaaatgtatatattcaaaaaaaaaaaaaaaaaaaaaagttcattgtatactgcagtgtcgtctacatggtattggacaggacataatgtaaaacataaaagtgcaattgttacacttaca

SEQ ID NO: 17709 - DNA, 609 bp, Homo sapiens
gaatacgactcactattggctatagggcgaattgggccctctagatgcatgctcgagcggccgccagtgtgatggatatctgcagaattcgccctttcgagcggccgcccgggcaggtacacacacgtgcacatcaacactaggcttcctacgtctgtttgctgaaaagatctagaaataataaccaacctagtggaattgatcttccctggtttccagattgtcatcttgatacaacattttccacaaaagaagccagggtttttggagaaagactgattgtatgtccaatgcaaggattttaaaagatgagcctggtggtgcatcctggaaacctaaccagatagtaagaaaactgacactactttatgtcggaagtattgaggaaccaatatgaagaggcttccagtggccaaagatgtgacagttagagcatcagtgtggataataacaggaatggattgaaatgcatcgaatatgcttgtctctctgagtccataatactaaaaaattaattggtcacctttgaaggataaatagaagcccatatcattgttttgaaaaattgtaaatagaagatatgagcatttatcctgccttttccatgta

SEQ ID NO: 17710 - DNA, 288 bp, Homo sapiens
tatagggcgaattgggccctctagatgcatgctcgagcggccgccagtgtgatggatatctgcagaattcgccctttcgagcggccgcccgggcaggtaccactgtctgttttcaggggttaaatttggagaatatctttagagcctcaatctggctattttggaagattattttgaaaataatttcaaggaaaatactagatgtcttttagataaggcttttcaatttgaactcggtatacatgtaaattgctttttcttcatctagatgaatttaaaggccactct

SEQ ID NO: 17711 - DNA, 510 bp, Homo sapiens
  misc_feature 287: n = A,T,C or G
tcactatatggcgaatggggccctctagatgcatgctcgagcggccgccagtgtgatggatatctgcagaattcgcccttagcgtggtcgcggccgaggtacttttttttttttttttttttttggggctttttttttttttttttttttttttaaaaaaggaaaacacttttttacccaaaaaaaaaaaaaggcccccccccaaaaaaaaaaatgttgccccacaaaaaaaaaaaggggcccccttaaaaaaaacttttaccccccgggaaacacccgggcccccnaattaaatccccaaaaaaatgggggggccccccccccttttttccccccccatttttttttcaaaaaaaaaggagtttttttccccccccccccccaaaaaaaaaaaccgggagaaaggcgcccccccccccccttttaaaaaatttttttttaaaaaaggggggcccccctttttccccggggggggggttaaaaggggggaaatacccccccggggggggg

SEQ ID NO: 17712 - DNA, 486 bp, Homo sapiens
tatatggcgaattgggccctctagatgcatgctcgagcggccgccagtgtgatggatatctgcagaattcgccctttcgagcggccgcccgggcaggtacgcggggaagagttcaaagagatgtgagaattagaaatgctgctgttggagggaagattactgctgtcaaagggaacagtcaagtcagtgcaaaggccctaaggtaggagtgtgcctatcatgtttgaggagcagcaaggagaccaaagtgcctgtagcaaggtgagcaaggagcccgcacataaagggtcactctgcctgctgtgttaaaaataaacagcagggatggccgggtgcagtggctcacacctgtaatcctggcactttgggaggccaaggtgggtagattgcttgaggccaagagttcaagaccatcctgggcaacatggtgaaaccccatctctacaaaaaacacaaaaattagccgggcgtggtggcgtgcaccca

SEQ ID NO: 17713 - DNA, 677 bp, Homo sapiens
gactcactatagggcgaattgggccctctagatgcatgctcgagcggccgccagtgtgatggatatctgcagaattcgcccttagcggccgcccgggcaggtacttcattattattttttcaatttttttcttatttttttaaaggtagacttcagaatcatttaatcaaattccaaaaacaaggcagtttcatgggaactatataaagacagagagaaagagaaagaaatatatatatacacatatatatattctttccataatgaacatgaaatttatcaaaggctcacgtatgattcatgaaaaaaaaaaaagaaaaagaaatttccatttcctcagactttaaaaatatttctcagtaacagtttactccatatacccaactaaggttattcccccggtacctcggccgcgaccacgctaagggcgaattccagcacactggcggccgttactagtggatccgagctcggtaccaagcttggcgtaatcatggtcatagctgtttcctgtgtgaaattgttatccgctcacaattccacacaacatacgagccggaagcataaagtgtaaagcctggggtgcctaatgagtgagctaactcacattaattgcgttgcgctcactgcccgctttccagtcgggaaacctgtcgtgccagctgcattaatgaatc

SEQ ID NO: 17714 - DNA, 602 bp, Homo sapiens
atacgactcactatagggcgaattgggccctctagatgcatgctcgagcggccgccagtgtgatggatatctgcagaattcgccctttcgagcggccgcccgggcaggtacatattgtccttttacttccaggtgcagggctcccatttcttgtaggaccagtctttatgtatgaatgataagttttctgggtatagtatccctggctggcaatatttttctttcagtgctttgaatatatcatcccatgttctcttggcttttaaggttactggtgagaaaccctctgttagtcgaatgggggttccgttataggtgactagacattttttcttgctgcttttagaattctctctgtctttgactttttagaatttaactataatgtcttatggagaatactttttggaattgtgcctgtttgggtatctctgaacttcctgtaactggatttctaaatctcttgctagacttaagaagttttcagctattattttgttaaatagcatttctatcccttttttaaccttgtgggatccagaaaattcaaacatttatttgctttatgatgtcccatatgtcaaattagcttttaaaacaaa

SEQ ID NO: 17715 - DNA, 368 bp, Homo sapiens
  misc_feature 109, 110: n = A,T,C or G
actcactatagggcgaattgtgccctctagatgcatgctcgagcggccgccagtgtgatggatatctgcagaattcgccctttcgagcggccgcccgggcaggtacttnnttttttttttttttgtttttttgccgggaaagtcgatcttctccgtttctctggcattggctttatttcaagaatttctagtctggcccagtcattgtctttaaaaggagcaagtgaccaaaagaacaaattgctcaatgactaaattttcctgctaaaatcttaacgtatatcactaccaagaaccaaaaccgagttgctgatagaattgttaaataagggtagccaccatcttctcacctggccatttcaaatcac

SEQ ID NO: 17716 - DNA, 716 bp, Homo sapiens
gactactatagggcgaattgggccctctagatgcatgctcgagcggccgccagtgtgatggatatctgcagaattcgcccttagcgtggtcgcggccgaggtacatagtgtcgcgaactcaaatcggcatttagatagatccagtggtttaaacggcacgtttttgcttataaaaaaagtgcaaaaaagatgtggtttacaagttaaagctacagaatccctttttgctgtaattgcaccagttttaaagcctctggacagagcagtatttcgtttaaaactttgtttttcttaaaagcttacagtgtttggctaattctcctcccctttttacaagacgggggccggagggtggacactggtggcaggttaagggatactgtcactttaagaagcctgcagattgaagtgtaaacatggggaaattaggggctgattttttaaactgtgtgagatattaaccagccgccctgttataaaatcaggaaatccaaacagcgatttacaccgattaacaccccctttatatattttttacaaaaatacactgagaaaataatcaaacgttttcatctctcttgtctttttttgttttttaaaagtgtcaaaagtctacatttaaatataaaaaattaaagttaaaactctagcccttcagtgaaagagacgtaaaatggcgtgggtaacaacaactaccaaaaaaaaaagaaaaaaaa

SEQ ID NO: 17717 - DNA, 664 bp, Homo sapiens
tacgactcacttagggcgaattgggccctctagatgcatgctcgagcggccgccagtgtgatggatatctgcagaattcgcccttagcgtggtcgcggccgaggtacattttaatgaaagagttttaaaataggtaagtcttctaaaaacaataattactaagtccattttacaaatgttggtgggataaatgggtgggtcagattttcttaaaatcagaaacagactgctaaataacctactgaatacatctaggaaaactttttttttttttttttttgggacggagtctcgctctttcgcccaggcaaaaacattttaaactttatggaagatatacttatcttcagaagtataaaaaacacattgataaaaattgttaggctgacataaaaatattcattaaaaagcttgtatgcaaaatttaatcatataataacttgaaacttttaaaatgggatcacttgttatctccacatgttctcttctcaccaatttctcacaaaatctaaaacacagatgttagaactgtaaacattattaacctagagactaatttcctaaaataattacattttgcagaatatagagtgaatagttgtttctttctcacaaaaactggattgtgtaatcctaatatgaaatcacccaaatctcatgaaaa

SEQ ID NO: 17718 - DNA, 588 bp, Homo sapiens
ctatagggcgaattgggccctctagatgcatgctcgagcggccgccagtgtgatggatatctgcagaattcgcccttagcggccgcccgggcaggtacaaattagccattcatgcaacaggcagtgttcaaagaggcttcaagttcaagggagctcagagttccattttccaccgaaaagctttaaacagactgaatattagtggacatttttgaataattttaaaacataattttacacccgatcttagccagaaggttgagaagtgataacaaaagtgtcagtattctggagagatattcctcagttgttatcacttaccacagtaactaacatcgatgttggacatgctgtttttataacaacattctttttttatattattctttaattttataagacttcataggacacaggcaatacaaatctgctatgttattcctttttgtctctccttgtaatttacaacctgaaaatgttgactgtacctcggccgcgaccacgctaagggcgaattccagcacactggcggccgttactagtggatccgagctcggtaccaagcttggcgtaatcatggtcatagct

SEQ ID NO: 17719 - DNA, 585 bp, Homo sapiens
tcactatagggcgaatggggccctctagatgcatgctcgagcggccgccagtgtgatggatatctgcagaattcgcccttcgagcggccgcccgggcaggtaccgggatgagatttaagaaggagtgaagagaaagtggcagaaagactatttgaagatatgatggccagaattttcttaaatgttatgaaaaacattgatctgcctaagaaacttgaagtccatgtggtataatttaaagagatgcatatttcaacacatagtagttgaactgttgaaagacaaagaaaaaaaatgtgaagacagcaagagaagagccactcatcacacaaaagtctcctcaaaaagatggctgacttcttatcaaaagcagggaggccagaagaaagtgggatgatatattcagtacatactatacagtaacactgctgttggccctggagataaaacagtcacaggtcagcccttgctcccatagggcttacactccagtggggacacccacaaagcatgaaaataaaagcagtaaaaataaaacagggcattatgttacagaggggtgggggaaaaggctctactatgttg

SEQ ID NO: 17720 - DNA, 522 bp, Homo sapiens
ctggggccctctagatgcatgctcgagcggccgccagtgtgatggatatctgcagaattcgccctttcgagcggccgcccgggcaggtacgatagctatccctacagaagataatgtgtaactttttataggaaaagtgtggttttactatttttgccttatcattccaaataagaactagtctgttaatgatcatattgtatgtagagaaaaattttcattgactcccattgtggaattccctagcaatttatttagacttaattttttaaattcaagcttactgtattagtcatttttagcccataattaaaacatgatcacttttacacaggtgtagtatggtgcatttcattccttatttataaattaactgaaattacagtttgctataatataaaatgacaatagtctcttgagtggtaagttggttatttttttagaggtgatccaggaatctttagtttgaaggcagttaccttttttttttttttttttaaaaaaaaagggggggggggtttt

SEQ ID NO: 17721 - DNA, 519 bp, Homo sapiens
taatacgactcactatagggcgaattgggccctctagatgcatgctcgagcggccgccagtgtgatggatatctgcagaattcgccctttcgagcggccgcccgggcaggtacgcggggaataaatatttatcttttgtattgctaaaaaaaaaaaaaaaaaaaagttccttggggcggcccccccctaggggcaatttccatcccctgggggggcggtattaaggcaaccccctatgaatcacctccgggtccgataaaggcaccttccacccttactacacaatcaaagacgccctcggcttacttctcttccttctctccttaatgacattaacactattctcaccagacctcctaggcgacccagacaattataccctagccaaccccttaaacacccctccccacatcaagcccgaatgatatttcctattcgcctacacaattctccgatccgtccctaacaaactaggaaggcgtcttgccctattactatccatcctcatcctaacaataa

SEQ ID NO: 17722 - DNA, 512 bp, Homo sapiens
agggcgaattgggccctctagatgcatgctcgagcggccgccagtgtgatggatatctgcagaattcgccctttcgagcggccgcccgggcaggtacacaataaaacacaaatccagccccaggatcataaatttatgactcctaatctaagatcacagcttacttctttttatttaattaggaaaaggaatggattatattaggatgaaggtcaccatatacccagctctcctataaattacttagcatggtatatatgctaaacattagcaacctttacttattatcttgtttataaaactacattttgaccatgagattttttttatggcctaaaaagttttttttaatatgctaaacattagcaacctttacttatgatcttgtttataaaactgcattttgaccatgagaatttttttttaatagcatgacaagtttttttttttttttttttgggagtggatatgtgtcaataaatttttattggagtatattatgttagcgattg

SEQ ID NO: 17723 - DNA, 513 bp, Homo sapiens
ccctctagatgcatgctcgagcggccgccagtgtgatggatatctgcagaattcgcccttagcgtggtcgcggccgaggtacctaccaagtagaaggcactatgccagcactgcatagctttccttgaagaagagcaattactgcccttcaggagtgtataatctagtaggagaaataaaatatttacatgagttttacatgtaggaaactgaatgaaaagaaaacatttaaagttgatgatatgttatcaaaagtagagaaaatgaaaggagagcaagaatctcatagcttgtcagctcatttgcagcttacatttttggtttcttccacaaaaatgataagccatcaccaaactcagaaaatgaacaaaattctgttaccctggaagtcctgcttgtgaaagtttgccaaaaaaaaaaaaaaaaaaaagtacctgcccgggcggccgctaagggcgaattccagcacactggcggccgttactagtggatccgagctcggtaccaagcttg

SEQ ID NO: 17724 - DNA, 461 bp, Homo sapiens
  misc_feature 195, 243, 244, 245, 397, 398, 399: n = A,T,C or G
ggccctctaaagcagctcgagcgccgccatgtgaggatactgcagaatcgccctaagcgtggtcgcggccgaggtacttttttttttattaaaaaaccccttaaaaaaaaaaataaaaattttttttaaaataataaaaaattttaaaaaaattaaaaaaaaaaaaaaaaatataaaaataatttattttttttnaaaaaaaaaaaaaaaaaaaaaaaaaaaaaaaaaaaattattttttttnnnaaaaaaaaaaaaaaaaaaaaaaaaaaaaaaaaaaaatttaaaaaaaaaaaaaaaaaaaaaaaaaaaaaaaaaaaaaaaaaaaaaaaaaattttttaaaaaaaaaaaaaaaaattttttttttttatttttttaaataaaaaaaaaaaaattnnntttttttttttttttttttttttttttttaaaaaaaaaaaaaaaaaaaaaattttttttttt

SEQ ID NO: 17725 - DNA, 610 bp, Homo sapiens
ctatagggcgaattgggccctctagatgcatgctcgagcggccgccagtgtgatggatatctgcagaattcgccctttcgagcggccgcccgggcaggtacaaatttaattacatcatcttactgaacactactgactttactgaatctattccttgatttgatgttacctttcatacaaatcacagtagaaaaacgtatgaatttttttcaatacagccaagatgctggcttctcacctgtgaatatagttttcacgattggtaggtagatcataatttataaccaaagacacttgttgcacatcaatcccgcgagccaacaagtcagtagtgatcagaacacgacttgaccctgaccggaattccctcatgataacatctctctccttctggtccatgtcaccatgctgcaaattaataaaccttaattcaagaatcaccagtcaggtcggtatttaattttaatcaacatgtatgagaccaagcgtccctggctgctacaggagaatagcagacaggtatagttaagaaacaactttattttaagcagggggaacgacaacacaacacttagcagctatattgtagtctgaatcctgctttagtgga

SEQ ID NO: 17726 - DNA, 533 bp, Homo sapiens
tacgactcactatagggcgaattgggccctctagatgcatgctcgagcggccgccagtgtgatggatatctgcagaattcgcccttagcgtggtcgcggccgaggtacttttttttttttttttttttttttctaatttgttgcctcttggtgagaagaagctgtttctcctattatcttgacctttctaaagtcaaacctctttctaaacttatcaaatcatcctttgctggcattacattttccaggtatagatccttcaccttccttttgctttgtcacagaatgacttttttctcaaatcatagtagagtctctaagtatgcctttcctatagcaatactacacctacataaaagctgaacttacaatatgagattaaaagatattgcacaaaatgtgcaaggttcttgtacctgcccgggcggccgctcgaaagggcgaattccagcacactggcggccgttactagtggatccgagcttcggaccaagcttggcgtaatcatggtcatagctgtttcctgtgtgaaa

SEQ ID NO: 17727 - DNA, 451 bp, Homo sapiens
actactatagggcgaattgggccctctagatgcatgctcgagcggccgccagtgtgatggatatctgcagaattcgccctttcgagcggccgcccgggcaggtacatttcatatgtatatatggggtgggagcataattgccattcccatgtgtctcaaggaagcttaatgaggaaactaatgagttaatattaactcttctgaagaaagctgacattttaggagtattaagtcatctgtcgttaatgagcagcaagaatatattatgattgtatcacatgttccagaagagcattaccccttacatagaaagctccttggagatttcatgatgttggatgaacatcagtttatccttatacatccctatgagctataattatcctcatttgatacttgaggaaactgaagtgacttgctccaaagtgactacaaaaacattgcagtttga

SEQ ID NO: 17728 - DNA, 222 bp, Homo sapiens
gactcactatagggcgaattgggccctctagatgcatgctcgagcggccgccagtgtgatggatatctgcagaattcgcccttagcgtggtcgcggccgaggtactttttttttgttttgattttttttaaactaaagctatataaagcttgtggattaaacagaataaatttctaaatttaaaaaaaaaaacgtacctgcccgggcggccgctcgaaaggg

SEQ ID NO: 17729 - DNA, 650 bp, Homo sapiens
gggcgaatggggccctctagatgcatgctcgagcggccgccagtgtgatggatatctgcagaattcgccctttcgagcggccgcccgggcaggactggcataaaaacagacacatagaccaatggaacagaatagagagtctagaaataaacccacacatatgcaataaactaatctttgataaggacaccaagaatacacaaaggggaaaagaatggtctcttcaataaatagtattgggaaagttggatatccacatgcaaaagaacgcatttggactctcatcttatgccatatataataatgaactcaaaatggattaaagacctgaaaccataaagctcctagaagaaaacatagggaaaaacctccttgtcattggtcaatgattttttggatatgaaaccaaaaacctatgcaactaaagcaaaaataagtttaaaaataagcaaaaaataagtttaaaataagcttaaaataagcaaaaataagtttaaaataagcaaaaaataagcaaaaataagtttaataaactaaaaaccttctgtacctcggccgcgaccacgctaagggcgaattccagcacactggcggccgttactagtggatccgagctcggtaccaagcttggcgtaatcatggtcatagct

SEQ ID NO: 17730 - DNA, 522 bp, Homo sapiens
atagggcgaattgggccctctagatgcatgctcgagcggccgccagtgtgatggatatctgcagaattcgcccttagcggccgcctgggcaggtactatttcagaaagtccctagattctcagatgcactggcaagcaccatacactgaagaattcacggaagattttagtcacttgctcactcatccacttgaagtaagaaaaatcagtcactgcatgtttattgttctataataaagcaaatgttagaaataaaagttagaaatgtcaaacacactaaattgttacataataaactaatcaagacacaacttttattcaggacatggatatttctgaaatgaaaacaaaagaagagaattgacttaaaatgtttataaatacgaatattatgacagaaccaaagctatttatgagcattatttttaaaagcttgtttaagtattatgcacttgtctgtgtgacattttgtaaagcggagaaaaattaaggagaaaggaattgtagaacactaacaggaag

SEQ ID NO: 17731 - DNA, 629 bp, Homo sapiens
ctatagggagtcgacccacgcgtccgcaaagatttcagcaacaaccatggcaaccttcgtggagctcagtaccaaagccaagatgcccattgtgggtctgggcacctggaagtctacgccaaaccaagtcaaggaagctgtgaaggcagccattgatgctgggtatcgccatattgactgtgcgtatgcatattgcaacgagaatgaggtgggggaagccatccaagagaagatcaaagagaaggctgtgaggcgggaggacctcttcattgtcagcaagttgtggcccacctgctttgagaaaaaactgctaaaggaagcctttcagaagaccctcacggatctcaagctggactacttggacctctatcttatccactggcctcagggatttcaggcagggaaggagttattccccaaagatgaacaaggcaacgtcctccccagtaaaacaacattcctggaagcctgggagggcatggaggaactggtggaccaggggctggtgaaagctctgggcgtctccaacttcaaccacttccagatccaaaggctcctgctagactagtctaaagaaaaaaccttccacaaccttcccctgaacctgaaacataaaatgaatgcaattg

SEQ ID NO: 17732 - DNA, 416 bp, Homo sapiens
ctatagggcgaattgggccctctagatgcatgctcgagcggccgccagtgtgatggatatctgcagaattcgccctttcgagcggccgcccgggcaggtactaaatttttgcctacaatttaccttgttaaatattgtagataaattgctaatactaatagccaaatagataacactaatgctttgtttaaaaaaacgaaaaaaacaaaacaaaacaaaaaaacatgagcagtggtgttctaatgaagttatgacatctgtcctaattagtttcttaaatacatttactacttaatggttttgaagcaactgtttaatttttaaaatttttgaaaacttgctaataaccttttgttcagaatttagtagattgtttaatgcaggacatcaactacataatgaaagatgcttgaaat

SEQ ID NO: 17733 - DNA, 233 bp, Homo sapiens
acgactcactatagggcgaattgggccctctagatgcatgctcgagcggccgccagtgtgatggatatctgcagaattcgcccttagcgtggtcgcggccgaggtacgcgggttcagtattcactaatgaaattaattgaggcctagaattaccatttcctatttcattcagccatcctattcataagtaaaataatgtttaaaaatgacctctgtgtgtgtgagtgtgtgtg

SEQ ID NO: 17734 - DNA, 355 bp, Homo sapiens
ttgggccctctagatgcatgctcgagcggccgccagtgtgatggatatctgcagaattcgcccttagcgtggtcgcggccgaggtactttttttttttttttttttttttttttttccacaaaaaagactactatctaactcttactatcctttcataaaagacattttaataccaaaaaactgcagaggacataatctcataataaaggagaagtgatataaatgaacaaatttagcttcatgtaagactctacaatagtcttcattttcacactttcctcagggccagtgcaaacggcattgagaaggatttaggaacctctgacctagattgtaagtattttgcaggcagag

SEQ ID NO: 17735 - DNA, 478 bp, Homo sapiens
gactactatagggcgaattgggccctctagatgcatgctcgagcggccgccagtgtgatggatatctgcagaattcgccctttcgagcggccgcccgggcaggtactggccagtgtcattttattttttccctcctgacaaatattttagaagctaatgtaggactgtataggtagatccagatccagactgtaagatgttgttttaggggctaaaggggagaaactgaaagtgttttactctttttctaaagtgttggtctttctaatgtagctatttttcttgttgcatcttttctacttcagtacttggcctggcccgattttcacctttcctttacacctcaagaacagcagataggtatgcataaccacagcagaacacaccctccacctctctgactgctgacaatggctacaggaataaggctttgggtatcatctagcaaaatgccacagagcatggacggactgagttt

SEQ ID NO: 17736 - DNA, 463 bp, Homo sapiens
atagggcgaattgggccctctagatgcatgctcgagcggccgccagtgtgatggatatctgcagaattcgcccttagcgtggtcgcggccgaggtacagcctgcagaactgtggaccaatcaaacctcttttcttataaattacctggtcttggggatttctttatttaatgtgagaacgcatgcccttttggatctactgtttctacttttataaatttatcctgcagaaatacacaaatacacaaagatacatgtaaaaaaagtagtttactgcagtacatagtaggtgtatataacaatgggatacatgaaatgttacaagatagtatttgtattttcccttttaaactttgtgtctgttacttgttaaatttttacaaaagtaaaactaacagaataatgctggcccaacactttgagatgataacaagtccatataagacagacaaaattgaacttaa

SEQ ID NO: 17737 - DNA, 585 bp, Homo sapiens
ctcactatagggcgaattgggccctctagatgcatgctcgagcggccgccagtgtgatggatatctgcagaattcgccctttcgagcggccgcccgggcaggtacagatctttaattgttgatcattttattttgctgtggcacagaaatctaagattttggatttaaaaaaaaactttataagggggaaaaggaaaaagttgctctggaataataattagcttttagaagcatttaagatctttaggagacattataacaactaaataggagctctggttcaaattttataggattcttatataaaacttatattgagttttctgttgtaaaaacagccctgtgtttctctgccattatttgggcttacaaccataattaaaggccaaggctatgccccagattccatgttagccatcttttattttaaaaataccccaaatggggcaaattcatactgggactgagacaatgtacctcggccgcgaccacgctaagggcgaattccagcacactggcggccgttactagtggatccgagctcggtaccaagcttggcgtaatcatggtcatagctgtttcctg

SEQ ID NO: 17738 - DNA, 549 bp, Homo sapiens
agactcaagctggcgacgaagggacctcgcgtcgccgcgccgggtctcgagcagctgccagagccgccggacagaccgccgcccccgccgcgtcatggccgagagtgactgggacaccgtgacggtgctgcgcaagaagggccccacggccgcacaggccaagtctaagcaggccatcttagcagctcagcgacgaggagaagatgtggagacatccaaaaaatgggctgctggccagaacaagcagcattccatcactaaaaacacagccaagctagaccgggagacagaggagctgcaccacgacagggtgaccctggaggtgggcaaagtgatccagcggggccggcagagcaaaggcctgacgcagaaggacctggccacgaaaatcaatgaaaagccgcaagtcatcgcagactatgaaagtggacgggccattccgaataaccaggttttgggcaaaattgagagagccatcggcctcaagctccgggggaaggacatcgggaagcctatcgagaaggggccgaaggcgaaatgaacacaaag

SEQ ID NO: 17739 - DNA, 430 bp, Homo sapiens
acgactcactatagggcgaattgggtcatctagatgcatgctcgagcggccgccagtgtgatggatatctgcagaattcgcccttagcgtggtcgcggccgaggtacattgtatactgcagtgccgactacatggcattggacaggacataatgtaaaacataaaagtgcaattgttacacttacatatgatagtgaatggcaacgtgaccaatttttgtctcaagttaaaataccaaaaactattacagtgtctactggatttatgtctatatgacaaatcttgatactggatccacaacattattggcgtgctttttggttcacttttgtgtgcttttgtgtggctgcctattcaatacgtccgatgattttgtttgggtttgcatacagattcttaatactattggtattactattggggataacag

SEQ ID NO: 17740 - DNA, 604 bp, Homo sapiens
ctatatggcgaatggggccctctagatgcatgctcgagcggccgccagtgtgatggatatctgcagaattcgccctttcgagcggccgcccgggcaggtacagccttttaaatacccaggaatatgccagagctttccaaagttccctatagttggctagttctccagactttccttttaaattcctggccagattcttcctttgcctcaactgaaatcacagccttaggcaattgacattttgccaacagtttgctattgtttcagtaatgccctgggggtaagctttttcttcccccaactgagctgagttcagagtcaaatcaaatatccagccactctctctgaaaagagttttcccagggagctgcaagttgggacaaaatattaactgtgctctggggatagtgccttcaatggggctccagaagtggtcagctctctccattgtctgcaatactgccagcttttagctacaccactaagctggagagagagatgagaataaccccaagttaaaatatcgcagaccccactggtcttcccaagattcactagttttctcttggacagatgattttcaattcatactcctgcttaattg

SEQ ID NO: 17741 - DNA, 348 bp, Homo sapiens
ctctagatgcatgctcgagcggccgccagtgtgatggatatctgcagaattcgcccttccgagcggccgcccgggcaggtccgtgcctgtaatcctgcctcagccccccaagtagctgggattacaggcacctgccaccatgcccggctaatttttgtaatttagtagagacagggtttcaccatgttgcccaggctggtttcgaactcctgacctcaggtgatccacccgcctcggcctcccaaagtgctgggattacaggcttgagcccccgcgcccaaacatcaaaatgctttttatttctgcatatgttgaatactttttacacattaaaaaaatgatctgttt

SEQ ID NO: 17742 - DNA, 264 bp, Homo sapiens
tatagggcgaattgggccctctagatgcatgctcgagcggccgccagtgtgatggatatctgcagaattcgccctttcgagcggccgcccgggcaggtactttttttttttttttttcctttttaaagttttataaaaactatttctcgttctttaagtaaagaacactatacaaagaaaatatttttgtgaaataccccagagacatggtttttttttccccctggaaagatttgtccatcctaaggaaatggtggggggtgg

SEQ ID NO: 17743 - DNA, 388 bp, Homo sapiens
atagggcgaattgggccctctagatgcatgctcgagcggccgccagtgtgatggatatctgcagaattcgcccttgagcggccgcccgggcaggtactttttttttttttttttttttttttttagatataataaaatattaataaagacatttatatttttatatataataaaatgattagtttaccaacaatcaaaataaaaagatcccaaagccacagataaggatagcctacagtggtctttatgttcctttgtataattccttttttttcagagtccagtcttggatgtaatccaattgcgataagaagtcactcgagtatagacacctggcttattctttttaccacatccatcaccccagcttactattccaacaagatgc

SEQ ID NO: 17744 - DNA, 305 bp, Homo sapiens
ctatagggcgaattgggccctctagatgcatgctcgagcggccgccagtgtgatggatatctgcagaattcgcccttagcgtggtcgcggccgaggtacaaaacaatataacaacaaaaagaatttaataatttttttttttttttttaaaaacaggatgttgctttgtcccccaggttggaccccggggatgtgatcatggctcactggaacctcaacccctggggcccaaaggatcctcctaccaaagcctcccaagtagctgggcctacaaatgcttgccaccaatgtaaacccattttttt

SEQ ID NO: 17745 - DNA, 605 bp, Homo sapiens
ggggccctctagatgcatgctcgagcggccgccagtgtgatggatatctgcagaattcgcccttagcgtggtcgcggccgaggtactcactgacctacctcattttcctctagattccataccacttataactggtaacactatatcctcaaatgtatacataaagcaattccaccttatttcccatcaacttctagttatactgaaaaccatggaactgtatacagttgtgcatcgccaccaagccaaaactaagatcttcacgttaccttctgagaagtcagaagaggagtaacagccacatcaccaaagagaacaattttagccagcataaggaagtcccctttgctttaacctttacaagaaaaataactttgtaaagatcaattgctttttgatttttgtttctgctttcctcagcctttttccatctataaaactagcctcttctattttatagaaggaagtgttgcctgattcttgaatggcaaatgaaagtcaattaagatctttaaactaaatttgtagtaattttgtctttgacagccacaacctacaattcttgccttaatctcttttatctcctcaaagacaaactaattctt

SEQ ID NO: 17746 - DNA, 538 bp, Homo sapiens
gccctctagatgcatgctctagcggccgccagtgtgatggatatctgcagaattcgcccttagcgtggtcgcggccgaggtacaggtatgtggctgcacgggggtgggagggcttgtgggagaagggctgctctgctctagcctttcttggaaaagccaaatctccaagtagaatgggaactatctgggacatctagacagaatagtttaagccctaactccctttcttgatactttagtataattacttctggtcctgcacagggcctgttctcttccagctccagacctggatctctttccaggctgacagtggtggaaagtgaggtggcagtgcaagaagggcctagagatcggctacaaagggaaagaagagatgacaagaaaggccgaggaaggatgcccaaaaacttgattcaaggttcaaagatggtggccaggccacccccatcattgtccaacacctccgtgtccaacaatggctttgtttttttgaaaagggagggaagaatcttaatgtgaacttcttttcggaact

SEQ ID NO: 17747 - DNA, 373 bp, Homo sapiens
tatacgactcactatagggcgaattgggccctctagatgcatgctcgagcggccgccagtgtgatggatatctgcagaattcgccctttgcggccgcccgggcaggtactgttcataaccccattttacaaagaaaaaactgaattttagggagtttaattgctgaaccaaggccacagaattggtgagttgcaggtaaaatttgaacccatttctgcagatgtcaagttgtgtttttttgtctttccatcatgctactgacacccaaaccaaatgaaactggcagcccggattctttcagagagatgttgtaaaagagttcccccaacaacctcacctgttaaacccccaaattaagtctgaagagcaaagc

SEQ ID NO: 17748 - DNA, 465 bp, Homo sapiens
ggcaggtactttttttttttttttttttttttttaatttttttttttttttttttttttttttttttttgttttggtttttttaaaaaaggggaaattttttttaccccaaattttgggggggggagggggggaaaaaaaaagaggaaaaaattttttgggaaaaacaccgggaaaaatttttttataaaaaaaaaaatttttcccccaaaaaaaaaaacccccccccccaaaaacaaaaaaattttaggagaacccgtttttggggaaaaaaaggggggcccttttttttttttaaaacccccaaaaaaatataaaaaaggggcccccccggggggggggttttttttttcaaaaaaaaaaaaaaaaaaaaccccggcgaaaagggccccccctcgggggggggggaaaaatttggggagggggggggaagcggggggaaaaaaaattttaaaaaaaaaaaaaa

SEQ ID NO: 17749 - DNA, 412 bp, Homo sapiens
ggccctctaaatgcatgctcgacggccgccagtgtgatggatatctgcagaattcgccctttcgagcggccgcccgggcaggtacttttttttttttttttttttttttttttttttttttttttttaaaaaaaaagggcccggggggggtttttttttaaatttttgggggaggggaatgggggcccgggcccttaaaaaccccaaaaaaaccccccggggcccttattttttaaaaaaagggggatttttttttaaaagggggcccccgggaaaaattttttttaaaaaaaaaaacccccaaaaaggccccccccccccccgggtttaaagggggttaaaagggggggggttttttcttttatttttaaaaggggggggaaacccggtgcccccctttgggggaaaaaaa

SEQ ID NO: 17750 - DNA, 416 bp, Homo sapiens
  misc_feature 88, 90: n = A,T,C or G
ccctctagatgcatgctcgagcggccgccagtgtgatggatatctgcagaattcgccctttcgagcggccgcccgggcaggtactttntnttttttttttttttttttttttttctgggtttgtgtttgggtccaactcatgtccaaattatggccttttgtgataccttccactggcatattcccaaggaatttactccttttgatgacactgcacccagaatggaggaacacagctacaaaatgaactataaagaagggctaggcaggcatggtggctcacacctatcatcccagcactttgagaggccaaggcaaaaggatcacttgacgccaggagttcacaaccagcctgggcaatatggctgtctctacaaacaatataaaaaataacgtgggcatggtggcacgtgcct

SEQ ID NO: 17751 - DNA, 513 bp, Homo sapiens
gactcactatagggcgaattgggccctctagatgcatgctcgagcggccgccagtgtgatggatatctgcagaattcgcccttagcgtggtcgcggccgaggtacacttggaagagggccaagtgggcaacttgagaggttaaactgcatggtttgagttttgatttgaggtttacgtgttggcatgcattcaggggcttgtgtcccttctcccctgattcttccctccgggtaggagggaagaatccacctgagcagtggcctgccagcacttgagaggctccgcaagcacaagtgtgtttatgggagttgtgcacatgctcagttgaggcattcttcccttaccagtcgagtgtttctagaggaaggtcatagactaatagtctaatagtctatgacctttaatcatactaatgcacatgcctgagcccactcacctgtgaacccccaaaatttgagacaggtctcaattaatttagaaaggttattttgccaaggttgaagacatgccca

SEQ ID NO: 17752 - DNA, 609 bp, Homo sapiens
ctatatggcgaatggggccctctagatgcatgctcgagcggccgccagtgtgatggatatctgcagaattcgcccttagcgtggtcgcggccgaggtactttttacaatcttctataaaattctgctttgtctacaacacagtcctgactctagcttaagcacaaaaggatttagtatgaaccaattcatacatttaatacttattaaactcctgacatgccaggcattgttgtaggtgctggtaataaagcagtttttaaaaagtccttattctcttgaagtttacattctagtggggtaaagggaatcaaaagatgttggtaagagaagtgagagaggaatgctatttttttatagctttgtctacgaaagcctctctaattttgtgacatttgagcaaagacctgaaggtattaacatcatttgctccaaactgaccaaactgttcttattacttataggtttcaggagatgtgttacaaggcttatctagctattcgacagcatgccaatctcttcataaatcttttctcaatgatgcttggctctggaatgccccgcgtacctgcccgggcggccgctcgaaagggcgaattccagcacactgg

SEQ ID NO: 17753 - DNA, 638 bp, Homo sapiens
tacgactcactatagggcgaattgggccctctagatgcatgctcgagcggccgccagtgtgatggatatctgcagaattcgcccttagcgtggtcgcggccgaggtacattgtatactgcagtgtcgtctacatggcattggacaggacataatgtaaaacataaaagtgcaattgttacacttacatatgatagtgaatggcaacgtgaccaatttttgtctcaagttaaaataccaaaaactattacagtgtctactggatttatgtctatatgacaaatcttgatactgcatccacaacattattggcgtgctttttgctttgcttttgtgtgcttttgtgtgtctgcctattaatacgtccgctgcttttgtctgtgtctacatacacatcattaatactattggtattactattgtggataacagcagcctctgcgtttaggtgttttattgtatatattgtatttgtttatataccattatttttaatacatacacatgcacgctttttaattacataatgtatatgtacctgcccgggcggccgctcgaaagggcgaattccagcacactggcggccgttactagtggatccgagctcggtaccaagcttggcgtaatcatggtcatagct

SEQ ID NO: 17754 - DNA, 755 bp, Homo sapiens
agggcgaatggggccctctagatgcatgctcgagcggccgccagtgtgatggatatctgcagaattcgcccttagcggccgcccgggcaggtacttttttttttttttttttttttttaaatttttttttttttttttttttttttttttttttttttttttttttttttttttttttttaaaaaaaaaaaaaaatattttttttggttttctcaaagaaaaacaaaatcattaatgagggagaaagaaaaaaaaaattgctttccaaaagggttaatttaaacccacaaactcaaaaggttgttgggggaatagcgaaatcccggttctaaaaaaaaaaaaaaagtttgtttaagcccccattcctgggaaataaaaaaaaaaaaccccccggttttttttttttccccccacaccccaaaaaagagggggtaaaaaaaacccccccccccccccaaataataaaattcccccaccaggggggggtaaaaaaaaaaaaaagggggaggtatctcccccccgggagttattaaaaaaaaaaaaaaaaacccggaagggggggggggggttttttttttttaaaaaacccccccccccccgaaaaaaaaggaaaaaatatggtgtaaaaaaaaactttttggtggaaaaaaaaaaaaaaaaaaaaaagggcggggggggggggggccccccttattaatacctttaaggaggaaaggggggggggggcgccccccccctggggaaaaaaaaaaaaa

SEQ ID NO: 17755 - DNA, 562 bp, Homo sapiens
tcactatagggcgaattgggccctctagatgcatgctcgagcggccgccagtgtgatggatatctgcagaattcgccctttcgagcggccgcccgggcaggtacttagttactccttgcccatagacgtgtttgacctagaaaaatttcttatacgcaacagatattcatgaaatatatattaaaataaagcttgaagggtgaattaaataaatatttacttggaagctacagtgggtgaattaaacaaatatttacttggaagctactttatagccactgggctggatttcatatacagagttcttgcccttgggagttttacaactgcttaacactttgtctatgctagaatacaaaaaaaaaagaaagaaaaaaaaggtgcctcggccgcgaccacgctaagggcgaattccagcacactggcggccgttactagtggatccgagctcggtaccaagcttggcgtaatcatggtcatagctgtttcctgtgtgaaattgttatccgctcacaattccacacaacatacgagccggaagcataaagtgtaaagcctgggg

SEQ ID NO: 17756 - DNA, 635 bp, Homo sapiens
actatatggcgaatggggccctctagatgcatgctcgagcggccgccagtgtgatggatatctgcagaattcgcccttcggccgcccgggcaggtacatttagttaggttcgttaggtctatattatagttttactctgatgtttcttttatgattttctgcctgaatgatctgtccattgcttaaaatgtgttgttgaattcccctgcccttattgtattcatctatttctcccttcagatctattaatatttacttaatatatctgagtgctgtaatattgggtgcatatgtatacttataaatactatattatattgctgaagtgacccatttgtcattatataatggtcttctttgactcttttttactctttttgacttaaagtctattttatctaagtatagctgtgcctgctctttactggttttcattttcatggaatatctgttttcatccctatacagtcagtctatgtgtgtttttatgagcaaagtgggtttcttgtaggcaatatattgtttggttttttttgtttttaatccattcagtcactctatgtcttttacttggaaaatttagcccccttgcatttaatattattattggtatgtaagaacttactattgccatt

SEQ ID NO: 17757 - DNA, 576 bp, Homo sapiens
gcatgctcgagcggacgccactgtgatggatatctgcagaattcgccctttcgagcggccgcccgggcaggtactgggtctgccagacttataggcattctttcctgcgcttagccatatactttttgcatggccctatctaaagcctgcatttgccttcttaaagttagtttttgtagctcacggagattacctttaatctgacttatgattgggggtggctggctgaacaaaatctcattgggcaaatacccagtgtggtttgttttgtgggggtgcacctgacttggagaaagaccatgggcaagacctggtcccacctcagatgagtttcctgacaaaatttcttcagcagctgcttgagtatctggttcatgtgctccatctttactgagcactgaggctggtagactggatgcaacttccattttatttttaacagtcaagttaagtcctgaacgatttcagccacaaatgccagtccattatctgaacccaaagttaggggcagtccaaatctgggaataatgtctcttaacaataccttcatcaactctcatgccttctctgtcctga

SEQ ID NO: 17758 - DNA, 464 bp, Homo sapiens
acaactcactatagggcgaattgggccctctagagcatgctcgagcggccgccagtgtgatggatatctgcagaattcgccctttcgagcggccgcccgggcagggactaggtttttttttttttttttgggattagaaaactatcatttattgatagatttaaggggtaatacaggtttccaaaaatggggcagtgagaataccatcataaaaaagagaaacttgtgctaaaaacaacctgaattcatcattggcaatattacataacaatcaaggccctcacatactaatgatttccactttggctatattgccaaccttccatgcattaaaaaaaaaaacccacaagattattcaaacttgggaagcaataaagtacctgggccgggaccacgctaagggcgaattccagcacactggcggccgatactaggggatccgagctcggtaccaagcttggcgt

SEQ ID NO: 17759 - DNA, 471 bp, Homo sapiens
ccctctagatgcatgctcgagcggccgccagtgtgatggatatctgcagaattcgcccttggccgcccgggcaggtactttttttttttttttttttttgtatttttagtggagatggggtttcaccaggctggttttgaactcctgacctcaagtgatccacctacctgggcctcccaaagtgctaggattacaggtgtgagccactgctcccggcctcccctttccttttactgctttaagccctcatcgggtcacttgtctgcccctacaggttaccgtgccagcctctgtggccagatttctttgtgtgaacctgttgaaagagaattcccagtagaatttggccttctgcactcccatccctagggtgtctcaaggtcatggggtgaatttcaggaaaaagtaaaggttaaacgctgcttctgagctcactgatgggaaaacacctgctgtttcatttcatgagta

SEQ ID NO: 17760 - DNA, 476 bp, Homo sapiens
atacgactcactatagggcgaattgggccctctagatgcatgctcgagcggccgccagtgtgatggatatctgcagaattcgcccttagcgtggtcgcggccgaggtaccttgatggggttgggtcatacagttgtgtgcattcgtcaaaacccattgaatattatacgtaaggtttatgcaatttattatatgtaaggtttatctcaaggaaaaaagttttgaaaactgtgattttgatgcaggtgatctgagcaccacacttgaaaactactgggtttgagtaacttcaggaatagttcttccataaaagcataataattcagagattactaatgtaatcctttggcattcaaaaactaagggagccaaaatattaatggagccaggtgcagtggctccaagcactttggaagactgcccgggcggccgctcgaaagggcgaattccagcacactggcggccgttactagtgga

SEQ ID NO: 17761 - DNA, 461 bp, Homo sapiens
actatagggcgaattgggccctctagatgcatgctcgagcggccgccagtgtgatggatatctgcagaattcgccctttcgagcggccgcccgggcaggtacatgagataatcaatgcttccttacaaaatgggcttatgttagaagacttttgcccagctgcaggctattgtaagtgttctgagcacatatgagataacctgggccaagctatgatgttcgatacgttaggtgtattaaatgcacttttgactgccatctcagtggatgacagccttctcactgacagcagagatcttcctcactgtgccagtgggcaggagaaagagcatgctgcgactggccagtgacatgcagaggatccagattgcacaaccggatccagaggccttgggaagcattagggagctctgcagctgtctcactcaaatctgtagcagcatatggacccacaaatggag

SEQ ID NO: 17762 - DNA, 403 bp, Homo sapiens
tacgactcactatagggcgaattgggccctctagatgcatgctcgagcggccgccagtgtgatggatatctgcagaattcgccctttcgagcggccgcccgggcaggtacgcgggtatctttttggttaatatagagttataggtgtttttaagccactaagtgtcattactgttacatgcatcagttagccctacttggattagcaagattatgctttcataaactattctttctctaaattaatatatttatatatttagaagttgacattctaaatcaaattgtgtttttttccttttgcaggtggataattactgtacctcggccgcgaccacgctaagggcgaattccagcacactggcggccgttactagtggatccgagctcggtaccaagcttgg

SEQ ID NO: 17763 - DNA, 709 bp, Homo sapiens
  misc_feature 398: n = A,T,C or G
tatacgactcactatagggcgaattgagccctctagatgcatgctcgagcggccgccagtgtgatggatatctgcagaattcgccctttcgagcggccgcccgggcaggtacgcgggggagaaactatggaaacctacatatgtagcttgtaaatgggagggaatcaataccatctagaattgaaacggtttactttacctaaaatatttatagaatttttttatctataaacagctgcaaggaaatattttttaaattaaaaagaaagagaaaagtaaactatgcctcaatattaaaattttaaccagaaaactctcaacttcttggaaaacaaaaaccaaccaaacaaaaaactccattagacaaataagttaaaagagaggaacatttgcctcanaaatttagaaaagaacaccaaagttataaaacagcaaataataaagataagatcaaaaataaagaatttacaaaaaaagaacaaagtacctcggccgcgaccacgctaagggcgaattccagcacactggcggccgttactagtggatccgagctcggtaccaagcttggcgtaatcatggtcatagctgtttcctgtgtgaaattgttatccgctcacaattccacacaacatacgagccggaagcataaagtgtaaagcctggggtgcctaatgagtgagctaactcacattaattgcgttgcgctcac

SEQ ID NO: 17764 - DNA, 482 bp, Homo sapiens
actatagggcgaattgggccctctagatgcatgctcgagcggccgccagtgtgatggatatctgcagaattcgcccttagcgtggtcgcggccgaggtactttttttttttttttttttttttttgccccttttttttttttttgttttttttttttttttttttttttttttttttctgggcaaaaaaaaaaaattttttttttctggggggggggggggggcccaaaggggggggggggccccggggggggggaaaaaaaaagaggtgggggggggggttttttatatatcccccgggggggggaagaaagggggggcctaccccccccgggggggggggataaagtttcttaacaggccgcccgctccgggggggcgcgggcgggcccttccaagggggatataaaagcccaagtgccccagggaagccacctcctccactacctaaaaagctgtctgggaactgagctacagaacaca

SEQ ID NO: 17765 - DNA, 560 bp, Homo sapiens
cactatagggcgaattgggccctctagatgcatgctcgagcggccgccagtgtgatggatatctgcagaattcgcccttagcgtggtcgcggccgaggtacttgttatctagtctgcctcttttcccttttcttacttcattacctcttcaacacaacaaccaaaagagacccttctcataaaacaaatctgattgtgtctctcccttgcttaaaatcctttatagttctctgtcacatacaaaatcaaatacaagacccgccgtgacatggtttctcttctagattcacatctctagtttatgcaaaactatgtgcaactctctgagctctgacttctgtgtgtttgcacacactgaatattcttgctaacttgtgctgcttcctaattcttgtggcaaattccagttcattcaaaatttagctccagcattgtttttgggtggtgtttaaacagtgttttacttttctctttatgttccataacacctcctacataagattatatttggcgtacctgcccgggcggccgctcgaaagggcgaattccagcacactggc

SEQ ID NO: 17766 - DNA, 263 bp, Homo sapiens
tttttttttttttttttttttttttttaaatttttagttttttttttttttttttttttttttttttttttttttttttttttttttttttaataattttttgtttttttttttttttttttttttaaaatttttttgggggggggggagagagaaaataaatcttttttctctcccccccacaacaaaaaaggagaagaaaaaaaaaaaaacactccccccccccccacacaaaaaaaaaaaaaaaaaaagagggggggggg

SEQ ID NO: 17767 - DNA, 374 bp, Homo sapiens
attgggccctctagatgcatgctcgagcggccgccagtgtgatggatatctgcagaattcgcccttagcgtggtcgcggccgaggtacataatgtaattgttacatataattgttgtataccataacttactattttttcttttttatttttatatataatttttttttggtttgtttgtttgttttttaataaactgttatcacttaaaaaaaaaaaaaaaaaaaaaaaaaaaaaacaaaaaggttcctgcccgggcggccgctcaaaagggcaaattccaccacactaggcggccgttactagtggatccgagctcggtaccaagcttggcgtaatcatggtcatagctgtttcctgtgtgaaattgctatc

SEQ ID NO: 17768 - DNA, 393 bp, Homo sapiens
tacgactcactatagggcgaattgggccctctagatgcatgctcgagcggccgccagtgtgatggatatctgcagaattcgccctttcgagcggccgcccgggcaggtacgcgggaagaatgttttaaatttttgttattgccattatttgtttattaaaggttagataaaatttggctttaaaaaaaaaaaaaaaaaaaagtacctcggccgcgaccacgctaagggcgaattccagcacactggcggccgttactagtggatccgagctcggtaccaagcttggcgtaatcatggtcatagctgtttcctgtgtgaaattgttatccgctcacaattccacacaacatacgagccggaagcataaagtgtaaagcctggggtgcctaatga

SEQ ID NO: 17769 - DNA, 354 bp, Homo sapiens
actcactatctgactatatggccactgtgccctctagcatgcatgctcgagcggccgccagtgtgatggatatctgcagaattcgcccttagcgtggtcgcggccgaggtacgcgggaatctttctgtagttatctgcataattcttgtttttctttccatctggctcctgggttgacaatttgtggaaacaactctattgctactatttaaaaaaaatcagaaatctttccctttaagctatgttaaattcaaactattcctgctattcctgttttgtcaaagaattatatttttcaaaatatgtttatttgtttgatgggtcccaggaaacactaataaaaaccacagagac

SEQ ID NO: 17770 - DNA, 457 bp, Homo sapiens
attgggccctctagatgcatgctcgagcggccgccagtgtgatggatatctgcagaattcgccctttcgagcggccgcccgggcaggtacgcgggccagataaaaacctcacactaaaggcctaactatcagttccttttaaccagtgcatcatgtctcactttcaataaaatgttaccacacgttctagacacacaaaaaatacagaatttgaaaagaaaaagcaagcataagaaccaaactgagcttatggcagagatgttggaaatatcagaccttgaatttttaagactatgattaatatgcaaagggttttaatggaaagtgagaacaatatgcacgaacagataggtaatataagcagagaaatggaaacactaagaaagaatcaaaagaaaatgctagaaatcaaaaacatcatgacagaaataaagactgccacctgtaatcccagcac

SEQ ID NO: 17771 - DNA, 463 bp, Homo sapiens
tatagtgcgaattgggccctctagatgcatgctcgagcggccgccagtgtgatggatatctgcagaattcgccctttcgagcggccgcccgggcaggtacccgaatctcagacgtccaggctctagaactgtaagaagataaatgtgtaacgtttaagccacccaatctatggtattttattatggcagctcgagtcgactaagacagattaagtgctaaaaccttctaaaagtctccagaacattacttgacacagaatagctaatgaatgtaacacagttcttttctataacctctgagatcctgagggttttcctgagctgctaaggaaaaagggagggctgggacagtaagtacctcggccgcgaccacgctaagggcgaattccagcacactggcggccgttactagtggatccgagctcggtaccaagcttggcgtaatcatggtcatagctgtttc

SEQ ID NO: 17772 - DNA, 405 bp, Homo sapiens
  misc_feature 343: n = A,T,C or G
agggcgaattgggccctctagatgcatgctcgagcggccgccagtgtgatggatatctgcagaattcgcccttagcgtggtcgcggccgaggtacattttttgaatcaatgaaatatagttgtgttaatatgtttggtaaaataaaacaatttattcatttattcagtttttccattctgctctcaaatccccttttccacacttgaacaaaactctattgtcaacataaaagaacaagtcaaagagctataaactccccctctaaacttggccttggtgttctcactttttctgtgatagtatatgagaaaaatgaatataatgttgccctgataggaagtntaatgaattttaaaagaaagcaatgttgcttttataaaatataaaatttattatttttcttg

SEQ ID NO: 17773 - DNA, 484 bp, Homo sapiens
tagggcgaattgggccctctagatgcatgctcgagcggccgccagtgtgatggatatctgcagaattcgcccttagcgtggtcgcggccgaggtactttttatttaattttttatttttttccagcgggtttttatttgttcaaatactatcattaccatgaaaatgactttcttttactgtgaatgctgacatagaaaggacaatgacaaaaaaaaacattctgtgcctttaagcttaggaagaccgccgggcctccaaaacataggcggggactgaaatgcaaattaaaacactgcgggggggggaataatttttgacacttaaatgaaagcttggttggtttagagaaattcaagcaataatctatacaagctgtcaggaaaactggataatgcaaaaagccataagtaaaggaaataaattgagtaaataggcagatgtggtatttagtgaacccaatgcctaaaagtacctgcccgggc

SEQ ID NO: 17774 - DNA, 447 bp, Homo sapiens
gggcgaatggggccctctagatgcatgctcgagcggccgccagtgtgatggatatctgcagaattcgccctttcgagcggccgcccgggcaggcacttttttttttttttttttaaaaatttatgttttttttttctctctttttcttttatactgttttatttgttgtttcctttttgttttcctcccaccgaaaaaaggaaatagggcaaaaaaaaaaaaggcccccccaaaacccccggaaaaaaaaaaaattgccggggaacccccccacccctgggggggggggggggcggggaaaaaaaacccccctttttttccagggggggggggaaaaaaagccccccccccccccccgctttaaaaaaaaaaccccccccccccggggggggggaaaaaccccaccgggggggtccccccccccggggggggggggcccgcaaaaaa

SEQ ID NO: 17775 - DNA, 390 bp, Homo sapiens
atagggcgaatggggccctctagatgcatgctcgagcggccgccagtgtgatggatatctgcagaattcgcccttagcgtggtcgcggccgaggtacttttttttttttttttttatttattccttttttatttttatatttttctttttttttttttttttttgaaaaaatccgggggggaagaaaaaaaaaccaccacccacaaaagagaggtgtgttgtttccccccccgggggaaaaaaacaccgctctattttttttgaaaaaacggggggaaaaaaaaaaaaaaaaaaaaattctaacctcgggggggggaaaaaaaatcccaagggggggggcggggaaaaaaaaaatagccccgggtttttttaaaaaaaagggggggtttt

SEQ ID NO: 17776 - DNA, 657 bp, Homo sapiens
gactactatagggcgaattgggccctctagatgcatgctcgagcggccgccagtgtgatggatatctgcagaattcgcccttcgagcggccgcccgggcaggtacgcggggaaacacttccccgcttggctctcattcttccacaagagagacctttctccggaccttgctactggtcagcagctctgcagaaaatgtcctcccttgtggctgcctcagctcctgttcttggcctgaagcccacagctttgatggcagcgcctcatcttcaacttttgtgctcccctttgcctaaaccctatggcctcctgtgcatctgtacctcggccgcgaccacgctaagggcgaattccagcacactggcggccgttactagtggatccgagctcggtaccaagcttggcgtaatcatggtcatagctgtttcctgtgtgaaattgttatccgctcacaattccacacaacatacgagccggaagcataaagtgtaaagcctggggtgcctaatgagtgagctaactcacattaattgcgttgcgctcactgcccgctttccagtcgggaaacctgtcgtgccagctgcattaatgaatcggccaacgcgcggggagaggcggtatgcgaattgggcgctcttccgcttcctcgctcactgac

SEQ ID NO: 17777 - DNA, 648 bp, Homo sapiens
tatacgactactatagggcgaattgagccctctagatgcatgctcgagcggccgccagtgtgatggatatctgcagaattcgcccttgagcggccgcccgggcaggtacgcgggttgattagttaagaataaaatttttttaaaacatgcgctccaaaagaggacacatcacagaaacacaacaagcaaattaaccttctgtttttgcctctgcagaaaatgtctcaagaaccagaaataaataaggatggtgatagagaggttgaagaagaaatgaagaagcatgaaagtaataatgtgggattactagaaaacctgactaatggtgtcactgctggcaatggtgataatggattaattcctcaaaggaagagcagaacacctgaaaatcagcaatttcctgacaacgaaagtgaagagtatcacagaatttgcgaattagtttctgactacaaagaaaaacagatgccaaaatactcttctgaaaacagcaacccagaacaagacttaaagctgacatcagaggaagagtcacaaaggcttgaaggcagtgaaaatggccagccagagaaaagatctcaagaaccagaaataaataaggatggtgatagagagctagaaaattttatggctatcgaagaaatgaag

SEQ ID NO: 17778 - DNA, 469 bp, Homo sapiens
ctatagggcgactggggccctctagatgcatgctcgagcggccgccagtgtgatggatatctgcagaattcgcccttagcgtggtcgcggccgaggtactttttttttttttttttttttaaaatttttttttttttttttttttttttctttttttattttcttcttctttcctctttttttttgttggggggccgccccaatttctgtgggtggccaaaaaaacaagacccccccgggggggggggaatttttcctggggcaaacccccaaccaagtgggccccccccgggggggagaaaaaaattttttttttgtgaaaagggggccccccccccgcttttaaatcacctgggcccccccgaaaaaaaaaattttttttttccgggggggaaaaaccccccccccgggggggggggggcccccccccttcttttttttgggaggacggcacaagaggggggggggg

SEQ ID NO: 17779 - DNA, 461 bp, Homo sapiens
  misc_feature 368: n = A,T,C or G
gcgaatggggccctatagatgcatgctcgagcggccgccagtgtgatggatatctgcagaattcgccctttcgagcggccgcccgggcaggtacttttttttttttttttttttttttggggtttttttttttttttttttttttttttttttttttttttttttttttttttttttttttttttttttttttttttttttttttttttttttgtcggaaaaaaaaaaaaaaaaattaaaaaaaaaaaaagatgaatcattaaaaaaaaagggggggggggtttttttttttttggggggggggagaaaaaaaaaaaaaagggaccgccccggggggaaaaaaaaaaaaaacccccccgggggggttnaaaaaaaaaaaaaaaaaaagtttttttaaaaaaaaaaaagggggtcttttttttataaaaaaaaaaaaatcccccaaaaagaatggggggggg

SEQ ID NO: 17780 - DNA, 455 bp, Homo sapiens
ctcactatagggcgaattgtgccctctagatgcatgctcgagcggccgccagtgtgatggatatctgcagaattcgcccttagcgtggtcgccgccgagggactttatttttttttttttttttattttggcggatttaccttttaaaagttaactttattgaaaaggtaacaggaaaaaaaattgcatggcaggaatggtttaaaactgctaaatcctaatttactacagcttgattacctaacatctaaaatggaaaaagcaagaaatagtgtaagtttaaattttttacataaaaatgtggaggttaaaatgacaaaaaacaccttaaacttaaaagtggctgcgtttaaggcacccagtggataagtgaaaaaaaagaactgctatttttttctattcatcctattggctttttgggaatgaacctgcccgggcggccgctaaaggcgaat

SEQ ID NO: 17781 - DNA, 635 bp, Homo sapiens
cgactcactatagggcgaattgggccctctagatgcatgctcgagcggccgccagtgtgatggatatctgcagaattcgcccttagcgtggtcgcggccgaggtacttctttttttttttttttttttgctttaatcatttatttgggggtgagattttggttgttgccaaattttcactatggacaattatgcaaaattcctcatacgtatatatttttttgtccagggtgttaagtcttctgtggcataggtttctggaagtaaaataattgtgtaaaacaatgtgttcttaaaaaaaataatagatatagatactctgccttcaaaaatgtattgactgtataactcatggtatatataaaaaggcttcaaaatcttcactctgattcttccaaagtcattaagatttttaatatatcaagtgaatgtgttaaaagctttgttaaatacagccagacatggtggtgtgcacctgtagtcccagctacttgggaggcttaggcgagagaatcacttgaggctgggaaactgagtctgcaatgagccacgatcacatcactgcattccagtcaaaaaaagcaaacaaacaaaaccaaaacaaataaacctactgctctcattttttttctcatt

SEQ ID NO: 17782 - DNA, 406 bp, Homo sapiens
  misc_feature 225, 226, 227, 228: n = A,T,C or G
acgactcactatagggcgaattgggccctctagatgcatgctcgagcggccgccagtgtgatggatatctgcagaattcgccctttcgagcggccgcccgggcaggtacttttttttttttttttttttttttttacttttttttttttttttttttttttttttttttttttttttttttttttttttttttttttttttaatttttttttttttttttttttnnnnaaaaaaaaaaaaaatttaattttgggccaaaattttttaaaaaaaaaattaaaaaaaaaatttaaaaaaaccccccaaaaaaaaaaaaaaatttccttacaaccccaaaaaaaaaaaaaaaaccttaaaccttttaaaaaaaaaaaaaaaaagggggggggaaaaaattaaaaaaaaa

SEQ ID NO: 17783 - DNA, 347 bp, Homo sapiens
ctgccgcggtaggagagcatcaagaagcgtcggggagcgcaggcccagcagccatggcggtggaaggaggaatgaagtgtgtcaagtttttgctctacgttctcctactggccttttgcgcctgcacagcgggattgattgccattggcgtaacagttcaggttgtcttgaagcaggccattacccacgagactactgctggctcgctgttgcctgtggtcattattgcagggggtgccttcctcttcctggtggccttagagggctgctgtggggcctgcaaagagaactactgtctcatgattacatttgccatcttcctgtctcttataatgctcgaggaggtg

SEQ ID NO: 17784 - DNA, 351 bp, Homo sapiens
actatagggcgaatggggccctctagatgcatgctcgagcggccgccagtgtgatggatatctgcagaattcgcccttagcgtggtcgcggccgaggtacttttttttttttttttttgtttgtttaaatttttttttttttttttttttttttttttttatttttgatttgacttttttttttttctcacagacccgccccaaagggggggggggcgcccccccccccccaaaataaaaaaaggagcgccccccccgaaaaaaaaaattttttttttatgacgccaaaaaaaaaacccccccccacaagccccttgggggggccccccccccgaaaaaaaaaaaagctcc

SEQ ID NO: 17785 - DNA, 597 bp, Homo sapiens
agtagactcaagctatcaatggagtcggatcttgtaaggcacctcgcccggcgcctcggcctcggggagccgagtgtactgaggaaagcagaggagtacctgcggctgtctaaagtgaagtgtgtcagtctgtctgcacacacctcagaaaccagcaatgctgtcatatgcctggaccttgcagcgtcctgtaggaagtgccccttggatagagcgtatctaattaagctctctggtttgaacaagaagatgtatcagagctgtcttaaatcttttgagtgtttgctggggttaaactcaaatattggattaagagacctggctgtgcagttcagctgtacagaagccgtgaacttggctgcggggatactgcaaagctatgagtctagtcttccggaagcacagcgagcagatcttgacttgtccaggccacttttcaccacggcggctctactctcagcatgcaaaattctaaagataaaggtggataaaaccaaaatgataactacatccggtgtgaaaaaaacaatatttgatcgactgtgtacacagctagaaaagatcggacagcaaattaacagagactctgcagattta

SEQ ID NO: 17786 - DNA, 629 bp, Homo sapiens
tacgactcactatagggcgaattgggccctctagatgcatgctcgagcggccgccagtgtgatggatatctgcagaattcgccctttcgagcggccgcccgggcaggtactgctctttactactctagtaacactagataataagcacttaaatgctgagtgtttgtcagttttaaaatagagaaagagacaaattgttttctgatctacttgcttaataaattattttttgccaactaatttttaggtttacttggtaaatttaaaggtagtttaaaatgtatatttaaataacttttctctataattgaagaaaataatttatcttgagagaattttactttaaacagttgctttagagtctatcttgtaaagtattctattttcaaataaagccgggtgcagtggctcatgcctgtaatcccagcactttgggaggccgaggcaggcagattacctgaggtcgggagtttgagaccagactgaccaacaaggagaaaccccatctctactaaaaatacaaaattagctgggtatggtggcgcatgctaccagctactcgggaggctgaggcaggagaatcgcttgaacccaagaggtggaagttgcggtgagccgagatggcacca

SEQ ID NO: 17787 - DNA, 489 bp, Homo sapiens
ggccctgtagatgcatgctcgagcggccgccagtgtgatggatatctgcagaattcgcccttcgagcggccgcccgggcaggtacttgtttacataatgtctccagagagggtttccttctgtctagcagacaaaggtaatggtagctgatcaccttaacaaaatcaggagctgtttgaagttgagacttggttgtagctctgggtaaagctctagctacttatgtccaagggtatatagccctctaggatttttaactgagagcttggtattcattggggcttctccttctggcaagttcataactctaatctgtatcttgtgagactgccaaagagtctgttctgcttttcaaaggctttccaatgagggttttaacctctcattctgcagagccccgggaattggcaaatatcccaacaggataactggctggatgcatgaggttcccctggttttccacaaagcctctgctgatttcttgtcccc

SEQ ID NO: 17788 - DNA, 446 bp, Homo sapiens
tatatggcgaatggggccctctagatgcatgctcgagcggccgccagtgtgatggatatctgcagaattcgcccttagcgtggtcgcggccgaggtaccacttcactccagcctggcgacagagtggaactccgtctcaaaaaataaaataaaataaaataaaataaaataaaataaaataaaataaagcaaaaatataaaatgttaaaaaaaaacaaaaaaagggaaaaaggaagctgattgcccttggtgagtcaacactgggtattttctgaccactatttgaaacaaaaaaggaaaccactggatatttctatgcaaaaatctgtttctggaaaggcactctgcggagacaccaggaaaacttttatcaatccttcattgatttgaagtaaaagtgctaaagcaatggttgtgggtggcaacccattaccaaatcacaaaat

SEQ ID NO: 17789 - DNA, 402 bp, Homo sapiens
atatggcgaattgggccctctagatgcatgctcgagcggccgccagtgtgatggatatctgcagaattcgccctttcgagcggccgcccgggcaggtacttttagtagagacagggtttcaccatgttaggcaggatggtctcgatctcctgaccttgtgatccacctgccttggtctcccaaagtgctgggattacaggcttgagccacagcgcccggcctagtcagcccagtatcttatagctgttgacgacattctggggatatgaatgtagcttacaaacgctagtatttctacagaaagcagaaataatttaactgtcgttttcacatttatatttaataaaatcaactttggatcacaatgtgaggtgagaggactactgctacaatgttatataa

SEQ ID NO: 17790 - DNA, 322 bp, Homo sapiens
tgtaatacgactcactatagggctaattgggccctctagatgcatgctcgagcggccgccagtgtgatggatatctgcagaattcgcccttagcgtggtcgcggccgaggtacgcgggtgtcttctgttgtattaacttctttcctttgtggtatcttgtatcactgtttaaaaactaaatgaagggaaccacattagggcccatgccagcatcccagtgaagttcgtccagctccagttaggtggattctggagttcggagagggtttaaagtttggctgaaatagcacctcaagtggggtttatttttatttttacctgc

SEQ ID NO: 17791 - DNA, 683 bp, Homo sapiens
tacgactcactatagggcgaattgggccctctagatgcatgctcgagcggccgccagtgtgatggatatctgcagaattcgccctttcgagcggccgcccgggcaggtacatatcttttatatgctcatatgctcctgtagtcgttagttttaattcttaaaaatgtgataattgtaataaacttttattatatcttatgtaaaataattgtgtgtctgagagagactaaaactcatgccctacttctcatgatttctctttctcttttgtttccctttcacagacagaagaattatagcctcagtatttatgtatatttttgaaagagtgaagtggggactgagaaggtatatctacatgctatgccttttgatagcattctgtttcaaatctccttttctcatcattggctggaacacagttgaaaaaatattaaactgattttgtgacgatgaatttaggaattccagttagctaaggattagaaaaactgattttcagaggcatactctgatccagaatggggctttaatattgtattatactgaaatataaagcagaggtctactaaaatctagagtacctcggccgcgaccacgctaagggcgaattccagcacactggcggccgttactagtggatccgagctcggtaccaagcttggcgtaatcatggtcatagc

SEQ ID NO: 17792 - DNA, 511 bp, Homo sapiens
atatggcgaattgggccctctagatgcatgctcgagcggccgccagtgtgatggatatctgcagaattcgcccttagcgtggtcgcggccgaggtacgcgggtgactgtagtggctctcaccagtaatcccagcacttggggagactgaagcaggaagattgcttgagaccaggagtttgagaccaccctgggcaatatagcaagacccgtctctgcaaaaaaattaaaaacttagccaggcatagtggcctgtgcctgtagtcccagctactcagtaggctgtggtgggaggattgcttgagcctaggaggtcgaggctgcagtgagctgtgatcttgccactgcacgctgaaccttggtgacagagtgggatcctatctcagaataaattagaataaaataaaatcccaagagagacgttacaagcaaagaaaatcatggaccaatatttttcatgaacataaatgtaaaattcttaggaaaattttagttaattagtaatatattaaa

SEQ ID NO: 17793 - DNA, 533 bp, Homo sapiens
actatagggcgaattgtgccctctagatgcatgctcgagcggccgccagtgtgatggatatctgcagaattcgccctttcgagcggccgcccgggcaggtactttttttttttttttttcttttttttttttcttttttttttttttttttttttttttttttctttattactaaaggtttatttacatagggtttaaagcttaataaaaaataaattacaatccaaaagtgctctttaggaaagagacactaaacaacaggcccattttaccccttgactatttacccaaaacataggctacaaattttgccggaaaaactgcccatacattttaaactacttcttcattattcttatggaccatcatccaggacatttgtttgaaaaaatatccagttataatattttcaaaggttaaaattgtgaaaaaaaaatttaaaatgtgattaaaggatatttagccttcaaatgtaaattacagttttaaaattgccctttaaaactttgcttttttaaacattttaaaaggca

SEQ ID NO: 17794 - DNA, 558 bp, Homo sapiens
gcgaattgtgccctctagatgcatgctcgagcggccgccagtgtgatggatatctgcagaattcgccctttcgagcggccgcccgggcaggtacgatctcagcttatgcaacctccacctcccgggttcaagtgattctcctgcctcagcctcccgaggaattggaattacaggcacctgccaccacacctggctaatgtttttgtatttttagtagagacacggttttgccatgttggccaggctggtcttgaactcctgacctcaagtgagccacctgccttgacctcccaaagtgtcgggattacaggcgtgagctcttgtcattcggccggaagcagcgtttctctattaggagacatgatgggtcattttctctgtaaagagaaaaacatgtagcctagaccagctttcctcaacctcagctttagtgatgttgtggccagacaattctttgttgggtggacagggctgtcttgtttgctgcaaggggggaaacagcatccctggcttctgcccataggtgccagtagcataccatccaattgcagtaaccca

SEQ ID NO: 17795 - DNA, 401 bp, Homo sapiens
tacgactcatatagggcgaattgggccctctagatgcatgctcgagcggccgccagtgtgatggatatctgcagaattcgcccttcgagcggccgcccgggcaggtaccttgaatatactgatgaaaatcaacatcaatatattgttggctgtgcctgtgttaaacctaaatcttcaacataataagatatttgtgaaccaagacagcaactctggaaagtggcttctaactcggcgcattttcttagtggatgcagtaagtggacgagaaaatgacttaggaactcagccaagagtaattcgagttgctactcaaatatcactgagtgtccaccttgtacctcggccgcgaccacgctaagggcgaattccagcacactggcggccgttactagtggatc

SEQ ID NO: 17796 - DNA, 516 bp, Homo sapiens
ctatagtggcgaatggggccctctagatgcatgctcgagcggccgccagtgtgatggatatctgcagaattcgcccttagcgtggtcgcggccgaggtacttttttttttttttttttttttttttggggtttttttttttttttttttttttttttttttttttttttacaaaaaaaaaacatttttttttaaaaaaaaggcggccccccccaaaaaaaaaaaaaaagtagaaataaaaaaaaattttcccccccccccttttttttttggcccccccccggggattttttaaaaaaaaaaattctcctgaaagagggggggtttttccccccgcttttatacccccgaggagaaaaaaaacacacccccctccgttgcttacaaaaggggggggggacccccccccgtttttttttcccccaaaaataaaaactccctctcccacacaaaaaaaaaacatctctctttttggaaaaaaaaatatttttccccccccccccaatttttttggggg

SEQ ID NO: 17797 - DNA, 561 bp, Homo sapiens
aattgtaatacaactcactatagggcgaatggggccctctaaatgcatgctcgagcggccgccagtgtgatggatatctgcaaaattcgccctttcaagcggccgcccgggcaggtactggcctgccaagccaatcactgtcactgtcaataccgggatagacaactcggaagccaaaggtttgtcctgccacggctactgatattgcccatagcatacttcatgcccaggagcccaaaaacctgcccacccaactggcctactgctgtcactaccagtaaccaggcaagccacctaaaggttcaagaatcagctctctggactagctaacactaatgccattatacactgccctaggtcccaaggaaaggaatatttggcctaccactgccgtgactagaacctgaaaacatgcctacctggcatccaagtcaccagcaaaacttcaccatagcctgtacctcggccgcgaccacgctaagggcgaattccagcacactggcggccgttactagtggatccgagctcggtaccaagcttggcgtaatcatggtcatagct

SEQ ID NO: 17798 - DNA, 577 bp, Homo sapiens
atatggcgaatggggccctctagatgcatgctcgagcggccgccagtgtgatggatatctgcagaattcgccctttcgagcggccgcccgggcaggtaccctgccttctggctgtatggcttacatcctggaaattacctgataataaagcaagtaaaggtgtaaggtttcctaagggattacaacacagtggtttcctggtctctctccctgtcatcaatcagggtagtaacttgacttaagaataccactttttagaaaaattacgatagagatgggatctcactaggttgcccaggctggtgtcgaattcctggtctcaagcagtcctcccacctcagcctcccaaggtgctgggattacaggtgtgagccaccacacctggccaagaataccacttttgaagttaatccttttgtgtgatacaggatgaacttgggatgtttgaaccctggacattccaaataaagaataggcccctgcctggctcctgggagataacctctaagccattaaaatatcttgcctgataagagtgtttttgtttacctgtgggccttgggccatgcagtatcag

SEQ ID NO: 17799 - DNA, 440 bp, Homo sapiens
  misc_feature 242: n = A,T,C or G
ggcgactggggccctctagatgcatgctcgagcggccgccagtgtgatggatatctgcagaattcgcccttagcgtggtcgcggccgaggtacttttttttttttttttttttttttctcccccccctttttttttttggtttttttttgtactgttcttttgtcgtggtgctctttttcccccggggaaaaaaaacccccggggggggggccccccccccccccaagaggcggcccccctncaaagaggccccgggttctaaaacagccgccccccccggaagagccaccacgcccccccccccggggggggcggggggacccccccccccccccgcggggggaaaaacccccccccccccccattggctaaagtgtgccccccccccccccgggaaaacctgggggggggtcttgagggggcggcccccccccccccc

SEQ ID NO: 17800 - DNA, 592 bp, Homo sapiens
ctcactatagggcgaattgggccctctagatgcatgctcgagcggccgccagtgtgatggatatctgcagaattcgcccttagcgtggtcgcggccgaggtacagtgaggggtgaatggaatgggcagtggtcgccaggatggcctcccacccagctcagagacctggtgaggaccacccagaagggttgtgcagagggttagaggccacacagaggggcactcatgtttttgtgggggatgcacagctcattaaacagtcaccagtcatgggaggaggctggtcaggggctaggggacttgctcacagtcgtgatggctctgtgttatttgggggtgacagtaattatggagctggagtgctcctcgacaaagacagacagagctcctcgcagagggatggtttccatggcaatagcatcagcatctgaatgacttcctgtcacaacaagttggtgatttaatgagttcattactgaattccaaaggaaaaccagagagtggatgagctactgttcagccctcaaagtggctaagtccatagtgagggagccatttctaccgggtgcagcatcagaaccattaacagctca

SEQ ID NO: 17801 - DNA, 367 bp, Homo sapiens
tttttttttttttttttttttttttttttttttttttttttcttttttttttttttttttttttttttttttttttttttttttttttttttccccccccccccaaaaaaaaaaaagggggaaaaaaaaccggggggcccccccccccccccgggggggggggggccccccccccccccaaaaaaaaaaaaattttcccccccccccccccccccccccccttgtgaaaaaaaaaaaaaaacacgcgcggggggaaaaaaaacacttttttttttttaaaaaaaaaaaaaaaaaaaaaaaaaaaaaaccccccccccccccccccccgtttttgttttttccccccccaccaaaaaaaaaaaaaaaa

SEQ ID NO: 17802 - DNA, 337 bp, Homo sapiens
actatatggcgatcggggccctctagatgcatgctcgagcggccgccagtgtgatggatatctgcagaattcgccctttcgagcggccgcccgggcaggtacctttttgttttttttattttcttctttgggtatacttgtattatataattttgcaattttttttttttaagcttgttgaatggtgttttctcaagaagagcaaaaaatattaattttttgggcccaaaaaactgggtgccaaggttcggggggaggaaaaccccccccccccaaaacatccaaaaactcttcagcatgatgcacttcctccgtgggaaaaaaaagaaaaccgggg

SEQ ID NO: 17803 - DNA, 374 bp, Homo sapiens
cgaattgggccctctagatgcatgctcgagcggccgccagtgtgatggatatctgcagaattcgccctttcgagcggccgcccgggcaggtacacttcagacacaattctggaactctaagaaaaaacgtttccagacttcaaacacaaatttatgctcaccaggtaaataactccttttctttgctcaaaaacccagtgagaaaaaataactccaggccaggcacagtggctcatgcctatacttatagcactttggaaggccgaggcgggcggatcacaaggtcaggagttcaagaccagcctgaccaacatggttgaaaccccacctctactaaaaatacaaaaattaacagggtgtggtggcatgtgcct

SEQ ID NO: 17804 - DNA, 442 bp, Homo sapiens
atacatgcatgctcgagcggccgccagagtgatggatatctgcagaattcgcccttcgagcggccgcccgggcaggtactttatttttttttttttttttttttttttttaaatttttttttttttttttttttttttttttttttttaaaaaaaaaaaatttttattttgggggggaaaaaattttaaaacccaaaaaaattaaaaaaaaaaaattttttttttacaaaaaaaatttttttaaaaaaaaaattttggggggaaaaaaaaaaaaatcatctttcccccaataaaaaaaaaaaaaggggggccaaaaaactttttttttttttaaaaaaaaaaaattttttccccccctattaaaaaaattttaaaaaaaaaccccgggggaaaaaaaaaaaaaattcaaaacctttacaggaagatttttttaaaaaaaaaa

SEQ ID NO: 17805 - DNA, 348 bp, Homo sapiens
  misc_feature 300, 306, 307, 313, 314, 315, 316, 319, 328: n = A,T,C or G
atggggccctctagatgcatgctcgagcggccgccagtgtgatggatatctgcagaattcgcccttagcgtggtcgcggccgaggtacagagcctcagagggaaagacagtggaagttccttttaaaggagatgtggaacataccatccgagacatcctaggagggatccgctctacgtgtacgcggggtccaaggatttatttaatggggatgtgttcaaggcaagaccgaattcagaaggatatcgacgtcgtgatccagaagtccagagctgaggactgcctgtttgcagatactgnactttnntttttnnnnttnttttttttnggggtttttttttttttttg

SEQ ID NO: 17806 - DNA, 544 bp, Homo sapiens
ccctctagatgcatgctcgagcggccgccagtgtgatggatatctgcagaattcgcccttagcgtggtcgcggccgaggtaccatatttcagatattggcacattcggcttgtataaggggagacgcttttttgcagttggacggccattgaagacaagttggtcaccccaagttttctttccagttcttctgaaaaactcactatagaaaaagaaagcaagaaatacagaaaagtatagaaaaataatccatattcccaccacctaggattaagttgttaacaagatgaaaacttcatactgaaaaaccaccctttctagaggcgatttaccacttattccttgcctttcaaaatattaactttttcagggtattctctccttattaaattgaaaaaaaaaatgtttcttttaaatagagattgttaacttggggtctggctaggctgtgaattctttgatattaaacaaaagattttgttgaaggtgcttataaggctttatttttcttactttctgctctagccccatatgtgcaggattt

SEQ ID NO: 17807 - DNA, 504 bp, Homo sapiens
gactactatagggcgaattgggccctctagatgcatgctcgagcggccgccagtgtgatggatatctgcagaattcgcccttagcgtggtcgcggccgaggtacgcgggtatcttatgattaaaaacaaattaaattttaaaacacctgaagatatattagaagaaattgtgcaccctccacaaaacatacaaagtttaaaagtttggatctttttctcagcaggtatcagttgtaaataatgaattaggggccaaaatgcaaaacgaaaaatgaagcagctacatgtagttagtaatttctagtttgaactgtaattgaatattgtggcttcatatgtattattttatattgaacctgcccgggcggccgctcgaaagggcgaattccagcacactggcggccgttactagtggatccgagctcggtaccaagcttggcgtaatcatggtcatagctgtttcctgtgtgaaattgttatccggtcacaattccacacaacata

SEQ ID NO: 17808 - DNA, 390 bp, Homo sapiens
tgtaatacgactactatagggcgaattgggccctctagatgcatgctcgagcggccgccagtgtgatggatatctgcagaattcgccctttcgagcggccgcccgggcaggtactttttttttttttttttttttttttttgttttttttttttttttttttttttttttttttttttttttttttttttttttttttttttttttttttttttttttttttttttttttttttttttaaaaaaaaaaaaaaaattaatttttttaatttttaaaaaaaaaaaaaaaagaaaaaaataaaaattattttttttatacaaaaagagaaaaaaaaaagttgtaaaattttttttttaaaaaaggggtgtgaaaaaaaaaaaaaaaaattttt

SEQ ID NO: 17809 - DNA, 450 bp, Homo sapiens
gcgaattgggccctctagatgcatgctcgagcggccgccagtgtgatggatatctgcagaattcgccctttccagcggccggcccgacgggcactgtcctgggctacataacaactccatattggctggcacagtggttcacacctgtaatcccagcattttgggaggccgaggcgggcggaggtcacgagattgagatcaccctggctaacatggtgaaaccccgtctctactaaaaaaatataaaaaattagccaggtgtgatggctggcacctgtggtctcaattactcgggaggctgaggcaggacaatggtgtgaacccatgaggcggagcttgcagtgagccgaaattgtgccactgcactccaacctgggtgacagagcgagactccgtctccctttttttaaaaaaaaaaaaaatatccccccagattttttttgggtttaa

SEQ ID NO: 17810 - DNA, 572 bp, Homo sapiens
tatggcgaactgggccctctagatgcatgctcgagcggccgccagtgtgatggatatctgcagaattcgcccttagcgtggtcgcggccgaggtactttttttttttttttttttttttttttattttttttattcttttttttttgttataaaaaaaaattttaaaaaaaaaaaaaaaaaacccccccttttttaaaaaaaaaacccccctaaaaaaaaaagaaaccccccccgaaaaaacccccttttcataaataagtggggagggaaaaaaaaaaaagccccccttttttaaaaaaaaaaggccccccccccccccgggggggggtttaaaaaaaaaaaaaaaaaaattttttttaaaaaaaaaagccccaaaaaattttttttttttaaaaaaaacccccccccggggggggggggttttttttttgaacaccccccccgggggggggttttaaaaatttcccaccaaaaaggggggggggcggttttttttaaacacccccccggggggggggagaagcccaaaaaaaaggttaaaaaaaaaaccctttttttttaaaaaaaaaaa

SEQ ID NO: 17811 - DNA, 633 bp, Homo sapiens
ctcactatatggcgaatggggccctctagatgcatgctcgagcggccgccagtgtgatggatatctgcagaattcgccctttcgagcggccgcccgggcaggtacctctcatggctttttggttccagcagtgagggcattggtgagatcaatggtaaactgtgcaagctttctttttatcattaggaaatgtgaaacgttggacaaattttgagttttaacaaggacaaaaagttgaaagaaaaggcacagttaacaaaaaagggtggctagatttatcttgggtgatggaggaaatgagagaggaatgctcttgaaaggtggtctgtggatctgtctgaatagaaagagcacagtaagtatgcattgccggagaaaacgtccttgaagctgcttgtctcatgtgtatgatgtgctttttaaatcatgcccctcgttgcctgcctaatctgtgactccctaaaaactaactgggcccatgtagatggggctgcaaccagagctgaataacatgttaggctcacacatgcatcagcactgcacactggaatcattgctcttcctggactttgtagaaatcagtctcaagtgcttcaagagtctggctcctgctacttttatctgtcaggtagc

SEQ ID NO: 17812 - DNA, 404 bp, Homo sapiens
  misc_feature 254, 255: n = A,T,C or G
ctatatggcgaatggggccctctagatgcatgctcgagcggccgccagtgtgatggatatctgcagaattcgcccttagcgtggtcgcggccgaggtacctatagaattatgaatatacagtaacctcattgagattaatcataaaatcaacactagattccaatattaactgtttatactgcattttgtttgttcccgcgcaccaactttgtcatgccttaagcaggttagttctttttactgtgtcttaaanntttttcctagtgagtaacatggtattttttaataatcccgcgtacctgcccgggcggccaaagggcgaattccagcacactggcggccgttactagtggatccgagctcggtaccaagcttggcgtaatcatggtcatagctgtttcct

SEQ ID NO: 17813 - DNA, 423 bp, Homo sapiens
aatacgactcactatacggcgaatggggccctctagatgcatgctcgagcggccgccagtgtgatggatatctgcagaattcgccctttcgagcggccgcccgggcaggtactccagcctgggcaacaagaagactccatctcaaaaaaaaaaaaaggattgttggcctttttaaacccatggccaaaggagtaccccttcaaagtctttgaactggggccaaaggttttttcggaaaaaattccacagtctaaaaaataagttttaaatttattttaggaagatgatttaccccctcaggtaaaaccaataaagggggaaaaaaaaaatgtttaaccaaattaaaattttccggttgggtatttattaaaaaggtttggaaaaattcgggtgggggggtcaagccctataaccccacccttt

SEQ ID NO: 17814 - DNA, 570 bp, Homo sapiens
tacgactcactatagggcgaattgggccctctagatgcatgctcgagcggccgccagtgtgatggatatctgcagaattcgccctttcgagcggccgcccgggcaggtacttcatttgcctaatttttgccattctcataatgtggcaattgttcaattttgcatttcttccattttatttttttgcatctctgcttttcttttggttagctttgccagttctgcctattatattaatctcccagaatcagcttttagttttgttaaatctctgacatgtttcgttgattcctgctttcatcttaaacatttcttcgttgttaatttgtgtttgctataaaataagcaacatcttaaatgcttgatttgctttcgatgtttattctgtaataagatatttaaagatataattttttccctaaatgctttattagacttttctcataagttttgactggtacctcggccgcgaccacgctaagggcgaattccagcacactggcggccgttactagtggatccgagctcggtaccaagcttggcgtaatcatggtcatagctgtttcctgt

SEQ ID NO: 17815 - DNA, 497 bp, Homo sapiens
ctatagtggcgaatggggccctctagatgcatgctcgagcggccgccagtgtgatggatatctgcagaattcgccctttcgagcggccgcccgggcaggtacctatgtcatatttaacaacccccttttgaagtcctatatttgtttagtagactgaaaatttgaattcactgttaagaggagacatggaactgtggaaagaatattcatttgagtgtttcaggaagtttggattttttttttaccaacatattatttgtaaaaggagggaaatcagctgcctcaggaggttcttaacatataggaatgtaattatcagattcaaagctgaacagtagtgcgttgccctgtaacctaagtcttggctgttagcaaagaaaagccagtgtctggggtattggttccaggaccttccactaataacaaaatcccaggatgttccatctcttatataaatgtatttgcatataacctatgcacatcctcctgtatacttt

SEQ ID NO: 17816 - DNA, 267 bp, Homo sapiens
gcgaattgggccctctagatgcatgctcgagcggccgccagtgtgatggatatctgcagaattcgccctttcgagcggccgcccgggcaggtacttttttttttttttttttttttttttttttttttttttttttttttttttttttttttttttttttttttttttttttttttttttttttttttttttttttttttttttgtgggggggaggtataataaaaatcccaaaaaatgggggggggggaaaataaaaaaaaatttt

SEQ ID NO: 17817 - DNA, 596 bp, Homo sapiens
gggccctctagatgcatgctcgagcggccgccagtgtgatggatatctgcagaattcgccctttcgagcggccgcccgggcaggtacataaagcatgccaactgctgctgggaatcatctgttccaaagaggccaacacttactcgtctgtttttattttgcgtaaagaatgagtagagcataaaacccctcaccatctagtgcctgttttaccccaaatcttctacatccactgttccgaagatttccacactgattctgagcaatttatgtaagcccaggtgttcaaagttccaggttgaaacatttggttaattaacatcatgctgcaaacactcaaaatcacttcagctgccactataacaaaacaaaactcccaaaaacaaaaactgtagggaaatataaacaaatggcagtattctttggaaaacagtatatgattttagtgacaataaaagcagcaagggctttcttgatttaataactgtgtttctcaaaaacaattttttctaaaggaaattatattgagtttgagtaaaaacttgaaagtacctcggccgcgaccacgctaagggcgaattccagcacactgggcg

SEQ ID NO: 17818 - DNA, 307 bp, Homo sapiens
atagggcgaattgggccctctagatgcatgctcgagcggccgccagtgtgatggatatctgcagaattcgccctttcgagcggccgcccgggcaggtactttttttttttttttttttttttttggaggagtttttttttttttttttttttttttttatttttttttttaaaaattattttatttaattatttttttaaaaaaaaaaaaaaaaaaacaaaaaaaaaaaaaaaaaaactggaaccacaaacatccccccccccccccccaaagaggagaatattacgaacagagggggggctcccca

SEQ ID NO: 17819 - DNA, 288 bp, Homo sapiens
ggccctctagatgcatgctcgagcggccgccagtgtgatggatatctgcagaattcgcccttagcgtggtcgcggccgaggtactttttttttttttttttttttttaaaattttttttttttttttttttttttttttttttttttttttttttttttttttttttttttttttttttttttttttttttttataaaaaaaaaaaaaaattttttttttttggggggcgcccaaaaaaaaaaaaaaaacccccggggagggggaatattttttttatggggaataaa

SEQ ID NO: 17820 - DNA, 407 bp, Homo sapiens
tatagggcgaattgggccctctagatgcatgctcgagcggccgccagtgtgatggatatctgcagaattcgccctttcgagcggccgcccgggcaggtacatttctcactattgtgaatcttcatgtgttccctatgattcttgatttagcttaaaagaaaacgtaagacatggtttcattagcttgaaccttatctttgtaaagccatgcatttaccttgtttattcctggttatgtttttatctcacagcctattcaaaaagattttgaataattatttcaaaactttttgcaactttaataatcttaaataaccttaaaatatttaggtaaatacggcatcatctgcatggaggatttgattcatgagatctatactgttggaaaacgcttcaaagaggcaaat

SEQ ID NO: 17821 - DNA, 448 bp, Homo sapiens
actatatggcgaatggggccctctagatgcatgctcgagcggccgccagtgtgatggatatctgcagaattcgccctttcgagcggccgcccgggcaggtacgcggggtttatctctagtgtcacaaacagctgtgcttgtttgagtgagacaaccaccatcaagaaaagactcaaggctggcagctgtaactaaatttaattttcacctacatttcacagtttatttatggtgagaagtgtttctatgcaagcattctttcagtgaaccaagaaaaatagtcatatacacgctctgacaaagaacttacactctgggattttgttagaggtaaaattaaataacgaatttattccttattataaaataggtagtatccattaatcaacctattgccaccttctccctacccgctctaccttccctgtgtgcaattattatgtcaatt

SEQ ID NO: 17822 - DNA, 379 bp, Homo sapiens
tatagggcgaattgggccctctagatgcatgctcgagcggccgccagtgtgatggatatctgcagaattcgcccttagcgtggtcgcggccgaggtacatctgaaaggagtgagaagtgttttgagggctctccctgtctcttcctgcacctctctcttgtgatcccagaagctacaacctcagcccagattagcaggctgaggggtcaggaggctgtcactggagctgttgagctcatgaacacgccgaagttgctgcgctccagaaatgtggaagttggaatgaagagccaccactgctgccaccaacatgaagcttgaccaagcaagccaagaaaagatggccaagagcctctgccttccttctgccttctgcaac

SEQ ID NO: 17823 - DNA, 325 bp, Homo sapiens
ggcgaattgggccctctagatgcatgctcgagcggccgccagtgtgatggatatctgcagaattcgcccttagcgtggtcgcggccgaggtactcggggaaggccaggcatggtggctcacgcctgtgatctcaggattttaagaggctgaggcaggcggatcacctgaggtcaggagtgaaactggccaacacggtgaaaccctgtgtctactaaaaatacaaaaattagctgggcatggtggcaggtgcctgtaatcccaactactcgcgaggctgaggcaggagaattgcttaaaccccggaggcggatgttgcagtgagcg

SEQ ID NO: 17824 - DNA, 384 bp, Homo sapiens
ctcctatagggcgaattgggccctctagatgcatgctcgagcggccgccagtgtgatggatatctgcagaattcgcccttagcgtggtcgcggccgaggtactatcccagccccccaggttcgcctaatagtcttggctacttccctacagctgctaatcttagcggtgtccctccacagcctggcacggtggtcagaatgcagggcctggcctacaatactggagttaaggaaattcttaacttcttccaaggttaccagtatgcaaccgaggatggacttatacacacaaatgaccaggccaggactctacccaaagaatgggtttgtatttaagggccccagcagttagaacatcctcagaaaagaagtgtttgaaagatg

SEQ ID NO: 17825 - DNA, 563 bp, Homo sapiens
ctcactatagggcgaatggggccctctagatgcatgctcgagcggccgccagtgtgatggatatctgcagaattcgccctttcgagcggccgcccgggcaggtacttttttttttttttttttttttttccttttttttttttttttttttttttttttaaaaagccccccaaagggggaaacccccttttttagggggaaaattccccccccccctttgggaaaaaagggggggataaaaaaaaaaaatttttttggttttcaaaaaaaaattttaaaggggcggaaaaaaactcccctttgcaaaaaaaaaaaaaaggggcccccaaaatttttccccccccccccattaaaaaagggggggggcccccctttttaaaaaggggggggggggttaaaaaaaggggggcccccgggggtttttaaaaaaacctttttaaacccccccttttaaaaaaggtttttaaaaaaccgggggcccacccccccggggggaaatgcccacccccgggggggtttttttttggggttaccatggggaaaaaaaagggggaaaaaagggg

SEQ ID NO: 17826 - DNA, 520 bp, Homo sapiens
gcgaatggcgaatggggccctctagatgcatgctcgagcggccgccagtgtgatggatatctgcagaattcgcccttagcggccgcccgggcaggtacgcgggtgatattttaatctcacatccagaatggctaaaatggaaaacccagaaaatgctagatgttggtcaagagttggagtaactgaaactacacagctgctggaaatgtatattggtataaccactttggaaaatgggaagttcaacaaacaggcaaaccaatctagatttagggatatatgtttaggtagtaaaagtataaagaaaggaaatagttagctttgcagggagtagtgcttgggaggtaataggtgcttctggagtgctgttgatgttctgttcctaagtagggtgctatggcttgagtttggtttgtctgaccctaccaagtctcatgttaaaatttcatccccagtgttggaggtgaggcctggtgggaagggttgtgggagtggatttctcatgagtggcttcgtattc

SEQ ID NO: 17827 - DNA, 356 bp, Homo sapiens
atagggcgaattgtgccctctagatgcatgctcgagcggccgccagtgtgatggatatctgcagaattcgccctttcgagcggccgcccgggcaggtacgcgggattgctttgtgttcagtccttttggaacacgtagcttccagcttaagggtagagaaatatatacctaaaatcatcaatacatgaaagaaaaaggatggaaactatgtcctcagttttacttctaccaaaacatccctgtatgtgtgtgcatgtatgttggcgtgtgtgtgtgtgcatgcatattagtaaatgtgtgtttgcatgtgtgtgttggggagtgtatgtgatctgggtgttggtaaaaaaacaaaa

SEQ ID NO: 17828 - DNA, 474 bp, Homo sapiens
tatagggcgaatggggccctctagatgcatgctcgagcggccgccagtgtgatggatatctgcagaattcgcccttagcgtggtcgcggccgaggtactttttttttttttttttttttttaaattttttttttttttttttttttttttttttttcttttgtccggggggctttgtttttttttttaaaaaaaacccccttttttttataaaaaaaaaaaaaaaaaggcgctgtgggcaaaaagggactacccctgcccccaccaccgggggggggggggtttttccccccccagggggggggggaaaaaacccccccccccagccttgtcccccgaaaaaaaaaaaaaagggggggggggggggggtttaaaaaagggggggccccccttttgtgggcccccaagaggaaaaacaaaatttttcccccgcgggggggggtatatgagggggggattcccccccccggggggg

SEQ ID NO: 17829 - DNA, 606 bp, Homo sapiens
tatatggcgaatggggccctctagatgcatgctcgagcggccgccagtgtgatggatatctgcagaattcgccctttcgagcggccgcccgggcaggtactaggtcttccttaagcagcaagaaaatgtggggggttttacagaagaaaacaggcaatctgggctatagcagaagagcactaatcaacttaagtccaccttccatggtggttcagaaaccagactaccttaacgattttacccacgaaatcccaaatatccagactggctcctatgaaagtatggcaaaaaccacaccaactggaggccttccaagggacccccaagaactcatggttgataaccctttgaatcagctctcgactctagcagggcagttgtccagtctgccacccgaaaaccaaaaccctgcatcccctgatgtagttccctgccctgatgaaaagcctttcatgattcagcagccctctacccaagcagtagtttctgccgtatcagcaagtattcctcagagctcctctcccacaagcccagaacctcggccatcccatagtcaaaggaactatagtccagtggcaggtccaagcagtgagccaagtgcccaca

SEQ ID NO: 17830 - DNA, 582 bp, Homo sapiens
tacgactcactatagggcgaattgggccctctagatgcatgctcgagcggccgccagtgtgatggatatctgcagaattcgcccttagcggccgcccgggcaggtacgcggggggattcccttctgtcgcgcggccttatagttccggctgtggcgcgcggacggaaagtttatgccgacggaaagtttatgccgacggactgtgtccggcgatgggcacgggcatttcttcgtttatagctgtctgtttgcattctgattgggaacactgggatcattttcatcatgccgacagtggtggtaatggatgtatccctttccatgacccgacctgtgtctattgaggggtccgaggaataccagcgtaagcacctagtagcccatggtttaacgatgctgtttgagcacatggccacaaattacaagcttgaatttacagcacttgtggtttttttcatcactttgggagttgatggtccccttcacgagagattataataccctacaggaagcactaagtaatatggatgattatgacaaaacctgcttggagtctgcattagttggtgtttgcaatatcgt

SEQ ID NO: 17831 - DNA, 314 bp, Homo sapiens
tacgactcactatagggcgaattgggccctctagatgcatgctcgagcggccgccagtgtgatggatatctgcagaattcgcccttagcgtggtcgcggccgaggtacttttttttttttttttttttttttaactgaaagagttgacaattttattttcacatttcccaatacaaaggaaaactggatcttttttgtcccacttctcccctccaaaactattctctttcatgggacaggggagcaagtcttccttatgctgtttagaaaactcagtatcacagcagcatgatctcctggggaagcagaacagg

SEQ ID NO: 17832 - DNA, 612 bp, Homo sapiens
actcactatagggcgaattgggccctctagatgcatgctcgagcggccgccagtgtgatggatatctgcagaattcgccctttcgagcggccgcccgggcaggtacttaaaaatgttgctcagcatatttaacattattattgttcatatttcctaatggggaacagcgtttttctcttacattccagtattgtttctgcctctattaataaggtttctgataatatatatcagtggagatatttctttggacttatatctttcagcttttctttagataatggctcttaaatgttggtctgcaggcaggtgataggcaatgatatgaaaatcatatgggggacttattaagaatatagatcagcagggcccatctctccatatgctgattgagtagtacctcggccgcgaccacgctaagggcgaattccagcacactggcggccgttactagtggatccgagctcggtaccaagcttggcgtaatcatggtcatagctgtttcctgtgtgaaattgttatccgctcacaattccacacaacatacgagccggaagcataaagtgtaaagcctggggtgcctaatgagtgagctaactcacattaattgcg

SEQ ID NO: 17833 - DNA, 522 bp, Homo sapiens
cgaattgggccctctagatgcatgctcgagcggccgccagtgtgatggatatctgcagaattcgcccttagcgtggtcgcggccgaggtacttcaaacacgactaagcaagatctggggacagcagacagatggtatgaaacttgaatttgtagaagaaaacctccaaaagaggaaacagagtttttatcaatccattctcagatgaccaatttggaagacattgatgtcaatcataaaagcaagttatcttctctgcaagatcttgaaaaaactaaacagcttgaagaacaagaccacttattagaagattatcagaaaaagaaagaagactccacaatgcaaattagtttcttgcaagagaaaattaaagtatatgaaatggaacaagataaaaaagtagaaaactcaaataaagaagaaatacaggaaaaggagacaatcattgaagaattattaaagggaaataaaaaaaaatgttcctgcccgggcggccgttcgaaagggcgaattccagcacact

SEQ ID NO: 17834 - DNA, 570 bp, Homo sapiens
tactatagggcgaattgggccctctagatgcatgctcgagcggccgccagtgtgatggatatctgcagaattcgcccttagcgtggtcgcggccgaggtacaatcatagctcactgtaacctccaactcctgggctcaagtgatccctctgcttcagcctcccatgtagctgggactataggcacatgccaccatgctcgactaatttaaaaaaaaaattatagagacgggggtcctactacattgtccaagccggtctcgaactcctggcctcaagtgatctctcacctcggtctcccaaagtgctgagattacagacatgagccaccatatccagccccttgccttgaatttttaaaaaattttagagacatattctacatatagttgcatttttgacattttcactgatatcatcccaaggcattaagtatttttgacaatgtgacttaatggttatatgacatttcattaatttatttaaccatatgtctactgactatatgtggttaattttataatcaggctctgtgatgaaattgttatacacacatctttatgtaacatctc

SEQ ID NO: 17835 - DNA, 398 bp, Homo sapiens
ctcactatatggcgaattgagccctctagatgcatgctcgagcggccgccagtgtgatggatatctgcagaattcgcccttagcggccgcccgggcaggtacttttttttttttttttttttttttgagacattgtctggttctgtcacctaggctggagtgcagtggcatgatcttggctcactgcaacctccacctcctgggctcaagccatcttcccacctcagcctcccaagtagctgggactataggtgcacactgccagggctggctaatttttgtatttttagtggagatggggtttcaccatgttgtccaggctggtcttgaactcctgagctcacgtgattcgcccaccttggcctcccaaagtgctgggattacaggcgtgagcccct

SEQ ID NO: 17836 - DNA, 466 bp, Homo sapiens
tatagggcgaattgggccctctagatgcatgctcgagcggccgccagtgtgatggatatctgcagaattcgcccttagcgtggtcgcggccgaggtacatttcctgctcctgtttccttaaccaccatcctcagggcatctccggcaccttggggtcgggtaagtgctctctactgccctcgttttagctgcctttatctcgtctatatggcactttctgcgtgaaaagacatttgccttacagggatgaaactggacttgcaagagtttgctgtagaaggtgttcaagtcaggaagatgctcagaaatgacctcctctcccaaccacttcaacgattctttctttgggtttggggttcttgcagttctatcatctaaaataacctttggactgcaggtaaaatgcaataaggacaactaaccaagtagacaaaacaagttcccctaggcaggggtgtccaatatt

SEQ ID NO: 17837 - DNA, 527 bp, Homo sapiens
tagggcgaattgggccctgtagatgcatgctcgagcggccgccagtgtgatggatatctgcagaattcgccctttgagcggccgcccgggcaggtacgcgggaagtaagattcttaggagcttttcttatcacacaagatgcctgaatcgaatgtgagaattgaaggcatttcttctgcataaacaaagaattctacctgctggacagaaacctggaaagttctttggaattcgctgaattacagtttagtatgtcctgattacagagtgacaatatttatcaagcctttgttatattggattatcttctctcttaaaatacaactgtattataattgaaatgacagcccaaaattggatggtttaccaaaaccaatgaaagggatttcacacatcaatttttatttctgttttgaagagcacatgctatataataattgctagtagcaactgcagtaaaacaggtgataagttattttctctgaaaagatccagtcctaaaacaggattcttcgatcattcatggc

SEQ ID NO: 17838 - DNA, 469 bp, Homo sapiens
ctatagggcgaattgcgccctctagatgcatgctcgagcggccgccagtgtgatggatatctgcagaattcgccctttcgagcggccgcccgggcaggtactcacagttaattaagtatatgctattctttgatgccatttcatttaagcatttgcttaaaatgaagaaggtagtgattgtgaaattgagcttgtttttaagaaataatttgacaatgtataagatccgaggagattgtgtctacttactaagtttcttctgtcctaaaaatcagatgacattttaaatggttaagtcaaccacaaatgtctcacgagataaaaatttttatgtcattttctgtaaaataggacaaactaatttctattgtgattaatttaaacatagctataatatttatactagttttatatacattagtatattgtaatcacattaacttatctctgtatatcatgaaagagattt

SEQ ID NO: 17839 - DNA, 577 bp, Homo sapiens
atagggcgaatggggccctctagatgcatgctcgagcggccgccagtgtgatggatatctgcagaattcgccctttcgagcggccgcccgggcaggtacagcttcaggacagccaggttggcttccagatcataggcattttccttggcctgcgtctctacatagcgctccagggtggccaggttctcaggattgtacgcgggttatcagaaaaaaatttccagctcaaccaagataaaatgaatttttccacactgagaaacattcagggtctatttgctccgctaaaattacagatggaattcaaggcagtgcagcaggttcagcgtcttccatttctttcaagctcaaatctttcactggatgttttgaggggtaatgatgagactattggatttgaggatattcttaatgatccatcacaaagcgaagtcatgggagagccacacttgatggtggaatataaacttggtttactgtaatagtgtgctgttcatggaaaccgagggctgcatcttgtttatagtcatctttgtacctcggccgcgaccacgctaagggcgaattccagcacact

SEQ ID NO: 17840 - DNA, 553 bp, Homo sapiens
tcactatatggcgaattgggccctctagatgcatgctcgagcggccgccagtgtgatggatatctgcagaattcgccctttcgagcggccgcccgggcaggtacgcgggcttatctgtgttttcggctaacaagcggtggacgcctcctcgaagcatccgcttcactgcagaagaaggggacttggggttcaccttgagagggaacgcccccgttcaggttcacttcctggatccttactgctctgcctcggtggcaggagcccgggaaggagattatattgtctccattcagcttgtggattgtaagtggctgacgctgagtgaggttatgaagctgctgaagagctttggcgaggacgagatcgagatgaaagtcgtgagcctcctggactccacatcatccatgcataataagagtgccacatactccgtgggaatgcagaaaacgtacctcggccgcgaccacgctaagggcgaattccagcacactggcggccgttactagtggatccgagctcggtaccaagcttggcgtaatcatggtcatagctg

SEQ ID NO: 17841 - DNA, 397 bp, Homo sapiens
  misc_feature 130: n = A,T,C or G
ctatagggcgaattgcgccctctagatgcatgctcgagcggccgccagtgtgatggatatctgcagaattcgccctttgagcggccgcccgggcaggtactttatttttttttttttttttttttatttntttttttttttttttttttttttggggtttttttttttttttttttttttttttttttgttttttttttttttttttttttttttttgttggggggaaaaaaacccaaccccttttttttttaaaaaaagactttttttcttttttaaaagccaattgtgggtgtggtaaaaaaaaatatttttttttgggggggggggggggttcaccccctttatatccaactttttgggggggtgaggaaaaaaaatttttttggggtttgggt

SEQ ID NO: 17842 - DNA, 547 bp, Homo sapiens
tatagggcgacttgggccctcttaaatgcatgctcgacggccgccagtgtgatggatatctgcagaattcgccctttcgagcggccgcccgggcaggtacacaatgagagcctttcccctctgactgagctcacattatcgtcctactacctgtgtcatgaagcgcgcttaacacttcatatagcgtgccagtgccatatatagggtgatcgtacctttgacgtgaccctctctaggccattagcactacactggacgagacgtccttctgcatgaaactggaaaacaatgatggtgtccttaatcgcctaaagttatcatgtataacccggtaatcccgtttgttggcaccattcctgatcagctggatcctggaactttgattgtgatacgtgggcatgttcctagtgacgcagacagattccaggtggatctgcagaatggcagcagcatgaaacctcgagccgatgtggcctttcatttcaatcctcgtttcaaaagggccggctgcattgtttgcaatactttgataaatgaaaaatgggga

SEQ ID NO: 17843 - DNA, 627 bp, Homo sapiens
ggggccctctagatgcatgctcgagcggccgccagtgtgatggatatctgcagaattcgccctttgagcggccgcccgggcaggtaccagatgggagggattccttgcacgtaatcttgagcatccacctgcttcagcaggttcaacaccaggtgcaaagccatccaggtgtgcccaacagcaattagcttggtattattcagtaaaactttcagttaagatttcaattgacagtttggggaagggatgtgctggctattagttaaatgactttagaggggggttcatttgtctctgtctcacccaatcctgaaactgcagtgtaaccaagaaaaagccaaagagaagcacttccctttctatcctcgtcactagtaactggaggtttttccaaaattaaaaatctgtgtctacatcatggtccatattttagaccctgtcatggaaataagtgctcaggtaaactaatatttttctttcacccccagaactagagctttcctagctgtaagccttataaaccaagatgcaggtacctcggccgcgaccacgctaagggcgaattccagcacactggcggccgttactagtggatccgagctcggtaccaagcttggcgtaatcatg

SEQ ID NO: 17844 - DNA, 574 bp, Homo sapiens
ctatatggcgaatggggccctctagatgcatgctcgagcggccgccagtgtgatggatatctgcagaattcgccctttcgagcggccgcccgggcaggtacgcgggcggggcgtggtggcacgcacctgtaatcccagctactcaggaggctgaggcaggagaatcgcttgaatccgggaggcagaggttgcagtgagccaagatcgtgccactgcattccagcttgggtgacagagcaagactctgtctcaaaaaaaaaaaaaaaaagggggggggccgggggctcacccttgaatccccaccttttgggggggccggggcgggggaatcccctggggcaaaatttaaaaattaccctccaaactggggaaaccccattttttctggaaaatccaaaatttccccggttttgggggggggcccctgaaaccccgcctcttgggggggttggggcagaaaatttttttaaccccggggacccaaaggttccagggacctaaaatcccttattggccctcccccgggggcaataaaaccaaatctctttcccaaaaaaaaaaaaaaaaaaaaatt

SEQ ID NO: 17845 - DNA, 69 bp, Homo sapiens
tttaaataaattcagggtaacaattttaatctaagtttctttaatattcttgatctgggttaaacattt

SEQ ID NO: 17846 - DNA, 602 bp, Homo sapiens
tacgactcactatagggcgaattgggccctctagatgcatgctcgagcggccgccagtgtgatggatatctgcagaattcgccctttcgagcggccgcccgggcaggtacgcgggtggcctctggcctgtcacttcccccagtgtcttgtgttccgtgatgtggcccctcaagctcctgtgcacttcctggtcattcctaagaagcccattcctcggattagccaggctgaagaagaagaccagcaagtgggaagaacagggccagggtttggctgggaggagcccctggacccagctagaggtcttgctccctatgaatgaagccacctatgtccctccgctctctctatagcttctaggacacctactccttgtggccaagcagacagcaaaggctgggggcctgggagatggataccgacttggtgagcgacttttggcccttggtccctcacctatgaattctcattcctacttctcaatatgatcttcattcttcgacctctgccatgatcctgactccctaaccccaagctcaatttcagtgatcaacgatgggaagctgggtgcacaatctgtgtatcatctgcacattcatgta

SEQ ID NO: 17847 - DNA, 541 bp, Homo sapiens
tacgactcactatagggcgaattgggccctctagatgcatgctcgagcggccgccagtgtgatggatatctgcagaattcgcccttagcgtggtcgcggccgaggtacaaatagggtcacctactctcaaattctgcggttcaaattgtggttggagatgagatgttctatttctgcatctctcctggaccatcttagagcagtgcaaagtttactggatcttccagtgcattattggcccttggtgtgatgacgagagagcaggaaggaggtctccagctccttttctgagttcagatgttccctagcccaagaagactaatcatgcacctggtttcctgctctgaaaaataagaagtgattttggcagcctttgaatctggatggaaggtggttttttttttttttcagtaacaaaggtagttgtgtatgtatgtacctgcccgggcggccgctcgaaagggcgaattccagcacactggcggccgttactagtggatccgagctcggtaccaagcttggcgtaatcatggtcatagct

SEQ ID NO: 17848 - DNA, 569 bp, Homo sapiens
  misc_feature 512, 519: n = A,T,C or G
ctcactatatggcgaatggggccctctagatgcatgctcgagcggccgccagtgtgatggatatctgcagaattcgcccttagcgtggtcgcggccgaggtacttttttttttttttttttttttttatttttttaaacaaggaagccccccccgcggggaaaaaaaaacaaacaactttgggggggggaaaaaaatttaccccccccccaacccaaaaaaaaaattaccccccctttttcccccacccccttattaatcccccccccgggggcccccccccccttttttaaaaaactttttttaaaccaccccccggtttttaagggaaaaactaaaaaaccttttttttaaaaaacccctttttttatttttccaaaaaaaaggccccccaaaaaaccccccccaaaaaaataaaaaggggggtttcccccccccaaaaaaaaccctttttaaaaaaaaaaaaaaaattccccccctggggggaaaaggggcaaaaaaaaaaaacatatnaaaaaanctttcccccctttttttccccccccccccaaaaaaaaaaaaatttttttt

SEQ ID NO: 17849 - DNA, 575 bp, Homo sapiens
ggggccctctagatgcatgctcgagcggccgccagtgtgatggatatctgcagaattcgccctttcgagcggccgcccgggcaggtaccaagttctagctgaagctggaggagaactgggagaagcttcgcctcctctgaaccacattcatggagctccttattgtggagatgggaaggtgtcagagagactgggagaagagtgtgatgatggagaccttgtgagcggagatggctgctccaaggtgtgtgagctggaggaaggtttcaactgtgtaggagagccaagcctttgctacatgtatgagggagatggcatatgtgaaccttttgagggaaaaaccagcattgtagactgtggcatctacactcccaaaggatacttggatcaatgggctacccgggcttactcctctcatgaagacaagaagaagtgtcctgtttccttggtaactggagaacctcattccctaatttgcacatcataccatccagatttacccaaccaccgtcccctaactggctggtttccctgtgttgccagtgaaaatgaaactcaagatgacaggagtgaac

SEQ ID NO: 17850 - DNA, 457 bp, Homo sapiens
attgggccctctagatgcatgctcgagcggccgccagtgtgatggatatctgcagaattcgcccttgagcggccgcccgggcaggtactcattttccttttgtaattaataagtcctttttgcagagttctttgaaattatgtaaatactttgtcatcaaactatcaattcattaggtaataatctgtatcacaggaaatcatggtttcctattttgtatattaggttataatctgttactatcattatttctttgagaccagtgtgggcccttcaatctggctctgacttctgggtttttaaaagctttttgggtgattctaatgtgcagccatgcttaagaaccacttctctaggtagaccaaagcacctatattcaaaggatattcacaggattgcaggcaacatgcagcagcctcagggaactgcaaggctttcagtgtggctggtggacagg

SEQ ID NO: 17851 - DNA, 436 bp, Homo sapiens
  misc_feature 377, 378, 383, 384, 385: n = A,T,C or G
tgtgatggatatctgcagaattcgcccttagcgtggtcgcggccgaggtacagactttatttccactctggtggataagttcaataaaggtcatatcccacaaaaaaaaaaaaaaaaaaaaaaaaaaaaaaaaaaaaaaaaaaaaaaaaaaaaaaaaaaaaaaaaaggccccccccttttttcactaaaaaaaaaaccccccccccaaaaatttaaaaaaaagggggggttaaatttaaaaaaaaacaccccccccttttttttaaaaaaaaaacccaaaaaaatgctggcccccaaccccctttttttgtggaaaaaacccaaaggggggtttttttttttgagggggaaccccccccccaaaaaaaaaaaaaaannttttnnnttccctcccccgggggggttttttaaaaggaaaaaaacccccccccggggg

SEQ ID NO: 17852 - DNA, 516 bp, Homo sapiens
catgctcgagcggtcgacacgtgtgatggatatctgcagaattcgcccttagcgcggtcgcggccgaggtacctagggttacaggtctagaaagtgcagagccatccctacctagaagagaatagatgggaagagaactgaaagaaagaattcctcaagcactgaagtcaggaaaatccccgtaggcactgtattagttgttccatttatcccagcactccacttgtggatgaaggagttgtatagaaaggagatgagaaaatggcaggagtggaagcagccaagaagagatcgatgactgaagatctccttcaccttcaagactgtctcaaggggttatttcacctctactcatgaggatggccagtttttctgtcttttatctttagacccatatataatcagttcagagcacaaatcaaaataaactggcctaaataactgaattctaggaagcaaagctacatcttttttcatatgccaaagcttctgttttctcatgttgttcctactttt

SEQ ID NO: 17853 - DNA, 597 bp, Homo sapiens
  misc_feature 573, 574: n = A,T,C or G
ggcgaatggggccctctagatgcatgctcgagcggccgccagtgtgatggatatctgcagaattcgcccttagcgtggtcgcggccgaggtacagagtttttattgagggtcagctgtgtggacttggctaacggcctgcatgactaaccttaacctctaaccccttcagatgttgaactgatgctttgtggcccaaggtcctcactacaaataacatcattagcatacaatatctagtgtggtccgagatctgcaggtaaacgtagacattcttattagtcaggaaattccaagggtagaggatatttcctgggagatagggtgaagggccagggtaggggatatttcctgggagatcgggtgaagggccatacttttctttgagcaagaatcatcctttatagcataggcctgatatgaaacagctaattagaaacacagctgagatttgaacccaggcattcagacctcaggtgcttaaccttatgtaacagcccatttgccctccaccaccaacagtgtctcctcctatgctcatttgacagtaggaaaaaaaaaaaaaaaaaaaaaannttttccttcccgggggggccttt

SEQ ID NO: 17854 - DNA, 439 bp, Homo sapiens
  misc_feature 111, 112: n = A,T,C or G
tacgactcactatagggcgaattgggccctctagatgcatgctcgagcggccgccagtgtgatggatatctgcagaattcgcccttagcgtggtcgcggccgaggtacttnnttttttttttttttttttttttaatttctcgagacagggtctctgtcacccaagctggagtgcagtgacacaatcaaggctcactgtagcctcaagcttcagggctccagggatcctcccatctcagtctccttgggagctgggagtaggcatgtgccaccatgcctggctaatttttaatttttttgtagagatggggtcttgtcatgttgcccatgtcggtctcaaactcctgggctcaagcgatactcccaccttggcttcccagtattgggattacaggtgtgagccaccatgtctggcttgcttctctttttgtattctaaa

SEQ ID NO: 17855 - DNA, 604 bp, Homo sapiens
  misc_feature 544: n = A,T,C or G
tacgactcactatagggcgaattgggccctctagatgcatgctcgagcggccgccagtgtgatggatatctgcagaattcgcccttagcgtggtcgcggccgaggtacacgaagctttatttttggaatttacaagttagattttatagattcttgttcagaaatagctgaacaagaataaaactatgttactgaagtcctttaaatgccattttctgaggtgaacgttctcaaatatggataaacaaaattacatatccagacaaaaatccctatttttttgcacagagtggaaggaggcctgttaaactaacccacttaataatgtatttagttttaatagggatagatttttaaattttaaggtttaaaatatttctacatatgaattccaaaatgaatttttggtaagtagtggctctaattcctggaaatgtacctgcccgggcggccgctcaagggcgaattccagcacactggcggccgttactagtggatccgagctcggtaccaagcttggcgtaatcatggtcatagctgtttnctgtgtgaaattgttatccgctcacaattccacacaacatacgagccggaagcataaagt

SEQ ID NO: 17856 - DNA, 499 bp, Homo sapiens
tatagggcgaatggggccctctagatgcatgctcgagcggccgccagtgtgatggatatctgcagaattcgccctttcgagcggccgcccgggcaggtacaaatatattgtgtccttaactccaacttctttggaaacaaacaaacaataacaacaacaacgaaacaccagaggcaaagatatagggcagatccctagcacaatgcaagtttttagaagcttttcttattctactttaaaactcaatgtaaaaatcatccctttaccaaaacaaaacaacaatacagataagagctaaattacaatttagggattaggagataagaagagaagcaggttctctaaatctgctttagaattctctttcaaatctgtcatagtcttgaagcaagaataagaaaacagaataatttccctttccccactttagacaagtaaatttataaaaaacttttttagaggtgaggtctcactatattgcccaggctggtctcaagtg

SEQ ID NO: 17857 - DNA, 528 bp, Homo sapiens
tacgactcactatatggcgaatggggccctctagatgcatgctcgagcggccgccagtgtgatggatatctgcagaattcgcccttagcgtggtcgcggccgaggtactatcaataatcacctctgactttcagatttaaattcagtgcaattgacaaatgcatcactaaaggaaaatgcagcttaaaagatactcaaaacatttgtgtctattcccgggagcacattttaaaattattgcacagatttttttaatttttatttattttttttaaacaataacagaggtcaaccacagatgtggacctccagcaataaaagcaggaattcaagtgccagatactcagcatattaggtttcctacgtaagtcacagggtaatatgttctaaatatctctaatgtgatccaaaaccctaaaaagagctggcacaaaaccatcgtgaatgactgcctctcttgatgtaaatttttaaaaatattattacagtatcatagtccccactaacaacaactggggtacctgcccg

SEQ ID NO: 17858 - DNA, 575 bp, Homo sapiens
atatggcgaatggggccctctagatgcatgctcgagcggccgccagtgtgatggatatctgcagaattcgcccttagcgtggtcgcggccgaggtactctgacaaatgctcttcagacctctcaccatcagacaccaggggaaggagacccttaaaccggagaattataattcaacagaaactgtcatttccccagacatcatgggagtattacatgcaaaaaccagccctgcggtgagtgggcttaaactcaaacttaattcttcaatacaggactctttactgatttgttctaagttttcagtgatgaacccaaataagattgagcttcaagagacagggttctgagaatctttggagtcattctgtccactattcctaagagaatcaatgtagataacagtcccaaaacctcaacagattgtttaaaagtgaacagatgttatctaaaatatcagaatcaaaattatgtgtaaaacatatccgggtgtattgtgtatgcacctatacatgtttatatatgtatattcttttttctctgctcaataaaattagcagcagttacagataaatta

SEQ ID NO: 17859 - DNA, 553 bp, Homo sapiens
atatggcgaatggggccctctagatgcatgctcgagcggccgccagtgtgatggatatctgcagaattcgccctttcgagcggccgcccgggcaggtaccaagcataagcattgtaacaaaagtgcaacttttcagcaaatcctccccaaaagatattttaactcaaaatatcattagcacatattttctccctacaaaaatagcatgtcagacatcattaattggatgtattaacaactatgtgcataagagccaccttgtaggctaagagtttaacgttgtttaaacacagcgtttgaggcaaacagtagcaacagcagcagcaaatgcaccaaactgacgaaaagacccagatattttcctcactcatagtcagactgttgtgtctcaccccttacataacatccaagtgagatttctcacagtgctaccttggcaacaaactaaaaatatagacaaggtcttggtttaagccttattaaaaaagctttctttgggattatctggtatctggtttggtctccagaaaatacatagacttggagataggga

SEQ ID NO: 17860 - DNA, 488 bp, Homo sapiens
tatagggcgaattgcgccctctagatgcatgctcgagcggccgccagtgtgatggatatctgcagaattcgcccttagcgtggtcgcggccgaggtacgcgggagcgtgtatcaggaaacacttcacgaaggggcaaaagtggcttcaattctaagagtggacagcggggatcttccaagtctggaaagttgaaaggagatgaccttcaggccattaagaaggagctgacccagataaaacaaaaagtgggttctctactggaaaacctggaaaaaattgaaaaggaacagagcaaacaagcagagatgaagaatgatgagtcagaagaggagcagagcagcagctccgtgaagaaagatgagactaatgtgaagatggaatctgaggggggtgcagatgactctgctgaggagggggacctactggatgatgatgataatgaatatcggggggatgaccagctggagttgatcagggatgatgaaaa

SEQ ID NO: 17861 - DNA, 578 bp, Homo sapiens
acgactcactatagggcgaattgggccctctagatgcatgctcgagcggccgccagtgtgatggatatctgcagaattcgcccttagcgtggtcgcggccgaggtactccctttggcaatcaagtttccccttttatggaggaaaaagttccccatgtcccatgatcctttacatgcctaattctgtcacccgcagctgtcaccaaaaagtgcaaggcagattaatacaaagagaatagtggtaaacattcctagtggcaaacctgtttttagccaaaagggactttactgacagtggcctctaaccccttacatcttaggaaggactctaaccttcctaagttgggccttgaacccaagttcagtcaagcatccttacttttattaagaggagccttttaacctactctgtcttaggagagactctaactcccctaagtgggcctctaacgcaatcccattctttacccaggtatatgtgccccacttacctaaagtcagccaatcaatgctgcagtctatttcctttgggttgggagtctcctcagtattatctcttcatggtcactggaaagatg

SEQ ID NO: 17862 - DNA, 539 bp, Homo sapiens
atacgactcactatagggcgaattgggccctctagatgcatgctcgagcggccgccagtgtgatggatatctgcagaattcgcccttcgagcggccgcccgggcaggtactttttttttttttttttttttttttttttttcttttttctttttttttttttttttttttttttttttttttttttttttttttttttttttttttttttttttttttttttttttttttttttttttaaaaacaaaaatttttttttttttttaaaaaaaaaaaaaaaaaaattgggggggaaaaaaaaaaaccaaaaaaaaaaaaatgggggggggcccctcccccccaaaaaaaaaaaataaaatttgggcaagttgttttaaaaaaaaaaaaaaaaatttttttttttaaaaaaaaaagggggggaaaaaccctttttttccccaaaaaagggccccccaaaaaaaaaaaatggttaaaagggggggaaaaaaaaaaaaaaaaagggggaaaaaccctttccccccttttttttttttaaaaaaa

SEQ ID NO: 17863 - DNA, 590 bp, Homo sapiens
gactcactatagggctaattgggccctctagatgcatgctcgagcggccgccagtgtgatggatatctgcagaattcgcccttagcgtggtcgcggccgaggtactatcgattctttccaccctcacgatgacttgcggttctctctgtagaaaagggatggcctaagaaatacaactaaaaaaacaaacaaaaacaccaaaaaaaaaaaaaaagccatttaaagccagccactagagggagtcagtgcagttccgtaaaggtatgctcagtgcccgctgcctgcaagctgttggggaccccggggagggcaaggcagcctgtccctgcccccagggaactagaacatgacaagaattctccgcactgtgcctacctgtccctttaccttacctctctggcccagagttcttggagggttttttctttattttcttatgtacctgcccgggcggccgctcgaaagggcgaattccagcacactggcggccggtactagtggatccgagctcggtaccaagcttggcgtaatcatggtcatagctgtttcctgtgtgaaattgttatccgctcacaattccacacaacata

SEQ ID NO: 17864 - DNA, 363 bp, Homo sapiens
tacgactactatagggcgaattgggccctctagatgcatgctcgagcggccgccagtgtgatggatatctgcagaattcgcccttcggccgcccgggcaggtacattccttatgagggctttcttcctcagtgttctctttagagggctattgctactggactttctgcaatgtctttggtgtgccctcagagcctgcaacaagtgtatttggatatactctatttgtaaagtttaggcctctaagaaggccacaatgaagcaactaaaaatctgatgattaagggagtcaatcaagctgatgccattcttagtttaaaaatgaagcagagctctaaactcatagatgggttttcttactggg

SEQ ID NO: 17865 - DNA, 660 bp, Homo sapiens
atacaactcaatatactatatggcgaatggggccctctagatgcatgctcgagcggccgccagtgtgatggatatctgcagaattcgcccttagcgtggtcgcggccgaggtacatcttcacataacatactgagaatgcgttgctgtatcagagaatcatttctgagaatcatttctgtagtattcctgcccaagtgcctaacctgaatctaataatgaagaaacttcagacaagtgaaaattgaggagcattctatgatgcagctagcctctgctctataaaaagtcataaaacacatggaaaactaagaaatcttcaaggttaaaggagactaaaaccccatgacatctagatgcatggtaatagattataatatgatgataatagatccttggattaccattatggtaatagagccttggctcagggaaaaaaaattcacaaagggtgttttgggagacagttgacaaaatttgaaaatggattgtatgttacataatattatattagggctaagtctcctgaatatgatgattatactgtgactatataagagactatctttaatcttagtagattcacactaattatttacggataaagggacctaatgtctcagttgaggaaacaaatgcacatgtatgaatatgtgtgtgta

SEQ ID NO: 17866 - DNA, 588 bp, Homo sapiens
tacgactcactatagggcgaattgggcgccaattgagccttctacatgcatgctccagcgggctgcatagcgatggatatctgcagaattcgcccttagcgtggtcgcggccgaggtacataataataacaagccctggagttaggaatgaagaggaccagcacccagaatttctacagcgtacctggaatatccaattttcaacaaaaagttgagatatgcaaagaaatggggaagtctaacccatatatcgggggaaaaaagcagacaaccaggcttgcctgtaagagggaacagatgtcagatttaataaaagatatcatagttgccattataaatatattcatagaaccaaaggaaatcatggttgaagaaataaaggacagtatggtgacaatcacatcaaatagagaatgtatgtagagatagattataaaaaagaaccaaatgaaaaattccactagaggggctcaacagtagatttaaactggtagaagaaagaattagtgaacttgaagattctagatcaatagagattatgccttccaaagaagagaaaagaatgaataaaaaggaagagagcttcag

SEQ ID NO: 17867 - DNA, 556 bp, Homo sapiens
ctatatggcgaattgggccctctagatgcatgctcgagcggccgccagtgtgatggatatctgcagaattcgcccttagcgtggtcgcggccgaggtacttttttttttttttttttttttttggaaaagggttccccccttttttttttaaaaaaaaattaaaaaccccccccaaaaaatttaatttaaaaattggggaaaaaatttttaaaatttccttaggttaaaaaagttgttttaaaaaattgaaaaatttttaaaaaaagggttttaaaaatttttaaaaaaaaaaaaattttttttttttcgggggccccccccttaaaaacaaccttgtaaaaaaagccctttttttaaacttaaatttttttaaaaaaattttaaaaaacttttaaatttaccccggaaaaaaaaaaaaccggtccttttttaaagggggctaaagaaaaattttttttaccttaaaaaatttttaaaaaacccttttttttttgcctttcccgggaaaacccaaaatttaaccccctttttttaaaaaaaaaatttttttaaaaa

SEQ ID NO: 17868 - DNA, 226 bp, Homo sapiens
tagatgcatgctcaagcggcctccagcggcacgcagagtgacggatatctgcataattcgcccttagcgtggtcgcggccgaggaactaaaaactatgactacaggttggtgcaactgccttcatgcatgctaaggcatcagcagttttacccatcattgttttgcaccatcaggacaaatgacaacaaatttgtgccaataatgtattttaatgaaaatagtttt

SEQ ID NO: 17869 - DNA, 456 bp, Homo sapiens
  misc_feature 71: n = A,T,C or G
ctcgagcggtcgtcagtgtgatggatatctgcagaattcgcccttagcgtggtcgcggccgaggtactttntttttttttttttttttttttcctttttttttttttttttttttatctctaggctaggagcgcagctcatgtttattcattcatttggtagcgctagaaactggcaactgtgggctaaatctagcccatagacctaaatttatgtttttcttaaccttcacaatatttagaaatcagagcacttcacataggtctacattttcagcttcttttagcgggaatgctccttcaaagggtatctgcattcctgttcccacagcccccagcattccttgtcctttagccgcctggcttctctaggcacctgagttcatggtcctgggttagaagctgcaaaaaggactgtgctgactccctcaactaaggggtggtacctgcccgggcg

SEQ ID NO: 17870 - DNA, 332 bp, Homo sapiens
tctgcagaattcgcccttgagcggccgcccgggcaggtacttaggcgttcataaaaatacagcagggcaagaggaccaagatggaggcagtgatcagggaatctcaatgagggtgagactgcgacaaagacttgaaaaaggtggagaagcaaaccttgtgggtatttagggtagcagtagtccaggcaaggggaacaactagtgcaaaggctctaggaggcaatgtgtttgaagtgttttaagaacagtaaggaggctagtatggttagaacagaatgagcaaagggggcaaagtggtagaaggtgagatcaaagaggtaatgaggccattg

SEQ ID NO: 17871 - DNA, 536 bp, Homo sapiens
ccctctagatgcatgctcgagcggccgccagtgtgatggatatctgcagaattcgcccttagcgtggtcgcggccgaggtactttcttcctcatactgactatagtcatccacctccattcgagactccaagagagaaagaggatcactgcacacaccccattttcatgaagcccctctgtataagaccccctattttcctcatctcgttttagctggatttttaattttgtagaactactgcctgatcctgagttaaatccattattaagctttgccacatagagattgttatcgttgtcatggtctttgcttaacttgatgcttattttggaagagttcattccatcattctcttggtcatttgttttgctgctgctatcatgacgcctacgaagagtcaatttgggaatcccagagttattttctaggattaactgtgcatcataccttgtgattcgcctcttctttttactttttgcagttctaaagctgtcttttgttttgaagctatctgatgtcacaactgaacaaccg

SEQ ID NO: 17872 - DNA, 458 bp, Homo sapiens
cactatatggcgaatggggccctctagatgcatgctcgagcggccgccagtgtgatggatatctgcagaattcgccctttcgagcggccgcccgggcaggtacttttttttttttttttttccctttccttttttttttttttttttttttttttttttttttttctttttttttttttttttttttttttgattttccccccccccccaaaaaattttaattttggttttgaaggggccccccccaccaaaaaaaaactgggtttttttttttaaaaaaaaggggggggggggggggggggggtttttttttttttaaaaaaaaaggggggggggtgggggatttttttttttttatagagccgcgggggaggacattgttttataaaaaaaaacaaaaagccggggggggggggggggggataaaacaagggggggggggggggggggtggttttt

SEQ ID NO: 17873 - DNA, 438 bp, Homo sapiens
  misc_feature 264, 265, 370: n = A,T,C or G
atacaactcactatatggcgaatggggccctctagatgcatgctcgagcggccgccagtgtgatggatatctgcagaattcgcccttagcgtggtcgcggccgaggtacgcgggtgcctgactttgggaggctgagatgggtggatcacgaggtcaggagttcaagaccagcctggccaagatggtgaaatcctgtctctactaaaaatacaaaaattatccaggtgtggtggcgggtgcctgtaatcccagatactcgggagnngaggcagagaattgcttgaacctgggaggcggaggttgcagtgagctgatattgcaccaccgcactctagcctgggccagtgagtgagactctgtctcttatagnaaaaataaaccataaaagtttcttcccgggggggtcctttaaagggggaatttcccccccgcgggggg

SEQ ID NO: 17874 - DNA, 600 bp, Homo sapiens
gcgaatggggccctctagatgcatgctcgagcggccgccagtgtgatggatatctgcagaattcgccctttcgagcggccgcccgggcaggtacagctatggactgatgcatcccatcccatcatctttcatgatcaaagcagtctcttcttttttgacagctgaagaagcatcggtagggaatccagaaggagcgttcatgaaggtgttacaagcccggaagaactacacaagcactgagctgattgttgagccagaggagccctcagacagcagtggcatcaacttgtcaggctttgggagtgagcagcacagctgatttccagaggatggaagaagtcaggaaacttgggaaaccgctgctgaggtccttgcagccccacggtccccaggctggtgactggtgggggagtatggagtccagctgaccaccagagcctgcacacctgctgctatgggggaggaaaggatgacttctacctcctttccacattccaaattccacatgactacattttattggcagcaccccgctggcaagtgagccttgatgtgtgcttcctgggcttctggcaccttttgtgttctggaaaaaatgct

SEQ ID NO: 17875 - DNA, 561 bp, Homo sapiens
ttgggccctctagatgcatgctcgagcggccgccagtgtgatggatatctgcagaattcgccctttcgagcggccgcccgggcaggtacctaaactctaaggaatgctttttctttgaaaacagaaatatttttacttatttctgtccactatgtttgtgtgtatgtgtgtgtttgtgtgtgtatgtgtggttttgatgccagcaatgcaaacaccaatatatctattaagaagtgattgaatttagattggaaaaaataaaatagttacatgtaaagacataaactctttccttcttaaatgtgattttcaactctatgatagaaactccctctaaaaaacaagcagggcaagaacaaacttacttgtaatgggtgagagaaaataagcaaatctcattggctcattcctgtttttaggaagttgcagtgggattaatgtcaattggaagggatgcagcaagtttagagaaggtgttggcactaacgctgcttgtttggcaaatcatcatcactgaagtattccacccaaagactttttcaaaaaagtcaactaaagtgc

SEQ ID NO: 17876 - DNA, 321 bp, Homo sapiens
  misc_feature 206, 227: n = A,T,C or G
agggcgaattgggccctctagaagcatgctcgagcggccgccagtgtgatggatatctgcagaaattcgcccttcgagcggccgcccgggcaggtattttttttttttttttttaactttctttattattttttttttttttttttttttttttttatttttaattttttttttttttaattttttttaaataaaaaaaaaaaaanttaaaaaaaaaaaaattttanaaaaaaaaaaaaaaaagaaaaaaatggttatttttttccacaaaaaaaaaaaaaaaaatttttttaaaaaaagagagccataaaaaaaaaaaaa

SEQ ID NO: 17877 - DNA, 119 bp, Homo sapiens
cgacgcgtaagacgtgttttgcgacccggcaccaccgtagtttttacgtcccggtgagcgctctcacccgcacctacaagtcgcgtgtatgtatgaggtgtacaggcgacagaggtacc

SEQ ID NO: 17878 - DNA, 698 bp, Homo sapiens
  misc_feature 535: n = A,T,C or G
tacgactcactatagggcgaattgggccctctagatgcatgctcgagcggccgccagtgtgatggatatctgcagaattcgcccttcgagcggccgcccgggcaggtacatttaaaaggtgatgctaatactttaaaatgtttaagatatagatttaaaaagcattgtaaattgtatactgcagtgtcgtctacatggcattggacaggacataatgtaaaacataaaagtgcaattgttacacttacatatgatagtgaatggcaacgtgaccaatttttgtctcaagttaaaataccaaaaactattacagtgtctactggatttatgtctatatgacaaatcttgatactgcatccacaacattactggcgtgctttttgctttgcttttgtgtgcttttgtgtgtctgcctattaatacgtccgctgcttttgcctgtgtctacatacacatcattaatactattggtattactattgtggataacagcagcccctgcgtttaggtgttttattgtatatattggatttgnttatataccattatttttaatacatacacatgcacgctttttaattacataatgtatatgtacctcggccgcgaccacgctaagggcgaattccagcacactggcggccgttactagtggatccgagctcggtaccaagcttggcgtattcatggtcatagct

SEQ ID NO: 17879 - DNA, 324 bp, Homo sapiens
tagatgcatgcatgagcggccgccagtgtgatggatatctgcataattcgccctttcgagcggccgcccgggcaggtacttttttttttttttttttttttttttttttaaaaaaattttttttttttttttttttttttttttttttttttttttttttttttttttttttttttttttttttttttttttttttttttttggggaaaaaaaaaaaaaaaatattttttttttttaataatggggattttaccctgtgatgccatgtgggaaaaaaaaaaaaaaatacttccccccgtatgtgtttttttaaaaaaaaaaaaa

SEQ ID NO: 17880 - DNA, 399 bp, Homo sapiens
ctatatggcgaatggggccctctagatgcatgctcgagcggccgccagtgtgatggatatctgcagaattcgccctttcgagcggccgcccgggcaggtacgcgggctttatacaaatgtatccataaaatatcagagcttgttgggcatgaacatcaaacttttgttccactaatatggctctgtttggaaaaaactgcaaatcagaaagaatgatttgcagaaagaaagaaaaactatggtgtaatttaaactctgggcagcctctgaatgaaatgctactttctttagaaatataatagctgccttagacattatgaggtatacaactagtatttaagataccatttaatatgccccgtaaatgtcttcagtgttcttcagggtagttgggatctc

SEQ ID NO: 17881 - DNA, 536 bp, Homo sapiens
cgaattgggccctctagatgcatgctcgagcggccgccagtgttttggatatctgcagaattcgccctttcgagcggccgcccgggcaggtactcgctttttccgttaagtatgccaagcacctcggttgaaaggcttgactcaaaccagaagtcttgctggaattcgtctctgaacacttgaaaaacagaaaccctgagccgcaacaaacatgcctctgtgtgtcgggattgcctttgtctctgcttccatgtggcttttccttttgtagctatgcttagtgacataatcttccctcttctagccttctcctttcaagcctgtctgttaattaaccatgtcagtattggcaagcatttatcttcccccaccctaacatgcaatcttctaagaattttgcaaaattctaaacaaatatagagatggtatatagaattcatatctagaaaactttgattttaatgtgagcttatcaaatttgttctggcttttttggcactaaggcaaaaacatgttaaccagaaataatttattct

SEQ ID NO: 17882 - DNA, 452 bp, Homo sapiens
ggcccctctagatgcatgcctcgacggccgccagtgtgatggatatctgcagaattcgcccttagcgtggtcgcggccgaggtacaagtatccttactaagagtgctccttttgtattttacatatatacagtatgaaaatacattggaacactaggaaagtttttaaataacagttctaatttatcagaaaattgtgttttgggattgagttctttgtctcagcccagaatcccaggtcctgggcctggttttctaatgctgtcatctcagttcgatattttactttagaacctggaatctcctacttaatatatgaccatgactttgaaaggcaaaagaggaatcaagaataaataaaacaaacttaatcttcatctttaaaaaaaagaaaaaagaaaccaaaatgagaatcaacacttcataggctcactgggttttcttttcttttct

SEQ ID NO: 17883 - DNA, 544 bp, Homo sapiens
  misc_feature 10, 20, 224: n = A,T,C or G
ggccctctantagctgctcnacggccgccatgtgaggattctgcaaattcgcccttacgtggtcgcggccgaggtacttttttttttttttttttttttttttttttttttttttttttttttttttttttttttttttttttttttttttttttttttttttttttttttttttttttttttttttttttcccccccccaaaaaatttttttaaaaaaaaaanttttttcccacccccctctttttttaaaaatttttttaaaacccccccccccccccccccccttttttttttttttttccaaaaaaaaaaaattttttccccccccccccccaaaaaaaaaaaaaaaaaattttttttttttttttataaaaacccaaaaatttttttttttaaaaaccccccccccctttttttaaaaaaacccccatatatttttttttttcccccccacccccccctttttttaaaaaaatttttttttccccacaatttttttttttttaaaaaaaaaaaaaatacttcccctttttttccccccc

SEQ ID NO: 17884 - DNA, 673 bp, Homo sapiens
ctcactataggtcgaattgggccctctagatgcatgctcgagcggccgccagtgtgatggatatctgcagaattcgcccttagcgtggtcgcggccgaggacacaatatgatacaggatatttttttctttcttctttaactggaataaatttaaactatggctttcctctaagttaatattgaatttagagctctatcctcacactagaaccggagttggcaaccttggccaacaggctaatctcactcattgcctgtttttggaaataaagttttattggaacacagccacactcattcttttacatattgtctttgactactcagagctgaatggttgtgacagagaccatatggccctcaaagccagaaatatttactatctgtcccctttccaaaatattaatactttaccaacccctatgctagaacatgaaactttcttcctctgaaaatttttcttttgtttatacaaagtataagttaaagggtcagtatctttatattttaagtgtaaagcatgtagtagcacttgcttctaaaaaccaaacaaaaattccacatctgcagaacaaaacaatatctcttttgaattccacaactgaaactatgcagcataaagccaaatctgctttggatccttcataacttttcaaaatatttagtaattta

SEQ ID NO: 17885 - DNA, 621 bp, Homo sapiens
  misc_feature 539, 602: n = A,T,C or G
atacgactcactatagggcgaattgggccctctagatgcatgctcgagcggccgccagtgtgatggatatctgcagaattcgcccttagcgtggtcgcggccgaggtactgggattagaggcgtgagtgaccgcacccggctggactggtaaactttcctaggaaaagatcttcctagagttggttttcccctatccaaacctatcttttccatttcttccattagacctttgctttgatgatgatgatgatgatgatgacgaccaggatgcttttgcatttactgagtttctactttgtgctcagaagtgtgttaaggtttttgcacttaataacataaactttcatttaatattcatgacaaccctacagagtcagcatcctattgtctccatattacagatgaggaaattgagattttaagaggtgaaataacttgcccaaggtcacaaagctagtagataaattcatttttttctgacctaaacacccataatattaatcaaataagcaaatatgggtggctacctgactgtccnctccttatttagagacaaaaaccacagtgagtgctgcacattccagccaaattccatcacttncaagttctggacagaaatg

SEQ ID NO: 17886 - DNA, 574 bp, Homo sapiens
tatatggagtcgacccacgcgtccgctttcccttcctagattgcacagcgttcatgcccaggatgagcttcctgacccccacgatcctgctgctggcgctggtcgccgccacccaggccgagcccctgcacttcaaggactgcggctctaaggtgggcgttataaaggaagtgaatgtgagcccgtgccctacccagccctgtcagctacacaaaggccagtcctacagtgtcaacgtcacctttactagcggcactcagtcccagaacagcacggccttggtccacggcatcttggcaggggtcccagtctacttccctattcctgagcctgacggttgtaaatgtggaatcaactgccccatccagaaagacaaggtctacagctacctgaataagctgccggtgaagagcgaatatccctctctaaaactggtggtggaatggaaacttcaagatgacaaaaaggataacctcttctgctgggagatcccagtagagatcaaaggctaggctgcttggtgccctgtgtctgtgcagggtgagagtccatgggcggagggaggggaaggaag

SEQ ID NO: 17887 - DNA, 558 bp, Homo sapiens
caatttactataaggcgaatcgggccctctagatgcatgctcgagcggccgccagtgtgatggatatctgcagaattcgccctttcgagcggccgcccgggcaggtacccaaagtgttctgattccttcaactggctactgagtcatgatccttgctgataaatataaccatcaataaagaagcattcttttccaaaaaaaaaaaaaaaaaaaaaaaaagtacaacattgtctttttcactagtcacacgaaaaatacatgaaagtgctctgataattttaaagcatcatataaattaacggtgtcattggtaataatctcatatgcatttcttaacccttccatttccttgaagactgagacgacatcccatgtcccacagcatattgcacaatgatgggcaaacaatatgccctcagtaagtgtttcttgtttgactgaagcaacatggcatagcataacgagcacagacatcaggagactaggctgggatgaaattagtttaaggcaggagagccagtctgcagtcataattattcattcaacaagcatttggtg

SEQ ID NO: 17888 - DNA, 482 bp, Homo sapiens
gccctctagatgcatgctcgagcggccgccagtgtgatggatatctgcagaattcgccctttcgagcggccgcccgggcaggtacgcgggcctgtcatgttcacattcatgtccagcctccctcctgcctcagactcctgagtagctgggattacaggcgcctgccaccacgcccggataatttttgtatttttagtagagacagtgtttcactatgttggctgggctggtctcgaactcctgccctcaggtgatccgcctgcctcagcctcccaaagtgctgggattactggcgtgagccactgctgccagccggcagttgaattttaagactgtggagctggctgaggcagtagatgaaacaagatttcttgatgttccttccaggtttattacgcatgtatctttagagatgatttttttttaaaagactgtgtttattgtatttcaaatgctgagatgaatcgtcacctgtgtggttg

SEQ ID NO: 17889 - DNA, 303 bp, Homo sapiens
atacgactcactatagggcgaattggtgcctctagatgcatgctcgagcggccgccagtgtgatggatatctgcagaattcgcccttagcgtggtcgcggccgaggtacgagcggcgatttcaaccacgaaaaaaataagaaaaaaaaaaaaaaaatgatttgtaaaaaaaaaaagaaaaaaatgagaataatcattcaatatgaggcattgggataacaaggacgtcggtggaaatgtaactagaaggactaaaaggaagaataggggaaaagttagagggaaatctggaaaagacgagaat

SEQ ID NO: 17890 - DNA, 464 bp, Homo sapiens
atggggccctctagatgcatgctcgagcggccgccagtgtgatggatatctgcagaattcgcccttagcgtggtcgcggccgaggtacttttttttttttttttttttttttggggtttttttttttttttttttttttttaaaaaaaaaccccccccccttttttttttatgaaaaacccctggttaatattgggtttaaaaaaaaggggggggtaaaaaaaattttttttaaaaaaaaacctttttgggggaaaaatgtggttttttaaaaaaagggggggacccccttttggggggggcccccctttttttttttaaaggggggaaaaaaaaaaaggggggggggggaaaaaaaacattgtggggggaaaaaaaaaaacttttgggggggggggttttataaaataacaaaaatttttttgtttaaaaaaaaaaatttcccccgggggggactttgggggg

SEQ ID NO: 17891 - DNA, 356 bp, Homo sapiens
gcgaatagcgccctctagatgcatgctcgagcggccgccagtgtgatggatatctgcagaattcgcccttcgagcggccgcccgggcaggtacttttttttttttttttttttttgagacgcagtcttgctctgtctcccaggctggagtgcaatggtgctatctcatctcactagcaacccccaccttcctgagttccagcgatttcttatgctctcagcctcccagagtagcatgggattacaggttgcccaccaccatgtcacggctaattcttgtatttttttgcaagagatgtggattttacacatgttacgccaggcatggtctaagaattcctgacactcagataaatc

SEQ ID NO: 17892 - DNA, 524 bp, Homo sapiens
  misc_feature 350: n = A,T,C or G
cgactcactatagggcgaattgggccctctagatgcatgctcgagcggccgccagtgtgatggatatctgcagaattcgcccttagcgtggtcgcggccgaggtacttatttaaatatggctctagcttttaaagtagagacaatgccttttatttcttctgtctgccttagagggtctagaacaatactcaagaaagttactctacgaaagtcattgacagatcaggaaataaaagacccaatttttaaaaactgcaactgattataggagaagtccctgtaacagacagacagacacagacagacacacacacacacacacacacacacacacacacacacacccctntaactgcttttcccctttatggttttactcatttgtccttactatgtgccaggcattgttttaagcattttatatatactttcccaagatcacaacgctggtaaatgatagaagccaatactttttccttctttttttttttattttttaaaagatgggggtctagttatgttt

SEQ ID NO: 17893 - DNA, 604 bp, Homo sapiens
tatatggagtcgacccacgcgtccgcctatctcctggtaggcgatagtgtcgtcctgaagcaggactccatctactacgagcatttttacaatgaactgcagccctggaaacactacattccagtgaaaagcaacctaagtgatctgctggaaaaactcaagtgggcgagagaccacgatgcggaggcaaagaagatagcaaaagcaggacaagaatttgcaagaaacaatctaatgggtgatgatatattctgttattacttcaagctgttccagggctatgccaatttacaagtgagtgagcctcaaattcgagagggtatgaagagggtagagccacagtctgaggatgacctcttcccttgcacatgccataggaaaaaggccaaagatgaactctgatatgtaaaatatcttctgttcaaatgatggtgctctgaagacactttactataaagattatttttaaacttcacggacaatgtaaaatttacttgtgaccatttacttcctcacaggatttttttttatacagtgttcccatgactgtcttttacatcacattttaaagtttttataataaaactggctttattttaaaaaa

SEQ ID NO: 17894 - DNA, 558 bp, Homo sapiens
tcactatatggcgaatggggccctctagatgcatgctcgagcggccgccagtgtgatggatatctgcagaattcgccctttagcggccgcccgggcaggtacttttataattctaaaacttcacttttgtccttaaatcaatatattacggatttcattgttcaataaattaccatctttaactaaaaataagtaaatcaaagagcatatttggagaaactaagagctgttaactgtttggagggtaaaagaatacttttctcgaaatttttttgaagaaaaatctaaaagccctctatgttgagttaatacaccttctgacccccatcatcagtggcattattcttccaagggactcttatctctaagcaatggtgaagttctggattcattatggatctcatggcaccaaaccaactggcactgaagttaagttaatatactccagcgagatcacctgtgggtcaaggatggcccagagaatcttggaaaatccatttatattgagcaaagatctgaatcaccttcaatcaggctgtaagatactagaaaatttga

SEQ ID NO: 17895 - DNA, 358 bp, Homo sapiens
agtgtgatggatatctgcagaattcgccctttcgagcggccgcccgggcaggtacctcaacttgctgattatttcaaaatgagattacaaacaaaaagaaaacaaatctggttcctcaataaagggcaaaataactgaatacagtctgttatttacttctctcttttacataaggttgggaacacttcattttacaaataggattaacatgaacataacatcgcacaagcttgcagacaaccagcataaaatatggagtacctcggccgcgaccacgctaagggcgaaattccagcacactggcggccgttactagtggatccgagctcggtaccaagcttggcgtaatcatggtcat

SEQ ID NO: 17896 - DNA, 539 bp, Homo sapiens
actactatagggcgaatggggccctctagatgcatgctcgagcggccgccagtgtgatggatatctgcagaattcgccctttcgagcggccgcccgggcaggtactttttttttattttttttttttttttatattttttaattattttttttgggatcttttaactaaaatgaatttattatttggcaaatagttttttcaaaatgtcaagtcacaggaaggaatgtgtggccaaccacacgcaaagcccactcataggccaactgcctctgccctttgctcacgttggcttcaaaagtgcaaggatttcggctgaagcctggtgcaggtacgccaacgaacccagaaggatgtctgcgggcttaatgggctggacgttgatgtcctccagcacctgctggcaaagcctcagctttgtcaagggcttctggactagtgcatctttccgctgtaattcattccttagatctgacacatcctctttgataactggctctggtttctggacagataactgcaatcttttttgtaagaaaaa

SEQ ID NO: 17897 - DNA, 466 bp, Homo sapiens
  misc_feature 393: n = A,T,C or G
tcactatagggcgaattgggccctctagatgcatgctcgagcggccgccagtgtgatggatatctgcagaattcgcccttagcgtggtcgcggccgaggtacgcggggttatttatgctttcttgatgggagttatttaaaatatttttatttatgtttctctagtattgtaagagtctgttaaatttctatgaaattagtaacattataaaaggccaggcgtggtggctgacgcctgtaatctcaacattttgggaggctgaggtgggaggattgcttgaggccaggagttaaaagaccagcttgagcaacatagtgagaccctatctctataaaaaaattttaaaaattagctgggtgtggttgcctgtgcctgtagtcccaactactcangaggctgaggtaggagaatcacttgaacccaagaggcagaggttgcaatgagctgagatcgtgccattgcact

SEQ ID NO: 17898 - DNA, 625 bp, Homo sapiens
  misc_feature 610: n = A,T,C or G
tacgactactatagggcgaattgggccctctagatgcatgctcgagcggccgccagtgtgatggatatctgcagaattcgccctttgagcggccgcccgggcaggtacagggagtatcaaacggtctgggttctacatgtgctcttccctgagactgggttttctaatttataaagcaaagagtttagagggatgatcttcaagcctcttgtagttctagaattctgtagttctgggagtttgtaaactattaagttttcttttagcccagaacttccattttcctgctctctcgtgtctgctctagactcagctctagctcggctaagtgtggagctctctgctggggagatccctagaagctttgaaggagacattgtgaggctggagaactgggttcaaattcagtgctaccattaaatctctgaataacatcctcagtcttccatctataaaagtcttggcatctccaatcacttcttgttctattatctcctaagccctatacatattactctgtaatactcctttgatccctatttctcacagtgctctatcctccaaaggttggaagactcactctatctacagatacctctctgggcatatnttattactgcgctga

SEQ ID NO: 17899 - DNA, 544 bp, Homo sapiens
  misc_feature 1, 24, 26, 27, 32, 36, 41, 43, 45, 47, 56, 57, 61, 67, 68,69, 70, 71, 86, 87, 105, 111, 112, 118, 119, 126, 127, 128,135, 136, 154, 158, 186, 190, 194, 202, 206, 324, 491: n = A,T,C or G
ngatatgtaataccgactccactntnnagggnccgnaattngngngnccccccttnncttngaagannnnnttttataaggggggnnccccccttatatgggggncccttnncccggnnaaagaannnccccggnngggggcccccccccgggncccnccccccaagtttgggttggaattggggnattnatcncttggccnaagnaaattttccggcccccccttttaaggcccgttgggggttccccgcccggggcccccggagagggttaaccaagtgttaaaagttggttaaaaaattatttgggccattggtgtttttnggggaatttcccaaaataaggcccctttatatattttaaaccttttgggttttaaaggcccaaaagggtttttgggggggccctttggggataaattgggccctttttaaaaaaaaaaaattttaaaaaaatttaaattcttttttctttttttgggaaaatttttngagagaggaaaaaaaagaaacccaccaccccacggagagccactttgtgggga

SEQ ID NO: 17900 - DNA, 601 bp, Homo sapiens
cgactcactatagggcgaattgcgccattgggccctctagatgcatgctcgagcggccgccagtgtgatggatatctgcagaattcgcccttagcgtggtcgcggccgaggtacacgggggtcagcagacagaaatagccatactaatctcatagggctcaaatgcatcttcaggcagcagggaaccaagcagcgtggcacaggccttcttgactggaggaagagcttgctggcatggtgggcagtattccaggagaggccatgtccgtgttcacttcttggcacatttcagttccgttttcctcttgtttaaaactgcctctttagatgtggatgccttaatgctgtaacacatttgaaaacattggcaatacttaagttgctgccatgattacagatggaattattggctaccaaagagacgcaattgatgatgagaagcatgattcttgcttccatataaccaaaggtaatcttaattgcaatttgactccgcttccttggtagggatagactttttttaaattccaagtgctctcttaaatggcaaattaagttaaagaatactactgctccattcccctcaattattcttcagtta

SEQ ID NO: 17901 - DNA, 432 bp, Homo sapiens
tgggccctctagatgcatgctcgagcggccgccagtgtgatggatatctgcagaattcgcccttcggccgcccgggcaggtactttcggttttgaagcttgctcagcagttcgtcttgcttctttaatcatggactctaatccaccaaaaacactatttgttgacttggaagcctctccatcagattcactatcatctgagtcatttagtgttacaaccactgatttatgctttggaagcgagatcacagttcgtggaagacggggtcctctgtgaaactttggattctgtatcctaggctgagacactgtgttaataccgactattgatagattgcttcttggcgcaggatgtgaattgttcagaactggaggtgaaggtgggtcactattactggatgtttcctctggcttaaaagctcttttatttgct

SEQ ID NO: 17902 - DNA, 519 bp, Homo sapiens
atatggcgaatggggccctctagatgcatgctcgagcggccgccagtgtgatggatatctgcagaattcgcccttagcgtggtcgcggccgaggtacagtgagggagagccgagggaaccagcgcggtgcctagcggaactccagggctggaatcccgagacacaagtgcatctgctagctgttagcacttggcagacggagttctcctctagggtagttctaactttgggtaataatgtttgtcagctacctgatattaacattgctccacgttcaaacagcagtgttagcaagacctgggggagaggtaagccaaataaaatatcttgtcagaagttgtattttttttcagcattatatttcctcttctatctaccaagagggatcagggaatggaattttatggggtgcaaagagtaatgctttatattacttttgtaggcttctcttgccttttcttatatgaagacttcttttcttcttgaaaaattttatactttctaaaatgtcattttgaa

SEQ ID NO: 17903 - DNA, 508 bp, Homo sapiens
tacgactcactatagggcgaattgggccctctagatgcatgctcgagcggccgccagtgtgatggatatctgcagaattcgcccttggccgcccgggcaggtacgcggggatgtgctggtatgcaaaccggggttcagttgaaaaacaggcacccacttcttatcttgctatagataagaagaaaaaaagatgagggatacagggctataacacagggatctagacgttaggaccaaaacatctggcaagatttagctaaaagaatcatggcaacttaccagacctatgggtgaatcagaagttcagcgaaaaaaaaaaaaaaaaaagtacctcggccgcgaccacgctaagggcgaattccagcacactggcggccgttactagtggatccgagctcggtaccaagcttggcgtaatcatggtcatagctgtttcctgtgtgaaattgttatccgctcacaattccacacaacatacgagccggaagcataaagtgtaaagcctggg

SEQ ID NO: 17904 - DNA, 165 bp, Homo sapiens
  misc_feature 153: n = A,T,C or G
tacgactcctatagggcgaattgggccctctagatgcatgctcgagcggccgccagtgtgatggatatctgcagaattcgcccttagcgtggtcgcggccgaggtacccacaaattattgttttctaaacatttgaagttttacgattagctntaaaataatgat

SEQ ID NO: 17905 - DNA, 424 bp, Homo sapiens
cgactggggccctctagatgcatgctcgagcggccgccagtgtgatggatatctgcagaattcgcccttagcgtggtcgcggccgaggtacgcgggggagggagcgagcaggcgaagccgcggaggacggggtgaagatggcggccttctccgagatgggtgtaatgcctgagattgcacaagctgtggaagagatggattggctcctcccaactgatatccaggctgaatctatcccattgatcttaggaggaggtgatgtacctgtcccctcgctctggtgattatttcttgcagaatcaccacacgagaccatcccggcagtcatggttttgctttagttttccaagtccgtttcagtcccttccttggtctgaaaaaattctgcagtggcgaacagtttcccacttgccaaagatccctt

SEQ ID NO: 17906 - DNA, 558 bp, Homo sapiens
actcactatagggcgaattgggccctctagatgcatgctcgagcggccgccagtgtgatggatatctgcagaattcgcccttagcggccgcccgggcaggtacaatagactagaaacgaaaaatattccatcaaaacattttctcttttcatttaagggagatcggatgtgcactttgcggtgtctgtgtttctggtagagctctatggaaacagcctccttttgacagcagtctacgggctggtggtggcagggtctgttctggtcctgggagccatcatcggtgaccgggtggacaagaatgctagacttaaaggtgagtgttgttatataattaagcccttttattcatgggaccaatgcctgagctacctctgtagcaaaggaaacaacaaactaggagagaaacaaccagggaatgtctgcatgccacacttgagggaggagggcttagatggcaccacctctggatggagggtcccatggctcccacacaaagttgggatgcctggacattgacctaatagatttttttgtatctttggctgttcataaatt

SEQ ID NO: 17907 - DNA, 595 bp, Homo sapiens
cactatatggcgaatggggccctctagatgcatgctcgagcggccgccagtgtgatggatatctgcagaattcgcccttagcgtggtcgcggccgaggtacatttaagaaatacattggttctgtccagaaaggcaggacaactcgaagggcggggaggggaggggagcggagtgcggagcttccagtttataggcagatttaaaaattttttggttgacaattggttaagtttatctaaagacctgggatcaatagaaaggaaatatctgggttgaagtaagaggttgtggagaccaaaattttatgaaacagatgaagcctccaaggtagtcagcttcagagagaataggttgtaaaaatttcttagacttagggtttatgttgatgttaatgctggagaggtataatgaggcatgtccaacccctacttcccatcatgacctgaaccagtctctcaggttaaattttaagagcaccctggctgaggaggaagtccattcagatggtttggctggcggggggcttagaattttatttttggtttacaccattagctcagaggctcattgatgatatccctcaagtctgacaag

SEQ ID NO: 17908 - DNA, 386 bp, Homo sapiens
tatagggcgaattgggccctctagatgcatgctcgagcggccgccagtgtgatggatatctgcagaattcgccctttcgagcggccgcccgggcaggtactttatttttttttttttttttttttttaaaattgtttttttttttttttttttttttttttttttttttttttttattttattttttttttgtttctttttttttttttttataaaataaaagaaaacaaaactccaacacaagaatatgtttgttttttttttcaaacataaaaaaaaaaaaaaaaaaaaaggggactaaatcccgggggggtataaaaaaaaaacattcctctgcgcccgagaccccaaggggggaaaaataaatccgggggggggggtataaa

SEQ ID NO: 17909 - DNA, 571 bp, Homo sapiens
ctatagggcgaattgggccctctagatgcatgctcgagcggccgccagtgtgatggatatctgcagaattcgccctttcgagcggccgcccgggcaggtacacacactggggccttctcgaccccatcccctgacaagccagccttttttttttctgtttctttggttgggttgggtttttttccttttaattaattaaatttttattttctttttccttggggatatatatatatatatttatatatttaaaaatgcaagcttgcttttttgccactgcgcttgcccctgggtgcaaaaactaagcctttgggtttcctgatcattgcaagggtcagtctactggacatatttttttcccttccctatacccacagatgttctggggatcattaatttacttgtgagatgatcagcaggtttaaagtcttttattattgtcgggtcatttgcatacataaataacaggactagcttaaccttaaaccagctctttcccttttctgcttttcttctcatttcacatccctctttaaatcattagagctgtgatttagaggttaataagctt

SEQ ID NO: 17910 - DNA, 382 bp, Homo sapiens
ctactatagggcgaattgggccctctagatgcatgctcgagcggccgccagtgtgatggatatctgcagaattcgcccttagcggccgcccgggcaggtactttttttttttttttttttttttttttttaggaaagcacttcgttggggttgatggtcaggaattatgggcttgggtaggtaagtgtgggctgagattaagaaagagtgaaattactgctgaataaagcaacaggcctaagaggagtgaatgggggatagtgtctgcctaagaggaaagatggagaatggctcagtagaagtagtcacggacacaggagacagaaggccttgtgatatgtacctcggccgcgaccacgctaagggcgaattccagcacact

SEQ ID NO: 17911 - DNA, 571 bp, Homo sapiens
  misc_feature 376: n = A,T,C or G
tacgactcactatagggcgaattgggccctctagatgcatgctcgagcggccgccagtgtgatggatatctgcagaattcgcccttagcgtggtcgcggccgaggtactttatttttaatcctttctgtaattgtaggatgtagatattatagtcccaatattaggaatgaggaaattgagactcagagaagttaggttacttactccaaagcaccctgctgataagtcgaagaactgcaattaaaacccaggtctgtttggctcccactcctgtgctctggaatgcttaagggattagaaatgtcccaaagagactaagaatccaaagcagtagtgggtatggaaggtaacagcagtgatttcctaaggacctgngttctagccccagagacatggttaaaattttatagcagttgcctgctttttgagtctgacaagcctccattttactgtcaaaaatgtgaaattcataattaggcaataatgtgctgaagcctgattttatttggttattttatttccattaaagtcatcaaaagtgatttattgattacaaaaaaaaaaaaaaaa

SEQ ID NO: 17912 - DNA, 247 bp, Homo sapiens
tatagggcgaatagggcgctctacatgcatgctcgagcggccgccagtgtgatggatatctgcagaattcgcccttagcgtggtcgcggccgaggtacgcgggtcattataactgaaggagaaggtgccccaaaatgcaagattttccacaagattcccagagacaggaaaatcctctggctggctaactggaagcatgtatgagaatccaagcgttttttacagagaaggcaggaatgtgtggcag

SEQ ID NO: 17913 - DNA, 538 bp, Homo sapiens
atggcgaattgggccctctagatgcatgctcgagcggccgccagtgtgatggatatctgcagaattcgcccttagcgtggtcgcggccgaggtaccacctaaaatagtgtctgaagtaacatttcagtatataattgcaagccaaacatttcaaaagttacatttatcttgaggggatctccctggatataaaagattggacaaaagagcacagagctgaaaggaggacacattattgaatttggaacccagttcatgaaatgaacaacagaataaggcagaccacatcaccaccataacggagctatgataaaacaaacaaaaaaactcaaaatgcaaaaaaactacaggtgatatcaatttccccccaaagcactccacaaacctaatgtagactataagccaccaccacaaatggaatattcaaacaaggaggaataatgattaaacaaacatcttgaagaagaaaacaaatactaagaaataaaaggactcaggctaaaactaaaaggatgaaaaaagacgtacctgcccgggc

SEQ ID NO: 17914 - DNA, 347 bp, Homo sapiens
agcggacggcaatgtgatggatatctgcacaattcgccctttggagcggccgcccggacaggaactgatctttactactttagtaacactagatataagcacttaaatgctgagtgtttgtcagttttaaaattagagaaagagacaaattgttttctgatctacttgcttaataaataattttttgccaactaatttttaggtttacttggtaaatttaaaggtagtttaaaatgtatatttaaataacttttctctataattgaagaaaataatttatcttgagagaaatttactttaaacagtggcttaaaagactatcttgtaaagtattctattttcaaata

SEQ ID NO: 17915 - DNA, 461 bp, Homo sapiens
ggggccctctagatgcatgctcgagcggccgccagtgtgatggatatctgcagaattcgcccttcgagcggccgcccgggcaggtacttttttttttttttttttttggggcattttttttatattttttttttttttttttttttatttttttttttttttatttttttttgggaagaggggaaaatgtggttttcattttatatctcccccaaaaaaaaaagagaaatttttaataaaaaaaaaaaccccccccgggggggaaaaaaaaaaaaaaaaaggccccccgggggcccttttttaagaagggggaaaaaaaattttctgcgtgccccccgaataaaaaaaaaaaaaggggatcacccccccccccccccttttataaaaaaaaaaaaaaaggggggggggcccccccccctaaagaaaaaaaaaaaaatctgaaagcgggggggggggggccc

SEQ ID NO: 17916 - DNA, 584 bp, Homo sapiens
  misc_feature 113: n = A,T,C or G
acgactcactatagggcgaattgggccctctagatgcatgctcgagcggccgccagtgtgatggatatctgcagaattcgccctttcgagcggccgcccgggcaggtactttnttttttttttttttttttgtagagacgggtttcacccagggctggtctcgaactcctgggctcacgcgatctgcctgcctcagcatcccaaagtgctaccagcattacaaacatgagccaccatggccagatgatcatttggacttctaagcattagcaaccaaaataaaaaattaattagaaaaacatacacataatttataataaaaataaggaacctaggattaaatataaaataaagatgtataagacctttgtgtagaaaattgtaaaactttattagaaaatgtcaaagaagacttaattaaatgtaaagcttatacactatgttcatggatagaatggctcaatgtcagaatgattttagtgttctcatattgatctatagactcaatacaatactgataaaaattcttaaatgatttttcaaggaaaattgatgtgataatttcaaatttcataagggaagag

SEQ ID NO: 17917 - DNA, 434 bp, Homo sapiens
  misc_feature 216, 217: n = A,T,C or G
ctcactatatggcgaatggggccctctagatgcatgctcgagcggccgccagtgtgatggatatctgcagaattcgccctttcgagcggccgcccgggcaggtactgagccacgatttgttctctcaacactctccaggctgtcagaaaagagatagaaactcaccaaggccaagaaatgcttgtgcgtggcacagaaggaatcaaagagtacttnnttttttttttttttttttttttttttaaaaaattttttttttttttttttttttttttttttttttttttttttttttttaaaaaaaaaaaaaaaaaatttttttataacccccccccattttttttttttcttgctaaaaaaacaccccacaaaaaaaattaaattcacttgggggggggggcccccccgttctcagggggggggccccccccccc

SEQ ID NO: 17918 - DNA, 547 bp, Homo sapiens
gcgaattgggccctctagatgcatgctcgagcggccgccagtgtgatggatatctgcagaattcgcccttagcgtggtcgcggccgaggtactttcagtatcattataaaaattttccttgtctgagttaaaaacatgttcagtatctggtttgttgtcgttttcacagtctactttatttgtatttaaataaagctctgaaggtgactggcaagcatattctggggacccagagtatgaatgagaaagaaaggcatttttgagactgggttatttttgttcaggaaatatctggactactacagagacagacatgccagatgcatcactttcctgacaatcaggtgaatcatttgtcaaattagaaggtttttacttaagtttgttcttcctgtagagttattatgtagttgctcttcctcaatacaagcagttttgtaattttcacaaatttcaccaaaactctgctttaacttatttgtgatgaattttaaaggttatttttaccctagtttgtcttgtttgatccacattctctcatactttt

SEQ ID NO: 17919 - DNA, 466 bp, Homo sapiens
  misc_feature 87, 88: n = A,T,C or G
ccctctagatgcatgctcgagcggccgccagtgtgatggatatctgcagaattcgccctttcgagcggccgcccgggcaggtacttnntttttttttttttttttttgggtcaagctgttctttatttcagggagagggcaggggaggggctcagtctttcttggcagcagctttcctcatggcggccagtacctcggccgcgaccacgctaagggcgaattccagcacactggcggccgttactagtggatccgagctcggtaccaagcttggcgtaatcatggtcatagctgtttcctgtgtgaaattgttatccgctcacaattccacacaacatacgagccggaagcataaagtgtaaagcctggggtgcctaatgagtgagctaactcacattaattgcgttgcgctcactgcccgcttttcagtcgggaaacctgtcgtgccagctgcattaatgaatcg

SEQ ID NO: 17920 - DNA, 486 bp, Homo sapiens
  misc_feature 476: n = A,T,C or G
atacgactcactatagggcgaattgggccctctagatgcatgctcgagcggccgccagtgtgatggatatctgcagaattcgccctttcgagcggccgcccgggcaggtacatgtaatccactgtagtgaaggcactaaaacctgttgtattttccacatttcgatagatctctcacaggatttaacacttttggaatgctcagtaaattattattgactgcttgataatacctctttgttcctgcctttccccaagtccttcaacagaagtttcttctagcactttgcaggtcagttgagtggactatttgagtccctcacagtaatgagcttgtgtgtttttgtcattcttttttctttttttgaaaaaacaatagagtcatttaaggaagcaaaaaggtccctgggtcaagatttttattttatcttttatggtggtagggtgaggtgtgagtatttagggagatggttggtnggatggcgtt

SEQ ID NO: 17921 - DNA, 499 bp, Homo sapiens
gcgaattgggccctctagatgcatgctcgagcggccgccagtgtgatggatatctgcagaattcgccctttcgagcggccgcccgggcaggtaccactaataaattgtttgccaaatccttgtaataacatcttaattttagacaatcatgtcactgtttttaatgtttatttttttgtgtgtgttgcgtgtatcatgtatttatttgttggcaaactattgtttgttgattaaaatagcactgttccagtcagccactactttatgacgtctgaggcacacccctttccgaatttcaaggaccaaggtgacccgacctgtgtatgagagtgccaaatggtgtttggcttttcttaacattcctttttgtttgtttgttttgctttccttcttaatgaactaaatacgaatagatgcaacttagtttttgtaatactgaaatcgattcaattgtataaacgattatgatttctttcatggaagcatgattcttctgatt

SEQ ID NO: 17922 - DNA, 386 bp, Homo sapiens
tacgactcactatagggcgaattgggccctctagatgcatgctcgagcggccgccagtgtgatggatatctgcagaattcgcccttagcgtggtcgcggccgaggtacacctatatatgtatgtaagtatatcaacataggtatatcaaaaacaaaacaaaacaaaacaataacaaacaaacgaaaggacccagcaaccatccaaatgtccacacagaggggaagaaaatattttttcaaaagtaatgattgctgtcattaatttggtgagtatactttcacaatgaatatattaacaatagttctttatgataaataagtaatactagccatataacactgagataaaaatatttacatcatgaaaggaaagcacttgtttacat

SEQ ID NO: 17923 - DNA, 364 bp, Homo sapiens
atacgactcactatagggcgaattgggccctctagatgcatgctcgagcggccgccagtgtgatggatatctgcagaattcgcccttagcgtggtcgcggccgaggtacctttatgtctggcaaaatagcgccccagaatgatgagcaagcacagcatggcgaacaccaccaccgccacgacgccaccgatcacggcatgatccactgccctgatcgagccttcttcacctgctcgggaatctgagaggtcctcactgtccagttcttctgcggaattgggcaactgagtaaggccgtgaactgctggttctgtcgtcgccgttgtgtctgtgatgatggtaaggatggtggtggtggtggtgg

SEQ ID NO: 17924 - DNA, 399 bp, Homo sapiens
ggccctctagatgcatgctcgagcggccgccagtgtgatggatatctgcagaattcgccctttcgagcggccgcccgggcaggtactttttttttttttttttttttttttggggcgttttttttttttttttttttttttttttttttaaaaaaaaaaaaaaaaattttttttaaaaaaaaaaaaaaagggggttttttccccccccccccaaaaagggggcccccctttttttggggggggggggaacctctcccccccatttttttttggggggggggggaaggggataaaaaaaaccccctttggggaaaaaaaaaaaatgttttttttttttggggtttaaaaaagaaagcccagggggggatcctttaaaaaaaggcggggggggtttttttt

SEQ ID NO: 17925 - DNA, 368 bp, Homo sapiens
ccggaccggacggcaatggaattgttatcaattcaacttttccatcgggcggccgggcacgaagctccatgactctaaaagaaacttgtttgtataatgctattctatccgggggatggagcccaggaaataaccaacttgatgcgtgttatgacccattttaagcctcccatgatcacagtttttaaaatacaattaaggactggtccttttctaggtgacacaagaaaggtaatagcttgaacagaagaaagaggggtccccaaaaatgtaaccttaaaatttgacacttgtgccactattgatagtaagcagcatggatgaagatgtggttctctaaattggaaaaaaagttaccagtaaaaaaa

SEQ ID NO: 17926 - DNA, 473 bp, Homo sapiens
ctatatggcgaatggggccctctagatgcatgctcgagcggccgccagtgtgatggatatctgcagaattcgcccttagcgtggtcgcggccgaggtacatcttcacataacatactgagaatgcgtttctgtatcagagaatcatttctgagaatcatttctgtagtattcctgcccaagtgcctaacctgaatctaataatgaagaaacttcagacaagtgaaaattgaggagcattctatgatgcagctagcctctgctctataaaaagtcataaaacacaaggaaaactaagaaatcttcaaggttaaaggagactaaaaccccatgacatctagatgcatggtaatagattataatatgatgataatagatccttggattaccattatggtaatagagccttggctcagggaaaaaaaaattcacaaagggtgttttgggagacagttgacaaaatttgaaaatggat

SEQ ID NO: 17927 - DNA, 582 bp, Homo sapiens
tagggcgaattgggccctctagatgcatgctcgagcggccgccagtgtgatggatatctgcagaattcgcccttagcgtggtcgcggccgaggtactactcgattgtcaacgtcaaggagtcgcaggtcgcctggttctaggaataatgggggaagtatgtaggagttgaagattagtccgccgtagtcggtgtacgctgggaaagcagaaggtcgcgcttggaggaagtggcggctttgagtccggtggcccaatcgctgttactacttctctgaagctcctctcggctgcttgccgagacaccctgccgccaagatgcctcgaattatgatcaaggggggcgtatggaggaataccgaggatgaaattctgaaagcagcggtaatgaaatatgggaaaaatcagtggtctaggattgcctcattgctgcatagaaaatcagcaaagcagtgcaaagccagatggtatgaatggctggatccaagcattaagaagacagaatggtccagagaagaagaggaaaaactcttgcacttggccaagttgatgccaactcagtggaggaccattgctccaatcat

SEQ ID NO: 17928 - DNA, 532 bp, Homo sapiens
  misc_feature 115: n = A,T,C or G
tatacgactcactatatggctatatggcgacctgtgcatgtctagatgcatgggccggcagtgtgatggatatctgctgaattcgcccttagcgtggtcgcggccgacgtactgnacttttttttttttttttttttttggagctgtttatagcctttaacaattgagtatacagaaatgaggcatatttctccctttttgccagatttatccagaattcagaaactttgtgaatgttcttaattcattgcaatgtggttgtttgcaagatcagtaagaatctgttttctcttatatttggaaacaattggaggcactggttattttctaggacttggactaaaatggcatgttttgggatatgagcacacagctttgaggaattcacattgattttatagagccaatgagaaccccttagaaagatgcctcataccttgtctatgcagttcctttgcagggttcctggcctgtggtaagtagagagtcaccttcctggcaggcccaggaaccacaagttcttttggggcct

SEQ ID NO: 17929 - DNA, 390 bp, Homo sapiens
ggccctctagatgcatgctcgagcggccgccagtgtgatggatatctgcagaattcgcccttagcgtggtcgcggccgaggtacaatgcctttgatgaactgttttgtaagtgctgctatatctatccattttttaataaagataatactgtttttgaaaaaaaaaaaaaaaaaagtacctgcccgggcggccgctcgaaagggcgaattccaacacactggcggccgttactaggggatccgagctcggtaccaagcttggcgtaatcatggtcatagctggttcctgtgtgaaattgttatccgctcacaattgcacacaacatacgagccggaagcataaagtggaaagcctggggtgcctaatgagtgagctaactcacattaatt

SEQ ID NO: 17930 - DNA, 374 bp, Homo sapiens
gcgaattgggccctctagatgcatgctcgagcggccgccagtgtgatggatatctgcagaattcgccctttcgagcggccgcccgggcaggtacagcttcaagacatgatgggactaataatttgggctggaagcagaaaccaaattagtaaaattcactgagctgtgtgagtctggctctttagaggcaaacctgttttcatagggctgtggaccccaaggaatagattcagcagatggatcattgtagcaagagttgtaacaaaatggcagtcgttggagttaagtgggagagcagttggtctagtttggagcagaagtccagatatataggaaatgtcatgggggctggaaaacccaagtgcatgtcatgg

SEQ ID NO: 17931 - DNA, 432 bp, Homo sapiens
acgactcactatagggcgaattgggccctctagatgcatgctcgagcggccgccagtgtgatggatatctgcagaattcgcccttagcgtggtcgcggccgaggtacttttcccctaccttgaagagacatggtggtcgtagcttgtcatctatatgaaaaagttttcgatgtattggaattatttgggaatgcttttaaaacaatttggaattatgtctttacaaaccaaaacagaacacaatggtgtggtgctggaacatcgatgaaggagccctacttactgagcttatttatggacttttttgatgcctgtgtgtatgggttttaaaaagtatgcaggctctaaaaatgatattttggtaagctctcagctcatgcaccccattttctgttgacccatattatgccttttttctcttgaccagattct

SEQ ID NO: 17932 - DNA, 283 bp, Homo sapiens
tatagggcgaattgggccctctagatgcatgctcgagcggccgccagtgtgatggatatctgcagaattcgcccttagcgtggtcgcggccgaggtactttttttttttttttttttttttttccgcttttattctgcttttgtaaaagcagtattttgagatggacattgcctcttcattgtatttctcatcaattcattatttttgtggttatagctggacaagcaattaactttaaaatggtagattccgtaactttaaattgggagctttcatttgctt

SEQ ID NO: 17933 - DNA, 591 bp, Homo sapiens
ctatagggcgaatggggccctctagatgcatgctcgagcggccgccagtgtgatggatatctgcagaattcgccctttcgagcggccgcccgggcaggtactctgctccgttgtgctgctagagccacaagcctattaaactttgcctgaaataaattcctatttgcgctggtgttaatttttacttatgagtgagccaagaactcaggccagagttgcggtaacaccaccagaagaggtctccgcttgtcagacttgagggatatcatcaatgagcctctgagctaatggtgtaaaccaaaaataaaattctaagccccccgccagccaaaccatctgaatggacttcctcctcagccagggtgctcttaaaatttaacctgagagactggttcaggtcatgatgggaagtaggggttggacatgcctcattatacctctccagcattaacatcaacataaaccctaagtctaagaaatttttacaacctattctctctgaagctgactaccttggaggcttcatctgtttcataaaattttggtctccacaacctcttacttcaacccagatatttcctttctattgat

SEQ ID NO: 17934 - DNA, 457 bp, Homo sapiens
  misc_feature 264: n = A,T,C or G
atatggcgaatggggccctctagatgcatgctcgagcggccgccagtgtgatggatatctgcagaattcgccctttcgagcggccgcccgggcaggtaccttcagtcccttgttattgttccgtatattacctgtaagcagatactgtattttattttagcctatttgacagaacacatcactcagaaaaagtgaagtttcagagcaaacagtgaagaaatcagtgtgattgtagacaaaaagtcggttcacagaacggagcancggggagaggaagggaaaagcttcatagtttggtgtttatcacatcaagagattggtaaatttctgaggaaagacaggctaatggggcactgaaatggaacaactcctttaaacgtgcagccttttgaatttttcctcaaaaccaagaagttgacctctgagctgtcaagtgaccactgtgtgcaaaggggat

SEQ ID NO: 17935 - DNA, 556 bp, Homo sapiens
tacgactcactatagggcgaattgggccctctagatgcatgctcgagcggccgccagtgtgatggatatctgcagaattcgccctttgagcggccgcccgggcaggtacgcgggggcaaagcggaaggggcgcgcggataggttctgaatctgtggtgggacctgagattctgcatctcaacaagtcccaatgtgtccagaattggtgggttcttggtctcactgagttctagaatgaagccgtggaccctcacggctgccaggatggaaactaactacctgaagaggtgctttggaaattgcctggcccaggcactggcagaggtggcgaaggttcggcccagtgacccaatagaatacctggctcactggctttatcattacaggaaaacagcaaaagcaaaagaagagaatagggaaaagaagatccacctgcaggaggaatatgacagtagcctcaaggaaatggaaatgacagaaatgctgaaacaggaagagtatcagattcaacagaactgtgaaaagtgtcacaaggaactgacttttgaaactgttt

SEQ ID NO: 17936 - DNA, 530 bp, Homo sapiens
  misc_feature 112: n = A,T,C or G
tacgactcactatagggcgaattgggccctctagatgcatgctcgagcggccgccagtgtgatggatatctgcagaattcgcccttagcgtggtcgcggccgaggtactttntttttttttttttttttttttttttttgagaccgagtctcactctgttgcccaggctggagtgcagtggcgcaatcttggctcactgcaacctgtgcctcccaggttcaagcaattctcctgcctcagcctcctgagtagctgggattacaggcatgagccaccatgctcagctaatttttgtatttttaatggaggtggggtttcactatgttcgccaggttggtctcgaactcctgacctcaagtgatccacctgcctcggactcccaaagtgccaggattacaggtgtgaaccaccgagcccgggtagaactaatattttaaagctatctcctttattcaaatttggggaggaatattatttttgaaaccaatgtcttaagaattacatattcagttttaacaattttgaatttt

SEQ ID NO: 17937 - DNA, 383 bp, Homo sapiens
tacgactcactatagggcgaattgggccctctagatgcatgctcgagcggccgccagtgtgatggatatctgcagaattcgcccttagcgtggtcgcggccgaggtacgcggggcacactggccccgctctgcatccacagctggattctccacccctgagcaagacaaggagccccagacaaaacgctcaggattccagaggatggggttgaggatcctcagcctttcagagtgaaaatccacgaggcggaggaggtttaaaacaacagaaacaggcatgtggggaaaaccataggttcaattagaagcactgtacgcgggtggtatataatttttaaactgtctaaagggccgggcacactggctcatgcctgtaatcccg

SEQ ID NO: 17938 - DNA, 855 bp, Homo sapiens
  misc_feature 115, 187, 188, 244: n = A,T,C or G
aattaacactactatagacgaattgcgccctctagatgcatgctcgagccgccgccagtgtgatggatatctgcagaaatcgcccatacgagcggccgcccgggcaggtactttnttttttatttttttaataatggggaatattataattattttattttttttttatttttttttttttttaaannaatataatatttataattttataataatttaaaaatataatttaaattataaattncccgggaaaaaaaaaaaataaaaaaaatttttggacaaacccgggggaaaaaaaaaatttttaaaaaaaaaaaaaatagaaccaaaaacccccaaaaaaaaaaaatcccacaaaaagggttaatatattcccccccacaaaccccaaaaaaaaaaccccccctaaaaaaaaaaaaaaaaattaacaaaccgggaaaaaccaaaaaaaaaaacccccaatttttttttttgtgaaaaaaacaccccccaaaaaaaaatgggtttccccccacccccaccccccaaaaataaaaaagggaaaaaacaaacccttttttccaaaaaaaaaaaatattaaaaaaatatctcccacccccccaaaaaaaaaaaaaaaaattttttatataaaaaacccccccccttttttgccaaaaaaaaagataataaaccccccaaaatattttttccacggcgcccaaaaaacattgagggaaaaaaccaacaaaccctcggggctataaatataaaaaaacacaccttacacaaaaaaggagagaaaaataaaaaaaaaatactttcctgaaaaaaaaataattcccacaaaaaaacaacaaaaaaataaccccgagaaat

SEQ ID NO: 17939 - DNA, 549 bp, Homo sapiens
ctatatggcgaattgggccctctagatgcatgctcgagcggccgccagtgtgatggatatctgcagaattcgcccttagcgtggtcgcggccgaggtactttttttttttttttttttttttttttttttttttttttttttttttttttttttttattattttttttttttttttttattttattttttttttttatctcccaaccgccattaaaaaaaaaaatacacagtgaaaaaaaaaaaaaaaggagaagctggaacaaaaagccatatatgtcaggtgccaaaagaaaaaaacagcaggggttacatatactttttctggagacatacccttcaaaaaaaaaaaaaagcgggggggggggcttattaaaatatttttgccctgagaagactttttttcaaaaaaacccccccaaaaaaaaaatttttcttttttttcccggggggggggaagaacaaaaaaaacatttttctttccaaaaaaaggggggggggggcccttttttttttcccccaacccccccccggggggaccaaaaaaaaaa

SEQ ID NO: 17940 - DNA, 517 bp, Homo sapiens
ctatatggcgaattgggccctctagatgcatgctcgagcggccgccagtgtgatggatatctgcagaattcgcccttagcgtggtcgcggccgaggtactcttcagtcaacagaacctgatgcaaagaacagaaaaggggaagatgtgggggattcagtcaggatggtgggagaaattgtaaaattataggaaataatcacaaacacttgtggaaggcctgggggtttgcataaaatgttgggctgaaggcagctgaattctcttaaaagcttagggcatagatacacagaaatgtagtttatctaaatgacttgtttacttatgtggtcctaaaactaacctttgatagtttatgggcaggatagctctctcagggtagggggagggcaaccagattgattacccactgatggtgttgactcaaagccttcgtcatttaatatgtgctgaataaatgccagcagggccagtgagtcagggccacagctgcaactctttacagcactctcctttgag

SEQ ID NO: 17941 - DNA, 248 bp, Homo sapiens
tacgactactatagggcgaattgggccctctagagcatgctcgagcggccgccagtgtgatggatatctgcagaattcgcccttagcgtggtcgcggccgaggtactttttttttttttttttttttattttattttttttttttttttatttttttttttttttttttttttttttttttttaatgaagccttgtttttttttaatttagactttgggtcactaagctggggggaggaaaaaaaaat

SEQ ID NO: 17942 - DNA, 389 bp, Homo sapiens
gactactatagggcgaattgggccctctagatgcatgctcgagcggccgccagtgtgatggatatctgcagaattcgcccttagcgtggtcgcggccgaggtaccgcgggattggccattgttgatcaactcagttcagcccctctcctctccctggaggtctggggtggggctatgaactttccaactctctaaacacatggttggttcccctggcaaccagccctcatcctgaggcaatctaggtgatctagccatcagtgaacttcatagcatacagaaatatacatatcactttgaagattccaagggatttaggagatttgtgtcagatgcttctatctctcaggaaattacaaaggtcttgggagctctgtgtcaggaatcag

SEQ ID NO: 17943 - DNA, 621 bp, Homo sapiens
ctatatggcgaatggggccctctagatgcatgctcgagcggccgccagtgtgatggatatctgcagaattcgcccttagcgtggtcgcggccgaggtacgtcacttgataagctgaaaggggtggatgttgaatatcacctaagtgtcattgcaacctaaagcctgttatcctctttccaatagaaccaaagagaagttggtatgtagcttctcggccttttggctaagattaagagaagttggtatgtagttcagatacttcattttctttaattgcactgacactaaagctttgtatttataactattctggttcttatagactataggttcttggggaaccctcttgttaagagaattttcctggactcaaatatttgattttccatagagaagaaaaattcagttttatttctgtattaaagcatttcagtcccttggccatagtcctcatagtaactgctcaattaatgttttcataatcattgtcataattattgccttcagtctgtataaaatgaagggcttgaagtagctaagatttaccatctttcctggatttccaccagtttctggccaccagaaccatccccagataattccagcgcttctggaataaa

SEQ ID NO: 17944 - DNA, 329 bp, Homo sapiens
ggatatctgcagaattcgcccttagcgtggtcgcggccgaggtacggtagtaagaaacctttgagatctttctgacttttcaaaattagagaaagcaaatgggatggatagatttttttttcttttcaaggggggcaggaaggtaatggtttgagtagcctttgtttaaaaaaaagactaaatatatttaaaaggccacatttatatttttttcacaagaaccacataataaattccacttcttgacctgaatttggaaatccgaaattactaatccaggccaggtgtggtggctcatgcctgtaatcccagcactttgagaggccgag

SEQ ID NO: 17945 - DNA, 140 bp, Homo sapiens
  misc_feature 98: n = A,T,C or G
gcgaatagagccctctagatgcatgctcgagcggccgccagtgtgatggatatctgcagaaatcgcccttacgagcggccgcccgggcaggtactttntttttttttttttttttttttcctttattatatattattttt

SEQ ID NO: 17946 - DNA, 390 bp, Homo sapiens
agggcgaattgggccctctagatgcatgctcgagcggccgccagtgtgatggatatctgcagaattcgcccttagcgtggtcgcggccgaggtacgcgggcattaattgtaaacaatctgaacaaagagttggcaaactttttcttaataagacagataataaatattttaggcttagaggtcacagagtctgagtcacaactatttaactatactgctatcgcttgaaagcagccattgaaaatgcatatacaaatgagcattgctgtgtttcaatagtattttctttataaaaactgtgggactgcagcttgttgacccttgccatatgagaaagtgtaaactaaaaatagaatatagtattaaaaacatgatatcagtcttcaaatc

SEQ ID NO: 17947 - DNA, 326 bp, Homo sapiens
  misc_feature 114: n = A,T,C or G
aatacgactcactatagggcgaattgggccctctagatgcatgctcgagcggccgccagtgtgatggatatctgcagaattcgcccttagcgtggtcgcggccgaggtacttantttttttttttttttttttttttgattttttttttttttttacctttaacccaaccatatttgattttctttttcaactttcccttggagaacttattaaatctaaacactaaaaagatatattttaaatacaaaaaacaacaagtctgaacactttaccccaaaaaaaaaaatcaagtgtatcaaccattacatatttctgcccggccccc

SEQ ID NO: 17948 - DNA, 373 bp, Homo sapiens
ggccctctagatgcatgctcgagcggccgccagtgtgatggatatctgcagaattcgccctttcgagcggccgcccgggcaggtgcgcgggatctgtgtctacagatatttacatgaattgggtgaactcctctctttccaaggccccaaaagaacttgtggttcctgggcctgccaggaaggtgactctctacttaccacaggccaggaaccctgcaaaggaactgcatagacaaggtatgaggcatctttctaaggggttctcattggctctataaaatcaatgtgaattcctcaaagctgtgtgctcatatcccaaaacatgccattttagtccaagtcctagaaaataaccagtgcctccaattgtttc

SEQ ID NO: 17949 - DNA, 403 bp, Homo sapiens
  misc_feature 225: n = A,T,C or G
gactcatatagggcgaattgggccctctagatgcatgctcgagcggccgccagtgtgatggatatctgcagaattcgcccttcgagcggccgcccgggcaggtactttttttttttttttttttttttttttctttttttttttttttttttttttttttttttattttttatttttttttttttttttttttaataaaatttttaattatttaatatttttttnaaaaaaaaaaaaaaaaaattttattgggataaaaaattttaaaaaaaaaaattaaaaaaaaattaaaaaaaaacccatttaaaaaaaaaaaaaattttttttaaaacccaaaaaaaaaaaaaaacttttaattttttaaaaaaaaaaaaaaaaaagggggggggggaaaaaataaaaa

SEQ ID NO: 17950 - DNA, 588 bp, Homo sapiens
ctatagggcgaattgggccctctagatgcatgctcgagcggccgccagtgtgatggatatctgcagaattcgccctttcgagcggccgcccgggcaggtacaggctcactgaacacgagagagctcacaaaggagagaaaccatacgggtgcagtgaatgtgggaaagccttccccaggaaatctgagcttactgaacatcaaaggattcacacgggaattaagccccatcaatgcagcgaatgtgggagagctttctccagaaaatcactactcgttgtacttctttttataggactggaaggaaaagtatataaaccgtgattattcaaagattttcactgaaaatatagttgaacaggtttgtattaatgattacaaagtatagaaaattttgctgttattttccagaagaaatattattaatactactttcacagaagatgtgaaagtggagaaactaccttttaagtaaaatttatttgactcaattactgattaaatagcattaaggaacatacagttgtaaaatgtagaacatagaaattaacattttaaaagcatgcctttttaaaaagcatgctcctat

SEQ ID NO: 17951 - DNA, 483 bp, Homo sapiens
  misc_feature 405, 406: n = A,T,C or G
atatggcgaatggggccctctagatgcatgctcgagcggccgccagtgtgatggatatctgcagaattcgcccttagcgtggtcgcggccgaggtacatgtgcacattgtgcaggttagatacatatgtatacatgtgccatgctggtgcgctgcacccactaactcgtcatctagcattacccgcgtacaaaggcagggagtcctggaaggagttttagctgatgatgacaagttcagtgaaactgtcatagagtgctttgagactagagagagtgctagtgctctaaagtgcttagagactagtagagttacacataaaagaacacagtgtgttccaggaactgcagttgtttctctaccctttttcactcagtccctttttcttttgatgaatggcacagannaaaaaaaaaaaaaattttcctgcccgggggggccttaaaaaggggaaattcgccccccttggggggccattcttggg

SEQ ID NO: 17952 - DNA, 533 bp, Homo sapiens
  misc_feature 419, 420, 421, 446: n = A,T,C or G
actatatggcgaatggggccctctagatgcatgctcgagcggccgccagtgtgatggatatctgcagaattcgccctttcgagcggccgcccgggcaggtacttttttttttttttttttttttttttttttaaaatttttttttttttttttttttttttttttttttttttatttttttttttttttttaaaaaaaaaaaaggacccttttttttttttaataaaaaaaaaaggggggggagaaaaaaaaaatttggggggggagaaaaaaaaaagttttttttaacccatgcaaaaaaaaaaaaatttttttttttggggaagaaaaaaaccccccctctggggggggggggggggaaaaaaaaaaaaaggaacccaccaggggggggggggggggttttaaaaaaaaaaaaaaannnccactttaataaaattcttcccccncggtttaagcaaaaaaaaaaatttctcaaaaaaaaggggggggggggaaaaaaaatttttttgggggtgaaaaacctcaaaaaaaaa

SEQ ID NO: 17953 - DNA, 427 bp, Homo sapiens
ggggccctctagatgcatgctcgagcggccgccagtgtgatggatatctgcagaattcgccctttcgagcggccgcccgggcaggtactttttttttttttttttttttgtttggcttttttctttttttttttttctctttttttgttcttttttgggggggaaaaggaatttttttttttcttctaagacagcgggggggggcttatcaggacaagcccctttcttggggcggacacaacaaatggtgttataagagggccgaccagaaactggctcttttcttcctgctccaggcctagaggggcccaaacgccgcccctgaactgtgactgcttttacagcccccaagatttggtcgggggggggtggttgggacccccaaatgaagccgaaggggggggggcacattccttgtctttgggcc

SEQ ID NO: 17954 - DNA, 581 bp, Homo sapiens
ccctctagatgcatgctcgagcggccgccagtgtgatggatatctgcagaattcgcccttcgagcggccgcccgggcaggtactttcattggagaaaatatcattcagctctgaaaaaagatgtttttaaagaatttttactgatatagggagacactcagggtatagtgttatatgaagaaaaaaaatcctggttagtatagcagctggtaaaagaaaaaaatatgaagccagctattaaaataatgtatagctgggtgtggaggctcagacctataatcgcagcacttaaggaggcagaggtggaaggatagcttgagcccatgagttcaagacctgtctggacaactacttttaaatggtacctaaagtacctcggccgcgaccacgctaagggcgaattccagcacactggcggccgttactagtggatccgagctcggtaccaagcttggcgtaatcatggtcatagctgttgcctgtgtgaaattgttatccgttcacaattccacacaacatacgagccggaagcataaagtgtaaagcctggggtgcctaatgagtgagctaactcacattaa

SEQ ID NO: 17955 - DNA, 394 bp, Homo sapiens
ctatagggcgaattgggccctctagatgcatgctcgagcggccgccagtgtgatggatatctgcagaattcgcccttagcgtggtcgcggccgaggtacttttttttttttttttttttttatttttttttttttttttttttttttttttttttttttttttttttttttttttttttttttggggagacccctgctttataaaaacatttttcttacacatccgggggtggggtggaaacccaagacccttaaaggcattttacattttttgaaaccaaggtggtaaaaaaaggaattttgaaaacataggggggggggcaaatgaattttttaaaccaaaaaaaaacctcccccaaaattttccattttaaaaagacctttaaaaaaaggg

SEQ ID NO: 17956 - DNA, 692 bp, Homo sapiens
  misc_feature 535: n = A,T,C or G
actactatagggcgaattgggccctctagatgcatgctcgagcggccgccagtgtgatggatatctgcagaattcgcccttagcgtggtcgcggccgaggtacctgtatctgatgagttagtagctgtgaaaacgtttctctagcaaggctgcctgtgagtgggatcccaggccaagcagttaactgcgttccagcgaagcaggtgccccgtgtgttgctctgcaagtccacatggagcaggattccttattttgtgaagaaaggatttttagtgccacgtgtgtatttttaacacatttccaaaagcatgatttattcaggattaagtttattcagtagaaatttccaaggtatttttttaagtgaggcaccatcctggatgctggggaagaatctttgttggaatatgaccccgcgtacctgcccgggcggccgctaagggcgaattccagcacactggcggccgttactagtggatccgagctcggtaccaagcttggcgtaatcatggtcatagctgtttcctgtgtgaanatgttatccgctcacaattccacacaacatacgagccggaagcataaagtgtaaagcctggggtgcctaatgagtgagctaactcacattaattgcgttgcgctcactggccgctttccagtcgggaaacctgtcgtgccagctgcattaatgaatc

SEQ ID NO: 17957 - DNA, 684 bp, Homo sapiens
ggggggggaattcaatacgactcactatctggcgaatggggccctctagatgcatgctcgagcggccgccagtgtgatggatatctgcagaattcgccctttcgagcggccgcccgggcaggtacctacctggtgtccttgtggtctttctcaggatggcttccttctcaactgtgacaagtgcaggtaagatcctgttccatctaaatttaagtctgggttgctgggattagggtttcttacaagtagggaaaagctcaaagtattctttcttgtgtttgttaatgtagatgattccttagtgctccttggctcgaattctctgcactaggtgaggattgctgacaacaaggaatgagagattgatgttaaagctattgaatttgatatgaaatttaatgtcctggaaacatttggtaggtgggagggagggggtagcatatgcagagacacttcgcccatgtgtgctatgatgtgatgcatgctgttggaaggactactttaagtttattttccctctttaggggaatgagcagggggaaggttattagacttcatcggcggaagcaggacaacatatcaggtggggatagcagtgcaacagaaagctgggatgaagagctttctccttccactgtgttgtatacagcaacacagcacacacctacaagcatcaccttaact

SEQ ID NO: 17958 - DNA, 543 bp, Homo sapiens
tatatggcgaattgggccctctagatgcatgctcgagcggccgccagtgtgatggatatctgcagaattcgccctttcgagcggccgcccgggcaggtactgagagcccaggtcgttgttttttccagcttagaagccatggcgcacctccatttttgtgcgctctcctaatgaggtttttttctttcggacctgttttagtattaattattgctttatttttttgaccagttaacatatttgagggttattttatttatttttcgttttttaacggaggattttgcctttatttttaattatttgggatctgatatttttctactagtagataggactcttggtttggacatactacatggatcagtaaatacctgggcacaggacttcaaagcaaacacagattccccctcccccttaatatttaagaattaaaagatgatgagaaataaggacaaaagccaagaggaggacagttcgctacacagcaatgcatcgaggtatgagctatcaactttcttcctttttgtctttttttttggg

SEQ ID NO: 17959 - DNA, 594 bp, Homo sapiens
tactatatggcgaatggggccctctagatgcatgctcgagcggccgccagtgtgatggatatctgcagaattcgccctttcgagcggccgcccgggcaggtacattatggaggctttctcaatatctgccactttcactgcttttaccccagggcctatgcaaagacagcgtcctcttttgaacatggggaagccttgaacaactgtagcacacaatatcacagccaaggctatagccatgcccttcacactcatgtttgttttttgctgttgctgctggtgctgttgctgctacttcagctttgctgctcttcttggaaggagtagaaatgtgcttggcgataagcgattgtctcaccgctcggcgataggcgatggtcttactgctcggcgataggcgaaagtcccttcgtggttgccaagatgtgtccggaattggtgggttcttggtctcgctgacttcaagaatgaagccacggaccctcacggtgagtgttacagctcttaaggtggcgcgtctggagtttgttccttctgatgtttggatgtgttcagagtttgttccttctggtgggttcgtggtctcactggctc

SEQ ID NO: 17960 - DNA, 600 bp, Homo sapiens
agggagtcgacccacgcgtccggaataggctgcgttctcttggaacgcgccgcagaacgaggttctggtgaccctagccgcgttccctccttagtcctttcgcctacccacccgcgtacccgacagacccaccccgtcctgtgccaggaaagcgctgccaccggcaccatgccccacccatacccagcactgaccccggagcagaagaaggagctggctgacatcgctcaccgaattgtagctccgggcaagggcatcctggctgcagacgagtccactggaagcattgccaagcgcctgcagtccattggcaccgagaacaccgaggagaacaggcgcttctaccgccaactgctgctgactgccgatgaccgtgtgaatccctgcattggaggggtgatccttttccacgagacactgtaccagaaggcagatgatggccgtcccttcccccaagttatcaagtccaagggtggtgttgtgggcattaaggtagataagggtgtagtgcccctggctggaaccaatggcgagaccactactcaagggctggacgggctgtctgagcgctgtgcccagtataagaaggatggagccgac

SEQ ID NO: 17961 - DNA, 578 bp, Homo sapiens
ggcgaatggggccctctagatgcatgctcgagcggccgccagtgtgatggatatctgcagaattcgcccttagcgtggtcgcggccgaggtacttttttttttttttttttttttttggggtttttttttttttttttttttttttttttaaaaaaaacccccaaaaaatattttttttttttcaaaaaaccgggggggaaaaaaaaaaactttttttcccccccccccctttttaaaaaggaaaacttttccccggtttttttaaaaaaccccttttcccaaaaaaaaggggcccccccctttttttaaaaaccccccctcccccaaaaaaaaaagccccttttaaaaaggggggggaaaaaaacccccccaaaaaaaattttttttttttttaaaaaaaaaccccccccccaggggggggttttaaaaaaaattttgatgaaaaattttttttttgaaaagacccccccacaccccctttttaaaacaattttttttaaaaaaaaaatttcctttttttttttttttttttaaaaaaggggggttttttttaaaaaaagtttttttcccccaaaaa

SEQ ID NO: 17962 - DNA, 303 bp, Homo sapiens
atacgactcactatagggtcgaattgggcactctagatgcatgctcgagcggccgccagtgtgatggatatctgcagaattcgcccttagcggccgcccgggcaggtacagggtcatacagatgagctttggggtcttgccacacatcccttcaaagatttgctcttgacatgtgctcaggacaggcaggtgtgcctgtggaactcaatggaacacaggctggaatggaccaggctggtagatgaaccaggacactgtgcaaattttcatccaagtggcacagtggtggccataggaacgcac

SEQ ID NO: 17963 - DNA, 427 bp, Homo sapiens
  misc_feature 414: n = A,T,C or G
aatacgactcactatagggcgaattgggccctctagatgcatgctcgagcggccgccagtgtgatggatatctgcagaattcgccctttcgagcggccgcccgggcaggtaccccaggcaagctcaaagccaagaacagctgcattgaagtaggaagaaaaaaaaagccattaatttcacctgcctttccctgaaggtggcacagcttggcatgattggtagtaaacacccaactctcttgctgggtagaaagtgaaaaaaggaagtccgccattctgaattttggggggtcacctgatggactggtttctgtctctcctgactcagtgctgactgggaactggcatactttggatgcctgggggcttcagagaaaaaagagttaactggctttttgcaacatcaaagactcancagtgctgcggat

SEQ ID NO: 17964 - DNA, 491 bp, Homo sapiens
tagggcgaattgggccctctagatgcatgctcgagcggccgccagtgtgatggatatctgcagaattcgccctttcgagcggccgcccgggcaggtacacgcctgcccttcggctgtgggtgtgtgtggaaggccagccctcaccactcatgccactctgattgggagccaggtcagctatcaccacggcaaccacgcagaccctgaggagcgggactgccccacagcacgcacagacatcggagacgtccagatcctgagcagctttgtcagagatcacttacctgatctgaagcccgagcctgctgtcattgagagctgcatgtacctcggccgcgaccacgctaagggcgaattccagcacactggcggccgttactagtggatccgagctcgggaccaagcttggcgtaatcatgggcataactggttcctgtgtgaaaatgttatccgctcacaattgcacacaacatacgagccggaagcataaa

SEQ ID NO: 17965 - DNA, 469 bp, Homo sapiens
  misc_feature 203: n = A,T,C or G
atggggccctctagatgcatgctcgagcggccgccagtgtgatggatatctgcagaattcgccctttcgagcggccgcccgggcaggtactttttttttttttttttttttttttttttttttttttttttaaaattttttttttttttttttatatttttttttttttttttatttttttttttaaaaaaaagaaaaaaaanatttttttttaaaaaaaattttttttttgaaaatttttttaaaaaaaaaaaaaaaagccatttttttttagagtgggaaattattttttttaaaaaaaggggttttttaaaaaaaattaaaaaaattgggtgggggggggaaaattttttttttaaaagagggggggataattttttttgggccccaaggggggggaaaaaaaaaaaaaaagggagaaatgggggaaaacattttctttttttggggcattttggaaaaaaaaaaa

SEQ ID NO: 17966 - DNA, 526 bp, Homo sapiens
  misc_feature 207, 310, 384, 385, 438: n = A,T,C or G
ccctctagatgcatgctcgagcggccgccagtgtgatggatatctgcagaattcgcccttagcgtggtcgcggccgaggtacaacaaaattcgtaataaccttttatcatttttagaaaactttaaatatatagataaaaatagacaattttcataggtctactgaagatgagtatgttctgttccaagggcttgcatagagcgcanatgtggttataatatagaacaactagacattaatatttttaggattacaaaagcatggaaaccataaaatgggcacattttacttgtttatgccaaaacacanatttccaaaccaacctgtataactaaaacagggaaaaaattaagttacagacttacaataacatttcatgaatnngtatatttacaacatggtagtaagagtctctcttaacatacagctgatagctnttttctttaatccttgctaaaatttccttttatttcaaatcaaacactaaagcattctcaaagggtctcaaatatgtattttaaaact

SEQ ID NO: 17967 - DNA, 610 bp, Homo sapiens
  misc_feature 86: n = A,T,C or G
ccctctagatgcatgctcgagcggtcgacagtgtgatggatatctgcagaattcgcccttagcgtggtcgcggccgaggtactttnttttttttttttttttttttttggaggcggagtttcactcttgttgcccatgctggagtgcaatggtgcaatctcagctcaccgcaacctccacctccctggttcaagtgattctcctgcttcagcctcccgagtaactgggatcacaggcatgcggcaccacgcctgtctacttttgtattttcagtagagacagggtttctccatgttggtcaggctggtctcgaactcccaacttcaggtgattcacccacctcaacttcccaaagtgctgggattacaggcatgagccccccaacacagcctctctcctattttaacacttggttggtcacacattctgctccattcatatcacagtgctaggctgagggactcaaaggtggggacaataggggaatgggagaatgccatgaaaacatgcccatgttaaagttaactaacaacacaggacattgcgtgtgtgatggagcaccacatgaccttagtcaataattcaatactgtctaataatattaatgatg

SEQ ID NO: 17968 - DNA, 432 bp, Homo sapiens
ggccgccagtgtgatggatatctgcagaattcgccctttcgagcggccgcccgggcaggtaccagctggttcccaggcaaagcctgtctgcaaagactggaataaacctctactcagatgtgcagacattcacatatagctacaagaattaagaataatcagggaaagaagatttcaccaaacagacaaaacaagtggccagtgactgaacctgaagagatctagaagatgaactacctagcaaaaaatttaaaatacctgttttcaagaaagctcagctaacttccagaaatataaagaattattcagaatttatcagagaaatgcacagagactaaattaataataaaagccctatatcctgcagagaaaaatacagagacaaaatgaaaattaatacaaaatggcaacagcagaattgatcaagtagaa

SEQ ID NO: 17969 - DNA, 491 bp, Homo sapiens
  misc_feature 446: n = A,T,C or G
tatagggctgaattgggccctcttaaatgcatgctcgacggccgccagtgtgatggatatctgcagaattcgcccttagcgtggtcgcggccgaggtacttgtgtgtatacttgttccatatactcaggcatttaccttggaaatggcctacactgagccaccgcttgtgaataatattgtctctataggtgtgcaagcatttcctggaagctattgaaaacaacaagtatggctggttttgggtatgccctggagggggtgatatttgcatgtatcgtcatgcacttcctcctggatttgtgttgaaaaaagataaaaagaaagaagagaaagaagatgaaatttcattagaagatctaattgagagagaggtaactggtatccttttcctaccataaaaactgaaagcagtatttattgtgaaattctaatacttaccacttgngggcaatagccttttatgaaaaaaaaaaaaaaaaaaaaaaaaaaa

SEQ ID NO: 17970 - DNA, 587 bp, Homo sapiens
ggcgaattgggccctctagatgcatgctcgagcggccgccagtgtgatggatatctgcagaattcgcccttagcgtggtcgcggccgaggtactcccattcatacctacccatccactcccaatttcaatacaaatttatatctctataaatgactaaaatactattgtgttggtttttctttcttttttttcttgctgccacaacaaattaccacttacttaaagaacataagattaaagtgatagattttaaagcataaaataaaaaaaaaattattatcttaccattctgtgggtcagacattcacatgactttggccaaaatttagatggtggtagactgtgttcttttctggaggatctggggatttatttccttgcctttacagcctccagaattctggacttgaatgggagtgacagtgtttttcttctggtaatgagcataggtgtaggctggtgcaattaatagtcactacatgcaagaaagcagaatcaagggaaatgaagagaagctagtcctgttaaacttcaattgacactgaaatatcagtcatctctgaagtgaatatccatgaacttgtca

SEQ ID NO: 17971 - DNA, 406 bp, Homo sapiens
ctatagggcgaattgtgcagtctgctccagcggccgccagtgtgatggatatctgcagaattcgccctttcgagcggccgtccgggcaggtacaaccttttgttctaagagacagttaacagctgggtttagtattactgggatttactcgaagacttgtaaagtaaataatggtgcatttaagaatatttgcctgttttgatttagtgagtttggcaggtggcggtggcctttcaatgacatatggctttgaaattacatcaatatatgcatacagtgtgtctgtgcctttagttcatgcatcaagttaattaataaaggacccctggtttaacattttatacgcaaatattccccagtgttggttgaagaaaatacagtgcaaagataaagtaaaaaagagcct

SEQ ID NO: 17972 - DNA, 635 bp, Homo sapiens
atacgactcactatagggcgaattgggccctctagatgcatgctcgagcggccgccagtgtgatggatatctgcagaattcgccctttcgagcggccgcccgggcaggtacacggtgagaaactctcgaagaggacactgtttggctgggccaagacccagagcatgctcaatctcctgaataaatcttagtaatgggtggaatatgacggtaatgtttctggctccaggtttgcagacaaattttgttcctccaccttcaattaagttgtcatcaggacccccttgcagttctccactccgactatagagctcccttctctgttctcgcagataggcgctcatactgatggcatgggaggacgattcgaacttgaaaagagaattttttggcctttgaggtttcttcttggcaaaaaaggctgcaaactctcgtccagtgctggcatagcttagttgagctgatggttcagaggccgtacctcggccgcgaccacgctaagggcgaattccagcacactggcggccgttactagtggatccgagctcggtaccaagcttggcgtaatcatggtcatagctgtttcctgtgtgaaattgttatccgctcacatttccacacaacatacgagccgg

SEQ ID NO: 17973 - DNA, 389 bp, Homo sapiens
tacgactcactatagggcgaattgggccctctagatgcatgctcgagcggccgccagtgtgatggatatctgcagaattcgccctttcgagcggccgcccgggcaggtactgggattacaggcgtgagccaccgtgcccgaccatgtagtgtgtatttttgttttcaataaatctttgcttttgttgcttcattctttctctcatcacgtggagtatactttcattttcagtaaatctctgcttttgttgcttcattctttccttgctctgtttgtgcggttttttttttttttttgaaggttaagaagttgtgttatgatatgtaaaatgattttctgattgctatatttagatgtgaaatacagatccacatgtcacctggttatgc

SEQ ID NO: 17974 - DNA, 451 bp, Homo sapiens
ccctctagatgcattctcgagcggccatcaatgtgaatgatatcttcagaattcgccctttcgagcggttttccggcaagtacagaggtattcagtggagggcgagtggtttcggaaaaaaaaaggaaaaaaaagaaaaaataagaaaaaaaaagatttttttttttttttaatcgaaatcgtgatggtgttggataatttaaatgggggggtaaatataccatgtaatccggactatctttaaaaaatttctgtataaaactgttgaccagtttttaaaatagtgtgggataataaaaaaagcgaataaaaggcgctatgtttaattcctacaacaaaattatcaccagctttttttaattttaaactctttaaaggattcaaacccacctgaaatttgggctggactttaaaaaaaaaatttaggaccaaattttttctaaaggggggg

SEQ ID NO: 17975 - DNA, 296 bp, Homo sapiens
ttctggaataaagcaaaagagtgttcattcacacacacacgagcttcaaaactgttcgatctgtttgtcccatgtccttttctaaagatggaaaaaaacgactatggcatcaatactactgtggccatattagattactggaacatctaagcatcagtgtgtgaccatgcgaacaaaagacttcggggagtgtctatatataaaaaggtttatgtgtgctgaggcagatgtataagatctacttgataatcaagcccacttttaggcttacgaccaggttctaactatctaaaaat

SEQ ID NO: 17976 - DNA, 368 bp, Homo sapiens
ggccctctagatgcatgctcgagcggccgccagtgtgatggatatctgcagaattcgccctttcgagcggccgcccgggcaggtacagtcatgaaattttgtggtcttcctgacatgttcttccggcataacgttgccaccttcagttggaaacgtatccttatctaataattaagccctggagaaaaattaatttatatattttattaattacataaggacattgttattagctaagcagagtaagtaaatcgaaataaaactttaaaaatgcctttatggagagaatgactatctctgaaagcttgtttttaatgatgataaaattcatgatcagaatttgtttctgtttactttaattcaggggt

SEQ ID NO: 17977 - DNA, 370 bp, Homo sapiens
ggggccctctagatgcatgctcgagcggccgccagtgtgatggatatctgcagaattcgccctttcgagcggccgcccgggcaggtactcagacactgatattcagtgaaagagcagggggccactcacagaaggagttgtggcagccacgtgccaactaactggccttgccggcatttattcagcacagatttaatgacaaaggcattgagtcaacacgtgtgtggttaattaatctggtcaccctccgctggagagagcagtcctatgaatgatcaaaagccagtcttaggaccacatgtgtaaacaagctctttagataaactcccttacattcctttttacctactctgagctgttaactcaaggt

SEQ ID NO: 17978 - DNA, 450 bp, Homo sapiens
atgcatgctcgagcggccgccagtgtgatggatatctgcagaattcgcccttagcgtggtcgcggccgaggtacgcggggcccgtgggctacggtatccggaagctacagattcagtgtgtggtgggggacggcaagtcggagtagcaagatggccgccgctgaggaaggctgtagtgtctgggccaaagcggacagggaattggaggagcttctggaaagtgctcttgatgatttccataaagccaaaccctccccatcttccccttttaccaccacggcccctgatgcttcggggccccagaagagatcgccaggaaacactgccaaagatgccctcttcgcttcccaagagaagtttttccaggaactattcgacagtgaactggcttcccaagccactgcggagtttcgagaaggcaatgaaagagttggcttgagaagaacccca

SEQ ID NO: 17979 - DNA, 323 bp, Homo sapiens
atgctcgagcggccgccagtgtgatggatatctgcagaattcgcccttagcgtggtcgcggccgacgtacactgggtgagagacaggcgttcctctgcctgaccactcagaggcaacacccggaagctgttttgttctttgtggagccttaacagtaccctggatgcgaactcactgacaaaatccctgaacaggagccaccctgcattgctctatcttcattaggaccatgatgatcctcttcaatttgctcatctatctgtgtggtgcagccctagcggcagtgggcatcagggtgtaaatcgatggggcatcctttctga

SEQ ID NO: 17980 - DNA, 541 bp, Homo sapiens
  misc_feature 199, 490: n = A,T,C or G
ccctctagatgcatgctcgagcggccgccagtgtgatggatatctgcagaattcgccctttcgagcggccgcccgggcaggtactttttaatcagtctttgctaaacagcagctattgctattcaatggagacggtggccaccatttccccggatcgctctcctacgtaatcagtccctgatggactctcttcccatanaaatccctgtgtcctaaagtcatggcgtgctctatttcatggtcatttgtagagcacagcagcactgtgcctgtcaggaaaagtgtgtgctaactgcaataagcatgatgactgccatcacggttttgttattctctgtccacctccatggtctctaaatcagacaatctttaatctgaaaaggcagtgtccttattcctccaggaaactggatagaaacgctcctcatctaatgaagtcagccctgtcatcttactgattctttcccagaccacagtgaaaggcctgtanggaaggcacatgaagaaatttcaaagttcaggttgaagtcataaaaactag

SEQ ID NO: 17981 - DNA, 797 bp, Homo sapiens
  misc_feature 232, 313, 599, 684: n = A,T,C or G
gatggtcgatacttgggcgaatggcccttaatgctgctcgagcggcgcaggtgatggatattgcagaattccccttcagcggcgccgggcaggtacacgtgactgaatctggaatgatggggtttggaatacaatgacactacaatggtaactgtgcatggaatgacattataaactgtagtaaccatcccgtttcttaagaagaagagaataggagcctgtcctcactctngtctgtaggaatgccatggctattacccaacataatgactaacagagccccttttattccgagatgtcctggtttatatgnataaattatatcgctaccctatcactatgtgctaccatgcaggtgactgtgcccctctgagccttggtttcctcatctataagacaagttctccccattgtagaccctgttatattctggtagtccttcagtctagcactttattgcacagaagctccatttagaagctatgacatcccattcaggtggtcagaggggttcccatgaacctaaaattaaccaaagagctgaagccctgggccagtagagatcactggatgccaggaaccagaggcaggacaagganaaatgtctgagtctaccacagttactgacactcaaatttgccgattggccattaagaggatgatgcacccttcttatgcaggcanaatattctaaacatagcctctacaaacaaagattaacatgtaagtgaggggcactcaaaaaaacacatcggctctggggcaagtttaacagcggtcaacaggtcttttctaat

SEQ ID NO: 17982 - DNA, 399 bp, Homo sapiens
actatagggcgaattgggccctctagatgcatgctcgagcggccgccagtgtgatggatatctgcagaattcgccctttcgagcggccgcccgggcaggtacccaccagatgtgtctgtcacttccctacatccacctctattgtggttctcatgtttctgcctccctagagaccatttctctgtagagcagcgctttcgaatagaaatacaatgccagacacataagttgttttagattttctagtagtcactttagaaaagttaaaaagaaacaggtgaaattaatgttttatttcacctaaaatgttagcattatccaaaatatcacttcaacatcttatcaaaataaaattattaatgagattggttaccgttccgataaataggtgaactgaga

SEQ ID NO: 17983 - DNA, 561 bp, Homo sapiens
ctcactatagggcgaattgagccctctagatgcatgctcgagcggccgccagtgtgatggatatctgcagaattcgcccttagcgtggtcgcggccgaggtacagtggtgtgtgcctgtaattccagctactcaggaagctgaagtggaaggatcgcttgaaccaacgagttcaagattagcctgagcaaggcaagatcacatttcaaaacaaataaaccaaaaagaaaaaaaaaggaaagaaaaagaaaagtaaaatgctcgccaggtctctactgattagctgttggggcactccttcaaaacttacccagggcctttataaatctaccttaatattcacttcctgtttgtgttgaacctaaagacaagccagaggtgaaagctaatggccttctcaggtcttttctgagcacacatactgccctgagctgtgcacttggctttctagtttctcatccacaatagcttttcaaagctcctattcctctacaaaaactcactctacagcttttcctctcaggctttcaatatcttattgtttgccctgtttttttttttc

SEQ ID NO: 17984 - DNA, 402 bp, Homo sapiens
tgtatacgactcatatagggcgaattgggccctctagatgcatgctcgagcggccgccagtgtgatggatatctgcagaattcgcccttagcgtggtcgcggccgaggtacgcgggtgctttccttataaggaatcaaacttgacttacggagccaataaagcccttggaaaaactggcctcatattctgtatacacagtccctgtaagtaaagaatatcactttttgacaagtgcagacgccccaggtttatcttgggccctcaaaaggagaggaaatttcacccaactcatgggtatttaatggcataaatccatggctcggctgggttttacgggttttacaaagtcttatctgagattcctgctatggagcaaagttccatcagagcctacttaaaag

SEQ ID NO: 17985 - DNA, 275 bp, Homo sapiens
ccctctagatgcatgctcgagcggccgccagtgtgatggatatctgcagaattcgcccttagcgtggtcgcggccgaggtaccttctttagtagagactgggtttcaccatgttggccaggatggtctctatctcctgaccttgtgatctgcctgcctcagcttcccaaagtgctgagatgacaggtgtgagccatcagacccagcatttttttttaatttaaatttaaattttttttcatttttttgagaggttttttttgttttgttttgttg

SEQ ID NO: 17986 - DNA, 455 bp, Homo sapiens
gcgaattgggccctctagatgcatgctcgagcggccgccagtgtgatggatatctgcagaattcgccctttcgagcggccgcccgggcaggtacgatgcctccatccttctctggaaactgcagttcgacgacaatgggacatacacctgccaggtgaagaacccacctgatgttgatggggtgataggggagatccggctcagcgtcgtgcacactgtacatatgctgttaccagcacaaacgagtcaaattcagccacaatcacccggccttcctgatcatgctcctcctcgcctatgccgtaagaaactttgagtgggcactggcgggaaagcaggcccacgccactgtacctcggccgcgaccacgctaagggcgaattccagcacactggcggccgttactagtggatccgagctcggtaccaagcttggcgtaatcatggtcatagctg

SEQ ID NO: 17987 - DNA, 373 bp, Homo sapiens
actatagtggcgaattgggccctctagatgcatgctcgagcggccgccagtgtgatggatatctgcagaattcgcccttagcgtggtcgcggccgaggtacctacttgaataaaatacttctgggcagtgaacaaggaagcctgcagttgtggaatgtaaaatccaagtaagtattttagttagaaaataatatagctgtcaccttatcctcatctactacttcctaatgtatacttaagtctcatttctccctgcccttgtatatttatttggagggttgtctataaatagcagttggtcccctgtatcagaggagtcaattaacctgggatcaaaaatattcaaggaaaaataaataaataataatacaaa

SEQ ID NO: 17988 - DNA, 311 bp, Homo sapiens
gggcgaattgggccctctagatgcatgctcgagcggccgccagtgtgatggatatctgcagaattcgcccttagcggccgcccgggcaggtacctaagagaaaaataggctcagttagaaaaggactccctggccaggcgcagtgacttacgcctgtaatcccaaagtgctgggattacaggcttgagcccccgcgcccagccataaaaaagcctttttatttctgcatatggtggaattcttttttacaattttaaaaaaaatgattctggttttgaaagggcaataatttgcaaaatctttggaaattt

SEQ ID NO: 17989 - DNA, 588 bp, Homo sapiens
tggggccctctagatgcatgctcgagcggccgccagtgtgatggatatctgcagaattcgcccttagcgtggtcgcggccgaggtacacatgaggaaattaagaatgagagaggttgagtatgtcacccaaggtcaaacaactacaatatggagaaacaaagccctgttttgtctaactccaaccctcctaccaactgccttcagaactataaatgaatctgttatttatttatttattttttgtttgaggcaaggtctcactctgttgcccagtctggagtgcagtggcatgatcatggctcatagcagcctcaaactcccgggctcatgtgatcctcccaccttagcctcccaagtaactgggactacaggtgcatgctactacacctggttaagttttaaaataaattttggtagaggtgggggtcttgctttgttgccaaggctggtcttgaactcctgggctaaagcgattctcccacctcaacctcccaaccagctgggaccacaaacatgtgccaccacacccaagctgattttattttttaacagctcaaagaggtaaaaatgaaaaaaaaaaaaaaaaa

SEQ ID NO: 17990 - DNA, 537 bp, Homo sapiens
atacgactcactatagggcgaattgggccctctagatgcatgctcgagcggccgccagtgtgatggatatctgcagaattcgcccttagcgtggtcgcggccgaggtactcagcaataaaaaggaatgaataaaaagaatgaaacattgatatatgtggcaacttgaaggaataccggggaattacactgagtgaaaagccaatcctgaaaggttacatactgtatgattccatttatataatattcttgaaatgacaaaatcatagaaaaatggaggacagattagtggttgccaggggttacggatggtggtgtgcagaagacaggggggaggtgggtgtgattataaaagggcaacacgagagatcttgtggtgttgaaactgttcaatatcttataggatacataaacttacctaggtgattacactatagaattataaattatatagaatacatcatacaaatattcattaatacagggaaactaggaagtctgaatatgattggtggatttggagtctgtatatgattggt

SEQ ID NO: 17991 - DNA, 414 bp, Homo sapiens
  misc_feature 392: n = A,T,C or G
gggcgaatggggccctctagatgcatgctcgagcggccgccagtgtgatggatatctgcagaattcgccctttcgagcggccgcccgggcaggtactttttttttttttttttttttttttttggggttttttttttttttttttttttttttttttttttttttttttttttttttaaaaaaaccccccccctttaaaaaaaaaaaaaaaaaaaaagggggggggggggccccccccaaaaaaaaaaaaaccaattttaacggggggggggaaaaaaaaaaaaaaatacaaaaaaaaaaagggggggggaaaaaaaaaaggacccccccccccccccgtggaaaaacaaaaaaaaaagggggggggaacaaccccaagaaaaaaaaaaaanaatttttttccccccccccccc

SEQ ID NO: 17992 - DNA, 379 bp, Homo sapiens
tatagtggcgaatggggccctctagatgcatgctcgagcggccgccagtgtgatggatatctgcagaattcgcccttagcggccgcccgggcaggtacagtgtttataaagcctacagtagtatgtagtatgtagtaatgtcctaggccttcacatttacttaccactcactaattcacccagagcaacttctagtcctataagccccattcatggtaagtgccctatacaggtggaccattttttatcttcattttttttttttgaaatggagtcttgctctgtcacccaggctggagttaagggctaactgcaacctttgcctcctggattcaaaaaattttcctgcctaagcctcccacgtagctggaattacaag

SEQ ID NO: 17993 - DNA, 496 bp, Homo sapiens
  misc_feature 367, 368, 372, 374, 375: n = A,T,C or G
ctcactatatggcgaattgagccctctagatgcatgctcgagcggccgccagtgtgatggatatctgcagaattcgccctttcgagcggccgcccgggcaggtaccagtcaccactatgcacctccggaactttttcatgatcccacactaatctctgtgccccttaaacaataaattcccattccctcctgccccctgtgacaaaacgtaatctttgttctactttgtctctatgaatctcactagtctaggtacctcggccgcgaccacgctaagggcgaattccagcacactggcggccgttactagtggatccgagctcggtaccaagcttggcgtaatcatggtcatagctgtattctcgannaaananngatcaaaaatgcaactgagaaaatgatggctcttgttgctgagctgtccatgaaacaagccctaaccattgaactccaaaaggaagtcagggagaaagaagacttcatcttcacttgcaat

SEQ ID NO: 17994 - DNA, 325 bp, Homo sapiens
ggccctctagatgcatgctcgagcggccgccagtgtgatggatatctgcagaattcgcccttagcggccgcccgggcaggtactttttttttttttttttttggccaaaaattttttaaaaaaaatttttttttttaggccttgggccacccttttttaaacccgggttaaccttttggccttataccaaccctttttttttttaacccccccgtttttttttttcgggccaaaaattttcccataccccttttttataaaaaccccccccccccccttttttttgaaaaaaccccctggttttttaaaacccaccttttttttt

SEQ ID NO: 17995 - DNA, 287 bp, Homo sapiens
ggccctctagatgcatgctcgagcggccgccagtgtgatggatatctgcagaattcgcccttagcctggccgccgcctacgtactctgagtctctacactaacactaaatctactatcaggtctctatcatcaactactacccccttcacggcatccgggatagcccacaatttaacgatctataataagcttgagtgaacatcggccacacctgctgctggggccttgaccctaccgtctacttaatgtaaaatcaagaatctactgtgaaataatgaaaattgac

SEQ ID NO: 17996 - DNA, 592 bp, Homo sapiens
tggcgaattgggccctctagatgcatgctcgagcggccgccagtgtgatggatatctgcagaattcgcccttagcgtggtcgcggccgaggtactaaaggcagttatagcattattaagcaggtccagtggcaaagctgaagggggtagcactgaaggactcacagcttctgtgaattgtggcatgacaatgttgtagtggatgcagaaccctggttcagaaggaaaatattcatcagatacaaatcttatcctaatttgatttcctttagaaatctgttttcctggtaccttatataatctaaaccaattaagagtagcttccaggtaacccggtttgaacttcttaacatcatcaatatcatgaaactttgaggcttcaggatcattcgcattgatagcaattaatttccaatctgtttcaccttcatcaataagagccaaaattccaaggatcttcacatgaataacttctccacaagaaagaatctttgagcctatttcgcaaacatcaataggatcattatcttcaaagcagttcgtgctcttatctttttcatggggatcttcccaagtctgagggagggtacctg

SEQ ID NO: 17997 - DNA, 648 bp, Homo sapiens
ccctctagatgcatgctcgagcggccgccagtgtgatggatatctgcagaattcgcccttagcgtggtcgcggccgaggtacactggctgtcctccaacccctgtcaccaccttaaatacatggccaattgttccctgtctatagttccttcggtgggccatccaacaccaaaagagggcaattctaatttacacagagttcttagcctctaggggttaacttaactctataatctcctgcaaaacccttcttaaggttctgtaacctgcattttaatggaataagttttgatgatttgatgactttccttttatttttctttttgaaaattttttttaacacagttcttagtggagtaggcttactttgtgtctgacctatttttctcttgagacaaaacaacattcacactacaagaaggaaaggataaaaggtcactcactcatctaattcacactaaatcaaaatgaacactaaaaccaaagtgttgttaaaggcacacctgttcgtcaagcaatttaagccaagtcaaaatcagaaccaaaaccaaagtgccaataaaagcatgtctgtttatcaagcaattcaagtcaagtcaaaatcaaaactaaaaccaaagtatcaagcaattcaagtcaagtcaaaaa

SEQ ID NO: 17998 - DNA, 568 bp, Homo sapiens
gggcgaattgggccctctagatgcatgctcgagcggccgccagtgtgatggatatctgcagaattcgcccttagcgtggtcgcggccgaggtacatttgtagaaatccgtagaaataccatatccagcctcaaagcattaatctcagaaaaaaaaaaaaaaaaaaaaccgcccccaaaaaaccccccccccggggggcccccgggggggggggaaaaggggtcccaaaaaaaccgctaaaaaaggggctaaaaaaattttttgggggcaaaaaaaagtctcttttttgggcgaaaagggcaaaaaaaccggggaaaccctttaaaggggggggttttatcttccccaaaaaggccaacagtttttcaaaaaaaaacccctgaaaaattttggggggggggaaaaaatggggcccgtgccgtaaaagggttttggggggggaaaaaaaaaacccccccggggggggtttttaatttcccggaaaatcttcccccctcaaggggggtgggctcagggaaaccccccggaaaaaaaaaaaaaaatttttttcccacccgggggggggggtt

SEQ ID NO: 17999 - DNA, 547 bp, Homo sapiens
atagggcgaattgggccctctagatgcatgctcgagcggccgccagtgtgatggatatctgcagaattcgccctttcgagcggccgcccggcaggtactctgagcttctccagaaagggaatatgagggccctgctggtggctttggccctggtggtctggaacctttgattgcaggacttgcttaggcaactgaaaccctcccttgcttacaattcactcttggatctttaaggatcacctgtacaagcagttaatcacccaccatagggcatgattaacaaagcaacctttcccttcccccgagtgattttgcgaaacccccttttcccttcagcttgcttagatgttccaaatttagaaagcttaaggcggcctacagaaaaaggaaaaaaggccacaaaagttccctctcactttcagtaaaaataaataaaacagcagcagcaaacaaatgaaatgaaataaaagaaacaaatgaaataaatattgtgttgtgcagcattaaaaaaaatcaaaataaaaattaaatgcgagcaaggaaaaaa

SEQ ID NO: 18000 - DNA, 360 bp, Homo sapiens
ggccctctagatgctgctcgagcggccgccagtgtgatggatatctgcagaattcgcccttagcgtggtcgcggccgaggtacactcagacagggcatcatttctagcctttatagaatatacatgcttcccacgtttcagagaataaggcttattttcttcaatctgcacaatctttgcattcttgttttctaaattatctttttttctttcgtttggtcttgggcatttttattccttcctttccacatctgctgtgcttggtcccccgatgtttagactttgatttttcttggtttgccttgcttgacatattttcctggcctggcgttaatcttcttggacgaatcaaatgagcct

SEQ ID NO: 18001 - DNA, 663 bp, Homo sapiens
  misc_feature 651: n = A,T,C or G
tatatggcgaattgcgccctctagatgcttgctcgagcggccgccagtgtgatggatatctgcagaattcgccctttcgagcggtcgcccgggcaggtactttatctacttaaagcaaagttttgctttcttgaatgactttttctgtgagatgaatttttgataagaactgggaaaacatgtcttttaggtgtcttgccgatgactatccataggaggaatggctatcccaaaaaaagttccgcaaaaaagtagatgagtttcttttttttaagcactaaagaacaaaatgcatttttcattaatacaggcttctgatgaaccaggaatcctgttttcgtaaagttccaatgttgatgagagtaaattcttaagcatttgtcctagaggtgaaagcagctgaatgtttctgaaccatcaagaggcaaacaaacaggagtttgtttcttgaacctgcttatgcacacagctcttaactcctcatgaggcacacagctcttaactcctgatgaaccaaggatttactcataactttctccttgtcatggaggcttaatagacaacagaataaatgcatttcttgggcctcttataaacttgggaattcttagaaagctgcttctattaccaggctgtaatagctggtatagnttttttttttct

SEQ ID NO: 18002 - DNA, 178 bp, Homo sapiens
  misc_feature 111: n = A,T,C or G
acgactactatagggcgaattgggccctctagatgcatgctcgagcggccgccagtgtgatggatatctgcagaattcgcccttagcgtggtcgcggccgaggtacgcggnggcgcttgcgcctctttcatcttcccatcatggccgccgcctgtgcgcctctgctgagtcgtatgta

SEQ ID NO: 18003 - DNA, 340 bp, Homo sapiens
tgggccctctagatgcatgctcgagcggccgccagtgtgatggatatctgcagaattcgcccttagcgtggtcgcggccgaggtacccaggggcgtgtatgattaccagagggattcagggaggggcgtgtgtgattaccagagggaatcggtgttacatcctctaggattccctccaggaaacctcctacctacctgttacaggtaaggaccttaggtgtattcttagatgggggttctcaaaccttcatgtgtgtatgaattactggggagccagtgaaaatacagattaaaattctgtaggtctggagtggagccatgtggtgctgatgctgctgat

SEQ ID NO: 18004 - DNA, 362 bp, Homo sapiens
  misc_feature 136, 291: n = A,T,C or G
ctatagggcgaattgggccctctagatgcatgctcgagcggccgccagtgtgatggatatctgcagaattcgcccttagcgtggtcgcggccgaggtacagtgacctaaagttggtaagatgtcataatggaccantccatgtgatttcagtatatacaactccaccagacccctccaacccatataacaccccacccccattcgcttcctgtatggtgatatcatatgtaacatttactcctgtttctgctgattgtttttttaatgttttggtttgtttttaacatcanctataatcattcctatactagattttttattacccttgataagtattaaacttacactttttttaaaaaaa

SEQ ID NO: 18005 - DNA, 318 bp, Homo sapiens
ccctctagatgcatgctcgagcggccgccagtgtgatggatatctgcagaattcgcccttagcgtggtcgcggccgaggtacgcgggaggaaggaaggaaggaaggaaggaaggaaggaaggaaggaagggcgggcaaagaaagagggacatttttttaaaatattattttaaaaagactaactaggggaccagcacagtgactgacacctgtaattccagtgcttttgagaggctgatgcaggaggatcacttgaagtcagatattggaaaccaacctgggcaacataatgagacccgtatctcttcaaaaaaaaaa

SEQ ID NO: 18006 - DNA, 383 bp, Homo sapiens
ggccctctaatgcatgctcgagcggccgcagtgtgatggatatctgcagattccccttacgtggtcgcggccgaggtactttttttttttttttttttttttaaaattttttttttttttttttttttttttttttttttttttttttttttttttttaaaaaaaaaaaaataaaaaaaaaaaaaaaaaaaaaaaaataaaaaaaaaaaaacaaaaaaaaaaaaaaaaaaaaaaaaaaaattttttttttaaaaaaaaaaaaaaaaatattttttttatttaaaatgggggggaaaaaaaaaaaaagaaaactttttttttgttggaataaaaaaaaaaaaaaaaaaaaaaaaggggggggggttttttttttttaaaaaaac

SEQ ID NO: 18007 - DNA, 658 bp, Homo sapiens
tatagggcgaattgggccctctagatgcatgctcgagcggccgccagtgtgatggatatctgcagaattcgcccttagcgtggtcgcggccgaggtactttataacatttaatttaaatatatcacaataattctttctgccctctccagtctattttaaaatccatccaggaactttttttttactttagttcctgaattttcatttgttttttgaaaatagtttccattcctgaaatgtcctatctattcatccattaggactagcctcttttaaaatctatttatgatagttgcattacaccctttatttgctgactacaactgggttttgtttctgttgactgatttttcttttactatgggtgacattttcctgtttcttcatatgatagtaagttttggttatatacttgacagcatagaaaatagactataagtattttggattcttgtttgggtgaaatggtagagatggaaaaagaaagagatgtttcggattcttttattttccttggaagagtgttgagttttacttcagcaggtggttaaattactgatgaataaccaggagtttgtgtagcctttttaacaggttgattcgggttttattcttacagagaattcttagtccttgggacatagtcttttattctat

SEQ ID NO: 18008 - DNA, 272 bp, Homo sapiens
  misc_feature 150: n = A,T,C or G
tatacgactcatatagggcgaattgggccctctagatgcatgctcgagcggccgccagtgtgatggatatctgcagaattcgccctttcgagcggccgcccgggcaggtactttttttttttttttttttttttttttttttccgaattnctgtggggttggtggtaatgtcccctttgtcatttctgattgtgttttttagatctccttttgcaaggtgtgaaatttttttgaagacttttccacacatttattataattgtgaagtctct

SEQ ID NO: 18009 - DNA, 482 bp, Homo sapiens
  misc_feature 108: n = A,T,C or G
cgactactatagggcgaattgggccctctagatgcatgctcgagcggccgccagtgtgatggatatctgcagaattcgcccttagcgtggtcgcggccgaggtacttnaattttttttttttttttttttttacttttttttttttttttatttttatttatatatataaaaaaaacaaaatttaatagatatttttgtttccccaaaaaattaaaaaaacttaagggggggggggggccaaaattttcttaaggttacccaaatacagaagggaaaagggggggggggggaaccccccaccccaggggggggagaatttgagggcgtcggggcaaaagggggggggggggggttagaagcgcaaaaggaaataatcccaggggggcggggaaagagccaccccggggcgcgaaaaaaaaaaatgggggcccaaaaaaggggggatcctgaaaaaggggggggggggggtaaaaaaaaaggg

SEQ ID NO: 18010 - DNA, 599 bp, Homo sapiens
acgactcactatagggcgaattgggccctctagatgcatgctcgagcggccgccagtgtgatggatatctgcagaattcgcccttagcgtggtcgcggccgaggtaccgtattacttttctattgcttctttaccaaataaatacaagctttgcagtttaaaacaacagaaatttaattttttatagttctgagggtcagtaacctaaaactgatcttatgaaataaagttaaatcttggggatatgggtgtggacagggctggtttcttctggggctctgatggtaaaatttgcttccttgccttttctccttctagggagcctgcattccctgcctcctagtggcttcctcccatcactcgaacctctgtttccagcctcaggattcctaatgtgactctgacgtttcatctcccgtttatgaggacgcttctgattgctaagatacatacggtgacactatggaagttaacttgaagattaaaaccctgaaaaatagaaagaatcttctatggtatatcacagagattacaagggcctgaattagagtggtgacattttcatcccttgataatggattaaaaacaattgaatgaag

SEQ ID NO: 18011 - DNA, 587 bp, Homo sapiens
  misc_feature 254, 258, 259, 260, 452: n = A,T,C or G
gcgaattgagccctctagatgcatgctcgagcggccgccagtgtgatggatatctgcagaattcgcccttagcgtggtcgcggccgaggtaccatctgacttggcaatgtaagacacacacgttagtgtggggcacaaacgtggaatattaggagagagctggttccagcaccaaatccagagtcactcggggaaggaggtatggtggcaacactttatgcttaatgttcaattctgctccagtagaacatggnactnnntttttttttttttttttttttttacacattccaagtttgaaatctctgtgatgcttttgagagggatgtgaagacactattcttagaaaattaagacaatcctctgccttggaaaataacaactcaatctgtttttctagaatgaatggataggcaaatattatttctgtctttaaaatattaaagttattntaaatcatagcatatatggcactttgctcaaggggaggaatggtgtggatataaacattctggagtaaaaaatatggccattattgacaattagttgaagcctgcctctgttcctgaacagagacattggaatgc

SEQ ID NO: 18012 - DNA, 617 bp, Homo sapiens
tatagggcgaattgggccctctagatgcatgctcgagcggccgccagtgtgatggatatctgcagaattcgccctttcgagcggccgcccgggcaggtacgtcccactctgatgcttctacaaagcagtgtcaaacatctgccttgtttcagtttgcagagatttcttcaaacacttcgcagttgggtggtgctgagcctgtaaaacgctgtggaaagtctgcactctttcaactggcagagatgtgcctggcatcagaagggatgaaaatggaagaatcaaagctaataaaagcaaaagaatccgatggtggaagaattaaagaattagagaagggaaaggaagaaaaagaaattaaaatggagaaaacagatgaaactaggttacagaaggaagcagaatttgaaaaatcggctaaggaaaatttaagagattctaaggaattgagaaattttgaggcattgcaaatagatgacataatggctataaaaatggaagatcccaaagaaattagaaaggaagagttagaagaagatcccaaatgtagtcattttcctgatttttcttattctgccagtagcaagataataattagtgatgttcccagtagaaaggat

SEQ ID NO: 18013 - DNA, 426 bp, Homo sapiens
actatagggcgaattgggccctctagatgcatgctcgagcggccgccagtgtgatggatatctgcagaattcgcccttagcgtggtcgcggccgacgtacaaaaaaaatcatttcaaataactcaggaggatgataatggctggacttttgtaattcacctcaaagactgtgggagagccaactcaacttacctggataagtctgtgcatatggaggcttgtaccatgtaagttttttccaaaagaaggaaatataaaatgtttagattaagaactttaaaactacagggtgcctataaaaggtggcttactccttattgttattatactatccaatttttaaaatgcagtttaaaaaaaaagcactgagtcttgttcccgcgtacctgcccgggcggtcgatcgaaagggcgaattccagcacac

SEQ ID NO: 18014 - DNA, 431 bp, Homo sapiens
  misc_feature 352: n = A,T,C or G
ccctctagatgcatgctcgagcggccgccagtgtgatggatatctgcagaattcgcccttagcgtggtcgcggccgaggtacaatacccctaattgtcctattacagccttccattagggaacaactgcatcactcttctttctacattaaacatgggctgcacatttgggaacaaaaacactcaagtattggaccagtaacttggctccagcttcaactttgtttaccccttggttcagtgcatttctgctccatcacgaggctgacatgtgcacgcagcacgcggcaagtctgtgcgtgcagaaaaggaaacaacagttcattaaagtggtgagcacaatttcttctgangtgtagtactaaaaaaaaaatacaaaatcccactacctagcccgggcggccgtttaagggcgaattccagcacactggc

SEQ ID NO: 18015 - DNA, 152 bp, Homo sapiens
ccctctagatgcatgctcgagcggccgccagtgtgatggatatctgcagaattcgcccttagcgtggtcgcggccgaggtacgcggggggtgggtagaggtgctcgcctgggacctgaacatggacttcccatgcctctggtagggctgtgc

SEQ ID NO: 18016 - DNA, 442 bp, Homo sapiens
actactatagggcgaattgggccctctagatgcatgctcgagcggccgccagtgtgatggatatctgcagaattcgcccttagcgtggtcgcggccgaggtacttaattgcctttcttttgcaaacttttaaaagtcaaatctcctggttcacaggaaaggaaatacaaatcagtcaagggtctgaaaagatgctcaacctcacttgtgggacaagacttagaaattactactgccctgagacaccatttcttcatgcatcagattggcaaaaacttcaaccgtaagatgacactgggtcgatgagtttttgtgaaaacaggtacctgcccgggcggccgctcgaaagggcgaattccagcacactggcggccgttactagtggatccgagctcggtaccaagcttggcgtaatcatggtcatagctgtttcctgtgtgaaa

SEQ ID NO: 18017 - DNA, 628 bp, Homo sapiens
gactactatagggcgaattgggccctctagatgcatgctcgagcggccgccagtgtgatggatatctgcagaattcgcccttagcgtggtcgcggccgaggtacaaagctgacagcactttattttattgctctccattatttggtattcattatattccttcagtcagaaaattattactctctatggcactgttttttatcacaaatatgtatatgtgatattgatatataactatatatattgccatcacacacgaacaataaaataaagtgttctattaacctgatctctttgcccttttgctatgtgaggagtgaatgagtggccttctgatgctctgactcttctctgtatgtcaaactcatccctggcacaagaaattccagtcatgtgaagcaaactgccctttgtcctcaaagaaattgttgaaaaaggaaactttttaaagagattttttgcatattctctgccttgttcttatcaacttgaaatgttggcattttctagccttgttttgttggctacaataattcagtattcatgtcaaaattgagaagtgccctaattgaatgtgtttgaatgttatccttgcacaattctttaaattgaaagataaaatgtttta

SEQ ID NO: 18018 - DNA, 217 bp, Homo sapiens
agggcgaattgggccctctagatgcatgctcgagcggccgccagtgtgatggatatctgcagaattcgcccttaccggcggccgggcgggcgggcacattttttttttttttttaatttttagtagagacgaggtcttgctatgttgcccagttctagtcttgaactcttgagctcaagcagtcctccagccctggcctctgacagtgctgggatta

SEQ ID NO: 18019 - DNA, 326 bp, Homo sapiens
ggccctctacatgcatgctcgagcggccgccagtgtgatggatatctgcagaattcgcccttagcgtggtcgcggccgacgtactgttaaaacttaactgtatttagaggtcaaatccaaattaaatggtaaggtaacatggctcttggaggatgagataactcattttttgagggaaaaattagtatatttcattagtcaggcaagatacagctaaggagttgtgtgatcacactaatgtaacaggacaaggacaattaggagtaaatctatcccaggagctatacccagatcataaatgggcctccatggagtctttaaaaaac

SEQ ID NO: 18020 - DNA, 427 bp, Homo sapiens
ctatagggcgaattgggccctctagatgcatgctcgagcggccgccagtgtgatggatatctgcagaattcgccctttcgagcggccgcccgggcaggtactctcctgaagtgttcattgaactctaagagagacagcttgtgtatcagtggcagggtttagggttcattttttattcccatattaatcctttaatatttagacaaatttccttctgagtttaaggataaaatgggatgggttctgcctgggcctggccctcatggggacatcaaagggcaatgttgcaaaaaaaaaaaaaaaaatcagaccatcagattgcgtggggggaaccacccccataattaaattacctccacccagtcccacccttgacacctggagattatggggattgcaattcaaggtgagatttgggtggagacat

SEQ ID NO: 18021 - DNA, 502 bp, Homo sapiens
atagggcgaattgggccctctagatgcatgctcgagcggccgccagtgtgatggatatctgcagaattcgcccttagcgtggtcgcggccgaggtacaggtttgaggaagcgatgaaggaggctcatgctgtagatcaaaagcttgcagagaagcaggaagatgaagccaccctggaaaataaatggcccttccttggggttcctttgacagtcaaggaagctttccagctacaaggaatgcccaattcttctggactcatgaaccgtcgtgatgccgttgccaaaacagatgccactgtggtggcattactgaagggagctggtgccattcctcttggcataaccaactgtagtgagttgtgtatgtggtatgaatccagtaacaagatctatggccgatcaaacaacccatatgatttacagcatattgtaggtggaagttctggtggtgagggctgcacactggcagctgcctgctcagttattggtgtgggctctgat

SEQ ID NO: 18022 - DNA, 236 bp, Homo sapiens
aatacgactcactatagggcgaattgagccctctagatgcatgctcgagcggccgccagtgtgatggatatctgcagaattcgccctttcgagcggccgcccgggcaggtactgggattatataggcatgagccactgagcctggccctgaagcgtttttctcatatgccctcagtgagataaattagatttggcatctcctgtcctgggccagggatctctctacaagagcccct

SEQ ID NO: 18023 - DNA, 590 bp, Homo sapiens
ggcgaatcgtgccctctagatgcatgctcgagcggccgccagtgtgatggatatctgcagaattcgcccttagcgtggtcgcggccgaggtacagccagtctcactaagcataaatctcagcctctcccttctgtctctgaagtgtctgctttcagtttcagccagaggctccacttccctgcctgtaggttgtaactctttttttgagacagagtctctctcttgttgcccaggctggagtgcagtggtgcaatctcagctcactgcaaacttgacgtcccaggttcaagcgattcttctgcctcagcctcccgagtagctgggattacaggcatgtgccaccacacccagcttatttctgtatttttagtagagacagggtttcaccatgttggtcaggctggtctcaaactcctggcctcaagtgatccgcccgcctcggccttccaaaatgctgggattacaggcgtgagccactgtgcctggcccaggttgtaaccctttataagaaagagagttctccttttttaaaatttaaagatatcaataattttaagtagacacccctataaattaggggaatgtctag

SEQ ID NO: 18024 - DNA, 276 bp, Homo sapiens
ccgccagtgtgatggatatctgcttaattcgccctttcgagcgtccgcccgggcttttacagagaagcacctattgacaaaaaggggtttttcaattacatcgagttcacacgcatcctgaaacatggagccaagacaaagatgactgaaagaactttagctaaaatcttccagttacattgtcttactctcttttacttctgagacacttaccccaccctcatagaacctgttgcatgcaacttagtttcacagctttgcctcttctttttgatg

SEQ ID NO: 18025 - DNA, 580 bp, Homo sapiens
  misc_feature 15: n = A,T,C or G
tatagggcgaatggngccctctagatgcatgctcgagcggccgccagtgtgatggatatctgcagaattcgcccttagcgtggtcgcggccgaggtacttctatatataaatttggacgaatagaagtaaatatgtttattggtgaaaaagaattccagaaactaatggcagatcctgaaatccagacttgtatcatgtattaagtgttatctggcaattagcttgtgagattaaggttctgcacatggagccttggtcatcatttgatatatacacccggaaagggccgctggaaaacccaaagcgtagggaattattagaccaattacaacaaaagctgtatcttattcaaatgattcctcgtcaaaatttatttaccaagaacttaacacctatgaactataatatattttttcacttgttaaagcactgttttgggaggcgcagcgccactgtaatagaccacttacgttcattgactccacttgatgcgagagatatattgatgcaaataggaaaacaggaggatgagaaagtagttaacatgcaccctcaagacttcaaaacactttttgaaac

SEQ ID NO: 18026 - DNA, 415 bp, Homo sapiens
cactactatagggcgaattgggccctctagatgcatgctcgagcggccgccagtgtgatggatatctgcagaattcgccctttcgagcggccgcccgggcaggtacatgagcaggttggtgatcccatttttaatgtcttcattacacatgtggatccatttctgcagcgtgtctttcaggtattcctgactggaggggatgtgcaagggttcggagtgatggctggaactcgacgatggatgctggcaggtgtttaaaccagctgcagagtttcatctcttcctgcaggacaccagtgcccttaccggcaggatgctggcctgtgatggtctccagagtagagaagagcaagccacatggcagggctggatctggcagcagtccttctggcaaagtgtagaaaagggcttgagc

SEQ ID NO: 18027 - DNA, 375 bp, Homo sapiens
atacgactcactatagggcgaattgggccctctagatgcatgctcgagcggccgccagtgtgatggatatctgcagaattcgcccttagcgtggtcgcggccgaggtacacaaccacattactggcctggggccaagagaaaatgcactgactgatgtgcggacatggtaacaccactgtctaagatgcagataccttgacgtgtctcaggaaatggcatcctttgggagtcccacaaggcagcctacagaaaagcacttcttttgaaataaaaaaaagaggtacctcatctacgttcacaattttcctgacacatggtctggatgacagttcatccctctctgtggccaaggtataaagctaaacatcttggtg

SEQ ID NO: 18028 - DNA, 350 bp, Homo sapiens
actactatagggcgaattgggccctctagatgcatgctcgagcggccgccagtgtgatggatatctgcagaattcgccctttcgagcggccgcccgggcaggtactaaatggtatccttagattaaaattttgtgcttgataacagctgttttttctacattagaaataagatgccacacaaggaactacattccagatttaaagaaatgaaaggataccattagtgtgtataacagattattgttcatacttgtaaagcaccttatgtcattgagaatataaagaacagtgccttagaagacagtgaaaggtaagctctagcttaatgtctatgatttggtctttgaca

SEQ ID NO: 18029 - DNA, 419 bp, Homo sapiens
agggcgaattgggccctctagatgcatgctcgagcggccgccagtgtgatggatatctgcagaattcgccctttcgagcggccgcccgggcaggtacagtggtgggcagagactggcagtgaattactctgtgcttccctaacgctctgctttatgggttacgttatcttcctttgaaattgtcccaattgtcagccctgccagctgacataggagctgagatagaggtaagattgcgtcatgagttctttgccaatgcggccaaaacattgtggacagtcaaagatctcctcccttggaacatagtacctcggccgcgaccacgctaagggcgaattccagcacactggcgggccgttactagtggatccgagctcggtaccaagcttggcgtaatcatggtctaagctgtttcctgt

SEQ ID NO: 18030 - DNA, 413 bp, Homo sapiens
  misc_feature 104, 108, 109, 110: n = A,T,C or G
gactactatagggcgaattgggccctctagatgcatgctcgagcggccgccagtgtgatggatatctgcagaattcgccctttcgagcggccgcccgggcaggnactnnnttttttttttttttttttttttggggtttccttccaaaggttgccattttccttaccaggtttaaaatgttaaaaaaaaatttcaattttttggggaaccaaggaaaggatttattaaaccttttttccccaatcttttaaccaatcctttttttttttttttccccccattttaaccaatttaatttccaaaaaaaatgaaagatttcacttttaatttaaaaaaaaaaaaaaaaaattgccaaaaaaaaatttttttaaaatttttttcttttttaatttaaattaaattcttttatttaa

SEQ ID NO: 18031 - DNA, 502 bp, Homo sapiens
aatacgactcactatagggcgaattgggccctctagatgcatgctcgagcggccgccagtgtgatggatatctgcagaattcgcccttagcgtggtcgcggccgaggtacaaggcatgatgagtccttttgcttttaggcttttgacttctggttttagactttctctagcttctgttgttagacaacattgtgcaagcttggtttttataagtttgcatggattaaactggacttaattgaaattggccctcccccccaatttctcagcacaattttttaggcccacaaggagtcaagcacctcaaggagatctttagtttgaacttggtgtagacacagggatactgatgaatcaatattcaaattagctgttacctacttaagaaagagaggagaccttggggatttcgaggaagggttcgtaagggagattttagctgagaaataccatttgcacagtcaatcacttctgaccaagttatcagaaaaaggagaaaaga

SEQ ID NO: 18032 - DNA, 606 bp, Homo sapiens
atatggcgaatggggccctctagatgcatgctcgagcggccgccagtgtgatggatatctgcagaattcgccctttcgagcggccgcccgggcaggtacaacctgaacttcttttaaccaaactaaacagtctattcttgcccaaattcaacaaaaggcgaaatccacccttgcaatgagtcaaaagcttttgtatcctacctgatatgcctggaacagcgtatacggggaacctgtcatactggtagctggactccttatggccccccctttgtttgggggccttaaatggcttccccaatgacactctggggtttctcccaccagacagttgtcagcacatattccaaatcaataacagtgcccccagtgaaacacagcacctttgttacttaaattacacattacagcaatacgattgtagtagaactcttccccttccctggggggccctctgtgtatgcggatcctatgggtggtgatacttgcccccgaactgaacagggagatgcacttgggggtggccattaattccattcactatctgggataatatttccctccccagtaatctaattacttacaaatattgctggttacaaatgc

SEQ ID NO: 18033 - DNA, 365 bp, Homo sapiens
ctatagggcgaattgggccctctagatgcatgctcgagcggccgccagtgtgatggatatctgcagaattcgccctttcgagcggccgcccgggcaggtacttggtgaagcccttcaggcagaccttctcgccgatgagggagaggaactcctcaaaggcggggccggcctcctcattgttgtactggcatctgcttggtttctggggaggcctccggaagcttatagtcatgacagaaggtgaagggggagcaggcacatcacatgacaaaagcaggaacaagacccagagcaagaagtcacttatcaccaaggggatggcccaggccattcatgagggatccacctttgtgctccaaacacct

SEQ ID NO: 18034 - DNA, 518 bp, Homo sapiens
cactacttagggcgaattgggccctctagatgcatgctcgagcggccgccagtgtgatggatatctgcagaattcgccctttcgagcggccgcccgggcaggtacctttaatgtcctgagttatgctgtggtgtggaaactatagctgttacaaagagtaaatgatctgtgagtccaggatttctgcttaaatcctctaggtgacgcacttgaaatttcatgttttttctcttaaatataattttccttatgtagcttgatttcatttcaaacatcagcttcaatctagcaaaggtctcagtcaaaaagagatgtctctccaattaaggttattatattctacttggaaccccgcgtacctcggccgcgaccacgctaagggcgaattccagcacactggcggccgttactagtggatccgagctcggtaccaagcttggcgtaatcatggtcatagctgtttcctgtgtgaaattgttatccgctcacaattccacacaacatacgagccggaagca

SEQ ID NO: 18035 - DNA, 399 bp, Homo sapiens
gactactatagggcgaattgggccctctagatgcatgctcgagcggccgccagtgtgatggatatctgcagaattcgcccttagcgtggtcgcggccgaggtactagataaattagtggttacactgtgtaaaataatttcaccactaagagatccagaagcaatgtagcaatcattccaattgtatgttacacaagttacttgatctttatgatccttaagagatcgatgaactctttttgattttaaatcccaaatattaacagtgttatttaggcctccacttaccaaatacatagatgtagaatttaaattgacacatttctactttttcccttcaacaaactctaaaaattgaacaagttttacattttacaactttaaacaactattttattc

SEQ ID NO: 18036 - DNA, 637 bp, Homo sapiens
  misc_feature 383: n = A,T,C or G
tctagatgcatgctcgagcggccgccagtgtgatggatatctgcagaaattcgccctttcaagcggccgcccggccaggtccagagaatgagatgatgagttcagattcagcttttttgagttggaggtgactgcatacatccagatggaaatactcaagagggcagttggaaagctagggccccatggccaaggatgagttcacatctacaactggacattgggggctttgaaatccaaatgcaggagtagaaaaggagcatgagttgcttaagataaattaaagctgggaataggcctgtgtggccaggcagcccacttttgcagaaatctgtaagagctgttagaaatgcagggtcaaacttctggaagacgtatctacngctcctgcttccacctttgtttcctccttcccattgttgagccacatctgttcactcagagatacgcggggactgctactcattaaattcaaggactcattagtctttcaggttacattatccttttcgaagcagttgacactgttaaccttttccacttctctctgcctttaatctttggggacagagttattcttggcccatttccaccccatcaattacatgtgttcttttttttcttctctccccatcac

SEQ ID NO: 18037 - DNA, 551 bp, Homo sapiens
atagggcgaattgggccctctagatgcatgctcgagcggccgccagtgtgatggatatctgcagaattcgcccttagcgtggtcgcggccgaggtacagtatgacttccatctgaacttgaaaagtattaaaatgggtcaatattcacattcttttagatctcaggatgggaaaatgggtttgttcaaatggatatggtaaatcttacccaattaaggaaggctaattttagagttcttctaatttgcttgtgtcaactcttaacttgtaaaactgctgttaactcggtttaaatttttaaattaatataatagaaagaacactaaaatacttactggtaactgcttacagccatttatctgatcctgtggattacagaatgcattccctcttctgctgtagcttatcattgctttgttttgtagctctgcatattttgcccaccttgtcttccctgtaagtttaagacgtttccaaggaaaagcttcagggctgatagtttcttagcaattcctattcttatgcccttacttttaaatagtccttttatt

SEQ ID NO: 18038 - DNA, 199 bp, Homo sapiens
gggcgaattgggccctctagatgcatgctcgagcggccgccagtgtgatggatatctgcagaattcgccctttcgagcggccgcccgggcaggtacgcgcggaggcggaggcttgggtgcgttcaagattcaacttcacccgaaacccaccgtcatggccgaggaaggcattgctgctggaggtgtaatggacgttaat

SEQ ID NO: 18039 - DNA, 349 bp, Homo sapiens
ctatatggcgacttgagccctctagatgcatgctcgagcggccgccagtgtgatggatatctgcagaattcgccctttcgagcggccgcccgggcaggtacttttttttttttttttttttttttttttttttttttttttttttttttttttttttttttttttttttttttttttttttttttttttttttttttttttttttttttttttttaataaaaaaaaaaaaaaattttttttttttttggtggtaaaaaaaaaattaaaaaaaaaaaaaaaaaaggttttttttaaaaaaaaaaaaaaaaatagtttttttttttttataataattaaagaaaaaaaagg

SEQ ID NO: 18040 - DNA, 280 bp, Homo sapiens
agggcgaattgggccctctagatgcatgctcgagcggccgccagtgtgatggatatctgcagaattcgccctttcgagcggccgcccgggcaggtacaactttatctcttatttgacttcattatttggctttcaaattaacaacatgaaaactatacagaaattagtctgtgccctataagacagagatttagataatttgttcaaaacatgagatgatattcagatattctctcaaaggcaggacttcaacaccgcaggtggaaaaccaacaaaagga

SEQ ID NO: 18041 - DNA, 314 bp, Homo sapiens
cactatagggcgaattgggccctctagatgcatgctcgagcggccgccagtgtgatggatatctgcagaattcgcccttcgagcggccgcccgggcaggtacttttttttttttttttttttttttgaaaccgagtcttgctctgtcgcccaggctggagtgcagtggcgcaatctcggctcactgcaagctccgcctccccggttcaggccattctcctgcctcaacctcccaagtagctgggactacaggcgcccgccaccacacctggctaattttttgtgtttttaataaaaacagggttttaccgtgtt

SEQ ID NO: 18042 - DNA, 390 bp, Homo sapiens
attgggccctctagatgcatgctcgagcggccgccagtgtgatggatatctgcagaattcgcccttagcgtggtcgcggccgaggtaccacactgatgtgcctgcatgttgcattatgaatatttttatttgataaagaacaaatggttaagaaacccagtggtagggctctcatgttatataaagctaaaaacaaagaaataagaaacaatgaagaatgaaaaaagagacaagcaggggttgtcacattttctcagtgtagacagcgtctccttctgcccctgcccgggcggccgctcgaagggcgaattccagcacactggcggccgttactagtggatccgagctcggtaccaagcttggcgtaatcatggtcatagctgtttcctg

SEQ ID NO: 18043 - DNA, 519 bp, Homo sapiens
gactcactatagggcgaattgggccctctagatgcatgctcgagcggccgccagtgtgatggatatctgcagaattcgcccttagcgtggtcgcggccgaggtactaaacccaaaccagaagaagaagtgaaacctgtgaaagaaccagacatcaaacctcaaaaggacactgggtgctacatctcctaaaatacaacttgcacttagaatttctctagcagtaaataagataaaccacagaatttcagttcttatttctcaaaatgatttctctgaagcttgtagaataactattatattcagagggttatctgccttcagcttacttgttcttaatttttaatacagcggagatgtttcttgctttgttttcagactctcctttttaatcaggacaacatttgaaagattttattgtgcctctaaagggtatatttgggggttgggtctttttgttaaactctggatagtaataagtttcaggtcagtataggcccgaatcatgtggtattaggtat

SEQ ID NO: 18044 - DNA, 467 bp, Homo sapiens
cactacttagggcgaattgggccctctagatgcatgctcgagcggccgccagtgtgatggatatctgcagaattcgcccttagcgtggtcgcggccgaggtacatttgtgcaaagacagatttgacttccaaacaagacagacattcattatagttgtcttacttcacaataagctactaaaaacagtcttctggaataagattgtattagtgctcactaaacatgcatttcatttaaacaaggcaaaacacttaatttggtctgcattacccaatatgttatatacagccgtctttttattttatcacaataggcaacaagatgggtctggttttggaatatgttaccatttgtgtttaatttccaaagacacgcatattagctcaactagtgtaaacctgtgaaaaaatagctgagccatctttttcctctcctctgttaatttatcttgaaatgttcacagctt

SEQ ID NO: 18045 - DNA, 516 bp, Homo sapiens
actacttagggcgaattgggccctctagatgcatgctcgagcggccgccagtgtgatggatatctgcagaattcgccctttcgagcggccgcccgggcaggtacctctgactggcacttctggcttgctgttgtccttggagaagtctgggcctgggacagaggagggatgtaatctgaacactcctttgtcacaggtcaccagggtgtgcttgaggggaccgttgacataaacggaattcagaggccggggaagactgcagagtaaaaaggtgattgtgccacaagcttcccgacaatggatcaactgggagctatccatctgggctttctgaagcagttcaattgtaagagaaagccattcaggaatgagtttctccatttccagactaaccatggccagagcaagcatggatcctctgaattgcagaagttggttgcaggccattcagtgaagtagttgcttggtaaggactgccaaatgttgagatgggctcaatttgggcaaactgaaaag

SEQ ID NO: 18046 - DNA, 621 bp, Homo sapiens
ggccctctagatgcatgctcgagcggccgccagtgtgatggatatctgcagaattcgcccttagcgtggtcgcggccgaggtacagcaagctatgaactctctcaaggagattggatttattaactactatggaatgcaaagatttggaaccacagctgtccctacgtatcaggttggaagagctatactacaaaattcctggacagaagtcatggatttaatattgaaaccccgctctggagctgaaaagggctacttggttaaatgcagagaagaatgggcaaagaccaaagacccaactgctgccctcagaaaactacctgtcaaaaggtgtgtggaagggcagctgcttcgaggactttcaaaatatggaatgaagaatatagtctctgcatttggcataatacccagaaataatcgcttaatgtatattcatagctaccaaagctatgtgtggaataacatggtaagcaagaggatagaagactatggactaaaacctgttccaggggacctcgttctcaaaggagccacagccacctatattgaggaagatgatgttaataattactctatccatgatgtggtaatgcccttgcctggtttcgatgttatctacc

SEQ ID NO: 18047 - DNA, 449 bp, Homo sapiens
ctatagggcgaattgggccctctagatgcatgctcgagcggccgccagtgtgatggatatctgcagaattcgccctttcgagcggccgcccgggcaggaacttttttttttttttttttttctttttttttttttttttttttttttttttttaatctggaaacttctttattaaccaaatttttttgtagtgaaatgccatttcccttttaagaaatgaatggaaataaacaatagagtttttaaggaaaaatatagtattggctgggataattttcctggtaagatgtaagaattaatttacttttaacttcagatgctatcattttttaccccctaggatactgtaaggcaccaacccttcaccaaaaattgtttaaagatttatttggagagagagatgtggctcggttttagtatttgtatttaaaaacttacacagtaccttg

SEQ ID NO: 18048 - DNA, 458 bp, Homo sapiens
tagggcgaatggggccctctagatgcatgctcgagcggccgccagtgtgatggatatctgcagaattcgcccttagcgtggtcgcggccgaggtactttttttttttttttttttttttggggttttttttttttttttttttttttttttttttttttttttttttttgttgcattttatttttttttccccccccccccccccccattttaaaacacgaaaaaaaaaaaaaaaaaaaaacccttaaatttctacagaaaaaaaaaagggggggggggggggggggggccccaaaaaagcccccccccccccggggggggggggggaaaaaaaaaaccccccccccccctttttggggcccacaaaagggggggggtaattttttaaaaaaaaaaaaaaatttttcccccccccgggggccccctaaaggagaaaaaaaccccccccgggggggggg

SEQ ID NO: 18049 - DNA, 654 bp, Homo sapiens
tacgactcactatagggcgaattgggccctctagatgcatgctcgagcggccgccagtgtgatggatatctgcagaattcgcccttagcgtggtcgcggccgaggtacatctcctcgatcatctcgcggagggccaggaagtagggcccgttttcatttggggctcggcgccagtcatagggagcccctcggacatcctcaccccgtgtgtagccccagcccacaaggctctccaccatggtgtggaaataggaacccacgctgcttttgctggggtccaggaactccagtgagaaggtcttcccaaagccagggacacgtacattaagttgctcaaaagtaggtagataatgtatttgggttataaaataaagatgtaattttactatttggaaagatcacttccctattaagaaaactatttattgcctatagtgataaaatttacatagttattattgtctattggaatagatcagcagaatatagaaaatatgtggtcctagatatcaaaaaactttcactttaaatataggcacacaaacatattttgagctacatgaatataaaacatttcatacctcttctttattcctatctgtttagttaaatgtggatgttggctaaaatacgccattaggaaatttgttaaca

SEQ ID NO: 18050 - DNA, 490 bp, Homo sapiens
ccctctagatgcatgctcgagcggccgccagtgtgatggatatctgcagaattcgccctttcgagcggccgcccgggcaggtactttttttttttttttttttttttttggggacggaatcttgctctgtcacccaggctggagtgcaatggtgcggtctcagctgactgtaacctccgcctcctgggttcgagattctcctgcctcagcctcccaagtagctgggactacaggcacccaccaccacacctggctaatttttttgtatttttagtaaagacggggtttcactatgttggccaggctggtctcgaactcctgacctcgtgatccacccaccttggcctcccaatcttatttgctttacaagtcctgcttcagggttaccttccctgaccactgctgcctccctcccagcatttgccagggactgtcattgcctaagattattttttctgttttgttttttttgtcgtttttgttttttttg

SEQ ID NO: 18051 - DNA, 579 bp, Homo sapiens
  misc_feature 524, 528: n = A,T,C or G
tatagggcgaatggggccctctagatgcatgctcgagcggccgccagtgtgatggatatctgcagaattcgcccttagcgtggtcgcggccgaggtactttttttttttttttttttttggggtttttttttttttttttttttttttttttttttgttttttttttttgggggcgcccaaaccatttttggggaaaccttccccaaaaaaaaaaaaaacccccccccgcccccaaaaaaaaaaaaaaaaaaagggttggggaaaacccccccccccccgaaaaaaaaaaagggtgtttccccccccccttttttaacacccccccttgaccaaaaaaaattttttccccccctttttggggggaaaaaaaaaggggggtttttttttcttgcccttttccgggacaccccccccaaaaaggtggcccccccccccccaggaaaaaacccccccccggggggggggggggtaaaaaaacgggggggggcccccccaaaaaaaaaaaggggggtttttccccccntaangggggaaaaaaaaaaggggggggccccccccccccgcgggggggggggggg

SEQ ID NO: 18052 - DNA, 177 bp, Homo sapiens
ggccctctagatgcatgctcgagcggccgccagtgtgatggatatctgcagaattcgcccttagcgtggtcgcggccgacgtacgcgggtagcatattttcctgcaatgaaagcgtttgtgaacttacctacagaaaatgaattaacattcaatgcagaggaatattctgacatatc

SEQ ID NO: 18053 - DNA, 504 bp, Homo sapiens
tacgactcactatagggcgaattgggccctctagatgcatgctcgagcggccgccagtgtgatggatatctgcagaattcgccctttcgagcggccgcccgggcaggtacgcgggggcacagcctgcggcgcagcggaggcggaccgcagtcgagtctgcagagtgttggaatcgccgcactaaagtcccctgcagcgtgaccatgtcgagaccccggaagaggctggctgggacttctggttcagacaagggactatcaggaaaacgcaccaaaactgagaactcaggtgaggcattagctaaagtggaggactccaaccctcagaagacttcagccactaaaaactgtttgaagaatctaagcagccactggctgatgaagtcagagccagagagccgcctagagaaaggtgtagatgtgaagttcagcattgaggatctcaaagcacaagccaaacagacaacatgctgggatggtgttcgtaactaccaggctcggaact

SEQ ID NO: 18054 - DNA, 565 bp, Homo sapiens
actatagggcgaattgcgccctctagatgcatgctcgagcggccgccagtgtgatggatatctgcagaattcgcccttagcggccgcccgggcaggtaccagtctcgtaagtttcttactaccctaatggaaaagttcatatatggtgatggtgaatatttggccttaaaccaccaaacttgcataaataaatagaaaattattctaggttgggcatggtggttcatgcctgtaatcccagcactttgggaggctgaggtgggtggatcacatgaggccaggagttcaagaccagcctggccaacatggtgaaaccccatcggcactaaaaatacaaaaattaacaggatgtggtggcggcacctgtaatcccagatactctggaggctgaggcaggagcatcgcttgaaccgggagttgaggttgcactactgcactccagcctgggtgagagagcaacattctgtctcaaaaaaaaaaaaaattaaaaattaaaaaaatagaaatagtctttctaaaataggtcggctatgtctgtattaccaaatgtttgggttttaaaatc

SEQ ID NO: 18055 - DNA, 642 bp, Homo sapiens
ctcactatagggcgaattgggccctctagatgcatgctcgagcggccgccagtgtgatggatatctgcagaattcgcccttcgagcggccgcccgggcaggtacagaaaagggaacatctccgatgggtgttaaggtaggagtttccatgcagccctttatgtctgagaaatagtctcctctgccattggggtccctgcggaatcttctacaggaattgcagctcttcacgtcatgctaggttaccagcatgggcttcccagagcacttcactctgtttctaactccactgacttttctgacttgtttcttgagggacttggaaaaggggaaggtattattcatccattttttttctattgtttctcctctggggggaaatggtgttttgtttttgtttgagttttgtgttttagttttttggttttggttttgttttgtttttttgtcattcagattcactaaatttggggatggttttattaaagtatattaacttctttttaaccaaagctttctgaatatgaccagcctcaggtgctagcgcattaaagagcaactaaacctaattccagtgtcgatttgtgaaataataaaagctaattgaatttctctaaaggtgagagagaacataatgatgaac

SEQ ID NO: 18056 - DNA, 360 bp, Homo sapiens
gggccctctagatgcatgctcgagcggccgccagtgtgatggatatctgcagaattcgcccttagcgtggtcgcggccgaggtacctcgtgaccatgtcttccaagaagaatagaaagcggttgaaccaaagcgcggaaaatggttcgtccttgccctctgctgcttcctcttgtgcggaggcacgggctccttctgctggatcagacttcgcggcaacctccgggactctggcggtgaccaacttattagaaaaggtagatgacaaaattcctaaaacattccagaattcccttattcatcttggactcaacactatgaagtcttgaaatatatgtataggtcgaccagtgttgcttac

SEQ ID NO: 18057 - DNA, 166 bp, Homo sapiens
gcgaattgggccctctagatgcatgctcgagcggccgccagtgtgatggatatctgcagaattcgcccttcgagcggccgcccgggcaggtacttttagtaacaacccaatctaatgagccttggaggcttgttaaaaaaacatccacaaaaatactacatttcta

SEQ ID NO: 18058 - DNA, 158 bp, Homo sapiens
tggccctctagatgcatgctcgagcggccgccagtgtgatggatatctgcagaattcgcccttagcgtggtcgcggccgaggtacagaactcagaggaaaaaagaaattaaattttagctgtctggagagcagcccctctctggcaccatcaaacact

SEQ ID NO: 18059 - DNA, 640 bp, Homo sapiens
tactatagggcgaattgggccctctagatgcatgctcgagcggccgccagtgtgatggatatctgcagaattcgcccttagcgtggtcgcggccgaggtaccggaagcagcgaatggaagagatgcggcagcagcttcacaaggggccccaattcaagcaggtttttgagatctccagtggagaagggtttttagacatgattgataaagaacagaaaagcattgtcatcatggttcatatttatgaggatggcattccagggaccgaagccatgaatggttgcatgatctgccttgccgcagagtacaaaaataacttatatacctttgtgtgagaaagatatttcataattttttaatggtaaaaataaatgaatataggttgtgcaaacagcataagtgtaatttttagcctatcaaggaatgctgatatgatttgttgaaaaacttggcttaaataaattttctagtgaaatttgaaaatcatggaattatttggcaatagaagcagagtgtttcaagtctaaatggatgggagaaagcaaaactagtgaaattatgcttgctggggaataggaaaatgagaaccaggtggcaaatgaccagtcactcaaccagtttcttgttacagtcagaatat

SEQ ID NO: 18060 - DNA, 368 bp, Homo sapiens
gactactatagggcgaattgggccctctagatgcatgctcgagcggccgccagtgtgatggatatctgcagaattcgccctttcgagcggccgcccgggcaggtacaggtgaccaagaaaaaaaagaagaaacaacacaggattccaacaaatgacgaattactgtatgatcctgaaaaagataacacagatcaggcctgggttgatgcacagagaaggggttaccatggtttgggaccacagatatcacttcaacaacagcctgttccaaataaagatgctatcttgaattagcctgcctgcatgaccacactttgccttaattgccaaaggcatgaatcatacaaaactcaatatatatcaatgtt

SEQ ID NO: 18061 - DNA, 482 bp, Homo sapiens
tgggccctctagatgcatgctcgagcggccgccagtgtgatggatatctgcagaattcgcccttagcgtggtcgcggccgaggtacagagtttctgtttcgggtgatgaaaaccttctggaaatggataatagtggtggttacacaacattgggaatgtaactaatgccactgaactgtccacttaaaaatggttaaaaatggcaaactttttgttatctagattttaccacaagttttaaaaacagaagaaaaaagaaggcagaggttgtggtgagctgagatcttgccattgcactccagcctgggcaacaagagcaaaactccatctcaaaaaaaaaaaaaaaaaaagtattactagacatcaaataagaaaacatcaacaaaattaagttacacaaatgtattccagaaactagtcttttaatatgtcctccagacaaactggaaacagcgcagctccttccaatggttcatcatgac

SEQ ID NO: 18062 - DNA, 440 bp, Homo sapiens
tatagggcgaattgggccctctagatgcatgctcgagcggccgccagtgtgatggatatctgcagaattcgccctttcgagcggccgcccgggcaggtacttttttttttgttttttttttttctgataagacccgaaaaaggaaaattcttttaattttctataaatttagatgtctgatcctcatctttttaaaaaccaaaatgataaaacatatttcttaaactgttgggttctgaaaaagtcacccaatggaatcagctagttcacatttgaaaatgcaactgctaaaagctgtgggatactgcaatttaagccctgcagctcacaaggcaaagtgtgtaattctaagaagcatcaaaagatactatcttcaaggagattcaggactagaaaaggagcatgttcttcccattacaacctgggattatgacttgggt

SEQ ID NO: 18063 - DNA, 616 bp, Homo sapiens
tatagggcgaattgggccctctagatgcatgctcgagcggccgccagtgtgatggatatctgcagaattcgcccttagcgtggtcgcggccgaggtacatgtgcacaatgtgcaggtttgttacatatgtatacatgtgccatgctggtgtgctgcacccattaacttgtcatttagcattaggtatatctcctaatgttctccctcccccctccctccaccccacaacagacccggatgtgtgatgttccccttcctgagtccatgtgttctcattgttcaattcccacctatgagtgagaacatgtggtgttctgttttttgtccttgggatagtttgctgagaatgatggtttccagcttcatccatgtccctacaaaggacatgaactcatcattttttatggctgcatagtattccatggtgtatatgtgccacattttcttaatccaatctatcattgttggacatttgggttggttccaagtctttgctattgtgaatagtgccgcaataaacatacgtgtgcatgtgtctttatagcagcatagttgcatgcctatttctaactgtggctccagggactgtcgccacagtttacttatctcccatccc

SEQ ID NO: 18064 - DNA, 340 bp, Homo sapiens
tacgactactatagggcgaattgggccctctagatgcatgctcgagcggccgccagtgtgatggatatctgcagaattcgcccttagcgtggtcgcggccgaggtacttttttttttatttttttttttttgcctgaagcaaaatataaggaggcaactaggagactcactaagaatttccagcatttcaacaaggaaaaatgatattagccttctaggatcttggcaaattaagtatataagcttgtcttcaacaccttcagtctctcaactcttcatcatgtactcatttagtggtcactttctcaaaaattctcctttaaaaagcaggattttccca

SEQ ID NO: 18065 - DNA, 623 bp, Homo sapiens
  misc_feature 18: n = A,T,C or G
actatagggcgaattggngccctctagatgcatgctcgagcggccgccagtgtgatggatatctgcagaattcgcccttagcgtggtcgcggccgaggtacaaaatgtccattgaagtggtttcaaattccaaatagtaattggaaaatccaccactcgtgttttggggtagtagtatcgaaaagaataaccaagataatttgaaaaggctattaaaaaatacttctcaattttcaaactgcatacagcaggtgctcattcatttctttgtaacattgatgagaaaaagactcccagccaggggcactgtctttgtggtgtttacgtgttctcgccacacctgcataggtttctctgggtgctgcagttcttgccacatcccagaggtgtgcacgtgaggtgaaactggtgtgtcctcactgtcccattctgagtgtgggtgtgtgagtggccctgtgatggaatggcgtcctgtccagggctggttccctttttgtgccctgagctactgaaacaagcttcagctacacatgacccagaactggaataattaagtaataattaatcttttattcatctttcttaaatgtatgtatagctcacatttatttcaatgtttaata

SEQ ID NO: 18066 - DNA, 443 bp, Homo sapiens
ctactatagggcgaattgggccctctagatgcatgctcgagcggccgccagtgtgatggatatctgcagaattcgccctttcgagcggccgcccgggcaggtacatctccgatttcaagaactgatgaaattagaaaaaacacctacagaacattggatagcctggagcagaccattaaacagctcgaaaatacaatcagtgaaatgagtcccaaagccctagttgatacctcatgttcttccaacagagattctgttgcaagttcatcccacatagcccaaggggcctctccccgacccttgctagttccggatgaaggtcccactgccctagagccccctacgtcgataccttcagcttcacgtaagggctccagcggggccccacagacgagcaggatgcctgtccccatgagtgccaagaacagacccggaaccctgga

SEQ ID NO: 18067 - DNA, 581 bp, Homo sapiens
cgactcactatagggcgaattgggccctctagatgcatgctcgagcggccgccagtgtgatggatatctgcagaattcgccctttcgagcggccgcccgggcaggtacgcgggtataaggatatcactgacgtggatgaaatgaaagttccagattgtgcagaaacttttatgactctactcttggttataactgacaggtataaaaatcttcccacagcttcccgaaagcttcagttcctggagttacagaaggacttagtagatgattttaggatacgattaacacaagtgatgaaagaagagactagagcttcccttggctttcgatactgtgcaattcttaatgctgtgaactacatctcaacagtacattctgctattttggggaatattactctataaatgataggtcaaatcggttgacagtttttttcaagtcttctgtatacttgctgattttttttttttttttgatctttgtcctatcaacaagtgagagatgattgttgaaatctccaaatataattatagtttttttgttctctttttagttctgtcaggtttgcttcatgtattttg

SEQ ID NO: 18068 - DNA, 425 bp, Homo sapiens
gggcgaattgggccctctagatgcatgctcgagcggccgccagtgtgatggatatctgcagaattcgcccttagcgtggtcgcggccgaggtacatggcaattagaagttgtcatggcaaaagaaaaccacagctggcctgccacagccaacacaagaaccagaaaatggtagatgaaatgaaggaaaaaagggggggtttattccttattataaaagaaaaaaaataattcttcagcagtcttaacaaagacatcaagattcataattacaagtgttttgactccaaccctgtccccatctcctccaagagcagaggtaggagacagttgaagcaaacaatcaattctgtaaaaattacctagaaaccctacaaatttgattaaaatctaaacttctataattttgctttttaaaaaaatttaa

SEQ ID NO: 18069 - DNA, 427 bp, Homo sapiens
ccctctagatgcatgctcgagcggccgccagtgtgatggatatctgcagaattcgcccttaacctggccgccgcccaggtacatggcgaaccttgcctacaggaaagaaaaagtcctacacatgtcgatgcctaatgctggctgtaactgcgtacagaaactgtgcgggcatcacgctcctgaggactcagatgatcaactggctccctgactgggctcttctctctgaaatgacgactcttactgtgtccatacctataaccagtggcaagtggaggactcctgtaatgcacacgatcctcacgacgatggtcccgacttcgcgactcactaccatgtcgacgatcccagctacggctacggtgacgacactgccgacctggacttcggctccgactatttctccgtctataccgatcccgatctc

SEQ ID NO: 18070 - DNA, 289 bp, Homo sapiens
cactactatagggcgaattgggccctctagatgcatgctcgagcggccgccagtgtgatggatatctgcagaattcgccctttcgagcggccgtccgggcaggtacatgcacatgtgcaggtccaagcatgcaagcacacttttctatctgggcaaaaggaagggtctaaacagtattgttcacaacgccaaaatagagcattacaccatatttgggtaagttggaagaaattaaaaaactgaaagcatctatttgggccttgggaaatatcggcttatcaaaatgggg

SEQ ID NO: 18071 - DNA, 537 bp, Homo sapiens
tatagggcgaattgggccctctagatgcatgctcgagcggccgccagtgtgatggatatctgcagaattcgccctttcgagcggccgcccgggcaggtacgcgggggacacgggagcaagatggcgattccgggcaggcaacctctgtgagtgaaagccttcagagggaagctgctagaagcaggccatgaaacagaccaaactggaaatccagaaggcccttgcagaaggtgctactgtgtatgaatatgacagtatttatgatgaaatgcagaaaaaaaaggaggaaaataatcccaaattgcttttggggaaagacagaaagcccaagtatattcacaacttgctaaaagcagttgagatcagaaaaaaggaacaggaaaaaagaatggaaaagaaaatacagagagaacgagaaatggaaaagggggagtttgatgataaagaagcatttgtgacatctgcatataagaaaaaactgcaagagagagctgaagaagaagaaagagaaaagagggctgctgcactggaagcatg

SEQ ID NO: 18072 - DNA, 468 bp, Homo sapiens
cgactcactatagggcgaattgggccctctagatgcatgctcgagcggccgccagtgtgatggatatctgcagaattcgcccttagcgtggtcgcggccgaggtacttgctgaagctctttatcactttgaccaattggacaattggctgaggtctggaggcttcttcctccagagattgctgatctcacaaaagtttgtggttgagatctgaggtttactctgctgaagagctccttttcttagagtttactgcttctatgatgaagagcaatcttcagcttggtccccatctccaataacaaactcatttggagtttcattttgagatttggtagctgaagatcaaggtttactatcagctggctctgacctcttcttatgctcagagatcttgactgtatttaaactgtgtgatcactttctcagctttttggggttttttttactacctaagaagtttcattta

SEQ ID NO: 18073 - DNA, 476 bp, Homo sapiens
actatagggcgaattgggccctctagatgcatgctcgagcggccgccagtgtgatggatatctgcagaattcgcccttagcgtggtcgcggccgaggtactttttttttttttttttttttttttttttttttttacaaattcttcaactttattaaaacattatgagatttttgcacaaaccattgttttttgttttagctcatcagctatggttactgtattttatgtgtggcccaagacaattcttccaacatggcccagggaagccaaaggattggatacccctgaactataccctagggtggggagtggctaagacccctaggccagggtctttcccccaactgaggccatagtgcttccccatggccaagacagtgaggtttttaagaatggaattactggcttaaaagccaaagttgactgtgatatcttcaactctggcttctgttttgaaaacacataattttttgg

SEQ ID NO: 18074 - DNA, 181 bp, Homo sapiens
cactactatagggcgaattgggccctctagatgcatgctcgagcggccgccagtgtgatggatatctgcagaattcgcccttagcgtggtcgcggccgaggtacttttttttttttttttttttttttttttttgttttttatttttttttttttttttttttttttttattttatttttt

SEQ ID NO: 18075 - DNA, 459 bp, Homo sapiens
agggcgaattgggccctctagatgcatgctcgagcggccgccagtgtgatggatatctgcagaattcgccctttcgagcggccgcccgggcaggtacgcgggggtagattggcgtgctgcaaaccagctctaggcggctctggccccaaaaggagcataaaccagggactttgatatcatgcagcagaagaccaaattatttctccaagctttgaagtatagtattcctcaccttggaaaatgcatgcagaaacagcatttgaatcactataacttcgctgatcattgttacaatagaataaaattgaaaaaatatcacctaaccaagtgtcttcagaataaacccaagatatcagagttagcaagaaacatcccaagtcggagcttctcatgtaaggatcttcagcctgttaaacaagaaaacgaaaaaccccttccagaaaacatggatgcatttga

SEQ ID NO: 18076 - DNA, 476 bp, Homo sapiens
actatatggcgaattgcgccctctagatgcatgctcgagcggccgccagtgtgatggatatctgcagaattcgcccttagcgtggtcgcggccgaggtactacaggccaaatgctggcacagcttacacatccatgcctgccagaaaaggcaaacagggaaaacatggaaaagccactgtgcacagttaatccgaaggctgcacaaagaccaagctctgcagttctcagggatgaaaaaaaggtttagaagggtgacggttggcatggaagtgtgcataagttgttgcagcaacactttcaggcatcattctgcatttagcaggaataaattcaactgccaaagaaaacccacaaggaaagacaaataagactgaaggtggggctcccaacagcttctgttatcaagcacagaaaggtggggtaggggagaccagcacagaaagtttctatttgatgacagtggaagttattcact

SEQ ID NO: 18077 - DNA, 465 bp, Homo sapiens
gcgaattgggccctctagatgcatgctcgagcggccgccagtgtgatggatatctgcagaattcgccctttcgagcggccgcccgggcaggtacataagccactttcatacctgcctactattatggactgcagagtaatgtggcctatatcaattttttcaggattgttcttttgtttgttgtttttttcatcccttcctcccccatattttctcttcacaggacatgagacttcacaacctgctaaaaatgaactttccagacctaccaatctaggaataaaccgtcctagccaggaaaggtcagatgacctttcctgagactggagactcattctgttgtaaaaatgctttctccaaagatgttaaaaaagaaaaggggaaaatgtgaaagaaaaatattttgggtcccttcaagatgggaactgctcagggcaaatctgccttctattctattcaagtcat

SEQ ID NO: 18078 - DNA, 500 bp, Homo sapiens
ggcgaatggggccctctagatgcatgctcgagcggccgccagtgtgatggatatctgcagaattcgccctttccagcggccgcccgggcgggtacacgttaacaaaaaaagttctgcgtgcctagaattcttgctgtccggtggcctagaaacaagcataaggggctagagaataaggcacaaaatgtgcaacggaaagaatctttgacttatactagggttcttataaatatgaccaagagaatcatcaaaacaaaatgaaacagcctggggataacagcaagatggagggttcccaggagcagcacgggatgggagatggaaaaggacatcagtcattgcctgtggtgtgtcggctgcttgacatgggccatctcattcaacttccttaacactcgacaattaggtattggcatccctgctttatatgaagaacaccaaagcacagcatgattaaatagggcaactggaatgctgcataaccaagatttttcatactg

SEQ ID NO: 18079 - DNA, 357 bp, Homo sapiens
tgggccctctagatgcttgctcgagcggccgccagtgtgatggatatctgcagaattcgcccttagcgtggtcgcggccgatgtacagcattctggaataaagcaaaagagtgttcattcacacacacagtagcttcaaaactgttcgatctgtttgttcccatgtagttttctaaagatggaaaaaaaggactttgggcatcaagactactggtgccatattagattactgggaacatctaagcatcattgtgtgaccatgcgaacaaaagactttcgggagtgtctatttttaaaaaggtttatgtgtgtcgaggcagttgtaaaagatttactgcagaatcaagcccactttta

SEQ ID NO: 18080 - DNA, 505 bp, Homo sapiens
  misc_feature 17: n = A,T,C or G
actatatggcgaatggngccctctagatgcatgctcgagcggccgccagtgtgatggatatctgcagaattcgccctttcgagcggccgcccgggcaggtacttagacctagtgcagcctctaggaaaagtcttgccttttcattagagaaaacaggaccaaggtttcagttttcaaacagctgttgttgaatgtgtagaacccagttccatctgttttggttcattgttacagaacttagtccagtcatttgggctaaagccaaccaaaagcttagttgcctttctcaacaaacactggtacgcggggtccattttgtcggtagaggcagaaggagaaggtcgggttgtagaagctggggtggccggcagctcgctcatcggtgttcgtgggctttgtcggtccgtgcctcgtctctccctggaaagggagggaggcttcgacgtcgagagggagccgctgccgcgttagttccgagcttgaagtcactaggacttctctcaaa

SEQ ID NO: 18081 - DNA, 557 bp, Homo sapiens
  misc_feature 144: n = A,T,C or G
ctagatgcatgctcgagcggccgccagtgtgatggatatctgcagaattcgccctttcgagcggccgcccgggcaggtactccacgagattagaagtgcatattcaactgcagaaaccggaaccagcatggggagtctaaatgnaccagataaggtttttagggcattttggttatagtgctaagcatttttgggaaaccgtaaagagggttaggataggtggtgggaatagaggctgacagcagttttcagatgtccgtgtgttcatgcacgcagtatggcccaggtaagttcaaaaccttattcttaggctatttcgatcaaccctgccaggcaattttaaattcttggtgatgtagggcagggacactgtggatggctgaggaaactctgggctctgctggctaaccagcttcgctccgctctgcagaggctgtctcatcttttgtgatctgcaaattcttgctttggtcttcatgtgaactctcagggaatttgagcagttcagtctgttaccagtgttgtgagcctacctggtcattttaacttgtgctttt

SEQ ID NO: 18082 - DNA, 627 bp, Homo sapiens
gactactatagggcgaattgggccctctagatgcatgctcgagcggccgccagtgtgatggatatctgcagaattcgccctttcgagcggcgcccgggcaggtacgcgggattttaccgcgcaccaataaagagactggggagaaaccagaaaggagagcacgttccgtaaaacaacaactactagtcggccgaactccaagcgtgaccagctttctgttgggaacactcaaagggcttttttccagacttcaagctcccattccaacagtaagagcttcttccacatcacagcccttggatcaagtgacaggttctgtgtggaacctgggtcgactcaaccatgtagccatagcagtgccagatttggaaaaggctgcagcattttataagaatattctgggggcccaggtggataatattaatgcagctgtgatggatttgaaaaaaaagaagatccgcagtctaagtgaagaggtcaaaataggagcacatggaaaaccagtgatttttctccatcctaaagactgtggtggagtccttgtggaactggagcaagcttgatttatatttgcaagcaactaaattaattgacctgaaaaagcctatcaaatactatcaaaatgta

SEQ ID NO: 18083 - DNA, 508 bp, Homo sapiens
ccctctagatgcatgctcgagcggccgccagtgtgatggatatctgcagaattcgcccttagcgtggtcgcggccgaggtacatttcagcgctgaaaagattttgtctaaaaatgaaaaggcagctttcttaaagaccagagttatagagtcactcttgtatttttcatcttgttttagtggaccaaagctcagcttgttttagtggaccaaagctcagtaactcactcagattagaatctataattctgttgagtgttcaggaccacagaagtcctcctgggactttctatggaagtatgtgcagattttcctcatggagctgggcgtgatggtgaccgggcttggcaatgtctttccgctctgtctcctggaattgggtgtctgggatgacggacttcgtggagatggattctcagccttccgtttggctgccatggccaacaaccagtttttattctctggggaactattctctttgcctaccatttcagacccttctccacaag

SEQ ID NO: 18084 - DNA, 403 bp, Homo sapiens
  misc_feature 241, 273: n = A,T,C or G
gactcactatagggcgaattgggccctctagatgcatgctcgagcggccgccagtgtgatggatatctgcagaattcgccctttgagcggccgcccgggcaggtacttcccacttttcataacgagttggagcctagagttgatcgactccagcgactttttcgtcttctttgcggccaccatcttcctgccttaggagcgggacggcccccaaccaacagcagccgctaagatggccggngaacgagaaaggaaagacttcccacaatgcanagctcttcacggcagaccccgcgtacctcggccgcgaccacgctaagggcgaattccagcacactggcggccgttactagtggatccgagctcggtaccaagcttggcgtaatcatggtcatagctgttt

SEQ ID NO: 18085 - DNA, 403 bp, Homo sapiens
tggggccctctagatgcatgctcgagcggccgccagtgtgatggatatctgcagaattcgcccttagcgtggtcgcggccgaggtacctccctgttgacctactttcatccccagttggggtgtggtgcttttaagatatgtccataaattctttgctactgctccattggggtagaggtatgtgtaattcctctctccttgagtgcaggctgaacttaggggctcgcttctaacaactaggataagaagtgacggtgtgtcctttccaagactatgtcttaaaaggcactgcagctttctcctggccctgccccatgatctctggaatcagctgctcagggagaagccaagtgtcatggtgtgaggacactcatgctgccctacgcagagacccacatggga

SEQ ID NO: 18086 - DNA, 348 bp, Homo sapiens
  misc_feature 285, 290: n = A,T,C or G
gactactatatggcgaatagtgccctctagatgcatgctcgagcggccgccagtgtgatggatatctgcagaattcgccctttcgagcggccgcccgggcaggtacttaggaggctgaggcaggaggatctcttgagctctggagtttgagaccagcctgagcaacatattgagaccttgctcaaaaaaaagaaaagaaaagaaagaaatattaataatattttaattgggcagtgaaaatgggacaatatcaatagacatttgaaaaagaaggaatagcttcancaaangccaggagagaaaaaaaccaggtattaatattaaagactaacatacaactctaatttt

SEQ ID NO: 18087 - DNA, 276 bp, Homo sapiens
  misc_feature 87, 89, 165: n = A,T,C or G
ccctctagatgcatgctcgagcggccgccagtgtgatggatatctgcagaattcgccctttcgagcggccgcccgggcaggtacttnanttttttttttttttttttttttgagagggagtctcactctatcaccattctggagtgcaatgagtgcaattctcancccactacaatctcatacctcccaaattcaaacaaattctcctaccttaacctcccaaataatttaaattacaggcacataccaccacacccaactaatttttatattttt

SEQ ID NO: 18088 - DNA, 402 bp, Homo sapiens
acgactcactatagggcgaattggggcctctagatgcatgctcgagcggccgccagtgtgatggatatctgcagaattcgcccttagcgtggtcgcggccgaggtacacataccaatgtaaggacaccagaaacacaaagcaaggacagctccatagcatcacaacaattcttcaataacagattctaattggaaaaaaaagttataaaatgctgcaaaaattttgaaataatgatagtgaagttcagtaaggtataagacaacaaagataagcaatacaaagaaattagaaaggtaattcaggatatgaatgagaaattcaccaaaatgatgggatataatgaaaaagaaccaaacataaatcctggaactgaagaattcaatatgtaaagtaaaaatata

SEQ ID NO: 18089 - DNA, 384 bp, Homo sapiens
acgactcactatagggcgaattgggccctctagatgcatgctcgagcggccgccagtgtgatggatatctgcagaattcgccctttcgagcggccgcccgggcaggtactaaagaaacacaagaactaatgtcagaggcttatcccatcccagaacagaaattaaagttgattcagccccacgttcaagcaagcaacaattgctgggaagaggccatttctcaggtcgacaaactgctacgaagaaatacagataaaaaaggcaagcctgaaatagcatgtgaaaacccacattgtacttcagccttgattcctccgcaacagacacctgaaacttgaccctacattggttcttggccatcgtgatcttccttggacagaatca

SEQ ID NO: 18090 - DNA, 226 bp, Homo sapiens
agggcgaattgggccctctagatgcatgctcgagcggccgccagtgtgatggatatctgcagaattcgcccttagcgtggtcgcggccgaggtacgcgggaagcgtggtaacaacgcagagtgagaaaataaaaggttagaagatggagggacaagtaaccccagtatttttttagtccagtagaagagattgaaatgtaaaagagtttacagattaatggtttta

SEQ ID NO: 18091 - DNA, 385 bp, Homo sapiens
actactatagggcgaattgggccctctagatgcatgctcgagcggccgccagtgtgatggatatctgcagaattcgccctttcgaccggccgcccgggcaggtacttgggtgtcttcagctagttttccattccaaccgtcgctccagcaaccctttgacctggattcgagcctccacgaatggacgccacttgccgagaccagctcgctcggggagactctaacccaatggagctaggaatacggcttaggctgaaaacttctatcgtcttagaaatgggaataaacctcacactcactgtccctgttggaagcaagctgaaactccaaaaaaaaagttgcctgttgtccatcatcatggtgaagcggcgtcgttgtctggggt

SEQ ID NO: 18092 - DNA, 231 bp, Homo sapiens
caactcactatagggcgaattgggccctctagatgcatgctcgagcggccgccagtgtgatggatatctgcagaattcgcccttagcgtggtcgcggccgaggtactttttttttttttttttttttcacggggaaaccttttttttttttttattaaagggtcccaaaaacggggggggggaaaacattgggaaataaacggggcaaactcccaaaaaaaaaaagttccc

SEQ ID NO: 18093 - DNA, 437 bp, Homo sapiens
gctcgagcggccgccagtgtgatggatatctgcagaattcgccctttcgagcggccgcccgggcaggtacgcggggttggctgtagttagtaaggagccggatgattgcctcagcaggtgtgaagcgtgtgctttagtttcgtgggaggcctggcatctccgagagggaggggaaaggtaaccactcctttgtggaggtcgccagggtcattgtcgtggatttgcacagtcggctgggcggtgcaatggcggaaagaaaaggaacagccaaagtggactttttgaagaagattgagaaagaaatccaacagaaatgggatactgagagagtgtttgaggtcaatgcatctaattagagaaacagaccagcaagggcaagtattttgtaaaccttcccatatccatatatgaatggacgccttcatttgggacacacg

SEQ ID NO: 18094 - DNA, 402 bp, Homo sapiens
acgactcactatagggcagatagggccctctagatgcatagctcgagcagccgccagtgtgatggatatctgcagaattcgcccttagcgtggtcgcggccgaggtacttttttttttttttttttttttctttttttttttttttttttttttttttttttttttttttttttttttttttttttttttttttttttggggccagggggaaaacaagttttatttaatccaattaaagaaccccgctatctaaaggctttttgggccaagcccccggggaaccccaaacaaaaaaattcccccgggtacctgcccgggggggcgcttaaaggggaaaatccaaaacactggggggcggtaataagggaaccaaacccggaaccaaacttggggtaaaaaag

SEQ ID NO: 18095 - DNA, 158 bp, Homo sapiens
ggcgaattgggccctctagatgcatgctcgagcggccgccagtgtgatggatatctgcagaattcgccctttcgagcggccgcccgggcaggtacccaacgtatttaggttagaaactctggtattccagcttccagaactacaagtgatgaagactt

SEQ ID NO: 18096 - DNA, 394 bp, Homo sapiens
actatagggcgatttgggccctctagatgcatgctcgagcggccgccagtgtgatggatatctgcagaattcgcccttgagcggccgcccgggcaggtactacttcttggttaaaaggccactggtagagtcatctgagtgtagagaatgtcccttcactgctggaaaaatccactggctcccaagaaaagaaaatggtctgaagcctctgttgtggctctcacaactcatctttccctaagtcatcaagctccacatcactgaggtcaatgtcatcctccacgggaagctgggagacgacagaaagccactgttagatctgcagaaggggacaccctggaaggtcaacatctcattttacggaagagcgactctctggagctactcctgctac

SEQ ID NO: 18097 - DNA, 265 bp, Homo sapiens
acactacttagggcgaattgggccctctagatgcatgctcgagcggccgccagtgtgatggatatctgcagaattcgcccttagcgtggtcgcggccgaggtacgcgggggaattcaagcagtgggacaaatgggggtttggcatgcagctcgtcatcttaagagttactatcttcttgccctggtgtttcgccgttccagtgccccctgctgcagaccataaaggatgggactttgttgagggctatttccatcaatttttcct

SEQ ID NO: 18098 - DNA, 448 bp, Homo sapiens
ggcgaattgggccctctagatgcatgctcgagcggccgccagtgtgatggatatctgcagaattcgcccttagcgtggtcgcggccgaggtacgcggggaagcttcatgagacctctccttgtctgcatggacgagtggccaactctggagcccaggctgttgcttcccagtctggtggtgaatcctccatagtctggtgagtgtaaatacatatatatatcttttcccttctcccttcccattgcaatttgcttattatatcatttgcttatatctgcactgccatttgggataaagcttgtttacccttaaaggtattgtgtgtgtgtctcctccccgcgcgtatttcccacacagaacacctaagaacctattttttatgatttttacgagaaatgaattccaagttgtgcctcagaattcagaatatatctttcaacctcctac

SEQ ID NO: 18099 - DNA, 601 bp, Homo sapiens
  misc_feature 534: n = A,T,C or G
gcgaatggggccctctagatgcatgctcgagcggccgccagtgtgatggatatctgcagaattcgcccttagcgtggtcgcggccgaggtacatatagggccactcaggttttctattcttattgagaaagctttggtggtttgtttatctttcaagaaatttgccaagaggctaaacaatctgtccaagatcacacagctataagggctgagccaggctttggcccctagcagcttgccaccagagcagacgcacttaaccactgcactatactaccatctctctaaggaagaggagtcggggatgaggaatgcagatgatgattttaaactactggtagcaaacatttgttgaggtttactgtatgccaaaacctatcctgcggcagattttattttccataaatggccaccgcattatctttcaccttccatgctcttctggaaccttgctgcttctccacacacaggtagaagctgtgtttcttcctcttgaaatcaggtgagcctttatgactgctgtgactaacaganaacagggaacctcatgacttctgaggttataaaaatactttcacctttttctcttggggcacttact

SEQ ID NO: 18100 - DNA, 323 bp, Homo sapiens
tacgactcactatagggcgaattgtgccctctagatgcatgctcgagcggccgccagtgtgatggatatctgcagaattcgcccttagcgtggtcgcggccgaggtaccatgcattaagagcttcctgattgagattcagtgcatcagccgtgtctattccatctacgtccacaccgtctgtgacccactctttgaagctgttgggaaaatattcagcgatgtccgcatcaacttgcagaaagaaatataaatgacatttcaaggatagaggtatacctgattttttttccttttaattttcctggtgccaatttcaagttcc

SEQ ID NO: 18101 - DNA, 164 bp, Homo sapiens
ataggcgaattgggccctctaatgcatgctcgagcggccgccagtgtgatggatatctgcagaattcgcccttagcgtggtcgcggccgaggtacgcggggtttggtgatgaaggcagaaatgaatggctcaaaacttgggtagaagagcaaaactcttaaggg

SEQ ID NO: 18102 - DNA, 172 bp, Homo sapiens
cactatagggcgaattgagccctctagatgcatgctcgagcggccgccagtgtgatggatatctgcagaattcgcccttagcgtggtcgcggccgaggtacgcgggaagaggaggtggaagtgtgagtgccatggggttgctgacactggagcaagttctcactgtccctct

SEQ ID NO: 18103 - DNA, 122 bp, Homo sapiens
ctcgggacatgtggagagcctactctgacatgagagaagccaattacatcggctcagacaaatacttccatgctcgggggaactatgattctgccaaaaggggacctgggggtgtctgggct

SEQ ID NO: 18104 - DNA, 378 bp, Homo sapiens
tgtatacgactcactatagggcgaattgggccctctagatgcatgctcgagcggccgccagtgtgatggatatctgcagaattcgccctttcgagcggccgcccgggcaggtaccagcatgactgtcagctgctgtcaatccttggcttttggaagcaatgtcacggcgctttaacttgcttttcagtttgctcagcatgtctttgaagcatcacctttactcatctcttccaaggctcactgttaaccacattgcactatttcagcaggaatcagctaatacttaaaagctagtgggccagcctccttcttgttgtgatataagcctgtttttcaaagaacagtcctcagagagacagcatcaacatgctctgggtg

SEQ ID NO: 18105 - DNA, 473 bp, Homo sapiens
ccctctagatgcatgctcgagcggccgccagtgtgatggatatctgcagaattcgcccttagcgtggtcgcggccgaggtactaacatcaatcccagaaagccagcagccatagccagggtggctatgataccacccgattgcattttcaaggcggccaacctgttttgcattttctatgtatgcagccatgtattcatatgcagcagcctgagcatttactcgggtttcagtgccctccacaggcaaagcaaaactgtccataatgatcatggtttcaccatccacctttcctagcatcagacccatcacttccaagttgcctcccgatctggcatgcatcaccatcttcagcagagccaatgctgagattttgcagtacgcggggcccggcggcctttgcgggaacaagatggcagcccccatacctcaagggttctcttgtttatcgaggtttttgggctggtggtttcg

SEQ ID NO: 18106 - DNA, 512 bp, Homo sapiens
ggcgaatggggccctctagatgcatgctcgagcggccgccagtgtgatggatatctgcagaattcgcccttagcgtggtcgcggccgaggtacgcgggggccttggtatttggtgcacagtcctgggaggatcctggtgctgggacagtcctggttttgtagattcctagtgcctacaggacacaactcacggagagaaaaggacagtttgggacaacaggtgggtgggcagtcttgaaaattggtagccacaggcgcccagcgagagtgaacaaggacaggtggcttcattctgtggttgatgattccctcatggaagttctagttcagcccctagaaagttaatcctactttgaagacctgtaatttcccagtcctcagccatatctgattggaccacgaataggtgtttgaatgaatcaaccactgactctcataaatttgacctgaatgagacagagctacttgagctgtagagtcatatggaggctccatggaagaaatggttttca

SEQ ID NO: 18107 - DNA, 488 bp, Homo sapiens
tacgactcactatagggcgaattgggccctctagatgcatgctcgagcggccgccagtgtgatggatatctgcagaattcgccctttcgagcggccgcccgggcaggtactttttttttttttttttttttttttggtttttttttttttttttttttttttttttttttttttttggccgaaaggggttactttattggttgggaaagggaaaaactgtggccaccccaagagggaaatccaagtccccaaaaaggggagggcaggtgggccgaaaccaaattcagggccaggcaaaaactttttttcctaactgttcaacctgggggaggctggagctcaaaaattgggagtgacccaggacaccttcccacagcctttggggcagcatttcatttggccagaacactggctgtcccccgcgtaccttggccgggaccaccctaagggcgaattccagcaccactggcggccgttactatgggatc

SEQ ID NO: 18108 - DNA, 496 bp, Homo sapiens
ctatatggcgaatggggccctctagatgcatgctcgagcggccgccagtgtgatggatatctgcagaattcgcccttagcgtggtcgcggccgaggtactttatatgtatatatatataaaagaatctcgtctcagaaatggctgcatttaacagagccatacacattgatgctaaacataagagctttcaccctgaaagaaagcattttcagaaatgtcacttacattctattatattaaatattcccaactgagtttcaaactcaacaggtaatgataacagaattatacatctcattgcactcaaagctgactacaaccaaaatttacagtatgattgaaacaagccaatgtttaaaaaagttttaattaacgataacaattccatgaaagaagaggataaagaatgggatgacaagaagtatttggtcttaataaggcaatacaaaatagatccattatcaaagaccatttaatttgtaaagatcaacaata

SEQ ID NO: 18109 - DNA, 730 bp, Homo sapiens
ctatagggcgaattgggccctctagatgcatgctcgagcggccgccagtgtgatggatatctgcagaattcgcccttagcgtggtcgcggccgaggtactatctcaaaaaagaaaaatagaaaataagaatcaaaaaacaggctgggaaaagtggctgacatctgttggccatgctggtttcaaacttctgacctcaagtgacctatgtgccttggcctccaaccgtgctggaattacaggcgtgagaaaccacacctggcccaatcctcttaacataaacacttgaatgtcaattaagggttgaactcaatgttaagtcaacacaaactcaagtcaatgctggactgactctagtgtcaattaatgcttgatggtttgctatactcactgcattgggaacagttatctcaaaaatgaattttctgatgttctgcaaggagtgacctcggactcaagaccttgccacacttctgacatttgtaagatttctgtccagtagggattctctgatgtctaatgaggtgtgaacatgaagtaaaggctttgccacaatcatcacacatgtgaggtttctctcctgtatgaattctcctatgttttgcataggatgaagcttgactgaagaccttgccacagtcatgacatttgtaaggtttctctccagtatgagtgtgtcaatgaactgcaatgtatgaatgatgtctgaaaaatttgtcacatttattacac

SEQ ID NO: 18110 - DNA, 586 bp, Homo sapiens
gcgaattgggccctctagatgcatgctcgagcggccgccagtgtgatggatatctgcagaattcgcccttagcgtggtcgcggccgaggtacctttctctccatatgctcttacgggcttggctaacagagagccaatataaaactcatcagagagctaccattttaagtggaaatggtagcaacggattatttttaaatggacacctctttaaatttatgcctgaggttgtaattttttgaatttttgtaatcagaccttgatgatgaccgtgagcagtaagatataaataactcccacatgcttagcgttccaataatggaacactacacatacatggctagggttcaaagaaacttgctctgttacagggattacctagaaagactcttctgcagttcaatttgtaaaatttagcagcaatagaatagactcataccatcacactagaggaaggccagtcttagaactaagtccatgaccatcagaggagaaatgtttacagaccataaaagagaaagtccagagaaaaaaagtctttctggggaatgtaactgtaaaagctcttaaaaatctagctaatcag

SEQ ID NO: 18111 - DNA, 428 bp, Homo sapiens
ggggccctctagatgcatgctcgagcggccgccagtgtgatggatatctgcagaattcgcccttaccagcggccgccccgacgggcactgtaagcaccaactctagcactgtcaaacctaaccacttgcggccgtgctaatgcaaaccctgctgctgaacctgatggtattgatccattaataaacctgctgtcaaagaaacaagatggagccattgccaacgctgctacagtattaacaaacatggccctgcaggagcccctgcgcctgagcatacagaatcacgacatcatgcatgccatcatcagcccactgcgttctgcagacacactcgtgcagagcaaagctgctctcgctgtcaccgcaactgcatgtgacgttcaagcccggactgacttaagaaaatctggtggattggagcccctggt

SEQ ID NO: 18112 - DNA, 483 bp, Homo sapiens
tatagggcgaattgggccctctagatgcatgctcgagcggccgccagtgtgatggatatctgcagaattcgccctttcgagcggccgcccgggcaggtacttttttttttttttttttttttttttttccccttttttttttttttttttttttttttttgtgggccccccaaaaaccccttttttgggccccccccccccggggggggggggggccccccccccccccgggggggcttttttgggggggctccccccccccccccccggggggggggggggccttttatttttttccccccccaaaacccccccggggggggggggggaaaaacccccccgcccccccccggggggggtggaaaaaaaatttttttccccaaaaaagggggggctttttttttatcccccccccccccccggggggggggggggggccccccccccaggggggggcccccccccccccccccccccgggggg

SEQ ID NO: 18113 - DNA, 197 bp, Homo sapiens
  misc_feature 9, 136: n = A,T,C or G
gcgaattgngccctctagatgcatgctcgagcggccgccagtgtgatggatatctgcagaattcgcccttagcgtggtcgcggccgaggtacgcgggaggatatcaagaaaccagactgtgatgactgggagagcnggctgaatgcaatggagtgtgcattacattggaaaaaaaatgtgaaatcagtcaactactg

SEQ ID NO: 18114 - DNA, 401 bp, Homo sapiens
catatactggtgactggggccctctagatgcatgctcgagcggccgccagtgtgatggatatctgcagaattcgcccttagcgtggtcgcggccgaggtacagtccgtcacatcccggtaaacaaaggtcctgctgagcggctccgaggagggcagtttgcactggcaagagtcgagtgtggtctcacaggtaaactgtgtgagctgcgaatagtggtgggcggcaaaggccacggccagcacacagaccgtcaggcccagggcactcagcagaaagtataacagctgcaagaaagcagaagaaaacctttctggttacaaagaacattggatgatgatttgcaaagcgaattcatcaaaactgttctttttcttccctcccagaaattttctgatggaaa

SEQ ID NO: 18115 - DNA, 447 bp, Homo sapiens
  misc_feature 108: n = A,T,C or G
gactactatagggcgaattgggccctctagatgcatgctcgagcggccgccagtgtgatggatatctgcagaattcgcccttagcgtggtcgcggccgagggactttnttttttttttttttttttttccttatcttattttggaaatgatttattaaatggacactttaggatttgagagaagcagcttttcccactcaaatcactttgtgttcctctgacagagaacaaattctttcacaaggacctcaaacctctgggttggaaaaaacctcagtggtcatccgctcattcacccatgcagctggatccactgggcagattgacttggggcgctatgtgatttgcccacggctcaccttctccagtgcgtcattcagggcatccagtgtctgtattttggcaacatttgcaatggcacttgttttctcgaatcctgtttttttg

SEQ ID NO: 18116 - DNA, 491 bp, Homo sapiens
ctcactatagggcgaattgggccctctagatgcatgctcgagcggccgccagtgtgatggatatctgcagaattcgccctttcgagcggccgcccgggcaggtacattccacattttaataaattaaccacaagaaaataatcccacatatacaaggtcaggggtggggaagagtattaatggtatcttaattatacccagtctggtttttttttttaaatggggtaaaaatcaaatgcaaccccatcttgttttaggaattttgagaactaataaatgcaccttaatggtcagtgttcctttcaaacatgtgagttctttaacaaaaatgaaataaaccaggtgtctgtgatttctaattaatcaccgctgaccattacacaggttttgttgtttggggtggggaggggggctttgttcccttttgacataatataagtcaatgcactaacaattatgtatattcaaacttgataattttaaattcgatc

SEQ ID NO: 18117 - DNA, 537 bp, Homo sapiens
  misc_feature 162: n = A,T,C or G
ccctctagatgcatgctcgagcggccgccagtgtgatggatatctgcagaattcgcccttagcgtggtcgcggccgaggtacagccccatgcaagtcgcatctctactaagtttcccttggacccatgagtaggatagatagtccagaataaaaccagtatncgtgtgatgtcattgaaagaaaacaaagtttcaaggaaggtagtcacttgggaaggggctccctaatgcctaaaaaataaagtctcgaatttttagcctagtcttaatgattatgccccattcaacctttccaggcttagctactcccatttccctacaagatactacacttgaaactagactacttgctctttactaagtatcctccatgtgcaaagggcctctatactttttgctcatgctagcaacaaagacagcaggggctcctgttaaattttagtgtgaatgtggatgagcttggcacaaattcagcaataagtaacagatactttaaaaaataaggggatcttaggtaacaatatgagtcagcgccat

SEQ ID NO: 18118 - DNA, 346 bp, Homo sapiens
gggccctctagatgcatgctcgagcggccgccagtgtgatggatatctgcagaattcgcccttagcgtggtcgcggccgaggtacgcgggacaacaacttgttacagaaagagccaggatcccagactgtgctgaagcttcatgagacctctcctcgtctgtgcacgaaagaggagccggacacagagtgtccagccgactctggagcccaggctgttgcttcccggtctggtggtgagtcctccattgtctgattgtgaagcctgtagcttggaagatacaggacataggtgaaagtgtttgtacctgcccgggcggccgctcgaagggcgaattccagcacact

SEQ ID NO: 18119 - DNA, 409 bp, Homo sapiens
gtatacgactcactatagggcgaattgggccctctagatgcatgctcgagcggccgccagtgtgatggatatctgcagaattcgccctttcgagcggccgcccgggcaggtacttgagaatggttcctcagttttggtctgtttggaggaaggctgggacatcactgcacaagtgacatccctggttcagttactcagtgatcccttttataggacacttgaaggcttccagatgttggttgaaaaagagtggctctcttttggtcacaaattcagtcagaggagcagcttgaccctcaactgtcaggggagtggttttgctccagtcttcttacagttcttagactgtgtacctcggccgcgaccacgctaagggcgaattccagcacactggcggccgttactagtg

SEQ ID NO: 18120 - DNA, 543 bp, Homo sapiens
gactcactatagggcgaattgggccctctagatgcatgctcgagcggccgccagtgtgatggatatctgcagaattcgcccttagcgtggtcgcggccgaggtacaattatgatttctgaattaatattagagtggggagaacaatgattaatttttacttcttcagtaagattacaatgaaaatgtagagagcactagcattatagtaactatacgataggccactttaaataaaaggcatcttttacaaaatttttagtcaataaattgattaccacatacttacgacctatttgctattaagtgtaatttataattctagtattttcaaaaaaggaacatattaaaatcctatcaatatttcaaataatgacagaattaatcatttttaatagaatccttactcaggtccttcaaaaacaatataaactatgacttaaggtagattcctttaaatctgactaatgaataaatgttaaatctcaaatttcatagtcccagtgctggaaaacctatatttttatttttcttcacgtttatac

SEQ ID NO: 18121 - DNA, 377 bp, Homo sapiens
  misc_feature 327: n = A,T,C or G
tagggcgaattgagccctgtagatgcatgctcgagcggccgccagtgtgatggatatctgcagaattcgcccttagcgtggtcgcggccgaggtaccatttgcctcccgggctcaagcgattctcctgcctcagcctcccaagtagctgggattacaggcacctgccaccatgcccggctaatttttgtaattttagtagagacagggtttcaccatgttgcccaggctggtttcgaactcctgacctcaggtgatccacccgcctcggcctcccaaagtgctgggattacaggcttgagcccccgcgcccaaccatcaaaatgctntttatttctgcatatgttgaatactttttacaatttaaaaaaatgatctg

SEQ ID NO: 18122 - DNA, 634 bp, Homo sapiens
ccctctagatgcatgctcgagcggccgccagtgtgatggatatctgcagaattcgcccttagcgtggtcgcggccgaggtacgtccacccaaagttttaagtaattctcctctcacgtcgttcaagacaatgcattatgcatgtgcagcctacatatagaagagctttttattactgttaacaatattaactaaaatttgcagaatatttattttaaaagcacttttattattactactactactgttaatagtattactaccactactaccacctcccttttgtaaaagaactaaagatcagaggagggaaacaacctgcttaaaattatatgaacactaagaaatgacggtaggactcaaactcaattcctatgactccaaaatctgtgacttttttcttaaaagttaaacccttttcatttttcagtatgaaacccttcattcattcactcatatcttcatctactcaagaaatatttattaaacacctactacatgccagatgctaatctcaggccctcaggaaacaattaagagtacctgcccgggcggccgctcgaaagggcgaattccagcacactggcggccgttactagtggatccgagctcggtaccaagcttggcgtaatcat

SEQ ID NO: 18123 - DNA, 368 bp, Homo sapiens
acatatagtggcgaactgggccctctagatgcatgctcgagcggccgccagtgtgatggatatctgcagaattcgcccttcggccgcccgggcaggtacgcggggcagttgtccgcggttcctcctcctgtcgctgcccgtgtgattactgagactcagatggaccacacatccccgacctacatgcttgctaacttaacccacttgcattctgaacaacttctgcagggcttgaatcttcttcgccaacatcacgaactctgtgacatcattcttcgagtaggtgatgttaaaattcatgctcacaaagtggtacctcggccgcgaccacgctaagggcgaattccagcacactggcggccgttact

SEQ ID NO: 18124 - DNA, 578 bp, Homo sapiens
  misc_feature 405: n = A,T,C or G
ccctctagatgcatgctcgagcggccgccagtgtgatggatatctgcagaattcgccctttcgagcggccgcccgggcaggtacgtgaacacatagtcgtcattcttgctgcccctgcctgtgctcccttccatgaccgctagtgggagccaagggagataaggcccagcccttaggagttagggctgagaggggagcccacgctctcatacccagcaagctgcagagtgatcagacagcccattccctatgatcgcaagtcctacagctggaaacagcggctcttcatcatcaacttcatctccttcttctcggcgctggctgtctactttcggcacaacatgtattgtgaggctggaggtgaagccaggataggatccacaggcggtcatgagtggctgcggngcagcaatgatgtttttgataatgggcaatggtcttggggactggctgccattgtgttctctgtggcagaccaatggtggtgtgatttatcaagaggcctctgagcgggtagctggaagttcaccatgtcctgttccttgtgtcctcacaacagtgtaccctggccgcgacca

SEQ ID NO: 18125 - DNA, 595 bp, Homo sapiens
ctatagggcgaattgggccctctagatgcatgctcgagcggccgccagtgtgatggatatctgcagaattcgcccttagcgtggtcgcggccgaggtacactaaaaagtatcctttttcagatatatttagtgctgttttttttcacatttttgtgcttttaattggtaatttcactgtttaaacactatattgtgacatctgaaatcattttgacctcagaatttgaaagaatggataaaagaatttggaaacatgtttttctttgttgttgttttttttgtttttttaggtaacattttaaaaattgtttattcctaccaagacccagttaataaaaaattttaccttatgggtaaaggatacacaggagctttccatatctgcaacttttccgtaaatctaaaattatttaaaaagaaattatctaaaagaatttagtctgtaatgaattttccacattatagaccactctcccaagtgtttgggagagggccaatgaaaagatgggacattttggcgtcatcaataattgcttggcctagacctgtgcattcttggagatctggtatgggcatataactcctaactgaaaa

SEQ ID NO: 18126 - DNA, 515 bp, Homo sapiens
ccctctagatgcatgctcgagcggtcgtcattgtgatggatatctgcagaattcgcccttagcgtggtcgcggccgaggtacaaatatatttaacagatctatgaaagatgcaggaaaggagtctttcttcgtagcaaagtagtcgttgctttgcatggttcttttgtatactcttcagggtttgtttatctgccccatgaataacacagcacctgtaggattatgtcggatgaaaaacagaaaaggtctgtctactataaaccagggaggcgatgatcttgcaatgcccgcgtacactaggtaataaaactgattcatacagtctaatgatatcaccgctgttagggttctataaaactgcattttaaaaaagattctatgaccagattattttcctgggtgctcctcaaaggaacactataaaggttaattgaaatgttttcaataattgccttaccattgatccttctaacatgctgttgacatcacacctattattcagagggaatgggca

SEQ ID NO: 18127 - DNA, 357 bp, Homo sapiens
ggccctctagatgcatgctcgagcggccgccagtgtgatggatatctgcagaattcgcccttagcgtggtcgcggccgaggtacatgatacttgtagctagactacctctatttgaatctcaactcttatttcttatgtgaccttgggcaaattacttaacctctgtgtgcccagtttcctctcctgtaaaatgaatatattggaacctgtcttataggtttatggttaaacgtgcaggcacttagtaagcattacataagtcttagctattgatgcttttttttattagtaaaaatgtaaatgccaattttctatttttcttctccccatcctgatacccatatcagtgtgatctt

SEQ ID NO: 18128 - DNA, 689 bp, Homo sapiens
  misc_feature 657: n = A,T,C or G
ctactatagggcgaatagtgcccctctagatgcatgctcgagcggccgccagtgtgatggatatctgcagaattcgcccttagcgtggtcgcggccgaggtacctgagtccctaaaaggtaaagactcatccaagctgttctgagattccctccaggcagggaaatgactatctggatctgagattatgtcatcttcatcaagttcttctttaaccagagaggcttcgggtttcagacacacagaagcataattctggccatacaaaaacctcaatgtttcttctgtcttccactcaatcaaagtctccttcaaaactttaagtaagtttctctttccaacttcaggacacacctgcactgaactagacactgacctagacacttggtttgatttggcaaattttctcttaaaatgctctgcacttttcttacttatgcctactagagttatttctgacctactgtattcactttcagaattttctgacgcttttaatctttcaggcaaagtgctatttgaagaactctgagtatttactttctgtaaaggaagttcacatgtagcatctttctcctgacctatctaattgcaatcgcctaactgctcagtgacatctactactgtctgttctttgtcttgtgtttggagttagctntgtgaccagctttctttttcattatgcttttt

SEQ ID NO: 18129 - DNA, 464 bp, Homo sapiens
tgggccctctagatgcatgctcgagcggccgccagtgtgatggatatctgcagaattcgcccttagcgtggtcgcggccgaggtactatcccagccccccaggttcgcctaatagtcttggctacttccctacagctgctaatcttagcggtgtccctccacagcctggcacggtggtcagaatgcagggcctggcctacaatactggagttaaggaaattcttaacttcttccaaggttaccagtatgcaaccgaggatggacttatacacacaaatgaccaggccaggactctacccaaagaatgggtttgtatttaagggccccagcagttagaacatcctcagaaaagaagtgtttgaaagatgtatggtgatcttgaaacctccagacacaagaaaacttctagcaaattcaggggaagtttgtctacactcaggctgcagtattttcagcaaacttga

SEQ ID NO: 18130 - DNA, 524 bp, Homo sapiens
tatagggcgaattgggccctctagatgcatgctcgagcggccgccagtgtgatggatatctgcagaattcgccctttagcggccgcccgggcaggtacgcgggattgtaggtgctatttagggtaggcttaaagtgctgggtggtgatttgagttcaaacaataaaaaattgattttttcaatattgtataaacaatagtgttctaattaccttaaaaaaaaataatgaccagttaagaattgcttttgatcttgtcaaaaaactgaatagaccccagtttcgggaaggtgtgtgagcagtgccatgactctgccccttacctaatcccacatctctctaatgataagacattggctcgcctctgaccagagccccagcaccagagtagcggaagatgcagaattgtcaaatgacctgctgggggaggttgtaggagtttaacagatttgagtgtggctgcagagagagagagtgtgtgtatgtgtgcacatgtgtgagagtgtgagccagagtgtgtgtgtgt

SEQ ID NO: 18131 - DNA, 434 bp, Homo sapiens
gaattgggccctctagatgcatgctcgagcggccgccagtgtgatggatatctgcagaattcgcccttagcggccgcccgggcaggtaccccagctactcgagaggatcgcctgagcccagtgaagctgcagcgagctgtgaggatgccaccgcactccggcctgggctaaaaagctagatcgtgtctctgataaaagaataaaagctgtttattgcagtcctaaaaaaaaaaaaagaaaaaaaaaaaaagtttccggggccgctccccctttggggggaattcccgccccgtggggggcgcttgttatgggacctacttgggaggccaaggggggagaaaaaggtggaacctggaaggtggggggttgcagtgagttcgagatcctgccactgcactccagcctgggcaaccaagcgagactttggcttaaaa

SEQ ID NO: 18132 - DNA, 673 bp, Homo sapiens
  misc_feature 339, 345: n = A,T,C or G
ggggccctctagatgcatgctcgagcggccgccagtgtgatggatatctgcagaattcgcccttagcgtggtcgcgggcgaggtacaatggttaatagtgctgtgtcctaaaggggatcctgaggggcgttgcctcgggtagttaaagtcttatgtgtgcataagttgcttattctttgtctacttcctatttgagatgttagtagagaactgtcctgggtgaatctttcagtattgcagggcttggcaacttgctgcccgacaaaatacatcagaatttctctttaagaacaatatgggatggattaaaaaatatatatatgggatgaaattgggggnactttntttttttttttttttttttttccccccgttgcccccaaattttttatttggcaaaaaaaaatttttttttaaaaattttttcccggaaaaacccttttttttggggggggccccccccccccccttttaaaaaaattaactctcgaaaaaattttcccccaacccttttgaaactttttcctcggggggaaaaaaaaatttggggggttttcccccgggaattttaaaggggccccccccaaaaagaaccaatgggccccaaaaatttttggggaaaaaacttagggggggcccccctcttttttaaaaggggggaaaaaaaaaaaaa

SEQ ID NO: 18133 - DNA, 550 bp, Homo sapiens
tcactatagggcgaattgggccctctagatgcatgctcgagcggccgccagtgtgatggatatctgcagaattcgcccttagcggccgcccggccaggtacagacctaacaattctgttgctaatgacactggcttcacagtggtcccacctggaaaggagaacgccctgatgaaagcaggcgcaactgtggggcccatctccgttgctatggatgcaggccattcgtccttccaattctacaaatcaggcatttattttgaaccaaactgcttcagctgaaacctggatcatggtgttgtggtggttggctaccggtttgaacgagcaaattcgaataacaacacgtattggctcgtgacaaacagctggggtccataatggggctcgaatggctatgtgaaaataccgcactacaagaacaaccactgtggaatagacacatcaaccagctacgccaatgtgtgagctgatggatggtgaggaggaaggacttaatgacagcctgtctggggaaattttatcttgaaactgaccaaacgcttattgtg

SEQ ID NO: 18134 - DNA, 306 bp, Homo sapiens
gcgactaatggcgccctctagatgcatgctcgagcggccgccagtgtgatggatatctgcagaattcgcccttagcggggtcgggggcgaggtactaaaaaaaactgtattcaggcatattacttgaggtcaggagttcgagaccagcttggccaccatggtgaaaccccatctctactaagaatttaaaaattagctaggcatggtggcatgcacctgcagtcccagctactctggaggctgaggcaggaaaatcacttgaagccaggaagcagaaggagcaatgagccaagattgggccactgc

SEQ ID NO: 18135 - DNA, 487 bp, Homo sapiens
gggccctctagatgcatgctcgagcggccgccagtgtgatggatatctgcagaattcgccctttcgagcggccgcccgggcaggtacacttcaccacaaatacagagaagcttcaaaaactgaagctcgaatatgagactcaaattaagaagatgctatgctcaaaagatagcctgggactaaaagaggaactgacagatgaagacagagaaaaggttgcggtgcaggaggggattaactcaggaacagccatgtcaagaggattgtatcaaccagcaacaatctttatgggccgccaaatgtcagccatcttaagcatgagagatttcagtacctcggccgcgaccacgctaagggcgaattccagcacactggcggccgttactagtggatccgagctcggtaccaagcttggcgtaatcatggtcatagctgtttcctgtgtgaaattgttatccgctcacaattccacacaaacatacgagcc

SEQ ID NO: 18136 - DNA, 473 bp, Homo sapiens
gcgaattgggccctctagatgcatgctcgagcggccgccagtgtgatggatatctgcagaattcgccctttcgagcggccgcccgggcaggtacaaatttttaaattatattttttgtagtaatatgttataaagcattgatttgttatatttttaaatttatcatactttaaacaaaacagatttaaacaacttcaatggatttggaaatagccattataaacaatcttataacctgaaggttttatttttactaataatttaagttgtgttattcttatacatatttaggttttgaaatttttataaaggtctaggctgggcgcagtggctcatgcctgtaatcccagcactttgggaggccaaggcaggtggatcacctgaggttgggagtttgagacaagcctgaccaacatggagaaaccacatctctactaaaaatacagaattagccaggcgtggtggtgcatgcc

SEQ ID NO: 18137 - DNA, 582 bp, Homo sapiens
  misc_feature 184: n = A,T,C or G
ccttgggcgaattgggccctctagatgcatgctcgagcggccgccagtgtgatggatatctgcagaattcgccctttcgagcggccgcccgggcaggtacttttttttttttttttttttttttattttttttttttttttttttttttttttttttttttttttttttttttttttttttttntttttttttttttttttcccccccccccccacaaggattttttcccccgggcccccccccccgggggggtttccccccccccccccccccccctgtgggggcgccccccccccacggtggttttcttttggggccccgggccccccccccctgggggggccccccccgtgggggcccccccccccctgtgtggggccggcccctcggggccccccggcgcgcttggtgttcccgcgcatccccccccggggcccccccgggcgggcccaaggggtgttttgggggggggccccccccccccccctctttttcccggccccgggggggcgggggggttttgcccctcttcccgggggccccggggggccccccaatgggggggggggcccgggggcccc

SEQ ID NO: 18138 - DNA, 377 bp, Homo sapiens
agggcgaattgggccctctagatgcatgctcgagcggccgccagtgtgatggatatctgcagaattcgcccttgagcggccgcccgggcaggtacaaaaaaaatgctgaaaggcagcgttttttagactctaaacattctgattttgaaggtgggtgttggaacgactgatgatgttttttatatcatcaattcagccaatggatgcgaacttaaaatctggattcacagaaccgtggtcacatttccccatcaaaatccccaaggcgggtcccaagttctctcctctacgctcattgcagaaatactttgaaataggttctgccagtctacaatagcagtgaagactgacaaatcagatattcccaatgactgaca

SEQ ID NO: 18139 - DNA, 198 bp, Homo sapiens
tataggcgaattgggccctctagatgcatgctcgagcggccgccagtgtgatggatatctgcagaattcgcccttagcgtggtcgcggcctgagtacctgggaagcagctcccacatcggctgaggcactcagaggcagagctttctgcttctgtctcatgcgttcctgtgttgatgtggattagtcagcaattattt

SEQ ID NO: 18140 - DNA, 367 bp, Homo sapiens
agggcgtattgggccctctagatgcatgctcgagcggccgccagtgtgatggatatctgcagaattcgcccttagcgtggtcgcggccgaggtaccgatacaccccgctgctgggttggctcctcactcccaacatctacctcagcgagctctttggaaagtttctcttcatcagctgcgacctcctcaccgctttcctcttataccgcctgctgctgctgaaggggctggggcgccgccaggcttgtggctactgtgtcttttggcttcttaaccccctgcctatggcagtatccagccgcggtaatgcggactctattgtcgcctccctggtcctgatggtcctctacttgataaagaaaagact

SEQ ID NO: 18141 - DNA, 159 bp, Homo sapiens
ccctctagatgcatgctcgagcggccgccagtgtgatggatatctgcagaattcgccctttcgagcggccgcccgggcaggtacaccgtgcacctgggcagtgatacgctgggcgacaggagagctcagaggatcaaggcctcgaagtcattccgcacc

SEQ ID NO: 18142 - DNA, 414 bp, Homo sapiens
acgactcactatagggcgaattgggccctctagatgcatgctcgagcggccgccagtgtgatggatatctgcagaattcgcccttagcgtggtcgcggccgagggacttttttttttttttttttttttttttttttggggggttgttttaaaaagtgctaacaaagcccactatcaacaacaaaggaatgatgcattgtgcttctggatatatattttggccttcagacacattggtaacaagataaatccctgagccctactcacaggaatcaaactgacagctacaggaatgttagtaaacttgtctatgataggcaattcctagggatttacatcttggttctagaccttaactgagaaattcttgcattttccagcttggcttttacatttatgggtttcttaaaaaac

SEQ ID NO: 18143 - DNA, 279 bp, Homo sapiens
  misc_feature 273: n = A,T,C or G
tacgactcactatagggcgaattgggccctctagatgcatgctcgagcggccgccagtgtgatggatatctgcagaattcgcccttcggccgcccgggcaggtactgtgcagtagtaaccataattctaaatgaggattatggatttttctggaagattcttttttcctgtggaacatgatgagaaatgtttaggagaggggacatagccatttttgtatgaagaccaattcaagaaaaaaatatatgtatgtgtgtgggtgtatatgtgtgnatatat

SEQ ID NO: 18144 - DNA, 491 bp, Homo sapiens
tcactatagggcgaattgggccctctagatgcatgctcgagcggccgccagtgtgatggatatctgcagaattcgccctttagcggccgcccgggcatgtacttgaacgagcaaagccagaatatatcagcaaaacatacaagattgattcttgggagaatgctgaggactttcttgagaagctcgctttccggactgggaagttactaaagggtggagagcccgacttgcagactgtgggtaagatggtcctcaatgactggcagaggggccggattcctttctttgtcaagccacccaatgcagagccacttgtggccccccagcttctaccctcctcatctttggaagttgtcccagaagcagcccagaacaatccaggggaggaagtcacagaaactgcaggtgaagggtcagaatccatcattaaggaagaaacagaagagaacagtcactgtgatgctaacacagagatgcagcagattctcaca

SEQ ID NO: 18145 - DNA, 439 bp, Homo sapiens
tgcatgctcgagcggccgccagtgtgatggatatctgcagaattcgccctttcgagcggccgcccgggcaggtaccaggtcttctatgtgggtgtcaggatatgctccctcacggcttccgaaggcccccagcaaaagatctaacattcttgctcaaagttgcgagagaaagtatcacatggagtagctgggttggggcggcggcctcttctcttcagctcccttagcttggctccgtaagtggatcacttaccaaatgctttagatgattgcctctcaataattgaaaggtggtggtagttgtattgctgcactgtcggtgttaagagaaattactctcacaagagcagaggcctgaagattctttcttctgaagggatgatgagcctggactctctggactcctagattatgaactcctgcagtggaccatgtccta

SEQ ID NO: 18146 - DNA, 529 bp, Homo sapiens
tactatagggcgaattgtgccctctagatgcatgctcgagcggccgccagtgtgatggatatctgcagaattcgcccttagcgtggtcgcggccgaggtacactgaatactacaaaatattgcttaaataaattatttgaaaagctaaataaatgaagttatgtataatgcttatgaattggaatactcagtaagtattgggatgtcgaagttacctctctttttttttttttatttttttttatttttgagatggagtctcgctctgtcacccaggctgaagtgcaatggcgcgatctcggctcactgcaagctccgcctcctgggttcacgccattctcctgcctcagcctcccaagtagctgggactacaggcacccgccaccacgccagttaatttttttgtatttttagtagagacgggtttcaccgtgttagccaggatggtctcgatctgacctagtgatcagcctgcctcagcctcccaaagtgctgggattacaggcgtgagcaactatctttttttata

SEQ ID NO: 18147 - DNA, 363 bp, Homo sapiens
ggccctctagatgcatgctcgagcggccgccagtgtgatggatatctgcagaattcgcccttagcgtggtcgcggccgaggaccgttgactcaggtaaagagggagacagcaagaacagagtagaaaggcagcataaaactggtggaaccaaacacagactaagtaaaaaaaaaaaaggtaagcttcccgacaacaccttgtcccaggaaaaaaaatccagtaaaaagcaaaggcctttaccaaggatgccaaaacaattccggggaaaaaggatttttttctcaataatcagcagggggacaagtggaaatccacaagcaaaaaaatgaagctggacccctacttcacatcatatttaaaaa

SEQ ID NO: 18148 - DNA, 495 bp, Homo sapiens
actatatggcgaatggagccctctagatgcatgctcgagcggccgccagtgtgatggatatctgcagaattcgcccttgagcggccgcccgggcaggtacatgtgatgcagaaaagtcttacgaagtattactgagctttgtgataagtgaactgtttaaaggaaagttataccatgaagaaggaactcaggaatgtgcaatggttaaccctattgcttggtctcctgaatccatggaaaaatgcttacaggacttctgcttaccttttctcagaatcaccagccttcttcagcaccacctttttggggaagatttacctagctgccaggaagaagaagaattttcagttcttgccagctgcctgggacttctgccaacgttttaccaaacagaacatccattcatcagtgcctcctgtctggattggccagttccagcatttgatattataactcagtggtgttttgagataaaatcatttactgaaagacatg

SEQ ID NO: 18149 - DNA, 662 bp, Homo sapiens
atatggcgaatggggccctctagatgcatgctcgagcggccgccagtgtgatggatatctgcagaattcgcccttagcgtggtcgcggccgaggtacacgacatttctgcatatggtctgctaatggcaccgatgcttcacattccaggaaatggttacttagggaaggttgatatgtgctgcagcataataggaacttaattcaaaccagagcaaccagaaaggatactggaggcaaaagccaaaatacaatttaaaatcttaaaaaaataaggaacggtttaaaggtaattaatgaacttttcctcacctagtgtaaacatttcataagaagtaatattttgtggtcacaaaaaaagcacagatacctcttttagaatattcatgatgctcttgtgtatgaacttaagttttcatgaaatgctttcacctcaaaaccccgtattcaagaatcaagaaggccaagcacgatggctcatgtctatagtcccatcacgttgggaggccgaggcgggtggatcacttgaagtcaggagtttgagaccagcctgtccaacataatcaaaccctgtctctactaaaaatacaaaaattagctggggccttgtggcgggtgccagtaatcctagctactcagcggccaaggcaggacaatcacttga

SEQ ID NO: 18150 - DNA, 383 bp, Homo sapiens
gcgaatggggccctctagatgcatgctcgagcggccgccagtgtgatggatatctgcagaattcgcccttagcgtggtcgcggccgaggtacattattaatcaacagtgtcccaccaactcagaagttttctaaattggctgctttctctgcatttagtaagtttataaccaatgactcaatcaaagaatgtgcttgtaataggctgctggtttaattttagaatcaaaagttttatattgggctactttcaaatatagaaatgctatgagtgacatatgaactattaattttgtttcccattacctacaggaagaatttattcaaataaaattttacaagacaaaatgcaaatctatatacctatatagagatgtatatatg

SEQ ID NO: 18151 - DNA, 593 bp, Homo sapiens
ctatatggcgaatggggccctctagatgcatgctcgagcggccgccagtgtgatggatatctgcagaattcgcccttagcgtggtcgcggccgaggtacactaaaaagtatcctttttcagatatatttagtgctgttttttttcacatttttgtgcttttaattggtaatttcactgtttaaacactatattgtgacatctgaaatcattttgacctcagaatttgaaagaatggataaaagaatttggaaacatgtttttctttgttgttgttttttttgtttttttaggtaacattttaaaaattgtttattcctaccaagacccagttaataaaaaattttaccttatgggtaaaggatacacaggagctttccatatctgcaacttttccgtaaatctaaaattatttaaaaagaaattatctaaaagaatttagtctgtaatgaattttccacattatagaccactctcccaagtgtttgggagagggccaatgaaaagatgggacattttggcgtcatcaataattgcttggcctaaacctgtgcattcttggagatctggtatgggcatataactcctaactgaa

SEQ ID NO: 18152 - DNA, 471 bp, Homo sapiens
gcgaattgggccctctagatgcatgctcgagcggccgccagtgtgatggatatctgcagaattcgcccttagcgtggtcgcggccgaggtacacttatccctaccttcatgttccagtggaagaccttagtaaaatcaaagatcagtgagttcatctgtaatattttttttacttgctttcttattgacagcaaccaggaatttttttatcctgcccagccagtttttcaaaaatgtcaatactttcctcctgcttaacagtccttggaccattctgatccagttcaccagtaggttggacagcatataatttgcatcattatgccccttgcaaatcaagatgttctgcagattatttctttaacggtcggacttttggctgtttcctaatgaaacatgtagtggttattttttagagtttatagccgaattgctagcaccttgtagtatggtcattattctgctcatgat

SEQ ID NO: 18153 - DNA, 402 bp, Homo sapiens
acatatatggcgactggggccctctagatgcatgctcgagcggccgccagtgtgatggatatctgcagaattcgcccttagcgtggtcgcggccgaggtacttgtaattagcacttggtgaaagctggaaggaagataaataacactaaactatgctatttgatttttcttcttgaaagagtaaggtttacctgttacattttcaagttaattcatgtaaaaaatgatagtgattttgatgtaatttatctcttgtttgaatctgtcattcaaaggccaataatttaagttgctatcagctgatattagtagctttgcaaccctgatagagtaaataaattttatgggtgggtgccaaatactgctgtgaatctatttgtatagtatccatgaatgaattta

SEQ ID NO: 18154 - DNA, 458 bp, Homo sapiens
ctactatagggcgaattgggccctctagatgcatgctcgagcggccgccagtgtgatggatatctgcagaattcgccctttcgagcggccgcccgggcaggtactcttgcaatgaaaccaaatagtatcatagacacaacctctgtagcacattttaggtggaaaacactgtcacagaattttaactaccagatctgttttaggccatacagtttgctcttagttttatcaagagaatttttaaggcttgctgcgacactgctatgtgtccttttcaaaatctgttcctttcattacttacttagaataagatctctctaaaattttaaattaatagcacagagagagaggctgggaaagcagcctttttatgtaaatgaaacctcttaggtagtaaaaaaaaccccaaaaagctgagaaagtgatcacacagtttaaatacagtcaagatctctgag

SEQ ID NO: 18155 - DNA, 430 bp, Homo sapiens
actacatagggcgaattgggccctctagatgcatgctcgagcggccgccagtgtgatggatatctgcagaattcgccctttcgagcggccgcccgggcaggtactttgggaggccaaggcggccggcctgacctcaatttcttagtgctgagacaacaggggagctaactccctatcccccatcacacccagaaagggaagcctcaactacgagttgttactttattagatagtagctctgccatcacagcttcccatctaccgcctaactctgcaacagaaacatttcccaggactgactggaaagaggaatcttatctaaagatactgtagttacaagggctgataagggtctttggtataaaagcaatatccagaaataagataattaactttggaactaaggggatataaatgacacagtaaaggt

SEQ ID NO: 18156 - DNA, 381 bp, Homo sapiens
tgtatacgactcactatagggcgaattgggccctctagatgcatgctcgagcggccgccagtgtgatggatatctgcagaattcgccctttcgagcggccgcccgggcaggtactttttttttttttttttttttttttctgataagacccgaaaaaggaaaattcttttaattttctataaatttagatgtctgatcctcatctttttaaaaaccaaaatgataaaacatatttcttaaactgttgggttctgaaaaagtcacccaatggaatcagctagttcacatttgaaaatgcaactgctaaaagctgtgggatattgcaatttaagtcctgcagctcacaaggcaaagtgtgtaattctaagaagcatcaaaaga

SEQ ID NO: 18157 - DNA, 490 bp, Homo sapiens
  misc_feature 302: n = A,T,C or G
catgctcgagcggccgccagtgtgatggatatctgcagaattcgccctttcgagcggccgcccgggcaggtactccccaatggtggatttattactattaaagaaaccagggaaaatattaattttaatattataacaacctgaaataatggaaaagaggtttttgaatttttttttttaaataaacaccttcttaagtgcatgagatggtttgatggtttgctgcattaaaggtatttgggcaaacaaaattggagggcaagtgactgcagttttgagaatcagttttgaccttgatgatnttttgtttccactgtggaaataaatgtttgtaaataagtgtaataaaaatccctttgcattctttctggaccttaaatggtagaggaaaaggctcgtgagccatttgtttcttttgctggttatagttgctaattctaaagctgcttcagactgcttcatgaggaggttaatctacaattaaacaata

SEQ ID NO: 18158 - DNA, 173 bp, Homo sapiens
ccctctagatgcatgctcgagcggccgccagtgtgatggatatctgcagaattcgcccttagcgtggtcgcggccgaggtacacgccctccatcagcaaaccgtagcaaaggagagtctcggtttgacaagacttaaaatggctggggaaccagttgagttcaggatcccaca

SEQ ID NO: 18159 - DNA, 408 bp, Homo sapiens
tctagatgcatgctcgagcggccgccagtgtgatggatatctgcagaattcgcccttagcgtggtcgcggccgaggtacttttttttttttttttttttttgggtgcaggtcatttattttggatgcgatctcaggaggcaacagtaagagagtgagaaagtgaggccaggaagggaaggcaagacaggggtgtcaatgagcaggttaccagggttggacaatgggagcttgagcctgctggggacttgtgggagattgcatagagcacatctcagggctgttccacctgagaggggaggaagctgagaatgtatccaccagctccatttgtcattggtagagagctacttctaagggcattaaatccctggcacttctggcctggcctgtgttcagctgaaaaatgc

SEQ ID NO: 18160 - DNA, 398 bp, Homo sapiens
agggcgaattgggccctctagatgcatgctcgagcggccgccagtgtgatggatatctgcagaattcgccctttcgagcggccgcccgggcaggtacgcgggtcatagcaacaagaatgtgcctcagcacgattactcaaaaagcagagatggatattgctctaggcttgcttgtgttctcctaaaattcatatgttgaattgaatttcatcacccaaagtgacggcacttgcagatgggcctttgggagctaattatgttgagatgaggttgtgagggtagtgccctcatgatgaggctacaacccttatacaaagagtcaccagagagcttgctttctcccaatctccaccatgtgtggacacagggagaaggcagccatctgcaaaccagaaaaa

SEQ ID NO: 18161 - DNA, 408 bp, Homo sapiens
gactcactatagggcgaattgggccctctagatgcatgctcgagcggccgccagtgtgatggatatctgcagaattcgccctttcgagcggccgcccgggcaggtacttcatcctgtttgttctgggcgagggaagacaatcttagagttggaagagatgtaatccggctcagcctcccaggataaaggaacttccttttgaaacaccctggatggctactctctgcttgagtgttttgagcggagggcactctgtgtctgacagggtgattatgagccaggatgtgcctacctctaatgctcacatttgccccagagtcagggtgctccctggcatggttgctcctcttactcttagacccaccagctggttttctccagataggaacagggctaggagaaatcttt

SEQ ID NO: 18162 - DNA, 499 bp, Homo sapiens
  misc_feature 336, 338: n = A,T,C or G
ccctctagatgcatgctcgagcggccgccagtgtgatggatatctgcagaattcgccctttcgagcggccgcccgggcaggcaccaaagaatttggttcttcttgaggtccccacaaaccagccgttatcacactattccatgacatcaatgacatcactttctctgagctccagctcatcttcattcctgggagtatagttatacagagcctgaaacggttcccctccgtgaaagtgtggattcctacttcctgctctaagctttgacacgtcaaaatgtgggatcagaaagaaaaaaatcatgatatttaaaaatggtcaaatatttgaggcananaccacaaaaacaaaaaaagcccttttttttttttaaaaaccttcattcccccacccatttttttttttttttaaaaaccccacaattttttcaccttttcctcccccagggggtggggcccccccttaactgggaactttgggggcttccccttaaaaaaa

SEQ ID NO: 18163 - DNA, 381 bp, Homo sapiens
actatagtggcgaatggggccctctagatgcatgctcgagcggccgccagtgtgatggatatctgcagaattcgcccttgagcggccgcccgggcaggtacgcggggtgtttggagctggagacggcctgggtgctggcgaagcggaggccggagttaatacacgaggaactcatgcaaaggaggggactttcggaaatccaaacttagagtgccttgtatttagaatccggaaggaaaaggaaatgaaatgtgaagaaactcatgcaccaaactcgaactggtaagaagactgttagaatgccctcggtaacacagaggctgagagatcctgacataaatccttgtttgtcgatcctgttctaccttttaaatgatgcct

SEQ ID NO: 18164 - DNA, 417 bp, Homo sapiens
attgggccctctagatgcatgctcgagcggccgccagtgtgatggatatctgcagaattcgccctttcgagcggccgcccgggcaggtaccaaattaaaggtttgttcccaactggaagcagaggtttgggaatgctggaagttaggtctgtcatccgagatcctccacctactgccatcactactgcttgaaattccatttttacaaaccgggtcagccagcttgtgtgcggcctggcagggcagaagtcacagctataactcagctccccgcacgccgcaaccgctcccagcgatctcccccgcgtacctcggccgcgaccacgctaagggcgaattccagcacactggcggccgttactagtggatccgagctcggtaccaagcttggcgtaatcatggtcatagctgtttcct

SEQ ID NO: 18165 - DNA, 375 bp, Homo sapiens
acatatactggcgactggggccctctagatgcatgctcgagcggccgccagtgtgatggatatctgcagaattcgccctttcgagcggccgcccgggcaggtaccatctatgaaccaaaaaacctcagacattgattctgctggcaacttggatcttagaattcccagtctccagaactgtaagaattaaatttctgttgcttatatgttatttcattatagcagcctgaatggactaagatatttgccagtaacatttgacttcaggtcctctgctcttgcttttcctctctcaggaacactttctacccagcctttcacatggctatcttctcaccctcagctctttggctgaaatgtcagagggtcttccct

SEQ ID NO: 18166 - DNA, 484 bp, Homo sapiens
atagggcgaattgggccctctagatgcatgctcgagcggccgccagtgtgatggatatctgcagaattcgccctttcgagcggccgcccgggcaggtactttttttttttttttttttttttcttttttttttttttttttttattgttatttttcttttttgattctttttttattgttttttttttttttttccccccccccgccctaatttgatagaaaaaaaaaaaaaacacccccctactaaaaaaaagaccccggggggggggggccccccccccctcccaaaaaaaaaacccgagggatataaaatacccaatccgccccccggggaggagcagagcttaaacttaattaaagttttatacacaccaggtccccaggaggggcccacccaaaaagaggagggggggggtatcccccccgggggggaaaaaaaaacaatctttttaaaaaaaaaaaaaggggaccgcccaatactgta

SEQ ID NO: 18167 - DNA, 521 bp, Homo sapiens
tctagatgcatgctcgagcggccgccagtgtgatggatatctgcagaattcgcccttagcgtggtcgcggccgaggtactctgtaaacaaaacaaagttatatcaccaagtgccttccccgaattcgctccctcaaaccaaccacacagttctgaccactctacagtcatggcctgtcatcagagctttgtatgaaattaagtcaaagtgtggagctccttttactcattttttttttctccttaaaaaagaaaagaaacaaatgttccaagtaaaaacaaacgtatcccaaagcatgtgtgcattgaaaagtaaagaaacattataacaacttcataaaaactgacttaaaagtttaaaaggaaaaaaacatgtttctaagtccctctgactggagtaatttctcttatataaagaaaagatattttcatatgtaatagggtcctttctttacagaaatagttgtattatgacacatatgcacaaggattaacactataacacactgtacctgcccgggc

SEQ ID NO: 18168 - DNA, 380 bp, Homo sapiens
  misc_feature 20, 39: n = A,T,C or G
gcatgctcgagcggccgccngtgtgatggatatctgcanaattcgccctttcgagcggccgcccgggcaggtacatgttttaatctttttttaaaaaattattttattagagtcagggtctcactatgttgcccaggctggcctgaacaattggactcaagtgatctgcccgcctgggcctaccaaagtgctgggattacagttgtaagccaccatgccatgccacatttctacattcttaataaagtccgtggaatctacttcgaatgcaattttaatttatatttcaatctatgaagatattgggttggtgcaaaactaactgcggctttggactgtgaattttaaatcattataactaggctcaacgctattttatt

SEQ ID NO: 18169 - DNA, 358 bp, Homo sapiens
atggggccctctagatgcatgctcgagcggccgccagtgtgatggatatctgcagaattcgccctttcgagcggccgcccgggcaggtactttttttttttttttttccttttttcccttccttttttttttttttttttttttttttttttttttttttttttttatttttttatgaatgtgttttttaataacaaaatactttgtttaggtattagaggaaaggggcatagccccttcttttaaaaaaaaaaaaaaggggggtgggggaagggaaaaaccaaccctttttttgattccaaaaaaaaaaatcataagttgtataaaaaaaaggaaaagaagggcttataaggaaacc

SEQ ID NO: 18170 - DNA, 507 bp, Homo sapiens
cgaattgcgccctctagatgcatgctcgagcggccgccagtgtgatggatatctgcagaattcgccctttcgagcggccgcccgggcaggtactttttttttttttttttttttttgaaaaaaaaaaaaaaaaaatttttttttaaaaaagggggggggggggctttttttttttttaaaaaagggccccttttttttaacccctttttttttttttttaaaaagaaaatggggaaagggggcttttttcccccccccttttttctttatggggcccctttttaaaactttttttaaaaaagggggccccaaattcccccataaaattttttaggggccccccccccgggggggggccccctttaaaaacccttccggggggggggccaaatttaatttccccccctttttcttttttaaaaaaaaagttgcctttttaaaaaaaaacccccccggggaagggtgggttggaaaaaaccctagggttttgggaccccaaattttttt

SEQ ID NO: 18171 - DNA, 372 bp, Homo sapiens
actcactatagggcgaattgggccctctagatgcatgctcgagcggccgccagtgtgatggatatctgcagaattcgcccttagcgtggtcgcggccgaggtacggtagtaagaaacctttgagatctttctgacttttcaaaattagagaaagcaaatgggatggatagatttttttttcttttcaaggggggcaggaaggtaatggtttgagtagcctttgtttaaaaaaaaactaaatatatttaaaaggccacatttatatttttttcacaagaaccacataataaattccacttcttgacctgaatttggaaatccgaaattactaatccaggccaggtgtggtggctcatgcctgtaatcccagca

SEQ ID NO: 18172 - DNA, 404 bp, Homo sapiens
gcgaatggggccctctagatgcatgctcgagcggccgccagtgtgatggatatctgcagaattcgccctttcgagcggccgcccgggcaggtacgcgggaaagaagaaaatacagagagtgagtgtgtggaagagggagagaaacaggagagaaacaggagggagagagagagagagagagagagagagagagagagagagagagagagacacacgagagagagggggggggagagagagggataacactagagtgtggcgctgaaaaaagaatctcccgctgcgcacaccggggggggggtgtgtgcacagagtgagatatacgggggggggggagagactctgcacacaaaaagtgtgtgtgtgtggggcccccccccagatctgtcttaaaaaaaagagcc

SEQ ID NO: 18173 - DNA, 398 bp, Homo sapiens
agcggccgccagtgtgatggttatctgcagaattcgcccttatcggccgcccgtgcaggttctggcatcagtcaatgttgtggagttattagttgcccaatgttggctatgaagctattggtcttgtggacagttttggcccacagttggtgtttttgcaaaagcaactgcacaagacaaccccaaatctgccacagagcagtcaggaactggtatccgatcagggagtgagacagagtccgaggcctcacaaattactattcctcccagcaccccggcagttccacaggctaccgtccagggggaggactacggcaaaggtgtcatcttctacctcaaggacaaagtggtcgaggggaatgtgctatggaacatctttaaccgaatgccaatagcaa

SEQ ID NO: 18174 - DNA, 337 bp, Homo sapiens
ccctctagatgcatgctcgagcggccgccagtgtgatggatatctgcagaattcgcccttagcgtggtcgcggccgaggtacggtggctcacacctgtaatcccagcactttgggaggccaaggtgggtggatcatttgagcccagccaggaggtgagaccaggcctgggcaacatagtgagaccctgtctgcacatacaaaaaatacaaatattagccgggtgtggtggcacgcacctgtggtcccagctattcaggacgctgaggtatgaggatcacttgagcccaggacatggaggttgctgtgagcccagatcatgctactggactccacctg

SEQ ID NO: 18175 - DNA, 375 bp, Homo sapiens
gcgactggggccctctagatgcatgctcgagcggccgccagtgtgatggatatctgcagaattcgccctttcgagcggccgcccgggcaggtactcaaattaatcaatagttcatcttatttacaatctctcaagcagctcattttatgttagttgcacaatctggaggtctggagttcttcacatgaaatttaataaattatcatgcaagctcatttttattcccattttttttacccagggagaatcagtctaccagggcaaataatgaggttaccaccttagtccctcttcccaaccccattttttagttactttcctttcattaaaatatccttatgcacttacaaataaaactaagtcccaagagggcaa

SEQ ID NO: 18176 - DNA, 579 bp, Homo sapiens
ccctctagatgcttgctcgagcggccgccagtgtgatggatatctgcttaattcgcccttagcgtggtcgcggccgatgttctaagattaaggacagagttccctccattgttcattgatttgtaaaccaaaatgtatctgtgacaggtattaatcaattgagaagagttttttatttttatttatttatttattttttgccaaggttcaggacagatccaggtgtctttctccaaagatgattatgatggtgttaatatttaaaggggaaagtggcctagaggggaacaagggagggtatgatcatattactgtatccacatgttgcaggagaaatggagcatgtacctgcccgggcggccgctcgaaagggcgaattccagcacactggcggccgttactagtggatccgagctcggtaccaagcttggcgtaatcatggtcatagctgtttcctgtgtgaaattgttatccgctcacaattccacacaacatacgagccggaagcatatagtgttaagcctggggtgcctaatgagtgagctaactcacattaattgcgttgcgctcactgcccgc

SEQ ID NO: 18177 - DNA, 492 bp, Homo sapiens
ctatagggcgaattgggccctctagatgcatgctcgagcggccgccagtgtgatggatatctgcagaattcgcccttagcgtggtcgcggccgaggtaccactttttaaagctagctgtgtcgagttaaagaaaaaatcagcagttttttctcccagaaatgtaattgccaaacacttattcatgccccatcttaagttttacaagggtggatgtaatcagcttgttgtagtgatgctggccaaatggtgctcagcaggtgagaacaaaaaaaccccagatttcagtgaactaatacacagcttgagcgtttccatgtgctaatgttgcacacttactaaaaaactttggaaatggaaaataatgtattagtgcaacagttgatgtgcttctttgggcaaagatatagttttgttccacaatttgtacctgcccgggcggccgaagggcgaattccagcacactggcggccgttactagtggatccgagctc

SEQ ID NO: 18178 - DNA, 404 bp, Homo sapiens
acatatactggcgactggggccctctagatgcatgctcgagcggccgccagtgtgatggatatctgcagaattcgcccttagcgtggtcgcggccgaggtactacaagaagcaaaggtgttgttgctctgccaatcaacatccaatgctggtgctgaatgaaaaggaaactgttgcttggcttcaccagtatgtgcgtcccaaataattgtagtcttgtctactccagcacttaggatgaaatttcctttcttattccattttaatgcaaatatagggcctttatgctgccctaaggtgctagcaaggttaccatctttagtccatattctggcaaacccatcataggaaccagttgctagaagtgtacctgcccgggcggccgctcgaaagggcgaattccag

SEQ ID NO: 18179 - DNA, 416 bp, Homo sapiens
  misc_feature 109, 135, 136, 137: n = A,T,C or G
gactcactatagggcgaattgggccctctagatgcatgctcgagcggccgccagtgtgatggatatctgcagaattcgcccttagcgtggtcgcggccgaggtactttntttttttttttttttttttttggggnnnttttttttttttttttttttttttttttttttttctaagcatactttttattttgaaagatttgtgaaacttttcacatcatggtgagagtttgtatgattaataaaaagcacctttttcatgaaatgcttggaggtgaacaagttctcaccctgtgaaatccaaccatcccattaactttaaagtttcttttgattaataaaaaaaaaaaggggagggtgaaaaaaaggaggaacttgcttaaaaccttattacaattttccaaatttgaggaaaaaa

SEQ ID NO: 18180 - DNA, 581 bp, Homo sapiens
ccctctagatgcatgctcgagcggccgccagtgtgatggatatctgcagaattcgcccttagcgtggtcgcggccgaggtacttttttttttttttttttttttggatcttctcattggagagagctaagatatcttggtatgcacacatacacacatttaaagacaaactgtgccctgagtgcatactgacaattcctatgcaaattcaaaactgtagggattttaacctcctttatcttacatctttatcctctttcaactatgttttcagaagagttgtatattttaaggcatattgactaaggaaaagtgacgttattaaccagccgtgtgaatgactagcctggccttttagatcatgtttgagaggtagcacaagcactgccactctccccatactagagtgctataaatacagtttaaaagtgaactggcttgagacctagttttgcaaaggtttgaacctttaaatatatgaaaaaatgttcgtcagtgttgggctccttagtttgatttggccaagttaacccagttaacagttgggatatttgattttaagaccacagaacttctagtttt

SEQ ID NO: 18181 - DNA, 408 bp, Homo sapiens
ccctctagatgcatgctcgagcggccgccagtgtgatggatatctgcagaattcgcccttagcgtggtcgcggccgaggtacctgtattagttttctatgctgctgtaacaaattgtcacaaattagttatcttccagttctggaggtcaaagtctaaaatcaaggtgtcagcaggactgcattccttctggaagctctagggaagaattcctttccttgcccttttcagcttctacaggccaccaatgcttcttggctcatgaccccctttcacatcactccaacctcttgggttcattactacgtctcctgctaccactctgagccgcctgcctctcatttagaaacacctttggggccatctgaaaaaatcaaattgctctccccatctcgagacacttaattta

SEQ ID NO: 18182 - DNA, 322 bp, Homo sapiens
  misc_feature 215: n = A,T,C or G
gcgaattgtgccctctagatgcatgctctagcagcatgctcgagcgggcgttgtgtgaaggatatctgcagaattcgccctttcgagcggccgcccagtcaggtacaacatatgcatgggaagatcatgataatgttttacatcacattttacagcattttattttaatcagtatttgtacgaaaacaaggatgctgagttcttgaacactgcantcacaaactcaaactaaaatttccaaaaaaaggaaagaaaacacttaactacttggtcaactgaacatctttaataataaatttaacgaaacctaaccaaataaata

SEQ ID NO: 18183 - DNA, 625 bp, Homo sapiens
  misc_feature 10, 136: n = A,T,C or G
ggcgaatggngccctctagatgcatgctcgagcggccgccagtgtgatggatatctgcagaattcgcccttagcgtggtcgcggccgaggtacgcgggtattaatatgatactgaaacatttattgctgaacatanaatttagaaaacttactttgcctacctattacagaagaacaaaagatatttgggcctattaaacctttcctctgccatttcctgtcctgtgtcataggactaggaatcgtgtttctagaaagtatgaaatcgtgtgcttgcaaacttggaagaaaacagttcatgactgcataccttctagttctctagtgttcactggaaattaaagacactaaaagttaacaattcttattaattaatcatattaatgtaattggaatttctagaaatattaggggaagcaactttatacgcaaagcataacagaaaaataaggtgtattttttctttgaaacctatgaaatatactggccaagcacggtggctcatgcttgtaatcccagcactttgggaagctgaggcggtggatcacctgagctcaggagttcgagaccagcctggccaacatgttgaaaccatgtctctactaaaaattacaaaattagccag

SEQ ID NO: 18184 - DNA, 400 bp, Homo sapiens
ggccctctacatgcatgctcgagcggccgccagtgtgatggatatctgcagaattcgccctttcgagcggccgcccgggcaggtacaagtcttccacatgttttatttggtttatggctaacaattttatatttgttaatggtattggaaataacatttttaaaatttcaatttctgaatggtttatataaaaatacccttgatttgtgtatattaatcttgaactctgccaccttgctaactcacttattagttctaatagcttttatttcatggattccatggactggtgtacagtgtgagtctccgaccttcacagtggcgtggcaccccaaaaggcctctgctggcatttgcctgtgatgacaaagacggcaaatatgacagcagccgggaagccg

SEQ ID NO: 18185 - DNA, 356 bp, Homo sapiens
ccctctagatgcatgctcgagcggccgccagtgtgatggatatctgcagaattcgccctttcgagcggccgcccgggcaggtacctagcatagtatctgacccacgacagtcatttattaaatatctattaagtgaatgaatgaatgaatgaattgcagccatttggcaaatgaaagcattgctttggtagattattatttcatatttagtatcttgtaatagtatagctgagcctccctaatcccaggccctctatctgcttgcacaccagtgctaagattatggttcctaaattctttttttctttctctttttttttttttttttggttttttttgagatggagtctggctct

SEQ ID NO: 18186 - DNA, 242 bp, Homo sapiens
ctagatgcatgctcgagcggccgccagtgtgatggatatctgcagaattcgcccttagcgtggtcgcggccgaggtaccttttttctgagctctggtttgcctttcttgactgtggccatcaccatgtcacccacaccagcagcgggaagtctgttcagccgtcccttgatccccttcacggagatgatatacaggttttttggctcctgtgttgtcagcacaattgattacagctcctacc

SEQ ID NO: 18187 - DNA, 506 bp, Homo sapiens
tacgactcactatagggcgaattgggccctctagatgcatgctcgagcggccgccagtgtgatggatatctgcagaattcgcccttagcgtggtcgcggccgaggtactgataggggttcatgcttaataaacatgtcacaatacagtaagtaaagtggttttgtttgtttctttgagatggagtcttgctctgtcacccaggctggagtgcggtggcgcaatctcggctcactgcatcctctgcctcccgggttcaagcaattctcctgcctcagcttcccaagtagctgggattacaggcacgtgccaccacgcccagctaatttttgtatttttagtagagatggggtttcaccatattggtcacgtcacgttggtcttgaactcctgaccttgtgatccaccccgccttggcctcccaaagtgctgggattacaggtgtgagccaccgtgcccggccaagtaaaatgttttttaaaatggttatgtgcattattcataaaaa

SEQ ID NO: 18188 - DNA, 625 bp, Homo sapiens
gtaatacgactcactatagggcgaattgggccctctagatgcatgctcgagcggccgccagtgtgatggatatctgcagaattcgccctcgagcggccgcccgggcaggtactttcttcatctccacctttgcccaagtcatctgctttttcatggaccaccagtgtgcggccaatgatgcaatggtctcctgagagtgagatcacagaatcttcaatagacacatcggccacaccatctttgtcagcagtcacattgcccaagtctccaacatgcctctcttcatcctttggcccaccgtgttttctggatagaggattaaagtgaggacctgcactggtactgggattatataggcatgagccactgagcctggccctgaagcgtttttctcaaaggccctcagtgagataaattagatttggcatctcctgtcctgggccagggatctctctacaagagcccctgcccctctgttggaggcacagttttagaataaggaggaggagggagaagagaaaatgtaaaggagggagatctttcccaggccgcaccatttctgtcactcacatggacccaagataaaagaatggccaaaccctcacaacccctgatgtttgaagag

SEQ ID NO: 18189 - DNA, 572 bp, Homo sapiens
ctcactatagggcgaattgggccctctagatgcatgctcgagcggccgccagtgtgatggatatctgcagaattcgccctttcgagcggccgcccgggcaggtacctctgtttctcatttccaaaatctgaggttgcacctgtgtttctcatttccaaagcctgaggatgcacctctgttcctcgtctccaaagcccgaggtcccacttctgttcctcatctccaaagcctgaggttgcacctctgtttctcgtctccaaagcccgaggtcgcacttctgtttcttgtctccaaagcccgaggttgcagctctgtttctcacctccaaagcctgaggttgcacctctgttcctcgtttccaaagcctgaggttgcctgcaagtctcttgaggattttttggtgtaaacaggttgagtttctggataggtgggcatattggcagctgaatatgtgggttttgagtgtgaaatacaggttcttagctatgacccagcaatcttctacttgttctgtgctcttccacataaattgctttttcttgattgtatttcataaagcaatttctgaggct

SEQ ID NO: 18190 - DNA, 423 bp, Homo sapiens
ctactatagggcgaattgggccctctagatgcatgctcgagcggccgccagtgtgatggatatctgcagaattcgccctttggccgcccgggcaggtaccaagttttcccagacagtttatactagcaatgtgattgatggtgaatacctgcttttcactggaggtctagaacttgaataactaaggtcagtctggagggcctacatgactgataagggctatatgctgagtcttgggtcctgtgagtccttttggcaaatctgcaggcctgaggatagtcaggcattcctgccacagtctaaagagctattcacctaatactacaataccagggggttcaccacgtatatataagctaaccaactcattaccttttgtgttcttgttatgatctggcgtcaattttctttttttattgctgt

SEQ ID NO: 18191 - DNA, 455 bp, Homo sapiens
tacgactcactatagggcgaattgggccctctagatgcatgctcgagcggccgccagtgtgatggatatctgcagaattcgcccttagcgtggtcgcggccgaggtacaagtctgttataacatgtctgaacaggctgtagttgaaggcactcagaaggataagacataagttgaaaagagactctatcaaagtaaaataaattctgctaaaattgaaacaaaaagaaacatcaaatttatgatgagatcagatgcagtgtcaccacaccctgctaatttttgtatttttagtagagatggggtttcaccatattggccaggctggtcttgaactcgtgacctcgtgatccacccgcctcggcctcccaaagtgctgggattacaggcatgagccaccgcacctggcccacatcagttttacaaaaaaaaattaaccttgtttgtgccgcagtga

SEQ ID NO: 18192 - DNA, 386 bp, Homo sapiens
agggcgaattgggccctctagatgcatgctcgagcggccgccagtgtgatggatatctgcagaattcgcccttagcggccgcccgggcaggtactctggagtcaccagcctctggtagattatcaagcatctcttcctcatcagccttttgtttctgtcttgcatgcttctctgtccactgtctggcattcttgaggaaggctggcttattatatttaaattctgaggactgagatgaaatcaaagaaaagagttaatggagaaaaacatgatttgcagtggttagagctgctgcagctatcctcacacagggagagttagcggtatagacaaggtaggatatgtgttgcagaggaaaatggggatatttactatgtcagccatga

SEQ ID NO: 18193 - DNA, 417 bp, Homo sapiens
  misc_feature 25: n = A,T,C or G
tacgactcactatagggcgaattgngccctctagatgcatgctcgagcggccgccagtgtgatggatatctgcagaattcgccctttcgagcggccgcccgggcaggtacataattttataacattgtgcattgatcatttggaaaatattggttcattgagttatggagatctttcaaatgttggcacatttaattatacaatataaaaaattcattaacataatcaccaatttatcagaatggtctttatgtatctggaaattattaaaattgtagtagacaaacatttttcaaaattttagttttcacttgaaagcctgaatttatcagtggcaacaaatattgtcaggtatcttccttgaagtgtgaaggaaaccagactctgtcaccccaaaatattcctatttgacatgaa

SEQ ID NO: 18194 - DNA, 289 bp, Homo sapiens
agggcgaattgggccctctagatgcatgctcgagcggccgccagtgtgatggatatctgcagaattcgcccttagcgtggtcgcggccgaggtacagtgtcaaaggaggcatttaaactagaaggtttaaatatggtccagaatctcataacaccccaaatgtccaggtttcaattaaaaaaatcaccaaatcttcattttgagttaaaaaaagaaaaaccagttgtacattaaacacttgaaaatgacaaaagatgtttagaatttattttgatagaatatttttaaa

SEQ ID NO: 18195 - DNA, 167 bp, Homo sapiens
tatagggcgaattgggccctctagatgcatgctcgagcggccgccagtgtgatggatatctgcagaattcgcccttagcgtggtcgcggccgaggtacgcgggcggttccagatgtggatttggcaaaacctcatttaagtaaaaggttagcaaagcaaagtgcggt

SEQ ID NO: 18196 - DNA, 291 bp, Homo sapiens
tctagatgcatgctcgagcggccgccagtgtgatggatatctgcagaattcgcccttagcgtggtcgcggccgaggtactaatgatacagatatttaagttttgttgatttgtatgtagtttccccataagaggttttttgttttttttttttttgagacagagtttacttctcactgctcaggctggagtgctatggcatggtcttggctcactgtgacctctgcctcctggtttaaagcgattctcctgcctcagcctcccaagtagctgggattgcaggcacccacca

SEQ ID NO: 18197 - DNA, 411 bp, Homo sapiens
tgtatacgactcactatagggcgaattgggccctctagatgcatgctcgagcggccgccagtgtgatggatatctgcagaattcgcccttagcgtggtcgcggccgaggacgcggggattcctgaagctgacagcattcgggccgagatgtctcgctccgtggccttagctgtgctcgcgctactctctctttctggcctggaggctatccagggtacaacactctgcgtctggctgagccacaaagccagggaaatagccaggtgctactggatgcccctatccagttgtcaaagataacggagaactacgactgtggaaccaaacttccaggactgctaaagagggaacagtcctcgacagtgaatgcaaagaagttagagaaggccgaggctcgacttaaggcaaagc

SEQ ID NO: 18198 - DNA, 262 bp, Homo sapiens
  misc_feature 125: n = A,T,C or G
tgctcgagcggccgccagtgtgatggatatctgcagaattcgcccttaccgtggtcgcggccgaggtaccgtgcaccccgctcttaccctaagtccaactcttccaaggagtatgtgtgacctgngatctccttgccccagctgacaggctatgggggtgtctagatgtctgaaagggcctggggctgagctcagcctgtgggcagggtgccggacaaaggcctgctggtcactctgtccctgcactccatgtatagtcctc

SEQ ID NO: 18199 - DNA, 169 bp, Homo sapiens
gggcgaattgggccctctagatgcatgctcgagcggccgccagtgtgatggatatctgcagaattcgcccttagcgtggtcgcggccgaggtacaaggaagcctggttgaagtcttttccttgagaggcctggatttgttcacatattcagatttcaactggctttata

SEQ ID NO: 18200 - DNA, 434 bp, Homo sapiens
gggcgaattgggccctctacatgcatgctcgagcggccgccagtgtgatggatatctgcagaattcgcccttagcgtggtcgcggccgaggtactttttttttttttttttttttttgctttagagcatattatattttaatagttattaacataaatctttgatttgtcctgggttggggagatggggtataacattattagcaacatttacccaaaaacagtgaacacaagggttagtagttactatgacgttccatagtctcagattttcatgtatttgtgcggtttttgtttgtctgtttctatttcccactaggctgtgaatttcattaaagcaggataaatatatgtgtaaaatttctgagtacgtttggatacataaagaggatcctatcttcaaaactcaatagcaggtttttggggatagtgaga

SEQ ID NO: 18201 - DNA, 221 bp, Homo sapiens
ctactatagggcgaattgggccctctagatgcatgctcgagcggccgccagtgtgatggatatctgcagaattcgcccttagcgtggtcgcggccgaggtactttttttttttttttttttttttttttttttttctttgtttttttttttgctcctcgaatgacaatcagttttattgcatgagttatggggtccaaatgagttaatttgcttttttcac

SEQ ID NO: 18202 - DNA, 403 bp, Homo sapiens
  misc_feature 307: n = A,T,C or G
gactcactatagggcgaattgggccctctagatgcatgctcgagcggccgccagtgtgatggatatctgcagaattcgcccttagcgtggtcgcggccgaggtacacctgcaaggctgtcaacagtcttggagaagccacctgcacagcagagctcattgtggaaacatggaggaaggtgaaggggaaggggaagaggaagaagagtgaaacaaagccagagaaaagcagtttctaagtcatattaaaaggactatttctctaaaactcaaaaaaaaaaaaaaactcaagataataaaaacacctantgtgataaattatcggttaagtcatttgtgggttgattcttcaaaaacaacaattgatacctagcagcattattgatgggcattaatctattttaa

SEQ ID NO: 18203 - DNA, 454 bp, Homo sapiens
tactatagggcgaattgggccctctagatgcatgctcgagcggccgccagtgtgatggatatctgcagaattcgcccttagcgtggtcgcggccgaggtactttaatcggcacaccaatagacatcttggcaggaagagagttcggctctggcctacttttcttctcttcggtccgctgcgaaagatgctacggcgaaggcgtgagtcaagcgaatggcccccgcgtacctgcccgggcggccgctcgaaagggcgaattccagcacactggcggccgttactagtggatccgagctcggtaccaagcttggcgtaatcatggtcatagctgtttcctgtgtgaaattgttatccgttcacaattccacacaacatacgagccggaagcataaagtgttaagcctggggtgcctattgagtgagcttacttacattaattgcgttgcgctcact

SEQ ID NO: 18204 - DNA, 281 bp, Homo sapiens
atagggcgaatggggccctctagatgcatgctcgagcggccgccagtgtgatggatatctgcagaattcgccctttcgagcggccgcccgggcaggtacttatttttttttttttttttttttttctttttttttttttttttttttttttttttttttttttttttttttattttttttttaaaaaaaaaaaaaaaaaataaaaaaacctggggcgccccaaaaaccgggggggggagaaaaaaaaaaaaaaacccccttcctatttgggggggggaaaa

SEQ ID NO: 18205 - DNA, 391 bp, Homo sapiens
agggcgaattgggccctctagatgcatgctcgagcggccgccagtgtgatggatatctgcagaattcgccctttccagcggccgcccgggcaggtacgcgggaagccacttccggcgtagccatggcggctaacgctactaccaacccgtctcagctgttgccgctagagcttgtggacaaatgtataggatcaagaattcacatcgagatgaagagtgataaggaaattgttggtaccttggccgcgaccacgctaagggcgaattccacacactggcggccgttactagtggatccgagctcggtaccaagcttggcgtaatcatggtcatagctgtttcctgtgagaaattgttatcctgtcacagtttcacacaacatacgagccgg

SEQ ID NO: 18206 - DNA, 511 bp, Homo sapiens
acgactactatagggcgaattgggccctctagatgcatgctcgagcggccgccagtgtgatggatatctgcagaattcgccctttcgagcggccgcccgggcaggtaccctgaagggccagagtttcagctgctgttagtgatacagccatcctagtctgcactagctctgcagaaggctcataccagctggaatcttgcaagggccccagtagaggaagaagtcaaatatgctttgtctctgggtgggtggaggaacgatttctagtcttgtccggtgaagctcggctgttcgtttccattgccagggtgagggaggccacctgggggcatatgttgctttctatcttgcagctcacaggaccaggaggttccatcggggcgctgccgcgaatcgcgccacttacagccctcccccgcgtacctcggccgcgaccacgctaagggcgaattccagcacactggcggccgttactagtggatccgagctcggtaccaagcttggcgtaatc

SEQ ID NO: 18207 - DNA, 330 bp, Homo sapiens
  misc_feature 225, 292: n = A,T,C or G
ctatagggcgaattgggccctctagatgcatgctcgagcggccgccagtgtgatggatatctgcagaattcgcccttagcgtggtcgcggccgaggtacttttttttttttttttttaactgtgctatggagtagaagcaggaggttttcaacctaatacagagcacacctaccccctcctcctttccacaccttcaaactcttttacttgggctgaatatttantgtagttacatctcaactttaagggctcctgtggcaaattccccaattaaaaagttcccttgttttnaaaatacatgaaataaatcattaaagccactatcatcc

SEQ ID NO: 18208 - DNA, 478 bp, Homo sapiens
ccctctagatgcatgctcgagcggccgccagtgtgatggatatctgcagaattcgcccttagcgtgcgcccgggcaaggaccggaacacgcgctcagtggtctcatcattggggtaggtgtccaggaagatggctaagccgaggaagttatctttgcttccaaacacccgcgtacataaatgcagcattttggatttggtcatttatatcttcatcctcattaaaaagaaatgtgccactgaggctcacatagatgataactcccactgaccacatatatagggaacggttgtaacctttgctccagagaacttcacgggctaaggatgctggagttactaccacatatctcctgaatgacttttcaccaatgatgcgtgcaaatccaaagtcacacagcttcacctgaggaaatggctctgctgatgcaggcagcacattttctggctttaaatcacagtgcacaatattcttaaaa

SEQ ID NO: 18209 - DNA, 502 bp, Homo sapiens
gactcactatagggcgaattgggccctctagatgcatgctcgagcggccgccagtgtgatggatatctgcagaattcgcccttagcgtggtcgcggccgaggtactttctttagtgaagtgaatgtatggttttaaggacatacaaccaccggttgacgaggtccagccttgatattcagttgtccacacaacatcattccagctatggcatacctgttttcctgcattcgttaaggaacaagggtcttgatagggggagccttttatcttaaaggggcagagatacttctctgagtctgagagttacttttgactttggagatctccacagggtatgacaagacatgcattgaaggtaatagtttggggtgagcttgacctggttacattaataatgaggtggtcagccatagaatgaggaaagaagaaggagtaatataatagatgaaggagagttaaactttttcttaccgttagtttggtagggtattcccctgggat

SEQ ID NO: 18210 - DNA, 460 bp, Homo sapiens
agggcgaattgggccctctagatgcatgctcgagcggccgccagtgtgatggatatctgcagaattcgcccttagcgtggtcgcggccgaggtactgaagccagccacgctgcgcccggccctgccccgggccttcctcgtgcctgggaggtcgttctagggatgctcctgacctccgtctcttggacctaagatggaatgtgtccccagctcagggattgcctgaaccaagaggccaggagcccccatgggccgcccagtacctgcccgggcggccgctcgaaagggcgaattccagcacactggcggccgttactagtggatccgagctcggtaccaagcttggcgtaatcatggtcatagctgtttcctgtgtgaaattgttatccgctcacaattccacacaacatacgagccggaagcataaagtgtaaagcctggggtgcctaatgagtgagct

SEQ ID NO: 18211 - DNA, 461 bp, Homo sapiens
actatagggcgaattgggccctctagatgcatgctcgagcggccgccagtgtgatggatatctgcagaattcgcccttagcgtggtcgcggccgaggtactttttttttttttttttttttggaatcacaatgtttattgatagatacaagtatataaaatcagggcatgaacatgacttgataaattaagtagacttaatttcaatacttttataaggggggccaaattcaaatttttaccatttgtttcacacccacaaaaaccactttaagggcattaacgatctctcaaaactgatcagttttgtgcaagtaaaccatggtttttttaaaaagacttgtgcacttgcccaggctcaaggatattaaaatctagcacataaagcccattactagaggtagaaatacaggcaatattctattacggcaacaaccatcaatttacagttaagaatttttt

SEQ ID NO: 18212 - DNA, 654 bp, Homo sapiens
tatagggcgaattgggccctctagatgcatgctcgagcggccgccagtgtgatggatatctgcagaattcgccctttcgagcggccgcccgggcaggtactccaaagattcaggtttactcacgtcatccagcagagaatggaaagtcaaatttcctgaattgctatgtgtctgggtttcatccatccgacattgaagttgacttactgaagaatggagagagaattgaaaaagtggagcattcagacttgtctttcagcaaggactggtctttctatctcttgtacatgggccacggtgggaagccctgggtctccgacttcagtcaccctcattacctggctgggagaagagccatgaagacagtttttggtgttgagccagacttgaccagggaaggcggcagtattcccgtgaccttgacctttcaggaggccacgggcaagaacgtcatgctgctgcctgtggggtcagcggatgacggagtccactcccagaatgaaaagctcaacaggtataactacatagagggaaccaagatgctggccgcgtacctcggccgcgaccacgctaagggcgaattccagcacactggcggccgttactagtggatccgagctcggtaccaagcttggcgtaatcatggtcatagct

SEQ ID NO: 18213 - DNA, 523 bp, Homo sapiens
actatagggcgaattgtgccctctagatgcatgctcgagcggccgccagtgtgatggatatctgcagaattcgcccttagcgtggtcgcggccgaggtactttgtgctgataaagaaaactggacgttatttttggtataaattctttttctgtcttatgtccctgagaactcgtcaagtcttgagtgggccttgattttatcctattacacgtgggaacattagattacttaaggcaattatattttcctatacatttctgatgtttctccaaggtgtcacaagctgactctgaagatattgttgcattagggaagaagtgtgtcattgtaaatgaagcagttcttaatttatatgcaataaaatttttaaagcttatcttcctaaagcatatacacacgcaaaacacacccaatacactgtcatagcatacggaaatgtaaaagggttggaaatatagttgactgacatcaaaaagttaatattcctaaaacatcttattcattgataaatcatctttttt

SEQ ID NO: 18214 - DNA, 262 bp, Homo sapiens
  misc_feature 166: n = A,T,C or G
gggcgaattgggccctctagagcatgctcgagcggccgccagtgtgatggatatctgcaaaattcgcccttagcgtggtcgcggccgaggtacgcggggagacccttttccggctgacttctgagaaggttgcacaacaactgtgcccggcagtctagaggcgcangaagaggaaagccactcgcctgggccccggcatctctggaaccttgttctcgctcagggagctggaaactagcgtgcagccaggagaacatgtttt

SEQ ID NO: 18215 - DNA, 452 bp, Homo sapiens
actatagggcgaattgggccctctagatgcatgctcgagcggccgccagtgtgatggatatctgcagaattcgcccttagcgtggtcgcggccgaggtacacattcccagcttacactgccttcttgtttcagttctcaatactctcaacagtgttcttttcatggtctattaatgccacattttttgcattttgtgcttcttcttgatgatcgtgctgctcaaaaggagccccaagcatagtgctgaagtgccgtctagtgttcctaagtgcaagaaagctgttatgtgtctcacagagaaaatacatgtgttagataaactcagttcaggcatgggtttgaccgctattgaccataagtagattaaaaaaggtgtctttaaaacagaaacacatgagattatgtataggtcgttcagaaaaatgtgacatgagactcacaggaactaacc

SEQ ID NO: 18216 - DNA, 337 bp, Homo sapiens
aattgggccctctagatgcatgctcgagcggccgccagtgtgatggatatctgcagaattcgcccttggccgcccgggcaggtacagctcaaggcggccgaaaaatagtaaccttccagctgcgccattccagctcccacgagccactgcccaagaacctactcctggaaaattctgagcctggaaacccgagctggaaacttgggctcgaaatgccccgcgtacctcggccgcgaccacgctaagggcgaattccagcacactggcggccgttactagtggatccgagctcggtaccaagcttggcgtaatcatggtcatagctgtttcctgacaa

SEQ ID NO: 18217 - DNA, 424 bp, Homo sapiens
gactcactatagggcgaattgggccctctagatgcatgctcgagcggccgccagtgtgatggatatctgcagaattcgcccttagcgtggtcgcggccgaggtaccaccacgcctagataattttttgtatttttaatagagacagagtttcaccacgttggccaggccggtctcaaactcctgacctcaagtgatctgcctgcctgggcctcccaaagtgctgggactacaggcataagccagcacacctggccgttaaactagttattttaatcatgctacacaaagaagacatttctccaaaggaaatatataaagggaaacactgttgaaataaatggaaagctaaaagtctcagcatagaagctataaaaagaaacaagtggaaattgtagaactgaaaattcaataacaaaatttact

SEQ ID NO: 18218 - DNA, 514 bp, Homo sapiens
gcgaatggggccctctagatgcatgctcgagcggccgccagtgtgatggatatctgcagaattcgcccttagcgtggtcgcggccgaggtacgcgggatgtattttaattagattgtgtctaattagtttctatctaaagtgctatgtattaggataattaatatttaattatcttccttcatgaactgtagagcttcctatggagagcatttgtggtagccacgcaaatcctttagtaaatctttcattctctttattaaccttggaataatttgaaaggtttttgaattgggactatttctttttttttcaatccactcaacatttattaaattccttaataaatcatcggaggaaagcagtgatatttttgagaatattgcaattaattattgaggatgagaagaaatgtttgacttacgaatattatagataacttaagggcacttaaactttttttcccctatgtaagaaataagtgccttggaaaatacaaaaaaaaaaaaaaaaaaa

SEQ ID NO: 18219 - DNA, 353 bp, Homo sapiens
ggccctctagatgcatgctcgagcggccgccagtgtgatggatatctgcagaattcgcccttggccgcccgggcaggtacattctgtgctgctgtaacagaattgaaggctaggaagttcaatctcaagggactggcatctagtgagggccctcttgctacgtcatcccatggtggaaggcaaaagggcaaagagggggtgagctcatccttttatataagggaaccattcctgtgataatggcattaatccattcatgaaggaagagccctcctgtttgaaccacttcttaaaggtcacacctcagaacacattgcattcaggattaagtttccaacacgtgaactctgggg

SEQ ID NO: 18220 - DNA, 473 bp, Homo sapiens
ccctctagatgcatgctcgagcggccgccagtgtgatggatatctgcagaattcgccctttcgagcggccgcccgggcaggtacccacacgtgcacgcactgaggccattgttaaaggagctctttcctacctgtgtgagtcagagccctctgggtttggtggagcacacagtgcctgcccctctccagccagctccctggagtcgtgtgtcctggcggtgtccctgcaagaactggttctgccagcctgctcaattttggtcctgctgtttttgatgagccttttgtctgtttctccttccaccctgctggctgggcggatgcactcaacatcaccccttcctgggtggcatgtctctctctacctcatttgtagaaccaaagaacatctgagatgattctctaccctcatccacatctagccaagccagtgaccttgctctggtggcactgtgggagacaccacttgtctt

SEQ ID NO: 18221 - DNA, 352 bp, Homo sapiens
  misc_feature 275, 276, 277, 278, 279, 280, 281: n = A,T,C or G
ggccctctagatgcatgctcgagcggccgccagtgtgatggatatctgcagaattcgcccttagcgtggtcgcggccgaggtactgatttacgaagagaatgatcatgaagggcaaatggcggtgaagcaagaagagctggcttcaggctcagaagagaatgctgtgcctcttcctcatggtttgcggtgccctgcatgttcagagaaacttctctagtaatgaatgaactatagaaatgatccctgacaaaaaaaaaaaaaaaaaaaaaccccnnnnnnntttttttttttttttttttttggggggggggcccgcggttttttccccaaaaaaaaccccccccccctttt

SEQ ID NO: 18222 - DNA, 535 bp, Homo sapiens
cactatagggcgaattgggccctctagatgcatgctcgagcggccgccagtgtgatggatatctgcagaattcgcccttagcgtggtcgcggccgaggtacgcggggcgggagagaggccgagatggcagatgagattgccaaggctcaggtcgctcggcctggtggcgacacgatctttgggaagatcatccgcaaggaaataccagccaaaatcatttttgaggatgaccggtgccttgctttccatgacatttcccctcaagcaccaacacattttctggtgatacccaagaaacatatatcccagatttctgtggcagaagatgatgatgaaagtcttcttggacacttaatgattgttggcaagaaatgtgctgctgatctgggcctgaataagggttatcgaatggtggtgaatgaaggttcagatggtggacaggctggctatcacgttcatctccatgttcttggaggtcggcaaatgcattggcctcctggttaagcacgttttggggataattttctcttcttta

SEQ ID NO: 18223 - DNA, 521 bp, Homo sapiens
  misc_feature 122: n = A,T,C or G
gcgaattgcgccctctagatgctgctcgagcggccgccagtgtgatggatatctgcagaattcgcccttagcgtggtcgcggccgaggtacaaaataacatcttagataacatagatgagangttttcaagaatgtaaatgtaccttgaaagtttaaacactatttctcacaattggttaaacaatccattttttttcttctcttttcctctcatttattctcataccctaaaaaaaaataccttcaaatctctattaacccccaatacttaaaattaaattaacaagattttaccttaaaacagaaaacttatattatcttttcaaattatttaaaatttattccctcttataaaatataattttttccctacttcttatttataaatataaccatataacccacacccattataaaaaaaaaaccaacccaaccccattaaactaaaaaacctcatctaaaaaactaaaaatctcaaaaaaaaatttaaaataccccctttctccaataaaaaaaaaaa

SEQ ID NO: 18224 - DNA, 362 bp, Homo sapiens
  misc_feature 343: n = A,T,C or G
tggccctctagatgcatgctcgagcggccgccagtgtgatggatatctgcagaattcgccctttcgagcggccgcccgggcaggtacacctgaaaaaggcagaaaatgcctggaagccaagccaaaaacgagacagccaagccgatgatcccgaaacataaaacccaggagctttttaaaaaagttcgaagtatcttaaataaattgacaccacagatgttcaatcaactgatgaagcaagtgtcaggacttactgttgacacagaggagcggctgaaaggagttattgacctggtctttgagaaggctattgatgaacccagtttctctgtggcttacgcanacatgtgtcgatgtctagt

SEQ ID NO: 18225 - DNA, 210 bp, Homo sapiens
acgactcactatagggcgaattgggccctctagatgcatgctcgagcggccgccagtgtgatggatatctgcagaattcgccctttcgagcggccgcccgggcaggtactttttttttttttttttttttttttttttccacttttaaaatgtgcatttctttaatttttaaaaatatacccaggaaaagccatgtgttttacataggaa

SEQ ID NO: 18226 - DNA, 394 bp, Homo sapiens
gactcatatagggcgaattgggccctctagatgcatgctcgagcggccgccagtgtgatggatatctgcagaattcgccctttcgagcggccgcccgggcaggtacgcgggcaaaggatagatttttgcctgtttatggggaaatcacaaccagaaatattcaacttgagaagaaactaatgggcctagcaacttaatatagagcagactcacaccagaactacattccctggccccctgcctgtgtgcttctggccaggccttggttggcaagtctgacctgagaaaaggatctgcagaaaatcagactatgggatcactttgtttgtgcattgggaatgacattctttcccaccccaggaaaacctttgggactttcagagacattgtggct

SEQ ID NO: 18227 - DNA, 348 bp, Homo sapiens
actcactatagggcgaattgggccctctagatgcatgctcgagcggccgccagtgtgatggatatctgcagaattcgcccttagcgtggtcgcggccgacggactcagaatagaatatcctcgttgtttttctaaggaagagtttcactcttgttgcccatgctggagtgcaatggcaccatcttagctcactgcaaccttcctcccccgggtttgagagattctccttactcatcctcccaagtatctgggattacaagcacgccccaacacatctggccaatttttgtatttttaataaaaacagaatttccccactttagccactctattctctaaccccttact

SEQ ID NO: 18228 - DNA, 390 bp, Homo sapiens
ggccctctagatgcatgctcgagcggccgccagtgtgatggatatctgcagaattcgccctttcgagcggccgcccgggcaggtacatagtaggtatatcacattctactttgatgtttaactgtaagtataaaattaaatttctcttagatcggattttacctcttgtatacgagaaactacattcttagtttatttgggttctttatgaagtttcaaaccacatgccaactgtgatgcttgttttatttgaaacatttaggctgtgtccagtttgggaggtctacgttttcctgaatttctacacccttcccctagatatacctacacttttaaaaaatttgcttcattgcatcctggactcatgtatttatttactaccaacaactt

SEQ ID NO: 18229 - DNA, 465 bp, Homo sapiens
actactatagggcgaattgggccctctagatgcatgctcgagcggccgccagtgtgatggatatctgcagaattcgcccttagcgtggtcgcggccgaggtacagctgccttattctccaactccatgggctgctgcccaggctctgactcagttttgccctggaaatgtcctcttgctttcccttttagtaacttattcatcaaatcatctgtaaggctgactcccacatgcccaagccttaatttggctacattttcagccggcgtggcttctctattaaatggtaatggcttcaggttaacatcaagctggacctctaagtcagaagatcgggtatgaggcaaaatcatatggtgcttgacgtacagctggaaacgctgagtattcgaggaaataacattcggtattttattctaccagacagtttacctctggatacactacttgtggatgttgaacctaa

SEQ ID NO: 18230 - DNA, 522 bp, Homo sapiens
ctatatggcgaatggggccctctagatgcatgctcgagcggccgccagtgtgatggatatctgcagaattcgcccttgagcggccgcccgggcaggtacattatgatgctctctacctagtggcagctcttccaaaatagctgctttaaactctgattaaattatgaatatttggtttcatttatcaacaggccaagaggcctctggttatgaagtgctatatatatatatatgaccgactctcgctgtgctgcccacgctacattgcaccggctatatattggctgtcttcaatctccgccttgaaggatgacaagctattctcctgactcagcctccttagcagctgggaccacatacatatgtcaccacacggaggtaactttctgtattctgggtacagacggcgttagcaccatattgactgggctggtctgatactcctgacctcaagtgattcgcccacctagttattccaaagtgctgggattacatgcgtgagccaccacacttggcctacat

SEQ ID NO: 18231 - DNA, 474 bp, Homo sapiens
tacgactactatacggcgaatagggccctctagatgcatgctcgagcggccgccagtgtgatggatatctgcagaattcgcccttagcggccgcccgggcaggtacattgttactatcttttaccaacacccttgagtaaggtgggataggttgaagttagtggcatgataatacttcactgaatgcacaattggtcttaacatgttaaaaaaaaagtttaattaaaaaattaagttcacaataatctaaaattttttaaatgtgctgcattttattacataaaagtagttagtaaaatgatatactactaattttaatttaattttaactaaaataaaagatattttcactagaatgcagaatattcctctgaacactttcctcatacatcattcaatattataaattaaacacaaagagcctcttcacttagatttttatcatgcatcctacattgtaatgtctttactctt

SEQ ID NO: 18232 - DNA, 419 bp, Homo sapiens
ccctctagatgcatgctcgagcggccgccagtgtgatggatatctgcagaattcgcccttcgagcggccgcccgggcaggtactaggaaggttattgcacagctccttaactgatcggggtcagggcaagaaaggtctactttccccacagccaggctctgatttgcctcctgtgaagacaccatgcctagcacaggctgacggagcggctgcagtcgaaccttgccttcagattatgaaccagtataagtagcacaattctcgtggctactttcacttcaaaatgtcatgtttattgatgcggagctttctgaatagggaggttaacgcacacctgctgaataaacaaatatttcttgtgtagcgttctagattgaaggccgcagtcaatgggtaaaataaactttaggagcatgttc

SEQ ID NO: 18233 - DNA, 445 bp, Homo sapiens
actactatagggcgaattgggccctctagatgcatgctcgagcggccgccagtgtgatggatatctgcagaattcgcccttagcgtggtcgcggccgaggtacggaagcgtgtggtctgcaagcgtggggtctgcgtcactgttcgcggagtttggtatcagaagttcccgggtgctgccttcagtgctgccgaatcacgtggaacgcatgaagaaagcagtgtcactgataaatgcaatagatacaggaagatttccacggttgctcactcggattcttcaaaaacttcacctgaaggctgagagcagtttcagtgaagaagaggaagaaaaacttcaagcggcattttctctagagaaacaagatcttcacctagttcttgaaacaatatcatttattttagaacaggcagtgtatcacaatgtgaagcccgcagctttgcat

SEQ ID NO: 18234 - DNA, 100 bp, Homo sapiens
cactactatgggcgaattgggccctctagatgcatgctcgagcggccgccagtgtgatggatatctgcagaattcgcccttagcggccgcccggccaggt

SEQ ID NO: 18235 - DNA, 465 bp, Homo sapiens
agggcgaattgggccctctagatgcatgctcgagcggccgccagtgtgatggatatctgcagaattcgcccttagcgtggtcgcggccgaggtactttttttttttttttttttttttttttttcagggttttggtaatttattcacagttcaggcttactcactggacttaacgacatgaggaagaaatgaccaactggctcaataaactaaacattcattttaaaaatcacaaaactgaaacaaagcaaagatgatcctaaaatttccacttctcaagaaggggaatttaaacaaataccaaaagctttatttaagcaaaaacacattcaaccacagaacattcagaaagctaacaggatcatttcttcattcattctgcaaacagtgttttaagaaagggaatttgggaattttcaaagatgttctcgctagccattttttatggtaattacattacatttt

SEQ ID NO: 18236 - DNA, 592 bp, Homo sapiens
ctatagggcgaattgtgccctctagatgcatgctcgagcggccgccagtgtgatggatatctgcagaattcgcccttagcgtggtcgcggccgaggtacaaccaacactatctccctgataacatccaaccattaattaaaatcaacctcaaaaatctgaaaacgttggcacaccataattactaagctaaaattactatatttctcagtttacaggaaaacaagtaaacatttactttctgcttttggacaaacagattaaattatttttaagaatgttcttgcctccatatgactcagcttactgtgggatgcagaacacctaagtgaggaggaccaagggctctagacctgcctaaaaacccaacctgcaccactccctgctaccagcagggtcctgaatgggccacctgggtatctcctccaggctcacattcttgacaccagataccatgtacgcggggaggcattgaagcagccagcgcatgggcttctgctgaaggggcaggcggagcttgaggaaaccgcaaataagtttttttctttttgaaagatagagaataatacaactactttaaaaatatagtcaata

SEQ ID NO: 18237 - DNA, 496 bp, Homo sapiens
tacgactactatagggcgaattgggccctctagatgcatgctcgagcggccgccagtgtgatggatatctgcagaattcgcccttagcgtggtcgcggccgaggtacaatggacatccaataaaacaggtagatgtcttgggaactgtcattggagtgagagaaagagatgctttctacagttatggagtggatgacagcactggagttataaactgcatctgctgaaaaaagttgaatactgagtctgtatcagctgctccaagtgcagcaagagagctcagcttaacctcacaacttaagaagctacaagagaccattgagcagaaaacaaagatagagatcggggacacgatccgagtcagaggcagtatccgcacatacagagaagagcgagagattcatgccaccgcttactataaagtggacgacccagtgtggaacattcaaattgcaaggatgcttgagctgcccactatctacaggaaagtttatga

SEQ ID NO: 18238 - DNA, 463 bp, Homo sapiens
atagggcgaattgggccctctagatgcatgctcgagcggccgccagtgtgatggatatctgcagaattcgccctttcgagcggccgcccgggcaggtactttattttttttttttttttttttttttctttttttttttttttttttttttttttattttttaattattttttataattttttttttttttttgggaatttaacaaaaatttattaaaaaaaattttttattttttaaaaaaaaaaattgccttaattaaaaaaaaattttttatttacacccatcccagattttcaaaaaaaaattaaaataaaaaggtttaattttaaaaaggtaataaaaaaaaaatgaaaaaaaaaactcttgggttttggaaaaaaaaaaaaaaatacttaaaacccttgggatccttggattgatggaaaataataagggaacacatttttttttttttaaaaaaaa

SEQ ID NO: 18239 - DNA, 249 bp, Homo sapiens
acactacttagggcgaattgggccctctagatgcatgctcgagcggccgccagtgtgatggatatctgcagaattcgcccttgagcggccgcccgggcaggtactgtcacctgtggccttggctataaggaggagaccgtctgtgaggtgggccctgatggagtgagaaggaaatgtcagactcagcgcttagaatgtctgaccaactggatctgtgggatgctccatttcaccattcccattggcaag

SEQ ID NO: 18240 - DNA, 350 bp, Homo sapiens
  misc_feature 322: n = A,T,C or G
tatatggcgaattgggccctctagatgcatgctcgagcggccgccagtgtgatggatatctgcagaattcgccctttcgagcggccgcccgggcaggtacttttttttttttttttttttttttttttttaaattttttttttttttttttttttttttttttttttttttttttttttttttttttttttattttttttttttttttttaaaaaattttttttttttattaataaaatttatttttttttttttattttatttaaaaataagagagggataaaatttttttttttggaaaaaacaaaaaaaaaaaaaaaanaagtattggttttttttttaaaaaaaaa

SEQ ID NO: 18241 - DNA, 448 bp, Homo sapiens
gccctctagatgcatgctcgagcggccgccagtgtgatggatatctgcagaattcgccctttcgagcggccgcccgggcaggtacttttttttttttttttttttttggggtttttttttttttttttttttttttttttttttttttattttttttttttttgccccccccccacaaaatttttttaatttttaaaaaggggggccttttaaaaaaaaaaatttttttaaaaaaaaaggggggggggaaatttttttaaaaaaaaaaatcccccccgggggggcccgaaagcccaaaaaaaaaaaaaaaacccccccccccccacaaaaaaaaaaaggggggggtttttttttttttttttttttaaaaaaaaaaaaggcgcccttttcttcttttttttggaaaaaaaaaaaaacccttggggggggggggagacccccttttttt

SEQ ID NO: 18242 - DNA, 652 bp, Homo sapiens
  misc_feature 535: n = A,T,C or G
agggcgaattgggccctctagatgcatgctcgagcggccgccagtgtgatggatatctgcagaattcgcccttagcgtggtcgcggccgaggtactatgacaaacgtgctttattcttctaacgcagtaagaattaggtggaattttttccttcaaccaagtgcaagaaagccctgtgtgtcttggtttagttatggtttcatttctagccatacaattgatgaattgtgtacttactgagctatagcatagctgcttagttgtttttgagattttttagtcaacacataatggaaacttctttcttctaaaagttgccagtgccacttttaagaagtgaatcactatatgtgatgtaaaagttattacactaaacaggataaacttttgactccccttttgttcatttgtggattaagtggtataatacttaattttggcatttgactcttaagattatgtaacctagctactttgggatggtcttagaatatttttctgataacttgttccttttcctgactcctccttgcanacaaaatgatagttgacactttatcctgatttttttcttctttttgggttatgtctattctaattaaatatgtataaataaagttacattttagtctgtctaaaagaaaaaaaaaaa

SEQ ID NO: 18243 - DNA, 545 bp, Homo sapiens
cgactcactatagggcgaattgggccctctagatgcatgctcgagcggccgccagtgtgatggatatctgcagaattcgcccttagcggccgcccgggcaggtacatgtgcatatacaggtttaacacaggtctgatcctaggtgttcatttagaacatagtttccagctgtaagaaaatttaaaaccctcattgtaagtgtattactagtaataggaacttgcttgctgctcccctgtatattatatttgctccttcaaatgataaaaggttttgtagctaccatggttcagcagaaaacttcaacacaagtatattacataaaatactatcactctgtctcacaaaaagactcaaaaagtaaaaaaaaaaaaaaaaaaaagtacctcggccgcgaccacgctaagggcgaattccagcacactggcggccgttactagtggatccgagctcggtaccaagcttggcgtaatcatggtcatagctgtttcctgtgtgaaattgttatccgctcacaattccacacaacatacgagccggaagca

SEQ ID NO: 18244 - DNA, 413 bp, Homo sapiens
tgtaatacgactcactatagggcgaattgggccctctagatgcatgctcgagcggccgccagtgtgatggatatctgcagaattcgccctttcgagcggccgcccgggcaggtacctggggagctgagaggggggttgcaaattggagtggtgtggatccaggtgaggttcatagctggccattgtgtgaggtgccaaggctgctttggttttaaagctagatgtcctagctgcgtctggtccatcttttccataggagatgcaggagaggaagcagctgaatcactgtggtggcttggaaaatgcttggtcagccgatgcttgccaccacccaatgatgacttctgggcagctatttgtggaaaccaagtctttaacatcccttctacctgtagcaaggttcctaggtaaca

SEQ ID NO: 18245 - DNA, 522 bp, Homo sapiens
  misc_feature 411, 412: n = A,T,C or G
ggggccctctagatgcatgctcgagcggccgccagtgtgatggatatctgcagaattcgcccttggccgcccgggcaggtacgcggggacacagaggccaggccttagcacggctcagccatgagcaacaggagtagcttttcccggctcacctggttcaggaagcagaggaaagctgtggtcagcaccagcgacaagaagatgcccaacggaatcttggaggagcaagagcagcaaagggtgatgctgctcagcaggtcaccctcagggcccaagaagtattttcccatccccgtggagcacctggaggaggagatccgtatcagatccgccgacgactgcaagcagtttcgggaggagttcaactcattgccatctggacacatacaaggaacttttgaactggcaaannaaaaaaaaaaaaaaaaaaaggtttttttggggggaacccctttggggggaattcccccccctggggggggttttttgggggtaccagcctgggccccaaggggggggaaa

SEQ ID NO: 18246 - DNA, 479 bp, Homo sapiens
ccctctagatgcatgctcgagcggccgccagtgtgatggatatctgcagaattcgccctttcgagcggccgcccgggcaggtacggaggcgtcttacagctctcttgttctcactgatgtccttcttatgcttgcgcttaaactcagcaataaaatggttgaccattcggttgtcaaaatcttctccacccaagtgggtgtctccagctgtagacttgacctcaaagattccatcctcaatagtgaggattgacacatcaaaagtgccacctcccaggtcaaagatgagcacgtttctttctgctccaacctttttgtctaagccgtaagcaatagcagcagcagttggctcattaataattctaagtacaaccatatccagttgtctagtaatttaatgcctggctgtgactactcactttttaaggatggtattgagcctatgtgggaagatgagaaaaacaaacggcgaggacgat

SEQ ID NO: 18247 - DNA, 658 bp, Homo sapiens
acgactcactatagggcgaattgggccctctagatgcatgctcgagcggccgccagtgtgatggatatctgcagaattcgcccttagcggccgcccgggcaggtaccccgcaaacacatacacctactacgcacccatagagataaaaaaaaaacttaccatgggacaaattggcatcataagctgcctgacatgatgcattgagaactacacattacctaggtaggatttttccaaaaaacgttaaactttgtgtaatccaaatccaaatagagggtcattctcaggtcaaagtttggagaggactattccacctcctagatcacactttccttcccgaaagccgcttctctctccggcctctcccctcctcctccctcatctgtttggcgggaggcttcctcacattgccgctccgcgtaagtccccgcgtacctcggccgcgaccacgctaagggcgaattccagcacactggcggccgttactagtggatccgagctcgggaccaagcttggcgtaatcatggtcatagctgtttcctgtgtgaaattgttatccgctcacaattccacacaacatacgagccggaagcataaagtgtaaagcctggggtgcctaatgagtgagctaactcacattaattgcgttgcgctcact

SEQ ID NO: 18248 - DNA, 189 bp, Homo sapiens
gtaatacgactcactataggcgaattgggccctctagatgcatgctcgagcggccgccagtgtgatggatatctgcagaattcgcccttagcgtggtcgcggccgaggtacactttaaccagctagggtttttgtctggatctttaaagtatattgataaaaatgcacatacacatttatttttctttt

SEQ ID NO: 18249 - DNA, 205 bp, Homo sapiens
ggcgaattgggccctctagatgcatgctcgagcggccgccagtgtgatggatatctgcagaattcgcccttagcgtggtcgcggccgaggtactttttctcttttttgttgatcaatctgtatcagaaaatatatttgagctagaatgacttcttatttgagagatacgcaatatagcataacagttatatatgtacgaccttgg

SEQ ID NO: 18250 - DNA, 290 bp, Homo sapiens
ggcgaattgggccctctagatgcatgctcgagcggccgccagtgtgatggatatctgcagaattcgccctttcgagcggccgccccggcaggtacgcggggctttttcgcatcgggtttgccgccagaacacagcgtgtctgagaaaactacccctaaaagccaaaatgggaaaggaaaagactcatatcaacattgtcgtcattggacacgtaagattcgggcaagttcaccactactggccatctgatctattaatgcagggggctcgacaaagaaccattgaaaaat

SEQ ID NO: 18251 - DNA, 563 bp, Homo sapiens
tatagggcgaattgggccctctagatgcatgctcgagcggccgccagtgtgatggatatctgcagaattcgcccttagcgtggtcgcggccgacgtgcgcgggtgctaatttcattatcaatggggatgctaaaatacacttggaaactatttctctgaattccaagagctgaaatcttagatttgatgtagtattacgcgaacaactaccaaaatagtaaacattgctgaagcccattcaataatggagtgctcttcgggtgctgaatttaagcgggcattttaaggttctgtggctcctcggccacaatgggtgatgtcactgatagaacgaagctgagtttccaagggtttggggctgtgcaagagtaaacactagagcttgagttgttatccagctggcaagcacggaagtctttgaagaatgtaatgtaaaaagggaaaagaatgtaaagctttttgtacctcggccgcgaccacgctaagggcgaattccagcacactggcggccgttactagtggatccgagctcggtaccaagcttggcgtaatcatggtcatag

SEQ ID NO: 18252 - DNA, 462 bp, Homo sapiens
agggcgaattgggccctctagatgcatgctcgagcggccgccagtgtgatggatatctgcagaattcgcccttagcgtggtcgcggccgaggtaccctgcgctggctccgtgaaccttagggacaacaccgggacacccgcgaggccggaaaatggactcagtggcttttgaggatgtgtctgtgagcttcagccaggaggagtgggctctgctggctcctttccagaagaaactctacagagatgtgatgcaggaaacattcaagaacctggcatctataggggaaaaatgggaagacccgaatgttgaagatcaacacaaaaaccaaggacgaaatctaagaagccatacgggagagagactctgtgaaggtaaagaaggtagtcaatgtgcagaaaacttcaatcccaatctcagtgtgacgaagaagactgccggagttaaaccatatgagtgtacct

SEQ ID NO: 18253 - DNA, 442 bp, Homo sapiens
gtaatacgactcactatagggcgaattgggccctctagatgcatgctcgagcggccgccagtgtgatggatatctgcagaattcgcccttcgagcggccgcccgggcaggtactttttttttttttttttttttttttcgtttggggcacttttatttacagccaaggaaaaaagaaaactagcatctatttagaatgggaaagcatgtttgtatgaaaacaaatatttcatcatcacttattttctatactgtttgcaactaagttttacatttttcattttcaacagagatttgaattttaatgtcccagaaatataaagaagatggcattaaaatgtcctatatgttggcagtcctaccctgaagactttttttgcttatcttttgttctgagctacagtcttcgcagagactaaattagtgactggacaacagaagaa

SEQ ID NO: 18254 - DNA, 388 bp, Homo sapiens
acgactcactatagggcgaattgggccctctagatgcatgctcgagcggccgccagtgtgatggatatctgcagaattcgcccttagcggccgcccgggcaggtgagaggcagaaggactggaaagagggcacagtgaagggccatggtgggggataccaggcaacactggcaagcaagtggacagtgatgagtgaggaggtagaggaaggtcccctcttagctgggacattatgcctctataggacgctgaacaaagtaacctgcggaggtgttactttgtgggaatgtagactgtgaaactgaaggaactgttttatccacctccccgtagtttgctctgtgctgaggctgctgtacctcggccgcgaccacgctaagggcgaatt

SEQ ID NO: 18255 - DNA, 552 bp, Homo sapiens
ctactatagggcgaattgggccctctagatgcatgctcgagcggccgccagtgtgatggatatctgcagaattcgcccttagcgtggtcgcggccgaggtacgcgggagacttcgggcttgttcgctggtggcgtcggagccgagccggactggtcaggatgatcacggacgtgcagctcgccatcttcgccaacatgctgggcgtgtcgctcttcttgcttgtcgttctctatcactacgtggccgtcaacaatcccaagaagcaggaatgaaagtggcgctttctccgccccagggttccaggacatagtctgaggcaagatggagggtatgaggggccttcacacttcacttcatcccttctacccattacaacatacaaagcagctacacctggatttttccaacaacctttaatttctcagagtcttccttaatcctatggaacaagaagctgccactgaataaggcccagtataggggcttgcttttctactccctccccccaatataaaaatttagactttcaaaaaaaaaaaaaaaaaaaaaag

SEQ ID NO: 18256 - DNA, 464 bp, Homo sapiens
cactacttagggcgaattgggccctctagatgcatgctcgagcggccgccagtgtgatggatatctgcagaattcgcccttggccgcccgggcaggtacgcgggaaggttggcagagtcagcatatatgattccaaaaggcaatccgggaaggctaaggagacaagcgtcaactggtgtctggctgatggctatgacctggagatcctggacggtacctcggccgcgaccacgcttagggcgaattccagcacactggcggccgttactagtggatccgagctcggtaccaagcttggcgtaatcatggtcatagctgtttcctgtgtgaaattgttatccgctcacaattccacacaacatacgagccggaagcataaagtgtaaagcctggggtgcctaatgagtgagctaactcacattaattgcgttgcgctcactgcccgctttccagtcgggaaacct

SEQ ID NO: 18257 - DNA, 595 bp, Homo sapiens
ggcgaatggggccctctagatgcatgctcgagcggccgccagtgtgatggatatctgcagaattcgcccttagcgtggtcgcggccgaggtactgaaaaccacttccagagtctaaagcagctcagatgttatctctgggggaattagtgttcccctcatttagcaacctccataccacaaggtctctgtctgtagttactgggattatccagatacactatcaatgatacaaattcataggagtattaatgcatttctttaaacacaacttgattaagaagcaaatatgttaagcagttttctttttctgctgctaaattacagttagacacttcagtatcttctctttacatgtgtatataaattagtaagaacctgcatccaaagcaatgtagtgtgtgtatgtatctatatatatttattctaactcagcacttcagaagcctttttgagttacaacaatattttagtttgcctcatctgtagaggtaaaatttctatattaccaagctccagaggaatatgatattttacaggcacaattttctggccgtagtccctggggcattcatttgctggcctccatgggatgct

SEQ ID NO: 18258 - DNA, 401 bp, Homo sapiens
cactactatagggcgaattgggccctctagatgcatgctcgagcggccgccagtgtgatggatatctgcagaattcgcccttagcgtggtcgcggccgaggtactttttttttttttttttttttttttttttcttttttttttttttttttttttttttttttttttttttttttttttttttttttttcccaacaaggaaatttacttctaaaaaaggggccccccctccttaaatcattaccccgggacccccctgaacaaaggaaggaaaaggtttttatccctaacacaacccctacctttgtgtcccccccccaggggctggggttggccccctcatttaaaattccccccatgggctatttgaaaatcccttcccaaaaaaggaagggaagggg

SEQ ID NO: 18259 - DNA, 383 bp, Homo sapiens
gggcgaattgggccctctagatgcatgctcgagcggccgccagtgtgatggatatctgcagaattcgcccttagcgtggtcgcggccgaggtaccatgttttataaacctcttgatttccagcaacatactatagaaaacacctgctactcaaaacacaacttctcagtgtcatccattgctgtcgcggggagacaacatatcaatatctggtatgttgcaagctctcaagatagcctgaacttaaaaagttggtgcattagttgtatctgatggatataaatttgcctcctagttcactttgtgtcaagagctaaaactgtgaacctaactttctcttattggtgggtaataactgaaaataaagatttatttttatgctca

SEQ ID NO: 18260 - DNA, 425 bp, Homo sapiens
ctactatagggcgaattgggccctctagatgcatgctcgagcggccgccagtgtgatggatatctgcagaattcgcccttagcgtggtcgcggccgaggtaccttaggatagaacatgggcttagaacacctgtaagcctgttttaaagatggcccagcaaactggttgtcatgtccttgggagctggaccttgtaaccatttggcagtagtttctcttggtctccaccatcacaacagtggccctggttcagggttcaattcccggcttagggaatgatacttaatcttctgtctgtctaagtatttctatgtattatgtgtgtgtaacataaaagaactttaattaattgggttaaaaaataataagagcttaaatcaaacattttgtcacaaaaataaaaagtataatgccttttagttcac

SEQ ID NO: 18261 - DNA, 483 bp, Homo sapiens
  misc_feature 16: n = A,T,C or G
ctatatggcgaatggngccctctagatgcatgctcgagcggccgccagtgtgatggatatctgcagaattcgcccttagcgtggtcgcggccgaggtacaggtttttatgtgaacatacattttcattttctgggataaatgctcaaaagggcaactgttgggttgtatggtaaacacatatatttttgtaagaaactaccctactctttttccagagtggctctactttttacatacagccactcatacaattcagacagcaatgtatgattgatccagtttcttcacatcctcaccagcatttggtattactactattttttatcttaaccattcacatagatgtgtgtaatgataccacatgtggttttaatttgcatttccaatggctaatgatgttgagtatctttttgtgtgctaatttgccatctatgtatcctcttcggtgaaatgtcttcatgtcttttgtctattttctattt

SEQ ID NO: 18262 - DNA, 403 bp, Homo sapiens
tgcatgctcgagcggccgccagtgtgatggatatctgcagaattcgcccttagcgtggtcgcggccgttgtaccatttgcctcccgggctcaagcgattctcctgcctcagcctcccaagtagctgggattacaggcacctgccatcatgcccggtaatttttgtaattttagtagagacagggtttcaccatgttgcccaggctggtttcgaactcctgacctcaggtgatccacccgcctcggcctcccaaagtgctgggattacaggcttgagcccccgcgcccagccatcaaaatgctttttatttctgcatatgttgaatacttcttacaatttaaaagaatgatctggtttgaaggcaaaaatggcaaatcttgaaaattaagaaaggcaaaaaatg

SEQ ID NO: 18263 - DNA, 230 bp, Homo sapiens
attgggccctttagatgcatgctcgagcggccgccagtgtgatggatatctgcagaattcgccctttcgagcggccgcccgggcaggtacgcggggctcttcgttaagtcggccttcccaacatggcgcagtctattaacatcacggagctgaatctgccgcagctagaaatgctcaagaaccagctggaccagatgtatgtccctgggaaagctgcatgatgtggaaac

SEQ ID NO: 18264 - DNA, 687 bp, Homo sapiens
gcgaatggggccctctagatgcatgctcgagcggccgccagtgtgatggatatctgcagaattcgccctttcgagcggccgcccgggcaggtactgaattaaaaatacagaacctactaacactactgtattaacaagctgactcctataatcttttggagatggcagatgatactggtttttaaaatacccaatcacatatatgcattcaagaaaatattttgtctttatttttattacaagtgcgctagctcccatttcctcagtgctctttagcaatgagtttttatgttaaacacttccaactgtcagtattaccatgaaatcaacattagaaaataaggtagaaaactgagtgttttgcttaaaaaataaaaaaggattaaatagctgttgtatccaaacatcacgttctgcttccatctctacattccactttccccattcttggagattaaaaaaacagggttaggaactttaatatctgacagactacaaagggcaaagacgtggcacatggccagtgccacacctacctggttgccacaacattctgaaacagaccacactttcaggaaaatgactaagtacctcggccgcgaccacgctaagggcgaattccagcacactggcggccgttactagtggatccgagctcggtaccaagcttggcgtaatcatggtcat

SEQ ID NO: 18265 - DNA, 386 bp, Homo sapiens
  misc_feature 62: n = A,T,C or G
tatagggcgtattgggccctctagatgcatgctcgagcggccgccagtgtgatggatatctngcagattcgcccttagcgtggtcgcggccgaggtacttttttttttttttttttttttttttttttattttttttttttttttttttttttttttttttttttttttttttttttttttttttttttttttttttttttttttttaaaaatttttaaaaaatttttttttttaaaaaaaaaggggggccggaaaaattttttttttttaaaatttttcccccgccaaaacccttttttttttggcccgggggaaataattcccctttaaaaagttttttttcaccaacctaggtttttttttttttggggggaaataatttttt

SEQ ID NO: 18266 - DNA, 448 bp, Homo sapiens
ctatagggcgaattgggccctctagatgcatgctcgagcggccgccagtgtgatggatatctgcagaattcgccctttcgagcggccgcccgggcaggtacacttcaccacaaatacagagaagcttcaaaaactgaagctcgaatatgagactcaaattaagaagatgctatgctcaaaagatagcctgggactaaaagaggaactgacagatgaagacagagaaaaggttgcagtgcacgaggggattaactcaggaacagccatgtcaagaggattgtatcaaccagcaacaatctttatgggccgccaaatgtcagccatcttaagcatgagagatttcagtacctcggccgcgaccacgctaagggcgaattccagcacactggcggccgttactagtggatccgagctcggtaccaagcttggcgtaatcatggtcatagct

SEQ ID NO: 18267 - DNA, 484 bp, Homo sapiens
ccctctagatgcatgctcgagcggccgccagtgtgatggatatctgcagaattcgccctttcgagcggccgcccgggcaggtacgcgggggaggcgtcagtgtgaagggaaggctaaggacgcatcggtgctggagagttgagaatatgccttcccctccacccccaacccagtcaccttatttgaaaaaaaattaaaaaacaccttttatttaaaaacctaaccctggaagtttgctcgctgcctgaaaatcatatgcgtggtttttcctgtttcctgctctgtagctgacatcaggggagcaacgtgaacgcaggaaaatggaaatcaacatttgaaacttttaaatggaagctttattggggttccacatatggaaaactgcaaatagcagaagtatgtgactcaataaattattctggagtgaccacatcctcttaactgcctcccaggacaagacggagaatgtgaacaatgctcctga

SEQ ID NO: 18268 - DNA, 525 bp, Homo sapiens
atagggcgaatggggccctctagatgcatgctcgagcggccgccagtgtgatggatatctgcagaattcgcccttagcgtggtcgcggccgaggaactattattttctatgctttgaggagataacattgaatttttcaaacaaattaaatagaccttggcctcaaagagcttcacattctactatagaaggcacacatggagaagattataatacaatgttgtaaatccaatagtatagataaccagtttattttggggagcaaagagaaagggtccctaaccccacactgcctgcgaagaggtgaaatggaattgaatgggattatggtcagccaaggcttcctagtggagctgctacctgaactgagttttaagaggggtaggaaagaaaaaatgtagtgggtcataatggcattccaaatacaggggacacaaacagctctgtgtttatgaactacaaccagttgttgacttttgtttcaagtggctccccttccccaatgctgggtggacgatggactga

SEQ ID NO: 18269 - DNA, 481 bp, Homo sapiens
ccctctagatgcatgctcgagcggccgccagtgtgatggatatctgcagaattcgcccttagcgtggtcgcggccgaggtacttttttttttttttttttttttttttttttccccttttttttttttttttttggttttttttttttttttttcccaaaaattgggggggaaaaaaagggggggggaaaaaaaaaaaaaaccccccaaaaaaaaaaaaaaaaaccctggggaaaaaaaaaaccccccagggaaaaaaaaaaaaaaaaggggggctccttcttttcaccgggtttttgagggaaaaaaaatcccccttttggggcccccaaaatttttaaaaaaaaaaaaaaaaaacgggggggttttaaaacccccgggaggaaacccttgggggcacccttttggggggcccccttttttttattttgggcccctgggggccccaaaaaacccaaaaaaagaagggggggaaaaaaaaa

SEQ ID NO: 18270 - DNA, 489 bp, Homo sapiens
ggcgaattgtgccctctagatgcatgctcgagcggccgccagtgtgatggatatctgcagaattcgcccttagcgtggtcgcggccgaggtacagaggggaaataatgaatagtattaaagaaacattctcgtcttcctttacctttaatcccctaatacctagtctactttttaaattttcagacttcactgctttttgaattcataattctaattttcacattattgttaatggaaaatcatatctaataaaggttttagttattcccatgcacagtatgaaaattctcatttgctgaggttttgtttcgagaaaatgtattggcatgtctttgagaacatgttttattgtctcctgtgtcatataatccaaactaatctccgtttacaagactttaacttgaaattagaccttataattaaactatttaaatagtgttcaaatgatagtttctaatgcatcaaatatatacctcaagtttcatgat

SEQ ID NO: 18271 - DNA, 640 bp, Homo sapiens
tatatggcgaattgggccctctagatgcatgctcgagcggccgccagtgtgatggatatctgcagaattcgcccttagcgtggtcgcggccgaggtactgctcggaggttgggttctgctccgaggtcgccccaaccgaaatttttaatgcaggtttggtagtttaggacctgtgggtttgttaggtaccctaaaacctagtatctttttctcttctatggaaaatccgaaggtctaaacttgacttttttgaggtcttctcaacttgactacagttgtgctcataattgtccttgcctttccagcttaattattttaaggaacaaatgaaaactctgggctgggtggagtggctcatacctgtaatcccagcactttgggaggctacggtgggcagatcatctgaggccaggagttcgagacctgcctggccaacatggcaacaccccgtctctaataaaaatataaaaattagcctggcatggtagcatgcgcctatagtcccagctgctcaggaggctgaggcatgagaatcgcttgaacctaggaggtggaggttgcattcaactgagatcataccacttcattccagcctgggtgacagagcaagactctgtctcaaaaaaaaaaaaaaagggga

SEQ ID NO: 18272 - DNA, 365 bp, Homo sapiens
ggccctctagatgcatgctcgagcggccgccagtgtgatggatatctgcagaattcgcccttagcgtggtcgcggccgaggtactttgggcttcatcatggaggactacctgcagggttgtcgagctgctctgcaggagtcccgacctctacatgttgtgctgggaaatgaagcccgtgatttggactccacagtgtctgctcttgccctggctttttacctagcaaagacaactgaggctgaggaagtctttgtgccagttttaaatataaaacgttctgaactacctctgcgaggtgacattgtcttctttcttcagaaggttcatattccagagagtatcttgatttttcgggatgagattg

SEQ ID NO: 18273 - DNA, 326 bp, Homo sapiens
cctctagatgcatgctcgagcgcacgccagtgtgatggatatctgcagaattcgcccttcggccgcccgggcaggtacttttttttttttttttttttttttttggggttttactgctaatcactctggggaaaacagaggcaggttggggagggataacaagtaacaaacatgggggagtgttaatgtccctgggtcatggcttcctgagggtttccctttaatttctaaggtgggacctcaaatctcttcttcagaccaaggaggccctttccattgagaaggtcactccttccaccccttagatctataaccaaatttggggc

SEQ ID NO: 18274 - DNA, 491 bp, Homo sapiens
atatggcgaatggggccctctagatgcatgctcgagcggccgccagtgtgatggatatctgcagaattcgcccttagcgtggtcgcggccgaggtacaggcaaccatcacagatgtccatcaaagctggattagatgaagacaaacaacgcaggctttgaggataaactgaaggtgcagctcaaaagtttccttttcttatccaagggcattataggaccattgtcttcctccctcatgaagacagacttgttcctgtcctctttggctactgaaatgcagctctaatgactctgtcactaagaggttgagtgggccgaaagttgtctcccaaaatcccatcacagccttccacaagttctgcccccttaacatgtgtccccagccttcgaaattcttctatagaaataaccggcatccccactttacgtccagactttccattctccacacctgtagctgggatatagttaaagggtatcggaataatat

SEQ ID NO: 18275 - DNA, 535 bp, Homo sapiens
cactatagggcgaattgagccctctagatgcatgctcgagcggccgccagtgtgatggatatctgcagaattcgccctttcgagcggccgcccgggcaggtacgacctggacggaaatggctatatcagcaaggcagagatgctagagatcgtgcaggcaatctataagatggtttcctctgtaatgaaaatgcctgaagatgagtcaaccccagagaaaagaacagaaaagatcttccgccagatggacaccaatagagacggaaaactctccctggaagagttcatccgaggagccaaaagcgacccgtccattgtgcgcctcctgcagtgcgacccgagcagtgccggccagttctgagccctgcgcccaccaatcgaattgtagagctgcttgtgttcccttttgattcttctttttaacaatttttttttttttgccaaacaatatcaatggtgatgccgtccactgtgcggtctgatgcgccttccttccggacgccttcagcttcttttgtcgtggatgcttcgtggg

SEQ ID NO: 18276 - DNA, 381 bp, Homo sapiens
acatatagtggcgaatggggccctctagatgcatgctcgagcggccgccagtgtgatggatatctgcagaattcgcccttagcgtggtcgcggccgaggtacgcggggatatttgctaagagcaccatgcgcgcagcagccatctccactccaaagttagacaaaatgccaggaatgttcttctctgctaacccaaaggaattgaaaggaaccactcattcacttctagacgacaaaatgcaaaaaaggaggccaaagactttgtaagtttgttcagagtctcactttgtgaattttaacaaattatctttaatggcagaaggattgagaatgaatggaagagagtgtgagcatttagtttagccagatcagaggagttaa

SEQ ID NO: 18277 - DNA, 545 bp, Homo sapiens
  misc_feature 347: n = A,T,C or G
gggcgaattgggccctctagatgcatgctcgagcggccgccagtgtgatggatatctgcagaattcgccctttcgagcggccgcccgggcaggtaccccgggttgtggggcctcaaatactgctttgccttgctctgctaaccagctgcattttacagatcccagtatgaactctagtgttcttcagaacatacctttaagaggggaagccgcgcactgccacaatgcaaacactaactttgttcacagtaacagtccagtccccaaccaccatcttgcaggtttaataaatcagattcaggctagcgggaactgtgggatgctcagtcagtcgggcatggctttangaaattccttacatcccaatccaccttaatcaagaatttcaacgtcctccactccagtgataccaaacagcattgttagcagctataatcaaacaagttctgaaacaagtatggttttattagaaaaaagtacctcggccgcgaccacgctaagggcgaattccagcacactggcggccgttactagtggatccgagc

SEQ ID NO: 18278 - DNA, 92 bp, Homo sapiens
tctagatgcatgctcgagcggccgccagtgtgatggatatctggcagattcgcccttagcgtggtcgcggccgaggtacttttttttttttt

SEQ ID NO: 18279 - DNA, 618 bp, Homo sapiens
  misc_feature 499: n = A,T,C or G
acgactactatagggcgaattgggccctctagatgcatgctcgagcggccgccagtgtgatggatatctgcagaattcgcccttagcgtggtcgcggccgaggtacattagtatgcttgatgatgtctcacagccctctcaggttttttttcctaaatattttttttctttcttctcctttggaataatttcaattatttttctcttcaaattcactgttctcttcttttgcatgcccaaatctttgttgaatccctctagtgggttttccatttcagggattatactttttagctctagaatttgtttggttcctttttataatttctatctctttattgatattctcattttgttcatgcatggttttcctgatttcctttagttcttcgtccatgtttttctttagctcgctgaacatacttaaaatagttgatttaatgtctttgggtaataattccaatgtctggacttcctcaaggatggtgcctgtcaattntttttcctgtgaatggaccatggttttctatttctttttatgttttggtaatttttggtgagaactggacattatgagtattacattgtggtaactgagaatctaattctgtcatgcct

SEQ ID NO: 18280 - DNA, 396 bp, Homo sapiens
tatagtggcgactggggccctctagatgcatgctcgagcggccgccagtgtgatggatatctgcagaattcgcccttagcgtggtcgcggccgaggtaccctggagaaacttcttcacatcagcaataatttctctgaagacaaattggtctttctgaacctcaaaccaccccaacttagtgattttagcaatgacttgaataagagcttggatgacaaagggagccagcttgggctgtgatgccacgtaattcagaatgtagtttctgatgtccatcctctgctcaacaggtaaaggactgactcggctgacaagttttgaaagacatgttgctgcaaggagctgagcataggatgttgttccttgttctaataaaagttgacacttgctgagac

SEQ ID NO: 18281 - DNA, 392 bp, Homo sapiens
acgactcactatagggcgattgggccctctagatgcatgctcgagcggccgccagtgtgatggatatctgcagaattcgcccttagcgtggtcgcggccgaggtactgggttatataggcatgagccactgagcctggccctgaagcgtttttctaaaaggccctaagtggagataaataagatttggatctcctgtcttgggccagggatctctctacaagaccccctgcccctctgttggaggcacagttttagaataaggaggaggagggagaagagaaaatgtaaaggagggagacctttcccaggccgcaccatttttgtcactcacatggacccaaaataaaagattggccaaaccctcacaacccctgatgtttgaagagttcca

SEQ ID NO: 18282 - DNA, 425 bp, Homo sapiens
ctataggtcgaatagggccctctagatgcatgctcgagcggccgccagtgtgatggatatctgcagaattcgccctttcgagcggccgcccgggcaggtactttatatttttttgttatgatttgtttcttaactatcatgtttttaaatttattattattgaacttggtgaatccttatttttttgagagtggatttttggtgctccggaaagaacaaaaaaaagatgtctgccgcaaaagaaaaaaaaagggggcagaaaaatttcatacctttaaaaaaaaaaaaaatttgaacaagaaaatgggcatggtcttttttaaagggggaaaaaaatgtaggtgggtgcgcaaaaaaatgatttcttgggaaaagagaacactgttcaaaaagcccgggggctttgtaattgcaaaaaaaaaaaa

SEQ ID NO: 18283 - DNA, 263 bp, Homo sapiens
tatagggcgaattgggccctctagatgcatgctcgagcggccgccagtgtgatggatatctgcagaattcgccctttcgagcggccgcccgggcaggtacttttttttttttttttttttttttttccttttttttttttttttttttttttttttttttttttttttttttttttttttttttttttttatttttttttttttttttgggaaaaaaaatactttataaagggggtaaaattttttttttttttttaaaaaaa

SEQ ID NO: 18284 - DNA, 677 bp, Homo sapiens
gcgaattgggccctctagatgcatgctcgagcggccgccagtgtgatggatatctgcagaattcgccctttcgagcggccgcccgggcaggtacctgtttctgatactcagaaacttaaaaatctaccttttaagacttctggcttggaaactaccaagaagagaaaccgcatttctgatgatgatactgattctgaagatgaattgagaatgatgattgcgaaagaggaaaacttacagagaactacacaaccctcaataaatgaatctgaaagtgatccttttgaagttgtaagggatgatttcaaatcaggcgttcacaaactgcattctttaataggtttaggtatcaaaaatcgtgtctcttgccatgatagtgatgatgatattatgagaaatgatcgtgagtatgactcaggagatacagatgaaattattgcgatgaaaaaaatgttgctaaggtcaaaaacagtacctcggccgcgaccacgctaagggcgaattccagcacactggcggccgttactagtggatccgagctcggtaccaagcttggcgtaatcatggtcatagcttgttcctgtgtgaaattgttatccgctcacaattccacacaacatacgagccggaagcatatagtgtaaagcctggggtgcctaatgagtgagctaactcac

SEQ ID NO: 18285 - DNA, 381 bp, Homo sapiens
catatactggctactggggccctctagatgcatgctcgagcggccgccagtgtgatggatatctgcagaattcgcccttggccgcccgggcaggtacattctgtgctgctgtaacagaattgaaggctaggaagttcaatctcaagggactggcatctagtgagggccctcttgctacgtcatcccatggtggaaggcaaaagggcaaagagggggtgagctcatccttttatataagggaaccattcctgtgataatggcattaatccattcatgaaggaagagccctcctgtttgaaccacttcttaaaggtcacacctcagaacacattgcattcaggattaagtttccaacacgtgaactctggggaacacattcaa

SEQ ID NO: 18286 - DNA, 373 bp, Homo sapiens
tcactatagggcgaattgggccctctagatgcatgctcgagcggccgccagtgtgatggatatctgcagaattcgcccttagcgtggtcgcggccgaggtaccctgtaagagtaaagacttcaaagagggataaattaggaaatatatgtggagggatgatggttttggatatgtagaacttaagctctgtgatggagatctctttggatcaagtagaaatgtgttggagctcagaggtaaaggctaaaatattaatttgggagtaagttacattaagtgaaaggtgaagctatggggaaggcgatacccctcaagggagaagtggttgtagatagaaacttatatataaatgccttttttaaaactttttct

SEQ ID NO: 18287 - DNA, 332 bp, Homo sapiens
ccctctagatgcatgctcgagcggccgccactgtgatggatatctgcagaattcgcccttagcgtggtcgcggccgaggtacagcctagaagaaaacagagagatgagcagcttctgacaaatgtcctggaaacacttcgaggtgatggaaatgtgttaatagcagtggacacagcaggcagagttttggaacttgctcaacttcttgatcagatttggaggactaaagatgcaggattgggtgtttactcattggcactcctaaataatgtcagttacaatgtggtggagttttctaagtcccaggtagaatggatgagtgataaattgat

SEQ ID NO: 18288 - DNA, 359 bp, Homo sapiens
ccctctagatgcatgctcgagcggccgccagtgtgatggatatctgcagaattcgcccttagcgtggtcgcggccgaggtacgcgggttaagacatctttttttaaatttgagatttctgaatgtgaatatctaaatgagataccattatgtgtccctgctgtaggtgacactcactatttttatttagttaaaaatcacagaagaacgctacgcatggtggctcatgcctgtaatttcagcactttgggaggccgaggtggtggattgcctgaggtcaggagttcaagaccagccctgaccaacatggtgaaaccccgtctctactaaaaatacaaaaattaactgggcatggtggcg

SEQ ID NO: 18289 - DNA, 398 bp, Homo sapiens
atagggcgaatggggccctctagatgcatgctcgagcggccgccagtgtgatggatatctgcagaattcgccctttcgagcggccgcccgggcaggtaccacacaaattcaaagctcaagaccagatagctgcaggatttgaatcaatattttggtgggtaactatcagtaaaaacatagattggataaattacatctattataaccagcagcggtttattaactacactagagatgctgtcaaaggaatagctgaacagttagggcctactagccagatggcttgggaaaacagaatggccctagacatgatattagccaaaaaaggtggagtttgtgttatgatcaaaactcaatgttgtacctcggccgcgaccacgctaagggcgaattccagc

SEQ ID NO: 18290 - DNA, 168 bp, Homo sapiens
ccctctagatgcatgctcgagcggccgccagtgtgatggatatctgcagaattcgcccttagcgtggtcgcggccgaggtacaggtggaacaatccaaagttttaatcaaagaaggtggtgttcagttgctgctcacaatagttgataccccaggattggagatgcag

SEQ ID NO: 18291 - DNA, 570 bp, Homo sapiens
ttgggccctctagatgcatgctcgagcggccgccagtgtgatggatatctgcagaattcgcccttagcggccgcccgggcaggtacgcggggctccgccccgaaaccttctgactactaacctaccaagatcactccatggatgaaatgacagctgtggtgaaaattgaaaaaggagttggtggcaataatgggggcaatggtaatggtggtggtgccttttcacaggctcgaagtagcagcacaggcagtagcagcagcactggaggaggagggcaggagtcccagccatcccctttggctctgctggcagcaacttgcagcagaattgagtcacccaatgagaacagcaacaactcccagggcccgagtcagtcagggggaacaggtgagcttgacctcacagccacacaactttcacagggtgccaatggctggcagatcatctcttcctcctctggggctacccctacctcaaaggaacagaatggcagcagtacctcggccgccaccacgctaagggcgaattccagcacactggcggccgttactaatggatcccaactcggta

SEQ ID NO: 18292 - DNA, 588 bp, Homo sapiens
ccctctagatgcatgctcgagcggccgccagtgtgatggatatctgcagaattcgcccttagcgtggtcgcggccgaggtacagtggcacaatcttggctcactgcaaactccacctcccgggttcaagcgattctcctgcctcagcctcccaagtagctgggattacaggcatgcgccaccacacccggctaatttttgtatatttagtagagacggggttttcaccatgttggccaggctggtctcaactccttacctcaagtaatccacctgcctcagcctcccaaagtgctaggattacaggcattagccaccgcacccggcccaatcaatattattttatgcagttctgtagggaactactccaagacttagaataatattgtttaggaaacaatgaaatagaagcctcatacatatataataaaaacctattatgttaaaggcctacatcttgaaaaagggtaataagacacacaagagaatgtcctccctcctcaagggtggggaaagaattacctaagcaggtaacagtgcaaggcagtgaagagaaaaaaaggtctccagcgaatatgatgctctgaaa

SEQ ID NO: 18293 - DNA, 563 bp, Homo sapiens
  misc_feature 466, 467, 468, 470, 471, 473, 475, 490, 520, 521: n = A,T,C or G
tggggccctctagatgcatgctcgagcggccgccagtgtgatggatatctgcagaattcgcccttggccgcccgggcaggtacaccaaacagaggagtttggctttctcctgaaagttcctgaagtcactgaaggatattagggagtaacactgtcagagtgcttctagaaagcctgctgtggtaacattgagcaacagagaggagaccagctaggtataggaggcaggttagtactggaataaacagtgagcatatctggtatatgtcattatttattgttaaattacatttttaagctccatgtgcatataaaggttatgaaacatatcatggtaatgacagatgcaagttattttatttgcttatttttataattaaagatgccatagcataatatgaagcctttggtgaattccttctaagataaaaataataataaagtgttacgttttattggttaaagnnnannananaaaaaaaaaaaaaanaaaaaaaagaaaaaaaaaaaaagggggggnnagggggggggggcccccgggggggaaacccccccaggggggg

SEQ ID NO: 18294 - DNA, 466 bp, Homo sapiens
gactactatagggcgaattgggccctctagatgcatgctcgagcggccgccagtgtgatggatatctgcagaattcgcccttcgagcggccgcccgggcaggtacaaacttagaagaaaattggaagatagaaacaagatagaaaatgaaaatattgtcaagagtttcagatagaaaatgaaaaacaagctaagacaagtattggagaagtatagaagatagaaaaatataaagccaaaaattggataaaatagcactgaaaaaatgaggaaattattggtaaccaatttattttaaaagcccatcaatttaatttctggtggtgcagaaattagaagataaaaacatacttttagaagaaaaaagataaatttaaacctgaaaagtaggaagcagaagaaaaaagacaagctaggaaacaaaaagctaagggcaaaatgcacaaacttagaagaaaattggaaga

SEQ ID NO: 18295 - DNA, 531 bp, Homo sapiens
gaattgggccctctagatgcatgctcgagcggccgccagtgtgatggatatctgcagaattcgcccttagcgtgggcgcgggccatgtactaaagatacaaaaattagcctggcctggtgatgcgcacctgtagtcccagccactttggaggctgagacaggagactcacttgaacccaggaggcagaggttgcagtgagctgagattgcaccactgcactccagcctgggtgacagagcaagactccatctcaaaaaacaaaacaaaacaaaaaactacaatagagatgtatgtcaaagagaatataagttcttaagaagctgcgtctaattagtgaagctctcccttcccatattcagtgatccaagaaactgaaatttaaatggaaaaatgaatctgtaaagttatagatgtcaaattctcagattcttcattgttatttcccaagtggaaaaggattataaataatagaatattattgatttttagaggaaagtggattaaaaagtgtttacatttttaaaacttta

SEQ ID NO: 18296 - DNA, 490 bp, Homo sapiens
atagggcgaattgggccctctagatgcatgctcgagcggccgccagtgtgatggatatctgcagaattcgcccttagcgtggtcgcggccgaggtacttgccggagtctagggataagaatgcactacaaaatcaaagccaaagggttgatgagctggtggcatgcattgaaattatacagaccctagtattgatgttcagagaaacagaataccgagtcatcacgcctgaacacattggcagctaagaagggagcactatttaatctcttggtaattttaattagtgagcctcagattccaaaatcttgtcctgtgtttgatatccagttggtggctgattcagctttagtcagaatgtcttttgacgctgagttacagaagcttattctggagtatacaaatactgctacagcacttttatatgagatacttcttgtctttcagcagggaaatctcggattgggatccacaaagtttgctattagctg

SEQ ID NO: 18297 - DNA, 550 bp, Homo sapiens
  misc_feature 103, 104, 105, 201: n = A,T,C or G
actatagggcgaattgggccctctagatgcatgctcgagcggccgccagtgtgatggatatctgcagaattcgcccttagcgtggtcgcggccgaggtacttnnntttttttttttttttttgggtataatataggatcttagtgcttaaatttgcctccaagcatacattagctgcaactccctgattctgatatatcgngttttcattttcagctcaatgaactttccaatttctcttttgatttcttatttgaataatatactttggctctatgtctccacccaaatctcaccttgaattgcaatccccataatctccaggtgtcaagggtgggactgggtggaggtaatttaattatgggggtggttccctccatgcaatctgatgggctgattaattttttttttaattattattgcaacattgccctttgatgtccccatgagggccaggcccaggcagaacccatcccattttatccttaaactcaaaaggaaatttgtctaaatttaaagggttaatttgggaataaaaaatgaacctttaa

SEQ ID NO: 18298 - DNA, 555 bp, Homo sapiens
gcgaattgtgccctctagatgcatgctcgagcggccgccagtgtgatggatatctgcagaattcgcccttagcgtggtcgcggccgaggtacgtcctgagggcatacaacttaatttctacaaaaacatactttttcaaaagggctatgagagtatcaattgacaaaagcagaacaagtagcatgattagacagagaagtcttaattgcttaacacaagataaactcagcagttttaaagtgtctgtatccattttaaatgattagtccaggggtagaaaagatgaggatggtttcatcatactttgaaaaggaaactcccactggagctaaaacaaacttacagtccaggttataagaatccaagttacatagtaaattattaactattattttcataccaagttcatgcttaagcaataagaaaatcctgtttgcagcattaattacatgttattcagttttccaggcccatagttagaggtcacacaccaggcagagaaagaacaaatgccagcccagtcatcttactgcctcagtccagcagccagtggcc

SEQ ID NO: 18299 - DNA, 376 bp, Homo sapiens
actatagggcttattgggccctctagatgcatgctcgagcggccgccagtgtgatggatatctgcagaattcgcccttagcgtggtcgcggccgaggtacagttatgactgacctgaaggatgcaaaggctccacctggttgtctcaccccagagagaattccagaggtccatcacatttcccaagatcctctgcactacagcatcgcgtcagtctctgcttctcagaagatcagagaactagagtctatgatcggcatagacccagggaaccgggggattgggcacctgctctgtaaagatgagctgctgaaggcctctctctcgctgtcccatgcccgctcagtgctcatcaccactgggttccccacacattc

SEQ ID NO: 18300 - DNA, 564 bp, Homo sapiens
agggcgaattgggccctctagatgcatgctcgagcggccgccagtgtgatggatatctgcagaattcgcccttagcgtggtcgcggccgaggtactaccctgaatgcacctgatattgtctgaagtctaataacagactataggaaaaacagatctattgtgatataagtcaggaagtggttgaacggtgagagacagggtgagaagtgattgtaaaggggcacaaagaaattttctgaggtgatgaagctgttctgtatcttgttttggatgaagataacataggtgtatagaattgttgaagctcattgaactgggcacttagatctgtagattgtatacatagtatatttcaattaaaaagattaaaaggagtaaataaaactatgtgtttccctcaaaattttaatttgagggatttctttggtagaaagtcacccgcactttaagaacagttttgaaaattagggaaatgctataaaatatagcccagaagaaattctgtaaaagacccaattgcaaattaaaaacttaagcctatccatatgagtttttttttttttt

SEQ ID NO: 18301 - DNA, 504 bp, Homo sapiens
tacgactcactatagggcgaattgggccctctagatgcatgctcgagcggccgccagtgtgatggatatctgcagaattcgccctttcgagcggccgcccgggcaggtacacagaaaggcagaagttgaaattagtttgaagactacattgtatattacacaatatacattgcttaagcatcagcaacgtgaagcaacatcaatgccgtttctggatggttacagcagttatgtcaaaattagatttttaaaagtaaaaggcaaagaaatttgccacatatttaataattactcttgggaatgactgcaaattagagatgttaggtattattgattcatttattctttagcaaatgtgtattgaacacatactatgtatcaggcaaatggatatcacctcccctactatggaagaataacagtaatcagataattaaaaattatatactccagggtggcagaatgacaatcagtaatcaaaattattacaaattatatactaca

SEQ ID NO: 18302 - DNA, 528 bp, Homo sapiens
tatagggcgaattgggccctctagatgcatgctcgagcggccgccagtgtgatggatatctgcagaattcgcccttagcgtggtcgcggccgaggtacaccataaatcttgacttaccaccctacaaaagatggcatgaattgatgcttgacaaggcaccagtgctaaaggttatagtgaattctctgaagaatatgataaatacattcgtgccaagtggaaaaattatgcaggtggtggatgaaaaattgcctggcctacttggcaactttcctggcccttttgaagaggaaatgaagggtattgccgctgttactgatatacctttaggtaaagttcacttagaagctctaaaaaaaaagtaattaaattcttttacaagtttccattgaggtgtgatatacatacagcacaggtgctgtatgtcttagatatacagcacaggtgctgtatgtcttagatatacagcacaggtgcacaggtcttagatatacagctcagtgaagcttcaaaaatgcatgcatgcat

SEQ ID NO: 18303 - DNA, 514 bp, Homo sapiens
atacgactcactatagggcgaattgggccctctagatgcatgctcgagcggccgccagtgtgatggatatctgcagaattcgcccttagcgtggtcgcggccgaggtacaaagatttaggcttgcatacccgaaaaccacagttaggaagaaaaatcatttcaggaaacaacatcaaacaagaacacatataaattaaaggcatactgtttatcattccacttcattgcacatataagaaaacaatactgccgtcattcttgagtaagaaagtttccaatgaaagaggaagttccacaatgaatacaggtgcagacagtcttattaccacaaatttagttatatcaaaacacttggtggtgtcactaagttaattaaattatctatactttttactggaaaggtaatcatttccctgccttcatatgttaacttaaaatcacttacaaatggaaatatagattcagtagaaaagacttcacatgcaatcctatacaatgcattctggttttttg

SEQ ID NO: 18304 - DNA, 423 bp, Homo sapiens
gctcgagcggccgccagtgtgatggatatctgcagaattcgcccttagcgtgggcgcggccgaggtactttgtttttttatttttaatgattttctttttgttattaatatttttctctgttcctttgttattacttgcatggtttggcgtcagaagtccttacctctttatattgtttgcaggtttaaataaaacagtgtggtgccaaaaaaaaaaaaaaaaaagtacctgcccgggcggccgctcgaaagggcgaattccagcacactggcggccgttactagtggatccgagctcggtaccaagcttggcgtaatcatggtcatagctgtttcctgtgtgaaattgttatccgctcacaattccacacaacatacgagccggaagcataaagttgttaagcctggggtgcctaatgagtg

SEQ ID NO: 18305 - DNA, 392 bp, Homo sapiens
aattgtaatacgactcactatagggcgaattgggccctctagatgcatgctcgagcggccgccagtgtgatggatatctgcagaattcgcccttagcggccgcccgggcaggtactttttttttttttttttttttttttcttttttctttttttttttttttttttttttttttttttttttttaaaaagcaagatttttttttttttatagaaagaaagatttttggcgtgtttatgggactgggggtaagggggggaaaaaaaaaaggggggcatgttttaaaaaaatttgaaaggacttggttttaaaaaatttggggggggttttttttttgggggggcccttttttttttttgttggggggggggctaaaaaaaaaaggggggggg

SEQ ID NO: 18306 - DNA, 501 bp, Homo sapiens
ctatagggcgaattgagccctctagatgcatgctcgagcggccgccagtgtgatggatatctgcagaattcgcccttgagcggccgcccgggcaggtacgcggggattatacagacgcataactggaggtgggatccacacagctcagaacagctggatcttgctcagtctctgccaggggaagattccttggaggaggccctgcagcgacatggagggagctgctttgctgagagtctctgtcctctgcatctggatgagtgcacttttccttggtgtgggagtgagggcagaggaagctggagcgagggtgcaacaaagcgttccaagtgggacagatactggagatcctcaaagtaagcccctcggtgactgggctgctggcaccatggacccagagagcagtatctttattgaggatgccattaagtatttcaaggaaaaagtgagcacacagaatctgctactcctgctgactgataatgaggcctggaacggatt

SEQ ID NO: 18307 - DNA, 506 bp, Homo sapiens
tatagggcgaattgggccctctagatgcatgctcgagcggccgccagtgtgatggatatctgcagaattcgcccttagcgtggtcgcggccgaggtacaaaatggtcctatttttgtgaagagggacataagataaaatgatgttatacatcaatatgtatatatgtatttctatatagacttggagaatactgccaaaacatttatgacaagctgtatcactgccttcgtttatatttttttaactgtgataatccccacaggcacattaactgttgcacttttgaatgtccaaaatttatattttagaaataataaaaagaaagatacttacatgttcccaaaacaatggtgtggtgaatgtgtgagaaaaactaacttgatagggtctaccaatacaaaatgtattacgaatgcccctgttcatgtttttgatttaaaacgtgtaaatgaagatctttttatttcaataaatgatatataatttaaagccaaaaaaaaaaaaa

SEQ ID NO: 18308 - DNA, 600 bp, Homo sapiens
gactactatagggcgaattgggccctctagatgcatgctcgagcggccgccagtgtgatggatatctgcagaattcgcccttagcgtggtcgcggccgaggtacatgtgactaagctttcagagcagaaaaagaaccatctgaaaggaatagaggatttgtagaaaccattccaggacagtgcttgatcccaacaaccagactggagaaacccataatttgtgtggatattagtttcctgaggccacaaacttggtggctaaaaccagtagaaaattacttgctcatacttgtagaagccagaagtccacaatcagttttactgaggcaaaatcaatgtgctagcagggtcttgctccctccagaggctctaaaagataattacttattgcccctttgtttctaggagctgctggtattccttgacattgggccacatcactggaatctctgcctttatggctgcattacctcctcttctgggtgtcaaatctacctctctttcttaaaaagacacttgtaattggattataacccattcagtagtccagaataatttccccaaagcaagatacttaatcacatctgcatagactccttt

SEQ ID NO: 18309 - DNA, 404 bp, Homo sapiens
ctactatagggcgaattgggccctctagatgcatgctcgagcggccgccagtgtgatggatatctgcagaattcgccctttcgagcggccgcccgggcaggtaccactaataaattgtttgccaaatccttgtaataacatcttaattttagacaatcatgtcactgtttttaatgtttattttttgtgtgtgttgcgtgtatcatgtatttatttgttggcaaactattgtttgttgattaaaatagcactgttccagtcagccactactttatgacgtctgaggcacacccctttccgaatttcaaggaccaaggtgacccgacctgtgtatgagagtgccaaatggtgtttggcttttcttaacattcctttttgtttgtttgttttgttttccttcttaa

SEQ ID NO: 18310 - DNA, 605 bp, Homo sapiens
ggccctctagatgcatgctcgagcggccgccagtgtgatggatatctgcagaattcgccctttcgagcggccgcccgggcaggtacgcgggtcctgtgttacattctgttcttaaatctgaatgccttctcatttaattctgaggaaatatcacacacgtgtcttcattgaccttgaagaaatgtatatacagctgccttataaaacaacatatatttagaccataacttttatagagaaagggttttgtcaaatgttttctgaaaatctgagtaattcaaagcatgcctctgcccctttaatatttttaataacctgcattgttgctgtctgccaaatattaaatggaaatcttcatttcaattttattatctggaaagggcactggattgctctgcaaccaaagaaagcaatatggaatgaaaaaactcattcacttttgtcttatttccttttaaggtgtatcggcatgtaatttgcatagagaaggtcctctggttagtctctcaaattgaggctgtttagggaaatccttattcagttggtggcaggggttggtttaaagtaaaagggaataagatcgccttaataccagaaatgattag

SEQ ID NO: 18311 - DNA, 364 bp, Homo sapiens
  misc_feature 161: n = A,T,C or G
ccctctagatgcatgctcgagcggccgccagtgtgatggatatctgcagaattcgccctttcgagcggccgcccgggcaggtacgcgggcaagtgatgggagggttggacctttcagccctaatcactaacctttgagaagtgaggcagggatggagattnaagctctataaaacacctcttgaacctaagagattcaaccaagcttccaggtttgatggatgcatctaggtgctgggagggtggcacacctcaattccacatggacagaaactccactcaggacccttcctggccttgccttatgtgcctctttattccgcttgttctctttattccttataataaaccaggtaaatgtaagt

SEQ ID NO: 18312 - DNA, 454 bp, Homo sapiens
actatatggcgaattgggccctctagatgcatgctcgagcggccgccagtgtgatggatatctgcagaattcgccctttcgagcggccgcccgggcaggtacacctttgactacagctgcagaagtgttcctttagacaaagttgtgacccattttactctggataagggcagaaacggttcacattccattatttggaaaggtaccctggctgtagcctttccattaattttgcttccactcatttttattttgtatttaaaatgtttttaggcaaccttaagaaacaaatgttaaaagttaagatgccaggaaaaaatgaaattggttgggaatttcattaacttcatggtataatcaaagcacaagcagtaaaaacaaaaaaccccatgtattttaacttttttttagggatttttttgctttttgtggattttttttttttttttttttt

SEQ ID NO: 18313 - DNA, 599 bp, Homo sapiens
acgactactatagggcgaattgggccctctagatgcatgctcgagcggccgccagtgtgatggatatctgcagaattcgcccttagcgtggtcgcggccgaggtactcttgcaatgaaaccaaatagtatcatagacacaacctctgtagcacattttaggtggcaaacactgtcacagaattttaactaccagatctgttttaggccatacagtttgctcttagttttatcaagagaatttttaaggcttgctgcgacactgctatgtgtccttttcaaaatctgttcttttcattacttacttagaataagatctctctaaaattttaaattaatagcacagagagagagactgggaaagcagcctttttatgtaaatgaaacctcttaggtagtaaaaaaaaccccaaaaagctgagaaagtgatcacacagtttaaatacagtcaagatctctgagcataagaagaggtcagagccagctgatagtaaaccttgatcttcagctaccaaatctcaaaatgaaactccaaatgagtttgttattggagatggggaccaagctgaagattgctcttcatcatagaagcagtaaactc

SEQ ID NO: 18314 - DNA, 557 bp, Homo sapiens
acgactcactatagggcgaattgcgccctctagatgcatgctcgagcggccgccagtgtgatggatatctgcagaattcgccctttcgagcggccgcccgggcaggtactgaaaggaagttgttcatggatcagaaatgtgggaggcccttccttgcccaaggcaagtcgctgtagatggttaaactgataccaaggataggtaagggaaattccaaattccattggaagatggccttttactgacactgcagacatgtagataacaatagtttaatgtcctctgaaaaggtaaaaattccataaatccttgcaaacaatttttagcaatattgtttattgctaccacagccaagaatgggtatttcaaagccagggttttttttattttgttttgttttgttttgtttttttttttttttggctacacttttttgggggggaccttttaatttgggaagaaaatgttgagtatacttttctttcacaaccattgcaaacccaggtagccctggagttttctttttttctcatcatcattggtttgttttttttatg

SEQ ID NO: 18315 - DNA, 314 bp, Homo sapiens
tatagggcgaattgggccctctagatgcatgctcgagcggccgccagtgtgatggatatctgcagaattcgccctttcgagcggccgcccgggcaggtactattttcaatccctgaccgagggaccttccagaagaccatgggggctgggcgggcagtggcagagcaagtgatatttaggtggtcttcagagaatttgtagtgaagggatactatgggcatagacggtgaggcaggccgttcctgagatcttcccaaaaccaaaggtattgaagagacacatgtaacacccttcatcctccagggtgatattcc

SEQ ID NO: 18316 - DNA, 659 bp, Homo sapiens
gcgaattgggccctctagatgcatgctcgagcggccgccagtgtgatggatatctgcagaattcgcccttagcgtggtcgcggccgaggtacttttttttttttttttttttttttctaatcagaatgggggaataaaaccacaaaggaatcagctaactgtccctgttggcccagcatctcaaggattgtgttgcagcagctatcctgaggtgtgcccttccacatctgggcaagcaaacgtctctttattggttggtggttatgttaagcatgttgaacttggaaccagaagatctaccaattctggacacagctccttccctaagtagtctatgaccttgggatagtcacataagacctttggatgccagtttcataaaccagagttttcaataactaatgcctcacatttaatgaggtccatatggtacctgcccgggcggccgctcgaaagggcgaattccagcacactggcggccgttactagtggatccgagctcggtaccaagcttggcgtaatcatggtcatagctgtttcctgtgtgaaattggtatccgctcacaattccacacaacatacgagccggaagcataaagtgtaaagcctggggtgcctaatgagtgagctaactcacattaattgcgttgcgctcactg

SEQ ID NO: 18317 - DNA, 642 bp, Homo sapiens
  misc_feature 566: n = A,T,C or G
ctactatagggcgaattgggccctctagatgcatgctcgagcggccgccagtgtgatggatatctgcagaattcgccctttcgagcggccgcccgggcaggtacttttttttttttttttttttttttaggaattttaccaattgctcagtaagaggtatttagatctcctactgaatggtgaaattgtttatttctccctttatctgccaatttctgctttatgtattctgaaactttgttactggatgcacacacatctgtgatgaatgataataaaatgtctttatcgcagttaattctttttgttttgaagtctattttatcttatattaatatatgcactcaaaccttcttatacttagtgcttccgtaatcttttttaatacatttacttacaacatgcctgcatctttatatgttaaatgcatttcttgcagagagcagatagttatgcttttcaaaaattcattctgcttatttctaactttaattggagaatttaatccaattaaatgtattccaagtattgatataatggtattaaggactgtttcttccttctgngtattgttcctttggcccccctttccttattacgtggattaaattgaatatttcttaaattctattttaatgtatt

SEQ ID NO: 18318 - DNA, 510 bp, Homo sapiens
  misc_feature 69: n = A,T,C or G
ctactatagggcgaattgagccctctagatgcatgctcgagcggccgccagtgtgatggatatctgcangattcgcccttcgagcggccgcccgggcaggtacttttttttttttttttttttttttttttattttttttttttttttttttttttttttttttttttttttttttttttttttttttttgttttttttttttttttttttttttttatttttttcgctttttttcaaaatttttataaatgttgtggggttgtttttttacttggatttgggaacttcttaattttaacaattcttgcttcaaaattttttttttgtttgacacacatttgatttcacccggggttctcctggttctgtttttttggtaacaaaaaaatttttttttcattttttggggcccgacaaaatttataacacctttgggggatttttttgtttaaaaaaaaaaatttttttttactggggttcctgggggcgaaaccctttgggggggtttt

SEQ ID NO: 18319 - DNA, 493 bp, Homo sapiens
gactactatagggcgaattgggccctctagatgcatgctcgagcggccgccagtgtgatggatatctgcagaattcgcccttgagcggccgcccgggcaggtacatttggctacctgatggaccatttaacatttataaagggatttcattcaattgtcattttcaatgcatgttttctgtttgtattaaaagctttcccatgcaagagggctgatgttacaacagtagattattgtgcaacagtgtattttcacctagtaaaaaaatcttttcatggttcactaaggacaatcccttcatgatctagagcctgaaggtaggatcttctgagaacatcagaaaaagactatctctaccatccacactacagcaaaacttttgagccttgaaccttgggttcataatctcacaatggagaagggtccctccacactcctagaactgtacgactattgttgctattataggtcttttgcctttctacataaactt

SEQ ID NO: 18320 - DNA, 492 bp, Homo sapiens
tatagggcgaattgtgccctctagatgcatgctcgagcggccgccagtgtgatggatatctgcagaattcgcccttagcgtggtcgcggccgaggtacgcgggctacaaacggcagaatgaaggaaatcctgaaagagataaagagaggcctgtccagtctttgaaaacatcaagagatacttcaccctcaagtggttcagcagtttcttcatcaaaggtgttagacaaacccagtaggctaactgaaaaggaacttgctgaggctgcaagcaagtgggctgctgaaaagctagagaaatcaggtgaaagtaacttgcctgaaatttctgagtatgaggcgggatccacagcaccattgtttactgaccagccagaggaacctgagtcaaacacaacacatgggatagaattatttgaagatagtcagctaaccactcgctctaaagcaatagcatcaaaaaccaaagagattgaacaggtttaccgacaag

SEQ ID NO: 18321 - DNA, 719 bp, Homo sapiens
gactactatagggcgaattgggccctctagatgcatgctcgagcggccgccagtgtgatggatatctgcagaattcgcccttagcgtggtcgcggccgaggtacagaccctagactcagaaacacaacagatttgagctaagacagctctggtgaaacagtaatagagggaggaggaacacgaggtattcatgtctgggccagagctgccatccagggccccacaccccacctttggtccagatggcccattggcccaggtgtccctgctgccagaacaccgtggactggggtactcattgtcagcttgtaggatctttggccattctgtccacagaagtatcagttttactgttaacatttctgacattggaaaaatacatctgcattgtctatccttttagatgtgtgagacctggaaaatgcagaacaattacagttctgattctcatttggattactggttttatagtggctttcattccattgagcaataaggaatttttcaaaaactactatggcaccaatggagtatgcttccctcttcattcaaaagatacagaaagtattggagcccagatttattcagtggcaatttttcttgggtattaattggccgcatttatcatcatagttttttcctatggaagcatgttttatagtgttcatcaaagtgccataacagcaactgaaatacggaatcaagtaaaaaagagatga

SEQ ID NO: 18322 - DNA, 377 bp, Homo sapiens
gactcacttagggcgaattgggccctctagatgcatgctcgagcggccgccagtgtgatggatatctgcagaattcgcccttagcgtggtcgcggccgaggtacgcggggggcatttacctaaaggcaatgttagagtcatcgaaagtttttaatcaggcaagtggtatgatcagttttttgttttgttttgttttttttgagacggagtctggctatatcgccaggctggaatgcaatggcgcgatctctcctcactgcaacctccgcctcccgggttcaagcgattctcctgcctcagcacctcgagtagctgggactacaggcgcgcgccaccacgcccagatgagaaaactgaggcacagagaggtgaaataa

SEQ ID NO: 18323 - DNA, 498 bp, Homo sapiens
tctagatgcatgctcgagcggccgccagtgtgatggatatctgcagaattcgccctttcgagcggccgcccgggcaggtacgcgggatgagtgtgaagtagcctctggtgtcatttggatttgcatttctctgatgagtgatgctatcaagcacctttgctggtgctgttggccatatgtgtatgttccctggagaagtgtctgtgctgagccttggcccactttttaattaggcgtttgtctttttattactgagttgtaagagttctttatatattctggattctagacccttatcagatacatggtttgcaaatattttctcccattctgtgggttgtgttttcactttatcgataatgtccttagacatataataaatttgtattttaaaagtgacttgatttggctgtgcaaggtggctcacgcttgtaatcccagcactttgggagactgaggtgggtggatcatatgaggaggctaggagttcgaggtcag

SEQ ID NO: 18324 - DNA, 538 bp, Homo sapiens
  misc_feature 329: n = A,T,C or G
tatacgactcactatagggcgaattgcgccctctagatgcatgctcgagcggccgccagtgtgatggatatctgcagaattcgcccttagcgtggtcgcggccgaggacgcgggtaaggagaaggatgttgacgactgttggttctattttacgtattcagtgaatgggagcaacgaggtatggttcatgttgtggagaatccagagtgtcccactggtccagacatcattccaattgtagctggtgtggttgctggaattgttcttattggccttgcattactgctgatatggaagcttttaatgataattcatgacagaagggagtntgctaaatttgaaaaggagaaaatgaataccaaatgggacacgagatggtcacataacattgtgaatgtaattaatgccactgaaacaaagtggctttaattgcaaaaaagaaaatgaaaaggcaggacataatggggaaaatattatcaaagcgtattgtctgataaaggacttttttctagaacacataaagatcacttagagtctc

SEQ ID NO: 18325 - DNA, 439 bp, Homo sapiens
gcgaattgggccctctagatgcatgctcgagcggccgccagtgtgatggatatctgcagaattcgcccttagcgtggtcgcggccgaggtacgcgggtgtatgtgtgcctatttttttttttggtaaccagaagtttcctgtggctcttttcactctctaaaaggccaggacctgcttcctctgaatctgcccgattcactcagttgttggtaggagaaattaagttccaagtgtaagagacataggcactgaaaactaaataatagttcttggaactatttgtttttttttttggtagagatagtgaagttcatttggtttttcaggcttcttttaggggacctgataataccaagttgccttaacacagcatatctaagttattaaactgcctaggggcagaaaagaatttatccagccaaaggcccgaaaatttgg

SEQ ID NO: 18326 - DNA, 190 bp, Homo sapiens
tatagggcgaattgggccctctagatgcatgctcgagcggccgccagtgtgatggatatctgcagaattcgcccttagcgtggtcgcggccgaggtacagaggagttgctttgcaaacaagccaggtagataagacataatgaacaggcttctgggaatggtatagctgtgttggtcctaaaacatgatg

SEQ ID NO: 18327 - DNA, 206 bp, Homo sapiens
ccctctagatgcatgctcgagcggccgccagtgtgatggatatctgcagaattcgcccttagcgtggtcgcggccgaggtactcacagggaaaacttttggtggacttatggtcatttctcaaaccattatgtcattcttacactaatcaataagaaaaataatgctaacttttttgaaaactagtaacctagaaagaacgttgca

SEQ ID NO: 18328 - DNA, 305 bp, Homo sapiens
gcgaattgggccctctagagcatgctcgagcggccgccaatgtgatggatatctgcagaattcgccctttcgagcggccgccgggcaggtacagaaagaatactcttacttcaacatagcggttaatctctgcaaaaggagactagggaagagatgtaggagttgtatctggatccataatattaattttattaacaaacaattttggagcaaatgagataaaacgttaacatttctcaaatctaggacacagttgtcaatgtatccgagaaattctgggggactccaagcctgttgtaggatat

SEQ ID NO: 18329 - DNA, 348 bp, Homo sapiens
  misc_feature 189: n = A,T,C or G
atatggcgaattgtgccctctagatgcagtgctcgagcggccgccagtgtgatggatatctgcagaattcgcccttagcgtggtcgcggccgaggtacgcgggctctttaggagagggtggtggtggcggccagtaaagggactgtttgaaatccagcagacacctttctcccagactgataaacctgnggaccacgacttgagagtctgtgagaaacttgaggtatctctaggtccaagaaatgaaagcgtaaaataatagcaaccagtaattgctgtgaaatgtatgctgtgagaaagaatgacgcacttactggttcaagtgatggtccttttactggaactcac

SEQ ID NO: 18330 - DNA, 714 bp, Homo sapiens
tacgactcactatagggcgaattgggccctctagatgcatgctcgagcggccgccagtgtgatggatatctgcagaattcgcccttagcgtggtcgcggccgaggtacgcgggttgccacccttacccccatcccagtgaatatttgcaattcctaaagacgtgttttgattgtcacacctggtggggaacgtgctactggcatctaatgcatagagggcagtaatgctgctaaacatctttcaacgcacaggacagagccccacaaaagagaattatctagccccaaatgtccataacactgctgttgagaaaacctaccgcaggatcttactgggcttcataggtaagcttgcctttgttctggcttctgtagatatataaaataaagacactgcccagtccctccctcaacgtcccgagccagggctcaaggcaattccaataacagtagaatgaacactaaatattgatttcaaaatctcagcaactagaagaatgaccaaccatcctggttggcctgggactgtcctagttttagcattgaaagtttcaggttccaggaaagccctcaggcctgggctgctggtcaccctagcagctgagggactcttcaatacagaattagtctttgtgcactggaaatgaatatactttaatttgtaacatgtgaaaacatctataaacatctactgaagcctgttctgtctgcacc

SEQ ID NO: 18331 - DNA, 550 bp, Homo sapiens
ccctctagatgcatgctcgagcggccgccagtgtgatggatatctgcagaattcgcccttagcgtggtcgcggccgaggtaccaataatagagctaaatacaatgacatttgcttttaaaaggtggatattttatttctgctttttgaaaatacttatttagtattgacttggaagccaatttggtcctttaataagtaaagaaaataatatgtttaaaaatgtaaatgttttacaaatttgaaactttcataattgtattaatcagaaaacaagcacattgccattctttgaaactcatgtttctagacatgacagcagtaataaaaggatgaaaacaagtgtcttcactaagcgtatggccaataaatgggacccaaacgttcaatctggtcagtttaccaaggttcagaaatacgtaatttagcaggaaactataaataccagtgctatcacagccacacatacacacacacagacataaaataaccaaacatctcatttctaggaaaggagataacactaaaggcatcataagtttaactgaaata

SEQ ID NO: 18332 - DNA, 584 bp, Homo sapiens
  misc_feature 488, 489, 492: n = A,T,C or G
actcactatagggcgaattgggccctctagatgcatgctcgagcggccgccagtgtgatggatatctgcagaattcgccctttcgagcggccgcccggtcaggtaccacttccattgtaagtcccaaagtattatatatttgataataatgctaatcataattggaaagtaacattctatatgtaaatgtaaaatttatttgccaactgaatataggcaatgatagtgtgtcactatagggaacacagatttttgagatcttgtcctctggaagctggtaacaattaaaaacaatcttaaggcagggtgcagtggctcatgcctataatcccagcactttgggaagcccaggtgggctgatcactggaggccaggaattggggaccagcctggccaacacaacaaaaccccatctgttaaaaaaacaaaacaaaaccaaaaaaaacaagtaaccttggtggatgtctactcaagttttctgtactttnnttntttattttttttttttttgactctaaagggggtagaaggggtgctatagggtaaatacgggccctatttcaaagatttttaggggaattaat

SEQ ID NO: 18333 - DNA, 486 bp, Homo sapiens
  misc_feature 411: n = A,T,C or G
ccctctagatgcatgctcgagcggccgccagtgtgatggatatctgcagaattcgccctttcgagcggccgcccgggcaggtacgcgggtggtaactgtatatttttgaggaactgccaaactattttcccacgtccatgcaccatttcacattcccaccagtaagtaagagggttccaatttctgcgcattcttgccaacactagttattatctgactttctggttataatcattctaatgagtgtgaagtagcctctggtgtcatttggatttgcatttctctgatgagtgatgctatcaagcacctttgctggtgctgttggccatatgtgtatgttccctggagaagtgtctgtgctgagccttggcccactttttaattaggcggttgtctttttataactgagtngtaagaggtctttatatattctggattctagacccttatcaaatacatggtttggaaatattttctcccatttct

SEQ ID NO: 18334 - DNA, 686 bp, Homo sapiens
actatagggcgaattgagccctctagatgcatgctcgagcggccgccagtgtgatggatatctgcagaattcgcccttagcgtggtcgcggccgaggtacataacctctcacggccaacttaaatccttgctcctcaacataaatttctgactatctgataacattatatttgaaccgaaagtgttaaaaaaaataaacaaataattgaaggttgctgaaaaacagatgtgtgatcttataactatgtgtagttcaaataagttaataacttcaaccaatttttttaataaaaagatacccccaaaagggaaaaccgataagaaacagattttcaaagtgttctgctaacatgtatgtttagtgtccaatggcttaaatttactcatttcagaaaacgtttacaatgaaagtattttataatttgcttctaatgctttctaagcgtgccttgttgtttcattactgtctgcttttaaagaataaattctaacttaaacttatctgaaaacaatgttgttagctctctgctctaagctaatgcttcacatatagacatgagtcaaaagcggactggttttcctaagattacctcctagaaaaaaaaccccttacaaattcatgatttcccctctccttacgatgagttgtgtaaggtgacagcaactgtaaccactgtttgaacttt

SEQ ID NO: 18335 - DNA, 574 bp, Homo sapiens
ctatagggtgaattgggccctctagatgcatgctcgagcggccgccagtgtgatggatatctgcagaattcgccctttgcgtggtcgcggccgaggtacttttttttttttttttttttttttttaccctaagaaaaagtagatcttttacatggcttggctcacaattaagtggttataaatatatatacatatgatatagtggtataaatagatttataaatatacatcattttttgctacactttgaacaccaacatgtaatctttgggcttagcagaataaaagatagaataacacaaagtctatcttgctggagcacatttactcggtttctcctctagagaagcaaatcattagataagacatcatttcctgcactactggacacactcaatgagggaactgttgttgaacaactttgcaatgccctttcatcttccattaaattaaccataaaatgtaaaaacacaaatactgaggaaaatctgagttttacagaaaaaatacaattgatgtgttggggataggaatgttcattacccgcttttaccccaagatgactagaaaaccc

SEQ ID NO: 18336 - DNA, 512 bp, Homo sapiens
ccctctagatgcatgctcgagcggccgccagtgtgatggatatctgcagaattcgccctttcgagcggccgcccgggcaggtactttttttttttttttttttttttttttttctgtaaaataggagatagaagactaaacactaggattttatgctattttgaaaatgaaaacgtagcatgagaaatattgcctgatataggaaaaagagtgcagggcttaaagtctagattcaaagagctctgcggtcttaagaaagtcactttacctctctgagcttcacatttctaatcaataaagtgatgctgtgaggccagctgctctccaatttcccttgcagcttagaaagcctaagatgtctactctagctaaaaaataaaccaaccttataaagaatttaaaacagataaaaattgtctggtatatcagctagtgttggtgaattttcctgttaatttgaaactttgctctatttcacatttcttaacctcttaattgagaatttacataac

SEQ ID NO: 18337 - DNA, 389 bp, Homo sapiens
gactactatagggcgaattgggccctctagatgcatgctcgagcggccgccagtgtgatggatatctgcagaattcgcccttagcgtggtcgcggccgaggtacaagtcactgattatgccaatacaacaaagataaccacatgtttgaggattgcaatgtgccagacattcactgaaaaaaaaaaaaaaacacacaactaaacaaaatccacacaacaaacatctgagaatctggacacttcacatcagtgttttgaagtgtttcattaatatcttaagacaagtgtatcaaaaccttggcacccgccatctggttagaagagtgggcataactcttaattaagaatttagcagaagacatttctagattttgaataactttcctctg

SEQ ID NO: 18338 - DNA, 405 bp, Homo sapiens
ttgtatacgactcactatagggcgaattgggccctctagatgcatgctcgagcggccgccagtgtgatggatatctgcagaattcgcccttagcgtggtcgcggccgaggtactttttttttttttttttttttttttggcttggttttttgttttgagatggagtctcactctattcccaggctggagtgcagtggcttgatctggggtccctgcaacctctgcctcccaggttcaagcaattctcctgccttagcctcctgcacatgttggttttaataacaataaaaaaacccacttgggcgtagccataatccagcgttactaaaggaactaattctacccagagttaaagtatctcgccttttggctattaatgtcagtgaaaagatttagtgcagtttt

SEQ ID NO: 18339 - DNA, 617 bp, Homo sapiens
ggcgaattgggccctctagatgcatgctcgagcggccgccagtgtgatggatatctgcagaattcgcccttagcgtggtcgcggccgaggtacgctcatctaacatgatttgagaaattcataaccaggcactcaaatatccttgtagcctacgaaaagtgagtagggtaataatttttgctttgtagggagaactacaaattgatatcttttaatctggccattttttaacatttagctcaatattaacagagaaatgtagtcagtatttagtaaaataaatgtatttttaaaatatttttaggaagctgcagaatggcgactgagtgcttcttgataagtctgcagtgttagttctatataggctcccttctgtgcttctgtttttgcaaagacctgtttaaattaaaaagaaaattttaaaacaataggacatatgctatttataaagtttttcagttttaagacatcattagcatttctgtagtagcaaagagtcctacttaaaaagggctttcagatttcacaatttttcccccgattatacaataattaataaacacacatggacagaaaaacaatacccaacacatttcaagcaatactaattctaaaca

SEQ ID NO: 18340 - DNA, 344 bp, Homo sapiens
ccctctagatgcatgctcgagcggccgccagtgtgatggatatctgcagaattcgccctttcgagcggccgcccgggcaggtacccagcaggtgctggctctgggaagagacacagaggcctaaacctactgttatttctgccacccgggaggactaaaaactctgagccaggagagatcctaaaaattgggtcacaaagaaagaaggggcattacctgtggagaaatagtcacttattggatccacttttcaccttcttcaggaaaacggcaatgtaaggaaattagctatcttatttggctttgcctgtaagaacaaagactgaaaaatatataatcttttt

SEQ ID NO: 18341 - DNA, 331 bp, Homo sapiens
  misc_feature 155, 156, 157, 158, 159, 187, 188: n = A,T,C or G
ccctctagatgcatgctcgagcggccgccagtgtgatggatatctgcagaattcgccctttcgagcggccgcccgggcaggtacttttttttttttttttttttttttcctttttttttttttttttttttttttttttttttttagtttttgtnnnnntttttttttttttttttttttttttttnnccccccggggcccagggccctttttttggaaaaaaaaataaaaatcccggggggaaaatgccttttttaaattccaaaacaaaacccccaaaggggggggggggaacccccccagccttccaggggggaagggggcccttttt

SEQ ID NO: 18342 - DNA, 593 bp, Homo sapiens
tacgactcactatagggcgaattgcgccctctagatgcatgctcgagcggccgccagtgtgatggatatctgcagaattcgcccttagcgtggtcgcggccgaggtacaagttcacagttccttatttgaaatcattggggctatatatgtatttaggaatatggtttcttgttttggttttttaattttagaaatgttaggccaggcacagtggctcacgcctgtaatcccagcactctggggggtcgaggcgggcagattgcttgagcccgggagttcgagaccaacctgggcagcatggagaaatgctgtttctaccaaaaatagaaaacttagccagcatggtggtgtgtgcctatagtcccagctacttgggaggctgaggtggcaggatcacctgagccagggatgctgaggttgagtgagctgagattgcaccacaccactgcactctagcagcctgggtcacataccaaaaccaggtctcaaaaaacaaaacaaaaaaaagaaatgtgatgggcacaaatattttatatttcattctacttctcagggctatttcaaactctacaatcagatacattaatatttc

SEQ ID NO: 18343 - DNA, 608 bp, Homo sapiens
ccctctagatgcatgctcgagcggccgccagtgtgatggatatctgcagaattcgcccttagcgtggtcgcggccgaggtactccgttgagttcatgatgctctccggcccattcttcagatgcaagctgccagggccgggtctgaagagggcctctgcgttggtgttgatggttgtggtgagctgcttggcgtcatcgggcaccgtctttgccaccatcacaaaccggtccagatcgtcacacttgttctggggcttgttgatggccaagatattcagggaccagctgcactcatttaagtcatggctggtttgactcacgatctggtgggagtcttcgactcgttgcagctcccgcttcatcttgttgtggaggatgagttccgggaggcaggcagcatttgcaacagctcccttgacaaagtggaggtactcgggagggaacgagagcgggaaagagagagagagagagaacgagagcgagaacgagaacgggagcgagagagagcgagagagggaacgggagcgagaaagagaaaaagacaaaaaacgggaccgagaagaagatgaagaagatgcatacgaacgaagaaaacttgaaagaaaac

SEQ ID NO: 18344 - DNA, 594 bp, Homo sapiens
ccctctagatgcatgctcgagcggccgccagtgtgatggatatctgcagaattcgccctttcgagcggccgcccgggcaggtacatctccccattaattcaggtcatcttttgtatcctttaatgcaattttgtgtgtgtgtgttttttttttttgatggactttcgccctgtcacccaggctggagtgtaatggcacgatctcagctcactgcaacctccacctcccaggttcaagcgattcttctgtctcagcctcctgagtagctgagattacagacgtgtgtcaccagacccagctaatttttgtatttttagtagagatggggtttcaccatgttagcctggctggtctcggactcctgacctgtggtgatccgcccccctcggcctcccagagtgctggggttacaggcatgagctaccgcacctagctagaccttatgttttgaaccaagtaagggaacgagcataagctttgtggccaggcagaggtgggccctgcccaggcaaatgacctcacttttcaactcccttcatcccatcttcagcatggaggaggataaaaccctcctggggttttataaaccggggc

SEQ ID NO: 18345 - DNA, 563 bp, Homo sapiens
  misc_feature 208: n = A,T,C or G
gcgaattgcgccctctagatgcatgctcgagcggccgccagtgtgatggatatctgcagaattcgccctttcgagcggccgcccgggcaggtacaaggcattttgctcaaaactgagcttatatttggacattgtatcttcatcataatcctgtggtaatgctatatcgtaagtaacaggtaagaaacctgaagaggagggatagcanatcatgtatttggacatatttccattttttttttttgggttttgtgatgctagaagaatgaccagaatgagtcataggaagagtatacattcctgtagtattttgcaggacagaggtgtgacctcctagagtacctcggccgcgaccacgctaagggcgaattccagcacactggcggccgttactagtggatccgagctcggtaccaagcttggcgtaatcatggtcatagctgtttcctgtgtgaaattgttatccgctcacaattccacacaacatacgagccggaagcataaagtgtaaagcctggggtgcctaatgagtgagctaactcacattaattgcgttgcgctca

SEQ ID NO: 18346 - DNA, 405 bp, Homo sapiens
ctatagggcgaattgggccctctagatgcatgctcgagcggccgccagtgtgatggatatctgcagaattcgcccttagcgtggtcgcggccgaggtacatggatgggagcagctttgccaacccttgcaaaaggactctgaagaagacgacaagccttgttccggtcacacccggaagctgactggtttcacgcatggccgaagcctgaggaaacctatcgcgggaataattttccttaaaatttggacttgtacctgcccgggcggccgctcgaaagggcgaatttccagcacactggcggccgttactagtggatccgagcttggtaccaagcttggcgttaatcatggtcatagctggtttcctgtgggaaattgttatccgctcacaattccacaccaac

SEQ ID NO: 18347 - DNA, 393 bp, Homo sapiens
atacgactcactatagggcgaattgggccctctagatgcatgctcgagcggccgccagtgtgatggatatctgcagaattcgccctttcgagcggccgcccgggcaggtactcttctgtccccagaaagtcacacatcctttagtggagaggccaggttagtctcataaaaaggcctgctatagctgtgtaataaaaggtgaaatttaaaggcataaatccaagacaagaacaaacaatgcctgcaatcttcgcagactgccctgtgaaggctcagagtgagtcaagagtccccgcgtactgatttcctgacaaatgatcttctccagcttctgatcgccatccttgaacagggcaaaggtggccatcgccagccttcgatgcagctgccagt

SEQ ID NO: 18348 - DNA, 589 bp, Homo sapiens
  misc_feature 564: n = A,T,C or G
cgactactatagggcgaattgtgccctctagatgcatgctcgagcggccgccagtgtgatggatatctgcagaattcgccctttcgagcggccgccgggcaggtacaatattctttcccttacatattctttttaaatataagatatttttattgaaatgggtgattatgacaaagccttaggagagctcggtccaggggagcaatagagaagaactcagagaaaaagacaggctttgttttcccaaacattttccttatatccctggcttgctctttcccctgtgagcaccctggagctccagccctccgtcaccttctttctcccattttgcctgtgacttaggaatgaacgtgatggttaagctaccttcattaagcagcatgaccgcttcctgagctcctgctgccgcatttaggccctgtcagctgtgaggccactggtgctgagtcagagggaaaagctcagaacagccttgagcagcgaagaataaagcgtgactcatctcgtcctgcccacccctcacactggactataaataccctccctgggtctgtgtgctgntattccaaacgatgcgatgaatacc

SEQ ID NO: 18349 - DNA, 507 bp, Homo sapiens
ggcgaattgggccctctagatgcatgctcgagcggccgccagtgtgatggatatctgcagaattcgcccttagcgtggtcgcggccgaggtacgcgggtccctcactgggagcttccccatcctccctgccttccccagtgggaagttagggaagctcatgagcctgggaccccgcatgtcccaaaatgggattggagaagctggagagaaagcagaagaggccgaggagtgaggcagcagcctctatgcttgatttccacaccgggtccgtgcagaggaaacagaaactcccaactgtccttacccaccgacatcacagcccctatgaagaaagtagccacaatctcaaataacaaaagggaatgttctaaaactttgtcttccttataaaatggagaaaattgcacttgtgcttgctgtgtggtatataaaccaggattagtcccagggtcgtgaggtttctggtgaaaaggttaaatcgtagaagctagtatattttttatatt

SEQ ID NO: 18350 - DNA, 222 bp, Homo sapiens
tatagggcgaattgggccctctagatgcatgctcgagcggccgccagtgtgatggatatctgcagaattcgcccttagcgtggtcgcggccgaggtacttttttttttttttttttttgtttttttttttttttttttttttttttttttttttttttttttttttttttttttttttttttaaaaaaaattttttaaaaaaattttataaaacgctttttt

SEQ ID NO: 18351 - DNA, 617 bp, Homo sapiens
gactcactatagggcgaattgggccctctagatgcatgctcgagcggccgccagtgtgatggatatctgcagaattcgccctttcgagcggccgcccgggcaggtacaaatacatttgtaggatagagtgctagaagtgaaactgctgagtcaagacgtgcattttagattatgatagatatcaccacattgctcttttctgaagtcgttaagaatttacactcccatcaaaaaagtatgagtcttgcttagagtaggatgtcaagtgctgactgatcaatgtggaaaatgaactagaataaaaaaaatacaaattttgcaaccatcacagtaaacattagtccaggcaagcaccgtcaatggatatttgatctaaggggagagacttcagtcagtaggatatttttatggtcttaaagtgtatcccaagattgcttaaatacaaagggaaaaaaacagtaaccatatggtaataagacaaaatcttcatggattgatcaaaataatatcgccattgaaagacagacagtgtacatgtggttagcaggagtttaggatgagagaaatttagtggaccgagaaatagtctaaatatcagttttaatttgtgaaagaaa

SEQ ID NO: 18352 - DNA, 466 bp, Homo sapiens
acactactatagggcgaattgggccctctagatgcatgctcgagcggccgccagtgtgatggatatctgcagaattcgcccttagcgtggtcgcggccgaggtacaatataaaataatacatatgaagccacaatattcaattacagttcaaactataaattactaactacatgtagctgcttcatttttcgttttgcattttggcccctaatttaattatttacaactgatacctgctgagaaaaagatccaaacttttaaactttgtatgttttgtggagggtgcacaatttcttctaatttatcttcaagtgttttaaaatttaatttgtttttaatcataagatatcatcatggccaagagactgggaaaataacaattttattctttctcctaagattgggattttattattccaagatcttatgcttgaattacttaacaagaaggcatgattattcaga

SEQ ID NO: 18353 - DNA, 482 bp, Homo sapiens
  misc_feature 376: n = A,T,C or G
gcgaattgggccctctagatgcatgctcgagcggccgccagtgtgatggatatctgcagaattcgccctttcgagcggccgcccgggcaggtactgtattaatattacgttggttcaaaagtaattgtgggttttgccattacttttaattggcatttaatggcatttgccattacttttaataggtgtttaatattggcaatatcttaattggcattaatattacattggtgcaaaagtaattgtgggttttgccattacttttaatgccattgcgggtcttgccattacttttaattggcatttaatggcatttgctagtacgcggggagaaaagctttataagttcaagggctgtaaaatatgaactacttanggtccgttgcctttcatgggaactcggctagacttagaaaaagctgtttgttgtgctaatgtaaaagtgtcatacagtttagaaagattttgaagatggtaaactt

SEQ ID NO: 18354 - DNA, 603 bp, Homo sapiens
atagggcgctatgatgcatgctcgagcggccgccagtgtgatggatatctgcagaattcgcccttagcgtggtcgcggccgaggtactttattttttttttttttttttttttgatagactgggttattttatttatttttgagacagtgtctctctctgttgcataggctggagtgtagtggcataatcacagctcactgcagccccgacctcccaggctcaagcgatcctcccacctcagtctcttgagtagctgggacttcaggtgtgcaccaacatgcctggctaatttttgtattttttgtttttggagagatggggtttcaccatgctacccaagctggtctcaaactcctgggctcaagcaatctacctgcctcggcctcccaaagtgctaggattataggcttgagccaccgtgcccggcccaaaatggaaatttttaggaagttaggttttgcttgtgaaagtgatcatacgctgtcctaccactatcattttactgtgggtgctggaaaagaagaaataagatttgctccttaataaataaccttggtgttattggctttaaaatgaaaattttccttaaaaaccttaaaaat

SEQ ID NO: 18355 - DNA, 578 bp, Homo sapiens
  misc_feature 473: n = A,T,C or G
ctatatggcgaattgagccctctagatgcatgctcgagcggccgccagtgtgatggatatctgcagaattcgccctttcgagcggccgcccgggcaggtactttattttttttttggatttttttttacttccggtagcacattgacacaggggatcttgttatggtattgctgacaaaaattaaaaatgtgaaggttgaaaatactataggtgtaatgcccaagtttacataaaataccagtgaagttcctattgatagtgaatcttgggtctgtcttctaattcaaggaaggcaaccaattaaaacttcatttactttgccaaaaaggtaacacagaatcacttcagaaacataagattcttggcacaggtaaaagaatatgatgatctaaaattcatttctaaatttttgcttctagcccctggcctaccagctcaaggttgttcccagcaacatagactaaagtgtctntgttcatttatttattgggtggtttgttcattcattcagtcactcaccagtctgcttttaaagtttacaatggatgaaagttaccttttcaagttcattgacatg

SEQ ID NO: 18356 - DNA, 574 bp, Homo sapiens
ctatagggcgaatcgcgccctctagatgcatgctcgagcggccgccactgtgatggatatctgcagaattcgcccttagcgtggtcgcggccgaggtacatgcatgctagacattgagatgttataaattaactgtaaatattattgagattgtcaatatttctgggaaaaaaatgtattgggataatgctgcatatcatattctgtcagaaaagatctatacttaaaggcaaagattgggggatgttagttttcctaagtagggagggtagaattgggaaggggtagtaaaatgataggttgctctttacataaataaaaaggttttttatttaaaaaaaaaaaaaagtcttttctctctgatttaggcttgaccaaagctaacgccagacttctatgctaaaagcaatatgaggtatatgttaattagtttgagcatcataacatcaataaacaattaatattctgtaacccaattagcctctgcttcctctaagttaaagagaggtcacagagggaaaaaataattttataaaaatctaatataactaatcaggaaggaaggagaaacaaa

SEQ ID NO: 18357 - DNA, 494 bp, Homo sapiens
gacggatatgtgcagaattcgccctaacgagcggccgcccgggcaggtactgaaatcaaggaggaggttaagactttttatttataccactttgtaaattattatttctgagtatgggctgaaactaaactccagctggagtctatctctatagttccaagcctcccggaatgaaactttttaaatattatcttggctggggtgctgtgaggagtaactaagacagtgcctctgggtgacacacagctttaactgcaacctcaaaaattccattactcccatggcgatgagcggaggggagaattacgaactgctatttatggcttcttttaaatagtttatttcaatcacaaaagttacagttttataaaggcaggggaagaaggagaaaagaatgaattaaagaaagatcacacactctaaaaagcctgagctaactctgagaaagggttaagtaagatttcagactcttcacattttatgaagcctataat

SEQ ID NO: 18358 - DNA, 566 bp, Homo sapiens
  misc_feature 138, 175, 228: n = A,T,C or G
ctcactatagggcgaattgggccctctagatgcatgctcgagcggccgccagtgtgatggatatctgcagaattcgcccttagcgtggtcgcggccgaggtactattgacccagcgatgggggcttcgacatgggctntagggagtcataagtggagtccgtaaagaggtatctntactataaagctattgtgtaagctagtcatattaagttgttggctcaagagtntgatagttcttgtgcagtgagagtgagtagtagaatgtttagtgagcctagggtgttgtgagtgtaaatcagtgcgatgagtatgggaagggagcctactagggtgtagaataggaagtatgtgcctgcgttcaggcgttctggctgggtgcctcatcgggtgatgatagccaaggtggggataagtgtggtttctaagaagatataaaatatgattagttctgtggttgtgaatgttataattaaggagatttgtagggagattagtatagaaaggtagagtttttttcgtgataatggttcactggataagtgggcgttggcttgccatgattgtg

SEQ ID NO: 18359 - DNA, 491 bp, Homo sapiens
catgctcgagcggccgccagtgtgatggatatctgcagaattcgcccttagcgtggtcgcggccgaggaacaacgtctagaatctagccgacaggaccccatcgtggactggctttccaactggcattggcgttggccatggtgggtgtggttcttgttacttgtgcttctgattctcctcagcttaccctgattctgaaacctctaccaattatgtatttcccatttatctgcaagggtattttactaaaactgggtatgaaattgatgccaaatatggaagaaaagttaaatattaaatatgaacttcattgaatgtatacacaaacaaatggtcaccaagttccataacaagttgtgtgagccccttgaggcattcatacagtgctgtttctgggaaatctctatttcaaatagattgaaatagttattggaatacaaacagactaatcgcaaatatgagtttgacctctattgtggtttccttgaag

SEQ ID NO: 18360 - DNA, 540 bp, Homo sapiens
gcgaattgcgccctctagatgcatgctcgagcggccgccagtgtgatggatatctgcagaattcgccctttcgagcggccgcccgggcaggtacaaatggactaagacaagggggaagaaatttgcattcctgatcttcccaacttcttcaaattcacaacacttgaatgacagtcttatttcagcacttactgctatcacctattacttttatgtgtgtcttacctatttgagatgccagattccttggaagtagagaccgtgtctgaatcatcattgtattaagccactcatccttaacaaatgcccaagccatggttaaagttcaataaatactttgttgaatttattaataaaatggcagaaatgtcattctcttccatatatgtttaataaatccctgataggtgctaagcactgcactaggtaaaaattctcttctgatgctgtctttttggccaaccatttttttatcatttattcattagctgacatttgctaaatgctttggaggggtcaaaaggggaagtaatgagaaat

SEQ ID NO: 18361 - DNA, 408 bp, Homo sapiens
actactatagggcgaattgggccctctagatgcatgctcgagcggccgccagtgtgatggatatctgcagaattcgcccttcgagcggccgcccgggcaggtactttttttttttttttttttttttgggagtttgattattgaatgtcttgaagtagtcttaatgtgttaaatccacttggtgttctattactttcttaaacttgaatattgataactttctttaggtttcaaaagttcactgttattatttctttgaatagacttttaccccaacctcttgctatacctcctcttttagaccagtaatgattagatttttttgaggcctttttctagatcttgttggtttacttcattctttttcatccttttttcttttgctttctcttactgtgcattttcagt

SEQ ID NO: 18362 - DNA, 326 bp, Homo sapiens
ccctctagatgcatgctcgagcggccgccagtgtgatggatatctgcagaattcgcccttagcgtggtcgcggccgaggtactttttttttttttttttttttgggtggggttttttttttttttttttttttttttttttttttttttttttttaataaaaaaaaaccttttttaacaggggcttgcggtttgtggccttttttgaaaaaataaagttggaaactttttttccaaattaaaaatgaggtttttaaaaattttaccttgcccagttttgaaacattttaaaaccctttaagggggttttgaaaaaaaccagttttt

SEQ ID NO: 18363 - DNA, 338 bp, Homo sapiens
ttcgccctttcgagcggccgcccgggcaggtacgcgggattctccctgaatcttaccaacaaaacactcctgaggagaaagaaagagagggagggagagaaaatgagagagagagaagcaaaaaaccaaagagagagaaaaaatgaattcatctaaatcatctgaaacacaatgcacagagagaggatgcttctcttcccaaatgttcttatggactgttgctgggatccccatcctatttctcagtgcctgtttcatcaccagatgtgttgtgacatttcgcatctctcaaacctgtgatgagaaaaagtttcagctacctgagaatttcacagagc

SEQ ID NO: 18364 - DNA, 571 bp, Homo sapiens
  misc_feature 104: n = A,T,C or G
tcactataggtgcgggccctctagatgcatgctcgagcggccgccagtgtgatggatatctgcagaattcgccctttcgagcggccgcccgggcaggtacttanattttctatttttccctttctcgcttaaaaaaagtgtttaaatgtgtttttccctgaagatttccagtgtattccacagtgtttaaaaaatagtttccccaaaaatatatcttgaaagcatttgacacagtggtatttgtggcgtatctggcgcttgtcagagtggggcccaggcctgatgagccaccatcccatcacccgaatgcctgctgaaggtggcgcacacgtgtgcctgggatgtccggctcttcacaggggatcagacccgcgtaccaagtgaatttaaataattggtgtggattggtcagtagctaactgggcttttaaagagtattgaagattgaaagggtttttctttcttttttaaaaaagaaaaacaaactattgattgtcgataatgaaaagctagggtttgccctcttcatgtctactctccttccaaatagttatatccaaaactgtttttc

SEQ ID NO: 18365 - DNA, 477 bp, Homo sapiens
ccctctagatgcatgctcgagcggccgccagtgtgatggatatctgcagaattcgccctttcgagcggccgcccgggcaggtactgagctccacaaacgtggccatggttggtgcggaaatgattctgagtgagcaggtagaagtctcacgtcctgctgtgtcagagttggttccttccagagggttcgtggtctcgctggcttcaagaatgaagccgtggaccttcacagtgtgtgttacagctgttaaagatgttgtgtctggagtttgttccttcagatgtgtctggagtttctcccttctggtgggtttgtggtgtcgctgacttcaagaatgaagccgcagactgtcgtggtgatcgttgtaactcttaaaggtggtgtggacccaaagagtgagcagcagcaagatttttcgtcaagagggtaagaacaaagttttcacggtgtggaatggtatctgagcggttccctgct

SEQ ID NO: 18366 - DNA, 236 bp, Homo sapiens
acgactcactatagggcgaattgggccctctagatgcatgctcgagcggccgccagtgtgatggatatctgcagaattcgccctttcgagcggccgcccgggcaggtactactgaagaaacagtttatgtgcaaggtgtataaaaaaatatacctttgataaaaagattataaggaggcctaagaatgtgaatttttacctaatttaaaagggttaaaaaaaattatttgatttta

SEQ ID NO: 18367 - DNA, 669 bp, Homo sapiens
tatagggcgaattgggccctctagatgcatgctcgagcggccgccagtgtgatggatatctgcagaattcgcccttaccagcggccggcccgacgggctcacagctcatgatgctgaaccgcgagaatgtgatgatgcttacacctgaagcagacttaactgaacagatgaccccaatctgcctttgagatctggaagacctagactattcacaaattcactgtttaacttattgagcgtaagccaaatgtgatcctaaacactgctacttgatccctactgccgacctggaatggagacttttatctacttctctctctctgaagatgtcaaatcgtggtttagatcaaatatatttcaagctataaaagcaggaggttatctgtgcagggggctggcatcatgtatttaggggcaagtaataatggaatgctactaagatactccatattcttccccgaatcacacagacagtttctgacaggcgcaactcctccattttcctcccgcaagtgagaaccctgtggagatgagtcagtgccatgactgaaaaggaaccgacccctagttgagagcaccttgcagttcccccagaactttctgattcacagtcttattttgacagcatgaaaaggcctcttgaagcataactttttaaatatctttttc

SEQ ID NO: 18368 - DNA, 583 bp, Homo sapiens
ctatagggcgaattgagccctctagatgcatgctcgagcggccgccagtgtgatggatatctgcagaattcgccctttcgagcggccgcccgggcaggtactaaatttcatgtagaaatgtcttagttgaaaagccattttaagtcctatataagctaacagtgattttactccttagttcttcactcataaggattttccctgcttcatgaaataaacagtgttgccaccatggtttgaggtctcaatgtggcaaatttagctttcatgttgaccactctgctactaatagaaataccaaataaagagaagcagccataccagttagacatattcaaaataaatccaaagatgctatttattataagtttcatagaaatgattatcaaaaacacttgcatgccaatgttttcttgtgccatttctttctacaataaatctatttggcttctgtttcaccttagctgtcatagacgtgttgttcaagtatcatattgtcagtaccatacagaagttaaatcccaggaactatgaacactagaccttatgtgggttattccttcaatcattttaaacattgaaa

SEQ ID NO: 18369 - DNA, 401 bp, Homo sapiens
tatagggcgaattgggccctctagatgcatgctcgagcggccgccagtgtgatggatatctgcagaattcgcccttcgagcgggccgccgggcagggacctaagaatattcccctaactttctgatcttgttgagggcatgcatggatcacttgttaataatatgtaacacattaatccaaatctttaaggataaacaagaaaaggaaaaaagcagataaatgcattattgtcaaaaagcagtcctacattcaaggagtcatgagataaaatgaagtgcctgggggaaactttgagaagcttagtttgaatgaacagaggagaattgggacttcttaaagagcgataacactggaaatgtgtggaagagtccaaaccacatactatccaaggacaatccac

SEQ ID NO: 18370 - DNA, 543 bp, Homo sapiens
  misc_feature 98, 123, 337: n = A,T,C or G
cgaattgtgccctctagatgcatgctcgagcggccgccagtgtgatggatatctgcagaattcgccctttcgagcggccgcccgggcaggtacgcggngtatgttgtccttgaaagggcatangtctgtgggaggcatccggtcctctctgtataatgctgcacaattgaagacgttcagaagctggccgccttcatgaaaaaatttttggagatgcatcagctatgaacacatcctaaccaggatatactctgttcttgaacaacatacaaagtttaaagtaacttggggatggctacaaaaagttaacacagtatttttctcaaatgaacatgtntattgcagattcttcttttttgaaagaacaacagcaaaacatccacaactctgtaaagctggtgggacctaatgtcaccttaattctgacttgaactggaagcattttaagaaatcttgttgcttttctaacaaattcccgcgttttttgcctttgctgctactttttctagttagatttcaaacttgcctgtggacttaataatg

SEQ ID NO: 18371 - DNA, 627 bp, Homo sapiens
  misc_feature 389: n = A,T,C or G
acgactcactatagggcgaattgtgccctctagatgcatgctcgagcggccgccagtgtgatggatatctgcagaattcgcccttagcgtggtcgcggccgaggtacctgagcccctaaaaggtaaagactcatccaagctgttctgagattccctccaggcagggaaatgactatctggatctgagattatgtcatcttcatcaagttcttctttaaccagagaggcttcgggtttcagacacacagaagcataattctggccatacaaaaacctcaatgtttcttctgtcttccactcaatcaaagtctccttcaaaactttaagtaagtttctctttccaacttcaggacacacctgcactgaactagacactgacctagacactnggtttgatttggcaaattttctcttaaaatgctctgcacttttcttacttatgcctactagagttatttctgacctactgtattcactttcagaattttctgacgcttttaatctttcaggcaaagtgctatttgaagaactctgagtatttactttctgtaaaggaagttcacatgtagcatctttctcctgactatctaatttgcaatcgcctaactgctcagtgacatctactac

SEQ ID NO: 18372 - DNA, 592 bp, Homo sapiens
  misc_feature 384: n = A,T,C or G
ctatagggcgaattgggccctctagatgcatgctcgagcggccgccagtgtgatggatatctgcagaattcgcccttagcgtggtcgcggccgaggtacaggcgctaattgttgtgataatttgtaattgtgacttgttctccccggctggcagcgtagtggggctgccaggccccagcttgttccctggtccccctgaagcctgcaaacgttgtcatcgaagggaagggtggggggcagctgcggtggggagctataaaaatgacaactaaaaaaaaaaaaaaaaaaaaaaaaaaaaggtccttactgtcgttggatcccatgctaatgaggtcatcagaatcaacattgtgaactatggctgccttgtatcctgctctctgngcatttaaaacctttatatcaaaattacaatcaagtcttctaattaacacgatgaaagtgccagatgaattgtcttttactggtggaggcactatgggttcacaggcattctctggttttgagttaatcaaaaaaccctttaaaccttcagctggaagtctataaccaaatcttgcagggaggtcatcaaatgtctgagatgcatttt

SEQ ID NO: 18373 - DNA, 394 bp, Homo sapiens
actactatagggcgaattgggccctctagatgcatgctcgagcggccgccagtgtgatggatatctgcagaattcgcccttagcgtggtcgcggccgaggtaccttgactttgttcacagcatgtagggtgatgagcagtcacaattgttgactaaaatgctgcttttaaaacataggaaagtagaatggttgagtgcaaatcctttagcacaagataaattgagctagttaaggcaaatcaggtaaaatagtcatgattctatgtaatgtaaaccagaaaaaataaatgttcatgatttcaagatgttatattaaagaaaaactttaaaaattattatatatttatagcaaagttatcttaaatatgaattctgttgtaatttaatgactttt

SEQ ID NO: 18374 - DNA, 463 bp, Homo sapiens
cgactcactatagggcgaattgggccctctagatgcatgctcgagcggccgccagtgtgatggatatctgcagaattcgccctttcgagcggccgcccgggcaggtaccctgacgccaaaaccagaaaaagacacaacaaaaaaggaaaactatgtgccagaacttaaagataactttaaaaaaaagacgtaaatgcaataaacagatatcaatagaaacaacaaaaaattagaaagtttggggtgatggagttaaagtttataaattgtatgagttatttattagttgggtttttttgcaatcagaattaaattgtcatcaatttaatatgatcatttataaaatgtcgtttacaagcctcatggtaacctcaaatcaaaagacctacagtagacatacaaaaaataaaaagcatgaaattaaaacacaccataagagaaaaatcacctttatacaaatgaa

SEQ ID NO: 18375 - DNA, 339 bp, Homo sapiens
attgggccctctagatgcatgctcgagcggccgccagtgtgatggatatctgcagaattcgcccttagcgtggtcgcggccgaggtactaaacatccctcattatcattctcagggaaaagatgaatgtagaatctctgctgagctagtatttcctgacaccctgtttatgtgccttgtgaattgtgggcattgccatgtggggtatttcatttcatctttacaatcaccctccaaaagtaaaaaaacaaagactgcctcactcaaatgtccactgccatcagtagccccatgagtatatatacggtgccaagctctgccatgatctctccagagaaga

SEQ ID NO: 18376 - DNA, 404 bp, Homo sapiens
tatagggcgaattgggccctctagatgcatgctcgagcggccgccagtgtgatggatatctgcagaattcgccctttcgagcggccgcccgggcaggtactgggacatccgcgggctggcccacgccatccgcctgctcctggaatacacagactcaagctatgaggaaaagaagtacgcgggtatgatctttgtataggacgtgtgttgtcattatttgtagtagtaactacatatccaatacagctgtatgtttctttttcttttctaatttggtggcactggtataaccacacattaaagtcagtagtacctcggccgcgaccacgctaagggcgaattccagcacactggcggccgttactagtggatccgagctcggtaccaagcttggcgtaatcatg

SEQ ID NO: 18377 - DNA, 451 bp, Homo sapiens
gcgaattgggccctctagatgcatgctcgagcggccgccagtgtgatggatatctgcagaattcgccctttcgagcggccgtccgggcaggtacaattcagtgacatttattatatttacaatgttgtgcaaccatcaccactaattcatcaaattttaataatcttttaatttttgagccagatttagcagtgaggggctatattccaactttaatgacactaatgttaataagttctgataacccactaccatcagaccagctgtaattcatccaattttcatcatcctaaaaggaatccccatacgcattacgcagtcactcccttttcaccccctccctagttcctgataactactaattggctttgtcaccatggatttgcctattttggatatttcatataaatggaatcatgtggctggcttcttccacttagcatgctttctt

SEQ ID NO: 18378 - DNA, 553 bp, Homo sapiens
  misc_feature 116, 122, 144: n = A,T,C or G
tacgactactatactcactatagggcgaattgcgccctctagatgcatgctcgagcggccgccagtgtgatggatatctgcagaattcgccctttcgagcggccgcccgggcaggnactttntttggtgtatggaggggttttnaggcagacagagagtaactttttcacccatgctggagtgcaggggcacggtctcggctcactacaacctctgcctcctgggttcaagtgattcttttgcctcagtctcctgagtagctgggattacaggtgtgcaccaccaagcctggctaatttttatgtttttagtaaagacggggtttcaccatgttgatcaggctggtctcaaactcctgaccttgtgatattttcttaatacttccttttactttactgtgtggactcaccctgaattttttcttgagcaaaatccaagaacccttttttggggcttggattgggacctctttctggtagaactctgcacattttcttatttttccaattaaaagaatcagctgcatttgtcttcagtggtctaaataaaattt

SEQ ID NO: 18379 - DNA, 428 bp, Homo sapiens
gcgaattgggccctctagatgcatgctcgagcggccgccagtgtgatggatatctgcagaattcgcccttagcgtggtcgcggccgaggtacttttttttttttttttttttttttttttagagacaggttcttgctgtgttgcccaggctggagtgcagtggtgtgatcatggctcactgtagccttgacccccgggggtttaaacaaatccgcctgcctaaacctttggagtagctgggaccacaaggcatgcaccaccctgcctgggcaattatttcttttcttttctttcttttttttttttgggaatgataaagacattttaaatgggccctagtgatgactgaacaactctgtatatactaaaaaccactgaattatacactttaagtgagaaaacagtatggtttgtgaattatatttcaa

SEQ ID NO: 18380 - DNA, 443 bp, Homo sapiens
  misc_feature 307, 362: n = A,T,C or G
tacgactcactatagggcgaattgggccctctagatgcatgctcgagcggccgccagtgtgatggatatctgcagaattcgccctttcgagcggccgcccgggcaggtacaggaatagtcaattatgtgttcttctcatgctcagtaaatcagaactttacataagttcaggtgaacatagagtagctacctgggggagatatttcacctttttatctgtagcgctctgcttaagaacaaaggaaaaaacagcttcttgcatgattcagctttcagcttaatttttttcctttaggcatagtgaatnggggtcccaggtttttatttttctttcacaaattaaaactgatatttagactatntctcggtccactaaatttctctcatcctaaactcctgctaaccacatgtagtctctctgttcatctccctatttatttata

SEQ ID NO: 18381 - DNA, 609 bp, Homo sapiens
gactactatagggcgaattgtgccctctagatgcatgctcgagcggccgccagtgtgatggatatctgcagaattcgccctttcgagcggccgcccgggcaggtacaaaaagttaaaaagacagccctattgtgatcagtggagatggagatttgaaagaagtttcaatttaatgaatgtgtttggtaaaagggtgagaaatagtttaacagtagatcacatcaggtttaatgaccattcattcattggaaaaagaatcgcactcattggcgcgcagcttcatttgtcaaatcatggttgaatcgaaactataggttggcaatggatataagagttggcaaaacttgggctgagtgcagtggctcacgtctgtaatcccagcactttgggaggccgaggcatgtggatcacctgatgtcaggggtttgaaaccagcctggccaacatggtgaaaccccatctctactaaaaatacaaaactggccaggtgcagttggctcatgcctgtaatcccagcactttgagagaccgagggaggcagatcacctgaggtcaggagtttgagaccaacctggccaacatggtgaaaccctatctctactaaaaata

SEQ ID NO: 18382 - DNA, 544 bp, Homo sapiens
tactatagggcgaattgcgccctctagatgcatgctcgagcggccgccagtgtgatggatatctgcagaattcgcccttagcgtggtcgcggccgaggtactgtgtgacattagctctgatttcaaagagcttacaacagagctagataaaacaagaccaggatatttagaacatttggagaataacgagaggatatataataaagggctaaactgaatataattaaatgtcagcctgcatggtgccatgagcaacagttaattaaatccaggccataatccatgtcctggttctaagaaaagagtctcctacaatctcttactttccactgtaactaatacctggagttcagtccagtaacgtaatttagcaatggctatatttccatgctcaaaagggaactctgttgatcttgaaatgtgtatgtatgtttaaaaatgtctatttaattttggggggaggaaaggtagctttgattgcacttggtgattgagtcttcaaacttaatgcttctgggaaaaagatagcatagactcataaaat

SEQ ID NO: 18383 - DNA, 552 bp, Homo sapiens
tatagggcgaattgggccctctagatgcatgctcgagcggccgccagtgtgatggatatctgcagaattcgcccttagcggccgcccgggcaggtactgggattacaggtgtgagccaccacacccgggctctgtgatttgtttgttttttgagatggagtctccactgtcatcaggctggagtgcaatggtgcaatctctgctcactgcaaactccgcctccctggctcaagtgattctgctgcctcagcctcccgagtagctgggattacaggcacatgccactgcgccaagctaatttttgtatttttagtagaaacggggtttcaccatgttgcctgggctggtcttgaattcctgacctcaggtgatacttgcctcgccctcccaaagtgcttgggttacaggcgtgagccagtgcgcccagccgcctctgtgattttttaaattgtgtcactcacactaaatttaacagcaatttttttgataactcattttttttgtggtctttccagaacattaaacttagttttcatagaaattgcaattctc

SEQ ID NO: 18384 - DNA, 550 bp, Homo sapiens
  misc_feature 418: n = A,T,C or G
tgtatacgactactatagggcgaattgggccctctagatgcatgctcgagcggccgccagtgtgatggatatctgcagaattcgccctttcgagcggccgcccgggcaggtactttttttttttttttttttttttttttttgggattttagcttattttattaatagcttatttccttacaaatatttccccacacgtttatttagtcgcagacttcatgcatacaaaatgcacactgctatgatcatcgtaaccatcagcaagcaggcattgtcatcagcgcttctttatttctgtggtttctcagtctcttttattttctttctttaaaaaagaaaaaaaacttttttttcctggtcaacagggcctgggcaacatggcaagactgtctctttaaaaaaggaagaaaaaaattanccaggtgtggtggtgcgtgcctgtgcttccagctacttgagaggttgagataggaggatcgcttcagcatgggaggtcaaagccacagtgagtcgtgtaaaataaaaacattcagatgctcttagtgacttc

SEQ ID NO: 18385 - DNA, 647 bp, Homo sapiens
acgactcactatagggcgaattgggccctctagatgcatgctcgagcggccgccagtgtgatggatatctgcagaattcgccctttcgagcggccgcccgggcaggtacgcgggtaagactgacgtatccgtatacttaagtgttcctgaaggtcccaggaaatcctagtgcaatgctatgaaagtctttggagtctttgaatgcatctactttacaggcctctgcatggacctgggaagctttggaaagatgtgtcccccagaacatctaaggcatattagaaaagttgtttacacaaatgcatgggagagttaaatattttgtcaacaattgtctaaaatgttaattgttagcttaagaaagtcaaacaagttaaatcattgccagagtacctcggccgcgaccacgctaagggcgaattccagcacactggcggccgttactagtggatccgagctcggtaccaagcttggcgtaatcatggtcatagctgtttcctgtgtgaaattgttatccgctcacaattccacacaacatacgagccggaagcataaagtgtaaagcctggggtgcctaatgagtgaactaactcacattaattgcgttgcgctcactgcccgctttccagtcgggaaacctgtcgtgc

SEQ ID NO: 18386 - DNA, 442 bp, Homo sapiens
gcgaattgggccctctagatgcatgctcgagcggccgccagtgtgatggatatctgcagaattcgccctttcgagcggccgcccgggcaggtacgcgggtattccacctgttctttgagctggtccagtgttgctggagagctctgcttgctgccttggtctgcagtggcagctgtgctttcctacaagcccaacttcatatattctgtggttttgggttttgaatgtttcctagtttaatcaaggatgggcatttctgtttccattttgtgttatttttagttatccatggaaagatagaaacagaactatctttagtattaaaattacaagtttccaggaatcagttctgaaattattttgcatctttgaagtgtcttaaattttaaaaattggtcttggccaggtgcggtggctcacgcctgtaatcccagcacttcgg

SEQ ID NO: 18387 - DNA, 454 bp, Homo sapiens
  misc_feature 17: n = A,T,C or G
actatagggcgaattgngccctctagatgcatgctcgagcggccgccagtgtgatggatatctgcagaattcgccctttcgagcggccgcccgggcaggtactttatttttttttttttttttcttttttttttattttttttttttttttttttttttttttttttttttttttttttttttttttttttttttttttattttttttttttttttttttttttgaaaaaccagaaaaaaaaaaatattttttccccccaaaaaaaatttttacaaaaaaatttttttttttttaaaaaaaaaaaaattttttaaaaaaaaaagtttttttttttttttaaaagggggaaaaaatttttttggggccctccaaaaaatttttttttaaaagaaaaaaaaaaattttattaaaccccggggagtttttattttttttataaaaaaaaaaaaaaaa

SEQ ID NO: 18388 - DNA, 570 bp, Homo sapiens
cgactcactatagggcgaatagggccctctagatgcatgctcgagcggccgccagtgtgatggatatctgcagaattcgccctttcgagcggccgcccgggcaggtacccagccatgtgaggtgtcagtctgcccctgctggggggtgcctcccatttagactgctcggggatcaggggtcagggacccacttgagtagtcagtctgcccattctcagatctccagctgcgtgccgggagaaccacttctctcttcaaagctcagatggaaatgcagaaatcacccgtcttctgcgttgctcacgctgggagatgtagaccggagctgttcctattcggccatcttggctcctccccgattttgcccaaattaatgtcagataccaaaccagttattcaggaaggttggactacaccaagaaaaattgatgccaaaaaaatcccccatacctaggtatattatttgtaaacctcagaaaagcaaaagtaaaaaatgtcctgaaagaagaccaaagaaaaaacaccttaccaatagagaaacaaaggtaagaattaaatctgtcttttcag

SEQ ID NO: 18389 - DNA, 196 bp, Homo sapiens
gcgaattgggccctctagatgcatgctcgagcggccgccagtgtgatggatatctgcagaattcgccctttcgagcggccgcccggacaggtacgcgggggtagtcgggtatgagaacgattgcaagcaaaagcagctgagggacgctgtccaaggagtaggctcagtagcacgaactgcaaatacttgagaaggg

SEQ ID NO: 18390 - DNA, 471 bp, Homo sapiens
agatgcatgctcgagcggccgccagtgtgatggatatctgcagaattcgccctttcgagcggccgcccgggcaggtacacccggagcccgaggcttgcggcgaccacgagcagcaatggactcttgtggctgacttcactcaccatgctcacactgcctccttgtcagcagtagctgtaaatagtcgttttgtggtcactgggagcaaagatgaaacaattcacatttatgacatgaaaaagaagattgagcatggggctctagtgcatcacagtggtacttttttttttttttttttttgtagagctagggtttcaccatgttgcccaggcttgtgattttgatgtctatgattatagactaataggaataattatttctaaacatctgatttacacatacagagaggattagtattttttttaaaaagtatatcttaaaacacatatgctcattaatagttatgatttc

SEQ ID NO: 18391 - DNA, 456 bp, Homo sapiens
ctatagggcgaattgggccctctagatgcatgctcgagcggccgccagtgtgatggatatctgcagaattcgccctttcgagcggccgcccgggcaggtacggggggggtacgtatgctgggtttgcggagcaactagctactcggcgggatctcccggcggatgggtaaataataaagaaggaagtatagcctcctactaaggatgtgttagaccccttaatgattgaaagctaaaaagcaccatctgtggtgttaatgcttaattctccagaagaggaaattttggctacagcatgtgaagccatgtataactttgctttaaaaggtgacgaaaataaaacacccctccttgaactaggagctgtggaacctttaactaagctgctcacccatgaagacgaaatagtatgaggaaatgctactatcatatttggaatcctggcttctaatcatg

SEQ ID NO: 18392 - DNA, 387 bp, Homo sapiens
agggcgaattgggccctctagatgcatgctcgagcggccgccagtgtgatggatatctgcagaattcgccctttcgagcggccgcccgggcaggtacacactccacagggtgggagtggtcctagcacactggctcaagagcccagttacagaattttgtggggtttaaataccctctagaggtttccattggttacttccattggtttatattggtgtatgccctgtgtaatgaagagcatgaagttaagttacaaagtcatctactctgtgtatgccctatgtaaatggagagggtattacctgtcatcactgaagtgtttccatttgatttagttctaggaaatcagcgtgaatcggccttatgttctctccctccagccactg

SEQ ID NO: 18393 - DNA, 645 bp, Homo sapiens
ctactatagggcgaattgggccctctagatgcatgctcgagcggccgccagtgtgatggatatctgcagaattcgcccttagcgtggtcgcggccgaggtactctaggaatttaaaaagacacaaaattatttttttccagactagtgtgccatggatttctgataagaattaacattcttgaacaaaggtatcagaaagggtaactcgagttgaaggtttgtgaatagaaggggaaatgtgatagaagattattcagaacaaaataagtagacaaaataacaaaagacaggaaaataagtctctttgtatccttattaatcatttgaaattatgctataatattttttaaaactcacctgtttggttctgggtgaagcagttcctgaaggagtgttttgtcagaatatattgttaggagaatagagggttctgtggccaagtaagtttgggaaatagtgggttagacaaagttgagttactgttggcctttcagacctttgatacgctaatgtgcattttaaatctccaagaagcacctctattttatacatcatttccctaatttattttaatatggatttcttgtttttgttttcttgagacggagtcttggtcttgtcacccaagctggaatgcagtggca

SEQ ID NO: 18394 - DNA, 502 bp, Homo sapiens
  misc_feature 103: n = A,T,C or G
ctatagggcgaattgtgccctctagatgcatgctcgagcggccgccagtgtgatggatatctgcagaattcgcccttagcgtggtcgcggccgaggtactttntttttttttttttttttttccttgagacagggtctcactctgtcactcaggttggagagcagtggtgtaatcacagctcacggcagccttgaactcctgggcacaagtgatcgtcctgtcacagcctcctgagtagctaggactacaggtgcatgccactatgcctggttaattttttaaatttttgtagagacatggtctcattatgttgacaaggctgggatgttccccccacctcctgtgagagtctcattgtcacccaggctggaatgcagtggtgtgatcttggctcactgcaacctccgcctcccaagttcaagtgattcttgtgcctcggcctcccaagtagctgagattacatgcgtgcgtcaccacacctggctaatttttgtatttttg

SEQ ID NO: 18395 - DNA, 356 bp, Homo sapiens
  misc_feature 183: n = A,T,C or G
tatagggcgaattgtgccctctagatgcatgctcgagcggccgccagtgtgatggatatctgcagaattcgcccttagcgtggtcgcggccgaggtactgaaactgtagcccgggtgaaagaagtatgcatgtgcacgaagatacatacatagtccgctgtaactaggggggggcggcgggtnagtccacacttacacaccagcaggtatgctggggaagggccccccaggtggagtgcctgacatagggctcgctccagaggcgcctgactcagaagctcctgaaagaggtgtctacttgagggggggaggagtacctgcccgggcggccgctcgaaagggcgaaatccagcaca

SEQ ID NO: 18396 - DNA, 421 bp, Homo sapiens
  misc_feature 17, 198: n = A,T,C or G
actatatggcgaattgngccctctagatgcatgctcgagcggccgccagtgtgatggatatctgcagaattcgccctttcgagcggccgcccgggcaggtactttttttttttttttttttttttttaaaattaaatttttttttttttttttttttttttttttttttttttttttttttttatttttttttttttnaaaaggtttccaacaaactttttttttcaaacccctttttttttctttttgaggaccaaaattttttttaattcctttaaaatgtccaatcacttttaattccggagaaggttttttctttttttacaccattttttttggttgggggccaattccccattctttaaggtttccctccccactttttcctggaggagggcccctccaaattaaaacctttttc

SEQ ID NO: 18397 - DNA, 549 bp, Homo sapiens
ctcactatagggcgaattgtgccctctagatgcatgctcgagcggccgccagtgtgatggatatctgcagaattcgccctttcgagcggccgcccgggcaggtacgcgggtatatactgttatgcataaagaaccttaggtgttcattcgtttgcttctattgatactacattaaatttacttataatcataggttaatagtttaatgaaagcataaaaatttagtatgcctatgtttttctctttctttccagacggattccatttctaggtatgttttatttattttttaactgacatttttttcttatttttatctttgttaaaaatgtgttgctaggaatttatggattttgtaagtttatagaattatttgataataaaaaacaaattttgatggccttatcattgttactagctttctttgttaaaggctttacttcaagatcactagtcagagcaagtaagatttttccccaaatctctacaacaaaggtattccaaagtttcttaagttagttcaactatctcattataacatcaaggact

SEQ ID NO: 18398 - DNA, 313 bp, Homo sapiens
gctcgagcggccgccagtgtgatggatatctgcagaattcgcccttagcgtggtcgcggccgaggtacttgttagctgtatatgtcagaattgattaaagagaaccaactattcttgtgcaagggatggtattgtagttaattatgacatttggagaaactaatttctgtctgtctaccctatctctgttccatttagacttagagacttacatgggcaatgcttgactttttgcattcagcacataaaagttaagttattccacttgtggttaaaattattaacctaaattttatattgaccttccttgact

SEQ ID NO: 18399 - DNA, 685 bp, Homo sapiens
acgactcactatagggcgaattgggccctctagatgcatgctcgagcggccgccagtgtgatggatatctgcagaattcgcccttagcgtggtcgcggccgaggtacgattcacgctgtgcctgttggaaatcagtctgaacagtgtgatcccacgacgtcctgagaagcatctctctactacaaaacaggcaatcagttcctactgcaccatgccatgggaatgatattcaagggtggtgacatgactgaggtagtaaatcctttatcatcatgactgagaggatgcagaaatctgtgcggaagaaaagagattgtgagctttttgaggcagtgacaatatatgatatgaatctccatattcataatttgcatatagaagctgctcaatgaatatttaagttaaaaaaaaatacagtccttcatggcaaggaatttcatcccagtctctgccaacaagaagaactcttctgtaatgggccatggggcaggccaggccctccttggctctgtggctctggactgggcagcagcaactctcatccctgtgtggagccatcatatcccctgtgaactgcatgtacctgcccgggcggccgctcgaaagggcgaattccagcacactggcggccgttactagtggatccgagctcggtaccaagcttggcgtaatcatggtcatagct

SEQ ID NO: 18400 - DNA, 615 bp, Homo sapiens
  misc_feature 14: n = A,T,C or G
tacgactactatanggcgaattgggccctctagatgcatgctcgagcggccgccagtgtgatggatatctgcagaattcgccctttcgagcggccgcccgggcaggtacaggttgtgtctgccagttcagtccacagctcagagtatcaccttgtcctcattccatggtataagctgttgcggggggcaggtctgcgggtcgtggattcactggactggatgggacatgatccagaactccgctccgtttggcttcccaaggatcccaccaactcattctaatcagtgatcactgaggaaatgcattgtattcctattcactatttcaaagatcaggtctacctcattggcatattaagaaagttttctcaagtatatttagtgtttatcattttactatagttcttcaaatgtctgacattcatcctttccctacctctacattcctttctttttcacattatctttcttgattgctttttaatagaaaaacaaaccaagacatggatttactgtgcatattagcagatccatactggaaaatgcatggagggttcatatacaccacttacagtaagtataactcaaagtataaagtcgaaaagaaagaatctg

SEQ ID NO: 18401 - DNA, 286 bp, Homo sapiens
atagggcgaattgggccctctagatgcatgctcgagcggccgccagtgtgatggatatctgcagaattcgccctttcgagcggccgtccgggcaggtaccaagacagagaacctgctcgggagctatttccccaagaagatttctgagctggatgcatttttaaaggagccagctcttaatgaagccaacttgagcaatctgaaggccccattggacattccagtgcctgatccagtcaaggagaaagagaaagaggagcggaagatacattcaggagaaggaaga

SEQ ID NO: 18402 - DNA, 478 bp, Homo sapiens
  misc_feature 222, 223, 233, 248, 249, 261, 290: n = A,T,C or G
ctatagggcgaattgggccctctagatgcatgctcgagcggccgccagtgtgatggatatctgcagaattcgccctttcgagcggccgcccgggcaggtacaattgttttagaagataatttgtttttctctcttcagtttcgcatattactaaagacaaatcatggtaggaattggtttgtttattataccttggcctacactatttgtataccaatgcanncaagaatganttattttttacttanngcttttaagtangcctctgatggaactttgttccataacangaatctcaaataagactttgtaaaacccgtaaaacccaaccaagccatggatttatgccattaaatacccatcagttgggtgaaatttcctctccttttgagggcccaacataaacctggggcttctgcacttgtcaaaaaatgatattctttacttacacaatccaaaacccttttcatggactgta

SEQ ID NO: 18403 - DNA, 607 bp, Homo sapiens
tacgactcactatagggcgaattgggccctctagatgcatgctcgagcggccgccagtgtgatggatatctgcagaattcgcccttagcgtggtcgcggccgaggtacgcgggaagaaatcaaaagagaaattggaaagttcattgagctgaaaatgaaaacacgatatatcagaatcagggagttgcagctaatgtatgcttggaggcaaatttaagcactaagatcctatattataacaaaaaagaaaggtctcaaatcagtgacctgagttttcaccttcagaaactggaaagggaagagcaaattaaacacaatgtaagcagataaagaaaataataaaaagaacagaaatcaatgaaagaaaaaagggaaaattataagaaaaatccaagaaagtaaatgctaatcattttaaacaatcaattaaattgttagacttctagtcagctgatcaagaaaaaagtaaaaaggcacgaattaccaataccaggaatgaaagggtgggtgtcaccaaatcttctacagtaattataaggaaacaatggactactgtaagccatttttttctaataaatttgataacttagatgaaatgaacacattc

SEQ ID NO: 18404 - DNA, 297 bp, Homo sapiens
ctctagatgcatgctcgagcggccgccagtgtgatggatatctgcagaattcgcccttagcgtggtcgcggccgaggtacttttttttttttttttttttttttttcgagcagttaacattcctttattttaatttcaagggcgggggaaaggaaaaaagggaaaaaaaaataccgggaaaacttaccagcaaattttttcactgtttatagctttcttggggaaaaaaacacatgcacgaatcctggggttaggaatattttaagccgttatcttcaatattattcatccaggact

SEQ ID NO: 18405 - DNA, 188 bp, Homo sapiens
atagggcgaattgggccctctagatgcatgctcgagcggccgccagtgtgatggatatctgcagaattcgcccttagcgtggtcgcggccgaggtactatcagaacaaatacataaaataacttcccatagagaacaggatttagcaataatagctccttagatactcagtggcattctgactccaat

SEQ ID NO: 18406 - DNA, 489 bp, Homo sapiens
  misc_feature 11: n = A,T,C or G
actcactatanggcgaattgcgccctctagatgcatgctcgagcggccgccagtgtgatggatatctgcagaattcgccctttcgagcggccgcccgggcaggtacacacctgtagtcctagctactcaggaggctgaggcaggggaatcgcttgaacccgggaggtagaggttgcagtgagccaaaattgcgccactgcactccggcctgggcaacagagcgagactccgtctcaaatacaaacaaacaaaaaaaaacaaaaaacataacaaaacaaaacaaaaaattagttcagcagtctgccagaaaaaaaaaaaagcatcgcaactaggtgggctccctcagaaaactcatcaaataattgatgaccgattaaaggagaagtatgctcatttcagtggctcttataggggccaagttcttggccctctgaaagttcactgaaaaattacctagcaaaaggtaggttaattaggaaaaaaaaagga

SEQ ID NO: 18407 - DNA, 431 bp, Homo sapiens
  misc_feature 232: n = A,T,C or G
ctatagggcgaattgtgccctctagatgcatgctcgagcggccgccagtgtgatggatatctgcagaattcgcccttagcgtggtcgcggccgaggtacaaatacttgagtcagttattacggtgtggtatgaaatttcaattgttttcaatgcataaaaacagatattatgatatagttcattatactatgtgattttgttactttacaatcctattatactgtgtgattntgttaccttaaaatccttatgtttatgttaagaatgattcattcttggatgagcttggtggctcatgcctgtaatcccagcgctttgggaggccgaggtgggtggatcatctgaggctggtctgggattcctgacctcaagtgatctgtctaccttggccttctaaaatgctgagaatacaggccttgatcactgtgcc

SEQ ID NO: 18408 - DNA, 450 bp, Homo sapiens
  misc_feature 254, 307: n = A,T,C or G
tacactactatagggcgaattgggccctctagatgcatgctcgagcggccgccagtgtgatggatatctgcagaattcgccctttcgagcggccgcccgggcaggtactggaacaactaggtcagctacaggacttgggggatcggatgccctgtggggaggagaggattaaggagtggggcagacaaacccgggaccaatcttaaactaaataaaaagggctgacccacaaagcttaaaatttccactattanctgcagaactcaggcaccagaagaaaaccggattggggctgcgcctcatgcanatgggttgcatttctccagtgagggaccatctagggcatccaggtgataccatgtgcttgtgggaccagcaaagagggaatatcatttatccgacaggatggtggtttcacaaacatactttattcccaacggcaactacaac

SEQ ID NO: 18409 - DNA, 437 bp, Homo sapiens
  misc_feature 160, 237, 285, 305, 411, 412, 421, 423, 424: n = A,T,C or G
ccctctagatgcatgctcgagcggccgccagtgtgatggatatctgcagaattcgcccttagcgtggtcgcggccgaggtactttaagtaagtgtgatgaaggaatcatctagcaacttccttcttagaaaaaaaggaagtgccttcatatttccttganaatttaaaacttgttccatatctaattctaagcaaaaattataaaggacaccagttcagaagagcctctttcagcanaataaagtaattgtttcacaataagccactgctgtaaaccaagatcanctttgatggcccagagacancttatgttttcaaccccaatggcaaccttaaacaccttccaagtataagatacacccagggtatatattgggcaataagggcaataccatcattatattcaatcannactaataanannaattaatttataa

SEQ ID NO: 18410 - DNA, 556 bp, Homo sapiens
actatagggcgaattgggccctctagatgcatgctcgagcggccgccagtgtgatggatatctgcagaattcgcccttagcgtggtcgcggccgaggtacagctgatgtctgctgtgcggcagggtaagtgggaccagcagcttgccggtgcctcgagtctttattggtaaagattgtataggcggatgcagtgatctagtctctttgcaacagagtggggaactgctgacgcggctaaagcagattggagctctgcagtaaccacagatctcataggaaatgttcaacaattctgtgaaaggtcacaggacccaattggagaaatcatatgaaaagcatagttggtcttggtgtcatatggatcagaggcacaagtgcagaggctgtggtcatgcggaacactctgttatttaagatggctatccagataatcctgaacactgtgtatttattttatttagactaccaacaaagattaaagcatgaaatgtaaaacatctgattaaacttacagccccctacaccaagaatgtatctgtgaaagaacttctacac

SEQ ID NO: 18411 - DNA, 409 bp, Homo sapiens
tatacgactcactatagggcgaattgggccctctagatgcatgctcgagcggccgccagtgtgatggatatctgcagaattcgcccttagcgtggtcgcggccgaggtacctggcatatgagttactgtggtcaacagcttgtggaaggtctcgaccttacagactttcagaggtagggggaaggtcttgttagcgggacagcagcaagacccacccaccagtttagactgaactgtgaacgtgtcaccaattgaaaatcagtagccataccacctcactcctacctcccacatgtaatgtgttgaaaaagcatgggtaacggtgtcctttgttctccaagtatgtgatgaagggaagagctgaccacacaagctgatagaattcttttctgcatcgaagtagcactat

SEQ ID NO: 18412 - DNA, 508 bp, Homo sapiens
actcactatagggcgaattgtgccctctagatgcatgctcgagcggccgccagtgtgatggatatctgcagaattcgcccttagcgtggtcgcggccgaggtactactggccatatctacgattccaccagttggacgggccacagcacccacaagcccttttccaattcctttaaagaatccagcagctccttcctttttggcaccttccacaggttttgttattattccagtcactccaccaacaactcctcgcagaaagccctttcctcctctggccaggctgtctccaaaatctctgggctgtcgactcaactcttctcttcttttttgctgatattccttgtccattgtaattgctgccaaacctttcccaacagaaccggtgattcgagatacaactcctgctgcaccacctactgtgtgtccaaagaggcttctcactccaatcactaacccctctgcaaattcttcaaggccttgaacagcaccctggaagggttcatag

SEQ ID NO: 18413 - DNA, 535 bp, Homo sapiens
gatgcatgctcgagcggccgccagtgtgatggatatctgcagaattcgccctttcgagcggccgcccgggcaggtacgcgggtccttctgggggcaaaacctatgtttttctttatggaaccctaagagtatataacaagttcctctcagatcttaaactccttgcttctatattttgttttctgattttttttaactgaaatagttattattacaggggctactcttgggagtttagaataagaaagggtgcttagacactcaagcaacatctttgtaacaaagtaacaccataaaagcattatgtggcctagtcccatgatttctctctcctttttggagacccaggattgaatgtgggctgtgctcagagctcagagatccagttaaaacagagactacgtttaaaactatctaagtgcgattggtctctttatacaatcctgtggtagatttctgtaattttatgtttgacttggtatccattttttaatcaccctgttaacacaacagattctctctctctctctttcct

SEQ ID NO: 18414 - DNA, 530 bp, Homo sapiens
  misc_feature 197: n = A,T,C or G
actactatagggcgaattgggccctctagatgcatgctcgagcggccgccagtgtgatggatatctgcagaattcgcccttagcgtggtcgcggccgaggtaccgtgttcttttggttaccagagccctgtagtgaaatttcaaataaggtaatgtgattcttccgttttgttatttttttttctcagaatggcctnggatatatttgttttttttgtgtgcgtggttccatataaatgttaggattagttttttgtttgttttagatttctgtgaagagtgtcattggtattttgttagggattgcctcaaatctgtagtattttggatagtatggaaattttaacaatattgattctttaaatccatgaacataattttgtgtgtgtgtgttcttttcaatttctttcatcaatgctttatagttttctttgtagagatctctcatatttttggttaagttaatttctaggtgtcttattttatttgtatctattgtaaatgaaattactttcttgatttctttttca

SEQ ID NO: 18415 - DNA, 484 bp, Homo sapiens
  misc_feature 187, 285, 291, 347, 353, 474: n = A,T,C or G
atacgactcactatagggcgaattgggccctctagatgcatgctcgagcggccgccagtgtgatggatatctgcagaattcgccctttcgagcggccgcccgggcaggtactatgaggcaactataggtatctgccaaagatttcaaatggcatccctatctgccaacgaaactttaaggattattnggatgtgcctagatcatatgaactcaagtggcagaaagtagcttgcactagcagcccagaaccttgttgcagtgaccttcttgggccctactcaaaanctatcnagcttctcgtgggtcatttggtagatgagcctagagtaaccatatcaaccatgatntgatanttgattccttcaaaatatcttccagagatgctagtattgttttttagtatacctaatcttcctgtgaggggaatctgttctattaagcttccaacttggcccttttcccacccataacatnttaccccact

SEQ ID NO: 18416 - DNA, 381 bp, Homo sapiens
ccctctagatgcatgctcgagcggccgccagtgtgatggatatctgcagaattcgccctttcgagcggccgcccgggcaggtacgcgggggagtataaggaggaggctggctggccgctgcaggcctctcacagatctatccctgctcactatcctgcagcagacagagagacaagaccccagccagcccctgtccaggcagcatgagcagctcatcacaggcaaggaagatgctggcaataactatgcctggggccactacaccattgggaaggagttcatcgacctgctactggaccggattcggaagctggctgaccagtgcacaggacttcagggcttcctggagtaccacagccttgggcggggcactggctctga

SEQ ID NO: 18417 - DNA, 422 bp, Homo sapiens
  misc_feature 228, 250: n = A,T,C or G
cctctagatgcatgctcgagcggccgccagtgtgatggatatctgcagaattcgcccttagcgtggtcgcggccgatgtacttgcccccaggcccagataatttatttaaaaactttttttgtacagacagggtctcactatgttgcccaggctggtctcaaactcactggccctcaaacaaatcctctacctcaactccccctaagtgcctggcattacaggcatcnagctgccatgctctggctacanaatcttaatgttttccccatggcttctttttctggcgttcttttctcacgtaatggaagtgggcagagaatgatcctttccctatgctccagtgtgtaagaattaaagaaagaggaaagaaacacactggcttgatggtcgaggacaggtttattttaaagaaaacaaaccc

SEQ ID NO: 18418 - DNA, 629 bp, Homo sapiens
ctatagggcgaattgggccctctagatgcatgctcgagcggccgccagtgtgatggatatctgcagaattcgcccttagcgtggtcgcggccgaggtacttcgaatttgagtttgaggcttaagaagctggatctcctgccgggcgtggtggctcatgcctgtaatcccaccactttttttttaaggcaggcggatcacctgaggtcaggagtttaagaccagcctgaccaacatggagaaacctcgtctctactaaaaatacaaaaattagccaggcatggtggcacacgcctatggtcccagctactcaggaggctgaggcaggaggatcacttaaatccaggaggtcaaggctgcagtgagccatgatcatgccactgtgctccagcttgggcgacagtgtgagaccctatctccaaaaaaagaaaaaaaaaaaaaagcttacacagagcagctctgagaaattagttcctactaaaagcacattcatgttacattcagagaaatggaaaatttaattacattacttttctaccctgcataaataggacaacagcagatgttgtcctatttgagtagatatgacaccctactttaaaaagcacaggtgaaatgacccttggaaatg

SEQ ID NO: 18419 - DNA, 602 bp, Homo sapiens
ctcactatagggcgaattgggccctctagatgcatgctcgagcggccgccagtgtgatggatatctgcagaattcgccctttcgagcggccgcccgggcaggtacttcctatggaaacctaaaaactgtttatttagttttccatactgtgaaatgctcagacataagagttcatagtagaacaaagcatattaatgatctgaaagtttccagaatactagttagaaagtaactttcaatgcttctagtgcaacactaaaaactgcagtatattaatgcattgttgctcctatttgtattctcaaaaagaaattttaataaaaagacaaaattcaaatcttatgttgaagattgcatttcaaaagacatttaaaaagttcaatcatcagagaagttgatctcatcagatatcatcttctgctaaatgcaatataaagcttttcaaatgagatttgtgatcttctaaaagaacatacttcagaacagggatctctggggaaaaaagaaaaccactaaaaaggattcatggtgattagttttaattggcaaaatgggatgaaagcatctttatgtaataaacttaaacacaactacttaccttt

SEQ ID NO: 18420 - DNA, 433 bp, Homo sapiens
tatagggcgaattgggccctctagatgcatgctcgagcggccgccagtgtgatggatatctgcagaattcgccctttcgagcggccgcccgggcaggtacttttttttttttttttttttttttttctttttttttttttttttttttttttttttttttttttttttttttttttttttttttttttttttttttttaaaaaaaaacaaaaatcccaatttatttatggttttttgggaaaaaaaaaacctggggggggccaaattaaacctcctatagtaaaaattaacattgcctaaaaaaaaatttgtttttgtttcccagggaatttttttaatcacttttaaaacaccctcaaaaattttttgggaaaaaaaaaaaaaaatttgggggaaaactgggtttttgccaaaatttttttttttccccttt

SEQ ID NO: 18421 - DNA, 396 bp, Homo sapiens
actatagggcgaattgggccctctagatgcatgctcgagcggccgccagtgtgatggatatctgcagaattcgcccttagcgtggtcgcggccgaggtactttttttttttttttttttttggggcagcatcacactgatttccttgtcagttttcctcattcattcatgaattcattcaagcattccacaaacatttattgaacatccaatacatgacaatcagtgttccaggcacaggatgtaaagttcccaggcacagtgaggatacaacaataaacaaaacaaagtcccaattatcatgaagcttaacttttagtagggcacaaaatcagcacgtaacgtgtaataaaatgccaggcaatcttaaatcctgtgaagaaaagtaaaacagaat

SEQ ID NO: 18422 - DNA, 404 bp, Homo sapiens
  misc_feature 16, 136, 171, 175: n = A,T,C or G
ctatagggcgaattgngccctctagatgcatgctctagcggccgccagtgtgatggatatctgcagaattcgcccttagcgtggtcgcggccgaggtactaccaagataaaatatattcaaacggctgtgactttngaccatgaattaagttgattctccacaaaatgttnggcnttctctatcatttaaatttgccgagatccttttactttgttaaaccaaacgataatgcttttttaaaaccaataatgaaaaagaagtattttgaaaacaaacatttgattgctaaaaataaatatactagcttacgtattttaatgtattgcagcatagggaatattgtgctagccattggccatttaacattcaatcagtagttttaaaaatgtttttttccacattg

SEQ ID NO: 18423 - DNA, 467 bp, Homo sapiens
  misc_feature 123: n = A,T,C or G
cctctagatgcatgctcgagcggccgccagtgtgatggatatctgcagaattcgccctttcgagcggccgcccgggcaggtacgcccagcattggcggggaaaatattcctaggaatgcttangagaagagcagctggaagcttggcatattccaaggcatgcccgtgctccctgggaagtggtctgtgtcatcctgccgggtgaaacctttgctattgcttgagtagctcccttaacccagtctggctggttctagacttcccagctgccggaaaaagtgatacacttccaaggaagcagctttccttgccttgcccggcctgcagctggctaaagtgcaagatgggaagatggctgggcattatctgcaagctccaatcacacttccgtggcactgggaactgcagttttcaactcctacccttacaaatgtttcaccaaatcctttatgttcacctttttgccc

SEQ ID NO: 18424 - DNA, 180 bp, Homo sapiens
ctactatagggcgaattgggccctctagatgcatgctcgagcggccgccagtgtgatggatatctgcagaattcgcccttagcgtggtcgcggccgaggtacaggaatagatgaagaaattgtttttgagtataatataaacataaacaaatctcttaacagcacgagtgtcaacaatgc

SEQ ID NO: 18425 - DNA, 523 bp, Homo sapiens
  misc_feature 448, 500: n = A,T,C or G
ctatagggcgaattgggccctctagatgcatgctcgagcggccgccagtgtgatggatatctgcagaattcgccctttcgagcggccgcccgggcaggtacatacttattttctaattggatttgaaatcagcatgattttgtttgacaaagcaaagtttaagattgaggtcagaaatactttaatggagcaaagacacataccaactttacatgacggtgtgagaaatagtcctataaactggtctcttcatcatttatgctctcactttaaatatccaaatattaaaaggcaggctgacctgtatcacacagaattaaggcagtaattttctgcttcagtagatcaagggtagggctaaggcatcctgtggtaattctgattcacagctagatttgggaaacacaaaattagggaatggctatatgtgatttgctagttggagcantcaaagtcttaactatcaaaaattgtgaatttgaatcatggcactaagtcangggtgctatggattgaaatgacc

SEQ ID NO: 18426 - DNA, 376 bp, Homo sapiens
ctatagggcgaattgcgccctctagatgcatgctcgagcggccgccagtgtgatggatatctgcagaattcgcccttagcgtggtcgcggccgaggtacttccccaggtataccagcccatatgcaaagcagatctatgttaagacctctggaactatctttacccagccaaacgtcatactctgaaaatgaaattttaaagaaagagttagaagcaatgcgaactttctgtgagtcagcaaaacaagaccgactgaagctccaaaatgaactggcacacaaagtggcagaatgtaaagctttagcattagaatgtgaaagggtcaaggaggattcagatgaacagattaagcaattagaagatgcattaaaagat

SEQ ID NO: 18427 - DNA, 206 bp, Homo sapiens
  misc_feature 92, 94, 139: n = A,T,C or G
gctcgagcggccgccagtgtgatggatatctgcagaattcgcccttagcgtggtcgcggccgaggtactttttttttttttttttttttttntnccccttcctttcttttttcttcatttactttttctttcttctatntcctctttctttctttctttttcctctttctttctttttctttctttctctttccttctttcttcct

SEQ ID NO: 18428 - DNA, 389 bp, Homo sapiens
  misc_feature 223, 288: n = A,T,C or G
gaattgtgccctctagatgcatgctcgagcggccgccagtgtgatggatatctgcagaattcgcccttagcgtggtcgcggccgaggtactaattttgcaaattttctgtttgaagttatttcaagtaaaatgttattcaaagtgatcatgctggcataagaaagaaaaaggaaaactgattgatgttaataagttatgcggtcatgccatctatactagctnttctggttttctgaccttagcctcttttttgaattattagtgcttataaagagctcaagactttntttttttttctttacattttacttctaactgcattgatggtcttttctatggattattgtttcaaaattaaatgtctttttttctatgaataaagttaaaa

SEQ ID NO: 18429 - DNA, 191 bp, Homo sapiens
atagggcgaattgggccctctagatgcatgctcgagcggccgccagtgtgatggatatctgcagaattcgccctttcgagcggccgcccgggcaggtaccatatctgtttcttatctgcagagatctgttttcaatgcagttttattctacttcttattctgatttaagatgggatgatagttttgacaaa

SEQ ID NO: 18430 - DNA, 311 bp, Homo sapiens
tgcatgctctagcgctcccatgagatggatatctgcaaaattcgcccttagcgtggtcgcggccgatgaactccttattcttattaaaaaaggcatgaggtgtaaagagcactataaaccatgaattggaagttgatggtcagtgaagagataaacatagaatatgaggaaatttatgtcatgctgaaaatgatgaggttcaaatgcttcaaaataacttttataaaaacttcccttgaaaattcagtttccttcctcatggtgacattatgcattggcggacagaactaataaagagtgcgttatttatt

SEQ ID NO: 18431 - DNA, 538 bp, Homo sapiens
atcgactcactatagggcgaattgtgccctctagatgcatgctcgagcggccgccagtgtgatggatatctgcagaattcgcccttagcgtggtcgcggccgacgtacccctgatatagagtattgagatggctagtttatgtagacaccaaaaccaattttcagctttaagaaagaaaactgagtcattcagagatcttttatttgaggggaaaatgtatgaccgtcactacaagaagctaatcattttcatttaaatggatgatttaaaactaagaagttttcaagaatttcagactacaataaaaaaattcagatttaaatcctgctttccatagcttcaatcctaaaccaagagagtttcaggaattttagatgaagcaaagataaattaaaataaaccgttacaacaacctaaccatataaaaaggcagtgaccatatagaaagagaacgcctttcgtggatattttctccaccaattgcatacggtaaattgtcctaaggtaattactttttgcaaaaccaatccaaaatga

SEQ ID NO: 18432 - DNA, 474 bp, Homo sapiens
  misc_feature 256, 264: n = A,T,C or G
tacgtctcactatagggcgaattgggccctctagatgcatgctcgagcggccgccagtgtgatggatatctgcagaattcgccctttcgagcggccgcccgggcaggtacgcggggggcatctcaggtcttcagggtcttccatctggaactatataaagttcagaaaacatgtctcgaagatatgactccaggaccactatattttctccagaaagtcgcttataccaagttgaatatgccatggaagctattgngcatgcangcacctgtttgggaattttagcaaatgatggtgttttgcttgcagcagagagacgcaacatccacaagcttcttgatgaagtctttttttctgaaaaaatttataaactcaatgaggacatggcttgcagtgtggcaggcataacttctgatgctaatgttctgactaatgaactaaggctcattgctcaaaggtatttattacagtatc

SEQ ID NO: 18433 - DNA, 413 bp, Homo sapiens
ctactatagggcgaattgggccctctagatgcatgctcgagcggccgccagtgtgatggatatctgcagaattcgccctttcgagcggccgcccgggcaggtacaatgaactattctcatgaaaaattgtataaatgtttctaaaaaattaaattataatccagcatttgaattttagaatatttatttggaataattgtaatcagagtttcaaaaagatattatcacttccatgttcatttcagcactatttataaaagccaagatatggaaacaacccaaatctctatcaatgaatggttttttaagtggtatataatataaaagaaattgttcacttttaaaaaagaaagaaatcctaaatttgtgacaatgtaaatgaaccatgaagatattacgttgattcaaaagag

SEQ ID NO: 18434 - DNA, 555 bp, Homo sapiens
gactcactatagggcgaattgggccctctagatgcatgctcgagcggccgccagtgtgatggatatctgcagaattcgccctttcgagcggccgcccgggcaggtacgcgggtattctgactcagcttattaatgatatctttaaattatattacttttattctgttttccctctttgctgctcatgtgaaataaatatgaatcttatgtttgcacttatgctataaaagaaattatccttggggttaattattaagggatggggaaattaagagctaagagacaggaaaatgagttgtgaggaattggggtcaccagatttcattaaaaatttgaaaatatcactgtttctctaaactttaatttttatttgttgtatttttagcggttaagaagattgtctacccaatatagaacagaaaagatatatcccacagccactgaaaaaaataactatataaaaaaatggttcctcggccgcgaccacgctaagggcgaattccagcacactggcggccgttactagtggatccgagctcggtaccaagcttggcg

SEQ ID NO: 18435 - DNA, 294 bp, Homo sapiens
tacgactactatagggcgaattgggccctctagatgcatgctcgagcggccgccagtgtgatggatatctgcagaattcgccctttcgagcggccgcccgggcaggtacagatgtgatattggaagaaaaagatcaagctgatgaggttaggatacccaggccctttggacttaaagatcactaatgtcttaattcccatccatggcattttaagtctataaggtaaaacttttcctgggaaagctgggattttggagacagttttaatcaatctgaattaatttgggccttta

SEQ ID NO: 18436 - DNA, 625 bp, Homo sapiens
  misc_feature 606: n = A,T,C or G
acgactactatagggcgaattgggccctctagatgcatgctcgagcggccgccagtgtgatggatatctgcagaattcgcccttagcgtggtcgcggccgaggtacaacgtgggcaagcatctgtgcatatgaaatgctgtttttctaaaagatttctcacattggcaaactgagagattttcttctggaacacaggaaagattatattaatgcttatagccataccatgtctgaatatgggaggatgacagacacagaacgagaccagatagaccaggatgcccagatattcatgaggacctgttcagaagcaattcagcaactacgaacagaagctcacaaggagatacattcccagcaagtgaaggagcacaggaccgctgttttggatttcattgaagattacttgaaaagagtatgtaaactttactcagaacagagagccatccgagttaaaagagtggtggataagaaaagattatctaagctggaaccagaaccaaatacaaagacaagagaatccacatcttctgagaaagtttcacagagtccttcaaaagactctgaagaaaaccctgccactgaagaacgtccagaaaaaattntggctgaaacacaacctga

SEQ ID NO: 18437 - DNA, 155 bp, Homo sapiens
cactatagggcgaattgggccctctagatgcatgctcgagcggccgccagtgtgatggatatctgcagaattcgccctttcgagcggccgcccgggcaggtacgcggggacagcggcttccttgatccttgccacccgcgactgaacaccgacag

SEQ ID NO: 18438 - DNA, 396 bp, Homo sapiens
agggcgaattgggccctctagatgcatgctcgagcggccgccagtgtgatggatatctgcagaattcgccctttcgagcggccgcccgggcaggtacttggatatcactgctggttattcaggtcccaaagacacttcaattagcatgtaatgaaggccttcaaggcagggggttaccttctggcctagaatgtgtctagaaatgttgtctaagagctagatcctggaatggggacctcgtgactatgactggtgccctattctactgtggctgatctggtatctaggaagcaagacaaagccttcccctctcttccttctcctcttctcaagtaaaaggaaagggtgtcttttggagtcatgagctgtgaagcctgtagttaagggaggggtgac

SEQ ID NO: 18439 - DNA, 317 bp, Homo sapiens
ccctctagatgcatgctcgagcggccgccagtgtgatggatatctgcagaattcgcccttgagcggccgcccgggcaggtactttttttttttttttttttttggatatatgttttaattctttgcttttttatttctagtatgtctattataggtcttgctttgcgattaccatgagacttaaaaaaaatcttatagctataacaagttactttaaactgatgacaaactaagtttgattgcaaagaaagcaaacaaaaactaacaaactttacattttaactccatccccaaattttgacttttggacctctcta

SEQ ID NO: 18440 - DNA, 544 bp, Homo sapiens
  misc_feature 484: n = A,T,C or G
tatatggcgaattgggccctctagatgcatgctcgagcggccgccagtgtgatggatatctgcagaattcgccctttcgagcggccgcccgggcaggtacgcgggtataaatatattaaaaaggaaaatgtttcggatgtttatttgtataattacttgattcacacagtgagaaaaaatgaatgtattcctgtttttgaagagaagaataatttttttttctctagggagaggtacagtgtttatattttggagccttcctgaaggtgtaaaattgtaaatatttttatctatgagtaaatgttaagtagttgttttaaaatacttaataaaataattcttttcctgtggaagagaaaaaaaaaacaaaaaaaaaaaagtacctcggccgcgaccacgctaagggcgaattccagcacactggcggccgttactagtggatccgagctcggtaccaagcttggcgtaatcatggtcatagctngttcctgtgtgaaattgttatccgctcacaattccacacaacatacgagccggaagcata

SEQ ID NO: 18441 - DNA, 401 bp, Homo sapiens
tacgactcactatagggcgaattgggccctctagatgcatgctcgagcggccgccagtgtgatggatatctgcagaattcgcccttagcgtggtcgcggccgaggtacagttactcccggaccggcggcgtgaaagtcgtgatatcatcgttgaactattagctttgaagttaaatccaatggagaagactcaagaaacagtccaaagaattcttctagaaccctataaatacttacttcagttaccaggtaaacaagtgagaaccaaactttcacaggcatttaatcattggctgaaagttccagaggacaagctacagattattattgaagcgacagaaatgtgcataatgccaggttactcatcgatgatattgaagacaactcaaaacttcgacgtg

SEQ ID NO: 18442 - DNA, 405 bp, Homo sapiens
gactcactatagggcgaattgggccctctagatgcatgctcgagcggccgccagtgtgatggatatctgcagaattcgccctttcgagcggccgcccgggcaggtacatatggctcacttgtgcccagagggagaataaagccatgtcgaaactatctacgattccttgagtgtttttccagctacctgccacttgcccacccactcccctcagatctcagttagaacatgacaattgggctcatgaacaggatcctgagtggttgcaggtgaacaagcagttggcacaagggcaaagtgatcacatcctgattgagtggctatggacagccatacagactgtgtggaacaacgctggtgaaatacccaaaccgtcccagaacaatgcctggcatgcaataaata

SEQ ID NO: 18443 - DNA, 483 bp, Homo sapiens
tatagggcgaattgtgccctctagatgcatgctcgagcggccgccagtgtgatggatatctgcagaattcgccctttcgagcggccgcccgggcaggtacgcgggatgatgtgaggtgtaaggcttatgacttcattatgagaaggatgaagacttgaataagatttggcacattttacgacaactagtctaactgcaagtgaaaaacggactgtaggtaaccaatggtgaaggacgatcatgatttgaactaaaatggtatcaacggacatagtaaggagttgagaaataaagaggaagtcgtgattgattctggatatgttttgagagtaaaacaacataattttctgagagtttggatctagagtgcaacaaacgtagagtcaaaaacaattaactttctggtttcaactacttgatgaatggtaatgccactaaataagacaaacaactctgaaagatgaaaaatttgagagaaaaatc

SEQ ID NO: 18444 - DNA, 450 bp, Homo sapiens
ctactatagggcgaattgggccctctagatgcatgctcgagcggccgccagtgtgatggatatctgcagaattcgccctttcgagcggccgcccgggcaggtacgcggtaggcatctatgtaaagtgagaaaaatatgtttcgtaaatatttgcatctttaatattgttagtaagtagtaaacaggtgttttgctgattgaaaggaagttatcttggtaaattgagactcaaagtgaaatacaaaaatgaaaatatttataataggactcgacttggagaaattgctattcttcctgttgtccaaaccataaatctgaggataacctgggcttttctctttcctcttctcctaaccagtttttcaccaagtcctgtgccatttcacctcctaacgtctgtcagctatccttttgcctttacctcaccactattaccctagagaagacttt

SEQ ID NO: 18445 - DNA, 569 bp, Homo sapiens
gactcactatagggcgaattgggccctctagatgcatgctcgagcggccgccagtgtgatggatatctgcagaattcgcccttagcgtggtcgcggccgaggtaccagctgccggtatgggtgacctgggcacaggcaaggccatcatcatcacacactgtgtgcaccagaactcctcttggcatctccaagccagttcaccattgtgtgaactgtgcactgaaggagctccactgggactcagaggccttggcacaactgcagctgtggaacattgcgatgaggaaagattgggaaaatgacaagagcccattgtctggaattcataggtgcattgattgtcttcagtatcaccagcccagccccatttgaagcagagccaaagtggaaaaatgatttggactaaacgttaactcatggcagaccagtttctggggttctgttggccaagaaatgtgaccatgggaggatgaatgcagaaacagcagcctcaagatgggccagatctacatggaacatagttttgtaggataaattgaaacatcagcaaaagaaaatgtgaactttga

SEQ ID NO: 18446 - DNA, 629 bp, Homo sapiens
acgactcactatagggcgaattgggccctctagatgcatgctcgagcggccgccagtgtgatggatatctgcagaattcgccctttcgagcggccgccgggcaggtacagaatatgattattctcaatgatgtggtggttctggagactcaggattctttggatccatgcgtgggcctcacacatctcttccacgttgaatcccatcagattgatggcaggagatctagcttcaagcccattttctcttttctcctctctggttgactgggggacactgtaattgttcaaactcagcatcttggacctctttgccatttcagaactgaaagcctacaagaagcaaaacagagcagagagtcataaacagggctgatagccattgtcatcaaagtctccctctctgcacacacagcacttgacttcatccactctgtcagtcccattcctactaccacaaatctaaagcagcctttaggaaagtcccagagaagaggacctcagtctattagaacacggaaagaataagcataggaaaaatggagatgaaatcaaaaactggtataaataaagaagactatacattccgagacaaaatataaccgtgcattcattaaacagattttaatg

SEQ ID NO: 18447 - DNA, 520 bp, Homo sapiens
gcgaattgggccctctagatgcatgctcgagcggccgccagtgtgatggatatctgcagaattcgcccttagcgtggtcgcggccgaggtactctcacaatgtgatttttgtatttcgaaagcttgaattgtcccctgagtgtgagagacagagggggagcgtccgatcagcggcgctgctgttcaccaggccatgaaactcctcccaggccttgatgctgtcggtgtgagttttgtattccataatggtgttgggaggtaggttaagcactcgccgaagtgtgtcccggattcgggctgtggttgcttggtcactggcagtcttattccatattgaaataatgtcttcctgaaggcggacagacaccacaagccccactaaatctcctccccaaccatgaactgttcccccagcatggccaaaatgagattctcccagcaacgggaggccaagcccttccgcagccgaattatccacttgccaccattttatttgcatcatcctcccacatgggtttaa

SEQ ID NO: 18448 - DNA, 399 bp, Homo sapiens
ttgggccctctagatgcatgctcgagcggccgccagtgtgatggatatctgcagaattcgccctttcgagcggccgcccgggcaggtactttggtgttacctagcttttgaaaaataaagtctttggttcacccggtgaaaaaaaaaaaaaaaaaaaaaaagtacctcggccgcgaccacgctaagggcgaattccagcacacttggcggccgttactagtggatccgagctcggtaccaagcttggcgtaatcatggtcatagctgcttcctgtgtgaaattgcaatccgttcacaatttcacacaacatacgagccggaagccataaagggaaagccctggggtgcctaatgagtgagctaactcacattaattgcgttgcgctcactgcccgtttt

SEQ ID NO: 18449 - DNA, 552 bp, Homo sapiens
  misc_feature 333: n = A,T,C or G
gaattgggccctctagatgcatgctcgagcggccgccagtgtgatggatatctgcagaattcgcccttagcgtggtcgcggccgaggtacgcgggggcaggcgccatgtccggccgcgaaggtggcaagaagaagccactgaaacagcccaagaagcaggccaggagatggacgaggaagataaggctttcaagcagaaacaaaaagaggagcagaagaaactcgaggagctaaaagcgaaggccgcggggaaggggcccttggccacaggtggaattaagaaatctggcaaaaagtaagctgttccttgtgcctgaggagatggtgaccctntatttcatctgtatttaaacctctctattccctgccataacatcttttgccacgtatagctggaattaagtgttgtcttggagctgttgtaccaactccaaacctctgatctcttgacaatggaagtagagctgagccttcatttttttcatctataaaagtgggaagaataattgtatttgcttaatttggcagggctccccaaaactactcccaggc

SEQ ID NO: 18450 - DNA, 628 bp, Homo sapiens
actataggcgaattgggccctctagatgcatgctcgagcggccgccagtgtgatggatatctgcagaattcgcccttagcgtggtcgcggccgaggtactcgtttttttttttttttttttttcaccagtgttacttgccaaattaaactaaaattcttagatgtttatttgagctagaaaaacatctaatagaactaaagattgctttaagaaacaaatatatcatgattccaaaaacaaaaacaaacttaggaaaaaactgttaaatatagcatgctccagaaaagagatctttatacttgggtctagatatctgcattttaaactactttggattatattttaggaagatctatagcctagaaataaataatttaaaaatctactgataaggaagcaaatcaataatactctattgaaatactgaattaagattcagtatttcagaacactgtaaaatcctaaactttcttttgagaatatcacaaaagagtaatggaaatttttcacctaaaagaaataagaatactttggatgacaacagcaatattcaagaagaactttttactgcttttcccactcttacttggtttggactaattcagtttctagaaatcagatctacat

SEQ ID NO: 18451 - DNA, 566 bp, Homo sapiens
ccctctagatgcatgctcgagcggccgccagtgtgatggatatctgcagaattcgcccttagcgtggtcgcggccgaggtaccactttaagttatcataattatgtttctatgctgtttttattaattaacccatttatttattaagaagccatgttaaatttttcctggaacaaggtaggatatatatttttaaaataaatattcacatgtattctttgttaataataagaaaggtcccaggcaaaattctagagcagagtaagtgctagtaaataaaacaaaagcaatatattagtttatcagaaagttaataaccacaaatattaacagaagtaacagaagtggggcttttattagaatttcggattgtggaacaggtgcaagagagaaggttgaaattccaaagtaactaatgagatattatgtttctgacagcacaaaaagaggagtggactgggacatgaccttgggttctggtctattaaggaatatatatgcattccaaccttcttcccaacattaagaggcaatatttgaaaaaattctttacacttatgagaattc

SEQ ID NO: 18452 - DNA, 609 bp, Homo sapiens
  misc_feature 12: n = A,T,C or G
gactcactatanggcgaattgggccctctagatgcatgctcgagcggccgccagtgtgatggatatctgcagaattcgccctttcgagcggccgcccgggcaggtactgaacggtttaatccccatgatattcgcttgatattaagtgatgatgtcttgatggaaaaatacgaagaatttatgcttagacggtggcttgttgcagatcctgattgtaggtggtgtccagctccagactgtggatatgctgtgatagcatttggatgtgccagctgtccaaaattaacttgtgggcgagagggctgtggaacagagttttgctaccactgtaaacagatttggcaccccaaccagacctgtgatgctgctcgacaagagagagcccagagcttacgtttgagaactatacgttcttcatccattagttatagtcaagagtctggagcagcagctgatgatataaagccatgtccacgatgtgctgcttatataataaagatgaatgatgggagctgcaatcacatgacatgtgctgtttgtggttgtgagttttgttggttgtgtatgaaagaaatctcagatttgcattatctaagtccatcaagatgt

SEQ ID NO: 18453 - DNA, 435 bp, Homo sapiens
tatagggcgaattgggccctctagatgcatgctcgagcggccgccagtgtgatggatatctgcagaattcgcccttagcgtggtcgcggccgaggtacttgttatactttggcagcttcttcacgtcggtcctctccgcgcgcgggtaggaaccgtccacggccttaaagaacctcctcaccagccatacttcccattgcctccagttgttgcacggaggtttcacatcatatttccagaaggctcctggaaagagtgaatatgtgtcgcatccagagagctgatggggattgtgacttggctgctgtcatccttcatgtcaagcgcagaagaatctgtgtcagcccgcacaaccatactgttaagcagtggatgaaagtgcaagctgccaagaaaaatggtaaaggaaatgtttgccacaggaagaaacaccat

SEQ ID NO: 18454 - DNA, 349 bp, Homo sapiens
  misc_feature 192: n = A,T,C or G
cactatagggcgaatagagccctctagatgcatgctcgagcggccgccagtgtgatggatatctgcagaattcgccctttcgagcggccgcccgggcaggtacgcgggtgtgctttccttataaggaatcaaacttgacttacggagccaataaagcccttggaaaaactggcctcatattctgtatacacnagtccctgaacagggtttctgactgtgtaagtaaagaatatcactttttgacaagtgcagacgccccaggtttatcttgggccctcaaaaggagaggaaatttcacccaactcatgggtatttaatggcataaatccatggctcggctgggttttac

SEQ ID NO: 18455 - DNA, 535 bp, Homo sapiens
  misc_feature 16: n = A,T,C or G
tatagggcgaattggngccctctagatgcatgctcgagcggccgccagtgtgatggatatctgcagaattcgccctttcgagcggccgcccgggcaggtacatatcacatcatatcatatcatagctagctctgaagatgcagcataggaaagagacgagaaggctgtgccctcacccgtgtggagagctgtgtgaaacggagtggcctccagacacagcttttattgccagtattcatccactgatggacatttgggttactcccaccttttggctcagctgtgaacatgggttacaagtgtctgttccagcgccctatttcagttctttccagtatatgtcagaggcaggatcgctgggtcgtttggcaattctgtttagttttgtgaggaactcccatactgttttccccagcagctgcgccattttacatccccaacaacagtccacaagggtttcaatttcttcacatcctcgcccacatttcttattttttggtggtgtggtatttttaaaaaataacacctaatgagt

SEQ ID NO: 18456 - DNA, 487 bp, Homo sapiens
gtgatggatatctgcagaattcgcccttagcgtggtcgcggccgaggtaccgtatgacttttctattgcttctttaccaaataaatacaagctttgcagtttaaaacaacagaaatttaatttttatagttctgagggtcagtaacctaaaactgatcttatgaaataaagttaaatcttggggatatgggtgtggacagggctggtttcttctggggctctgatggtaaaatttgcttccttgccttttctccttctagggagcctgcattccctgcctcctagtggcttgctcccatcactcaaacctctggttcccaccctcaggattcctaatgtgactctgacgtttcatctcccgtttatgaggacgcttctgattgctaagatacatacggtgacactatggaagttaacttgaagattaaaaccctgaaaaatagaaagaatcttctatggtatatcacagagattacaagggcctgaa

SEQ ID NO: 18457 - DNA, 508 bp, Homo sapiens
  misc_feature 73, 111, 145, 150: n = A,T,C or G
ctcgagcggccgccagtgtgatggatatctgcagaattcgccctttcgagcggccgcccgggcaggtactttnttttttttttttttttttttttaaaatttttttttttntttttttttttttttttttttttttttttttatnaaaanttttttttttttttttaaaaccccaaaagcccttttccccttttaaaaagggggcccaaaagggggcccctccccccggggggcatttctggggggccccccccccccccggggcgcccggggcccccccccgggaccggggccccggagtttggggaaagcccgggcggcccaaaaaaggccctgcccccccccgggggcccccatgggagggccccaaccgggggcccgggcccggggaaaaagcccccccgggggcccccctaacaccaaggtgcccggggggccccccccggggggggggggttcctggggggccgggggggcccccccccggatttccggcccgggggggggg

SEQ ID NO: 18458 - DNA, 575 bp, Homo sapiens
tcactatagggcgaattgcgccctctagatgcatgctcgagcggccgccagtgtgatggatatctgcagaattcgcccttagcgtggtcgcggccgaggtactagatttattgaaacagtctaagataatactcctataatttttttaaagtgttaaaataaaaatacttcactcaattaacttacccacataaagccaccgaaaaaatgctttgaagtttttcatactactatctataactctaaagagataaaaacaaaaaatcagaaataagattagtgtgtgggggattcatacatcctactcaactgtcaggaaatatcataatccttactgttctattttatcctatctgggtgacatttaagtctttagaacagcagatattacaaatcaaacgcctacctaaaaataaaatttcaaaaaagaaaatactgattataaaaataaagcaaataacttagattccaactggttacaagagccttgccacaaactgtgtaatagtctttcttatgacttaataaagcatgaactccttttctaactttgccaataaagaaatcagaaaaaa

SEQ ID NO: 18459 - DNA, 461 bp, Homo sapiens
ctatagggcgaattgtgccctctagatgcatgctcgagcggccgccagtgtgatggatatctgcagaattcgcccttagcgtggtcgcggccgaggtacttttagttgagacagggtttcaccatgttggccgggctggccttgaactcttgacctcaggtgatctacccacctcagcctcccaagtgctggtattacaggcgtgagccactgcgccctgccaagctactgcattctaaccacacacacacacacacacaccccaaaattttatgaagattaaagaaaaccttttattgaggtataacttacaataaatagtgcacatttaagtgtgcagctcctttaattttttacatatgaatacatcattgagactttctgtaacccactttatactgtagtttgcagtgagctaagatcgtgccattgcactccagcctgggcaacaagagtgaaac

SEQ ID NO: 18460 - DNA, 361 bp, Homo sapiens
  misc_feature 172, 349, 350: n = A,T,C or G
ccctctagatgcatgctcgagcggccgccagtgtgatggatatctgcagaattcgccctttcgagcggccgcccgggcaggtacataacagatgtttcctcagctgggtgtgaggtatactctaagcaggaggctttttcagccttctctctcttttttttttttttttttnttttgagaatggacattttgctctttatgcccacgtctgcgagtgcagtaggcattgatctcatgctcaactgcaacgctccacgccactgaggttcaaagcgattctttctgtcctcacgccttcccgagtatgctggtgattaaccggcaccacaccatcgcacgccctggctannatttttcaatt

SEQ ID NO: 18461 - DNA, 380 bp, Homo sapiens
  misc_feature 102, 105, 144, 146: n = A,T,C or G
ccctctagagcatgctcgagcggccgccattgtgatggatatctgcagaattcgcccttagcgtggtcgcggccgaagtacaggtgtggtcaaaaagatgangcngttcatacaaaaaaaatattttctatttgtatttctcgngnggggcgggggacgcccgttaactgcagatgtctgctgagcatgtccagggtgggtatgggagctgggattcatcattttgttatgagatgcctggctgccatatgttgacatgaccgaattagggcccatcatgacgttctggcccataacccggctgttgggctgggctacccccagatcaactggtgtcataatgtcattatggggaggagagtcataagtcaacaacttct

SEQ ID NO: 18462 - DNA, 563 bp, Homo sapiens
  misc_feature 350, 464: n = A,T,C or G
gactactactcactatatggcgaattgtgccctctagatgcatgctcgagcggccgccagtgtgatggatatctgcagaattcgccctttcgagcggccgcccgggcaggtacacttgtttatggaactttctgtggccacctacgaaagacaagttaacaaactgtcatggaggctgttgttgcccagccagggccgctgcattttgacaacatttccaccctggccactcagcacatttcatggaggtcatgtcttttcactgatacttttttgatagtttttatataacagaatccttattctatttataacttaagatgataaggcactataaattaatgacctanaataatatatttgtctgttatcttttgctatttctacttcactttaatttttagctgtaaaattggtaaatggattcttacaactatctctttccatttcttactatttggttntcaaatttcatttacatgtcagaatttccttttttaggaacaatgtgtatttcattgcactatttataaataaactcaaatttgcatgccatatgcaca

SEQ ID NO: 18463 - DNA, 572 bp, Homo sapiens
ctatagggcgaattgggccctctagatgcatgctcgagcggccgccagtgtgatggatatctgcagaattcgcccttagcgtggtcgcggccgaggtaccataatatctatcatccaagtttcagggttttttgaaagttgataattaggaaagtgacattttacttttcttagtgccctttgcctgtttgatttccattgagaaagagcagtcaccaaagttcctcaagtgtcggaagaccaccaccatcagaatcagtgcttgtttaaaaaataaaaatccctaggttccagacctactgaattggactctttggacatgagactcagcaatctacatctttaaaaaggcttcccaggtggtttttgtgcatactgtttgagagtcactaagttatatatatatcctaccttctgtaaagtgaaatgaggccccaaaaagctaaagaggtagagctgctacctcgtttttagttgattcatcatctagtctatatcacccaaaagaattggaaataggtattcaaacaaaaacctgtatacaagtattcatagaagcactacttacaata

SEQ ID NO: 18464 - DNA, 541 bp, Homo sapiens
tacgactcactatagggcgaattgcgccctctagatgcatgctcgagcggccgccagtgtgatggatatctgcagaattcgccctttcgagcggccgcccgggcaggtacttttttttttttttttttttttttttttttttttttttttttttttttttttttttttttttaaatatttttattttttttattcctcccccaaaaaaaaaattttttttaaacccaaaaaaaaaaacccccttgattcccaaaaaaagaaacctttccataaaaaaaaaaagcacgctaaactggtgaggtgattttcccgggccatggaaaaaaaataatcaccccctgtgcccaaaaaaaggattgccaaaagaaaaacaagggacgcaagtttgctgagctttttttttcaaaggcccgaaggtctttacaaagtcggaaaagaagaattgtttcctttccccaaacaaaaaaaccggtttcggggtgaagaaaaccccccgaggcaaaattgctgtgggtggaaaaaaaaaaaaacgggggggggg

SEQ ID NO: 18465 - DNA, 181 bp, Homo sapiens
atagggcgaattgggccctctagatgcatgctcgagcggccgccagtgtgatggatatctgcagaattcgcccttagcgtggtcgcggccgaggtacccatttcctgatagagacttgagatcgttacctttgaaaatggaaccccaatcaccaggtgaagtaaagaaactgcataagggc

SEQ ID NO: 18466 - DNA, 365 bp, Homo sapiens
ctactatagggcgaattgggccctctagatgcatgctcgagcggccgccagtgtgatggatatctgcagaattcgcccttagcgtggtcgcggccgaggtacgcgggtgagtccaaacttgaagatggtaacaaagaacaagaacagacaaagcaaatcttggtggaaaaggaaaatatgattttacaaatgagagaaggacagaagaaataaattgggatactcacacataatttgtcagccaaggaggacagtattcatattttgaatgaggaatatgaaaccaaatttaaaaaccaagaaaaaaaagatggaaaaagttaagcagaaagcaaaggagatgcaagaaacgttaaagaaaaaaa

SEQ ID NO: 18467 - DNA, 197 bp, Homo sapiens
atacgactcatatagggcgaattgggccctctagatgcatgctcgagcggccgccagtgtgatggatatctgcagaattcgcccttagcgtggtcgcggccgaggtactcggggatgaatacaccattgctacatatctatcactctcatgttccttggcctgtcttctatctttgtgtgtgtgtgtgtgtgtgtgt

SEQ ID NO: 18468 - DNA, 665 bp, Homo sapiens
tatagggcgaattgggccctctagatgcatgctcgagcggccgccagtgtgatggatatctgcagaattcgcccttagcgtggtcgcggccgaggtaccttaaaacaattacaatgttaataacaaagataagtaatcacagagcactatgtcagatataatactaatttaaaaagtttgaaatataatgacaattaacaaaatgtgactaggaggctcaaagtgagcacatgctgttggtaaaatgatgctaacagacttgcttaatgtagggttgccacaaacagaagtaaaaagtgcttatttgccgacaaccttgccaaatattgactctataaaatggtttaaaattatttatattacagatactttgctttgctatttctaattctcttattttgtaaacagtgttattttagccacatatgtatttctttcgctctggatttctcatttcattttaattttgtgtgtatgtccttgatggattctttgaatttttgttttcattgcatctttctgtataattattcctgggatattgtgtcatttttaaaaattgcatttcgtaagatggattcctaatactttcttagcatgtgcttttatgttattttatttccttggcttattactaaaaagtgattttatacttgccatgattt

SEQ ID NO: 18469 - DNA, 212 bp, Homo sapiens
actatagggcgaattgggccctctagatgcatgctcgagcggccgccagtgtgatggatatctgcagaattcgccctttcgagcggccgcccgggcaggtacgcgggggatactctgattttggttttgattttggtttggtgtaaactgcaagagtgtgtatgccctttttacctgttttttgtttgtggcatgtgtgtggtgtgggtgtg

SEQ ID NO: 18470 - DNA, 519 bp, Homo sapiens
gtatacgactactatagggcgaattgggccctctagatgcatgctcgagcggccgccagtgtgatggatatctgcagaattcgccctttcgagcggccgcccgggcaggtacttccatttacaaaacatagtcatccttgattgccgaaaatgacaaatcctagaaaacgtagcattcctatgcaagatgttaacatggttcttagttgttggccaaagatccatttgatgaatttaatttttctgaaatagacaattctgatgattcagatgattctgatgttagttctgtttagaaataactccaagaatagtttttatattttattttcacattgaaaatcaatcagggccaggtgcagtggttcacgcctgcaatcccagcactttgggaagctgaggtgggtggatcacttgaggtcaggagttcaagaccagcctgacaagcatggcataaccctgtttctactaaaaatacaaaattatctgggcatggtggtgggtgcctgtagtcccagc

SEQ ID NO: 18471 - DNA, 197 bp, Homo sapiens
actactatagggcgaattgggccctctagatgcatgctcgagcggccgccagtgtgatggatatctgcagaattcgcccttagcgtggtcgcggccgaggtaccagcagtggttacttgcattgtgtagtgtttttcaagaggtctgggtcttaacaaaatgttttcctttatctcagtgctcttctgcctcttttt

SEQ ID NO: 18472 - DNA, 343 bp, Homo sapiens
ctatagggcgaattgtgccctctagatgcatgctcgagcggccgccagtgtgatggatatctgcagaattcgcccttagcgtggtcgcggccgaggtacttgttcctattgtatccatgggctgtgtgcactttttgtgctttaaaattctctttgacaataaaacatgttatccccatgatcattcatttatttgagaaatatttattgagcctatgtgaagggacaggtaccagttatgtcctctcaacaattaaggatgcctatgctttctttcaggttgtgtcctgcaaatcattgccctccaggtgtctaaaggcaactagactccagcttcttcaca

SEQ ID NO: 18473 - DNA, 574 bp, Homo sapiens
ctactatagggcgaattgtgccctctagatgcatgctcgagcggccgccagtgtgatggatatctgcagaattcgcccttagcagcggccgagcgggcgggcacagcaatttttcttgccacaaacctgaattaaccttacagattttttaataggagccctgagatataatttactttttggagaatatacttacccttttaatagcttttcttttttagaataaaaatgtttggaaaactagactcctgtttctccagattagaaatgaaatttgatcctgtggtggcagattttctccctctcatcattacatatgttagaaattctgataaggagattgttagaagcagagattaagattatataaaagagagaggagacagaaaaggaagtgaaatgtaattttacaattccctgcaccacttatttatttcctaaaatcttgtctcacacaaaagacatcagagacagaaaggtttctctgtccacatctcccatatgggcaaaggtagcttaccatttcttggaaaataaagaaaaaatgaatttttctttaccaaaatttaaacac

SEQ ID NO: 18474 - DNA, 375 bp, Homo sapiens
gactcactatagggcgaattgggccctctagatgcatgctcgagcggccgccagtgtgatggatatctgcagaattcgcccttagcgtggtcgcggccgaggtacttttttttttttttttttttttccttttttttttttttttttttttttttttttttttttttttttttttttttttttaaaaaattttcctttttactctcctccttacatttccccaaactttatttaaaaaggcttaccctttcaaccacaaaattttttcttttttaaaaattttttaataattgaaaaaggccatttcctcatcttttaaccaattttttacaacacatttccctccccaaacaaccccttaaaaagacaaattcc

SEQ ID NO: 18475 - DNA, 613 bp, Homo sapiens
ctactatagggcgaattgggccctctagatgcatgctcgagcggccgccagtgtgatggatatctgcagaattcgccctttcgagcggccgcccgggcaggtaccttctttgctattcagttgattttttgtaataacacacttttaatttttttatttccttttgtgcatattctatagatattgtttgaggttaccatgagagttatgtataacatccaaagttacaacaatctattttgaattgataacaagttagttaattgatagcaaatcactttcttagttaagttaattcctaggtgtttcattttatttgtagctattgtaaatgggagtacctcggccgcgaccacgctaagggcgaattccagcacactggcggccgttactagtggatccgagctcggtaccaagcttggcgtaatcatggtcatagctgtttcctgtgtgaaattgttatccgctcacaattccacacaacatacgagccggaagcataaagtgtaaagcctggggtgcctaatgagtgagctaactcacattaattgcgttgcgctcactgcccgctttccagtcgggaaacctgtcgtgccagctgcattaatgaatc

SEQ ID NO: 18476 - DNA, 724 bp, Homo sapiens
  misc_feature 581: n = A,T,C or G
attgtatacgactcactatagggcgaatagcgccctctagatgcatgctcgagcggccgccagtgtgatggatatctgcagaattcgccctttcgagcggccgcccgggcaggtacagtaataccttaaggaaccggaaaatactaaatgtctttggctatacaactaaaaggccattctttcaaaagaatagggcatattcatttcagaatcaactaaaaaaaacagaaagcataacagaaatatgcatagaatttaagtatactttgtcttgccttcttttcccattctacccacataagcaaggagaatgcaatttatataatctttccagatgagactcaatagcactacaaagaaaatacccaaatttctgcaaaggcaaagtgaattaaaataattacacaactaggtgaagactgaaagggacaaatgttatttgcaattttctttttaacttgtttttaagccttacaagtgtagaaattatagctaataaacaaaaagtcacaatcttcacaaatggaactacaatagaaaaataaatcaaatgaaacacttagtaataaatgaagcctatnttattacttcaaggtgttaatgataaaaaaatttcaacacagctgttgcatttaaaaaagtgaaactacatactatgtttctagctcagtaaacagatgaacctgatgtcttaaatgacataacaattgaacattggactcct

SEQ ID NO: 18477 - DNA, 542 bp, Homo sapiens
ccctctagatgcatgctcgagcggccgccagtgtgatggatatctgcagaattcgccctttcgagcggccgcccgggcaggtacaacttaataaattttaacaaagtaagcacaactcttgtgcttaccacaagattaaggaatagaatagtcgctgggcatgggggctcacgtgtgtaatcccagcactttgggaggcaatgcaggcagatcacctgaggccagaagtttgagaccagcctggccaacaaggcaaaaccccatctctactaaaaatacaaaaattagctggccacggtggtgcacacctataatcccagctactcaggtggctgaggcttaagaattgcttgaacccaggaagtggaggttgcagtgagtccagattgcactattgcactccagcactccagcctgggcgacagagtgagactccgtctaaaaaaaaaaaaaaagaaattcttactgggctagcctgctttgctggcacttcctgagatttggtttttatgaccttttcttattaaactatacattttact

SEQ ID NO: 18478 - DNA, 427 bp, Homo sapiens
cgactactatagggcgaattgtgccctctagatgcatgctcgagcggccgccagtgtgatggatatctgcagaattcgcccttagcgtggtcgcggccgaggtacagtggcacgatctcggctcactgcaagctccgcctcccgggttcacgccattctcctgcctcagcctcccaggtgctgggactacaggcgcccgccactacgcccggctaattttttgtatttttagtagagacggggtttcaccgttttagccgggatggtctcgatctcctgacctcgtgatccgcccgcctcggcctcccaaagtgctgggattacaggcgtgagcaattactgtgtttcttatccatgtagtgtgcatgcagtgacggcatcctaatacgggtcctccttctagcatagatatggggatcagcacaaa

SEQ ID NO: 18479 - DNA, 338 bp, Homo sapiens
  misc_feature 203, 211: n = A,T,C or G
tacgactcactatagggcgaattgggccctctagatgcatgctcgagcggccgccagtgtgatggatatctgcagaattcgcccttagcgtggtcgcggccgaggtacgcgggtgacccaagcattggtatctacggcctggacttctatgtggtgttgggtaggccaggtttcagcatcgcagacaagaaagcgcaggacanggctgcanttggggccaaacacagaatcagcaaagaggaggccatgcgctggttccagcagaagtatgatgggatcatccttcctggcaaataaattcccgtttctatccaaaagagcaataaaaagttttcaga

SEQ ID NO: 18480 - DNA, 583 bp, Homo sapiens
gactactattggcgaatgcgccctgtagatgcatgctcagcggcgacgtgtgatggatatctgcagaatgcgccctttcgagcggccgcccgggcaggtacgcggtggttggctgcattaagagctcagtctcttcaccaggggctgccagtccttccatctgtgacgccaagcggattcacgttctgagactagacagagcctatgttactctgtgaccggcaggcaccgggagatccgtagctcagacgccaggacatcccggaagctgggaaatgggactgttgacattcagggatgtggccatagaattctctcgggaggagtgggaacacctggactcagatcagaagctgttatatggggatgtgatgctagagaactacggtaacctggactctctgggtctcgctgtctctaatccggacctgatcacctttttggagcaaaggaaagagccccggaacgtgaagagtgcagagacagtagccatccagccagatatctcctctcatgatactcaaggcctcttaagaaagaagcttataaaagcatcattccaaaaagtgatattggatggata

SEQ ID NO: 18481 - DNA, 213 bp, Homo sapiens
actatagggcgaattgggccctctagatgcatgctcgagcggccgccagtgtgatggatatctgcagaattcgcccttagcgtggtcgcggccgaggtactttttttttttttttttttttttttttttttttttttttttttttgttttttttttttttttttttttaaacaggaccaattgagtcagagaacacaaacatcgttaggcaaa

SEQ ID NO: 18482 - DNA, 480 bp, Homo sapiens
  misc_feature 86, 349, 372, 393, 407: n = A,T,C or G
cctctagatgcatgctcgagcggccgccagtgtgatggatatctgcagaattcgcccttagcgtggtcgcggccgaggtacgcggnggcagcaggaggaggcagagcacagcatcgtcgggaccagactcgtctcatgccagttgcagccttctcagccaaacgccccgaccaaggaaaactcactaccatgagaattgcagtgatttgcttttgccttctaggcatcacctgtgccgtaccagttaaacaggctgattctgaagttctgaggaaaagcactttacaacaaatactcagatgctgtggccacatggctaaactctgacccatctcagaagcagaatctnctagccccacagaatgctgtgtnctctgaagaaaccaatgactntaaacaagagaccntttcaagtaagtccaacgaaagccatgaccacatggatgatatggatgatgaagatgatgatgaccatgtgga

SEQ ID NO: 18483 - DNA, 338 bp, Homo sapiens
cactatagggcgaattgggccctctagatgcatgctcgagcggccgccagtgtgatggatatctgcagaattcgcccttagcgtggtcgcggccgaggtactgagctccacaaacgtggccatggttggtgcggaaatgattctgagtgagcaggtagaagtctcacgtcctgctgtgtccagagttggttccttccagagggttcgtggtctcgctggcttcaagaatgaagccgtggaccttcacagtgtgtgttacagctgttaaagatgttgtgtctggagtttgttccttcagatgtgtctggagtttctcccttctggtgggtttgtggtgt

SEQ ID NO: 18484 - DNA, 448 bp, Homo sapiens
  misc_feature 115: n = A,T,C or G
ccctctagatgcatgctcgagcggccgccagtgtgatggatatctgcagaattcgccctttcgagcggccgcccgggcaggtacttttttttctctttttttttttttttggatnttttttttttttttttatttttttttttttttccttttttttttatacactactttaaaaaattaaaacccttttatttccaaataaaaaaaattggccctccccaaaatcaaaaccatttcccccaaaaaaaatgcccccctgattaaacccctttacaccccccgagaccccctggccccacttggtttaacccaaaaattcggtggggccccccccccctttttccccccccctttttcctttaccaaaaagcaagttctttccctccccccccccccaaaaaaaaaaccattgggaaagccccccccccccctcctttccaaaattttt

SEQ ID NO: 18485 - DNA, 555 bp, Homo sapiens
gactactatagggcgaattgggccctctagatgcatgctcgagcggccgccagtgtgatggatatctgcagaattcgcccttagcgtggtcgcggccgaggtactcccgattggagacgtagaaccgttacttgtcgagggccttagcggccgccgtgaccctctggggatcccacgatgttcttctacctgagcaagaaaatttccattcccaataacgtgaagctgcagtgtgtatcctggaacaaggaacaagggttcatagcatgcggtggtgaagatggattactgaaagttttgaaattagagacgcagacagatgatgcaaaattgaggggccttgcagcccccagtaacctttctatgaatcagactcttgaaggtcatagtggttctgttcaagttgtaacatggaatgagcagtatcagaagttgactaccagtgatgaaaacgggcttatcattgtgtggatgttatataaaggctcttggattgaggagaagatcaacaatcgaaatatatcagttgttcccaatatgagctggaatgctgac

SEQ ID NO: 18486 - DNA, 364 bp, Homo sapiens
  misc_feature 325: n = A,T,C or G
tgcatgctcgagcggccgacagtgtgatggatatctgcagaattcgccctttcgagcggccgcccgggcaggtactggtgaaacagttttaataccctaacatacacagtaatgattcattcttgtttaaaacaagaggtgatttcgacttgggattgggatttttattttttgagatggagttttgttcttgttgcccaggctggagtgcaatggcacaatcctggctcactgcaacctccgcctcctgggttcaagcaattctcctgcctcagcctcctgagtagatgatgggattacaggcatgcaccaccacgcccaggtnaatttgtatttttagtagagatggggtttctccatgttg

SEQ ID NO: 18487 - DNA, 527 bp, Homo sapiens
tcactatagggcgaattgagccctctagatgcatgctcgagcggccgccagtgtgatggatatctgcagaattcgccctttcgagcggccgcccgggcaggttgctgtgttttccgtgggcccgtcactttcccctctgtttactgggtatctcacccagctgtgaatattcatggcccaaggtgttttaagacacctttttaaagggtgtgggattatcactttatttcagagttgtgaagaacaaataagtgacttgaccaagatccaatagactttttagaaatataaacatctgatttcagggtctgtgcgtaatttcttttcttttttttttcaaatatttagacttcaaggagatgagcttaatttcataatggagcattcctcttagagtttctggagtaatgaccgcattagacaatacaagccaagtcctaaaagccttgggtattcaggacttctgaaagccaccagactccctgtggagccatgaaacttccaaactctcccctgtgtcatgctgg

SEQ ID NO: 18488 - DNA, 332 bp, Homo sapiens
  misc_feature 54: n = A,T,C or G
ctcgagcgccgccagtgtgatggatatctgcagaattcgcccttagcgtcctcncagctcctatacattgccatttatccaagaagctgattatcccttcaacaattacctcatcatgctatacactgtttctggaacagcgagtatgaggttatcacatcctgtatggaaaacatgccagaaggaaaatggcctaactggatgattgttggaccagacagttcacggctgactacgcgtttggggaatcagtatgtcaacgtgatgaacatgcttcttatcacactccctggaacttctataacttactatggagaagaaattggaatggg

SEQ ID NO: 18489 - DNA, 601 bp, Homo sapiens
ctatagggcgaattgggccctctagatgcatgctcgagcggccgccagtgtgatggatatctgcagaattcgcccttagcgtggtcgcggccgaggtacttatgaagcccatctaagtaagatcatttcttctaattcaattttctaaaatcatttgtgttttagaaatctcatgattcccaggaaaaaaattttaaattgtgatacaggtttgacagccttttagtcaaataagttaaaacacacacacagactcatttactcactttgccattataattcaatcacaaagaaattttggccaggcgtggtggcttacgcctgtaatcccagcactttgggaggccgaggcaggtggatcacgaagtcaggggatcaagatcatcctggctaacatgtgaaaccccgtctctattaaaaataaaaaattagcctggtgtggtggcgggtgcctgtagtcccagctactcgggaggctgaggcagcagaatggcgtgaactcaggaagcggagcttgcagtgagccgagatcgcgccactgcactccagcctggatgacagagcgagactccgtctcaaaaaaaaaaaaaaaaaaaaagta

SEQ ID NO: 18490 - DNA, 550 bp, Homo sapiens
  misc_feature 472: n = A,T,C or G
gactcactatagggcgaattgggccctctagatgcatgctcgagcggccgccagtgtgatggatatctgcagaattcgccctttcgagcggccgcccgggcaggtaccaaaagtaaactgggtagaatccaaaggaaatagtatacaatatctttcagtcattttatagcatttttgttgccaaattataagtaaattgtaggtatttattaatatcattccaaggaatgactagcagtgcaaaaaataggtactacactgaattcacccccactgaaaaagatgagtatgcctgccgtgtgaaccatgtgactttgtcacagcccaagatagttaagtgggatcgagacatgtaagcagcatcatggaggtttgaagatgccgcatttggattggatgaattccaaattctgcttgcttgctttttaatattgatatgcttatacacttacactttatgcacaaaatgtanggttataataatgttaacatggacatgatcttctttataattctactttgagtgctgtctccatgtttgatgtatctg

SEQ ID NO: 18491 - DNA, 394 bp, Homo sapiens
actactatagggcgaattgggccctctagatgcatgctcgagcggccgccagtgtgatggatatctgcagaattcgccctttcgagcggccgcccgggcaggtacatgatagggaggagtgaggcaggtgggcactggagggctgtttcctctggcacagttgaactagagggtcactttccactcataattggtttcctaggtctaagtcaccacacctggggctgaagcaagtcttgcctgtgcaccaagcgtggccttggaccctggagagatgcaaggctcagttctccagtgttgaagtggaaggactcccaactgaaggagatcttcctctccccacctccagctcttttcccttacaaatgaccagggtgcaagtcgagaggcagag

SEQ ID NO: 18492 - DNA, 191 bp, Homo sapiens
aacgatacgacaactatagggcgaatagggccctctagatgcatgctcgagcggccgccagagagatggatatctgcagaattcgcccttagcgtggtcgcggccgaggtactttttttttatttatttttttttttctttaaatttttttttttatttttttttttattttattttttatttattattta

SEQ ID NO: 18493 - DNA, 176 bp, Homo sapiens
gcgaattgggccctctagatgcatgctcgagcggccgccagtgtgatggatatctgcagaattcgcccttagcgtggtcgcggccgaggtacgcgggtcagcagacgccccctgctagatgtgctggatacatgggaatgcatttccatttgttactagattgttcagaagtttta

SEQ ID NO: 18494 - DNA, 663 bp, Homo sapiens
tacgactcactatagggcgaattgggccctctagatgcatgctcgagcggccgccagtgtgatggatatctgcagaattcgccctttcgagcggccgcccgggcaggtactaagtggtgccagagctattgtattaacttgtttcatctctcttttaattctttgttctctctactataaaatggagaacagggaaaaattccttgttctgtatactgtaaaaagcaaacagggagatatagatgaccacagcaattacctttgttgagaaaagccacatataaaccaaaaaaatgggtattgtctttgttccattttgcatctgcctacaaacttcccaggttcaaaaacaaaaacaattagtgaaataacaaaccaccttacctcctttgccaggctagagattttatttctcttaaggttctgtctgttacctagtggttttcttgtaaaggggaatgaaaagtgtgaattaaaagtcacacattgttttgtcctgagtcctaatcacagtgtaaaagcaaacaagtttatcaggaacagagaagtggcagatatcgggcctgattacgttatttttgaggtcttatatcaagaagctccattccattaaaaatgttcagttttatgggaaagacagaggaaaaggaaagatgtgatgta

SEQ ID NO: 18495 - DNA, 393 bp, Homo sapiens
tagggcgaattgggccctctagatgcatgctcgagcggccgccagtgtgatggatatctgcagaattcgcccttagcgtggtcgcggccgaggtacattacggtatgccaatcgtgctaagaatattaaaaataaagctagaattaatgaagatccaaaggatgctttgctgcgtcagttccagaaagaaatagaagaaactgaaaaagaagcttgaagaaggagaagaaatatcaggctctgatatcagtgggtcagaggaagatgatgatgaagagggtgaggttggagaagatggagagaaaaggaaaaaaatcaatataataataaaatgttcctgcccgggcggccgttcgaaagggcgaattccagcacactggcggccgttactag

SEQ ID NO: 18496 - DNA, 426 bp, Homo sapiens
tacgactcactatagggcgaattgggccctctagatgcatgctcgagcggccgccagtgtgatggatatctgcagaattcgcccttagcgtggtcgcggccgaggtacttatattttttattattatttttaaatactttaattatataaattaaatttattttaaaattttttttttacaatttaatttaatttaattaataataactgacaaaaggggggaaaaaaattttatttaaagaaaaaacattatttaatagagggagaaaaaaaaaaaatatttttaaacccaaaaacattttaaaaaaaaattttcaaaaattttttaaaaaaattcatcaaattaaaccaaaaattattttttttttttatacaaaatttttcatatatttccaaaaaaataaaaaatatttccctaaacaaaaa

SEQ ID NO: 18497 - DNA, 422 bp, Homo sapiens
gcgaattgggccctctagatgcatgctcgagcggccgccagtgtgatggatatctgcagaattcgcccttagcgtggtcgcggccgaggtaccctaaccgtgcaaaggtagcataatcacttgttccttaattagggacctgtatgaatggctccacgagggttcagctgtctcttacttttaaccagtgaaattgatcctgcccgtgaagaggcgggcatgacacatcaagacgagaagaccctatggagctttaatttattaatgcaaacggtacgcgggtataccctttatgttcctgactgatgcgcagaacttgggggaaatctacagcaatatacaggttgcaatgctgatgacacaacagcaatcctctcctctacgtggacttactgttgtttttttaattattattggaatgg

SEQ ID NO: 18498 - DNA, 485 bp, Homo sapiens
  misc_feature 95, 96, 135, 137, 144: n = A,T,C or G
gcccgagcggccgccagtgtgatggatatctgcagaatacgcccttagcgtggtcgcggccgaggtactccatgcggcccagaggggcactaccnngtgtggccgcagaacatgtttatgatgcttattccaccngnggttggngaactccttggcagggtcatgtcctaccccatgagtgtcttgcttcagtgtcaccctgagagcctgagtgataccattctccttccggccgaggcctttgccttgagtccatccatgctttagcagctgctcctcagcaaacttcatcccacgactcttgacctctggggtgacattcatggtgagaaaaaagtctctatcctcagactctcaccagagaagaagaggtgatatcattcgtcattgctgggtccgctccgcggaaacatgtgccggacctgacttgtgcgccgccatcttcccccccgcgtacctgcccgggcggccgctcgaaagggcga

SEQ ID NO: 18499 - DNA, 501 bp, Homo sapiens
  misc_feature 401: n = A,T,C or G
tcactatagggcgaattgggccctctagatgcatgctcgagcggccgccagtgtgatggatatctgcagaattcgccctttcgagcggccgcccgggcaggtactcatttcccctgtgtcttcctgggaatttaacttagtctcagaggcccaatgggctgagtgtggtggattttgcatttcaaagttaagccctaaacccagcaaacaaccaagtaaagatggttattaacccaactcagactgactctgagtttatccatttttctaggactatttaagaaacaactgaggcatcagaccaactttccccacaagtcctcggtaaggaactagtccagtcgcatgtagagagggggatcctggccttctggctgcttccttacctagaccccacacanagggtggtgggaggaggcggcgggcagatctggaggaaatgcctatgaaaactgagatctagggcttgtgcagcaagaactcagcattctacttgctgtc

SEQ ID NO: 18500 - DNA, 578 bp, Homo sapiens
gactcactatagggcgaattgggccctctagatgcatgctcgagcggccgccagtgtgatggatatctgcagaattcgccctttcgagcggccgcccgggcaggtactttttttttttttttttttttttttttttggagggacacgctagagtgcagtgacatgatcacatgtactgcagcctcagcctccaaggttcaaaagatcctcccacctcagcctcccgagtagctgggactacaggtgtgcaccatatccagccaattttttaattttttgcagagacgaggtctcaccatgttgcccagggtggtcttgaacctcctaactcaagtgatcctcccacgttggcctcccaaagtgctaagattacaggcatgagccaccgtgcctgccatcattttttttttttaaagaagacaaaatactagtgatgcacttagtcactggtacattaataagaattgttacagctggtgattcttttgcagatcagaaactttggtggacttgagaatatagtcagaaaggcacacaaaagtcagagtaaataataatgggaagagacctttttgcca

SEQ ID NO: 18501 - DNA, 262 bp, Homo sapiens
gggcgaattgggccctctagatgcatgctcgagcggccgccagtgtgatggatatctgcagaattcgcccttagcgtggtcgcggccgaggtacaattgttttagaagataatttgtttttctctcttcagtttcgcatattactaaagacaaatcatggtaggattggtttgtttattataccttgggctagctatttgtatacaatgcagcaagaatgattattttatacttaagcttgtaaataggctctgatggaact

SEQ ID NO: 18502 - DNA, 647 bp, Homo sapiens
  misc_feature 519, 520, 522, 525, 529: n = A,T,C or G
gactcactatagggcgaattgggccctctagatgcatgctcgagcggccgccagtgtgatggatatctgcagaattcgcccttagcgtggtcgcggccgaggtacacaacattttatatatgaaaagaatgctgtagactgacttgcaaataacattctaagattcccattacctttaagaggagtcagctgtcattttggaaaaattaagatttcaacaattttacacatattttgaaaataattttgataatgaaaaatgttcaatcttaaatcgtgtaaataagtaaatagagaggtaaaataaagagcttgatgtttatgtgatattgagaaaaaatcttttttaaaagtaaaatacagattaaaatacaactttgtgctttaactgaagggtgtccctactccctgatgtgtttgagactgtcacaaacctgaacccatttggacaatacatgaaataatcattttgcatcatttcactattggggaaatgataacttcttacattaaatgaannanaanaatnaaaaaaataaaagtacctgcccgggcggccgctcgaaagggcgaattccagcacactggcggccggtactagtggatccgagctcggtaccaagcttggcgtaatcatggtcatagct

SEQ ID NO: 18503 - DNA, 553 bp, Homo sapiens
tgtaatacgactcactatagggcgaattgggccctctagatgcatgctcgagcggccgccagtgtgatggatatctgcagaattcgcccttagcgtggtcgcggccgaggtacaagtgtcagtcatgtatcattatatagtctgttgatctttccatttgcaaaaaattaatagttttcccccacaaatgtacctgcccgggcggccgctcgaaagggcgaattccagcacactggcggccgttactagtggatccgagctcggtaccaagcttggcgtaatcatggtcatagctgtttcctgtgtgaaattgttatccgctcacaattccacacaacatacgagccggaagcataaagtgtaaagcctggggtgcctaatgagtgagctaactcacattaattgcgttgcgctcactgcccgctttccagtcgggaaacctgtcgtgccagctgcattaatgaatcggccaacgcgcggggagaggcggtttgcgtattgggcgctctttcgctttctcgctcactgactcgctgcgctcggtcgttcggct

SEQ ID NO: 18504 - DNA, 408 bp, Homo sapiens
tacgactcactatagggcgaattgggccctctagatgcatgctcgagcggccgccagtgtgatggatatctgcagaattcgccctttcgagcggccgcccgggcaggtactgctttttctattccctgtgagtttataattatttcacaataaaagttcaaaaacacttattggatggacgtcacagtcagaacataatagaagacagaatcagtgaattataggtctgtttaatagaaatgactcaaactgacacacaaagcaaaaaaaaaaaaaaaaaaagtacgcgggtctgtaatgatactgattatgaaatgtcccctcaaactcattgcagcagataacttttttgagtcattgacttcattttatatttaaaaaattatggaatatcatctgtcattatat

SEQ ID NO: 18505 - DNA, 605 bp, Homo sapiens
acgactcactatagggcgaattgggccctctagatgcatgctcgagcggccgccagtgtgatggatatctgcagaattcgccctttcgagcggccgcccgggcaggtccgggcaggtacttgcatttcttttttgtgcactctataaggctggttgtgacccagatcagcttaactttttatattatgttatttcactaactgctacagtcaaaatgatcaaatctttgtacctcggccgcgaccacgctaagggcgaattccagcacactggcggccgttactagtggatccgagctcggtaccaagcttggcgtaatcatggtcatagctgtttcctgtgtgaaattgttatccgctcacaattccacacaacatacgagccggaagcataaagtgtaaagcctggggtgcctaatgagtgagctaactcacattaattgcgttgcgctcactgcccgctttccagtcgggaaacctgtcgtgccagctgcattaatgaatcggccaacgcgcggggagaggcggtttgcgtattgggcgctcttccgcttcctcgctcactgactcgctgcgctcggtcgttcggctgcggcgagcggtatc

SEQ ID NO: 18506 - DNA, 571 bp, Homo sapiens
ggcgaattgggccctctagatgcatgctcgagcggccgccagtgtgatggatatctgcagaattcgccctttcgagcggccgcccgggcaggtacaagctgatctccccgctaaatgaaaaagggcaagatactggggccaccattgacttggtgatcggctatgatccgccttctgctccacatccaaatgacctgagcgggcccagcgtgccaggcatgggaggagatggggaagaagatgaaggtgatgaagacaggttggacaatgcagtcaggggccctgggcccaaggggccagttgggacggtgtcggaagctcagcttgctcggaggctcaccaaagtaaagaacagccggcggatgctgtcaaataagccacaggacttccagatccgcgtccgagtgattgagggccgacagttaagtggtaacaacataaggcctgtggtcaaagttcacgtctgtggccagacacaccgaacaagaatcaagagaggaaacaaccctttttttgatgagttgtttttctacaatgtcaacatgaccccttctgaattgatggatgagat

SEQ ID NO: 18507 - DNA, 179 bp, Homo sapiens
attgggccctctagatgcatgctcgagcggccgccagtgtgatggatatctgcagaattcgccctttcgagcggccgcccgggcaggtacagttgaatctaccattttggctgtggtagaccacatctttgggtatcaatgggagatcagcttagtaaggtagaaaacaactcaatttt

SEQ ID NO: 18508 - DNA, 131 bp, Homo sapiens
tatagggcgaattgggccctctagatgcatgctcgagcggccgccagtgtgatggatatctgcagaattcgccctttcgagcggccgcccgggcaggtacaacgccaaaccacgactgtcgtagcaggtat

SEQ ID NO: 18509 - DNA, 546 bp, Homo sapiens
cctctagatgcatgctcgagcggccgccagtgtgatggatatctgcagaattcgcccttagcgtggtcgcggccgaggtactttgagttctcacgtgcgtcttaaggcatgagtgttcactgaagacttctgcacattgctcacagtcacagagttcccttccattgtgttttccttccaattgtatcccagtggatgtctgacccctcagaaagtcctgctgaagtatagaccactgcgtttcaagtcgcatttaccatccttggagaactcctccctgaactgtccttgactcttcttgttccaaccaagagattagactgggtttgatgatctgacctcctactgtggccaggttcttgtagttctccagcatcacgtcactgtagaggcttctctgagttgagtccagtaaagttcactcctcctgggtgaagtccacagccacatcgtcaaaggtcactgaatccatgggacaaatcagcagctgccatcccgcgaggtgagaacgtgtcagaaccctcctttcatcgatgtcaccatcac

SEQ ID NO: 18510 - DNA, 446 bp, Homo sapiens
  misc_feature 278: n = A,T,C or G
catgctcgagcggtcgacaatgtgatggatatctgcggagttcggcctttcgagcggccgaccgggcaggtacaaactgttaaatttgtgaataagtgacaaaagaattccacaaaatcatggaactctcaaactcaagtaaaccaaaaaatagttaaccaaataatgatctccgtcagacagtgatttgaatgagagatcatatcctaagtttaaaaagtaaaatttaaatgcaatgtgattgaaatacctctgtgttttacattactagttatttntttaataaaagagaggattagtgtgttaaagtttagagacatttcaaaggtcatactgtaaatggatctgtgtatgtggcagaactgaaggaacaagtcttttaagcctctcaggcacatttgacactaatgccaggaactgaagtatttgaaggagctgcagacaga

SEQ ID NO: 18511 - DNA, 508 bp, Homo sapiens
ctatagggcgaattgtgccctctagatgcatgctcgagcggccgccagtgtgatggatatctgcagaattcgccctttcgagcggccgcccgggcaggtacttttttttttttttttttttttttcttttttttttttttttttttttttttttttttttttttttttttttttttttttttaattttttttttttttttttttttttttttttttttttttttgggggggaaaaaacttttttgggaaaaaaaaaaaattgttgtaaaaacctttttttttttggggggaaaaattggggggggcccaaaaggctaaaaaaaaaaaggggggggaaaaggaaaaaaatttttttaaaaggggaacattaaaacaaaattttttttttatttttaaaaaggggctttccaaaaggggggtggaaaaaaaaacaaagggggggggggggcctttttttttcaaagggggggggaaaccaaatttggggaaaaatttttaaaaaaggggg

SEQ ID NO: 18512 - DNA, 648 bp, Homo sapiens
  misc_feature 580: n = A,T,C or G
actcactatagggcgaattgggccctctagatgcatgctcgagcggccgccagtgtgatggatatctgcagaattcgccctttcgagcggccgcccgggcaggtactacctacctagaggttatgtgttttctctttctccccgctttcacctctttctttcccaattcaaccagccaagtgagccctgttctggtattttgaatcattagagaaaagaaagggagtggctgttttgagttgtcctttctttgcagaaaggagaaaatgtgattgtgttttttttttaccagcctacttctaagtgtcactgcctggtttttctcttttttaaggattagaactaagaggacacaccagcatcggagtgtattaagcccctgaaacacatggtagctagggactgaacacaggaaccgtatgacagcagcacaaacccccaaaggatgttcctgccttgtgggcccctgagccccttgggagactgagaatcatgaccagattcatccagaactgctgcagtgttaagtgaaaatcctctgtagttgttctgcagaggaaccttccttccattaaaaaanttctgctcaatacagaatggtccacatcacccaaagtgcactgttggagatgctgtgaaattaaaacc

SEQ ID NO: 18513 - DNA, 518 bp, Homo sapiens
  misc_feature 413: n = A,T,C or G
ataggcgaatggccctctagatgcatgctcgagcggccgccagtgtgatggatatctgcagaattcgcccttagcgtggtcgcggccgaggtacagcggtgcctggaatatttgggctatctaggctattcaatattgactgagcaagagtctcaagcttcagctgttacagtgacaagagataaaaagatagacctgcagaaaaaacaaactcaaagaaatgtgttcagatgtaatgtaattggagtgaaaaactgtgggaaaagtggagttcttcaggctcttcttggaagaaacttaatgaggcagaagaaaattcgtgaagatcataaatcctactatgcgattaacactgtttatgtatatggacaagagaaatacttgttgttgcatgatatctcagaatcggaatntctaactgaagctgaaatcatttgtgatgttggatgcctggtatatgatgtcagcaatcccaaatcctttgaatactgtgccaggatttttaagcaacactttat

SEQ ID NO: 18514 - DNA, 659 bp, Homo sapiens
ctctagatgcatgctcgagcggccgccagtgtgatggatatctgcagaattcgcccttagcgtggtcgcggccgaggtaccagctagtggacaagatagtgcactgcatgagaccgttgatacagccagaaaacagggagatcttgagcatggagtatccggtaatgttacaaccgataccggccgggaaggggccaggaaagggagtcaagcaggagcgtctgtccgaacggaggctaggtaagaatatttcaccatgaaaatgttaaaagacataaaggaaggagctaaacaatatggacccaactctccttatatgagaacgttattagattccattgctcatggaaatagacttattccttatgattgggaaattttacctaaatcttccctttcaccctctcagtatctacagtttaaaacctggtgggctgatgaagctcaaactcaggtaagagaaaacacacaagcacagccacctgtgcctgtttcttttgaacagctaatgggagttggccctaattggggttgattagaaaattaagcagtaatgaagaatgttgccattgttcagctgtgcactgtgtgcttacaggcatggaaaagaataagtgttacaggggaaaaatatccttctttcagttgtttgactaact

SEQ ID NO: 18515 - DNA, 670 bp, Homo sapiens
tacgactactatagggcgaattgggccctctagatgcatgctcgagcggccgccagtgtgatggatatctgcagaattcgccctttcgagcggccgcccgggcaggtacgcgggggagttctcagcaggagtgccaaagaaagaagtaaactgaagttgcaaagcaacagtaatactgcattcctcgttcagtattgaaagattggcgtaaagtcaagaagctgaagcaaactggggaatcctttttacaggatgactcctgctgtgagatagggcctaatttacaaaagtgtcgagaatgtagacttattcgcagtaaaaaggagaagaaccagctcactcaccagtattttgtagattttactactttagacggttgtcatttagtaaaaacggagtagttagaatagatggtttctcttctcctgaccaatatgatgatgaagctatgagtttgtggacacatgaaaattttgaagatgatgaactagatatagagacttctaaatatatcttggatataataggtgataagttctgtcaattagtaacatctgaaaaaacagctttgtcctgggtgaaaaaggatgccaaaattgcctggaaaagagcagtgagaggagtccgggagatgtgtgatgcatgtgaaacaacattgtttaacattcac

SEQ ID NO: 18516 - DNA, 664 bp, Homo sapiens
tacgactcactatagggcgaattgggccctctagatgcatgctcgagcggccgccagtgtgatggatatctgcagaattcgcccttagcgtggtcgcggccgaggtacagaatgtaaattatatctcaataaagctgatatgtgcatacacacacacgcacacccaacagcagaagaaaatacctaaaaggtaatgaacaaaagcattcagattaaagcatgagaatctgaaggtttggtcatctacatcttgttccatagataagcatggactgtctactaaacacagttgtcaacttgatccaaaaatcttcgctggattctgtttctttcaagactgtttctagaggggtccacaaataattatctttgaagtttctgattaggacatctttccagggattctaagattatttatgcctctttaattaaaagactttaaggatcaatatattggagttgccctcttgtgtccattattagcagtatttgatatcaactttttcattcgtgttctagagctttttctcttatttctttaagtcagaacaccagatcttcaggtttacgatcatgcaagtttttaggaagattatgagaaaggttgcctgtgcctgtggatcataaggttgaatgtgttgcattaattccttgcaatatttcg

SEQ ID NO: 18517 - DNA, 596 bp, Homo sapiens
ccctctagatgcatgctcgagcggccgccagtgtgatggatatctgcagaattcgcccttcgagcggccgcccgggcaggtactttttttttttttttttttttgggttttttttttttttttttttatttattaattttttttttttgatttattttttttatttttaattttattttttatttattttcatgttttttattgtattttttgaaaaaaaaaaaatttttataaagaaaatatcaaaaaggggcaaaaaaggtaaaaagggactaccacccaaaaaaattaattggggggggataaatttttgggaaaaaaaaaaaaaatattttttttattcaccaaaaggcgaaaattggggaaaaatgaaattactttgcaaaagaaaaaaaactgcgacagaaaaaaaaaaggttcgggatgttattttcttaggaggcatttatttactacggggggaaaaaaaaacccccccctttttattaaaaaagcgtgggtgggtgaaaaaaaaaaaaaaccccggtggagggtgtttcccgaaacaatttttttgaaaaaaaacaccacgttttttaaaaaaaaaaggggggggg

SEQ ID NO: 18518 - DNA, 535 bp, Homo sapiens
acgactactatagggcgaattgggccctctagatgcatgctcgagcggccgccagtgtgatggatatctgcagaattcgccctttcgagcggccgcccgggcaggtacgcgggagttattatctgactttctggttataatcattctaatgagtgtgaagtagcctctggtgtcatttgatttgcatttctctgatgagtgatgctatcaagcacctttgctggtgctgttggccatatgtgtatgttccctggagaagtgtctgtgctgagccttggcccactttttaattaggcgtttgtctttttattactgagttgtaagagttctttatatattctggattctagacccttatcagatacatggtttgcaaatattttctcccattctgtgggttgtgttttcactttatcgataatgtccttagacatataataaatttgtattttaaaagtgacttgatttggctgtgcaaggtggctcacgcttgtaatcccaacactttgggagactgaggtgggtggatcatatg

SEQ ID NO: 18519 - DNA, 616 bp, Homo sapiens
  misc_feature 178: n = A,T,C or G
acgactactatgggcgaattgggccctctagatgcatgctcgagcggccgccagtgtgatggatatctgcagaattcgccctttcgagcggccgcccgggcaggtacagttgctccttctgtaattcttgcactaaaactccattaaagaccatcaatgagccaaatagtgtgctagnattgaggatggagttcttagctacttaatgattcttttcttctggaaatcttctagtggataatttttaaaagcttcttttaaactgctcagtaaaacattgccatacattaactctccatttctgcattaatttcatttgctggaaagaaattattttgttaatgaaccaaacccagccattaagttatgtgaattcaccttctctagacacattgaggtatggcagagaagacacatattccctggcctagagtgggctgacaatattgttgcctcccctaaattgactcaatcttgagaaccacatactgcagtgacagttgatcatggatcaaaaatattcctttttctcctaaaggaaatccctcatggcattatcatttcctaaggacaatgagatgtccctccgctcaaatcctaaagcccccctgatgaa

SEQ ID NO: 18520 - DNA, 544 bp, Homo sapiens
gcgaattgagccctctagatgcatgctcgagcggccgccagtgtgatggatatctgcagaattcgccctttcgagcggccgcccgggcaggtactttttttttttttttttttttttttttttttttttttttttttttttttttttttttttccacccaaaaaaaaaaatttttttcccccccaaaaagatatttcccccaaaattttcccttttttttaaaacaaaaaattttttgggcacaaaaaggttttttttttttttaaggggggaaaaattttttgtttgcgcctccataaatttttttttttgggaaaatatcacatttttaaaatcagggggagggggcgttttttttttataaggaaaatagacatatccccgagggtttttttttacagggggtttttttttggccccaaaatttactttttttttaacccctctttttttttcacactctaatatattccccttttccccatatactgtgaaaaaaacccttccggggctcttttattttgggaaaaaaaatttttttttt

SEQ ID NO: 18521 - DNA, 614 bp, Homo sapiens
tactcactatagggcgaattgggccctctagatgcatgctcgagcggccgccagtgtgatggatatctgcagaattcgccctttcgagcggccgcccgggcaggtaccccagaagccctcctctttccccatcttaacactgtcttctttcttgctgaaagttactatcctgactttaaaatcatagattagttttgcctgttttttattttatgtaaatgtaatcatacataatacactttttttcattcatcatttttgtgaatattttagtttcttgttgccactgtaacaaattaccacaaacttagtgacttaaaacaacacagatttattcttttatagtcctggagatcagaagtccaaaaatcagtttcattaggcctaaatcaaagtatcagcagggttggctctttattgaagttgtgagggagaatgttttcttcccttttttggcttccagtgacggcctgtatttatgggcttgtgaccccttcctctctatgatcaaagcttgcttttgtcattatatcatcttctcttctgtagtcagatctttccctgcctctaagtttatggctcacctgcataaagcagggataatccccctatct

SEQ ID NO: 18522 - DNA, 398 bp, Homo sapiens
gggccctctagatgcatgctcgagcggccgccagtgtgatggatatctgcagaattcgccctttcgagcggccgcccgggcaggtacactaggtaataaaactgattcatacagtctaatgatatcaccgctgttagggttttataaaactgcatttaaaaaaagatctatgaccagatattctcctgggtgcctcctaaaaggaacacttataagggtcattgaaatgttttcaatcattgccttcccattgatccttctaacatgctgttggcatcacacctaatattcagagggaatgggcaaggtatgagggaaggaaataaaaaataaaataaataaaatagaatgacacaaatttgagttttgtgaactcctgaacagatggtcttaaggac

SEQ ID NO: 18523 - DNA, 713 bp, Homo sapiens
  misc_feature 661: n = A,T,C or G
cgactcactatagggcgaattgggccctctagatgcatgctcgagcggccgccagtgtgatggatatctgcagaattcgcccttagcgtggtcgcggccgaggtacttgtttgcaatttttttatctgtgaaaatattttaaagctcttacaaaacttaaatttttaaaaaatcagctcaaaaattttttccatgttgttgggcataccactgctgtctctgctttcggttttccaactctgtaagaagggcttgtctgtatgcttcatacattttaacaatctgctccaattctttcatgaagagcaactttagcattccctggtatgtatccaggtcagccagctggaagagttcccacttcagaatgtggtcatatctgttttaaaacacaatcatatatatgttcacaacacatacataaacatgtatttctagcaagaaactagtctgttttttaaaatgtcaactttatttataactaaacaaaccataagttttaattaaaaataactgggcacagtggtggcgcctattatagtcccagctacttgggaagctgaggtgggaggctgagattaactttgggaaccaccgcgcccggcctacatataattcttctaagcaaagaaaaaactgctaatattacttcatttcaatntaagttaaagaatacctatttctttaaattacccattattctaatattaaca

SEQ ID NO: 18524 - DNA, 401 bp, Homo sapiens
actatagggcgaattgggccctctagatgcatgctcgagcggccgccagtgtgatggatatctgcagaattcgccctttcgagcggccgcccgggcaggtaccattcatttaaaggcataaatgtccaatggggccatcttgtgatacatgcactgtcacaggaaaagtttccaggaaaagtcaagccagggcttcacagaagatcaaaagaaagagacaaggggaagctaagtgtattagtcaggattctctaagggacagaactaatagaatatatatacacacacaaacacacacacacacacacatatatatacatataaataaaagggagtttattaaggagtattaactcacacaatcacaaggtcccacaacaggccgggccatctgtaagctg

SEQ ID NO: 18525 - DNA, 401 bp, Homo sapiens
gcatgctcgagcggccgccagtgtgatggatatctgcagaattcgccctttcgagcggccgcccgggcaggtacttttttttttttttttttttttggaaggtgatgatgcaaaggattttattaggcagtggaagtagctctcaccaaaaggggagctgaaaggggggtgcaaaaaaaaagggaatctttccttgaagcctggtcgtctccatctgggctcctctccaaagttgtgccgtctgaagttaagtcgcatctatccatagtctcaaatgcccagttgcttcttcacctcttgatattcaactgcttgtgttgctctgccagctgaagtctgttgtgggcacaaaataggggcagactgggccaaaaaggcaacatttgggcagaaaaatgggg

SEQ ID NO: 18526 - DNA, 628 bp, Homo sapiens
  misc_feature 110: n = A,T,C or G
gactactatagggcgaattgagccctctagatgcatgctcgagcggccgccagtgtgatggatatctgcagaattcgccctttcgagcggccgcccgggcaggtactttnttttttttttttttttttttttttttgggacggaatcttgctctgtcacccaggctggagtgcaatgggcggtctcagctgactgtaacctccgcctcctgggttcgagattctcctgcctcagcctcccaagtagctgggactacaggcacccaccaccacacctggctaatttttttgtatttttagtaaagacggggtttcactatgttggccaggctggtctcgaactcctgacctcgtgatccacccaccttggcctcccaatcttatttgctttacaagtcctgcttcagggttaccttccctgaccactgctgcctccctcccagcatttgccagggactgtcattgccttagtttattttttctgttttgttttttttttgtcgtttttgtttttttttgagacagcgtcttattctgtcgccaaggctggagtgcaatggcgcaatcaaagcttgctgcagccttgaactcctgggctcaagcaatcctcttaccttagcaactaggac

SEQ ID NO: 18527 - DNA, 571 bp, Homo sapiens
acgactactatagggcgaattgggccctctagatgcatgctcgagcggccgccagtgtgatggatatctgcagaattcgccctttcgagcggccgcccgggcaggtacgcggggggactctgaagtgaaaatggattttcagaggattgaattggctggtgctgtgggaagcaaggaggaacttgaagtagactttaaaaaactaaagcaaattaaaaacaggatgaaaaagactgattggctcttcctcaatgcttgtgtggggttcctgaaattgtgccagccgactccaggtccaccctgaccccacagcataaaccatgctgtgatgtcacagctaccatagaactccagggtagtgttgggctggcccatgtgggctcaggggttgtagaaggtgatttagctgccatagaagcatacaagtcatcaggaggaggcattgcacgtcagctcaccgcagatgaagtacctcggccgcgaccacgctaagggcgaattccagcacactggcggccgttactagtggatccgagctcggtaccaagcttggcgtaatcatggtcatagc

SEQ ID NO: 18528 - DNA, 535 bp, Homo sapiens
  misc_feature 134, 229, 235, 357: n = A,T,C or G
ccctctagattcatgctcgagcggccgccagtgtgatggatatctgcagaattcgccctttcgagcggccgcccgggcatgtacaaagtccaggcccggcacggtggctcacacctataatcccagcaccctgngaggccaaggcgggtggatcacccgaggtcagtcaggagtttgagaccagcctggccaaaatggcaaaaccctgtctccactaaaaataacaaanaattangcgggtgtggtggcaggtgcctgtaatcccagctactcaggaggctgaggcaggagaatcacttgaacccgggaggtagaggttgcaatgagccaagattgtgccactacagtccagcctgngcaacaagaccgaaacgccgtctctttaaaaaaaaaaaaaaaaaaaagtgcaaagtcctatgtattcttcagagttgttaggaaagaaaacaaataaggttagctacatatttagctaaccttagatttaataaactattaagttatttaggtcaaaaagaataactaaatggatgct

SEQ ID NO: 18529 - DNA, 539 bp, Homo sapiens
  misc_feature 25: n = A,T,C or G
tacgactcactatatggcgaattgngccctctagatgcatgctcgagcggccgccagtgtgatggatatctgcagaattcgccctttcgagcggccgcccgggcaggtaccattcatttaaaggcataaatgtccaatggggccatcttgtgatacatgcactgtcacaggaaaagtttccaggaaaagtcaagccagggcttcacagaagatcaaaagaaagagacaaggagaagctaagtgtattagtcaggattctctaagggacagaactaatagaatatatatacacacacaaacacacacacacacacatatatatacatataaataaaagggagtttattaaggagtattaactcacacaatcacaaggtcccacaacaggccgggccatctgtaagctgaggaacaaggaagccagtctgaatcccaaagatgacaaacttggagttcaatgttcaagggcaggaagcatccagcacaagaaatagatgtaggctgggaagctaagccagtcaagacttttcacgtttttc

SEQ ID NO: 18530 - DNA, 566 bp, Homo sapiens
  misc_feature 169: n = A,T,C or G
gactcactatagggcgaattgggccctctagatgcatgctcgagcggccgccagtgtgatggatatctgcagaattcgccctttcgagcggccgcccgggcaggtactttttttttttttttttttttgagacagagtctcgctcagtcgcccaggcagagcttgcagnggcagagatcacaccactgcactccagcctgggcgactcagggagcctccgtctcaaaaacaactttttttcatccatggacaattgttgtcttgttttggtcctctttaggaggtggttttataatcagctataaaactccaataggtgctcttgaatgcaggtttctgataactttggagattgtgacaacaggaatagaggaagaaccttcaggactcatggagagctaaatgttcatgagtatcaagcaggaattaacaggaattaactgcatggactgaaccaatcttttttactttttgctcaaaatatttgctgggcctttgatttgcgtttccgagtcttatgacttttcttttgagctacctgacagattttaacaatttaagatact

SEQ ID NO: 18531 - DNA, 666 bp, Homo sapiens
  misc_feature 622: n = A,T,C or G
tacgactactatagggcgaattgggccctctagatgcatgctcgagcggccgccagtgtgatggatatctgcagaattcgccctttcgagcggccgcccgggcaggtacttggatatcactgctggttattcaggtcccaaagacacttcaattagcatgtaatgaaggccttcaaggcagggggttaccttctggcctagaatgtgtctagaaatgttgtctaagagctagatcctggaatggggacctcgtgactacgactggtgccctattctactgtggctgatctggtatctaggaagcaagacaaagccttcccctctcttccttctcctcttctcaagtaaaaggaaagggtgtcttttggagtcatgagctgtgaagcctgtagttaagggaggggtgacactagcactcccttggctgtcccagctggtgtctcaatatgtcgtctgctccccctagttcactgtctctgggcctagttcagctctaggattcacctaagagttacagtccttatggcctagactgcctttcaagtttacttagagaccaagagcactttgactctcagtggcaaggtctgcaagcactcaatcttggaccactaagatctancggttcccctctgactagggttggtttaagtgctccctaagtgt

SEQ ID NO: 18532 - DNA, 539 bp, Homo sapiens
acgactcactatagggcgaattgggccctctagatgcatgctcgagcggccgccagtgtgatggatatctgcagaattcgcccttagcgtggtcgcggccgaggtactttttttttttttttttttttgtagagacagagtcttgctttgttatgcaggttggagtgctgtggcacaatcttagatcatcacagcactgaactctaggctcaagtgatccttcctgcttcagcctccccaatagctgggactacaggtccggttgatttttagaatttttttgtagagacagagttctcactatgttgcccaggttggttttgaatgcctgacctcaaacaatcctcctgcctcaacctcccaaagtgctgggatttcgggcgtgagacaccatgcctggccaacgttaagcatctattcatgttcttactggccatttgggtattttcttgcctatccaaattctttaccatttttatactggattagttgtctttttattattaagttgtaagaggtctttatatattctagatata

SEQ ID NO: 18533 - DNA, 387 bp, Homo sapiens
gggcgaattgggccctctagatgcatgctcgagcggccgccagtgtgatggatatctgcagaattcgccctttcgagcggccgcccgggcaggtactttaaatcacctctagattacttgttatacctactacaatgtaaatgctatgtaaatggttgctatactatattgtttgtttgttgttattgttagtaggattgttattttttattgtgagtttcttttttctgaatatatttaatccagggttggttgaacctgcagatgcagaactcccagatacaaaggtccaactgtatacatattttaaaacaatatgttatacataataaatatatatgttatcaataaacaaaaaaactttaaatttaaaaaagtacccagtaa

SEQ ID NO: 18534 - DNA, 404 bp, Homo sapiens
gactcactatagggcgaattgggccctctagatgcatgctcgagcggccgccagtgtgatggatatctgcagaattcgccctttcgagcggccgcccgggcaggtacatgctgagagattgggagaagcttttgattctcagctggttattggagtaagagaatcctatgttaacctttgttctaatcctgaggataaacttcaaatttatagggacaattttgagaaggcatacttggattcaacagagagattttatagaacacaagcaccctcgtatttacaacaaaatggtgtacctacacagggcccctacagcatggtatcgtctactcaggaggttcttctgatacgatctgtgacctgttgggagccaagggaaaagacattttgtatattggaga

SEQ ID NO: 18535 - DNA, 557 bp, Homo sapiens
gactactatagggcgaattgggccctctagatgcatgctcgagcggccgccagtgtgatggatatctgcagaattcgcccttagcgtggtcgcggccgaggtactgtttattccagtaaatgctgtaagattatattccagatttttaaggaaaaaagttaagtcaagcctgcaagatacagctttctcaagtgtctacaatgccagtatgaaaataaaaaattaagttacactgatacatccaagttttttttaatatgcagtgatgagcacaaacattaatagagataaaatactgatgcaaataacacaccccaaagtaacaaatgcaattattttccaccatttacaatacagtagttacaatgacactccaaacagaaaagcaaagtaaaaaatcaaaaccccaatttctattcatgtaattagacttatacagaaattagaaggctaaataacaactagttaatcacctaatttcacagctatctgaagtggcaatcgttatatagcagcttatctatgatacattcaagataaatgatacaatttattac

SEQ ID NO: 18536 - DNA, 419 bp, Homo sapiens
attgggccctctagatgcatgctcgagcggccgccagtgtgatggatatctgcagaattcgccctttcgagcggccgcccgggcaggtacttttttttttttttttttttttttttatatttttagtagggacagggtttcaccatgttggccaggctggtttcgaactcctgacctcaagtggtccgcccgcctttggcctcccaagtgctaggattataggtgtgaaccaccgcacctggccccagataattttttaatagtctctcgtattactgagttttttcatattatatataaagattctgtatttgtttgttgttttctgttttttttttgagaaggaatttcgctcttgttgcccaggctggagtgcaatggcgcgatctttgctcactgtaacctccgcctcctgggct

SEQ ID NO: 18537 - DNA, 484 bp, Homo sapiens
  misc_feature 87, 88: n = A,T,C or G
ccctctagatgcatgctcgagcggccgccagtgtgatggatatctgcagaattcgccctttcgagcggccgcccgggcaggtacttnntttttttttttttttttttttttggagcgtgtgtgtgtgtgtatcttattagttctgtccctctaagaaaccctgactaatacaaccttcaacttagaaaagttaagaaaagagcaaataggaataatataaaaattgagaagataaagacaagaggaagaaattaataaaacagaaagcaaagatagactagaaggaaacaacagagccaaatattggttctttgcaaaaactaataaaattggcatacctctggcaaaagtgaatgagaaatacagaaagagggcacaaataatattatgaatcaaaaagggacacaactacagatgtagcagatattaaaaaggtaataagagaaatttactaaattccttaggtgaaatagacatattccta

SEQ ID NO: 18538 - DNA, 585 bp, Homo sapiens
actcactatagggcgaattgggccctctagatgcatgctcgagcggccgccagtgtgatggatatctgcagaattcgccctttcgagcggccgcccgggcaggtacatcatcagaacatactaaaatggaagtcctttggattatagttttgtttatggatattacacaatgaatgcttgtctgaacagttcttacttgccagttccactattcttcatcttcaccaccttctactggtcagtctttcatcacttaaaaaaaaaaaaaaaaaaatcacacatcattgtggtttttttcccccttaattctgtctcttctagccagaagcatctggcttaagcatatttcatcaacttctctgttatttcttttaaagatctttatctctgaaattttcccagaagatacaagttttggtaatattatcaataggaattttgagactggggcattcatctttgtctcaaaaacaaacagaaagccaaccttcaaataaaacaaatttgaaagttttagctcaataatttggggacattttacttaaattacaaaagaacataattatgattttatgatcgatatta

SEQ ID NO: 18539 - DNA, 607 bp, Homo sapiens
  misc_feature 157: n = A,T,C or G
tggccctctagatgcatgctcgagcggccgccagtgtgatggatatctgcagaattcgcccttagcgtggtcgcggccgaggtacctttctatatacagattttaaaatagaagtttttttaatattgaaaacaatccagatttgatggaagacacnatctgcagattcataatgaacctaaatccatgataaatctatagctagacatataataaaaactgcgtatctccaaagtaaaagatattatcttagaacagctcaagagatgtcagttctaaatctacagctctaaggacataatttcagaaggtataaagaattctacctagaaggaacatctgacacacaagaaaaaaggtaagcccccaccatgtcccatcaaaaaaataaacattgactatataaaatactaataatatccaatttggagatttaataaagaacttgtggaatttaattagaattaatgttatttcaatacctttgtgttgtttggaaagagggtagcatttttagatgtttaaggataatcaaaaggacttgtaacattcacattccaaatcagtaaagggaaaatatatgattaaatagaaaacccaactgatc

SEQ ID NO: 18540 - DNA, 622 bp, Homo sapiens
tactatagggcgaatagcgccctctagatgcatgctcgagcggccgccagtgtgatggatatctgcagaattcgcccttagcgtggtcgcggccgaggtaccatatataaatgcagtatgacgaaaagttatcaataaaaaatatggaaatagagtcaacatttgtgtagactacctttactaatatctaatcaggaatgatcactgaatattatcttgagccagaaagatctttttaaaaattctttgtcaatctattgccaagaagtccatttccacagctctttaactttaataaactatttttggcaatgggaaaaaagaaaatggaaaaagaaatcaagtggaaattatcataacaaaataaaagtgacacaatgagaaagaatcttaaaaattaatcccccaccctgatattttgggggaaaaacactcaatttttctatcatatatatttttcttttctctctctcctctgagcgtgtgtgtgtatgtgtgtgtgtctgtgtgtgtgtgcattttccatactaccaatgggaggctgaaagcaatgaaagacaaaacattgtaagcatttttaaatattcaaaataaaatacaaaataaatgtacctgcccgggc

SEQ ID NO: 18541 - DNA, 449 bp, Homo sapiens
ctactatagggcgaattgggccctctagatgcatgctcgagcggccgccagtgtgatggatatctgcagaattcgcccttagcgtggtcgcggccgaggtacaacagtcctgtttgtgctaagattctttcaaatatactcctaattccacttatcaaccaagtttaaaagaaaaaaatatgaaaataaactatattttaaaggtgacaatggtttctggtgaaaattgattcttcttttacaaacctcctaaaaacttattttctaccttaaattgaaaattcacctaagtcacagcacttatgtttaaataaggaccctctgttgctcattttttgacatttttgaaatccagagtgactctgtttttcttatgcttattaaggctattattactataattatggataataaatttatcatgcctcagatgtttgaaaaccttatag

SEQ ID NO: 18542 - DNA, 494 bp, Homo sapiens
tacgactcactatagggcgaattgggccctctagatgcatgctcgagcggccgccagtgtgatggatatctgcagaattcgcacctttcgagcggccgcccgggcaggtaccccagaatgtattgacaagctgctccgtcccagactaatggggcagggactttcccattaagcttagtgcaggccaagagcagtggtgccctctcaaggcaggccgatgctgaagaggcccaggtgacagcgggatatgtcaacctgtgtccataatctatggtaagtatgttcttacttaactccttaattaggcaagtccctcccaggggaagaatgaatgaggagacagaaggaagccaggagatgacgtatgtcctctttcaaggaagaaaacttctgtaatggagaataagtctacttcaatcaataattaaaaattggtcatatttattagaagcaaatggtgagagggagactttgaggttttcattttacctgga

SEQ ID NO: 18543 - DNA, 538 bp, Homo sapiens
tactatagggcgaattgggccctctagatgcatgctcgagcggccgccagtgtgatggatatctgcagaattcgcccttagcgtggtcgcggccgaggtacgacctggacggaaatggctatatcagcaaggcagagatgctagagatcgtgcaggcaatctataagatggtttcctctgtaatgaaaatgcctgaagatgagtcaaccccagagaaaagaacagaaaagatcttccgccagatggacaccaatagagacggaaaactctccctggaagagttcatccgaggagccaaaagcgacccgtccattgtgcgcctcctgcagtgcgacccgagcagtgccggccagttctgagccctgcgcccaccaatcgaattgtagagctgcttgtgttcccttttgattcttctttttaacaattttttttttttttgccaaacaatatcaatggtgatgccgtcccctgtgcggtctgatgcgccttcctccgtgacgccttcagcttcttttgtcgtggatgcttcgtgggaatg

SEQ ID NO: 18544 - DNA, 394 bp, Homo sapiens
ctactatagggcgaattgggccctctagatgcatgctcgagcggccgccagtgtgatggatatctgcagaattcgccctttcgagcggccgcccgggcaggtacgcgggggctaggaccatgcaggatgtgggcaaacaagaggagaaggctgcctctcatgttcctccccctcggtccccacgcttagggagatgtggggctggcgatgggaaagctgtatggcaacgacttcagccagaccaccatctcacgatttgaggccctcaacctgagcttcaagaacatgtgcaagctcaagcccctgctggagaagtggctgaatgatgcagagtcctctccgtcagacccctcagtgagcacgcccagctcctaccccagcctcagtgaagtat

SEQ ID NO: 18545 - DNA, 459 bp, Homo sapiens
actatagggcgaattgggccctctagatgcatgctcgagcggccgccagtgtgatggatatctgcagaattcgcccttagcgtggtcgcggccgaggtactgtggagagctcggtggacaaatcaaagccctggagtaggtccatcgaggacctgcacagagggagcaacctgcctcacctgtgggcaacagtgtctcccgctctggaagacattctgcactgcgatataatacattgccaagcagaagaactctgaaaaattcaagattagtgagtaagaaagatgatgtgcatgtctgtatcatgtgtttacgtgccatcatgaattatcagtatggtttcaacatggtcatgtctcatccacacgctgtcaatgagattgcactaagcctgaacaacaagaatcccagaacaaaagcccttgtcttagaactgttggcagccgtttgtcttgtcag

SEQ ID NO: 18546 - DNA, 449 bp, Homo sapiens
tgtaatacgactcactatagggcgaattgggccctctagatgcatgctcgagcggccgccagtgtgatggatatctgcagaattcgccctttcgagcggccgcccgggcaggtactttttttttttttttttttttttttttttgtaaagataggggtatcactatgttgcccaggctggtctcaaactccaggcctcagcatcccaaagtgttaggattacaggcatgagccaccatgactggcactaattttattattacatacctaggtatgattatatttgtttattctatttaaagttcactgagtttcttggatctgaaagtttatggttatcatcaaatttggaaaatttatagtcactgtttctttttcttttttaaagaaattgcccaaacttgtcttgaactcctgtactcaaaaaatcctctcatttcaacctctcaa

SEQ ID NO: 18547 - DNA, 520 bp, Homo sapiens
  misc_feature 301: n = A,T,C or G
acgactcactatagggcgaattgggccctctagatgcatgctcgagcggccgccagtgtgatggatatctgcagaattcgcccttagcgtggtcgcggccgaggtacgcgggtagtgaaaccccgtctctactaaaaaatacaaaaaattagccaggcgtggtggcggccgcctgtagtgcagctactcccgaagctgaaggcaggagaatggcgtgaacccaggaggcggagcttgtagtgagctgagattgcgccactgcactccaacctgggcgacagagtgagactccgtcccaaanaaaaaaaaaaaaaaaaaaaaggtacgcggggatgtgtgtagtcgggtatgagaacgattgcaagcaaaagcagctgagggacgctgtccaaggagtaggctcagtagcacgaactgcaaatacttgagaagggaaaagttcagcctcgtgctggaaagtggtttagcatgctggagctggttttctgcttggtagccctacaactttggcccaactact

SEQ ID NO: 18548 - DNA, 654 bp, Homo sapiens
  misc_feature 434, 446: n = A,T,C or G
ctactatagggcgaattgggccctctagatgcatgctcgagcggccgccagtgtgatggatatctgcagaattcgccctttcgagcggccgcccgggcaggtacaggtagcattttaccccactttcctctgtccaaagcgacatacaagtaacgggcctgcttcgtgctgcatcagaacaggcataaaaagcaaatcatttactttccggaaacagagtccaactgcacagagcattcgcggttattcccttgttctatcattttctaccacccaacaacattcagcaaaacgagttaataatagttactggtgtttgaggaagggtaaaaaaataaaataaaataaaataaaactaaagaacacacatggcagagatacgatattactgcaaaagcaggtgaatgcgggaacatccttggctggccaggctntatgtgaagctngcactgcaagttaaaaaacaaaacaaaaaagttagaaataataataaattaaaaagaaaggaaaattaggagcgacagcaccagcattcagtgatggtgaatgctcatgcaatgattatgggaatgacagaaattaaaaccaaaaatttgagaaggctactctacatgacaagccaaagcaaaaattaatactgaattaaagacatat

SEQ ID NO: 18549 - DNA, 519 bp, Homo sapiens
  misc_feature 285: n = A,T,C or G
ccctctagatgcatgctcgagcggccgccagtgtgatggatatctgcagaattcgcccttggccgcccgggcaggtacgcggggaataacattcggaaataaacattcagaagataagcccagtatatgtaagaatctaataagataaatatatttcaaattaatagggaaattatagttattctacatttacagaagattttggaagaaggtgctggctatttgttatggggaaaggatggattaattgctgccccatatttaaggatgttcttttttcctttnttgtaatggcagtttgtcagtgtgaaataaaatgttcttttttaattaagatctagattaaaaattaaacatggagacaaaaggaaaataggctggcatttttacagtgtcagggtgggttagcaaagacatgatatcagaagcagaaaataaagtgatccgtttgactaaatagaaacaaaacatatagcagagacttgtaaataaaattgaaggcaatcagtaaactgggaa

SEQ ID NO: 18550 - DNA, 382 bp, Homo sapiens
ttgtatacgactactatagggcgaattgggccctctagagcatgctcgagctgccgccagtgtgatggatatctgcagaattcgcccttagcgtggtcgcggccgaggtacttttttttttttttttttttttttttgttatttttttttatatttttttttttttttttttttttttttttttaattttttatatttctttaaacaaataactgaggtaaatgccaaaaacctaaaagtatataaacagacgatagttataaagaaattaaaacttaatcaaatgcggttggataaaacctctactaaggctttcctaccttaattagactacctaaaaaatttaactaaacacttcaataattgaccatgaagagaaaaa

SEQ ID NO: 18551 - DNA, 484 bp, Homo sapiens
cgactactatagggcgaattgggccctctagatgcatgctcgagcggccgccagtgtgatggatatctgcagaattcgccctttcgagcggccgcccgggcaggtacagaaatatactggcctagcagaggcaaaaaaaaaaaatgaattttattttacttgtcacacctgtcttataaactggagttttgctacaaaaaaaaaaaaaaaaaaaaaaagtacgtacgctggatgcaggcgaaggagtttttttttggagggacataatgcctataggcagaatgaacggacctatctaccctgggggaggagctccctgtgtacggacagacaaactaggctgcctgaaggaaggtgttggttcgaaagatggaagagacaatctttccgcaggcattgatggtgccttcgctgactgagctggactcggagtcgttgctcacaaagtacgcacccacgcctgggaggatgcccatacatactg

SEQ ID NO: 18552 - DNA, 549 bp, Homo sapiens
  misc_feature 433: n = A,T,C or G
ctatagggcgaattgtgccctctagatgcatgctcgagcggccgccagtgtgatggatatctgcagaattcgcccttagcgtggtcgcggccgaggtactttttttttttttttttttttgtgctcttgcattgaaattggttttactgtgctgagctctgtgcaaaggagaaaagtgaagtttgaaattcactaacacctgcagaaaatctcttactgctctttaacacacaagcaccaggacttgactcacattattacaactcaatccacttgaacactaattggcctgcctgcttcatgccaggtctataaataggtgatcaaaatgatcatcaaaatgaacagggagtgccaaggtcctgagcagagaacggaatgacagcaaaggaaatgagaccttgggtgaggtgaaccctgggtggacgctcancagaggagaagggcaccagggctctggagtcctgaactacccaaagaaaagcggagaacaatgattaggcactgaggactcagagaaagccagagtccacagggaaaggggaacag

SEQ ID NO: 18553 - DNA, 470 bp, Homo sapiens
  misc_feature 135, 137: n = A,T,C or G
tacgactcactatagggcgaattgtgccctctagatgcatgctcgagcggccgccagtgtgatggatatctgcagaattcgccctttcgagcggccgcccgggcaggtactttttttttttttgtagtttttttntnggggccattgatttctgttctttttattattttctttatctgcttacattgtgtttaatttgctcttctctttccagtttctgaaggtgaaaactcaggtcactgatttgagacctttcttttttgttataatataggatcttagtgcttaaatttgcctccaagcatacattagttgcaactccctgattctgatatatcgtgttttcattttcagctcaatgaactttccaatttctcttttgatttcttatttgaataatatactttggctctatgtctccacccaaatctcaccttgaattgcaatccccataatctccaggcgtcaag

SEQ ID NO: 18554 - DNA, 610 bp, Homo sapiens
cctctagatgcatgctcgagcggccgccagtgtgatggatatctgcagaattcgcccttagcgtggtcgcggccgaggtaccagcatggaattatagcaccaccttgtggttaacatgccagtattttaccttttgttaaaacaagtgatttcccatcaaacaggataatattttttcccttttgaaaaactcaattttaaaaagaaacatttttgaagttttcttatggaagatagaaaaaaagttaagtctctttctaccctttctttttttctttatatagtgcagatatacacacagagaagggacttaaaacatttctaatctcctagtttatatacagtgtgcaaaatataagtaagtatatattgaaaatataaaatatttcatatatgttatcaggtggaaatttagaatccaaattttcttaaactttaataacttgtctaacaactctctaatagggactaaaaatcaactcaatatatcatacatttacacttacaaagagtctttagacaacataatttttggaaaaataaagcaaattcaactttattggagttattggacagatcagcaaattgttattttaaaaagttttcttgt

SEQ ID NO: 18555 - DNA, 658 bp, Homo sapiens
tatagggcgaattgggccctctagatgcatgctcgagcggccgccagtgtgatggatatctgcagaattcgcccttagcgtggtcgcggccgaggtacaataataaatacaagttagtagctccaaaaaactactttccctaaaaagtcatttctgtcgaacaatttaaggagcaaagcatccttaaaatgaaaatgcactaatcttttttacaacctgcacaattaagtatttcagaaaaacaaaaacttgtgcaaaatggtaagaaacgcccacctatacaaatttaatattaaatcagatgagaacatgaatttataagtaaaaaacaatttaatattaataatatatagagaaattaaatattgaaattttaactttgtatcactaataatctcagcttcagtgaaataatttaaaaaaagctgtcaaacactaatttcctaaataaactgaaacctatgaattgacagtaaatacttcagaatctctaacaatgaagacctgcaaaatcagcctaattattttccagtgtgtgtgtacctgcccgggcggccgctcgaaagggcgaattccaacacactggcggccgttactagtggatccgagctcggtaccaagcttggcgtaatcatggtcatagctgtttcctgtgtga

SEQ ID NO: 18556 - DNA, 193 bp, Homo sapiens
agggcgaattgggccctctagatgcatgctcgagcggccgccagtgtgatggatatctgcagaattcgccctttcgagcggccgcccgggcaggtactcagaatttatatacactcttctttaatacagtggaacagtcttgcccatggttcccagagcaagggacaatgtagttggatgtatgggaaagaat

SEQ ID NO: 18557 - DNA, 515 bp, Homo sapiens
  misc_feature 487: n = A,T,C or G
acgactcactatagggcgaattgggccctctagatgcatgctcgagcggccgccagtgtgatggatatctgcagaattcgccctttcgagcggccgcccgggcaggtacttagacatgccagcacagaaggtgtgttcattcagtatgggctgcacccctacagggctcttcgtgtcttcttttcggggactgtgctgccttcataatgccttatgcattggtcttggtcagccacaggcagcatgacatacttcagatggtcagtaaatttaaaattggcatttcacccccagccagaaacataacccacacaccctacttctgcataatcctttgaaagtaagcagatgggcatcactctctcattaacagacaccttctgtttgagtttgatgagctcaatatctacctgggagtagttagggtgtaaaacaaccttctcaatctctacaaactgctttttccccacataaagtgttaaaatangggcaatgtctttcactattacattttc

SEQ ID NO: 18558 - DNA, 531 bp, Homo sapiens
tatagggcgaattgggccctctagatgcatgctcgagcggccgccagtgtgatggatatctgcagaattcgccctttcgagcggccgcccgggcaggtacaggctgtgatacatgtggcgatcgatcttcttagattcacggcatattctgatcatccggcgctataacccatcggctcatccatgtgaccttctctggcattcgggcattggctgtacaatggggacgcctcatacccttgccactctcttcagaaatcatctctgttacagactgttcctgatgtttccacattaaagaactttgtggattgcctttgctatggcgacggccacctggtcttctattacagccttctgagttcaaagtaaaaccaaaggaaggctggactctgcgtggctgatctgggttaactgtcactctgatctttggatagtcacttattccattaggagatttattacccagtttcagcatgttgttccaggatccagaacctgtcagttcacaggatgaagagttcgaaaata

SEQ ID NO: 18559 - DNA, 461 bp, Homo sapiens
atgcatgctcgagcggccgccagtgtgatggatatctgcagaattcgccctttcgagcggccgcccgggcaggtactttattttgatttttttttaaattcatttatttttttttttttttttttatttattttttttattaaattttttttttattaattttttatttattttttttttttttgggaaaaaaaaaaaaattatggggggggaaaaaaaaaaaaaattttaaaaaaaaaaatttttggaaaaaaatggggaaaaaaatttttcaaatggaacctgggggggaaaaaagttaaggggaaatataaaaaaatgggggggggtaaaaaggggataaaagctgggaaaaaaattgggggaaaaaaaggaaaaaaggggtttcgggggaaaaaagttttaccgaaaaaaatccaaaaaaaaaaaaaaggggaaaaaaaaaagggaaaaccgggggg

SEQ ID NO: 18560 - DNA, 550 bp, Homo sapiens
ccctctagatgcatgctcgagcggccgccagtgtgatggatatctgcagaattcgcccttagcgtggtcgcggccgaggtacaatttaaaataactaaaagaatataactggattgtttgtaacacaaatgataaacgcttgagtaatggatacgatattaccctgatgtaattattacacattgcacgtctgtattcaaaataccccatctaactcataaatatttatatctactatctacacaaaaaattaaaaattaaaaaaatttttgcatgatgatcttaactgaatttttcaataataaaacattgtctgttttcattaagttcaatttagcaatttcaattatgtttaattatttttgcatcctgaataaaaaatcttcttatactgcaagattttgaaggcaatctagacttacttctagatttgttatgttctacctgttataatcaggcttacaattcatgtccaattaattttcatatgtaaagtgaattatatttttcatgaagttgttcagtttttcagccccacttaaaaaaatgt

SEQ ID NO: 18561 - DNA, 523 bp, Homo sapiens
  misc_feature 439, 484: n = A,T,C or G
ctctagatgcatgctcgagcggccccagtgtgaagggattttggaaaaattcgccctttcgagcggccgcccgggcaggtactttaaagccacaaagtctaagacgatgccttaaatacaagaaggctgagggactcctcaagtgagctgatgccagaatggcagaatgaaaaaaaatgaactcgaagacatgaagaacaacacacaacagccacggtttggcaagagaccaacctcagctcagactttccatctgagcacagccgtttggctatgagctttttactgaattttatagcaactctgatttcttcctttaaatgattggaggctttttaaagatcttatggggctcaaatactaacttcataaatggccttttgaataacagcagcaaataatctctcagctgatatttcaatttactaaggaagcacanattaaaacattcctgctacacagtcatggtctggccacacactgnggtgaatcactggccctggtgaacaactgtagtgcacac

SEQ ID NO: 18562 - DNA, 471 bp, Homo sapiens
gctcgagcggtcgacagtgtgatggatatctgcagaattcgcccttagcgtggtcgcggccgaggtacgtatgtataaaaaccgtgcccttgttcactgccaacacaacatctgggtggacatgaactcattacaacaaatcttatgtggatgttgtaagaagtcactcaatgtctgtggatttaataagtcacttcacaccacagaaaatatttaataaatccaaaaaaaggaaagaagaatataacgacagaagagcttctgtctcagttctctgaaactgagtcccccataggaaactggtcccaaagttctcgaggggtcattgaagaaacttcggtttgctaatttttttcatccttttagtgttcaaaagttctagaaagactcctcgctgttttcagtttttaaacagtcaaatctccatctcccccagaaggtaacagtctggtgcagatccataaaaacgtg

SEQ ID NO: 18563 - DNA, 572 bp, Homo sapiens
tacgactactatagggcgaattgggccctctagatgcatgctcgagcggccgccagtgtgatggatatctgcagaattcgccctttcgagcggccgcccgggcaggtacttgttctcaagggaatcttcagcttaggtggctcttttaataacaaaaaaatcctttccttcgaaagtaacatctctcaaggccaggaattccattagtagaaagccttcctaaaaaacaaaattcctggccaggcatgggttcacgtctgtaatctcagcactctgggaggccgaggcgggaagatcacttgatgtcaggagtcgaggcgggaagatcacttgacatcaggagttcgagactggcccggccaacatggtgaaaccccatctccactaaaaatacaaaaattagcctggtgtggtggtgggcacctataatcccagcgacttgggaggctaaggcaggagaatttcttgaacccaggaggcagaggttgcagtgaccagcaaggttgcgccattgcaccccagcctgggcgataagagtgaaaactccatctcaaaaaaaaaaaaaaaaattc

SEQ ID NO: 18564 - DNA, 365 bp, Homo sapiens
ctactatagggcgaattgggccctctagatgcatgctcgagcggccgccagtgtgatggatatctgcaaattcgccctttcagcggcgccggcaggaccggtttaatggaatactatcttgattatgaaccgctttctagctggttattttgtgaccaaataatttaaggcaagcgtggtggcatgtgccttgtagtcctagttgctgaggtaagaggattgcttgagcccaggagttcaaggctgcagcaagctttgattgcgccactgcactccagccttggcgacagactaagacgctgtcccaaaaaaaaaaaaacgacaaaaaaaaaacaaaacagaaaaaataaactaaggcaatgaca

SEQ ID NO: 18565 - DNA, 199 bp, Homo sapiens
ctcactatagggcgaattgggccctctagatgcatgctcgagcggccgccagtgtgatggatatctgcagaattcgcccttagcgtggtcgcggccgaggtacaactaaaattttattagaaatcgctcagcttacacactccaatcaggaagttatttaaatcacctcagataaaacctttgtgacctaacctaatac

SEQ ID NO: 18566 - DNA, 571 bp, Homo sapiens
ggcgaattgggccctctagatgcatgctcgagcggccgccagtgtgatggatatctgcagaattcgccctttcgagcggccgcccgggcaggtacttttaaattcaatacagatgctgctgaattcattcctcaggagaaaaaaaattctggtctaaattgtgggactcaaaggagactagactctaataggattggtagaagaaattacagttcaccacctccctgtcacctttccaggcaggtcccttatgatgaaatctctgctgttcatcagcatagttatcatccgtcaggaagcaaacctaagagtcagcagacgtctttccagtcctctccttgtaataaatcgcccaagagccatggccttcagaatcaaccttggcagaaattgaggaatgagaagcaccatatcagagtcaagaaagcacagagtcttgctgagcagacctcagatacagctggattagagagctcgaccagatcagagagtgggacagacctcagagagcatagtccttctgagagtgagaaagaagttgtgggtgcagatcccaggggagcaaaaccca

SEQ ID NO: 18567 - DNA, 348 bp, Homo sapiens
ccctatagatgcatgctcgagcggccgccagtgtgatggatatctgcagaattcgccctttcgagcggccgcccgggcaggtactttttatttttttttttttttctttttaatttttatttttaatttttttttttatatatttttaattataataaataaatataaaatattaatttttttaacgggggagggaaaacacatttaaagttggagattaaaagaaaccgggtataattgccctgggaaagaaggggaagggaaaaaaaagtgggccaaaaagggggggaaaaaaaattttaagaaaaaaaaagggggggggaagggggattaaaaaaagggggaaaa

SEQ ID NO: 18568 - DNA, 527 bp, Homo sapiens
tactatagggcgaatacgaccactatagggcgaattgtgccctctagatgcatgctcgagcggccgccagtgtgatggatatctgcagaattcgcccttagcgtggtcgcggccgaggtacgcggggactgaagccttaagcactgttgcgcctccatgtgctttggatcagcaaccccagtggtgttctaccagagcattgtgggaaagcagatgtatagtcaggtcccaacagcaaattgttgggtgtgagagttctaaagtataggggtgagggaagagaaggatatgaactcctctgaccttaagccagcattcattcaacttttatgtctacttaacaagagaacctggagaaaactaccgtattcaagagattaatcaaaatcagtgttttagccaggcgatgacagagaagcaccattcctcaccctccattcttgtaatgtctgtaataaatttcagtgcgtcaggatggatgaacccaagatccagtgaatgattcagctgttccaagccttacattt

SEQ ID NO: 18569 - DNA, 536 bp, Homo sapiens
gactcactatagggcgaattgtgccctctagatgcatgctcgagcggccgccagtgtgatggatatctgcagaattcgcccttagcgtggtcgcggccgaggtacaatatgttttgacatacatatatattgtgaaatgattgccacaatccagctaattaacatatccatcaccttatataggtattgaaaaattaaacaaaattaattaatctttagtcagactaaaaaaacatgagtgaagatctaaataaaattggaaatgacaagttaatagaactgatactgcagaaatttaaaggacattagtggctactatgaggaactattaatatatgctaacaaactggaaaatctagaataaatggaaacattctgagatacttacaacctaccaaaattgaaccgagaagaaattcaaatactgaatagaccaataacaagtaacaagatcaaagccgtaaaaaaaaaggctccaaagtaaaaaataaaaattaaaataaaaaaattaaagcctgggacctgatggcttcact

SEQ ID NO: 18570 - DNA, 567 bp, Homo sapiens
ctactatagggcgaattgggccctctagatgcatgctcgagcggccgccagtgtgatggatatctgcagaattcgcccttagcgtggtcgcggccgaggtacttttttttttttttttttttttttttctattttatagttattttatttatattctaatctttattattacttcatatgctaactttgggtttagttagtttctctttttctaattgtttatttgtaaagttaggttgttcgagttagatctttcttattttttaatgtaggtatttatcactgtaacatttccctcttagcacttcttttattgaatcctgtaagttttgttgagttgtatgttcatttttgtttgcctcaagatatttttaaaattcccttttgatttcttcttttacccaatggttgtttaagcatgtgttgtttagtttctgcatttttgaaaatgtttctgttttctttgttattgacttttaattttattccattgtggaatgagaagatacttggcattatatcaaacttcttaaatttgtagtatgccttgtgacctaagatttgatc

SEQ ID NO: 18571 - DNA, 655 bp, Homo sapiens
acgactcactatagggcgaattgcgccctctagatgcatgctcgagcggccgccagtgtgatggatatctgcagaattcgcccttagcgtggtcgcggccgaggtacaaggtgtcagagtatgcacggcgctttggtgttccggtcattgctgatggaggaatccaaaatgtgggtcatattgcgaaagccttggcccttggggcctccacagtcatgatgggctctctcctggctgccaccactgaggcccctggtgaatacttcttttccgatgggatccggctaaagaaatatcgcggtatgggttctctcgatgccatggacaagcacctcagcagccagaacagatatttcagtgaagctgacaaaatcaaagtggcccagggagtgtctggtgctgtgcaagacaaagggtcaatccacaaatttgtcccttacctgattgctggcatccaacactcatgccaggacattggtgccaagagcttgacccaagtccgagccatgatgtacacatttcactttaagcagaaaatctttcttcaagaaatgactttactttctctttgcactgccagcacgtgagatactaactttttaactaggttgtcttctctagtctctacgttattagaattttttgctttcataat

SEQ ID NO: 18572 - DNA, 364 bp, Homo sapiens
  misc_feature 331: n = A,T,C or G
gactcactatagggcgaattgggccctctagatgcatgctcgagcggccgccagtgtgatggatatctgcagaattcgccctttcgagcggccgcccgggcaggtacttttttttttttttttttttttctttcattgatttctgccctttttattattttctttatctgcttacgttgtgtttaatttgctcttctctttccagtttctgaaggggaaaactcaggtcactgatttgagacctttcttttttgttataatataggatcttagtgcttaaatttgcctccaagcatacattagctgcaactccgtgattctgatatatcgngttttcattttcagctcaatgaactttccaatt

SEQ ID NO: 18573 - DNA, 200 bp, Homo sapiens
ctactatagggcgaattgggccctctagatgcatgctcgagcggccgccagtgtgatggatatctgcagaattcgccctttcgagcggccgcccgggcaggtacgcgggaacaatggtaatgagacaaattatcaagaaattggagctgggattccttaaagaaaacagagaagatgccagactccttctgggggccaaa

SEQ ID NO: 18574 - DNA, 330 bp, Homo sapiens
cactactatagggcgaattgggccctctagatgcatgctcgagcggccgccagtgtgatggatatctgcagaattcgcccttcgagcggccgcccgggcaggtactgagctccacaaacgtggccatggttggtgcggaaatgattctgagtgagcaggtagaagtctcgcgtcctgctgtgtccagagttggttccttccagagggttcgtggtctcgctggcttcaagaatgaagccgtggaccttcacagtgtgtgttacagctgttaaagatgttgtgtctggagtttgttccttcagatgtgtctggagtttctcccttttggtg

SEQ ID NO: 18575 - DNA, 631 bp, Homo sapiens
tatacgactcactatagggcgaattgggccctctagatgcatgctcgagcggccgccagtgtgatggatatctgcagaattcgcccttagcgtggtcgcggccgaggtactgcaaacagacaccagagggtgcaagagactgtatactcctgaaaaagaaaccagaaaactttgtctggttgtgaaattacacacataggctcagaaaaaattcatctctgtaaaaggtttgagagaccgccagaatctctagctgggctgattggtgaagatctttttccatccaaaaccagtctgtaaagactggaagaggtgaccgtttattcaaatacaaaaattacaacaaaatataaggcacacaaacagggaaaatatggtccaatcagaagaacaaaataactgtccgtaaactgacccaaaagaaatggagatctatgaattacctgacaaatagtttaaaaggaacattttaaattagtgcactacaagaaaacatatacaatgaaactgtgaataaaatgagaatatcaattaagagatggaaactgtaaagatccaaacaggaattctaaataactaaacaggaaattctgaagctgaagaatacagtaactgatttgagaaaaaaaat

SEQ ID NO: 18576 - DNA, 569 bp, Homo sapiens
  misc_feature 441: n = A,T,C or G
actatagggcgaattgggccctctagatgcatgctcgagcggccgccagtgtgatggatatctgcagaattcgcccttagcgtggtcgcggccgaggtacccagcctgcattagtgaattctttataactcaaaaaaagataactccctcattaaatgatcgaaagcatggaatggggggaagaggagctatataatttatttcatgatttaatggaattttggccctaaaacataaaagataatacagcttaaatttttaaaaaagaaaagaaaaaggaaacaaaactgtaagtttcccttacatatgaaacccaactaaacaatatttagatcaaatacactgacctgcctcctatgtagatcagctagcctctgaggggcaaaaaccacactgcttccccattccatgtccccacagaagaataacagctctctgtanttgaaccctgctttgtgctctaccagaagttcccatttcattagctgctcccagcagccctgtgaggtgggtcattgggtatcctaatgtctactttagggatgaagaaaatgaaacccaaccatatg

SEQ ID NO: 18577 - DNA, 521 bp, Homo sapiens
  misc_feature 26, 118: n = A,T,C or G
tacgactcactatagggcgaattggngccctctagatgcatgctcgagcggccgccagtgtgatggatatctgcagaattccccttagcgtggtcgcggccgaggtacaaaatatggngaatcactaaatggattacctaatacaatttgatcatttaaatactacaactgcagaagtcttttcacaaaatgagtcacatagtttctctctatccttgtgcaggtattttaaatccttattcaaacagttccctctccatttctagatttttgtaagtataaaatattttaaaacaaaggtatgtccgttccttagctagagaactattcttccactgactcctggaagagaaaaaaaagattcccatttcttcctctacctcaaaaacacaaagcaaacccaaacaatccaattcctaatgtagtgtcacatagaacccagggcctgaaacaatatttcatgctagttttcctgctatatgcagagaacaatttagttatttacattattgagaaatcta

SEQ ID NO: 18578 - DNA, 645 bp, Homo sapiens
  misc_feature 362: n = A,T,C or G
atagggcgaattgtgccctctagatgcatgctcgagcggccgccagtgtgatggatatctgcagaattcgccctttcgagcggccgcccgggcaggtacgcggggaggcattgaggcagccagcgcaggggcttctgctgagggggcaggcggagcttgaggaaccgcagataagtttttttctctttgaaagatagagattaatacaactacttaaaaaatatagtcaataggttactaagatattgcttagcgttaagtttttaacgtaattttaatagcttaagattttaagagaaaatatgaagacttataagagtagcatgaggaaggaaaagataaaagggttctaaaacatgacngaagtttgagatgaaccttcttcatgggagtaaaaatgtatttaaaagaaaattgagagaaaggactacagagccccgaattaataccaatagaagggcaatgcttttagattaaaatgaaggtgacttaaacagcttaaagtttaagttaaaagttgtaggtgattaaaataatttgaaggcgatcttttaaaaagagattaaaccgaaggtgattaaaagaccttgaaatccatgacgcagggagaattgcgtcatttaaagcctaattaacgcatttact

SEQ ID NO: 18579 - DNA, 395 bp, Homo sapiens
tatacgactcactatagggcgaattgggccctctagatgcatgctcgagcggccgccagtgtgatggatatctgcagaattcgccctttcgagcggccgcccgggcaggtacttttttttttttttttttttttttttctttttttttttttttttctttttttttttttttttttttttttttttttttttttttttttttaaggcaaaaaaaaagggtttgttttattaattgggggacaaccgggggaaaacaaataaccatttgccccccccaaatttttttttctttcaaaataaaaaattttttccccccccaaaaagattttcccaccaaatttttcccttccttaaaaaacaaaaattttttgggacctaaaatgttattttttttt

SEQ ID NO: 18580 - DNA, 159 bp, Homo sapiens
tagggcgaatagggccctctagatgcatgctcgagcggccgacactgtgatggatatctgcagaattcgccctttcgagcggccgcccgggcaggtacactactcaggtgaccggtgcagtaaaatctcagacttcactactgtagaattcatctatat

SEQ ID NO: 18581 - DNA, 599 bp, Homo sapiens
  misc_feature 147: n = A,T,C or G
gactactatagggcgaattgggccctctagatgcatgctcgagcggccgccagtgtgatggatatctgcagaattcgcccttagcgtggtcgcggccgaggtacgcgggggaggccgaggcgggcagatcatgaggtcaggaggtcnagcagaatctagactatctctggctaacacagtgaaaccccatatctactaaaaataaaaaaattacccgggcatggtagcacacacctgtagtccagtcccagctactcaggaggctgaggcaggataatagcttgaatccaggaggcggaggttgtagtgagccaagatcacaccactgcactccagcttgagtgacagagcgagactccatctcaaaaaaaaaaaaaaaaaaaaaaggaattacatttacaacagcattaaaaaaattagaaataagcttaaccaagagggcaacagatttgaacacagaaaactacaaaacactgttgaaagaaattaaatacaaataagtgaaaagaaaagctgggtttgcagattagatgatttcatcttggaatgatgtcaacactactcgaagtgacctaaattcaatacaatccttatacaga

SEQ ID NO: 18582 - DNA, 398 bp, Homo sapiens
gcgaattgggccctctagatgcatgctcgagcggccgccagtgtgatggatatctgcagaattcgcccttagcgtggtcgcggccgaggtacttttttttttttttttttttttttggatttgatttgctaaaattttaaggctctttgcttctctattcgtgagaatattgctctgtaattttttttcaggaaaaaaatttctttatgaggtttcgtttttagtattttgctgagctgataaaaataaattcagccgtatttcccttctcctctattttttgaggaagttcacgtaagattagtgttactctgtccttgaaggtgtaatagaattcactagtgaaactatctgagcctaggggtttcttctggagaaagctttggatagtaaattca

SEQ ID NO: 18583 - DNA, 479 bp, Homo sapiens
  misc_feature 472: n = A,T,C or G
agggcgaattgggccctctagatgcatgctcgagcggccgccagtgtgatggatatctgcagaattcgccctttcgagcggccgcccgggcaggtacatcttacacatattgattgatgtctcatgtctctctaaaatgtataaaccaagccatgccccgaccaccttgggcacatgtcaccagggcctcctgaggctatgttacaggcacatgtccttaactttgggaaaataaactttctaaattgactgggatctttctcagatatttggaactcactctacacagacacacagacacacacacaaacacactcacaaacatgcacacacaaatacacatatatgtatatttgtgttataaacgtattagtcctttttctgtaatacagaatttaagtaaactccagtgcttcatttgtctttttactttgcttatcggtctttttttcttataagttttaaaacactntagggaa

SEQ ID NO: 18584 - DNA, 629 bp, Homo sapiens
cgactactatagggcgaatagtgccctctagatgcatgctcgagcggccggcagtgtgatggatatctgcagaattcgcccttagcgtggtcgcggccgaggtacctgatgagagacttcttcctgcatccttacatggtggaagacaaaagagtggcagagaatgaatatactcccagccattcgagagggaagagccctcacctcatcacttccctgaggcctcaccttctaatactatcaccttggtgataagatttcaacataggaattagaggggaatacatacatccagactattgcagatgggattatgtaatactttgttcctgtttggcttatttcttagcacaatatctttctggtatgtgcatgtttctgcaaatggcaagattttcttcctttttaaggctgagtaataattcattgcatgtatagaccacattttctttatgcattcattattagtgagagttcttattacaaatggcgaagtggtttttaatattgatttaatttttgttattaaaaacatttttagatggttagattcctttttagaataaatatacttcattagttaaggcagttttaacttcacagcagaattaagaagtacctgcccgggc

SEQ ID NO: 18585 - DNA, 431 bp, Homo sapiens
ggcgaattgggccctctagatgcatgctcgagcggccgccagtgtgatggatatctgcagaattcgcccttagcgtggtcgcggccgaggtacagaactcagaggaaaaaagaaattaaattttagctttctggagagcagcccctctctggcaccatcaaacacttctttgtttcccttcaacttggaactcttcaaacatcaaggggttgggaagggttgggccattcttttatcttgggtccatgtgagtgacagaaatggtgcggcctgggaaagatctccctcctttacacccgcgtacctgcccgggcggccgctcgaaagggcgaattccagcacactggcggccgttactagtggatccgagctcggtaccaagctgggcgtaatcatggtcatagcctgtttcctgtgtgaaaattgttatt

SEQ ID NO: 18586 - DNA, 520 bp, Homo sapiens
  misc_feature 180: n = A,T,C or G
acgactactatagggcgaattgggccctctagatgcatgctcgagcggccgccagtgtgatggatatctgcagaattcgcccttagcgtggtcgcggccgaggtacacagcttgaaatattacctatgcgctgaaattactttattttgcagagtatatgtcttttatgtgtaagacagngaacaagcagtagataaactagtaaaggatgtaaacagattaaaacgagaaattgagaaaaggagaggagcacagattcaggcagcaagtaagtaaacaacacatctctactttctgtgctaaaaatttttatttatttatttatttttgagacggagtctcgctctgtcgcctaggttggagtgcaaaggtgtgatctcagtttactgcaacctctgcctcctggggtcaagcgattctcctgcctcagcctcctgaaacgctgggattccaggtgcctgccaccatgcctggctaattttttttgtatttttaatagagacagggtttcaccatgttg

SEQ ID NO: 18587 - DNA, 376 bp, Homo sapiens
  misc_feature 209: n = A,T,C or G
cgccagtgtgatggatatctgcagaaattcgcccttcgagcggccgcccgggcaggtactttttttttttttttttttgatatatttttttttttttttttattttatttatatatatctattcttaattaaatatataaaatatttaaatactttaatatacaaaaacttttaataattatttaaagatttatttaaaaaagaaaaanaaattaaaaaaaaatattttattaaaaaaaaaaaagaaaaaaaaaaaaaaatattttttaaaaattttcaaaaaaaaaaaaaaaaagataaaaaatttttaaaaaccttaaaaaaaacccaaaaaaaaaccaaaaaataattaaaccccccctaaaaaaaaaaaaaa

SEQ ID NO: 18588 - DNA, 272 bp, Homo sapiens
tatagggcgaattgggccctctagatgcatgctcgagcggccgccagtgtgatggatatctgcagaattcgccctttcgagcggccgcccgggcaggtacaatcttgggcaagcatctgtgcatatgaaatgctgtttttctaaaagatttctcacattggcaaactgagagattttcttctggaacacaggaaagattatattaatgctcatagccataccatgtctgaatatgggaggatgacagacacagaacgagaccagatagacca

SEQ ID NO: 18589 - DNA, 548 bp, Homo sapiens
  misc_feature 19, 21: n = A,T,C or G
ccctctagatgcatgctcnancggccgccagtgtgatggatatctgcagaattcgcccttagcgtggtcgcggccgaggtacacgctcatgtgcttctgaaacaacgtggtaagaccaaagactagattttaatgcaacttaattacaaaagagaaagagacaaaagataagagacttttctcctctatctatcccacacccctaaaagagctttgggttttaaaaatacagaaaagcactcactcaatgaaattatatcactcaagtgatattttcagtgcatggctacacaaaaatagataccactaaaaactgggctatttagagaaagaggcatatttgttcataactccctgacattgtctcatcttacatttcactatatttattattaaaatggcaacatcatcactctttttgagaaggcaagaaggaattcatctgattagattaaatcaagtattagaataccatgtctaaggggttcaataaaataatgtatctaattatttggaaaagacacaaatattttagaggctgaattttc

SEQ ID NO: 18590 - DNA, 684 bp, Homo sapiens
tactatagggcgaattgggccctctagatgcatgctcgagcggccgccagtgtgatggatatctgcagaattcgccctttcgagcggccgcccgggcaggtacaatgataggcactcccagcaaccgctgcccagtcagcccaatggccagtggcacagactggatttcacagaattcacgtaggcaatgcccttagaacgacgtgagttccgatctgaaatgatacgtactcgaggttcctgaagctaaggcagctgtttcagaggagggggaggaggtagcagatgtcaagggatttccatttctctttcgatgccgacatacttcagggcatcagcctggctgtatctgtaatcaaaaaacagctcttcgccagtctggatggctctcttggcaaaaatacctatcctgtgatcaccgttaaccatcataactgcaaagagacacactggtgtcagtgagcatgaagacgggccacggggggttaactgacttgttcacataacaaacaactatcccagaagtattcaagtccatcatcacaggactgaaaagggagttccaattctcacgtcaaaggtacctcggccgcgaccacgctaagggcgaattccagcacactggcggccgttactagtggatccgagctcggtaccaagcttggcgtaatcatggtcatagct

SEQ ID NO: 18591 - DNA, 584 bp, Homo sapiens
ccctctagatgcatgctcgagcggccgccagtgtgatggatatctgcagaattcgcccttagcgtggtcgcggccgaggtacaagtgacgaggaagattctgttttgggtatagccagagaaaacaaggatggagaaaaatctaggacagtgtctttgagaaaccaccaggcttgaaggctacaagtgatgagaaagattctgttttgaatataaccagaggaaaaaaggatggagaaaaaactaggacagtgtcttctcggaaaaaaccagccttgaagtgtcttctcagaaacaaccagcattgaaggctatctgtgacaaggaagattctgttccgaatatggccacggaaaaaaaggatgaacaaatatctgggacaatgtcttctcagaaacaaccagccttgaaggctacaagtgacaagaaagattctgtttcgaatatacccacagaaataaaggatggacaacaatctggaacagtgtcttctcagaaacaaccggcctggaaggctacaagtgtcaagaaagattctgtttcgaatatagccacagaaataaaggatggacaaatacgtgggac

SEQ ID NO: 18592 - DNA, 564 bp, Homo sapiens
cgactcactatagggcgaattgggccctctagatgcatgctcgagcggccgccagtgtgatggatatctgcagaattcgcccttagcgtggtcgcggccgaggtacttgatgtcactaaccaagttgtagaaggagcctgttataattctgcaagatctgtgaatagcattataaatctggggcaggtgcctgtaatcccagcactttgggaagccaaggcaggtggattgcttgagcccaggagttcgacaccaacctgagcaacatggcgaaaccccgtctgtaataaaaatacaaaaaaattagctgggcatggtggcatgtgcctgtaatcccagttactggggaggctgaggcaggagaatcacttgaacctgggagatggagattgcagtgagcggagattgtgccactgcactccagccagagtgacagaacaagactccatctcaaaaaataataataaaaataaacaaatctgtttaaattactgtcgcctttcagcattagactttgagtttaataactacaaattgagactgcttacaatattaacttttttt

SEQ ID NO: 18593 - DNA, 547 bp, Homo sapiens
tatagggcgaattgggccctctagatgcatgctcgagcggccgccagtgtgatggatatctgcagaattcgcccttagcgtggtcgcggccgaggtacagccaaggaccaactggccctgggcctaggaaaagtccttaggccaacttggcctagtgatccaatctttctgtgcctcagtttcttcatctgtagcatgcagctaataataataaatacataaatctctaccttatagggaggctgtgaatagcaaatggatacacacgtaattaatttatatgttatatatgaatatataaaatgtatattatatacacctatagttaatatatgcagatgtgtgtatttaaatatggacacacatcttttaagatgacttgcaccaaggacatgtaagtgctaagttggtatctgctatcattatttgttcactatttgtggctgccaatgagcttatgatacagacagggagagatagagaacatattgcatcgtgattacatgtgtagaatctgaagttagatggccttgggaaatttatttga

SEQ ID NO: 18594 - DNA, 534 bp, Homo sapiens
tagggcgaattggatgcatgctcgagcggccgccagtgtgatggatatgtgcagaattcgcccttagcgtggtcgcggccgaggtactattaaataaacataatatttgaatttactacaattatctggatatgcattttcaagtataagcaagcatactagatataagttacagtgaaaatcttatattcttttgtctccctgtttctttgcacccctgtaatctttttctgtaacagcaactagaataatccttttaacaagaaatcaagtcatatcactcctctctgcttaaaatggtttttgcctcatttagagtaaaagccaaagcccttccaataagtccatatgggcctccacaatggcctcattacctctttgatctcaccttctaccactttgccccctttgctcattctgttctaaccatactagcctccttactgttcttaaaacacttcaaacacattgcctcctagagcctttacactagttgttccccttgcctggactactgctaccctaaatacccac

SEQ ID NO: 18595 - DNA, 464 bp, Homo sapiens
atacgactactatagggcgaattgggccctctagatgcatgctcgagcggccgccagtgtgatggatatctgcagaattcgccctttcgagcggccgcccgggcaggtacgcctaaccgctaacattactgcaggccacctactcatgcacctaattggaagcgccaccctagcaatatcaaccattaaccttccctctacacttatcatctttacaattctaattctactgactatcctagaaatcgctgtcgccttaatccaagcctacgttttcacacttctagtaagcctctacctgcacgacaacacataaaaaaaaaaggaaaaaaaaaaaaaaaaaaaaaaaaaggtactgggaacacttgctagctcagaatgcaatattggtagaatttgctaagaattcaaccaaggatgccgaaggcattcgccagctgaggctcgtttttctggaaccattt

SEQ ID NO: 18596 - DNA, 96 bp, Homo sapiens
  misc_feature 28: n = A,T,C or G
tgtgatggatatctgcagaaatcgcccntagcgtggtcgcggccgaggtactttttttttttttttttatattttttttatcctgtcatttttttt

SEQ ID NO: 18597 - DNA, 527 bp, Homo sapiens
tatagggcgaattgggccctctagatgcatgctcgagcggccgccagtgtgatggatatctgcagaattcgccctttcgagcggccgcccgggcaggtacgcgggggcccttgttcactagaagcaaggagtcccctgacccccttcttcaaaacatactcttcagtctttgtctttattcccgccttggtcctcctttgttcagtccagcaaggtccacagcaaagtgctgcccgaaaacagggtcttgaggacatgaacaaagaaggtctgctggagcagaggaagtgaaattgaccagatgaacagggaccctgggatgaatctgctggcagtggatataaggtcagtgctctaaagaagtacctcggccgcgaccacgctaagggcgaattccagcacactggcggccgttactagtggatccgagctcggtaccaagcttggcgtaatcatggtcatagctgtttcctgtgtgaaattgttatccgctcacaatgtcacacaacatacgagccggaagcata

SEQ ID NO: 18598 - DNA, 491 bp, Homo sapiens
  misc_feature 10: n = A,T,C or G
ggcgaattgngccctctagatgcatgctcgagcggccgccagtgtgatggatatctgcagaattcgccctttcgagcggccgcccgggcaggtacttttttttttttttttttttttttgtgaattgtctgttcatatctattgctaatttttttctaatcaattgtcctttttcttcctgatttgtaggagctctttttatgttgtaggtgttaattatttaatatgtattaggaaaatattttctgccaggttgtcatttgtctttagctttgtttagaatatgcttgatcatacagagattttaaatttttatctattcaaatttgttacttttccttttgactgccttggttttctgtcatgctgaaagagccttctctaccccaagattatttttaaaaagcccatattttctccctatgtggatttagtgttaccctttccacctacctccttaacctagcaggaatttattcactttgtggaac

SEQ ID NO: 18599 - DNA, 399 bp, Homo sapiens
ctatagggcgaattgtgccctctagatgcatgctcgagcggccgccagtgtgatggatatctgcagaattcgcccttagcgtggtcgcggccgaggtactttttttttttttttttttgaagtgtggacggaatatttaatccattccatccaggcatttgcatcttgatatcctgtttcaattgctaaagtttgttttaggtcatttacttctacaatatctattttggttttatctttgggtggaggaagaacagaacattgggggataatgtagaaggaatgtaggaggtgaaggagtaataaaacatatctcaaaatatccaataagatgtgcccctgctatttcggctcccatgccatataagcaacttaaagtaggtttagggtcagtagaag

SEQ ID NO: 18600 - DNA, 525 bp, Homo sapiens
  misc_feature 19, 116: n = A,T,C or G
gtaatacgactcactatanggcgaattgggccctctagatgcatgctcgagcggccgccagtgtgatggatatctgcagaattcgcccttagcgtggtcgcggccgaggtactttnttttttttggaggggttttttagttcacaagtaaatcttgatttattggtttaaaaatggttgaaaaaataaaattagaaatatcttcaaaagtgtcaacatacattctcacttgagtttactggtcacacagttttatatatgcctctgctagatcttttaatgtaataaggtgataaagcctaaaacaacataatctttaaccctttgataagattaatttaatattgttgctttaataaaatcagccatgtctcctgacttattgacaggatttatacaataggacttattgacctatgtatttaaccttaaagttcttacttaggtaaattcctgatattaacaggcaataaaattcgttaataaaaacctaataactagctatgtctagtatctcaattttcat

SEQ ID NO: 18601 - DNA, 421 bp, Homo sapiens
gcgaattgggccctctagatgcatgctcgagcggccgccagtgtgatggatatctgcagaattcgcccttagcgtggtcgcggccgaggtacttttttttttttttttttttttttgatcttctgtgaagccctggcttgacttttcctggaaacttttcctgtgacagtgcatgtatcacaagatggccatttaaaatttaattgcccagatatataacgatctaccactacagcggtagctattagtgcattggggtaattccatggttgattcattttacttttgcagctgaaaaaacctcatgctgagcagagaggcatctaatttgctcatcatccatgctggaagctttttttgtctattagctttgacctttatgacccattggacatttatgcctttaaatgaatggtacttt

SEQ ID NO: 18602 - DNA, 280 bp, Homo sapiens
  misc_feature 167, 168, 169, 170, 172, 173, 174, 175, 176: n = A,T,C or G
gactcactatagggcgaattgggccctctagatgcatgctcgagcggccgccagtgtgatggatatctgcagaattcgccctttcgagcggccgcccgggcaggtacttttttttttttttttttttttttttcctttttttttttccttttttttttttttttttnnnntnnnnnggggggaggaaaaattctgtctttcaccaacttttgggggggggtgcttcatcacctcttagatgcggcccttcaccccgttattttgcgacgttttttttggc

SEQ ID NO: 18603 - DNA, 545 bp, Homo sapiens
cgactcactatagggcgaattgggccctctagatgcatgctcgagcggccgccagtgtgatggatatctgcagaattcgcccttagcgtggtcgcggccgaggtactttttttttttttttttttttttttccagggtctcactttgtcacctggctggagtgcagtgtcgtgatcttggctcactgcagccttgacctcctgggctctaagaatcctctggcctcagccacccccgaccaagtagaggggactacaggcatgtgccaccgtgaccagctaatttttttgtattttttgtagagacggggttttgccattggcccaagctggtctcaaactcctgagctcaagggatccacctacctcagcctcccaaagtgctaggattacaggcatgagctgccacgcctggcctagaagtagagcttaaagttgtgactcaattactgtaatctcatgataaaactttaacaaataaggagttgcttttaatggatgtgcaaaaaaggtagggatttttaaggtagaatttactcctggtga

SEQ ID NO: 18604 - DNA, 384 bp, Homo sapiens
ctactatagggcgaattgggccctctagatgcatgctcgagcggccgccagtgtgatggatatctgcagaattcgcccttagcgtggtcgcggccgaggtactttttttttttttttttttttgtttttttttttttttttttttttttttttttttttttttttttttttttttttttttttttttttttttttttttttttttaaaaaaaaaaaaaaaaattttttttttaaaaaaaaaagcttaaaaaaaagtcttttccctttggcggtttttttttggggccccccccacttaatttgaaaatttggccctcccttttaaaaaagggccttaaattttggaaaaaaaccggccagaaaaaaaaaaaaatttcccccaaa

SEQ ID NO: 18605 - DNA, 544 bp, Homo sapiens
gagcggccgccagcgtgatggatatctgcagaattcgcccttagcgtggtcgcggccgaggtaccagggcaataaacaacaaacagttatttggtagagtgataaaagcaagcattgctattgacaatggaagagcagctgagttcgccgaaggcgaaactactttgataaatctaagtgttatgaatgtggggaaagtggacacttaagttatgcctgtccgaaaaatatgctcggagaacgtgagcctccaaagaagaaagaaaaaaagaaaaaaaagaaagctcctgaaccagaagaagaaattgaggaagtagaagaaagtgaagatgaaggggaggatcctgctcttgacagcctcagtcaggccatagcattccagcaagccaaaattgaagaagaacaaaaaaaatggaaacccagttcaggagtcccctcaacatcagatgattcaagacgcccaaggataaagaaaagcacatatttcagtgatgaggaagaacttagtgattaaaatcttgccccagcacagtaataaaaatca

SEQ ID NO: 18606 - DNA, 562 bp, Homo sapiens
tatagggcgaattgggccctctagatgcatgctcgagcggccgccagtgtgatggatatctgcagaattcgccctttcgagcggccgcccgggcaggtacagtggcaccatcttggctcactgcaacttccgcctcctgggttcaaacgattcttctgcctcagcatcccaagtaactgggactacaggtgcctgccaccacacctagctaattttttctattttttagtagagacagggtttcaccgtgttagccaggatggtctcgatctcctgacctcgtgatctgcccacctcggcctcccaaagtgctgggattacaggcgtgagccaccgcgcctggctagtatatggtatttttcttttatgtttatatgatgatgagaaatttgaaattattgtttgtttgtctttagtttttattcttgttaatggagaaaccaaactccgtgaaatattttaaagaggcttcttctgagccaatatgagtgaccaccatcttgggaaaaacagtcttaaggagccctgagaaagtgtagctgatttctgttttacattaatg

SEQ ID NO: 18607 - DNA, 122 bp, Homo sapiens
tatagggcgaattgggccctctagatgcatgctcgagcggccgccagtgtgatggatatctgcagaattcgccctttcgagcggccgcccgggcaggtacttattttttttattattttttt

SEQ ID NO: 18608 - DNA, 502 bp, Homo sapiens
  misc_feature 111, 112, 113, 114: n = A,T,C or G
acgactactatagggcgaattgggccctctagatgcatgctcgagcggccgccagtgtgatggatatctgcagaattcgccctttcgagcggccgcccgggcaggtacttnnnnttttttttgggtttgttggattcaaactgtgaacccaaaagtatttgaggcaggtttcaatcaatttagaaagtttattttgccaaggttaaggattcacatatgataaagccattcatatggtttggggaccttagaattttattttgttttaacattctccctcttctggccaaggtttgccagagacagcatcaatggcctccaaatgtttattttgttccatagcattgccagggctaaaggactgtctgcctcaggtccatcctgtccctcggtgggacactctgtggcagagggacttagagtcaagagacttatagccaattaaatattccaggccagacaggaatgaacatggacaggcattcattatcccgtaattttt

SEQ ID NO: 18609 - DNA, 546 bp, Homo sapiens
  misc_feature 490: n = A,T,C or G
tatacgactcactatagggcgaattgcgccctctagatgcatgctcgagcggccgccagtgtgatggatatctgcagaattcgcccttagcgtggtcgcggccgaggtacgttgctcagctcctcccgcttcctcttggcgcggatgtgcgtccccacccttttcttgataaattgagggcccgtttgtccttggagaccttcagtaactccatggcgcgccgctcgtactcggagctggatgaggatgagtcgcaggctccctatgaccccaacggcaagccagaaaggttttactacaatgtggagtcctgtggctctctgcgtcctgaaaccattgtcctgtcagccctcccaggattgaagaagaaactgagtgatttacaaactcaattaagccacgagatccagagtgatgtgctaaccataaattaactgcagcttgcctgcttcagcaaaaacggagattcaggccagcagctggatatggnggtctctcttcagactcttctcgtttctgagaatctagtctactgttggttgagct

SEQ ID NO: 18610 - DNA, 687 bp, Homo sapiens
atggatatctgcagaattcgcccttcgagcggccgcccgggcaggtacatcaatatggtcctaacatacagtggcccaataatattttgaaatcaactctaggaaaagaatgttttactaaagtcattcatgaaaaataagtggtgaatttaaaccccagggctatattatatagaattatttttaaattgaaaagttatgttcacatgttccactcaacaaataaaataattataccttttgtgagccatgaggtctgtaatttatgagagactcattaagttttatagatgtgaagaatctagaggcaaatttgcaaactgcttatttaaaaatattgtaaaaaacaaaacaaaaaggaaaaacaataacttccctaaccgtgcttagaaaactttctggtcactatgtagcacagaaacccaaataccttattaagcacatggatataagaggacttatattatttaaaaaaaaaaagtacctcggccgcgaccacgctaagggcgaattccagcacactggcggccgttactagtggatccgagctcggtaccaagcttggcgtaatcatggtcatagctgtttcctgtgtgaaattgttatccgctcacaattccacacaacatacgagccggaagcataaagtgtaaagcctggggtgcctaatgagtgagctaactcaca

SEQ ID NO: 18611 - DNA, 325 bp, Homo sapiens
ctagatgcatgctcgagcggccgccagtgtgatggatatctgcagaattcgcccttagcgtggtcgcggccgaggtacccagtaatcacataaattctgcaatcatctgtttatttagcttaactgtttttttttatttgttgaagttgttgttgtatttcagtctttttcttattgggttgaccagacttggtaaaatctgtaagaaagttccataattatggggaagatttcctctgaattggctaaattcctgtagctgaaaaaaaaaaggaaagaaaaaacactcgcaaaaaaaaaaaaaaaaaaaagtacctgcccgggc

SEQ ID NO: 18612 - DNA, 529 bp, Homo sapiens
  misc_feature 287, 360: n = A,T,C or G
tacgactcactatagggcgaattgggccctctagatgcatgctcgagcggccgccagtgtgatggatatctgcagaattcgcccttagcgtggtcgcggccgaggtacagttgttacataattatataaaataaagcttgtaaaagttctattctatctactctataaagtttatacagattgagcatccctaatctgaaaatccaaaatccaaaatgctccaagatttgaaacttttgtggctctgatatgacatcaaaagtggaaaattccacacctgacatgtntgctttctgatgattcaatgtacctttctgcttaatagttagaaatgagattataaaacactgacattgattnttcttgtgactgattaaatgagtcacactagtttatattcatatcatatatgtatagcattccagagtaaaactcttagacatgtttcaaaggggagtggaacatttgttaaaatcctggttcctcactgggaagttggaaaggccagaattggagctaacagtgaatc

SEQ ID NO: 18613 - DNA, 579 bp, Homo sapiens
acgactcactatagggcgaattgggccctctagatgcatgctcgagcggccgccagtgtgatggatatctgcagaattcgccctttcgagcggccgcccgggcaggtaccattcatttaaaggcataaatgtccaatggggccatcttgtgatacatgcactgtcacaggaaaagtttcaggaaaagtcaagccagggcttcacagaagatcaaaagaaagagacaaggagaagctaagtgtattagtcaggattctctaagggacagaactaatagaatatatatacacacacaaacacacacacacacacatatatatacatataaataaaagggagtttattaaggagtattaactcacacaatcacaaggtcccacaacagggccgggccatctgtaagctgaggaacaaggaagccagtctgaatcccaaagatgacaaacttggagttcaatgttcaagggcaggaagcatccaacacaggagatagatgtaggctgggaggctaagccagtcaagacttttcacgtttttctgcctgtttcatatcctagctgcaatggcagctgattagat

SEQ ID NO: 18614 - DNA, 215 bp, Homo sapiens
cgccagtgtgatggatatctgcataattcgcccttagcgtggtcgctgccgaggtaccaacggcacaaaagatggtcttggccttgcccagctctttccctgctactttcactgttgagctatatcttaacctctacttcccttcaccattgttggactctttcaccattctggaattggaacagtatacctatgtgtgaacttaatagacattg

SEQ ID NO: 18615 - DNA, 542 bp, Homo sapiens
  misc_feature 167, 186, 187, 223, 243, 244, 269, 333, 339: n = A,T,C or G
gcgaatggccctctagatgcatgctcgagcggccgccagtgtgatggatatctgcagaattcgccctttcgagcggccgcccgggcaggtacttgttactcttacagatgtctcaattaattttaacctctatccctaatggtgtttaaattttggtaaagaaaaanttcattttttcttttattnnttccaagaaatggtaagctattcttttgtccctatngggagatgtggaccagagannaaactttctgtctctgatgtctttntggtgtgagacaaagattttagggaaatataataagtggtgccagggaattgtgaagattacantttcancctcctttttctgtctcctctctcttttatataaatctttatctctgcttctaacaatctccttatcagaatttctaacatatgtaatgatgagagagagaaaaactgccaccacaggatcaaatttcatttctaatctggagaaacaagagtctagttttccaaacatttttattctaaaaaagaaaagttaagctattaaa

SEQ ID NO: 18616 - DNA, 647 bp, Homo sapiens
  misc_feature 577: n = A,T,C or G
gactcactatagggcgaattgggccctctagatgcatgctcgagcggccgccagtgtgatggatatctgcagaattcgccctttcgagcggccgcccgggcaggtactaacaggtccatctggttttctcatgttttctccattcattaaaaaagaaaaattaaggtcttttatatatttaccaaagacaagaaaaaaactacagtctctattagtaagaattcatgctccatgcatgagaagtttgacactgttttaaaggatcctgttcctgccacttgttgtcccccagggccaagtcctactgacacctgttggaatttcttgcacttaggagcggctctctatggagagaggtccacatcaaaatttagacgttgtcaccttttttgaactagataaaaccagtaaggatacagacaataataaaaggctttccaactcagcagaattaagaactagctcttggagtatatacatttgcactccaatatcaacactagcctatccactttgagtcaaaatttgaaaggtaagaatgtaattatgaaaatgtgcacaaaatgttaaatactantggcaaataaatatatcttaatatgttctaacaagcaaacatatattcaagataatacagccctgcttta

SEQ ID NO: 18617 - DNA, 380 bp, Homo sapiens
agggcgaattgggccctctagatgcatgctcgagcggccgccagtgtgatggatatctgcagaattcgccctttcgagcggccgcccgggcaggtacgcgggtcatagttaagatctgtgatacgaaccatagatattgtctgacaaagcagaaatcaccaagtttcccccttttgaattaccaccaagaagtgttgaaacaccaaatagatatcatgttattttgggcatttgcagttttcttccctgctgcatgtaatgtctcagaatcaacattcttttaaaatctagactatattttgaggcaatgaattacttatattcaacttaggcttgttttgacattcagtagaactttaagttcaatctaaaggcttcag

SEQ ID NO: 18618 - DNA, 370 bp, Homo sapiens
  misc_feature 23: n = A,T,C or G
gccctctactgcatgctctagcngcctccattgtgatggatatctgcagaattcgccctctcgagcggccgcccgggcatgtaccgcatggtatacatgaaatattataaccaagcataatatatcaaggactaacccctataccttatgcataatgaataactagaaataactgtgcaaggagagccaaagctaatacccccgaaaccagacgagctacctaagaacagcttaaagagcacacccgtctatgtagcaaaataagtgggatgatatataggtagaggcgacaaacctaccgagcctggtgatagctggctgtccaaaatagaatcttagttcaactttaaatttgtccacagaacccttt

SEQ ID NO: 18619 - DNA, 360 bp, Homo sapiens
tgggccctctagatgcatgctcgagcggccgccagtgtgatggatatctgcagaattcgcccttcgagcggccgcccgggcagggacttgcttttttttttttttttttttttgggagacggagtcttgcactgtactccagcctgggtgacagagcgagactctctcaaaaaaaaaaaatccaaataaagtcttctgtaaagtatggacacctatgccaagtaatgacataggaaaaaactacaggttttatagttttaagagatgacaggattataaaaagcaggtaagaattagtaaatttgggcccttcctttgagatattatgattaagaatctttaatctcctttttgtgcata

SEQ ID NO: 18620 - DNA, 294 bp, Homo sapiens
  misc_feature 163, 164: n = A,T,C or G
ctactatagggcgaattgggccctctagatgcatgctcgagcggccgccagtgtgatggatatctgcagaattcgccctttcgagcggccgcccgggcaggtactttttttttttttttttttttttttttattttctttttttttttttttttttttttttnncgatttatcgttatttattatcaaattcatgaccagggtgtaaacatacttgtgaaaatttacagcaacttggggcttataacacatgaccaaagatgactttaacacgtgcactgttcacattttgggg

SEQ ID NO: 18621 - DNA, 352 bp, Homo sapiens
gactactactcactatatggcgaattgtgccctctagatgcatgctcgagcggccgccagtgtgatggatatctgcagaattcgcccttagcgtggtcgcggccgaggtactttttttttttttttttttttttgagcagttaacattcctttattttagtttcaagggcggtggaagggagagagggaaaagaagatacacggaaacttacagcaaatttttcactgtttatagctttcttggggaagaaaacacatgcacgaatcctggtgttaggaatattttaagcgtatatcttcaatattattcatccaggactgaagtaagtcctgatgcaagaaatgagtgagt

SEQ ID NO: 18622 - DNA, 432 bp, Homo sapiens
gcgaattgggccctctagatgcatgctcgagcggccgccagtgtgatggatatctgcagaattcgcccttagcgtggtcgcggccgaggtacttaagaaaaaaacagtataccctattcctttaaaagccaaggtaaatttgaaacctataattgataattaaaggtattcttcgtaaccctgtaacactctaataccactttgttgtcagtgtagtcagtgtaaacaagggcgtatcccgaaagcactgaggccttcctatcaaaaatccttaacccagtaacccgcagatggcccaaatgcattcaatctgtagtggcagctgctttgctaatgaaaaaaaaaaaaaaaagccatctataccaattctaagttaatttagactaaacaaggtcttattaatagcaaaggataatttgaaatcccaaacta

SEQ ID NO: 18623 - DNA, 628 bp, Homo sapiens
gactactatagggcgaattgtgccctctagatgcatgctcgagcggccgccagtgtgatggatatctgcagaattcgcccttagcgtggtcgcggccgaggtacaaggattttgaagaaaacgaatgtggagattaggccactggactcagaaataaaatccagaataatgtaaaccacattctgaagctgtcactcatatctgagtctcaccttgtgttgcagatagtcgccatgtcctcagcacaggaacaggtggctgtcttaatgtcattgatgtgcagacaggaatgctcatctcctccatgacatcagatgagccccagaggtatagtttgtgagttactgggggcgaagacatttacagacatgttcatgatcacttcatttgggcttacattggccagttcaacatatccttccttcatgatgaagaaaggactatttctaaatcattcttgcaggtgctttgtctgggatggaaattccgttttatctggcagtcagtctggtgaactgctcgtttgggacctccttggagcaaaaatcagtgagagaatacagggccacacatgtaagcagctactgcaagtgccttgatctttgctctcaagataatgaactcaagc

SEQ ID NO: 18624 - DNA, 599 bp, Homo sapiens
  misc_feature 524: n = A,T,C or G
gactactatagggcgaattgggccctctagatgcatgctcgagcggccgccagtgtgatggatatctgcagaattcgccctttcgagcggccgcccgggcaggtacttttttttttttttttttttttttttggagatggagtctcactctgttgccaggctggagtgcagcggtgtgatcttggctcactgcaacttccgccccctgggttcaagtgattctcctgcctcagccctccaagtagctgggattacaggcatgcaccaccacacctggctaatttttgtatctttagtagagacggggtttcaccatgttggccaggatggtcttgatctcctgacctggtgatcttgctgcctcaaccttccaaagtgctgggatacaggtgtgagcccccgtgcctggcctatgtatttttttttttaaacacacccataaatctaaagcaaagggtatgccaagattcagctggggccaggtctgacccccaccctgagcatctcattagcttcccatcagnggaatacaatggagacatattccacttggtctggcaatgtcctcctggggtgatgaaaagggggcatgttggtgt

SEQ ID NO: 18625 - DNA, 257 bp, Homo sapiens
tgctcgagcggccgccagtgtgatggatatctgcagaattcgcccttagcgtggtcgcggccgaggtacttttttttttttttttttttttttttcttttttttattttttttttttttttatttttttttttttttttttgaagaaacgccaaagttttagtgtttaataatgaatagcacaactgaccaaggtccaaaatgtgaagattccttgttcaagaaactggggggaaattactttacaaactaactttt

SEQ ID NO: 18626 - DNA, 581 bp, Homo sapiens
tatagggcgaattgggccctctagatgcatgctcgagcggccgccagtgtgatggatatctgcagaattcgcccttagcgtggtcgcggccgaggtacatacctgttggcaaagattgggcagcaagccttgtggaccaaactggggttactctccaggaaagagcaaattagtggtcacaacattcagatcttagagccagaagaacaggactacagcagagcctcacttcaagacaactcggaggcgctggctcctctgaaacccagacgctgtcaactccctgggcccaggagtcacaaccgctttcgtgctctgggttcttcacttcttgtgatcagctccacatatttttctgatgatgtcacccattctgacttcctacattttgaaagttgatctacaagtaaaatctttcgtgaggcttaaaaaaaagaagaaaagaaataaaaggtgtgctatagggagatggagaagaagagaaaggccgttgcctctttattttgagatttgctgcagctgcgagtgccccccgcgtacctgcccgggcggccgctcgaaagggccaattccaacacact

SEQ ID NO: 18627 - DNA, 453 bp, Homo sapiens
actatagggcgaattgtgccctctagatgcatgctcgagcggccgccagcgtgatggatatctgcagaattcgccctttcgagcggccgcccgggcaggtacctgtctcaaggcaaaattatgactgagttcatcctcacctctggaggccagtaaaagcgggttatagaataacaaagaggcatctagtatctttcactggggtatttggagagaaacatctcctaccgaacgccagtttaacaagactgggcaaggagggtatcttatctacttcacagaaattaacacattgagtcactaaatgtgagacacggaaacactctacttgactgaagatatgtcttctgaatccaaccctaatgaaatgaagatatgtgattaacctgacaggaacattgagagagcgaccgtatagagtctcatgggagcaacgcatgaacaaactgagaa

SEQ ID NO: 18628 - DNA, 478 bp, Homo sapiens
ccctctagatgcatgctcgagcggccgccagtgtgatggatatctgcagaattcgcccttagcggccgcccgggcaggtacttttaggcagctcacagagctgatctcaactttgagcaccatgggaggtaaagacctcagggcagttggcctcttgtgcagctgaagtgtttagaaagccagaacgaagtgaaaggaagaccctagagtgggtcagctttctgccaaagatagagaatatagctatagaatgctcccagcctacagtatagagctgttgttgggaagtggctgctcagccagtgcctgtatgccctaacctgtcacacagttggactacatgactagttctggccaatggagtgtgagtagaaatgacgtcagccacttgtagaactgtcccataaaaacctgctactatccctctgcctgccagctggatgttaatactcataggcatattaaagccatgttttta

SEQ ID NO: 18629 - DNA, 275 bp, Homo sapiens
ccctctagatgcatgctcgagcggccgccagtgtgatggatatctgcagaattcgcccttagcgtggtcgcggccgaggtacgcggggagagcaccttggcgcgcggagctggcaccttggcgctgttggtggcggcggagacagctgtgaagtgtgacgttctttgtctgctggcagctatgggcgacgaggcgggacgtcatggaagtgaaggatgccaattctgcgcttctcaataactacgaagtatttcagttactaactgatctgaaag

SEQ ID NO: 18630 - DNA, 394 bp, Homo sapiens
acttactatagggcgaattgggccctctagatgcatgctcgagcggccgccagtgtgatggatatctgcagaattcgcccttagcgtggtcgcggccgaggtacccatatactaaccagtttggggcacataaatgttacaagggagaaaaaaagatttagactagcatgtgaatttcatcaagcagagacaccttggttaaaaagcaaaacttgtggggtggagaggaaggaaaaaaggaaaacgtaagaaaaaggaccggagtgctcactgtttatcattatcagcccttttttttgagacggagtctcgctctgtcacccaggctggagtgcagaggcactatctcggctcactgcaagctccgcctcctgggttcacaccattctcctgc

SEQ ID NO: 18631 - DNA, 385 bp, Homo sapiens
gactcactatagggcgaattgggccctctagatgcatgctcgagcggccgccagtgtgatggatatctgcagaattcgcccttagcgtggtcgcggccgaggtacaaactgttaaatttgtcaataagtgacaaaagaattccacaaaatcatggaactctcaaactcaagtaaaccaaaaaatagttaaccaaataatgatctccgtcagacagtgatttgaatgagagatcatatcgtaagtttaaaaagtaaaattcaaatgtaatgtgattgaaatacctctgagttttacattactcctcatctgtataataaaagagaggatgagtgtgaaaaagttaagagacatttaaaaggtcatactggaaatttatctttggat

SEQ ID NO: 18632 - DNA, 197 bp, Homo sapiens
ctcactatagggcgaattgggccctctagatgcatgctcgagcggccgccagtgtgatggatatctgcagaattcgcccttcgtggtcgcggccgaggtacgcgggtattgggagaatctgctgccagcttcaggcagacctttctgtccttcgctgtcaaagccagacttctaaggagtagttgaaagaaaaaccc

SEQ ID NO: 18633 - DNA, 402 bp, Homo sapiens
ctactatagggcgaattgggccctctagatgcatgctcgagcggccgccagtgtgatggatatctgcagaattcgcccttagcgtggtcgcggccgaggtacctgtaatcataccaggcttctgattttacaatccgggtttaagctgtttacatttccaaagtaatcaacttttgctctcctaaatccctcgtaatattcaaagtaaaactgatggaattttttgataagttactacaagtttagcatcactgattaccttcaatgcacttgcaagtgaaccacagctaatctgtaaattaagaattcatctacaaatggaagcaagaaagaaaaaaagttgtttttcttaagcaaagttggaaataaacagaaaatctttttctttaaaggatggtggag

SEQ ID NO: 18634 - DNA, 406 bp, Homo sapiens
gcgaattgggccctctagatgcatgctcgagcggccgccagtgtgatggatatctgcagaattcgccctttcagagcggccgcccgggcaggtacttttttcttatgatgattggtgtagaaatgtgtgatttgggtgggcttttacatcttgcctaccattgcatgaaacattggggtttcttcaaaatgtgtgggtcatacttcttttgggaggggggttgttttcttctgtttattttctgagactcctacaggagccaaatttgtaatttagagacacttaattttgttaatcctgtctgggacacttaagtaacatctaaagcattattgctttagaatgttcaaataaaatgtcctgaccaaattgttttgtggaaaatagatgtgtttgcaatttgaag

SEQ ID NO: 18635 - DNA, 196 bp, Homo sapiens
  misc_feature 114: n = A,T,C or G
tatagggcgaattgggccctctagatgcatgctcgagcggccgccagtgtgatggatatctgcagaattcgccctttcgagcggccgcccgggcaggtacacattccatgctgngtcatacctgagtgccagtggaatataatttggaaggaaatactgtgttgaaaaacatcctctacagacaatatgaacaatg

SEQ ID NO: 18636 - DNA, 571 bp, Homo sapiens
  misc_feature 110: n = A,T,C or G
gactcacttagggcgaattgcgccctctagatgcatgctcgagcggccgccagtgtgatggatatctgcagaattcgccctttcgagcggccgcccgggcaggtactttntttttttttttgtgtgtgggggcttatataaaattatttttcttcaagctttttttacctcagaaaaatacctctttatttttacaactttctttacatatttttttatttcctggttccatttaccttgttttatacataatgtttaaataagctttgaattagacataaatttttcacttttctttttaaaaggacacacttctctgtttttgtttttttttaaccaggatggtttcccggcatttttttttattgggaaattccccaggtatggaaccttttttttttaaattaaatttaccttattttcttaaatattgaccggttggtttccaggttttttcccatttcctttggcctaatatttattttaaatatttaccctaaatatttttggaatccgggattggcctggatttaaaggttttgaaccggttttggaaaatttttacccggcc

SEQ ID NO: 18637 - DNA, 179 bp, Homo sapiens
ggcgaattgggccctctagatgcatgctcgagcggccgccagtgtgatggatatctgcagaattcgccctttcgagcggccgcccgggcaggtacgcggggcaggatgatggaagaaaaattacttcatgctgagtataagcgagaagtgcatttacaagcaattgtgataaaaagcac

SEQ ID NO: 18638 - DNA, 577 bp, Homo sapiens
ccctctagatgcatgctcgagcggccgccagtgtgatggatatctgcagaattcgcccttagcgtggtcgcggccgaggtacataatacacgtaacataaaaaatatgtattaactgtttatgttatcagtaaggtttctggtcaacaggttactagtagttatgttttggaggagtcaaaagttctatgcagattttcaactgcacagagtcgatactgctaatccccaagttgttttagggtcaagtctgtattcaaatgcattcgcaggagttgcctttaacatctacttagactgatttaaccacccctatttactttgccaagaatgtagaggtatattaaaatcaaccaccaacactgtttctaccaatgtctttctgttattcaaatgattatagttttgtcgacttttagtatttggcacatgtgttatctagcttgcataaaataatcttcactgccttgttttaatcattttttattctgtattcgtgttttgtttaacaataatacttttcttctcacctcttctgggctaaggaataacacatacatatttgctaatctgtttac

SEQ ID NO: 18639 - DNA, 515 bp, Homo sapiens
ctactatagggcgaattgggccctctagatgcatgtagatgcatgctcgagcggccgccagtgtgatggatatctgcagaattcgcccttagcgtggtcgcggccgaggtacaatatcattattgtgaagatatgctatagctgatgcgagactttgaatgatccaccttgtctattctctgagaaatgccctaatctctgcaaaatatttctgagttctgcatcctcacaaagctgcatcacaagatacattttctttggcgtttcaaatacttgttccacatgtgtgatgtgttcatgttttacacttttcagaatgttcacctctcgttcaagtaacttcacagcagagcttccagccttttctttggtcacttttttaattgcccacttcggttctgtttccttggctgtagtttcaatgactattccaaagctcccttttcccaatattcttccaaaggtatagatttcctcaataggcgcttcattctcaatccttatgtgaggaactt

SEQ ID NO: 18640 - DNA, 502 bp, Homo sapiens
  misc_feature 325: n = A,T,C or G
gactactatagggcgaattgggccctctagatgcatgctcgagcggccgccagtgtgatggatatctgcagaattcgcccttagcgtggtcgcggccgaggtacgcgggtgcctgtcttcatgagagcactgttgtctgcgccgggaaatcatcctctgacctgttcacaagtctttagatgaagattttcagcgggtttggatctatttaaaaagcggtaactgcaaagaggcacctaatccacttgatttgcctgtttttgagattctgattatcctgttacatgtacctgcccgggcggccgctcaaaagggctaattccancacactggcggccgttactagtggatccaacctcggtaccaaccttggcctaatcatggtcataactgtttcctgtatcaaattgttatccactcacaattccacacaacatacaatcctgaaacataaaatataaaacctgcagtgcctaatgagttaactaactcacattaatta

SEQ ID NO: 18641 - DNA, 438 bp, Homo sapiens
  misc_feature 169, 170, 204, 246, 247: n = A,T,C or G
tagatgcatgctcgagcggacgccagtgtgatggatatctgcagaattcgccctttcgagcggccgcccgggcaggtacgcgggctcgaaaatgtggtgaaggtctcagttgttatttcagaaatgaaaccaaaagaaacacaatagcgaataagaaacaatatgagannatcccttaaaagactagaagggttaaaagggagnggaaaattattaaattataaaagaaagggaagaatgatcaannaagcagcaaccactgaagatatgcagagcagatctagcatacggataataggagtcactgaagaaggaaaccaaagcaagaaagcaagccaacactaaaaattataactccaaaaaaaaacttcactgaaatacaagagaaatgtagaactacattttggaagaccagacagtatacctgagaatatggat

SEQ ID NO: 18642 - DNA, 554 bp, Homo sapiens
actatagggcgaattgggccctctagatgcatgctcgagcggccgccagtgtgatggatatctgcagaattcgccctttcgagcggccgcccgggcaggtactttttttttttttttttttttgataaaagtatttttggaatctaatttaatgttcagggatccattaagcatttcaaggaagacactgacattactaaattgttcagcaatgcacagaatttgaaaatacacttgaaaaatagaactttgatataaacttgtaaaatacgtaggatgtataccactgattaaataaattaaaaaactccattcccctattcagtgctgtgttgggtagaaaaggggtaagtgaacaaacaagtggaaaagaaagttaaggaagaacatagagaaaaggattgttttgcgcagacatctggctttgcttccccaaagctactgagtacaaaatttattgcggtaaagagattaaaactatttcttatgtaaaccaaaatcaacatttgtttcacttgactaccagtagttggaaaaactatctattacaaatg

SEQ ID NO: 18643 - DNA, 384 bp, Homo sapiens
ctactatagggcgaattgggccctctagatgcatgctcgagcggccgccagtgtgatggatatctgcagaattcgcccttagcgtggtcgcggccgaggtactcttattaaagaaaagtctttactgttgagggcactgggtctctggagtagatttagaagacacatatagaatagggtgtgatttcttacaagtttctttttccaatttgcttgaagtttcttttccttctttaacttctgtttgaagctttgattcagcagctaacctgggagagttaggggtgtttccacttctttcacttaaggcctcagcgtcagcgggagctcctatgagtttcacacatttcttttccttcttcagctgcatatccacgggcagat

SEQ ID NO: 18644 - DNA, 497 bp, Homo sapiens
  misc_feature 24, 184, 201, 219, 220, 242, 243, 259, 260, 279, 296, 297,307, 314, 315, 331, 332, 340, 342, 343, 352, 354, 355, 393,394, 404, 405, 452, 453: n = A,T,C or G
acgactcactatagggcgaattgngccctctagatgcatgctcgagcggccgccagtgtgatggatatctgcagaattcgccctttcgagcggccgcccgggcaggtacttaacaatttgtttctgtttttttcttatttggatatggctcagacatttaatgagtattatttaatttaacatnaactttaagaattttanaattacccatgaaaattnntatttgtaaatgccttacctcnntgtttgcaattacccnntaatttatttaaatttttntaaccaattattacccnnttgattaccnctatgannaaattgagaatacctnnagacatangnnctagttatntnnaggtttttaattaacccgaattttaattgccctgttannatatcaggannatttacctttaagtaagaacctttaaggggttaaatacccataggtnncaataagtccctaattgtatttaaatcccctgtcaataaagtca

SEQ ID NO: 18645 - DNA, 567 bp, Homo sapiens
ctatagggcgaattgggccctctagatgcatgctcgagcggccgccagtgtgatggatatctgcagaattcgcccttagcgtggtcgcggccgaggtacagatggggtttcgccgggctagccaggatggtctcgatctcctgatctcgtgatctgcccacctcgacctcccaaagcgctgggatgacaggcgtgagccaccatgcctggcccgtatctggataattttaaaaaatttttttgtagagacaaggtctcactatgttgcccaggctggtattaaactcctgggctcaagcaatccggccgcctctcaaagtgctgggattataggcgtgagccaccatgccaagccaaaagagtaatttttaatatataaaaagctcaggataaaaaaaggcaggaagataccagcagaaaaataggcaaaagttgagctgggctcagcagcacatgcctgtaatccctgctacttgtgagattgaggtgggaggaatgcttgagcccaagagcttaagaccagcctgggcgacacaacacgaccccatctcaaaataaaagaaaaat

SEQ ID NO: 18646 - DNA, 424 bp, Homo sapiens
gcgaattgggccctctagatgcatgctcgagcggccgccagtgtgatggatatctgcagaattcgccctttcgagcggccgcccgggcaggtacagtaatttatttgtcgttagtgttaaagattaagcatagtaactgactcttaagtgttaaataatgtagaagtaaaaaaattattttttaaaaggctttaattttgggaagggggggactttatttctgtttacaagtgtattaccttccttccctcctcttctccccccacacccaacaaaatacagtttggaattcactgaaacagtaccttggccgcgaccacgctaagggcgaattccagcacactggcggccgttactagtggatccgagcttggtaccaagcttggcgtaatcatggtcatagctgtttcctgtgtgaaattgt

SEQ ID NO: 18647 - DNA, 551 bp, Homo sapiens
actatgggcgaattgcgccctctagatgcatgctcgagcggccgccagtgtgatggatatctgcagaattcgcccttagcgtggtcgcggccgaggtacgcgggaaactgtcaggttgccgtctaggtagcggttgtgcttgctgaggctgcacttgctgacactgcagctgcgacgcggctaagaggcgcagagcgaggagtcgggatttggtcgcgagcggcgacgagcatttgtgcagaatgtcatcagatgaggagaaatactcacttccagttgtgcaaaatgactccagtcgaggcagttctgtctcttcgaatcttcaggaagaatatgaagaactgcttcattatgctatagtgactccaaatattgaaccctgtgcttcacagtcatctcatcctaagggagaattggtgccagatgtcagaatttctacaattcatgatattcttcatagtcaaggaaataactctgaagtaagagaaactgcaatagaagttggaaaaggatgtgatttccatatttcaagtcattcaaagacagatgag

SEQ ID NO: 18648 - DNA, 599 bp, Homo sapiens
  misc_feature 476: n = A,T,C or G
gcgaattgggccctctagatgcatgctcgagcggccgccagtgtgatggatatctgcagaattcgccctttcgagcggccgcccgggcaggtacacattcttttcttcagcatgtggatcattctcaaagatagatcacattttaggccacaaaacaagtcttaaaacattccaaaaagagaaggaaattatatcaagcatgtcctctgaccaaaattgaataaaactagaaatcaataacaaaaggaactttggaaactatacaaacacatggaaattaatcaatatgctcctgaatgactagttggtcaataaaaaaatttaaaaattaaaattttttgaaacaaatgaaaatagtaataaaacatatcaaaatttatggaatacagcaaaccatcactaagaaaaggtttacagcagtaagtaactgcattaaaaaggtagaaaaatttcaaataaacaatgatgcatcttanagaactaggaaagcacctactaagcaaaccaaaagttagtagaagaaaagaaataataaagatcagagcagaagtagtgaaattaaaactaaaatcaattacaaaatattaatgaaaggaaag

SEQ ID NO: 18649 - DNA, 280 bp, Homo sapiens
  misc_feature 195, 196, 231: n = A,T,C or G
acgactcactatagggcgaattgggccctctagatgcatgctcgagcggccgccagtgtgatggatatctgcagaattcgcccttagcgtggtcgcggccgaggtacacccggcagcacaacgagtccagacacaactttgagagcatgtcacctgccaagccagtccagcatcacagagaacggaaaagagccnncaaatccagcaagcacagcatgagttagaactcanacttccataactagacttactagtaaccatctgctttacagatttgatt

SEQ ID NO: 18650 - DNA, 472 bp, Homo sapiens
  misc_feature 175: n = A,T,C or G
ctatagggcgaattgggccctctagatgcatgctcgagcggccgccagtgtgatggatatctgcagaattcgcccttagcgtggtcgcggccgaggtacagttatgcagtcatggctcactggagccttgacctcctgggctcaggcagtcttctcaccttaaccttctcagtanctgggactacaggcatgcaccaccacacctggctaatttttaaattttttataaagacagggtcttactttgttgcctgggctggtctcaaattcctgggctcaagggatcatcccacttcaacctctcaaaagctctaaaattataaatataagccaccatacccacccccatcatcttcttataaagacactaattattgaattcaagacacacactaaatccaatataattacatctcgaaatccttaactaattatagctccaaaaactctctttccaaataaaattacattc

SEQ ID NO: 18651 - DNA, 612 bp, Homo sapiens
actactatagggcgaattgggccctctagatgcatgctcgagcggccgccagtgtgatggatatctgcagaattcgccctttcgagcggccgcccgggcaggtacgcgggggaacaacggaggcagaggagctgaagactccagtatgcaactgactacaaggaggtttgtgaggcttcagttgatcgtgagtgtaagtgcttcagtgcgatcaaagttctacgtgcgagagccgccgaatgccaaacctgactggctgaaagttgggttcaccttgggcaccactgtcttcttgtggatctatctcatcaaacaacacaatgaagatattttagagtacctcggccgcgaccacgctaagggcgaattccagcacactggcggccgttactagtggatccgagctcggtaccaagcttggcgtaatcatggtcatagctgtttcctgtgtgaaattgttatccgctcacaattccacacaacatacgagccggaagcataaagtgtaaagcctggggtgcctaatgagtgagctaactcacattaattgcgttgcgctcactgcccgctttccagtcgggaaacctgtcgtgccagctgcattaatgaatc

SEQ ID NO: 18652 - DNA, 585 bp, Homo sapiens
ctatagggcgaattgtgccctctagatgcatgctcgagcggccgccattgtgatggatatctgcagaattcgcccttagcgtggtcgcggccgaggtacgcgggaacaaaaggaactttggaaactatacaaacacatggaaattaatcaatatgctcctgaatgactagttggtcaataaaaaaaatttaaaaattaaaattttttgaaacaaatgaaaatagtaataaaacatatcaaaatttatggaatacaacaaaccatcactaagaaaaggtttacagcagtaagtaactacattaaaaaggtagaaaaatttcaaataaacaatgatgcatcttaaagaactaggaaagcacctactaagcaaaccaaaagttagtagaagaaaagaaataataaagatcagagcagatgtagtgaaattaaaactaaaatcaattacaaaatattaatgaaaggaaaagttggtgttcataaaagaataagtcaacaaacttaggcaaactaaaaaacaaagagataataaaataagtaaataaaatcagaaaatcaaaagagatttacaactgatactgcaaaaat

SEQ ID NO: 18653 - DNA, 655 bp, Homo sapiens
ctactatagggcgaattgcgccctctagatgcatgctcgagcggccgccagtgtgatggatatctgcagaattcgcccttagcgtggtcgcggccgaggtacagtgttttttcaaccagtttatgagagaatgaaaagaatgaaagtgaaaattttacttaacttagggttatgtagctctaggtaatctcttcagaactcccttgcttcaccttctcaagttaatcaacagtggctagtttataactagaaaccacttaccaaattgcctaaacaagaaaactttttaaaataacaatttgctgatctgtccaataactccaataaagttgaatttgctttatttttccaaaaattatgttgtctagataaagactctttgtaagtgtaaatgtatgatatattgagttgatttttagtccctattagagagttgttagacaagttattaaagtttaagaaaatttggattctaaatttccacctgataacatatatgaaatattttatattttcaatatatacttacttatattttgcacactgtatataaactaggagattagaaatgttttaagtcccttctctgggtgtatatctgcactatataaagaaaaaaagaaagggtagaaagagacttaactttttttctatc

SEQ ID NO: 18654 - DNA, 569 bp, Homo sapiens
  misc_feature 478: n = A,T,C or G
gactactatagggcgaattgggccctctagatgcatgctcgagcggccgccagtgtgatggatatctgcagaattcgcccttagcgtggtcgcggccgaggtacatctacagtggcaacagcctgcaggataccaaggctcccatgatgcctctgagctgtttcctgggcaatgtctatgctgagagtgtagatgttcttcgagatggaactggacctgcaggtttacgacttcgcctacttgctgcaggttgtggacctggcctattagcagatgccaagatgcgggtatttgaacgttcagtgtattttggtgattcctgccaagatgttcttagcatgcttggctctccacacaaagtcttctataaatcagaagacaagatgaaaattcattctccttcccctcataaacaagttccatcgaagtgtaatgactacttttttaactacttcactcttggagtggacatcctctntgatgcgaatacacacaaagtgaagaagtttgttctacacaccaattaccctgggcattataatttcaacatttatcatcgctgtgagttc

SEQ ID NO: 18655 - DNA, 591 bp, Homo sapiens
acgactactatagggcgaattgggccctctagatgcatgctcgagcggccgccagtgtgatggatatctgcagaattcgcccttgcgtggtcgcggccgaggtacagttaccttcagtctctgtgtatctggaatgcacttacatgctattcaagttcttagagtgtaaggaaaacaaaagctgtagagttctgcatccatggggactgagacagagcaaagcacttcctagtatgttcaactggaacatggcccacactgatccatggtcacagtttggaatgtgctgagaagcttccatctacaatcaagtttctcagtaagaagtccccgcagagggagggagtccactgtgtacctgcccgggcggccgctcgaaagggcgaattccagcacactggcggccgttactagtggatccgagctcggtaccaagcttggcgtaatcatggtcatagctgtttcctgtgtgaaattgttatccgctcacaattccacacaacatacgagccggaagcataaagtgtaaagcctggggtgcctaatgagtgagctaactcacattaattgcgttgcgctcactgcccgctt

SEQ ID NO: 18656 - DNA, 752 bp, Homo sapiens
  misc_feature 25, 114: n = A,T,C or G
tacgactcactatagggcgaattgngccctctagatgcatgctcgagcggccgccagtgtgatggatatctgcagaattcgccctttcgagcggccgcccgggcaggtactttntttttttttttttttttttttttttttttttttttttttttttttttttttttttttttttttttttttttttttttttttttttttttttttttttttttttttaaaaaaaaaaaaaaaaaattttttttccccaaaaaaaaaattttccaaaaaaatttttcttttttttaaaaaaaaattttttccaaaaaaaattttttttttttttaaaagggaaaaaaaattttttttgtttttaaaaaaaatttttttttggaaaaaaaaaaaaatttttaaaaacccgggggggtggctttttttttaaaaaaaaaaaaaaaaaaaaacccctaaattttttttttaaagggggttttttcttagtcccccacaataaatttttttttaaaaccttttttttttttcaaaccaaaaaaaaacctcttttaaaacaaatatgtaaaaaaaaatttttgttttttttttaatttaaaaaaaaaaattttttttttttaaaaaaacaaaaggagagaattttgttttttttcctttataaaagacttctaaaaaaaactttttttttttttttaaaaaaacacagtttttggggtttttttttttttttttttttgtggaaaaaacaaccccttttttttttg

SEQ ID NO: 18657 - DNA, 572 bp, Homo sapiens
  misc_feature 417: n = A,T,C or G
acgactcactatagggcgaattgggccctctagatgcatgctcgagcggccgccagtgtgatggatatctgcagaattcgccctttcgagcggccgcccgggcaggtacgcgggatatttaaaagaaaatagttcccaagaaatgaaactggctccagaaagctgacagctcatcctgtccatgacacttacccacttccagggtcacctgcaaacaccaacttcctagccttacagtatgtgatcttctttgcctggaacccgagggcgcatccagctgctgctatttttgtccctggctttgggctgaactaataatgttatgagaaattttaagaatttgtgttgggctgcattcaaagctgtcctgggctgcatgcggcctgttggttggataaagctgctctatagtcactntacagacagggaaactgagtcccagaaagcctcaggtggtggagtctttgtataagaagcagtaagaccactgttaggtaagagcaagtaattctaagaaggctttctacatcaaagcctgcattctcccaacaaacatttactgagtgtctact

SEQ ID NO: 18658 - DNA, 622 bp, Homo sapiens
agggcgaattgggccctctagatgcatgctcgagcggccgccagtgtgatggatatctgcagaattcgcccttagcgtggtcgcggccgaggtactttttttttttttttttttttttttgggaaatgaatgtttatagcagcattagtcacaacagccaacaagcagaaaaaacctaaatgcccatcaattgaatggacaaacaatatgtggtatattcatacaatggaatattatgcagtcataaaaaggaaagaaatactaatacatcaacaaggatgagccttgaaagcattatgctaagtgaaagaagctgggcataaaagaccacatattgtatgattctatttaaatgaaatgtccagaataagcaaatccatagagacagaaagtagacgagtagttgtcgggggctggtaggaggggataatagggagtgatagctagggatatggggtttctttacgggagggagcttaaaaacgttctgcaattagtgatgattgctgcacaactttgtgaaaatgaaaaaggtaaattttatggtgggtaaattttatctcaattttaaaatacatttaatgaacacctgctatcagcacaacagactttcctaagccct

SEQ ID NO: 18659 - DNA, 611 bp, Homo sapiens
cgactactatagggcgaattgggccctctagatgcatgctcgagcggccgccagtgtgatggatatctgcagaattcgccctttcgagcggccgcccgggcaggtacctaggaggaatatttgctctgtgccatcagccgcgtagaaactagaataaccagctgccatattgtgagctgattatgaagaggaccatgtggcaagacactgagggagatctccagccaacaacaactcataagcaactaagtcttgtgatgaaccactggagtcatctggaaagaggatcctctcaccttcaatctttgaaatggctagagctctgatgacagttggatcacagccttaggagaaacagagagccggggaaatttgtgcccaggttcctttcccacagacattgtcagataataaatatctgtgcgttttctacaacaggctaaagttatggaaaacaaaagttcctcggccgcgaccacgctaagggcgaattccagcacactggcggccgttactagtggaaccgagctcgggaccaagcttggcgtaatcatgggcatagctgtttcctgtgtgaaattgttatccgctcacaatttcacacaacatac

SEQ ID NO: 18660 - DNA, 578 bp, Homo sapiens
  misc_feature 453, 454, 455, 456, 457, 458, 459, 462, 463, 464, 465, 466,467, 468, 469, 470, 471, 472, 473, 474: n = A,T,C or G
ctactatagggcgaattgggccctctagatgcatgctcgagcggccgccagtgtgatggatatctgcagaattcgccctttcgagcggccgcccgggcaggtactggaaggtgatattaaaggtgaacgtgtattataatggggctgtgttgatttctataagtggttcatatttttcctgcgaatttcttaggatgtaaccattactaacgatggtgcaaccatcctgaagttactggaggtagaacatcctgcagctaaagttctttgtgagctggctgatctgcaagacaaagaagctggagatggaactacttcagtggtaggtagactggctaaagaatgatcatttttctaaaaacgaccgactttcagaaagttgaagccataagtgggtcatttgtgctgtgtcagaaataagttacatattctgaatgcccagaagattgagcnnnnnnnaannnnnnnnnnnnngtacctcggccgcgaccacgctaagggcgaattccagcacactggcggccgttactagtggatccgagctcggtaccaagcttggcgtaatcatggtcatagct

SEQ ID NO: 18661 - DNA, 569 bp, Homo sapiens
gactcactatagggcgaattgggccctctagatgcatgctcgagcggccgccagtgtgatggatatctgcagaattcgccctttcgagcggccgcccgggcaggtactttcagaccacagctgcagaggggatcgtggtgaatttcaatgaaaatccatttgaatcttgaggttcagatcttaaaaagcaaaggacatgagagaagtaatattgttgcttgaaatttcattgcttatatctaaaagaaactcctatttttaagagaaatgttgaatctttgcaacgtggtggacgctcccacaaaactttctcctgaaataggagataaatgttggaaagaggcaatgtattgagtatgctgatagaggtggagttcagagacaggcaagcatacataagagtcaggatgtttttcagtattatctttacaaatgagtttcttacagtggtcaatgacaaaccaatttcattcaaagcttgcttcaataggcaatggtttgatgccaatatgttagctatttactttgaccaccgtatgcattaaaaagaagaaaaattaagaatactc

SEQ ID NO: 18662 - DNA, 445 bp, Homo sapiens
ttagggcgaattgggccctctagatgcatgctcgagcggccgccagtgtgatggatatctgcagaattcgcccttagcgtggtcgcggccgaggtacgctgattgttgctaactgtcctccgggggaacttcaatttagtggtcagcctcaggtgtgtgccattgtaacaaatagcagttaagcttcatattgggtggacaaaagtttccacccactttcagacagttacaaagatatgtagctacactgagcataaaaggaggaaaattgatgaacactatggacagaaagcaggtgaattgctagaactttggctggtttgcttgggttggttgcttaaagattaaggaagaatggaaatagctgagccatcttactacttagtccctcctatagtctgtcatgccaaccttagatccctttggagatgacactaaaagtaat

SEQ ID NO: 18663 - DNA, 475 bp, Homo sapiens
actatagggcgaattgcgccctctagatgcatgctcgagcggccgccagtgtgatggatatctgcagaattcgcccttagcgtggtcgcggccgaggtacaaaaattagctgggcgtggtggtgggcgcctgtaatcccagctactctggaggctgaggcaggagaatcgcttgaacctggtaggtggaggttgcagtgagctgaggccgtgccattgcactcccagcctgggcaacaagagtgaaactccatttcaaaagaaaggaagaaaaaacaaaagcaaaaacaagaaaaacagaacaatttattgccccataaggctacctttgatgtatcaaagtaaaagaaagcatgacaaaaatcagttatgctagaaaagagataacttacggaagttcacttaagggaaatacaacaaaatgctctttgtttttagtagaaaattaaagtatgggtgtggatttttatccccct

SEQ ID NO: 18664 - DNA, 570 bp, Homo sapiens
gactactatagggcgaattgggccctctagatgcatgctcgagcggccgccagtgtgatggatatctgcagaattcgcccttagcgtggtcgcggccgaggtactttttttttttttttttttttttttagttttgcttagaattagtaatatgtatctttggtaaattggtatctatattttaattttaaatacagtatatatgcatttaagaaaaattcataacaaggcagttgtgctgtgtcattataaaataattatttactgatttcagtatgtcactctgggctaaaaactccaacaaccagaacttgaacaccgtaacccttctttggcctcgctggactcttctacttgaatagactaaaaactctaaaggcataaaaattaggaagaccaattagctaatcttactctttttgaaattcagaaattaacttttttcatattaaagaagatatcttggctatcgcatataagaaagagttctcctgatggcaacagcatgtcttttctttgatgtccagcacagccacttggtctgatcattgcaatttatttttatatgat

SEQ ID NO: 18665 - DNA, 368 bp, Homo sapiens
  misc_feature 88, 119, 152, 153: n = A,T,C or G
ccctctagatgcatgctcgagcggccgccagtgtgatggatatctggcagattcgccctttcgagcggccgcccgggcagggactttnttttttttttttttttttttttttccctttnttttttttttttttttttttttttttttttttnntttttttttttttttttttttaaaaaggcaaggttgggtaatttttatttttttatttttggaacggaattaactttaaatttggtgtttttggaattttaactttcattcaaaaacccaggggtggggggttctccccttttccagggtttaggggggaggtttccgggggggggtttttttcctaaattttttgggttttttttttttaaatt

SEQ ID NO: 18666 - DNA, 402 bp, Homo sapiens
actatagggcgaattgggccctctagatgcatgctcgagcggccgccagtgtgatggatatctgcagaattcgcccttagcgtggtcgcggccgaggtacaaaactcaaatagatgaacttttaagacaaagtctcagttaacttgtgaaaattgaattcccatcaaactgaatgtaagcatttaatatctaaacatttaatgtggacttccaataaattcttttatagaattagaaagtgggatttactgtagagtgtaaaaatttttttaaaattgttttacactatgtagtaatatttacagttaaattattttgtgcaatatttgaactttatttttgaaactattctttaaagatttattttttaaagcattcattttttttccttgaatagcacag

SEQ ID NO: 18667 - DNA, 461 bp, Homo sapiens
tacgactactatagggcgaattgggccctctagatgcatgctcgagcggccgccagtgtgatggatatctgcagaattcgcccttagcgtggtcgcggccgaggtactggagagtgtctgcaaagagtcctgtgatgtgatctgtctccaggtctctcaggcgtggataccagcacttactctggtggaggtaacaggggtgtgaagtagattctgtgaaggtccttggttgtatttttgttaagtgcgctggttttgtattggctggcctccagccaggagttggcacttacaagagcacatcagctacagttgtataaaactggattttttttaactgaagatccgtgcatatcattacatgttaattttatttcaataaaaataaaaagcatcttattactcatagactgatctcatctcattatttaaactatatctcatatacacattatgttgag

SEQ ID NO: 18668 - DNA, 428 bp, Homo sapiens
gcgaattgggccctctagatgcatgctcgagcggccgccagtgtgatggatatctgcagaattcgcccttagcgtggtcgcggccgaggtacacttgaaaatggaatggaatctccaggagtgagggtttccatggaagccagcactatccttggggacaccactgaccattaacagattaggaagatgtgcccatttttacaacaccagaaaagcagcccagagtttaatgccctgcttcagggcagagaccaagttggggagtcaggaactgaaagctgtcttagccagtttgggggcagggtggggtctcaggcctttggcccctgtgactccaggtataaggcatatatgaaggctagtgagctggggttgggatgggatggcagggtgaaaggtcagcatattcctgcctgcaaacccctccc

SEQ ID NO: 18669 - DNA, 650 bp, Homo sapiens
acgactactatagggcgaatggggccctctagatgcatgctcgagcggccgccagtgtgatggatatctgcagaattcgccctttcgagcggccgcccgggcaggtactccctgctgttccgcaggacctccaccttcgccctcaccatcatcgtgggcgtcatgttcttcgagcgcgccttcgatcaaggcgcggacgctatctacgaccacatcaacgagggggtgagggcctgtgccatccctgaccttggacccgcctgaggggtgacagtggagtagagaagctgtggaaacacatcaagcacaagtatgagaacaagtagttccttggaggcccccatccaggccagaaggaccaggtccacccagcagctgtttgcccagagctggagcctcagcttgaagatgatgctcaaggtacgcgggggtgagatctaaagctgtctgaaccgtttatccatgccaaatcacttactcaaccaggaaggcccacccttggcatttttggaagaagacttttatttcaggtttattttgttctctcttaaatagttaattcattggccccagcttcaaagtgagaaaacaaacaaaaaacagtgagacagaaaaaaaaaactgaatcctacattataaactgttgacta

SEQ ID NO: 18670 - DNA, 279 bp, Homo sapiens
ttgggccctctagatgcatgctcgagcggccgccagtgtgatggatatctgcagaattcgcccttagcgtggtcgcggccgaggtactgcaaacagacaccagagggtgcaagagactgtagactcctgaaaaagaaaccagaaaactttgtctggttgtgaaattacacacataggctcagaaaaaattcatcttctgtaaaaggtcctgagagacctgtcagaatctctagcttgggctgattggcgaagatcttttttcatccaaaagccatctgt

SEQ ID NO: 18671 - DNA, 529 bp, Homo sapiens
  misc_feature 106: n = A,T,C or G
actatagggcgaattgggccctctagatgcatgctcgagcggccgccagtgtgatggatatctgcagaattcgccctttcgagcggccgcccgggcaggtactttnttttttttttttttttttttgggagagacagggtttctccatgttagccaggctggtctaaaactcctggcctaagtgatcctctctccttggcctcccaaagtgctgggattacaggcatgaacaaccacacctggcttgcccccttttattatcataaatgcccctcttcatctcccaaaacatttgggatgccattttattcattcatttctagatgctgacatatacattatgtgtactaaataggtgggttaaatgtggtaattctagttcagtgtcttaccctgaagagaaagttgtaggttggctgttgaaattcattccttagatatgatcagtttgattgcccggctttattgcctttacaggaatgtgatactcagggcttactctatacaccaatgagtcttctttgatcct

SEQ ID NO: 18672 - DNA, 607 bp, Homo sapiens
gactcactatagggcgaattgggccctctagatgcatgctcgagcggccgccagtgtgatggatatctgcagaattcgccctttcgagcggccgcccgggcaggtacctggatgccagcacccatagataactgagggccaatgcatcctaattaggaagggataaaaataaatatatccataaaatataaatatcccccaatatgcctgggacctgctgttggatgtttacagattgactcacaggcctggttggcagtagtccccaaaaaaattaaatcatgggctgctttgcatatgatttcggggcatagtttaaaatataatcattcccatcccaaaaccctgcagttccatctgaataagttcaaatataaacaaaatagagtttaaaggtgtggattcttgaacttgggaagattgtatggcaagtaaggctgaagtgctacaaaataattcctatggagtcatcattaattagcctcctaatgggatcttttaaaaaaaattgcaccagaaggccttcttgtagaacaaatataataaaccgatgtaaccactggcaattaaatcatacacaatatattcggacaaaagctgaggtacc

SEQ ID NO: 18673 - DNA, 621 bp, Homo sapiens
atctatgctcgagcggccgccagtgtgatggatatctgcagaattcgccctttcgagcggccgcccgggcaggtaccaacaagggccaatggaaagatcacaggggccatgtgttcaacgtgaaagtgaggagccggagagagagatggacctgtgggccaaggcctttacagggatccggggtgttacccaaggaactttcctgtggagagttctaattcatgggtttaaaacgagcattcagtggggccatactgtgactaagaggtgatcattaagacatatctatgcagtccatgtggagtgtgggagtctgtggggcaagtcaagtagattgtatctctaaatcccacagggaggtgatcaccagatgtataaggcagatatctgtcttttataatgaaaaactgggaggaagcagaaaagtgtaaattgtgttaagaataactaagccttgcttctggtatgagaaagttaaacatattttcaaaatggataccaaggtgacataaaattacaagaattcactacagcctacataaaaagcaggcgagatctacagagagttccacctgaatcttccactgagtaatggctgtgcatgagtgtgatgaattaatc

SEQ ID NO: 18674 - DNA, 595 bp, Homo sapiens
actatagggcgaattgggccctctagatgcatgctcgagcggccgccagtgtgatggatatctgcagaattcgccctttcgagcggccgcccgggcaggtacagttaaaaagtaagcattgtagtaaatagtggattctctggtgtgtattttttatctcagtgttgaaaattggaaaagaatggactgaagtctaaaaactggaataatgaaggacactaaatgcctttattgtagatactatgtttgtaagtctatagctaagcaacttaagccaaaaaggtctttcaactgaagctttaatcaacttattttggagatgttctcttcccttatctcatgcgtcatccctaaaataataagatacatgggatcaaatagcccttgccttttcaacacaaatcagttggaaaattatggtttgagtcctgttgctgccatggcttctgtttctcagaaatgagtgtgtatgaacataccaatctatgtaataggctacctttttttgtcttctttggaactttgtacctcggccgcgaccacgctaagggcgaattccagcacactggcggccgttactagtggatccgagctc

SEQ ID NO: 18675 - DNA, 518 bp, Homo sapiens
  misc_feature 361: n = A,T,C or G
ctctagatgcatgctcgagcggccgccagtgtgatggatatctgcagaattcgccctttcgagcggccgcccgggcaggtactatgttgaccaggctggtcttgaactcctgaccttgtgatcccctgcctcggcctcgcaaagtgactggattacaggcgtgagccactgtgccagcccacttatattatttcaattgtattaaattcatttttggcccaggatattgtttctattggtaaatgttctgtgtgcacttgaaaagaatgtgtcttctgctcttgcagggttgagtgttctataagggtcaattagaccaagttgattgacagtgttttttctactgtatccttcctgattntctgtcttaatctaccagttcttgagaggggtcttgaaatctctgattgtcaatttgagtttttctccttgaagttttatcagtttttgcttcatatactttgaagctttgtcactgcatatataaatatttaggatggctacgtacttttccacat

SEQ ID NO: 18676 - DNA, 358 bp, Homo sapiens
ctactatagggcgaattgggccctctagatgcatgctcgagcggccgccagtgtgatggatatctgcagaattcgcccttagcgtggtcgcggccgaggtacaaataagcccaccccactaggaactatgttaaaaaaaaattcaagaaagaatttaagggagattacagtgttactgtgacaccaggaaaacttaaacttgtgtgaaataaactggccagcattagaggtgggttggccatcagaaggaagcctggacaggtcccttgtttcaaaggtatgacacaaggtaacccgtaagccaaggcacccaaaccagtttccatacatagaaagttacagctgcttttataccccc

SEQ ID NO: 18677 - DNA, 384 bp, Homo sapiens
gactcactatagggcgaattgggccctctagatgcatgctcgagcggccgccagtgtgatggatatctgcagaattcgcccttagcgtggtcgcggccgaggtacattttgctggggggttcagacaagcaagtatctcttttcaccaaggatggagtgcggcttgggactgttggggagcagaactcctgggtgtggacgtgtcaagcgaaaccggattccaactatgtggtggtcggctgccaggacggcaccatttccttctaccagcttattttcagcacaatccatgggctttacaaggaccgctatgcctacagggatagcatgactgacgtcattgtgcagcacctgatcactgagcagaaagttcggattaaatgc

SEQ ID NO: 18678 - DNA, 634 bp, Homo sapiens
actactatagggcgaattgggccctctagatgcatgctcgagcggccgccagtgtgatggatatctgcagaattcgcccttagcgtggtcgcggccgaggtacagtaggtaattctttggggctttggtttttttttcactcagcataattattttgagattcatccatgttgtttttctgtgtatcatagttcctttttaaaattgctgagtagtattcaattgtatggatatactaaagtatatttgttcctcaattaaaggacatttgggtttccattttggcaattatgaataaagctgctataaacatttacatacagatttttgtaggtttttatttcacttggataaataactaggagtgggattgctggatcttatggtaagcatatgtttaactttataagaaactgccaaactattttctagaatagccacaccattttgcatttccaccagcaatgtatgagactctcagttactcctcattctcgtcagcacttgccattgtcagtttctttgttaaaaattttagctatgtgaacaggatgtggtggtatctaattgtgggctttttaaataccacattttttaattaaaaaaatttaaattggctggatgcaatggctca

SEQ ID NO: 18679 - DNA, 567 bp, Homo sapiens
atacgactcactatagggcgaattgggccctctagatgcatgctcgagcggccgccagtgtgatggatatctgcagaattcgcccttagcgtggtcgcggccgaggtactagcagtttcagttgtctgatgagagttgctctttgcttcccagatcacactttttgttgcatcctgcaggggaaaccaatgctgtgtcctcacatagcagaaggcagaaaagtaacagagcccagtgttgcctgaagcctttttatgaagaacttaatctcattaatgagggaggagccctcatggcttgatcatctcttaaaggctcaccaacatctgaattttagagggagcacattcaaaccatagaaaacctaattgaaaaaaaaattgtctttttttgtaagcagtgcaagaattccttggaagagggagaaagcagcctttgttaagaaaacgctatgacaacccggctgtaaggtggagggtagtgactaggactgagtgtcagactggcaaccagaagctctgaagaagaaggcatttgctctccctgaaaaggagaaggacgtggatg

SEQ ID NO: 18680 - DNA, 177 bp, Homo sapiens
tagatgcatgctcgagccgccgccagtgtgatggatatctgcagaattcgcccttagcgtggtcgcggccgaggtactttttttttttttttttatggaggtactttgatttatgccaaatttttttattgtttgatgctttttgctgctgcttaatcctaccccctttttcaaagc

SEQ ID NO: 18681 - DNA, 446 bp, Homo sapiens
actatagggcgaattgtgccctctagatgcatgctcgagcggccgccagtgtgatggatatctgcagaattcgcccttagcgtggtcgcggccgaggtaccgggaacaaaatacagagctcaagctttcagcggtgctattttattactgccatcaagaaatcatacaccatcttttttcctaaagcagcaggggaaaaaaaaaaacctttctttatgcgtttttaacttagaattattcaagcaaatattagaaatatgtctatgctaataccaagtagcagtttgacccatgcctggagagaagagctttctttgctctctgactacagtgatatataaaagcatctcattaatgaaaaagtacctgcccgggcggccgctcgaaagggcgaattccagcacactgggcggccgttactagtggatccgagctcggtaccaagc

SEQ ID NO: 18682 - DNA, 417 bp, Homo sapiens
tacgactcactatagggcgaattgggccctctagatgcatgctcgagcggccgccagtgtgatggatatctgcagaattcgcccttagcgtggtcgcggccgaggtactgatggaagttttatttcaaatgtaataatactcttcaatagatggggtaaaataaagattgttttcctccccactccccaaccccccagccaaatgaaatggctttggttatgtttctttactttttttttttttttttttaatacaaacaacttggggaaggtagataagtgcaatgggagggaggattgaattgaatagtaaaacgtaagcgtatgtgatttcttactttggaagagaggccctttgttataataaaaaaaaaatcgagaaagagaaaacaaataaaaacaacaacaataaaccaa

SEQ ID NO: 18683 - DNA, 350 bp, Homo sapiens
tgctcgagcggccgccagtgtgatggatatctgcagaattcgcccttagcgtggtcgcggccgaggtaccaagttattaagtaacataatttttaaaatttaaagaatgtgtcttcaactaaaaactttattctttagcattttatttatatttctctgtagggtgttccctgtgacattgtctctttagtttgctctttcaagagatacttacagaagttgagatggctgccctgcatttccagctaatctcttctgctctaaatatttaaaaacagttcttctcaaacattttcattcagatagctttctgaaagttccctatccctctttaccataaattttttaaa

SEQ ID NO: 18684 - DNA, 598 bp, Homo sapiens
ggcgaattgcgccctctagatgcatgctcgagcggccgccagtgtgatggatatctgcagaattcgccctttcgagcggccgcccgggcaggtacattatcagtaataattctaattgttatgttaaattattttgtgccacagaggtaacaacttttcttgtcaattgtgtctttgacagtggcttccctaaaacttttgtcatccatgaacaattgtcttattttgatcctctttagaaggtggtttcataatcagatataaaattctaacagatgctttgaatgcaggtttctgataactttggaagttgtgacatcagaatacaggaaaaattttcaagactcatggagatctgaaatgttcatgaatatcaagcagaacaagaattagctgcattaactaaactcatagaagtctgaagtaatctttttaactttttgcttaaaacgtcgctgatcctttggtttgttttttagagttacaaaaacttttcttttaagctatttacagctgttaacaactgagtgaagtatatgaacagaatttggagcttacttatctttacctgatttctacaaaatttggaaaatgttta

SEQ ID NO: 18685 - DNA, 489 bp, Homo sapiens
ctactatagggcgaattgggccctctagatgcatgctcgagcggccgccagtgtgatggatatctgcagaattcgccctttcgagcggccgcccgggcaggtacgcgggtcatagtgtaaagtttgtgtggtgtttctgctttttgtaatgtttggaacttgcctctgcaggtaaaatcccagaggaatccaaagccctctctttattggctcctgctccaaccatgacaagtctgatgcctggtgcaggattgcttccaataccgaccccaaatcctttgactactcttggtgtttcacttagcagtttgggagctataccagcagcagcactagaccccaacattgcaacacttggagagataccacagccaccacttatgggaaacgtggatccttccaaaatagatgaaattaggagaacggtttatgttggaaatctgaattcccagacaacgacagctgatcaactacttgaattttttaaac

SEQ ID NO: 18686 - DNA, 652 bp, Homo sapiens
  misc_feature 538: n = A,T,C or G
ccctctagatgcatgctcgagcggccgccagtgtgatggatatctgcagaattcgccctttcgagcggccgcccgggcaggtacactagaaaaaaaaacttattgaatggactcaacagcagaatggagataaaggaaagaaatagtgaactggatgatagacaatagtaactacttagtctaaactgcaaagagaaaattgaggaaacaaatgaacactacctcagggacttataggactgtaacaaaagctgacgttatatgatgcatcataagtcctagaaggagaggaaaaaggaatggctctgaaaaatactcaaagaaataatggctgaaaacttcttaaatgtggcaaaaagtatataaacctacagattgaagacagccccaaagaggttaaacccagacaaatccacatgatgacgaacctctgtatggtcaaatttctgaacgtgaaagacagaaaaaaaaaatcttgaaagcagcaaacaatagcaccctacatataggggaaaaacagttctaatgatagcagatntctcagcaaaccaccatggcacatgtatacctatgtaacaaacctgcactttctgcacatgtatcctagaacttaaaattttaaaaataaataatttttgctttctcattaaag

SEQ ID NO: 18687 - DNA, 485 bp, Homo sapiens
ccctctagatgcatgctcgagcggccgccagtgtgatggatatctgcagaattcgcccttaggtggtcgcggccgaggtacgcgggctgggctgtagtgcgctatgctgatcaggtgtccacactaaattcagcatcaatatggcgacctgccatgaacaaaggaccatcaggttaccaaaggaggagtgaactggcccaggttagaaatggagcaggtcaaaactcctgtgctcatcagtagtgggatcacgcccgtcccaatgttttgggaggccaagacgggaggatcacttgaggccagaggttcaaaaccagcctgagaaacagagacagacccccatctccacaaaaaaaaagaaaaactttaaaatttggcaggtgtggtggcatgcacctgtagtcccagctacttcagaggctcaggcagaaagaccactcaagcccaggagtgtcgaggctacagtgaaccatgatcccgtcact

SEQ ID NO: 18688 - DNA, 394 bp, Homo sapiens
agggcgaattgggccctctagatgcatgctcgagcggccgccagtgtgatggatatctgcagaattcgccctttcgagcggccgcccgggcaggtacgcgggttcttagttcttttcaaccagttctatgtggaaagaaaggtattttatttgacagtgatactaacattgaaggagtgtttcctagggcctggctcccgccaagcatctatgggcagcaaatgccctgtttgtccctcacatcagccctgggcagatgtattttcccttttcctgttttactgatgagggagcttaaaatttagggagattaaggacctccccaagatcatagagtttatcaccaatattttactgactctccataatatagagagctcttatcttaaatgaa

SEQ ID NO: 18689 - DNA, 498 bp, Homo sapiens
ccctctagatgcatgctcgagcggccgccagtgtgatggatatctgcagaattcgcccttagcgtggtcgcggccgaggtaccaagattaaggacagagttccctccattgttcattgatttgtaaaccaaaatgtatctgtgacaggtattaatcaattgagaagagttttttatttttatttatttatttatttttttgccaaggttcaggacagatccaggtgtctttctccaaagatgattatgatggtgttaatatttaaaggggaaagtggcctagaggggaacaagggagggtatgatcatattactgtatccacatgttgcaggagaaatggagcaggtacttgttactcttacagatgtctcaattaattttaacctctatccctaatggtgtttaaattttggtaaagaaaaattcattttttctttattttccaagaaatggtaagctatctttgtccctatgggagatgtggacagagaaaacttt

SEQ ID NO: 18690 - DNA, 524 bp, Homo sapiens
  misc_feature 107, 110, 151: n = A,T,C or G
ccctctagatgcgtgctcgagcggccgccagtgtgatggatatctgcagaattcgcccttagcgtggtcgcggccgaggtacaagaaaggaggggatgaagagcaangcngaagatatgagaaaaacatttttatttgattgatgaacccngagtgggtttttttgaaaagataagcagaattgacaaaccttagctagattaagaaatgaaaaaagacccaaatatataacatcagaaatgaaaaaggagacattacagctgataccacagaaatataatggatcataagagactattatgcaacatctctatgccaacaaattggataacctaaaaatgtataaattcctagacacatagaatctaacatgaatcatgaagaaatagaaaattggaactaaccaatagcaagtaaagagattaaaacagtaataaagtcccccatcaaaggaaagcccagcacctgatgacttcactgtacctgcccgggcggccgctcgaaagggcgaattccagcacact

SEQ ID NO: 18691 - DNA, 581 bp, Homo sapiens
ccctctagatgcatgctcgagcggccgccagtgtgatggatatctgcagaattcgccctttcgagcggccgcccgggcaggtacaatgacaggatctcggctcactgcaagctctgcctcccgggttcaagcgattctcctgcctcacctcccaagtagctgggattacaggcacccaccacctcacccagctaatttttgtattttcagtagagacggggtttcaccatgttggccaggctactctcaaactcctgacctcaggtgatctgcccacctcggcttcccaaagtgctggaattacaggcctgagccaccccacccggcctattttcttaaaggggaacaaatgatcttgacaacatattattccataaaaccagtttagggcacaggccagttcctgattagaacacaggacctgtgggagggactatcagagatgcaaaaattacttcaagatgagtgtattggtttcatttgtattgcaaaagttagaagtcattttacaaattaaaaaaacatttttttcttggtagtttttaaaaattaggggattgaaaggatccaggatgggcttt

SEQ ID NO: 18692 - DNA, 588 bp, Homo sapiens
  misc_feature 211: n = A,T,C or G
gtaatacgactcactatagggcgaattgggccctctagatgcatgctcgagcggccgccagtgtgatggatatctgcagaattcgcccttagcgtggtcgcggccgaggtacatgtgctgaaggctttcccacatgcatcacacttatacggcttttcaccagtgtgtattttttgatggttaatggagaatcagaacgccgactaaagcnttttgccacactcatcacatggatttggtttcttcccagtgtggattctctggtgtagggtaagagctgagcactgactgaaagccttcctgcacccgcgtacaggttcttggtccccaaaatgaggcttcccattcactgcaaagagcaagcctggtatatatgaaattgcaaatacatttcttccaaatgatgaatgcttaatctctctcacaaattctttggtgtcagttttaaaacactggatccgaccattttcccggtctgccacacataattggcccaaaagaggcacaagagccaagctgtgaggaacagtgaactggcctggcagaggactgctccctgaaaactcttcttcccactgtgtgatgaac

SEQ ID NO: 18693 - DNA, 511 bp, Homo sapiens
acgactcactatagggcgaattgtgccctctagatgcatgctcgagcggccgccagtgtgatggatatctgcagaattcgcccttagcgtggtcgcggccgaggtaccagaatctctgggatgcagctaaagaagtgttaagacagaaattaatagcactaaatgcccacataaaaagctagaaagatctcaagttaacaacatcacaactaaaatagagaaccaaaaacaaaccccaaagctagcagaatacaggaaataagatcagagcagaactcaaggagacagagacacaaaaaatctttcaaaaattaacaaatccaggagctggttttttgaaaaaaattaatagactgctaactagactaataaagaagaaaagagagaagaatccaacacaatcagaaatgataaaggggatatcaccactgaccccacagaaatacaagcaaccatcagagaatattataaacacctctctgcacataaactagaaaatctagaaaaagag

SEQ ID NO: 18694 - DNA, 534 bp, Homo sapiens
  misc_feature 134, 137, 138: n = A,T,C or G
gtaatacgactcactatagggcgaattgggccctctagatgcatgctcgagcggccgccagtgtgatggatatctgcagaattcgcccttagcgtggtcgcggccgaggtactttttttttttttaggggggtngtnnatatggagaaaatacttgtttattttatatatcttacatttttttattatggaatgttttaaataaaattttagggtattaaataaattcttaaaaaaaaatgtaatcccagcactttgggaggctgaagcgggcagatcacctgaggtcaggagtttgagaccagcctggccaacatggtgaaaccccatctctacttaaaatacaaaaattagcaggctgtggtgttgtgtgccagtaattccagctactccgaagactgaggcaggagaatcacttgaactcaggagccggagattgtaatgagccgagatcgtgccattgcactccagcctgagcaacaagagctaaactccatcatcatcagtccaaagtttttcagagttctatgtgact

SEQ ID NO: 18695 - DNA, 216 bp, Homo sapiens
  misc_feature 109, 110, 111: n = A,T,C or G
gactactatagggcgaattgggccctctagatgcatgctcgagcggccgccagtgtgatggatatctgcagaattcgccctttcgagcggccgcccgggcaggtacttnnntttttttttttttttttttttctgcttcctacttttcaggtttaaatttatcttttttcttctaaaagtatggtttttattcttcttaatttccccctatcttct

SEQ ID NO: 18696 - DNA, 182 bp, Homo sapiens
atagggcgaattgggccctctagatgcatgctcgagcggccgccagtgtgatggatatctgcagaattcgccctttcgagcggccgcccgggcaggtactttttttttttttttttttttttttttaaataaagacggggtttcaccatgttacccaggatgatcttcgatctcctgacctc

SEQ ID NO: 18697 - DNA, 683 bp, Homo sapiens
ctatagggcgaattgggccctctagatgcatgctcgagcggccgccagtgtgatggatatctgcagaattcgccctttcgagcggccgcccgggcaggtaccttaagatattttaaaaataagaaaatgtagtttgtatatgtatgcattcacatatatatatacatactaatatgtaaggttttaacataaaatagcagttaaagacccaatatagggtaagttttaagagtttttcatgtcagaccactagttatgctaccaaaagaataagcaccattcctccagcacagcaacaataacagcagaagttccccacccccaaaaaagtattatcttcaaaatttgtcctaaaataacaattcttttaactttaagaatggtttcaatagtttggttgcaataattttccacagctatgaagcagaaaaaaaaatataaaagtttattcttgggtttaggacttattaagaaaatttcccctcccatttctatcaaattcacctgatcaacgcagggtgatgctaatactcatttatattccatagtatttccaagaaaatatacatgtatgtattcttggtgtcaggaaccaagtcaggaatgtttaaatatacacatacgaataaataataaagccaacttcaaacaaatacattggtgtacccaatagtggatgggaa

SEQ ID NO: 18698 - DNA, 473 bp, Homo sapiens
actatagggcgaattgggccctctagatgcatgctcgagcggccgccagtgtgatggatatctgcagaattcgccctttcgagcggccgcccgggcaggtacgcgggaagcagtggtaacaacgcagactactttactttattttttttttttttttttggataactcagtttcagataaaccatcttggttactgggctttaattgggaccaaattttatttagcttaatatggacactgacacattttggggggtatacattagacatatcagagcagtgtatttctggatcattttttaaatgacctcttctaaaacataactgtcacttacctgaaatgctgcatcctaaaattccaaaattttattgagcaatcgccaaggcctaaagccaactgacttaaaggtaattattttagctaagattaaatttaaagccgtagaatggtttgagctagttttaaaataatg

SEQ ID NO: 18699 - DNA, 190 bp, Homo sapiens
tataaggcgaattgggccctctagatgcatgctcgagcggccgccagtgtgatggatatctgcagaattcgcccttagcgtggtcgcggccgaggtactcctgctactagcccgtcccccagggtcaccatctttaattcttttccttcttttctttggagaggcacaaggagaatttaagggtccatgg

SEQ ID NO: 18700 - DNA, 210 bp, Homo sapiens
gctcgagcggccgccagtgtgatggatatctgcagaattcgcccttagcgtggtcgcggccgaggtacttttttttttttttttttttttttttctttggttttttttcttcagtcaccctcattacctggctgggagaagagccatgaagacagtttttggtgttgagccaaacttgaccagggaaggcggcagtattcccgtgacctt

SEQ ID NO: 18701 - DNA, 300 bp, Homo sapiens
  misc_feature 179: n = A,T,C or G
atagggcgaattgcgccctctagatgcatgctcgagcggccgccagtgtgatggatatctgcagaattcgccctttcgagcggccgcccgggcaggtacgcggggctacatgaaaaggatggtttcttggagcttccacaaacttaaaaccatgaaacatctattattgctactattgngtgtttttctagttaagtcccaaggtgtcaacgacaatgaggagggtttcttcagtgcccgtggtcatcgaccccttgacaagaagagagaagaagctcccagcctgaggcctgccccacc

SEQ ID NO: 18702 - DNA, 220 bp, Homo sapiens
gactactatagggcgaattgtgccctctagatgcatgctcgagcggccgccagtgtgatggatatctgcagaattcgccctttcgagcggccgcccgggcaggtacttgaatattctttgttggtgatgtaaatatgtaatctctgatttatagttaacaaataaaataaattttaggtgagttgaagcagtgatttaaattaacagtgtccctttgaaa

SEQ ID NO: 18703 - DNA, 567 bp, Homo sapiens
gactactatagggcgaattgggccctctagatgcatgctcgagcggccgccagtgtgatggatatctgcagaattcgccctttcgagcggccgcccgggcaggtactttttttttttttttttttttttctgtcccctcttactgtgtattttcaaataacctgtatccaaacttactaattcattcttctgcttgaccagttctgctattgagagactctgatgcattctttagcatgttaattgcatctttcagctctagaatttctacttcattttaaaattatttcaatctctgttaaatttgtctaataggaccctgaattccttctctgtgttatcctgaagatcactgagtttcctcaaggcagttgttttgaattctctgtgtgaaagtttacatctctgtcattctgggattgatcactggtgccttatttagttttttgttgagggttggttttcctggatggtcttaatgcttatggatatttgctgatgtctgggcattgaagaatggggtgtttattttaatcttcacagtgtaaatttgtttgtatccatact

SEQ ID NO: 18704 - DNA, 433 bp, Homo sapiens
agggcgaattgagccctctagatgcatgctcgagcggccgccagtgtgatggatatctgcagaattcgcccttagcgtggtcgcggccgaggtacttttttttttttttttttttatttggcagactaataggtagtaaagtaatatctcattatttttctgatttctaaggagaggcagcatattttcatgtcattttccaaatctgaaagttttcttctttgaaaattttccctattttttttttttttaccatttctctattgatccttatttgtttttcctgcggatttgaaaaaaaataaacatttataaatatcacctcttgatattaatatttttgatatttatttgacagagacagatctggcatttgactcttaatcttactattcatgtctctcttggaagataaattcttaattttggtata

SEQ ID NO: 18705 - DNA, 460 bp, Homo sapiens
gactcactatagggcgaattgtgccctctagatgcatgctcgagcggccgccagtgtgatggatatctgcagaattcgcccttagcgtggtcgcggccgaggtacttagaaataatcaaatttgtttatttgccattgaacactttggcatggttttcttttttctgtttttggtaatctctttcttctagatcagagcttggcaagctgtagtccacagggtggctgcctgtttttgtgaacaaagttttggtgttttgttttgtttccttttttttttttttttttaataagacagggtctcgctatgttgcccaggctggtcttgaactggtagactcaagggatcctcctgcctcagcctcctgcatacctgggaccataggcacatgctactgtgcctggcttcaatttttgtaaacaaagttttattagaacacagccatgctcattcttttac

SEQ ID NO: 18706 - DNA, 605 bp, Homo sapiens
acgactcactatagggcgaattgggccctctagatgcatgctcgagcggccgccagtgtgatggatatctgcagaattcgcccttagcgtggtcgcggccgaggtactatcccagccccccaggttcgcctaatagtcttggctacttccctacagctgctaatcttagcggtgtccctccacagcctggcacggtggtcagaatgcagggcctggcctacaatactggagttaaggaaattcttaacttcttccaaggttaccagtatgcaaccgaggatggacttatacacacaaatgaccaggccaggactctacccaaagaatgggtttgtatttaagggccccagcagttagaacatcctcagaaaagaagtgtttgaaagatgtatggtgatcttgaaacctccagacacaagaaaacttctagtaaattcaggggaagtttgtctacactcaggctgcagtattttcagcaaacttgattggacaaacgggcctgtgccttatcttttggtggagtgaaaaaatttgagctagtgaagccaaatcgtaacttacagcaagcaacatgcagcatacctggctctttgctgattgcaaat

SEQ ID NO: 18707 - DNA, 446 bp, Homo sapiens
actatagggcgaattgggccctctagatgcatgctcgagcggccgccagtgtgatggatatctgcagaattcgccctttcgagcggccgcccgggcaggtacttttttttttttttttttttgcaaaataaatactttattgttttaatatatatatattttagaaatcagcctttgtgtgatatttcaagcatttataagccttttagaagattttttcaaagaacactggtaacaactcaaccacttttgattaaaatatcacacacaaagaaacacaataggagttgaaaaaattataaatgctagaagaaaaattctaataacatttggtggttactttacacatttatttaacacatattaaaccaaatgggaaaccattttccttttttttcataaaaacaaagttttcactgggtaaaactgaactaaaatcattttta

SEQ ID NO: 18708 - DNA, 417 bp, Homo sapiens
tatagggcgaattgggccctctagatgcatgctcgagcggccgccagtgtgatggatatctgcagaattcgccctttcgagcggccgcccgggcaggtacgcggggagcagggaaccgctcagatacccttccacaccgtggaaactttgttcttaccctcttgacgaaaaatcttgctgctgctcactctttgggtccacaccacctttaagagctacaacgatcaccacgacagtctgcggcttcattcttgaagtcagcgacaccacaaacccaccagaagggagaaactccagacacatctgaaggaacaaactccagacacaacatctttaacagctgcaacacacactgtgaaggtccacggcttcattcttgaagccagcgagaccacgaaccctctggaaggaaccaac

SEQ ID NO: 18709 - DNA, 139 bp, Homo sapiens
cgactcctatagggcgaattgggccctctagatgcatgctcgagcggccgccagtgtgatggatatctggcagattcgccctttcgagcggccgcccgggcagggactttttttttttttttttttttttttttttttt

SEQ ID NO: 18710 - DNA, 399 bp, Homo sapiens
tacgactcatatagggcgaattgggccctctagagcatgctcgagcggccgccagtgtgatggatatctgcagaattcgcccttagcgtggtcgcggccgaggtacttttttttttttttttttttttttttttttaaaaattggatgtggaaaattgggtttatttatatgagcccttacttctttttttaaatacaaacatttaaataataaatttccctttatgcaccatttcactgcattcaatacattttcgtgtgttgggccctcattctacataatcttaaagtattttctaattgactttgtagtttcttccttgtcccattatttatttaaaagtgtgctgtttccttctgttattttgaggttctggattacccgcgtacctgcccggg

SEQ ID NO: 18711 - DNA, 600 bp, Homo sapiens
  misc_feature 176: n = A,T,C or G
tacgactcactatagggcgaattgggccctctagatgcatgctcgagcggccgccagtgtgatggatatctgcagaattcgccctttcgagcggccgcccgggcaggtacgccgggtagctacactacaccattctagggtcattgctgccactacacgtggcttcatagagcctngatactgccaatttttatcatctcagagtccagagtcaccactgcatggtgccttatccccccaggatctaagttgtctctgagccctgttgggtctggttcccaaactgatgcctaccctgctccctaggtccaaactttcagagcatttctagggcagaagtgctctgaaggtttgcacctggggagcagggtagactagaacagagtctcagctacaaccaaattcccttggtctgaactgcgagggtgcctcagagtcatgggtgctgcttctgtgggcaatctatatccaacactgtcacagagagtggatctgcacctcaggacccatatgccacagtaggttcatgaggacctgagcctaggacctcagcttcacagctgctctgaataactgcaccctggaacccagcactagtgt

SEQ ID NO: 18712 - DNA, 203 bp, Homo sapiens
tacgattcactatagggcgaattgggccctctagatgcatgctcgagcggccgccagtgtgatggatatctgcagaattcgcccttagcgtggtcgcggccgaggtactcaatatttatgcacaatttgctagtttaggagtagacaggctggtagaggcttactggaacatgaaacgtcggcttggattaacgccacagcta

SEQ ID NO: 18713 - DNA, 407 bp, Homo sapiens
tgtatacgactcacttagggcgaattgggccctctagatgcatgctcgagcggccgccagtgtgatggatatctgcagaattcgcccttagcgtggtcgcggccgaggtacttttttttttttttttttttttttttaaagttcctcttgtggataacgcgtggcctttcaggctgagaactatgaaacaggcaggctactagttaggattaataaaaaaataccttgatctgctgtcttcgtagcatggcaaattctctcatgtctcggaatggctgtagtaaatactgatagagttcggttgtagcttctgcaaggctgctgtaggcttcatcctccaactgatacaagtccagaagctccaccatgctctctgtattcttgtgcttatccaagagctcctggat

SEQ ID NO: 18714 - DNA, 350 bp, Homo sapiens
ccctgtagatgcatgctccagcggccgccagtgtgatggatatctgcagaattcgcccttagcgtggtcgcggccgacgtacacggggagtgtagccggccggtgagagcgcgcgtggctgtcggagataaaatgtttttataaactctttcaactccattttgctttttacgtctaacgagaaacgacaatcactgttttatattgattaaagtccagttacactttggcaatggctgccattcggaagaaactggtgattgttggtgatggagcctgtggaaagacatgcttgctcatagtcttcagcaaggaccagttgccagaggtgtatgtgcccacagtgtttg

SEQ ID NO: 18715 - DNA, 493 bp, Homo sapiens
gactcactatagggcgaattgggccctctagatgcatgctcgagcggccgccagtgtgatggatatctgcagaattcgccctttcgagcggccgcccgggcaggtacttttttttttttttttttttttgctctttttgtttttttttttttaatgaactgcttggattgacaaaatactagcctggccaacatggcaaaaccccatctttactaaaaatacaaaaattagctgggcgtggtagcatgcccctgtaatcccaactacttgggagactgaggcatgaaaatcgtttgaacccgggaggtggaggttacagtgagccgaaatcgtgccactgccctccatcctgggcaactgattgaggcaccatctcaaaaaacaaacaaattaaaaaaacaaaattagaatatttatcaaatcctttacttaccaatgaaaaactttttcctaaaatgttggggaaatcataatattcattataataacccac

SEQ ID NO: 18716 - DNA, 613 bp, Homo sapiens
  misc_feature 150, 163: n = A,T,C or G
ccctctagatgcatgctcgagcggccgccagtgtgatggatatctgcagaattcgcccttagcgtggtcgcggccgaggtacaaatttaattacatcatcttactgaacactactgactttactgaatctattccttgatttgatgttancctttcatacaanatcacagtagagaaaacgtatgaatttttttcaatacagccaagatgctggcttctcacctgtgaatatagttttcacgattggtaggtagatcataatttataaccaaagacacttgttgcacatcaatcccgcgagcctgaaacacaatggcatgttttaaaaattgattcaaaaaaacttgacacctgtcatgtaggccacaaaatagtagcgaactatactaagtggtatagcccactgtggagtgtggtcttttactcttccaaatagcccaagttggcaaaggttacttaaaaacctgccccccaaaaagctaactttttggtagatttttaaaaagcattaggagacttaccaacaagtcagtagggatcagaacacgacttgaccctgaccggaattccctcatgataacatctttttccttctgggccatgtcaccatgct

SEQ ID NO: 18717 - DNA, 580 bp, Homo sapiens
agggcgaattgggccctctagatgcatgctcgagcggccgccagtgtgatggatatctgcagaattcgcccttagcgtggtcgcggccgaggtacgcgggtgacatgaagagtgtgaagcatagatccaacaaagacaatctgagagaggccttcagaattgcagaacaagaattaaaaatccccagattgctggaaccagaagatgtggatgttgttgatcctgatgaaaagtccatcatgacctatgtggcacagtttctgcagtattccaaagatgcccctgggactggagaggaggctcagggaaaggtgaaagatgctatgggctggttaactctgcaaaaggaaaaactacagaagttgctaaaggattcagagaatgatacctactttaaaaagtataatagcctgctgtcctttatggagtcattcaatgaagaaaaaaagtcctttttggatgtcctgtcaataaaacgggatctggatgagctggacaaggatcatttacagttgagagaagcctgggatggcctcgatcaccagattaatgcatggaaaataaagctaaattatgcctt

SEQ ID NO: 18718 - DNA, 452 bp, Homo sapiens
agggcgaattgggccctctagatgcatgctcgagcggccgccagtgtgatggatatctgcagaattcgccctttcgagcggccgcccgggcaggtacgcgggggcgtgctcccaacgtcgccccggtttgacgcacacggcaccaaactgtttgatttaattttggatgagatcgttcttgcagcaagatgttaataagacaaaatttaaaccttaatgggtaaaatgggcttgccaacaatatggatgatttgaagataaacaccgatattactggtgctaaagaagaactcctagatgacaacaattttatctcagacaaagagggcggagttcataagccaaaagattgtcaaacatcatttcagaaaaataatacgttgactctgcctgaagaactgtcaaaggacaaatctgaaaacgccttaagtggaggccagtctagtctattt

SEQ ID NO: 18719 - DNA, 486 bp, Homo sapiens
  misc_feature 72, 73: n = A,T,C or G
cgctctagcggccgccagtgtgatggatatctgcagaattcgcccttagcgtggtcgcggccgaggtacttnnttttttttttttttttttttttttctgacagtctcactctgttgcccagactggaatacagtggtgcgatctcggctactgcaacctccaactccctggttcaagtgattctcctgtctcagccgcccaagtaacagggattacaggcacgcaccaccacgcccagctaatttttgtatttttagtagagacagggtttcaccatgttggccaggatggtctcaatttcctgacctcgtgatctgcccacctcggcctcccaaagtgctgggattacaggtgtgagccactgcgtccagcctggtgaaattacttttatgcattcatttcatatttcttaaactagcaaaacttgtaaatgcacagtttttatctaccctgagaaacaaaaatttaccttttggcatacatga

SEQ ID NO: 18720 - DNA, 388 bp, Homo sapiens
ccctgtagatgtatgctcgagcggccgccagtgtgatggatatctgcagaattcgcccttagcgtggtcgcggccgatgttctcttcacattcacttactccttagcaaagattgctcttgaatggagaggttgcggaaagagccaaagccaattgaagaagtgagaaacttacaggtttgaggaatggtgaagtcagcgaacgatctagcctgcttagatgatgaacaggcaaagtcagagaaggaaccacagtgagagaattggcagatgcccctaattaaatcacacaactcagacacacacacagacacacaaatattcatgcgttatacccatttcaagtactggatatttaattcattctatgcaatgaacagtcaaatgct

SEQ ID NO: 18721 - DNA, 450 bp, Homo sapiens
  misc_feature 372: n = A,T,C or G
cgactcactatagggcgaattgggccctctagatgcatgctcgagcggccgccagtgtgatggatatctgcagaattcgccctttcgagcggccgcccgggcaggtaccatttgcctcccgggctcaagcgattctcctgcctcagcctcccaagtagctgggattacaggcacctgccaccatgcccggctaatttttgtaattttagtagagacagggtttcaccatgttgcccaggctggtttcgaactcctgacctcaggtgatccacccgcctcggcctcccaaagtgctgggattacaggcttgagcccccgcgcccagccatcaaaatgctttttatttctgcatatgttgaatactttttacanattaaaaaaatgatctgttttgaaggcaaaaatgcaaatcttgaagttaagaaggcaaaaatgtaaaggagtcaaaac

SEQ ID NO: 18722 - DNA, 529 bp, Homo sapiens
acgactactatagggcgaattgggccctctagatgcatgctcgagcggccgccagtgtgatggatatctgcagaattcgcccttagcgtggtcgcggccgaggtacaacacattctttttttaaatttattttgttagagatggcctcttgctgtgctgcccatgctgaagtgcggcggtgcaatcacagctcactgcagtctcaaactcctggggttagggaatcctcccaccttagcctcctgagactgtatctttcttatagacagcattcattgaaaatagttctataaaagtttataaccaacataattacaaagagttttaaagacttctactgaaaaatcacaccttcctaatccagtaggtttttttttttcagatgaagaatgcattgcttttggggatcataaccaaattttttttttttttatttgttaagagacaggggcttgctctgtcacccagcctggaatgcagtgggacaattacagctcactacagtctcaaactcctgggcccaagaaat

SEQ ID NO: 18723 - DNA, 306 bp, Homo sapiens
agggcgaattgggccctctagatgcatgctcgagcggccgccagtgtgatggatatctgcagaattcgccctttcgagcggccgcccggccaggacagcgccgcaaaagctaagatgttgaggaagaggagcgacaccccgactgcaatggtgacacttaattcggtggaataatctccgtcggtttcaatgaggacagttgtgccctcaggccctgttatgtgagggtccttagagtgtttggcattgatggcaggagtgattgctgggcgtttggtggttggccatatcttggcgggagatcgc

SEQ ID NO: 18724 - DNA, 514 bp, Homo sapiens
  misc_feature 353: n = A,T,C or G
tacgactcactatagggcgaattgtgccctctagatgcatgctcgagcggccgccagtgtgatggatatctgcagaattcgcccttagcgtggtcgcggccgaggtactaattttgcaaattttctgtttgaagttatttcaagtaaaatgttattcaaagtgatcatgctgggcataagaaagaaaaaggaaaactgattgatgttaataagttatgcggtcatgccatctatactagcttttctggttttctgaccttagcctcttttttgaattattagtgcttataaagagctcaagactttttttttctttttctttacattttacttctaactgcattgatggtctnttctattgattattgtttcaaaattaaatgtctttttttctatgaataaagttaaaagttcccaggcctcatttcagatcagagcattttatgggcattgttataattgttaactctccttgctttctatcttgttctgaagaaaactcttgggcattaca

SEQ ID NO: 18725 - DNA, 624 bp, Homo sapiens
  misc_feature 500, 514, 519, 527: n = A,T,C or G
ctatagggcgaattgggccttctagatgcatgctcgagcggccgccagtgtgatggatatctgcagaattcgccctttcgagcggccgcccgggcaggtaccatttgcctcccgggctcaagcgattctcctgcctcagcctcccaagtagctgggattacaggcacctgccaccatgcccggctaatttttgtaattttagtagagacagggtttcaccatgttgcccaggctggtttcgaactcctgacctcaggtgatccacccgcctcggcctcccaaagtgctgggattacaggcttgagcccccgcgcccagccatcaaaatgctttttatttctgcatatgttgaatactttttacaatttaaaaaaatgatctgttttgaaagcaaaattgcaaatcttgaaattaagaaggcaaaaatgtaaaggagtcaaaactataaatcaagtatttgggaagtgaagactggaagctaatttgcattaaattcacanaactttatactctntctgnatatacantttttttctttaaaaaacaactatggatcagaatagccccatttagaacactttttgttatcagtcaatatttttagatagttagaacctggtccta

SEQ ID NO: 18726 - DNA, 328 bp, Homo sapiens
tagatgcatgctcgagcggcgccagcgtgatggatatctgcagaattcgcccttagcgtggtcgcggccgaggtactttttttttttttttttttttttttcaattgacatcttagctccaaaattaaaagagcatattttaatgggagctggtttaaaacaatttgacataagttagataacagtttggcaaatgtgtctgtgctcagttttgcttccaaatttggacttttagacttattgtcagcctcagaaagaaataagaagctgtgcagataattaaacatttgccttgggggaattatttgtagttaattaaaaccacaca

SEQ ID NO: 18727 - DNA, 195 bp, Homo sapiens
agatgcatgctcgagcggccgccagtgtgatggatatctgcagaattcgcccttagcgtggtcgcggccgaggtactttttttttttttttttttttttttgggtctgttcctctattgggggggccacagtagggtgttttttcaggatggggggaagaaggaaggagtttttgtgagttctattatggatttt

SEQ ID NO: 18728 - DNA, 509 bp, Homo sapiens
  misc_feature 110, 111, 138, 139: n = A,T,C or G
gactcactatagggcgaattgggccctctagatgcatgctcgagcggccgccagtgtgatggatatctgcagaattcgccctttcgagcggccgcccgggcaggtacttnnttttttttctgtttttttagagtattnntatttgtatttttttttttttttatacttcaaaagcaattttcctttattaaaagaatgcttataaaaagttcatttcacttctgcgtcattttttgtggtcactcccagcttacttgcagcacttggccttccctgtgtaacaggtgccttgaattttggtaaagatcgggcaggcagaatagagacattgcgcctccactgctgacgcaattgtaatgatcagatctgtggccaaggcctgtgagaaagttaccacctgaggccatctcagacaaaagttagcagagagtaaacagcagaaggtgggaagttctcatggcgactggcaggcaacacccaggatttcaggaactggggagaggctggct

SEQ ID NO: 18729 - DNA, 416 bp, Homo sapiens
ccctctagatgcatgctcgagcggccgccagtgtgatggatatctgcagaattcgcccttagcgtggtcgcggccgaggtactgtcttactcagctcaggctgctagaacaaagcaccctacactgggtggcttataaagaacagaaattcatgtctcacagttctggaggctggaagtctgagatcaggtactttttttttttttttttttttgccgacaattcttcaatgtgtctcaactttctgacttattacaaacattttttttctttaaacaccagttagtttatttcaggacaagaatttaccatataacactctttttacataaattctgtctccccccacttttttttttttgaagataaccattccttttttttttttaaagcaaactttctttatgcctttggac

SEQ ID NO: 18730 - DNA, 452 bp, Homo sapiens
gcgaattgggccctctagatgcatgctcgagcggccgccagtgtgatggatatctgcagaattcgccctttcgagcggccgcccgggcaggtacgacgagtcctgacaggcctggacctcctaccagaccgcttgtcaaaggcccagttacatctcatggctttagtgtcaaatggggtatgttttgctggtggtggtactgtttttttttttttttttcttttgatagatttttaaaaaatgattcattttagtagtgacaagccaaaaaaattgtggatggtatttgcagaagttttctgcattcggaatatatgtgtgagaaacatcctgagaattctacaaattggaatggacaatttcattaaaatgtaatcgtaatggacaattaaattttagtggaaattaaaatggatgatttttaagagtatctcatttactctatgattttc

SEQ ID NO: 18731 - DNA, 390 bp, Homo sapiens
  misc_feature 37: n = A,T,C or G
tgtatacgactcctatagggcgaattgggccctctantgcatgctcgagcggccgccagtgtgatggatatctgcagaattcgccctttcgagcggccgcccgggcaggtacgtgggtgagttatttattagttgggtttttttgcaatcagaattaaattgtcatcagtttaatatgatcatttataaaatgtcgtttacaagcctcatggtaacctcaaatcaaaagacctacagtagacatacaaaaaataaaaagcatgaaattaaaacacaccataagagaaaaatcacctttatacaaatgaagataaaggaagaaagaagggcgataacaccaaaaaagtcagaaaacaaataacaaaatgtcagtaaagtcctcacatatca

SEQ ID NO: 18732 - DNA, 694 bp, Homo sapiens
  misc_feature 384: n = A,T,C or G
tactatgggcgaattgtgccctctagatgcatgctcgagcggccgccagtgtgatggatatctgcagaattcgcccttgagcggccgcccgggcaggtacatacaaacaatgaaaacaaatcacatccttaggttccatgattaccgagatgatttcccctgccctaagtgctttattatatttcttaaaaaatataggagcagcagcttatcacaagtctccacaagtgcattaatgatggaatcaaaacaacacaacagattcataaggatgagagaactgcagaacaaccagaagtcagttttatgcttcttcttgttctggataattcagaattttgcggtgtgcctgtcgtaaatattgctgctgtttgaagtaaactntaaatgctccttttatggcaacaaacgcaattccacccaagattgtcctttgtaaattagagttaacactactgaacatcaatttaccaactattgtagcaatagtaggaaagacaagggctccacacaagattcgagtagcggaaacatgatctgctaaagggatggcctcagctggaattcgaggaacaggacaacctatccctggaaatatactatttaaaatttgtagtttattcgagtatttgcgccacagtctaagcacatagtcctcccagcgaatcatcttgcctaatatcagcatgacagg

SEQ ID NO: 18733 - DNA, 531 bp, Homo sapiens
tactcactatagggcgaattgggccctctagatgcatgctcgagcggccgccagtgtgatggatatctgcagaattcgcccttagcgtggtcgcggccgaggtacaaagtagcactgatatctcaggtgagtgttccgaaaataatgtctaaggaaccacaggctacttgtttttgacttatgagtcaaggcttcattcagaacttttttttttttttttttttttggaaatgtaaaatatttttatagtttgttcatactatatgaggttctattttaaatgactttctggatttttaaaaaatttctttaaatacaatcatttttgtaatatttattttatgcttatgatctagataattacagaatatcattttatctgactctgtcttcataagagagctgtggccgaattttgaacatctgttatagggagtgatcaaattagaaggcaatgtggaaaaacaattctgggaaagatttctttatatgaagtccctgccactagccagccatcctaattgatgaaag

SEQ ID NO: 18734 - DNA, 399 bp, Homo sapiens
gactactatagggcgaattgggccctctagatgcatgctcgagcggccgccagtgtgatggatatctgcagaattcgcccttagcgtggtcgcggccgaggtacttttttttttttttttttttttttgtttttttttttttttttttttttttttttttttttgccgatgctactattttattgcaggaggggggggtgtatgcaccgcacgccggggctttgaaaaacaagaaggaaggagggagggcagagccccttgctgagcaacaaaggccgcctgctgccttctttgtctgtctcctggggcaggcacatggggagaccccgcgtacctatcaagcctttttttattcttcatgaataactcaaaatcatgcctcattttattttgctctat

SEQ ID NO: 18735 - DNA, 385 bp, Homo sapiens
ctactatagggcgaattgggccctctagatgcatgctcgagcggccgccagtgtgatggatatctgcagaattcgcccttagcgtggtcgcggccgaggtactggggggatgcacttgagtgccatttctgatactgtcattgtatgactactgatgctcgtttatgttgttctttggaagctatagtgagcctgatgttttcacattttaaaaaatgcttcctgagacttctttaagctcctctaacttcttcagtgcatttgggatcaaacttagctcttagatcagcaaacctgacttgcttctacttttgcaatttttcaggccttaccatatttcttatctctgtcttcccacctgataggaaaatcttgcagatttgaa

SEQ ID NO: 18736 - DNA, 374 bp, Homo sapiens
  misc_feature 86: n = A,T,C or G
ccctctagatgcatgctcgagccgccgccagtgtgatggatatctgccagattcgcccttagcgtggtcgcggccgaggtactttnttttttttttttttttttttttttttttatttttttttttttttttttttttttttttttttttttttttttttttttttgggggaaacccttttcaacctttttttccccccgtcccagggccaaaaaatttttttgaaaaaaaaaacctttttttcccctggccccccaaaaaaaaccaatataattccccgcgggttcttttcccaccccccctttttccctaaaacccagaaatttttctcccccccccctttaaaaacccccccccctctctccaaaaaaaaa

SEQ ID NO: 18737 - DNA, 457 bp, Homo sapiens
tatagggcgaattgggccctctagatgcatgctcgagcggccgccagtgtgatggatatctgcagaattcgccctttcgagcggccgcccgggcaggtacagggattacaggcgtgatccacgataccaggtctaacctctcattttattttaaaagaataatgctatttcaaatcctattgctctaaaaataaacttagtttcacagaacactaacattatcaaccaattcctggattttctttgagcagctctagaattaatgttaataccaatttttcttctctgttatttactgtcatgtggtatcccaaaattattaacaagtgaagcaactattattaattttaaaaagattagggttttcgaccttaatgttttcaaacctttataattggacacatctgattaaagctaaaaaaaaaaaaactttattaatctagtagaatggttcatt

SEQ ID NO: 18738 - DNA, 658 bp, Homo sapiens
  misc_feature 27, 531: n = A,T,C or G
tatacgactcactatagggcgaatggngccctctagatgcatgctcgagcggccgccagtgtgatggatatctgcagaattcgcccttagcgtggtcgcggccgaggtacatgtgcacattgtgcaggttacaaataattattatttattgaaaaagaaactacagttgacccttgaacaacacagatttgaactgcgctggtccacttatatgtggattttttttctaaccaaaagaggattgaaaatacagtattctcaggatgcaaaatctgcatatactaagggctgacttttcacatacatgggctctgcaaggacttgcatatgcactgatttgggtttacacgggggtgatgatttggatataggcaggtggtcctgaaaccgaattcccgagcatgctgagggatgactgtatatgtgaataagacttaaattatatttccaaacttgggatggaatcaaacattttagtaacaattctgttgattacacttctatttttaatcttgtaggactgtatttatnttttatttttgtgtttgaatatgtgtgtgtgtatgtgtggtgttccgggaaacaattataaaagatttgtgaataatttgggtgtatgcttttccaaatactccagtttcccttctttttttttttt

SEQ ID NO: 18739 - DNA, 203 bp, Homo sapiens
actactatagggcgaattgggccctctagatgcatgctcgagcggccgccagtgtgatggatatctgcagaattcgcccttagcgtggtcgcggccgaggtacttttttttttttttttttttttttccctgaaggaaggttttcaacttgaatgtatggtgacaagtttttcttgttgtggcaacctacgatctttaatact

SEQ ID NO: 18740 - DNA, 460 bp, Homo sapiens
  misc_feature 87: n = A,T,C or G
tgcagaattcgccctttcgagcggccgcccgggcaggtactggatttatgcaaatgtcttttctgcgtcttttgagatgagtatcangttttttttttttcctttatcatctgatgatgaactaaatgtttccatttgtattaatggaatcctaagtccctctgtgatttctgaaccaaactattcctaggcctgagttttattttgttgacacagaaataaattagaaggccaagcgtggtggcatgtgcctgtagtcctagttgctgaggtaagaggattgcttgagcccaggaattcgaggctgcagcaagctttgattgcgccactgcactccagccttggcgacagactaagacgctgtctcaaaaaaaaacaaaaacgacaaaaaaaaacaaaaccagaaaaaataaacctaaggcaatgaacagcccctgtcaaatgcctgggagggaggcaa

SEQ ID NO: 18741 - DNA, 627 bp, Homo sapiens
ccctctagatgcatgctcgagcggccgccagtgtgatggatatctgcagaattcgcccttagcgtggtcgcggccgaggtacaatacagtgttcaatagtttttattgcagtgatgtttttccaataatttaagtaattctctttctagataatacagttttcataaataatgtttacttgctttctttacattttcaaataaaattaaaatgctcgagcacttcctttcagaaagttataaaattaaaaataattattttaaatgctcattcaaatgtgtctgtatacttgctatgcccctttttctataattccaaactgagactgatttttcagagatttttaactttaataattttaaatctagaatcaagtgaaacagatatgttaaatactgagtctagttttcttccatcttatggagcttcatggaataagaaactaatctagtgcaaatgaagattaaatatttctgggtgatggagagatagtcaacaaatttatttatccatcctctgcacatcagtccactggagcagggagttctacacattaaaaatgtaatgggatcagcctagcattgtttggtgttcttttgctgaattttttagaatgggggtgggggc

SEQ ID NO: 18742 - DNA, 486 bp, Homo sapiens
tacgactgactatagggcgaattgggccctctagatgcatgctcgagcggccgccagtgtgatggatatctgcagaattcgccctttcgagcggccgcccgggcaggtacttttttttttttttggggggttttttaattgtgtttttttttttttttttttggttttttgtttttttgggggccaggccccagggggggggtttttcaggaaaacaagccggggcggggaaggaaaaattcccctttgcggatggggccttttcgggaacgtcgggggggggcccaagccggggggggccgggtaagcttttttgggtcgagacaggggggggggggtttgggttttttccaaaccccaaacgtttgggatttggaagggagaaaagtcctttgttgtgggggccgtgcagaaattggggggggggaccaaaaaaaaacatccgccgggccaggcgggggggggatactggaccgggtctggggg

SEQ ID NO: 18743 - DNA, 522 bp, Homo sapiens
cgaatagggccctctagatgcatgctcgagcggccgccagtgtgatggatatctgcagaattcgcccttagcgtggtcgcggccgaggtacgagtccctctgaaaattgtcagtgttccttcagttctctttgggtcaacttcagtctaagaatggtcttatgccagtcaagctgtacgcgggcaacaacagccagcggctcctcaatgtcatcgacatggccatcttcgacttcttgatagggaatatggaccggcaccattatgagatgctcaccaagttcggggatgatgggttccttattcaccttgacaacgccagatggttcggacgacactcccatgatgaaatctccatcctctcgcctctctcccagtgctgcatgataaaaaagaaaacacttttgcacctgcagctgctggcccaagctgactacagactcaacgatgtgatgcgagaatcactgctggaagaccagctcagccctgtcctcactgaaccccacctacttgccctggatcg

SEQ ID NO: 18744 - DNA, 663 bp, Homo sapiens
actatagggcgaattgcgccctctagatgcatgctcgagcggccgccagtgtgatggatatctgcagaattcgcccttagcgtggtcgcggccgaggtactcagagcttattactagaagttgatgcaacatctaagtattctgttgctatttctaccagcgaagtgggcactgaccataagctacatttgaaagaagatccaaatttaattagcgtgaataattttgaagattgcagtttgtgtcccagtgttcccattgaacatggatttcgtagacaacagtctaagtcaaataatgttgaagagactgaaatacattggaaactgattccaattacaggagggaatgcaagaagcccagaagaccagctggggaaacatggtgagaaacaaacaccaggtgagaaggcttgctttgcttttcttcccagtgtgcccttcttcagagttgctacttgcatttctgatactccatcaatagggcattgacttaaatttttttaattacagaaaatttggacagtagcatatttatttatatgtaaatcattacttgagttgtatccactattcttactataaagagtgttcagataagtcaccgaatatttatataaattttcttcacccatagtagagtctatcttacaatatgatttgg

SEQ ID NO: 18745 - DNA, 366 bp, Homo sapiens
ccctctagatgcatgctcgagcggccgccagtgtgatggatatctgcagaattcgcccttagcgtggtcgcggccgaggtactgagctccacaaacgtggccatggttggtgcggaaatgattctgagtgagcaggtagaagtctcacgtcctgctgtgtccagagttggttccttccagagggttcgtggtctcgctggcttcaagaatgaagccgtggaccttcacagtgtgtgttacagctgttaaagatgttgtgtctggagtttgttccttcagatgtgtctggagtttctcccttctggtgggtttgtggtgtcgctgacttcaagaatgaagccgcagactgtcgtggtgatccgttgt

SEQ ID NO: 18746 - DNA, 515 bp, Homo sapiens
ccctctagatgcatgctcgagcggccgccagtgtgatggatatctgcagaattcgcccttagcgtggtcgcggccgaggtactcaagtaacagagttgaaccttccttttgacagagccgttttgaaacagtctttttgtagaatctggaagtagatatttggatacctttgaggatttctttggaaacgggatatcttcatataaaatctagacagaagcattctcagaaacttctttgtgctgtatgtcctcccgcgtactatcacagaagacaagaggagctcaagagattggaagaaaatgatgatgatgcctatttaaactcaccatgggcggataacactgctttgaagagacattttcatggagtgaaagacataaagtggagaccaagatgaagttcaccagctgatgacacttccaaagagattagctcacctttctcctaggcaattataatttaaaaaaaaaaaggccactaactggcctctgtaaaagatgttaacatttcta

SEQ ID NO: 18747 - DNA, 637 bp, Homo sapiens
actatagggcgaattgggccctctagatgcatgctcgagcggccgccagtgtgatggatatctgcagaattcgccctttcgagcggccgcccgggcaggtactttttttttttttttttttttttaacagcatagcaaggagtctttactaggatggaggcaggggatgcgagggcaggtccagagcaagtagaatgggccaagaccatgccatggcacgccaccctgcgcgacaagagcaaaactgtcaaaaaaaaaaaaaaaaagaaaatgagttttaaagtgatggcagtaagcttatttgagaggataaaccctcttccaacttgtggagataccccaaagcagttgatgtggaaagtccttggcgtcgccctcctcctcttggagaatatttgtccaatctctctccccgaggctgacaacaacgccaaaccccagatactccggactcgtcctcaccccccgcccaggagcagcgagaccgaggtggcggcggagatccagggcaggaaaaggcccccgcgtacctcggccgcgaccacgctaagggcgaattccagcacactggcggccgttactagtggatccgagctcggtaccaagcttggcgtaatcatggtcatagctgtttcct

SEQ ID NO: 18748 - DNA, 608 bp, Homo sapiens
ctcactatagggcgaattgggccctctagatgcatgctcgagcggccgccagtgtgatggatatctgcagaattcgcccttagcgtggtcgcggccgaggtactttttttttttttttttttttgaaaggtgatgatgcagaggattttattaggcagtggaagtagctctcagcagaaggggagctgaaaggggggtgcaagaagaaggtgatctttccttgaagcctggtcgtctccatctgggctcctctccaaagttgtgccgtctgaagttaagtcacatctatccatagtctcagatgcccagttgcttcttcacctcttgatattcagctgcttgtgttgctctgccagctgaagtctgttgtgggcacagaataggggcagacttatgatgtgattcaggttacagaacttgaggtcagaggattctcctgaatgatgtagaggctcccaatcaaatcacaggagtccttagaatggagaatctttttggctgcttctctgtgccacctaaatcagagtagcttcatttttgtagttgctcccagcatcaacttctccttgataaactaggtggtgagtccatgaggtgactggcattga

SEQ ID NO: 18749 - DNA, 143 bp, Homo sapiens
  misc_feature 85, 86: n = A,T,C or G
ccctctagatgcatgctcgagcggccgccagtgtgatggatatctgcagatttcgcccttagcgtggtcgcggccgaggtacttnntttttttttttttttttttttttttttttttttttttttttttttttttgggttttg

SEQ ID NO: 18750 - DNA, 403 bp, Homo sapiens
tacgactcactatagggcgaattgggccctctagatgcatgctcgagcggccgccagtgtgatggatatctgcagaattcgcccttagcagcggcccggccgacgggcacattcagaatctgacttcttcccaccacccccactgctaccactctagtccaaccagtaacatctatccctgaactattctcattgcctgggaattactcatcttacctcagctgctgcccctctacacaggagctagtgattattctaaaatataagtctcattgatgcattctctactcaacacaatcttacttcctatctctgacagaatgaaattcactctttaacataacttacaacaccctattcattccagaagcgctggaattatctggggatggtgctggaggcc

SEQ ID NO: 18751 - DNA, 550 bp, Homo sapiens
gactactatagggcgaattgggccctctagatgcatgctcgagcggccgccagtgtgatggatatctgcagaattcgccctttcgagcggccgcccgggcaggtacagcagtagcagttcatacatatctgatatgctttcacaccaggattcagtaaacaacaataaatataatttcccctcttcaaaacaaaaaatggatttatacggaaaaagggttaatttacttggggtttatcagcacaccatttttaatgtgctttgaaagaattaaaaaccatgaaactgtattcactgaataccggtccatagttatattttttcttttaacgtggcttaaatacatacatcatgtctttctattaaaatccttaaatctatggggatgtgtggtagataagactatattaaaaatttttcctcattaacaatttcattaaattaaaaaaaaatctgacatttcccttaaatgttaagttgaagcctgatctacactgctgtgtcctgtgaaatgaacctaattttccgagtgaataggaacgcctgagtg

SEQ ID NO: 18752 - DNA, 468 bp, Homo sapiens
tatagggcgaattgggccctctagatgcatgctcgagcggccgccagtgtgatggatatctgcagaattcgcccttagcgtggtcgcggccgaggtacttttttttttttgttttttttttttaattttgaacaactgaagaatactaaatcagagagtagctgaagcctctgccccggtgaccattgtcagccagggacaggccttgaacaactcttttccctgttagatgtaaagttagactagtgcttagtagctctgaataaatacttgtctctgtcagtaaagtgtctgcattaataataaatattaattatatgggacagttttgacagttggaactgcctgtcttcatggaaaaattcagaaattgtttaaattgggaacatttttgccttttttattgagtagtatagttcctatattaactttgttattggtggagttgacctcactttaattagaact

SEQ ID NO: 18753 - DNA, 409 bp, Homo sapiens
aatagggccctctagaagcaagctagagaggcagccagagagaaggatatcagcagaattagccctttagagcaggccgcccgggcaggtacttttttttataataaaaaataaaattaaaaaatattaaaaaaaatattataaataaaaaatttaaaataaatttaataaataaaaaaaaaaaaaaaaaaaataaaaaaaataaataaaaaaataaagaaaaaaaaaaaaggggataaaattaaaaaaaagggggaaaaaaaaaaaaaaaaagggggggggggaaaactttttccaaaaaaaaaaaaaaaaaaggggggggaaaaaaaagggggatgatataataaaaaaaaaagaaaagagggggaaaaaaaagaagggggaaaaaaaaaaaaagggggggggggaa

SEQ ID NO: 18754 - DNA, 247 bp, Homo sapiens
  misc_feature 85, 86, 103, 104: n = A,T,C or G
ccctctagatgcatgctcgagcggccgccagtgtgatggatatctgcagaattcgcccttagcgtggtcgcggccgaggtacttnntttttattttttttttnnttcccacgacttttgcagacaatttttcaacatgtcttaactttttgacttattcacattttttctttaaacaattagttaatttatttcaggacgagaatttactatataacactctttttacataaattttgcctcccccg

SEQ ID NO: 18755 - DNA, 600 bp, Homo sapiens
  misc_feature 181, 468: n = A,T,C or G
gactactatagggcgaattgggccctctagatgcatgctcgagcggccgccagtgtgatggatatctgcagaattcgcccttagcgtggtcgcggccgaggtacctattattatttcaaatttaaaaacttcttcttttttaagagatagggtatcactatgttgcccaggctgatcttgnctcttggcctcagatgatcctcctgcttcagggttaccttccctgaccactgctgcctccctcccagcatttgccagggactgtcattgccttagtttattttttctgttttgttttttttttgtcgtttttgttttttttgagacagcgtcttagtctgtcgccaaggctggagtgcagtggcgcaatcaaagcttgctgcagccttgaactcctgggctcaagcaatcctcttacctcagcaactaggactacaggcacatgccaccacgcttggccttctaatntatttctgtgtcaacaaaataaaactcaggcctaggaatagcttggttcagaaatcacagaggggactagtattccattaatacaaatggaaacattaagctcatcatcagatgattaaagggaaaaaaaaa

SEQ ID NO: 18756 - DNA, 623 bp, Homo sapiens
tacgactcactatagggcgaattgggccctctagatgcatgctcgagcggccgccagtgtgatggatatctgcagaattcgcccttagcgtggtcgcggccgaggtactcacctcagacataaaaagttatttacctaagtctcttctatctaacagcatagagttacccaaacaaggccaataaagaccctttcaatatccttttcttaaatttggctctaaaatgactgttaataatggtaataaatgtctttttattaaacagacaattttatcttatgcaatttagggaaataaacataaaatctacctttaaatgaagaaaataataatttcccactctaactatggctgattcattccctgagcatgaatcccattttaccctcattgtttttaactataaactgagctgaaatctgctcacaggtgaaactagtattttagatggagaatgatattaccaagtaatcatatttattactttttgtagtaattatttctactcactggggcatttaatgtttcatctgtaactctctatcacaatgccctctatagaagcagcaatagtgaaaaacataactacactttggggaaaaaaaaaaaaaacgggaaaaaa

SEQ ID NO: 18757 - DNA, 490 bp, Homo sapiens
ggcgaattgggccctctagatgcatgctcgagcggccgccagtgtgatggatatctgcagaattcgcccttagcgtggtcgcggccgaggtactcccaaagcccttgccatgtaaatgccaactatgtctgtgtgaaataataacttggaccatcttaaggctttttttcacaaagtccttgtggaatttgaaatcatttttgtgactgctgagaatgacatttagagactataacatttccttttattcactttttttttttcagtgtttgaaagatgtatggtgatcttgaaacctccagacacaagaaaacttctagcaaattcaggggaagtttgtctacactcaggctgcagtattttcagcaaacttgattggacaaacgggcctgtgccttatcttttggtggagtgaaaaaatttgagctagtgaagccaaatcgtaacttacagcaagcagcatgccgcatacctggctctttgctgattg

SEQ ID NO: 18758 - DNA, 515 bp, Homo sapiens
ccctctagatgcatgctcgagcggccgccagtgtgatggatatctgcagaattcgccctttcgagcggccgccgggcaggtacttttttttttttttttttttttttttccttttttttttttttttttttttttttttttttttttttcttttttttttttttttttttttttctgggggccgaaaaaaagggttttttttttttttttgtgggccccccggggaaaaaaaattagcctttggccccccccattttttttttcctttcaaaaaaaaatttttttcccccccccaaagattttctccccccaatttttccccttctttaaaaacaaaagtttttttgcccccctaaggttttttttttttttttaaggggggaaaaaatttttggggggtctccccaaaaatctttttcgggggaaaaacaccacttttttaaacccgggggggggggccttttcttttttagagggaactatcccttcccccgaagttttttttttcccggggg

SEQ ID NO: 18759 - DNA, 497 bp, Homo sapiens
ccctctagatgcatgctcgagcggccgccagtgtgatggatatctgcagaattcgccctttcgagcggccgcccgggcaggtaccagggtcaggaagcatgtggttcatcctttggaaatggtagtaggaaaccatacagtctttggcatttcgactacataaaggaaattgtctgaagttcttgaggtctgactcttccatgggttctttctgaagactgcatctcatggtggcttgttcttttgtgtattttgtaatgtgggatggtgagctcaagtggggatcctatgggggtctgagttgcagctgtgtccctccagagcggacctgggaacactggctgtggggaccaccttgtggaatgtctctgcttgtagtttcttcatgtcctatttgaaactgttcaggtgaatgtcctgctgaatgtagaactttatgttttctctttgctggtaagcatcagagacagtggagaggccaaagtgatcactaatgc

SEQ ID NO: 18760 - DNA, 519 bp, Homo sapiens
  misc_feature 453: n = A,T,C or G
tacgactcactatagggcgaattgggccctctagatgcatgctcgagcggccgccagtgtgatggatatctgcagaattcgcccttagcgtggtcgcggccgaggtacacttttattactgattaatttcaaagctttttattggtctgtttagggtatcaattccttcctgtttcaatcttagggggtcatccagtttgtgtgcatagatgtgctcataatagtctctgagggttttttttttttttttttttttgtatttctgtggggtcagtggtaatggccactttgtcatttctggttgtgttttttcatatattctcttttttatcttgattagtctatctagcagtctaccaatcttattcattccttcaaagagctaaattttagttttgttgatcttctgtatggttttttcacatctcaatttcactcattttaaaacccagnttggttatttcttttggtatgggagcattgggattgggtaatgcttggttttctttttttcttttt

SEQ ID NO: 18761 - DNA, 642 bp, Homo sapiens
atagggcgaattgggccctctagatgcatgctcgagcggccgccagtgtgatggatatctgcagaattcgccctttcgagcggccgcccgggcaggtaccgtattacttttctattgcttctttaccaaataaatacaagctttgcagtttaaaacaacagaaatttaattttttatagttctgagggtcagtaacctaaaactgatcttatgaaataaagttaaatcttggggatatgggtgtggacagggctggtttcttctggggctctgatggtaaaatttgcttgcttgccttttctccttctagggagcctgcattccctgcctcctagtggcttgctcccatcactcgaacctctgtttccagcctcaggattcctaatgtgactctgatgtttcatctcccgtttatgaggacgcttctgattgctaagatacatacggtgacactatggaagttaacttgaagattaaaaccctgaaaaatagaaagaatcttctatggtatatcacagagattacaagggcctgaattagagtggtgacattttcatcccttgataatggattaaaaacaattgaatgaagctttggggtgaacttacaggactttatggcaaacttcatatgggagactta

SEQ ID NO: 18762 - DNA, 452 bp, Homo sapiens
aggcgaattgagccctctagatgcatgctcgagcggccgccagtgtgatggatatctgcagaattcgccctttcgagcggccgcccgggcaggcacttgctggttgtttaatgatttttatatggtagaaatatcccagaaatttatttgatgttggcttgaatacattttatataaaaagattgggattgtttgccttggatgcccctggcaaatctcgtgaggcattgaactataaaggggggccaatctggagacattaaaaatggaaatcacaagcccaattttagaactattcttaaagatttgcctctagggaaatgaagccactccctaaaaaatgctaaaagggttggagctactgagggacaacagctgacatttaggagggcatttcatgttctgatccgtgagaacatgtaaatacttaaaaataaaaaatattcagcctt

SEQ ID NO: 18763 - DNA, 636 bp, Homo sapiens
acgactcactatagggcgaattgggccctctagatgcatgctcgagcggccgccagtgtgatggatatctgcagaattcgcccttagcgtggtcgcggccgaggtactttattgcaatacacatctgcagtgaaaaagaagaaagatctcaagtaaatagtctaacttcgtgcctcaggagaggagaagaagatgaagaagaagaggaactaagcctaaaattagtgaaggaaataacaaagattagagtaggaaccaagaaaatacagaatagaaaagcaatagaaaaaaaatcaacaaattttttgaaaagaataacaaaagaattggttttttgaaaagataaacaaaatcaacaaatccttagttaggctaagtaagaaagagagaagactcaaataaacaatatcagaaataaaagaggagacattacaactgatgccacagaaataaaaacatgaggctataatgaacaattctattccaacaaactggataatctagaagaaatgaataaattcacaaaaccttccaatctacgatgactgaatcatgaagaaatacaaagtctgaacagacttataactaatgtggaggtttagtcaataatcaaaaatgttccccaaacgaagaagt

SEQ ID NO: 18764 - DNA, 396 bp, Homo sapiens
actatagggcgaattgggccctctagatgcatgctcgagcggccgccagtgtgatggatatctgcagaattcgccctttcgagcggccgcccgggcaggtacggcaacatcaaccaagatttttccactaactcagaaggaaaagcagaatgagtcaactaatggtaattcagaagtcacacctaatgtcaatcaaggaaggcataacaaattagagtcagctatccattctcctatgaacgatcagcaaatctcacaggagtcaaggaatagtacctcggccgcgaccacgctaagggcgaattccagcacactggcggccgttactagtggatccgagctcggtaccaagcttggcgtaatcatggtcatagctgtttcctgtgtgaaattgtt

SEQ ID NO: 18765 - DNA, 189 bp, Homo sapiens
ctcacttagggcgaattgggccctctagatgcatgctcgagcggccgccagtgtgatggatatctgcagaattcgccctttcgagcggccgcccgggcaggtacgcggggaggcattgaggcagccagcgcaggggcttctgctgagggggcaggcggagcttgaggaaaccgcagataagtttttttc

SEQ ID NO: 18766 - DNA, 397 bp, Homo sapiens
actactatagggcgaattgggccctctagatgcatgctcgagcggccgccagtgtgatggatatctgcagaattcgccctttcgagcggccgcccgggcaggtactttttttttttttttttttttattggctgtcaatctggttgatcagattactaatttctactctactggaagtgatctttagaaaaacaggtctgccatgtttgcattacagagatattaacaataataatgatttttaaaaagtaaaccaaacataaataaacaggaaaagaaaccaccatatttgagtccagtctttgtcctgcctagtgaaacatctgtcttatacctttttgacaggcagaaataaggtccttcacatcgccccatctctctgataaatcagtctatt

SEQ ID NO: 18767 - DNA, 326 bp, Homo sapiens
  misc_feature 86: n = A,T,C or G
ccctctagatgcatgctcgagcggccgccagtgtgatggatatctgcagaattcgccctttcgagcggccgcccgggcaggtactnttttttttttttttttttttttttcagcaaggcaatttacttctgcaaaagggtgctgcctgcataatcatgaacacaggagcacactgaacaaaggaaggaaaaggtttttatccctaacacagtccctacctctgtgtcactcccccaggggctggggttggaccgctcattctaagttgacccgattggctatttgtgaatacttttccaaataaggaagggaagggaagatgtgag

SEQ ID NO: 18768 - DNA, 838 bp, Homo sapiens
  misc_feature 100, 101, 125, 126, 128, 129, 131, 138, 164, 174, 175, 176,184, 185: n = A,T,C or G
ctcactatagggcgaatagggccccctagatgcatgcccgagccgccgccagtgtgatggatatccgcagaaatcgcccctcgagcggccgccccggccnngtcccgggggggagttagccaccnncnngnggggccncactcatttttcctcctatcttccgnggggggaaannnagaccctnnggcattaaccaccacatctttttctaacaccaaatcatttctctctctcttcactcccccaccaccttctgggtcctcttttcatcactcccgaccctcctccttggcaaagcccctctccctgtgtcttcatcctgggcttccctctccatcttatgaatccccaggttcttctccaggcactcatcctcctcccctttctcattcttgccacctattttctcctgcctatataacttggggagccttctcccgcttccttaaaaaaaaaaaaatcacatctcaactcccttgtggatccctgccatttcaccgctctatctctctcgcttatcaaccattaaaacccttccattaaggaagagtaaaattccgagtcgtcaactcagtggtttgtccccaccgtggtcatcttcccaagcccccctggggcccctccatttataaggtccccctcttccacggccacatataaacaccgggaaccgcctccacccttttgacaaaggtttgcccttagcgaggcttccttcttggggaggccccccatttcccaaactcagttttagtaaggacggaaaacctacaaaagggtcccaccccccgccctccggaggggttgaaaaccctccccacagcccggccattttccg

SEQ ID NO: 18769 - DNA, 527 bp, Homo sapiens
ccctctagatgcatgctcgagcggccgccagtgtgatggatatctgcagaattcgcccttagcgtggtcgcggccgaggtactttttttttttttttttttttttttgggacggaatcttgctctgtcacccaggctggagtgcaatggtgcggtctcagctgactgtaacctccgcctcctgggttcgagattctcctgcctcagcctcccaagtagctgggactacaggcacccaccaccacacctggctaatttttttgtatttttagtaaagacggggtttcactatgttggccaggctggtctcgaactcctgaccccgtgatccacccaccttggcctcccaatcttatttgctttacaagtcctgcttcagggttaccttccctgaccactgctgcctccctcccagcatttgccagggactgtcattgccttagtttattttttctgttttgtttttttttttgtcgtttttgtttttttttgagacagcgtcttagtctgtcgccaaggctggagtgc

SEQ ID NO: 18770 - DNA, 380 bp, Homo sapiens
tgcatgctcgagcgggcgatagggagatggatatctgccagcggccgtccgcgcgggcacgcggggcttggcctgttgcttcagcctgagctcggttagggcctcacttccctgcttccacacctcagggaggcctcggtgattttgccagagcctcagcctccatcgctctgtaacctgcgggtattggatgattcgtagctaagacttcgcgacacccttgaagctgagacatgcaacgcttaacattcatggatgcggccatagaattctctccagaagagtggaaatgcctggaccctgcccagcagaatttgtatagagatgtgatgttggagaactacagaaacctggtctccctagctatgtgttctcatttc

SEQ ID NO: 18771 - DNA, 203 bp, Homo sapiens
  misc_feature 171, 172: n = A,T,C or G
ctatagggcgaattgtgccctctagatgcatgctcgagcggccgccagtgtgatggatatctgcagaattcgcccttagcgtggtcgcggccgaggtactttttttttttttttttttttttttacttttttttttttttttttttttttttttttatttttttttatatnnaaggggagggcccaaaaagcaaggttttttt

SEQ ID NO: 18772 - DNA, 464 bp, Homo sapiens
tactatagggcgaattgggccctctagatgcatgctcgagcggccgccagtgtgatggatatctgcagaattcgcccttagcgtggtcgcggccgaggtaccctgcacgcctgctggactcaattcagctgcttcctcagcaagctgccatggcttctattttgcccacagctattgtcaatagtaagtgctcaatgctgtgtacccagctttagaggtgatgggaatttatgggagaaaaaaatgtctactgacaagaaaccaggaacagacctttttccttcagtgttgtggtttcattttatcttttttctttttaaatatttaatttgagaaaatgatgttactttttttttatactttaagttttaggatacatgtgcacaatgtgcaggttagttacatatgtatacatgtgacatgctggtgcgcgggacccactaaactcgtcatctagcattggg

SEQ ID NO: 18773 - DNA, 619 bp, Homo sapiens
  misc_feature 532, 566: n = A,T,C or G
gctcgagcggcgcgtcagggtgatggatatctgcagaattcgccctttcgagcggccgcccgggcaggtacatagatctcatatttaaattaaaaaatggactttttttctagtatcaaaatagttatttttaaaataccttgaaaaactttaatacaatttttaatatattaaatattcacctgaactctcagccatttatctcccatctctctttgctagaatcttgccttaccatcactatcattcttttgtttttttttctttttggcatctttaatgcttatcccagaaaagcattaaaaataaaatatttttctttaagtccacaatttaaaaaaaaaagaaagaaaaaggaaaagccattgacagtatttgacacgacattgaagattcttattaaaccagcctcatcttgtttgcccacatccaaaactctttagtaaatatcagttcttgccctgaaactggtaatactgacccaatagcatcctctagtggccaaactgtagcaaagcacccaatgatgcangaaggttttcgaccttgggttatatggaccttgngtgttggaagtctagatatggaaaccccccaccacaaaaaaaaaaaaattttt

SEQ ID NO: 18774 - DNA, 541 bp, Homo sapiens
actatagggcgaattgggccctctagatgcatgctcgagcggccgccagtgtgatggatatctgcagaattcgccctttcgagcggccgcccgggcaggtacgcgggtatccactcaatacttgtgtctcacttggcaattggcatacgtgactgttcctctatttttccatctacctaatttcacaggatttccagaaggaaaagaagatttacatgcttcatttcaaatatttctgagttttgacaaaggtgccaagaccacacattggagaaaatacagtcttttcaataaatggttctgggaaaataaaatatccacatgtagaagaatgagattacacccctgcgtcttgcaatatacaaaaaccaactcaaaatgaattcaagacttaaatgtaagatgcaaaactatgaaactactagaagaaaacataaggggaatacttcaccacattgggcttggctaagattttttaaataacacctcttaaatacaggcaacaaacgcaaaaatagacaaatggattatatcaaactga

SEQ ID NO: 18775 - DNA, 734 bp, Homo sapiens
gactcactatagggcgaattgggccctctagatgcatgctcgagcggccgccagtgtgatggatatctgcagaattcgccctttcgagcggccgcccgggcaggtacttcaagatgttgcagtatttcacagttattattatttaaaattacttcaactttgtgtttttaaatgttttgacatttcaatacaagataaaaaggatagtgaatcattctttacatgcaaacattttccagttacttaactgatcagtttattattgatacatcactccattaatgtaaagtcataggtcattattgcatatcagtaatctcttggactttgttaaatattttactgtggtaatatagagaagaattaaagcaagaaaatctgaagtattgtcttgtttttaaaaaatacagttcctagtgtttttagaagtcacttaatttgtctcatttttccacctggaaattaggaataatgtagaatgcaaggcagtaatttccttttggaaaggactctgaaggcagaaaagaagggagagaacctcatgggcagaatattataaaaagagtgtcatattccagcatttgaattggaaagagaagagtgaagatccaagttgcattattaatctgccctgtgttttttccttttaacaatcagtttgagctggtgctgttatgagtttctcatcaagatgaaagccctaatatgtaaagtcaaatccgatttaaattttg

SEQ ID NO: 18776 - DNA, 382 bp, Homo sapiens
gtatatgcatgctcgagcggccaccagtgtgatggatatctgcagaattcgccctttcgagcggccgaccgggcaggtacagttataaaaaaaaaaagaaaaagaaaagtttgccaggcctaaagggaaaagtaactggagtgttttaaataatgagcattagttacaggatgaaaaacaggaaatacacaaagaaaaacatgccagaggtaggtgcaggcccatcttatatgagaagcagggttctaggccgggcgcagtggctcaagcctgtaatcccagaactttgggaggccgaggcgggtggatcacgaggtcaggagatcgagaccatcttcgctaatgcggtgaaaccccgtctctcctaaaaatacaaaaaaaa

SEQ ID NO: 18777 - DNA, 541 bp, Homo sapiens
ggcgaattgtgccctctagatgcatgctcgagcggccgccagtgtgatggatatctgcagaattcgccctttcgagcggccgcccgggcaggtactttctttagtgaagtgaatgtatggttttaaggacatacaaccaccggttgacgaggtccagccttgatattcagttgtccacacaacatcattccagctatggcagacgtgttttcctgcattcgttaaggaacaagggtcttgatagggggagccttttatcttaaaggggcagagatacttctctgagtctgagagttgcttttgactttggagatctccacagggtatgacaagacatgcatcgaaggtaatagtttggggtgagcttgacctgtttacattaataatgaggtggtcagccatagaatgaggaaagaagaaggagtaatagaatagatgaaggagagttaaacttttcttagcgttagtttggtagggttttcccctgggataacgacccatgactccggaggtggtgatgctttcttgactggggtgtgat

SEQ ID NO: 18778 - DNA, 457 bp, Homo sapiens
ccctctagatgcatgctcgagcggccgccagtgtgatggatatctgcagaattcgccctttcgagcggccgcccgggcaggtactttatttttttttatttttttcggattttttttttttttttttttttttatttttttttttttttttttttttttttttttttttatttttttttttttttttttttttttttaattttttttttttgggaaaaaacaccaaaaaaaaaaaagggttttattatataaaagaggaaaaaaaaatttttggatataaatataaaaaaaaattgaaaaaaaattttttttcaaaaaaaaaaaaaacaaccattgtaaaaaaaaaaaagggggggccgaagcagtgaaaaaaaaaaaaaaccctttttaaaaattttttttaaaaagaaaaaaatttttaaaaaacaattttaaaaaaaatttttggggaaaaaaa

SEQ ID NO: 18779 - DNA, 587 bp, Homo sapiens
  misc_feature 490, 516, 575: n = A,T,C or G
gcgaatagggccctctagatgcatgctcgagcggccgccagtgtgatggatatctgcagaattcgccctttcgagcggccgcccgggcaggtacgcgggtaacttctttaagcctccatgtttcctcatctgtaaaatgaggataatagatagtatggacctgttgcaaggattaaacataatcagtgtaaagtgttggtcccatgcttgccacataagaaaatatttgtcaacagagtggtagttgtcattaccattgtctcagtttgcctgtaactagttgtgtgatctgagacaaacactaattttgaacttgagtttccccacatgtaaaatgaaagattgataatagaaagtaaatcaattttttctagcattaaaaatagtatgcatttaataaaaatcttattcttaatgatctagcttacctgcaacttgccctagtcactttggcgatcttgtctctaaatagaacctagaaaacacttanatgtgtgtttccttgcaatataactntttctttttttatttagataagtcttataaatgtgggaaaaaattatcttgtgttcctntaatttcatttt

SEQ ID NO: 18780 - DNA, 281 bp, Homo sapiens
  misc_feature 84, 85, 86: n = A,T,C or G
ccctctagatgcatgctcgagcggccgccagtgtgatggatatctgcagaattcgcccttagcgtggtcgcggccgaggtactnnntttttttttttttttttttttttaaagcagaatggggttttgctatgttgcctgggctggtctaaactcctggcctcaagtgatccgcccgcctcagcctcccaaagtgctgggattataggcatgagctgctgcgccaggccttaattttttaaaaacaatgatggggtgggggtgggggacagtccacaaaat

SEQ ID NO: 18781 - DNA, 460 bp, Homo sapiens
acgactcactatagggcgaattgggccctctagatgcatgctcgagcggccgccagtgtgatggatatctgcagaattcgccctttcgagcggccgcccgggcaggtacgcgggggggagcgccagttccgtctgtgtgttcgagtggacaaaatggcgaagatcgccaagactcacgaagatattgaagcacggattcgagaaattcaaggcaagaaggcagctcttgatgaagttcaaggagtgggcctcgattctacaggttattatgaccaggaaatttatggtggaagtgacagcagatttgctggatacgtgacatcaattgctgcaactgaacttgaagatgatgacgatgactattcatcatctacgagtttgcttggtcagaagaagccaggatatcacgcccctgtggcattgcttaatgatataccacagtcaacagaacagtatgatc

SEQ ID NO: 18782 - DNA, 486 bp, Homo sapiens
attgggccctctagatgcatgctcgagcggccgccagtgtgatggatatctgcagaattcgccctttcgagcggccgcccgggcaggtacttatagataagaaaaatattcaaatttattttaggctaaaaagcataatttcaacaactaaaatgctatgctttattatgaattattgatttacttaatatattatttattatatttcaggtttgaagaaactgcagagttactgaaatgtccaaatcactacttgtaggattttctacatgaacttttttctaggactttggttactatacatattgtatattttaagaattctttatacaattttaatatactgcaatactgcagtttttgacaatttggattccatttggtatatgaagtttagcattcattattgaataactcttttaatatttttgaccaatgattatactgctttaccttgtgtcactttttttttaggaaaaactcatg

SEQ ID NO: 18783 - DNA, 606 bp, Homo sapiens
tacgactcactatagggcgaattgtgccctctagatgcatgctcgagcggccgccagtgtgatggatatctgcagaattcgcccttagcgtggtcgcggccgaggtaccaggatagtggggcactgttataaagatacttgaaaatgtaaaaagaactttggaactggttagcaagtagaggttggaacagtttggaggggtcagaagaagataagatgacgcaggaaagtttggaacttccttgagatttttttgaataattttgaccaaaatggtaatagtgatatggacaagaaagtccagggcgaggtgttctcaggtggagatgaagaacttattgggaactggagtaaatgttattcttgctaagctttaggaaaagactggtggcattgtgcccctgttctagggatctgtggaactttgaacctgggagagatgatttagtgtatctggtggaagaaatttctaagcagtaaaacattcaagatgtggcatggctgcttgtaacaccctagctcagatgtgtgaggaaagaaataaacctaagttggaacttatatttaaaggggaagcagagaaattaggaaattttgcattgtggt

SEQ ID NO: 18784 - DNA, 666 bp, Homo sapiens
tctagatgcatgctcgagcggccgccagtgtgatggatatctgcagaattcgccctttcgagcggccgcccgggcaggtacggtttccttcaagaccaacacggggtatcactgagtgaattttcacagcgctcagtgactgctggtcattaaatggggatgattgtcatcagtataagtatcacactatttgtcctgctaaatgcaagttaaaagatacttatggatgccactaccacatattctgacaaataagggaaacactaggcttttaaaagattcttagagtgttttccctatattgcactttctagataacacaattttaacaatgatataatgtgatcttggttctagacacagcagtggggaacacatgaatttacctttttcttgttccttttcttaaagtttttagtatagtctcaagaatatagcaaggagaaataacaaaatatacatgtgctttgggcttctgaggaaaaaagaccacccacacacatttttaaaagactaaaatagacgtctcttctgctttagccatttcattttcacaactgaaaataaggaactactatatatttgatgtccctaactcattaaacatagcattgccataaatgcactgttctgcggaaaactttttaaaacagtagaacaatttgt

SEQ ID NO: 18785 - DNA, 576 bp, Homo sapiens
ctatagggcgaattgggccctctagatgcatgctcgagcggccgccagtgtgatggatatctgcagaattcgcccttagcgtggtcgcggccgaggtacctatggaccataggcagtcttcagggaccagtgtctccaatttggatccctttctgtgtgtcaggggcatccaatcttttgcttccctgggctgcactggaagaagcattttcttgggccacacataaaatacactaacactaacaatagctgatgagcttaaaaaaaatcccaaaaaaactcataatgttttaagaaagtttacgaatttgcgttgggccgcattcaaagccatcctgggctgcatgcggcctgtgggctttgggttggacaagcttgcatgtgactgagtttgttcttaaactggtaaggaaactttgtcaggcagtatttatttccataagtggtgttttcctacgaatcagcacatggtgaaaaatgaggggctatgtatatttaaggtgcaaaattaaattgggttaaatatcttttctattctgagctttgattttgataccttaaaggaaatatcaacag

SEQ ID NO: 18786 - DNA, 268 bp, Homo sapiens
cccagtctggtgatgaatcctccacagtctggtgagtgtaaatgtatataaatgtatgtatatactttttcccttctccccttcccattaaaatttgtttgttgtatcatttgcttattatatctatattgccatatactcggggtaaagtctgtttacctttaaaagtattgtgtgtttcttttctttcctcacacgtttcccacacagaacacacatatgcaccatggaatactatgcggctacgtgttctcacttgtaaatggga

SEQ ID NO: 18787 - DNA, 692 bp, Homo sapiens
ctagatgcatgctcgagcggccgccagtgtgatggatatctgcagaattcgccctttcgagcggccgcccgggcaggtaccagtcgaggaagagcaaggagaaggagcacatcacgaggaagaagaggatccacacgcggaagccagcgttgttttaatggcctctcttatgtcttcgttgccttccttgatattttcagttgcccccacaactaactggtgaatgctgtcaatctcagcttcctgttgcaaaaccttttccgtgaatatctcttggagtctggaaatctcaaccactctcccttcgatttgcctcacttcatcaaacaagctgttcatttcaccaattagtcgctgattttcctgttcaaacatttgtatttcttctggggataactcatcttcgcctttgccatctccccacgttcccaattcaggttatgtttcagccaaaattttttctggacgttcttcagtggcagggttttcttcagagtcttttgaaggactctgtgaaactttctcagaagatgtggattctcttgtctttgtatttggttctggttccagcttagataatcttttcttatccaccactcttttaactcggatggctctctgttctgaagtaagtttacatactcttttcaagtaatcttcaatgaaatccaaaaacagcgtcctgtgctcct

SEQ ID NO: 18788 - DNA, 569 bp, Homo sapiens
  misc_feature 556, 557: n = A,T,C or G
cactactatagggcgaattgggccctctagatgcatgctcgagcggccgccagtgtgatggatatctgcagaattcgcccttcgagcggccgcccgggcaggtaccagcattccagctccaaccatggctgcaaaggtcacaccaattgtcacccaagagcctctcatcatgaagttcatgagaacaggcgttctgctgattgctatggcagacaaagctgttaaaccaatactccctgctaagtacgcgggtcactctctgggggtgggacttttaatacatcaataacttttaaaactttctaggtcattctgatgtgcagctgagtttgagatctaataagttaaagatactaaaaagaagcaatcgaccaaatccagaatgtgaggcattttataaaacagaaggttcaagttcctcaacaaataaatggcatttttaccaaaaggagtgggagggaatgggaactgtcatagattagaagactgaacagacttatcaaataaatgcaaatggtgaaccatattcggaccccactgaaaaacaacaactgtnnaaaaaaaaaaat

SEQ ID NO: 18789 - DNA, 560 bp, Homo sapiens
gactcactatagggcgaattgggccctctagatgcatgctcgagcggccgccagtgtgatggatatctgcagaattcgcccttagcgtggtcgcggccgaggtactttttttttttttttttttttttcttgagacagggtctcactctgtcactcaggttggagagcagtggtgtaatcacagctcacggcagccttgaactcctgggcacaagtgatcgtcctgtcacagcctcctgagtagctaggactacaggtgcatgccactatgcctggttaattttttaaatttttgtagagacatggtctcattatgttgacaaggctgggatgttccccccacctcctgtgagagtctcattgtcacccaggctggaatgcagtggtgtgatcttggctcactgcaacctccgcctcccaagttcaagtgattcttgtgcctcggcctcccaagtagctgagattacatgcgtgcgtcaccacacctggctaatttttgtatttttggtagagacggggtttccccatgttggccagtctgggctcgaactcctgacctc

SEQ ID NO: 18790 - DNA, 552 bp, Homo sapiens
ctatagggcgaattgggccctctagatgcatgctcgagcggccgccagtgtgatggatatctgcagaattcgcccttagcgtggtcgcggccgaggtactttttttttttttttttttttttttggagacggaatcttgctctgtcacccaggctggagtgcaatggtgcggtctcagctgactgtaacctccgcctcctgggttcgagattctcctgcctcagcctcccaagtagctgggactacaggcacccaccaccacacctggctaatttttttgtatttttagtaaagacggggtttcactatgttggccaggctggtctcgaactcctgacctcgtgatccacccaccttggcctcccaatcttatttgctttacaagtcctgcttcagggttaccttccctgaccactgctgcctccctcccagcatttgccagggactgtcattgccttagtttattttttctgttttgttttttttttgccgtttttgtttttttttgagacagcgtcttagtctgtcgccaaggctggagtgcagtggtgc

SEQ ID NO: 18791 - DNA, 355 bp, Homo sapiens
gcgaatcgtgccctctagatgcatgctcgagcggccgccagtgtgatggatatctgcagaattcgccctttcgagcggccgcccgggcaggtactttttttttttttttttttttttttccagataagaccatttctgagaaattgacaggtgtctataactcacaatatagctttccaaaaatacttaggatctcagtacttttttttttttttttttttttgcagtctgctctttatttgaatggagaatggaaacaggttataagaatatataacatccatgttcaagagtcactgagttctggagggcagagggagcacagaggcctgctgattccaacagggctcctgat

SEQ ID NO: 18792 - DNA, 542 bp, Homo sapiens
  misc_feature 393: n = A,T,C or G
ggcgaattgggccctctagatgcatgctcgagcggccgccagtgtgatggatatctgcagaattcgcccttagcgtggtcgcggccgaggtacttgaaatcatcactaatgagacagcaaatatgttagacttgctggcccagcaagccacagaaataaggatcaccatctattagaatagactggcttcagactgcctcctagcccaaaaagaaggattatgtggaaagttgagcctgatgaattgctgcctagaaattaatgataacaggaaagccatcatagaaatagctgccaggatgtggaagatagctcatgtcccagttcagacctggaacccagatggtctccagattccctcttaggaggttggttttcatcctttggtggttntaaaacattaagggtagtgttggctatattaaaaggttgcttaatgttcccttgcctcttaggcctcctcatcagaaacatccaatcaatcacagaatccatcgttaacagaaccacctccactccactgatgactctaaacaagtatc

SEQ ID NO: 18793 - DNA, 378 bp, Homo sapiens
tatagggcgaattgagccctctagatgcatgctcgagcggccgccagtgtgatggatatctgcagaattcgccctttcgagcggccgcccgggcaggtactgagctccacaaacgtggccatggttggtgcggaaatgattctgagtgagcaggtagaagtctcacgtcctgctgtgtccagagttggttccttccagagggttcgtggtctcgctggcttcaagaatgaagccgtggaccttcacagtgtgtgttacagctgttaaagatgttgtgtctggagtttgttccttcagatgtgtctggagtttctcccttctggtgggtttgtggtgtcgctgacttcaagaatgaagccgcagactgtcgtggtgatc

SEQ ID NO: 18794 - DNA, 318 bp, Homo sapiens
gcgaattgggccctctagatgcatgctcgagcggccgccagtgtgatggatatctgcagaattcgccctttcgagcggccgcccgggcaggtacgcggggactagagaagggcgagcggcgcggcagagtgcggcgcagcgcagctcctgaggttatggttatgaacaggattcggattcacgtctttgccaacccaacggggggaggatcacttccagttcccaggtctcaagaacctttgtcttgtgcattcactcatcgtccatgctctcaccctcgtctggaggggcatgagttttgcattaagcatatacttg

SEQ ID NO: 18795 - DNA, 527 bp, Homo sapiens
cgactcactatagggcgaattgggccctctagatgcatgctcgagcggccgccagtgtgatggatatctgcagaattcgcccttagcgtggtcgcggccgaggtacgcgggggacttggccctgggggacaacaagtggcaggaacaggatcctttaaaacagtgtcaaacttctcatgcatggagcatgaattcttactaatagagactgtagtttttttcttgtctttggtaaatataataaaagaccttaatttttcttttttaatgaatggagaaaacatgagaaaaccagatggacctgttagaactgtagtcctccttcatttttggataatgaatcctccacatttaagggatattagatcattcctaccaataaaaaactatttatttaaaaatgaaaactaagcctttgtgtgaatttaaaagtattgtctagtgtgaaaactgatgaaaaataaaatctgaaaagtcaactgcttatatctaccttctttattatgatctggccttttcttctgaaa

SEQ ID NO: 18796 - DNA, 461 bp, Homo sapiens
actcactatagggcgaattgggccctctagatgcatgctcgagcggccgccagtgtgatggatatctgcagaattcgccctttcgagcggccgcccgggcaggtaccttctctccttccctggctctgaacatcattcagaacaggaacatggggaagccagcccagcctgccctgagccgggaggagctggaagcactcttcctcccctatgacctgaagcggctggagatgtattcacggaatatggtggactatcacctcatcatggacatgatcccggccatctctcgcatctatttcctgaaccagctgggggacctggccctgtctgcggctcagtcggctcttctcttggggattggcctgcagcataagtctgtggaccagctggaaaaggagattgagctgccctcgggccagttgatgggactttttaaccggatcatccgcaaagttgtg

SEQ ID NO: 18797 - DNA, 382 bp, Homo sapiens
tagggcgaattgggccctctagatgcatgctcgagcggccgccagtgtgatggatatctgcagaattcgcccttagcgtggtcgcggccgaggtacgcgggggcgtctgccaggagctacggccggaagatggcggcggccgcagagttgtcgctactggagaagtccctgggactgagtaaggggaataaatacagtgctcagggcgagcgacagattccagttcttcagacaaacaatggtccaagtctaacaggattgactactatagcagctcatctagtcaagcaagccaacaaagaatatttgctggggagtacaaagagaggaattttacagctgggctgctggcggtgacatcacatgtcagtagggccctgat

SEQ ID NO: 18798 - DNA, 624 bp, Homo sapiens
  misc_feature 13, 547: n = A,T,C or G
cgactcactatanggcgaattgggccctctagatgcatgctcgagcggccgccagtgtgatggatatctgcagaattcgccctttcgagcggccgcccgggcaggtactgttggttaaatgacaatttatgtggattttgcatgtaatacacagtgagacacagtaattttatctaaattacagtgcagtttagttaatctattaatactgactcagtgtctgcctttaaatacaaatgatatgttgaaaacttaaggaagcaaatgctacatatatgcaatataaaatagtaatgtgatgctgatgctgttaaccaaagggcagaataaataagcaaaatgccaaaaggggtcttaattgaaatgaaaatttaattttgtttttaaaatattgtttatctttatttattttgtggtaatatagtaagtttttttagaagacaattttcataacttgataaattatagttttgtttgttagaaaagttgctcttaaaagatgtaaatagatgacaaacgatgtaaataattttgtaagaggcttcanaatgtttatacgtggaaacacacctacatgaaaagcagaaatcggttgctgttttgcttctatttccctcttatttt

SEQ ID NO: 18799 - DNA, 394 bp, Homo sapiens
tacgactcactatagggcgaattgggccctctagatgcatgctcgagcggccgccagtgtgatggatatctgcagaattcgcccttagcgtggtcgcggccgacgtacttattttgttttgttcatgttctactttctatattgtctttatttttcttggggcattctttgtatgtctatagagtttttgaatggctttaaaggtctttgggtccaacccggcattgactggctcagtgtagtaagggccaaaccgtttctcatacaagaggttggccaccatgctcatgagggtacctcggacgcgaccacgctaagggcgaattccagcacactggcggacgttactagtggatccgagctcggtaccaagcttggcgtaatcatggtcata

SEQ ID NO: 18800 - DNA, 613 bp, Homo sapiens
tacgactactatagggcgaattgtgccctctagatgcatgctcgagcggccgccagtgtgatggatatctgcagaattcgccctttcgagcggccgcccgggcaggtacaatacaatcatagcaattttaaagtaacattaaagagaagacctctagttctgtggcggttttgctttatttataatctacaagggatgggagggtttgttttccacatttttaccctcaagttttaaaatttttcccacctcctttttacctacagagctcaaactaaataatgcacttttgaaccaccggtccgcttggagctaacataaataaataccagtgtccaccgatgcagtcctcagatgaacactgtctcaattattttttccttttttttttctataaaaagtcaaatgatacccgcgtacctcggccgcgaccacgctaagggcgaattccagcacactggcggccgttactagtggatccgagctcggtaccaagcttggcgtaatcatggtcatagctgtttcctgtgtgaaattgttatccgctcacaattccacacaacatacgagccggaagcataaaatgtaaagcctggggtgcctaatgagtgag

SEQ ID NO: 18801 - DNA, 658 bp, Homo sapiens
  misc_feature 630: n = A,T,C or G
cactatagggcgaattgggccctctagatgcatgctcgagcggccgccagtgtgatggatatctgcagaattcgcccttagcgtggtcgcggccgaggtactctaatcaggatgattcctaacaagtcagtcatttgtgaacttagtggactttttggttactttaattgcatatattctccagttacatcggactctatctgtggccttgttcttcatttcagtgttaatcagctaaacagaagttgttgcttatgatgtgtgagtgaacatatgccactgcctggcctttttttcttcagagcttgttgtctttttcgctatattagactttgcagtatgcccagaagctttccttcataaaatagaaagaaaaaaacatttggcttatttttcactgtagctagtcttttatacaataaatctgtaagaaaatttcttgaattctaaatattactctttctagatttttgaaatcaaaaagttttcagtaaaaagtttcttactttattttattatattaggtagtaaaaaatgtagggttatttaccataacctgttcattaatatcagaaatttacaatagcattttaagaccatagtaggattctagcataccgtgtagtactntttttttttttttttttttttacatcag

SEQ ID NO: 18802 - DNA, 559 bp, Homo sapiens
  misc_feature 462: n = A,T,C or G
actatagggcgaattgtgccctctagatgcatgctcgagcggccgccagtgtgatggatatctgcagaattcgccctttcgagcggccgcccgggcaggtacagattcaagaatactgtaccccaaagcctagatgaagatatcctttggaaaactgcaagatgttttccttaaaaaatttatacatctttccccctaaagaaaagtctatgtagtgtagggcagctgaaagtcaagcagaaaatcagagtcttactggcttgaagtatcaggggatggaagttaagtggccagaaataggataaatcgcagaaaggagggagttatggtaagtaacttccaaaaatctgtgggtaaactcccttcagatatctagatgtcccctagaactgtgcttgggagattccaaggagttcagtggaaaacaacagctggcaggcagaaaaatctaaatagagattntagctaatggcttctgcaggggtgacagaatttggtgtttgattcccagcaagatagaagggattggtaaacatgggtggtttccacagatctactc

SEQ ID NO: 18803 - DNA, 596 bp, Homo sapiens
  misc_feature 18: n = A,T,C or G
actatagggcgaattggngccctctagatgcatgctcgagcggccgccagtgtgatggatatctgcagaattcgccctttcgagcggccgcccgggcaggtactgaatttgaaagattccaagcccttcccaactcaaagagtagaaacacatgcctccattttaaatcatctttcatttgtaaaaatacatatatgtttcatggaaaaaacacatttccatcaagctagagggaggattgctattttgcatcttttttgcaatgcacattctccaacagataatccacgtgtgaagtttttttgccctccttccacacaaatctgttattacctttttctttctttttaacttttaattgtattgttttgttttaatgcccagatagcacagcattcctcctttacttgccttttcaaaagcccgtaatcaatatctgtaaaagttaaaattagtttccacagaaacattgatttcaaagcaaacactatcttaatgagcctaactctggtaaattaaaaatataaatggcactattaagagaggccaaggaaacaatacgtaatatttagcgggatctctaatattctaatttc

SEQ ID NO: 18804 - DNA, 398 bp, Homo sapiens
  misc_feature 104: n = A,T,C or G
ctatagggcgaattgggccctctagatgcatgctcgagcggccgccagtgtgatggatatctgcagaattcgcccttcgagcggccgcccgggcaggtactttntttttttttttttttttttttgcacaatgaaatacattacctcttcaaaaaaatttttgtgaattaatcaaaaccatttgatatgaaaataagaataacacactaaaatgatatgcagcagacaggtcgcaaacttggagtgatatttacaattcaaaaacctaaatgattaatgtcaaaatacataaaagactcctacaaatcagtgaaagaaagcaatccagtggtgaggtggaaatgaacaagagatgcacatacatttcactgatgatacaacaatcaataaacatgaaa

SEQ ID NO: 18805 - DNA, 510 bp, Homo sapiens
tgtaatacgactcactatagggcgaattgggccctctagatgcatgctcgagcggccgccagtgtgatggatatctgcagaattcgccctttcgagcggccgcccgggcaggtacttttttttttttttttttttttttttctttttttttttttttttttttttttttttttttttttttttttttttttttttttttttttttttttttttttttttaaaaagaaaaaaaaattttatttaaaccccccccaattaaaaaattttttctgggaataaacctttttttttttttaaaattggtttttttttaaaggccccaaaaaaactttttttttccccaatggcagaaaaccgcccttgcccaaatttggggggggtttaaaaaaattaaaggtcatttttttcaaaaaccttctttttttttttcccaaaaaaaaattttggaaaagaaaaccccccctttttttttcccaacaaaaaaatttttaaaaaaaaaaaaaatttatt

SEQ ID NO: 18806 - DNA, 389 bp, Homo sapiens
gcgaattgggccctctagatgcatgctcgagcggccgccagtgtgatggatatctgcagaattcgcccttagcgtggtcgcggccgaggtacgcgggtgcttctttctcagtttattggttgaatgtgtatctatttgagtctggaaataactgatgtgtttgataattagtttagtttgtgggcttcatggaaactaccctgtaacctaaaagccttcacgtgtattgtctaagttcattctatagaagaaatgcaaactattcctgtattttaatatttgctattctctcatgaatagaaatttatgtagacgcaaacaaaatacttttacccacttaaaaagagaatataacattttatgtcactataatcttttgttttttaagt

SEQ ID NO: 18807 - DNA, 184 bp, Homo sapiens
gcgaattgggccctctagatgcatgctcgagcggccgtcagtgtgatggatatctgcagaattcgcccttagcgtggtcgcggccgaggtacaaaatcatcttgcttaacagagaaaggatgtctgatgctcccgaatgaaacaatttttctgaaatagagggcccagaattggtctttgacaa

SEQ ID NO: 18808 - DNA, 351 bp, Homo sapiens
tacgactcactatagggcgaattgggccctctagatgcatgctcgagcggccgccagtgtgatggatatctgcagaattcgccctttcgagcggccgcccgggcaggtacagaacataaactttgctatttcctttggcgaatcatccaggataccgttggacataaagtaatgcactccctcacctgggttgacattaaaggtgaggctgccttcatccacctgcagatacaattgtctaacagaacatccttgaggtgggttcttattgcatatggatcacagaccccaagtggctttgcacaaacctggccagagaagttgatcatttccaaggtcctgccatacaca

SEQ ID NO: 18809 - DNA, 554 bp, Homo sapiens
  misc_feature 177: n = A,T,C or G
ctactatatgactatatggcgaattgagccctctacatgcatgctcgagcggccgccagtgtgatggatatctgcagaattcgcccttagcgtggtcgcggccgaggtacaaaaaattccaggcaaaaaaaaaatatttctcttgatctctactatcatacataaggtgtccagttncaacaaacaagagatatacggaaggcaaggaaaaaacaacatacttccaagaggcaaagaatcaacagaaccagctaattatgacacagatgttggaactatctcatagggaatttaaaaggactataattagtatgttcaagacactaatggacaagatggatgccacgcaaggtcagattggtgatttcagcagagagctggaactgtaagaatgaacccagggcaattgctagaaataaggaacattgtaacagagacaaagaatgccttcaaaaagttcaactgtagatgacacaaaaccaagtaaggaatccatgaacttgaaaacagttcaacagaaattacccaaaccaaatcacaaaaaggaaaaaatg

SEQ ID NO: 18810 - DNA, 405 bp, Homo sapiens
ctcacttagggcgaattgggccctctagatgcatgctcgagcggccgccagtgtgatggatatctgcagaattcgccctttcgagcggccgcccgggcaggtacaggttatccccaatgtcttccacccaggaaggcctactggctatgcagctacttggactcccgttcaggtgcagagaaccgcacaactcagggttagctctcagggtcttctctggctcctcagtcccactaatgcagagagaaccctggctactcggaaacggctgtcctggggctaatccactgctaattccgttagttcctgtcaagcactggccattcctgctttccatcccactgagcggggtcgtggaggggaagtccaaatgtccattgatgacacatccatttgtcaatgtat

SEQ ID NO: 18811 - DNA, 521 bp, Homo sapiens
ccctctagatgcatgctcgagcggccgccagtgtgatggatatctgcagaattcgcccttagcgtggtcgcggccgaggtacgcggggtagtccagccttccaggtggcgtgagaggcaatgactcgttacctgccgcccatcaccttggaggccttccctggccttgagtagaaaagtcggggatcggggcaagagaggctgagtacagagactttccatagagtctcttgaagtgtgcccggatatccaacatgtcaatttctgctcgagaaaccatcactctgatgagggtgttatcatcggtgcccaagcccttcatcgatttatagagcttttcagcaaaatatgcagatttgttcctcatgcactttactatagccagcagagcatcttcaaagctaccagatgtttcagatttaatactctgttcaatatccttctgtgatatccttttgtattcatcaaacacatgcaacaggtgatttcggttccgggaacagagaacagttagaaatttca

SEQ ID NO: 18812 - DNA, 373 bp, Homo sapiens
ctactatagggcgaattgggccctctagatgcatgctcgagcggccgccagtgtgatggatatctgcagaattcgccctttcgagcggccgcccgggcaggtacttttttttttttttttttttttttttagaatgatatattcagtgttggcaaggaataggaaaataggcacggtcctacactcttggcaagaatgtatgccgatcccatcattctggagggggaattggcacaattctatgtctagaaacgtagtctaaagacaggaatcagctgggcacagtggctcatgcctgtaattccagcactttgggaggctgatgtgagcagatcacttgagccgtgttcgagaccagcctgggcaatatagc

SEQ ID NO: 18813 - DNA, 610 bp, Homo sapiens
tacgactcactatagggcgaattgggccctctagatgcatgctcgagcggccgccagtgtgatggatatctgcagaattcgcccttagcgtggtcgcggccgaggtaccttggagatttcagccagccctgtagcatagataccagctaattaaatggctctcagttaaatggcaaatggttattgagcaaaaggtgttatggtaaatactagacattcaaagacaatcaagacagtctgatctccccaaaagcgtgctgtctactagaggagaaagatgtgtaccaagtcattatttctgacagcattgtgtattagaaggaacactggatttaatcaaaagataggagtttgaatcccgatgccacctcttaccaactgggtaaccttggataggaattgcataacttctctgagcctgttctcaaattgcctccctcataaagttgctgtgaagaataaatgcatgatggtttctgaagcacttatcccctgccgttagatctcctgagctgcatttctgtttaacacggcccccagtttgtcagccaagcagctcaaatatatgaagtctaaaatgaaagtaatgaccctttatgatctctttcta

SEQ ID NO: 18814 - DNA, 613 bp, Homo sapiens
tgtgtacgactcactatagggcgaattgggccctctagatgcatgctcgagcggccgccagtgtgatggatatctgcagaattcgccctttcgagcggccgcccgggcaggtacaaagaaataggaataagtttcatatactaattatgctgagttttaagcctacatatcacaaaatatttagaattgtataaccttttcatatatttataacttttaatgtctttttaaaagatgtgggaccaaaaatatatttataatttggaaatgtgactgcataccaataagaaaacttaccttattttgaaatttatctgggatattaaagaatctaccaattcttaaaaacacagatttatactttaagcttattttaaaattaaagaatatataccaattcttagaaacactttaaggactactcttaaataacttaaatatcagagttttgttgtaatattaaaatttaccatggaaatcactgttgttcagctatcaccttaattgtgtatgatatgataaatgtttagcagtaaagctatcttaagatttaatggaaaagtttaatttgaagatgtaacaaaaattctgaccacaggtgattctgaatttt

SEQ ID NO: 18815 - DNA, 395 bp, Homo sapiens
agggcgaattgggccctctagatgcatgctcgagcggccgccagtgtgatggatatctgcagaattcgcccttagcgtggtcgcggccgaggtacaatatttatgcagggatacacaaatacatcagtgctacaaaccatagaaccagaaagactcacgtgtattagaaaacttgatatatgctggaggaggcattgcaagtcagtgtacgcggggtggtaggtagaaatataagatgactcccaagatttttgcaccctggcatacacatatgcttttccagttgttgaaacactaatttaggtgctgctgtgaagggattttgtagatgtgaataatgttccaaatcagttggccttaagatagaaagatgatcctggatgggccagatctta

SEQ ID NO: 18816 - DNA, 550 bp, Homo sapiens
acgactactatagggcgaattgggccctctagatgcatgctcgagcggccgccagtgtgatggatatctgcagaattcgccctttcgagcggccgcccgggcaggtactgaagagtaggggtcagaaagaggactgggggatttcccctaattattctcactaatccttattgcttttttattgcaaaaaggaaagaatattgttatgcatactcaaattgttttttttcccctgttaaaccatgattatacatagattttgtctccctctctcgtgggtattagaaccctgcatggttttctctgtgtggtggggccatagctttcttctaggatagttattaaaatgcataccactttcaattgtgtatccggcattctttccgtgatgttcagtgcctcgctagtcattttcatttaaagaggcccaaatacttccatagaacagtacctcggccgcgaccacgctaagggcgaattccagcacactggcggccgttactagtggatccgagctcggtaccaagcttggcgtaatcatggtcatagc

SEQ ID NO: 18817 - DNA, 545 bp, Homo sapiens
gactactatagggcgaattgggccctctagatgcatgctcgagcggccgccagtgtgatggatatctgcagaattcgccctttcgagcggccgcccgggcaggtactttttttttttttttttttttttttttgagcagttaacattcctttattttagtttcaggggcgggggaagggagagagggagagaagatacagggaaacttacagcaaatttttcactgtttatagctttcttggggaagaaaacacatgcacgaatcctggtgttaggaatattttaagcgtatatcttcaatattattcatccaggactgaagtaagtcctgatgcaggaaatgagtgagtttcacagctttctgagcccctacttgacccaggaagcccagctggcacctcctttcagtcctgcctctaaacaggacaccccaactgctgttgggaaccgtgtggcagtcgttctggctacttcctgctggttaggggtgaaaaaggggccctgcagtttggtgtcctccagaggggaattttctagggtaattg

SEQ ID NO: 18818 - DNA, 594 bp, Homo sapiens
  misc_feature 344, 532: n = A,T,C or G
tacgactcactatagggcgaattgggccctctagatgcatgctcgagcggccgccagtgtgatggatatctgcagaattcgcccttgcgtggtcgcggccgaggtacaaaaaaataaaaaggaggctggtgggagaactgcttgagccccagagtttgaggttacagtgagctatgatcacatcactgcatcccaggcctgggcgatggagcgaaactgtctcttaaaaaatggcagggagttggggagctgggcaggtgcagtggctcatgtctgtaatcccaatactctgggaggccaagatgggaggatcacttgagcccaggagtttgagaccagcctgngtaacacagggagaccccgtctcaaatatttaaaaaattagtcatgcgtagtggtgcatgcctgtggtcccagctacttgggaggctgaggtgcaaggatagcttgagcctgggaggacaaggctgcagtgagctgtgattgcaccactgcactccagcctggccgatagaatgagaccctgtcttanaaaaaaaaaaaggcagagggacacaccagtgtagtaatgagcagaagcacacaaattttttt

SEQ ID NO: 18819 - DNA, 611 bp, Homo sapiens
tatacgactcactatagggcgaattgggccctctagatgcatgctcgagcggccgccagtgtgatggatatctgcagaattcgcccttagcgtggtcgcggccgaggtacgcgggtatgttagaaattctgataaggagattgttagaagcagagataaagattatataaaagagagaggagacagaaaaggaggtgaaatgtaatctcacaattccctgcaccacttatttatttcctaaaatcttgtctcacacaaaagacatcagagacagaaagttttctctgtccacatctcccatagggacaaaggtagcttaccatttcttggaaaataaagaaaaaatgaatttttctttaccaaaatttaaacaccattagggatagaggttaaaattaattgagacatctgtaagagtaacaagtacctgcccgggcggccgctcgaaagggcgaattccagcacactggcggccgttactagtggatccgagctcggtaccaagcttggcgtaatcatggtcatagctggttcctgtgtgaaattgttatccgctcacaatttcacacaacctacgagccggaagcataaagtgtaaagcctggggtgcc

SEQ ID NO: 18820 - DNA, 261 bp, Homo sapiens
gctcgagcggccgccagtgtgatggatatctgcagaattcgccctttcgagcggccgcccgggcaggtacgcgggatggcacatgcagcgcaagtaggtctacaagacgctacttcccctatcatagaagagcttatcacctttcgtgatcacgccctcataatcattttccttatctgcttcctagtcctgtatgccccttttctaacactcacaacaaaactaactaatactaacatctcagacgctcatgaaatagaa

SEQ ID NO: 18821 - DNA, 399 bp, Homo sapiens
tacgactcactatagggcgaattgggccctctagatgcatgctcgagcggccgccagtgtgatggatatctgcagaattcgcccttagcgtggtcgcggccgaggtacacggtattccttaggtcccttccattggtagtgatgctgcgagttattactggagaaaaggaattctagagcttaacttggcagattaaaagtactttttttttttttttttttttttttttggggggttgtttgtttttggtgtagaaggggaatgttgtgaaagagaacagttggaaaacccaataatatacaaatcgccaaatacttagtttatgtctataaacaaagaaaaagccttttacttatcttcagaaatgaaaagtattagcacaaagacaatttgatcaa

SEQ ID NO: 18822 - DNA, 521 bp, Homo sapiens
ccctctagatgcgtgctcgagcgggcgtcctgagactggatatctgcagaatgcgcccttagcgtggtcgcggccgaggtacgcggggggtgatatcacttaggtagaatcagactactaccatatcttcattccagtaaggaacgacaaaaattccgctcagggtgttaggaaagactggaagactggcaggtcagcagcgctgttgagggctgactttatttggaacagagaatggaaaaactcactcctaaaaggtgttttcaaaaacggtagagatctttatgttgaacaactagtgggaagctaatagttcatgtaactagaagcaacgaattaaatggcagaccagccagaagtttaacagacagaatcaaggggagagacagctaaaaagagtcctgttaagatcactgggggtcaggatggcatgcacatgtgctacactgcattgactcaaaagcaaccagaaagtgtacctgcccgggcggccgctcgaaagggcgaattccagcacactg

SEQ ID NO: 18823 - DNA, 326 bp, Homo sapiens
atacgactcactatagggcgaattgggccctctagatgcatgctcgagcggccgccagtgtgatggatatctgcagaattcgcccttagcgtggtcgcggccgaggtactaacctctggaacttttattgttttttattcctttgctgtatttcaggggtcatcgaatatcttcactgtctctgtaacatatacattttcaagccagaaaactgactccattagctaaattaaactgtttgcgaaagcctttttccactgccatgtcttatttctatttcagtttctctggtgggatatgttggtcacagtggattcccttttctt

SEQ ID NO: 18824 - DNA, 410 bp, Homo sapiens
  misc_feature 230: n = A,T,C or G
atggatatctgcagaattcgcccttagcgtggtcgcggccgaggtaccgaaaagaacagaggaaactaaggcaagctgtgaaagatgctgtgtctaagaaacccattccattggagaacccaaggaaaagcgaccaggtaaaaggattgagagggaagaaggggaagaagaagaagcccttcctttagatatgatggatgaagatgacttacagttaatgaaggatttangacaaagagtatcttttctaacaagagatctttcttctagtgagcctgttcatgccaagaaacggaagcatgaacgcattatagataaatatgaaaaaataccaagaactctacaaactgcaccagaaaaagaactgattcatttacttcctatcaaaaataaaagtggtataatcccac

SEQ ID NO: 18825 - DNA, 540 bp, Homo sapiens
ccctctagatgcatgctcgagcggccgccagtgtgatggatatctgcagaattcgcccttagcgtggtcgcggccgaggtacaatatctcatctatatgccagcagtttaaatgctatttgttcagtctcgaacattttcaaacaaatgacagttatcacttaactaacacaatctttctattatttcactgacaaaagaggcagtttcctgcagtggaaagaggagatggcttggagttagaagagctagattctgaacccagctctactcattctgagccttagtttccttatgaggatcaagtgagacgaaagtgctttgtaaaggagtaataaccacaagaaataatattctagagtccatctcttccatcaactgatggatccctaatttgcacatgtattttgcaagtaaaatcttacctcttaaagtaaatatatgatgcatattcaccacatgcagctgaaatgtgcaagttgggttacatagatgggaaaagagtatgtattaaaaagcctttaagacttgtatactcttg

SEQ ID NO: 18826 - DNA, 455 bp, Homo sapiens
actatagggcgaattgggccctctagatgcatgctcgagcggccgccagtgtgatggatatctgcagaattcgcccttagcgtggtcgcggccgaggtaccagagtattgtatagtcaatgttaaataaaagccaaaactggaatgtgcagaaagtaggctttggttaatttgtggattcatttttatttttgtctttgtttaactttttaaaaaataagatttctggagtagattggtatattctgttaaagacttacagtgatccattttgcttacactgttgcatcacaagggactcacccagggaccatgacctgctggtgtgtgtgtatatttacaaaaacaaaactaacaaaccacccattgggatataaggtagcaattacaaaactaaaaactgcggcttgttgaagtgcaatacccttgcttccaaagttagttacagtgggtttt

SEQ ID NO: 18827 - DNA, 197 bp, Homo sapiens
actatagggcgaattgggccctctagatgcatgctcgagcggccgccagtgtgatggatatctgcagaattcgccctttcgagcggccgcccgggcaggtacctaagctcagtatgcaaaagcccaaactagtgcagaaactgtaaactgtgcctttcaaagaactggccctaggtgaacaggaaaacaatgaagtt

SEQ ID NO: 18828 - DNA, 569 bp, Homo sapiens
gactactatagggcgaatggggccctctagatgcatgctcgagcggccgccagtgtgatggatatctgcagaattcgcccttagcgtggtcgcggccgaggtacggggtcacaatcctaaacatatatgcacctaacactggagctcccaaatttataaaaccatcactaatagacctaagaaatgagatagacagtaacacaataatagtgggggacttcaatatgtcactgacagcactagacaggccaatgagacagaaagtcaacaaagaaacaatggatttaaactataccctggaacacatggacttaacacatatatacagaacattccatccaacaactgcagaatatacattctattcaacagtgcatggaactttctccaagatagaccacgtggtaggccacaaaacaagccgcaataaatttaagaaaattgaaattttatcaagcactctctcagaccacagtggaataaaactggaaatcaactccaaaaggagctttcaaaaccatgcaaatacatggaaattaacctgctcctgaatgatcatgaaatcgaga

SEQ ID NO: 18829 - DNA, 668 bp, Homo sapiens
tactatagggcgaattgcgccctctagatgcatgctcgagcggccgccagtgtgatggatatctgcagaattcgccctttcgagcggccgcccgggcaggtaccgaacctgtaataatataaaggaaatgggggatgactcctgagtgcagggtttcctttaggggtgatgaaaatggcctgaaattgatggtggcgcacaacagtgggtggttgcataactctgtgaatatactaaaaaccacggaactgtgcacttttaattggtgaaatgtgtggtatgtgaattctatctcataaggctaatattaaaaagaatcatataaaacatttgctttgctatgatggccagtatgccatccctccaagtagctctgacattcattcatttattcatccattcattcattctacagatatttcttgatagtccactatatatgtggctctgtgctaagcactgggatacagagttgaagaagatagacattgtccccatcctcatgctattgggaacatagactttagataaaaaattgcactgaggtgtgatgaattttttattatggaaagttaaaaggagacaaggaacatacagcagagggtcctatcacagtctttggtcagagaaggttccaactctgatctagggagtggagggaggattct

SEQ ID NO: 18830 - DNA, 406 bp, Homo sapiens
tacgactcacttagggcgaattgggccctctagatgcatgctcgagcggccgccagtgtgatggatatctgcagaattcgcccttagcgtggtcgcggccgaggtacaatgtttaataaaagtgatgagagtagatatctttaccttgttatcaattttaggaagacatagatttttgtgtagatggcctgcatcctatgaggactcttcattttatccctggttttctgagggcttttaatcatgactcaatgttgggttttactaagtgctttttctattaagatgatcatatgcatttttctttttagtccactaatatggtaaagttcatttattgatttttgaacccgcgtacctgcccgggcggccgctcgaaagggccaattccagcacactggcggcc

SEQ ID NO: 18831 - DNA, 176 bp, Homo sapiens
tatacgactcactatagggcgaattgcgccctctagatgcatgctcgagcggccgccagtgtgatggatatctgcagaattcgcccttagcgtggtcgcggccgaggtacttgtttcaccatacttgattcacaccagtgaaagagtagtgcatttaattggagtatctaaagcca

SEQ ID NO: 18832 - DNA, 401 bp, Homo sapiens
actatagggcgaattgggccctctagatgcatgctcgagcggccgccagtgtgatggatatctgcagaattcgccctttcgagcggccgcccgggcaggtactaactttcactccccctctctgtaataaatgccttaagcaatttaaataagcagaatgtttaatttcattctgtcccattgttaccctggttcttctgagtgcccagcttacccgccgagcttctttcagtcatcctcggtgtcctctgacaatgcatcttctgcttccacatgctctagcattccttcaccggggtcttcatagccccatgttgggcgccagaaatgttggggtgatcagacccaacaccaggccgtgggggctacgaagtccggaggagtcaaaggaatgagaaaag

SEQ ID NO: 18833 - DNA, 644 bp, Homo sapiens
agatggatatctgcagaattcgccctttcgagcggccgcccgggcaggtaccttttttttttttttttatttttttttgggtttttttttttttttttttttttttttttttttttttttttttttttaaaattttttttttttttataatttatatttaatttaatttatttattttttttgtttaaccacacaaaaaaaaaaaatttttctccccccccaaaaaaaaaatccccaaaaaattttcttttttttaaaaaaaaaaaaattttttgcaaaaaaaattttttttttttttttaaaagggagaaaaatttttgtcgcgccctaaaaaaaattattttttgggaaaaaaaaaaatattttaaaacccgggggggtggttgttttttttataaaaaaaaaaaaaaaaaacccccgagttttttttttataaaagggggttataacccccccccacaaattaatattttaaaaacccctttttttttttccaaaaaaaaaaaaaacacttcaacaaataattaaaaaaaaaaactcttgtgggttttttttttatattaaaaaaaatattttttttttacccaaccacaagagaaaaattttttttttttttttttaaaggccaaaaaaaaatccttttt

SEQ ID NO: 18834 - DNA, 204 bp, Homo sapiens
  misc_feature 19: n = A,T,C or G
ccctctagatgcatgctcnagcggccgccagtgtgatggatatctgcagaattcgcccttagcgtggacgcggccgacgtaccacaactcccaggatgttgcgggaggagagagcttgtatctggtatgcaattattgtgtatattgttatgagagacggggccctctttgaacatatttattttaagagaactattgatatcc

SEQ ID NO: 18835 - DNA, 549 bp, Homo sapiens
  misc_feature 353: n = A,T,C or G
acgactcactatagggcgaattgggccctctagatgcatgctcgagcggccgccagtgtgatggatatctgcagaattcgcccttagcgtggtcgcggccgaggtacgcgggtgtcatttggatttgcatttctctgatgagtgatgctatcaagcacctttgctggtgctgtgccatatgtgtatgttccctggagaagtgtctgtgctgagccttggcccactttttaattaggcgtttgtctttttattactgagttgtaagagttctttatatattctggattctagacccttatcagatacatggtttgcaaatattttctcccattctgtgggttgtgttttcactntatcgataatgtccttagacatataataaatttgtattttaaaagtgacttgatttggctgtgcaaggtggctcacgcttgtaatcccagcactttgggagactgaggtgggtggatcatatgaggaggctaggagttcgaggtcagcctggccagcataccgaaaacttgtctctactaaaaatacaaaaattag

SEQ ID NO: 18836 - DNA, 476 bp, Homo sapiens
gccctctagatgcatgctcgagcggccgccagtgtgatggatatctgcagaattcgcccttagcgtggtcgcggccgaggtacgcggtcaaggcctgaggggcgcattgtcaataaagcacagctggctaaaaaaaaaaaaaaaaaaaaaaacgtactcacgaaaaatcaatgtcagcccaacaccttacagattactcaaagactgtcctggtttcgtgtttacccctcgaccaagggaggaacttccaccaaacttccctagtgaaatccccggaatctgccattttctggatgcttaccaacagggaacaaactcaaaaccatgcttccaaaagaaagatgtggaagatggcaatgccaattttttaggcaaagcatcaggaaattattagcaacctatacacctatttataagtcttgggggtttgactcattgaagatgtgtagagcctctgaaagcactttagggattgt

SEQ ID NO: 18837 - DNA, 562 bp, Homo sapiens
  misc_feature 57: n = A,T,C or G
tacgactcactatagggcgaattgagccctctagatgcatgctcgagcggacgccantgtgatggatatctgcataattcgccctttcgagcggccgcccgggcaggtacggggtaaatggattttgcacaaaaccacatgaaagtcccggagctacatcccgcacttacaacagagtgccttacacaaacctacggattggcagaaaaagatcctcatatggtcaggtcgcttcaaaaaggaagatgaaatcccagagactgtttcgttggagatgcttgatgctgcaaagaacaagatgcgagtgaagatcagctatctaatgattgccctgacggtggtaggatgcatcttcatggttattgagggcaagaaggctgcccaaagacacgagactttaacaagcttgaacttagaaaagaaagctcgtctgaaagaggaagcagctatgaaggccaaaacagagtagcagaggtatccgtgttggctggattttgaaaatccaagaataatggtataacgtgcctgtattaaaaaagatgtggtatgaggaaccatttca

SEQ ID NO: 18838 - DNA, 632 bp, Homo sapiens
  misc_feature 584: n = A,T,C or G
acgactcactatagggcgaattgcgccctctagatgcatgctcgagcggccgccagtgtgatggatatctgcagaattcgcccttagcgtggtcgcggccgaggtactgcttttgttgtatcccaccggtatgttcccattatcatttatttcaataaatatttcaatttccttcttaatctcttcattgacctacgggtcatctgggagcatttccatgtagttgtataacttccaaaactcctcttgctattaatttctagttttattccattgtggccagagaagatgctttattctattgtggtcagagaagatacttcatattatttcaggttttttttaaatgttttaagatttgttctgtggcctaacattatggtttgtccttgagaatgatcatgttctgagaaagagaatgtgtattctgcagctcttgaatgaaatgtccagtaaatatctattagaaccttttggtcaatagtgaatatttaagtctaatgtttctttgctgatttttccctgggaagatcgatcaaattctgaaagtgggatgttaaagtctctagcttttattgtatggnggccagtctatctctttagctctaataatatttcctttatatatctgg

SEQ ID NO: 18839 - DNA, 606 bp, Homo sapiens
acgactcactatagggcgaattgggccctctagatgcatgctcgagcggccgccagtgtgatggatatctgcagaattcgcccttagcgtggtcgcggccgaggtacgagggccatagctagcaagatcctccaaacatgaggtagaacttggtgcctcctgcctcagagcttctggaagccttggggaaggcaagcgtgttcctgggcagaagaggagcaggaagcactggatctgctgaatcttcagttttctgtctgaggctggcttgaggcgagggatgcggaagaatgttctccaagggggtcattcactcaaggcaccatcccgtgcacccggctcccgctcctgctcccgccctccccgcgtacctgcccgggcggccgctcgaaagggcgaattccagcacactggcggccgttactagtggatccgagctcggtaccaagcttggcgtaatcatggtcatagctgtttcctgtgtgaaattgttatccgctcacaattccacacaacatacgagccggaagcataaagtgtaaagcctggggtgcctaatgagtgagctaactcacattaattgcgttgcgctcactgcccgctttc

SEQ ID NO: 18840 - DNA, 388 bp, Homo sapiens
gactcactatagggcgaattgggccctctagatgcatgctcgagcggccgccagtgtgatggatatctgcagaattcgcccttagcgtggtcgcggccgaggtacactctgaattataactaaacaactacatgttactgacaaatttgtgattctttgagtctaaacaacacagaaactagaagatccctttcctagatttatatacttgattttcttataaaaataacttcagttattatgtcaatatttacccgcgtacctgcccgggcggccgctcgaaagggcgaattccagcacactggcggccgttactagtggatccgagctcggtaccaagcttggcgtaatcatggtcatagctgtttcctgtgtgaaattgttatcc

SEQ ID NO: 18841 - DNA, 395 bp, Homo sapiens
acgactcactatacgactcactatagggcgaattgtgccctctagatgcatgctcgagcggccgccagtgtgatggatatctgcagaattcgcccttagcgtcgtcgcggccgacgtacgcgggtgtcattgtttacttgtcctgtcactggatctgggctaaagtcctccaccaccactctggacctaagacactggggttaagttgtgggttgtgcatccccaatccagataataaagactttgtaaaacatgaataaaacacattttattctcaaaaaacctaccacaaaactttaatgctcgcgggattccatctgcacgttaaacaaaagcaattgttatgcttgtgcacatggcaagccagaggccctaattgtcccctttccactaca

SEQ ID NO: 18842 - DNA, 557 bp, Homo sapiens
atacgactactatagggcgaattgcgccctctagatgcatgctcgagcggccgccagtgtgatggatatctgcagaattcgcccttagcgtggtcgcggccgaggtgcacatacaccgaaacggctagtaaaacaaaggactttgttatctgagctattatgtaacaccttttcattcacctcaccataaggaatttcctgcttcccatacaattaagagaaaataattactaagaggattatgatacctcgtgaccaagcctcctgagtataatactcttagttatgagttgtgcagataaatatatatttaaaatttatttttcagaacaatgttatgctttatatagtgaatggttttatgtctgtaactaaaaccaagattgcagcagctcaacacacagaagttaaatataattcagctttgtaacctcgccttcggctttttgtttgttggctctttaaaacaacaaaaaaaattatgggataatgaatgcctgtccatgttcattcctgcctggcctggaatatttaattggctataagtctcttgactc

SEQ ID NO: 18843 - DNA, 189 bp, Homo sapiens
agggcgaattgggccctctagatgcatgctcgagcggccgccagtgtgatggatatctgcagaattcgcccttagcgtggtcgcggccgaggtactcttgctcttttagctagagtgtatgtgaaaataaagaaatacatcattgtattcacaaccatgtgtcttcatttataactttttgtttaaaaa

SEQ ID NO: 18844 - DNA, 667 bp, Homo sapiens
  misc_feature 439: n = A,T,C or G
tacgactcactatagggcgaattgggccctctagatgcatgctcgagcggccgccagtgtgatggatatctgcagaattcgccctttcgagcggccgcccgggcaggtactagttgggcgagacctaaaattccctgggcacaggttgcacctgggtgtgagcacttaatcactcaacgcttgttttcttacacttgaaaatcaagggaaagagtagtacgcgggatgtatatttctaacgtaaaaaacataatttttttcttttcaagattttttcttaacaagatgagagaaacatattttttcaggaaaaacaaactttaaaaaaaaagaggagaaataaaaccttttctcccctttccccatcctctatctatccctctttcccaggaacaaatcaaaaggtggattatcttctgaagaatggaaactgccagtncagaatgatgtctttttctcaatgcagtgagttatagattctctagttttctccctagggatgggaagggggcattgaggcaagcctggagaggagcccggggagcaaggtcatgaacttttttctttagtgaaggaggaatacaatcaagggttttgtattcagaatgttgtgccatattttggaatgggacattggtgtggttagagattttagtttaaaacaaaa

SEQ ID NO: 18845 - DNA, 613 bp, Homo sapiens
  misc_feature 343: n = A,T,C or G
ctactatagggcgaattgggccctctagatgcatgctcgagcggccgccagtgtgatggatatctgcagaattcgcccttagcgtggtcgcggccgaggtacatgtgcacattgtgcaggttacaaataattattatttattgaaaaagaaactacagttgacccttgaacaacacaatttgaactgcgctggtccacttatatgtggattttttttctaaccaaaagaggattgaaaatacagtattctcaggatgcaaaatctgcatatactaagggctgacttttcacatacatgggctctgcaaggacttgcatatgcactgatttgggtttacacggnggtgatgatttggatataggcaggtggtcctgaaaccgaattcccgagcatgctgagggatgactgtatatgtgaataagacttaaattatatttccaaacttgggatggaatcaaacattttagtaacaattctgttgattacacttctatttttaatcttgtaggactgtatttattttttatttttgtgtttgaatatgtgtgtgtgtatgtgtgttgttttgggaaacaattataaaagaattgtgaattatttggatgtatgcta

SEQ ID NO: 18846 - DNA, 464 bp, Homo sapiens
  misc_feature 112: n = A,T,C or G
cgactcactatagggcgaattgggccctctagatgcatgctcgagcggccgccagtgtgatggatatctgcagaattcgccctttcgagcggccgcccgggcaggtactttntttttttttttttttttttttctttttttttttttttttttttttagaccataattattttattacactaaattacacgctgcgtttgaatataaaacttaactaacaatcacgtaagggtctcataggtgacaaccagttacttttcttgtttcttctccccaacagtgaatcatcaaggccatggtgcttaaacacaagtgtattcctttcacgttttactactctccaaatcggagtccatcacttcacttcagttattcattaaggggttcctctacagctttcctaggaggttgtatagtcttctgattggaagccacaaatttcatataaactagtccaagtaatt

SEQ ID NO: 18847 - DNA, 305 bp, Homo sapiens
cgactacgactcactatagggcgaattgtgccctctagatgcatgctcgagcggccgccagtgtgatggatatctgcagaattcgccctttcgagcggccgcccgggcaggtacttttacttatgttttaattaattttaacctctatccctaatggtgtttaaattttggaaagaaaattcattttttcaacacgcgccagaaatggtaagctaacaaggtccctatgggagatgtggacagagaaaactttctgtctctgacgccttttgggggagacccccccttatgaaatttttcaccgg

SEQ ID NO: 18848 - DNA, 651 bp, Homo sapiens
  misc_feature 594: n = A,T,C or G
ctatagggcgaattgggccctttagatgcatgctcgagcggccgccagtgtgatggatatctgcagaattcgccctttcgagcggccgcccgggcaggtacttggtttttgtttaatagaacaaataatcagtgtttcacttatattactaaatgtgaaaaacataatgtgaaaagtatacatacattaacttggttgtaaaacccattttaagtgttcatgtaatgtggtaagtttaaaaagtgaagtgagctgttttactacaatgaattcgtttgactcaaagattaaaatgcccctccccctatgtgtatctcttatggcctgtaataattgaaagcaatgtttttgcagtttatataatgcaatttttaatctgtgttcaaaaatggagttcatatgggcttaacacatgaaatgggtggcacagatccacttgcagaacccaaagatacacaatcagttttgaaatgcaacttaagccattaattgttggtgtgaatttaaaattttctagtgtttgtatggtggtatgctgcctaagagcaaaacatcctctgcacaaaaaaaaattactgtagtggctttcgattntaattagaattttctccctggtgtttctttatagactaaagcaaaatcttttaagtt

SEQ ID NO: 18849 - DNA, 594 bp, Homo sapiens
ctatagggcgaattgggccctctagatgcatgctcgagcggccgccagtgtgatggatatctgcagaattcgcccttagcgtggtcgcggccgaggtacagggaaaaactttttccttccctacaggggtcagggcaacataagtattaaggtcatatggcttgctggcctgtaaataacttgtaaataattaagttctttgtctctgaaccattaatcttacgtctcctaccatccataaaactatgacaaaatgatcaacctgttatcttccaagaagggtgaaatatcagacccctaataatttgacttttaatcaagtacttttatctttttgttctctcccatttattttttaaagattgttttccatgagccataattttgcccaccccaccccaaccaggttacttaatttctggacttcatttttctcctctgtatgatgacaataataatagtattgaaactgcccttgcaaatattataacaatgagaaaattatcacaatgaaagagatgtgacctaaccaactctatcttatctttaacctccaagcctggtcattcttggtttttcaccaaactcattttg

SEQ ID NO: 18850 - DNA, 583 bp, Homo sapiens
  misc_feature 412, 481, 502: n = A,T,C or G
tatagggcgaattgggccctctagatgcatgctcgagcggccgccagtgtgatggatatctgcagaattcgccctttcgagcggccgcccgggcaggtacttaagtgtgatgttgtggtaacaggtattgttcttttgtttccacatttagaacttccttaaagatttcttgtaaggttggtctaatggtaacaaattcccttagcaattacttatctgaaaaaatattttattttaccttcacatatgaagctcaacttggcaggatatgaaattcttggttggaatgtctttcctttgagaatgctgaaaatagaccctcaatctcttctggcttgtaaggtttctgctgagaagtccactgttaacctgatgggggtccctttgtatgtgatctgacctttttctctanttgcatttaaaattttttctttaatgctggccttaaacaatctggtgcctatatgccctaatgatgttncttttgtgtaaaatccaacangtgttctctggatttcttgtatctgggtgtctacctctctaacaagattacaaaagttttattctattattccctcaaatt

SEQ ID NO: 18851 - DNA, 613 bp, Homo sapiens
ctcactatagggcgaattgggccctctagatgcatgctcgagcggccgccagtgtgatggatatctgcagaattcgccctttcgagcggccgcccgggcaggtactatcattataccctttccctcaatgccatcttacattttagggataagttttaagccaaactataaggctacctggaatgctgagacaacacacaaattctgctgagtccccgtcacagactacttctgaaggtcaccagtgagggcctaaacaagagtccacttcttgttagtataataactttttatttgacatctacaagattttggcatcttgcagctttttaccaggtttatacaatctcgatttttcaatagtgcaacctgtggaagcaaaaaaaaaaaaaaaaaaagaagaagtacctggtgttcggttatggagcctctctcctctgcaacctgataggatttggctacccagcctacatctcaattaaagctatagagagtcccaacaaagaagatgatacccagtggctgacctactgggtagtgtatggtgtgttcagcattgctgaattcttctctgatatcttcctgtcatggttccccttctactacaatgctg

SEQ ID NO: 18852 - DNA, 576 bp, Homo sapiens
acgactactatagggcgaattgggccctctagatgcatgctcgagcggccgccagtgtgatggatatctgcagaattcgccctttcgagcggccgcccgggcaggtacttaatacccattatatctcccaatcagctcccgacatctggcacaaactctaaaagctaaagaaggccctcagccccacaacgagaccttctcaacctggttttcaaagtcttcaataatagggatgagcaggaaaaaataaataaggcccaatgagattgtgccaaataccagctactagccatggctatttgccaacctggcaatagcacccaagggcacaaaggacccgatagcagtcttcctcctgctttaagagttgacaaagagatgtggttatggttaagctaatcaactactctgtgctttagtttcttattttgtagaatggaaatcagaaaagcacctgcctcacatgctgttataaagagtaaacaaattaaattcaataaaataatgcacataactaggtacagcaagcactggttatcattaataacatcatcttcattattttctacagccccc

SEQ ID NO: 18853 - DNA, 173 bp, Homo sapiens
ccctctagatgcatgctcgagcggccgccagtgtgatggatatctgcaaaattcgcccttagcgtggtcgcggccgaggtacaacttaatttggttaaatcaggctaaagcgaaggacttacactccttgatcaagggaagagttttcttgttttctctttctccgtgctaga

SEQ ID NO: 18854 - DNA, 201 bp, Homo sapiens
tacgatacgactcactatagggcgaattgggccctctagatgcatgctcgagcggccgccagtgtgatggatatctgcagaattcgcccttagcgtggtcgcggacgaagtactcgggggagaactgcagagatactattctttctaaacaagagcagttgtatgatagagggagtcgcttgaggggggactgagcctggt

SEQ ID NO: 18855 - DNA, 511 bp, Homo sapiens
ccctctagatgcatgctcgagcggccgccagtgtgatggatatctgcagaattcgccctttcgagcggccgcccgggcaggtactaaaacatgcagtcacatttttcacaaattagggaaaagtttgatactctagtttctttccttctttcttcggataagtggaaacttctaagaaatatgaataagtagaaacttctaagaaataggaaagaagtaaatatgtgcctatattcttagaattaatcagtatatttttaataaatacaagattttcttcataaaccaattgtagggtgtaggtaggtagaccagttgatgagtaactggtaagtcatctgggaaaaagaaatacgttaggtctttatgacattgcatataataatataaattcaatgcaaaatcatggctattgaaaatatcatactatagaaaaaggtaaacacacttgatttattatttcgagtctctgaatgggtaaagactctctaagcttaaaaacaattgaaaa

SEQ ID NO: 18856 - DNA, 628 bp, Homo sapiens
tatagggcgaattgggccctctagatgcatgctcgagcggccgccagtgtgatggatatctgcagaattcgcccttagcgtggtcgcggccgaggtacattctccacagatcatattaaggagtttgtaggtgaagtttaatctgtgcatagtgggtagagacatgaatagggtcaaaggggaggaaaaaggaaaaaaacaaaacaaaaacagtcacaggaaaataaaaatacaccacaggttaccagaaccttcagatttaaaataaaaagaaagaaaaagcagaagcagtgagcatcgacatcaactgtacctgcccgggcggccgctcgaaagggcgaattccagcacactggcggccgttactagtggatccgagctcggtaccaagcttggcgtaatcatggtcatagctgtttcctgtgtgaaattgttatccgctcacaattccacacaacatacgagccggaagcataaagtgtaaagcctggggtgcctaatgagtgagctaactcacattaattgcgttgcgctcactgcccgctttccagtcgggaaacctgtcgtgccagctgcattaatgaatcggccaacgcgcggtgagaggcggtttgcgtattgggcgctc

SEQ ID NO: 18857 - DNA, 474 bp, Homo sapiens
  misc_feature 24, 105, 110, 111: n = A,T,C or G
acgactcactatagggcgaattgngccctctagatgcatgctcgagcggccgccagtgtgatggatatctgcagaattcgcccttagcgtggtcgcggccgaggnacttnntttttttttttttttttttttttttccgctatttctcttttcttcttttcattctctaattgtgcccttaaaaggaattgcaattgctgttacaaattaatacacaaaaatattattcatgtgatggaatactactctgccataaaaagtaacaaaataatgtcttttgcagcaacttggatgaagctggaggccatgattctaagtgaagtaactcagaacatacaaatgccacccgcgtacctgcccgggcggccgctcgaaagggcgaattccagcacactggcggccgttactagtggatccgagctcggtaccaagcttggcgtaatcatggtcatagctgtttcctgtgtgaaattg

SEQ ID NO: 18858 - DNA, 782 bp, Homo sapiens
  misc_feature 702: n = A,T,C or G
acgactactatagggcgaattgggccctctagatgcatgctcgagcggccgccagtgtgatggatatctgcagaattcgcccttagcgtggtcgcggccgaggtactcagtaaatactaagttttcccccaggttctaagttttctgtaatgcatcattttacttttaccattaaaaaatgtattattgttaagctgctctatttctgaaaaaccctcttacgatcatacacatagaaaatataaaagaattgacaaaataactcctggaaccaataagcaattatagcaaagttgtagcatacaaggttaatatacaaaggtccagtggctttcctatatatcagtaatgaacaagagacatttgaaattaaaaacatattgctgtttacattagcatcaaaataaatgaaatatttagctataaatctatcaaaatatgtataaggtctatatgaagagcaaaaactctgatgaaaggtatcaaagaagaactaaataaatgaagagataatccatgttcatgaagaggagaactcaatattgtcaagatgtcagtgcgtcccagcttgttctaatgcaattccaatcaaaatccccagaagttattttgtggatatcaacaaagtaatttgaaacttcctatgaaaaaacaaacgactcagaatagcaaacccaatatcgaagggaaagaatagagcangaggactgaaatcacttgagttcaagacttactatgaagccacagtgatcaagacaatgtgtattggccaaaaaaaaaaa

SEQ ID NO: 18859 - DNA, 516 bp, Homo sapiens
gactactatagggcgaattgtgccctctagatgcatgctcgagcggccgccagtgtgatggatatctgcagaattcgccctttcgagcggccgcccgggcaggtactaaggtatactactggacatttctatttttttaagtgtattctttttctgacttacagtaaaatttcaggaagttgatagatactaagaacttatgattggtctcagaggtaacaatgaaatactcataattttgtctgtggaactctggcagaattatgttacacatttggcgaagttgtctcttgtaatttatattttaaatgaaaaagtattttagagcttttaatgaaggggaagagtataaactttctttcatattcactctgtagttacagaccgtctcataaatcaagattgtgcattattagagttctcagagacagatacttccatatggacccctgttcatttttcttatttactagatattttgctaaatttaacacactagcaattaagagtttaaaa

SEQ ID NO: 18860 - DNA, 64 bp, Homo sapiens
gactcattagggcgattgggcccttagtgctgctcgacggccgccagtgtgatggattctgcag

SEQ ID NO: 18861 - DNA, 355 bp, Homo sapiens
ctcactatagggcgaattgggccctctagatgcatgctcgagcggccgccagtgtgatggatatctgcagaattcgcccttagcgtggtcgcggccgaggcaccagggttcatgaagcatgtggttcatcctttggaaatggtagtaggaaaccatacagtctttggcatttcgagctacataaaggaacttgcagttgttttcccagaaagactgtggcaacagctgagtggaaaggtgagtctttagtatccgcggagagggcattgctttggctttttccacaccaaaatgttggggttgccgagcccactcaatgaaaggatggcggggttgtatgatggctccctggcac

SEQ ID NO: 18862 - DNA, 214 bp, Homo sapiens
  misc_feature 72: n = A,T,C or G
ctcgagcggccgccagtgtgatggatatctgcagaattcgcccttagcgtggtcgcggccgaggtacgcggngactggagacactgaataaggcaggggcccttagagtcttggttgccaaacagatttgcagatcaggagacccaggagtttcaaagaagcgctagtaaggtctctgagatccttgcactagctacatgctcagggtaggagg

SEQ ID NO: 18863 - DNA, 549 bp, Homo sapiens
atagggcgaattgggccctctagatgcatgctcgagcggccgccagtgtgatggatatctgcagaattcgcccttagcgtggtcgcggccgaggtactatcaaatactaggtcttattattctttctaactatttttattttgatacaagtctttcaggtctgtcttaaagtcataggatgctaagggctaaaaaggcccagagagagcagtaagttgcccaaatttgcccaactagagaggggcagaattcaaatgagaacccgggtttctgatgccaagctgcctcctcccgcgtacctgcccgggcggccgctcgaaagggcgaattccagcacactggcggccgttactagtggatccgagctcggtaccaagcttggcgtaatcatggtcatagctgtttcctgtgtgaaattgttatccgctcacaattccccacaacatacgaaccggaagcataaagtgtaaagcctggggtgcctaatgagtgagctaactcacattaattgcgttgcgctcactgcccgcttttcaatcgggaaacctg

SEQ ID NO: 18864 - DNA, 435 bp, Homo sapiens
ggcgaattgggccctctagatgcatgctcgagcggccgccagtgtgatggatatctgcagaattcgccctttcgagcggccgcccgggcaggtacacctgactcgacctttaccagatagagagctggtcattaagtgtgaacaagctgacttgaatgtttcaggacagctccctcctctgtaaaatgggaatactaacactattcttagggagattctgggattcaccatgataaacatgtaccatactcagcctagtgtgtagaaatgatgctctttactgtggagcacgtctataaaagagaatacactcccttaccctcaatgaataataggtggttgtataactatacaccacaatctatgaactgcaatgtgattggagaaatgcccttgcttttctgggattctgggcaattttatcctaaccctatt

SEQ ID NO: 18865 - DNA, 191 bp, Homo sapiens
acgactcactatagggcgaattgggccctctagatgcatgctcgagcggccgccagtgtgatggatatctgcagaattcgcccttagcgtggtcgcggccgaggtacaggtttcactattacaaatatatgatgttaaactaacaaactcatgaccttcaaagatgttttctgtcccacatcacacacatt

SEQ ID NO: 18866 - DNA, 368 bp, Homo sapiens
  misc_feature 168, 296: n = A,T,C or G
gtaatacgactcactatagggcgaattgggccctctagatgcatgctcgagcggccgccagtgtgatggatatctgcagaattcgccctttcgagcggccgcccgggcaggtacagtggtccttttcagagttggacttctagactcacctgttctcactccctgttntattcaaccccgcccatgcaatgccaataaatagaattgctccctaccagctgaacagggaggagtctgtgcagtttctgacacttgttgttgaacatggctaaatacaatgggtatcgctgagactnaagtgtagaaattaacaaatgtgctgcttggttaaaatggctacactcatctgactcattctttattctatt

SEQ ID NO: 18867 - DNA, 410 bp, Homo sapiens
actactatagggcgaattgggccctctagatgcatgctcgagcggccgccagtgtgatggatatctgcagaattcgcccttagcgtggtcgcggccgaggtactcggggacagcattctaatccaagcaaggtggctcaaaacctactattctgactgcacagcctgacaaggctggtgctaggataaacaaagtcaaacaactttattttctctaggacccctgggaacttctaatagcagaagtatttgctgggaatcaccaacaggaatttttagatacaacggaatttggcttaaaaagtcttatttctatggagcttctgcactgaaggaatatcttgtataattgcctgaaacttgcagcaaagaggtatatcaactgtctaggggtgactcctggggaccaag

SEQ ID NO: 18868 - DNA, 327 bp, Homo sapiens
atacgactactatagggcgaattgggccctctagatgcatgctcgagcggccgccagtgtgatggatatctgcagaattcgcccttagcgtggtcgcggccgaggtacgcggggccctcacagctgccctgtgaggtgggtgccattactgtcctcttattatagattgggaaacggaggctccgaggtgccagagcttgcaaaccgatggaggttggccagacttcatgagccacactctgaatattccctttgaggcacaaacaacagaatcaagaaggaggccacgcgcgggggctcacacctgcaatcccagcactttgggag

SEQ ID NO: 18869 - DNA, 514 bp, Homo sapiens
tatagggcgaattgggccctctagatgcatgctcgagcggccgccagtgtgatggatatctgcagaattcgcccttagcgtggtcgcggccgaggtactcttggtttatcaatgggacgttccagcaatccacacaagagctctttatccccaacatcactgtgaataatagcggatcctatatgtgccaagcccataactcagccactggcctcaataggaccacagtcacgatgatcacagtctctggaagtgctcctgtcctctcagctgtggccaccgtcggcatcacgattggagtgctggccagggtggctctgatatagcagccctggtgtattttcgatattttcaggaagactggcagattggaccagaccctgaattcttctagctcctccaatcccattttatcccatggaaccactaaaaacaaggtctgctctgctcctgaagccctatatgctggagatggacaacttaatgaaaatttaaagggaaaacccttaggcct

SEQ ID NO: 18870 - DNA, 574 bp, Homo sapiens
ctatagggcgaattgggccctctagatgcatgctcgagcggccgccagtgtgatggatatctgcagaattcgcccttagcgtggtcgcggccgaggtacgcggggagtcctgagctgcgtcccggagcccacggtggtcatggctgccagagcgctctgcatgctggggctggcctggccttgctgtcctccagctctgctgaggagtactttttttttttttttttttttgacagagtctcactctgtcacctaggctggagtgcagtagtgtgatcttggctcactgcaacctccacctcctggggttcaagtgattctcctgcctcagcctcctgagtagctgggattacaggcgcccaccaccatgcctggctaatttttgtattttctaatagagacggggtttcaccatgttggccaggctagtctcaaactcctgacatcaggtgatccgccctccttggcctcccaaagtgctgggattacaggtgtgagccactgcgcccagcctacagctcatttctttttatctctgcataatatcccattggatgaatgtacctgcccgggc

SEQ ID NO: 18871 - DNA, 428 bp, Homo sapiens
tacgactactatagggcgaattgggccctctagatgcatgctcgagcggccgccagtgtgatggatatctgcagaattcgccctttcgagcggccgcccgggcaggtacgcgggataccattgcacttactttgaagaagagatgctgaatattattaaaccattgtgttccctggtgggctgatggactgtgattttataaggtggtctcagccaattgcagcagctgttccctgtcagaggggctagaggtttggtgagagcagtggatgaggtgcagtggtgtgtttgttcactagaagcaagtgggagaaagctttgcctctttgtacctcggccgcgaccacgctaagggcgaattccagcacactggcggccgttactagtggatccgagctcggtaccaagcttggcgtaatcatggtcat

SEQ ID NO: 18872 - DNA, 598 bp, Homo sapiens
atacgactcactgtatggcgaacgactactatagggcgaatggggccctctagatgcatgctcgagcggccgccagtgtgatggatatctgcagaattcgcccttagcgtggtcgcggccgaggtacgcgggggcagttgccaagcaacgagtgtaaacagcacaagatcatggccactaactacagtgccaaccagtatgaaaagactttctcatccaagtatctgcagaactggtctcccactaagccaacaaaagagagcatctcttctcatgaaggctacactcaaattattgccaacgatcgtggtcatctactgccttctgtgccccgttccaaggcaaatccttggggttccttcatgggcacctggcaaatgcctctgaagataccccctgctcgggtgaccctgacctcccgtacctgcccgggcggccgctcgaaagggcgaattccagcacactggcggccgttactagtggatccgagctcggtaccaagcttggcgtaatcatggtcatagctgtttcctgtgtgaaattgttatccgctcacaattccacacaacatacgaaccggaagcataaagtgtaaagc

SEQ ID NO: 18873 - DNA, 571 bp, Homo sapiens
gactcactatagggcgaattgggccctctagatgcatgctcgagcggccgccagtgtgatggatatctgcagaattcgccctttcgagcggccgcccgggcaggtacgcgggtgctaaagaaaggactacttaaaatcattactaaaaattatagaacatgggagatatcttgaccttcgcataaaactgattttttctttatggttaaattcagtctataattgactttttgaggggcaatatctcagcagtgatgttgtgttcttctttgtgcatcagcacatcataaaaatttattctagtgttgttgatgttaataatttgcttggttaaagagctctctgactttttttcactatagagttaattgtttttctctttattgttaagtatctttatgtagctaataaactatcacatttaatctggcacctgcccttttttcttaggtttttttgtttgttttttgcacatatgtgtctttggaaaatgaaggcttttatctttggttacagaccaaaaaagttgggaaaaaacacaatctctttcacttactgaatggctgacaaa

SEQ ID NO: 18874 - DNA, 163 bp, Homo sapiens
ctagatgcatgctcgagcggccgccagtgtgatggatatctgcagaattcgcccttagcgtggtcccggccgacgtacacaatggtttattaaaggaatgtatggcccacatcaacctatcatggattctactgggtaaccttcccatggccaaaggaaaaac

SEQ ID NO: 18875 - DNA, 176 bp, Homo sapiens
agggcgaattgggccctctagatgcatgctcgagcggccgccagtgtgatggatatctgcagaattcgcccttagcgtggtcgcggccgaggtaccttttaactaatgagacaagattcagaaatcttaagcaacttgcccaagggcatgtggaggaggtttatttaaatgtaacc

SEQ ID NO: 18876 - DNA, 647 bp, Homo sapiens
gactcactatagggcgaattgggccctctagatgcatgctcgagcggccgccagtgtgatggatatctgcagaattcgccctttcgagcggccgcccgggcaggtacggaaaaccactttcatatccgctggaaattcatgtaaaagttaaagatattaatgataatccacctacatgtccgtcaccagtaaccgtatttgaggtccaggagaatgaacgactgggtaacagtatcgggacccttactgcacatgacagggatgaagaaaatactgccaacagttttctaaactacaggattgtggagcaaactcccaaacttcccatggatggactcttcctaatccaaacctatgctggaatgttacagttagctaaacagtccttgaagaagcaagatactcctcagtacagaaggtagaagtgagtaacttttttcttgctccagagcaatccctgagtaactaagcctgcattattaacttacatgaccaaattattcataaaattaatttttgataaatacagagtgagaacaaagaaaattgaaaaatcttaccgaatatatatgtatatcatccgggttggaatacaatatagaaaattatctctattcagtataaaacatacttctaggaaactaaca

SEQ ID NO: 18877 - DNA, 244 bp, Homo sapiens
gagcggccgtcatgagggatgtatatctgcagaattctccctttcgagcggccgcccgggcaggtactaaggatcaaccaggtttggtaagcccaaggacagatatatgccatccaaaatcatttctaatcctgccatttcatgctttcttgggctttctgaggagattccttgccacttctgtggggaaaacagacttcatgaggggccagggtgggtgagggttggagagccatcttaaatg

SEQ ID NO: 18878 - DNA, 586 bp, Homo sapiens
cgactcactatagggcgaattgggccctctagatgcatgctcgagcggccgccagtgtgatggatatctgcagaattcgccctttcgagcggccgcccgggcaggtacgcggaagagatagtgctaatatagtaaaaacaaaaatccacatgaactacagcaaaatttttaaaaagttgaatttcaccagggacttggaatccattagaaaaccatcaaagggaaatcctaaacctaaaaactataataaaaattaagaactcaaaagatagtcttaatgggagattagtgaaaacagaacagaggattcttaaaatggaagactggttactagaaagcatccaaatgaatacacaaaaaaaaaaaaaaaaaaaaagaatggaaacagaatagagtgcaaaagacatatgtaatccagtggaaaggcctaaaaaaaaagtatagagtccccttatgagaatggaaggccaagatggatggatcacctgaggtcaggagttcaagaccagcctggccaacagctgaaactctgtctctattaaaaaatacgaaaattagccaggcatggtggcgtgcgcctgtaatc

SEQ ID NO: 18879 - DNA, 476 bp, Homo sapiens
ctactatagggcgaattgggcccttagatgcatgctcgagcggccgccagtgtgatggatatctgcagaattcgccctttcgagcggccgcccgggcaggtacaaaaggatgtgggtagaactacaattgtgcattcagacatgataattcctactaactgggggtaggagggcccacaggagtgtagactagaagtagaaagaatgaggaaaataagtcttttgtagctgtatggcgattgaagaggagataaaacaaactctccagcttttcaggttgggtgacttgcagcgccatcgtctgacaaagccgccaaaatctttcaatgtccctaggaataaagttgccctgagtagggccactcaggatgacgccagatgatatcccttattatagttttaggggaatctcttcctaccttcgccagtcctgcagtgaaaaaatgtaccttggccgcgaccacgctaagggcgaa

SEQ ID NO: 18880 - DNA, 312 bp, Homo sapiens
cactatagggcgaattgggccctctagatgcatgctcgagcggccgccagtgtgatggatatctgcagaattcgcccttagcgtggtcgcggccgaggtacccaccaccactgtatgatgctcatgagctctggcatgccatgaagggagtaggcactgatgagaattgcctcattgaaatactagcttcaagaacaaatggagaaattttccagatgcgagaagcctactgcttgcaatacagcaataacctccaagaggacatttattcagggaccttgggacactttagagatacttcttatgaacttg

SEQ ID NO: 18881 - DNA, 417 bp, Homo sapiens
aattgggccctctagatgcatgctcgagcggccgccagtgtgatggatatctgcagaattcgcccttagcgtggtcgcggccgaggtacagattcagggattatcatcacttatatggcatttacattcatgagatggatgggatgggatatgggatgggatggaatgggagacaatgggatgggataatatgtttaatggaaaagataagaagctcaaggactaagccctgtggccctcagttagaggtttaaataatagaaggaatggccagaagtgtggaaaataaactagtgaattgtggtcccgcgtacctgcccgggcggtcgattcaaagggcgaatttcaacacactggcggccgttactagtggatccaatctcggttccaagcttggcgtaatcatggtcatagttg

SEQ ID NO: 18882 - DNA, 372 bp, Homo sapiens
ccctctagatgcatgctcgagcggccgccagtgtgatggatatctgcagaattcgcccttagcgtggtcgcggccgaggtactctcaccttcattcttcaattcagtccaggaaaccatgctgtttctctatcaagaagaagacagagattttaaacagattgtaaccaagaggggacttcctaaggcacatgccttaagacctatgtgggcattcaagcctttggggcctgggaacacacacattcgggtgctctgctgaatgagagcttgtgggttagaggaacaaatatctagacattcaatcttcactctttcaattgtgcattcatttaataaatagatactgaacacaaaaaataaaattgcaaaa

SEQ ID NO: 18883 - DNA, 527 bp, Homo sapiens
atagggcgaattgggccctctagatgcatgctcgagcggccgccagtgtgatggatatctgcagaattcgccctttcgagcggccgcccgggcaggtacttattcttaattattccacttctgagagacttatttgactgacccaagccagctctagaaacatttgaagcctcatgtttccgtctggcctggaggacgctgagcttacagaattccaagccaacgcagagacttttctttagaattgagatgaggagcgtggtgtttatttatttattttttttttcgtttttgggtattttgtttttttttcctacagacttgtgtttcaggaaaaaataatcagtgtcaggcaattgttttcagggagtgtggtcttctgtgtatgtttttaaaacttcaggtaagaagagtagaccaatctctgaaaaggaaatcatggttgatagaaaccaggttgaagggaagggctactctgtttctctgagttcttctgacaggtctcacttactagccttatgtatgga

SEQ ID NO: 18884 - DNA, 321 bp, Homo sapiens
  misc_feature 52, 53, 77: n = A,T,C or G
atggatatctgcagaattcgccctttcgagcggccgcccgggcaggtacttnntttttttttttttttttttttttnccgggtctaactgtgtttggatttcttattgggagtgttgttcacatatgcagaagaacagatgccattaccggcgttttatatagaagatgccatcttctcaggagaaaacatagccccagactcttctttcatttgtctcataccgattctctttttctttttcttcctttattctctgctctaactgtgtttggatttcttattgggcccgcgtacctttttttttttttttttttttttt

SEQ ID NO: 18885 - DNA, 360 bp, Homo sapiens
ctatagggcgaattgggccctctagatgcatgctcgagcggccgccagtgtgatggatatctgcagaattcgcccttagcgtggtcgcggccgaggtacttttttttttttttttttttttggttctttttttttttttttttttttttttttttttcaaaattagaaagtggtttatttgcaatttacatggattcctttactttgggagggttagtttatttgaaatgttttgcaattttcaggaacattacctacaaattgatattagggggtctacagcttgaaattgatgtgctttaagataaagatggcagtaatgatgtttaaaatattctagagctcattggatttcatttt

SEQ ID NO: 18886 - DNA, 521 bp, Homo sapiens
actcactatagggcgaattgtgccctctagatgcatgctcgagcggccgccagtgtgatggatatctgcagaattcgcccttagcgtggtcgcggccgaggtacccggttaactgccaggtgggtgacagtgatgccaggctcgcccactactgcactggacacagcctcaccaatgccaccttcataataatggtcctccacggtgaggatcctgcccttggtggcacgagcgctgtcgagaatgagttttctgtccaggggcttgatggtgaaggggtccagcacgcggatgttgatcttttctttcttcagcagttcggtagccgcgtactgttttctaactgaataatcatgagcacattacttaacctctcagaggcttaatttctttatctatacatggggtcaataacgttctcgtgttgagttattggtacagctaactagtacctgcccgggcggccgctcgaaagggcgaattccagcacactggcggacgttactagtggatccgagctc

SEQ ID NO: 18887 - DNA, 448 bp, Homo sapiens
gactactatagggcgaattgggccctctagatgcatgctcgagcggccgccagtgtgatggatatctgcagaattcgccctttcgagcggccgcccgggcaggtacttttttttttttttttttttttttttttttctaaaatttaggtttgattatttttaatacattccaattatctagtgaaatcttccatttttaccgttattttttaaaacactttccctttatattcttgaacatattataattatttcaaagtcccttgttaattcaaacatctggatcacttgagggtctctttccgttatctgctttcttcattttttagctatgttcctgtctcttggcatagctatttttaattgagggatagacattgtttattaaaaactgtaaggattctaactgatgttttatttctccagaaaaggtaccttggccgggacc

SEQ ID NO: 18888 - DNA, 501 bp, Homo sapiens
  misc_feature 114: n = A,T,C or G
tacgactcactatagggcgaattgggccctctagatgcatgctcgagcggccgccagtgtgatggatatctgcagaattcgccctttcgagcggccgcccgggcaggtactttnttttttttttttttttttttttttttttttttttttttttttttttttttttttttttttttttttttttttttttttttttttttttttttttttttttttttttttttttttggggtttttataattttttttttttggggaaaaaaaaaaaaaatttttttttaacttggtgaaaaaaattttttcccctcaaaaaaaattttttaaaaaatttctccaatattgtgggcccccctaaggggaaaaaaaaaaattttctttttttttttccaaaaaagttttttttttaaaaaactaaaaacgggtgtttatataaaaaaaaaaaatttttttaaaaaagggggaaaaaaaatttttaaatttgttaaaattttttaaaaaaaa

SEQ ID NO: 18889 - DNA, 433 bp, Homo sapiens
tacgactactatagggcgaattgggccctctagatgcatgctcgagcggccgccagtgtgatggatatctgcagaattcgccctttcgagcggccgcccgggcaggtaccctggatgatggtgaatacaaccccactgatgataggccttccagggctgaccagtttgagtatgtaatgtatggaaaagtgtacagcatgtggagctggagagaggagtgggcagcagtgtagataaacaggcctggccgtgtgtggatgggttgtcagggctgagtggagttgcaaagggatttattataccatgatctctgcttgtgcatatgtttggagattttcataatcaaatgtgaaaattttttgattttcataatcaaaaatcaatacaaaatatgaatgtataacgtaattcctccatcatgacggtggtggga

SEQ ID NO: 18890 - DNA, 300 bp, Homo sapiens
acgactactatagggcgaattgcgccctctagatgcatgctcgagcggccgccagtgtgatggatatctgcagaattcgccctttcgagcggccgcccgggcaggtacataatcggaggtgcagaatcttggaattgtctgaacacagtagaacgatacaatcctgaaaataatacctggactttaattgcacccatgaatgtggctaggcgaggagctggagtggctgttcttaatggaaaactgtttgtatgtggtggcttgtgatggtactgatgccatcagttgtgtggaaatgtt

SEQ ID NO: 18891 - DNA, 602 bp, Homo sapiens
ctcactatagggcgacattggccctctagatgcatgctcgagcggccgccagtgtgatggatatctgcagaattcgcccttagcgtggtcgcggccgaggtacaatgtttaataaaagtgatgagagtagatatctttaccttgttctcaattttaggaagacatagatttttggtagatggcctgcatcctatgaggactcttcattttatccccggttttctgagggcctttaatcatgactcaatgttgggttttactaagtgctttttctattaagatgatcatatgcatttttctttttagtccactaatatggtaaagttcatttattgatttttgaatgttaaatcaactttatcttcctgcaataaagtacctgcccgggcggccgctcgaagggcgaattccagcacactggcggccgttactagtggatccgagctcggtaccaagcttggcgtaatcatggtcatagctgtttcctgtgtgaaattgttatccgctcacaattccacacaacatacgagccggaagcataaagtgtaaagcctggggtgcctaatgagtgagctaactcacattaattgcgttgcgctcac

SEQ ID NO: 18892 - DNA, 557 bp, Homo sapiens
  misc_feature 26, 179, 180, 181, 182, 193, 199, 240: n = A,T,C or G
atacgactcactatagggcgaattgngccctctagatgcatgctcgagcggccgccagtgtgatggatatctgcagaattcgcccttagcgtggtcgcggccgaggtactttttttttttttttttttttttttttttccttttttttttttttttttttttttttttttttttttttnnnnttttttttttntttttnttttaaaaaaccacattttaaatttttttttttaaaagggngggggaaagagttttaaacctgccaaatctttaaaaacttgggccttggaccttaaagggaaaaaccccccaaacttttttttgtaaaggtttttaaaagcccaaaaacccttttatttcccccgggggggttccaaacaccggcccggaaaaaaaaaaaccttaaaaaacttttttaaaacccggcccaaaaaaaaaaaaaaaaattttttttttttaaaagttcccgggttaaaaaaagggaaaaatttactgccaaaaacgggaaccccttaaaatgggcaaaatgccccaagggtttttataaaaaaaaaaaa

SEQ ID NO: 18893 - DNA, 461 bp, Homo sapiens
gactactatagggcgaattgggccctctagatgcatgctcgagcggccgccagtgtgatggatatctgcagaattcgcccttagcgtggtcgcggccgaggtactagcctttaattacttttatttactttatttaattttctcctgcaaccagtggataccctcaaatagaaccattttagaagtttgagcatttaggtaagagaaggaatttgggatgggattgggtataatggacagttatgcagggaaatgagaaatatcaatggaccagaccacccgcgtacctgcccgggcggccgctcgaaagggcgaattccagcacactggcggccgttactagtggatccgagctcggtaccaagcttggcgtaatcatggtcatagctgtttcctgtgtgaaattgttatccgctcacaattccacacaacatacgagccggaagcataaagtgtaaagg

SEQ ID NO: 18894 - DNA, 915 bp, Homo sapiens
  misc_feature 645, 687, 734, 787: n = A,T,C or G
tatggagattgtaatacgactcactataaggcgaattgagccctctagatgcatgctagagccgtgctcaagcggacggctgtgtgatggatatctgctgaattcgccctttcgagcggccgcccaggcatgtaccaatagaatggcaatgcttttagattaaaatgaaagtgacttaaacagcttatagtttagtttaaaagttggaggtgatttaaataatttgaaggcgatctcttaaaatgagattaaaccaaaagtgattaaaagacctttgaatccatgacgcaaggagaattgcgttatttaaagcctagttaacgcatttactaaacgcagacgaaaatgggaaagattaaattgggagtggtgaggatgaaacaaatttgggagaagatagaaagttttgaaagtggaaaaacttggaagaacagaatgtttttaaatatttttagcccgtaaaatgtatatatttgtaaccttgggcccgtgaaccacccctaagggccgaatttcccagcacacttggcgggccgtttacttagggggatcccaagcttcgggtcccaaaactttggggtaaatcaatgggccataagctggttccctcgtgtgaaaaattgttatttcggttaaacaatttgnaaaaaaccatcaagaagccggaatccctttttttttttacgnccttgttttgttttaccgtagggcacgtacaaccccttttccttcgncccttggtccaccccgccccccctttaatttttgaaaacccccccccccccangtggatttaaagaaattgtaaaaggggcgggggagaggggggttttcggttttggggcgctttttccttttcttcgttaatgaattcgttggccttgggcggttggcgttgggaaagcggttataatt

SEQ ID NO: 18895 - DNA, 492 bp, Homo sapiens
agggcgaattgggccctctagatgcatgctcgagcggccgccagtgtgatggatatctgcagaattcgccctttcgagcggccgcccgggcaggtacaaacgaggaccggtctggcttagcatccactgaatcttcatttgctgaatcctcaaccccctgctcttcaatacagccctgatcatctgccatcgttcccacggcggtagggcggctgggactggcacagtctctctccgtcgctccgcagcaagggtctggggcccctttagcgaaagcgaaactaaaagtctcccccgcgtaccttttacgctgccagaatgaatgtagggctgctatgccagctagcatattaccctttttactgccctcaccgcagttcagtgtttgccaaagtgtgaaccaaaactgcttgtatcacagaatctcttgggacagggcctggcgttcttaattttaaacaagctctccaaatgctcagtgacactctaaaa

SEQ ID NO: 18896 - DNA, 599 bp, Homo sapiens
  misc_feature 10, 20, 43: n = A,T,C or G
ctcactatanggcgaattgngccctctagatgcatgctcgagncgccgccagtgtgatggatatctgcagaattcgcccttagcgtggtcgcggccgaggtactacctattaactttgatggagaaagattccctgtatcactttcatattttaaggggaaggtttcagtttcttccttagtagtttttctaagccagcactgaattcgaggaactctgatttgggttgaacaattgtttccctcacaatttcttccacttcctgagggaggcctttgccatattgagcaacaatggaagcaaatgagctaagcgtctggtctgatggagacatttgggcagctaaataagatccaacttcatgagttttatcaggaactacattggaggaataaaaatccttcctgtctggaactatggtgtccatcgtaacccatggtgacccgcgtacctgcccgggcggccgctcgaaagggcgaattccagcacactggcggccgttactagtggatccgagctcggtaccaagcttggcgtaatcatggtcatagctgtttcctgtgtgaaattgttatccgctcacaattccacacaacata

SEQ ID NO: 18897 - DNA, 586 bp, Homo sapiens
  misc_feature 343, 348, 350: n = A,T,C or G
actcactatagggcgaattgggccctctagatgcatgctcgagcggccgccagtgtgatggatatctgcagaattcgcccttagcgtggtcgcggccgaggtacttggcctcgctgatccgttccgtggtcgccctgcacaacctcatcaacaacaagattgccaaccgggatgcagagaagaaagaagggcaggagaaagaagagagcaaaaaggataggaaagaggacaaggagaaagataaagataaggaaaagagtgatgtaaagaaagaggagaaaaaggagaaaaagtaaaacatgtattaaatagcttttttaatttgtaaattaaaatcttacanaccananaaaaaaaataaaaaaaaaaaaaaaggtccacaatggtttattaaaggaatgtatggcccacatcaacctagcaaggattctactggtaaaccttcctatggtcaaaggaaaaacaagcaggagttgagtggctggggtggggtgcaggcaatggagagagggcagaagggtgtaaaagctgaaggggtctagaagcttactcctgagtttcttccttctgtcttcaaatctttact

SEQ ID NO: 18898 - DNA, 606 bp, Homo sapiens
ccctctagatgcatgctcgagcggccgccagtgtgatggatatctgcagaattcgcccttacgagcggccgtccggacaggtacctagcgaggtttctgcctgagctacccacataactaatgctggtcctctggctgctcagtgaaaggatacacgaagaaccaggcggtgaagaacatgccaatggccaaaagcaccacggtcagatgggggaagacagctgggaacactgggctggtatatctgctcatggcctcaagctccattttgccccgagaaggctaatccgacgctccgacaccctccgcgtactcttgaatacaagtttctgataccactgcactggctgagaatttccaaaactttaatggactaactgacagcttcatgaaactgtccaccaagatcaagcagagaaaatgattaatttcatgggactaaatgaactaatgaggataatattttcataaatttttatttgaaattttgctgattctttaaaagtcttgtatcccagatttcatgaaactttttttcttttaagctatccccagcttaccagcaattgataaaatatacttatgggaaaaaaacaaaaaaaaaaa

SEQ ID NO: 18899 - DNA, 510 bp, Homo sapiens
gactcactatagggcgaattgggccctctagatgcatgctcgagcggccgccagtgtgatggatatctgcagaattcgccctttcgagcggccgcccgggcaggtacctctactgatgcatttttatttttttctaggcgggagtcaggtaaatcatttaaaaggtaaatcagattgtgccattacctcacctgctcaaaagtctccagtggcctatcacactttgactaatatccaaattgctggggcagaaaagttcttgatgatctggcttttctccttcccatttcctcctcataaatcactctcccatgcactatttctatgtcttggcatttttctttcatgatatttatgtcatagagccttttctcataggtcactcctttactttcttttgatctctgttaaaacagtaccttggccgcgaccacgctaagggcgaattccagcacactggcggccgttactagtggaaccgagctcggtaccaagcttggcgtaatcatg

SEQ ID NO: 18900 - DNA, 406 bp, Homo sapiens
cactactatagggcgaattgggccctctagatgcatgctcgagcggccgccagtgtgatggatatctgcagaattcgccctttcgagcggccgcccggcaggtacgcgggtgagccttggtggaaggaacctctctgttgatatttaaagaatgaggctgtggtattcattggtagaaaatgccaaatttcacttttgaaaccatagtccaagtctctaggttggtagaaggaaaaggaaggaagtggtccccagtgattctagatctggttggaaacttctgcctcatgactctgtccttgagtcctttgacagcacacaaacatacattttattttaacaaccattctttgatccacagactgggtggtcgccgtacccggatggttagtgatactgctactga

SEQ ID NO: 18901 - DNA, 458 bp, Homo sapiens
tatagggcgaattgggccctctagatgcatgctcgagcggcccgccagggtgatggatatctgcagaattcgccctttcgagcggccgcccgggcaggtactttttttttttttttttaattttttaaatctctatggcatatttttccaatttctgcttttctttttttttcttttctgcttagcacctatggacataattcaacatgatgccctctttcttctggaggggtgtgataactgcttgataataagcactttttcaggcctattgagaatgtggttaatgattctaaacttgatttttcataacttgtaaaatagagctgacagtattatagttctgaaaacagttttgcgttatttgggtatcaaaataaagtttgaaacaattaggatgtgatttgcaaataacctttcacaaaacatgttgactcagattttgtcatgatccttct

SEQ ID NO: 18902 - DNA, 466 bp, Homo sapiens
tatagggcgaattgggccctctagatgcatgctcgagcggccgccagtgtgatggatatctgcagaattcgcccttagcgtggtcgcggccgaggtaccttcagcagttgtaggagaagaactggcttcagcagaagtggtgacaggtgtgctggtgtcaacaggagttgttgaaagggtgctagcctcagaattggccaacagcgtggtgctgacaagtatatttgttaatggagtgcttctttcaccaggagttgaggttggcatgctgctaccttcagcagttgtaggagatgaactggttccagtggaagtggtcacaagtgtcctggtgttaacaggagttgttgaaagggtgctagcctcagaactggccactggcatggtgctgacaagtatacttgttaatgaagtacctgcccgggcggccgctcgaaagggcgaattccagcacactggcggccgt

SEQ ID NO: 18903 - DNA, 447 bp, Homo sapiens
agggcgaattgggccctctagatgcatgctcgagcggccgccgtgggatggatttttgcagaattcgcccttatcgtggtcgcggccgaggtacgcgggactttatgattttattaatcaaaggtcaaaaacagtccaaattaatttatgctgttagaaatcagggtagttgttacctttggaagggggagggtgggtgactggaacaggtaaggagaggacctccaggtgctggtaatgtcctctttcttgatctggggactggttacatgtgtgtgcttagttttcaaaaattcaaactaaggctgggcgcagaggcccccaggattttggacggccgagttgggaggatcacctgaagccaggagtttgagaccagcctggccaacatggtgaaaccccgtctctactaaaaatacaaaaattagctgggcgtaatggtgggcg

SEQ ID NO: 18904 - DNA, 507 bp, Homo sapiens
gactcactatagggcgaattgtgccctctagatgcatgctcgagcggccgccagtgtgatggatatctgcagaattcgcccttagcgtggtcgcggccgaggtactttttttttttttttttttttttggacttttaaaataacctttattttttaaaagttagtatgtgcattataggaaattgaaaaacacaagcaaagaacaaagtcattcacaatcacaagcagtttatagtttgacatattcttctagatcctgtgtgtaggcacaacatccaattttatgggactgagactgtacacaatggtttattaaaggaatgtatggcccacatcaacctggcaaggattctactggtaaaccttcctatggccaaaggaaaaacaagcaggagttgagtggctggggtggggtgcaggcaatggagagagggcagaagggtgtagaagctgaaggggtctaaaagcttactcctgagtttcttccttttgtcttgaaatctttac

SEQ ID NO: 18905 - DNA, 338 bp, Homo sapiens
  misc_feature 138, 178, 193: n = A,T,C or G
ctatagggcgaattgtgccctctagatgcatgctcgagcggccgccagtgtgatggatatctgcagaattcgcccttagcgtggtcgcggccgaggtacaaagacttaagcagagcaaatagggttaaaaaaagaatntggaagaaagtaatggatatacattttccaaggtgagagnagaagaataccatangagtggagaaagcataaacaaaggcatggaaatgggaactggaaagcccaccaacttggctaacatagagaaagcagagcagtaaagagtagggggtaactacaggggcatggggatgcatgaggaaccagtttgtaaagattac

SEQ ID NO: 18906 - DNA, 468 bp, Homo sapiens
actactatagggcgaattgggccctctagatgcatgctcgagcggccgccagtgtgatggatatctgcagaattcgccctttcgagcggccgcccgggcaggtacgcggggatccctgactcggggtcgcctttggagcagagaggaggcaatggccaccatggagaacaaggtgatctgcgccctggtcctggtgtccatgctggccctcggcaccctggccgaggcccagacagagacgtgtacagtgcatattggcggcgcacgcctcattacgattcgcctgtttgcttctcctgttcaatcgtttctttggaaggcagtggatttttctcttgcgtctctgtcttcttcagtttcgacttatcgaatttctcgatctcagccatatcgggtttgtcagacatggttgcggaggaaaagcgaagcgaggcgcacgagtaccttggccgcgaccacgctaagggc

SEQ ID NO: 18907 - DNA, 507 bp, Homo sapiens
ctatagggcgaattgggccctctagatgcatgctcgagcggacgccagtgtgatggatatctgcagaattcgccctttcgagcggccgcccgggcaggtactttttttttttttttttttttatgggttttttttttttttttttttttttttttttttttttttatttttatttttttttttatatttttttttattttaatattttaaattttttttttaattttttttttcttatagaaaagtggggattatataatttctttatggaggtggagaaaaaaaaaaataatttttttttttaaagggctaaaaatgcctggcaccctcacagggggaaaatttaaaagggctaatttttgtgcacccacaaacttaataaaaaaatacagtttcgttccctggcttggcaaaaaaaaaaaattatctgtttcctgggggaaattgttttttaaaaaaaaaaacactttttttacaaagggggaaaaaaaaaatttttaagcctgg

SEQ ID NO: 18908 - DNA, 214 bp, Homo sapiens
cccgggcaggtacgcgggagaacagcgcagtttgccctccgctcacgcagagcctctccgtggcttccgcaccttgagcattaggccagtctcctcttctctctaatccatccgtcacctctcctgtcatccgtgtccatgccgtgaggtccattcacagaacacatccatggctctcatgctcagtttggttctgagtctcctcaagctggga

SEQ ID NO: 18909 - DNA, 388 bp, Homo sapiens
acgactcactatagggcgaattgggccctctagatgcatgctcgagcggccgccagtgtgatggatatctgcataattcgcccttagcgtggtcgcggccgaggcacagcccgacatgatgacattctactttcatgtcggacatgctgcagggaaaattctgtaagtgtcctaataggctggaatcatttgctagggtgaaccccatctttggagctcacttttctgctatcttataattagctttattctaagcaaatccatgtctattatatttatctgtttatacacttatctatatgtatggaaaaacacttttttttatttacttattgatttagagacagggtctccgtctgttacccaagctggagtacctgcccgggcg

SEQ ID NO: 18910 - DNA, 577 bp, Homo sapiens
acgactactatagggcgaatcgtgctctagcgatcctgctgtgatggatatctgcagaattcgccctttcgagcggccgcccgggcaggtacgcggggtgcacctgtaattccagctatttgggaggctgaggcagaggaatcaattgaacccagaagacggaggttgcagtgagccaagatagcgccattgctttccagcctgggcgacagagcaagactccatctaaaaaaaaaaaaaaaaagacggaataatggaatagaattttgggaaagtttgtcaaaaatatcagaggtttaaaaatacttgattaaagtagatcacagatcacttgaagtaatacctactgatttaaccagagtggtaatttagagacaaatatagaaagttacacagttgcttaaaaaaaaaaaagtacctcggccgcgaccacgctaagggcgaattccagcacactggcggccgttactagtggatccgagctcggtaccaagcttggcgtaatcatggtcatagctgtttcctgtgtgaaattgttatccgctcacaattccacacaacatacgagccggaagca

SEQ ID NO: 18911 - DNA, 615 bp, Homo sapiens
  misc_feature 205: n = A,T,C or G
acgactactatagggcgaattgggccctctagatgcatgctcgagcggccgccagtgtgatggatatctgcagaattcgcccttagcgtggtcgcggccgaggtacgcgggtattcatatgttgatctgatataactatgttgttaggaatgtatgagacacatatatttgggtttctgaagacagatatgaactgaagacaatnttttcaagttattagcatcttccaggtggtagttggaatactgaaatggattaaatcacctgatcatctgtagacattaaagaaggctaaggacagagtccctgaagtaacaacatttaaggatcatgcagaaaaagaatcagcaaaagaaaaaacaaaccaggaaggtaaggaagatttaggagagtgatgtcagagatggaaagagtttcaaaaaaaaaaaaaaaaaaaagtacctgcccgggcggccgctcgaaagggcgaattccagcacactggcggccgttactagtggatccgagctcggtaccaagcttggcgtaatcatggtcatagctgtttcctgtgtgaaattgttatccggtcacaaattcacacaacatacgagccggaagcataaagtgtaaagc

SEQ ID NO: 18912 - DNA, 495 bp, Homo sapiens
gcgaattgggccctctagatgcatgctcgagcggccgccagtgtgatggatatctgcagaattcgcccttagcgtggtcgcggccgaggtacgtgcctctttattccagtaggtggctctaaagtccaattgtttatttttctataacaagaccggagcacaaaattgtgctaaatttgaaaaataacttaatgaggagtattttctgcttagcttctttcctgtcaaaataaaataattttttttcattcaatagtagttgaaccacctgaagctggtttatagaaaacaatgctaaacataaaatgttgctataatatgttataatataacctaagattctttgtatttgtccacagatagaatccagactaacttggcaaaattactcctcattatgtgctgtttctataaaaaaaatagtttatttgcactttgtatcctattaaccctagctgttcacatttttttttccttggaagtacctgcccgggc

SEQ ID NO: 18913 - DNA, 392 bp, Homo sapiens
tacgactcactatagggcgaattgggccctctagatgcatgctcgagcggccgccagtgtgatggatatctgcagaattcgcccttagcgtggtcgcggccgaggtacgcggggagaattgcgctgtccacttgtcgtgtggctctgtgtcgacactgtgcgccaccatggccgtgactgcctgtcagggcttggggttcgtggtttcactgattgggattgcgggcatcattgctgccacctgcatggaccagtggagcacccaagacttgtacctgcccgggcggccgctcgaaagggctaattccagcacactggcggccgttactagtggatccgagctcggtaccaagcttggcgtaatcatggtcatagctgtttactgtgtgaaa

SEQ ID NO: 18914 - DNA, 393 bp, Homo sapiens
tatacgactcactatagggcgaattgggccctctagatgcatgctcgagcggccgccagtgtgatggatatctgcagaattcgcccttagcgtggtcgcggccgaggtactctgggactggagacactgaagaaggcaggggcccttagagtcttggttgccaaacagatttgcagatcaaggagaacccatgagtttcaaagaagcgctagtaaggtctctgagatccttgcactagctacatcctcagggtaggaggaagatggcttccagaagcatgcggctgctcctattgctgagctgcctggccaaaacaggagtcctgggtgatatcatcatgagacccagctgtgctcctggatgggtttaccacaagtccaattgctatggtta

SEQ ID NO: 18915 - DNA, 404 bp, Homo sapiens
aattgggccctctagatgcatgctcgagcggccgccagtgtgatggatatctgcagaattcgcccttagcgtggtcgcggccgaggtaccaagactccagacctaagttttgtgactatactgtgccttcccgtttctcagaaaccaaagccatagtcgtaacaagctagtttgcatcttgtgccctgaagccaaggtctctctctgggtacttggggtggttgggaacagagccaggcatccaccgtgcacgctgaagggtggcccagaggtgttcatctgggctataagtgtcttttacccattcaatcagttgttgggatttagggttcttcaaaacatgttggacgaaatcttgggaagccacaatgtacctgcccgggcgggcgctcgaaagggctaat

SEQ ID NO: 18916 - DNA, 167 bp, Homo sapiens
  misc_feature 131: n = A,T,C or G
tgcatgcatggacggctgcagaattcggccttagcgtggtcgcggccgaggtacagatggggtttcaccgtgttagccaggatggtctcaatctcctgacttcatgatccacctgccctcggcctccaagngctgggattacaggcgtgagcaaccgagcccagcca

SEQ ID NO: 18917 - DNA, 448 bp, Homo sapiens
tacgactcctatagggcgaattgggccctctagatgcatgctcgagcggccgccagtgtgatggatatctgcagaattcgcccttagcgtggtcgcggccgaggtactttttttttttttttttttttttttgtttttttttttttttttttttttttttttttttttttttttttttttatactttttttttttttccccccccccctttaccccttttttttaggggggggggggaggcctttaccccgccccccccttggcccggggcggggcccccgggggggacccccccccccccctggggggaaggttttttaaaggccccgggggccccccccccccccccggggggggccccccccccggccgggagacccgggccccccccggggcctttttgtggccgcgcccaaaaaaaaaaataaagttttgtttttccccccgg

SEQ ID NO: 18918 - DNA, 529 bp, Homo sapiens
gcgaattgggccctctagatgcatgctcgagcggccgccagtgtgatggatatctgcagaattcgccctttcgagcggccgcccgggcaggtacgcggggaaagcggagccgggagtttttgctacagttttcgccaccgtgagtcgcagctataatgatgagctgagttcttggagaagatcaataaaaactgctggaggattaagaagggcttcgtgcccaacatgcaggttgaaggtgttttctatgtgaatgatgctctggagaaattgatgtttgaggaattaaggaatgcctgtcatggagcgggccgtgcattgtcccgagcaaaatctcgacgtaatttagatttccaggatgtcttagacaaattggcagatatggaaattgcgatccgtgttgcctcacccaaactggttatggaagaggctcctgagtcctataagaatgtgacagatggtggaaatacctgccatgatgctggaatcaacaagaaagccattatactgagaccaattgctgggatca

SEQ ID NO: 18919 - DNA, 623 bp, Homo sapiens
atacgactcactatagggcgaattgggccctctagatgcatgctcgagcggccgccagtgtgatggatatctgcagaattcgccctttcgagcggccgcccgggcaggtacgccggggagctcacacctgtaatcccagcactttggaaggccgaggtgggcggatcacctgagctcaggagtttgagaccagcctgtctctactaacaatataaaaattagctgggagtcacggtgggcgcctgtagtcccagctactcgggaggctgaggcaggagaattgcttgaacccaggagacagaggttgtagtgagctgagatcgcaccactgcactctagccttggcaacagtgcaagactgtctcaaaaacagcaacagagagcaggacgtgagacttctacctgctcactcagaatcatttctgcaccaaccatggccacgtttgtggagctcagtacctcggccgcgaccacgctaagggcgaattccagcacactggcggccgttactagtggatccgagctcggtaccaagcttggcgtaatcatggtcatagctgtttcctgtgtgaaattgttatccgctcacaattccccaccacatacgaacccgaagcataaag

SEQ ID NO: 18920 - DNA, 486 bp, Homo sapiens
  misc_feature 81: n = A,T,C or G
agatgcatgctcgagcggccgccagtgtgatggatatctgcagaattcgcccttcgagcggccgttcgggcaggtactttnttttttttttttttttttttagtatcgatctcttttaatttttaggccaattttgagtagtcaaagtcagagcagtcaatctgtgttgtgagccgaggcacagctgcagaagcgtgtctgaggtgtccggtggaggtggcagccgagctctgggactaatcaccgtgctggggacggcaccgcgtcaggatgcaggcagatccctgcagaagtgtctaaaattcacgctcctcttctggagggacgtcgatggtattaggatagaagcaccaggggaccccacgaacggtgtcgtcgaaacagcagcccttatttgcacactgggagggcgtgacaccaggaaaaccacaattctgtctttcacggggggccactgtacagtgcgaaaataccagaactcaacct

SEQ ID NO: 18921 - DNA, 425 bp, Homo sapiens
aatacgactactatagggcgaattgggccctctagatgcatgctcgagcggccgccagtgtgatggatatctgcagaattcgcccttagcgtggtcgcggccgaggtacattgacattgatattcaccatggtgacggcgtggaagaggccttctacaccacggaccgggtcatgactgtgtcctttcataagtatggagagtacctgcccgggcggccgctcgaaagggcgaattccagcacactggcggccgttactagtggatccgagctcggtaccaagcttggcgtaatcatggtcatagctgtttcctgtgtgaaattgttatccgctcacaattccacacaacatacgagccggaagcataaagtgtaaagcctggggggccttatgagtgagctaacttacatttattgcgttgcgc

SEQ ID NO: 18922 - DNA, 463 bp, Homo sapiens
ctacttagggcgaattgggccctctagatgcatgctcgagcggccgccagtgtgatggatatctgcagaattcgccctttcgagcggccgcccgggcaggtacacaccagaatacaagacagtattggacaatgccaccgaagtagtgaaagagaaaatcacaaaagtgaccacacagcaaataatgattaatgatatttgctcagacatgatgtgtttcaacaccactggcacccaagtgcaaaacattacggtgacccagtacctcggccgcgaccacgctaagggcgaattccagcacactggcggccgttactagtggatccgagctcggtaccaagcttggcgtaatcatggtcatagctgtttcctgtgtgaaattgttatccgctcacaattccacacaacatacgagccggaagcataaagtgtaaagcctggggtgcctaatgagtgagctaac

SEQ ID NO: 18923 - DNA, 551 bp, Homo sapiens
acgactcactatagggcgaattgggccctctagatgcatgctcgagcggccgccagtgtgatggatatctgcagaattcgcccttagcgtggtcgcggccgaggtacacagaagtcaataattgaagtttgggaacctctgcctagatttcagaggatgcatggaaatgcctggatatccaggtcagaaatcttgctacagatgcagtggccctcattgtgaacactctgctagggctagtgtggaagggaaatgtggggttggagcccccacacagagtccccactgtggtactgtgcaggtgggttagaggctgcgtggcaggagaggttcaaattatcccctggacggtaattggcctttgagggggaaatggtggggccatctgggccatagaggacattcagggtgactgggtcactgcggttggcactcgctgggttctgtatttcacattcataggatcctgcatcgttccttttgacgctgagtagagtgaggggtatgttgccattggacagctgcagcctgggactgaccgggagggcttt

SEQ ID NO: 18924 - DNA, 528 bp, Homo sapiens
tacgactactatagggcgaattgcgccctctagatgcatgctcgagcggccgccagtgtgatggatatctgcagaattcgccctttcgagcggccgcccgggcaggtacccttgaggaggtgggtagggtccccccataggtcctggacccattggttgtggtggataaggtgggtatggggccgttggaccagggcctggatatggtggagggttctcttggttcattggggacctgtaaagtgcacctctgctctccacgaaccgactggataacggtcgggtctgaacctccccgcgtacctcggccgcgaccacgctaagggcgaattccagcacactggcggccagttactagtggatccgagctcggtaccaagcttggcgtaatcatggtcatagctgtttcctgtgtgaaattgttatcccgctcacaattccacacaacatactagccggaagcataaagtgtaaagcctggggtgcctaatgagtgagctaactcacattaattgcgttgcgctcact

SEQ ID NO: 18925 - DNA, 312 bp, Homo sapiens
acgactcactatagggcgaatcgtgccctctagatgcatgctcgagcggccgccagtgtgatggatatctgcagaattcgcccttagcgtggtcgcggccgaggtacgcgggggaatgtataaatgtccattgccatcgaggttctgctattttggagaagctgatacaactccaaggacaaagttcacagaaatttggttcttagccccaaaatactgattgaattggggacaattacaaggactctctggccaaaaacccttgaagaggccccgtgaaggaggcaatgaggagcttttgattgctgacct

SEQ ID NO: 18926 - DNA, 88 bp, Homo sapiens
  misc_feature 34, 37, 71: n = A,T,C or G
ctcgagcggccgccagtgtgatggatatctgcangantccgccctagcgtggtcgcggccgaggtactttnttttttttttttttttt

SEQ ID NO: 18927 - DNA, 345 bp, Homo sapiens
cgaattgggccttctagatgcatgctcgagcggccgccagtgtgatggatatctgcagaattcgcccttagcgtggtcgcggccgaggtactttttttttttttttttttttttttttaggctctagagggggtagagggggtgctatagggtaaatacggccctatttcaaagatttttaggggaattaattctaggacgatgggcatgaaactgtggtttgctccacagatttcagagcattgaccgtagtatacccccggtcgtgtagcggtgaaagtggtttggtttaaactttcgggaattgcatttgtttttaagcctaatgtggggaccagttatgag

SEQ ID NO: 18928 - DNA, 379 bp, Homo sapiens
agggcgaattgggccctctagatgcatgctcgagcggccgccagtgtgatggatatctgcagaattcgccctttcgagcggccgcccgggcaggtacatcttcagagcagatacatggacagcttttattctgaaatgtcttcttaagtgtgtttgcatggcaaacagttttggaaggtaaagataatgtctccctccaaagcaaaggacagatttgctttctatttagaataataaagataatgtctctttccagggcaaaggatggacaagctactggcagtccctttaaaagtctgctatctcctaagctcagggaatctcacctcttatataagtcttgtgtgtacctcagccgtgaccactctaaaggcgaatt

SEQ ID NO: 18929 - DNA, 489 bp, Homo sapiens
ctatagggcgaattgggccctctagatgcatgctcgagcggccgccagtgtgatggatatctgcagaattcgcccttagcgtggtcgcggccgaggtacatttattgattcatttattttaaatatttaatatttttcttgctatagtgaatggcatcttgttaaaactacctgatctatatggttcttgcttatatataggaaagctattgagttttaaatgtttacttgatctggacagtgtcatgaatatatgattaggtctaatagttattcataagtagccaataattttgttggtaagaaatgatgtcatatataaataaggtgggttttatcctttttctacaatctttatacctcatttatttttcttgtctcatttcattggctggaaccttcatagtgatatttgagtttccttatcttttcctagaaataagaatggctctcttgtttcaccctttaggtatgatgaatactactgaa

SEQ ID NO: 18930 - DNA, 606 bp, Homo sapiens
gagtcgacgcgtaagacgtgcgactgactatacggcgaattgggccctctagatgcatgctcgagcggccgccagtgtgatggatatctgcagaattcgccctttcgagcggccgcccgggcaggtaccttcagctctcacacaaggactcagttacatacagttgctttgagagcaagttcgtaatgttagataagatttgcagcttcctttgggtgcctgctttgagcacagatcacaaatatgactcccacaacactacataagtctcagttaaacaaaagagtcaaaataaacaaggatagcacaatcatggtaaagacaaagaaacaatttgagttacttcaattctatcattttatgtgactccttggagtttttatttgtggttgaaatttaaaacagcgaaacagtgcacaaactgcaaaggtagtcattttgtttgataagggcaaattttagcttgttcatgaaacgttttactggctgtaaggactattttttaaattaaacgttatttttcttattttggtagctgttttaaaattaaagactacatctagaaataattaacattaagtcaagggaataataatttaatgatta

SEQ ID NO: 18931 - DNA, 616 bp, Homo sapiens
cgactactatagggcgaattgggccctctagatgcatgctcgagcggccgccagtgtgatggatatctgcagaattcgcccttagcgtggtcgcggccgaggtaccacaaattactgatttcagcaccagggagcaaaaagacaaatatccctgtcctgtggcacttacattctaatggctagacagagaaacaacaatatgcattaaagtaattcattcacgcaatgctataaagagattagatgtgtggggaaattttagagggatgtagtgaaccagtgggaggaaaagtggaaatgtaaattatttaaatggagttgccaggacagaacttctccagaagatgattagaaccatttgacttttcagagccctgaaagtcaaaagtacctgcccgggcggccgctcgaaagggcgaattccagcacactggcggccgttactagtggatccgagctcggtaccaagcttggcgtaatcatggtcatagctgtttcctgtgtgaaattgttatccgctcacaattccacacaacatacgagccggaagcataaagtgtaaagcctggggtgcctaatgagtgagctaactcacattaattgcgttgcgctcact

SEQ ID NO: 18932 - DNA, 548 bp, Homo sapiens
atagggcgaattgggccctctagatgcatgctcgagcggccgccagtgtgatggatatctgcagaattcgccctttcgagcggccgcccgggcaggtacttacaatattgttttatatgttttatggaaggaaagaactcctcctagctttaaagtaaaatagagcaaaactgacttgaccccgattttcctttaaatccgtatctcaaagtattttaaatctgaagtaaagactacttgtgtcaatgcaacatatatttttgtagacctttgttccttgttgtccaccacttctatgtacctcggccgcgaccacgctaagggcgaattccagcacactggcggccgttactagtggatccgagctcggtaccaagcttggcgtaatcatggtcatagctgtttcctgtgtgaaattgttatccgctcacaattccacacaacatacgagccggaagcataaagtgtaaagcctggggtgcctaatgagtgagctaactcacattaattgcgttgcgctcactgcccgctttccagtcgggaaacct

SEQ ID NO: 18933 - DNA, 324 bp, Homo sapiens
gggccctctagatgcatgctcgagcggccgccagtgtgatggatatctgcagaattcgcccttagcgtggtcgcggccgaggtacttttttttttttttttttttttttgctaaaaggaactagaagatataaaacctcagagcctgtatccacccagtcttcatttgagaaaagcgcaaataacagattctttcagtttgcctgtgtctctcaccactaagctgtaagaagctccctccaaatgagaacgtgacacatgcagggaccagtcctgtgctgcaaaccgactcagagggaggccacatgcgttcctgagcaggttg

SEQ ID NO: 18934 - DNA, 214 bp, Homo sapiens
  misc_feature 155, 156: n = A,T,C or G
atacgactcactatagggcgaattgggccctctagatgctgctcgagcggccgccagtgtgatggatatctgcagaattcgcccttagcgtggtcgcggcccgaggtacgcggggctctgaagccgtggatacagaaatctctgcaggcaagttnngctcccagaagcatattgcaggacaagcctgtaaccgaatagttaaattcacggcatc

SEQ ID NO: 18935 - DNA, 465 bp, Homo sapiens
  misc_feature 104, 105, 106: n = A,T,C or G
actatagggcgaattgggccctctagatgcatgctcgagcggccgccagtgtgatggatatctgcagaattcgccctttcgagcggccgcccgggcaggtactnnntttttttttttttttgtttttttttgagatggaatcttgctctgtaagttttgtatttttagtagagacggagttttgccatgttggcaaggctggtctcgaactcctgacctcaggtgatccgcccgccttggcctcccaaagtgctgggattagaggcgtgagccactgtgcccggcctaaaggcatttactttttataaaatcataatttgggacagatgtgaatttcagcaaagccatgttacatttaatctaaccactggtatttataatttactttgaatgtttttacaaagaatttgctcataattttcatttcaaggctcactgcctatcattcggatataactttgatag

SEQ ID NO: 18936 - DNA, 190 bp, Homo sapiens
ccctctagatgcatgctcgagcggccgccagtgtgatggatatctgcagaattcgccctttcgagcggccgcccgggcaggtacttattccttttgaaaaaccggacttcacctctgtcggcaaattcatatgcctcgttaacccatttggcagtggggacagaaaacagaaatgaaattgagctcaact

SEQ ID NO: 18937 - DNA, 678 bp, Homo sapiens
ctatagggcgaatggggccctctagatgcatgctcgagcggccgccagtgtgatggatatctgcagaattcgcccttagcgtggtcgcggccgaggtacatttggcatgatctgggcctatgcggtcttacaatccctgtataaaactagacaatgaaaaacagaaaacaaaacaaacaaacaaaaaaacaagaacgaagcacctaccacatgccagctactgaggctatgaaggtattctcccgccttagaaagcccaggattaatgcaggattgcgacatttaaacagaacatttccatacagcatgagtataaatgactttcccaagtttacactgagagtaactgacacagcaaccccagcaaagtctgagctgagtcctgaataattgtataaaaaggggagagaaacagagtgaagaaagggtttcccagactctgtcccaggaaagaaaatgagctcgtggagaggaatagactttctctatgaaaacagagggaacaaagaggaagatgtctgggaaccgaggagtaatagagacctgagtttacatcactactctgccactccctaggtacctgcccgggcggccgctcgaaagggcgaattccagcacactgggcgccgttactagtggaatcgagctcggtaccaagcttggcgtaatcatggtcat

SEQ ID NO: 18938 - DNA, 638 bp, Homo sapiens
tacgactcactatagggcgaattgggccctctagatgcatgctcgagcggccgccagtgtgatggatatctgcagaattcgccctttcgagcggccgcccgggcaggtaccatcatgaaatatcatgccatcctactctgtcccacccaggagagaaaccatccctttgtccgcagtatctatactgtatataccacccttccactagttacttagtagccatttctattagattggctgtcatggtatcatagtaattgagtccaagtaattcttattttacttaataatagctccaaagcagaaaagtaatgatgctggcaatttggatatgtcaaatagaagttgccaagttctacctttaagtgaaaatgtaaaacttcttgaattggtaaggaaaggaaaaaaatatataccaaggatgctaagatctatgctaagaatgattcttctatccatgaaactgtgaattagaaaaaggaaatttgtgctagttttgctgttgtgcctcaaactgcaaaagtcgtggtcacagtgcatgataagtacctcggccgcgaccacgctaagggcgaattccagcacactggcggccgttactagtggatccgagctcggtaccaagcttggcgtaatca

SEQ ID NO: 18939 - DNA, 523 bp, Homo sapiens
tcactatagggcgaattgggccctctagatgcatgctcgagcggccgccagtgtgatggatatctgcagaattcgcccttagcgtggtcgcggccgaggtacatgtgactttatacattttacatttgtaataaaaaaatcatgaaaagtatgctttgaacctgttggtaaattctaaaaaggaactaatttgaaagatttataaatcaaatttgttaagtggccaaactattttttatttgaaaataacaaaattccaactcgagcaaagctggttggaaagaaggaataactgccttttctaagctttatcagctaggaagcagataggaattaataattccaagaagagaagaagttttatgaaaagaaattgaagtcgtcatgctgtagagtctgagcagctcatcttggaagtttaaacgggtccatctcccccacagcagccacaacactggcagtccccacagagggtccccaggaggccattgaccacctggatggcgcaaagaaccatttggat

SEQ ID NO: 18940 - DNA, 455 bp, Homo sapiens
  misc_feature 39: n = A,T,C or G
gcgaattgggccctctagatgcatgctcgagccggccgncagggtgatggatatctgcagaattcgcccttagcgtggtcgcggccgaggtacaccaaatgagatactatttggaaaggcaataaagggagtgtaaaagcctaggtagcttaaatacaggctctggaatttccttcgcaagaaggtgaagcaccaatgatggcaaaaattaaataaatacatcatcttaaaaaggcagagggtaggctgcgtgcagtggtttacgcctataatcccagcactttgggaagccaaggcgggcacattgcttgagctcaggagtttgagaccagcctggacaaccccatctctacaaaaaaataaaaatcggccaggtgtgatggggcaaacctgtggtctcagctactgggagggtggtccttgagcccaggaggtcaagcctgccatgagtcaag

SEQ ID NO: 18941 - DNA, 689 bp, Homo sapiens
tacgactcactatagggcgaattgggccctctagatgcatgctcgagcggccgccagtgtgatggatatctgcagaattcgcccttagcgtggtcgcggccgaggtaccgaccatagagcaagaatcaagattctgctaactcctgcacagccccgtcctcttcctttctgctagcctggctaaatctgctcattatttcagaggggaaacctagcaaactaagagtgataagggccctactacactggcttttttaggcttagagacagaaactttagcattggcccagtagtggcttctagctctaaatgtttgccccgccatccctttccacagtatccttagcgtggtcgcggccgaggtacgcggggagaagcttggaccgcatcctagccgccgactcacacaaggcagagttgccatggagaaaattccagtgtcagcattcttgctccttgtggccctctcctacactctggccagagataccacagtcaaacctggagccaaaaaggacacaaaggactctcgacccaaactgccccagaccctctccagaggttgtggtgaccaactcatctggactcagacatatgaagaagctctatataaatccaagacaagcaacaaacccttggatgattattcatcacttggatgagtgcccacacagtcaagctttaaagaa

SEQ ID NO: 18942 - DNA, 280 bp, Homo sapiens
ccctctagatgcatgctcgagcggccgccagtgtgatggatatctgcagaattcgccctttcgagcggccgcccgggcaggtactcttggtttgtcaatgggactttccagcaatccacccaagagctctttatccccaacatcactgcgaatatgaaggagcctatacgtgccaagcccataactcagacactggcctcaataggaccacagtcacgacgatcatagtctatgcagagccacccaaacccttcatgaccagcaacaacttcaaccccgt

SEQ ID NO: 18943 - DNA, 412 bp, Homo sapiens
attgggccctctagatgcatgctcgagcggccgccagtgtgatggatatctgcagaattcgccctgagcgaggacgcggccgaagtacaaccattttcattatattactactagaaagtttaaatacagaaataatcttgaaagaaggcagagaaaaatgacacattaacgtatagaaaaaaaatgactactgacatcataaaaaataataaatgccagaacacagtagaaatacacattgcaagtgctaaaaaaagctttcaaatgagattatatgctccaaatatatcatttaagaatgaaagcaaaattacactttcagttatgatggagtaacaaggactacatatacttcaactctaaacaataagaagacacaactgtattcattcattcatttaaagacagagtc

SEQ ID NO: 18944 - DNA, 378 bp, Homo sapiens
ggcgaattgggccctctagatgcatgctcgagcggccgccagtgtgatggatatctgcagaattcgccctttcgagcggccgcccgggcaggtacaagagatagaaagaccagtccttgctgaaagacaagtctgaatgctccactttttcaattctctctccattcttcagtaagtcaacttcaatgtcggatggatgaaacccagacacatagcaattcaggaaatttgactttccattctctgctggatgacgtgagtaaacctgaatctttggagtacaatctcatccttccaagcacgactatgtgtaatgctctaagacctctcagcacgggcggaagaaactcccggagagctcacccaaaaaacaaggac

SEQ ID NO: 18945 - DNA, 381 bp, Homo sapiens
  misc_feature 1, 23, 24, 109, 117, 142, 143, 281, 282, 283: n = A,T,C or G
ngattgtaatacgactcactttnnagggcgaaattggggcccctctaaaaaagggccccaatagggccctcttcccgaagaccggggcccgcccaagttggttggaatnggggattnattccttggcaaagaaaaaaaaatnnttttttccgcgggcgccccccttttttccgaagccgcggcccgccccccggggccaaggggttacccccccgcggggggttcacaacaattaacccggggagagggtgcccttgttgggggtgtattccctcgggggnnngggggggggggccccacacaaaccaaccacaagaagagggggaggagagttttccctttttattacaaacttccttttaaattttgcgcgcgccgcgg

SEQ ID NO: 18946 - DNA, 544 bp, Homo sapiens
ggcgaattgggccctctagatgcatgctcgagcggccgccagtgtgatggatatctgcagaattcgcccttagcgtggtcgcggccgaggtacagatagaaaaatgatgtattatgaaaacagttatatgaaggctggagtaactatattaacatcagataaaatatgcttcaagacaaaaagtagtaacagagataaaaagggacatttcattatgaaaaaaagtttaattcattagcaagatatcacaatcataaatatgtatgtggttagcacaaagttaaaaatgcatgaagcaaaaactaatagaagtaaaagaaggaatagacaatttcacaacaaacattaaagattataacactcttctcctgccaattaatagaataactagacaaaacataattatccagattatctgaagattatcaaccatctgtctttaattgatatttatagcacaattgcagaatacaaattctttttgagcacatacagtttatttaaacctaaaaataaaaattaaatatttgttcctgcccgggcg

SEQ ID NO: 18947 - DNA, 141 bp, Homo sapiens
actcactatagggcgaattgggccctctagatgcatgctcgagcggccgccagtgtgatggatatctgcagaattcgcccttagcgtggtcgcggccgaggtactggagatgtatttgataaccaaggttttaggtaaatt

SEQ ID NO: 18948 - DNA, 498 bp, Homo sapiens
gggcgaattgggccctctagatgcatgctcgagcggccgccagtgtgatggatatctgcagaattcgcccttagcgtggtcgcggccgaggtacattcaatttaggttttggacacttagttggataaacaagtttatttgtaaatttagtcaacatacataattgacctaaaaacttcagtaaattttaaaaccacttggaaggccatctctataaaaatgattttcccaggacagtaaccagatgtaacctaacccaacaccatcttaattggcagaggttcagtgggctggagttttgtgctcctcccccacaccaagtttttataatacaaatgccacaagaaaaagaacttcggtacacaatggtttattaaaggaatgtatggcccacatcaacctagcaaggattctactggtaaaccttcctatggccaaaggaaaaacaagcaggagttgaatggctggggtggggtgcaagcaatggagagagggcaa

SEQ ID NO: 18949 - DNA, 206 bp, Homo sapiens
ccctctagatgcatgctcgagcggccgccagtgtgatggatatctgcagaattcgcccttagcgtggtcgcggccgaggtaccttaatagctacccaacaagtcattaacatacagaaacatgcattattagaagcatgaagcatcacccatcccttctgcatattagcaactatgccactcctgagcaaacagtgctcacatcac

SEQ ID NO: 18950 - DNA, 609 bp, Homo sapiens
atagggcgaatagagccctgtagatgcatgctcgagcggccgccagtgtgatggatatctgcagaattcgccctttcgagcggccgcccgggcaggtacgcgggataagagtaagtgtggcagcaatttcccagaaactgtatactatattgaacctgtgagtctttaccatgtatatatatttcctttttcattcatataactttaaaaaaatcaaatttattaataactaagatagtatccttcttgacagcaagcatcaaaaacttaggctgaaattatttttaattttgccttactttcctttggaaatggtatattatggtataaggtacctcggccgcgaccacgctaagggcgaattccagcacactggcggccgttactagtggatccgagctcggtaccaagcttggcgtaatcatggtcatagctgtttcctgtgtgaaattgttatccgctcacaattccacacaacatacgagccggaagcataaagtgtaaagcctggggtgcctaatgagtgagctaactcacattaattgcgttgcgctcactgcccgctttccagtcgggaaacctgtcgtgccagctgcattaatgaatcgg

SEQ ID NO: 18951 - DNA, 448 bp, Homo sapiens
ctactatagggcgaattgagccctgtacatgcatgctccagtcgatccatgctcgagcggccgtcagtgtgatggatatctgcagaattcgcccttagcgtggtcgcggccgaggtactttagtttgccttaacctactttttgttgtatttgtttaatttcttctactggattataattcccctgagtagacagtatttgtctaactatcttagagtgctgagaagagtgtgtggctcagactatgggtgtaattcagttgacacatggtgcatgcctataaggatattctgagagtgacaaagttaagacagacatcagacgtaattagtaaacacacatattacacagttccatattatatatgaatgtaaaacattcagataaggaatatgcccgcgtacctgcccgggcggccgctcgaaagggcgaattccagcacactggc

SEQ ID NO: 18952 - DNA, 339 bp, Homo sapiens
actatagggcgaattgggccctctagatgcatgctcgagcggccgccagtgtgatggatatctgcagaattcgccctttcgagcggccgcccggcaggtacttattatttttatattttatttttttgctctagagggggttgagggggtgctataaggtaaataccggccctatttaaagatttttaggggaattaattctaggacgatgggcatgaaactgtggtttgctccacaaatttcaaagcattgaccgtaatatacccccggtcgttttacggagaaagtggtttggtttaaacgtccgggaattgccattgtttttaggcctaaagtggg

SEQ ID NO: 18953 - DNA, 552 bp, Homo sapiens
  misc_feature 484: n = A,T,C or G
cgactcactatagggcgaattgggccctctagatgcatgctcgagcggccgccagtgtgatggatatctgcagaattcgcccttagcgtggtcgcggccgaggtactcgaatatatgccagcatgaagtgcccagaccagaagtgtctatatacctgtcagatcaaggatggtggtgtgcagcctcagtttgaaattgttcctgaagatgacccccagaatgccattgtcagctcttctgcagatgcttgtcatgcagaactgctcaggactataagcactactatggggaaactaatgcctaacctgcttccagctggagctgacttttttggattttctcatccagccatccacaacctgatccagagctgtccaggagctcgaaaatgcatcaattaccagtgggtgaaatttgatgtgtgcaaacctggagatgggcagctacctgaggggctgccggagaatgatgcagctatgagctntgaagcctttcagagacagatctttgatgaaaatcagaatgatccccttctgccaggatccttggacc

SEQ ID NO: 18954 - DNA, 498 bp, Homo sapiens
  misc_feature 111, 112: n = A,T,C or G
tacgactcactatagggcgaattgggccctctagatgcatgctcgagcggccgccagtgtgatggatatctgcagaattcgcccttagcgtggtcgcggccgagggacttnnttttttttttttttttttttttttttacagagtgggaaacaactttaatgagaaacccagtttcccagtttccctttcatttcaagactatgacattccgacttctttgagggcttccattgcctaggtggcctttttcttgtagttaggcattcttagagctctgggcatgggcttgtcttggccaaaatgtcttttagcaaagtaatcatatatgccaataggcaaatagtgagcaaggcagatccacaagtaagcgcctttccctggcgtgtaataggcaaaagggctcttcgccaagatagcatgctggatgtcccgcagcaccggagagaagtccttgctggctaacgagttgatcaataggaggaaattccgctgtgcta

SEQ ID NO: 18955 - DNA, 391 bp, Homo sapiens
  misc_feature 203: n = A,T,C or G
tacgactactatagggcgaattgggccctctagatgcatgctcgagcggccgccagtgtgatggatatctgcagaattcgccctttcgagcggccgcccgggcaggtacttcaaccagcctacaagctggcacttgctaacaaatcagaaatatgacaattaatgattaaagactgtgattgccacctaagaaaaagctaaangctattataaataacgtacttgggctggaaggccaagacagcaccagaaactagcaacatttattctagtgctcaaaatgtccgcgacaaattggccttctgcatatttatgaagacctttctcagaaaggaagaccagttgtgtaccttggccgcgaccacgctaaggcgcgaattccagcacactg

SEQ ID NO: 18956 - DNA, 399 bp, Homo sapiens
actcactatagggcgaattgggccctctagatgcatgctcgagcggccgccagtgtgatggatatctgcagaattcgcccttagcgtggtcgcggccgaggtactttttttttttttttttttttttttgagtctttcttaaaaaacaaacaaataaaaaactcttcaacaaatcctaaagaccaggaaataaacatctgctgagttttctgctcagggtccattcatgatttttctggtaacaatactgccagttacttagggggcaaccccctgactctagagccatgtagcttagtggagtgaaccccacccccagcttcagaagtgggaaagtttacacagtccaagctcactcagacactgcaagcccttcccatagatgcaggttcagaatca

SEQ ID NO: 18957 - DNA, 418 bp, Homo sapiens
cactactatagggcgaattgggccctctagatgcatgctcgagcggccgccagtgtgatggatatctgcagaattcgcccttagcgtggtcgcggccgaggtacgcgggtgattccaaaaagttgaggagaagggacttctccctaactcattctatgaggccagcatcatcctgatacctggcagagatacaacaacaaaaacaaaaacttcaggccaatatccttgatgaacatcaatgtaaaaattctcaagaaaatactggcaaatcaaatccagcagcacatcaaaaagcttatccaccacaagcaagtaaactttctcatggttattaaccttatgcaaggttggttaaacatacacaaatcaagaaatgtgatttatcacataaacagaactaaagacaaaaagcacatga

SEQ ID NO: 18958 - DNA, 601 bp, Homo sapiens
ctatagggcgaattgggccctctagatgcatgctcgagcggccgccagtgtgatggatatctgcagaattcgcccttagcgtggtcgcggccgaggtacctgtgactttgtcaccaatacaaatcacagctgttttcgtatcacattctcattgttacaaatatctttagatgtttacattcaacacaactttgaagttgaagcaattattcccaatgctagaccttgttagttaataataaataagccaccatgcccggccagtgatttacacttctatatactctcttcttttattaaatacttagggaaaaagcccagtattgatgcttaaaaaaactgaggccgggcgcggtggctccccctgtaatcccagcgctttgggaggccgaggcggggggatcacgaggtcaggagatcgggaccatcctggccaacatggtgaaaccccgtctctaataaaaatgcaaaaattagccgggcgtggtggcacgcatctgtaatctcagctattcaggaggctgaggaggcaggagaatcacttgaacccaggaagcggaggttgcactgagctgaaatcacaccaccgcactccaacctg

SEQ ID NO: 18959 - DNA, 518 bp, Homo sapiens
atacgactcactatagaggcgaattgggccctctagatgcatgctcgagcggccgccagtgtgatggatatctgcagaattcgcccttagcgtggtcgcggccgaggtacttctttttttttttttttttttgagacagtctcgctctgtcgcccaggctggagtgcagtggcgcaatctcggctcactgcaacctccacctcccgggttcacgccattctcctgcctcagcctcccgagtagctgggattacgggcgcccgccaccacgcccggctaattttttgtatttttagtagagacagggtttcaccgtgttagccaggatggtctcgatctcctgaccttgtgatccacccacctcggcctcccaaagtgctgggattacaggcgtgagccactgcgcccggccacattcagttcttatcaaagaaataacccagacttaatcttgaatgatacgattatgcccaatattaagtaaaaaatattagaaaaggttatcttaaatagatctta

SEQ ID NO: 18960 - DNA, 563 bp, Homo sapiens
ctcactatagggcgaattgggccctctagatgcatgctcgagcggccgccagtgtgatggatatctgcagaattcgccctttcgagcggccgcccgggcaggtactagccctggattgataaattctggggtgcatagccattgatgaagaggctatccctgtccaggacatagaagcccagttgggtgacaccatgggtcagctgactcagctcccagtaaagctgctgtatgtccagcccggggcccacagggtcagggtggtaggtgcaggtggtgtccacaccagtggctgccccatccttctcaggcctgagggagatcagttggcaacccaagtagaaggggcccatgctgctcttctggaacaagggtctgagcaggtgctgaaggaccccctcggtggagttgaatgtagctgaacccttgcccatatctggtgaatactggagattggagatggtgaagttgagtgtgagggtcttcaggtggtacctcggccgggaccacgctaagggcgaattccagcacactggcggccgttactagtggatccgagctcg

SEQ ID NO: 18961 - DNA, 283 bp, Homo sapiens
gcgaatcgtgccctctagatgcatgctcgagcggccgccagtgtgatggatatctgcagaattcgccctttcgagcggccgcccgggcaggtactatgtggtatccatattcgttgcaaaaatgataattactggaattttcaaacataatagcaggtggatcaatggttaccactatcgttttcaaccaatatacagatgttcgctcaaggtctaggttttatttctacatagtagtattcacatgagttccctattctgaagtattatcaaaacgaggacc

SEQ ID NO: 18962 - DNA, 403 bp, Homo sapiens
agggagtcacgcgtaagacgtggttggcccctctagatgcatgctcgagcggccgccagtgtgatggatatctgcagaattcgccctttcgagcggccgcccgggcaggtactccaatctgggtgatagagcaagaccttgtcttgaaaacaagataaaacaagataaaacctttccctcatcaaccatttgcccaggaaagaagacaattacttggggttttgtttcctttgtttaccagttttcagaatgagttggtaccatcagccctggcccttaggccagcccagtccacgggctctgagtgtggaggctgcgtagcaccaggaagcggctctgctgaggtcaaggggccccatcacagtgtggcatccgttcagcttttggttggtccaggatggtg

SEQ ID NO: 18963 - DNA, 390 bp, Homo sapiens
tagggcgaattgggccctctagatgcatgctcgagcggccgccagtgtgatggatatctgcagaattcgcccttagcgtggtcgcggccgaggtacgcgggtaaggaaggaattcctcctgatcagcagagactgatctttgctggcaagcagctggaagatggacgtaccgaagtatagagggctgctgtatttgcagagctaagtcctccagttctcgattcactgacagtaaacgctatgaaaaggacttccagagctgttttggattgcatgagactcgttcaggagacatctgcaatgcctgtgtcctgcttgtgaaaagatggaagaagttgccagcaggatcaaaaaaaaactggaaccatgtggtagatgcaagggctggac

SEQ ID NO: 18964 - DNA, 404 bp, Homo sapiens
atagggcgaattgggccctctagatgcatgctcgagcggccgccagtgtgatggatatctgcagaattcgccctttcgagcggccgcccgggcaggtactttttttttttttttttttttccctttttttttttttttttttttttttttttttttttttttttttttgtttttttttaaaaaacgaccttttttaatttttaggccaatttggggtagtcaaaggaagagcagccattttggggggggggccggggcacaattgcaaaaacgggtttgggggggccgggggggggggaacccggcctttgggactaatacccggggtgggggcgggaccctgttgggaagcgggcaaatcccctcaaaagggggaaaaattcaccctcctttttggggggggg

SEQ ID NO: 18965 - DNA, 355 bp, Homo sapiens
  misc_feature 1, 11, 19, 23, 28, 31, 34, 36, 38, 43, 71, 90, 91, 120, 124,297, 299, 300, 301, 302, 332, 334, 355: n = A,T,C or G
nggatatggtnaattacgnactncactnatnagngngnccggnaatattattttggggggggggggggggnccccccccccccctttttnntctttttttaaaagtatggccatggcctntcgnaggccgggccccgcccaagtttgttggaattggggattattccttggccaagaaattttccgcccccttttttccaagagcggggccccggcccccgggggcccagggtttaccgccccggggggggaaaggttttccccgtggggaaaaaaaaaaagaaataatgggggggngnnnncccccccccccccggggggggggggggggngnaaaaaaaaaaaaaaacaaaan

SEQ ID NO: 18966 - DNA, 398 bp, Homo sapiens
  misc_feature 1, 42, 44, 53, 67, 86, 132, 133, 134, 135, 138, 141, 155,156, 161, 162, 170, 184, 190, 191, 192, 193, 194, 195, 201,202: n = A,T,C or G
ngattggaatacgactcactatagggcggattgggccctctngnatgcatgcntcggggcggccggncagtggtgatggatatctngcagaattcggccctttcggggggggcgggccggggcggggacctnnnnttnttntttttttttttttnnaaatnntttttttntttttttttttttntttttnnnnnnaaaaannaaacttttttttttggggttttgggggtttagggggggggttggggggggggcggggaaacctcttttggggggggggaatccttttttgggcccggggggggggggggggaaaattatatttttattttttttttaataggggggggggggggggggggagtaaaaggggggatttttttccacccttggggggg

SEQ ID NO: 18967 - DNA, 524 bp, Homo sapiens
gtaatacgactcactatagggcgaattgggccctctagatgcatgctcgagcggccgccagtgtgatggatatctgcagaattcgccctttcgagcggccgcccgggcaggtacgcgggagacagcagaaggatcactgggctggaagctctaacaggcattgccagcctagctacctgcagtttgaggcaagggcagggtcacttaccctgctgtctgaatgtctcctgggacaacaggaggctgcactcactggctgagttcagacagaagagggatcatcggactggaagctctggcaggtatggctagcctggttacccgtagtgagaatggagagggccacctgcccagctacacagatgtttcccaggacaacaggaggctgtgtccactgacagttcagacagaagtggaaccactggaccggaagctctagcaagtgttgcccacctggctactagtgagccttgaaaccagcgaaacaataatcaaagagcagttctgtcaaagaaaacaacata

SEQ ID NO: 18968 - DNA, 406 bp, Homo sapiens
atagggcgaattgtgcactctagatgcatgctcgagcggccgccagtgtgatggatatctgcagaattcgccactagcgtggtcgcggccgaggtaactagttttttttgagaaatttgtaatgtactttatttttttttttaattattttatattttttttgtataaaattttatttttaatttaaagattattgtggtaatattttatattatttctgagaaaaaaaaaacaattttttaaaaaaaaggggacaaagggctggggggtaaaatgggggaaaaaaaaaacgggggtttaaaaaagggcaaaaattttatgagagaaaaaaaaaaggggtttttctttttaaaaaaaaaaaaaacacattggggggaataataatttggaagaaagcaaaaaaagg

SEQ ID NO: 18969 - DNA, 185 bp, Homo sapiens
gactactatagggcgaattgggccctctagatgcatgctcgagcggccgccagtgtgatggatatctgcagaattcgccctttcgagcggccgcccgggcaggtacgcgggggccaaagtggcgagcctgagaggaatggagttacaggggtgcgccagcactcaggttgaatcagaaaataacc

SEQ ID NO: 18970 - DNA, 448 bp, Homo sapiens
atacgactactatagggcgaattgggccctctagatgcatgctcgagcggccgccagtgtgatggatatctgcagaattcgcccttagcgtggtcgcggccgaggtacgcgggtaacatataagaaacaaaagttcaattttgcttcagaaatgcaaggtaggccatttgaatttgtgacacgtgacaaaatgagttaacagtatggtggctgaaataatcctttggtaatcatcactttatagaaatatctttaattgctaaaggaaagggtagacaaattcttctccgttgcttttggtccaagtagggcttctgattaatactgaagagcatttaaaaagtacctgcccgggcggccgctcgaaagggcgaattccagcacactggcggccgttactagtggatccgagctcggtaccaagcttggcgtaatcatggtcatagct

SEQ ID NO: 18971 - DNA, 603 bp, Homo sapiens
  misc_feature 24: n = A,T,C or G
acgactcactatagggcgaattgngccctctagatgcatgctcgagcggccgccagtgtgatggatatctgcagaattcgcccttagcgtggtcgcggccgaggtacaagagcatcctttagtctagggctagatttccactctacccaatgtcccatgaattatgaggctttccactctggctggtgggaacaggcactattcctagaccactattccaagcttcctaaatctcggccagaacaaattcattaatttatttagaaagatttattaagcaccttcatgttaatagcactaaggactgttccctctcatccttttaagtggttcttttcccagcattatgtatcttcttcatacgctggagccaatcaggagttagctgaatacctgaggggaccttctgcagatctccagaattctctcagtaaaacctctctcatctccagtacctgcccgggcggccgctcgaaagggcgaattccagcacactggcggccgttactagtggatccgagctaggtaccaagcttggcgtaatcatggtcatagctgtttcctgtgtgaaattgttatccgctcacaattccacacaacata

SEQ ID NO: 18972 - DNA, 499 bp, Homo sapiens
aatacgactcactatagggcgaattgggccctctagatgcatgctcgagcggccgccagtgtgatggatatctgcagaattcgcccttagcgtggtcgcggccgaggtacttcttatacaggaggctgaaacagaatgaaagggtgaaaattaggtttaatttacttaggaaacaagaaatagaaagtcatagctataacactccactttcaggtgcccatgaagtagccttcaatggagattccccatagttgtttcacagcacagtgttaaaattttattacaagccctgtgtacctgcccgggcggccgctcgaaagggcgaattccagcacactggcggccgttactagtggatccgagctcggtaccaagcttggcgtaatcatggtcatagctgtttcctgtgtgaaattgttatccgctcacaattccacacaacatacgagccgggagcataaagtgtaaagcctggggtgcctaatgaggtgagctaact

SEQ ID NO: 18973 - DNA, 464 bp, Homo sapiens
tacactactatagggcgaattgggccctctagatgcatgctcgagcggccgccagtgtgatggatatctgcagaattcgccctttcgagcggccgcccgggcaggtacattatcagtaacaataatcattttcatgttaaaattattgtgtgccacagaggtaacaaatattcttgtcagttgtgtcttttaactatggcttccttaaaacttcttttattcatcaatagacaattgtcttattttgtcttgtttttaaccctctttaaaaggtttacaatcagatataaaactctaacaagtgcacttaaatgcagattttctgataactttgaaaattgtgacattgaaataaagggaaaaatttcagaactgtaatggagagctgaaatgttcatgactatcaaacagaacaggagttaactgaattaattgaaccaacagaaaacctaagttatcttttt

SEQ ID NO: 18974 - DNA, 550 bp, Homo sapiens
atacgactcactatagggcgaattgggccctctagatgcatgctcgagcggccgccagtgtgatggatatctgcagaattcgccctttcgagcggccgcccgggcaggtacatactatcagtgtgacttattactgttagtgttaatcttgataacctagccgagatagtgtttatcagatttctccactacaaagttattttccccctttccatatgtaatttttggaaggaagtcactattcagctcacactagagaagtaggaagttctgctccatatccttgagggcagagttcataaattatttggaattcttcttcatgggagattcatctattctaccccatttattaatgtattcaattttctggcactacaagaatatatatatatattttggtaatcgactttaaaataattaggaaaatgatagaacattttaatataagaacaagatatggtaaattgatgaatattattagacattatcagtaacaagagctttgtatcttaagttgttttgagttcaatttcttgttcacatcttt

SEQ ID NO: 18975 - DNA, 489 bp, Homo sapiens
actatagggcgaattgggccctatagatgcatgctcgagcggccgccagtgtgatggatatctgcagaattcgccctttcgagcggccgcccgggcaggtacttatttttttattaataatctataattttatttttatatatattatttatgttaatttttatagatgggaggaaagagaaatatatttaaaagggaagagaaaggacaaaaaaaaaaaaagggggtttgtggggtaaaaaaaaaacaaaagggggggtaaaaggggaatggggaatttttttttgggcggaaggaaaatttaaaatttaataaaaaaggggggaaaaaaaattttttttgaaaaaaaaaaacaccaacaaaaaattcccggaaattttgttttaaaaagggggaggggggggaaaaaaaacgtgggaaaataaaaaaaaactaaagggttttttttaaaaggaaaaaaaaaattttgggggtgggaaaaaagaaaaa

SEQ ID NO: 18976 - DNA, 94 bp, Homo sapiens
tagatgcatgctcgagcagccgccagtgtgatggatatctgcagaattcgcccttagcgtggtcgcggccgaggtacaagtggtggccacataa

SEQ ID NO: 18977 - DNA, 582 bp, Homo sapiens
atacgactcactatagggcgaattgggccctctagatgcatgctcgagcggccgccagtgtgatggatatctgcagaattcgcccttagcgtggtcgcggccgaggtacctgggacatactaagtaatataattgttaactcttactagcattctgtcccttttatttcctaaatatctctcatgcccatctcctaaatatctctttcctaaatatctctcatgcttttggcttaagacctcttttcctccttatccattgactggactgcggcaaatgcctgctaatcgttatttttgtgttcattcatttagcaagccaatttattacgcgcttagggtgctgccagggctacaaaagctgttgagactgtacctgcccgggcggccgctcgaaagggcgaattccagcacactggcggccgttactagtggatccgagctcggtaccaagcttggcgtaatcatggtcatagctgtttcctgtgtgaaattgttatccgctcacaattccacacaacatacgaaccggaagcataaagtgtaaaacctggggtgcctaatgagtgagctaactcacatt

SEQ ID NO: 18978 - DNA, 405 bp, Homo sapiens
atacgactcactatagggcgaattgggccctctagatgcatgctcgagcggccgccagtgtgatggatatctgcagaattcgccctttcgagcggccgcccgggcaggtacttttttttttttttttttttttttttttattttttttttttttttttttttttttttttttttgtttttttaaaaaacgagcccttttaatttttaggccaattttgagtaggcaaaggcagagccgtcaatttgggttgggggccgggggacaagtgcaaaagcgtgtttgaggggtccgggggggggggcaaccgagctctgggactaatcaccgggctggggacgggcccgcgttaggatgcgggccaatccctggaaaaggggttaaaattcccactccttttttggggg

SEQ ID NO: 18979 - DNA, 370 bp, Homo sapiens
tagggcgaattgggccctctagatgcatgctcgagcggccgccagtgtgatggatatctgcagaattcgcccttagcgtggtcgcggccgaggtccgcggggaggtctgaaaattgaacaagatggacgggtccaggaaagaggaggaggaagacagcacattcaccaacatttctcttgcagatgacataggaagaccaaccccttctcttcctccttctcctcagcttgttcaatgtgaaaatgaagaagatgaagactttcatgatgacccacttgcacgtaataccattcctcaagaattttgaatccaaggcccaaaagtttgttgcccatgatgatgaatgctgacatggatgcatatgatgct

SEQ ID NO: 18980 - DNA, 522 bp, Homo sapiens
tacgactcactatagggcgaattgggccctctagatgcatgctcgagcggccgccagtgtgatggatatctgcagaattcgccctttcgagcggccgcccgggcaggtacttttttttttttttttttttttttttttttttttttcttttttttttttttttttttttttttttttttttttttttttttttttttttttttttttaaaaaaaccaacctttttaaatttttaggccaattttgagttgtaaaagtcaaaacattcaatttttgttgggagccggggcaaattttaaaaaacttttttaagggttccgggggggggggaaaccaacctttggaaaaaaaaaccgggcgggggacggcccccttttaggatgcaggcaaatccctgaaaaagttttaaaaattaaaactcttttttgggggggaccttaatggtttttgaaaaaaaaccccgggggcccccaaaaagggtttttaaaaaaaaacaccctttttttgccaacggggggggggg

SEQ ID NO: 18981 - DNA, 467 bp, Homo sapiens
tacactactatagggcgaattgggccctctagatgcatgctcgagcggccgccagtgtgatggatatctgcagaattcgcccttagcgtggtcgcggccgaggtacaggtcagagtcttcttttcttttctttttgagatggagtcttgctctgttgccagactggagtgcagtggtgcgatctgggctcactgcaatctccacctcccgggttcaagcgactctcctgcctcagcctcccgagtaactgggactacaggtgcgcgccaccaagcccagctcatccttgtatttttagtagagatggggtttcacgatgttggctaggatggtctcgatctctggtcagagtcttttctgtaaatatccttggtaaagaagcaattttagactgtagctgttgcaaatgctttaaggaagaagcaaaacaactgtcagtcttcctgaaatgaagaaactacaccagg

SEQ ID NO: 18982 - DNA, 596 bp, Homo sapiens
  misc_feature 12, 329, 488: n = A,T,C or G
gactcactatanggcgaattgggccctctagatgcatgctcgagcggccgccagtgtgatggatatctgcagaattcgcccttagcgtggtcgcggccgaggtacatttggcatgatctgggcctatgcggtcttgcaatccctgtataaaactagacaatgaaaaacagaaaacaaaacaaacaaacaaaaaaacaagaacgaagcacctaccacatgccagctactgaggctatgaaggtattctccggccttagaaagcccaggattaatgcaggattgcgatatttaaacagaacatttccatacagcatgagtataaatgactntcccaagtttacactgagagtaactgacacagcaaccccagcaaagtctgagctgagtcctgaataattgtataaaaaggggagagaaacagagtgaagaaagggtttcccagactctgtcccaggaaagaaaatgagctcgtggagaggaatagactntctctatgaaaacagagggaacaaagaggaagatgtctgggaaccgaggagtaatagagacctgagtttacatcactactctgccactccctaggtacctgcccgggc

SEQ ID NO: 18983 - DNA, 472 bp, Homo sapiens
cgccagtgtgatggatatctgtagaattcgccctttcgttcggccgcccgtgtaggtacattgtatctttgttctcactggtttcaaagaacatctttatttctgccttcatttcgttatttaaccggtagtcattcgggagcaggttgttcagtttccttgtagttgtgcggttttgagtgagtttcttaatcctgagttctaatttgcccgcgtactccttcctcctgtccacatcatcccggcacacccccacgcgccaccttttattgtgtcctccgtccacctcccagtaatgtttcctgcttggaaactctgagaagccaccacactcttccttgtaaatctcttctcagagtgaggcacctcctggggagcttttctctcggttacagttttcagatcagaaacgcagagcttcgggtgagccgtctctggatccagagtcacctccactgcgtgtttcccgggc

SEQ ID NO: 18984 - DNA, 193 bp, Homo sapiens
tatatacaactaatccctccctatacatgcatgctcgagcggccgccagtgtgatggatatctgcaaaattcgcccttagcgtggtcgggccgaggtacttttttttttttttttagttttttttttttttttttttttttttttttttttttttttttttttttaaaatttttatttttatttttatttatt

SEQ ID NO: 18985 - DNA, 279 bp, Homo sapiens
tatagggcgaattgggccctctagatgcatgctcgagcggccgccagtgtgatggatatctgcagaatacaaccttagcgtggcgggggccgatgtactaaataaatattattggaatgaacagccgaagcgactgacttctaaatggagcagattgctcatttcacttctgttccttcacctaaacaaacctttacatcctcactggtttgcgaggccagaataacaaggtgtggcacttggtgtgattaagaaatgcttatttttatacaaaactga

SEQ ID NO: 18986 - DNA, 611 bp, Homo sapiens
ctactatagggcgaattgtgccctctagatgcatgctcgagcggccgccagtgtgatggatatctgcagaattcgcccttgagcggccgcccgggcaggtacttcccttatcataacacctatcatgctttattattatgcctattatattagtttcctatttcttctgtaacaaattacaccaatttttttttgcttaaaacagcacaaatttattatacttctggagctcaaaagtctaaaataggctagcagtgccattttccttctggaggatatacaagataatcaatttctttatcttttacagcttttagaggctacctgtattctttggcttgtggtcccttcctctatcttcaaagtcagcaggccatctttaactttctgtcttctgacctctgcttctattttcacattgccttcccacattgattttctgcctctctcgttctcttataaggatcttggtgattacattgggcccacctaggtaatccaaggtacctcggccgcgaccacgctaagggcgaattccagcacactggcggccgttactagtggatccgagctcggtaccaagcttggcgtaatcatggtcatagctgttt

SEQ ID NO: 18987 - DNA, 487 bp, Homo sapiens
  misc_feature 29: n = A,T,C or G
gtaatacgactcactatagggcgaattgngccctctagatgcatgctcgagcggccgccagtgtgatggatatctgcagaattcgccctttcgagcggccgcccgggcaggtacttttcagttccatatttttgtttgtttctttttatgttttgcatctctttactgatatttcactaatatattatttttgtgggttttccacatcttcctttagtttactgagcatctttaagagatttcttttaaagactttttctagtaaattgggcattggtcttatgaacagtttctgttgattttatatttatttggatggaccatactttcttattttttgaatactttgtgatttttttgttgaaaattggacatttgaatctaagaatgtggtaactttggaaatcagattctcgtcctttcctaggttttggggtgtgtgtgtgagtgtttaatttttactcttctttaatcttaaaactgtacc

SEQ ID NO: 18988 - DNA, 159 bp, Homo sapiens
ctactatagggcgaattgggccctctagatgcatgctcgagcggccgccagtgtgatggatatctgcagaattcgcccttcgagcggccgcccgggcaggtacgcggggctagcactctgacctagcagtcaacatgaaagctctcattgttctggggc

SEQ ID NO: 18989 - DNA, 583 bp, Homo sapiens
gactcactatagggcgaattgggccctctagatgcatgctcgagcggccgccagtgtgatggatatctgcagaattcgccctttcgagcggccgcccgggcaggtactcctgcaggatcttgctgtcggtggtctgcgggaagccaaagtccatgagctcgtccagcaactcgtagacgatgacaaagttgtcccggatgctctcctcctccagctccttgaagtattcgcagaatacctctattgtcttatacaggaaggagtacttcccacttttcataacgagttggagcctagagttgatcgactccagcgactttttcgtcttctttgcggccaccatcttcctgccttaggagcgggacggcccccaaccaacagcagccgctaagatggccggggaacgagaccccgcgtacctcggccgcgaccacgctaagggcgaattccagcacactggcggccgttactagtggatccgagctcggtaccaaacttggcgtaatcatgggcatagctgtttcctgtgtgaaattgttatccgctcacaatttcacacaacatacgagccggaagcataaag

SEQ ID NO: 18990 - DNA, 506 bp, Homo sapiens
aatacgactcactatagggcgaattgggccctctagatgcatgctcgagcggccgccagtgtgatggatatctgcagaattcgccctttcgagcggccgcccgggcaggtactgggatggaattctactgtcttggaaggaatttagactttctgctcaaaagggcagtgatgtaagctcagggaaggtgtgtggttgcaaagagctttcagttttgcccaaacatctgatggtccaaccactctaggtgaattcagagaagtgaacagctctcagagtaacaaaactgaccaccagctagttgtgatggcgcacacctgtaattccagctacttgggaggccagggtagaagaattgcttgagtgcaggagtttgaggccagcctggaaagtgagaccccgtctctaaacaaagcaaaacaaaacaaaaccgaccacagtgccaggaaagtgctactgctaactggcagtggcttgtaaccatgcaaatgtggatacctgtcact

SEQ ID NO: 18991 - DNA, 373 bp, Homo sapiens
aattgggcctcctagatgcatgctcgagcggccgccagtgtgatttatatctgcagaattcgcccttagcagttgcgcggccgaggtacaaatgacacaattagagataaaagagtgacaaaaagcaaatagatgaatactgattataacttattcccacaacagaaggctactgatttctacaattatcaatcaaaggctgacaattcagtgattagatgaagtgaaagccaaattcccttttacatgtggtacctgcccgggcgggcgctcgaaagggcgaattccaccacactggcggccgctactaggggatccgagctcggtaccaagcttggcgtaaccatggtcataagctgtgtcctgggtgaaa

SEQ ID NO: 18992 - DNA, 464 bp, Homo sapiens
atagggcgaattgggccctctagatgcatgctcgagcggccgccagtgtgatggatatctgcagaattcgcccttagcatcggccgggccgacgtgcacataggcaaagctttctcccacttgcttctagtgaacaaacacaccactgcacctcatccactgctctcaccaaacctctagcccctttgacagggaacagctgctgcaattggctgagaccaccttataaaatcacagtccatcagcccaccagggaacacaatggtttaataatattcagcatctcttcttcaaagtaagtgcaatggtataaaccaataaatatttgtatatccttctattaagaagttttggcttaaatttaaacaacaaagcagaacaaaaaattccatacttgcagagaaagtttaaaaaagtggagcataagtggtttcccaatctggttctctattatctctcaaccc

SEQ ID NO: 18993 - DNA, 336 bp, Homo sapiens
ctatagggcgaattgtgccctctagatgcatgctcgagcggccgccagtgtgatggatatctgcagaattcgccctttcgagcggccgcccgggcaggtatagattaaatagcttaaaggaagaaaaaatcatcatagtaaaagaatttgagaagatacaaagcccaggagaaatggagaagaagatgaatattttgagagaaagcactgaagaattacgtaaagaaataatgcagaagaaattagaaattaaaaatttacgagaagatttggcatctaaacaaaagcagttattaaaagagcagaaggaactagaagaattgttgggacatcagg

SEQ ID NO: 18994 - DNA, 548 bp, Homo sapiens
  misc_feature 457, 458, 464, 481: n = A,T,C or G
tacgactcactatagggcgaatggggccctctagatgcatgctcgagcggccgccagtgtgatggatatctgcagaattcgccctttcgagcggccgcccgggcaggtacgcgtggaaagtaaatgacaatttgtaattttatgtgatagtttttaaaactatgtgttatctagggtagtaggaagccagatgtccagaaccaatcatgtggggctgttcagactgggatccactcacggtccccgagccgctcccaggaactttaggcctgggcagaatacataggaaaagccagtgttctaataatacccaaactagatcagtctttgagttcaatttgttgtacctcggccgcgaccacgctaagggcgaattccagcacactggcggtcgttactagtggatcctagctcggtaccaagcttggcgtaatcatggtcatagctgtttgctggnnaccacnctaagggcgaattccancacactggcggcccttactaatggatccgagctcggtaccaagcttggcgtaatcatggtcatagct

SEQ ID NO: 18995 - DNA, 358 bp, Homo sapiens
gggcgaattgggccctctagatgcatgctcgagcggccgccagtgtgatggatatctgcagaattcgccctttcgagcggccgcccgggcaggtacgcggggggatattggagcagcaagaggctgggaagccatcacttaccttgcactgagaaagaagacaaaggccagtatgcacagctttcctccactgctgctgctgttctggggtgtggtgtctcacagcttcccagcgactctagaaacacaagagcaagatgtggacttagtccagaaatacctggaaaaatactacaacctgaagaatgatgggaggcaagttgaaaagcgggaaaaatagtggcccagtggttgaaaa

SEQ ID NO: 18996 - DNA, 531 bp, Homo sapiens
actatagggcgaattgggccctctagatgcatgctcgagcggccgccagtgtgatggatatctgcagaattcgcccttagcgtggtcgcggccgaggtaccgactggagtccatatgcagaccaaagcatcaaagtgaggataagcctaaaatcagctcttggagataaagcatatgaatggaacgacaatgaaatgtacgcggggagtccgagtggagagagcgagctgagtggttgtgtggtcgcgtctcggaaaccggtagcgcttgcagcatggctgaccaactgactgaagagcagattgcagaattcaaagaaactttttcactatttgacaaagatggtgatggaactataacaacaaaggaattgggaactgtaatgagatctcttgggcagaatcccacagaagcagagttacaggacatgattaatgaagtagatgctgatggtaatggcacaattgacttccctgaatttctgacaatgatggcaagaaaaatgaaagacacagacagtgaagaagaaat

SEQ ID NO: 18997 - DNA, 166 bp, Homo sapiens
tatagggcgaattgggccctctagatgcatgctcgagcggccgccagtgtgatggatatctgcagaattcgcccttagcgtggtcgcggccgaggtactcggggctagcactctgacctagcggccaacatgaaggctataatagctctggggcttgacctcctta

SEQ ID NO: 18998 - DNA, 392 bp, Homo sapiens
cgaattgggccctctagatgcatgctcgagcggccgccagtgtgatggatatctgcagaattcgcccttagcgtgggcgcggccgaggtactacaggctgaccttctctgttgccaattctggaaccaaaatatgcagttgaaaaaatagtagaagctattctacaagaaaaaatgtacctgcccgggcggccgctcgaaagggcgaattccagcacactggcggccgttactagtggatccgagctcggtaccaagcttggcgtaattatggtcatagctgtttcctgagtgaaattgttatccgctcacaattccacacaacatacgaaccggaagcataaagtgtaaaggccctggggtgcctaatgaaggagctaactcacattaatt

SEQ ID NO: 18999 - DNA, 442 bp, Homo sapiens
actatatggcgtattgcgccctctagatgcatgctcgagcggccgccagtgtgatggatatctgcagaattcgccctttcgagcggccgcccgggcaggtacttttttttttttttttttttactttttttttctttttttttttttttttttttttttttttttttttattttgggaatgaaaaaataactttattttattgtggggagcggcccccccctgggaggggtgacccggccccccccccgtgttccttggccgtgaccacgctaagggccaattcccgccccctggcggccgttactagtggatcccagctcggtaccaaacttggcgtaatcatggccatagctgtttcctttgggaaattgttttcccctcacaatttcccaccacattccacccggaagcttaaagttttaaacctggggtgcctaatga

SEQ ID NO: 19000 - DNA, 654 bp, Homo sapiens
gactcactatagggcgaattgggccctctagatgcatgctcgagcggccgccagtgtgatggatatctgcagaattcgcccttagcgtggtcgcggccgaggtactgggatggaattctactgtcttggaaggaatttagactttctgctcaaaagggcagtgatgtaagctcagggaagtgtgtggttgcaaagagctttcagttttgcccaaacatctgatggtccaaccactctaggtgaattcagagaagtgaacagctctcagagtaacaaaactgaccaccagctagctgtgatggcgcacacctgtaattccagctacttgggaggccagggtagaagaattgcttgagtgcaggagtttgaggccagcctggaaagtgagaccccgtctctaaacaaagcaaaacaaaacaaaaccgaccacagtgccaggaaagtgctactgctaactggcagtggcttgtaaccatgcaaatgtggatacctgtcacttggaaacattacatttaattcaggctcaacttttttttttttaaagaattagttttaacctacttcctaggacttgctgtgttccattatttattttttatttttttagacaggatctcgctatgtcacctggctggagtgcagtggtgtgatcat

SEQ ID NO: 19001 - DNA, 186 bp, Homo sapiens
ctcactatagggcgaattgggccctctagatgcatgctcgagcggccgccagtgtgatggatatctgcagaattcgcccttagcgtggtcgcggccgaggtaccaactgcagagccaggaaaactttgaagccttcatgaaggcaatcggtctgccggaagagctcatccaaaaggggaaaggata

SEQ ID NO: 19002 - DNA, 126 bp, Homo sapiens
  misc_feature 92, 102: n = A,T,C or G
atagggcgattgggcccttaatcatgctcgagcggcgcagtgtgatggatatctgagaattcgccctttagcgtggtcgcggccgaggtacntttccagggnaccgcatggagatcccttaagttg

SEQ ID NO: 19003 - DNA, 519 bp, Homo sapiens
tacgactcactatagggcgaattgggccctctagatgcatgctcgagcggccgccagtgtgatggatatctgcagaattcgccctttcgagcggccgcccgggcaggtacgcggggtggcctagcctcccagcctacatctttctcccatgctggatgcttcctgccctcaaacactggactccaggttcttgttttgggacttggactggctctccttgctcctcagcttacagatgcctattgtaggaccttgtgatagtaaaggagatgggtgtatgagttctgcagaagtccaccaaatgtgggccagggttatttccctggtgatgctctgaagcttttgccaaaggacaaatggaaacaggaagtacctcggccgcgaccacgctaagggcgaattccagcacactggcggccgttactagtggatccgagctcggtaccaagcttggcgtaatcatggtcatagctgtttcctgtgtgaaattgttatccgctcacaattccacacaacata

SEQ ID NO: 19004 - DNA, 886 bp, Homo sapiens
  misc_feature 18, 19, 31, 130, 592: n = A,T,C or G
taatacgactcactatanngggcgaattggngccctctagatgcatgctcgagcgcccgccagtgtgatggatattctgccaaaatcggcctttcgagcggccgcccggccaggtacgccgggaaatgtngatattattgggtattatcattattaaataaataaagagaaaaggaattttttgtttaaaatggaaaaaatggttagcccagaattctggtctatttgaaatggtgacttgcacctttttgttcaaagtatttcctttaggcatttgaaattgtgaacaagcttttaacttgtgcccagtgacaggattgcagtggtcttcttttcccagttgaagcagtgcatacgcagtagctattaattgtggtatctttacttctcttcaattgtaagaaaccaaagtcttctcttgctggcttgggctgagagaggggtctgggttatctcctttctgatcttcaaaacaagagagaagaccttggaatacactgactctttcaccctttttttttttctgggaaaagagaggcaggaggtcccgagtcccccccttaatctttcatcctggatttgcccaaagganaagcgggttgccccgcattggccatcctgatgttgctggcgggaatcccatgcaccttggtccttctcactgatactggcaacttcgcttctggaccccaaaacccttgagtggaattctgcatgcagaaccccttcggggaactgtcccatggttccatgggcccaatctcccttcccttggtggggtaccaactacttacccaaaggggctacccaaaaaaccctaaaagcttgtgcttatttgccttgttcaactttatgccccaacttgctttcacaacatccctaagct

SEQ ID NO: 19005 - DNA, 467 bp, Homo sapiens
ctatagggcgaatggggccctctagatgcatgctcgagcggccgccagtgtgatggatatctgcagaattcgccctttcgagcggccgcccgggcaggtaccactttgggctacaaagtagagaatttattttgacttctttagccccatcaaggctcgtggttctccctgacacccctcaccacctcatgtcttcatctgcagactgtgctgggatgctaggctgttcctcccgttaggagcagctcagtgggagcagattcaagtagaaggagagaggaatctgcatgcattgggctgacggtgatttgttcatttcttagagtaatcagtaacatcttgattgatgcattcttagtttagtacctcggccgcgaccacgctaagggcgaattccagcacactggcggccgttactagtggatccgagctcggtaccaagcttggcgtaatcatggtcatagctg

SEQ ID NO: 19006 - DNA, 542 bp, Homo sapiens
atacgactcactatagggcgaattgggccctctagatgcatgctcgagcggccgccagtgtgatggatatctgcagaattcgccctttcgagcggccgcccgggcaggtacttttttttttttttttttttttttgaaactgagttttgctcttcttgcctaggctggagtgcagtggtgctgtctcggctcactgcagcctccacctcctgggttcaagcgattctcctgcctcagcctcccgagtagttgggattacaggtgcccaccaccacgcccggctaatttttctatttttagtaaagacggggtttcaccatgttggccaggctggtcttgaactccggacctcaggtgatccgcccaccttgctctcccaaagtgctgggattagaggcatgagccaccatggcacctggctatatctaacttctgttacagcaaatgatgctgatttcctctttaaatgaatgatataaacttgcattttagaatgcattcacaatattctgtatttaacaaataatagatttaaagaaaaa

SEQ ID NO: 19007 - DNA, 536 bp, Homo sapiens
atacgactactatagggcgaattgggccctctagatgcatgctcgagcggccgccagtgtgatggatatctgcagaattcgcccttagcgtggtcgcggccgaggtgctcgtggatgattcacgtggcaaaggacgcccattctctccattattattgtctacaaattgctacttttgctacttgaaatcattcattcaaaaaatatgtattaagaatcatcttaataagctattagtgctagatgctaaagatatagcattgaacaacagtctctgctgacatgaaccttgtagtctactgaacgagacaactaataaatacaggaaaccaaatgtaaatgggatacttatggtaaccataaatgcaaagaatgaaataaagtaatgagatggaatgagatgagcaagtttagatgaagtggagtctcggcctagcataagaacagaaagacggctagtgtggccagatacatgttcagttggcgtagagacttatgagatgaggttaaggagatagatgattttcagtgatgct

SEQ ID NO: 19008 - DNA, 540 bp, Homo sapiens
tatagggcgaattgggccctctagatgcatgctcgagcggccgccagtgtgatggatatctgcagaattcgcccttagcgtggtcgcggccgaggtactttttttttttttttttttttctttcttttttgttttgttttttgttgtttagtttttttttgtttttttgttgggatagaattaggaaaaaaaggggcctgtttaaagtttgggggcaatttgggggagcaaagggaggagcggtcaattggggggggggggggggggacagttgaaaaaacgggttggggggggcgggggggggggggacccagccttggggattaataaccgggggggggacggcgccgggtaagggggaggggaaacccttggagaggggcttaaaatgcagactccttttgggggggggcggtgaagggttttaggaaaaaagccccggggggcccccagaagggggtgggaaaaacagctgcccttttggaggccgggggggggggggaccccgggaaagcccctgtttttggttttaaggggggg

SEQ ID NO: 19009 - DNA, 375 bp, Homo sapiens
ctactatagggcgaattgggccctctagatgcatgctcgagcggccgccagtgtgatggatatctgcagaattcgcccttagcgtggtcgcggccgaggtacgcgggtgacttaaagctgagagtggagcaggcactaggggaaaacctggcatgcagatccccacccccagagggatatgaagcttgtggtaggtgccctgatggtaaccagagcaacagtaaggctcaaacccagtccagcttctaatgaaattaactcgattcttgcactaatagcttagcaggagggaaaaacctgtaggtctattagtaggaattacccatgctaaaaaaaataaaaaaaaaggtccctgcccgggcggtcgttcgaaag

SEQ ID NO: 19010 - DNA, 480 bp, Homo sapiens
tcaagcggccgccagtgtgatggatatctgcagaattcgcccttagcgtggtcgcggccgaggtactttttttttttgattttcttgatttttttatttttattatattataatatttttattttaatatttatttttattatttattttttttttttttatttttaaataaatatatattttttctttattttttttattaattttaattttttaaaaaaattttattttattaaacaacatattttacattcttttatggatacacacaatgctggtagttgtattatataataattgaattcatttatcttaaaaggaaaaatttaaaaaaacaaaaaagtccaaatgaatgtatgctacaaataaaattttaaatattcttaagcaaaaaaaaaaatatttaaaaaaaaaaaaaaattacaaatattcaaacagttatcacattttttttttttttataaaaaaaaaataaaattc

SEQ ID NO: 19011 - DNA, 295 bp, Homo sapiens
acgactcactatagggcgaattgtgccctctagatgcatgctcgagcggccgccagtgtgatggatatctgcagaattcgcccttagcgtggtcgcggccgaggtacctaatgctgcctttagatgaagtcacattcagtctgctttgaaatgaaatatctttaagtaatctgttctgccatgctagaaaaatgtcaccatcattttgctgatgcatggagatgtggcagtcctaaactactatttagagaggaagagaattggagcagaagtgactgggcaacagtttcaagag

SEQ ID NO: 19012 - DNA, 477 bp, Homo sapiens
ggcgaattgggccctctagatgcatgctcgagcggccgccagtgtgatggatatctgcagaattcgcccttagcgtggtcgcggccgaggtactgttcaatacatttttgttgagcaaattatagctcagaataaagaagtgatatattctaaattgtattgaaataaaagcacatgacaaaatagctaagtatttttatttattttttccccctgtgatagaacaagtaagaagtttgcgacagagcactattgccaagcgttcaaatgcagcaccattaagtaacacaaaaaaaagcatctgggaagactgtatctactgctaaagcaggagtgaaacaaccagaaaggagtcaggttaaagaagaagtatgtatgtcactgaaacctgagtacctgcccgggcggccgctcgaaagggcgaattccagcacactggcggccgttactagtggatccgagctcggtaccaagctt

SEQ ID NO: 19013 - DNA, 406 bp, Homo sapiens
atagggcgaattgggccctctagatgcatgctcgagcggccgccagtgtgatggatatctgcagaattcgcccttagcgtggtcgcggccgaggtacacattcaataagctcagcaaatcctaagtaggatgaactcaaagaaaccactcccagatacataactaacctgttgaaaaactaatataactaaagaatgaaaacagagaaaaatgtcacattatgtgtagggagaaaacaatttaaagaccacatatttttcatcacaaactatgaagactagcatacagtggaacaatatctttaaatctgcaaaagaaaagaattataaacttagaattttataccctgtgaaactgtccttcaggaatgaggcaaaaagaaaatatcctcagaggaaggaaaatc

SEQ ID NO: 19014 - DNA, 243 bp, Homo sapiens
gcggcactgtgatggatatctgcagaattcgcccttagcgtggtcgcgccgaggtacggcccagtttgcttggctctacaaggcccaaaacggtttggacttttccacttaaggaagacatttctgatggtacccaccaccactgtatgatgctcatgagctctggcatgccatgaagggagtaggcactgatgagaattgcctcattgaaatactagcttcaagaacaaatggagaaatttt

SEQ ID NO: 19015 - DNA, 160 bp, Homo sapiens
  misc_feature 1, 36, 118, 119, 120, 121: n = A,T,C or G
ngatgtatcgattcacttaggcgattgggcctctanatgcatgcctccgaacggcgcatgggtgatgttctgcagattcgcctttagccgttgggtcgcggcgggctttttttttttnnnntttcaagtgggaacatttatggaaaccctttttccattt

SEQ ID NO: 19016 - DNA, 556 bp, Homo sapiens
cgactactatagggcgaattgggccctctagatgcatgctcgagcggccgccagtgtgatggatatctgcagaattcgccctttcgagcggccgcccgggcaggtacgcggggacagaagggacgacagctgcttgctggggagaggcggagccctgagctcctgcagaacctgaagggaagaatatttctcagccctccgttctcaagacagatgagtgctttagaaagaggactctgcagcggcgaggaggatggaatgacaggcaaagcacgcaggaccaggagatggcttcgctccctcaatcactcatccaaagacgtttaatgagcacctattgtgtgtcaggcattgtacctcggccgcgaccacgctaagggcgaattccagcacactggcggccgttactagtggatccgagctcggtaccaagcttggcgtaatcatggtcatagctgtttcctgtgtgaaattgttatccgctcacaattccacacaacatacgagccggaagcataaagtgtaaagcctggggtgcctaatgagtgagctaact

SEQ ID NO: 19017 - DNA, 528 bp, Homo sapiens
gactcactatagggcgaattgggccctctagatgcatgctcgagcggccgccagtgtgatggatatctgcagaattcgcccttagcgtggtcgcggccgaggtacatatgctcagtgtttaaattacatttctatacaggtctattgatctatatttttggtcaatatatctcatgcctgtaatcccagcactttgggaggccgaggcgagcatatcacgaggtcaggagttcgagatcagcctggtcaacacggtgaaaccccgtctctactaaaaatacagaaattagctgggtagagtggcaggcacctgtaatcccagctactcaggaggctgaggcagggggatggtttgaacccgggaggcagaggttgcagtgagccaagatggcgccactgtacacgatagtggattggagtgcagggtcccagtaataagtgtaatgccagcttggggtcagtgaaagccagagacagcagattgggcctgacccccaccaaatcagcaagctcttccatggtatctat

SEQ ID NO: 19018 - DNA, 490 bp, Homo sapiens
gactcactatagggcgaattgggccctctagatgcatgctcgagcggccgccagtgtgatggatatctgcagaattcgcccttagcgagggcgcggccgaagtacacacactgtatcattctattcatctccaagccacagaaggatgtatcagccctgtagctaaaaggatgtgtggcggaatcgtttggtaatggcagttttgaagatgaagtctgaaaaatgtaagatgattttgccatcttcttgaaatctttaaacagggtggaagacttagaattatgcagtgcagctccagtgcgtacgggaaggcgaagaaaagaatagagaagatagggaaattagaagataaaaacatacttttagaagaaaaaagataaatttaaacctgaaaagtaggaagcagaagaaaaaagacaagctaggaaacaaaaagctaagggcaaaatgtacctgcccgggcggccgcccgggcaggtactttattttt

SEQ ID NO: 19019 - DNA, 588 bp, Homo sapiens
  misc_feature 378, 379, 380: n = A,T,C or G
ctatagggcgaatggggccctctagatgcatgctcgagcggccgccagtgtgatggatatctgcagaattcgcccttagcgtggtcgcggccgaggtacctttattgagcttaattataatactgtcaaattgccacgatctcactaaaggatttctatttgctgtcagttaaaaataaagccctaaatacatttttattctttctactgagggcattgtctgttttctttgtaaatgccgtacgcggggagacacactctgccccaaccatcctgaagctacaggtgctccctcctggaatctccaatggatttcagtcgcagaagcttccacagaagcctgagctcctccttgcaggcccctgtagtcagtacttnnntttttttttttttttttttttccccccccaaacggggaaaaatttttttttgaaaatttttttccccccccagggggaaaaaaaaaccctaaatttcaaaaatgggggggggggggttttttcaaaaaaaaagggaggggtttttttttaaaaaattgggcctttttccttaaaaattaaaatttgccccccccgggggggcctttaa

SEQ ID NO: 19020 - DNA, 517 bp, Homo sapiens
attgtaatacgactcactatagggcgaattgggccctctagatgcatgctcgagcggccgccagtgtgatggatatctgcagaattcgcccttagcgtggtcgcggccgaggtacgacatagctttcagtattgtatcttctaatattttaatatctgataggctagtctccattttcttcggagattttttcttttttttctgcgtttgcttaattgttatttcttttttttttttttttttgagatggaattttgctcttgtcgcccaggctggagtgcaatggtgtgagctcagctcactgcaacctctgcctcccaggtttaagtgattctcctgcctcagtctctggagtgggttaggattacgggctcccgccacagctaatttttgtatttttagtagagatggggtttcaccatgttggccaggctggtctcaaactcctgaccttaggtgatctacccacctcagcctcccaaagtgctgggattacaggtgtgggtcaccacgcctg

SEQ ID NO: 19021 - DNA, 693 bp, Homo sapiens
ctactatagggcgaattgggccctctagatgcatgctcgagcggccgccagtgtgatggatatctgcagaattcgcccttagcgtggtcgcggccgaggtacaatcatgcactggggtaaagaagattcatctgctcttagctacctaccatgccaacactcctgagaaagctcacagaggcccatgatgcccacctggatctgaggacctagaaagccacaacaggcaaccataatctgggtcttccctcagccaactcccctgcataaagtgaatgaatgaaaaacccatcttatattaatcagagttctctagagaaaaagaaccaatcagatgtgtatatatagaaagagagaattattttagggaattagctcacatcattatgcaggctggtcaatcaaaaatctgtggagtgggctagcaggctggagacccagggaaaggctaaattgcagtttagatcagaaggtcatctactggcagaattccctcatcttccaggaaggtggatctttttctaccaaggccttcagtttattagattaggcccatgaacatgctggagggtaatctgctttactcaatacatactgatttgaatgttagtatcatcaaaaagaccttcacagaaacatctaaaataatgtttgaccaaatgtctgcataccatggccaagccaagtttacac

SEQ ID NO: 19022 - DNA, 378 bp, Homo sapiens
ggcgaattgggccctctagatgcatgctcgagcggccgccagtgtgatggatatctgcagaattcgcccttagcgtggtcgcggccgaggtacgcgggtcactaacactataataaaataatttttttaaagagtcataaacctttaaggatgataagagtggtagaagagactatagaaacaaaattttggaagctgaaaagcaggtagatgagtggtaatgacttaggaggtctgagaaagtcagattccaaattagcagtggtgaaagctgaggacctgttcagtttacttggcagaatcttcagaagttttagaaattgctatctttaggaacctctggaagttgaggtatgggtagggctaaagtacgcgggg

SEQ ID NO: 19023 - DNA, 238 bp, Homo sapiens
tacgactcactatagggcgaattgggccctctagatgcatgctcgagcggccgccagtgtgatggatatctgcagaattcgcccttagcgtggtcgcggccgaggacgcgggggagtcagagcctcttctctctaagtcacgggaactgcccttgctacttgtgacctgccctttactcaacagtttttgttctgggaagccctgggattctgctaatacctatcactgtaggtgctg

SEQ ID NO: 19024 - DNA, 563 bp, Homo sapiens
tacgactcactatagggcgaattgggccctctagatgcatgctcgagcggccgccagtgtgatggatatctgcagaattcgcccttagcgtggtcgcggccgaggtacgcgggggtgtctcgatggagtagactctcagaacagtgcagtttgccctccgctcacgcagagcctctccgtggcttccgcaccttgagcattaggccagttctcctcttctctctaatccatccgtcacctctcctgtcatccgtttccatgccgtgaggtccattcacagaacacatccatggctctcatgctcagtttggttctgagtctcctcaagctgggatcagggcagtggcaggtgtttgggccagacaagcctgtccaggccttggtgggggaggacgcagcattctcctgtttcctgtctcttaaggccaatgcagaggccatggaagtgcggttcttcaggggccagttctctagcgtggtccacctctacagggacgggaaggaccagccatttatgcagatgccacagtatcaaggcgggacaaaactggtgagggattcta

SEQ ID NO: 19025 - DNA, 615 bp, Homo sapiens
gactactatagggcgaattgggccctctagatgcatgctcgagcggccgccagtgtgatggatatctgcagaattcgcccttagcgtggtcgcggccgaggtacgcggggtaatagatattctagcctttattttttttcctatttttcctggaggcattgcaatattgcatttaaaaaaaaacctttctgccatattgagcaaaagcagcatgattaaagtaacaaatggaaacaaaacatgaggatggcattttaggattacaaaatgctttcctgacaaattttcatttcatgtttaccacatttttttaaagattaggttattattcctgttttaaagatggggaaactaagtatcagaaaggtaaagtgggccgggcacagtagctcactctgataatcctagcactttgggaggctgtggcgggtggatcgcttgggaccagcctggccaacatggtgaaaccctgtctctactaaaaatacaaaaatgagggtgtggcacacaacagtaatttcagcctctcaggaggcttaggcacaagaatcttttgaacttgggaggcaaaggttgcaatgagctgagatcgcgcctctgcactcgagcctgggc

SEQ ID NO: 19026 - DNA, 436 bp, Homo sapiens
cgaattgggccctctagatgcatgctcgagcggccgcctttgtgatgttatctgcagaattcgcccttagcgtggtcgtggccgaggtacaggtgcatgccatgatgccctggaaatttttttgtatttttagacggggattcaccatattggtcaggctggtctcgagctcctgacctcaggtgatctgcccaccttagcctcccaaagtgctgggattacgggtgtgagccaccgcgcccaacctctttattcttttaatggaaatactttagagatcattatttctgttatttcttcaattctttttgtaatatttacttaataattttatcagtattatggatcaacaaccaagtaactgtacagatcctggtctggcaagtccatgggtgggaacaagcactgtgcttgagatgagctccaataacaactt

SEQ ID NO: 19027 - DNA, 325 bp, Homo sapiens
gggcgaattgggccctctagatgcatgctcgagcggtcgccagtgtgatggatatctgcagaattcgccctttcgagcggccgcccgggcaggtacctagaagtggactacactcatgaggccgtcaccataaagtgcaccttctccgtaaccggatgcccttctgagcaaccaacatgcctgtggtttcgctacggtgctcaccagcctgagaacctgtgcttggacgggtgcaaaagtgaggcaaacaagtttcacagagagggaggccctcaaagaaaaccaagcttccctcacttgtaaacagagtgacttcaaatgacag

SEQ ID NO: 19028 - DNA, 539 bp, Homo sapiens
atacgactcactatagggcgaattgggccctctagatgcatgctcgagcggccgccagtgtgatggatatctgcagaattcgcccttagcgtggtcgcggccgaggtacatattttatttatattacaggtgggagaaaagtccaattggtcatggaatttgatagacttttccccagccaactgctacagtgtattataatcccgactgcccccctgtgaaaagaaaaaaaaaatgtccaagagcaaatttaacattttacaaacaataaagtccaaactcctctatgcacatatttatagcttatcacttcattttctgtgccagtgaaggggtggccagaaaaaaaatcccaagtacctgcccgggcggccgctcgaaagggcgaattccagcacactggcggccgttactagtggatccgagctcggtaccaagcttggcgtaatcatggtcatagctgtttcctgtgtgaaattgttatccgctcacaattccacacaacatacgagccggaagcataaagtgtaaagcctggg

SEQ ID NO: 19029 - DNA, 296 bp, Homo sapiens
ctcgagcggccgccagtgtgatggatatctgcagaattcgcccttagcgtggtcgcggccgaggtacattaaaaggggaatggttaaataaatcatggaatgtgaaaatattaaaaagaacaaagtaactatatatgctgatgtggaaagctgctcacactgttttaggaatgaagaaggttgcgaaatatttacactaaaattctatttgtgaaaaaaagagtcaatatatttgtttgcaaatgcactgaaactatccaggaaagataaaaaagggagcctttatctttggggtt

SEQ ID NO: 19030 - DNA, 503 bp, Homo sapiens
taatacgactcactatagggcgaattgggccctctagatgcatgctcgagcggccgccagtgtgatggatatctgcagaattcgcccttagcgtggtcgcggccgaggtaccagctagcatgaggatcaattgattttatgttaaatccattttatcagttggagaaattcaagattaatgttggagaaacagtataaagctctagtttttcaggctgtagaatataaaatcatcagacaaaacctaaaaaggcaagatattagatgtaagaaatgtcttgaaatgaatgtgaagtgaattgaaaagagccgtgaataaagcaaaaaccactaggaattcaattttgttggctatttctgacattcacaagtagacgtacctgcccgggcggccgctcgaaagggcgaattccagcacactggcggccgttactagtggatccgagctcggtaccaagcttggcgtaatcatggtcatagctgttttctgtgtgaaattgtta

SEQ ID NO: 19031 - DNA, 549 bp, Homo sapiens
  misc_feature 245, 332, 344: n = A,T,C or G
ccctctagatgcatgctcgagcggccgccagtgtgatggatatctgcagaattcgccctttcgagcggccgcccgggcaggtactttgagaggctgaggcagccgtatcagttgaggccaggagtttgagaccagcctgccaacatggcaaaacccccatctctactaaaaaataaaaaaattagccgggtgttgtggcgggcgcctgtgatcccagctatttgggaggatgaggcatgagaatngattgaatctgggaggcagaggttgcagttagctgagattgtgccactgcagtccagcctgggcgacagagcgagactgtcacaaanaaaaaaaaaaanaaaaaaaaaaagtacgcgggtaagagatatatacaattttatcttaatgcaaaaattagaaatatgtaaccaaagtagcaattaaataaatctagccacttgtaaattgaaataaacctctctcctaagccagcagttttgaatcaaaggaaaaataaaatgtgtgattctaagttattcagaaaaccatgaaaatgaaaaattt

SEQ ID NO: 19032 - DNA, 240 bp, Homo sapiens
tcgagcggccgccactgtgatggatatctgcagaattcgcccttagcgttgtcgcggccgaggtacggatgctacttgtccaatgatggtaaaagggtagcttactggttgtcctccgattcaagttagaatgaggaggtctgcggctaggagtcaataaagtgattgccttaatgggcgaaatattatgctttgttgttcggatatatggaggatggggatttttgctaggatgaggat

SEQ ID NO: 19033 - DNA, 299 bp, Homo sapiens
ctatagggcgaattgggccctctagatgcatgctcgagcggccgccagtgtgatggatatctgcagaattcgccctttcgagcggccgcccgggcaggtacttcttcctgggtaagcagttatgaccagagatggaaccggcaactctttggccagaaagctgtatccaaaagacagagaagatgagaaacagggagggcaaaggcgaaaaagcaattggacatgatagctagatttgtttcaggaaaacatcctgctttccaaggatttaaatgaatgtttttggtcactggtgactc

SEQ ID NO: 19034 - DNA, 620 bp, Homo sapiens
ctactatagggcgaattgggccctctagatgcatgctcgagcggccgccagtgtgatggatatctgcagaattcgcccttagcgtggtcgcggccgaggtacatgatagtaagtgtaagccatgtaaaaagtaaataatgtctgggcacagtggctcacgcctgtaatcctagcactttgggaggctgaggaggaaggatcacttgagcccagaagttcgagactagcctgggcaacatggagaagccctgtctctacaaaatacagagagaaaaaatcagccagtcatggtggcctacacctgtagtcccagcattccgggaggctgaggtgggaggatcacttgagcccaaggaggttggggctgcagtgagccatgatcacaccactgcactccagccaggtgacatagcgagatcctgtctaaaaaaataaaaaataaataatggaacacagcaagtcctaggaagtaggttaaaactaattctttaaaaaaaaaaaaaaaaagtgagcctgaattaaatgtaatgtttccaagtgacaggtatccacatttgcatggttacaaaccactgccagttagcagtaacactttcctggcactgtgggcggttttgttt

SEQ ID NO: 19035 - DNA, 402 bp, Homo sapiens
gcgaattgggccctctagatgcatgctcgagcggccgccagtgtgatggatatctgcagaattcgcccttagcgtggtcgcggccgaggtaccatatagacaatgtcaaagcaattattttttcatttccttctatccacatgtatgggtgaggctatttcacagagatagtgtatcattttactaaaacattatttattttaactatatttaggacttaaattaaaaaaaatatttttctcattcatctagggacaatttctgacccgcgacagatagaggactccagtggatagcttatgaaacttctagaatggtgttgctgtaaataagaagatgtcaacagcataacaaaggtttggttgcctcaaactgaatatgaccttggtttggtaactttta

SEQ ID NO: 19036 - DNA, 434 bp, Homo sapiens
tacgactcactatagggcgaattgggccctctagatgcatgctcgagcggccgccagtgtgatggatatctgcagaattcgccctttcgagcggccgcccgggcaggtacctgtaaaatgggagtaataataaaatctcccacataaggctgttgtagggtgaaaccaaataaaggatgcagcaagtaaacagtaagtatgagtcattattaccatgcaggtgtgtaagtgcttcccatatttccgagttattttccaaaaattccgctgtaaacttgtttattggaaattaaaatgcagtttgccacagaaacccgtttaaatggagtattgacaagcccatagaaattttcatttccgctgaatgtagtagttggacctgggccgggaccacgctaagggcgaatttcagcacactggcggccgttactaat

SEQ ID NO: 19037 - DNA, 441 bp, Homo sapiens
actactatagggcgaattgggccctctagatgcatgctcgagcggccgccagtgtgagggatatctgcagaattcgccctttcgagcggccgcccgggcaggtactccaatctgggtgatagagcaagaccttgtcttgaaaacaagataaaacaagataaaacctttccctcatcaaccatttgcccaggaaagaagacaattacttggggttttgtttcctttgtttaccagttttcagaatgagttggtaccatcagccctggcccttaggccagcccagtccacgggctctgagtgtggaggctgcgtagcaccaggaagcggctctgctgaggtcaaggggccccagcacagtgtggcatccgttcagcttttggttggtccaagatggtggggagcacagagggtcttggacgggtaggtggggcacacggaggg

SEQ ID NO: 19038 - DNA, 555 bp, Homo sapiens
ctatagggcgaattgtgccctctagatgcatgctcgagcggccgccagtgtgatggatatctgcagaattcgcccttagcgtggtcgcggccgaggtactccaaagattcaggtttactcacgtcatccagcagagaatggaaagtcaaatttcctgaattgctatgtgtctgggtttcatccatccgacattgaagttgacttactgaagaatggagagagaattgaaaaagtggagcattcagacttgtctttcagcaaggactggtctttctatctcttgtacatggtcttattctcccatcgcacagtgcagctcccgtcagtagagctgtcccagaagcaggaacttgctgtgtgtaatccagctccattcttctgcataattacacgggtcacgatgtatttaaatggttttcccagcttggtgagttggcttaaagtttgttctactacatttgtggtccactggttcactttgctgtgttgataagcgttaccaccaattgcgctttctatagcctcttttacaatgttgctcacttcatcaacaac

SEQ ID NO: 19039 - DNA, 566 bp, Homo sapiens
gactcactatagggcgaatcgagccctctagatgcatgctcgagcggccgccagtgtgatggatatctgcagaattcgcccttagcgtggtcgcggccgaggtactttttttttttttttttttggacaaacaaaaaagaagtttactaaatttaaacactgacatcctgtgaagatgccagtctttacaggcgtttgtaaaagtagactgtggggagtatgttacactaatacaaagttttacaaatgaatacaagtgaaatatataaattacaatgaaatagaggaagattgtggctctgtcctgggctggttcttttagcagtcatattgctgttggtgagagcagcaaaagccacatatgcctccaagcactccatttattacttgaataagacacaagatgaattcaattccaccaagagccaagaggatagaaaacagagatacattccattccacaatgtgcttgggttcagtgcactcggaccatgtggaggtatccagaaggtacagtgatagctccccctgggcaatacaatacaagaacagtgggttttgtcaaa

SEQ ID NO: 19040 - DNA, 518 bp, Homo sapiens
ctcactatagggcgaattgggccctctagatgcatgctcgagcggccgccagtgtgatggatatctgcagaattcgcccttagcgtggtcgcggccgaggtacgcgggggactgtggaaggcccaggcaagagggcgcgtggcagcccaaggccatggcgggacacccaaaagagaaggtgattccagatgaggtccatcagaaccagatcttgcgggaactgtgcctgcccgggcggccgctcgaaagggcgaattccagcacactggcggccgttactagtggatccgagctcggtaccaagcttggcgtaatcatggtcatagctgtttcctgtgtgaaattgttatccgctcacaatttcacacaacatacgagccggaagcataaagtgtaaagcctggggtgcctaatgagtgagctaactcacattaattgcgttgcgctcactgcccgcttttcagtcgggaaacctgtcttgcccactgcattaatgaatcggccaacgcgcggggaga

SEQ ID NO: 19041 - DNA, 606 bp, Homo sapiens
ctatagggcgaattgggccctctagatgcatgctcgagcggccgccagtgtgatggatatctgcagaattcgccctttcgagcggccgcccgggcaggtacagcggggctcaggtccgcgtgctctccgcaccaccccacttccattttggccaaaccaaccgcacccctgaatttctccgcaaatttcctgccggcaaggtcccagcatttgagggtgatgatggattctgtgtgtttgagagcaacgccattgcctactatgtgagcaatgaggagctgcggggaagtacccagcaccacctaggaagtatttttgccacaaaatcagacctccagatctaactaccattttataggaaagataagttcagagaaccatgtcaaatgacacctcgggatttcaaccagcaacgttcaaatgtgctaaactctgtagatggaaagagacttacagacatttcaaataaatgcaatatatgggccttgcttgaatcctaatacaaacaatccaactacaaaaacagccaaacatttgtgggacaatgggagatgcttgaattccgattgtatatttaaggatgttagaaatatttatggacaaaat

SEQ ID NO: 19042 - DNA, 306 bp, Homo sapiens
tttttttttttttttttatatataaattgtttacgatcactatagggcgaattgggccctctagatgcatgctcgagcggccgccagtgtgatggatatctgcagaattcgccctttcgagcggccgcccgggcaggtacttttttttttttttttttttttttttttaaaataagtttattttcatcagacttggtctcattcttttcataactgcagcaagagtattgactgaccacataaacttttttttttttgacggagtctcactttgtctcccaggctggagtgcagcggattgatttt

SEQ ID NO: 19043 - DNA, 291 bp, Homo sapiens
tgcatgctcgagcggccgccagtgtgatggatatctgcagaattcgccctttcgagcggccgcccgggcaggtactgattatctcccaaatgagaagtcattaactggaaatctccctagaatactttcatcactttggaaacaaagataggctctttcgtgctgtgttatctttatagcaacactcatccttaaccaactaggtacctcggccgcgaccacgctaagggcgaattccagcacactggcggccgttactagtggatccgagctcggtaccaagcttggcgt

SEQ ID NO: 19044 - DNA, 65 bp, Homo sapiens
gagcggccgccggcaggacgcgggcgttggcaggggccagggggggcccgaacaaaagggaaggg

SEQ ID NO: 19045 - DNA, 561 bp, Homo sapiens
  misc_feature 29, 118, 144, 145, 146, 176, 178, 179, 181, 186, 187, 188,209, 226, 234: n = A,T,C or G
gtaatacgactcactatagggcgaattgngccctctagatgcatgctcgagcggccgccagtgtgatggatatctgcagaattcgccctttcgagcggccgcccgggcaggtactttntttttttttttttttttttttccggnnntttttttttttttttttttttttttttttntnntnggggnnnttttttttttttttttttttnttttttttttttttttntttttttnggggggaaaaaaaaattttttaaaaaaattttaaaaaaagtttttttaaaaaaattttttttaaattgaaattttttttttttttccccccaaaaaaaaaaacaatttttttaccccccaaattttttttttttaaaaatttaagggatttttttttaaaaaaaaaatttttcaataattttaaaacgggaaaaaaaaaaaaaaatttcaaaaaagttttttgggggtttttttttttttaaaaaaaatttaaaaaaaataaaattttttaaaaaaaattttttttttttttttttaaaaagttaaaattccttttaaaaaaaaaaa

SEQ ID NO: 19046 - DNA, 606 bp, Homo sapiens
  misc_feature 583: n = A,T,C or G
agggcgaattgggccctctagatgcatgctcgagcggccgccagtgtgatggatatctgcagaattcgccctttcgagcggccgcccgggcaggtacatacacattggcattgtaaagatgctgagaagtcctggatagcagacctctgtagctttgtttaacacggtattttcaaatgtagaaatatacttgaaagatttctagaacactttttttgtttaagacagggtcttgctttgtcacccaggctgaagtgcagtggcacaaccacggctcactgcagcctcatcctcctgggctcaagtgatcctcttgcctcagcctcccaagtagctgggactacaggcatgtgccaccacatttgctaaattttttatgattgtttgtagagacaagatctggctatgctgcccaggctggcctcaaactcctgggatcaagcagtcttcccactttggcctcccaaagtgctaggtttacaggcatgagccaccatgtgcagcctagaacactttcaaaggcatatttattaacatgcctcagaacaattttctgcagaacggtgtcccacaggacatgtanctttttttttttttttttttttt

SEQ ID NO: 19047 - DNA, 517 bp, Homo sapiens
  misc_feature 31, 144: n = A,T,C or G
gtaatacgactactatagtggcgaattgggncctctagatgcatgctcgagcggccgccagtgtgatggatatctgcagaattcgcccttagcgtggtcgcggccgaggtacgcgggtgggagctcttgttgtggagagcatantaaattttcagagaacttgaagccaaaaggatttaaaaccgctgctctaaagaaaagaaaactggaggctgggcgcagtggctcacgcctgtaatcccagaggctgaggcaggcggatcacctggggtcgggagttcaggatcagcctgaccaacatggagaaaccctactggaagtacctgcccgggcggccgctcgaaagggcgaattccagcacactggcggccgttactagtggatccgagctcggtaccaagcttggcgtaatcatggtcatagctgtttcctgtgtgaaattgttattcggtcacaattccacacaacatacgaaccggaagcataaagtgtaaagcctggggtgcctaatgagtga

SEQ ID NO: 19048 - DNA, 575 bp, Homo sapiens
  misc_feature 175: n = A,T,C or G
ccctctagatgcatgctcgagcggccgccagtgtgatggatatctgcagaattcgcccttagcgtggtcgcggccgaggtaccaaaatggataagtggggcatttttgggggggaattacttagcttgttatctggtagtaggtgtgcaatagattataattatcatcattctcntgaaaatgtcatttttgctttctggtgctccatttctagtacctgcccgggcggccgcaagggcgaattccagcacactggcggccgttactagtggatccgagctcggtaccaagcttggcgtaatcatggtcatagctgtttcctgtgtgaaattgttatccgctcacaattccacacaacatacgagccggaagcataaagtgtaaagcctggggtgcctaatgagtgagctaactcacattaattgcgttgcgctcactgcccgctttccagtcgggaaacctgtcgtgccagctgcattaatgaatcggccaacgcgcggggagaggcggtttgcgtattgggcgctctttcgcttcctcgctcactgactcgctgcgctcggtcgttcggctgc

SEQ ID NO: 19049 - DNA, 452 bp, Homo sapiens
agggcgaattgggccctctagatgcatgctcgagcggccgccagtgtgatggatatctgcagaattcgccctttcgagcggccgcccgggcaggtactttttttttttttttttttttttttgagacagggttgcactatgttgcccaggctggacttgaactcctgggtttaagtggttctctcacctcagcctcctgagtagctgggactacaggtgcactccatcaagaccagctggttgcctttagcccaggtttgccctgtcactgaagcttttccaaccaatccctccttcttccattcacttcccccaccctttgaaagattaaatggtccccagagccagttgagaacagtccagatgctctgccctagcaagtcctcacaggtgaggtccccacccgctgtgttgccttgggccaagtgggcatcgagaaggcaccatccacc

SEQ ID NO: 19050 - DNA, 385 bp, Homo sapiens
agggcgaattgggccctctagatgcatgctcgagcggccgccagtgtgatggatatctgcagaattcgccctttcgagcggccgcccgggcaggtacttttttttttttttttttttttttgattttttttttttttttttttttttttttttttttttttttttttttttttttttttttaaaaaaaaaacatggccccaatttttttttttttttttaaaaaacacaaaaatttttttaaaaaaatttttttttaaaaaatttaaaacaaattaacccctaattacctttaactttttttccttggccataaaggaaaaattcccattttttaaaaaaggcccaataaattagaacccctttattttggggggggaaaaaaaa

SEQ ID NO: 19051 - DNA, 527 bp, Homo sapiens
  misc_feature 143: n = A,T,C or G
ggcgaattgggccctctagttgcatgctcgagcggccgccagtgtgatggatatctgcagaattcgcccttagcgtggtcgcggccgaggtactggaaatgtgggtatgggcagctgaggaacttaactcaatgttttaattntattaatttgaattagccacataatggctaggccagtgggttaccatatttggacagaacagatgtagactagtagagtgtcagtttcagtcatttgaaccatacatttgaaccatagctgagaaccagaaaatcagtaaataaagcctctgaacagaataaatactggtgtataatatcaaagaatccatgtaaagatacgtattttactgataggagctcctgtctggtagtccttagagtgtgttgctctttactatacaagattgttttccaaacttcagtggatgagaagtagcagattggccttgtttattgcagtagtttttgaggattttccctcacgcttcagcacggtgtagtaattgatctttagtgagaaga

SEQ ID NO: 19052 - DNA, 587 bp, Homo sapiens
  misc_feature 484, 552: n = A,T,C or G
atacgactcactatagggcgaattgggccctctagatgcatgctcgagcggccgccagtgtgatggatatctgcagaattcgcccttagcgtggtcgcggccgaggtacactggatgcagccatgcatggatggtttttctttatttttcagtgatttcctctgaagcagctgcactgatacatttgggagttggtggcttgactttgtccataaggggcgtggccacttcacatgatggcgggcctttaagagcacaaagaagtttaatatggacaacaacaggaaaaagcaagaagaaaacaagtagggaaaaacagctaacctggagagaaagaatttctttaacctttatgttcttcattaaaaatcttatcttggactgatttgagggatttttagaaacatggccttattttatataagcattaccttcccaggaatctttgttgtatattaatttttgataaccatttgattaactntaaaattaagtatatgtgtgtatatatacatatgtatgtttatatacacacatgtatctgtatagttntatatatacatatatacacatagacatacagagaa

SEQ ID NO: 19053 - DNA, 541 bp, Homo sapiens
ctatagggcgaattgggccctctagatgcatgctcgagcggccgccagtgtgatggatatctgcagaattcgccctttcgagcggccgcccgggcaggtacaagtcttgggtgctccactggtccatgcaggtggcagcaatgatgcccgcaatcccaatcagtgaaaccacgaaccccaagccctgacaggcagtcacggccatggtggcgcacagtgtcgacacagagccgcacgacaagtggacagcgcaattctccccgcgtacctcggccgcgaccacgctaagggcgaattccagcacactggcggccgttactagtggatccgagctcggtaccaagcttggcgtaatcatggtcatagctgtttcctgtgtgaaattgttatccgctcacaattccacacaacatacgagccggaagcataaagtgtaaagcctggggtgcctaatgagtgagctaactcacattaattgcgttgcgctcactgcccgctttccagtcgggaaacctgtcgtgccaactgcattaatgaatcg

SEQ ID NO: 19054 - DNA, 283 bp, Homo sapiens
ctctagatgcatgctcgagcggccgccagtgtgatggatatctgcagaattcgcccttagcgtggtcgcggccgaggtactcagggccagcacgctcctgctcatgcggtataagtcattcatagcagaccagctggaaggatcagggatctgagcaaagccatagttacttaagctaagccacttgttcctgggtcaagcaggtggttttctaataagcatcattcttgatcattagagcaaagggatgaatgctcctcttggaatgatacaggggatctgc

SEQ ID NO: 19055 - DNA, 598 bp, Homo sapiens
actcactatagggctaattgggccctctagatgcatgctcgagcggccgccagtgtgatggatatctgcagaattcgcccttagcgtggtcgcggccgaggtacaaggaaacatgagtcctcaatatgcttagagtgcacctgggaaaatcagacacaaatagaattatgatggaaaataattggtaaaagataataaagaccaaatgaagaaaacacgtagtaagaattaaaggatgttagtaggtggtagattgctcagagaaggtattatggaacccacgagtccagagtcagccctgaatgagtttcggtgagcagggcaagaggggagcagggatggtatagaaaaaaaggcagaaaagtgcaaggtgtgaagccatggcttgcacggttagtagagagcaaagagactagctgcagttgactcgtccactgatcaaatgatcagcttgtagggctgtacctgcccgggcggccgctcgaaagggcgaattccagcacactggcggccgttactagtggatccgagctcggtaccaagcttggcgtaatcatggtcatagctgtttcctgtgtgaaattgttatccgctcaca

SEQ ID NO: 19056 - DNA, 527 bp, Homo sapiens
ggcgaattgggccctctagatgcatgctcgagcggccgccagtgtgatggatatctgcagaattcgcccttagcgtggtcgcggccgaggtacgcgggccatgggtctttttatcaattttgtttgaatactcccagaggcaggtggcataacaccattgcaatccagaaggcaaataatctatgaatatatgcccagttgtctccaggaagtaagaaatttaccttgtctacacccatggttttatatgctgcccatatattaatagagggaagagggagagggtcctcagtaatcagtaattgtaaacattcatgcttgttggaatggtcttcccatggcccagggaggttgcagcctgtcaggagaccacatgccatggggaagggcacagcactcctggttccagaacagggtcccttaatcagagtgttgtccatagaaacactctgattaagctttaatcagagctgtttagctgtttccccactggacggtagggtccttaaagacaatgtttgtacctg

SEQ ID NO: 19057 - DNA, 497 bp, Homo sapiens
ggcgaattgggccctctagatgcatgctcgagcgtgtccgccagtgtgatggatatctgcagaattcgcccttagcgtggtcgcggccgaggtacttcttcctgggtaagcagttatgaccagagatggaaccggcaactctttggccagaaagctgtatccaaaagacagagaagatgagaaacagggagggcaaaggcgaaaaagcaattggacatgatagctagatttgtttcaggaaaacatcctgctttccaaggatttagatgaatgtttttgttcactggtgactcaggtaacacgtcttcaagaagccatagggaggttgagggagggaagtcaagaagggaggttgaggactgcacttttgatttacttctgacttcacgagtcactttctgccaaaaaaatctctccttttgcttctagcaccgactagatttccttcagctgatgattgactcccaaaattcgaaagagactgagtcccacaaagc

SEQ ID NO: 19058 - DNA, 350 bp, Homo sapiens
tatagggcgaattgggccctctagatgcatgctcgagcggccgccagtgtgatggatatctgcagaattcgcccttagcgtggtcgcggccgaggtacatgtgactttatacattttacatttgtaataaaaaaatcatgaaaagtatgctttgaacctgttggtaaattctaaaaaggaactaatttgaaagatttataaatcaaatttgttaagtggccaaactattttttatttgaaaataacaaaattctaactcgagcaaagctggttggaaagaaggaataactgccttttctaagctttatcagctaggaagcatataggaatttaataattccaagaagaga

SEQ ID NO: 19059 - DNA, 664 bp, Homo sapiens
  misc_feature 663, 664: n = A,T,C or G
ccacgcgtccgggaagtgtgtgtgttggccacggctgcaggaggtgggggagacacaaagcaggaagcctccgggagaccagagctgggtgcagacatacacagggcatacacacagacacacagagtcacacacactcacacacacctctctctctctctccctctgtctttctctctctctctctctctctgtcctttcctcctggacagatccacagttatacacagaaacaaacacacacgcacgtagagaagtgattcacaaacacttaaagacataaatcacaggtgcaaagccatacctgggctcaaaaacctccaagagaacgcagcctcagacccacccaggggccaggggccaggctgtttgcgagaccagcccaggcgggacccaggcttgcacgggcaggtacacgacattcttgggcatacgcagcccgcctggccggagctgtgggagtcctcagccccaagacccagcaggcgtctgaggcctgcccactaaggaggaggagtcattgctgccatcattatcatcccctccccagccacagtctgaggagcccctgtccacccttccccagggcctacccagcctccctctccaacttcctgccccccggagatacctccaaagccgtacgcctgttcccagagttcnn

SEQ ID NO: 19060 - DNA, 3296 bp, Homo sapiens
  misc_feature 1, 3294, 3295, 3296: n = A,T,C or G
nacgttagtaagcaagctggtggcggctggtgggcgaccgggcgcatcctcattgcagtgcggcggccctacctcggccctggcctgaccccggcggccctgcccgcccctccctccagcatcatggccagcccaagaaccaggaaggttcttaaagaagtcagggtgcaggatgagaacaacgtttgttttgagtgtggcgcgttcaatcctcagtgggtcagtgtgacctacggcatctggatctgcctggagtgctcggggagacaccgcgggcttggggttcacctcagctttgtgcgctctgttactatggacaagtggaaggacattgagcttgagaagatgaaagctggtgggaatgctaagttccgagagttcctggagtctcaggaggattacgatccttgctggtccttgcaggagaagtacaacagcagagccgcggccctctttagggataaggtggtcgctctggccgaaggcagagagtggtctctggagtcatcacctgcccagaactggaccccacctcagcccaggacgctgccgtccatggtgcaccgagtctctggccagccgcagagtgtgaccgcctcctcggacaaggcttttgaagactggctgaatgatgacctcggctcctatcaaggggcccaggggaatcgctacgtggggtttgggaacacgccaccgcctcagaagaaagaagatgacttcctcaacaacgccatgtcctccctgtactcgggctggagcagcttcaccactggagccagccggtttgcctcggcagccaaggagggcgctacaaagtttggatcccaagcgagtcagaaggcgtccgagctgggccacagcctgaacgagaacgtcctcaagcctgcgcaggagaaggtgaaggagggaaagatttttgatgatgtctccagtggggtctctcagttggcgtccaaggtccagggagtcggtagtaagggatggcgggacgtcaccacctttttttcggggaaagcagagggccccttggacagcccctcggagggccacagttatcagaacagcggtctggaccacttccaaaacagcaacatagaccagagcttctgggagacctttggaagtgctgagcccaccaagacccgcaagtccccgagcagcgacagctggacgtgcgcggacacctccaccgagaggaggagctcggacagctgggaggtgtggggctcggcctccaccaacaggaacagcaacagcgacggcggggagggcggggagggcaccaagaaggcagtgccgccggccgtgcccactgatgatggctgggacaaccagaactggtagggcccactgcgcccccgtccccagcgcccccgggcgacttcgtgtttgcactctgccctcgtcgttcctcctccttccatttgacccaagaatcagcaactgcagtgtgaggacagcgtctcgggaggcaggaccctagggagacccgggtgtgcgccgcctgcgcgtggggagtcttcggtgcgtgggggcggcttgctgtccagcctgtgtgggggccgtcccgtcccacactcccctgggcattcttggactcaaggccggggctctgcgtggcttgctgggaggtgggctgcagcacagaggcctgtgactgcgttccagcggccagttcactacgcagtatctctggggcctgggaccagccacgtgccgagctgtcagcgacgtgaggtgtcccttctcgttgagatatttaactttggttttgctctagttctttctttttgaagagagtgactggagtggtaaagatggaaatgctggaaatgatactggcgctcacgctgccatccgaccaccctcggctcccgagtccacgcctgcctgggcctgtgctgtcagacccgcgtcggtcgtaaccctctgtggctcccctgcatcagcaccgtcccaccaccaagttcaccaggttcaccagacacggcctccacaatagccacacccacacctgagctgttctcagtgctggaacttgaccatcctggaacaccctggaagaaaaaggagcgcagggtgggccctcggccctgatgcaggagggtgcgatagcggacgtggccaggcaggaggggccgggttcaggagctgagcaggggatgcctgtgcgtggtgcctgggtctagggaagctccagccccaggatggggctgccctgcacaccggtgcccgccacatgccaaccctcacctccccgaggactggatgatgtgctgccacgtgtgactcgtctcccttgtctgccctgtgtgaccctcagtcttggccagccatgcatgcgcccgaagctcgtgcagtttgtacgtgaggtgctctcctccctgccaccatgctcatcactctggccttggccatgctccctggtcaccccacttcccggtcgccgtctgcagcactcctggagcagcctgggcccttcagcccctgtgctcgtcccaccctagggactcagccacttgcagaacaggatgggaccgagatttcagcgagccctcctggcgcccggtcctccctgtgggcaccagccctcttggtagctggtgtggagggccggtgtccttggctgccacggagggatttgatcaccgaagcagccacctgctgtagttggacctgaggtcagaggcggggcatcagaggctcaaggtgctgagaagccaccgggaaagcagccagcacaaagggcccaggaagccagcccccgagagctgagcgtgggggtctttgagtgtctttctccaagctgagacgtgggcggccgcgtggtatctcccgagggctgcttggaccctggtgggctgagtgctccgaggaggggtggactccaccttggacagtgggatgtggtgttccacatgtgcctgtttccacgccagcaccttgacttggcagcatggagccaaggtctgtccccgcccaggagggtgccttcctcgggggtagggggacggcccactctgccccagggagtcccttttgatgggaagtgcagtcagcagcgtggaggtgtctgggccaccttcagaaggtggatgtggtggccgagaccccgtccacggagggtgatggcctttcccttctgcaggtgcgggcaggtgggcctgggaccggtgctggggcctctccttgctgtgtgtgagggcccaggtggaaggcgcggacctgacagcattccaataaagcatacgggaacatgcaaaaaaaaaaaaaaaaacctatgcggcccctcgnnn

SEQ ID NO: 19061 - DNA, 871 bp, Homo sapiens
  misc_feature 1, 2: n = A,T,C or G
nngccctgttcccccattcgctccccacggcccccgcccccctgtgcgcacccccacggccaacccacaggccagccagcccatctccccgccccagaaccctggcaccagctccacacacggggctcgccccaactccctgcgtccccagctccgagccagagccggtagaggcgcccggctcacgtaggccgggccagggcacaggggtagcctcccaccgtgggcgctcaccgccgggatcgtcttccccttcgcctcgggcaccacattcgggcccacaaggctcccacgcagcgccgattcgccgcccagacctgcagtaacgcctccgccccggcccggcgcgcagcaccgcgaggagcccctccgaggcccacgcgtccttgcagcggcccgccgcgccgctggctgagcccgacagctccaagcggcctccacgggtcacgaaagcggtgtagctccagctcgcgctcacgcggcagatgtcgacgcccgcccgcagcggactggggctgtgcacctggcgcccgcgtccggagcccagctcctgcccgaagccgcagaaaccgaagccgaaccaggcccccggccgctcctccgccatgcccgagcagcgccctctgccggccgccgcctggctgcggcgggcccggggggattcttgcgaagagcccgctagtgggacactggcaagtctctggccttccaggggctggagctgccttatcttatctagccatttattcgtccagcgagcatttactgagcgctcctcctctgccagtgaggacagctgtctgctcccaaggagctcagtcccgggaccgcggcagctcaaaacccgacacgcgccggaccggacgcgtgg

SEQ ID NO: 19062 - DNA, 1515 bp, Homo sapiens
  misc_feature 875, 878, 989, 1357, 1391, 1398, 1420, 1439, 1460, 1474,1480, 1491, 1497, 1500, 1501, 1502, 1503, 1504, 1505, 1506,1507, 1508, 1509, 1510, 1511, 1512, 1513, 1514, 1515: n = A,T,C or G
agggagtcgacccacgcgtccgccatgtgctgcgattcgctccctcccaccccactgctcccgccccacgcgtccggcagccgcggggcgggcggcggcggcggcggcggcggccgggacccagcgggccaggtggggacggcgcggagcgggtgcgggagatgccgtgcgggactggggccacctgagccgcccgcctcgtccccgccttctgtgggaaggatgtgcgcgcggatggccggtcgcacaacagcggcccctcgggggccctacggcccctggctctgcctcctggtggccctcgccctggacgtcgtgagagtggactgtggccaggctcccctggaccctgtctacctgccggcagccctggagctcctagacgcccctgaacacttccgtgtgcagcaggtgggccactacccacctgccaactcctctctgagctcccgatctgagacctttctgctcctacagccctggcccagggcccagccacttctccgggcctcctacccaccttttgccactcagcaggtggtcccccctcgagtcactgagccccaccaacggccagtcccatgggacgtgcgggccgtttcagtggaagcggctgtgactccagcagagccctacgcccgggttctcttccacctcaaagggcaggattggccaccagggtctggcagcctgccctgtgcccggctccatgccacacaccctgcaggcactgctcaccaagcctgccgcttccagccatccctgggcgcctgcgtggtggagctggagctttcctcgcactggttctcacaagccttcaccacacgggccgagctggcctacacgcttgagcctgcagctgagggccctggggntgntggctccggcgaggagaacgaccctggggagcaggccctcccagtggggggtgtggagctgcgcccagcagaccccccgcagtaccaggaggtacctctggacgaggctgngactctgcgggtgcctgacatgccagtgcggcccggccagctctttagtgctaccctcctgcttcggcacaacttcacagccagcctcctgaccctgcggatcaaggtgaagaaggggctgcatgtgacagccgcccgcccagcccagcccacactctggactgccaagctagaccgcttcaagggctccaggcaccacaccaccctcatcacctgccaccgtgctgggctcacagagcagattccagcagtccccttgaactgtctgagttcctatgggtggactttgtggtggagaatagactggtgggggcgtaggtcacctcgcccgtcacgtggcagttggagtaccaggcaaggccctgaanagagaaggacaaatgtgttggaaatctgtgtttnaccgganatcagagccttatccactggcnaagttaagactgtgataanaccatgattgattcccagatntccgtggctttatntgaagnggggcttgtgngttaancannnnnnnnnnnnnnnn

SEQ ID NO: 19063 - DNA, 865 bp, Homo sapiens
  misc_feature 826, 851: n = A,T,C or G
cgtccgggcattgcccatcctgggtgaggctggggctctcctgggcactgtatgtattctggatacagggatactgggctcgctatgtgtgtggagccatcccttccttgccccagccccacctccctctcaaaccctctctggctctttctgagcttcctttcctgctccccagcttgcccagtgctcagtgccccacttggctcttttgctacttcgggtcaggtggagcctcttgggaatgtgaagtgccttacagaaagattgcacttcaagaggagaggctgcagggagccatcctaaacccagaggcctggagcttaccgtgtcactttacttttgtacacaggggtctccttagtgccctcgagaaggattcttggccctgagcttctactcctgaggccacctctgtgcagccccagctccctcaactctaggctgtagtctcagtgggaaagcctggcttgggggtctcctaggaatgtccacctgaaggcacacttgataggggcttgcacaacttatgtctgccaaggccacctgaggaactccctggtgcctataagttccaccttccccttcctcttcctcgccccagcattttttctgagtaggggtggcaatggacaaagccattgtcataagcagttgcaggtataactttcactagaaaacctgacaccttgtgttttctttcaggcttcccagaggtctgtgcgactagcccctgtctatcaaaagttattagagaggatgaagcattagcttgaagcactacaggaggaatgcaccacggcagctctccgccaatttctctcagatntccacagagactgtttgaatgtttnaaaaccaagtatca

SEQ ID NO: 19064 - DNA, 1502 bp, Homo sapiens
  misc_feature 1, 2: n = A,T,C or G
nncaggcaaagtccagggcaggaaggccccaaaaggccatgtggacctcaccacgtgatttctgtttagaaactttcaatggtgccccattccaaacccttaagtatggcctctgtgcgtcctggtgtagccctcaagctacatttctgatccattctcaactcctagtactgtgctacacctatctacacctcactcctcaaagactcgaagtaaactcatgctcttggcctgattcaaataattcccttaggccactctggaccccaaattccaggaagcataaaaaacagcaaagcacacgagtatacttccaaacttttgaaaaatacaataagatcaccaggaacaaatatgacccacgcagcagcgtacgtacttgtataggccatattcctttacgtgggacacttaatgaaaagctgtcttttccaaactgaatgcgcctattaataaaaaaatacacctgaccatctaatgctgaagtcatccgccaggatggtactggaaattgagtggctaatgtggagaaaacgcaggcagaaaaacaggggagacaaaacgaaaggctctcttggtttgagcctgtccaagcagccacgactccttatcaggtgaacacagttcgtcagttggccacctaaagtacaagtgggagaaattcatcatcacaacataaattttgagcttgatattctcatatccgggagtcaaacaaacccaaccacctgtgcacaatgcttccacctgcaggaaggtcatcgcaaacgctccaatctcgtaacaacattcacacgtttccagcatgtacctccgcttcacacctctctccccccacgtagtgacccaccaggtctacgtcctgaaaatacttccagtggtcatgactctttacaacaacatatcaaattattttctctaattacctatgaaaaaagaatgaaaccaactccgcggagagcgtggcacggctctgcgctcccctccctgcctacccagcgccttccacgcgggacactccccgccgcgctccgctccagacccgcgcggcctcgccggctcagcagcactcgcagccggcgatccgctggtgcagctccacgatccgcctgcccatccgcgccgcctccgcagccttcctctctgcttcggcgcacagccgagccacccgctcctcagcctccgcacgcgggcggggtgctggggcccgggcgccccgctcctctgcctccacctcactcttgatggcgtcgagcaggctctggatctccagcagcttcctgcgggcccgccagtgcgcccgggcgcgctcgcgctccagggaggccaggttctcgcggccggcgcggggcgcgtccacgggccgcatcacgccgccgcctcttccagcccgcggggcacgccggggctgctcaccagcagcgagcgcggaagcctcgctgtcaccaacgaccagactagcaacaggttgccccaactttccgcagcgaggacgcggacgc

SEQ ID NO: 19065 - DNA, 710 bp, Homo sapiens
ggagtcgacccacgcgtccgcgcgctggaggagtggagcagcacccggccggccctgggggctgacagtcggcaaagtttggcccgaagaggaagtggtctcaaaccccggcaggtggcgaccaggccagaccaggggcgctcgctgcctgcgggcgggctgtaggcgagggcgcgccccagtgccgagacccggggcttcaggagccggccccgggagagaagagtgcggcggcggacggagaaaacaactccaaagttggcgaaaggcaccgcccctactcccgggctgccgccgcctccccgcccccagccctggcatccagagtacgggtcgagcccgggccatggagcccccctggggagggcggcaccagggagcctgggcgcccggggctccgccgcgaccccatcgggtagaccacagtagctccgggacccttccggcacctctggacagcccaggatgctgttggccaccctcctcctcctcctccttggaggcgctctggctcatcctgggcagcaaggaacagactgtcaccatcaggttccagaagctacacctggcctgtggctcagagcgcttaaccctacgctcccctctccagccactgatctccctgtgtgaggcacctcccagccctctgcagctgcccgggggcaacgtcaccatcacttacagctatgctggggccagagcacccatgg

SEQ ID NO: 19066 - DNA, 892 bp, Homo sapiens
  misc_feature 892: n = A,T,C or G
gggagtcacccacgcgtccggagcacgcaaagggaataaattgtaattaggtggtgggtggctaaaaatgacaatgcaaaggtgttggattaaaaaaaaaatctggtagtagagggaaattatggaggatttttaaaaaggttaatgataatatccatctacttatgtaactttttttggagatacctgataatagtgtagagtgcattggagaggaaaagtaggagttgtaaagaccattttggataaactttgaagcaagggataatggcctcaaccaaggtagtggtgctgaaaagattgtttacataaataagcagatacaaatagaaggatttttcaagtggcattgtaactgcacttttcaaagttatttgccaaaaatcaaataacgtatcttcaaaaatcatgtttgatgatgtatcatcaaggtctttcttaaattttgttgaaagcaaaggaataagagccacctgatttgcaaacggattgagttactcagtggagtaattcttttaatatgagcaccattattttgaatggtccctttggcacccagtgttttgtactttaagacagtgcaccactgtgctttttttaagtagaaggacaaaaaggatataaaaacttttatgactgcttgactgaaggtatgatctcaagcagatcaattttaggaagcagtacttaagattagaaaatctagaaagaggccaggcatggtggctcacgcctgtaatcccagcactttgggaggccaaggccggcagatgacaaggtcaagagatcaagaccatccagccaacatggtgaaaccccacctctgctgcaagttcaaaaattagctgggtgtggtggggcacgcctgtagtcccagcaactcaggaggctn

SEQ ID NO: 19067 - DNA, 725 bp, Homo sapiens
  misc_feature 1, 2: n = A,T,C or G
nncattgcccagatcatgtcaagacgattcttgctccttatgtttctcttctacatagatttatttttatcagcgtcttgactggaagacactctgtcgatttaattggtatcctttttttctgccaatttactacagaacttattgaatgtggaaaagattcatgcaatcatgagttttctgcctataattttgaatcagctcttcaaagttctggtacagaatgaggaagatgaaataactacaactgtcaccagggttctgaccgacattgtggccaagtgccatgaggagcagctggatcattctgtccagtcatatattaagttcgtgttcaagaccagggcatgcaaggagaggactgtacatgaggaactggctaaaaatgtgactggtcttttgaaatcaaatgactcaacaacagtaaagcatgtcctaaagcattcctggttcttctttgcaattatcctaaaatcgatggcacagcacttgattgacacaaataaaatccagcttccccggcctcagagatttcctgaatcttaccaaaatgaattggacaatcttgtcatggtcctatccgaccatgtgatttggaaatacaaggatgcacttgaagaaacaagaagggcaaaccacagcgatgccagatttctcaagcgctgctttacatttatggaccgagggtatgtgtttaagatggtcaacaattacatcaggcatgt

SEQ ID NO: 19068 - DNA, 4657 bp, Homo sapiens
  misc_feature 1, 105, 4656, 4657: n = A,T,C or G
naatgtcggcacaagtgttcatggtgcgccccgagttgccgtttcttgtcccgttgcccgcatttttataggggccaaggtttattctctttgagtcttttagancggccgctgttggcaaattaccttggggtaagtcatacggccgggaacaactgcttcatgtattcaatagagggcggtcttcctccaaataacattttcttagtcttccgtgatgattcacatccggtgccatcttgtctgtgttagtaaataaataatcttgtgcgaacagcgttgcatgttttaaccaacacttgggcctcggcactgtggatgttgtgtccgcccaaaacggtttgcactatttgccgagacgagttgtcttcccggaggaaaatgtcatctaggacccgttccatggggcaagtctattggaggtaccccaattaggccctatactactttaacgcgtaggctcttttatttttttttttacgtagtacactgataaccacaaagctctgagtatctccccaaagtaagtgatataggcagatatgataaggtatacatacatatttttcaaagtaacagtaaaaaaaaaaaacaaaaaaaaaacacaaaacattcaggccaatactaactaagccttatttcaggatagatgaccaaggtgagggtacagggatagtgatggtgggggagggggtgtgtgtgtgtgtaagacaaaaaaaaaattactgttaacttttgagggattaaaccacagatttttatactctatattaactgaggtagtgtttaaaatgaatgtctaaaatatgttaatcccattatgaataagattacattacttcctttggaggttttaaccactatttggtctagtaactctgacatttggttctctggaaaggcagtttagttatccaagaccaaagaccacgatgacaggcaacgttcttagaagtactgttgacatttaaataaacacttgggttcagtgataaagtataaaaaaattatttatcttcaactggattttatgagagaaaatctgaagaaccacttttcaacataagcagcagcttacagcccttatctgctttgttataatgtaagttgctacacagtgcacataagaacaattcactgaagtgcagtcaaagaggtgttatgaagtgagatgaaatgcttcatcccaactggaactttcagttccagtaaataaattttttaaaaaagtatctctgtgagttatgttttctagttcacagggttctttacagagatctcaaagaacaagcccattacaaaaaggatctgcatcatgggaaaatattaatgttgctatgactgtgtcaaaactgatgtgtaattgtaataaaaatgttatacacaaatgaattaaaaaagaatcctaatcagtccagctggattttctatttctatttatatatagatctcaaaaaagataatcctttcatttacaagcattcaaatgatggccatgctatttttatatacaaatttgcatatatgtttaattcctgtaaaaagttccaaatacctttagacatatacaaattaaacaaacaaaaaccttgccctcatcaacttaacttcacaaatggataaaggcaattaatatactcataaacccacctaccactgcatttagtttgtgcaaaacaaaaacactgatataaaaattaagttactgctgctttaaaatttggtacttaaggcttttcactacaatttttctcaataacaagctttattaatttttttttaaggaaatatggctcttctttccccatggaatgtgtaaattgcaagcaaacttatcttttcctcaggagatccaaagtattatttaatgctttcctatcctttaggtctaaactaacagtgcttgttcaagttcctgtttaaagcgatgagatggaaagttgatgaaagtggaagtccattgcaaatatatgcattctataaatgggaaatatttttaattaaaataaaaaatgatttttaaattttattcaagaactgtagtgaaaaaccttaattggttcatatatcctgtaataacacattgcaacaaaatgaagagttggaaaacaagaatctttatgcaagtctagtaacataaaaataacttataagtcccgggttgttgaggctcttcttctgctttgaggttataaacctctgaagtagtgttacaaacattaagaaaaacgtgaaagggccaaagttccctctctaataccagcagttatagcacaccccattgtggtaataggatgcagccttagagacactgattcctgctttccacaagttagttaacaaacaaggcatctgtattatttaccctaaaaatcattcagaaataacttgtgaagggtgcttctgcatatcccattattgttccactgtcattacgcttttaaaatgaaagaaaatagaaaacctatgtaggtattcagtgcttggctcttgcatacaatggtaactgaaactcttaaaactgtggtaatgaatcatgaacccctcaaaaggctcaacaaaggagagaaggaagttgttttggttaggaaagtcagcagttccaactgttcatgtaccagtaactgcggaacagtgtacagaagatactcctgtctttgctgcctagtcagtcgtattttctgaggcttttaggaaatccacaaatatgaatatatatagtatgtatctatatccatcataaatatgaggtcaggattcagcagatgtatcaactataggttgctttggtggtgttgccaacacagcctctgcttcttcatgcatttgtagaaactgtacatcttgaaataattcttgtatgaacctccgacacggaagtctgaatgtgcagtgtgacagcaaatgggaaacctcagagtaaaggcatatgtcatcaaatgtttgaggatacttctccttaattgttaaaagcccagtctcatgacatttagttgaaactgaactactcaaattaatgactaatcttagaacttctctgcgaaggagtatacggcacattggtgtatcatctggaattgttttaacacctagtaacaattctgtgcttttggtgctgctagctgagccttcttgagacaccccatcactgcatccagaaatccccgaaaacttagagggaaccacttctaaaggattatggatagtctgctcacaccaatcagaatatggaatatcttgaaagtctgaatgactacatattgcactcagttggttgctgggctggaaacccagaatttcaatacagacacaataaaggcagttatcatctgtatgttcctgtagtccagtgtcttctgtactttctaaaaacagagaggcatctgaatggattgaattcattatttccgtaagactcatctgctgtcgtagcaagtgaaaagaattttttacaagacctccagttccagatggaagacctcctgcatcatgggcaaatgctcttgcacctcgatcatcatgtggtggtatgttttttgtctgaaaatagggaatatcctttacctggaatatatcatttatatccaccgggagagcaagaccaatgtaatcatctgaacccccatatgtggcactggacaccatggaccgcactgaggaagatcgttgcagggtattttgattaataggactcaataaatcttctttatctaatgatgcataacttaaggctttcatgaacctgcttggtgttaatctggactcaaaactgttggccttcatggtgatggtatcagtaaatagcacatcttttgctggagatgccaaagcttcagagtgagataaggatggatgcattctttgttgctgtagtcttttcagtgtagcatagccaaaagcatctctagaacttgtgtaactaaagttacaatctgctagacttttaattgtagcaatagagggtgctttaagggactgtgctcttctaggaagcctatgagaagaaccacagtactcatgcttccacagtctgtgtccatagttgtagcatctacacctactgtctctcgtgaaggacttgagctcattgaacttatgccacttgttgtagtgtctgtattgaaactttggctacgtatcttcatatgtgagctcgttgaactttctactactaacctctctcggcttgtattttctctgtgattctctgtaccaaaattcttggtgaattttaagtcattttctccaatgcttggtgtactaccagtgtcttcaatgtgcttattccccataaatgaagtctctaattgtaatgttttctgtacagtggatatgggtgtaaaatcatcactatgattaaaatcaacactgggctccgtaagtgttctgattcgcctgttgcttgtcttactttcagatgataatttccctccttttggatcactgctactacgatgttttttgttaggcaaagtaagcgaatttaagatacgattcttcacaagtttactagaagcaaagaaagggaatgaatttttatcctttatgggtccagatcggtcataaaatgttggctctgtatcttcattgatatcaaggaaaaatgtactagtagagctgctgccaaaccggtcggacgcgtggtcgactccctann

SEQ ID NO: 19069 - DNA, 1159 bp, Homo sapiens
cgacgtacagctcatagttattctagagtatccttgtaaccaggaatcacgtcctcacgtgcgtgttggccatcgatgaagtcgttgtatttgtcacagctacactcgggtgtgcacctgacctggggtagcccagctgtgttcatttgggaggcaataccatctgagctgcatgctgatcccagaaaaggggtccctgcccccgctctccaggacatggacaccaaggttcagcaggtcagaagagaagggcaccatcagtgaaaagaggctcgggcagctttcggaagaaggacttgagcaggctgctgatcacattgaggtcttgccagcgctcatcctgcaggttgatgtcaccaggcccgcggttgagctgctcctgtaggctggacaccactgcattgttgccgggcactcggtaaatgcctgtggactccagccctcgtgcctccacaatgcgacagcatgcagccacgattaaggggacgcgctggttctccgtggctggctggcactcctccagcctgaccccaaacgccctcggagcggccttcttatttttcttgatgatgttgatgccccagggggttttgggggctgcagcactgtcatcttcctacccttgctccctgcgggcaggtcctgagtcctgaggccacgtgccgcactctgcttgaggaactcagacttgaggccccccaggccgcgagagcctttgggggaggaatcagctttgggcccagagctatggctcactttgcgataatcattaagcttcttgctgatcagagcttggttggcacagccggggtcctcgccctcggccctgctgttctcccggatcgctctgatccagcccagcatgtcatcccggtcctcagccttccccttcttggtgagaatctgcttataatacaaccagccttctctcctgatatcgctgaaggtcgcatctgagaggtcagaggttgagtgtcgcttagaaggagcgtcagcatcttcagaggtgccccagctatccaaggacccgtcggtgaagaagctccggagcatccgcaggctgggtatgcggtttggcaggcgccgcagaacccggccctcgtcgcggaaggtgttgagtccatcatcgcaggacttggcggacgcgtgggtcgactcc

SEQ ID NO: 19070 - DNA, 5955 bp, Homo sapiens
  misc_feature 1, 2, 3, 4, 5948, 5949, 5950, 5951, 5952, 5953, 5954, 5955: n = A,T,C or G
nnnnatgtagaattttgctttgctgtctcagtcaggtttctgtttttctgtcctccttgcctttcttcccgttttgcttcctgttttccttcttccttcccgttttccttcttccttccctgcctcccttcctttgactgtggatggaagaaagtgtgcagtttttagggattttacttaggttcgtctttagttttcctcagtaagatagttgttttttgatacctgagtttgggattaattcatatcaaattcaggtatttgtatattactcttgatttttgtctgaaattcactttgctatgacagcctagtagttgggtcttcactccttaagtatatgtttttcccatggtgaaaatacatgaactttagttctagtagtgagcattcaaaggtccgtgatagggcttgtcacagagagagagaaatcatttatccctattgtgctggttatcatagaagagactgcctcaccactttatagaaccaatttgcaaactaaaacactgtttggagaaggtacaaactacctttcaaaaaggctacaggaaacattttatgagcagcaaatattaggaagagagcagatacagaatttagtgcctttgagaagaatataattaagtggaattaagaggggttagaaaaaaggcaatttagaaaaatattcttgtaaaactttattgtttctatatgtgaaacagaagattagacaaattccttactcttaagtatttttttaagctgaaaaaaaattattttgagcaaataaccaataagagacatttgtctattttatattaatttaaatttgttagctctaggtttcaataagtcatgattggctagaatccattttagctaccatctaaagatatggtaaagataatttagtaaaacaaaagttcatatttgccatgatttcagatatgtttgtcatggggacaatattagagttttagagatactataaaatagcttgaatttctttctgcactacatacttttgatagaaacacatttactacattgataagatgttatgtccacctgtgaaaatgggagtttggcattcagatatgctataggttagaagccccactcatctggcaatatagtcttcccatgatgcatacaaagataacttactgatgtcgataggaggtccatacatatatccccaggaaaaatgacagattattctggaggaagatgaccttcattttatggttatgtgtgtgtgtctgtgtgtctttggaaaaatatatataattttttcaaataggaagccaacatatcaagtgatgaattaaagtatgctgcagaatatatattctaaaactacaaaaaagtcactgaatatcaaaatgatacagcttatacatatagttactgtgacaagtgacagactgctagttcagaattcaaaaatcctttcctagtttgtgagataatgggctaaattccttctgcctgccactggggcaaagcaaattgctttagtttttgatgagagttcttagaagtttgttggtattccttcatccacagcatccattgttgaaataaccattttcagttgtgatgccttaactaagaagccaattgttagcctgaaatgcaatcttggtagccagtttcaatgaagctagagattagtcagaaaaagttagctgttgggctttagaaagggattttgagtcctgtcatttctacttgggagcattttggagcagattagtctttcagtataaaaacaagtggctacctgatggaaacttttcttacccttatagggaaactgagcacaagctgaatgatattgtctgctgcaaaaaaaaacaaacaaaaaaaaaacaaaacaaaaaacaaaaaaaaaaaaaaaaaaacctcgtgccgaattcggcacgaggggaagccccgtgcaccccccgccctccggccgccgccgccccgctggccctgcagccgtcgccgctgcctcgggctacagccccgggctcggcggtcccggctggggaaggagggcggcgagcgcgtccggagccgccggagatggcgggagggcactgcggcagcttccccgcggcggcggccggcagcggcgagatcgtccaactgaacgtaggggggaccagatttagtacctcaagacaaactcttatgtggattccagattcttttttttccagtttgctgagtgggagaatttcaacacttcgagatgaaactggtgctatatttattgatagagatccagcagcatttgcacccattttaaattttcttcggacaaaagaactagacttaaggggagtgagtattaatgttctcaggcatgaagcagaattttacgggatcactccattagtaagaaggcttctcttatgtgaagaattggagcgttcctcttgtggcagtgtcctttttcatggttacttgcccccaccaggtattcctagtcgtaaaataaacaacacagtcagatctgctgattctaggaatggtctaaattctacagaaggtgaagcccggggaaatggtacacagcctgttctctctggaacgggagaagaaactgttaggctaggatttcctgtggatccacgaaaggtgctaatagtagctggccatcacaactggattgtagctgcatatgcccattttgctgtgtgttacagaatcaaagaatcttcaggatggcagcaagtgtttacgagcccatatttggattggactatcgaacgagtagctttaaatgcaaaggtggttggagggccacatggagacaaagacaaaatggttgctgttgcctcagagagtagcatcatcttgtggagtgttcaggatgggggaagtggaagtgaaattggagtgttcagcctgggtgttcctgtagatgctctcttctttattggtaaccagttggtggccacgagtcatacagggaaagtgggagtgtggaatgctgtcactcagcactggcaggttcaagatgttgttcctataactagttatgacactgctggatcattccttctgcttggatgtaacaatggatcaatatattacatagatatgcagaagttccccttgcgaatgaaagataatgatcttcttgtaactgaactgtatcatgatccttcaaatgatgctattactgctctgagtgtttacctcacacccaaaacaagtgtcagtggtaactggatcgagatcgcctatggtacgagctctggagcagtacgagtgattgtacaacacccagagacagttgggtcaggtcctcagctttttcagactttcacagttcaccgaagtcccgtaacaaaaatcatgctatcagagaagcatcttgtatcagtctgtgcagataataatcatgtccggacgtggacagtaacacgattcagaggaatgatctctactcagccaggttctactcctttagcgtcattcaagatactatccctggaggagacagaaagtcatggtagctattcctctggaaatgacataggaccttttggagagcgagacgatcaacaggtgtttatccagaaagttgttcccatcaccaacaaactatttgtaagactctcatcgactggaaaaagaatatgtgagatccaggctgttgactgtactacaatatcctcatttacagtgagggaatgtgagggatccagtaggatgggctcaagaccaaggcgctacttgttcacaggccatacaaatggcagtattcaaatgtgggatctgaccactgctatggatatggttaacaaaagtgaagataaggatgtaggtggtccaaccgaagaagagctactcaaattactcgatcaatgtgatttgagcacatctcgctgtgctactcctaacatcagtccagcaacttccgtagttcagcatagccacttacgagaatcaaattctagccttcagcttcagcaccatgataccacccatgaagcagctacttacggttccatgaggccttacagagaaagtcctttattagcaagggcaagaaggactgagagctttcacagttatagggacttccagactattaatttgaacagaaatgtagaaagagctgtccctgaaaatggtaacttgggtccaatacaagctgaagtgaaaggggcaacaggggaatgtaatatatctgagagaaagtctcctggagtagaaataaaaagtttgagagaattggatagtggattggaagtgcataaaatagctgaaggtttttcagaatccaagaaaaggtcatcagaagatgaaaatgaaaataaaatagagtttaggaagaaaggaggatttgaagggggaggattccttggaagaaagaaagttccctatctggcatcatcaccaagtacttccgatggaggaactgactcacctggtactgcgtccccatctcctacaaagactactccatctcctcggcataaaaaaagtgattcttcaggtcaggagtacagcttgtgaaaactcaccaaaatgaatagttgtttcgttacatttagatgaaagttaaactttactgaatttcagtacattagtttttacactaaaactttacaagataaaattggacttcatttagtatctttttaacagaattacttggaataatgagatacaataatcatatctcttttgacattttggaaatttttttaattttacaagtacatttaacagatcatttataaagcaggagtccattttaacacttaccgactttttttggtttggaaacatattaccacgtcttaataggatggtgcccatataggtgagcatccctttagatcatgggaaccagcagactgcattcctaatcttcattatgcctgagacttgtcttacaatgttacctttaagtgaatcacataattgtctttggaacttggtctcccaacacttattgtgattgcaaagtgtttaccagatatttgatgaggtgctatgtttgtgaaaaacatatcatgtaattcaaaaacactattgatattgaataccagataccactatgtagtaagtcttttaggatgattttaatttagtcgtgcgtcattttctgattctcatcattgggagatcttaaatcttagcaagcattagcaatattaaatgccaaaattccattgaaactttcaagttggagcaattgtctgtgtttgaaaagatgaaataaaaataataatcaagggcaaagctttgagtgcccagaagggaaagctgtaccagttgctaacctgtcttgtttcaggagccaccatgtttttttttcagtgttaacaacaatcatgataattaaattaaaacactagtttgttcacttgtaggactgcagttctgaattttgggttaaaggttttggctgctgtaagaatgtgaatttgaatgtattttgaattgtaagagcaaaagaacgtttttgtacaattttttttcatttaattggaatgatcttcaggtttctacaaatagggtaattgtaaatttaaagcattagcatttattggtgaataatgtatatatccccattccaagaaatataagtgagtgaagttgaaataaaatctttaaaatttactatattgccagtggtttcacaacagttctcttgtatttatttatcaattaaatcaaataaaaatgattatgacacacatacagaacaatgtgtggcctgcctaaaattcagacatctgggcggcctagagaatgcaagcgccaacggccaaaaggactgggtacaacgcggggatccacaaaagcgggggacggttagacccagggcggggaggatacggcgcagcacaccaccagcgagaaagaagcaacgaacaagacacacacaaagaagagaaatcgacaaccagcagaaacacacgcccttgctcaaaaagaagggagaagannnnnnnn

SEQ ID NO: 19071 - DNA, 2483 bp, Homo sapiens
  misc_feature 1, 2474, 2475, 2476, 2477, 2478, 2479, 2480, 2481, 2482,2483: n = A,T,C or G
ntaaacattccacatttccttaactgtttctcatatagtatgccctctaagcaatagaattaagaggactagggtagccatgctttggcaggacttttcttctatggtattgttgccagcaacaacagattcctgaactggtaagaggcttctctcctctttccattagaagggatagaattcttgttacttctcagattagtcccttctagggacaagacctactaatctgaccaggaaggaaatgaacatgtaggtgactggggctgggaaagcatgggacagggactggtcacttcgcacatattttccatgctgtgattttgggagaaaactgatgtggttaggaaggagaaagtatggacaccagagtgagcacaatttgttagtcatgagaatggcctttttccattgcaggttaccctacctgtaaagaaaaaattaagagaaggcctggcggccggtctgaagtcatctataattatgtacaacgccccttcatccagatgtcatgggaaaaggaagaagggaagagtcgccatgtggatttccagtgtgttcgaagcaaatccctcacgaatctggtagctgctggagatgatgtcttggaggaccaggagatattaatgcatcacccaccccaagtggatgaacttgaccggctaaatgccccactttctcagatggcttctaacgactttcaggattagggccagctgtgggtctactccttgttggagcccatctcacctgggatgcctgcagccagccctccctcgtgatttgtctcaccttgagtaggagacatgcttctcccctaaccttttcctttctgccataattaacatatgtccttttcagtaagtccatgcctctggcaggggatgaagaagtactcactggtaattagctaccatctttgcagcagccctggtaacttgaaaaatttgggtctggtgctgttcattgagtctttgtgtaactgcaaaagcaggaaaggaagtcaagactcctgttgcctcgtgcttagcaaagcagtccttatcctttatactctgttcttgggttttgtttttgtcttgttttataccaggcaaattgcttagtagcaaagggaccaaactgaaaaggtgacaatctctaacttctaaaagcagacaccaatcggatgctcattagaggttaatgaagatgccattcttggtggcctctgcacccaaattgcatctggaaagaactagggtctcattcagaatgtccaaaaggaaattcttaagagcttaaattcagatttgtgtctcattaatgcagtgaacaattcaaaaccacacagattccttggcaggaaggataatggaataacagtgttgatgagacctttttagcttcaaggtttcggagtctaaacaaatggatgattcatttggaatgaaactcacaatgcaagtagaaggacctctccaaatcaggccagttgggttatcctggcttggaatctggtgtgaaaccataggtcttaacactctggagcagcacattgctgtggatatgtccaggagaccttagatatggcttaaaggctttcaagatgaggacagaaattgcttacaattgctcagtttctcaacagaaagactcataagagtgccagcatggggtacatggagtgaagctgggtgggaagcatcatctgcacagtccctgtcctagtgcaggacttttctctgtatgttttcataccatgggatttttggatatcagtgtattttggttcttgaaatagcctaatagctgctcacacattgggtaggaatattataccaatgtcatccccaaaggaagggtgagctgaatggaaattaagcccagtcattttatttgatctattagctctgttatcagtgcatgatcacccagatcaccctcctcagcccacacagtgctgaaccatcttccctcctgttctccatggctattaatagtatagctaaatttagagtgcagagccagatataagtattttggaattatctcccagtttgtggtagaagcctgactggaatacaggttgagtatctcttatccaaaatgctagggaccagaaaggttccagattcttccagaattggcatactacacacgtgaggacacaaatctgaagggtctggaagtcggttgactcaaaaggggtcttggggaatcaaattcggattggaagggagccaccggcgagcgaaaaaggtgcgacaaaaaaggatgggagcataaaacacccacgataagccggaaaagtagataacacgatacgggcaaaagtctacacactgcagagacacacgaggaaaaagctgaccaaaaacgggagagatacccacataggagtatgcaaggaacagaaggatctagaacagctagacaagggaggctgcaacacctggcctcctcccctccttctcctcgtacttgcttcagcnnnnnnnnnn

SEQ ID NO: 19072 - DNA, 1559 bp, Homo sapiens
  misc_feature 1541, 1542, 1543, 1544, 1545, 1546, 1547, 1548, 1549, 1550,1551, 1552, 1553, 1554, 1555, 1556, 1557, 1558, 1559: n = A,T,C or G
ggagtcgacccacgcgtccgccgagcggggcggcgcggctggcggggccggcggcggctgaagcgagagcgcgacgcgacgcgaccgcggcttcccgagctgcgcctggccgcccagcgccgcggcccgcccgaggcctggaggggtccgggccgccgtccatggtcgcggcgtcctgaggcgggggacgcgcccggcgcccccggccctcctccgcctcctcccgcggggcgggcggcctcctccggcgcctccccgcgcccgcccgccgatcgccgccgcctccctccctccttccctgcggctcccccggctttcggagcccgggggcggcctgtggcgcgcggagcccgcgccggactgcgcctctttggaccttgaggggaaacatgcgtttgccttggatcgtttgaaattctgagtttgggatccccgcccgcccgcctgcctcttccgccccgcgggttttttccttttttccttttgctttttttccttttctccctccgggtctcctttttgactccctccccctttatgctcgcccagccctccccctgctgctgagaagtgggggagggtctcggcctccaggttcccgccccaccggggcccgggcgagcatgcggggcataagagcaccggggccgctcccggggccccttcccgggggtctccaccgatgacagcgccgtgccggcgccgggaggggcgccccatttcgggcactaccggacgggcggcggggccatggggctgcgcagccgctcggtcagctcggtggcaggcatgggcatggaccccagcacggccgggggggtgcccttggcctctacacccccgcctcccggggcaccggcgactccgagagggcgcccggcggcggagggtctgcgtccgactccacctatgcccatggcaatggttaccaggagacgggcggcggtcaccatagagacgggatgctgtacctgggctcccgagcctcgctggcggatgctctacctctgcacatcgccacccaggtggttcagctcgcatagtggtttcaagtgccccatttgctccaagtctgtggcttctgacgagatggaaatgcactttataatgtgtttgagccaaacctcgcctctcctacaagcgatgatgtgctgactaaagacgcgggtgagtgtgtgatctgcctggaggagctgctgcaccgggacacgatagccaggctgcctgctgtgcatctatcacaaaagctgcatagactcgtggtttgaagtgaacagatcttgtccggaacaccctgcggactgactgcgggcttgctagctgactcctctcacagggacagagcgccctgctccaggagaggtcacggacctggggcaagagctgagttgggacaccaggggacagggacacttctgactgaattccgataaggtctccttcctccgaagaaccaattggtgaaccagtgagaaaagaataggaccaacccacttagacaggagaaagacaaataaccatgcaagaggggagcaaattannnnnnnnnnnnnnnnnnn

SEQ ID NO: 19073 - DNA, 3380 bp, Homo sapiens
  misc_feature 3379, 3380: n = A,T,C or G
gttcgtaaacaacatactgtcataggaaaactggagagcttaaccaacttgctcttagaaatgttaccttaaaaaaaaaaaaaaagcagtgcttaagagaaaatacaattttaattattttgttgagcctgcagagtaagtttttaaaaatataagttcatagcattttaattaactttgaaagttcatatgcatcagaaaatttatgaaaatttgaatgaaaaaaatttcatctatttatttttctaattttaatggcaaatttacactattatggctgataattctgtgaacttaccttcttgttgactgattctttttcccttaatcccagctttaaggagataggtgaagttattgtacaaagttaagtgataccataaagtatatattataaagtcatacatggcttttggacagtattatatttcagttgcagtgctgcattccattaaatttcataaaatgctagggaaaatgtgtttgataaaattttctgcagtgagaaatgacagactgagtgcctgacaatttaagccacatatgaagtatgcaagtaaagattcagtccttaatgtcatctatatcatggtataaaagctcaacaagtatcttataatttggagttaactttataaagtaagaagagtttggatatcttgataaaagattttcatgtttgctgctttttttataataaaaatcccaacattttgccatcttatgtttagctacatgaacttcgcaatttcatcggctcattctaatgaccacctaaaagtcctcaatctttgaatattgctttattagctcctctaactggtattctaacagtttagcagcacttatatttattaatgctttacatttttacccctttttgtgtaaacacaaatacacccatgcatatacacacaaacattattgtccttgtgagggtttgggggaaatgaaaaatagtacctttctcctcttcttttgattccttagttcccaaatagactggtgctagtcatttagtcatctgtaaatttcgaaatgtagtttgattaaatgtgaactgaattctcagcaatgaaaaatgtcaagttgaattcatctaataagtgaaaataatatattttgtaaacagattacatttgaacacctaaataagtatttgtttcataatcattacatgcttgtttatgatttacaaagatttggtagagaaaagtacagtccttaaggcatatatatgccaatgcattaaactactcagcttttgtgccagctcaggtgttcataggaacaggaatgtggaataccagctttttactttaattatacttttatgctgaatttttcttccagttaaacctttaattacactagtatgtaaagtagttactgagaaaaataagtttttgatttcccttctgttgatctgtaacatttttaaatgaagctatttaacacatgacatgctaatgttacttaatggattcctatgtatttcattaaaaaaaagtctcccacctgtgttaagacagctaaatatttcttgatgttggcttgaggaccaagtgagccatcttgccagttaagcaagttttatatcagaggaccaaatggttaagaagagaatttgtacatttcttgagcttccccatgtgaagcttgggttcagtactatcctattactatccatcttcataatgagtgaagcaaactgaaagggaattcataatcttttttcttatctgaacagaaaaactaatgaaaatcaacaataaatctttattttaattttcattcaacagctgaaaaaccatgtctgttgaccacattggaccattgcctagttaaaatccataaaattccctataaaccaatgaaaagaaacttgtctggcaataatttccaacattttaaattctaatttttagttacaaagaaaaaggatagaatgaggcttttcaaggaattcttgctcatcccttcaattatttggcaggtaaaacagtcctagaattcagcttcctttttggttttattactattaaatagatactttcatataaatggaaacacttttcctcaaaacattaattcaaaacatactccttatattaaggattatagcaccatattttttgtatattccctatgtgtaactttttcctgttggtatgtgatatttttcatttaatatgactatctgctggtgttggggccaatagatttgtgaatattctgtggatgtgtctatgtataggtgtatatatatatatatatatatttttttttttttcccagctaattacctcaaatgtgtgattgtttaatatataccacactatgtttgcacagagcagggcttccattagcagtggatatttttatgtctgactttgaaaatcagtcaacacaatttcattggtgtgaattatttgttgctctttttcatattttaatggagagattcctattataaggcccatgcttcaaacataattatatctttctatatccagccatctggaaatacataggggtaagaagtatttcttgaaatgtccttgtttagtaagttagtaaaaactgggatgactagttgccaagatgtcttgtaactgcatagcagatgacacctggcatggcaagtctcattcacttcagcacaacactctgtacatttcagtctgatattctactttgccatttaaggacaccattaaaatcatagagattttcagtgacattggagtattgtaattattactttcaaaaaattatttttaataggatgattaaaccaatgagaagaaacacacataaatgatattttgcagtttatctgtattaagaaatgcttcttgccaatttctagttttagtttttggattgctacataagactttctttccatttactttatgtgtttttaaaagctgcaggtaatttttaaggtttgatggaattataatggaagccttgtataagttaaatgaaattggtaaaggagagcttactttgtctataatgcattcaggattaaaaattagatttcaaaatgaaatgtctgatttgtaaaatatttaatgttatatcagacttacataaaattttctgtgagaactcaaatgcatttgatttttaatgaatgttctgaatgaaatatgaatttttgtctttcagtctctgtagtttatctcaatatattaataaaaaggtctgttctcactgtaaaaaaaaaagaaaaaaaaaaaggggggcaaataccggggaatacgacaacttgtaaaggcaaggggaaaaaagagggggaaaggggagaagcgtgtggacggggtgaccacaagagaaaaaatggcgggtgaaaaaaattggtgaagann

SEQ ID NO: 19074 - DNA, 641 bp, Homo sapiens
  misc_feature 1, 2, 3, 633, 634, 635, 636, 637, 638, 639, 640, 641: n = A,T,C or G
nnnatagaggagtcgagtggtgtggagcgcgccgggtcccggagccggctgtctgagggatggacgagacgagcccactagtgtcccccgagcgggcccaacccccggactacaccttcccgtcgggctcgggcgctcactttccgcaggtgcccgggggcgcggtccgagtggcggcggcggccggctcgggcccctctccgccgggctcgccgggccacgaccgcgagcggcagccactgttggatcgggcccggggcgcggcggcccagggccagacccaaaccgtggcggcgcaggcccaggctctggccgctcaggccgcggcggcagcccacgccgctcaggcccaccgcgagcggaacgagttcccggaggatcctgagttcgaggcggtggtgcggcaggccgagctggccatcgagcgctgcatctttcccgagcgcatctaccagggctccagcggaagctacttcgtcaaggaccctcaggggaggatcattgctgtcttcaaacccaagaatgaagagccctatgggcatcttaatcctaagtggaccaagtggctgcagaagctgtgctgtccttgctgctttggccgtgactgccttgtccttaaccagggctatctcnnnnnnnnn

SEQ ID NO: 19075 - DNA, 3415 bp, Homo sapiens
  misc_feature 3415: n = A,T,C or G
ccacgcgtccggctgcgggaggcgcggcgcggggggggtcgggtgcgcggcgggccgcccctccccctgccaggtccgggcgggtgcctggagccgccagagtttccgcacccgggagggagatgcggccggggctcaggctccttgcagttgtaatttagattcgagaagtggtttatcctttgactggaaaagaaaagtagctgcagtattcccccagcacttgctgagagcatgccgtatgccaggctgtgaggctcgagagacaagcagtggaagagttgcggcctgtttcatctctggattgtaaatctgagcctccttctggcccctggaaggggacagcatcacgatggaatgattcctaaccagcataatgctggagccgggagccaccaacctgcagttttcagaatggccgtgttggacactgatttggatcacattcttccatcttctgttcttcctccattctgggctaagttagtagtgggatcggttgccattgtgtgttttgcacgcagctatgatggagactttgtctttgatgactcagaagctattgttaacaataaggacctccaagcagaaacgcccctgggggacctgtggcatcatgacttctggggcagtagactgagcagcaacaccagccacaagtcctaccggcctctcaccgtcctgactttcaggattaactactacctctcgggaggcttccaccccgtgggctttcacgtggtcaacatcctcctgcacagtggcatctctgtcctcatggtggacgtcttctcggttctgtttggcggcctgcagtacaccagtaaaggccggaggctgcacctcgcccccagggcgtccctgctggccgcgctgctgtttgctgtccatcctgtgcacaccgagtgtgttgctggtgttgtcggccgtgcagacctcctgtgtgccctgttcttcttgttatctttccttggctactgtaaagcatttagagaaagtaacaaggagggagcgcattcttccaccttctgggtgctgctgagtatctttctgggagcagtggccatgctgtgcaaagagcaagggatcactgtgctgggtttaaatgcggtatttgacatcttggtgataggcaaattcaatgttctggaaattgtccagaaggtactacataaggacaagtcattagagaatctcggcatgctcaggaacgggggcctcctcttcagaatgaccctgctcacctctggaggggctgggatgctctacgtgcgctggaggatcatgggcacgggcccgccggccttcaccgaggtggacaacccggcctcctttgctgacagcatgctggtgagggccgtaaactacaattactactattcattgaatgcctggctgctgctgtgtccctggtggctgtgttttgattggtcaatgggctgcatccccctcattaagtccatcagcgactggagggtaattgcacttgcagcactctggttctgcctaattggcctgatatgccaagccctgtgctctgaagacggccacaagagaaggatccttactctgggcctgggatttctcgttatcccatttctccctgcgagtaacctgttcttccgagtgggcttcgtggtcgcggagcgtgtcctctacctccccagcgttgggtactgtgtgctgctgacttttggattcggagccctgagcaaacataccaagaaaaagaaactcattgccgctgtcgtgctgggaatcttattcatcaacacgctgagatgtgtgctgcgcagcggcgagtggcggagtgaggaacagcttttcagaagtgctctgtctgtgtgtcccctcaatgctaaggttcactacaacattggcaaaaacctggctgataaaggcaaccagacagctgccatcagatactaccgggaagctgtaagattaaatcccaagtatgttcatgccatgaataatcttggaaatatcttaaaagaaaggaatgagctacaggaagctgaggagctgctgtctttggctgttcaaatacagccagactttgccgctgcgtggatgaatctaggcatagtgcagaatagcctgaaacggtttgaagcagcagagcaaagttaccggacagcaattaaacacagaaggaaatacccagactgttactacaacctcgggcgtctgtatgcagatctcaatcgccacgtggatgccttgaatgcgtggagaaatgccaccgtgctgaaaccagagcacagcctggcctggaacaacatgattatactcctcgacaatacaggtaatttagcccaagctgaagcagttggaagagaggcactggaattaatacctaatgatcactctctcatgttctcgttggcaaacgtgctggggaaatcccagaaatacaaggaatctgaagctttattcctcaaggcaattaaagcaaatccaaatgctgcaagttaccatggtaatttggctgtgctttatcatcgttggggacatctagacttggccaagaaacactatgaaatctccttgcagcttgaccccacggcatcaggaactaaggagaattacggtctgctgagaagaaagctagaactaatgcaaaagaaagctgtctgatcctgtttccttcatgttttgagtttgagtgtgtgtgtgcatgaggcatatcattaatagtatgtggttacatttaaccatttaaaagtcttagacatgttattttactgatttttttctatgaaaacaaagacatgcaaaaagattatagcaccagcaatatactcttgaatgcgtgatatgatttttcattgaaattgtattttttcagacaactcaaatgtaattctaaaattccaaaaatgtcttttttaattaaacagaaaaagagaaaaaattatcttgagcaacttttagtagaattgagcttacatttgggatctgagccttgtcgtgtatggactagcactattaaacttcaattatgaccaagaaaggatacactggcccctacaattttgtataaatattgaacatgtctatatattagcattttttattaaatgacaaagcaaattaagtttaaatctcttttgtttaaacaacatacggtgaactttgtagggaatatcattgattcatgtgtgaatagggcaatatcgcatgagaatggcagtttacatagcaattaaatatgcttccccaaagaaaaatggaacctgcgtttggagccgcatggggaatcaccaggaattgtaggaaaatacaagaggaacaatggagaaccggttgaaaaagagcaaattatggacaggaaggaaactgaagtgaaggaaggaaaaagaaaataacaaaagtcaggaaaacgagaacgctctccactacacttcctcan

SEQ ID NO: 19076 - DNA, 2566 bp, Homo sapiens
  misc_feature 1, 2, 3, 4, 5, 6, 7, 8, 9, 10, 11, 12, 13, 14, 15, 16, 17,2566: n = A,T,C or G
nnnnnnnnnnnnnnnnncaatgcatctttaatttgtaaagaaataaaataaattaagatgtaaccattagcctcatctttactcccgaaagctcactttgcttttagtcctggccgtcggctgagcgagctgcgcatgcgccacgtgcccccgtggcgtagggcctcgtccggtcacgactatccgctgggcggggtcggtgctggccgagggggcgccggctgccggagtggacatggcggccggccccattagggtggtgttggtccttctaggggtgctcagtgtctgtgcagccagcggccatgggtccgtagcggagagggaggccggcggggaggcggagtgggcggaaccgtgggatggcgcggttttccggccgccctcggcgctgggcgcagtgggggtgacgcgcagctctgggacgccgcggccagggagggaggaggcgggggacttgccggtactgctgtggtggagcccagggctattcccccacttcccgggagactcggagcgcatcgagtgtgcgcgcggcgcgtgcgtggcgtcccggaaccgccgagcgctgagggactcgcggacgcgcgcgctgctcttctacggcacagacttccgcgcgtcggccgccccgctgccgcgcctggcgcaccagagctgggcgctcctccacgaggagtcgcccctcaacaacttcttgctgagccacggcccgggcatccgcctcttcaatcttacctccaccttcagtcgccactcggattacccgctgtcgctgcagtggctgcccgggaccgcctatctgcgccgcccggtgcctccgcccatggaacgcgcggagtggcgccgccgcggctacgcgccgctgctctatctgcagtcacactgcgacgtgccagcggaccgggaccgctacgtgcgcgagctcatgcgccacatcccggtagactcctacgggaaatgcctgcagaatcgggagctgcctaccgcgcggctacaggacacagccacggccaccaccgaggatccagagctcttggctttcttgtcccgctataagttccacttggccctggaaaatgccatctgtaacgactacatgacagaaaaactgtggcgtcccatgcacctgggcgctgtgcccgtgtaccgcggttctccctctgtgagggactggatgccgaacaatcactccgtcatcctgattgatgattttgagtctcctcagaagctggcagagtttattgactttctggacaagaatgatgaggagtatatgaaatacctggcatacaagcaacctgggggcatcaccaaccaatttcttctggatagtctgaagcatcgggagtggggagtgaatgatcctttgctgcctaactacctcaacggcttcgagtgtttcgtctgtgactacgaactggctcggctggatgccgagaaagcccacgcggcctctcccggggacagccccgtctttgagccccacattgcccagccctcacacatggactgcccagtgcccacacctggctttggcaatgtggaagagattcctgagaatgacagttggaaagagatgtggctgcaagattattggcaaggtctggaccagggggaagctctcactgccatgatccacaacaatgaaacagagcagacgaaattttgggattacctacatgaaatcttcatgaagaggcaacatctctaagtgcccttgcaagagcctttaacttggcggagctaaggagatcttattctaccatgggacataaggagcatccactgcacaaacccttaatgaacactgtcttttcatggattcaaggaattccagttttatctattaagattttatcttaatgatgagtagccaaggtctaacatagggcctctcctcaaggagagatggagggatacaattcttggttcagtgggaaacagaaccctaaaacatccatttgattcaaggtgctggtccaacagagtttttaaactactcacttctttatttcatcctttcgactgtacttgattaccagtgaagtaagatgggtcaggttacgacttacaacttttgttctattccccagactcctcattattcagtacatttcccaataatctctttttctcatctcttgctttataaattgttacgttggtggagaagcaaaacatttggtgagttgtattctggttttccggagttggatttttttatattatatactttcatgtcaaacttctattttacttatttatttatttttttaaaatattttttgtagagatgaggttttgccacattgcccaggttggtctccaactcctggatcaagcaatccatccgccttgacctcccagagtgctgggtttacaggcatcagccacctcacccagccctaattttttttttttttttggctttttctggccaggcgtagtggcttatgcctgtaatcccaacactttgggaggccgaggagaggcgactgcttgaagccaggagtttgagaccatcctagcaagaccttgtctctaaaaaataaaagaattagcn

SEQ ID NO: 19077 - DNA, 2950 bp, Homo sapiens
  misc_feature 1, 2, 3, 2950: n = A,T,C or G
nnnccgcaggcaggtcactgcgccatttcctgtccaagctgggcgaatcagggattccggttcacaatggatgctgataaagagaaagatttgcagaaatttcttaaaaatgtggatgaaatctccaatttaattcaggagatgaattctgatgacccagttgtgcaacagaaagctgtcctggagacagaaaagagactactgcttatggaggaagaccaggaggaggatgaatgcaggaccaccttgaacaagactatgatcagtcctccacaaactgctatgaagagtgcagaagaaataaactcagaggccttcttggcatctgtggagaaggatgcaaaggaacgagccaagagaagaagggaaaacaaagtcttggcggatgccctaaaagaaaaagggaatgaagcatttgctgaaggcaattatgaaacagctatcctgcgctacagtgagggtttggagaagctgaaggacatgaaagtgctgtacaccaaccgagcccaggcttatatgaaacttgaggactatgagaaggcactggtggattgtgagtgggctctcaagtgtgatgaaaaatgcacaaaagcatattttcacatgggaaaagccaacctggccctgaagaactacagtgtgtctagagagtgttataagaagatcttagaaataaaccccaagctgcaaacccaggtgaaaggttacctgaatcaagtagatcttcaggaaaaagcagaccttcaagaaaaggaagcccacgaactgctggattcaggaaagaacacagccgtgaccaccaagaacctcctggagaccctttccaagcctgaccagatccccttgttctatgctggggggattgagatcctgactgaaatgataaatgagtgcacagaacaaactttattcagaatgcacaatggatttagtatcatcagtgacaacgaggtcataagaaggtgtttttccacagcaggaaatgatgcagttgaagaaatggtctgtgtgtctgttctcaagctctggcaagcagtgtgcagcaggaacgaggaaaaccagcgtgtgctagtgatacaccatgacagggccaggctgttggccgccctcttgtcctccaaggtcctggccatccggcagcagagctttgccctgctgctgcatctcgcccagactgagagcggacggagcctgatcatcaaccaccttgacctgaccagattattggaagcgctggtgtcatttcttgatttctcggataaggaggccaacactgctatgggactgttcacagacttggctctggaagaaagattccaagtctggttccaggccaaccttccaggtgttctccctgcactcacaggcgttctgaagacagatcccaaggtaagcagctcctcggctctgtgccagtgcattgccatcatgggaaacctcagtgctgagcccactacccgaagacacatggcggcctgtgaggaatttggggatggctgcttgagcctcctggccaggtgtgaggaggatgtggacctgttcagagaggttatctacacactcctgggactcatgatgaacctgtgtcttcaggctccctttgtctctgaggtttgggctgtggaggtgagcagaaggtgcctgtctttactaaacagccaggatggaggaatcctgacaagagctgctggtgttctgagccggaccctttcttcctctctgaaaattgttgaggaggccttgcgagcaggagtggtaaagaaaatgatgaaattcctgaagacaggaggtgagactgcatcacgttatgctataaagatactagctatctgcacgaatagttatcatgaagctcgggaagaagtaataagactggataaaaagttgagcgttatgatgaagctgctcagctcggaggatgaggttctggtgggcaacgctgccctctgccttggtaactgcatggaggtgcccaacgttgcgtcttccctgctaaagacggaccttttgcaggtcttgttaaagcttgcaggcagtgacacacagaagacggccgtgcaggtgaacgcaggcattgctctggggaagctgtgcacagctgagcccagatttgctgctcaactgagaaagcttcatggcctagaaattctcaactctacgatgaaatacatcagtgattcttgagagagacagggtttgtgtgcatttggggaacacacagatgcacaccgtgtgttgttcctatgctaataaagacctttgatgtatccacaaccaaacaaaaaaaaaacacaaccacatgagtggtgcagacttaaaaaacatccccaatgagggaccaaaaagaacaagcgatcccggaaacacaggaccacaaagggcgaccacattagctgcagtcagttaatataaacgacagaggcagcttgtacccgaatcatggtctacgaaaagcagacgtgcaaatcagtatacaacccagctaggcacaacaacgtggcgcgcactatagagccatgcctgccgttcaacttcgtcagcggaggaacgcctacctctgatgctacgatgatcgtctgcccgcaaacacaggtatattatatacatggcctaagtaccaaggaacgaaacacagcctgagagagccgatagaaaggggtctgacccacactgggtatttgagcgtagttcgtgcgggagtgtgctctgtatcagccttaataaggtgtttccgtatttcaaccacagcacatactaatttgactaacatatgaaacagagactacatttataaacccataatgaataaacataacaccacaaatataacaaacacatatccactgcctaaccactcaccatacttaccatcagcataacatatcactctacatctacctttcatcaatctataattatccactcgtcactaaacatcaatactgcaacn

SEQ ID NO: 19078 - DNA, 939 bp, Homo sapiens
  misc_feature 937, 938, 939: n = A,T,C or G
ggagtcgacccacgcgctagctccctctgagttgcgctgggcttggctgctgcaccatgaccctggaggcgatccgctactcgcggggctccctgcagatcctagaccagctgctgctgcccaagcagagccgctacgaggcggtgggctcggtgcaccaggcctgggaggccatccgcgccatgaaggtgcggggcgccccggccatagccctggtgggctgtctcagcctcgccgtggagctgcaggcgggcgccgggggaccgggactcgccgcgctcgtggccttcgtgcgcgacaagctgagcttcctcgtcaccgcccggcccaccgctgtcaacatggcccgcgccgcccgcgacctggctgatgttgcagcccgggaggccgaacgggagggcgctacggaagaggcggtccgggagagagtgatctgctgcaccgaggacatgctggagaaagacctcagagacaaccgaagcattggggacctaggagcccgccacctcctggagcgggtggcccccagcggtggcaaggtgactgtgctgacccactgtaacactggtgctctggccacgctggctatggtacagcctaggtgtgattcgctcactggacagctggggcgctggagcatgcttctgacagagaccggcctacaacaagggagccggtgacggctttgagctgtctatgagcagatcccgcacccttatcacgaacaggatggtggctggtgcatggccaaaagggcgggggtaagtgtggtccgtgggaactggacgcgtggttcaacgggacacaggccaaggggggcctcaccagtgggcatgtgccaaccaggagtcctttaggggggccacgtgtagggacacgcgggccggagacacaatgaacgcgggcgagagaagcgtaaggcgaggcgacataaggnnn

SEQ ID NO: 19079 - DNA, 594 bp, Homo sapiens
  misc_feature 524, 587, 588, 589, 590, 591, 592, 593, 594: n = A,T,C or G
ggagtcgacccacgcgtccggataacgaagctgctaccatgatgatggctgatctcatgttcagaaaacaagactatgaacaagcagtgtttcatttacagcagcttttagaacgtaagccagactcctcgagttcagggatcacaccatattcccaatatcagacaaaatgccacacacatggatgtggcaacatagatgtttattggttgaatggatcagtgaatgactgtaaaacaccaagtcaattaaaaacacagcaggagaatcgcttgaacctgggaggtggaggttgccgtgagccaagatcacaccactgcactccagcctcggtgacagagtgagacttggtctcaaaaacaaccacaaaattttaaataattatatgacattatctcgtttgattgatctcctaagaagatgtggaaaactcgaggatgtcccaagatttttctcaatggctgagaaacgtaactccagagcaaaattggaaccaggatttcagtattgtaaaggactgtatncttggtaccactggagaccaaatgatgcccttcgcattttataaagctcggaagatcgtgacnnnnnnnn

SEQ ID NO: 19080 - DNA, 323 bp, Homo sapiens; identical to SEQ ID NO: 12810

SEQ ID NO: 19081 - DNA, 3574 bp, Homo sapiens
  misc_feature 1, 3574: n = A,T,C or G
nagcgtccgcccgcgtccggtccccgacctgcggcagccggagctcggggagcggagcgtggtggggaggggagcgggacaggcgacacaggagacagcggcgccgcggcctctccccaccaggcggccccggatcctactggacgccctgagggcacaccgaccgcgcctctagagtcaccccacgccgacccctcccctcttctctagacttatttccatccttcccgcttttaccctccccacccctccctgggctccaggccgccgccccctcctcactcctggaccggcccttctcggtgcccctcttccctagggagatgcgatgagccggtgcccccgcgtcctcatcgtcgccccgggcacggtgcccgtccagtgcccgtggtggggagggagcactccgcggtccctccgtgacgcccctcgcttggcccccccccacagctggcgtccctcggccatgccccaggggacccagccagggggtgggctctagagcgagtggggtggagaggagaaaggacggggccttgggcgcctctgagatgctcccaagtgccagggagggccgagcgaggcgcaggcaaccgggcagcaggcatgatgccctcgcctagtgactccagccgctcgctgaccagccggcccagcaccaggggccttacccacctccgcctccaccgaccctggctgcaggccctgcttacgctggggctggtccaagtgctcctgggcatcctggtggtcaccttcagcatggtggcctcttccgtcaccaccaccgagagcatcaagaggtcctgcccgtcttgggctgggttctcgctggcgttctccggggtggttggcattgtgtcctggaagcggccattcactctagtgatctccttcttctccttgctttcggtgctctgtgtcatgcttagcatggctggctctgttctctcctgtaagaatgctcaactggcccgagacttccaacagtgctctctggaaggaaaggtctgtgtgtgctgtccctctgttcccctcctccggccctgtccagagtcggggcaggaactgaaagttgcccctaactccacctgtgatgaagcccgaggggccctcaagaacctgctcttcagcgtctgtgggctcaccatttgtgccgctataatctgtacactctctgctattgtctgctgcatccaaatcttctccctggacctcgtgcatacgctggcccctgagcggtcagtctcaggcccactgggacctctgggctgcacgtccccgcccccagcccctctcctacacaccatgctggacctggaggaatttgtcccgcctgtgcccccaccgccctactatcccccagagtatacctgcagctcagaaacagatgcacagagcatcacgtacaatggctccatggacagcccagtgcccttgtaccctaccgattgccccccttcttatgaggcagtcatgggactacgaggagacagccaggccactctctttgaccctcagcttcacgatggctcgtgcatctgtgaacgagtggcctccattgtagacgtgtccatggacagcgggtctctggtgctgtcagccattggtgacctccctgggggctctagcccgtcggaggactcgtgcctgctggagctgcagggctccgtgcgctccgtggactacgttctctttcgctccatccagcgcagccgtgccggctactgcctcagcctggactgtggcctgcggggccccttcgaggaaagccccctgccacggcgccccccacgggctgcccgctcctattcctgctctgcccctgaagctccacccccactgggtgcccccacagctgcccgcagctgccaccggttggagggctggccgccctgggtgggaccctgcttccccgagctgaggcggcgggtcccccggggagggggccgcccagccgcagccccgcccacccgagccccgactcgtcgcttcagcgatagctcaggttccctcaccccaccggggcaccggcctcctcatccggcatccccaccaccgctgctgctgccacggtcccacagcgacccaggcatcacgacctccagtgacactgctgacttcagggacctttataccaaagtgcttgaggaagaagctgcttctgtttcctctgcagatacagggctctgctctgaagcctgcctcttccgcctagcccgctgcccttcccccaagttgctacgtgcccggtcagccgagaaacggcgccctgtgcccaccttccaaaaagttcccctgccctcgggccctgcacctgcccactccctgggggacctaaagggcagctggccaggtcggggcctggtcactcgtttcctccagatatccaggaaagccccagaccccagtgggactggagctcatggacataagcaggtgccccggagcctgtggggccggcctggccgagagagcctccaccttcgcagctgcggagatctgagctctagctcttccctgcggcgtctcctgtctggccgcaggctggagcgtggtacccgcccccacagcctcagcctcaacgggggcagccgggagactgggctctgacctaggcttcttgtcacactgaacacatccagccacaggcaccagctggttgggaccagcagcccccagcatcctcttgcactggctggcacaaaaagaaacctgctgtataccccccaaagtgtccctttccctcctacctctggggtctcttgctgcttgcctctgctgctctggactgggagagcttctgtcctgtgctgcatgggtatttagactgtgggggagatgccccttcttatagcactggaggaggaaaacaaattcttgtccccctcagaatgagagtggctctttctgatttgcaagggcactatggtcagggcaaaggcatggcccaggtgtttaagtacagggtgacgtgtgcctatgcaatggggtggtaaggcaggcacgaagagtccaaaaaatctaggtggcctctcagctctgccacctctagctgcatgaccttgggcaagctatgtaaccccaattgcctgctccattaaagactgtgaaggtagaatgtttgtaaagctcttaacagtatgtaagccttcaataaatttcagttttccccttgttttcttgatccaaaaaaaaaaaaaaaaaaaaaaaaaaaaaaaaaaagaaaaaaaaaaaaaaaaaaaaaaaagaaaaaaaagggggggggggggcacaagaggatcccgcggggggggcccagggggcacaccacacgattactaggacaaaagagggggcccccaattatggccgagctctcttataaatcaatacgacgggacagcggcgcggctagtacaaaaaaccccgatcacggcggcgtgggagaacccactcggccacacgggggaacatctgggaggagaaagaacccccaaatcggagggggcgacgaacacactgggcgcgccaacacacccacagagagactaacgaccctgggagaatcacaaacattcagcagtcatagcan

SEQ ID NO: 19082 - DNA, 4934 bp, Homo sapiens
  misc_feature 1, 2, 4820, 4821, 4822, 4823, 4824, 4825, 4826, 4827, 4828,4829, 4830, 4831, 4832, 4833, 4834, 4835, 4836, 4837, 4838,4839, 4840, 4841, 4842, 4843, 4844, 4845, 4846, 4847, 4848,4849, 4850, 4851, 4852, 4853, 4854, 4855, 4856, 4857: n = A,T,C or G
  misc_feature 4858, 4859, 4860, 4861, 4862, 4863, 4864, 4865, 4866, 4867,4868, 4869, 4870, 4871, 4872, 4873, 4874, 4875, 4876, 4877,4878, 4879, 4880, 4881, 4882, 4883, 4884, 4885, 4886, 4887,4888, 4920, 4921, 4922, 4923, 4924, 4925, 4926, 4927: n = A,T,C or G
  misc_feature 4928, 4929, 4930, 4931, 4932, 4933, 4934: n = A,T,C or G
nncgtccgatttaagtagcagggagtccatgtgttcaactccagcatttcctgtgtctccagagacaccgtatgtgaaaacagcgctgcgccatcctccgttcagcccacctgagcccccgctgagcagcccagccagtcagcacaaaggaggacgtgaaccacgaagctgccctgagacgctcactcacgctgtggggatgtcagagagccccatcggacccaaatccacgatgctccgggctgatgcgtcctcgacgccctcctttcagcaggcttttgcttcttcctgcaccatttccagcaacggccctgggcagaggagagagagctcctcttctgcagaacgccagtgggtggagagcagccccaagcccatggtttccctgctggggagcggccggcccaccggaagtcccctcagcgctgagttctccggtaccaggaaggactccccagtgctgtcctgcttcccgccgtcagagctccaggctcctttccacagccatgagctgtccctagcagagccaccggactccctggcgcctcccagcagccaggccttcctgggcttcggcaccgccccagtgggaagtggccttccgcccgaggaggacctgggggccttgctggccaattctcatggagcgtcaccgacccccagcatcccgctgacagcgacaggggctgccgacaatggcttcctgtcccacaactttctcacggtggcgcctggacacagcagccaccacagtccaggcctgcagggccagggtgtgaccctgcccgggcagccacccctccctgagaagaagcgggcctcggagggggatcgttctttgggctcagtctctccctcctccagtggcttctccagcccgcacagcgggagcaccatcagtatccccttcccaaatgtccttcccgacttttccaaggcttcagaagcggcctcacctctgccagatagtccaggtgataaacttgtgatcgtgaaatttgttcaagacacttccaagttctggtacaaggcggatatttcaagagaacaagccatcgccatgttgaaggacaaggagccgggctcattcattgttcgagacagccattccttccgaggggcctatggcctggccatgaaggtggccacgcccccaccttcagtcctgcagctgaacaagaaagctggagatttggccaatgaactcgtccggcactttttgatcgagtgtaccccgaagggagtgcggttgaaagggtgctcgaatgaaccatatttcgggagcctgacggccttggtgtgccagcattccatcacgcccttggccttgccgtgcaagctgcttatcccagagagagatccattggaggaaatagcagaaagttctccccagacggcagccaattcagcagctgagctgttgaagcagggggcagcctgcaacgtgtggtacttgaactctgtggagatggagtccctcaccggccaccaggcgatccagaaggccctgagcatcaccctggtccaggagcctccacctgtgtccacagttgtgcacttcaaggtgtcagcccagggcatcaccctgacagacaatcagaggaagctcttcttccggaggcattaccccgtgaacagtgtgattttctgtgccttggacccacaagacaggaagtggatcaaagatggcccttcctcaaaagtctttggatttgtggcccggaagcagggcagtgccacggataatgtgtgccacctgtttgcagagcatgaccctgagcagcctgccagtgccattgtcaacttcgtatcaaaggtcatgattggttccccaaagaaggtctgagaactcccctccctccctggacccaccgatgcctctcgaagccctggagacagccgttgggtgagggtggggcccccactttttaccaaactagtaaacctgacattccaggcccatgaggggaaagaggatcttccagctctgcaaaaacaagaacaaacaacatcaccgtgaattggcctttcctgaaagtgacttatctgacacatctctgtagccacatgctttttgggtagaagaagctgggcatgggtgcaccccaccccctagggtccccatgggaaagggacatgcaaggaaacagcacagaacacgaggtggtccccatgtccctggcacactagcattctgggggatgaggaatccccagcccttgaggcagaggtgccgagtgactgccatgcttcgcccgtccgcatgggcgcttctgtccagctgcacccgaggccgggggtttccctcacctcggtcttcccaagatggagatgctaacgaaactgagaagggggcgtatgtttgacgaaggtttgtgcaagtcaggcccttctggaacacagcagggcctacaacgaggggcctttgcgatgggctgtgaggatgggggtggtgggaagaattggccacgttagagaccccatgccaccccaccatggtgagtgctctgtgcctcctgctcacctgtggtgagctgggcgagctgggcgagctgggcgagctgggctggggagagcctgtgaggaccgagaggagaaatgagaagaaggaacaaaaatattatttctatgtaatttatattttacttatgccaaattatttatgataatttgccattgctatactgtaccagtgtcaaatgctgcagcctgccaagctgtgattttgtgaggcttgtccctatgtaggatgcaccgcaggcccctggccactgaaagagtgtgcagtggactgtgggtctcccatatgcggtgccgcccaaaggtggctttgcctcaagcaacctaccctgatgttttactcattggaatgtttttccccgattgtggatgacttcttttctgatggagagagtccaggagggatggaaaactcctggatttaagctcagcatcccccacatgggcttttcgatcatcttcaggcctgaagctgcacgacctgaagttcgcctgcatttatcagccctctttgtgctgctccttgccaccttggggttcctgctggggaccatgtgtggttgtggcatgtgtgagcagaagggaggatgaggaaaaagagaagaaaccccggtactgacaagctgtttttgagtgccactgtttgccatcatctaagccactgaatcaagtgtatttcaggcttatttcaacattccaatgccctggttttcctgcttgaatctgttcgtggtcaaaggtttgggggaatttgtgaccctggaacatccccagagtgaaagatggagctgggccacatcagaataaggccttggccccatcctctcacagcctaggtgctctgcaggcatgctgactgtcctgattgcgatccagcccgaaattccctcctctgctttcaaaagtcaaatcccccattcttaggccacactggtgtcacaagctcctgtcagggagctggggtttgggaatgtgctttgtgaactctgctttaaagtgaggggccgaggaaaacttagaaacaggcagagttggaagcagccaaatcacagtgggtgttgtgtgtgtgtgcgtgtgtgcatgcgtgcgtgtatgcgtgtgtgaaagcaggtggaccattccactttttagctcctattgatgcaccaaaccaagtgcctcatttctgtgccaaatgtttgccttggtcgttgtggacctccttctctaacttgcggtggcatgactgtcaggaggtgctggcattttcagcagatcctcatgtgttgaccctgatgtctttagcagaggcctctagcatctcggtttttcatccactgcaggaatgtggccacagggagcagaggtttgtactttccccaagaggtcctcatcctgagacggtctctacccatgtttaacccaaagagtgcaggccaggttccttatccttctgatgaaggatgagagagctcatttagaagtcagagcaaactagggtctcagtattgagaaacgcagcctgccagggaatcacagagacatcggggtgcccgcgatggccctcatgaagccatgcctcgacggcattcaggaagccctgcaaacgtgctttttgaactcattggccaggtgtgatttttacacaaggtaaacgtggtcaagggcatcggggaatttgctccaagcagatagctccctctgaggaaccaaaggaagcaagtttccacgatttctgaagagctggtataggaagtttctttcttccttttgtgttacatgtgcattaaacagaacaagctgtgtgtcatcacagattgtactgtgggctcagaaaccgtgagagagcccccaccgtggacaccggctctagggccacaggaaaaggaacgtttccaggcattttgtctccagggctcccgctggacaggcacgtactgccctggggagtaaatgcggagagttcacgaactgtgcccaacgcatgttatagccagggtcctactaactactcagtaaaagaacgtattgttgtattcctccagtgttaagctatagccatgttaaaagtcactgtgcatttattctcagcatcaaataccttgtaacgtcttctctgccttgttagtgcatatttttacttttctgatactgtaaagaatatatccagtatgtaaatgaatgttctataaatcttttgtatagtcattttctctgctccttaaatatcatctctattcagagtataataaaattatgaacttggtaaaaaaggattgatctgacatcaaatttaatatctgagattgatgaagatgcannnnnnnnnnnnnnnnnnnnnnnnnnnnnnnnnnnnnnnnnnnnnnnnnnnnnnnnnnnnnnnnnnnnnggggcggcctttaactattttaaaaaaaaaannnnnnnnnnnnnnn

SEQ ID NO: 19083 - DNA, 501 bp, Homo sapiens
  misc_feature 501: n = A,T,C or G
cgtccggtttacttgtcagttcattgatttaaaatagaatatcaattgaatttagaaaattctcaaaagccagtttaatgctgttcatcttttaaggccaaaaaaagtttaatccagaggcagtctttcattctgcactaatttataatttagatcaaagaactaattatatatctcaaatttaataataaaaaggtatagtaatgagaattaaatttatggtaaattatataactcagaatgttaaagtaacttggaaattcttaatctaagttaagtatctttttatttcttacttgtcctgtttgatttattaagggaaaagaaaattttaaggagttgccagtatttctttgtctattgaaagtggaatgtttattcacccttatttatatacttaaaagacattgtattggcctggtctcgaactcctgacctcaagtgatccacccacctcggcttcccaaagtgctgggatagaaggcgtgagccaccacgccn

SEQ ID NO: 19084 - DNA, 627 bp, Homo sapiens
gcgtccggtgattttgaacaattctgaaatatttcaggtaagattaataacatccaattacaaatatatgtttcaatattttatacgtatgtctactttgaaagttaaaccaatagtatagaaagcctaagaatgaacactgattggacatactcacagaaattaagggaaaaacacatattgtaaaattcctgtcaatgtttgagtagaatacagaagtacatagcagtcttcaatttttaaacacaattatgggcttataactggacgtgacatgcatcatttattagaacaatattatttatttatactaagtaaggatataagatcacagaagcttagtgttataacggagacttcacagacattcataactaatgttttctaaggcaaataagggcataaaccagaactcatggtcagtgcagagtaagtataaaaagttatgtatgaaagacatttatttatagagatttctgaggattctatgccttttcaacttaaagatgagtgtgtcttagaatttgttttatgcatcattggactggggatgatattcaaatgtgcactcagcgtgtcctcacattaaagggcacattgaacagtttaggaaatacatcataaact

SEQ ID NO: 19085 - DNA, 9461 bp, Homo sapiens
gtccgctccgaccctggagggagagagagccagagagcggccgagcgcctaggaggcccgccgagcctcgccgagccccgccagccccggcgcgagagaagttggagaggagagcagcgcagcgcatcgagtcccgtggtcgcgccccaacagcgcccgacagcccccgatagcccaaaccgcggccctagccccggccgcacccccagcccgcgccagcatgatgaacaacagcggctactcagacgccggcctcggcctgggcgatgagacagacgagatgccgtccacggagaaggacctggcggaggacgcgccgtggaagaagatccagcagaacacattcacgcgctggtgcaatgagcacctcaagtgcgtgggcaagcgcctgaccgacctgcagcgcgacctcagcgacgggctccggctcatcgcgctgctcgaggtgctcagccagaagcgcatgtaccgcaagttccatccgcgccccaacttccgccaaatgaagctggagaacgtgtccgtggccctcgagttcctcgagcgcgagcacatcaagctcgtgtccatagacagcaaggccatcgtggatgggaacctgaagctgatcctgggcctgatctggacgctgatcctgcactactccatctccatgcccatgtgggaggatgaagatgatgaggatgcccgcaaacagacgcccaagcagcggctgcttggctggatccagaacaaggtgccccagctgcccatcaccaacttcaaccgtgactggcaggacggcaaagctctgggcgccctggtggacaactgcgcccccggtctctgccccgactgggaggcctgggaccccaaccagcccgtggagaacgcccgggaggccatgcagcaggccgacgactggcttggggtgccccaggtcattgcccctgaggagattgtggaccccaacgtggatgagcattctgttatgacctacctgtcccagttccccaaggccaagctcaaacctggtgcccctgttcgatccaagcagctgaaccccaagaaagccatcgcctatgggcctggcatcgagccacagggcaacaccgtgctgcagcctgcccacttcaccgtgcagacggtggacgcgggcgtgggcgaggtgctggtctacatcgaggaccctgaaggccacaccgaggaggctaaggtggttcccaacaatgacaaggatcgcacctatgctgtctcctatgtgcccaaggtcgctgggttacacaaggtgaccgtgctctttgctggccagaacattgaacgcagtccctttgaggtgaacgtgggcatggccctgggagatgccaacaaggtgtcagcccgtggccctggcctggaacctgtgggcaatgtggccaacaaacccacctactttgacatctacactgcgggggccggcactggcgatgttgctgtggtgatcgtggacccacagggccggcgggacacagtggaggtggccctggaggacaagggtgacagcacgttccgctgcacatacagacctgccatggaggggccacataccgtgcatgtggcctttgcgggtgcccccatcacccgcagtcccttccctgtccatgtgtcggaagcctgtaaccccaacgcctgccgcgcctctgggcgaggcctgcagcccaagggtgttcgcgtgaaagaggtggctgacttcaaggtgtttaccaagggtgccggcagcggggagctcaaggtcacggtcaaggggccaaagggcacagaggagccagtgaaggtgcgggaggctggggatggtgtgttcgagtgcgagtactacccggtggtgcctgggaagtatgtggtgaccatcacgtggggcggctacgccatccctcgcagcccctttgaggtacaggtgagcccagaggcaggagtgcaaaaggtccgggcctggggtcctggtttggagactggccaggtgggcaagtcagccgattttgtggtggaagccattggcaccgaggtggggacactgggcttctccatcgaggggccctcacaagccaagatcgaatgtgacgacaagggggatggctcctgcgatgtgcggtactggcccacggagcctggggagtacgctgtgcacgtcatctgtgacgatgaggacatccgagactcacccttcattgcccacatcctgcccgccccacctgactgcttcccagataaggtgaaggcctttgggcctggcctggagcctaccggctgcatcgtggacaagcccgctgagttcaccattgatgctcgtgcagctggcaagggagacctgaagctctatgcccaggacgccgacggctgtcccatcgacatcaaggtgatccccaacggcaacggcaccttccgctgctcctacgtgcccaccaagcccattaagcacaccatcatcatctcctggggaggcgtaaacgtgcccaagagccccttccgggtgaacgtgggcgagggcagccaccccgagcgggtaaaggtgtacggccccggagtggagaagacaggcctcaaggccaatgagcccacctacttcacggtggactgcagcgaggcggggcaaggcgacgtgagcatcggcatcaagtgcgccccaggcgtggtgggccctgcagaggctgacattgacttcgacatcatcaagaatgacaacgacaccttcaccgtcaagtacacgccaccaggggcgggccgctacaccatcatggtgctgtttgccaaccaggagatccccgccagccccttccacatcaaggtggacccatcccacgatgccagcaaagtcaaggccgagggccctgggctgaatcgcacaggtgtggaagtcgggaagcccacccacttcacggtgctgaccaagggagccggcaaggccaagctggatgtgcagtttgcagggacagccaagggcgaggttgtgcgggactttgagatcatagacaaccatgactactcctacactgtcaagtacaccgctgtccagcagggcaacatggcagtgacagtgacttatggcggggaccctgtccccaagagcccctttgtggtgaatgtggcacccccgctggacctcagcaaaatcaaagttcagggccttaatagcaaggtggctgtgggacaggaacaagcattctctgtgaacacacgaggggctggcggtcagggccaactggatgtgcggatgacttcgccctctcgccggcccatcccctgcaagctggagccaggcggtggagcggaagcccaggctgtgcgctacatgcccccggaggaggggccctacaaggtggatatcacctacgatggtcacccggtgcctggcagcccgtttgctgtggagggtgtcctgccccctgatccctccaaggtctgtgcttatggcccgggtctcaagggtggactggtaggcacccccgcgccattctccatcgacaccaagggggctggcacaggtggcctggggctgaccgtggagggcccctgcgaggccaagatcgagtgccaggacaatggtgatggctcatgtgctgtcagctacctgcccacggagcctggcgagtacaccatcaacatcctgtttgctgaggcccacatccctggctcgcccttcaaagccaccattcggcctgtgtttgacccgagcaaggtgcgggccagtggaccgggcctggagcgcggcaaggtcggtgaggcagccaccttcactgtggactgctcagaggcaggcgaggcggagctgaccattgagatcctgtcggatgccggggtcaaggccgaggtgctgatccacaacaacgcggatggcacctaccacatcacctacagccctgccttccctggcacctacaccattaccatcaagtatggcgggcatcccgtgcccaaattccccacccgtgtccatgtgcagcctgcggtcgataccagtggcgtcaaggtctcagggcctggtgttgagccacacggtgtcctgcgggaggtgaccactgagttcactgtggatgcaagatccctaacagccacaggcggcaaccacgtgacggctcgtgtgctcaacccctcgggggccaagacagacacctatgtgacagacaatggggacggcacctaccgagtgcagtacaccgcctacgaggagggcgtgcatttggtggaggtcctgtatgatgaggtcgctgtgcccaagagccccttccgagtgggcgtgaccgagggctgtgatcccacccgcgtccgagccttcgggccaggcctggagggtggcttggtcaacaaggccaaccgattcactgtggagaccaggggagcgggcaccgggggccttggcctagccatcgagggtccctcggaagccaagatgtcctgcaaggacaacaaggatggtagctgcaccgtggagtacatccccttcactcctggagactatgacgtcaacatcaccttcggggggcggcccatcccagggagcccgttccgcgtgccagtgaaggatgtggtggaccctgggaaggtgaagtgctcagggccagggctgggggctggtgtcagggcccgggttcctcagaccttcacagtggactgcagtcaagctggccgggcgcccctgcaggtggctgtgctgggccccacaggtgtggccgagcctgtggaggtgcgggacaatggagatggcacccacactgtccactacaccccagccactgacgggccctacacggtagccgtcaagtatgctgaccaggaggtgccacgcagccccttcaagatcaaggtcctcccagctcatgatgccagcaaggtgcgggccagcggcgccaggcctcaacgcctctggcatccctgccagcctgcctgtggagttcaccatcgacgcacgggacgcgggcgaggggttgctcactgtccagatcttggaccccgagggtaagcccaagaaggccaacatccgggacaatggggatggcacgtacactgtgtcctacctgccggacatgagtggccggtacaccatcaccatcaagtatggcggtgatgagatcccctactcgcccttccgcatccatgctctgcccactggggatgccagcaagtgcctcgtcacagtgtccattggaggccatggcctgggtgcctgcctgggccctcgaatccagattgggcaggagacggtgatcacggtggatgccaaggcagccggtgaggggaaggtgacatgcacggtgtccacgccggatggggcagagctcgatgtggatgtggttgagaaccatgacggtacctttgacatctactacacagcgcccgagccgggcaagtacgtcatcaccatccgcttcgggggtgagcacatccccaacagccccttccacgtgctggcgtgtgaccccctgccgcacgaggaggagccctctgaagtgccacagctgcgccagccctacgctcctccccggcccggcgcccgccccacacactgggccacagaggagccagtggtgcctgtggagccaatggagtccatgctgaggcccttcaacctggtcatccccttcgcggtgcagaaaggggagctcacaggagaggtgcggatgccctcggggaagacggcacggcccaacatcaccgacaacaaggacggcaccatcacggtgaggtatgcacccactgagaaaggcctgcaccagatggggatcaagtatgacggcaaccacatccctgggagccccttacagttctatgtggatgccatcaacagccgccatgtcagtgcctatgggccaggcctgagccatggcatggtcaacaagccagccaccttcactattgtcaccaaagatgctggagaagggggtctgtcactggccgtggagggcccatccaaggcagagatcacctgtaaggacaacaaggatggcacctgcaccgtgtcctatctgccgactgcgcctggagactacagcatcatcgtgcgcttcgatgacaagcacatcccggggagccccttcacagccaagatcacaggtgatgactccatgaggacctcacagctgaatgtgggcacctccacggacgtgtcactgaagatcaccgagagtgatctgagccagctgaccgccagcatccgtgccccctcgggcaacgaggagccctgcctgctgaagcgcctgcccaaccggcacattgggatctccttcacccccaaggaggtcggggagcacgtggtgagcgtgcgcaagagtggcaagcatgtcaccaacagccccttcaagatcctggtggggccatctgagatcggggacgccagcaaggtgcgggtctggggcaaggggctttccgagggacacacattccaggtggcagagttcatcgtggacactcgcaatgcaggttatgggggcttggggctgagtattgaaggcccaagcaaggtggacatcaactgtgaggacatggaggacgggacatgcaaagtcacctactgccccaccgagcccggcacctacatcatcaacatcaagtttgctgacaagcacgtgcctggaagccccttcactgtgaaggtgaccggcgagggccgcatgaaggagagcatcacccggcggagacaggcaccttccatcgccaccatcggcagcacctgtgacctcaacctcaagatcccaggaaactggttccagatggtgtctgcccaggagcgcctgacacgcaccttcacacgcagcagccacacctacacccgcacggagcgcacggagatcagcaagacgcggggcggggagacaaagcgcgaggtgcgggtggaggagtccacccaggtcggcggggaccccttccctgctgtgtttggggacttcctgggccgggagcgcctgggatccttcggcagcatcacccggcagcaggagggtgaggccagctctcaggacatgactgcacaggtgaccagcccatcgggcaaggtggaagccgcagagatcgtcgagggcgaggacagcgcctacagcgtgcgctttgtgccccaggaaatggggccccatacggtcgctgtcaagtaccgtggccagcacgtgcccggcagcccctttcagttcactgtggggccgctgggtgaaggtggtgcccacaaggtgcgggccggaggcacagggctggagcgaggtgtggccggcgtgccagccgagttcagcatctggacccgggaggctggcgctgggggcctgtccattgctgtggagggtcctagcaaagcggagattgcatttgaggatcgcaaagatggctcctgcggcgtctcctatgtcgtccaggaaccaggtgactatgaggtctccatcaagttcaatgatgagcacatcccagacagcccctttgtggtgcctgtggcctccctctcggatgacgctcgccgtctcactgtcaccagcctccaggagacggggctcaaggtgaaccagccagcgtcctttgccgtgcagctgaacggtgcccggggcgtgattgatgcccgggtgcacacaccctcgggggctgtggaggagtgctacgtctctgagctggacagtgacaagcacaccatccgcttcatcccccacgagaatggcgtccactccatcgatgtcaagttcaacggtgcccacatccctggaagtcccttcaagatccgcgttggggagcagagccaggctggggacccaggcttggtgtcagcctacggtcctgggctcgagggaggcactaccggtgtgtcatcagagttcatcgtgaacaccctgaatgccggctcgggggccttgtctgtcaccattgatggcccctccaaggtgcagctggactgtcgggagtgtcctgagggccatgtggtcacttatactcccatggcccctggcaactacctcattgccatcaagtacggtggcccccagcacatcgtgggcagccccttcaaggccaaggtcactggtccgaggctgtccggaggccacagccttcacgaaacatccacggttctggtggagactgtgaccaagtcctcctcaagccggggctccagctacagctccatccccaagttctcctcagatgccagcaaggtggtgactcggggccctgggctgtcccaggccttcgtgggccagaagaactccttcaccgtggactgcagcaaagcaggcaccaacatgatgatggtgggcgtgcacggccccaagaccccctgtgaggaggtgtacgtgaagcacatggggaaccgggtgtacaatgtcacctacactgtcaaggagaaaggggactacatcctcattgtcaagtggggtgacgaaagtgtccctggaagccccttcaaagtcaaggtcccttgaatcccaaaagtgcctccccagcctcagcccccacctccagccacacacacattacacacacacacacacacacaaatgtgccacacccagacacgcacagaatcagacactacaaacacctgccttgggggtgaagtgaaggcccagcctccccaccccaccgcgccccaggggttggaggaccttgtctgtgtcaggacagtgtccctccctgggaatgtgacatgagggccgacctggggccaggctcaggggcagaggctgggacacaaggggctggcgagggctgcgaggccagggaagccctgagtttctggcggggctgagcagtgggggagcattgtgttgtgggtgtctgtgtgtgaggtcaccctcaaactgcaccgccggccagataccctcctgaccccgaggacttggtctggtctctctggtggctacaaccccagagttttaaggacttggaaaggaaagcacaatcagagaagaaaacagcccccgaaccagcaggagtggcctggcacatggaccggcctgagcgatgtgcactccacccaagccaggctcccagggggcctgatttctctctcactgtctctttttttaaaatggttgcacggctctgccccatggggggccttttttacacactgcgaggcccagctttctaggggacttttgcacatgtcatgcagctcagctgggagctgcttaggtggaaaactccaaataaagtgcggctgtcgcaaaaaaaaaaaaaagcaaaaaaaacaaaaaagggggggggggaaaaagaacccgcaggggcccagcctcagcggtccccgcttttggtcacacgggcccaaaggggaggcggaataaagcagcgcggcgggcgtacccggctgacggcacacggcctctggccttgggagacccccctgtgggtcctcggcacgccacaggttaggctggaaatacttaggataggtccaccctgccgcgaatcgcgatgatcgcacacgcagaaaggaagagagaacacaacggacacgcaggcacacagaacggtccgcacag

SEQ ID NO: 19086 - DNA, 518 bp, Homo sapiens
  misc_feature 1, 2, 518: n = A,T,C or G
nncgttccgcagggaaattgttaaaataatttgggggtgtttattggggaaggaaacagggccttgacagtggaggacttggaagacatgtaatttaagatatagagtatgattgttggaaaataagcatggagatccagaaggaatcttaagagtttttctatgcaagtgaagatggaagaaaatatgtattttacaaaagataaattacaagtaccttatttgctttgcaaaataacttatcatgttcttccactatttttattatattttaattttaatgaaacttatataacatttacactaaattttaaatacatggctcaagacaaaaaaatggggaaaatattttttaaaaaatcaccccaaatcctggtactcagacataaccactattacaaacttggcagagtaatatttttcctgtctgcatgtgtgcacaccatgtgtgcatgcataccacaaagtagatgttttactatactcctggtttattatctgcttttttcccttaatan

SEQ ID NO: 19087 - DNA, 1688 bp, Homo sapiens
  misc_feature 1688: n = A,T,C or G
cgacccacgcgtccgggacaagagaaacataagcaggaaaaaaggaggaggaataaacacacgcctgtccataataaaactcgctcttgaagactcagcggcagccctgcaccggagactgacgacttgcgcggctgtgacctccgccctgcagcggaccctcgactgccctgcactgcggctctggaggccccgactcagtgcatgggaaagaaatcctcactatcagaaaacagaggggcaatctgctgctctccctttccggccaaacacgtcacccatcaaccggatacctaccaagaggctttcagaggaggcgcccaaggtctcccaggcccgcccctccccaatcacgctccgctcagccccctcaacttttggcctccgggaagttcgcagcgttctcacgcttggcaggaagttcccgccaaggcttccggaaaatcctttaaaaagcaacgcttgcgctgggcggggcttggtgcgctctcacccttatctccaaattctgggtgttgtcgcgagggctgctgtgtccggaacttccggttccggtcagggtccgcgatctcggactaaggatgcggtcccgggttctgtggggcgctgcccggtggctctggccccgccgggccgttggcccagcccgccggcccctgagctccggtagcccgccgctggaggagctgttcacccggggcgggcccttgcggaccttcctcgagcgccaggcggggtctgaagcccatttgaaggtcaggaggcccgagttgctggcggtgatcaaactgctgaacgagaaggagcaggagctgcgggagactgagcacttgctgcacgatgagaatgaagatttaaggaaacttgcagagaatgaaatcactttgtgtcaaaaagaaataactcagctgaagcatcagaagaaacagatgaaaatgatttgatcctggaagtaactgcaggagttggaggtcaggaggcaatgttgtttacatcagagatatttgatatgtatcagcaatatgctgcatttaaaagatggcattttgaaaccctggaatattttccaagtgaactaggtggccttagacatgcatctgccagcattgggggttcagaagcctataggcacatgaaatttgaaggaggtgttcacagagtacaaagagtgccaaagacagaaaagcaaggccgcgtccatactagcaccatgactgtagcaatattacccccagctactgagattaatcttggtgattaatccgaaagattgggcaatggacacttaagcgagccagtggagctggggggcagcatgttaatacccaggacagggctggccggatagtcatcttccacacggggtggtcctgaatgtcaccagagaggtcttagatggaaaattagagctgggttgcacagtccgtgcccggttccgcctggcctcttgagacaggaaatactacggcacgagggcttccaaccttgctgggggcacggaggggctcgacaccaacaacgatcttttctgccagggcgcccctcggaaaacacgcggtacaaaaaaaaacgcgccttcgggcgaccgcaggcagcaatctcgccccctaagggagcaccgttatgacacttcacgcatctcaccccgtgcaggaacagcatcgctgctctttctgtccgagacacan

SEQ ID NO: 19088 - DNA, 506 bp, Homo sapiens; identical to SEQ ID NO: 12818

SEQ ID NO: 19089 - DNA, 4388 bp, Homo sapiens
  misc_feature 4376, 4377, 4378, 4379, 4380, 4381, 4382, 4383, 4384, 4385,4386, 4387, 4388: n = A,T,C or G
ccacgcgtccgcggacgcgtgggggcgagggccgctggggccgcgaagtggggcggccgggtgggctacgagccgggtctgggctgaggggcgcggcttcgcggtggaccccagcccggcaacgggaaggcgagctctcctccaccgtccaaagtaaactttgccgctccttccgcggcgctcccgagtcctcgccgccgccgggccgccgcagtccgcgaagagccgtcctgcgtcagggcctccttccctgccccggcgcggggccactgcgccatggacgccacagcactggagcgggacgctgtgcagttcgcccgtctggcggttcagcgcgaccacgaaggccgctactccgaggcggtgttttattacaaggaagctgcacaagccttaatttatgctgagatggcaggatcaagcctagaaaatattcaagaaaaaataactgagtatctggaaagagttcaagctctacattcagcagttcagtcaaagagtgctgatcctttgaagtcaaaacatcagttggacttagagcgtgctcatttccttgttacacaagcttttgatgaagatgaaaaagagaatgttgaagatgctatagaattgtacacagaagctgtggatctctgtctgaaaacatcttatgaaactgctgataaagtcctgcaaaataaactgaaacagttggctcgacaggcactagacagagcagaagcgctgagtgagcctttgaccaagccagttggcaaaatcagttcaacaagtgttaagccaaagccacctccagtgagagcacattttccactgggcgctaatcccttccttgaaagacctcagtcatttataagtcctcagtcatgtgatgcacaaggacagagatacacagcagaagaaatagaagtactcaggacaacatcaaaaataaatggtatagaatatgttcctttcatgaatgttgacctgagagaacgttttgcctatccaatgcctttctgtgatagatggggcaagctaccattatcacctaaacaaaaaactacattttccaagtgggtacgaccagaagacctcaccaacaatcctacaatgatatatactgtgtccagttttagcataaagcagacaatagtatcggattgctcctttgtggcatcactggccatcagtgcagcttatgaaagacgttttaataagaagttaattaccggcataatttaccctcaaaacaaggatggtgaaccagaatacaatccatgtgggaagtatatggtaaaacttcacctcaatggtgtcccaagaaaggtgataattgatgaccagttacctgttgatcacaagggagaattgctctgttcttattccaacaacaaaagtgaattatgggtttctctcatagaaaaagcatacatgaaagtcatgggaggatatgattttccaggatccaactccaatattgatcttcatgcactgactggctggataccagaaagaattgctatgcattcagatagccaaactttcagtaaggataattctttcagaatgctttatcaaagatttcacaaaggagatgtcctcatcactgcgtcaactggaatgatgacagaagctgaaggagagaagtggggtctggttcccacacacgcatatgctgttttggatattagagagttcaaggggctgcgatttatccagttgaaaaatccttggagtcatttacgttggaaaggaagatacagtgaaaatgatgtaaaaaactggactccagagttgcaaaagtatttaaactttgatccccgaacagctcagaaaatagacaacggaatattttggatttcctgggatgatctctgccagtattatgatgtgatttatttgagttggaatccaggtctttttaaagaatcaacatgtattcacagtacttgggatgctaagcaaggacctgtgaaagatgcctatagcctggccaacaacccccagtacaaactggaggtgcagtgtccacaggggggtgctgcagtttgggttttgcttagtagacacataacagacaaggatgattttgcgaataatcgagaatttatcacaatggttgtatacaagactgatgggaaaaaagtttattacccagctgacccacctccatacattgatggaattcgaattaacagccctcattatttgactaagataaagctgaccacacctggcacccatacctttacattagtggtttctcaatatgaaaaacagaacacaatccattacacggttcgggtatattcagcatgcagctttactttttcaaagattccttcaccatacaccttatcaaaacggattaatggaaagtggagtggtcagagtgctggaggatgtggaaatttccaagagactcacaaaaataaccccatctaccaattccatatagaaaagactgggccgttactgattgagctacgaggaccaaggcaatatagcgttggatttgaggttgtaacagtttctactctaggagatcctggtccccatggctttctgaggaaatctagtggtgactataggtgtgggttttgctacctggaattagaaaatataccttctgggatcttcaatatcattcctagtacctttttgcctaaacaagaaggaccttttttcttggactttaatagtattatccccatcaagatcacacaacttcagtgatggagaaatctcaagttactggcttttatacttaccaaacatcagttcttcaaataaggacgcaaatcttcaggacagtaagcagaacaatcagaatggaattaaatctctaaaaacgtgttacagtggaatctggtgcttgtcagggtgtttggtaagaactgtatatagtcagaattacctaaatcacctagaggtaccgtttacatggttttgtgtatatagagttggcttgcattttaggggccattttgtataaaaagtgcatatgattaaaattagactcagtcatcactgtgagatgcctttgctaagaggataaaggaactgagaccagatgagaaaaagaaaggatatagattccttgagtggaatagtgggctagattaatataccgaaatatttccattgtttcccttttttgcagagcatgtggaagttaaacctgcttgattctactatacatcttgggcaactagttaccaaatgaattgtgccaccataactgattttaattttgcattatttatgattttaaaatatttgttgcccaggtgttatgaaagaataaagcttttaagtatagactaccttagcatgaagatgctcatgcctaagaatgaaaattgttgaggttatctcccattcaatcatgtagcaagaacttaaagaaattcactactgcagtttttatttttaaaaaacagtaattgagatattgaagacattacaatttagtttgtgtggtctttttttaaattgctgtatcgttcagtctcttgtggcaatagcactttgaagaaaatagagaatttaatatatggtgattgggatatgtagcattcaaaaaaagtgaattgccaagatactggtgtcatgtaaattcccactttacataaaaacccatcaggacagaatgatgctcaatattttaaaattctaaaaatagggtgggatttttcattgtctctactttataattatcaaaacttattttgtattgctactaccttaaattgaaataaaatgtttatacttacggatattgcatagtttaagttagatttattgaaagatttcatctgtcgtgtttcatgtaaatgagaacagattatttgcatgaaaatatatacttcaacaaaaatctgttctttaacagagtagtggtagattattacactaatgagatttcactttggtaaatacttcatgctttcagttttagcctattaattttaggtggacaaatttaacaagttttctgttactttttaaaaagaaaaaattccagaacataagaactatattatgaacacatgatttgaacctgttgtggtaaagatcttgtacaggatgcaaactaaaaacctaatccctgccatcaaatttattagaagagacctatatatgaacaacttaaaggcactgatttctataatagagctctaaaaacatgccaccagtgtatgaataagggaaagattaattttggctggaccaatataaaaaattgtatttgaagaattgatactttaacttggaccttgaaggtaaagcttcaaaagacaggttactgaccattgagtgtttactatgtacccaatgtgtatatttttctttttaatcttcccaatagctgaataaagtatagatcctannnnnnnnnnnnn

SEQ ID NO: 19090 - DNA, 582 bp, Homo sapiens
  misc_feature 580, 581, 582: n = A,T,C or G
cgacccacgcgtcctgcgggtcccgccggcgggtacctgggcactgcgccccatctggactgaaatggggacaccccttcgggggtcccaggctcctggccgtattgttctccttctcctcgtgataactccgcagtggaggtggattccgtccaagacgcccaacgtggctccgcgtagcaatcagcgctgcaatcctggcggttacctcagcggcggcgtctctctctgcgcctcacactcgcagcccgcggccctccccaacttagggcgtttacaaaagaaactactccagacgcgctgcaaagggaggcgcatgtgcccgaaagctggcgatcagacgggggggggcattctgcatgtgtgatgtttctgggggcggtggggagtgtgtgtcggggtcggggggcgggggggagtcaggcagaaagacagggacaacctccgctatgaaggatccgcgagtcctcaaatgtaagctccgtgtgactaacgacctgcactgatttggagagcgggcatgttaaaggtcacggacaattgttgctggcttcagcatgaatgcctaagtgggatgtannn

SEQ ID NO: 19091 - DNA, 603 bp, Homo sapiens
  misc_feature 1, 2, 3, 603: n = A,T,C or G
nnnacgcgtccttggtctttcttcctaagaaggagatggagccaatttctcacagctcgtgcctcagtactgagggtatggaggaaaaggcagtcagtcagtgtctaaaaatgacgcacgcaagagacgctcggggaagatgtagctggacctctgcgatttacttttctcaaggtggacaagctgtagccatcgggcaatttaaagatcgaattacagggtccaacgatccaggtaatgcatctatcactatctcgcatatgcagccagcagacagtggaatttacatctgcgatgttaacaaccccccagactttctcggccaaaaccaaggcatcctcaacgtcagtgtgttagtgaaaccttctaagcccctttgtagcgttcaaggaagaccagaaactggccacactatttccctttcctgtctctctgcgcttggaacaccttcccctgtgtactactggcataaacttgagggaagagacatcgtgccagtgaaagaaaacttcaacccaaccaccgggattttggtcattggaaatctgacaaattttgaacaaggttattaccagtgtactgccatcacagacttggcaatan

SEQ ID NO: 19092 - DNA, 1048 bp, Homo sapiens
  misc_feature 1030, 1031, 1032, 1033, 1034, 1035, 1036, 1037, 1038, 1039,1040, 1041, 1042, 1043, 1044, 1045, 1046, 1047, 1048: n = A,T,C or G
gcgtccgcccagcgtccggtcacgggcaccggccgcgctccttctgccgccagggcgaggctggcacccggccagcgcgggcagggccacgggtgcccggctgtttcccgggtgtggaaggcgctcaaggtgcgcggcccggggcgcgctactgggggcgccctccgcggtgggcagcgcgccagggatcggcctgggcagccgcggggcgcgcgaaggctgcgctttccctacgccccccctcgcttcctccggcacggcggcaacggagatttcctctcggggaaactacgcggatccttttcggggatcctcgccccgccccagttctccgccccctcccctttgctggggcgcctgggctggcccgcgcaggggaggaggctctggcagcctgggcagggaggcggcggggggccgcggagccgctggccatcgattctccccgccatgtgacgccgtccttagccctgcgacccccagcgcgtcccgggcctgcgcctccgccccgccgcgcagcgcacgatgcttctgccgggacgcgcacgccaaccgccgacgccccagcccgtgcagcatcccggcctccgccggcaggtagagccgccggggcagctcctgcgcctcttctactgcactgtcctggtctgctccaaagagatctcagcgctcaccgacttctctggttacctaaccaaactcctgcaaaaccacaccacctatgcctgtgatggggactatttgaatctacagtgccctcggcattctacgataagtgtccaatcggcattttatgggcaagattaccaaatgtgtagttcccagaagcctgcctcccagagggaagacagcttaacctgtgtggcagccaccaccttccagaaggtgctggacgaatgccagaaccagcgggcctgccacctcctggtcaatagccgtgtttttggacctgacctttgtccaggaagctattaaagggatgtttcaagctgtttctagcacattccaaaataaatgaggagggaggagnnnnnnnnnnnnnnnnnnn

SEQ ID NO: 19093 - DNA, 2344 bp, Homo sapiens
  misc_feature 1, 2344: n = A,T,C or G
ncgttcggcgagtttctgtctatgtcgggcgcagccgccgccagggaaaagaaagggaggaaggaaggaacaagaaaaggaaataaagagaaaggggaggcggggaaaggcaacgagccgtccggcctccgtcaagggagttggagggaaaaagttctcaggcgccgcaggtccgagtgcctcgcagcccctcccgaggcgcagccgccagaccagtggagccggggcgcagggcgggggcggaggcgccggggcgggggatgcggggccgcggcgcagccccccggccctgagagcgaggacagcgccgcccggcccgcagccgtcgccgcttctccacctcggcccgtggagccggggcgtccgggcgtagccctcgctcgcctgggtcagggggtgcgcgtcgggggaggcagaagccatggatcccgggcagcagccgccgcctcaaccggccccccagggccaagggcagccgccttcgcagcccccgcaggggcagggcccgccgtccggacccgggcaaccggcacccgcggcgacccaggcggcgccgcaggcaccccccgccgggcatcagatcgtgcacgtccgcggggactcggagaccgacctggaggcgctcttcaacgccgtcatgaaccccaagacggccaacgtgccccagaccgtgcccatgaggctccggaagctgcccgactccttcttcaagccgccggagcccaaatcccactcccgacaggccagtactgatgcaggcactgcaggagccctgactccacagcatgttcgagctcattcctctccagcttctctgcagttgggagctgtttctcctgggacactgacccccactggagtagtctctggcccagcagctacacccacagctcagcatcttcgacagtcttcttttgagatacctgatgatgtacctctgccagcaggttgggagatggcaaagacatcttctggtcagagatacttcttaaatcacatcgatcagacaacaacatggcaggaccccaggaaggccatgctgtcccagatgaacgtcacagcccccaccagtccaccagtgcagcagaatatgatgaactcggcttcagccatgaaccagagaatcagtcagagtgctccagtgaaacagccaccacccctggctccccagagcccacagggaggcgtcatgggtggcagcaactccaaccagcagcaacagatgcgactgcagcaactgcagatggagaaggagaggctgcggctgaaacagcaagaactgcttcggcaggtgaggccatgtcaggagttagccctgcgtagccagttaccaacactggagcaggatggtgggactcaaaatccagtgtcttctcccgggatgtctcaggaattgagaacaatgacgaccaatagctcagatcctttccttaacagtggcacctatcactctcgagatgagagtacagacagtggactaagcatgagcagctacagtgtccctcgaaccccagatgacttcctgaacagtgtggatgagatggatacaggtgatactatcaaccaaagcaccctgccctcacagcagaaccgtttcccagactaccttgaagccattcctgggacaaatgtggaccttggaacactggaaggagatggaatgaacatagaaggagaggagctgatgccaagtctgcaggaagctttgagttctgacatccttaatgacatggagtctgttttggctgccaccaagctagataaagaaagctttcttacatggttatagagccctcaggcagactgaattctaaatctgtgaaggatctaaggagacacatgcaccggaaatttccataagccagttgcagttttcaggctaatacagaaaaagatgaacaaacgtccagcaagatactttaatcctctattttgctcttccttgtccattgctgctgttaatgtattgctgacctctttcacagttggctctaaagaatcaaagaaaaaaactttaattcttgggacttaaatacgggcacactgggggggcgcggggaacaaacacacgtgaagatagaaggccacccctatgccaacaaaaagtgctccacacgtttacaacaactcccggcgccaacaacgaaagaggcgcaggtagcaaccatacagaggacaaacagggctccaacaccaccgcacgcggagaaacaaaattgctgcggaacaaccagcactacgagtcaacaacaaggcgcgacaaaaaaaaagcaacgcggacgaacgatgaaccgcgacaaccaaggaaccacatcacagcagaaccaccatatcacgaaactan

SEQ ID NO: 19094 - DNA, 1082 bp, Homo sapiens
  misc_feature 1080, 1081, 1082: n = A,T,C or G
ggtgtcgacccacgcgtccgggagctagcggcgccctcccttatctgccttggcaacgacccagccgcgccgcgaggagagccgggaatggaggtcgtggcgtgaggggcgccgagcgaggggaggcgcgggccacgggagttccggcgttgcccggcagtccgcagtcctcggcgggaaggctgtcccggcgcctcaggcagctctgcgtgggccggggtgacttcctcgcgatcccctgcgcgaggtgaagggcagggacctttgccgcgccttccacgcgccgtgccccaccggcgagtggctccatcttcctcagacttatcgctcgcggacaggcgccgtgggtctcccgggcctccgtaccgtcctccttcccagcggctccgggaagcggttccctgtcttcggacgcatttcacccgcgcggggagagcttcccgggaaggttccacggcggccgagggtttccgcgcccgggacgcgtatcggctgaggccgtgggtccagtccacgggttctgcccgcacgggtccactggccggggaggcggagggaggagtgggggctccttaatgtgacccagaaggtgctataccgggatgtgatgctggagaactttgcactcggtagctcactgggaacttggcacttcgaagatcccctgtgttaacccagctggaaggatgatgaacagtcggtgggtgccagctgggtggctgtgattccagtacagcagagcagaagccaagaaggtaacggactagaaaggaaggagtagaatcggacgactgcagagagccaatcctggagcattcaaggaattacgagtcatcccggacaccgggaacctactaaggttggggagaacccaagcataggcaacatgacatatgtgggaagatcattcacacgtggttccaactgactggacatgacaaagcgctgtggttgctacagatgtcaaagacagcaaggtggaacaagacccaaagacagtgcccatagtgaactagtagcagcagataacaacagagtcacacaaacatgatgtatcaaactagcattaacctactatannn

SEQ ID NO: 19095 - DNA, 892 bp, Homo sapiens
  misc_feature 890, 891, 892: n = A,T,C or G
tcgacccacgcgtccggtcgagactcccgcgccccaccacccccggcggagctgctgctgagccactcaatctgagccctggctactaataaagttcgtttaaaaatcataatcattcttaagagagcgaaagagggtgcgaactagccgctcggccccgcagggagagctggcgcgtcgggaggagacagcggcggcagcggttgcgccgcgaccaggaggagccggtggcgccgggcggcgggtccgcggccggtgggggacggtgagtagcggctcgcgctgcggtgcagcggcgctgcactcactcgccctctccaggggctgggggttcgtccggctccactggggaagactcagcttctccccggggtcccgggttgtgccttactctccggagtgggcaggggtatcgagggcaggggcctcccggcccggctcccccatcccccggttcggaccgccgagcgccggctctcccctccctgagcaccgatcccaagttccagctagagaaggtgggcggcagcgccagcccgggccccctcccagctcccagcgatttgagagggaagatctgatctcctagaattagagttggtaacagaaaccatttcagctccaaaaaatgttggaggaagatatggaagtcggccataaagatggtggttgtagggaatgggagcagttgggaaaattcaagtatgattcaggatattgcagaggcatttttccaaagactaagaaaacatggagttggattataggagcgacaattacagttttggtggagatgttggactaggtttgggcgtgcggtggaggaattgagaattgacaggcaaaacggacaagtaggtgaaggtctacgtacgatttgtagatcccgnnn

SEQ ID NO: 19096 - DNA, 2489 bp, Homo sapiens
  misc_feature 1, 2484, 2485, 2486, 2487, 2488, 2489: n = A,T,C or G
ngcccccgacccacgcgtccgcccacgcgtccggcctggcgccggggctaagtggccgccggcgtccgggtacccgagggctctcccgcgttgctggcaccgctggcgccgcggtctcgtagcgcatgggcctcctccgaggcgggctcccatgcgctcgggccatggcgcgcctgggcgctgtgcgctcccactactgcgccctgctgctggccgcggcgctggccgtctgcgccttctactacctcggctcaggccgggagaccttctccagcgccaccaagaggctgaaggaggcccgcgccggggctcccgccgcgccctcgccgcccgcgctggagctagcgcggggctccgtggcgccagcccccggcgcgaaggccaagagcttggagggcggcggtgccgggccggtggactaccacctgctgatgatgttcaccaaggcggagcacaatgccgcgctgcaggccaaggcccgcgtcgcgctgcgctcactgctgcgcctcgccaagttcgaggcgcacgaggtgcttaaccttcacttcgtgagcgaggaggccagccgcgaggtggccaagggcctgctgcgggagctcctgccgcccgccgctggcttcaagtgcaaggtcatcttccacgatgttgctgtgctgacggataagctcttccccatcgtggaggccatgcagaagcacttcagtgctggcttgggaacctactacagtgactccatcttcttcctctcggtcgccatgcatcagatcatgcccaaagagatcctgcagatcattcagctggacctagacctgaagtttaagaccaacatccgggagttgtttgaggaatttgacagtttcctgccaggcgccatcatcggcatagcccgggagatgcagccagtttacaggcacacattctggcagttccgccatgagaacccccagacccgggttgggggcccgccccccgaggggctgccgggcttcaacagcggggtgatgttgctgaacctggaggccatgcgccagtccccgctctacagccgcctgctggagccggcgcaggtgcagcagctggccgacaagtaccacttccgcggccacctcggggaccaggacttcttcaccatgatcggcatggagcaccccaagctcttccatgtgctggactgtacctggaaccggcagctgtgcacctggtggagggaccatggctacagtgacgtcttcgaggcctatttcaggtgtgagggccacgtcaagatctaccacgggaactgcaacactcccatcccggaggactaggcgctccccgtgccttgcccccggggcctccagatctgggggaaggacagggttccttgggacagacccaagggcagtgtctgacccgctagagagacaccgcagggaagtcctgtgattaaggtgctgagacctcctgccgggcaggtcactgtgctgaggccacccgccaaggactggcctgtgcactgctggtgcttgggaccttattcctccagggagcaggcgacacaaaggacacgtatgtccagtgggctgggaagcaagcacttgaagagaaggaaggggagaaagggtcccccttgctgtctgcctctgaggaatggaaatcctttagacccggccttttttggaccaatataaatttaatttaaattgacagccttccatttttcgagaaagtacaaacagaactgctttagcacccatcgagccccaaacgggtaaggtaagccaaggttttaatgaccagcccagtatctaagcttccaaacgaatgccagcccatcacatactcaccctgggaggctgctgcacgcgcattctcctgatgctcacgtcacttggtgtaggtttcaggatcgcctctttgaggaaggacttcaggaccaactggggcctgcataagaaaacttatctcattattagagtactcacagcttgtatctcccagctacatcctagaaccccattgtcctttattccaccaaaccagctccaggtgaccagactctactcagaaagcaaattcgtcatcaaagaacagagactggccaccacaaggacatgcaggagaactgtcgggaccaggaagactcattccaaaaagcccaggccgggcacagtcgtcaagcctgtaatcccaacactttgggagaccgaggtgggggtatcgattgagcctcggaggtcgagatcagcctgggaaacacagggaggcccccatcgctacaaaatattttaaaaattagccaggtgtggtggcttgtgcttgttgtcccggctacttgggaggctgaagtgggagggtggcttgagtccaggagttcactgcactgagctgtgatcacaccactgcactccagcctggacgacagagtgagacgtccatctcaaaaaaaaaaaaaaagggcgaccgctcgcgatctagaactagtctagttctagatcgcgagcnnnnnn

SEQ ID NO: 19097 - DNA, 3362 bp, Homo sapiens
  misc_feature 3362: n = A,T,C or G
acttgtattagatttttaaggcctataatcatgaaatatcactagttgccagaataataaaatgaactgtgtttaattatgaataatatgtaagctaggacttctactttaggttcacatacctgcctgctagtcgggcaacatgaagtaggacagctctgttgattttttagggccatactaaagggaatgagctgaaacagacctcctactttgcgccaatcctacgagaactcccagaactccgcttccctagtccaacccaagccagagttgcccacacctaagatggcggcggggggcggagtcggcgcggccgcctctgggcgggaccgcggggactagacgtggccgcggggcggtgtcatcgcccccgccccgcccggtccagccagctcggcccgggggcttcgggctgtcgggccggcgctcccttctctgccaggtggcgagtacacctgctcacgtaggcgtcatgaggtctccggttcgagacctggcccggaacgatggcgaggagagcacggaccgcacgcctcttctaccgggcgccccacgggccgaagccgctccagtgtgctgctctgctcgttacaacttagcaattttggccttttttggtttcttcattgtgtatgcattacgtgtgaatctgagtgttgcgttagtggatatggtagattcaaatacaactttagaagataatagaacttccaaggcgtgtccagagcattctgctcccataaaagttcatcataatcaaacgggtaagaagtaccaatgggatgcagaaactcaaggatggattctcggttcctttttttatggctacatcatcacacagattcctggaggatatgttgccagcaaaataggggggaaaatgctgctaggatttgggatccttggcactgctgtcctcaccctgttcactcccattgctgcagatttaggagttggaccactcattgtactcagagcactagaaggactaggagagggtgttacatttccagccatgcatgccatgtggtcttcttgggctccccctcttgaaagaagcaaacttcttagcatttcatatgcaggagcacagcttgggacagtaatttctcttcctctttctggaataatttgctactatatgaattggacttatgtcttctacttttttggtactattggaatattttggtttcttttgtggatctggttagttagtgacacaccacaaaaacacaagagaatttcccattatgaaaaggaatacattctttcatcattaagaaatcagctttcttcacagaagtcagtgccgtgggtacccattttaaaatccctgccactttgggctatcgtagttgcacacttttcttacaactggactttttatactttattgacattattgcctacttatatgaaggagatcctaaggttcaatgttcaagagaatgggtttttatcttcattgccttatttaggctcttggttatgtatgatcctgtctggtcaagctgctgacaatttaagggcaaaatggaatttttcaactttatgtgttcgcagaatttttagccttataggaatgattggacctgcagtattcctggtagctgctggcttcattggctgtgattattctttggccgttgctttcctaactatatcaacaacactgggaggcttttgctcttctggatttagcatcaaccatctggatattgctccttcgtatgctggtatcctcctgggcatcacaaatacatttgccactattccaggaatggttgggcccgtcattgctaaaagtctgacccctgataacactgttggagaatggcaaaccgtgttctatattgctgctgctattaatgtttttggtgccattttctttacactattcgccaaaggtgaagtacaaaactgggctctcaatgatcaccatggacacagacactgaaggaaccaataaataatcctgcctctattaatgtatttttatttatcatgtaacctcaaagtgccttctgtattgtgtaagcattctatgtctttttttaattgtacttgtattagatttttaaggcctataatcatgaaatatcactagttgccagaataataaaatgaactgtgtttaattatgaataatatgtaagctaggacttctactttaggttcacatacctgcctgctagtcgggcaacatgaagtaggacagttctgttgattttttagggccatactaaagggaatgagctgaaacagacctcctgatacctttgcttaattaaactagatgataattctcaggtactgataaacacctgttgttgttcactttcctcataaaaattgtcagctctctctgacacttagacctcaaactttagcatctctgtggagctgccatccactgtataatttcgcctggcaactggactgaggggagtgtgcccaggcagctgccaagcactccctccctggcttcagggtcagagtgcccagcgtttatcagaggcagcatccaagcccagagccagtgtcgactcttcggctggtgcctttcctctgaggggctatcaatgtgtagataaagccctgagtaggcaagagcagtgagatccactgctatggtcttgatacatcctcaaactttcccttcccagcacagaggaatattggctggcatgcaacctgcaaaagaaaaatgcgaagcggccgggcacggtggctcatgcctgtaatcccagcactttggggggctgaggtgggcgaatcatgagatcaggagttcgagaccagcctggccagcatggtgaaaccccatctctactaaaaatacaaaaaattagctgggcgtggtgacgggcgcctgtaatcccagatactcaggaggctgaggtaggagaatcacttgaacctgggagatggaagttgcagtgaaccaagatcacgccactgcactccagcctgggcgatggagcgagactccaaccaaaaaaaaaaaaggattaagaagaaagtgcgatgccccagtcaatcacaaaataggatcatcctggtttaaatctactctcacttggatccacgtattaattcctatgggcgggttaggccgtgtattggacaagaggggtcccgttgtcgcaaggggtttgaactcgggtaagcgactccggccggcccaagggtggaactacggtgagcacggcagcggtaggttaaaccgagaattcaaacccggggcagcgcccaccggggccgcaaggaacgaaggccacgcaaggacatccggcaaacaggcccggggggcgacaccaaaggaccgcaacaggacgaacggctagacgaacgcn

SEQ ID NO: 19098 - DNA, 810 bp, Homo sapiens
  misc_feature 774, 808, 809, 810: n = A,T,C or G
gcgtccggccgctgccccctctccccgccccctgcccggccaacgccgaagtgcggagagcagccgcgggccctttaagggccgcgaggtgcgcggtctctttaaggcgggtcctggtggtttctgttttctgaaggaagtgacggggggtgggattgaatgaaaagtgcaaaacacaggctcgcagcgctggagcccggggccgcggagccgggccggggcagcgccgtctccgcctcggggccgccgggggcgccctgctgagcgctacccacgtgcgtccgcgccacctcgcgggcgaccccgcggccaaggcccccggcggagcggctcccgggcgccccgaactagcccccaactttgggcgaagtttgcctgcgcctctccccgcccccacgcggcgcgccggggccgcggacggcagcggcccccggggatgcgccttcccggggtacccctggcgcgccctgcgctgctgctgctgctgccgctgctcgcgccgctgctgggaacgggtgcgccggccgagctgcgggtccgcgtgcggctgccggacggccaggtgaccgaggagagcctgcaggcggacagcgacgcggacagcatcagcctcgagctgcgcaagcccgacggcaccctcgtctccttcaccgccgacttcaagaaggatgtgaaggtcttccgggccctgatcctgggggagctggagaaggggcagagtcagttccaggccctctgctttgtcacccagctgcagcacaatgagatcatccncagtgaggccatggccaagctccggcagaaaaannn

SEQ ID NO: 19099 - DNA, 3470 bp, Homo sapiens
acgcgggggggcccggaagtggtccctgtagaaccactgtggcaccgctactccggtgccgcgcccgtcgagcattgcgttgctgcattgcgccccaccgactccactatgttgaagaaattcgacaagaaggatgaggagtcaggtggaggctccaacccattccagcaccttgagaagagtgcggtactccaggaggcccgtgtatttaatgaaactcccatcaaccctcggaaatgtgcccacatcctcaccaagattctttatctcataaaccagggggagcacctggggaccacggaagcgaccgaggccttctttgccatgaccaagctctttcagtccaatgatcccacactccgtcggatgtgctacttgaccatcaaggagatgtcttgcattgcagaggatgtcatcattgtcaccagcagcctaacaaaagacatgactgggaaagaagacaactaccggggcccggccgtgcgagccctctgccagatcactgatagcaccatgctgcaggctattgagcgctacatgaaacaagccattgtggacaaggtgcccagtgtctccagctctgccctcgtgtcttccttgcacctgctgaagtgcagctttgacgtggtcaagcgctgggtgaatgaggctcaggaggcagcatccagtgataacatcatggtccagtaccacgcactagggctcctgtaccatgtgcgtaagaatgaccgcctagccgtcaataagatgatcagcaaggtcacacggcatggccttaagtctccctttgcctactgcatgatgatccgggtggccagcaagcagctggaagaggaggatggcagccgtgacagcccactgtttgacttcatcgagagctgcttgcgcaacaagcacgagatggtggtgtatgaagccgcctcggccatcgtcaatctgccaggctgcagtgccaaagagctggccccggctgtgtcagtgctccagcttttctgcagctcacccaaggctgctctccgctatgctgctgttcgtaccctcaataaggttgccatgaagcatccgtcagctgtgacagcttgtaatctggatctggagaacctggtcacagattcaaaccgcagcattgccacgctggccatcaccaccctccttaagacgggcagcgagagcagcatcgaccgcctcatgaagcagatctcctccttcatgtcagaaatctcggatgaattcaaggtggtggttgtccaggccatcagtgccctgtgtcagaaatatcctcgcaaacacgccgtccttatgaacttcctgttcaccatgctgcgggaagagggtggctttgagtataagcgcgctatcgtggactgcatcatcagcatcattgaagagaactcagagagcaaggagacagggctgtcacatctgtgcgagttcatcgaggactgcgagttcacagtgctggccacccgtattctacatctcctgggccaggaggggcccaagaccaccaatccctcaaagtacatccgcttcatctataaccgagtggtcttggagcatgaggaggtccgggcaggtgctgtgagtgctctggcgaagtttggagcccagaatgaagagatgttacccagtatcttggtgttgctgaagaggtgtgtgatggatgatgacaatgaagtaagggaccgagccaccttctacctaaatgtcctggagcagaagcagaaggcccttaatgcaggctatatcctaaatggtctgactgtgtccatccctggtctggagagggctctgcagcagtacactctagaaccatcagaaaaaccttttgacctcaagtctgtgcccctggccacggcgcccatggcagagcagagaacagaaagtacccccatcacagcagtcaaacagcctgagaaagtggcagctaccaggcaggagatcttccaggagcagttggcagcagtgccagagttccgcggtcttgggcccctcttcaagtcctcgcctgagcccgtggccctcaccgagtcagagacggagtatgtcatccgctgcaccaaacacaccttcaccaaccacatggtttttcagtttgactgcacaaacacactcaatgaccagaccttggagaatgtcacagtgcagatggagcccactgaggcctatgaggtgctctgttacgtgcctgcccggagcctgccctacaaccagcccgggacctgctacacactggtggcactgcccaaagaagaccccacagctgtggcctgcacattcagctgcatgatgaagttcactgtcaaggactgtgatcccaccactggggagactgatgacgaaggctatgaggatgagtatgtgctggaagatctggaagttactgtagctgatcacattcaaaaggtcatgaaactgaacttcgaagcagcctgggatgaggtaggggatgaatttgagaaggaggaaacgttcaccttgtctaccatcaagacacttgaagaggctgtgggtaatattgtgaagttcttgggaatgcacccttgtgagaggtcagacaaagtgccggataacaagaacacccacacgttgctcctggctggtgtgttccggggtggtcatgacatcctggtgcgctcccggctgctgcttttggacacagtgacaatgcaggtgacagccagaagtttggaggagctgccagtagacatcatcttggcatctgtgggataagaggccagcctgcataggacctcatacccttccccaacactacctggaagttgtgccttcctcatgaaactggcagaaaccccttcccaagcttctgtattgaaaaacaattaggaatcattgcagatttttttttattctgctcccacctcccacccgggactacttgctggtgactttttttttttttttttttaaataggggatgattttagcttgtcctaaatcttgctgtccacccttccaggaaagggacattgtaaatgaataaaacattctcaactcctcttgaatctatcccccaagaaaccatcttatccctgtaataaatcagcatgtatttattgaaaaaaaaaaaaaaaaaaaaaaaaaaaaaaaaaaaaaaaaaaaaaaaaaaaaaaaaaaaaaaaaaaaaaaaaaaaaaaaaaacaaaaaaaaaaaaaaaaattaaaaaaaaaaaaatggggggcccccccggggggggcccccaattgccctttaaaggggtggtaaaagccccccccctggggcgttttttaaaaaggggggggggggaaaaaccccgggggcccccaaattaaatggggaggagccccaccccctttccccttggggggaataaccaaaagggcccggcaaatggccccttcaaaaattgggccccccccaaagggggaggggaattttggccccctttttttttttaaaaacccgggcgaaaatttgggcaaaacccc

SEQ ID NO: 19100 - DNA, 2020 bp, Homo sapiens
  misc_feature 1, 2, 2020: n = A,T,C or G
nncacagctcttttgaagtcaggttcatccataaattcggcaacagcaaattgcaagagcaggtataccactccagtaagtacagaaaatgcggtgataacataggcaaaccatctacttcccagtcttctttctagatttattcctttccagagcatggatgccatattgaaatacaaatgccaatcatcagcatggtgaaggggagagagcagtaaacgctgccagtctttttgctggtaacacttctccacactaaggcaggagctatacagtggcttctgagggttcaagaagaaccagatgttgagggccaaagttgctagggtgacaggtggaatattgttgatcccaacatggaagatttgagaaaggagtagaataagtccagtatttatccctcttgatctccgttgcatggccagatatcagggaaacagctcagcaatgggaaaacgtactcaggtggtcagtttcaggtatctggggagatatacagacggctgaacgccctcgacgacccgccaggtgactacatgaacatgtcaccagtgggggactccaacaccagcagcccctccgactgctactacggccctgaggacccccagcacaagccagttcctctccgtactactcattgccaacgatcctttaagcaccacccagccgccccgagggagccggacgcgggtgcccggcatcagcacctccgcctttccactagctctggtcgccttctctatgctgcaacagcagatgattcttcctcttccaccagcagctgacagcctgggtggtgggatactgctgtggtgctaggctggagcccagccattccacatccccaccatcaggttctgcagccccatctgcctcgaaaggtggacacagctgctcagaccaatagccgcactggcccgtgccacgaggctgtacctgggggatcccaaggccagcaccttacctcgggcccgagagcagcagcagcagcagcagcccttgctgcaccctccagagcccaagagcccgggggaatatgtcactcatcgaatatgggcagtgatcagtctggctacttgtctggcccggtggctttccacagatcacctatctgtcaggtgtccatcccagactccagcacagactcccagacgcggcagacgactggacactgaggagtacatgaacgatggaccctggggccgggccggagggcagactggcagcgaagagcactaggcgtcgagatgggacgactggggccctgaacactccctggggctgcttcagcatctgcaggcctacatgggaagtgaccagaagcctatggtgacttacatgaccatcgcagatgagttgtacacagtacagagcctaagaatgggaacacccttcgcacagcaatgactccctgtaacaagactactggctgacacatgccggagcacatggcacttggcatgatcgaacgaagtctaacccctgaccaagtacaatccatggacttgctcgcctaccatccatctcaaacagcatcatgacacacacgacatgaaccataaagagagtcaggacgaagcgaggaagacaccgatgcaaacccgaggagaggcggaggccacacaagcgccagtagcggcacatgaacgggacacaacaccgaggagcacatccaacgacgccagaacgcggcacgcacacgacagggcaccagcggatatcgccggtccagcacccgcacaagcggatcggcacgcaagaccccatccacgcaccgcgcaggaggtagacgcgccaacacaactgactcatgctgctagtgaagcgaaaggcatgcctggagagacggggctcccagactcatccgagatgcgcccggacggcatcgacaacgcgcagtgagaccaacacgcgcactgaccacaacgtagagcctcgaatacgagcgccaccatgacaatagagcagtgagaagatcaggccaactcgatcatcaactcgctagtcaatgactcan

SEQ ID NO: 19101 - DNA, 1914 bp, Homo sapiens
  misc_feature 1914: n = A,T,C or G
cccacgcgtccggcagagcctgcgtcatcacgtcgttgcctgggctgccgtccgcggaaatttgaaatggctgacgggtcgctgacgggcggcggtctggaggcagcggccatggcgccggagcgcacgggctgggcggtggagcaggagctggcgtctctggagaaaggtttgttccaagatgaagattcatgcagtgattgtagctaccgtgataaaccaggttctagtttacaaagttttatgccagaaggaaaaacctttttcccagaaattttccaaacaaatcaacttttgttctatgagcgattcagagcctatcaagattacattttagctgactgcaaggcctctgaggtacaggaattcacagctgagttcttggagaaggtccttgagccatctggatggcgggcagtctggcacactaatgtgttcaaggtgctggttgagatcacagatgtggactttgcagccttgaaggcagtggtgaggcttgctgaaccatacctctgtgactctcaagtgagcacttttaccatggagtgcatgaaggagctccttgatctgaaggagcatcggttgcccctgcaggagctgtgggtggtgtttgatgattcaggagtgtttgaccagacagcccttgcaattgagcatgtcagatttttctaccaaaacatttggaggagttgggatgaagaagaggaggatgaatacgattattttgtcagatgtgttgaacctcgattaagattgcattatgacattcttgaagaccgagttccatcaggacttattgttgactaccacaatctgttgtctcaatgtgaggagagttacaggaaatttttaaatctgagaagcagtttgtcaaattgtaactctgattccgagcaggaaaatatctccatggtggaagggttaaaattgtattcggagatggaacagttgaaacaaaagctgaaactcattgagaatcctttgttgaggtatgtgtttggttatcagaagaattctaacatccaagcaaagggtgtccgttccagcggtcagaagatcactcatgtggtctcctccaccatgatggctggtctcctgcggtccctgcttacggacaggctttgccaggagcctggtgaggaagaaagagaaattcagttccatagtgatccattgtctgctataaatgcctgcttcgaaggtgacactgttattgtttgtcctggccattatgtggtacatggcactttctccattgctgactccattgagttggaaggatatggcctaccagatgacattgtgatagaaaagaggggcaaaggcgacacttttgtggactgcactggtgctgatattaaaatctcaggcataaaatttgttcagcatgatgctgtagagggaatcttaattgttcaccgtggtaagactacgctggaaaactgtgtgctgcagtgtgagacgaccggagtcacagtgcggacatcagcagagtttctaatgaagaactcggatttatatggcgccaagggtgcttaggtatacgaaatctaccctggagcagtcaagtgagacccttgaagttgaaatgggatcatcactggcagggacatgggtcctcattaaggaattcattcaattcacagtaatacactaccaatggtatttcagtggcgcacttaatacttcttccaatattacagagcgagttagtaagcggccgccatcgttgtgacaccacatcaggctctgtgtaacactgacacacatatctccgttcgaccatgagctcccataaaacgacctgtaatttactacccttgatagcccactctgtatgctctaggggccagatacctatatctcagttccgcgcaccatgctcttacatcgacataccaacatattcacgcn

SEQ ID NO: 19102 - DNA, 1107 bp, Homo sapiens
  misc_feature 1, 1050: n = A,T,C or G
nagtcgacccacgcgtccggaaaaaaaaaatgacccagagatattaacaacttgacctggttatacagttagatatttgcacagtctggactcaaactggaggcttctgactcctcatctaggctcctctcactctgccattgcatgggttttctcatataccttctctcataaggttttcacaaatttgtcacgtcaaataattatcaaaattattcacactattatagatgaaaataatgtgcttataaagattaagtaactttcctgagggcgcaggtatctggttcacataacaactagcctggcttagaataaacacatatttcctggttctgaagttggtgtccttcctaccactttctgctgtctcctaaagataaagaatgttattggctcactgaattaatccattctgttcctggctgaaataaaaattggtatattccttacgtgaagtgtcaacaggaaggggcttttacaacttccttttgtttccaggcgttagtatctctgcttggtataagataccagtattcctaggaaaggccttgaaaagagggacagatacaagcctcttctgataaatctatgcttttcttacctctaccaagtaatagcaaacatgaaaatggtaaagatctttacaacatttgtctctgtacatataaaacgtttaaacacatgcgcaaagatggagcaaaatatcatatattttaatctaagcaacaaagtcaagaaccaaaattctgagcagtctttgaacaacaactcagttgaaacatttccatggcaacagcaggcttatatggttgtgtgctacttttaatattgaacatattttctttaggagctgacatgattatcacaaaaaggttttacagtattacaaagaaaaaataagtgataaagggaactgacaatttcagcctgcaaaatttttactgaaaacatgtcaaaagagtaaatagtttacaaataataatcaatttgttcaatccaaaacatattcagcccttgagaaggtcctgaaggtttgctaaatcctgngcttgggcctttagcaaaacacacaaagagtaagtaacttgctcaaagttatacaac

SEQ ID NO: 19103 - DNA, 3230 bp, Homo sapiens
  misc_feature 3229, 3230: n = A,T,C or G
cgcgtccggcgacccacgcgtccgcgcctgggcaagggccggggcgccgggccgagccacctcttcccctcccccgcttccctgtcgcgctccgctggctggacgcgctggaggagtggagcagcacccggccggccctgggggctgacagtcggcaaagtttggcccgaagaggaagtggtctcaaaccccggcaggtggcgaccaggccagaccaggggcgctcgctgcctgcgggcgggctgtaggcgagggcgcgccccagtgccgagacccggggcttcaggagccggccccgggagagaagagtgcggcggcggacggagaaaacaactccaaagttggcgaaaggcaccgcccctactcccgggctgccgccgcctccccgcccccagccctggcatccagagtacgggtcgagcccgggccatggagcccccctggggaggcggcaccagggagcctgggcgcccggggctccgccgcgaccccatcgggtagaccacagaagctccgggacccttccggcacctctggacagcccaggatgctgttggccaccctcctcctcctcctccttggaggcgctctggcccatccagaccggattatttttccaaatcatgcttgtgaggaccccccagcagtgctcttagaagtgcagggcaccttacagaggcccctggtccgggacagccgcacctcccctgccaactgcacctggctcatcctgggcagcaaggaacagactgtcaccatcaggttccagaagctacacctggcctgtggctcagagcgcttaaccctacgctcccctctccagccactgatctccctgtgtgaggcacctcccagccctctgcagctgcccgggggcaacgtcaccatcacttacagctatgctggggccagagcacccatgggccagggcttcctgctctcctacagccaagattggctgatgtgcctgcaggaagagtttcagtgcctgaaccaccgctgtgtatctgctgtccagcgctgtgatggggttgatgcctgtggcgatggctctgatgaagcaggttgcagctcagaccccttccctggcctgaccccaagacccgtcccctccctgccttgcaatgtcaccttggaggacttctatggggtcttctcctctcctggatatacacacctagcctcagtctcccacccccagtcctgccattggctgctggacccccatgatggccggcggctggccgtgcgcttcacagccctggacttgggctttggagatgcagtgcatgtgtatgacggccctgggccccctgagagctcccgactactgcgtagtctcacccacttcagcaatggcaaggctgtcactgtggagacactgtctggccaggctgttgtgtcctaccacacagttgcttggagcaatggtcgtggcttcaatgccacctaccatgtgcggggctattgcttgccttgggacagaccctgtggcttaggctctggcctgggagctggcgaaggcctaggtgagcgctgctacagtgaggcacagcgctgtgacggctcatgggactgtgctgacggcacagatgaggaggactgcccaggctgcccacctggacacttcccctgtggggctgctggcacctctggtgccacagcctgctacctgcctgctgaccgctgcaactaccagactttctgtgctgatggagcagatgagagacgctgtcggcattgccagcctggcaatttccgatgccgggacgagaagtgcgtgtatgagacgtgggtgtgcgatgggcagccagactgtgcggacggcagtgatgagtgggactgctcctatgttctgccccgcaaggtcattacagctgcagtcattggcagcctagtgtgcggcctgctcctggtcatcgccctgggctgcacctgcaagctctatgccattcgcacccaggagtacagcatctttgcccccctctcccggatggaggctgagattgtgcagcagcaggcacccccttcctacgggcagctcattgcccagggtgccatcccacctgtagaagactttcctacagagaatcctaatgataactcagtgctgggcaacctgcgttctctgctacagatcttacgccaggatatgactccaggaggtggcccaggtgcccgccgtcgtcagcggggccgcttgatgcgacgcctggtacgccgtctccgccgctggggcttgctccctcgaaccaacaccccggctcgggcctctgaggccagatcccaggtcacaccttctgctgctccccttgaggccctagatggtggcacaggtccagcccgtgagggcggggcagtgggtgggcaagatggggagcaggcacccccactgcccatcaaggctcccctcccatctgctagcacgtctccagcccccactactgtccctgaagccccagggccactgccctcactgcccctagagccatcactattgtctggagtggtgcaggccctgcgaggccgcctgttgcccagcctggggcccccaggaccaacccggagcccccctggaccccacacagcagtcctggccctggaagatgaggacgatgtgctactggtgccactggctgagccgggggtgtgggtagctgaggcagaggatgagccactgcttacctgaggggacctgggggctctactgaggcctctcccctgggggctctactcatagtggcacaaccttttagaggtgggtcagcctcccctccaccacttccttccctgtccctggatttcagggacttggtgggcctcccgttgaccctatgtagctgctataaagttaagtgtccctcaggcagggagagggctcacagagtctcctctgtacgtggccatggccagacaccccagtcccttcaccaccacctgctccccacgccaccaccatttgggtggctgtttttaaaaagtaaagttcttagaggatcataggtctggacactccatccttgccaaacctctacccaaaagtggccttaagcaccggaatgccaattaactagagaccctccagccccaggaggattggcccactaggttgctccaacctctaggccgtccaaagatgtcatgtttttcctgcacgtgtcggtagggccacagaatctttaaaaaggcgcatacccgggccggccctttaagcagagaagggcgaacnn

SEQ ID NO: 19104 - DNA, 529 bp, Homo sapiens
  misc_feature 528, 529: n = A,T,C or G
gcgtccggaaaccacctagttagctgctgtgctttcacaacttctttctctgtaaattcctcgcttggctctgagaaggaaaaaagatgttcgtaaagggctcagcgaggaatttacagagaaagaagttgtgaaaccaccatagttagttgctgtgctttgaatttcttttgctcaaatggcctcagcgaaatcttatttgcctatagcatatctacaaaaaattttcctagaccgtcttttctacaactggatggtaaagttgattgaagtgtgcctcatgtagctttatgtttggggcatttgaagggctatggctggaccagagtgtaatataaatgcttaatagagaggggaaaagaagagtgtaagaaccattatagggctgggctcacgcctgtaatcccagcattttgggaggctgaggcaggcggatcacgaggtcaggagttcgagaccagcctgaccaacatggtgaaaccccatctttactaaaaatacaaaaattagccagtcgcggtggcacgnn

SEQ ID NO: 19105 - DNA, 3002 bp, Homo sapiens
  misc_feature 1, 3001, 3002: n = A,T,C or G
nacgaggctgttgcagcagtttaaaggatccactcagccgccttaaccgccaaccagcaggctaagggaggaacagaatgaacaatgtttggatcccaatgactggagatgaaagttgcaaaagctctgcccaggcttctaccaaggattaactttccagggcatctgctgaactgctcttcggggctgtctgctgagattggcggtgggaccctcccgcctctcactcgtgcctttgttccccacgccggcctaaccccgcgcccctgcgctcgcggccagggcacctgacccacgcgccgcccgccggggatgcgggagccgccactgctaccgctgccaccgctgccgggcctgctccgccaagcacatgcgcagtggcgacgccgagccggcgccctcagtctcctcctccaccgcctcccggttccgcagtcacttcctgcagcctgtttccctgtgggtcgggttggactgacttttgacagtcagccttcggctgcggagggggctcggcggcggccggcggagaaagttgctccgagaagaggctgggtcgagctgggccgagccgggcgcgcagggcgggcgtcgcgggcgtcccgggcggacgcggcgcggagactgccggcgcgtcccgggggttccgatttgaagaccttgcttctcatcacccactggattatgccccaggctttcctacccaatgatcctcttgcaacacgccgtgcttcctccacctaagcagccctcaccctcgcctcctatgtcagtggccaccaggtctacaggaaccttgcagcttccaccacagaagccttttgggcaggaggcttccttgcctcttgcaggggaagaagagttatcgaagggaggggagcaagactgtgccctggaggagctatgtaagcccctgtactgcaaactctgcaatgtcaccttgaactctgcacagcaagcccaggctcattatcagggtaaaaatcatggtaagaaactccgaaattactatgcagcaaatagctgtcctcctcctgctagaatgagcaatgtggtcgagcctgcagctactccagttgttccagtccctccgcagatgggctcctttaagccaggaggccgagtgatcctggccacggagaatgattactgtaagctctgtgatgcctccttcagttccccagctgtggctcaggctcactatcaagggaagaatcatgccaagaggctgcggctggcggaagctcagagtaactcattctcggaatcctcagagctgggtcaacggcgggccaggaaagaagggaatgagtttaagatgatgcctaacaggagaaatatgtatacagtacagaataattcaggtccttacttcaatccccgctctcggcagagaattccacgtgatctggccatgtgtgttactccaagtggccagttttactgctcaatgtgtaatgttggagctggcgaagagatggaattccggcagcatttagagagcaagcaacataagagcaaggtgtctgaacagcggtacaggaatgagatggagaatctgggatatgtatagtgattatcatattaagatagagcagcttttcctgcctgttgtttgccttttgtcaacttgccctgctttgtggtctttttgatatgagtacattcctctgcttaatgttaatacgtgtaacccacagtggtaccatgagatgtcaaaacctgggggcccgggggcggggcggggggaggtgggtgtgaagaacgtgcttcttaggtcataacgcttttgcagggtcaatggtgttgagccgctcatagcatgtgacctacctaccccatcagaaataactttttatcttgctcaagttctggtcaactagtagcctgacggcttagaactttgactatttaaaagtttcattttcttttgcaattttagttttatgtactgttaaagaattgtactgaattctttttagatcacagtaaaaataggttggcagagatttcagtttcccagggcttaaccagaaccgccacctcaatgcattgtcagtagaatacattattagaaactgttaaggtctttcccgggacatttttttctgccattttcttttgcaattgtagttttatgtactgttaaagaattgtattgaattctttttagatcaaagtaaaaataggtcagcagagatttcagtttcccagggcttaaccagaaccgccacctcaatgcattgtcagtaggatacattattagaaactgttagggtctttcccaggacatttttttttctgtatcatgtctccccatcattgaagcgcaagttttcttgaattcaaatactcccaatgagcttgtatacttccaaacagctaaacttgatttccagttgtggatttcacacatataattgccgccttcttccctcctcttttttcccccctagttgaatcagcttgtctaacaagcccattttcatgccccagctgtgctgtgggttttccaagcctcatatttgaatattcaatgagtttaagatggatatgatttcaaaaaatagggccgggcgcggtggctcacgcctgtaatcccagcactttgggaggccgaagcaggcggatcacgaggtcaggaggtcgagatcatcctggctaacacagtgaaaccccatctctactaaaaatacaaaacattagccgggcgtggtggtgggtgcctgtagtcccagctactctggaggctgaggcaggagaatggcgtgaacccgggaggcggagcttgcaatgagccgagatcgcgccactgcactccagcctgggtgacagagcgagactccgtctcaaaacaaaaaaaaaaaaaaggggggggcttaaaaatcccggggggccctttcctccctttgttcacagggccccaggcggtatacaaaacgccgcgtaaaccgccggaaacgccgtttggaacctcggggcctgcacccccacgccgaann

SEQ ID NO: 19106 - DNA, 2644 bp, Homo sapiens
  misc_feature 1, 2, 3, 4, 5, 6, 7, 8, 2644: n = A,T,C or G
nnnnnnnngggccccggagtttcccctggaacaaaaagcgggccgggaaaaacttgccacagggccagtggaaaaccttttgttgccgcccccccgaaaagagtccctggaatttttttttttttaagtccattacagtgcacatttattgactctgtgtatcttcacagtgtgatcttcaccacagcttgcaaagtgtaaccactcagcaccttctgcttccttctgttcagtttttccactgcaattcttccagcataattttctgatagccagtgtatgactttggctttgacttgtttctacacagtgggtccagtcatttatttctggaacttgatcagtctttttccaggtatataagcaaatctttccacactccaatcctactgcaaccacgtatcgttgagaagggtggagcactgggcagacgctgacagctgtcacagccccacccacgtccaggactgaggagcaggggccaatgttgtgctcaatacagtcatcagtggagtcgcactcaccccagacaaccacctttttgtctcgactcccagtgaagaaatacttgctgtcaggactccaatcacaagaccaaataattctactgtgcacagaagtaattttgttggtgaaggcaaaaagactaaaaactggctcgaactcaggtgagattgtatcctgctttttccacaatgaccaggttcgatctctggaaacagctagtaagaacttctcattaggtgagaaggccatctgcgtgactgtcaaactgtggaaaactaaattctgcacctgtttccaagatgtagtgttccaaagaatgatagctgcatgctctttcttagctgccttacaagctgaggcaagcagagtctttgaactgttacaagtaacacaaaatatttcataaccgtgcccatatagtttttgaacttcaggccacaaagtattctgcagaagatgatcctcagtgggaggctcagtaagtatggagggctgaaaggccacctgctgatactcaaaaccagtactagttaacagctcctcttcatcagaaggctgagaagctatatctccctgaaagacagctttatttgataatcccaatgcagggacagtggctccttctggaagatcactatcttgattacagagcacatgattcagtgattgtcctgtaatggcacaaaaattttccacaaaattccgaggtgcagaaaaaacccgaagaactttttcatctgctccagatacaaactgaaaccgattaatcattgccaaacatttcaggtcatacccatgtatctgaggccttgcaatttcatgccaagtcacctgtgattggtcttttctcttccatggagcaaaaagtctagttgtctgatcagtaccaacagtgataataaattctccttctggatcccagactaggtcttggacaccatcaaagtgtcctgaaatgacaatctctggagtccactctcttgggttaactgtattctgtttccaaaggtgcaacgctccgtggaaagcatgagcaatgatcatggagccatcttcattgaactggcaatcataaaatcccaaagtattcccacctacttcacctactcgaacctgttctagccaaactcctgactcttcatctggagcccagagaatcatggttttatccatggaagcagataataatctcactggctgctgtaggacaccatctttgtaaaacacaggttgccagtgaactgcatttacccagttttcatgaccggctagcactgtctccagagtaacagcaaatgctattttaacactttcattttctatggtaaaagtattttctttcagtcttatgttatcgtcatcctgagtttctaaagatgttgactttatatacagcttccatattcttatcaggcaatcttgtgaacagcttgctaggaaaagatctctaccaaaggctgcccattccactcctctaatccaatcctcatgtccacagagagaaagcactttctgaaactgatcattttgttgagcaaatatgtgaattctgcaatcatcattgccacatgctaatattggtacatcagtatttggcaaaaaagataagcagagagccaaagcaaatccatttccaaagtttaaagtctgaaggcacattacttctggaccctttttagaccagagtcgaacagcagaatctgcagctgcagaaacgatcagtgtacataatgcaggatctgatgtcctcctctggtaaacagcatgcaccgcataaacaggtccttcatggccttgaagatgcactgcttttaaaagctgattatcctctatttcccagtgaatcacttgattatcagatcctccagaaactaattcagtagaaggggagccatcctgtttacaaatccactgtatgcaattgactcgggcggtgtgaccattcaagttggtaacaacaacccttttcagggggtcatagagcaccacggagcaggacgtgccaaaggccagaagtcctctgggcccagagctccagttcaggactccccgcacccggtttgggcagcaaaacacgtgagaagtctccagcacgggtgccaccatgtcgccaactggtccggacgcgtgggtcgan

SEQ ID NO: 19107 - DNA, 1832 bp, Homo sapiens
  misc_feature 1, 2, 1831, 1832: n = A,T,C or G
nnaatacctgcagttcccaaatacatctggcctcacaggggtgatggggcttaaatgtgcaaatacgagtaaagaggtgagagcggagcctgacagcgcacctgctgggcagggtctccaacactgcagcattttgggggaagctctcctactgggtggggtcttgtacagcagcagcatttcaaggtgggctgatccttctcatctggggaagccagggctgggcaggtgcctgagcctcatgagggtctcagtctagatgttgggccctattctccctgctgccttgggcttggagatgctcacaggtgagttctcatttgtgaagaggtctgtcttcctgaggaagcaggggaccctcacctgtgaaccaagtgtgccatgggagctgctccatgtccaggtccaggtctcctggtctgcagggaacggcacaagagggctggcctaggccaggaggatgtgatctgtcctagaagggggctgacctgcttgctgaccccgcttgctgctgcctggctgacctgactcagccacggctgttccgagggcccttctgagtacgaacttccagttggaggatctgggtgaagacccagctgcttgagatagcagcctctggctaggcccttggcgtggccaagccaatcaggcaggtttagagcctggtgcccctagacaggtcctgcaaccaagaacaggggtagccttcaaaggccagccctgccttccaaccaccgctccacagcgagggaaaccaaggctcttagggcaggaggcttgtccgagattagcacctgcgtgctccaggctctgagttctgtcccctcagctgtccggcccctgggtgctcactttaatctcaagtcattcatcttactattaaacgtgagcccagaaatatgtggtaatggagaacgatgcctgcgagtctccaaagccttccctcggaacggttccattaaatctctcctgctcagaaccacccaatccaattcatggagcgccacgtggtctacagcacagctggttagggccagcggaggtttatttatagctgggctcctggctgcctggtaaccggccattgccacctttaaagagtcttgggatattatctacctctattcagcttgaaatcgggcatgcagtgccttgggctggggctggcgataattaaatttctatcatgcacaattatggatgcaaagaatgaatgacatcccactggcatgtgaggattcgggcagcttctggactgaaatacagacttcataattgctccatccagattgggacaaagactgtggttgggagaacatgcctgaacaaagaaaaatgactctgcaggaccaaagttcttgacactaattgatctgccaaaaggggaagaatgagtccagctagaatccaggactaaccagcgggtgagcttcaaggaacaaagggcttccgctgggtcagcccacgagagggagctgctgcaggtaccttgggaggggcacaggcccaccggtggtctggttcctcggggagcagtgctccttggaaggcagcgccagctcaagaaaggccggggttcccaggggagcaagagacggtgtgtcgcggaggcacgggcaagtgaagggcgcgacacggaggggcggcagaggagggcaaggagagagggaaacggaggcagcaggcagggggagacagacaccgaaaacgaggcacaaggacccaaggcaaaagaacgaatagagaaacaaaagagagagcagaaaggagaccagagacgcaacggcaacgaaggaaacagcacaaagagggacagagcagaaaagann

SEQ ID NO: 19108 - DNA, 598 bp, Homo sapiens
  misc_feature 1, 598: n = A,T,C or G
ngacccacgcgtccggggagcagggatcaaggtggtccccgtaaacctgacagtaaacctgacagaggctgcaggagtgcatttccacccagggtgcactcagcgagtggaactccacacccgtttctttggagtcaaggcgcgacctctcagggaggagactgctcctggttgcccactgccgggtcatcccagcttgcagtggaaccctccgcagcctggcctcttccagggtagcccctcactcccctctctcttgtcctaggataaggccgaggaaggctgacgagttccagctctggggatgccctatcagctgtgtcaccttgaacaaatcatttctcctcttgggtctctgtttcctccagtgtgaaacgtggtgaaggcatgaggggctatgggagccccaaggcctctttcagagatctcctctgggtcccatgtgaccccgtggctatccccaaaggcaagagggtccccagccctgcagccaaggccctgggacaccctttctaaacaagtgcaggtctctgacgggctgagctttgctcgcttgggtttctttgcttttttcctttttttatctttcctgaatgan

SEQ ID NO: 19109 - DNA, 613 bp, Homo sapiens
  misc_feature 612, 613: n = A,T,C or G
ccacgcgtccggtgggaagccagaagataaaaccaaatggctgggcagtctttaggttattcctagctaagagttaagagttgtaagctctctcattctttgttcttcagccttaaactatctttccttctattaactttatttgtctcagttacaatgatagaggtaacttcacatactaaaagaaattaggttaccatgtgaaacattcttcttggcttgtgctaatgttatcagatccaaacagcatctgaaagaaaattttccaagtagatgttgttctcttgttttctgaaatacatatcatatgttaaagtgagagtttttatacatgttgaaagaagttgaatgacataacaaatagttactgaggcctccattttcttacttcacagttaaaattcctgtttctctttgggtataggaggtagaaagaagtgggagagtaatagcattttaaaacacagaatcaaaaatacatattaaaagtagaacttaggcccaggcacagtgactcacgcctgtagtcccagcaccatgggaggctgatgcaagtggatcgctcgagcccaggaattcgagaccagcctgggcaactaggtgaaaccctgnn

SEQ ID NO: 19110 - DNA, 2100 bp, Homo sapiens
  misc_feature 1, 2079, 2080, 2081, 2082, 2083, 2084, 2085, 2086, 2087,2088, 2089, 2090, 2091, 2092, 2093, 2094, 2095, 2096, 2097,2098, 2099, 2100: n = A,T,C or G
ncgtaggatgggcgcgaacaatggcaaacagtacggcagtgagggcaaaggcagctcgagcatctcatctgacgtgagttcaagtacagatcacacgcccactaaagcccagaagaatgtggctaccagcgaagactccgacctgagcatgcgcacactgagcacgcccagcccagccctgatatgtccaccgaatctcccaggatttcagaatggaaggggctcgtccacctcctcgtcctccatcaccggggagacggtggccatggtgcactccccgcccccgacccgcctcacacacccgctcatccggctcgcctccagaccccagaaggagcaggccagcatagaccggctcccggaccactccatggtgcagatcttctccttcctgcccaccaaccagctgtgccgctgcgcgcgagtgtgccgccgctggtacaacctggcctgggacccgcggctctggaggactatccgcctgacgggcgagaccatcaacgtggaccgcgccctcaaggtgctgacccgcagactctgccaggacacccccaacgtgtgtctcatgctggaaaccgtaactgtcagtggctgcaggcggctcacagaccgagggctgtacaccatcgcccagtgctgccccgaactgaggcgactggaagtctcaggctgttacaatatctccaacgaggccgtctttgatgtggtgtccctctgccctaatctggagcacctggatgtgtcaggatgctccaaagtgacctgcatcagcttgacccgggaggcctccattaaactgtcacccttgcatggcaaacagatttccatccgctacctggacatgacggactgcttcgtgctggaggacgaaggcctgcacaccatcgcggcgcactgcacgcagctcacccacctctacctgcgccgctgcgtccgcctgaccgacgaaggcctgcgctacctggtgatctactgcgcctccatcaaggagctgagcgtcagcgactgccgcttcgtcagcgacttcggcctgcgggagatcgccaagctggagtcccgcctgcggtacctgagcatcgcgcactgcggccgggtcaccgacgtgggcatccgctacgtggccaagtactgcagcaagctgcgctacctcaacgcgaggggctgcgagggcatcacggaccacggtgtggagtacctcgccaagaactgcaccaaactcaaatccctggatatcggcaaatgccctttggtatccgacacgggcctggagtgcctggccctgaactgcttcaacctcaagcggctcagcctcaagtcctgcgagagcatcaccggccagggcttgcagatcgtggccgccaactgctttgacctccagacgctgaatgtccaggactgcgaggtctccgtggaggccctgcgctttgtcaaacgccactgcaagcgctgcgtcatcgagcacaccaacccggctttcttctgaagggacagagttcatccggcgttgtattcacacaaacctgaacaaagcaaatttttttaaaagcagcgtatgtaagcaccgacacccactcaaaacagctctttcttccgggaaggttattaggaatctggcctttatttttcctcatttctcatgggcaacagaggccaaagaaacgaagcaagacaaacagcaaacaggcatcttggtcaggtcatttgtaggcagtttctcttctcacaaaagatgtacttaagcaggctgatcgctgttccttgagcaaggcgcttactctcctccgctcaagcccccaaagccgccctttccctcgcacacaggccccacccccacagttccacgccccccccaccaaggccacaccctccctccctagagcagcagcgaggatccatcatcagaatcacagtgctctccagacctcctctctaaactgcttcattgacctaagtcactctcttcaatcccacacccatgggcttcatcttttgcatcaccaccactcctgaaccccatttctgatttgtcagaatttttttttacaaaactaaaatgaaacacatgtgtctgtggtatcnnnnnnnnnnnnnnnnnnnnnn

SEQ ID NO: 19111 - DNA, 510 bp, Homo sapiens
  misc_feature 1, 505, 506, 507, 508, 509, 510: n = A,T,C or G
ncgtccgccaggtctgtgaaggatccacagactggcatatgcaggaggaaatggggcgggcgacgagtaacgtccccaaaaagcaggggtagggaagggcccgcccagcgccccactgtaataggggcctcatcaatgccccatgctcactgaataaagcactgccagcgaaaggtgaaaagaggaacaaagaacattctcctggacgccacccacagaaagccacgtgcaggcttggccctcaccttggggaccttggacacggagctggttatgtcacatctggctctcagagctggggcagcgtctaggaggcctgatgtagaaagcactcagctaagccctagttaccggcacacgggcaccagcgccccctctcagcaaactccacgtcttatgaaattagcactggatttccacttcaattggaaaatattgccaagctcggcaagatgtccgtgaaggagggcgcacagcgcaagtgggcaacgcttgaagagaagcnnnnnn

SEQ ID NO: 19112 - DNA, 1344 bp, Homo sapiens
  misc_feature 1, 2, 1342, 1343, 1344: n = A,T,C or G
nncagccaagtgtctggcgtacacgcttggtcgctcctgcttttgactgggaattcctgggacgaattctgtttcgagggtgtcttcgtaaccccgtgagctggatataggcttgggataaaggccctggagatgccaagtagttttgtgttgggcttggcatctaatgtgtaaataagacgtccagggtacttcaggtgccccagagcccattgcgggaagtgtcagaagtgaatagggatgtagtccaaccttgctgcatgctaaggataaagttctaatctgtgttgttctggctattgtactaaactcagtaatcgtaggttataagataaagcctgagactgtgatctcagtcatccagcccgattgccagccacgatgaagtacttaaaactctgtgtctttgtacttgctgttctcttggcctccgattccgtgttcatcttttccattcggtaaagtttgtttatcccacaggccccatcttggaagcctccagcaacttctccagacagaggtgttagcagtgtaggatcagatttctcaaccacgtcactcccatgtctgggtagatatctctgcccaagtgttctcatagcacttgagcagtactctctaagcgcccaggatctaccatgttgcttttttaaaatttgattaatttatgttttttatactgctccttgtggagcaggagtgttcccagagtagcccaccatgttatattgaaatggatctgtgtgcataatgcagctgtccatctacatcgtatatttttgtctcctcaagggtagggaccacatgagccttacttcttggggctttgatctctacatgatgcagacttacatctattactgtaacccaagtctgcatgagggcagaatccagaaggaaaaggaatcccatggctgtgacttgccctgttatcctaagcacagatgtgttctgtagtcctgggctgggagcctctgccttggcctccccagatcaaagtcttctgaccccactggagcttccccacatacatgttcatccttcccctgctcttagaagttggctttgcaaaacaataggttgggtggtgggaagatgtcacaggcatattcactggcctactttacagggcagtatgtaggtgtctgaggaggtatctgtggttgagtaaagctcctaggagttcttttagaaatacaaagaaggcagaaaggctgtcacaaaccttatcaagagtcttactctgatgtcagcttgtatatcactgatgtctggtctgaatttgactataccatgcaaactacttttagttagtaaagttagtttgtttaacaaacaacannn

SEQ ID NO: 19113 - DNA, 923 bp, Homo sapiens
  misc_feature 914, 918, 919, 920, 921, 922, 923: n = A,T,C or G
acctgcccattaatatttttgctttgattctagcaatgtgtatgtatctgtataaaaaataaaataatgaaagcaacctaaaaataggatgcaccaatagcatgtggttccaagtaagttgtgatttttattttgagacagtgttccactggaagggagggaagggcttacattcacagacagtaaagcagggctgtgtaaggagctacatttacttaacagtctcctttccagctaggtttgttttatttatttgcaagtcagctaagaattaaccttttaaaccatctaaaacaggcaagcaatataaagatttctactagtgcaaggtaagtggtttgaatatacaagtgccctttcctgccacccagtctcactaccgttttagtcctgcagctgggtaaagccactattgtgtggaaactctcccatgtgccctgtctctacctctggacacaccagctccttcttccacctattctattcctcagttaagccaagtgatcagaagtagtattaaatgggtagataattttaacaggatgcctaatgtgaaataaggagttatttttactcttctactatagaaagcctaaggtaattcttaccatctcaaagactgagtattccatttaggtttggagaccacttgtgctgtgctgcctgatatttaccaaacttgaataagtgttcgtcaacttgatagtgaatgtaccccttctcaccttatattttgattaaatcaattaactataggtcatctaccaagaatgtaatccaagcggttgataaaacattattaggcagatagattattgattattaaattttgagcagtgcaaaaacggttttgctgcttggagttcagattcagtccctcaaagagtttatgatcactgaaatacactctgaangtannnnnn

SEQ ID NO: 19114 - DNA, 3673 bp, Homo sapiens
  misc_feature 1, 3662, 3663, 3664, 3665, 3666, 3667, 3668, 3669, 3670,3671, 3672, 3673: n = A,T,C or G
nccagagagacacaaaggcagattcgtgatgtatgactcgtatgatcttctgtttctctgctttggattcacatttttgattcatggtctcttgctggcacagcttctcttttggcatctttgcttcctcctggtctgttatgtagtgtgtctgtctaatcgttctctcgcgctctttttccggggacttaggtaatccccgcttcggagttccggggaataaagggggagcgcaaaattctgatgccccacgctaaagttgtgggaacgcgccgccattccagccctgcccggcgccaactacgcaaagaccaagcgggctccgcgcggaccggccgcggggctagggacccggctttggccttcaggctccctagcagcggggaaaaggaattgctgcccggagtttctgcggaggtggagggagatcaggaaacggcttcttcctcacttcgccgcctggtgagtgtcggggagattggcaaacgcctaggaaaggactggggaaaatagccctgggaaagtggagaaggtgatcaggaggccggtccactacggcagtttatctgtctgatcagagccagacgcgacgcgtccacttcgcagttctttccaggtgtggggaccgcaggacagacggccgatcccgccgccctccgtaccagcactcccaggagagtcagcctcgctccccaacgtcgagggcgctctggccacgaaaagttcctgtccactgtgattctcaattccttgcttggtttttttctccagagaacttttgggtggagatattaacttttttctttttttttttccttggtggaagctgctctagggaggggggaggaggaggagaaagtgaaatgtgctggagaagagcgagccctccttgttcttccggagtcccatccattaagccatcacttctggaagattaaagttgtcggacatggtgacagctgagaggagaggaggatttcttgccaggtggagagtcttcaccgtctgttgggtgcatgtgtgcgcccgcagcggcgcggggcgcgtggttctccgcgtggagtctcacctgggacctgagtgaatggctcccaggggctgtgcggggcatccgcctccgccttctccacaggcctgtgtctgtcctggaaagatgctagcaatgggggcgctggcaggattctggatcctctgcctcctcacttatggttacctgtcctggggccaggccttagaagaggaggaagaaggggccttactagctcaagctggagagaaactagagcccagcacaacttccacctcccagccccatctcattttcatcctagcggatgatcagggatttagagatgtgggttaccacggatctgagattaaaacacctactcttgacaagctcgctgccgaaggagttaaactggagaactactatgtccagcctatttgcacaccatccaggagtcagtttattactggaaagtatcagatacacaccggacttcaacattctatcataagacctacccaacccaactgtttacctctggacaatgccaccctacctcagaaactgaaggaggttggatattcaacgcatatggtcggaaaatggcacttgggtttttacagaaaagaatgcatgcccaccagaagaggatttgataccttttttggttcccttttgggaagtggggattactatacacactacaaatgtgacagtcctgggatgtgtggctatgacttgtatgaaaacgacaatgctgcctgggactatgacaatggcatatactccacacagatgtacactcagagagtacagcaaatcttagcttcccataaccccacaaagcctatatttttatatattgcctatcaagctgttcattcaccactgcaagctcctggcaggtatttcgaacactaccgatccattatcaacataaacaggaggagatatgctgccatgctttcctgcttagatgaagcaatcaacaacgtgacattggctctaaagacttatggtttctataacaacagcattatcatttactcttcagataatggtggccagcctacggcaggagggagtaactggcctctcagaggtagcaaaggaacatattgggaaggagggatccgggctgtaggctttgtgcatagcccacttctgaaaaacaagggaacagtgtgtaaggaacttgtgcacatcactgactggtaccccactctcatttcactggctgaaggacagattgatgaggacattcaactagatggctatgatatctgggagaccataagtgagggtcttcgctcaccccgagtagatattttgcataacattgaccccatatacaccaaggcaaaaaatggctcctgggcagcaggctatgggatctggaacactgcaatccagtcagccatcagagtgcagcactggaaattgcttacaggaaatcctggctacagcgactgggtcccccctcagtctttcagcaacctgggaccgaaccggtggcacaatgaacggatcaccttgtcaactggcaaaagtgtatggcttttcaacatcacagccgacccatatgagagggtggacctatctaacaggtatccaggaatcgtgaagaagctcctacggaggctctcacagttcaacaaaactgcagtgccggtcaggtatccccccaaagaccccagaagtaaccctaggctcaatggaggggtctggggaccatggtataaagaggaaaccaagaaaaagaagccaagcaaaaatcaggctagagaaaaagcaaaagaaaagcaaaaaaagaagaagaaacagcagaaagcagtctcaggttcaacttgccattcaggtgttacttgtggataagcacaaatatttcctgtttggttaaactttaatcagttcttatctttcatctgtttcctaggtaaaccagcaaatttggctcgataatatcgctggcctaagcgtcaggcttgttttcatgctgtgccacctggtgccgaactgccacctggccgccacactgaaaactgtcctgctcagtgccaaggtgctactcttgcaagccacacttagagagagtggagatgtttatttctcttgctcctttagaaaacgtggtgagtcctgagttccactgctgtgcttcagtcaactgaccaaacactgtttgaattataggaggagaacaataacctaccatccgcaagcatgctaatttgatggaagttacagggtataccatccgcaagcatgctaatttgatggaagttcacagggtagcatgattaaaactacctttgataattacagtcccaagatgtgtcacctcaaaggcttgaagaatatatttctggggtgaattctcgtatgtctgtcatattgacactttgggttttttaacttaaattcctatttatatatatatatattgttcttttcctgtgaaaagctggttttcttcacatgtggaacaggttcaccttcattaccatgcgtggggaatgggcactaagaaggtgggcactggcccaagagtggtattatcaaactctttaagaattcggttaaacccatctttttcgaaacttgggtgtcaagcggcgacatatttcgggcaagaaaatttcccgcgaaaaannnnnnnnnnnn

SEQ ID NO: 19115 - DNA, 3520 bp, Homo sapiens
gtggagcccccaggaactgctcctctccctctactgctcatctctgcttaccttgttttttagtggattaatccctcacctggtgggcgatgtggttttcttgtggggctgtaacctgctggcccacttcataatcctacctggtggatgacagcgtgagtgacaccccaggggggctgggaaacgaccagaatccaggttcccaggttggttggaacaaggacttgtccttctttccgtgtgctgctgatgcccagggtctgggacaaactcaaggattctgggattctgagcatcaggccgggagggtgagagaggacctctcattatccctggagtcatctttgtctaaggggagaatggcctcaagaggcgagattccagattagtacccagacctgggaggaattaatggaatgcttgtccctgggcagccttagaaacagaccccagcttatctaaggctgctccgaggcagtgacccaactagggctcaggaagtcagaagatagaccagctaatagtgatcacctcttgacctttgtgtcacgtcttttgctttttaaaacccttttgtgaacgttatggcctttgatctgacggcatcctagttgtgaagggaacagggcaggtataatgttcgtttaccaatacagaaatcgagacccagagatcacaaattctggagaggctctgggctctccagagtcactcagctggaactgacagggctggaattagatccctggccaggccaagggtgcattcctctgagttttttcagatctgctaggaagtgtacagtccgatacaccctcctattttgttagctgtggtctacacagcctagtatacatagacctttcagcaggtcgggtcaggcataggaaggcctggtccttctacacagcacttgttgaggaaggccatccaggtacctgaggggttgactggttctgcctgaaccaagataagaggtagggagcagcgatggctgggaattgcagtgtccagacattctcacagtggggatcaccttcaagaaggatggcattccttcttgaagtggctttccctcccaggaggctaggagggcctggggacgtctctgccagaatcacctgggtgggaagggggtcatgttcagcatgtgtgtgtgtgtggtacatgtctgttctgtgtggtgaggagtgccccatcccagatgggagcctctgcttgcagggagactggccacttgacctgggcaggtgagtcttcactggcctttcaatgtaagcaaattaaagtggctccatagagacccaccccatctgcaatcacagtggtacattcctgcagttctgccccttctctgggggccttgtgggtgggtaagctgctgctgtcacatacagagcaagggtggccaggagtgcaccgctaagtggtttctcatctaggtgggcagctgtctgaccagaggctgccgtgcttacatcagcaacaacagcagtcaacagatttgtctaaagtgtttttcgagtgcttttctgtatgtggcttaaaggccgaggtgaggctgccgggctgtcaaagccactcaagcagacatctgagcaaatctctgaccaagaacccaggccatcgatctggtgggatggccgctccacaggaagctgagggtcggggagtcacctttcctcactaggagctgtttgcttcagcaaagcaggatttgaggagttggggtctgaagggggaaaagcttgctgaggtggaggtggcgataagcctggacttgccctcacctcaccccacaggccaggattcgtctttgggtttcagggtgcatgtctgtcttagcactgactgcgtgccaagccctggatgttgatcaggcagacacgggctcagcccttgaggctcacagtccggtgggttgcacaggcagcggcagctgatccctcttaccgggtctccttctcgggactcccttcagtccacttaccccgtttctgccccccaggccttctctgggcagtgactgtgagggctgacaggaaaggcatgtgcagcgtgcttgtgaggagctcagcacagagggtggggtgagggcatgtgttgctgaagtctgcatcctgaggtgcctgtggcaaaccactcttcccttctgtctcctcagttcagccaggccctggccatccggagctataccaagttcgtgatgggggtaagttgtgccagctgtccttccttcccactgccttgcggacccaagcggggcctaggaggccaaccctggtaatggctggaggcaggtcttggtacagggtgttggcgtggtgtgtccctgctccctgggccggggtgggtcactggcactcaggcctctctgggtttcagattgcagtgagcatgctgacctaccccttcctgctagttggcgacctcatggctgtgaacaactgcgggtaggtgtgcgcccctctacttgccactctacctaccaaggctgtggggtgggggagacccaccgagcccttccagcactctgccccctcccacctgctctgtgtgtaggcttggcctgccaggcaccctggcttccgctgggatttcccagcaccccctggggtaaactgtggtgtcaggggtcagggtgtggatgggtggtagcctgaaggcattccttcttgaagtggctttcccgtggctggctgtcttccactgttctctgcatctacactctccttctccggcaggctgcaagctgggctccccccttactccccagtgttcaaatcctggattcactgctggaagtacctgagtgtgcagggccagctcttccgaggctccagcctgcttttccgccgggtgtcatcaggatcatgctttgccctggagtaacctgaatcatctaaaaaacacggtctcaacctggccaccgtgggtgaggcctgaccaccttgggacacctgcaagacgactccaacccaacaacaaccagatgtgctccagcccagccgggcttcagttccatatttgccatgtgtctgtccagatgtggggttgagcgggggtggggctgcacccagtggattgggtcacccggcagacctagggaaggtgaggcgaggtggggagttggcagaatccccatacctcgcagatttgctgagtctgtcttgtgcagagggccagagaatggcttatgggggcccaggttggatggggaaaggctaatggggtcagaccccaccccgtctacccctccagtcagcccagcgcccatcctgcagctcagctgggagcatcattctcctgctttgtacatagggtgtggtcccctggcacgtggcaccatcatgtctaggcctatgctaggaggcaatggccggctctgctgtgttttctcaacactactttctgatttgggggggccctggctctgatgggaatctgcattctcgatgtgccctcatcaaggcacgttaggggcccggcaggatcggcgggggtgaccaggggggccgtc

SEQ ID NO: 19116 - DNA, 564 bp, Homo sapiens
  misc_feature 1, 2, 43: n = A,T,C or G
nnagcacttagcctccatgccatctggcatttatttactatanactcccaagtatctgttatttattcatctaaaaaggacgtaaccaaaccaaactcaggatttcataaaaaggaaggtctatgaggcagttactgtgtcagaaaatctttacagaagcagcagggggcagagacagcactgggatgccactgggaagagacatgggattgaaaagggcacatcatgtgatgtgacagtctttctttggtttccattcaggatttcttacaatctccagctacaacctgcttagcttgctactcagtacgtgaattaggatgcaggcaacacacctcagaaggcaggaagaaaaaaggcacagctgataatcaagtcgttagagtcaaccatcattactaaagccaactctccacccagcgcatctaagcctgtgcctcttcttgccaccctagcatctcctaagccagatacagcaaatgaatgccggaagctcactatcagaatgttccaagacctttccataataaaaaataagtatttttttttaatgtgccggacgcg

SEQ ID NO: 19117 - DNA, 1540 bp, Homo sapiens
  misc_feature 1, 2, 13, 1539, 1540: n = A,T,C or G
nnagcgtccgggntactgaggccccacgcggctgtcgcgagggcgggggtcggggctgcaggcggggcagggctgggtgggggcgcgcgacgcacctgcctgcttcctgcacgggtggtccccaagcactgcggggccccagcccaaagcggaccttgactaccgcccagccccgcgctcccaggacctcccgcccgcggagcccactcggattgctctccgcccgggtcggcggaggccccgtctcctgtacccggcgctgggactgctccgcaccgcgcggctccctttcagcagctgcgggagcatgcggaggaggccctgccggccccgcgggtcatggaggagttccggcgctcctacagccgcctgtgcagggagagtggggccgagccccaggaggctgtcctgcagcagctgcaccagcttcccaggggccggctggacctggccacgcaaagcctgacggtggagacctgcagggccctgggcaagctgctgccgagggagacgctgtgcacggagctggtcctgagtgactgcatgctcagcgaggaaggggccacactgctgctccgaggcctgtgtgccaacaccgtgctgcgctttctggacttaaagggcaacaaccttcgggctgcaggggccgaggctctgggaaaactcctccaacagaacaagtccattcagagcctcacgctggagtggaacagcctgggcacgtgggacgatgccttcgccaccttctgcgggggcctggcggccaacggcgccctgcagcggctggacctccgcaacaaccagatcagtcacaagggcgcggaggagctggccctagccctgaagggcaacaccaccctccagcagctggacctgcgctggaataacgttggcctcctggggggccgggccctcatgaactgtctccccagcaacagaaccctgtggagactggacctggctgggaacaacatccctggagacgtcctcagagccgtggagcaagccatgggccacagccaggaccggctcaccaccttccaggagaaccaagcccgcactcacgtcctcagcaaggaggtccagcacctccgggaggagaagtccaagcagttcctcgacttgatggagactattgataagcagcgagaagagatggccaagagcagcagggcgtcggcagcccgtgtagggcagcttcaggaagccctgaatgagaggcactccatcatcaacgctctcaaggccaagctgcagatgacagaggccgccctggctctgtcgtgagcagaaaggcccagggacctgggggacgtcctggcacagggggagagaagttgagctggcaagaaggggagcagggcgcagcttgaggaggaagtggaagggagtcaacctcaagatgtggggcctgaaaaaccgttcggaacggaaagtggcggggacggaggcggccaagggaggccagcgacggacacggccgtggaaatagcgggagagaggacaaaacaaagaggggaaaatgagaggagggaacann

SEQ ID NO: 19118 - DNA, 1329 bp, Homo sapiens
acaccacctgagtccagaaagggaggtgtcaacaaaagaagataagcccatacagtgcacacctcagaaagccaagccaatgcgggcagctgctgacctgggagggagaagatcctcaggccaccagtagaaaaatggaagagacaggatgacaaagacttaagagaaaaacgttgttttatttgtggaagagaagggcacattaaaaaggaatgcccacagtttaaaggctcttcaggcagtgcttttacatgaagacaaaaagaaacaaaaaacaacaatatttttgagtccccagtcaggtagcctttccagtaaatatatgactcagggaaaagcctcagcgaagaggacccagcaggaatcatgagggaaggaaaatgcagcactctaaatggccactcaggcgttcctattcactcggaaaattaggttcatttcacaggacacagcagtgtagatcaggcttcaacttaacatttaagggaaatgtcagatttttttttaatttaatgaaattgttaatgaggaaaaatttttaatatagtcttatctaccacacatccccatagatttaaggattttaatagaaagtcatgatgtatgtatttaagccacgttaaaagaaaaaatataactatggaccggtattcagtgaatacagtttcatggtttttaattctttcaaagcacattaaaaatggtgtgctgataaaccccaagtaaattaaccctttttccgtataaatccattttttgttttgaagaggggaaattatatttattgttgtttactgaatcctggtgtgaaagcatatcagatatgtatgaactgctactgctgtacttccgatttacggacatcattttattgctatttgtagacgtgataacatgaacatgagtacctatttatgtgggccttcagtggatgggcagtgccactcaggtctctggggtttccctctctaattttaagtaaattgacatataactactatgcttataaaaatgaagtaaggaaaacaagtagtcctgtttgccactaaaaacattttcaaaggaaaaataaaatgaaagtactttttactttttatgatactcagaaattaggatgaagaacttttaaaattgctgaagatcaaagaggttatctctgccagtcacaagtgtggctggtgtcattctgggtctgactggagccctcctggactgtttctttaatttcaaaagccctgcagacatagtacctggtcagaactatgcctcggtttatttatcattttgaaataaaatcaaaatttcaacctgtaaaaaaaaaaaaaaaag

SEQ ID NO: 19119 - DNA, 1785 bp, Homo sapiens
  misc_feature 1783, 1784, 1785: n = A,T,C or G
acgcgggtctgcgccacgcgtcctggcgacgcggggccatgtgcaggaccctaacgacaggcgcctccggcccatttacgattatcttgacaatggtaataataaaatggcaattcagcaagcagataaactgttgaagaaacataaggatcttcattgtgctaaggttttaaaggcaattggtttacagagaactggaaagcaagaggaagcctttactcttgcacaggaggtggcagcccttgaacccacagatgacaactcactgcaggcactgactatcctttaccgggagatgcaccgaccggagttagttacaaaactttatgaggcagctgtgaagaaagttcccaatagtgaggagtatcactctcacctcttcatggcctatgccagagtgggtgaatacaagaaaatgcaacaggctggcatggctctatataagattgtccccaaaaatccctactacttttggtctgtgatgagcttaattatgcaatctatatcggcacaggatgaaaacctctcaaaaacaatgtttctgccccttgctgagagaatggtcgaaaaaatggtgaaagaggacaagatagaagctgaggctgaagttgaactttattatatgatcctggaacgtttgggaaagtaccaggaggccttggatgtcatcagagggaaattaggagagaagttgacaagtgagattcagagtcgggaaaataaatgcatggctatgtacaagaagctgagcaggtggccagagtgcaatgccctttcccggcgcctcttactaaaaaactcagatgactggcagttctatctgacttatttcgattctgtctttcgactgattgaagaggcctggagtcctcctgctgaaggtgaacactctttagaaggagaagtacattattctgcagaaaaagctgtgaagtttatagaagatcggataacggaagaatctaaaagttctcgccatctccgaggaccacatctagctaaattggagctgattaggcgtttacgaagtcaaggttgtaacgatgagtacaaactgggtgatccagaagaattaatgttccagtattttaaaaagtttggcgataaaccttgttgttttacagaccttaaggtgtttgttgacctcttacctgctacacagtgtacaaaatttattaatcagttacttggagttgttcctttgtcgacaccaacagaggataagctggcactgcctgctgacatcagagctctgcagcaacatttgtgtgtggtgcagctgacgaggttacttggcttgtaccacaccatggataaaaatcagaaattgagtgtggtcagagaattgatgttaaggtaccagcatggactggaatttgggaaaacctgtttgaaaacagaattgcaattttctgactattactgtctccttgctgtccatgcgcttattgatgtatggagggaaacaggtgatgagaccactgtgtggcaggccctgactttgctggaagagggattaacccatagcccttccaatgctcagttcaaattgctgcttgttcgaatctactgtatgctgggtgcatttgaaccagtggtggatctttatcccagctcgatgcttagcatatcaggcatgatacatggttatctttggcccgaatatgtgattctaaggcagaaggtggcggccaaccgtacttcgaccagttttcatccacaaaaaaccgaaaattatacatcaaatggggtggaaccagaatgctcagaaggagacactcannn

SEQ ID NO: 19120 - DNA, 637 bp, Homo sapiens
  misc_feature 1, 2, 3, 4: n = A,T,C or G
nnnnagatcgacccacgcgtcctcccggagccgctggcggctcgggcgcctgcaccccgctgaggagctccggagggcgccggggtggcggagccggaggcggccggcaagggcggcgtgccggcgatggagcgcgcggtagagccttggggcccagatctccaccgcccggaggagagggagccacagagaggcgcccgcacaggtctagggagtgagaacgtgatttctcagccgaatgagtttgaacataccccacaggaagatgacttggggttcaaggaagaagatttggctccagatcatgaagtaggaaatgcctctctcaaacctgaaggcatccagaactgggatgacttatgggtccagagagagggtctaggaaagcctcagcctcgggacagaggcccccggctcctgggtgaaccacgctggggccaggctagtagtgatcgggccgctgtgtgtggtgagtgtggcaaaagcttcaggcagatgtcagatctggtgaaacaccagcggacccacacaggggagaaaccctacaagtgtggggtctgtggcaagggctttggggatagctctgcccggatcaaacaccagcggactcatagtgggggagaagccctatagagcc

SEQ ID NO: 19121 - DNA, 1598 bp, Homo sapiens
  misc_feature 1, 1598: n = A,T,C or G
ngcccgcagtaagaaacccaaactcttttctcagagagtttgtagcctagtttgggatagataagatccacatatttagtcatataagactacaggagagtagaatagatgcaccagatggtgtcgaatgaaagtggtactttgtagactataagtgctgtaaattctaaaggacaggttacttttgcctggagtggtcaagaaagattttatttaaaataaggatttgacgggcagacttagcagtcaaaagggagaaagcgggtaaaacaaatgtaagccatcataagagtgcatgtggtttggaagcatcagggaaaagactagccaacctgaagtaaaaggttcgtgcaaattgggcaatcaatagcattaagttggaaacagcttggggacagacacataagagggccagagtgtgaataatttcatctaatactttatagcacttggacatttacagagcacttttctcaattcctaaaataccttggtaaatcaaaagcattctccattttaaaaatgagaatactcttgcctatggagatggcaacatagctataatcccacacaaagaaaaagaccagtaacctaagtgcaggtcttttgacttctagtcctggccattactctagtgatcctccaactttgatgaacatcaaaatcatgtttggagcttgtttaacatccctgaatcccactcacattctgcttcattaggcctaggatgggagttgagaatcttcatttttatagctccacagttacttaatatactttaaaatttgagaagcgttgagttgaatgacagctgacttcatggctgtctgcgaagtggggaagcctgaacacagtcctataaactaaaggccactgcagacttttagcacaaggagatccttacagggaacatgtgccatcagctctttggagtgaacaaggaattagacccccatcatgccaaaaaactaggatttttaggtggtctttccatcccttcagatttaagtattcaaagaaagagagacagacctacattccaagggtcttctgagtgcaaggccttgtgttgtttgtttatttaggggagggcctggtgctcttctctgttttatgctttaccttcttttatttctcagatctcatgttagcactatgttctgaattccctaataatggctcttgagaactgatttacattttgttggtttgtttacttcttgagcacataaaaggaccccaaattagagatactatcccttgggcttctgaaaaatgaatcaaccaaaactggttgactctaaccttgccttgctgagtaaaaattctgctttggatgagaacctgtcttgattattttagtggacaacagataagccacatggaagtacacatggctcctgatctgtctttttatttacagaaatcattcttaatctctactgagatggcctgttatttccttccttttctaccctgccacagcaaactccacagtttctgggactaacttcctactacaccccaacacaactccagtcctctcttctcttcacacttctagctggttagtgggtttgaagtggtgagacagtgan

SEQ ID NO: 19122 - DNA, 924 bp, Homo sapiens
  misc_feature 919, 920, 921, 922, 923, 924: n = A,T,C or G
cgtccgccttactctctgccccccccattcgtcctcttgattctctgcttctctagctcagccgctgaccttcgtgcctagccgccactagtccttgaccagcgttctggcaactcttgcctccaagttcttccagctccaggctgagcgatggggattcagttttctgacatcacagctcagttcttgatttctgcagcaaaaccttcaaggcttccatcacctcggctctagagtccatcatgctcctctcctatgacctgctagggctgatcaaacgttctgtctcctgccgtgccctgccctgccctgccctgagcttcgcttagcctgttgcaggctttgtgttttccttcttgtgctgttgaccacgcagctccttctacccataaaacccccttctctaggtcggtggaaatcttgttcatccttccgtgtctagttaaactgccacctcctccacgaagccttctaaaactcctcctcagggaactgttttctttctttagatttccatcacaataatgcttaccttttattgagtgcttactctatgtcaggcagcccttgagatgcattacctctttaaatgctcacagttaccctgtgaggtacatgcttttcttatacccattggcgaatgagagtcagatttaaaaatgcatgtaatcccagcactttgggaggccaaggcgggcagatcacgaggtcaagagatcgagaccatcctggccaacatggcgaaaccctgtctctactaaaaatacaaaaattagctgggcgtggtggcgggcacctgtaatcccagctacttgggaggctgagtcaggagaatcgcttgaacccaggaagcagaggttgcagtgagccgagatcgtgccactgcactccagcctggcaacagagcgagactctatcnnnnnn

SEQ ID NO: 19123 - DNA, 1701 bp, Homo sapiens
  misc_feature 1, 2, 3, 1701: n = A,T,C or G
nnnaccatgaagtcacgggccgccttaagcctggtgtgcacacccctcctcagaggcccccctaacttccgatatggttgaaacccatccgcctcggaccctgtctagccaaacctgcattagccaagccgcccccacattaatatcggtaggacttcgatttaataacagtccgggcctactcatgcgaacccactctcactggctttctccactgcacagcagacgttactctgatagcttgggaagtgggactccacgcagcgcagtgctcttttggcacaggctctgagcatgcgcacatgcatgggatcagagctggtccatgagcctcatgcagcctggaagccctgctcaccctgccccactggggaacaccacaggctccttgttgcttctgtcccttccctcccctcccttcctcattttctgcaatgttgtgtgccttagagcctgctttgtttgcttttttacctctccctactggtgatctgagttcttctctctctgcactcacccactagaagaactgagtgagttctgggctagtttctgcctcagcatggtgtcccctccccatttgtcctaactgtgactaaagggacatagatggggaagaggagacaaaggagcaaaacactcctgtgtttgtgatagtgcgcttctaggaaagacacaggaatttgtccaatgtttgcaccaataggctacaaaccttctggctccctgctgtccgcaggggctgtgcctgcctctttctaggtctttgagacccaggtttgggagggaggaagctcttcaagggagcccccactgtctgcctggcctgctctgcaacctcctttagacatctgtcctttcctttcccaacatcctgtcctccagctaactgaaagagaaaacacgcgcaccgtccttatgcttgaaggtggaggtggaggaggttggaagggtgtgtgtggagtggggagggggaaataaataaataaaatgaagaaagcttaggttctgtccgaggtggttgcgtgagtccttcgtgtggccagggtagagtttttccccacaccctatcttcacgctttgccacaagttccacagcagcgagatttaaactggctgagttggcagagtttcagctgtttcaccttctcgcagtacctggtggtgtctctgcactccatgttttcacatggggtgatgttgcagcgctgccagttggcaggccggggcccccaggagcacaggtgctcaggcactgccttgttggtgcgggcatgcacacactccacacgccgggactggaagccgtagttgccacaggtagctgtgcacagggtccacaggctgactctccagtgtacactgcaggcctctgaccagcagttctgggtgctcacaggcctcggaagagcactgcactgctctgatggtaaggtgatgccatcccgtgtctggcagaagacttgtctgtgttgcacagctaggtgaggcccgatgcaaggcccattgcactggccccagctggagaaggcccactccacacacagctgctggttacaggcctgggtgtccacaggccgcttggcgacctgggtgcacatgtcattggacacaggggtggagatcccagaggctttcagctttcagtcaccctgcgggtctgacacctcccccacagagagagcatcggtaccgatatgn

SEQ ID NO: 19124 - DNA, 1045 bp, Homo sapiens
  misc_feature 1044, 1045: n = A,T,C or G
cctttttttttttttttttttttgattataaaaacttcaatgaatatgaaaatttatacctaatgagaacagaattcaacaagtgacacttgctaactaaaataaacaagactaataaatacacaacataaatgcatgaatgtgtaaatgacatcaacctgaaaacataaaagaaaatgtcaacgaacacatctctggatcagtaagtagcacatgagtgaattccctactccagctcccttactggttgctttgtgaaccaggcagtgggaggaaacagggcccagccagggtccctcgtccttctcttgcttccaggcaggtcctgcatccactcctgctgcaagaagggctcccatccctgccttgggtctttttcacaggtgtcacccttacactctctgccatgaccaccttacgtgggtggggctgaggttgccttgaccaagaagtgcatcacccatctgtgtgccccaacaccagcagtcaggaggcatcaagaaatagggtgaggaataacccacctcttgcatgtccactttcctggttcatttattcttcattcattcagtccacacctccccagcagtcactttacgccagaacctgactgactgggattcttcaaaatcagaaaacctccaagcactctctatcccctcccgaatatcacacttcagctctgtgtcatcacatgaaggctccaactcttcagggcagatgttcccccacagggtcagcccctgaaggtcagtgccagatgtcccacctccatcccttcccagtcctttctgttctgctgtgaatctgtcagtcatcaggagctagcagggaaaggggacaaggaggggagattgtcttcatgccgtgccaaggcattgagacagacctctctttctccctgaacctcacactttatccgctcccagacacatgaaataaaacagactagaagtgtctgtttaaagagtaaacatctatggtataaaattacacacccataacagtagacatagagtaatgcgtaagagcggacgcgtgggnn

SEQ ID NO: 19125 - DNA, 564 bp, Homo sapiens
  misc_feature 524, 562, 563, 564: n = A,T,C or G
gcgtccggccgcttccggtctccctcccgggccggcgctggcctgactgcggccccggtccgtagcactccgccctccgcttctcccgccctgtagccgcgaagactgcttcagcctttccctgtgctgcccctgccgcgcgatggagacgagctcgagctgcgagagtcttggctcccagccggcggcggctcggccgcccagcgtggactccttgtccagttaatgtgttaagagccattgacatttgaagatcatcagaagtgaagataaaacatctcaaaaattataattgcctccacttctcattcagagaattcagtgcatacaaaatcagcttctgttgtatcatcagattccatttcaacttctgccgacaacttttctcctgatttgaggcccatgcagtccagttcgggagctaagtcacttaaacactgtgtgatagttcctacacatctcattatagtttgtcctgagggagtctaacaagttagcagaaatggaaggaccacccttgcttncaggagaaaatattaaagacatgggccaagatgtaacnnn

SEQ ID NO: 19126 - DNA, 1206 bp, Homo sapiens
  misc_feature 1, 2, 3, 4, 5, 6, 7, 8, 9, 10, 11, 12, 1206: n = A,T,C or G
nnnnnnnnnnnncggaagtcttctagaattaattaacgcgggggacttccggtcggcgtgagcgtgaggtgtgggtgttcgtttctcaggtaaaacatggctaaaagcttacggagtaagtggaaaagaaagatgcgtgctgaaaagagaaaaaagaatgccccaaaggaggccagcaggcttaaaagtattctcaaactagacggtgatgttttaatgaaagatgttcaagagatagcaactgtggtggtacccaaacccaaacattgccaagagaaaatgcaatgtgaggtaaaagatgaaaaagatgacatgaaaatggagactgatattaagagaaacaaaaagactcttctagaccagcatggacagtacccaatatggatgaaccaaaggcaaagaaaaaggctgaaggcaaagcgagagaaaagaaaggggaaaagcaaagcaaaagcagtgaaagtggcaaagggtttggcctggtagactcttaaaaccttggaaaatgccacatgggatagatgacggattagaatgtatacacatgtatactttgatttcaactgccaccaaatgaaaaccatttgttttcctattttaacttggccttttttcttcaattcaaacccagcataactcctcaagtttgttttgggaacttgaataaaatattttctttgatacatccaagctctactgatactttaactggatgctacccaatatccagttataatcaggcctcaacgttctgtcaggtattaatatggttagaattgttcttacaactggtaattatagtcaatagagataaaacagatgatgtactgacaaatttttgtgaacttagatttcaaagaaagtagtggcataatcatatcatttaaaaatactacattagggtgggcatggtggctcaaacgtgtaattccagaattgggaggcgaggaggggataagaaagtcagtcagaaaacaggtaaaaaggaaccaattgtataaaagtgaaatatcggaatggaggagaacatgtagttagaaaagggagagaagggaaatgggtgaccggaaagggttagagcaaagcaagagaaacagtatgagtaagtataaaagaaagataggcaaacaggggagcaaaaagtgtaaaggggagtaagataaagatgaaaaaaaacagaagtaatattaaatcagtgtgatagan

SEQ ID NO: 19127 - DNA, 2316 bp, Homo sapiens
cgtccgcagaacttcagctccgacccctcctccaacctctcgtcccactcgctggagaaactgccgcccgcggccgagccggccgagcgcgccttgcgggggcgggatcccggcgccctaagaccccacgaccccgcgcaccggccgctgctgcgagaccccggcccgcgtcggtccgagtcgccccccggccccggcggagacgcctccctcctggccaggctgttcgagcacccgctttaccgggtggcggttccgccgctcacggaggaggacgtcctgttcaatgtgaacagcgacaccaggctcagccccaaagcggcggagaacccggactggccgcatgcgggtgctgaaggtgcagaattcctctcccccggggaggcggccgtggactcctatcccaactggctcaagttccacattggtatcaaccggtacgagctgtactccagacacaacccggccatcgaggccctgctgcacgacctcagctcccagaggatcaccagcgtggccatgaagtcggggggcacgcagctgaagctcatcatgaccttccagaattacgggcaagcgctgttcaaacccatgaaacaaacgagggagcaggagacaccccctgactttttttatttctctgactacgagaggcacaatgcggagattgctgccttccacctggacaggatcctggacttccgccgggtccctcccgtggccggcaggatggtcaacatgaccaaggagatccgggacgtcacacgggacaagaagctctggaggaccttcttcatctctccagccaacaacatctgcttctacggcgagtgttcctactactgctccacggagcacgccctgtgcgggaagccagaccagatcgagggctcgctggcggccttcctgcccgacctgtccctggccaagaggaagacctggcggaacccttggcggcgttcctaccacaagcgcaagaaggccgagtgggaggtggaccctgactactgcgaggaggtgaagcagacaccgccctacgacagcagccaccgcatcctggacgtcatggacatgacgatcttcgacttcctcatgggaaacatggaccgtcaccactacgagacttttgagaagtttgggaatgaaacgttcatcatccacttagacaatggaagagggtttgggaagtattcgcacgacgagctctccatcctggtgccgctacagcagtgctgcaggatccggaagtccacctacctgcgtctgcagctcctggccaaggaggagtacaagctgagcctgctgatggccgagtctctgcggggggaccaggtggcacccgtgctgtaccagccgcacctggaggccctggaccggcggctccgcgtcgttctaaaggccgtccgggactgcgtggagagggacgggctccacagcgtggtggatgacgacctggacactgagcacagagccgcctcggcgaggtagtgtccgccggccgctgcgctgcccgggacagagacagaggggccggacctcccagcaagcgcatgcgcccgtcgtgaattcagtgaattcagaggcaggacgggatcatccggagtcgggagctgctgccacaggaggcgaggctccccaggtctcataggacacattttgtcagtgtttgaccagaaaagcttgggaaggaagcgctgtctgtgctcacggacagaggcggccggcgccggaggcattccatcctttctgtagggaaaggagcctttatttactattttgtatttatatttgatgaataagtatataaacagagacgtgtacacagatgccaatcacctaccaaaccaaacacgaggaccgccctccctggttctgggggcccctcaaggccaagctcacccctcaagtgctctcacactcgggacctaattcaagtaaaaaccctttctccttcctggggcctcggctcctggagggctggagggtctcgtctgaggacgggaggaggctctcgctggacgtctggcctgtgcgctggtggacggatgcctacatggttttggaggacccgatgaccaggcgtcctgcgagtccgcccgctggcctgcagcacccacctcggacttggctgtggacggttggtgcaagtgcatcctgcagggctggctgtgcgcagctgtgggctgacctttgcagagttttgtggaatagtttgcaatgtcataaaagtgcaataaaggtacagcagatgtgaaagcggccgcgaattccagcacacggcggccgttatagtggtaccgaggtcggtaccaagtc

SEQ ID NO: 19128 - DNA, 4065 bp, Homo sapiens
  misc_feature 1, 2, 4063, 4064, 4065: n = A,T,C or G
nnctaatctcttctaggccccgccccttctgagccccccctccttcggcctgtatgataggctcttcctccatttccggcttctgggactcgggtgcaccacggcttccggtgtcatggctgcttgaagtcccgggagtcggtgaggcggctgcaggtccctccctgcggagccgctggtccggctggcggagatgtgaccgcgggcccggccggcctgcctcaggcgtcgcgtcagctcccgtgtccgtgcccttaacccacaccgatggcgggatccggctgcgcctggggcgcggagccgccgcgttttctggaggccttcgggcggctgtggcaggtacagagccgtctgggtagcggctcctccgcctcggtgtatcgggttcgctgctgcggcaaccctggctcgccccccggcgccctcaagcagttcttgccgccaggaaccaccggggctgcggcctctgccgccgagtatggtttccgcaaagagagggcggcgctggaacagttgcagggtcacagaaacatcgtgactttgtatggagtgtttacaatccacttttctccaaatgtgccatcacgctgtctgttgcttgaactcctggatgtcagtgtttcggaattgctcttatattccagtcaccagggttgttccatgtggatgatacagcattgtgcccgagatgttttggaggcccttgcttttcttcatcatgagggctatgtccatgcggacctcaaaccacgtaacatattgtggagtgcagagaatgaatgttttaaactcattgactttggacttagcttcaaagaaggcaatcaggatgtaaagtatattcagacagacgggtatcgggctccagaagcagaattgcaaaattgcttggcccaggctggcctgcagagtgatacagaatgtacctcagctgttgatctgtggagcctaggaatcattttactggaaatgttctcaggaatgaaactgaaacatacagtcagatctcaggaatggaaggcaaacagttctgctattattgatcacatatttgccagtaaagcagtggtgaatgccgcaattccagcctatcacctaagagaccttatcaaaagcatgcttcatgatgatccaagcagaagaattcctgctgaaatggcattgtgcagcccattctttagcattccttttgcccctcatattgaagatctggtcatgcttcccactccagtgctaagactgctgaatgtgctggatgatgattatcttgagaatgaagaggaatatgaagatgttgtagaagatgtaaaagaggagtgtcaaaaatatggaccagtggtatctctacttgttccaaaggaaaatcctggcagaggacaagtctttgttgagtatgcaaatgctggtgattccaaagctgcgcagaaattactgactggaaggatgtttgatgggaagtttgttgtggctacattctacccgctgagtgcctacaagaggggatatctgtatcaaaccttgctttaatcagtaacctaaggactgtttcctttttctcctcttccatttcttgggttattccacatatgaatgcaggactacccccttaccattttaagaaggtactttatacatttatttaatcctactaatgtgcagccattgcccaagcagtgactgcgttgcatacatttggcactgagtaggacaagacctctcagctatacattgaggggttttagagcatccatgtgggcaacccttttttgtgcgggagagcaggtgttgctcttcagtatgtagcctaaaaaaatcttaattatttcatggatcatgaagcaaggatgaataatatcatgtcttggtaaatactaacaaatttgttaggtttggtgacatcatttacagattatttctttatgttgtccagtggttcttccttattgttgatatccataagctggcactggatgctctcagtaatgttaagtaattgtcaagcagcagttacctactgtgttcttaacactgagttgtgaattttttcttaaagcagtactgtagtactgaatattcctttaaaggaactgcagtgagcctatctaagtttttttaaattaaggcttttaaaatagaaagctgatgcttgatcttgcacaatttttatgtctagtatgtatgcttgagtgaatgtgcgagtatgaatgattagagaaaatttgagtcagtgtactttatagtgtgaatcctgtgagctaatacagtctatacttatttcttccctacctgtttcacatccgtaagatttaagatatacattttttgagaggtagtctgtctgatacaatgtaaatgacaaaacataattcctgagaggcccagaacaaactggagtctagcctggagttaaattgagacttctaaaatgattggaacaaagactaagttgtgccagatgtaaatcaacccctcttttagtttactttagactttgtattagctcatcttttttgtagtaaatctatagttttaaggtttctcaagatgtggctctacctactatgatgaaaattgaagtgggtcaaaagaattagatgtacagtgaagggaaaagaaaaaaaatgggcgaagagagggtggaaaataaaaggattcttttttcttcctttctgtttctcgtatccctgctccctttttcctccccttccctcattctttgcctctatccttagctgaagacaaactagaggagcagcatcccaggtagtttggcttttgactgcaaggtagttaagaaaggtgtagatataatgaggtagaagtagaaaggaagaaaaactcaaagaattctgaaaaggattcatagcaacataatgtgtccctgagtagaggatgctgctatgcgtgagttcatggacacaagttgattacatggtttttagaattataattatggattcttcttatttcatggtaggttgtctttaaagatataaaaattaggatgcctttatgaagcactgattataccaaaaaaaaaagacaagttatatacaggttattaatttttttatttatttattttttcctaaggaaaaagtcttctatctttccctgctggaagcctcctcatatttccttatgtttgccatgcaggttgctgagagtccagttaaaatttgcattttacagaatgaaatactttaccccattcaaacaattattgtttgacattttagttatttataattgtcaaattcaggactcccctttaatgtttattatgaaaccaaatttggcataaggaggctgatttatgaattaccaaagggtcttgtggcatgttccccaatacatgcccttagaaggaagaactattattttttattttggccctttcaggagttgattatcaattggttcgttttcaagtcacaattcacgtgggcagaacccgtattgtgaagacctaaactttcctaaatgttcatatgggtagcagattttgtggtgattagaaacatcaggtccttaaatacgatgaacatgggatacaaaggaattctttataagggcaagtatcctaagttagcacatttacttttctctcccctccgcccccaaaagaaaaatccttacaaataaactgcaggtaggcttctaagcctagtcctgcagtatgctgctaacatcttgatgccaatcttcacagcattctttgattgtcatcttattgctgatacattcatacatatatttagtgcttgacactgtagaattttgttacagaagatggttactagattttaagggagctgagggaataattgatgagccttgaattaaccatgcatttaattagattttttgttgttgttgttgttgttttgagatgatgtcttgctctgttgcccaggctggagtgcagtggctcaatctcggctcactgcaacctctgcctcgcaggtttgagcgattctcctgtctcagcctccccagtagctgggtttacaggcgcttgccaccacacctggctagatgttttatattaaagccagagaannn

SEQ ID NO: 19129 - DNA, 2167 bp, Homo sapiens
gcgtccggcccagcttccttccacccggaatgcctaagcatagaaatgccagaaggctgctggaattgtaatgactgtaaagctggcaagaaactacattacaagcagattgtttgggtcaaattgggaaattacagatggtggccagcagagatctgcaaccccaggtctgtgccactgaacatccagggccttaaacatgacttgggggacttccctgtattcttctttggttctcatgactactactgggtacaccagggcagagtgttcccttatgttgaaggagacaaaagctttgctgaagggcagactagtattaacaagaccttcaaaaaggcactggaagaagctgcaaaacgtttccaggaattgaaagcacaaagagaaagtaaagaagccctagagattgaaaaaaactcaagaaaaccccctccctacaaacacatcaaagctaacaaagtaataggaaaggtgcagatccaggttgctgacctgtcagagattccccgctgtaactgcaagccagctgatgaaaacccttgtggcttggaatcggagtgcctgaacagaatgttgcagtatgaatgccacccgcaggtgtgcccagctggagatcgttgtcagaaccagtgctttacaaagagactataccctgatgcagagatcatcaaaacggagcggagaggctggggcctcaggaccaaaaggagcattaagaagggtgaatttgtaaatgaatacgtcggtgaattaattgatgaagaagaatgcagattgcgaatcaagcgagcccacgagaacagtgtaactaatttttatatgttaactgttaccaaggaccgtataattgatgccggcccaaaaggaaattattctcgcttcatgaaccacagttgtaatcccaactgtgaaacacaaaagtggacagtgaatggagatgttcgagtgggactatttgctctctgtgatattcctgcagggatggagttaacatttaattataacctagattgtctgggcaacggcagaacggagtgccactgtggagcagataactgcagtggttttctaggagtgcggccaaagtcggcatgtgcgtcaacaaatgaagagaaggcaaaaaatgctaagttaaaacagaagagacgaaagatcaaaacagaaccaaagcagatgcatgaagattactgttttcaatgtggagatggtggagagctggtcatgtgtgacaaaaaagactgtcccaaagcataccacctcctatgccttaacctgactcagccaccatatggaaagtgggagtgtccgtggcatcagtgcgatgagtgcagcagtgcagctgtttccttctgtgaattctgtccacattcattttgtaaagatcatgaaaagggggccctggttccctctgcactggaaggccgcctctgctgctcggaacatgaccccatggctcctgtgtcaccagaatactggagcaagataaaatgtaaatgggaatcacaagatcatggagaagaagtaaaagaataaatgtgtggtgtcccctcctttctatttaagtgaaaaaagcaaatagatcatgcatttaaaaagaagagactgctacagtgcatacagcctttgccatcggaactgccttattaaagcaaaaatgggaaaccagttcatgcaggcagaagcagttggtggtgtctggtttttgtttgatttggttggtttgggattcttttgtggagggttaaattcccttggtcttttcttgccttttattgtgcttcagtgccattgcagcttgaaaaagaaatgtttttgctgttaaaataagaacaaagagaaaagtaagttttgttaatgagataaatttaaagtctaagatgtgttccttggttgtataaagcaaaagtagccatcattcctttatttattttcatttttaggaatttcaagaagtgtagttcaatagtctaatcaagtgtgtgtgtgttttaagtaggaatctgagaaagccctctaggaaagggtatgataagctttatatacctctttactgagcagtaggtaggctcacttctctttcccttcaaaatgcttttcataggcttagagaagggctctatggaagtattaaatctggcctcttggaaaacaatgcctcggtgga

SEQ ID NO: 19130 - DNA, 4971 bp, Homo sapiens
  misc_feature 1, 2, 3, 4970, 4971: n = A,T,C or G
nnncgttgccggcacgagacccgggcaggcatcgcaagcgaccccgagcggagccccggagccatggccctgagcgagctggcgctggtccgctggctgcaggagagccgccactcgcggaagctcatcctgttcatcgtgttcctggcgctgctgctggacaacatgctgctcactgtcgtggtccccatcatcccaagttatctgtacagcattaagcatgagaagaatgctacagaaatccagacggccaggccagtgcacactgcctccatctcagacagcttccagagcatcttctcctattatgataactcgactatggtcaccgggaatgctaccagagacctgacacttcatcagaccgccacacagcacatggtgaccaacgcgtccgctgttccttccgactgtcccagtgaagacaaagacctcctgaatgaaaacgtgcaagttggtctgttgtttgcctcgaaagccaccgtccagctcatcaccaaccctttcataggactactgaccaacagaattggctatccaattcccatatttgcgggattctgcatcatgtttgtctcaacaattatgtttgccttctccagcagctatgccttcctgctgattgccaggtcgctgcagggcatcggctcgtcctgctcctctgtggctgggatgggcatgcttgccagtgtctacacagatgatgaagagagaggcaacgtcatgggaatcgccttgggaggcctggccatgggggtcttagtgggcccccccttcgggagtgtgctctatgagtttgtggggaagacggctccgttcctggtgctggccgccctggtactcttggatggagctattcagctctttgtgctccagccgtcccgggtgcagccagagagtcagaaggggacacccctaaccacgctgctgaaggacccgtacatcctcattgctgcaggctccatctgctttgcaaacatgggcatcgccatgctggagccagccctgcccatctggatgatggagaccatgtgttcccgaaagtggcagctgggcgttgccttcttgccagctagtatctcttatctcattggaaccaatatttttgggatacttgcacacaaaatggggaggtggctttgtgctcttctgggaatgataattgttggagtcagcattttatgtattccatttgcaaaaaacatttatggactcatagctccgaactttggagttggttttgcaattggaatggtggattcgtcaatgatgcctatcatgggctacctcgtagacctgcggcacgtgtccgtctatgggagtgtgtacgccattgcggatgtggcattttgtatggggtatgctataggtccttctgctggtggtgctattgcaaaggcaattggatttccatggctcatgacaattattgggataattgatattctttttgcccctctctgcttttttcttcgaagtccacctgccaaagaagaaaaaatggctattctcatggatcacaactgccctattaaaacaaaaatgtacactcagaataatatccagtcatatccgataggtgaagatgaagaatctgaaagtgactgagatgagatcctcaaaaatcatcaaagtgtttaattgtataaaacagtgtttccagtgacacaactcatccagaactgtcttagtcataccatccatccctggtgaaagagtaaaaccaaaggttattatttcctttccatggttatggtcgattgccaacagccttataaagaaaaagaagcttttctaggggtttgtataaatagtgttgaaactttattttatgtatttaattttattaaatatcatacaatatattttgatgaaataggtattgtgtaaatctataaatatttgaatccaaaccaaatataattttttaacttacattaacaaacatttgggcaaaaatcatattggtaatgagtgtttaaaattaaagcacacattatctctgagactcttccaacaaagagaaactagaatgaagtctgaaaaacagaatcaagtaagacagcatgttatatagtgacactgaatgttatttaacttgtagttactatcaatatatttatgcgttaaacagctagttctctcaagtgtagaggacaagaacttgtgtcagttatcttttgaatccataaatcttagctggcattagttttctatgtaatcacctacctagagagagttgtaaattatatgttaacatgttatctggttggcagcaaacactaaagccaataaaggaaaaacagtaaatgttccgaaagcagagaaaagcaaccaaacatattgttatgaactaaaagctttccctttaagatgcatacttgtcttactggatgaagaaaattgagggtacatgtaccttatactgtcaaggttgtttaaacatgataaggttaatcgccatctacttcaagttttagaaaaggaaacaagaagctaaaaacagctgctctgactttaatatctgactatatctttgatctgtttgcaggtcatccaagtgttttctaggaatatatttattttaggttgtctgaaactactattttttagactcctgaaagttgttcacatcaatgtgaagacaaattttaaatgaaaatgaagaatgaaattatgtcttgaatcatatattaagaagtaaaaataatagtgatcaggcagaaaagaaaaatggaacatctaaaaatgtatgtgctaactatatcatccagtgtgcagtgttgtgtatttttctaagcatgacaacattgatgtgccttttcagtgtaacagcaaatactgttagtgaacattgtcaatttatgtcattttgttaagagatatgactggagtgtgcagtgtggaatgtctctaatactacttgagaatcctgcagttctataatcataaacaaaaattacttagtttcgttaagctaagattgtgtttgtgttaacttcgacatcaaggagcaaagaactttagaacagactcctcaatcttgtgactttcttattctctaggaaagtaacacttcgtttcatgaagcttttctgtggggcttcgattatttcaagtctggtttctaagtgcagtgtgtttgaagcaaacgaacttccaactcacttatttggcattgggcaacttggccaagtctgctactttggaagatggctctggaggaaactctcatatggctaaaaaggcaggctagtttcttacttctacaggggtagagccttaaaaaagaacgtgctacaaattggttctctttgagggtttctggttctccctgcccccaataccatatactttattgcaattttatttttgcctttacggctctgtgtctttctgcaagaaggcctggcaaaggtatgcctgctgttggtccctcgggataagataaaatataaataaaaccttcagaactgttttggagcaaaagatagcttgtacttggggaaaaaaattctaagttcttttatatgactaatattcttggttagcaagactggaaagaggtgtttttttaaaatgtacataccagaacaaagaacatacagctctctgaacatttattttttgaacagaggtggtttttatgtttggacctggtaatacagatacaaaaactttaatgaggtagcaatgaatattcaactgtttgactgctaagtgtatctgtccatattttagcaagtttacttaataaatcttctgaaccatgttttgtgcctgtttgtattcctttataaaccaaatgttgttggaataaaatacataaggtatcattttgactgtggatatttaattaaaaactatttttctgtgcttgtaggcatcaggtaaaagccaccccaggttagcttgaccatacttttttggctttccacaatttattttaaattgagatatgtaactagccacattcaatgtggaaaaaaaccaggaagttatccttccatctataaacattgttgtcctgatggttgtcaacaaataaccatatctgatgaaaacagctgtaatatccacccatttgacttaatcccgggggagtttgtaaaaccgttgaaatctgatacattttgaatggtgtgcccatgggtatcttcctgcggtgaaagtccacatctttaatcagatcctaaaagcggatctatggcccaaaaggaattaggggaacctctccttcttttggtaagaaaagcaattatgtcaatttagaagacagtatttttaaaagtaggtatttaaaatttattcacttttaggggacttaacattttattatttatcttatttttaagagccaaatatttccaaattgctttaaaaaaaattcagctatacatttagaacttgatagtacccctcaaaatttttaggttgtgttttctcctcccagcatcacaaaatagccacttatttcaagtacttctgatattgaatataaggcttgatatgaagaagtatagcctattatgattgctaataatgctaaaatgttgctcagtttgtctaagccattcactcagctaatactaatgtagaaaatatattttaaagtctaattactaatacatagccaaaggaaacccataaacttgataatccataaggaaacaatagtaaaaaaatgttttggggcagtctgcaaaacagcaattttgtttaggaaaagtggactttgttatgcttttctgcatggccaaattataccagaagataattccatagagatgcagcaatcaccttttttaaagatttcattaaatgaagatattcttgttttctgtggtagtctttattattattttttagctattgatacatagcatggcagcaagattacatcacggacgcgatataatacagcttttttcattgaagatctgtagcttactatactctagctatatacnn

SEQ ID NO: 19131 - DNA, 1378 bp, Homo sapiens
  misc_feature 1375, 1376, 1377, 1378: n = A,T,C or G
gacccacgcgtccgattatgccaagagaaggtattactttaagatgtgaaaaatgtaaaatggaaaattacattactaagaaaaacaaaaaaacacaaactgaaaaattagaaatgaaaaaacattgccacaaatgcaacgcacatacaagtcataaagaaaaaaaataatttaaaatgaatagaaaatatttagacttaagctttgaagaacacaatttagatgcaataatttcattttctcaacaaacaagattatgagtttctaatcttcaaacaagtgatggaatagtgtttcttgaaaaagaagaaatccatttatttgttgattcaagatatatagaagctgctcaaaaagatgcaaaaaatgtacaagttcatttattgacagcagctaatttaaaagattttgtaagtagtaaaaattacttaaaaattggtgttggaaaagaatacttaactttagctgattttaaaaaacttcaagcttgatttccaagtgcagaatttgtacaaatcaatgcgcaaaaattaagacttattaagacaaaagaagaaatttacaaaatcgaaaaagcagtaaaaatatctttaagagcatacgaagaattactcaaacacataaataaaaacgacactgaaaaaactttagatatcaaattaaatttcttcttaaaaaaatatggtgctgataaagaatcttttgattcaataattgcaactggtgctaatgcagctatgcctcactatcatcctaaaaatgtgattattaaagaaaatgattttttaaaaatagattttggtgcaagttatcaaggttacattgctgacattacaagaacaattatcttcaaaaaagaagaaaattttgaccctagaaaagaagaaattttacaaatagtattagaagctgcaaaactaggaagacaagcagttagaccaggctgtaggaaatctagttatttacaggaacttcatcataatttggagggaagctcttggagctgtgagttctccctgtacagtgttaccatccccgagccatcggagtaaaatgcttcgccccgaggttaatccacttacacagaccacgtgtgagttacagccggggtattcaggcatgtccgtgaatattcccaacttgtagtaacagaaccttcaaatacgtcctctcaagcatggacagtagcctgggtgtcaccatgcctcttctgcgggatggatgggaaggtgaatatggattacgtgtatggattctcacgctgcatttgtatgcaccttgcaggaagattcgggaattcaagctgctgcctggaagcaagatctaagcattgcttcttatctagcgggactctccgatggctgcggcgtcttcnnnn

SEQ ID NO: 19132 - DNA, 1084 bp, Homo sapiens
  misc_feature 1, 1083, 1084: n = A,T,C or G
nacgcgtccgtttgtccctatatcttgttccagcagccatatatcttgtggtctacagcctaaagcatgatttcccttgaagtcttggggttgtttaaaggagagtcccttcaatataaaacctctgaaatattagtgagaatggctcactaatgtgaacaatgtttaaattatttatttatatatagaattactgaatattagtactgggaaaatttatagaaatcatctagtcttacccttcatcttacatataagaaaaatggtcttttcttctaatcacatttacaaaatatgatataaaccttgaccatgaatgtatgagcctaattagagaaacagaaaatcagcatgtcagttttccttcattcaaaataacatagtctttctaagcagtcattctggagttaacatgcctagttcagagccgctgtggatgctcaaatcatttctggaattgccttcaggacacaattatgagaaagtcagacttccaatattttgatcatgccttgtgtcttcctaagtgtccttatcccactggattgtgtctcttactcccaagacttattccaaatgattttttgactcttttcattaatcaaattcaccccaaaccagaaagttttgccattagcgtagatattaaaaatattactggctgggaaagcactcctcaaagcagaggttctaaattaatttatctgttcttttaccatttgctcactcactcactcatggacccattcaatcatagaatatttaagatttatatgcccagaattataatagtgcctaggccttgataattagtgaacttgtacttggggtgaatgtgtaagtgtcaaaaggtcactattatgaacgagaaactaatcgatttactctgtaaattctggggaggcatttaaaaaatcagtaatcttcaaggcatatcttgtgtatcatctgtgtaggatactctgatcaggggggaaagaggctccagacagttagctaaatactattccgaaagtaatccttgggcattgtaaaataccttgcttcataccccaaagaataggacatgacagtctgacatcnn

SEQ ID NO: 19133 - DNA, 1810 bp, Homo sapiens
  misc_feature 1810: n = A,T,C or G
ccacgcgtccgggagaactcaagctcccgattgtgcccgaaggaacccgaagggagaccccgcctcattcctcacgccgagctccagaccccgcctcctttccggagccggtctgttccccttcgggtccaaagcttttggctcctccttgttccgagcccgaaggcccgccccttcacgtactcggagctcggatcccagtgtggacctggactcgaatcccgttgccgactcgcgctctcggcttctgctccggggcttcttccctgcccgcccggggccctgaccgtggcttcttccccggcctgatctgcgcagcccggcgggcgcccagaaggagcaggcggcgcgggggcgcgctgggcgggggaggcgtggccggagctgcggcggcaagcgggctgggactgctcggccgcctcctgcccggcgagcagctcagaccatgtcgcctgaagaatggacgtatctagtggttcttcttatctccatccccatcggcttcctctttaagaaagccggtcctgggctgaagagatggggagcagccgctgtgggcctggggctcaccctgttcacctgtggcccccacactttgcattctctggtcaccatcctcgggacctgggccctcattcaggcccagccctgctcctgccacgccctggctctggcctggactttctcctatctcctgttcttccgagccctcagcctcctgggcctgcccactcccacgcccttcaccaatgccgtccagctgctgctgacgctgaagctggtgagcctggccagtgaagtccaggacctgcatctggcccagaggaaggaaatggctcaggcttcagcaaggggcccaccctggggctgctgcccgagtgccctccctgatggagacactcagctacagctactgctacgtgggaatcatgacaggcccgttcttccgctaccgaactacctggactggctggagcagcccttccccggggcagggcccaccctgcggcccctgctgcgccgcgcctggccggccccgctcttcggcctgctgttcctgctctcctctcacctcttcccgctggaggccgtgcgcgaggacgccttctacgcccgcccgctgcccgcccgcctcttctacatgatccccgtcttcttcgccttccgcatgcgcttctacgtggcctggattgccgccgagtgcggctgcattgccgccggctttggggcctaccccgggccgccaaagcccgggccggaggcggcccaccctccaatgcccaccccccagcagtccggagaaggcggcttccttggagtatgactatgagaccatccgcaacatcgactgctacagcacagatttctgcgtgcgggtgcgcgatggcatgcggtactggaacatgacggtgcagtggtggctggcgcagtatatctacaagagcgcactgccgttcctatgtctgcggaggctggacaggctgctgagcgctaagggaagggctccacccgggtatacctgaacttcctgaacaacccgctgggctggatgcgaaggcgaagtggagcaagcctgcggggcggtgaccaggggcagaaggctggaatggtgcaatggtccgagataccgcctataaatacagtgaatggacacgcggctccagacaaccccggaagagccacacattggtacaagagacggagcaggggcgagaaggagcacacaccggaagaccaccaaccccaaaaggaaaacaccccacacagagagagcccacaaaaagaaacagagacgccacatagctaacgn

SEQ ID NO: 19134 - DNA, 747 bp, Homo sapiens
gagtcgacccacgcgtccgcgtccgccaagatggcgtccatcatggaagggccgctgagcaaatggactaacgtgatgaagggctggcagtaccgttggttcgtgctggactacaatgcaggactgctctcctactacacgtccaaggacaaaatgatgagaggctctcgcagaggatgtgttagactcagaggagctgtgattggtatagacgatgaggacgacagcaccttcacaataactgttgatcagaaaaccttccatttccaggcccgtgatgctgatgagcgagagaagtggatccatgccttagaagaaacaattcttcgacatactctccagcttcaaggtttggattcaggatttgttcctagtgtccaagattttgataagaaacttacagaagctgatgcttacctacaaatcttgattgaacaattaaagctttttgatgacaagcttcaaaactgcaaagaagatgaacagagaaagaaaattgaaactctcaaagagacaacaaatagcatggtagaatcaattaaacactgcattgtgttgctgcagattgccaaagaccagagtaatgcggagaagcacgcagatggaatgataagtactattaatcccgtagaagcaatatatcaacctagttctttggaacctgtgatcagctttttttttatcaacagcaacaaccaagacccagggtcctggcccttcttttcctctcaggaaacagctatgacc

SEQ ID NO: 19135 - DNA, 1561 bp, Homo sapiens
  misc_feature 1554, 1555, 1556, 1557, 1558, 1559, 1560, 1561: n = A,T,C or G
ccacgcgtccgcggacgcgtgggtccgggccggccagccctggacgaaagaagagggcccctccaggccagtctgggcaccctgggatagcggctgcagccaggcatggccgactctgcacaggcccagaagctggtgtacctggtcacagggggctgtggcttcctgggagagcacgtggtgcgaatgctgctgcagcgggagccccggctcggggagctgcgggtctttgaccaacacctgggtccctggctggaggagctgaagacagggcctgtgagggtgactgccatccagggggacgtgacccaggcccatgaggtggcagcagctgtggccggagcccatgtggtcatccacacggctgggctggtagacgtgtttggcagggccagtcccaagaccatccatgaggtcaacgtgcagggtacccggaacgtgatcgaggcttgtgtgcagaccggaacacggttcctggtctacaccagcagcatggaagttgtggggcctaacaccaaaggtcaccccttctacaggggcaacgaagacaccccatacgaagcagtgcacaggcacccctatccttgcagcaaggccctggccgagtggctggtcctggaggccaacgggaggaagggcccgtggggggctgcccctggtgacgtgtgcccttcgtcccacgggcatctacggtgaaggccaccagatcatgagggacttctaccgccagggcctgcgcctgggaggttggctcttccgggccatcccggcctctgtggagcatggccgggtctatgtgggcaatgttgcctggatgcacgtgctggcagcccgggagctggagcagcgggcagccctgatgggcggccaggtatacttctgctacgatggatcaccctacaggagctacgaggatttcaacatggagttcctgggcccctgcggactgcggctggtgggcgcccgcccattgctgccctactggctgctggtgttcctggctgccctcaatgccctgctgcagtggctgctgcggcactggtgctctacgcacccctgctgaacccctacacgctggccgtggccaacaccaccttcaccgtcagcaccgacaaggctcagcgccatttcggctatgagcccctgttctcgtgggaggatagccggaccgcaccattctctgggtacaggccgtacgggttcagcccagtgacggtggggctgggctggaggccagatacagacatccaccaggtcccgagccctcacaccctggacgggaagggacagctgcattccagagcaggagggagggtctggggggcagaaaggctgtctgtcgtagagcctccacatttcctttcttcttgagacagggtctggctctggcatcagacggagtgggggggggtcataggtcaggccccaactcctgggtaaggaactcgcgcgctccgaaaggggccagtgcccccaccgggttttggggaaagggcacaagcaagggtgacacgcgaaaacccgggcacaggaaaggggagcggggccaaacannnnnnnn

SEQ ID NO: 19136 - DNA, 4241 bp, Homo sapiens
  misc_feature 1, 2, 3, 4, 5, 6, 7, 4241: n = A,T,C or G
nnnnnnnacgtatctcacttaaaacaagtctataaagtggtttattttaagaagggtacattttaagaaggacaaaatcaaaagcatggacaagtgttggatgagctgatgaggttgtggcaatttactttgtgaatactgtgagagtttgtccaactcgctgtgcttaggtactagatggtgaggatttaaaaggtcaatgaagtcacagcagaccagcactcaaacatatttctcttctatttcctacttttgaataaaaatgtcagaagtgggcggtgggaaaggaacaagcaaaggagtaattatttgaataaatttttggcgaaacgtgggtgtctgacggggaggctgtgcggtggtgaccaacgcacccatgcgctgggtttcacagatgcagactgaagtccaggctctgctgcagattaacggggtggccgccagcaagtcaagtgacttgctcttctgtgcactgcatgtacttgggttcctctcacaggtattcctgtttttcctctttcttgctccaggttacacctcgtggcgcggcgctctcggagagcctgtggagtggccctgtgtccctccctgacccctggaggattccgtaaggtcacagtcaccgcctccatcccctacttgccatgtcttcagggctaatgcataacaattatcacaatttacagcagccccacgctctgaagagcttctggaggggatactactcaagcggaggaaggcaagacagggacctcctccctcttcccggacctcttctgataaggaatatttgtaggtggttaagaaaggcagcgggagggcgtgaaggcaaagacaagcttttttctcgtaggaacacacatcttctggtctggctgtgtttccggaggcatttccagaggacctagcgaggaccaacttccggctgcgacttccgcgtcttccgagtttcgagaacctgcctgcttccgcccggagttgttgtgggctccagcagcgaagtagccacttcgctaggagtccttagcggccagggcgtggaagcggattctgaggcggctttctcctactgccctccgcttgccaaccgctacttccctgcggcggggtaaccgcctcgcacctaccgggctcggttccctggctccggccgcggggggagcatggagtttgcggagctgattaagaccccgcgggtggacaatgtggtgctgcaccggcctttctacccggctgtcgagggcaccctgtgcctgacgggccaccacttgatcctgtcctcccggcaggacaatacggaggagctgtggctcctccattcaaacatcgacgccatcgacaagcgatttgtaggatcactgggtaccatcatcataaaatgtaaagattttcgaattattcagttggatattcctggaatggaggaatgcttgaatatagccagttccattgaggcattgtctactctggactccatcactctgatgtaccctttcttttaccgtcctatgtttgaagtgatagaagatggctggcattccttccttcctgagcaagaatttgaactctattcttcagctaccagtgaatggaggctaagctatgtcaataaggaatttgctgtctgtccctcttacccaccaattgtcacagtgcccaaatccatcgatgatgaagctcttcggaaggtagctacatttcgacatggagggcgcttcccagtactaagctattaccacaaaaaaaatgggatggtaattatgcgaagtggtcagccactcactggtacaaacgggaggaggtgcaaggaggacgagaagctgataaatgctaccctcagggctggaaagcgtggctacatcattgacacccgatccctgaacgtggctcagcaaactagagccaaaggaggtggctttgaacaagaagctcattatcctcagtggaggcgaattcataagtccattgagaggtatcacattcttcaggagagcttaatcaaacttgtggaagcttgtaatgaccaaacacataacatggaccgatggctcagtaaattggaggcctctaactggctgactcacatcaaagagattctgacaactgcctgcctagcggctcagtgcatcgacagggaaggagcatcaatattgattcacggaacagaaggaactgattccacactccaggtgacctccttggcccagatcatcttagagccaagaagcaggaccattcgtggttttgaggccctgattgaaagagagtggctgcaggctggtcacccattccagcagcgctgtgcacagtcagcctactgtaacaccaagcagaagtgggaggctcctgtatttcttctcttcttggactgcgtgtggcagatccttcgtcagtttccctgttcttttgagtttaatgagaatttcctcatcatgctctttgagcatgcttatgcctcacagtttggaacatttctgggcaacaatgaaagtgaaagatgtaagttgaagctacagcagaagacgatgtctttgtggtcctgggttaatcagcccagtgagctgagtaaattcaccaatcccctctttgaagccaacaaccttgtcatctggccttcagttgctccgcagagtcttccactgtgggaaggtattttcctacgttggaatagatcctctaagtatttggatgaagcatatgaagaaatggttaacatcattgaatataataaagaattacaagcaaaagtcaatatccttcgaaggcagttggcagaactggaaacagaggacgggatgcaggagagtccctgaaaggtctcctcgcacccttcgcaaggaccttcttgggcctgtgtccgccgttctctccttgtgcccttcagttcacttttacacggtagccttgaagtgaaggctttagatgtgggacccccctaatgtaatggatttctcaatactgtatgaataatgaaacttactatcataaaccatgtttcatgtggcctgttagggcctgtcactttgggagccggaaggaggtgctagtcattttatttttacgtgaaatagatgacctatttaatgccatttgtgtttcatgccattttatccaaagctttttctctgtgtccactctccaaacagcattctagagcagtcaaggagacagctaatctctctagggactatttggtggtttaaaaaaagggtcagacttttaaacactctgaccatagaaatgtttttcaaaatggcaacaatggataaaccaaggattttgtgtttaacaatccatttccagtgtcttcgccacataaaatagccattttctttaaaatagttttggactaacgaagctgaaatctattctcattcttgtttgtcaagaaaggaaaatctgttattcaaggtaaattatttctacaagggcaacaggtatggtcctccgatatttacattaagaagagttaaatttattttaacgtagacactaaaagtatgtgcaatatacaattaaagtaggaatttgttactgattgagaattgttactggtgaattggttttcaggttttgagcatacatatacaatgtgtttcaaatgctgcttgtaaaattaaaccatcatctagaatagagttaatttattataatcaagctacaaataggttttcttaaaccagagatgcactgcccttgtctaaagttcttattgcactggtttatatgtgtatgtgtgttttattgtgtgtttttttaatttgtaagtattctaagagtttcctaatactaaggttaaaattttcatgttgacctgagccttttgcaaatttgctttggctctattgatttgtccattatgtgttaggcaaatataacttaagtggagggggaagtttatgaatataatatagctctgtgttttaaacctcagaaaacagatttgagtgttcagtattatagaaacagtgatgactattcctgctctgctagtctatgccctgcaactccaatgtttgtgggtcagtattcccacctacattctgttgtgacttgctccttttaccaaatatgaccggtctcgttttcttaacaggatgttttgggtatctttaaaccttcctaccccctgtgtttcccttggtgggacacactcctggccgcttaagcgggggggccacttcttttcatggtgcacttgcccgcgagctggggggcttccccgccgcctctttgtctcn

SEQ ID NO: 19137 - DNA, 673 bp, Homo sapiens
  misc_feature 1, 2, 659, 670, 671, 672, 673: n = A,T,C or G
nnagtcaccccgcgtccggtttcaccatgttggttaggctggtcttgaactcctgacctcacgatctacccaccttggcctcccaaagtgctgggattacaggcctgagccactgcaccaggcccaccctgtctctattttctaaaataataaatctgattttaatgtggctggatataaatcatatcacagttggatttggaagtttgggttttattcctaactttgatgggaagccattttaagcagaaagatgattttaaaagaccactatattttctgtgtgaagaatgaactgggagatttcatagtattattaacaaaaatagaatagttggggatctggtttggcttgggaaatggaggaagttcaactttgggcatgctccatttgcattgccaagacattgcagcaattggaagtgcagtcagagagcttaggagaaacacttggcagatggacatagagaagtagtactcaaagctgtggacattgattaaataatcatacaggagtatgggctgacaaaagattccaaagagaaaacctcaaaagctcaaagaggaagactagtcagggaaaacagaaatagtaaaagaagctgccctggaagtgtcctggattccatggcgggaacaaggagctacaggagacctgngcctgctggcnnnn

SEQ ID NO: 19138 - DNA, 2311 bp, Homo sapiens
  misc_feature 1, 2, 3, 4, 5, 99, 1073, 1074: n = A,T,C or G
nnnnnacagacctggagtatgaccctctctccaactactcggcccggcacctcagcagggccagctcccgggatgagcgggccgccaagcggcccgggngctcccgcggcagtgagccctacacacctgctcccaagaagctctgtgacccctttggcagttgcgatgcaaggttctcagactcagaagatgaggccgccacggtcccaggtaacgagcccaccacggtccagcacccccaaagccagggccgaccctgagatcaaggccaccgggcagccaccctccaaagagggcctggaggccgaggggggcggcctgcgggagaccaaggagacggccgtgcagtgcgacgtgggggacctccagccgcccccagccaagcccgcctccccagcccaggtccagtcctcacaggatgggggctgccccaaggagggaaaacccaagaagaaaaaaaccggggccccacctgcccccagctgcaaagacggggcccaggggaaggacaagaccaaggacaagggccgagggcggcctgtggagaagccccgtgcggacaagaagggcccgcaggccagcagcccccggcgcaaggcagagcggccggaagggaccaagaagaagccatcttcggccactcctgtggccacctcagggaaagggaggcctgaccggccagcgcggcggccgagccccacaagcggggactcccgaccggcggccggcagaggcccaccccgccccctccagctgcccgacaggaagagcaccaaggccccgtcggggaagctagtggagcggaaagcccgctcactagacgagggcgcctcccaggacgcccccaagctgaagaagcgggccctgagccacgccgacctctttggggacgagagtgaggacgaggaccgcagggccaggggtgccgagcgtgtggccctctgccctccccagcctcagctcggactcagactccgactcagactccagcctgggcttcccggaggcgcaggggccgcccaagcggctcaaggcctccccgcccccctcccccgccccatcctcctcctccnnctcctcctcctccacctccagcgcgggggcaaatcaggctaggtacgaggcctgggtgttagtggactttgactccgaccccatggaggagtgcctgcggatcttcaacgagtccaccagcgtcaagacggaggacagaggccggctggcccggcagccccccaaggaagagaagagtgaggagaaggggctttcgggtctgaccactctgttccccgggcagaagaggaggatctcccacctttccaagcaaggccaggaggtggagcccccgaggaggggtcccgcggtgcccccggcccggcccccgacggcgcaggaggtgtgctacctgcgggcccagcaggcgcagagggcatcggcgagcttgctgcaggcccccgccaggctggcagagaagtcgccctccgtccacatttccgcccctggcgagaagaggaggatcgcccacatccccaacccccgcctggctgcagcccccacaggtgccaagaggacccttgcggccagcggcagccagccctccaacggccctgagccaggtggccagcagctgaaaacacgcacattgtcggggatggcgtccaagactaccaccaccatcatccctaagcgaatcgcccacagtccatccttacagagtttaaagaaacccattatccccaaagagtttgggggcaaagtccccaccgtcatccgccagcgctatctcaacctgttcatcgacgggacgtgtctcaaagttctggtacctccaaacagggaggcaatagagaaggaactggacgagcgagacaggtggctaatggaaccgaggccccaagcaaagaacatactaacttggagtgtgggcgatggcagccatcagaggaaggctcagggggcgtgggacccgaacaggtgagcagggcacagaagcacaagggggcagacagggtgagacccaaaagtgggagaagacgagaaggtgcgggcaggacaggtacgccaaccgcaagagagacccagggggggaacaaaaggagcgcggaaaaggccaaaggacacagggaacaagaccgcataggaaagggaacccaagacacaaagagcggggaagccacaagcgaagagcggagtcacgagacagccaagagaaaaagcgcagaacgacaaagaacaggaaacacaagaagaacagcgcagcacagacacaccctcgacaaagcaatagagaaacttaacaaggcgcaacacc

SEQ ID NO: 19139 - DNA, 2976 bp, Homo sapiens
  misc_feature 1: n = A,T,C or G
nataataccgttttttgtgccaattattgcatacactattttgtgatttgtactcatgtgtaatatactcatttcttgttatctgattatagtgatgtctatgatatgtcgttatacatttattcttcgatcttgctcttttatttttttccgattatacattttcgatatatctaatatttttgtttgtggcatcttgtatcgataagctattaaacgatatcgccgttcatctttgttttcctaatagaatttaatttctctctagttgttgtttttgtggtgccttctttatatctgctgtttgcgcttgtccgtgatgtctggtgttcctgctattgtcatgaatgtgatgtattttagatttccctatttatggtcacgtggtagtatcccatggttgcgttctgcttggtgaatttgtccacttggttgccttcgtatggtattggaccatgtagttgagtggacgtggacgtggtatgtcaaaggtgagaaacttatcccattataaaagttaagggttactattatatcctgatagtgcctttagatcacacatgtagatgatcaaattgcatcttctagcataagactagaataatctgcttccaaagaattcctttgtactttagtagatgagggcaaagctttcaccgtaatgaaaaggcaaatgggaggtctctgataagttggaatcatcatagcaaaaaaagagatacctaccagaaaatttgcattaatatctataacctcatttgtaaaaaaaaatcattaagtttataaactattttaaaaataaaacgaatacatatgtaatatgaatcatatgccaaattatattctatagtcataagtgctattaataaatacatttgattcatgctacaagagaaagaattgagacaatttcacatttcagaattcctgagtcttatcagagaaaaacaagtactgaaaaaacaaacacaataaacctacttaaagtagggcaaataacaaaatttgggcatatttatagttttaaagctgaagactatgggaacaatatatatgtacttcatgaaattataaacatgtttttaaagcttggtttttaaaaaaggcgttttgatcaaacaaggccacctgagtgacatcttcaatgatggtaagcccaccattttaaaggaataacatctttatttaaaagcctaattattaatataaaaaggaaaagagtttattttaacaaaatgttttagtaagattgcaatgggacagccctttgatgaaaaatctaaggagggtaaagccaatgtaactgaattagaacaagagttccaattttgagctaccatccaccaaataatttcccttttgctttgcatattacacagtgaaaataaacagttatattaagagcacttcagtcccacaaggtaggatttaagctttgtgaataggtgtaaatggccctgtaacaatatgatgcctgcaaaaatacattcaactgaaaattaatgtctgttctttaactagtaaggaaacgggaagctaagtggtcccacttaaacaataaaacaaaacaaaacaaaaaccactgtttatcctttctggaaagactaccaaagcaaagaacatccaataatattataaatttaaaactgcatacttttactcatctttacaagtaggaaagatgcatacaaactactcatgggctttataaataaagacactaagcagaaataatatttgggttatttctctgttcgtaaatacacagaaataaaacaattaaaaaacactaaagtgcagacctataggccaatacaggcatgataaagaggtgcagccaaatttgcatctacatttacacttacatacccagaaaatgattcttgctttaaaaaaaaaaaattgtgcaatttaaaaactagtcagttttgtttgtgctgtaatacaattagaacttgtctctgcccactagtgaagtgactgctagaccttagatagcacactaggctcttgacaatcacgtatctcattagaatcatacaacattgattccacctccagaaaatgttagggtcctcttgttgtagaatgaagagccactggtatttggttgattgcctttaaccagagaagatttcagttccatttcacaagctacaatagctgcattcaattccacttgagctcgatgaactacataaaacatgaggcctatacttataataatctgtaaacaaaaaacaaaatatccactaacactctgttctgcaatgacatcttccattgtccgcagggtggtacccaagtaagaattcagaagctgggtaggacgcagtccaaccgaagatgccatcagatagttgggtaatgagagatcagtaatcgaaaacactgcattctgaagcccaaaaggtatgggtgtcagtctggccagcgccaccactttcaggccgcttcctccctccactacgcgaataaccgcgctcagcttctcgctgctctggatcctggcggccacccaggcggtgaggagccgcttgcagaccacatgggcgatgaaggtgccgatgaggacgcccaccatcatcagacccatgcccagcacgaagccgtacaggtagccagcggccacgttgagcacgatgtagccccagccgcaggggaaagagaccacgatgaagcccacgacgaagagcaggacccccagcagcgagtcaaggctctccacccacagcaggaggtggtgaaggtagcggcggaccagggccagggaagcgaagcacagggcggccaacacgcagaccagcacgaggctccggcaccaacaggtgctgccgaggcagcagcagcgccagtttctcacctcagccacgccgaccaccacgccgccgccgccactcccggggccgcccgccaaggccccgcccggctccggcagctccgaagcctcgggcggaccgtggcgctcccggacgc

SEQ ID NO: 19140 - DNA, 914 bp, Homo sapiens
  misc_feature 1, 2, 3, 4, 5, 6, 7, 901, 914: n = A,T,C or G
nnnnnnncgtccgaaatgttgtaccaagtattcaaaaccactttgagtttacatactagttaccttaaaaattattccctgacactctgactttccttctaagcacctctgtctcgtctctcttatgtactctcatgggtttttttcgatgattcgaatatgaatgtgcctaaagaatttttgctctcttaatctatgtatacatacttgaacaaatcattcttgcttaactgctgatcttttgtaaaactattgctagtcataatggatttctataacctgaaagttgatataatacagcacgtggagcactttaaaaacaaagaaacttgaaaataattttattttttacctttacatggtgtgttctagactactgcattatgactacataaacctacctgagctcttacaagtacagaattgtgagacagaggttttgtgatggaaaacatacacatagggaaaaataccaaactgagcaatataaatttcacagctcacatcttagccagtacaaagaaactttcacatggggtgaatattataatacttgaatttgagacttaatactgtatatgaattaatcatcccactgtaataactgacatcttcaaatagttgggcttatgaaaaatttgactaagacattttattttatactttatgtaaatgtgaaataagttctggtcatataaatatgtagaatgcatgtgtgtgaactctatgaagtgaagtgtggtggccttttatgtttcagagtactcaagtgtacaattgatttatataaaaatgccaaatggaccccaggccattttgaaattaatagtaatatttttgttgtttaactttaaagctagctcccctaactttatatattttttgggaaaaaatacctaanaacctcagcctan

SEQ ID NO: 19141 - DNA, 523 bp, Homo sapiens; identical to SEQ ID NO: 12880

SEQ ID NO: 19142 - DNA, 1325 bp, Homo sapiens
  misc_feature 1, 2, 1307, 1308, 1309, 1310, 1311, 1312, 1313, 1314, 1315,1316, 1317, 1318, 1319, 1320, 1321, 1322, 1323, 1324, 1325: n = A,T,C or G
nnacgcgtccgggcgtctcggctcttctgtatctccctggcctggtcgctctcggcttctgggcctcgcccttcctgtctgtgaaatggactctgggtgaatccaaatgggatcgtctcgggctacgtcctgtccctccgggactacaagtcccaaggtgctcgaggcgaccttggctccccctccccaccgggacccgcctccctccagcccaagtcacgtcgtctaacctgttcccagctcctgccccgccccgttctccgctccccaagccggagcccgagctggaggaagcccccaggtgccaggatctgcccggatccgcgcccgctccggccggcaccatggacagcgaggcattccagagcgcgcgggactttctggacatgaacttccagtcgctggccatgaaacacatggatctgaagcagatggagctggacacggcggcggccaaggtggatgaactgaccaagcagctggagtcgctgtggtcagactctcccgcgcctcctggcccgcaggccggacccccttctaggccgccccggtacagctccagctcgatccctgagcccttcggcagccgagggtccccccggaaggcggccaccgacggcgcagacaccccgttcggacgatcagagagtggcccaaacctacacccctacagcccgctgtcccccaagggacggccgtcgtcgccgcgcaccccgaatctaactgcagccggacgcctaaacgggcaaggcctggaaccggagcaggaacatcagacccaggaacaccgaggcacaacacgaatgagcgcaaaggcaagatacacatcaggacagaagacgaacacatcaccaggaaggaccacagggcacaaggaccggatacacggaaaaaaaagaggaaggcagcacaagaacaaatagagacaaacaatgagaacaaacaagaagaacagagagaaaaaaaaacaaaaagaagaaaaaaaggaaaaaaaaccaaaaaaagaaaaaaaacaagacaccagaaagagaagaaagaaaaaacaaaaagcaacgagagagaacagggacagcacccgacgacagcaaaacgaagaggccagagagcaaagcgagcagagagacagagaaacaaaaagagaaacagccagaaagacgagaaagaagagaaagggagagaaccggacaaacaggacagaacacagaacgacacgagcagaaagagaggaagaacaaccacaacgaagagaaggaaaggagagacaaagaaaaagaagcgagacacacagaagcaagaaacacacagannnnnnnnnnnnnnnnnnn

SEQ ID NO: 19143 - DNA, 1207 bp, Homo sapiens
  misc_feature 1, 1207: n = A,T,C or G
ntcctagaccggccgagggacgcgtccgtgacgtagaaggtggagaccgcttcaccctgatcagggagtatcggctgcgggtgcgcaaggcgtccaggagtgacctggggctgtggagagcgacccgtggccttgtgtttcagagtttaccacctaggatgacttcagtgactagatcagagatcatagatgaaaaaggaccagtgatgtctaagactcatgatcatcaattggaatcaagtctcagtcctgtggaagtgtttgctaaaacatctgcctccctggagatgaatcaaggcgtttcagaggaaagaattcaccttggctctagccctaaaaaagggggaaattgtgatctcagccaccaggaaagacttcagtcgaagtcccttcatttgtctcctcaagaacaatctgccagttatcaagacaggaggcaatcctggcggcgagcaagtatgaaagaaacgaaccggcggaagtcgctgcatcccattcaccagggcatcacagagctcagccggtctatcagtgtcgatttagcagaaagcaaacggcttggctgtctcctgctttccagtttccagttctctattcagaaacttgaacctttcctaagggacactaagggcttcagtcttgaaagttttagagccaaagcatcttctctttctgaagaattgaaacattttgcagacggactggaaactgatggaactctacaaaaatgtttcgaagattcaaatggaaaagcatcagatttttcttgggaagcatctggtggctgcgatgaacgaatacataaccaaggttgctttagaacgtccagactggggatcagctctggcttcattaccagcaggagggtccacagatatgtccaaaggatcaactggagccaaactactgaggttcaagtgcaacctatgacatatcggggtctcctcagaaggacgtcttatacaaacctggatacagaaaatattaccgaacagagcaagcttgctgtaggagtggtgcaggctgactggaggatcggaacacggggagcattaggatacagcacacagtcacgaaggggaggcgaaaagcaggaaaaacacaccgcaacgagagacagacagcaagagagatcgcaaaagtagcgccaggaagaacacgcacacatgaagaacacagacagaccgggacgccgcgtgtcatacan

SEQ ID NO: 19144 - DNA, 3224 bp, Homo sapiens
  misc_feature 1, 2, 3, 4, 5, 6, 7, 8, 3206, 3207, 3208, 3209, 3210, 3211,3212, 3213, 3214, 3215, 3216, 3217, 3218, 3219, 3220, 3221,3222, 3223, 3224: n = A,T,C or G
nnnnnnnncctagcccttcaggcctggccgctacaataaggctggcgaactcgcagcgcttgaatacccgtggcctaaccgtccactcggaagaccggtcccgctcgggaggctctgcagtcgcgcctggggtcagggccgggggcgaatgtggctcgcgttctaggcctccctgggttggaaaaagactatgttagcaagtgtcacgccatgcttttgccaactttccaattaaaggttgacattcctgcataagcatttctctgtgaaaatgtccttgcctcttacagaggagcagaggaaaaagattgaagagaatcgacaaaaggctctggcccgcagagctgagaagttattggcagaacagcatcagaggactagctcgggcacctccattgctggcaacccattccaggccaagcaaggcccatcccaaaatttcccaagggagtcttgtaagccagtgagccatggtgtcattttcaagcaacagaatctcagtagctcatctaatgctgaccaaagacctcatgattcccacagttttcaggcaaagggaatatggaaaaagccagaagaaatgcccacagcctgcccaggccacagtccacgtagtcaaatggctctcactggaatctctcctcccttggcacaaagtcctccagaggtccctaaacaacagctcttgagttatgagttaggtcaaggtcatgctcaggcttcacctgagatcaggttcacaccctttgctaacccaactcataagcctctggccaaaccaaagagttcccaagagacaccagctcattcctctggacagcctcccagggatgctaagttagaggccaagacagcaaaagcctccccttcggggcagaacatttcttacatccattctagctcagagagtgtaacgcccaggacagaaggaagactccagcagaagtcagggtcctcagtccaaaaaggagtgaactctcagaagggaaagtgcgtaaggaacggcgatcgtttccaggtgttgattgggtacaatgcggaactcattgcagtgtttaagaccctgcccagcaagaattatgatcctgacaccaagacgtggaacttcagcatgaatgactatagtgccctgatgaaagcagcccagagcctccccacggtcaacctgcagcctctggaatgggcctatggcagcagcgagtcaccctccaccagcagtgagggacaggccggccttccatcagctccatccctttcatttgtcaaagggcgatgcatgctcatctccagggcctacttcgaggcagacatcagttattcacaggaccttattgcgctttttaaacagatggattccagaagatatgatgtcaagaccaggaagtggagctttctcttggaagagcacagtaaactaattgcaaaggtgcgctgcctcccacaagttcagctggaccctctgcccacgactctcaccctggcgtttgcttctcagctcaagaagacatctctcagtctcacgccagatgtcccagaggcagacctttctgaagtggaccccaagctcgtgtctaatctgatgccctttcagagagctggagtcaattttgccatagccaaaggaggccgcctgctgctcgctgacgacatgggcctggggaagaccatccaagccatctgcatcgcagccttttaccggaaggagtggccgctcctggtggtggtgccatcctccgtgcgcttcacctgggagcaggccttccttcggtggctgccatctctgagcccagattgcatcaacgtcgtggtgactgggaaggaccgcctgacagctggcctgatcaacattgtcagctttgaccttcttagcaagttggaaaaacagctaaaaaccccttttaaagttgtcatcattgatgaatctcacttcctcaaaaacagtaggactgcccgctgtcgagcagctatgccggtcctaaaggttgccaagagggtgatcctgttgtcgggcacaccagccatgtcccggcccgcagagctctacacgcagatcatcgcagtcaagccaactttcttcccccagtttcatgcctttggacttcgctactgtgatgccaaacggatgccttgggggtgggactactcaggttcctccaacctgggagagctgaagctcctgctggaggaagcagtcatgctgcggcgcctcaagtccgacgtcctttcccagctgcctgccaagcagcgcaagatagtggtgattgccccaggacggatcaatgccaggaccagagctgccctggatgctgcagccaaggaaatgaccaccaaggacaaaactaaacagcagcagaaagatgccctcattctcttcttcaacagaacagctgaagctaaaatcccatctgtcattgaatatatcttggacctactggaaagtggaagagagaagtttttagtatttgcacaccataaggtggtcctggacgcaattacgcaagagcttgagagaaagcacgtgcagcacatccgcatcgatggctccacctcatcagctgagcgggaggacctgtgccagcagttccaactgtcggagaggcatgctgtggccgtgctgtccatcaccgctgccaatatgggcctcaccttctcctcggctgacctggtggtgtttgctgagctgttttggaacccaggggtgctgatccaggctgaggaccgcgtgcaccgcattggacagaccagctccgtgggcattcactacctcgtggcaaagggcacagctgatgactacctttggcccctgattcaagagaagattaaagttctggcagaagccgggctttctgagaccaatttttcagaaatgacagaatccactgattacctctacaaggacccaaagcagcagaagatctacgacctattccagaagtcctttgagaaagaaggaagtgatatggagctcctggaagcagcagagtcctttgacccaggaagtgcttcaggaacatctggaagtagttcccagaacatgggagacaccctggatgaaagctcattgacagccagtccacagaagaaaaggagatttgaattttttgataactgggacagctttacgtctcccctgtaaaaggggcaaaaagaaaaaaataaaaagcattttaaaatcatggaattgaaataaaataatgtattttgtnnnnnnnnnnnnnnnnnnn

SEQ ID NO: 19145 - DNA, 730 bp, Homo sapiens
  misc_feature 720, 721, 722, 723, 724, 725, 726, 727, 728, 729, 730: n = A,T,C or G
tcgacccacgcgtccggcccatatccctatattgtttgcttgtttgggataacctaaaattttttatccagtttactactaatttgttttacctgatgtatcttctctttcaataattttatgttaccttctgtttagaataatatttgccacagatatttaggtttaattctgtgtttgaatgattccaatgcctttctctacccactttgaacacttcatcctggaatggttggctgatgtatgtctctaaacaattttttttttaggagaaggtatgtgggtaatgtaattcctaaacctttgcttttctgaacagtctttcatttgcctttatacatgaccagatttactgggtatatagatttgttgatgaaaaaaggtaaaaagagcaacttttgacatccagaggttgtctggcactcacagctagcccgtgttattctccctattagacataatattacagaataccaactttagacaaggctacttgagaccataataaagtgagacaaaacaagggatccataattttgcctaggtacagtacatacaggatcactatgctacccgcaaaatatcaaacatctccatctctcagttaaaatgagtgactactgcttctttaccaattacggttttagatttgctctagtctggcctccgtatggataagatttattgacccgcgttaattaattctagaagacttccgannnnnnnnnnn

SEQ ID NO: 19146 - DNA, 1349 bp, Homo sapiens
  misc_feature 1349: n = A,T,C or G
gcgtccgtctaaccctaagctaaaagtcattgtgaaccttttggtctgatgctaaagaagggaaaacaggtacaggaaatcccatgtggatgcttgcttccaggatttcctgccatgattccagaatcccacagctccaacatgattgcaaaagactccctgctcatttttcctcagcatgcacagcgctgccctgtctcagttgcaactcgacagagccgcatttactccagaacccaatccacacacctgctcatcctgccccgagaggagtgcctgaagccaatagcagggaactagagcagacttgggtggatcttcattggatattaggtatcttgccctagataggcagcagtggccttacagatgctgacagatgatctgattagatgcacagttgctgggtggcgtctggggccagtctattggcagttctgggagtgggaactatttgggctctgcaaagatggtttcacctttaagaagggcagtatggggaggtgaagatggggcccaaaggatagaacatagtcaaagaagcagggccacaatgcccctttaattcccaagccctagttgggcagtgcttggtgacacatcccattacctcaccttagatcaatgtctactgagccatcattagctctgcttcctcacttcttcacagtatctgatggcccatcacatgctgctcaacatcttagaccaatgtctgctcacccattacctcccttcacctcatccagcactgtatctgaagcttcactattcttccttcagttttggatattttgtgatacaacattatccccaacttaggacaatgtcagctgactctcaggagggtgcctggagatcacctcttccttcctaacataccctagaacaaggtctggtccccttcattattcccattttaccttactcctaagtgtatcactcctcatgaattccaggaaatatggaggaaaacacatttcactgtacatgactttcaataatttctcctttatatttattgtaacgtgatattttagtgctgacatatatatgtatatgtatgcccatttatataaaagactagtttttagagaaattttaggttcacagcaaaatggggcagaaggtacagagatttcccatatatcccctaccctcacatatacacagcctcccccatcatcaacatcccccttcagagtggtacatttgttacaattgatgaaactacattgacactatcggccaaagtccatggtttaattagggttcagtcttgatgtgcattctgtgggttgagacaaatgaataatgacatgtatgcattattacagaaggataaagan

SEQ ID NO: 19147 - DNA, 1131 bp, Homo sapiens
  misc_feature 1, 2, 1130, 1131: n = A,T,C or G
nnactatgctgcgccgctcagccatgcctgagggagcccaaggactgagcctctccaaacctagcccaagcctcgggtgtggccgaagaggtgaagtgtgtgactgtggcaccgtgtgtgagactcggacagcagctcctgcagcccccaccatggcctccccccgaggttctgggagctccacatccctgagcacagtgggctctgagggggatccagcccctgggcccactccagcctgctcagcctccaggccagagccccttccagggcctcccatccgcctacatctctctccggtggggatcccaggttcagccagaccctcaaggctggagcgtgtggcccgggagatcgtggagacagaacgggcctatgtcagggacctccgcagcatcgtggaggactacctgggccctctgctggacggcggggtcctggggctgagcgtggagcaggtgggcacgctgtttgccaacattgaggacatctacgagttcagcagcgagctcctggaggacttggagaacagctagcagcgctcgggggtatttgcctgagtgcttcgtgcagaaggagcgaggattttgacatctacacattgtactgcatgaactacccgagctccctggccctgctccgggagctgtcgttgtctccgccagcagccctgtggctgcaggagcgccaggcccagcttcgccactcgctgcccctgcagagcttcctgctgaaacctgtccagcgcattctcaagtaccatctgctgctgcaggaactagggaagcactgggcggagggcccaggcactgggggtcgcgagatggtggaggaagctattgtgtccatgacagcggttgcctggtacatcaacgacatgaagcgcaagcaggagcatgcagcgcgcctccaggaagtgcagcggcggctgggtggctggaccggaccagagctcagtgcttttggggaactggtgttggaggggcgcgttccgaggaggcggaggtggggtggcccccggctacagggggggggagcgggctgctcttcctgttctctcggatgctgctggtggccaagcgcagggggctggagtacacctacaaaggccacatcttctgctgcaaccnn

SEQ ID NO: 19148 - DNA, 1172 bp, Homo sapiens
  misc_feature 1171, 1172: n = A,T,C or G
gggagtcgacccacgcgtccgcgggatgttcatggaaagcaggacagacagaattgtgtatgccttgcctatcacggtacagcacgaagccaggctcctttctccaccaaagaagatggaaccagactggaattctgtctccagagagaaacccagctgtttgggtcaaagacagatgcttcagacttgggtgggaaggtgaaagatggctatttagaaagctggtggcacgttttacataagggaatgtcagatgggagatgctagttgccattttaacaaagcaggtaaatcggtaaattttaaactctgtccatgttctgttagaactcagggacaaggatccatgaaaaagacctgtgatgtttctctggcgctttactggcctgggcacacctaccaatcttctaggatttgactggttccattacatttcctttgggtataagcttcacagaaaagctgacacttcctctacagagatggaccaaaacataagcaatttcagtctacagcatgtgcatggttgtcagtgcattctaaatatttctatgtgaggaatggtaccttctgaaactgcctttccagtctttaggcaatgggataggaccagaccgaatgaaacacaaatggatttgtatgtacacatttccttaatttaatgcagtaggctgtgccccagaggattccagacagtggctggctgaggtgggtggggagcttttccttgagactgttggtctaagaagccagccctttcgggagaggcgctggccaagggtggccgcccctttcaccggcacatctgtgggacctgacgccccagtggcggcggaatcagggtacaggctggtgaacatttgcttaaatttccggacctgcttggcggtctttgccatcctagcatgggcgagaacttatcacatttacgccgacccttttgggcgaccaccatgaccctggcgggcctatataaacaggcgggaaatagtttggcaggccacaacctaagagcgcggaagctttctacaacagcgggtgtgcaccggtaccatctaggggagcgtgccccgcggagttgtacaaaagtggttgctcatcagcatcacacaacaaatactatcactaggcgataggttcactatcagctacattatttctcctgttctcnn

SEQ ID NO: 19149 - DNA, 1310 bp, Homo sapiens
  misc_feature 1, 2, 3: n = A,T,C or G
nnncctgtagtcgttaaccctcatggctgcctaccttttcccggctatacccttgtgttgcatcggtttcagccatctcgccacatacgccaccgtttgttttttcgccattgtactctcagtgagattatgtcctcgtcgcatgagtcaccgccacattcggacatcgtggcgcctgctccccacgatggatgcccggtgtttgctcagggagcaagcgtgccgaacccttgctcgcagtctgcgcagtggaaagggctttctcgccccctgtggctcttacatgttgcttccatccagtgtggagcgccagcggagcctcttccccgcacacgtagcagccgtgacgctgtcagctacgtggacaggggggtgggcaacaaacgggcggcgactcggcgccgggccttggacagctgctccaacccggcaaagggggcttgggagccttcagcccaggagacccggcggccacagggtcgggcttctccagggctcccgtcccttccctttgtctttcctcttccttgtttctggaatctgggtccgcttctgtcggacacttcgccacctccggatcctgggcagccggatcccacagttcggccttctcctccacccaggagatgagcgccggcttgctgcctccgactcctgggggagaagaacgcaaaccccacgctgcgaggagccgcctgcccggccccggggcccccaactccacacgcagctcccagaggcgcggcagggcctgtggaggcgcagggcccaggcaagcaggtggggctctcaccgagcgcgcccaggtggccgtaggtctcccgcatcacgtcccggtacagggccctctgcgcgggccgcaggcagccccactcctcccgggagaagtacacggccacgtcggcgaagctcacggccccgggctttctccactcggatcccgccccgtttgggtcccggggagggagcggggccagaggcggcgccatggggactgtcagccccagcgacggatcggtcatctcccctggccaggcctgggcatgcggaacctcccgcgcccgagaacacttccccggcccggtaccaagggaaggagggacgtcagtagagcccccgaaggcccactagaggggatggaaactaagggccgatggctgcgagtccatggtcagaactggacgatgtcttcaaataaaacggcggcagcgcgacctctcgacctttgcccctgcgcaattgtacccacgacgacgcccccctccccgcgcccccgctccaggcccagttctctccgtgcggacgcgtgg

SEQ ID NO: 19150 - DNA, 1536 bp, Homo sapiens
  misc_feature 1, 2, 3, 4, 5, 6, 7, 8, 9, 10, 1521, 1522, 1523, 1524, 1525,1526, 1527, 1528, 1529, 1530, 1531, 1532, 1533, 1534, 1535,1536: n = A,T,C or G
nnnnnnnnnnatatccgggctctctgggagcccctgttgttgtagtgtccccccctgtgtgtgccttcctcgcgcttccctccttgggggttgtggttcctcgaaacgcctcctgttttgtcccccccggggcgctgtttttttatatttgtgggggaggaactcccccccgcttgtgcttttggcgcccgcgagtctctcttctcttggggaaccagccttgttggccgccactgttccttcctctatccccctacttgtcgggccccgccgctcgccccccaccacggagtggggtctttacagaaaatagctttatcctcgatgggggcccgcgtaggcgggccgcgcacacacatgttttttcttttttcttttctttgtttgtttgtgtcttcttttttcgcagaagggggaagggggaggaagaaatttttatattaaaatggtggcgagaactgcccccccccccccccagcaggagagcagcaaaatttatgcaaatctttgacggggttttccttgtcctgccaggattaaaagccatgagtttcttgtcacatgcctttctatgccttccatggctgggtctcagggagccggaagcacctgagaaatgctacgaccaacttttcgttcagtgggacttgcttcacggtgagttttattcagcatccgatccaagtcctactcgagtgaccgtgggcccttagtccaagccttgatcggcgactaagtgacggcagtgactgccgccatgccgagctggacggaagtcacttctgagaagggcggaagtgtctcgggctccttagagggaggacaccatattagtgccagtggggaagtcaccgggtggaattacttctttgtggagtttgtgctgtagcgacaatgaaaaacgaagagtcaacttttataaaacaaaataaaaattaagtcaaatcatgccaacctttattagatcgctagcagggttaaacttaattcaaagcccctgatgaatcgggccttcattgcacccccaaaggctccgccaccctgattgctttctttccagcctccaggtttgctcatagtctgatttcggaataatttgcctcccttcctttttctgattgcgagacagctccacaagggtcaccgtcagaccgtttggggagcgtcagtctgcccctgtcagttcatggtacctctcttgagctcgtggggcactttgttttagccgcattcatgacccgtgagagtcagactcccactagaccaagttccttgaggggaaggcttcaaggctagagaagttgtggatggccagggcataaaagcaagccttgaaagggtaaggtttagtccctgagtaggggccagggacagtcagagtgttcaagaaagagtggtatggggcgggcacggtggctcacgcctgtaatcccagcactttgggaggccgaagcgggtggatcacctgaggtcaggcgttcgagaccagcctggtcaatagggcgaaaccccgtctgtacnnnnnnnnnnnnnnnn

SEQ ID NO: 19151 - DNA, 667 bp, Homo sapiens
  misc_feature 1, 665, 666, 667: n = A,T,C or G
nctgcaatttggcggtggtggtgtaagtcggtgccggcgccggtacgcctggtccccgcgtggagtctttactcaaaacagctcccgcctcaggccgagatgaggagcccttcaaaatagctgctgtctctgggaggacccgggcgtccttggcagcccagctgctctggacaaagccctgccagtcaggcctccgctggcaggaaccatggcagaggctggggatgctgcgctatcggtggccgagtggctgcgggcattgcacctggagcagtacacggggctctttgagcagcatggcctggtgtgggccactgagtgccaaggcctcagcgacacccgcctgatggacatgggcatgctactccctggtcaccgccgccgcatcctggctggcctgctccgtgcccatacctcaccggcccctgcaccccgcccccccccggcctgtgcccatgaagcgccacatcctgccgctcaccacctgtgcctgccactccacccgagccgctgcccaccactacagaggatgaggggctccccgctgccccacccatcccgccccggaggagctgtcttccgcccacctgcttcaccaccccatccacagctgccccagaccctgtgctgccccccgtggctgctaagcggcatttggcagagcnnn

SEQ ID NO: 19152 - DNA, 1361 bp, Homo sapiens
  misc_feature 1, 2, 10, 1356, 1357, 1358, 1359, 1360, 1361: n = A,T,C or G
nncgtccggntaaactcagattagatctcccatcaggatcaaagctaactgaaggagtatccagttgctggtttctaacagctgaaggcaatgaatggctacttcaaggacagatagcagctggagatatagagaacatttccagtcaaccaacaatttcactacaaattcctgatgattgcttatcacttgaagccattgtatctgtcagtgtgtttctttattactgtagtgcagacagcagtgcttgtatgatgaaggcaattttgttcagtcagcctttacaaataacggatacacagcaaggttgcatagctccagtagagctcaggtatgtattttagccagccagctagctagcaacccattgccaccacctactgtctcccatcctgactatcactgtaatttaaggaaagaaaacttcagttctgcctctggataccaagatgcccattgctcagttcagacaactgatattaaaataaagctatgctccttacttacttcttttattataaacaaattcctttgctttggctgatactagctgagtcattgatcatcattggtaccatgatattgtaatctatgctgctatttggcacaagactgaagttcacactacagtagagaatactataagataatttgcaataaatactgataataataataccagatattttaactaactttttctacctttattaatagcaatcagcacacttgaatgtgtaaatttcacagtaactttaggcagaacttaagctccaggccacatttgtataagaacaccaagtattcaaggcataaagtctgttgtaagccaaaaaaaagtcttttcatcactgtagaagcttaaggagtacatcagtggtaaatacgatctttattctcttctgtggttttctcagttgagatatttttaaaagagagttttgatcgtattttattataaatgattgtgatttaagcataccattatgaatgccttaaaactttgtacagataaagttggacatagaatctctaaggactgatcctttaactgtatgtgagtgactacagttacagataatgaatgagtcccagaaatattatgaccttcaaggaaacagggcttaggacacataactaggtctgtgagtaataattatggggcgctaaactgatgtgctatctgttgggatgcattcattgtagctaaatggaatggagtaggtggggacggccctatgaattatagctaaggggtaaaccataacgaagaataggggggacgaaaaaaattaatagaaagcagggaagcataagggcaaaggagtggaaagttaatagaataattattaatannnnnn

SEQ ID NO: 19153 - DNA, 11295 bp, Homo sapiens
  misc_feature 11276, 11277, 11278, 11279, 11280, 11281, 11282, 11283, 11284,11285, 11286, 11287, 11288, 11289, 11290, 11291, 11292,11293, 11294, 11295: n = A,T,C or G
gggagtcgacccacgcgtccgagactggctagccaagcatctagacccacaaggtcccctagcggcagcggctctagaagtagatcctccagtagtgattcaatcagcagcagcagtagtaccagcagtgacagcagtgattccagcagtagttcaagtgatgattctccagctcgatcagttcagtctgcagcagtccctgcacccacttcccagttgctttcatctctggaaaaagatgagccccgtaaaagttttggcatcaaggtccagaatcttccagtacgctctacagatacaagccttaaagatggccttttccatgaatttaagaaatttggaaaagtaacttcagtgcagatacatggaacttcagaagagaggtatggtctggtattctttcggcagcaagaggaccaagaaaaagccttgactgcatcaaaaggaaaacttttctttggcatgcagattgaagtaacagcatggataggtccagaaacagaaagtgaaaatgaatttcgccccttggatgaaaggatagatgaatttcaccccaaagcaacaagaactctctttattggcaaccttgaaaaaaccactacttaccatgaccttcgcaacatcttccagcgctttggagaaattgtggatattgacattaagaaagtaaatggagttcctcagtatgcgtttctgcaatactgtgatattgctagcgtttgtaaagctattaagaagatggatggggaatatcttggaaataatcgcctcaagctgggttttggaaagagcatgcctacaaactgcgtgtggctagatgggctttcttcgaatgtgtcagatcagtatttaacacgacatttctgccgatatgggcctgtggtaaaggtggtgtttgaccgcttaaaaggcatggccctggttctctacaatgaaattgaatatgcacaagcagctgtaaaagagaccaaagggaggaaaatcggtgggaataaaattaaggtggattttgcaaatcgggaaagtcagctggctttttatcactgcatggagaaatctggtcaagacatcagagacttttatgaaatgttagccgaaagaagagaggaacgaagggcatcctacgactataaccaagatcgtacatattatgagagtgttcgaactccaggcacttatcctgaggattccaggcgggactatccagctcgagggagagagttttattcagaatgggaaacttaccaaggagactactatgaatcacgatactacgatgatcctcgggaatacagggattacaggaatgatccttatgaacaagatattagggaatatagttacaggcaaagggaacgagaaagagaacgtgaaagatttgagtctgaccgggacagagaccatgagaggaggccgattgaacgaagtcaaagtcctgttcacttgcgacgtccacagagtcctggagcgtctccctctcaggcagagaggttgccgagtgattctgagaggaggctttacagccgatcctcagaccggagtggaagctgtagctcactctcccctccaagatatgagaaactggacaagtctcgtttggagcgctatacaaaaaatgaaaagacagataaagaacgaacttttgatccggagagagtggagagagagagacgcttaatacggaaggaaaaagtggaaaaggacaaaactgacaagcagaaacgcaaaggaaaggttcactcccctagttctcagtcttcagaaacggaccaagaaaatgagcgagagcaaagccctgaaaagcccaggagttgtaataaactgagcagagagaaagctgacaaagagggaatagcgaaaaaccgcctggaactcatgccttgcgtggttttgactcgagtgaaagagaaagagggaaaggtcattgaccacactcctgtggaaaagttgaaagccaagcttgataatgacactgtcaaatcttctgccctggaccagaaacttcaggtctctcagacggagcctgcaaaatctgacttgtctaaactggaatcagttagaatgaaagtaccaaaggaaaaggggctttcaagccatgttgaagtggtggagaaggaaggcaggcttaaagccaggaagcacctcaagcctgagcagcctgcagatggggtaagtgctgtggatctggagaagctggaagccaggaaaaggcgctttgcagattccaatttaaaagcagaaaagcaaaaaccagaggtcaagaaaagcagtccagagatggaggatgctcgcgtgctttcaaaaaagcagcctgacgtgtcctctagagaggtcattctgctgagggaaggagaggctgaaagaaagcctgtgaggaaagaaattcttaaaagagaatctaaaaaaatcaaactggacagacttaatactgttgccagccccaaagactgtcaggagcttgccagtatttctgttgggtctggctcaaggcccagctcagacctacaagcaagactgggagaaccagcaggtgaatctgtggaaaatcaagaagtccaatcaaaaaagcccattccctcaaaaccacagctcaaacagctgcaggtattagatgatcaaggaccagagagagaagacgttaggaaaaactattgcagtcttcgtgatgaaacacctgaacgtaaatcaggccaagagaaatcacattcagtaaatactgaagaaaaaattggcattgacatcgatcacacgcagagttaccgaaaacaaatggaacagagtcgtaggaaacagcagatggaaatggaaatagccaagtctgagaagtttggcagtcctaaaaaagatgtagatgaatatgaaagacgtagcctcgttcacgaggtaggcaaaccccctcaagatgtcactgatgactctcctcctagcaaaaagaaaaggatggatcatgtcgattttgatatctgcaccaagcgagaacggaattacagaagttcacgccaaatcagcgaagattctgaaaggactggtggttctcccagtgtccgacatggttccttccatgaagatgaggatcccataggctcccctaggctactgtcagtaaaagggtctcctaaagtagatgaaaaagtcctcccctattctaacataacagtcagggaagagtctttaaaatttaatccttatgattctagcaggagagaacagatggcagatatggccaaaataaaactatctgtcttgaattctgaagatgaactaaatcgttgggactctcagatgaaacaggatgctggcagatttgatgtgagtttcccaaacagcataattaagagagatagccttcgaaaaaggtctgtacgagatctggaacctggtgaggtgccttctgattctgacgaagatggtgaacacaaatcccactcacccagagcctctgcattatatgaaagttctcgattgtcttttttattgagggacagagaagacaagctacgtgagcgagatgaaagactctctagttctttagaaaggaacaaattttactcttttgcattggataagacaatcacaccagacactaaagctttgcttgaaagagctaaatccctctcttcatctcgtgaagaaaattggtcttttcttgattgggactcccgatttgcaaattttcgaaacaacaaagataaagaaaaggttgactctgctccaagacctattccatcctggtacatgaaaaagaagaaaattaggactgattcagaagggaaaatggatgataagaaagaggaccataaagaagaagagcaagagaggcaggaattgtttgcttctcgttttttacacagctcaatctttgaacaagattccaagcgattgcagcatctagagagaaaagaggaagattctgacttcatttctggtaggatctatgggaagcagacatctgagggagcaaacagcacaactgattccattcaagaaccagtagttctgttccatagcagatttatggagctcacacggatgcaacagaaagaaaaagaaaaagaccagaaacccaaagaggttgagaaacaggaagatacagagaatcatcccaagaccccagaatctgctcctgagaataaagattcagaactgaaaactccaccttccgttgggcctccaagtgtcacagtcgtaactctagaatcagccccatcagcactagagaagaccactggtgacaaaacggtagaggcgcctttggtaacagaagagaagactgtggagccagctaccgtctcagaagaagcaaagcctgcatctgaacctgctcctgcccctgtggaacagctggaacaagtagacctgcccccaggagcagaccccgataaagaagctgccatgatgcctgcgggtgttgaggaaggttcatcaggtgaccagccgccttatctggatgccaagcctccaactcccggggcctcgttttcccaggcagagagcaacgtagatccagagcctgacagtacccagccactttcaaaaccagctcagaagtctgaggaagccaatgagccaaaggccgaaaagccagacgccactgcagatgctgagcctgatgcaaaccagaaagccgaagctgctcctgagtctcagcccccagcttctgaagatttagaggttgatcctccagttgctgcaaaggataaaaagccaaacaaaagcaagcgttcaaagacccctgttcaggcagctgcagtgagtatcgtggagaagcccgtcacaaggaagagtgagaggatagaccgggaaaaactcaagcggtccaattctcctcggggagaagcacagaagcttttggaattgaagatggaggcagagaagattacaaggactgcttctaaaaactctgctgcagaccttgaacatcccgaaccaagtttgcctctcagccgaacaaggcgccggaatgtaaggagcgtctatgcaaccatgggtgaccatgaaaaccgctctcctgtcaaagagcccgttgagcaaccaagagtgaccagaaagagattggagcgagagcttcaggaggctgcagcggttcccaccacccctcggaggggaaggcctccaaagacacgccggcgagccgatgaagaggaggagaacgaggccaaggaacctgcagaaacactcaagccacctgagggatggcggtcgccaaggtcccagaaaactgcagctggtggtggaccccaagggaaaaagggaaaaaatgaaccgaaggtggatgctacacgtcctgaggccaccactgaggtgggcccccaaataggcgtgaaagagagctccatggaacccaaggctgctgaggaggaggcagggagtgaacagaaacgtgacagaaaagatgctggcacagacaaaaacccccctgaaaccgcccctgttgaagttgtagagaaaaaaccggcccctgaaaaaaactccaaatcaaagagaggaagatctcgaaactccaggttagcagtggacaaatctgcaagtctgaaaaatgtggatgctgctgtcagtcccaggggggctgcagcacaggcaggggagagggaatctggggtggtggcagtctcccctgagaaaagtgagagtccccaaaaggaggatggtttatcatcccagttgaaaagtgatccagttgatccagacaaggaaccagagaaagaagacgtgtctgcctctgggccgtccccagaagccacccagttagccaagcagatggagctggagcaggccgtggaacacatcgcaaagctcgctgaggcctctgcctctgctgcctataaggcagatgcaccagagggccttgccccagaggacagggacaagcctgcacaccaagcaagtgaaacagagctggctgcggccatcggctccatcatcaatgacatttctggggagccagaaaacttcccagcacctccaccttatcctggagaatcccagacagatctgcaaccccccgcaggtgcacaggcgctgcagccttctgaggaaggaatggagacagatgaggctgtatctggcatcctggaaactgaggctgctacagaatcttctaggcctccagtcaatgctcctgacccctcagccggcccaacagataccaaggaagccagaggaaatagcagtgaaacctcacactcagtgccagaagccaaagggtctaaagaagtggaagtcactcttgttcggaaagacaaagggcgccagaaaacaacccgatcacgccgcaagcgaaacacaaacaagaaagtggtggctcctgtagagagccatgtccctgaatccgaccaagctcaaggtgagagtcctgctgcaaatgaggggacaacagtacagcaccccgaagccccacaggaagaaaagcagagtgagaaaccccattccactcctcctcagtcatgtacttctgacctaagcaagattccctccacagagaattcgtcccaagaaatcagtgttgaggaaaggactccaaccaaagcatctgtgcccccagaccttcccccacctccccagccagcaccggtggatgaggagcctcaagccaggttcagggtgcattccatcattgaaagtgacccggtgaccccacccagcgatccaagcatccccatacccacactgccttctgtaactgcagcaaagctctcacctcctgtcgcctctggggggatcccacaccagagcccccctactaaggtgacagagtggatcacaaggcaggaggagccacgggctcagtctactccatctccagctcttcccccagacacaaaggcctctgatgttgacaccagctccagcaccctgaggaagattctcatggaccccaagtatgtgtctgccacaagtgtcacttccacaagtgtcaccacagccattgcagagcctgtcagtgctgccccttgcctacatgaggccccgcccccgccagttgactctaaaaagcctttagaagaaaaaacagcacctccagtgacaaacaactctgagatacaagcctcggaggtgctggtagctgctgacaaggaaaaggtggctccagtcattgctcccaaaattacctctgttattagccggatgcctgtcagcattgacctggaaaattcacagaagataaccttggcaaaaccagctcctcaaaccctcactggtctggtgagcgcactcactggcctggtgaacgtctccctggtcccggtgaatgccctgaaaggccccgtgaagggctcagtgaccacactgaaaagtttggtgagcacccctgctgggcccgtgaacgtcctgaaagggcctgtgaatgttcttacggggccagtgaatgttctcaccactccagtgaacgccacggtgggcacagtgaatgccgccccaggcacagtcaatgccgctgcgagtgcagtgaatgccacagcaagtgcagtgaccgtcacagcgggtgcggttactgctgcatctggtggtgtaacggccacaacaggcacggtgacaatggcaggggcagtgattgcgccgtcaacaaagtgcaaacagagagcgagtgctaatgaaaacagtcggttccacccagggtccatgcctgtgatcgacgatcgtccggcagacgcgggctcaggggcggggctgcgtgtgaacacttctgaaggggttgtgctcctgagttactcagggcagaagaccgaaggcccacagcggatcagcgccaagatcagccagatccccccggccagtgcaatggacattgaatttcagcagtcagtgtccaagtcccaggtcaaacctgattctgtcacagcatcgcagcctccatccaaaggccctcaagctcctgcaggctatgcgaacgtggccacccattccacgttggtactgaccgcccagacatataatgcctctcctgtgatttcgtctgtgaaggccgataggccatccttggagaagcccgagcccattcacctctcggtgtccacgcctgtcacccagggaggcacagtgaaggttctcacccaggggatcaacacaccccctgtgctggttcacaaccagctggtcctcaccccaagcattgtcaccacaaacaagaagcttgctgaccccgtcacccttaaaatcgagaccaaggtccttcagccggccaacctggggtccacgctcacgccccaccaccctcctgctctgcccagcaaactgcctacagaagtcaaccatgtcccctcggggcccagcatcccagcagatcgaactgtctcccatttggcagctgcaaagctagatgctcattctcctcgaccaagtggacccgggccatcctcattcccaagggcaagccaccccagcagtactgcatctacggcgctctccaccaacgccacagtcatgctggctgcaggcatcccagtgccccagttcatctccagcatccacccagagcagtctgtcatcatgccaccccacagcatcacccagactgtgtccctgagccacctctcccagggcgaggtgagaatgaacactcccacgctgcccagtatcacctacagcatccggccagaagcgcttcactctcctcgggctccgctgcagccccagcaaatagaggtcagggccccacagcgtgccagcaccccgcagccagccccagctggtgtgcctgcactggcctcccagcaccctcccgaggaggaagtgcattatcaccttcctgtcgctcgagccacagcccctgtgcagtcagaggtactagtcatgcagtctgagtaccgactgcacccctatactgtgccacgggatgtgaggatcatggtgcatccacatgtgacggcagtcagcgagcagcccagggccgcggatggggtggtgaaggtgccaccagccagcaaggcccctcagcagccagggaaggaagctgccaagacaccagatgccaaagctgcccccacccccacccctgcccccgtccctgtccctgtcccccttcctgcccctgctcctgcccctcatggtgaggcccgtatcctcacagttacccccagtaaccaactccaggggctgcctctgacccctcctgtggtggtgacccatggggtgcagattgtgcactccagcggggagctgtttcaagagtaccggtacggcgacatccgcacctaccaccccccggcccagctcacacacactcagtttcccgccgcttcctctgttggcctgccttcccggaccaagacagctgctcagggccctcctcctgaaggtgagcccctgcagcctcctcagcctgtgcagtccacacagcctgcccagcctgcaccaccctgcccgccctcccagctcggtcagcccggccagccaccaagcagcaagatgcctcaagtgtcccaggaggcaaaggggacccagacgggagtagagcagcctcgcctcccagctggacctgcaaacaggccacctgagcctcacacccaggttcagagggcacaagcagaaacaggcccgacttccttcccctcccctgtgtctgtctccatgaagcctgaccttccagtctctcttcccactcagactgccccaaaacagccgttgtttgtcccaacaacctctggccccagcaccccaccaggactggttctgccacacactgaattccagccagcccccaaacaagattcctctccacacctgacttcccagagacccgtggatatggttcaacttctgaagaagtaccccatcgtgtggcagggcctgctggccctcaagaatgacacagctgctgtgcagctccacttcgtctctggcaacaacgtcctggcccatcggtccctgcccctttctgaaggagggcccccactaaggatcgcccagaggatgcggctggaggcaacgcagctggaaggggttgcccgaaggatgacggtggagacagattactgtctgctgctggctctgccctgtggccgtgaccaagaggatgttgtgagccagaccgagtccctcaaggctgccttcatcacttacctgcaggccaagcaggcggcagggatcatcaacgttcccaaccctggctccaatcagcctgcctacgtgctgcagatcttcccgccctgtgagttctctgagagtcacctgtcccgcctggcccctgacctccttgccagcatctccaacatctctccccacctcatgattgtcattgcctccgtgtgagccactgagtggttatcacctcagtgaatcttcccagggctctgcagtaaaaacaaaggacaacccagccaagcagaggaagaagctgccgaaggggacagactccactgccagacggccagccgtttgctgtcctgccgcccggctcagtcggccagacttcctctaggagtggtgctgctaccttgtatgtttacataatgctttagcccaaggacacatcaccaacccatggactcgcagacaccggggctgggtttctctttcctctttttggagaaaaggaacagggcagtggaatgaaaattttttgtttgtttgtttttaagaaacaagaaaacagaactgcctttgcactaaattagtgacttggacttttgcccagtgaagacaggctgtgacactctggatgtcttggtgtgtgtagacacacattgcagactcttaacgcaggaaggacttcaaacttctgctgagaccttggggtcaaggaacatttcattggttttttttgtccacccccatctcccttgctcatttggatgcgtcaccttaattctcctgctgccaccgtctttgattcaccgggatgtacagtttacagttgaagagcaaacagaaaggttttctcttggtgggatatgcagaacttgggatgtgtgtatatataaatatataatatatataaatatatataatactgacttaaaaaatcaaatcccccgacatacgttttttttaatctgtgccaaaaatgtgttttcagaggaaatcttattttcatattcagactttgtattgcccactcatttgtataagtgcgcttcggtacagcacgggtcctgctcccgcgatgtggaagtgtcacacggcacctgtacaaaaagactggctaacccctcttcctattaccttgatctcttcccccaacttcctaacacttattaatttatgaaactgtttttctcagcgcagttttgttttgtgtgtccattggattacaaactttattaaaaaatataaaacannnnnnnnnnnnnnnnnnnn

SEQ ID NO: 19154 - DNA, 445 bp, Homo sapiens
  misc_feature 439, 440, 441, 442, 443, 444, 445: n = A,T,C or G
acgcgtccgcaccaggcccgagtcttcccttacatggagggtgacgtgagcagcaaggataagatgggcaaaggagtggatgggacatataaaaaagctcttcaggaagctgcagcaaggtttgaggaattaaaggcccaaaaagagctaagacagctgcaggaagaccgaaagaatgacaagaagccaccaccttataaacatataaagggtctccctctgtgacccaggctagagtgcattgctgcaattttggctcactgcaacctccgcttcgtgggcgcaagtgattctcctgcctcctgcctcagtctcctaagtagctgggattacagacatgagccaccaacgcctggctaattttgtgattggcaaaaaagagattttgtgacacataaagatgatatgaaattcaactttcaatcagtatccagaaaannnnnnn

SEQ ID NO: 19155 - DNA, 2978 bp, Homo sapiens
  misc_feature 1, 2978: n = A,T,C or G
ncctcagcctactaacgtgaagatgatgaggacgaagacctttaggatgatccacttccgccttggcggaggcctcctcgctggggaggcagagtcctcgcgtggtctcctgcctcgagcacagcctgtgcccaggggagccgggcttgcagacaacagcagtggtgtccatgggctctggagaccatcagttcaacctcgcagagatcctgtcacagaactacagtgttaggggggagtgcgaggaggcctcgaggtgcccagacaagcccaaggaggagctggagaaggacttcatctcccagagcaacgacatgccctttgatgagctgcttgcgctctatggctacgaggcgtcagaccccatttcagaccgggagagtgagggtggtgacgtggccccgaacctcccagacatgaccctggacaaagaacaaatagcgaaggatttgctttcaggggaagaagaggaagagacgcaatcatctgctgacgacctcaccccgtccgtgacctcccacgaggcctccgacctcttccctaaccggagtggatctcgtttcctggctgatgaagacagagagcctggctcttctgcctcctccgacaccgaggaggactctcttcctgccaacaaatgtaagaaggagatcatggtgggacctcagttccaagctgacctcagcaacctgcacttgaaccggcactgtgagaagatctacgagaacgaagaccagctgctctgggaccccagcgtcctccctgagagggaggtggaggagttcctgtacagggcggtgaagcggcgttggcacgagatggccgggcctcagctcccagagggagaagccgtgaaagacagtgagcaggcgctgtacgagttggtgaaatgcaacttcaatgtggaggaggccctgcgaaggctgcggttcaacgtgaaggtgatccgagatgggctctgtgcttggagtgaagaggagtgcaggaactttgagcacggcttccgtgtgcatggaaagaactttcacctgatccaggccaacaaggtgcgcacacggtcagtgggcgagtgtgtcgagtactactacctgtggaagaagtcggagcgctacgactacttcgcccagcagacgcggctgggccggaggaagtacgtcccgtccggaaccacggacgcagaccaggacctggatggcagcgaccccgatggccccggccgtccgcgcccggagcaagacaccctgactgggatgcgcacagatccactgagcgtggatggcacggccggtggtctcgatgagcccggagtggcctctgatggactcccgtcctcggagccagggccgtgttccttccagcagctggatgagtcccccgctgtacccctgtcccatcggcccccagccctggccgacccagcctcataccagccagctgtcactgctccggagccagacgccagcccaaggctggccgtggacttcgccctgcccaaggagctgcccctcatctccagccatgtggacctcagcggggatccggaggagactgtggccccagcacaggtggctttgtcggtcaccgagtttggactcatcggcattggggacgtgaaccccttcctggccgcccaccccacgtgcccggcccccgggctacactcggagcccctgtcacactgtaacgtgatgacctgctgactcctggccgcgggcggcgtatgcggcccagactggacttagcgctgccgctgggcccgcctctgtcagtcttcctgaccccttccccaccccccgggccttggggtagcacctccttctgcttcagaacacgtcaggactggggtgaggtggctgggccgtgagcccttgcccctgtccacacagaatggacccacggccccacccagcgccgtcagcgcccggcactgccacccgggtccgggccgctgcctgcacgtgggatccgtcgggcagccggggacagaagagaccccgccgttgggacgcagggcagagccggccacctagtcccttccagccagcagaggcgagggaaggcgtcactgccccggcggggagacggacaggacgccctgccccgcaccagcagcctccgccggggcgccctcagctccctgcttggctctgtctctccacacccggcagggccgcgggctgccccagccctgggggtcgtgggcagctgctactcagtgccaaccccgtggggcacagagccatatacctcgctgtccggcccccaccccagcctcgccttcccaccccatcgtctccacttcaggaaaagccgcactttacacccccacctgcctcttccccctccatccctgctccccgatccttgagcggaatggggtggggtccctcagcaaaccccaggccgtgggtattgaggagacaggtgatttacatcccctttggctggtcctcccccggtaccaagggcagggagcctccggaggagccggccctgctggcacgcaggggccaggactccagcctggtttccccagccctgcaggtccttccttctgttgggatgcttcctaagcagatggcttggagttctgggtcccgcttctccctggacctctcgtcggtgctggttcctggtaacccgttggagttgtggtcctccagtgagcagggagatcggcccatggcccggggatggacagacggcgcctatttgtggctccaaaggcccttattccggacggttgggacttcagacaatccccttcagcgccagccatggacgccgcctatgtgtaattgatatacttgcgtagagaccccccatatggtcgggatattactaaactagctctagaccccgggatagatgcagtcgaaacaacagcacacgcgcgcactccttgcgggggacaacgaagatcagtcatctgctatgatatccaacatcaacataggaatcacgccacaaagagatan

SEQ ID NO: 19156 - DNA, 468 bp, Homo sapiens
  misc_feature 468: n = A,T,C or G
gagtcgacccacgcgtccggtgcggagcaagcatcacaccatggcgtatgagtgttcctctgtgtagactcaacctgcgcctcgccgtcccccattcgcacacccgatgcccgggggtcgctacggacttaaaatctccgcaccgcaccctccacctcagaaacgttcctggatccgaacactgccccctgacgacctagagagatcccggctcccagcccactgagtggcttcagcctcgctggtaggtctctcctccaaagctctggaaacagactcctgggagtgagagggaggggagcgcaggcaccgccccctttccccaagtcccccgcccacttcatccctcaggcacctcccaactcctggcctctctgcacgaggcgcctgccccgggccccgcctaccaggggacccagctctttcttgcagccactggaagctgatcacctggagtgaagacctcan

SEQ ID NO: 19157 - DNA, 3252 bp, Homo sapiens
  misc_feature 1, 3241, 3242, 3243, 3244, 3245, 3246, 3247, 3248, 3249,3250, 3251, 3252: n = A,T,C or G
naggcgtacagctacgcgtccgcggcgcgtgaggaacctaccggtaccggccgcgcgctggtagtcgccggtgtggctgcacctcaccaatcccgtgcgccgcggctgggccgtcggagagtgcgtgtgcttctctcctgcacgcggtgcttgggctcggccaggcggggtccgccgccagggtttgaggatgggggagtagctacaggaagcgaccccgcgatggcaaggtatatttttgtggaatgaaaaggaagtattagaaatgagctgaagaccattcacagattaatatttttggggacagatttgtgatgcttgattcacccttgaagtaatgtagacagaagttctcaaatttgcatattacatcaactggaaccagcagtgaatcttaatgttcacttaaatcagaacttgcataagaaagagaatgggagtctggttaaataaagatgactatatcagagacttgaaaaggatcattctctgttttctgatagtgtatatggccattttagtgggcacagatcaggatttttacagtttacttggagtgtccaaaactgcaagcagtagagaaataagacaagctttcaagaaattggcattgaagttacatcctgataaaaacccgaataacccaaatgcacatggcaattttttaaaaataaatagagcatatgaagtactcaaagatgaagatctacggaaaaagtatgacaaatatggagaaaagggacttgaggataatcaaggtggccagtatgaaagctggaactattatcgttatgattttggtatttatgatgatgatcctgaaatcataacattggaaagaagagaatttgatgctgctgttaattctggagaactgtggtttgtaaatttttactccccaggctgttcacactgccatgatttagctcccacatggagagactttgctaaagaagtggatgggttacttcgaattggagctgttaactgtggtgatgatagaatgctttgccgaatgaaaggagtcaacagctatcccagcctcttcatttttcggtctggaatggccccagtgaaatatcatggagacagatcaaaggagagtttagtgagttttgcaatgcagcatgttagaagtacagtgacagaactttggacaggaaattttgtcaactccatacaaactgcttttgctgctggtattggctggctgatcactttttgttcaaaaggaggagattgtttgacttcacagacacgactcaggcttagtggcatgttggatggtcttgttaatgtaggatggatggactgtgccacccaggataacctttgtaaaagcttagatattacaacaagtactactgcttattttcctcctggagccactttaaataacaaagagaaaaacagtattttgctgcttcattgagagaatcagaccagcagagagagagagttatatgacaaaatatgctgaggataaaatattgacaaataaagaagatttgttagaagggccttttatactcgtttgtgttttaaataagagactcgggccgaaaacaagtttaagataagatctgtatcattgtattttactctaaaaactcctaagtggtttggtttttagatgaaaacctctataatgagcaaaagtccattccaattttccacttctaagttcctcttaattaatcttaattattggttggggaatgaagtgtctttgatagtctattattcttccttctagtgttataaaaattcttaagtgaatgtgtaaaacattggcattctgtaaaacatgattagcattaaaattaagctaaagataatgtggtttttcttgatgattgggaggtcactcaggatttttctgagcatttttatagaatacccatcatagttaattaaaaattccagttaatgcaacatcttataatggaatttattgtatatcactatttaagaaacagcttagttatataatatttttgataattgccaaaatacactttttttgaaaaaagacatttggaattgtttgaaaaactatttaccttctataatcattttcctaaaaatactacattggaaattgaaaaaacaaaagatatcaaatataatgaatatttattcaaaaagattacaatgtgattttctttttctagtttctcaactcattggatgctaaagaaatatatttggaagtaatacataatcttccagattttgaactactttcggcaaacacactagaggatcgtttggctcatcatcggtggctgttattttttcattttggaaaaaatgaaaattcaaatgatcctgagctgaaaaaactaaaaactctacttaaaaatgatcatattcaagttggcaggtttgactgttcctctgcaccagacatctgtagtaatctgtatgtttttcagccgtctctagcagtatttaaaggacaaggaaccaaagaatatgaaattcatcatggaaagaagattctatatgatatacttgcctttgccaaagaaagtgtgaattctcatgttaccacgcttggacctcaaaattttcctgccaatgacaaagaaccatggcttgttgatttctttgccccctggtgtccaccatgtcgagctttactaccagagttacgaagagcatcaaatcttctttatggtcagcttaagtttggtacactagattgtacagttcatgagggactctgtaacatgtataacattcaggcttatccaacaacagtggtattcaaccagtccaacattcatgagtatgaaggacatcactctgctgaacaaatcttggagttcatagaggatcttatgaatccttcagtggtctcccttacacccaccaccttcaacgaactagttacacaaagaaaacacaacgaagtctggatggttgatttctattctccgtggtgtcatccttgccaagtcttaatgccagaatggaaaagaatggcccggacattaactggactgatcaacgtgggcagtatagatgtggcaacagtatcattcttttttgtgcccagggaaaacgttcaaagatacctggggataagatttttttcccccaaaatcaaataaagcttatcattatcacaggttccaagggtgggatagggatggtattcccggaaactggggctaggatttactccaggttccccgatttaacccgaattcgtggaaatctcccgggaaacacnnnnnnnnnnnn

SEQ ID NO: 19158 - DNA, 2181 bp, Homo sapiens
  misc_feature 2180, 2181: n = A,T,C or G
cgtccgcgccatgctcctgcctcagcctcccaagtgctgggactacatgcgcctgccaccacacctggctaatttttttgttttttggtttttttttttagtagagacggggtttcaccatgttcgccaggatggtctcaatctcctgacctcgtgatccgcccgcctcggcctcccaaagagctgggattacaggcgtgagtcaccgcgcctgaccctgttaaagtattttctaagcttctttgaaaacggaatctctttgtggttgctgctgataaaactcctttgacctgacgattgctctaagtcctaattgccatatttatattcccatagtaagagtgtttggagatagtgtttgagcttttttgctggtgttaaaaatgcataatgaaagatggcagagagaggcatattatatccaattcatgagttgtttgtgttaacagaaagcttattttaatcacttaacattgttgatttgtctaatcacagtagcgctattgattaggagcctgacctttagatggttgacttgtgagtgtattcaatatggtgaaatatggtgttgatatatggctgcagattttagaggtgtcattagcaaaggtataggagtaaaataggggttatagtattccttactcaaattctgtatgtgctagagctggctggagtctgtggcatgctcattggtgtaagtcggtaaggactatgctttttgctccacatctctgttgtgggaaagctagtctcttgagcattcttgatcagaatggactggaataatttaactttcgtactttcccaggctattagtattatctaatgagtggcttaaagataccagaaacactgactgaggtctccacctgcttctggctgaatgaatgggagcttctagccattgaataagaggcagtagccaatgtttcttattctgaatggtccaggttgacttttataagagaaacactcagccttttaattgctgaaggtctggcccatagactaagattgcacattcttagtctaggttacacttgaactagactgcacccactgacgatatattcagttcaggtgttaactcacttggattagcatctggcctgtcctatctgaatataggttgagacgtgtattggaatctctgactagtcagaatacgttcttagttatattctcaatactgaggaatttttacttgtagaaactgaaggctcggaagaggatgataaagaaaatgataagactgaagaaatgccaaatgattcagtccttgaaaacaagtctcttcaagaaaatgaggaggaggagattgggaacctagagcttgcctgggatatgctggatttagcaaagatcatttttaaaaggcaagagacaaaagaagcacagctttatgctgcccaggcacatcttaaactacggagaagttgagtgtttgatagtctgaaagactatgtgcacagctgtgcgaggagttccagtcctgccttaacctgcaggaacagtacctggaagcccgacgaagcgtctcgcttgctagcagacccactacctagctgggcttgtgcttatgggtacaactctcagtatgatgaggcagtggatacggagttcagcagaatctattgaagtcattgagaacagaatggctgtactaaacgagcaggtgaaggaggctgaatggatcgtctgcttgaatacagagaaagaaattgaggaagtaaaggatcttgtacccgaaaatttagagagaatgatagaagatgcaaagtgagtctcagcggtagtgggaattgttagctgactggtctgaaaggtactctggtggaaagttctcacttgagtttcaatgctggtggaaagaagtcattattcttcatgattgccgttaaaaagccaaagacggggcgttttcattaaatggggtgatggattttccaccgggtggaaaggagaggaaccaaagggatatgactcctggaagattagtgaggaggcaaagaagggaggtaggagaaggggagtgttcccggaatgagattggaaacgggaggggtaatagtgaaggacatggaggggggacaaaagtgtttggggccggaagaggtgataggagggtagtaaaggataggcactgatagtttgtcatatttatatatgttgtgacnn

SEQ ID NO: 19159 - DNA, 872 bp, Homo sapiens
ccacgcgtccgacactttgtattgataacttaaaatggcatcagtttatcttagacatcagcttgctttttatctccctttttagtgagtgaaatagagcaactagcatgcctgtgttcccagctacttgggaggctaaggtgggaagatcaattgaacctaggaggttgaggctatagtgagctgtgattgcacgactgcactccagcctgggcaatggagtgagactcctgtctctaaaacagcaacaacaaaaataaagcaaccatagtgcataagggaaattaaatgttccctatagaaatatgtgtatgtctgtgatagtggtatgcaaatgctaattattttataaaataaaagttcagaactattcttatcattgccacttgaacaattaaagggtttgctttatttcactaatgtttaataggaaccctttgcttcaaacagctttgttgaaatcatgtaaaaatttgttaatagagaatcaagttatttaactcaacttatttaattcaagcttgtgatactaacatacaaaggtagcataaaccaagtcataaattgctgtaatctttccctgtaaagtaatagctacttcatgatttttttaaaaatttcatttttttgctatttaggattgcatttgcttggctcctagtaacaattcttttacagtattagcactctctttactaaggaatgcctcccaaggaaatgcaaaggtaggaaaagtctcttagaatgcccatgaggtatttaaaacagatatttatgaaaatctttttgtgaatgttataaatcttgctagttattttatctttatcttaagtattagatgtagttccttggaattgtcattacatatttat

SEQ ID NO: 19160 - DNA, 3673 bp, Homo sapiens
  misc_feature 1, 2: n = A,T,C or G
nnctctctgcggcgccctggggtcgtcccgttccgcgccgtcccttttgtgtctctcatcgcccgggcactctctctcgtcgccggcgctctctgtagtcctggcggcgctcctcttgcgcccctgtgcgacgtcgtggctccctatgttctcctgtgttgttgtttttttctcttctttgtggggtgtccggtgaggtatgttttttgtgtgcctcgttcctccgggggtgtgacggtggtcgcgtgccgtggtgcctgtgcagtgcgggggtgagtgggcttgcctgctggtccacttgtctgtctgtgtgcgtgttgtggttcctcagtcattgtggtcctgtcttggtcgctgtcctgtctgtgtccatgtctgctcgtgggccttttgtccctgatgtccaggctctctggctccattttcatgacttgtgcaagaatgcaacacagtgtgtcttacatcctgcctctgtgaccctccctaggcagatgagtcttgagaatgggcagctttctcattcatctttcaggaaggtgacctttaacttgtggcatgccctgagaagccatcctctgggaccagagactgagtgtttctaaacattttggctggactgaggtgctgttaccaccctccatgaaggccactccctagtgacagccctaacagcatgtgcactgtctaaatcacatcccaccatcctgaaaacttcatttcctcccactggtttccttcatacagctattctaacgattttaccagaacaccacctgaagatgcccacaccccacagctgctgtgcatgggtactcctgggccacctggcattaaggcaatggagatgagaccagtctagagccaacaccggtctctgaaacccagaagggctgcccaactaacagcacctccctcttggccaaaggctttgtctagggttgagaagcaatttggctgggtggtctcactgccctcctaaacagagcccacctctgcccccagagtcatctgtgctccaaagcaatgggcgggggcacagctgccaccatgccatgccttgggcattggaagagcaggacccaggagtgcagggatggtatcactgttgcccctttgaaaatgacccatttcccactttgggaggccgaggcaggtggatcacctgagctcaggggttcgagaccagcctggccaacatggcgaagcctggtctctactaaaaatacaaaaaaattagccgggcatggtggcatgtgcctgtagtcccagctagtggggggctgaggcaggaggatcgcttgaacccaggaggcggaggttgtagtaagccaagatcgtgccactgcactccagtctgggcaacagagtgagtctccgtctcaaaaaaaaaaaaaaaaaatccatttcctttagttttttaggtgcagactggggttcaagacccagctccaccactgtcctgagcagactcccaagactgggccagctgcctcgtcagctgcctcgtctgagaggtgaaggggcaggtacttaaaccactggccaagtccctttctctgaaaaagaacttgagctggctaactgccctgtgcagaggtgttagtggttccaaagtaccttcactcttgctattactgttttacttgaaggtgattacccctcaaaaatgaaaacttaaatctcaaagaacaacccctgaccccaacctccccaaaaaagaggaaggaaagagctctatgctacttgctgtgttgtaagatcctgggcaggaacccctcttctccatcaagatagacaagacccagtatcctgtgcaatctggtgtgaagaccaggttgggtgggcagctgcaggctgccccagcccgttgctttggagcacaggccttagcagccaaccttaaaggactaggggctccccacactcaagagggcagaccctgctgtcaggattttggctggtgtcaggaggcctcctgggtgcagggatccctctggggctagggcagctgtttattcccagagcactgctgccagccacgaggcctaccagtgggatctaggcccgagagccctccatctgacagagctggaggacctggagggctgtggggggtttaagagtctccagcggccagggctctgcatggcagggcagctgtgaggtgtgtctatgctgggtggcaggggtcagatgccctgtaatgagccacagaaacttgggcccatgggtaggcaggtggtggtggtatcatcaaccactgggcacaggggcatatgcagcacttccaggagagaggggcctggaggggtcctcagcctgggggattggggtcagctatgctgtctccagacactcacatactgtcctgacaagtggcatccgtcaagcaacttctctctccaggctcagtcctgcggtctgtggggagaccattgccatggatctggctcaaaggcaacaagggcactgtcgggactggacttcctgtgggcgcagctggagtcaaggcttggggtcttggggtatgcttccagcagccagcaggtgcttggggtgagtgacatgacaacacacggcactggcagacaaagcagctgtgccagtctccgagttcctgggactctgccagatgggctgaggctgcagttccacattccaaccccagcagccccaagcctgggccagggcgtcctgagcgggcccggctggggtggggatggggtccgagggcctaggcgcaccaggctcctgctgtcagctgtccaagtagacaaagaggatgtcctcatctgtgccatagctggttctggcctcctcaaagttactgatgctggtgctgcacattcggtcggcataggctgggttgttgtagaagatgcagccagtggcccggttgtagccacgcagcacgatgaagtggccctggtagtcaggagtgcggcagaagcagtggtggccactgggggtgaagcagcagtacttgacagggctggagcacaggtcacagtgcagcacccccgagttcaccagcacgatggccacatggccctgagccaggtgcgcctggatgtccttcacactcactgtgcatttctccaccagcaccttgcaggcctttgcttgtgcaaacagctgattcacccgggtctcttctgtgtcaaagtgcttcctgtagaaggactggttcttgtagcccttgtcgacacccagggtctgggtacagaagcggtgcctcacgccaaagtggtgcatcaggtaggccaggtcgatggtccagatgctcctggtcagctgcagcttctgcagggctctctcaaactcactgtcgtccagctggcccaggtaccgcagcaccatcctggagcaggccaggccacagtcccagtggtagagctgctggatgacgggcacaggcagttgcacaaagtccccgggctcgagcggcggccccgctgcctccgcctccgtcctcatgacccgggcggcgcggggcgcccatggccccggcccagagcgggctacagcttccgcttcggctggggcgggagggcggtcggtgcgtgtcgagttccttctccgccaccgccgccgctgcggaggggagaacgggaggcggcggctgggccgccccaagcgccgccccagcccttccggacgcgtggtcgactcc

SEQ ID NO: 19161 - DNA, 1809 bp, Homo sapiens
  misc_feature 1, 2, 3, 1809: n = A,T,C or G
nnnaccagatgacgatgggaagacagtggatggcccccatcagcttggaaaggctgccttacaacatggggtgatatgctggtcgccagggcttggggagcatcttcgtggtagccagtggcaacggaggcaacacaacgacgaactgcaactacgatggctacgccaactccatctacaccgtcaccatacgataggactagccctgcttgctgaggacctggggacttcttagatgtcagcataccctgggaacaccttcaagccatcatctggagatcaccgagctgcctccacccagcacagctggagctgtggatgaggagggacgcatgcctttctatgcagaagaatgtggcctccatgctggcagtcaccttcagtggtggggacaagatgcttcggagcattgtgaccactgactgggaccttcagaagggcactggtgcactgagggccacacagggacctcagctgtccggcgcctctggcagctggcatgatagccttaatgctgcaggtgcggccctgcctcacgtggcgtgacgtccagcacatcattgtcttcacagccacccggtatgaggatcgccgtgcagagtgggtcaccaacgaggcaggcttcagccatagccaccagcacggtttcggcctcctcaacgcctggaggctcgtgaatgcagccaagatctggacatctgtcccttacttagcatcctacgtcagtcccgtgttaaaagaaaacaaggccattccgcagtccccccgttccctggaggtcctgtggaatggtaagtaatcagcacaaagggggttaatcttaggcctgaggtttggggccgggtgacaaggaagttaaactcgtcctccctgccagattctaccccctttcggagctgagctccagccaaacctgtggagttttctttgaccattttaggacatgttactgcttctgagttggctcccccagctgcttaaacaagacctttctcctgggttcctagtagtgaaacaggagcagcagagcaactgaggaggagggcgggtgggaggcatgggactggggcttggggaggtcaggcgagaccggggtgagagctcagagaagctcctgtgacttccatgctacgatcttgccagagaactctggtcagtcctcgggtgtctggatgaagtacaaggagttaggcatttcttcctttgattctctggcttacctaatagagagagtcagatgtggctctgctggggatggacagagggtaagcagaagtctcctaggcttaagtgacccatcctctgcctccgcctccatggtggacagcatgaaccaggatcgtctgaaggggtcgtatcctctaaaggcagcgacctcgcaacactgtccaagcgaccagcgcggacgccctccctagaggacagtgcagctggcatccggatgctccggcagcggatgcccggcacggacataacacagcggcaacccgctataacccacaaaatccagggcggaatcactcgcaaccggagaccacaaccaacacccgcacacacgcacgcaacgcccgccctaaagcgccacagccaaaacaggaaaacaacacatcacacctgccccgcccacagaaaaccgacaccccatggagagcccctggacagcaccaaggaacgggcacacaaacggcgcctacacaacgccgcaaaaacgagaaacacccagcagaagagtcagagacaacaggagtcacaacagacacgacacgcaagcccacacccccaaggaagcaccacggccagcacatgcan

SEQ ID NO: 19162 - DNA, 856 bp, Homo sapiens
  misc_feature 854, 855, 856: n = A,T,C or G
ccccgggtccggcggcggagcctacggtccctgcagtgcctgctgctgaggaggccaccgaagctcggggacgcgaggagccggcgtggccctggaaagacgccccgatccggacgctggtgcagcgcatccaccagctgcaggctgagcgcgcgcagggcttccgccgactggaggagtgagtgggggcgcggaggggctcagggttcggtcccccgcccgctccgggcgtgggcgtgttctcggcgggcgtgcctggaggaggagctgggtccttgtgtggctgcagagtcagatggggcggggatttcggggcaccgggtcctcaccttcacgaaaaaggccccacagcacgtccccactacccgacgactcactcttcgtggcttctctctcctccccaagagcaggggtgggcctgtctcgcgttcccctgcgggagtcaggaagcgtccttcctacctaccagtcctcccctctggtgtctggggacacttcctgggggcctttcaggtggttggcgccggtgcagggcctgagagcctgggggcgcggcctcagggtccccacatgccgcagaggccaccgccagtacctgcgcagcggccctgactacgacttcgcgcgctaccggagccagtgccgggtggccagggcttcggcgcgcttcgggggaggtgctggcggggaagccgagctggggggctcggaggaggcgtgtcgcggcactgggcagctgaggagttgtgcaccggttgggcggggcctgttgttatgttgtgacccacttggggcgggactttggttgcgcggagagggtaccgggggcgcgcggtcccccctttgggttcccnnn

SEQ ID NO: 19163 - DNA, 2202 bp, Homo sapiens
  misc_feature 2202: n = A,T,C or G
ggagtcgaccacgcgtccgctgggggccctggggctctctgcgtcgagagcgctcgaagacccgggattcctggcccgatcgcgggcggggggagaccccagctccaccccagctcccgccggctcggggaaggggcggcccctttaagagcgcgcggccccgcccgccccctccgggcaggatccgaattccagggaggcggggcggagacggcggcgaggaggaggccgcggcgcgggacgcatagagctgcggctcgggcggcgcctccctgcggcggcccggcccggctccggcccccgctggggcaatgctccccggggccgcgggatgagccagcgatcctgaactgtgttcctgcccacagtgactcggccggtccgggcatggcagacccagtggcgggcatcgcgggctcggcggccaagagcgtgcggccatttcgctccagtgaggcctacgtggaggccatgaaggaggacctggccgagtggctcaatgccttgtacggcctgggtctcccgggtggtggcgatggcttcctgacagggctggccacgggcacgaccctgtgccaacatgccaacgccgtgaccgaggctgcccgtgcattggcagccgcccgcccggcccgaggtgtggccttccaggcgcacagtgtagtgcctggctccttcatggcgcgcgacaacgtggccaccttcatcggctggtgccgcgtggagctgggtgtgccggaggtgctcatgtttgagactgaggacctggtgctgcgcaagaacgagaagagcgtggtgctgtgcctgctggaggtggcgcggcgtggggcacgcctgggcctgctggccccacgcctcgtgcagtttgagcaggagattgagcgggagctgcgtgctgcacccccagcccccaacgcccctgccgctggggaggacaccactgaaaccgcccccgcaccagggactcctgcccgcggcccccgcatgacacccagcgacctgcgcaacctcgacgagctggtgagggagattctgggccgctgcacctgccctgaccagtttcccatgatcaaggtctcagaggggaagtaccgtgtgggggactcgagcctgctcatctttgtgcgggtgctgaggagccacgtgatggtgcgagtgggtggtggctgggacacgctggagcattacctggacaagcacgacccgtgccgctgctcctccactgctcatcgcccaccccagccgagggtctgcaccttttctccacagagggtgtcgcccaccaccagtccccgccctgctagcccagtccctgggagtgagcgccggggctcccggcctgagatgactcccgttagcttacgaagcacaaaggaggggcccgagaccccacccaggccccgggatcagctgcccccccatccccgctcccgccgctactccggggacagtgactcctcagcctcctccgcccagagcggcccccttggtacccgcagtgatgacacaggcactggcccccggagggagcgacccagccggcggctgaccacaggcaccccggcctctccgagacggcctcctgccctgcgcagccagtcccgagaccggctggatcgcggccggccccggggggccccaggaggcaggggagcccagctgtcggtccccagccctgcccggcgggccggagccagagccgcgaggagcaggcttgtgctgcttgtgcgcagggatcgagacgggcagcactcatggggtgccaaggggcagggcagtgggggctcgggcaggagcaccccccagagtcccgcgtgcccgcagcctgacagaaccccggctttcccgggtctcagccccagtcagagtgggcaccacagcggcagcatcttccgaaacccctgcagctcgaccgagaggagcaggagctgttccggcgccgaagaggagtccgggcaacgccgggccttgaggctgttgtagggtgaccccactggaaagccctgacccaagtcgggccgactccagcgaatctgccgattggtccacaagacacacctacgccctagacgccgggggaagtgccaccggggactggcgacgcaggccgtgcgcggccaacctatgcctcggaatgaccgcatgagggggcataacaggcccatgagaccgcggcgctccacagacaatcgtcgcctccan

SEQ ID NO: 19164 - DNA, 1717 bp, Homo sapiens
  misc_feature 1716, 1717: n = A,T,C or G
gcattttttactatgtgttcttaatttttaagacaaaccaatataccttatcctttatggggtttttttggtgtgtatctttaagaagacttctctaccatgaggtcatacagtaatgtcttcttacagtttttgagaacttctgaatgtcaaatcttgaaattgaaatttgctttttatagtataaggtaagaatttaattttttttttcatgtggttgaaacagttatcccaacaccattgtaaaggctgttctttcccaattggtttgtggtgtgtgctctcaggcctcacaccccctcatttgctagagtctgtggactcttttagttatctgtgtatttccttatcagtgtcatacttagttactgtggctttgcagctgactgtcttaaagggtggatacctcctcttgttcattgttaaagccgtcttaactatttatgcacttttattcttccatataaattctggaatcaattggccaatttccagaaaaattctgttacaaattttattggaggcacatgcatctcttcatctattcaatacgtattttttgagcatggcacacacatgccaggctattttaagaactactacaactatgataaagctgtgaatatgtagccatgaaccaaaacaaagtctctgtccttgtggaacatttgttctgtcagagaagacagtgtgttggctcacattgtggtcagtgctgttgagcaaaataggtcagagtaagggggatggagactggtgggaggaatgctgctttatccaggatgggcagggaggactcgatggtgtcagcactgaaggatgtaagatctgctgctctggggagaggagcagcatggaaggagtagagtgcagaggccatgaggaaggatcaggcttgactcctttgagcaagggggatgggagagtgacgggagaagaggacaggccacatggcctggtggcctgtgctgaggccttgggcttttactcaagtgagatgagatgccattggccagtttgggcagtgatgtgatcagacttgtttcagcaggaccatcctgcttgcaatgtggagagcaggctgtagggggtgctataggagcacaaggttggaggcagggaagatggcagcactggctgttgggccatttgaagaagcaaggccagggatgttggcagggaccaggccagagtgcctccaatggctaactaaggagcctggacattgaatttctaggttagcttaggatttctcatcctcccatctgtgaatgtcatagatctctcattttgcctgagtcttttatgcaatgatattttatttgtaatattttcccggtttttgattgttttttaacaaatgaattttttaagagacttaattttttaagagaaactttaatttcccagcaaaagtgagaggaaggtagagagatttcccatctatcccctgcccctacacacgcattgcttctcctactatcaacattcccccaccagaccagtgcatctgttaccatcggtgagcccacattacactgacatatccacatcacctgaaacccatagtttacattagggttcattcttggtgttgcatgatctgtgggtttggacaaacgtatgaagacatgtattccaccattatagtatcatgcagagtattttcactgccctaaaagtcctctgtgttccctgcactcatctttcccaccnn

SEQ ID NO: 19165 - DNA, 2888 bp, Homo sapiens
  misc_feature 2870, 2871, 2872, 2873, 2874, 2875, 2876, 2877, 2878, 2879,2880, 2881, 2882, 2883, 2884, 2885, 2886, 2887, 2888: n = A,T,C or G
tatagggagtcgaccacgcgtccgcgactccagccgcctagacgctggcactatggtcatggcggaggggacggcagtgctgaggcggaacaggccgggcaccaaggcgcaggatttctataattggcctgatgaatcctttgatgaaatggacagtacactagctgttcaacagtatattcaacagaacataagagcagattgctccaatattgacaaaattcttgaaccacctgaaggccaagatgaaggtgtgtggaagtatgaacatttaaggcagttctgccttgagctaaatggacttgctgtcaaacttcagagtgaatgccatccagatacttgcactcaaatgacagcaactgaacaatggatttttctttgtgcagctcataaaactccaaaagagtgtcctgctatagactatactagacacacacttgatggtgctgcatgtcttctgaatagcaataaatattttcccagcagggttagcataaaggaatcatctgtagcgaaactaggatcagtatgccgtaggatttacagaatattttcacatgcttattttcatcatcggcagatatttgatgaatatgaaaatgaaacatttttgtgtcatcggtttactaagtttgtgatgaaatacaatttgatgtccaaggataacctgattgtaccaattttagaagaggaagtacagaattcagtttctggggaaagtgaagcatgaagggaatcataggaaaaatgtactgatcatataattaacattatgtactgtatatatcattttagacacatcaatcatgtatccatattatagcttctttgtttagtataggtttttgtatgctgggtttgccttttaaaatgggaaatactttttaagttattcataagctgtatattcaccagtgtggcactcatggtttttaaataagattagtattatctgtttataatgcctgttaataaaagaatttacagtttggtaaaattgctgctaaacaatcattggatcacaatcctcatcagacaaacccatctgtaaaaaaaatgagggagagcttgaggtttcacacaagccatttactaaagaggtagaaatgttttctattggttttaccttgagtttagatatcctaaaaaattctgtagtacgtagttttgtcttacctgttaactttccccaattgagataaaagtgttttaaaattctgtttatagtttttgatatgcatatataattatgtgtatatctaaatacaaatgcaaatgaagcattagtaatacttaaataattttactgtgctacataaagtataacatacttggaaaggatttaccgttctgcaacaacggactggtacatacaggatgatcacaatggtaaggcacataaattattttcccactggaaacctgccctgtccaccccttctcatttcccttaaccttatcttcaaactactttagctgagaagcttttcaccagactgagttagtggtggcttatacctatttatatttgtattaattgcttacagattatacctcatattagcaattacattacactacaagaaaatgtatttgcataggctcttgcttatctttgttttgcaaaattgttctacttagaaaacagtccttaaaatagtttgactcttcctgttagtaatatattaatctttcatttaaccagctaggcagcattaaatagaattgaagaaataccatagtatttattttacaccccctctcccacgaagtttatgtttggattacatgcacgtgtgagattatttgcaataattcataggttccaagggtgttgatgaatagtcatacatttttttggactttgttataattcattgtggtaagaatgattgaaatgcagatttaacaatcttataatctattgaatgccatttttgataaagcactggaggtcttattgccaaactgattgtaatgaggcagtaagggtgaaaacattgtacatgttgtgaagaaagtatttaaatccaacttttgaacagatttaacaaacatgaggaacttttttatttagaaggataattttgaaatgaagatgaaaatgtattcatcttaattgttttttcaaatttaagggaataatttataccatcttttcagacaagaatgtacagcaaaaataaggggaacagtagtatactgagagtgtgtgtatgtatagtgtatgcctttccaagcttgccagtctttttggctttgaacactgcccatcagctacagtcattactgttccccaacccacaactatcttttaagaagtcttagttcacagtgaaaggaatgatgactttgaaattatggatttatattaatggcactataaaccaatggtaatggtaatttttaaacttgctaaatattgagaaactaaactactaagttaataaattatatatagcagtgtagctgttctctctagatggtgtctcacaatggatttctgttgcttgactattttcttagtgaatatttatactaaggtagtgactgagatttggtgatctggctgagtattttgaaacacattttgaataatatggcttagtgttaacggggacttaaatatgatttttttttcttactcatttcaccttccctgtactgtatgtttggaattgatcataaaacatctccaaaagaaaataatcagtttgtagtcttgcttttgtattcatgttgataatcttactaattgtgaagttgattcactactatactaggtaagacctaagtgaaacagttcctgtttttccttaatactgttttcagaattttgaaaatgtacttatatatacataaatactacnnnnnnnnnnnnnnnnnnn

SEQ ID NO: 19166 - DNA, 3256 bp, Homo sapiens
  misc_feature 1, 2, 3, 4, 5, 6, 7, 8, 9, 10, 11, 12, 13, 14, 15, 16, 17,32, 3247, 3248, 3249, 3250, 3251, 3252, 3253, 3254, 3255,3256: n = A,T,C or G
nnnnnnnnnnnnnnnnncccgggcgttgcggnggcggtgctcagactgaaggggcgaggtttgcaggcggaggctacagctagggctgctcagtaactggcccaaccactaccacgtccccaagtgcaacgggacccacggaactacaggtgtggggcagggtgagcgtggaagaagggacgcggatgggggtgcgctttgcagacgatctggagactgctgtgtgttgagggaagatacgaagtcgcgggagcagttggggactcaatgtgtgggcaacaagggtcctgctgagctcaggagctgcacggaatggtggcagtcaccttgccagtgcagcaggcatggatcagactgcaagctaggggcacgaggcatcagttgggaagaggggacgcacagctaggcttgaggcctcttcatcgggatgtccccaggccccccagcccaggcccagcataaaggccgtgttggggggcccccctgacccaaggggggcttcatgcgccacgtgcaggcggagccgtctccatcctcagagccggaggctggcccttcacagcctccagtcaggcagggggccctccagggtggcctgctcatgggctacagcccagcagggggggcgacatcccccggggtctaccaggtatccatcttttcccctccggctggtacctctgagcctcatagggccctgaaacgacaagccccatccactgagggtccccgggagctgaagagaggccctgggctgggggccagagagggactaccccctgaagaaccatctactgtggggctcttaggcccagagggaccggggctgggactaggtgtggccagccagcatttctcccaccgtggcctctgtgttgtggaacagagaagtagtgtcacctcatcttggacttcaggggcctggagtcccccctgccccccatcaaatgcttcctgcaatactttgcacaccagagactgggcctccccagatccagggggacaggggtccctgggggagtccccagggccagcccctccaggccagctgcacacacttgacactgatttgcacagtcttgcacaaatagggggtaagagcccagtggctggggtgggcaatgggggtagcctctggcctagggagtcccctggcactgccaatgggcacagtcccgagcacacaccccctggccctggacccccaggcccctgccccaccaagcgaaggctgcttcctgctggagaagccccagatgtcagctctgaggaagaggggccagcccctcggaggcgccggggatccctgggccaccctactgctgccaacagttctgatgccaaagccacacccttctggagccacctgctgcctgggcccaaagagcctgttttggacccaacagactgcggtcccatggggcggaggctgaaaggagcccgtcgcctgaagctgagcccccttcgaagcctccggaaggggccaggcctgctgagcccccccagtgcctcccctgttcctacccctgctgtcagccgtaccctgctgggcaactttgaggaatcattgctgcgaggacgttttgcaccatctggccacattgagggcttcacagcagaaattggagctagtgggtcatactgcccccagcacgtcacgctgcctgtcactgtcacattctttgatgtttctgagcaaaatgccccggctcccttcctgggcatcgtggatctgaaccccttggggaggaagggttacagcgtgcccaaggtgggcaccgtccaagtgaccttatttaaccccaaccagactgtggtaaagatgttccttgtgacctttgacttctcggacatgcctgctgcccacatgaccttcctgcgccatcgcctctttttggtgcctgtgggtgaggagggaaatgctaaccccacccaccgcctcctctgctacttgctgcacctcaggttccggagctcccgctcaggccgcttaagcctgcatggagatatccgcctgcttttttcccgccggagcctggagctggacacagggctcccctacgaactgcaggctgtgaccgaggcccctcataatccacgttattcacctttgccctgattgccagcactctgaacccatgcgggctaatgacctgcccatcctgctccatcttagagaacatatatggagagacagcaagagacccttcaggcttgaattaaagccctcaccatgctcacgcccaaatggattatttgggtgtttaaagcttctgattcttactacaccctgccctacttcgggtactccatgtgcctgtcccctcccttgggtttcccaggccagcttaggtagtagggaggaactggagctaccctgagattttctcaagttcccaggcaagttatgccagcgttgcctccctgtcctgggcaggggccacttgttattttatttatttttaatttataatttattcaaattggattgccttggtaacctcccacacctgataattggcatcactcctccccgcttcccactctcagatattgctccaacctcaggagttgaagaggcttatgcggtgggggcaggaggagaactgctttccctcagctgagggaagaggggctattccagagggactgagtcagtagccaaagactcagcttcccctgtccttccccagtcccttcacttcccctaccctctgacctatctctgaaagccaagttatgcgtatgtgtgtgtgcacaagcttgtctttgtgtggtatgtgtgtgtgagtgtgcatgtatgcacacacacaggggttaaccacccctcacctagggctccagactccagttgtccctctcctcctacctgtgtctccttgttttggggtcctgactgaagaaggtgtccagggggcagagtcagggccaagcactggggtgcctcctctcacctggccagactctgacccacctacctcagctggggtgaggggcacccctcaaactcagtcatgtggttccaaactaccccattccccactccagactctgacccagcctcagtcctaactcctggggctgggctgaggggaacaagcatttgctgaaacttgaaaaaacaaagcaaatcaaaaacaggaaaaaattgtacctggtacttttttttagaaaaaaagattaaaaaagaaagaataaattcttgtttggaaacttgaacaaaaacaaaaaaaatggacaaaactannnnnnnnnn

SEQ ID NO: 19167 - DNA, 2512 bp, Homo sapiens
  misc_feature 1, 2: n = A,T,C or G
nnatatctgtatcggggtattgtttttgttgcttccttcatgtgtttctctcccggcatttttcttcgttctcgtttccatttgggctctcattcccgtggtcttcctctattcatcctctcgttcttttttttcttgtgtctggctttccccgtttgactttcgtacctctgttcgtttcgtgtctgtctccctgtatctgctttttttgcttctttcttcagctacacctgtcagtgccagtgttttttcgtcattcgttactgtctccgtctatctcgggtccgtgtctttgtgttgtctgtgtcgcgtatttccctacctttgttggggtgcctatctgtgtcctatcatgttgtgtggcttccctgccatttcttcatcgcctatactccctctactttaccttcattacattcagatatttatcatccaataatggaagtacatatcttcagaatatgtatcatcctttaagttgcacctaatgtgacttcatcaattatgtaccatgctgttctcatacgcctcacctgcatagagcgctctgtccccagtgctatgctgtggtccacaaggacactggcccatcggggtccacagtccagcccggatctcccagggtcacacgttcatccagccctgtcaccatctcaaatgcatttccactaagaagagggacaagtcaccaggacagcagtttacacacacatggagactgcttgcgtaacacattgcttcccatgtgaccccactaaaccctgccagaaaggcacagcaggaagccttgtccctgtctgaagtggagctgcctctgttaatagggatgtggccaaggccgcacggatggcagcaaagcacaggccaagcgtctctctcaggcagactcttccttggctcagtcctatgtctgctgtatcttcctctccttctctcaagaacttttaatttgaagaatcaattcattgaaaaaggaaaaagaaaacttactaaaaacaattgttccttctctttaaaattacctgtttaacaagtacattttaacaatgtactaaattttcaaatgtcaaaagaaaacaccaaaaaacaagcgttgttgccttaaacacttttctggaacaaggcagaatataaataaataaataaataacacgagtgatgcaaagagtcacagaatgtgggtgatattgatgggtttatctaaaacccctcacccgggactccaaagctgaattctcagagttaccaacgttgtcccccaccccaccacagcccagcccagcccatctgttgacagcagccaaggcccagggcccaggactgttccacagccactggcagtggtgacagtcagatgcttctgggatgcaaccaggggcaaccttcaggctccttcccccagcccatcgagcccctctcctagggaggactccgggccagccaggcagcagcctcactgaggaccacgtttccctgtcccatgggacttgggcgccccagggcttagaaaggtgatttcctaaagtgcttaggcggaaagtgctactcttcctattctgtaacctgtccttgccaacagaaaaaaaagggagctttagtgaaggaaggcaatgccactaaaacccaggaggaatgaccttagctacccaccctgttttcagattcatatttggcagctatgaaccaagataccaaacctccaaattgtttggattctgaaaaaattggcaaaggctggcttgaacagagaggaagttgaacatgtcctctgcaaatgaaaagctgagaccctagacacctgcaggccagtccaggctgggccacaggccagggaagggccatgagaggccccctcctccagctcattctctccccagatacatcattccctggccaggtctgggtgagtcttctctgcaacgatccattcagtccactcctcctagagagaccaggggcagtgacctggtccctcccaaacaggccctgggctgtgcaacggagcatgacgcccatgctgccacatctgggtccttgcctctgtgcagcctgaaggtcacaccaccacactcacgcatgggactcccacgaggcagcattcccaggtgctgcttcccaaaaggttcaataactgagccacctcctgcaccgggcagggctggggaggcctcgtccttaacaggcccctgcagaaagtactcagtagagcagacgcagagcgtatcatgtgtctacaacatggctcacctcgaaaaaagccaccctcctctgagcccaaagggtggcaggaagaagagcctcgaggtgggaggagctaaacagtaagccagtaaagagccagagtgcagggagctaaccagcctccctgaaagcccctatcagccctaccagggtgatgagccactgcctacgacctccagtgacaaggcccagtccacggtggtggctccaacttccctatcatcattccttaactccctatagctcctgccccagccacagcccaattttt

SEQ ID NO: 19168 - DNA, 3752 bp, Homo sapiens
  misc_feature 3748, 3749, 3750, 3751, 3752: n = A,T,C or G
gggtggtgcggagtgccgagcggcctcacccccaaccgtcggcccagtcggacggttccgaggcgttgccgggagccgggcgcggctctgtgtggactcggagaaacgcggggcgtctgcctgagcccgcttttctacaagatgtggggatttttgaagcgccctgtagtggtgacggctgacatcaacttgagccttgtggccctgactgggatggggttactgagccggctgtggcgactcacctacccgcgggctgtggtttttgacgaagtatattatgggcagtacatctctttttacatgaaacaaatcttcttcttggatgacagtgggccgccatttggccacatggtgctggccttgggaggttatttaggaggattcgatggcaattttttgtggaacagaattggagcagaatacagtagcaacgtgcctgtgtggtccctgcgcctgctgccagcactcgcgggggccttgtcggtccccatggcctaccagatagtgttggagctccacttttctcattgtgccgccatgggagctgctctgttgatgcttatcgagaatgctctcatcactcagtcaaggctaatgcttttggaatcagtgttaatatttttcaatctattggccgtgttgtcctacctgaagttcttcaactgccaaaagcacagccctttttctctgagctggtggttctggctaacactgacaggggtcgcttgttcctgtgcagtgggcatcaagtacatgggtgtgttcacgtacgtgctcgtgctgggtgttgcagctgtccatgcctggcacctgcttggagaccagactttgtccaatgtaggtgctgatgtccagtgctgcatgaggccggcctgtatggggcagatgcggatgtcacagggggtctgtgtgttctgtcacttgctcgcccgagcagtggctttgctggtcatcccggtcgtcctgtacttactgttcttctacgtccacttgattctagtcttccgctctgggccccacgaccaaatcatgtccagtgccttccaggccagcttagagggaggactagctcggatcacccagggtcagccactggaggtggcctttgggtcccaggtcactctgaggaacgtctttgggaaacctgtgccctgctggcttcattcccaccaggacacctaccccatgatatatgagaacggccgaggcagctcccaccagcaacaggtgacctgttaccccttcaaagacgtcaataactggtggattgtaaaggatcccaggaggcaccagctggtggtgagcagccctccgagacctgtgaggcacggggacatggtgcagctggtccacggcatgaccacccgctccctgaacacgcatgatgttgcagcccccctgagcccccattcacaggaggtctcctgctacattgactataacatctccatgcccgcccagaacctctggagactggaaattgtgaacagaggatctgacacagacgtctggaagaccatcctctcagaggtccgctttgtgcacgtgaacacttccgctgtcttaaagctgagcggggctcacctccctgactgggggtatcggcaactggagatcgtcggggagaagctgtcccggggctaccacgggagcacggtgtggaacgtggaggagcaccgatacggcgcgagccaggagcagagggagcgggaacgggagctgcactcacctgcgcaggtggacgtcagcaggaacctcagcttcatggcgagattctcggagctgcagtggaggatgctggcgctgagaagtgatgactcggaacacaagtacagctccagcccactggagtgggtcaccctggacaccaatattgcctactggctgcaccccaggaccagcgctcagatccacctacttggaaacatagtgatctgggtttcgggcagcctcgctctggccatctacgccctgctgtccttgtggtacctgctccgacggcgaagaaatgtccatgacctccctcaggatgcctggctgcgctgggtgctggctggggcgctgtgtgccggtggctgggcagtgaactacctcccgttcttcctgatggagaagacactcttcctctaccactacctgcccgcactcaccttccaaatccttctgctccctgtggtcctgcagcacatcagcgaccacctgtgcaggtcccagctccagaggagcatcttcagcgccctggtggtggcctggtactcctccgcgtgccacgtgtccaacacgctgcgcccactcacctacggggacaagtcactctcgccacatgaactcaaggcccttcgctggaaagacagctgggacatcttgatccgaaaacactagaacaagagtgtggcaaagaacacccgtgctggggtcgggacgaggttgaagggtcttggtcaatgtacgtaatgagcagggtgggccccacgctgggaggacacgggctgggctgagcagggcctctagtggaacacatgggggtctcattgaaaagctctctgatgagcacctccttttgtgcaaagttaattttttctcgacaataaagatattccgtgtcttcacccctgaactaagacacagggagtatttcagaggccagcgtaggagtcatcgacaacgaaaagccgagaacccagggccagcagtggagcctcagcagaccagggcctggtccttgctaattgctgcagggtggagtttgatctggcagacccgatcctccttcatgaacacccagcaacctgagcaagtcccggccctgccctcagcgagcccggcaggcgtcccgggacagctcagtgttggagggccacctgaaccacgagccagggctggggcttgcatgtcattgtctatgacagcgtcaagactggcccttggcaccgtgctgtgtggaaaccctcccctctgagactccactgagacgtggctgagtgaaatcttcctcgtcagtggtcaaggtgtgtcatccatacagctccatgcctttgtcttttttaaatgtaattaaaaaaggaaccaactggcaaaaaaaaaacaaacaaaagggcggggcaaaaaatatcccaaaaaaagagggggggggggcaaaaaagtatatccccgagaggggcgccaattagcgtctacccagttttttgaccaggggggcccaaaagggagggaatataaacgaaagcacggagcgcgggtaaacacggcgcggacggggacaccagcgtgcccgggagaacactgggggagagggacccccaactcgcggggggggacaatagtgggcaccacccctgcagaatataagaccggaggaaaatcacacgacgggacaacgtcgcacccacgcgcaattcgcggcggcgaaaaatcggccccccggttatattgaaatgacgggggggcgccacagcagtctagctgacaacaagacaaaacaaagcagacgcagcgcggacaagcgaagggtggctaaggctgaacgtatgtagacggacgaggaggcagaggaggacggagtagtaacaacccgaccaccaccacacacaggtgacacagggagtaagaaacaagagacgacgatgagaccacgagaacgcacgaaagattaagaggaggtgcgagcctagcggacgcgaagaccagaacgactgactgaaggtcatccagccggcgggccgccaggccagctcgccctcgcgannnnn

SEQ ID NO: 19169 - DNA, 1270 bp, Homo sapiens
  misc_feature 1, 8, 1268, 1269, 1270: n = A,T,C or G
nacgcgtncgcccacgcgtgcgcgcagccgtcatggcagcggaggagaaggaccctctgagctattttgcggcatacgggagcagcagctcaggctcctcggacgaggaggataacatcgagccggaggagacgagtcgcagaaccccggatccggcgaagtcggcgggcggctgtaggaacaaggcggagaagcggctcccgggacctgacgagctgtttaggagcgtgactcgcccggcctttctctacaatccgctcaacaaacagatagactgggagaggcacgtcgtcaaggcgcctgaggagcctccaaaggaattcaaaatatggaagtcaaattatgtaccacctcctgagacctacaccactgagaagaagcctccgcctccagagcttgacatggcaataaaatggtctaacatatatgaggacaatggtgatgatgctccacagaatgctaagaaagctaggcttctaccagaaggggaggagacgttggaatcagatgatgaaaaagatgagcatacttctaaaaagcgcaaagtagagccaggagaaccagcaaagaagaaaaagtagaaacaaatgaccagaatttctgtactgctaaacttgttgaaatgtttctttggacagattaagttgatattgtgggttattatgccacatctccatgaaaatgcatacgttaatgaactaataagtattgcctcaagaactttccactatagaattctttttttatttaaaacatgtatgtatttaaaactcaactggtgacttgtgattgtgaaattgataacacttggatgcattcttgctctcacagaattggtgacatgctttgagagttttgtcacatgttgacatgccaatgttcttataaaccttttataaaggaatatatttttaaagtaaatatattgtaatgtactgtgaacttgtagggtgcttttcaacagtctttgtacagtgtaaatagatcatggaaataaaattacttattcaatattactattactgtataacattaacatttgaatgtttgtctgtgacaagtaccctatttgtcgtgtgacattttaagttgtaataagaagtattaccatttaaagagtgcctcctgtgttccaggtgctttgtgcatatattttctctgatccttaaacaacctagcgcaaggtattattagtattctcattttataataaagagtgcttgagtagcttgtctgatgttaaaaaaaaataaaatttacaacaaacnnn

SEQ ID NO: 19170 - DNA, 2477 bp, Homo sapiens
acataatccataaagataaaaacgaaccaaattcaagccaagtaatttccaatgatattctaaggctaagtctaaaagatgaatgttctgtaactttggccataaatcattttcttctatgaaaattttcttctagaataaataagatgggcatgacagcatgaaacttcatttcagcaggaaataaagacttaaaataaatgctttcaagaaatagtttatcaagagaatgagttctgaatcagttaacctcacacacggacacactgttgggcagaacacatgctggctggtacaaacatgccccagttgcacacccataaaacaagaagaaattatgaacacttaaaattatggagaaataagatatctagtgatatacaggcatgagtccttcctcagttttcactcaaaccgtggagtcacttccgaagtagatttgaatctttgagtcaatagtctcagatccacacaagctagattttggtgtgtatcacccttcaggaaaattctgttgaatctgtgacactctgggataggactcagtcaagaaaattagttactgagctttcacgatgtgcctagtctttgtagctaataatcccacattttactctgagatgcccaattttacactttcaaaataagaaaaaaggcatttcataaaattcacacaaattttaacataattcaaaatagagaatagcaaaaataaccttagagcaaacaaaaaattttattagattatatacctgagcaatagaaaacttcgagataacattttaaaaatattgacacgttaaggagtattttactttcaaaagaccataaaattgattttaaattccctttggaagaaaacatcccctagtctccttcactaaattacaaataattacccaaatataaaaaggacttgcaatgtttgttaaatatggacggcatgaagacaattaagaaactataggacttatttccaacaagaatacaatatgcatgaagttttgaaaatgtgactttttaccacagtttctgagagtgtaatagtactaaatgttctaaatgtaatctttcagatccacgagcggtgaaagtaatgctggtttggaaaatgaggttgatacttcctctcttaagcttctcagtgaatggctgcttctgtttctaagctgcaggaacaaagcacctctatcatataagcacataaacacacaactcaactatccagatactcagggccacaatctcaaatctagggctgtataaattcaacaaattgatgacctagattgcatacatgtgctaatctatgcaatatatgattcacaaggttcatctaatgttaaaagtctagctaagtctaataatttaatattaaataaaatattaattctttaaaatggtcactcataaaagaaatgtagtcataataagccccataatgatctccattcctcgcaagggaagcttgatttgaaactggcttgtaagtgaattgacttgtaagagaggtaaaaatgtgtcttacatgaattactatcccacagatatgatggaacataatgctagtttgacaattagatttttctaaccaatgactgggctttcactgaggaaaagagggatttctcaattattttcccagttagtaagggctggagagaacacatctagcctctgcttctaactagtccttaattgtagcttccaagggagaagccacgaatctaactggacagagcacaatcagtatgagaccaccttgtaaatgcaggcatgcaaccttcattgacaaacagcgcacatttaccagtatctcagacaactgaacatgtgaccaatctccttccaacttccctcccctcttcccgtgttgttactctccctacacacacaggttggggggagtagaggtaatatcctgggatctacacaagggtctagctgtcttgaattcaatgagggaaaagaaggaaaactgctttggccccagacataaatcacattcttttaagcacacagcaacttataaggagcttgcccagacttaatagcgttactctgcttctcattaagctagtgatcctcgtgtaggggatccaaaagtaggggaaaggtgagtaacgctattaagtctgggcaagctccttataagttgctgtgtgcttaaaagaatgtgatttatgtctggggccaaagcagttttccttcttttccctcattgaattcaagacagctagacccttgtgtagatcccaggatattacctctactccccccaacctgtgtgtgtagggagagtaacaacacgggaagaggggagggaagttggaaggagattggtcacatgttcagttgtctgagatactggtaaatgtgcgctgtttgtcaatgaaggttgcatgcctgcatttacaaggtggtctcatactgattgtgctctgtccagttagattcgtggcttctcccttggaagc

SEQ ID NO: 19171 - DNA, 895 bp, Homo sapiens
gacaaagcggggattccagcccagcactttttggccctggagttcctggtttaatgcttcccattgtacttcctttcttgtaggtaaaaacaccttgaaaagccaataacactattggggtatgtcttccatgcctgcaaccaagttttctttccctttccatatctttttgtcctgccatctctcagccaggcggattggaggatggaattccaacgaggctcccccgcctcgtcccaccttggtaattgcatggccaacatttaactgagggctccatagtcttgcatttatcttgccattcaggtgaatgggagcggaactcacaggacacaatgagccgggtcactgatggccttgctttctaagaatctcacagtgagccctagaactctctacgtggtaacactgtgtgcctttttcagagaagagcctatcttagatcttagcctaacgttgggtctattgtgttgctggagagaccagcactgacattcatctcaaagcacatggtatgtttgactcctatgttgactcaactacccatcttgtactgggacactcgctttttttttttttttttgagacggagtcttgctctgtcaccgggctggagtgcagtggcacgatctcggctcgcggcagcctccgcctcccgggttcaagtgattcttctgcctcagcctcctgagcatgtggagctacaggctgaaggtgatgtggccgccctcaaccgacgcatccagctcgttgaggaggagttggacagggctcaggaacgactggccacggccctgcagaagctggaggaggcagaaaaagctgcagatgagagtgagagaggaatgaaggtgatagaaaaccgggccatgaaggatgaggagaagatggagat

SEQ ID NO: 19172 - DNA, 590 bp, Homo sapiens
  misc_feature 1, 588, 589, 590: n = A,T,C or G
ngcgtccgattgattcttctatgatgcgtgttcattatacaatacacattctcggaaaggcagaattatttgcttttatgattgttttttgtgacctaagaaacggttcttcccccattttcctatcccaggccaaaaaatattctctcacgtttttctgtaagagctttataagttcagcttttatattgaggtctgtgattcatcttggattattatgtgtaggttgtaaaataggaatctaggtccagtttttccatgtggatattcagttattgtggggccaattgttgaaaagtctccccaaagaactgctttcttatcagaaagataagatatattaaaagtgtatatctaagtctgggttctcttttctgttctaatggttgatatttttatccttatgccagaaccacactgtcatgattgctgtagctttataatagtcttgaatcaagttgtctttcagttttgtatttttcaaaattgctttcggtattctaagtcctttgcatttctgcataaaatttagaagcagcatgtctaccaaaaggaaaaaaaaagcctgggtgggattatgattggggnnn

SEQ ID NO: 19173 - DNA, 1548 bp, Homo sapiens
  misc_feature 1541, 1542, 1543, 1544, 1545, 1546, 1547, 1548: n = A,T,C or G
cgcgtccgtgaggacgcggacccgccatgcggcggaagaaggtgcgtccgcggctgatcgcggagctggcccgccgcgtgcgcgccctgcgggagcaactgaacaggccgcgcgactcccagctctacgcggtggactacgagaccttgacgcggccgttctctggacgccggctgccggtccgggcctgggccgacgtgcgccgcgagagccgcctcttgcagctgctcggccgcctcccgctcttcggcctgggccgcctggtcacgcgcaagtcctggctgtggcagcacgacgagccgtgctactggcgcctcacgcgggtgcggcccgactacacggcgcaggtgcgtgcaccccgtccgcaccccgcccctgcagccgcctggtctccccgcctcccctcctccctgcaggtttgcgtggctgaggctcccacctcctgacctcgggggccgagagctttgcgagctgaccccgcttccttctggctttgcagaacttggaccacgggaaggcctggggcatcctgaccttcaaagggaagactgagagcgaggcgcgggagatcgaacacgtcatgtaccatgactggcggctggtgcccaagcacgaggaggaggccttcaccgcgttcacgccggcgccggaagacagcctggcctccgtgccgtacccgcctctcctccgggccatgattatcgcagaacgacagaaaaatggagacacaagcaccgaggagcccatgctgaatgtgcagaggatacgcatggaaccctgggattaccctgcaaaacaggaagacaaaggaagggccaagggcacccccgtctagaatgccagaaccagcgggtggccttaggggctgtgaggcagtggggaccttattgatgaaagaaaccgtctttgcgttacacccgagtctgcctctcggagcagggagctcaccttccgcgaccgtgttctgagggtctgcatcttaggggggagggctggggcaaatcgacacctgtgcctttcctctggccctgctgaccacaaaaccaaatccgagggcccacgctggggaacagcgggcaagcgctcgctccctttcccccattagtgctctctctggcctggatcccggcagaagctatgaacagggaatacagacgacaagaagtacccaggacaaacagcaaaaaagggcgacaggatacaaagaatcacaaaggggcccaagatagcggtacccagaatactgtaccacgtgcccaaaaggactaggaataaaaccaggcgaggagcgaaaaaagcggaagcgcacacgagccggaacaggcaaggaccaaacagcgaggacccaagcgcaacacccacagactcagccggaacactaaataacaggaagcgaaaaaaaggcaatagaggagaaaagtgaagagtgatgtagaatatccggagagaagagaaaaaaaaggaaagacgaaaggaagaagaagcggcaagagaacacgagaacaaaccactcggcaaggagcacaaacacaccgcaacannnnnnnn

SEQ ID NO: 19174 - DNA, 1167 bp, Homo sapiens
  misc_feature 1, 2, 3, 10, 1063: n = A,T,C or G
nnnacgcgtncggagaatgtctacacagaagatggcaagcttgatatatggtccaaatccaactatcaagtattccagaaggcctgttttttccaagtcttggatgctgagcaaaaaaacaactttgttgttgaaaaatgtaaaacaaaaaaatattgaagtggagtgctttgacaagacggaagatcactgtaggtgaagttctcctgtgctccacagccacccagaggaattccaaaaccagcagtggaggacttggggaggacaggagggaaaacatggcgagttcatcagctctgtttcctttattaaaatatttctgtaattggtggtgggaaattgaagaaatcaagtgattgcatcagcgctggaaaaagctgccagcacttggcagtggaagagaatatatgctttatactggactttttgaaaaagaggctgagtttggccagattgccgaccagcaatggaaaaactaattaggtgccttgcctgtgagccagacgcccagcagggctgtggcgcatggctcccgccgcctctgaagaggacactttctagtgaattcagttcgtgctacccttgagcagcctgtgctacagcaggcacatttgtgaatctcccagcctgtgcctggcgtcggaactgtagcttcccaaagacttacctgccctgggagatggcgggcagctgctggccacagccctgggcctgcacctttatctgcaaactgggagagcggggatgggagtcagtgggtaggaggtgggcagaggcctgggcctcccagtgttcgggctcccacactgctgccctcacccactatgtgcatcttcccaacttctggacatcctcactcctcctctgtccaatgtaaatcagaatagtgggccgggcgcagtggcgcacgcctgtaatcccagcactttgtcaggctgaggcagaagaatcacttgagccaggagttggaaaccagcctgggcaatacagtgagaccctgattctacaaaaataaaaaattagctgggcggggtggcgtgagcctatagtcccagcaactcangaggctgaggtgggaggattgcttgagtccaggaggtcaaggctgcactgagctaagattgggccactgccctccagcctaggcgacagagcaataccctgtct

SEQ ID NO: 19175 - DNA, 850 bp, Homo sapiens
  misc_feature 1, 2, 3, 4, 5, 6, 7, 843, 844, 845, 846, 847, 848, 849, 850: n = A,T,C or G
nnnnnnncgacccacgccgtccgagtaaatctgttctgcactaaattatatcaaaataaatataaataattatttcgtataccattcgttatatacatttcagtgtttttaataatgtcaatttcttatattttaaggagaactctagttatttttataaatctaattgacttaattttgtgggaatataaaagaagtgattaaaaacctttggtttaaagtagttaatcctgaaatcaagctctgtaaatattgtgtagggatatggagaaatcctcaaaaagaaagagctaaagaaaatggcagggatggcatcttgggagtataactgaaagtaggaagatgtggatagaagagtcttatttttaatcacagggcatatgtgctatttgaattattttgacaaaagtataaaaatatggaattatgcattgtgtgtgtgtgtggtttcatctgtttaagaaatatgtgatggagactgtcctatcatcaggaaattattccagttcacagatcagaaatgactgaggaattgagagtacagctaattactaaggttgcttcttttgaccaaataggccagagcttgaataaaagaaacatggattgaatgaatttttataagacctaagaagaaagtttcataagccacattttttcttttgactcccctgttctgatgtcttccttcttcattcatttcctgactcctgaactctgctggctacagaagaaaatcttaagccaagctgtttttcctgtggcatatttgacataggcattggaatatttcccctggattcatgaataggcaaggtaggagaaagtcaagaaatacacagnnnnnnnn

SEQ ID NO: 19176 - DNA, 2521 bp, Homo sapiens
  misc_feature 1, 2521: n = A,T,C or G
ncggagtcgacccacgcgtccgcggagacaccgaccgcggcggcagcagcagcagcagcagcgagaggcagaggcggcggcggcggggaggacagcacggccgaggctgcccagaggcgcctcctccacaccccccgccgcagcagcaccggcgacagattttttaaaaaatggatttggccaaccatggacttattctactgcaacagttaaacgctcagcgagagtttggtttcctgtgtgactgcacggttgcaatcggcgatgtatacttcaaggcacacaaatcagttcttgcttcattctccaattactttaagatgttgtttgtccatcagaccagtgagtgtgtccgcttgaaaccaactgacatacagcccgacatcttcagctatctcttacacttgatgtacactgggaagatggcgcctcagctcatcgacccggttcgattagaacagggcatcaagtttctgcacgcctacccgctcattcaggaagccagcctcgccagccagggagccttttctcaccctgaccaagttttcccactggcttcttcattgtatggcattcagattgcagatcatcagttgagacaagccaccaagattgcttcagcacctgaaaaactcgggcgagatccacggccacagacctccaggataagccaggagcaggtccctgaggcctcacagctctcccagctgacttcaaatctggcccaggtgaatcggacaaatatgactccctcagaccccctgcagacctcgctgtctccagaacttgtttccactcctgttcctccccctcctcccggggaggagaccaatctggaagcatcttcctccgatgagcagcctgcgtccctcacaatagcccacgtcaagccaagcatcatgaagaggaatgggagctttccaaagtactatgcctgccacctgtgtggacggcgcttcactctccggagcagcttacgtgaacacctccagatccacacaggagtacctttcacatctagccaacagggagaaagtcgcgtccccctgactctctgtagcaatgcagctgacctcgggaaagatgccatggaagtgcctgaagccgggatgataagtgacagtgagctgcagcacatctctgattctcccatcatcgatgggcagcagcagtcggaaaccccacccccctcagacattgctgacattgacaacctggagcaggccgaccaggagagggaggtgaagaggcggaagtacgagtgcacaatatgtggacgcaaatttatccagaaaagccactggagggaacacatgtacatacacaccgggaagcctttcaagtgcagcacttgtgacaaaagcttttgcagggccaaccaggctgcccgccacgtgtgcctcaaccagagcatcgacacttacaccatggtggacaaacagactctggaactctgcacatttgaggaagggagtcagatggacaacatgctggtgcaaacaaacaaaccctacaaatgcaacttgtgtgacaaaacattctccactcccaatgaggttgttaaacattcatgccaaaaccagaactcggatgtttttgccctagacgaagggcgatccattctcctgggcagtggggactcggaagtaacggagcctgaccacccagtgttagcttccatcaaaaaggaacaagaaaccgtcttactagactgaatgtcacttatctttttaaaaaactctcatttttacaaagactatcttccctcccttccctgaattcagaactgtagttctccatggcatgatacaaacaggtccttgttctcttctcctcttccccttttccacatcccagccccacctctgtaaaggctttgtgcattataaacctggaatgtatcgactttctttcaggggatattggaaagataatggtcattatacttataaactcaaattttgagaggttttagattattcagaagcatacttggaactaatgaagggtatataataaaacaactggaatccaatttggtaagctaaaattatgactttccctgggtaaaaagtcttctcagaaaaacaatgtcagaaaataacagcgtgctgcttagaaatacggctgggctctgtactatgcaaaatctagaaagtgtggggaaactttaaacccaagaaaacgttcttagtattcatcctccaggtgtcttacttcagaatgcatcctttgagattatgtccacttaagagaaatcatcagttaagaaatctactttaacaaaacaaaaaggagaaaaagtaataatgtgagtggcaatcttaatttttgggtacaacatgacaagctgtgagttgggtgttgcgcacgaaaaatggtggggcctggcatcaaccgcggataagcgtcttaatatggtgggctttcaggtgagacacaaagcggttggggctcggcgaaggttaaacactgatggatcaaagggttgaaaaaaggtatgccgaatttacaacacggn

SEQ ID NO: 19177 - DNA, 4096 bp, Homo sapiens
  misc_feature 1, 2, 4095, 4096: n = A,T,C or G
nncttcatgcatataataattatgggtatcatcatgagtggcgcgagtcatccagacggctcgttcgatgatgctcggcgtactatacgctgggtcggtcctcagactgcatgaggccccgccggctttaaataaagcgtttattgattagtagaagcatgaacagtgtgcataatattttcaatacaatatcagggagggatgatgggaacccctcaaaaggcactagaggcgcagatcttcgggacaagagggaagagatgcgccagagaccagggctggggcagctgggggtccctgagtgccaggcgccaccacacgtcctgtgggtcaaggcccctcctctggggagcaggtctacggcacggaggatgcagggctgggaggggaccccacctcggggacccaaaaggagtccatttctgccctgccccccgcaaagcagcaggggagggggcctgggggtcctggggtgggggatcccaggcctgggcccatcctggcttgacccttgtcccaggaacaagaagctgaggagggacgacagccaggcccagagtgactcacaaggacatccaaagaagggactggattttcagagggaggtgacttggtgactgagaggcagcagaggccaaagcctgaccccagaccctcagggagggcccacccaacctgtacccctcaggagccccgtccggctccccaggcaaccactgaggacctcggggtggcctgtagaagacagaacccagccccattacaccccttgctgccgctccatccccaaccaccagagggacagggaccagagggagacctgtgggccaggcgggcaggagggaggcaggctggggccgggagaaggggatacacaggcccataaaacctcaggctccccataaccctcactcagccatctcactcactcactcccagcatcccccaggatgggggtcccctccttcactcaggacacttcccctccgcagacctgcacgttctgggcctttctcatttcaccccaggcctgcccaccccatgaggcaccccctaaatctcatctctccacccagcacccccagcctggctccagcctgaagaccccctccttccccttccctccagaacagtggggaaagcgaggctcggtccacccctaactgcggaaggagcagggccaggagggcagcagtgctccctctcccggtcctggcccagccagctcctgggtgagtgggcgggaacccactgggctcacaccagctttcacctccctctctccaggaaggatggcagcacccatgaggggatggaggccacagaaggacaggaagggaggggctttccagccccccagcagtgtccagcccttggcacaagcaggaaaaccccaaaaccagcccctgcatctgagatcatcccacagaagagaaaacagggagcaagaaagtgttgactgaacccaataaagtgactcaggtgggcccgctccctggcggtgccacacagccctgccccgcctccacccacaaggcacagaccagggtgccctccccagagctgagcctgcctgggtccggaagggaacggcctgtgccatgtgcagcagtcagggacccactggcctagaactcagtctgcacccctgcactgtcctcggtggtggtgtggagggcggggtggctgctggggctggacacctgctctccagtctcctggtcgctgggcttggggggcccaaggtccacagcctttccaggcaggagatgctggaggggtgaggcaggcggcgaggaggcctcgggggcggccttaggctggggactctccccagcgggggccccgttgagcagggggccggctggtggggggctctcaggccgcagaccttgggccagcaggcctcggatctcagtgacaccgtccggggacgcaggtggtggtgactcagggctagcctcaaagggcagccccacctcctcatcctggaccacagagaccacctgcttggcgcgccgtcgcttttccgagagggtggctgactccggggtgctggggctggggctgccgcccccgccgctgttgctgtactcctcgccccagtcgatgggggcgccctcggccagcaggtgcaggttggggtcgctgttgtgcatgaccatgctgtcccggtagaggttgtgcttcctctgcaccgcggcctccttcacagcctgcaggatgtccttcatgacggtctgcagcaccacctcctcgtacgtgttttccaccaggatgaacctggcaaagtcctcgaagatcagctcctggaaccggggcagctccgacttgcaggtaggggccagcttcttgagcaggaacgggatgctgatctgcagcagcgcctcccggaagaacctcttccgcacagagctgctgtcgtagtcgtatttcttcagcacccgctccaggacccgctggatggacttgcacagctcctccttggtgggccccttccccagctcctggtgcaggagggtctcgaacgtatacacggcattgtccatttgctcccgcatgtggatctgggctcgctgcttgaacacggacgtgctggacacatcaaatcgctgctgcagcccgtccagtcgcagcgactccatcttctcatagcagctctgcatcttcagggggtggtacgccagccgggacagcttctccatgtactcgcccagcttgtcaatgccgccctcgttgatgacgttcaggttcatgtccgtgacctccttgaagaagacatctcgcacctcagtgaagccctggctggtggggaccatcagggcctccaggatggatgggatgtagggctggacatggttccgcacgcacacctctgccttggggaggatgaaggctcggatcttgctggcaaggtgctccttggaggtgataatttggtccatgtcagttcggatgacggcctgcatggccggctgcacctgctgcaccttggacagcacctcctcgaagcgcgccttggcctgctcgtacaccatgtggtacacggcgtccgagatctggatccactgccgctgccgctcctgcggtttccccttcagccgcgggccgagctctgccttcagctcagggcccagctcctccatcaccaggttgctcaggatctgcacctcgttcccacacagcatctcccaggtgccgtacagctccttggactgtcggtacatgcggatggcatctgtgaacgcagggccctctaccttggagtcctcagggattccattgttgcagtgccggatgcagtcctgcagcacagcctgccacttgtcctgctcggcttctgtcatcatgcagaagtagtagtgacgcgcataaggatgccagaggatgagcgggaactgtgtggggcacttgaggatgggggcactgcccgactttgccgtggtccctggtaaggagttgccaatgagctccaggtattggtccacggacgtgaggattttgtagcctgcactgttgatgacggctcgtggtgggacctgccgctcataggccgctttgttttcgtagagcaccagcccgtagttgtggggcacgaggctgaagcggtttctccacttcttgctgtcctcctggtgctggaagaggttccccgagaagacgatgcgctcgtccagtggcaccttgcgccagagcagctgggcctgcggcagccccgtgccctcaatctcatggcgcatgctgttgaagagagccacgccatactggtcttcatagaactggaggaactccgtcaggatcttcccggttttttctgcgatgtgctggcgccgggcgtcgtccaggtgcgtggacagcacgtcccccatggccaggaggtgtcgcggcccgatccggccgacgccgccgctgttgcccgcgctgctcaggcggacgccgctggcgccatggagcccggcccgccctgcttcccccgctcccgccgctcccgccgctcccgccgccccggctgcggcttccgctccggctccgctcccggtcgggccccgtccctccagccggccgccttggccccctcaccggacgcgtgggtcnn

SEQ ID NO: 19178 - DNA, 4337 bp, Homo sapiens
ccgcacctgctggtgcctggggaacccctgggctacggagtgcagcgcagcccctccttccagagcaagacgccgccggagaccgggggttacgccagcctgcccacgaagggccagggaggaccgccaggcgccggcctcgctttcccaccccctgccgccgggctctacgtgccgcacccacaccacaagcaggccggtcccgtggcccaccagctgcatgtgctgggctcccgcagccaggtgttcgccagcgacagccccccgcagagcctgctcactccctcgcggaacagcctcaacgtggacctgtatgaattgagcagcacctccgtccagcagtggccggctgccaccctggcccgccgggactccctgcagaagccgggcctggaggcgccgccgcgcgcgcacgtggccttccggcctgactgcccagtgcccagcaggaccaactccttcaacagccaccagccgcggcccggtccgcctggcaaggccgagccctccctgcccgcccccaacaccgtgacggctgtcacggccgcgcacatcttgcacccggtgaagagcgtgcgtgtgctgaggccggagccgcagacggctgtggggccctcgcaccccgcctgggtgcccgcgcctgccccggcccccgcccccgcccccgcccccgccccggctgcggagggcttggacgccaaggaggagcatgccctggcgctgggcggcgcaggcgccttcccgctggacgtggagtacggaggcccagaccggaggtgcccgcctccgccctacccgaagcacctgctgctgcgcagcaagtcggagcagtacgacctggacagcctgtgcgcaggcatggagcagagcctccgtgcgggccccaacgagcccgagggcggcgacaagagccgcaaaagcgccaagggggacaaaggcggaaaggataaaaagcagattcagacctctcccgttcccgtccgcaaaaacagcagagacgaagagaagagagagtcacgcatcaagagctactcgccatacgcctttaagttcttcatggagcagcacgtggagaatgtcatcaaaacctaccagcagaaggttaaccggaggctgcagctggagcaagaaatggccaaagctggactctgtgaagctgagcaggagcagatgcggaagatcctctaccagaaagagtctaattacaacaggttaaagagggccaagatggacaagtctatgtttgtcaagatcaaaaccctggggatcggtgcctttggagaagtgtgccttgcttgtaaggtggacactcacgccctgtacgccatgaagaccctaaggaaaaaggatgtcctgaaccggaatcaggtggcccacgtcaaggccgagagggacatcctggccgaggcagacaatgagtgggtggtcaaactctactactccttccaagacaaagacagcctgtactttgtgatggactacatccctggtggggacatgatgagcctgctgatccggatggaggtcttccctgagcacctggcccggttctacatcgcagagctgactttggccattgagagtgtccacaagatgggcttcatccaccgagacatcaagcctgataacattttgatagatctggatggtcacattaaactcacagatttcggcctctgcactgggttcaggtggactcacaattccaaatattaccagaaagggagccatgtcagacaggacagcatggagcccagcgacctctgggatgatgtgtctaactgtcggtgtggggacaggctgaagaccctagagcagagggcgcggaagcagcaccagaggtgcctggcacattcactggtggggactccaaactacatcgcacccgaggtgctcctccgcaaagggtacactcaactctgtgactggtggagtgttggagtgattctcttcgagatgctggtggggcagccgccctttttggcacctactcccacagaaacccagctgaaggtgatcaactgggagaacacgctccacattccagcccaggtgaagctgagccctgaggccagggacctcatcaccaagctgtgctgctccgcagaccaccgcctggggcggaatggggccgatgacctgaaggcccaccccttcttcagcgccattgacttctccagtgacatccggaagcagccagccccctacgttcccaccatcagccaccccatggacacctcgaatttcgaccccgtagatgaagaaagcccttggaacgatgccagcgaaggtagcaccaaggcctgggacacactcacctcgcccaataacaagcatcctgagcacgcattttacgaattcaccttccgaaggttctttgatgacaatggctacccctttcgatgcccaaagccttcaggagcagaagcttcacaggctgagagctcagatttagaaagctctgatctggtggatcagactgaaggctgccagcctgtgtacgtgtagatgggggccaggcacccccaccactcgctgcctcccaggtcagggtcccggagccggtgccctcacaggccaatagggaagccgagggctgttttgttttaaattagtccgtcgattacttcacttgaaattctgctcttcaccaagaaaacccaaacaggacacttttgaaaacaggactcagcatcgctttcaataggcttttcaggaccttcactgcattaaaacaatatttttgaaaatttagtacagtttagaaagagcacttattttgtttatatccattttttcttactaaattatagggattaactttgacaaatcatgctgctgttattttctacatttgtattttatccatagcacttattcacatttaggaaaagacataaaaactgaagaacattgatgagaaatctctgtgcaataatgtaaaaaaaaaaaaagataacactctgctcaatgtcacggagaccattttatccacacaatggtttttgttttttattttttcccatgtttcaaaattgtgatataatgatataatgttaaaagctgctttttttggctttttgcatatctagtataataggaagtgtgagcaaggtgatgatgtggctgtgatttccgacgtctggtgtgtggagagtactgcatgagcagagttcttctattataaaattaccatatcttgccattcacagcaggtcctgtgaatacgtttttactgagtgtctttaaatgaggtgttctagacagtgtgctgataatgtattgtgcgggtgacctcttcgctatgattgtatctcttactgttttgttaaagaaatgcagatgtgtaactgagaagtgatttgtgtgtgtgtcttggttgtgattggattctttgggggggggaactgaaacatttgtcatatactgaacttatatacatcaaaagggattaatacagcgatgccaaaaagtttaatcacggacacacgtccgtttctgtagtccgtatgctctttcattcttggtagagctggtatgtggaatgccatacctctgaccctactacttacctttttactgacagactgcccacactgaaagcttcagtgaatgttcttagtcctgttttcttctgttactgtcaggaaactgagtgatctaatggttctctcactttttttttgttcttttagtgtactttgaagtatcaaatcttaacttggtttaaacaatacatattcctaacctttgtaaaaaagcaaagattcttcaaaatgacattgaaataaaaagtaagccatacgtattttcttagaagtatagatgtatgtgcgtgtatacacacacacacacacacagagataaacacaatattccttatttcaaattagtatgattcctatttaaagtgatttatatttgagtaaaaagttcaattcttttttgctttttaaaaaatctgatgcttcataattttcattatattattccacatatttttccttgaagttcttagcataatgtatccattacttagtatatatctaggcaacaacacttagaagtttatcagtgtttaaactaaaaaaataaagattcctgtgtactggtttacatttgtgtgagtggcatactcaagtctgctgtgcctgtcgtcgtgactgtcagtattctcgctattttatagtcgtgccatgttgttactcacagcgctctgacatactttcatgtggtaggttctttctcaggaactcagtttaactattatttattgatatatcattacctttgaaaagcttctactggcacaatttattattaaaattttgaatcca

SEQ ID NO: 19179 - DNA, 4521 bp, Homo sapiens
  misc_feature 1, 2, 3, 4, 4520, 4521: n = A,T,C or G
nnnncattcacttgcaaattcgacccacgcgtccggagccagctctcccgagcccgtaaccttcgcatcccaagagctgcagtttcagccgcgacagcaagaacggcagagccggcgaccgcggcggcggcggcggcggaggcaggagcagcctgggcgggtcgcagggtctccgcgggcgcaggaaggcgagcagagatatcctctgagagccaagcaaagaacattaaggaaggaaggaggaatgaggctggatacggtgcagtgaaaaaggcacttccaagagtggggcactcactacgcacagactcgacggtgccatcagcatgagaacttaccgctacttcttgctgctcttttgggtgggccagccctacccaactctctcaactccactatcaaagaggactagtggtttcccagcaaagaaaagggccctggagctctctggaaacagcaaaaatgagctgaaccgttcaaaaaggagctggatgtggaatcagttctttctcctggaggaatacacaggatccgattatcagtatgtgggcaagttacattcagaccaggatagaggagatggatcacttaaatatatcctttcaggagatggagcaggagatctcttcattattaatgaaaacacaggcgacatacaggccaccaagaggctggacagggaagaaaaacccgtttacatccttcgagctcaagctataaacagaaggacagggagacccgtggagcccgagtctgaattcatcatcaagatccatgacatcaatgacaatgaaccaatattcaccaaggaggtttacacagccactgtccctgaaatgtctgatgtcggtacatttgttgtccaagtcactgcgacggatgcagatgatccaacatatgggaacagtgctaaagttgtctacagtattctacagggacagccctatttttcagttgaatcagaaacaggtattatcaagacagctttgctcaacatggatcgagaaaacagggagcagtaccaagtggtgattcaagccaaggatatgggcggccagatgggaggattatctgggaccaccaccgtgaacatcacactgactgatgtcaacgacaaccctccccgattcccccagagtacataccagtttaaaactcctgaatcttctccaccggggacaccaattggcagaatcaaagccagcgacgctgatgtgggagaaaatgctgaaattgagtacagcatcacagacggtgaggggctggatatgtttgatgtcatcaccgaccaggaaacccaggaagggattataactgtcaaaaagctcttggactttgaaaagaagaaagtgtatacccttaaagtggaagcctccaatccttatgttgagccacgatttctctacttggggcctttcaaagattcagccacggttagaattgtggtggaggatgtagatgagccacctgtcttcagcaaactggcctacatcttacaaataagagaagatgctcagataaacaccacaataggctccgtcacagcccaagatccagatgctgccaggaatcctgtcaagtactctgtagatcgacacacagatatggacagaatattcaacattgattctggaaatggttcgatttttacatcgaaacttcttgaccgagaaacactgctatggcacaacattacagtgatagcaacagagatcaataatccaaagcaaagtagtcgagtacctctatatattaaagttctagatgtcaatgacaacgccccagaatttgctgagttctatgaaacttttgtctgtgaaaaagcaaaggcagatcagttgattcagaccctgcatgctgttgacaaggatgacccttatagtggacaccaattttcgttttccttggcccctgaagcagccagtggctcaaactttaccattcaagacaacaaagacaacacggcgggaatcttaactcggaaaaatggctataatagacacgagatgagcacctatctcttgcctgtggtcatttcagacaacgactacccagttcaaagcagcactgggacagtgactgtccgggtctgtgcatgtgaccaccacgggaacatgcaatcctgccatgcggaggcgctcatccaccccacgggactgagcacgggggctctggttgccatccttctgtgcatcgtgatcctactagtgacagtggtgctgtttgcagctctgaggcggcagcgaaaaaaagagcctttgatcatttccaaagaggacatcagagataacattgtcagttacaacgacgaaggtggtggagaggaggacacccaggcttttgatatcggcaccctgaggaatcctgaagccatagaggacaacaaattacgaagggacattgtgcccgaagcccttttcctaccccgacggactccaacagctcgcgacaacaccgatgtcagagatttcattaaccaaaggttaaaggaaaatgacacggaccccactgccccgccatacgactccttggccacttacgcctatgaaggcactggctccgtggcggattccctgagctcgctggagtcagtgaccacggatgcagatcaagactatgattaccttagtgactggggacctcgattcaaaaagcttgcagatatgtatggaggagtggacagtgacaaagactcctaatctgttgcctttttcattttccaatacgacactgaaatatgtgaagtggctatttctttatatttatccactactccgtgaaggcttctctgttctacccgttccaaaagccaatggctgcagtccgtgtggatccaatgttagagacttttttctagtacacttttatgagcttccaaggggcaaatttttattttttagtgcatccagttaaccaagtcagcccaacaggcaggtgccggaggggaggacagggaacagtatttccacttgttctcagggcagcgtgcccgcttccgctgtcctggtgttttactacactccatgtcaggtcagccaactgccctaactgtacatttcacaggctaatgggataaaggactgtgctttaaagataaaaatatcatcatagtaaaagaaatgagggcatatcggctcacaaagagataaactacataggggtgtttatttgtgtcacaaagaatttaaaataacacttgcccatgctatttgttcttcaagaactttctctgccatcaactactattcaaaacctcaaatccacccatatgttaaaattctcattactcttaaggaatagaagcaaattaaacggtaacatccaaaagcaaccacaaacctagtacgacttcattccttccactaactcatagtttgttatatcctagactagacatgcgaaagtttgcctttgtaccatataaagggggagggaaatagctaataatgttaaccaaggaaatatattttaccatacatttaaagttttggccaccacatgtatcacgggtcacttgaaattctttcagctatcagtaggctaatgtcaaaattgtttaaaaattcttgaaagaattttcctgagacaaattttaacttcttgtctatagttgtcagtattattctactatactgtacatgaaagtagcagtgtgaagtacaataattcatattcttcatatccttcttacacgactaagttgaattagtaaagttagattaaataaaacttaaatctcactctaggagttcagtggagaggttagagccagccacacttgaacctaataccctgcccttgacatctggaaacctctacatatttatataacgtgatacatttggataaacaacattgagattatgatgaaaacctacatattccatgtttggaagacccttggaagaggaaaattggattcccttaaacaaaagtgtttaagattgtaattaaaatgatagttgattttcaaaagcattaattttttttcattgtttttaactttgctttcatgaccatcctgccatccttgactttgaactaatgataaagtaatgatctcaaactatgacagaaaagtaatgtaaaatccatccaatctattatttctctaattatgcaattagcctcatagttattatccagaggacccaactgaactgaactaatccttctggcagattcaaatcgtttatttcacacgctgttctaatggcacttatcattagaatcttaccttgtgcagtcatcagaaattccagcgtactataatgaaaacatccttgttttgaaaacctaaaagacaggctctgtatatatatatacttaagaatatgctgacttcacttattagtcttagggatttattttcaattaatattaattttctacaaataattttagtgtcatttccatttggggatattgtcatatcagcacatattttctgtttggaaacacactgttgtttagttaagttttaaataggtgtattacccaagaagtaaagatggaaacgnn

SEQ ID NO: 19180 - DNA, 7765 bp, Homo sapiens
  misc_feature 1, 7761, 7762, 7763, 7764, 7765: n = A,T,C or G
nacccacgcgtccggggccgtgtgcgcctgcgtggtgtctgtcccggccgcagccccacgccggctgcagctccgcgagccgagccggatctcgagcggggtacacgggctgaggcggcggcggcggccccgccccggggctccattgttaaggcggctgcggctctgtcggctgttcagctgcgctccagtcggcccaggcgccgcggcgaggagcgagcgctgcgaggtggcggcctgagcaatggaagagttaatagttgaacttcgtctctttcttgaactcctggaccatgaatatctaacctcaactgtcagggagaaaaaggcagtgataaccaacattctgctaagaatacagtcatccaaaggttttgatgtgaaggaccatgctcagaagcaggagaccgctaacagcctgccagcccctcctcagatgcccctgccggagatccctcagccctggctgcctcctgacagtgggcctccaccattgccaacatcctccctcccagaaggttattatgaggaagctgtgccactgagccccggaaaagctccggaatacatcacatcaaattatgattccgatgcgatgagcagctcttatgagtcgtatgatgaagaggaggaggatgggaaggggaagaaaacccggcaccagtggccctccgaggaggcctccatggacctggtcaaggacgccaaaatctgcgccttcctgctgcggaagaagcggttcggccagtggaccaagttgctctgcgtcatcaaagacaccaaactgctgtgctataaaagttccaaggaccagcagcctcagatggaactgctactccaaggctgtaacattacgtacatcccgaaagacagcaaaaagaagaagcacgagctgaagattactcagcagggcacggacccgcttgttctcgccgtccagagcaaggaacaggccgagcagtggctgaaggtgatcaaagaagcctacagtggttgtagtggccccgtggattcagagtgtcctcctccaccaagctccccggtgcacaaggcagaactggagaagaaactgtcttcagagagacccagctcagatggggagggtgttgtggaaaatggaattaccacatgtaatggaaaggagcaagtgaagaggaagaaaagttccaaatcagaggccaagggcactgtgtcgaaagtcactgggaaaaaaatcaccaagatcatcagtctgggaaagaaaaagccgtccacagacgagcagacctcctcagctgaggaagatgttcccacctgcggctatctgaacgtgctctccaacagccgctggcgagagcgctggtgccgagtgaaagataacaagctcattttccacaaggacaggaccgacctgaagacccatattgtgtctattccgctccgtggctgcgaggtgatcccgggtttggattctaaacatcctctgacgttccggctgctgcgcaacggccaggaggttgcagtattggaggcatcttcttctgaagacatgggcaggtggattgggattttactcgcagagacgggatcgtccacagacccggaggctctgcactatgactacattgatgtggagatgtctgcaagtgtcattcagacagccaaacagaccttctgtttcatgaacaggcgtgttatatctgctaacccatatctagggggcacctccaacggctatgcccaccccagcgggacggcacttcattatgacgatgtcccgtgcatcaacggctcgctcaagggtaaaaagccccccgtggcgtctaatggggtcacaggaaaagggaagactctgagcagtcagccaaagaaagcggatcccgcggctgttgtgaaaaggacgggttcgaatgctgcccagtacaagtatggcaagaaccgggtagaagcagatgccaagcggctacagaccaaagaggaggagctgctgaagaggaaagaggccctgcggaataggctggcccagctccgcaaggaaagaaaagaccttcgagcggctattgaagtgaacgccggcaggaagccgcaggcgatcctggaggagaagctgaagcagctggaggaggagtgccggcagaaggaggcggagcgtgtcagcctggagctggagctgacggaggtcaaggagagcctgaagaaagcgctggcgggcggagtcaccctggggctggccatcgagcccaagtcagggacatcgagtccacagtctccagtgttccggcaccggaccctggaaaactcgcccatctccagctgtgacaccagtgacaccgagggccccgtgccggtgaacagcgcggccgtcttgaagaagagccaggctgccccgggcagctccccctgccgagggcatgtgctgcggaaggccaaggaatgggaattgaagaacgggacctaggggacagcagcaccactccagcctcagagactgcacacccccttgcctgtatcctcatctgtgtgacggcaggaagctctgcccagagtggcctcagctgcacgactccagaggctccacgactgagctctgaggccagtgcctgtcccccaggcccacttgtattctttctactgtaaaatggcgcctttaaaaaagatgtaagactttggttcccaactttgttaaaaaacaaaaaaagtgatggaaaggtgtttgaaaggatgctatcaggcgaagtgacatctttctaaccagataggccattgctttcaccgattccaacccagccctggactgaggatggatggttccatgagcccccagatgaaaacctggattcgacagggaagagcttggatccccggctgccccgggcatgagtgtggctggccatgggcactgggctcgccttgcacgcccaccaggagggccaggggcatacgcagtcctgacgtggactttgtgtcttggcgtaccctctccacgtgcccgtccccctcgtcatcagaggtaaaggcatgagaaaatcgcgctgtgaaacgttttttaccttttattattattttttggacagatgcttttgtcaccaagacatgaaaagctgccattcttcttaacctgttttttaagaatgtctttttactgtgtgtcacacttagatcaaggagttttcagaggttccttattttattaattaattatttgtgctgcttttgacaggtagcagagggttttaatacttcactaacagtacaccctcctcccccttgggctagcatccccagcccttaatccacgtcggagccggcaggtgcttctcacaccaggagcctctgggggcaggggctggctcctcgccgctgtacaggacgtttactgctgcttggggccagggcagtcctttgaaagggaagcaagttccggaatttgttccctcatggaactataacaccttagagcaagaggcaggaattccagggcctcctgcccctccccttcctccagcttgtcaagttaaaccactaatgtgttggtgggcctggccgtgctgcctctcctgagtagggtgggtgcaagtagggcctctttcccagctttcttgcttgccttctgtgcaatatttcttggagaatttggatgcctaaggcataaaggaaaaaaacagagttcatagtttgagctggtatttaccccctgggtttaaaaatcagattaacttcttggtctcccggaggctgctgtcaggaattctccagtacgggaagatgcagtcacttatgacgaaataagtcacccctgaacgcctccgcaggcagattcatggagaccagtcccagtagcaaccgccccttccccaagcatagaatacagaggtgccatacttggtgtaagccttccttctgtccactgtccagaatgtcctttttcacacagaggaagagatggcgggaaaacactgactgactccttgggtttcccccagacatactttcagagcgctagctgtgtggtgcacgggactttacagttaggattcatgtttaaggtggtggcgcttgaggcctgcaagggccacgttggattactgaagcggaaagcggtctcccatgtataagaaaaagttttacaacacgaattggaagctgcttgagtccacctgaacttgaattgattgcaaagccatctgccgggaacggttttgggttcctgagccatcagccagcctttctttcccctctgatgcacgttcctcccggcctagtccgtggaggcccatcacaccagcatccgtgacgccagcttcccactaggacatccaggcaggtcgggcggggacgccacacacctcagggccgtccgctgcactgccatagaggagccctccctccagtggtcacttcccaccattgcaggcagacttcccaccattgcaggcagctgggcccacttcatatcacacaaaatgaattttctataaagggaaaaaagtttgctcctccatagatttttgctgccttcgggtcaaatagtttccctggttgacgctcttgggccactctgattggcagcctgctttgccaaagagaactgtgtgaggttttggtggttagtaagagaagggggagatggccagcctgaagtcacggtcctggcccagcacaggtgggcagcagcgagctggcaggtgaagtgtgagcagcacgcaaagtgtcacgtgggccttagccgtcacccaccagcttcctcaccaggcaaggaggccccggagccttagcagggacttgcccgacggcacagctgattggtgctcgactcccagcatgcatattttgttgtaaaaacccaggtttgtaattcacatccacaaccctaagccttttaaagcggaggcaaacgttaacgaaccccatcgtggtccatggagcctttcaaaatgggtgccctggaggggcctgacagtgggttccttccatggcggatactcccttgaaatttcacattccatcaaagtttaaagcatttacttcagaataagttatttatgtgtatatgttcaataaatatagtttttaatttatatctgtacatattagacacacgcgagccatcttgccagaattctgacagtgatgtcattttattcccctcccaaaacatgccccaggaacaagcaccccttgcctctgtggcagctgcgagtgtgtctgatttcataacgaagccaggctgagggcaagaggcccgacaggcaggccagggtccccggagaagccggatttcttcgcaatgtcactggtacttagcagatggtcgtgttcacaggggctagccacctgtactacggtgccgaccgcaatgcgaggaatgtggtggccacgcgatggagctggccggaggacaggtcaggtgagggggccgacccctgcggggctcagggctccttccattctaaccttgagccacagtgtcactcttcagggctctgctcctggctctattttgttaaggtgtcatcagccttcaacctccatttatatatttttataatgttaagccactgaccaactttttcatagaaacaactatcagatttgagggctccctttgtccccctgacctgggcacaggcatgggccatggctccctcttcccagaatctgcggggaactggggcaaggcccatctgtctgcaaggctggtagctctctccctcggcttccagagtccacggcagttgcaaggtaaccagtgtggatctgctgagtcaccccaggcaccagacttaccccaggagcatgggccactgtccatggggccttccttgagaccttcccttggggctggcgggcggcggcttaccagctgggtcagtcccatctcgcccctctgtgcctatgccctggcgttgccaggcttaaccttcccctgtatcttactcatcccagaattattactggccatttctaaatagacaaaaactaccctaaaatgtggagatttactccttttgaaaagtctgtttcaaaaagtgtggcctcagctctggaggccacccccaggaaggagtttgaggttcattgtcattatggccacagtttggtgcttgtgcacgggactcaaagggcagcgtcgaagctggggttaggtgtagggttgtgagcaaagctcccctgtttgtggccacaccttccctttccaaaaaggctattaattctactcacccactatttggggggatgtaaattttgcccacagactttgccacccaggtgaggtgctgtgttcatgcacggaactgatgtcattagacaccatccaaggatgggcagcctgcagtgtggccggcgactgccatccagagaaaaggcaccttgtgccacagggcggggccgacaccctgagctcacaggtggcccctgcattcaggtggatgtccatccttgaaacagcctcttctgggaacacagcactggaggtctccaggcatcagggttggccggcagggtgccctgcagcttacataaaggtcgtggcaatgtttcaatgttaaactaaactattgccttcctcttacttttcctaaaatgattttctaatgggaacagtcacttcaagttcatgacatagtttgaaggaggataattcattttttcctggttgtcactgtcttcttatccccttggtgggctgggttcatactgtgaaataaactaaaatgaaaccaaaacgttcctgccgtaaatacgtggcacagcactgcagaaaaagcagtcacctctattcgtgagtccccaagccatagcagggcgtctgtaaaagaagggaaactgcacccaggaagtggtgggcgtcagacgcatcctttcgcccgtagttcatgaaatagttccggctttggtcttccagaaaatctcaacttcaccgtgcacaagtgttaccgggtctttttagtgtagccatggaagatactttcaaaaggacatcttcagatcataagtcttaggaccaaaggtgtttttaatgagataatctttttgattttctaacaagaaaggaaatattcactttacattttaacatcaacttttaagtgatattcagaattaattgaccatggtgatacgttgtaaaatgttttcatattaagaatgtaattatttccttattgtattttttaaaagctaaagtcatatttaaaattctctttgaaagaaacaggcaaagaaacagcaaagatttttttaaattaaatatgttagtagtgcccacttcaaatgactgtaaatatattttcactgtttctcaatgtatttaattcataaagtaaaaattttatgaaaagaaacttgcaaggaaaatcctagttttcagtccactcgccccactttgtagtagcttcactgaatttcctgctttcctggttgaattttctactgtttcacgtggtgtaaccctagactggcgcccttggcgtgcccctttgtgtatgaataaacttctctcccccaaaagaaaaaaaaaaaaaaaaaaaaaaaaaaaaaaaaaaaaaaaaaaaaaaaaaaaaaaaaaaaaaaaaaaaaaaaaaaaaaaaaaaaaaaaaaaaaaaaaaaaaaaaaaaaaaaaaggggggggcctttaaatttttttaaaaaaaaacccccccacccccccccggaacccgaaaaaaaaaaaaaaaccccatgtgtggtgaaaacttttttttcccctttttaaggggtcaaaaaaaaaacaaccccttaaaaattttcaaaaaaaaaccnnnnn

SEQ ID NO: 19181 - DNA, 753 bp, Homo sapiens
  misc_feature 750, 751, 752, 753: n = A,T,C or G
gacccacgcgtccgtgtccttgcgctttccgtctgtctaattgtggcagctgagattgaatagaggaatacaggaggaaaaaagcgggaagagtttttgaggcaggtcggtcacccaggcttgtagtgcagtggcacaagcaactcactgcattctctgcatcctgtgctcaagccattttcccacctcagtctcactagttgctgggactgcaggcatgcacccctatgcccagctaatttttgtagagaccgagtatcgcttagttgcccagggtggtctcaactcctgggctcaaggagatctgcccacctcagcctcccaaagtgcaggcctagcctgggaggggaattttcaaaacgtgagttttgggaaatagtctaccagccttacctggttgattacacttgtaaaagaaagattaaaagcaggccagtgactctggtctgcttgaacatgtgaatgtagtggtttgagcaatctggagtttgccctagtgtcaaattccagactgtccatagtgtccaaaacctgaggcagatactaatgttaacccccagcaccccgtgattggaaacaaacctaaatacgtattgggaacttaatagcaattttaagcattctgatagattttttgtagggatggggtcatgccatgtggcccaggctggtctgaaaactctggcctcaagtgatctcaagctttggccttctaaagtgttgggattacaggtgtgaggcattgcaccnnnn

SEQ ID NO: 19182 - DNA, 788 bp, Homo sapiens
ctgttgctgttgggtgtcaacactgtcatctgttccactgtcatctcggcagatacaggaattacccatggtagtagcggcacctccagtccctaggaagtgggctatgtgctcttcgagagtcaacaacagaccctggccaaggcttctgctcgctaagaacacggcccaaccaaagacgatcatttaggtagttttcagttttccaagtactgttttcataacctggagttgaggaatttgcatcctatttgtttttaacaactgaatgccaaagaaagttgcagagcttattcccaacattatcaactacaggggattctggacatccaatggcagttctgggccctgttagccgcagcctcctcagaagggcgacccccaagaacctcttctggtgaggacccccgaaagagggaacaccctcttctaggaacctcttcagatccctcaagcgcgggcctcggtggaaaacctctcggctgtttctcaggttctgaccaacgccacctctctcccgggccctttccagagcctaccccggccccagtccggtccgcccgccccaggctcgagcggctgttcccctccctcacagacgtccccaaccctcagactccctcccgttccgcgtgcccagggctcagagcagcgcggtcgggctgtggcactgactttctctacctcccgggcccaccggagggagggggcggcggcggcggcgcgactcctttgtgacaggtccgagagaacggcaaagatggacgcgaggccacggcgccggacgc

SEQ ID NO: 19183 - DNA, 956 bp, Homo sapiens
  misc_feature 1, 2, 3, 4, 5, 956: n = A,T,C or G
nnnnnaaggggcccccctttgggggcgccccaccacccccccggagactggttccggccaggcctgggtccaaatccggggttggaaggtgaccaatcccagcaatgggagccagaagccagacccagacgaggcccacgggccccagggctcctccaaggttgtgcagggacccagtcataggagtgctggccaccgagccaactcccatgtggtctgcccgccaccacgagcatcccatggaagagcaagcccagccccgcacagcagcgcacccgccacgcacgtgtccgtcacgaaggccaaggcaaactgtgccagagacactctgcctgtgagcaacatgagccagggaagcaggaggagggcagccatgtggaggggcgtgtgggctcgcagcagggccgacagtgcagggcccagcagcacagagacgtggagcaggacgccggcggcatgaagcagcaggcacaggaagggccggtagttgccgaagcccacgcagcggcccagcaggcggcagtggtggtcccgacgcaggatgcagacgcggcaggcagagcagtgtccgctgcgtggcggcacctggctttggcattggtagcagtaagcccagccctggcccagaccgcggccggccagcatcacgccacggatgctgggatccgagcgcaggaagagccccacgttgcccagcaggttgagcagctggaaggcggccagcgccagctgcaaggcccgggccaggggtcccagcggcggcggcccgggaccgagcaccagcacgtaagccagctccaggcccacggccgcggcccacagcgcggtgagcacgagaggcagctgcgcgggcgccccgtccgtgctcccagccgcccagggctgccccatggcctggacacccagctgtcggagccggaggactaggccgccggacgcgtggtcgactccctatn

SEQ ID NO: 19184 - DNA, 562 bp, Homo sapiens
  misc_feature 1, 2, 562: n = A,T,C or G
nngcgtccggctactgcaaactccgcctcctgggttcaagcgattcttctgcctcagcctcccgagtagctgggactacaggcatgcaccaccacgcccagctaatttttgtatttttagtagagacagggtttctccatgttggccaggctggtctcgaactcctgacattcggtgatccacccgcctcggccttccaaagtgctgggattacaggtgtgagccactgtgcccagccccttcctgttgagtaaaaggaagaacttcagggtaagacactgtacagtgcccagcatctggagagccgccagcattacccctgccttaggaggtagtcgtctcctcatcactacaaggtattgaagcctgagggcccctgggcaggacgatagagtgagattgccctggggactcaggaaaggaaacatgccgtatttctagggaaggagctgctgctgcctctcagtgactctggttccaggaggaagagccgagagctagggttccctttatagggagaaacccaacagggtttggggtgttctgggaagccaggccagcn

SEQ ID NO: 19185 - DNA, 1665 bp, Homo sapiens
  misc_feature 1, 2, 1548, 1665: n = A,T,C or G
nnaccgacaacagtatgtgtaagtgggtagtcgcggcctgacgtgtgtcgttatatcccaagctccgcggcggccgagctgaagtgtgtccgcgcgcacgaaaatttcgcgcgttctattcttgacccgcacgcaccctgccgttcccggtggatgcgcactttttccgtggaaaagaaggcagggtactgttaaaccaaaaatgggaaaagaaaatgggttaagcacatgtacactcacgctaaaaaagcttgatttaatgcatacccttaacgggggaaaagactacactccaacttcagaaaattaatttagaaggataggggaagagattaagtaattgcagtttaacatgaaaaatgcacatgtgatagaatggagcacaatggaggattcataaaacatgctcatcagaaaaatctgttaagtcgactttgtccagattcagaaagagtaagtttatcaacatctggcatccctcatactttgtgaagatagatcttctactgcttaattatgagaaattattttattcaaagaaaggagctcttaatcttttgataaaacaaaataaaggagtagagagctgactagatgtcaagtgcttgctagaaatgatttttaaaatgcttctacacgtaaaatgtactgacaaattttggtaaaccatttaaaaataagaattagttttaaaatcttggagaaaatgcctttttgcccacatttaaaactgaaaatcaattttactatagataggagttctgtggagtgtacaaaattccttttagagatcaaatggccatcccagatagatatcatgtttcacaggcattacttttagtcaccctcaagtttcagccatgggaccaaaatttagtgttctgtgccatgtggtcacagggtcattggtttcacatcatggcttaagaaaatactggcattttgtttcttacgaagtaagtcctaccttgtgcatacaagcaaaaagaaaaaggaagaaaacaggggagggaaaggcgcaagaagctttttttgtttgtttgttttgaagacaacagattgaaggcaaaagaacacagagctttcacaagctcaaagaaaaatatttgctggctgatcgctgatttgtatgcactataaaacaattccataaataaaaccaatatatcatttcttaatcatgaccctatcaaaaccaagttatttcctaactattctttcaatgtcaaatgtaccctagagttgacgtttcatttttaagggttacagctacctcataggaactgaactagatgtactcttaccctttctctgaagtataacagtacaccactgcacaacagtatccaatttgaagactaatggtaaagaaaattcttcaggaaaaactgaaaatccatcaagctgaaaatctaaaattaggttctactttctaatgaaaaatacactaaaagtgcatcatcagaataaggtaattcttatgcccccctttgtattggcaaaattttccaaacaatgcatcaaacttaaaccctccccccagggccnatttttgataccaaatcctcggggggggggggggggttttttttaaaagggcagcaaatttttgggaaaaaaaattaaggcccacccggggtggttttacaacaaaataataatggn

SEQ ID NO: 19186 - DNA, 1673 bp, Homo sapiens
  misc_feature 1, 2, 3, 1668, 1669, 1670, 1671, 1672, 1673: n = A,T,C or G
nnnagcgtccgattacttgcaaatagttgtaaaagtaaaatacgacctttgttataggcagtcttctctttaagacaatacttttccacttgtttgccttttccatattatatatgtgtattcatatagctgtatacatattcagttgatcattttataaacatatgaaggcataaagatatacagaagaaaaattattaaacaactcattttaagattcaaattaactaattcctgcatatatgacattccttacataagcgaacactaaacaaaaatggctagaaatgtctttttctttcttttctctctttgttgtttaaggtattaagcacgaattattacatgagactggcagatagctattaatcctcttacagatttgagaaagttgattctcaaatatttatgcaccttctccttcattgttttctttaaatctgtcctcttaaaaagcttcttaagagctcagttaatgcttttgacttaactaggagaaaaaggcatgataatacaggcaagatggcattgttagcaattctggtagtggtttggaatgaatcctaagaggcagggatcttaaggacaaggaagagaagagagagagggagggatctttgatctctttctctggtaatcttaatgcataattttactaaaacatgttctcaattcattcatattattaagctcttcctgcagttgatatctgagcagagtaagatttgtatttccatttttacttttttgaaagagaatatatggacagattattagtacaatttgggcactgtggttttaagaatatctgagtaaaataacaatatgaaataataaacagaagctctaacgtcaggtaacaaatagacagcaagaaaggttttgcaccatcctcttacggcctagagagttgacaagttgcttgtagttttaaaaaaataataaagtatacccttctggtatatcatcaagagcttaagaatcttggctttcatatttaaaatgcttttggggagacatatattaaaattttagccaagatgatagacatgtctcaattatatatgtgtgtgtatgtttttaaagctaaaaacattacttttagatccctagaatgaaaatttttttctcatctatgcaattcccatatggtttttttttaaatcatattttattcattttctccctttagcaattttcattttatttctcataatttgaacagagacagttctcatacatgatcagatgctttttttttcttcttaccatcatttatgcatgacataggtaatgtgactaatttctccagttgattcaagaaactcattactttgcctcaaattatatgtaaaatatttgttttacttaggttacagttatcagaaaggtagtttttttcttctattaaaatatacattggcaagaaataaactttagctattctgttgtgtataatgaacttttcatagcattcagatattcagggggaagataatatggtcataattgtaccttgagtcagattagtacgaaggtaggttggtaaattgtccgtgagtatggacatttaactatgtgcagtattggggataaaagggcaggctggtaaaaaaggattgtacattaaagaacgaggaaaaagaagggagtttcttttgctcatannnnnn

SEQ ID NO: 19187 - DNA, 1508 bp, Homo sapiens
  misc_feature 1494, 1507, 1508: n = A,T,C or G
gcagtatcttagccctttctacattttttctcccacttctggaaggattcttgggtataacctaacccaaagaaaagtggcatgtgctgaaactgagtgtcacagagctgtgaggttgggtctttgggattagcttcattttccagggtttgccctttgcccttcaaccaaaggacaaagtcatgttaacagctgctactaagtctatatgcccattcgttcataccacaaaacaggcatctgactcctctggtcaccatggaatcaaggcactgtcaagtggtggggggtccacaggcacagtgggcttcactctggaacaggattactgggtgcagcggatgtaatcctcacttaatcaacccacaccccagcatcccctgagctttctcttaatctcattctagcccatcttgactcttcggttagagggagttctcattggagatttgtctctgggattaatgagtgtatgcctagctactttctccagtttacttttagaccatattgttgtttgttttgaatatcattccttaggctatgttgagagtagagtggcttcccattaggagaactaatttagggcatgtcttttgctgaatcccgtcagcatatttaacaaattcccaattctagataatttccttttatttctctagtaccctttgccaggggctctacacatcaaaggtgttcatgaagtatttgtcaaaggaaagaacagtaatgacacctaacacataatgagtgattagtatgttccaggcattgcgtgagctatttactgtgagtgatttaatgttatcttcccagcagacctctgaggtaggtactagtatgatccccatttcgtacatgaggaaactgacactaagggacataaaataagttttttgaagtcacaaagtgaataaaaggaagaaccagggtttaattgaagcccatagcaatgaaaacattgtggaacttattcttcatgaatggtttacaatttaaacaaaatgtcacctagaaaatagatgaaaatatgttcaaccaggtctggatttttccaatgtttactactgaattttcattcaataacaagtttaacttccaaaaaggtgttggtatctgattttctgcctgcctcagaatgtgatttgtctgcctttgggtaatccagccttgggtagagaaggaatttgaactcaggaaattcaactccagaactgatgttcttttttttttttacatttaagttcggggatacatgtgcagaaggtgcaggttggttacataggtatacatgtgccaggggggttggctgcacctatcaatccatcatctagatttaaagctctgcatgcatcagatattggtcctaaggctctccctcccatggcccccaacctcccgacaggccccagtgtgatgtttccctccctgtgtccatttgttctcatttttcatctcccacttatgagtgagaacatgtgttgtttggttttnctgttccctgtgnn

SEQ ID NO: 19188 - DNA, 2719 bp, Homo sapiens
  misc_feature 1, 2, 2715, 2716, 2717, 2718, 2719: n = A,T,C or G
nncgactcttaacatgttcaggaaactggatgtggaattggtgcaattctctgactgctttttgtgtcaaattacattgtgataaaaaaacaatgacatactattttccctatcgcaaagaaaagtattttcgtttatactgttttttcctttggaaaattttcaattgtacattttatttcactgatagttgtatttttcacaaggaaaatgttgtggttataattacgtttgatatatctctacaacaccttttgttattttcagtaaatcttacctctaggttgaattcccattgtgaattctatcttgaggtaaccatttttttcacacagatttgcttcagtgttatccagaatatgcattcagtactagaattagtttagctttataaatagggctgtgttagacactgcagtaattttctaattcataaaataaacttcttactaaactagcacttgattaacttgttgaggtaaaaatctaactacatttacattttgaagaataaaactgataattagactatttgcagtgttaaacacagcttccttaactcttagaactggaagttgtagagctctccttttggtgcctttccagcctttatacacactattgtagctttcttaggtttgataggtagcgtttcaagtagtttagctgagacagtgaatgtattaggttcaacatgaccttgtgttttatttgtgtttgccaacaggatgccttatttgtttgagaaaaagatgtactagtgtcattctaaactatctccttttttaggattctaaagaagttaatcatcatccttttgtttattttaccaccatttagtgccttaaatcctatcaagaaagcagtgttactgctcaatgcccaaataagacacgcggatattgctattgtcttgcttttgagttaacaggccaactttttatacttaaaacctcagtaaactggcaaagaattgaaggtaatgtgatttgatttgagaataaaacattgtagcattgggtgaaaaatgagtatttgagttaagcttacatatttatttctgatggttatcttattaaaagcaataatccttaatactgtacttgccattagactaggtactcagtaatggaagtttctctcaagggttaaatgttccatttttgaaagttttaaaaaacctgtttgggtggtttattttgaaaacaaaagtaacctattagattcattttgcctaactcatatgagagatgcagagtatcaacagtgggagcatcataaaatgaattttccaagtggagaggagtaggaagcagccatatgatagtattgactctggacagaattgatgtctttcgtttccaaagtgcagagtagggaactacatttcctaatgtggcattgtaaatatacatctttatattactcttccagcctacgttcctaaatcattgataatttaaatattttttaaagccaccttaatttaggtagctcttggaatcgatgtttgaattcactagccacattttcttcatgatatgcctcgtggcaaacaaagatgtttccttaagatgaatcttacatttcccatagaaaataacccatttcctttggcactgcagttgccctcaaactgcttgcagttgtattcattttagtacaacaaaggttttcataatatgggaggccaagtctatgatactgcctcaaagagaccctattgtgtagatgcatcatcttctctcatttgatccatagagcataggcaaagatgtcaacctcaggccttagagaaaagtggaaatgttattatgacagccgtccatgagttatcgctttgtatgaagttaaatacagtcatgcgttgcttaacagcagggatacattctgagaaatgcattgttaggcaattccgttgtgcgaacatcctagtgtacttacacaaacctaggtggcatagcccacaacgtacccaggctatatggtaaacctgtacagcatgttactgtactgaatactgtaggcagttgtaacacaatggtatttgtgtatctagacatagaaaacatacagtaagaatatggtattataatcttacgggaccactgtcaaatacgcggtctgtctttgaaaagttgtaatgcggcgcatgactataaatacctagctggttagcatttacattccttgccagggagtttgaaatttatactatagaaataactttaggttttaggtagagttaaagaggtaaagcacatgttgccacaacccaggaaagtatttttaagaaagattggattttcctacctttagagatctaaaaaaaatttaatataaaaaatcattttgtgttggtgtttattactagttcagatgagtggctgctgaaggggcccccttgtcattttcattataacccaatttccacttatttgaactcttaagtcataaatgtataatgacttatgaattagcacagttaagttgacactagaaaatgcccatttctggtattacactatcaaataggaccttggagaggggacaattctttaaggtgaagtttcagataattggattaatttttcggtcaatgaaaattgagggcggtaaaagttcaagtctcaataaggggcgaaaaatatttaggggatccccggtggtgtcaacaaacggggggaggtgggggagttgataggaactaataannnnn

SEQ ID NO: 19189 - DNA, 1482 bp, Homo sapiens
  misc_feature 1, 2, 1482: n = A,T,C or G
nnctgtgccccgccggcttctacggcttgggctgtcgccgccggtgtggccagtgcaagggccagagccgtgcacggtggccgagggcctggtgcttgatgtgcgagcccggctggatacggaaccaagtgcgaccagccttgcgccaccggtttctatggcgagggctgcagccaccgctgtccgccatgccgcgacgggcatgccgtgtaaccactgatcaccgtggcaagtgtactgcgcgtgcaacaggcgggctggatcgtgcgaccgtgtgcgagaccaagttgtagcaatggcactttacggcgaggactgcgccttcgtgtgcgccgaactgctggcagcggacactgcgacttccagtcggggcgctgcctgtgcagccctggcgtccaccggtgccccactgtaaacgtgacgtgcccctgcccggactccagcggctggcggactgtgctcaggcctgccagctgccactgaggacactgtgcgacccggtcactggtgcctgccactctagaaagccaagcagcgcagagggctgtgatgggctgcggggctgcggctgctcgtcctgctcgtctgctgctgctctcgctgctcggctgctgttgcggcttgccgtcggcaaggacccgttacgcgccgtggagctttccgctttgggaggaaagaaggcgccgaaccggaatatgcgtggcgcttcagtcgcatcagcattgaagctgcccggattccggctccggagggagaaactacccaaagtcgtagtggacacgacgatcttggtaacacaatcaatgcagttctggaccacctcagggttgggcagcctcaccaactgtctctcggggctcctttctcgttgaaacacttttagggctgtgtactgtgtaccccatgaggaggcaccagcggagagccgggaccccgaagtccccactgtccctgccgaggcgccggcgccgtcccctgtgcccttgaccacgccagcctccgccgaggaggcgatacccctccccgcgtcctccgacagcgagcggtcggcgtccagcgtggaggggcccggaggggctctgtacgcgcgcgtggcccgacgcgaggcccggccggcccgggcccggggcgagattgggggcctgtcgctgtcgccatcgcccgagcgcaggaaaccgccgccacctgaccccgccaccaagcctaaggtgtcctggatccacggcaagcacagcgccgctgcagctggccgtgcgccctcaccaccgccgccaggctccgaggccgcgcccagccccagcaagaggaaacggacgcccagcgacaaatcggcgcatacggtcgaacacggcagcccccggacccgcgacccaacgccgcggccccccgggctgcccgaggaggcgacagccctcgctgcgccctcgccgcccagggcccgagcgcggggcctgggccccggcctttaggagcccacggacn

SEQ ID NO: 19190 - DNA, 1724 bp, Homo sapiens
  misc_feature 1, 2, 3, 1724: n = A,T,C or G
nnnagtcgcccacgcgtcctgtgagtttagcgctgctgtccggatgggttggtagcagacagggtggagtagggttaagcacactggtcaccttaggattggtttcctggtgctggagaatggttaggacacaggccttggaaggttttttgagtgtgaaatattactcagcgttttctgcagacctcgcgggcaatgccgcttctaattttatccaggccttcttctgtagggagggcctgttaagagttgagcagcccgatttctgaacccctctaaaaagctgtggctgattggtggcttttttttttcttggagagggggtgtcaaagatttctttaaaatcgttagtgatgtggtctcgctttaagatttttaatgggatcagaagaaaattcggtacttaatcacttccggtaatcttcatgacctgttatagtgactgcagtgtactctcaatgaggaagatatagatacgaaaagaactagagccgcatcacatggggacttctgcaaatacagagactcggattaaaggtggagaagatggagctaaaggaactgcttatttaatacatttgaacaacttttggggtacttagaaggtgctttgaaacctgcatttgattaagcaagaattcgcttgcaagttaagggttagatttttttattttttaaaaatatgctttctgccacatgtaaaccgtaagttgtcctgaaatgataagctttgatattctatggtgtttattttttacttatctttttgaatgaaaagtgaacaacaagaaatgctggtggtaattttttgggtcaatgatgagttggcatgtattctgaatctaaagttgattattactactttagctctagaattactctgagacctgaaaattacctgaatcgtgactaagacgaagcctgaatgatttaagttcttttttgttggatacaatttgttgttgttgttgttgttttggttttgtttttgagtcggtctccggtcgcccaggatggagtgcagtgacacaacctcagttcactgcagccttaatttccctggctcaagcgatcttctacctcagcctccctagttagttaacaatttttaaatggaacgttttcctattacaagatgaaatcaagtgaaaattgagatggcactccacagaaggatgttattatcaagtcagatgcaccggacactttgttattggagaaacatgcagattatatcgcatcctatggctcaaagaaagatgattatgaatactgtatgtctgagtatttgagaatgagtggcatctattggggtctgacagtaatggatctcatgggacaacttcatcgcatgaatagagaagagattctggcatttattaagtcttgccaacatgaatgtggtggaataagtgctagtatcggacatgatcctcatcttttatacactcttagtgctgtccaggtaaatactaatcaaaattgcaacgatcttgatagtatgttctcttacttcagagttggaaattgaaactgtatcaggatttggtcaaaaagttttgttacaagtgaagctgtcctacaaggtcaatgatgtaatggcatgtattagctgaatctaaagtttgatgtgagttctaaaattacactgagaccttgtagggtaaaatttttatcttcagtatgtgtaaatactgtaaaatagctaaatggagctatttgan

SEQ ID NO: 19191 - DNA, 592 bp, Homo sapiens
  misc_feature 539, 586, 587, 588, 589, 590, 591, 592: n = A,T,C or G
acgcgtcctaaatgtgtggtacatggaatattttttattatgcttatttcgtattgccaggtagatggccagcctgacattcaaaattattttatcagcccctaaatgttaatatttcccaaactatttaaatcagtagaagacatttttactattaagaataaaaagttataatataaaatggattaaatgccagattatatgctaaacaagtcctttaaatttttaacttaatatttttaacagattttttttttgagatgcagttttactcttgttgcccaggctggagtgcaatggcacaatcttggctcactgcaaccaccacctcccgggttcatgcgattctcctgcctcagccttctgagtagctgggattacaggcatgtgccaccacatgcagctaattttgtacttttagtagagacggggtttctctatgttggtcaggctggtcttgaggtcgggagctcaggtgatctacctgcctcagcctcccaaagtgctgggattacaggcgtgagcactgcgcccggctntaacagatatttttataagcaaatcatttataagtatgggtgactannnnnnn

SEQ ID NO: 19192 - DNA, 759 bp, Homo sapiens
  misc_feature 732, 743, 756, 757, 758, 759: n = A,T,C or G
tccgcgaggttaggagatcgagaccatcctggctaacacggtgaaaccccatctctactaaaaatacaaaaaaaattagccagacatggtggcagcctcctgtagtcccagctactcgggaggctgaggcaggagaagggcatgaacctggcaggcggagcttgcagtgagccaagatggcgtcactgcactccagcctgagggacagagcaagactctgtctcaaaaaaaaaagaaaaaaaagtggcacagatcaattataaatcacggcttcaaggccagtgctctcacttggtacattaataatctcaggcccaaataagataagtgatatgtcaacgtatgttcactttggtctttacatggcagctatagtatacggaatattataagctcagaatcgtcatagctacataactcctttagttggaagaccacgcgtaaatgcccatcaagagctagcagttctgcatttgactcttgaagaccgtggcatggcagacaacacttcttgagctgtaacaggtggacattaaatccatgacaggaggtagagacggccagattacttgagcccaagagtttgagaccagcctaggcaacatggaaacaacagttccaggccaggtgcgatggctcatgcctgtcatctcaacactttgggaggctgaggtggttggaccgcctgaggtcaggagttcaagaccagcctggccaacatggcaaaactcngtctctactanaaaatacaggccnnnn

SEQ ID NO: 19193 - DNA, 1075 bp, Homo sapiens
  misc_feature 1059: n = A,T,C or G
gtgagtggtattgtggtttggccgtgtattgtcactgtttctggttctcctggtggtcgggaatctgggccattgagtctgttggaccctggaggcagagggttcatgtgctcgagttcaggtgctgttcagtgtcaggcctgggcccaaggggagagctctggttgtgtcgccgttaagagtgagataccacacacacacacaaataactgatcattgattctctttcccttcctgcagtctcccaaggtgtcaattaggaagtgccaaaatactaaagtctcatttaattttcctgatcaacttatgttctaataattaatgtggaaggagaggaaagaaagagaaaacaaatgagaatctaaggtagtaaacagcagcaacttagcgggaataaggggaacatggttctcactaaccaaataggactgataacgcttccaaaaaataaaatgttaggtgaagggaaatatggaaatatgttttactttctactaatagctgcaggcaggaaggtccaaacgcagggtttaactaagctgggggagtaggggagatgtttagagggaatactgaaagagaatcagtttcaaccataacccccatctactgtagagtatatccagaaatctagactactagtatggtatacatatgccctagaagcaacttaggtagtaaactcccatgaattgtttgtaatttatcttgtccctgggcagtttcttaggaggggtttcagaagcaagatctctacttccttcagaataataaggtagggaaggaagcctcaaaacaaagtggcaatttggaggcagagaaggaataaggtagtggtggggaggaaagggatagcaagcaggttcagttcaggaactaaaggcaaaatcttcatactcataccctgtttgagtccaagaggaagcaggaatgagagtaagggtggggcacataatccttattcaagttacctgatatttgaaaagaaggacacatgaacactagagttaatcttttagtgctactgaaatggctacacagttgatctgaaggcgttancgtgtgggatcctcta

SEQ ID NO: 19194 - DNA, 2269 bp, Homo sapiens
  misc_feature 1965, 1966, 1967, 1968, 1969, 1970, 1971, 1972, 1973, 1974,1975, 1976, 1977, 1978, 1979, 1980, 1981, 1982, 1983, 1984,1985, 1986, 1987, 1988, 1989, 1990, 1991, 1992, 1993, 1994,1995, 1996, 1997, 1998, 1999, 2000, 2001, 2002, 2003: n = A,T,C or G
  misc_feature 2004, 2005, 2006, 2007, 2008, 2009, 2010, 2011, 2269: n = A,T,C or G
cccacgcgtccgcacgcctccgcgggcagttaccagctttggctgctcgcgcctccccaactcgggtaaagctcctcggcctcggcgtgctgcgcctccgcggctgccctgcgccagaattcggttccctcaaaattataaaagcaggaaagctcaagacaaagaaatccaacaaggctagtgatttcagtgatatggagaattggccaacaccaagtgaattagtgaacactggatttcagagcgtcctcagccaaggagaccttctacagtgaggtgaaacaaatagagaagagaaggttgaaaagagaagtaacagtgacagcaaagaaaaccgggaaacaaaattaaatggtcctggtgaaaacgtcagtgaggatgaggctcagtcaagtaatcaacgtaagagagctaataagcacaagtgggtaccactccacttagatgttgtaagatcagagagtcaagaaagacctggatcccggaacagctcaagatgtcaacctgaagcaaataaaccaacacataacaataggagaaatgatacacgaagttggaagcgagatagagaaaaaagagatgatcaagatgacgtttccagtgtgagaagtgagggtggtaatatccgaggttcctttagaggtcgaggaagaggccgaggacggggaagaggacgaggcagaggaaatcctcgattgaactttgattattcatatggttatcaagaacatggtgaaaggactgatcaaccatttcaaacagaacttaataccagtatgatgtattactatgatgatggtacaggtgtacaggtgtatcctgtggaagaagcgttgcttaaagagtatattaagcgtcaaattgaatattacttcagtgtagaaaatttggaacgagacttctttcttcggggaaagatggatgaacaaggtttcttgcctatttccctgattgctggttttcagcgtgttcaggctctcactacaaaccttaatctcatcttagaggcactgaaggatagcacagaagtagaaattgtggatgagaaaatgagaaaagagatagaaccagaaaaatggccaattccaggccctcctccacgcagtgtgccaccaacagacttctctcaactgattgattgtccagagtttgtaccaggccaagccttttgctcacatacagagtctgccccaaattctccaagaattggaagcccattgagcccaaagaaaaacagtgaaacaagtattcttcaagcaatgtctagaggtttgtctaccagtttgcctgacttggactcagaaccttggatagaagttaaaaaaagacatcagccagccccagtgaaattgagggaatcagtgtctgtccctgaagggtcattaaatcagctatgttcttcagaagaaccagaacaagaagaacttgattttttgtttgatgaagagattgaacaaataggacgaaaaaacacatttactgattggtctgataatgattcagattatgaaattgatgaccaagacttaaacaagattttgattgtaactcagacaccaccttatgtgaaaaaacatcgtggaggagatcgaacaggcacccacatgtctcgggcaaaaatcacatctgaacttgctaaagttatcaatgatggcttatattattatgaacaggatctatggatggaagaagatgaaaacaaacacacagccataaaggtaattgtttctggccaacatctttctactgatgctttgttttgattgtatgttgctgtttatattttctcaaacttgaggctctattttatgaaatgttgaatataaatacattgtatttaacttgaaaaattcctggaaatatacctgataattaccacctgaggaatcgttttattttatgaaagtaacagcgtgatgaatactgtaattacaaaagaaaattagtactcactgacttataccnnnnnnnnnnnnnnnnnnnnnnnnnnnnnnnnnnnnnnnnnnnnnnnggtgacaatactgagaacgccctttctcgtatgaaagaataaaaacaagttactgtggacaggctgaatttatatgctcattgcttacctggctctcaccgcagctgtatgagccagtggctttagagagcactcttcttgcctctttctgttttccccacttagtctatggtgcatgatctaaggtagtggaaatggttgtggacaaactataaatgactaaactggatgattatctctcttggtctagtcattacn

SEQ ID NO: 19195 - DNA, 762 bp, Homo sapiens
  misc_feature 1, 9, 20: n = A,T,C or G
nagccgggnagcccatcagnaggaaaagtccgaggcgctggaaccctgcgtccaggcgtgacggtcatcccgaaggccggccccaggcctgctgactttccctgatggttctcatggaatcccccgcaatgaaggtctctttgagaacaacaagctgctgcgacgtgagaagtgttctgccattgttcagcgggcccagagcgcctccaagtcagccagaaatctcactgcctgacagcgcagtgggcaccagctgataagtattgggtaaagccagtgcccctgttgttgattcgaggtgaacaaatgaatcagagctgagatgagttgacaatgacagtggagcagaggccttgtatgtgccctgtcacctgccattccagaactggaccacagaaaagtgctgaggatgctggccagcagaccctgcagcagtcattggtggttctgtctttccctaacccttatgtgctggaggacagaggagccacctcttctcactggttgatactctgttcctaagacctcaggttacccagtgtagcctgctgtgacccttctgcttcattttctgccaagtgatacagaaccttcgttctgctgctttggggacaggtgatcctagccccagcttagggccagtgctctgtgccactctggagaaatagggaaaagataggggtggctcagtacagcagccctgtgaaagtcaaggccagagcttttcttttttaatttttttattattattattattatttt

SEQ ID NO: 19196 - DNA, 1990 bp, Homo sapiens
  misc_feature 1988, 1989, 1990: n = A,T,C or G
atactatagggagtcgaccacgcgtccgcaccctgcagcgtttgaaatctgaggggaaaagactgtagtcagcccttagtggatgagagcgcctatgctccagaaacagcaggctcccaggatggacaccccgccccctgaagaacgcttagagaagcaaaatgaaaaactgaacaaccaggaagaggagacggagtttaaggaactggacggtctgagggaagccttggcaaacctccggggactgtcagaggaggagaggagcgagaaggctatgcttcgctcccgcattgaagagcagtcccagctcatctgcatcctgaagcggaggtcagatgaggccctggagcgctgccagatcctagagctgctcaatgcagagctggaggagaagatgatgcaggaggctgagaagctcaaggcccagggtgagtacagtcggaaactagaggaacgctttatgaccctagcagccaaccacgagttgatgctccgcttcaaggatgaatacaagagtgagaacatcaagctgagggaggagaatgagaagctgaggctggagaatagcagcctcttcagccaggctctgaaggatgaggaggcgaaagtattacagctcacagtccggtgtgaggccctcactggggagctagaaacgctgaaggagaggtgtgctcaggatgcctgccaggcacaggcgcgcgagaaggagctgctggagctacagagccagcaggcctgcacccacaccaaggagacagaacagctgcgcagccagctgcagaccctcaagcagcagcaccagcaggctgtggagcagatagctaaggcagaggagacacacagcagcctgagccaggagctgcaggccaggctgcagaccgtcactagagagaaagaggagttgctgcagctgtccattgaaaggggcaaagtgcttcagaacaaacaggcagagatctgccagcttgaggaaaagttggagatagcaaatgaagacaggaagcatgcgctggagcggtttgagcaagaggcagtggctgtggacagcaacttgagagtcagggagcttcagcgcaaagtagatgggatccagaaggcctacgatgaactcaggctgcagtctgaagccttcaaaaagcacagcttggatcttttaagcaaggagagagaactcaatggcaaactccgccatctctctccatagggaagtttctgcttcctctggcctgcaattcagaattcaaatatttgcgtcttagcattatggcaagagtaaagatgatatcccatttattatactttcaagcacaaaaggcaactcaaagaaaagctactttactatgatatgtgtattatgtaaagccattattaattttcatttctacacctagaatacacaagatttgccagatttccttctgtgccttagaaatcttaaatttactagtagtatcttctcctacccataagttattaattctcaactcagatatcttcatttatgtaggattttaaattagcagcttctgtgatttaagtcaatctaagtgcagtgagatgtgccattgtgaaaaataattagcacaattacccattgtagatagttaggcttatagtctcccatagttgagatgtaagcaaacatgtatcagcattaataaacatgaatgtttgcggaaaaaacaaaaacgttgtctgacttccatatacattgcgctagctggcaaatgatggggaatcaagtcttaaccaagaggtcaacttcattctggatgagcaatatggttcacttacgttttcaaacccacttttatttttttctggaagcttagaaatatccaattggggtccccataaagaggcctcactggcacaatgcacttcagtgtattaaaatggcgattgcaatgacactacgccttgggcacacatcacagcgtctagatcccacagtgtgtttaactttggaaacttcaacatgcgcnnn

SEQ ID NO: 19197 - DNA, 636 bp, Homo sapiens
  misc_feature 1, 2, 3, 633, 634, 635, 636: n = A,T,C or G
nnnagcgttcggtgaatattcagtaagctaattaaaatttgtaagtaagatttccttattaaaaaaactattaaaataagaggaagcccgtttaaataataattagagcaggaaaaaagaagatgactatcaaatcacagtactttttttcagctatacataaaggccttttcagttgctttggcagtagacagaaggcagaagtagattcctactgcaagcatgtcagtttggtaaaccaagaaacaagtctgaaggaaaaggcagctttttttgttaaaacggtttctttcacatgtcttaaaagaagactacagaccctctgttctaaaagctctgattgtgtatcccagtggaggtgggacatcattaaacagtgcgcagagaataaaagagcaggttgtaaaaaatgggagctttgaggatgctatagcatgaagtacagatgaggcatatctgcaagatttaaagaaaacagggaagcttccgatttttttgttgctgttgttctctacaaacaatcagcaccatgattggggtggtgcttaaagcttgctccagtgatgtcaggtattatatttattttagaattgactattttgaggaaatctctaacctcagttgatacgatannnn

SEQ ID NO: 19198 - DNA, 1889 bp, Homo sapiens
  misc_feature 1, 1861, 1862, 1863, 1864, 1865, 1866, 1867, 1868, 1869,1870, 1871, 1872, 1873, 1874, 1875, 1876, 1877, 1878, 1879,1880, 1881, 1882, 1883, 1884, 1885, 1886, 1887, 1888, 1889: n = A,T,C or G
nggcacgaggtctcgctctgtcgcccaggctggagtgcagtgtcacgatctcagctcactgcaacctccgcctcccaggtacaagagattctcctgcctcagcctcccgagtagctgggactacaggcgtgtgccaccatgcctggctaatttttgtatttttagtagagatggggtttcgccatgttagccagactggtctcgaactcctgacctcaggtgatcctcccaccccggcttcccaaagttctgggattataggcgtgagccaccatgcccggtctcttctcagtcttgaagcccatccctggatttccaccaggagttactttcctcctgacctgtaaatttgttctttaacaatggctgcaggtgggagcatatggtggtttataaaaacgctgtcgggctttgtttccttctttagctgccgtgtctacttctgaagtctgggaagtgccaagccacgcggcctcaagggagctggctggtgtttgagctgtggcagaagcacctggggctccagggagcaggctgggaactgcaggaccttgctcagccaggagcacttccccctccttgaggcaggaatactgaggtgcctccccacagatggagaaggtggagaggaggatgggcctcaggagcatctcaagccccagtagcaggagaaagaaagaaagagatgcctggttttcacagactggttcctgtggctgggatgactgcatccttttttttttttttttgagacggagtttttgcctttgtcgcccaggctggagtgcaatggcgtgatctcggctcaccgcaacctccgcctcccggattcaagcaattctcctgcctcagcctcccgagtagctgggattacaggcacgcacctccacgtccggctaattttgtatttttagtggagacggggtttctccatgtcggtcaggctggtctcgaactcccgacctcaggtgatctgcccacctcggcctcccaaagtgctgggattacaggcatgagccaccgcgcttggccagactgcgtcctttttaagcgaacattttagggcctgggagtttgtcaagtaaggaagtctcaagcccaaagagcagcgtcctgaccatggtggtttcattacgagcccttctgctggctctcaggcagaagccccacagcaccgggaccattcatgaggtcactgcccagctcatgatgtccgtgaggctgtccttttggccagtagccgtgtgcagctgtgtggcacagatggcttcgttcatcctgatcaaggccccacctcagccacagcagtccccccaacctgtgttgtccaccctattattcatgtacctgccaggccctgctagatagcaccccgtggcattacataacacttcatgagtggctgtgtcttgtaattttggggacaggtttctctctttccctctcttttttttgtcaaaagcccagagactgacaaccagctgcagtgtctaagtgttcctcactgacagggtggggcctcaccacccctggagggagcagcgttggcagggagacagcctggcccagtgaccctgggcccaagccagcccctccagggctttcagggaagcgccatccattttcaaagatgtcaaacgtcacttcttcctgtagggcccgagtcctgcctcctatcagggccagatcatagaaggctattttctattctggggaacgattataacttaaatgattgttttaataaaaattctaagctggaaaaaaaaaaaaaaaaaaaaaaaaaaaaaaaaaaaaaaaaaaaaaaaaaaaaaaaaaaaaaaaaaaaaaaaaaaaaaaaaaaaaaaaaaaaaaaaaaaannnnnnnnnnnnnnnnnnnnnnnnnnnnn

SEQ ID NO: 19199 - DNA, 2212 bp, Homo sapiens
  misc_feature 2212: n = A,T,C or G
tcgacccacgcgtccggggccgaaccattcaccggagcgcgcagcgggtggagtgtggctcggaggaccgcggcgggtcaagcacctttctgccccatatctgaaagcatgccctttgtcctcgtcgtttacgctcattaaaacttccagaatgcaacaggacggacttggagtagggacaaggaacggaagtgggaaggggaggagcgtgcacccctcctggccttggtgcgcgccgcgccccctaaggtactttggaagggacgcgcgggccagacgcgcccagacggccgcgatggcgctgttggccggcgggctctccagagggctgggctcccacccggccgccgcaggccgggacgcggtcgtcttcgtgtggcttctgcttagcacctggtgcacagctcctgccagggccatccaggtgaccgtgtccaacccctaccacgtggtgatcctcttccagcctgtgaccctgccctgtacctaccagatgacctcgacccccacgcaacccatcgtcatctggaagtacaagtctttctgccgggaccgcatcgccgatgccttctccccggccagcgtcgacaaccagctcaatgcccagctggcagccgggaacccaggctacaacccctacgtcgagtgccaggacagcgtgcgcaccgtcagggtcgtggccaccaagcagggcaacgctgtgaccctgggagattactaccagggccggaggattaccatcaccggaaatgctgacctgacctttgaccagacggcgtggggggacagtggtgtgtattactgctccgtggtctcagcccaggacctccaggggaacaatgaggcctacgcagagctcatcgtccttgactggctcttcgtggttgtggtatgcctggctgccttcctcatcttcctcctcctgggcatctgctggtgccagtgctgcccgcacacttgctgctgctacgtcaggtgcccctgctgcccagacaagtgctgctgccccgaggccctgtatgccgccggcaaagcagccacctcaggtgttcccagcatttatgcccccagcacctatgcccacctgtctcccgccaagaccccacccccaccagctatgattcccatgggccctgcctacaacgggtaccctggaggataccctggagacgttgacaggagtagctcagctggtggccaaggctcctatgtacccctgcttcgggacacggacagcagtgtggcctctgaagtccgcagtggctacaggattcaggccagccagcaggacgactccatgcgggtcctgtactacatggagaaggagctggccaacttcgacccttctcgacctggcccccccagtggccgtgtggagcgggccatgagtgaagtcacctccctccacgaggacgactggcgatctcggccttcccggggccctgccctcaccccgatccgggatgaggagtggggtggccactccccccggagtcccaggggatgggaccaggagcccgccagggagcaggcaggcgggggctggcgggccaggcggccccgggcccgctccgtggacgccctggacgacctcaccccgccgagcaccgccgagtcagggagcaggtctcccacgagtaatggtgggaggagaagccgggcctacatgcccccgcggagccgcagccgggacgacctctatgaccaagacgactcgagggacttcccacgctcccgggacccccactacgacgacttcaggtctcgggagcgccctcctgccgaccccaggtccaccaccaccgtacccgggaccctcgggacaacggctccaggtccggggacctcccctatgatgggcgctatggagaaggcggcggaaaacggcgctgccgagaagagggagaccccaccaagagggagagggagaagcggcaatcacacgcccgggcagcgcaccgaattggagaaccagacacaaggggccgggaaggggaaggctgaaaaaaaatggccctacatccgggaagaaagcagcaggaagcgcgaggaacagagacaccaggaggtcgtctactgtaggagaagtagagccgcacacccccgcgtgtgacgagtgacaaaaaaaagggcgagcactagcgaagaacgaccactaaacactagtcataagtaaggccgcacagtgcacgacgagcagaagcaacgcgan

SEQ ID NO: 19200 - DNA, 2322 bp, Homo sapiens
  misc_feature 2317, 2318, 2319, 2320, 2321, 2322: n = A,T,C or G
cgcgtccgcagcgggcgacgacgtgcgcggacggtctgcgcatactcaccaggatacccctcgttaaaggcaaggcggcttctggctcttccgcaggctcagttatgggttcctgtgtgcttagtcatcgggtccgacacaggctggactgatctggggagccgcgaagggcctgccttcacaaagggacgtaacgcaagtactgcgggcagtgtttgaatatggccctgaacaatgtgtccctgtcctccggtgatcagaggagcagggtggcctaccgctcttcccatggcgacctcagaccgcgggcgtcagcgttggcgatggtctccggagacggcttcctcgtttccaggcctgaagcgattcatctaggacctcggcaggcggtgcgaccaagcgttcgggccgagagccgtcgagtggatggtggcggccggagcccaagggaaccagatggccggggccggagccgccaagccagattctcaccttacccaatccctgccgttgaacccgatctcctaagaagtgtgctgcaacagcgtttgattgcattaggaggtgttatcgcagctcgaatttcagtttaaacgaacacctttcctctggccctcacttagcttgtgaacaggcctttttaaaatcctttcttggtgtagcagcaatcgtgttgttttatttttagatggatgtattttcatttaatacgtgggagttatatgaatatgtcctagcactaagggaagtgtaacagttgattgatttaggtggttttatgcagccagaacgattggatcaggaaaggtgtggaagggatattcttaggtcgtcacaaagctgagctgatgggagcaccctccccagaggtcaacaatccattcgttaactcagacacttaacctttacctttacttctgttggcgaaaaagaagtgctcctttttattacactgatttatccttccatcttttccttggcatttaccatcttccatctcccccttcacttttttcagatatgtctacaaacagactccaatctcagtcgcactaaaaataagaacaaaacctaaaccttacagttctttcaaattattaaatcaatttattattcctttctttggcaaaggttccaaatttttactttatatttgtaattttactatttgcattcagtcccagcgcattaatctgaatctgctgtcctaaaatacactggtgaaaacattacttgtacaatctcctatcagaaaactgttcatctactcactgtagtgccctccttgaaatgtgtgtttgttcattcaactaacaatatttggggatccctgtagtaaacactgtatgaattttacacagtctggccatcaagaaagatcacggagtatattctagatggggaggctactaagtgaataggaatcaccacgctgggctgtttattaggtacagtaataaacataagtactggttgcagtgactttttttttttttttttcatcataatactgcactatcctggttcttctcttacctggctgatcactccttatttgctgttatttttgttctcttaaccatacatttcccaatgtttaaagggtggtattttgagaaagttaatgggttttgtaagtgccagctctttatataagcaggtagactagctttttcccagcagacgcttgtctgtttagacttccttaaaataattatcttcaaataaagcaaaatctccatacaccacatagtattgaattgttataactacgtgttaagaagaatgttgagtaaacaagatagcttccataagagggtgattaatatagtgagaattctagaaaccagatcataggaagaatgattgaaagaatagtaatagctaccttttattgagtgctatgtgcaagtcagtgtgctaggacttctattgtttatagagatatttattgagaacttactctgtacctgctactgcctgcggtaagcacttagaataaagtggtgaacatgataaaagtatgtgttcctaaggaactttatatgttatttgattctcacagcagcccataagaggggtactctactttcattttgttactgaaaaacagcgtgaaggagataaactttccaaggtcatatagctagtaaatgatagagccctgcagcctttcaaatgaggttcctcatctgaatgcaaaaaaaatgacttgagtaactattttctcaattctcccaaggataatatataactaattttttttcagataactaaaaagaagttagtttgtaatatacaatggatggcttaatcnnnnnn

SEQ ID NO: 19201 - DNA, 454 bp, Homo sapiens
  misc_feature 451, 452, 453, 454: n = A,T,C or G
tcgacccacgcgtccgaaaagacaagacagcatactgtatttttcctcttaaaattcaatgttacaattaaatgattgttatctgagaataagttagcttcagctttctaatcgatgtgttcccacatctacaaattgatatgaaaaattattttgaaatgcacactgcaaaatggtgagaatatgaaagttacctgggaattaaatcagaactgtctccatatgactatttccaagtcacaatcataactttcttaatagcaatggttatatatgtggccagatagtattcagtttcacagtaatgtctcggtcacataaagatagcaaagcatagacatagtacaacaatttattatttctgctgattgccaaatgtgcataaaactataaagatatattttccagcccaggtgacagagaccctgtctccaatttaaaaccttcatgnnnn

SEQ ID NO: 19202 - DNA, 799 bp, Homo sapiens
  misc_feature 1, 2, 3, 793, 794, 795, 796, 797, 798, 799: n = A,T,C or G
nnnagcaggggagacctatcagtagggtgaccacgtgtcctttgcctgggcagtccaggtttatgcttgttttccagtgaattagacccccttccacttttctaaaaagtcctggtttagatgctgtgatcaccaaacatatcaggaaacaatattccttggtcttgcttccctatcttcaggtactggtgggccgaattcctgggaccaggtcaaggtgggctgcctcagtaagaaggaaggactggagagtgcccatttcagaggagcaggctggtgggggccagccagaaagtagttccctttggggggaagatgttggacctttattatttgtggtaaccagccgaggctggttgtcaggacagcaggtgagccactttagggaagaaagtgcaggggtgggtggatgcccagattaccaaggccagccaccctgatggggtagggtctggttatctgtgttcaagaagcaaatcccaccccagccccagcactagctctctatgtatgtattttccctgtacaatgttttataaaagagatcattaatttatctgctatgttaaggctcgaggggtgcgggcgtagactctcagctgtatatgctctggggtgggcaggaaggctgagtctcacttgaccttggaagataacacggccagtggacggcctccaggcccgggctggggtggctacaaggaagggaacaccgagaacacgcccgtgcgcagatgggtgacgcacagtcccaagcccgtcagaagcaaccgagggcaaggggaaccaacannnnnnn

SEQ ID NO: 19203 - DNA, 495 bp, Homo sapiens
  misc_feature 1, 2, 495: n = A,T,C or G
nnaacagagcccataggggaaatagagtcacttgtgagtacatgccttttgaggtgaccttggctctcagcacaagatatttacagcctttgagcttgatattctagaattgctacagagattagctctggaaaagaaatagactagaaggataaagggaaggaatcatagcttatgaaggttttactctgcatcagaccgctttctagttctatgacttaacgtcctataggctgtaaggttctctgcgtgaacacttctttcctggcctcctttctgcccccatttcctcttaaacctcagttgcctgagttttattatcccctggtgcatccctgggccatgtttcatttcacatatggaaacaatcaggtagaaccttgctatttcttatcttctgatttgatggaaaatataatctttggcgctgcagtgggaatattggtttggggttggatacttacaaaccctctgatcttgggcttaaattatacn

SEQ ID NO: 19204 - DNA, 934 bp, Homo sapiens
  misc_feature 1, 933, 934: n = A,T,C or G
ngcttatgcagtttggggctctaggtagacacgagctggctttgaaattgtagattcctacactccccctttctggagttctgggtctaagtgaattgactcctatttctgttgtgaatgttgtagtttcccttcccattctcttggtggccctggaagcttctaggcacagtgtgccaccctgattattcccaccactccatccaacttttctctctctgtggtgtctgcaccacaagctgcctaccctccaggtgcctcaatggtccggccaccagttgtgcctcggcgccccccggcccacatcagcagtgtcaggcaggcctccacccaggtgccacgcacggtgcctcatacccagagagtagccaacattggtactcagaccacaggacccagtggggtaggatgctgtacaccaggccggccgctcctgccgtgcaaatgttcctcagcagcacatagcacctatcgggtccaggagccggctgtgcacatcccaggacaggagcccctgaccgcgtccatgctggctgcggcgcccctgcatgagcaaaagcagatgattggggagcgtctctacccccttatccatgatgtccacacccagctggctggcaagatcacgggcatgctgctggagattgacaactcggagctgttgctcatgctggagtctccagaatccctccatgccaagatagacgaggcagtggccatgctgcaggcacaccaggctatggagcagccgaaggcgtacatgcactgaaaccagatttcagcttaaaatgccacccagagaccaagttcattctgtcaactgatctccagcacctggcccagagacggaaagtacaaagactagtgaaatacatccttgcccttaaggagctaagtacccaaaacctgtaatccatcttgagtcaccagagnn

SEQ ID NO: 19205 - DNA, 1925 bp, Homo sapiens
  misc_feature 1, 2, 3, 92, 215, 1924, 1925: n = A,T,C or G
nnncccgtaggctgtctttcccttgctttgcagatgccagcccccagagtcccaacttccaccgttgtaagtcttttgaaattctggggtgnattctacattgacgggacatctcattttggactaaccacatttcaagtgctcagtattcacatatggatactgtgcaggacagcacacactaattggtccatgggcgcaggtccctgagcccnacagttcgcgggggtctggccgagcatgcgtcacaacctacgcggccaagagcgagtgcacgcgcaacctaacgcgggactgccagcaacttccgggcgtttacaggcaggcaggtcagtgatgtgtcctaagggtccgaccgacctagatacccctctttgattcctcctcttgggattagtgtccatctctggaagcaggatccaggaggacgggaggggccgctgcggaccgcagtcgctccacctggaggagacaccagaaggaagacagcctgagggacgcagccatccccggctcctaccggcgccccgccccgcgcatgcgcacgcgcacagggagtcagctggctgcgcgggaggtcacgggaagtggggcggtgcccagacagctggagggaaggaggtgtcaggcggggagagacgcaaacggcgggaccagcagcgacggtagcagcagcatggccgcgatctatgggggtgtagaggggggaggcacacgatccgaggtccttttagtctcagaggatgggaagatcctggcagaagcagatggactgagcacaaaccactggctgatcgggacagacaagtgtgtggagaggatcaatgagatggtgaacagggccaaacggaaagcaggggtggatcctctggtaccgctgcgaagcttgggcctatctctgagcggtggggaccaggaggacgcggggaggatcctgatcgaggagctgagggaccgatttccctacctgagtgaaagctacttaatcaccaccgatgccgccggctccatcgccacagctacaccggatggtggagttgtgctcatatctggaacaggctccaactgcaggctcatcaaccctgatggctccgagagtggctgcggcggctggggccatatgatgggtgatgagggttcagcctactggatcgcacaccaagcagtgaaaatagtgtttgactccattgacaacctagaggcggctcctcatgatatcggctacgtcaaacaggccatgttccactatttccaggtgccagatcggctagggatactcactcacctgtatagggactttgataaatgcaggtttgctgggttttgccggaaaattgcagaaggtgctcagcagggagaccccctttcccgctatatcttcaggaaggctggggagatgctgggcagacacatcgtagcagtgttgcccgagattgacccggtcttgttccagggcaagattggactccccatcctgtgcgtgggctctgtgtggaagagctgggagctgctgaaggaaggttttcttttggcgctgacccagggcagagagatccaggctcagaacttcttctccagcttcaccctgatgaagctgaggcactcctccgctctgggtggggccagcctaggggccaggcacatcgggcacctcctccccatggactatagcgccaatgccattgccttctattcctacaccttttcctagggggctggtcccggctccaccccctccaagctcagtggacactgggtctgaaaggaaggagtcttttgcttcctttctcctttttacaaaaacaaacatagaagaaaataaatgcactttatccactcaaaggccaagagagtaaaaaaagccggaaagaggaaacgggtttggcctcgggggccccacgaaattgtttgtgtataaatacann

SEQ ID NO: 19206 - DNA, 1547 bp, Homo sapiens
  misc_feature 1, 1305, 1306, 1307, 1308, 1309, 1310, 1311, 1312, 1313,1314, 1315, 1316, 1317, 1318, 1319, 1320, 1321, 1322, 1323,1324, 1325, 1326, 1327, 1328, 1329, 1330, 1331, 1332, 1333,1334, 1335, 1336, 1337, 1541, 1542, 1543, 1544, 1545: n = A,T,C or G
  misc_feature 1546, 1547: n = A,T,C or G
ncgctagctgttcagaggatatctctctctctctaaaaaaagagaactggccgtgagctattgtgcccagctgggatcttgacaaagacactatttctctcctttcacctgtgctgtgtatttttcccggggtcagctagtgtccgctctgctcggccgcgggctcccggaggactgcaggcaggatgacgcaaaacacggtgattgtgaatggagttgctatggcctctaggccatcccagcccacccacgtcaacgtccacatccaccaggagtcagctttgacacaactgctgaaagctggaggttctctgaagaagtttctttttcaccctggggacactgtgccttccacagccaggattggttatgagcagctggctctaggggtgactcagatattgctgggggttgtgagttgtgttcttggagtgtgtctcagcttggggccctggactgtgctgcgtgcctcaggctgtgccttctgggcggggtctgtggtgatcgcagcaggagctggggccattgtccatgagaagcacccgggcaaacttgctggctatatatccagcctgctcaccctggcaggctttgctacagctatggctgctgttgtcctctgcgtgaatagcttcatctggcaaactgaaccctttttatacatcgacactgtgtgtgatcgctcagaccctgtcttccctaccactgggtacagatggatgcggcgaagtcaagagaaccaatggcagaaggaggagtgtagagcttacatgcagatgctgaggaagttgttcacagcaatccgtgccctgttcctggctgtctgtgtcttgaaggtcattgtgtccttggtttccttgggagtaggtcttcgaaacttgtgtggccagagctcccagcccctgaatgaggaaggatcagagaagaggctactgggggagaattcagtgcccccttcgccctctagggagcagacctccactgccattgtcctgtgagccgccaaagaccccacggggtgcccgcatgtccctgtctagggcagcccagggcccccactcctggctcctcacacttgcctcccctatggccgctctccagaccctcctcctttcttctccccacatccgcacctgctgttcccactctggggttctcaagtccatgaacagatattgttgcattttccacaatgctgattaaacataataaacaatccagaaaagcagttttgcccagaaaaaaaaaaaaaaaaaagtgcgggcacaaacccgggggcccattaggaccgttttttaagggccnnnnnnnnnnnnnnnnnnnnnnnnnnnnnnnnnggggggccctttaaattttttaaaaaaaaaaacttcccacccttccccgaaaccggaaaaaaaaaaaaaaagccatttgtggtggaaaacttgttattggacctttaaaggggtccaaataaaacaaatctttttcaaattttaaaaaaaaaagattttttttaacggatttaaagtgggggttggcaaaacctaaaaaagggnnnnnnn

SEQ ID NO: 19207 - DNA, 1083 bp, Homo sapiens
  misc_feature 1077, 1078, 1079, 1080, 1081, 1082, 1083: n = A,T,C or G
gacccacgcgtccgctcggagatggagctgtgctgtcgtagcctcccctctccattcactggcttctggcccccttgggaggggagtaaatgaggcactgggcatggctggccaccggggtgggctgtcactacgcatcctcctgccctgcagctgggcgctgggagcgaggatgtgaacggcccttctcggcctgtcccaggtacacggtcctcttctcgcacggcatggccgtggaacttgcccaggatgagcagcttctacattggcctgggctcccgcctccactgcacatctcttcctacgactactccggcttacggtgccagctcgggcaggccttccgagaggaacctctatgccgacatcgacgccgcctggcaggccctgcgcaccaggtacggcatcagcccggacagcatcatcctgtacgggcagagcatcggcacggtgcccaccgtggacctggcctcgcgctacgagtgtgccgcggtggtgctgcactcgccgctcacctcgggcatgcgcgtcgccttccccgacaccaagaagacctactgcttcgacgccttccctaacatcgagaaggtgtccaagatcacgtctcccgtgctcatcatccacggcacggaggacgaggtgatcgacttctcgcacgggctggcgctctacgagcgctgccccaaggcggtggagccgctgtgggtggagggcgccgggcacaacgacatcgagctctacagccagtacctggagcgcctgcgtcgcttcatctcccaggagctgcccagccagcgcgcctagcggcggccccaaccggccggacctcagcaataaggcggcccccggacctcaccccgcgccggcccccacccaggggctgcatgtggaccccccgggcggcccaggggaccccgccccgacccaggggctgtggacgatgtacaggcaacagagctacgcactcctttccttttggaagcaagaagaaaatacgtgaaaacggaaattaaagatttaaaattttaaaaaaaaaaagaagataataaaagggcgcggccgctcgacagtctagannnnnnn

SEQ ID NO: 19208 - DNA, 5028 bp, Homo sapiens
  misc_feature 5021, 5022, 5023, 5024, 5025, 5026, 5027, 5028: n = A,T,C or G
gcgtgacagggcaccgagggaaggaggacgcgagggcagccaggccctagggagcagggagagtggctcgggctcagtcgcgtggccccaggaagaagaaattgtcgagacgaataacatgaggtcatatagaatcccacttttggtgatttcaagtcaagaaagtaaaagtaaaccattgctatctttcaccttaaatatcctgtgttttattgctcagaacatccagtttttctaatactcatgatgtcagaagggaaacctcctgacaaaaaaaggcctcgtagaagcttatcaatcagcaagaataagaaaaaagcatctaattctattatttcgtgttttaacaatgcaccacctgctaaacttgcctgccccgtttgcagtaaaatggtgcctagatatgacttaaaccggcaccttgatgaaatgtgtgctaacaatgacttcgttcaagtggatccagggcaggttggcttaataaattcaaatgtgtctatggtagatttaaccagtgttaccttagaagatgtaacacctaagaagtcaccaccaccaaagacaaatttaacccctggccaaagtgattcagcaaaaagggaagtaaagcagaagatcagtccctactttaaaagtaatgatgtggtgtgcaaaaatcaagatgagctgagaaatcgtagtgtgaaagtcatttgtttgggaagcctagcatctaaattgtccagaaaatacgtaaaggctaaaaaatcaatagataaggatgaagaatttgccggttctagtccacagagttccaaatccacagttgttaagagcctgattgataactcttcagaaattgaggacgaggatcaaattttggagaacagttctcaaaaagaaaacgtgtttaaatgtgattctctaaaggaagagtgcattcctgaacatatggtaagaggaagtaaaataatggaagccgaaagccaaaaggctacccgggaatgtgagaaatcagccctcacccctggattctcagataatgcgatcatgttattctcaccagatttcactcttaggaatacattaaagtctacttcagaagacagtcttgtaaagcaagagtgtatcaaagaagtggttgaaaaacgtgaggcatgtcattgtgaagaagtaaaaatgactgttgcttcagaagctaaaatacagctgtcagattcagaggcaaaatctcatagttctgcagatgatgcttctgcatggagtaacatccaagaggctcctctgcaggatgacagttgcttaaacaatgatatccctcacagcattcctttggagcaggggtcaagctgcaatggtcctggtcaaacaaccggtcatccttactaccttcggagtttccttgtggtgctgaaaaccgtacttgagaatgaagatgatatgttgctctttgatgagcaggagaagggaattgtaactaaattttatcagttatcagctactggtcagaagttatatgtaaggctctttcaacgtaaattaagctggattaagatgaccaaattagagtatgaagagattgccttagacttaacacctgtgattgaagaattgacgaatgcaggctttctacagacagaatctgagttgcaagaactctctgaagtgcttgaactcctttctgctcctgaactaaaatccctagccaagaccttccacttggtgaatcccaatggacagaaacagcagctggtggacgcctttctcaaattggccaaacagcgttcagtctgcacttggggcaagaataagcctggaattggtgcagtgattttaaaaagagccaaagccttggctggacagtcagtacgaatctgtaaaggccccagggctgtgttttcccgcatcttgctactgttttcgttgaccgactcaatggaagatgaagacgccgcttgtggaggtcagggacagctttcaacagtcctgttggtcaacctcggccgaatggagtttcctagttacaccatcaatcggaaaacccacatcttccaagacagagatgatcttatcagatatgcagcagccacgcacatgctgagtgacatttcttccgcaatggccaatgggaactgggaagaagctaaggagctcgctcagtgtgcaaaaagggattggaacagactgaaaaaccacccttctctgagatgccacgaagatttaccactcttcctgcggtgtttcactgttgggtggatttatacaaggattttgtctcggtttgtggaaatactgcagagacttcacatgtatgaggaagccgtcagagaacttgaaagccttttgtctcagagaatttattgtcctgacagcagaggccgatggtgggatcgactggcccttaatttacaccagcacttgaagcgcctggaaccgactatcaagtgcatcacagaggggctggcggatccggaagtcagaacgggacaccgcctttcactgtatcagcgagccgtgcgcctgcgagagtctccgagctgtaaaaagttcaagcacctcttccagcagctcccagaaatggctgtgcaagatgtgaaacacgtgaccatcacaggcaggctgtgcccacagcgtgggatgtgcaagtctgtgtttgtgatggaggccggggaggccgctgaccccaccacggtcctgtgctctgtggaggagctggcactggcccattacagacgcagcggttttgaccaggggattcatggcgaagggtccaccttcagcaccctgtatggcctcctcctgtgggacatcatcttcatggatgggattccggatgtcttcagaaacgcctgtcaggcattccccctggacttgtgcacagacagcttcttcacaagcagacgcccagcccttgaggccaggctgcagctgattcatgatgcccccgaggagagcctgcgggcctgggtggcagccacgtggcatgagcaggaaggcagagtggcttcccttgtcagctgggatcgcttcacgtctcttcagcaagctcaggatcttgtctcctgcctggggggccctgtgctcagtggtgtgtgcaggcacctggctgctgactttcgacactgtcgagggggcctccccgacctggtggtgtggaactcccagagccgtcactttaagctggtggaagttaaaggccccaatgatcgtctttcacataagcagatgatctggctggctgaactgcagaagctgggggctgaagtagaagtctgccatgtggttgcagttggagctaagagccaaagccttagctaaaagattccctacaggagaaaatggaaatgaggaggagagaaactccggtgtccccgaggtgtcggtgtggtgagggccgctggcgttgaagtacatcctgctctggcccagctccccatagcaggcctccagggggccactgcgctgttgccgcagcatcctgctcagtacgtcgacttcatcagccaggagggagagcttgtgaaaggctgtgatggagccacccaggctgatctgggcctcgggaacccagcggaagtagcacagtttccacagttttatgtgtgttccagagacacgtggcagaataacaccgtgcaggttggcgggtttggaaaaccattctctaaaatactgctccgtatcactgttctggctgtcggtttgctgagctggatctggctttggttttaatatcaatgaatttctccttggaagtaattcttggtcactgatgattccattctttaaggcagacggcattcctcttagtgtggagctgtagcttttctatacagaagagattttattatgttccggggattccctttttagaaagattgaaggatgcaatggcaaatataaactcaatactatgaaaaattaatggaatttcagcctcaaagaacattttcctcccttcctttgtgtccttattctaatcctcctcccctggaattacacttttttatgtgttgactctacctaggctgttactatcagcctgaatgggggcgggatgagagtacctcctatccactaatttgcttaaggataagttctaagacgggctagaaaaaacactagacctggtcgattctatcaagaacaatggcaaactgaacagaggcagtcaggaggccaaatgtctgattctttgttctgtacctttcagtagtctgcaaattttctaccaaaaaaaatcccaagaatttatttgggaattattaaaaaggcaaacaatgaatgttattaggacaagaatatagcagtcaggaggccatgactacatcacagccaggcggcattccctgccacagtggcggcttgaatcatcaagaaatggataaatggggctttagtaaatcaggcttgcaggctcaaagctgcaatctgcccactctcaggtactgagactttgtgggcctcagacaccaggaagaaagttgggatacagtcatttgagttaaaaagggaatgacccctcagaaacccgcattagcagtgttactcttggaagtgcctttacttttaacgctctctgttctgaaaaagaggtgtttggttacgtgtgagccaacatcacgttttgttagctgtgatttacctttgtccgtttaaaagacttcacggagccattctgtatacaaggtgtgctctttccaatgtagaaggggttatggaaaagggtgcgatcctttgctgtaaactggagagaccagtcccaaacagaggggaattttaagcccttctcatcacccaattggatgtttttgcttatagcaaattcctgcaaaataaataaataaatatttgcaaaactaacaaaaaacaaaaaaaaaaaaaaaggggggggcgtttaatttttttaaaaaaaaaccccccccccccccccccggaacctgaaaaaaaaaaaaaagccaatggtgggtgtaaacttgtttttggccctttttagggggaaaaaaaaaaccaatgccttcaaaattttaaaaaaaaaaccnnnnnnnn

SEQ ID NO: 19209 - DNA, 417 bp, Homo sapiens
  misc_feature 409, 410, 411, 412, 413, 414, 415, 416, 417: n = A,T,C or G
cgcgtccgcccacgtgaggggcagctgtggtgtggtgtgatgatgctgggataggcactcagatggttgagtctgagtttggctctgatattatatcaactgcatgggcagctgtggtgtggtgtgatgatgctgggataggcactcagatggttgagtctgagtttggctctgatattatatcaactgcatgggcagctgtggtgtggtgtgatgatgctgggataggcactcagatggttgagtctgagtttggctctgatattatatcaactgcatgggcagctggggtgtggtgtgatgatgctgggataggcactcagatggttgagtctgagtttggctctgatattatatcaaccgcatcattttggggaagacacaatttctcagaattttatttaggtgnnnnnnnnn

SEQ ID NO: 19210 - DNA, 536 bp, Homo sapiens
  misc_feature 1, 536: n = A,T,C or G
nggaccgggctgggcctggccatcgtcaagctggtactgctgcgccaccgcgcgcgcttggaaatcagcagtgtgctgggccatggcagtacgttcacctgccattttccgccagctcaggtgacgcgcacacggctggtcgggaatgatgaataacctgaagtgacgacgacccaatgtgggagctgctgatactttgctgtctccgcccagcagtgggcactaggcaagcgccccatcagccgctacattggccgacttgcgcctgcctttcaggccctctcgtcaccccttattgaacacacggaacctgcaaaaccccatcatggacccttcccctggtattaccctcgctacactcttcgccgatttcggcatgattctttttgcactgatcctggtactgctcaacggtttcttcgttgcggcggaatttgccatggtcaaactgcgctccacccgggtcgaggccattgcccacaccaacggctggcgcgggcagatcctgcgcaccgtacacagccagctcgacgccn

SEQ ID NO: 19211 - DNA, 629 bp, Homo sapiens
  misc_feature 1, 2: n = A,T,C or G
nnccgctccactggtttcttgtctcatgaagaagaaaaaatcctaactgttcttgatgatctttaaggctcacaatgatctggacagaggtatttaccttgaagctcataaagcataggcctttctcacttgcagagtatctttctgaagctggactaaattggttaaggccactgtacttttccactttgtcttctttcctgtcacacaccctatcctttcaggctgtgttgggatggacaaaagcagttctggagtcctaaggagaagatgagtgggatatgtttctgtgacctgcagtcattttaaagtttagctgttgctagctgactccatgtaagaataccttccaggaatttgatggctgtgcactctggcagtgcagctggcatggttatagggtgcttggccgaaggtttgcatagcaatatgaacgcatcctacgacacatctagccaacactggaagactgtgggtaatggacgagaaaccaagattgactttttgcaagtttttaaaaataatcttcttgtaactcacatgtgaaagaaacatgagagggtttcacaaattcagtaatttagagacatttacatagcatcaccaatagttgggaaggctgaaacttt

SEQ ID NO: 19212 - DNA, 470 bp, Homo sapiens
  misc_feature 1: n = A,T,C or G
nacacctgctaagctaagctaattcctgcttagcttagttttaagaatttataggggtaaagaaaaagagaatatatcaggtgaatcctttagtggtaaatttggctgacatgaaaatttattgctaaaggattaagtataggccctgattgatgaagcacagtcagtaaatcatctcttcattccccagttcttaagccaacatcagcaacactgagagaacattagattaaaggcaggtatagaagagagacttagggtaacaagttagtgggtgcctgaaggcatgtgggaagagatgtggtaaaggtgtgcacactattccttacgtgacttaaaatgtcaaggggcttggtgtggtggctcatgactgtaaaactagagcactttggaaggccaaagctggaggatagcttgaggtcagaagttcaaggccagcttgggcaatatggcaagactgtgtctctacc

SEQ ID NO: 19213 - DNA, 532 bp, Homo sapiens
  misc_feature 1, 513, 514, 515, 516, 517, 518, 519, 520, 521, 522, 523,524, 525, 526, 527, 528, 529, 530, 531, 532: n = A,T,C or G
ncgtccggagaggctgttcattgatagatactccagaatagacacgggcccttgaaaagcttgtacctttggggaaaagtagaccaggaaaatctcaagccagagaaggactatgaagcttctttttccagttacacatggaaataagaggtcttgcatgagaaacctaaatcaacccctatgtcttaagcaggttttgagtctaaatttatactaattgcattgtggagcaggtctagccaagaaattaacatgacaatcagtctctaatctgtctgtctatctacttacttacctaccagtcaggccaaagagattcccacaagtaggttaaaaaaagtaaagtctgataacaaataattagtaagaatgaatgaataaataaatagcacaaaggaacactctaccacaaggaggagtactcatcacatcaaatgagagaataccctaagaaagtgagataatgcagcaatctgaaagatattttaccctaacgtgtttaaaatgattagnnnnnnnnnnnnnnnnnnnn

SEQ ID NO: 19214 - DNA, 583 bp, Homo sapiens
  misc_feature 580, 581, 582, 583: n = A,T,C or G
tccgggaacagacataaaacctgttttgttagatgtgaatctaggaaatacaatatatttttaagtaaaagtactcttgctttacttgtaaactgattttcgtttttttcccctcaggccatcaagccctgtcgtcctatgaccaacaatgctggcagacttttccactaccggatcacagtctccccgcctacgaactttttaactgacaggccaactgttatagaatacgatgatcacgagtatatctttgaaggattttctatgtttgcacatgcccccctgaccaatattccactgtgtaaagtaattagattcaacatagactacacgattcatttcattgaagagatgatgccggagaatttttgtgtgaaagggcttgaactcttttcactgttcctattcagagatattttggaattatatgactggaatcttaaaggtcctttgtttgaagacagccctccctgctgcccaagatttcatttcatgccacgttttgtaagatttcttccaggtaaatcttctggcttgtcagtgacctggtgagatagtgcatctgaaaatagcttgccannnn

SEQ ID NO: 19215 - DNA, 1095 bp, Homo sapiens
  misc_feature 1, 1094, 1095: n = A,T,C or G
nactatagggagtcgacccacgcgtccgtgtgttttaggaacagagagattttaaactgtgtcctaaagtgaaaatcatctcctatgattgtgggagaagatagaagatggggcatactactaagctaaaataaccctgcacttatttaattgatgaagcaaggacttatggatatcattgtaaagaagaatgcaagaacatctggatcaaaatggctttctagatgagaatggttgcattttttaatggctattctggtagaaaggacaacatgtgatattcatcgaccctctttctcagaccctctttataacagctagtatggaaaaatctgtctttcctataaatattttccctggggaatggtttccatttatgtgttggatgctttgttgtttctctcttgcacagcgtgtatgttgtcatctgcacttaagagtggaatggaattgggaatcctggtttcttgctctggctggaggtcccaagtccgcattgtgattttgggcaagtcacgttgttcttctagatctaatttaactcatctgtaaaataagatggttgaattcgacaatttcatgggtttcattagatgccaatattttatgactcatgatcccagcaagactacacctatttataaggctgttttgcttgtttttactaagagcaacaataactacatattttcagtttactcaatcatcaaaaaaattataaaatccataaacactttggatttgaaacattgcaactttgataaaaaatgtatccatgtaggccaggagcagtggctcacgcctgtaatcccagcactttgggaggccgaggcaggtggatcacgaggtcaggagatcgagaccatcccggctaacacggtgaaacctcgtttctactaaaaatacaaaaaattagctgggcgtggtggcaggtgcctgtagtcccagctactcgggaggctgaggcaggagaatggtgtgaacccaggaggcggaggttgcggtgagccaagatcgctgccactgcactccagcctgggcgacagagtgagactccatctcaaaaaaaaaaaaaaaactagttctagatcgcnn

SEQ ID NO: 19216 - DNA, 2899 bp, Homo sapiens
  misc_feature 1, 2829, 2864, 2896, 2897, 2898, 2899: n = A,T,C or G
nacgaggcgaaggaggaacccaccgcacctacagggcggtcgagtcagggagctgctggcgggtgggtctggcaactctttgggaggccgacgcgggcggaccggcgggtgctgggaaccgagcctcggcttgcggccggcagtttccgtgggtctgtgaagaggtcggcggcccctgcgggcgccagtcagctttaagaaaaagtagagatcacttctgactgtactgaacagcaaaaattaagtgacttgctgccctgcacatcatggcactgccattccgtaaggacttagaaaagtacaaagaccttgatgaagatgagctccttgggaatctgtcagaaacagaactgaaacaactggaaactgttttggatgatcttgaccccgagaatgcccttctgcctgcagggttccggcagaagaaccagacatcaaagtccaccacagggccatttgatagagagcatctcctttcatatctggagaaagaagcattggagcataaagacagggaagactatgtgccctacactggagaaaaaaaagggaaaatatttatccccaaacagaaacctgtacagacttttacagaagaaaaagtgtctcttgatccagaattagaagaagctttgacaagtgcttctgatacagaattgtgtgacctcgcagcaattcttgggatgcacaatttgataacgaatacaaagttctgtaatataatgggaagtagtaatggtgttgaccaagaacatttttcaaatgtggtcaaaggtgaaaagattcttccggtatttgatgagccaccaaatccaaccaatgtagaagagagtttgaagagaactaaagaaaacgatgctcatcttgttgaagttaatttgaataatataaagaatatcccaattccaaccctaaaagattttgcaaaggctttggaaaccaacacacatgtgaaatgtttcagtcttgcagccacccggagcaatgaccctgttgctactgcttttgcagaaatgctgaaagtgaacaaaactttgaagagcttaaatgtggagtccaactttatcacgggagttgggattctggcactgattgatgcgttaagagataatgaaaccctggcagagctcaagattgacaatcagaggcagcagttggggacagctgtagaattggaaatggccaagatgcttgaggaaaatacaaatatccttaaatttggatatcagtttacacagcagggaccacgaaccagagcagctaatgctataacaaaaaacaatgacttagtgcgtaagagacgagttgaaggagatcaccagtaagtctgcaaaggtgtaatctttggaagacttcagaagatcaccaagggctcatgttggtgacatcatgtaaaattttcctgggtagaagggaaaagactggaaaaatttttttagtgacatgcattttttttttagttgttatcaaattgtaaaatcagtaatgtgatattttatattctgaaacatttctactttctgctaaaatcaattttaatttagtttaattgaatgatttatgatgaatcttgggcaaaaaaatacaactgtaaaaaatttcacaggtcatttgtgtagaataatttgaacattgtgaggaccaatcttttttaaatcaaaagggatgttgctggtatcagaattgttattgcttcatttagacataaaacacttaagtgttttccttcctccgtgacctggagagttttccattttttaaaatacatgaacttggcaagggtgtgatttttctttatcaagagaacaaaatgccagaatgttaaaacagttaactcaaaatctagtcatctgtgtaggataaagcaggtctccctccccaccccccaaaaaaggcgtacagccaactcttagttatttagggtaagagaaaaaagaaaactgttaaacaatgaaatcaaagataataaatatgatagatttccagtatgaggcactttgcaaaacagtcatttaaactgatggttactgtaagtcagttggaagctggcatgtatgtaaattacttggtgttacaccatatccgaagaagttcctatgtgcagtgcagaattgcataaacagtatttaatcactgctacaaatcttccaaccaagaaggaaaactgctattcttcataaatctaatttttagtatatgcttcctttcatcttatacttttatcaatatttataaaagtcatttctataataaaagcagtctttcttgctcaaagtattaaggtgaacaattgaatagagtactgtggtcgggagactgatttgagactgcagagctgatgctgggtagagggtctggacttgtattcatgttctgtctcagggcagcccctggagcaggagatggcagaggcatttacagctgcagaaaacagggaggaatggaatctgaggtagccctggcctcaaaattcaggcctggctgtatcatttacagagatttttctggagggaaaagtctcatttctgaggaaggcaaggtggctaatcattattaattttttttaaactttttgggccgggcgcagtggctcacgcctgtaatcccagcacttttgggaagccaaagtgggtggatcacttaaggtcaggagttcaagaccagcctggccaacatggtgaaaccctgtctctactaaaaatcaaaaaagtagccgggtgtggtggtgcacacctgtaatcccagctactcgggaggctgaggcaggagaattgcttgaacctgggagatggagattgcagtgagctgagatcgtccccctgcactgcngtctgggtgaccaagcaagactctgtctcgtgggnccggccggccggccaactttttgaaattgaannnn

SEQ ID NO: 19217 - DNA, 518 bp, Homo sapiens
  misc_feature 501, 502, 503, 504, 505, 506, 507, 508, 509, 510, 511, 512,513, 514, 515, 516, 517, 518: n = A,T,C or G
gcgtccggttgaagagggcagggaataggggtgggtgagcgtgaacagagtcaggctgattgctgcagggtcccttgcattagttcaggtgagaagagacccgagtaggccagtgagcctggaggagaggctctctgtgtgtttaattggtttccagctttttttctctattcatgtaggttatacacgtttcttctgtgaatttttatttaaatgattttttgttgttactggatctacaaacagcccaactccaaggaatctggcatctctcagtggagcatacaggtgacttcataatctaaccgcattagtaactgccaaaatcggaagtaatttctctctgtttaaaaggcagtgaaacaaattttcagagcaggtttcttcaactgaacaaaatattttggaccttaaaggtggtatggctctcctgatcagggagggacagtgaaaggtttgagctctgacactgcccagctctctggatacaaccaagtgacnnnnnnnnnnnnnnnnnn

SEQ ID NO: 19218 - DNA, 376 bp, Homo sapiens
  misc_feature 1, 2, 3, 368, 369, 370, 371, 372, 373, 374, 375, 376: n = A,T,C or G
nnncgacccacgcgtccgctgggaggctgtggggtctgccacccagcagatctgtgtcacgggagtggcgctgtcactcgttgaggtggtggcctggttcctttggccttagggaaggacaaacttcaactctgagccttgattgagtgaccttggccaagttacctagcttttctgagcctcacttttttggcaattagatgaaccagaggtttatttcactcagaatcctgttcacgatgctggtatttggaccagcctgcgggtttatcctgggctctttctgtaccaaaatctacttggatttcggttcattgacacaagtaacctggacaatactccggacgacccccgttggatcggacccnnnnnnnnn

SEQ ID NO: 19219 - DNA, 1795 bp, Homo sapiens
  misc_feature 1, 1790, 1791, 1792, 1793, 1794, 1795: n = A,T,C or G
ncataagtgagacggccgaggtggtctatttactatacagttgggccataagagaatttatccaatctcctcctagcttagggtcctgaagtcaggagttccttttttcttaatgattagggaccatgtctttcatggccttttgaaatcgttaaagcattgtcaactggctcaactacacaaatgccatcatttattacccactgaccaaaagattaacttccaaatcctcatcctgacactaaaggccacctattatctacccaaaacttaccttcttcacttgttctccccagtcctccagcttagcctaaatgttctactgtcatgtaaagcatcttaactttgtcttctgtgcttttgttacattgttctgagttttagtactcagtcctctggactacttgaagctttttatcagtctgtcagttcttttaaactcttgctcaaatctcactctgagaagctttttcatctcattgtagttcacagggaagtctttctcttaaggcctcattccttgcataacgaataattgtgtagctttgtaaactgtaggcttattcctcaatttctttttcttgtttttacattttcttgtctgtcttctgctagagacatatgcttctcggtatttattccacaaaggctatcccaatgcctactataaaatagcttctcaatgaaagtttgttgactggttgccagtcaacagaacactagaaaattgatctgagagtggtgggttctagtaaatactctagtaaatatttttctctactttttttctaactttttttcttactcctttactatggatactctttttaattattgcccttcataattattggcccagttgaaacaactgttatagattcaaaaatcctcagagtggtaaagtactacacttggcatcttcccttgagccgatgtatctatgtagctaaaatgatgagattagagtggagctttctcaccctggtttgaggtgctgcagaaatggtctgcttttctagtgccttgaaaaaggatgagaagagaggtgcattccagaagacaaaaggtgtgtagtatcaggataaggggctttaaatatcagatccagagaacactgcacatgtagaaatgggcttggcctgggtcagggcattgagattggttacataatcttttcaaggattggtgaatgagttggagtatgtgtagaaacctacaaagatgacagtttaatctcatgtcataatttttagacaaataatgtattttaaaactgggtgcagttcctaaagctgttctaaaagtcaatgcaactgaatttggaatgtaagcataggacaacagatgggaaataagtacatgacctctgtgggataaagtgagagttatcaaagaatgtcagtgtttataacaaggaacaagcttgttttggagaattactagatattatggaaaatttttttcttttctacatttggttaactatagctgaactatagcagatcatatgacttggcaaaaatagaaaacttgataaaaatcttctaggccccacaatgtcaacatgaacaaacttctgaaaagtaaaagtagaccgtgttttctcagtatgtgttatcaaatatatgttgaacatataatttttgcccctcagccaggttgtaatattttcctttagtttatctctttaataattttttgttaatccattttattttgaaaaaataatgagctagaggatacaaagatgtaaatgaatctaaaagagagaattaaaccggcgttaagannnnnn

SEQ ID NO: 19220 - DNA, 435 bp, Homo sapiens
  misc_feature 435: n = A,T,C or G
agtcgacccacgcgtccgaatgaatagttaagcccaatgataaaggaataaaaggatgaagaatatttgaagagaaataaatcttcctcactcctcaggttcccttccatgtgcaggagcctcaacctacaactagcaaccttatctcctgactcattcctctctagaggaggagtaaattagtcaactgatatgctctggaagaaaaacccagcttagcacagcccagccttatgccattgtgtgcaattatacatttggccctgcatcttaaagaagcaaaccacatgtcctgtcccacaaggggagaaaaactgtggcccactgctatctgtgtctggtgaatattactttttgttactgatatggtttttggggaatattactttttgttactgatatgggttttatttcacgaaataaaaagtggatggn

SEQ ID NO: 19221 - DNA, 354 bp, Homo sapiens
cacgcgtccggtcatttcctccccctaaataatgcattacaaagtggaaatgcaaatttcctgtgcaagctctaagtagcaggtggtatttccttaatatattgtttttgacctttggggaaattggtattacgagctgactttggaaaattaaaatagcatcaaggtcctacattttaaataaaacaatcgatatcttaatttttaaaatcagactagattacgataccaggaaaagacatacatattttgcttttatgtgttaaagttttgtaattcagggaggacaagaaaagggatatggtgcagctgaactttctaattcactaagacaggaaaaaaaaaaaaaaaaaa

SEQ ID NO: 19222 - DNA, 956 bp, Homo sapiens
gcgtccgggaaaaacaagggtttccgccacaggctgagagcaaaggaggacgcaggaaaactattttaaaaattgacccaagagttcaaaaggcatatggaagcatttaatgggggtgggaggtatccttgtaataagaataccatgcatgtattcccacactgctcttggtggtctgcaaagtgatttcatatgtattttatgtcaacaccagcacaatgaggtaagtaggactgtatacctcagaggcatttggtgatttgtcaaagtggagtgtagtgtgttggtgcccagatttgaataggatcatttgagtctgatatcatcatgttgcccaccgcctactcagcctctacacccgatgaggccaatctgcagctcactacagtcaatagagaacaggcaattaacccttaagttatattttagaaagatttctgtctaaaatagataaacttgaaagtatagctcttcaaaataacgtattcctgtgttggcaaatattttccaaactcacaatcaacacataggtgtatttcttagactactagaagtggggacttaccccaaggaaccaagctatagtgaccaatatccttagttctcaaggattctagagcaccccatgtctccaacgatctttcttctctcttatttcttctatttgtttgataatgttaatgggaaacactaaatcccctaatcaggacactgaaagtgacccccttcaaaagtagccctcccttttccacggagtgaccttgaagacttttagtggggaatatctggtagctttccaagaaagccgttttatggcacagggaaatggaaaacaaaactgtcctggcatcaccataaagcaaaatttctctgcacatgagaggctaggagggcctggatttttccaaacgaggatgatccattaagcaatcaaattttattttttaattgtttta

SEQ ID NO: 19223 - DNA, 531 bp, Homo sapiens
  misc_feature 1, 2, 3, 4, 528, 529, 530, 531: n = A,T,C or G
nnnnacgcgtccggtttccattgggatagattttacctatgaattcctccttagaattctgaaattgctcagatttacccaaatgacagccagtttctcatttcacatttgggggctgtagaatcttccaacattgagaacctgttttaatcaaaggatgctttgtggaatcctgaatgaggaacagcatgttgcaggaagaagagaaggatcctgatgccctaatgggactgatttccttttggggggcaggaagatatatattcgttgggtgcttataaaaggttaattccaaagattgtgtatggttaaaggactgaaagtcacacttagcctcatacttcacttagatgaaaaacaaaagccttcctctccattaccttgtaagatctattccttgtgtcttgtgctgagtggacctggaataatggatagccctcactgagtacctagaagggactagggtggtgatgagggggttcacaccgaagatctaagtgctagctggggtccctttaacagtacacnnnn

SEQ ID NO: 19224 - DNA, 950 bp, Homo sapiens
  misc_feature 1, 2, 3, 4, 950: n = A,T,C or G
nnnnacgcgtccggatgcttaatccaagcccaaagtaaggaagaaatcttatcaaagtagctttcactccagacccccacttaagtggatagcccagaatagttccgtcagggccaattatgcccaccctcaacaaatataactgccctccattagacagtgtgcatggatgttaggttgtgggtatcattttccccaaatcactggaacatgatggccttgctagagatccatataatgcagtcatgctgtttcttcctccatagtatgtggggcatgaggaggagacagggagagggtggcttcattgagcaaaaaggaatggctgtgctttggggccaaggagatgctgtcctgctgtagctgctctgtgaaaggtcaggcctgcccctctgaggctccctttatcctcctaaattctggggcatctacatgacgctttctagtccacctttgcctccgcagatcatggctactaacctgacctttgtctgtacttgagcacccttcgcgatttaactttcatgtagcgtccgacttctaatatggatttgaatttcttgactgttactgctcagaacaatcacccttttttgagcaggagctggaggttatgccgacaatgacatcggagccgtctcaaccacagggcatggggaaagcatcctgaaggtgaacctggctagactcaccctgtccagtgctttgagattcttcccacctccccatcctcaccagccggatcgggcgctgtgcagtgtggtcagcatggtgaagaaagtcatttcctcgttgggcagtattcctctttatctctcattacactggaaatgttatttctgctgtatcatccgtgctcaacgttttagtctgtcaggctcaccttctctctggaaagaatttgcttaacttgacattccatgtgccgctaataaaatatattttgagan

SEQ ID NO: 19225 - DNA, 472 bp, Homo sapiens
  misc_feature 1, 2, 3, 472: n = A,T,C or G
nnncgatcattttattagagtcatgtatttaagaactgataaatcatgggcttacctacacaagtctagacacatgagcaatgaacaaatagcagggtctgtgatatctcatatggcaatactaggactgagattatttttgttacaattaaataattgtcagtaaaaatccacagagatcatttagaatgggaaaaaagtctgatatattttgtttcagattataatcattaatagggtacctgacagttttcaaagttgtttaatgttttttaggtctttaaccttcctaatcctacaaggtggttacaatcccacatattatccttgtgtcaggggtctccagcacctgccttagggtcagtgatttgctagaagtacttacagaactcagaaaagccattctgctcagttacagttcattacagagaaagggtttagattaaagccaggaaaggaaaaaggtgaatgn

SEQ ID NO: 19226 - DNA, 1466 bp, Homo sapiens
  misc_feature 1, 2, 3, 4, 5, 1457, 1458, 1459, 1460, 1461, 1462, 1463,1464, 1465, 1466: n = A,T,C or G
nnnnnactgcttccaggggagcatctgacaacctagaacatgcaccctcaccccaaggtgggcatctggcagcataaaacagcacccctactggcagatgagcatatgacagcctggaacagcacctcacacccccaggtgagcatctgacagcctggagcagcacccacacccccaggtgagcatctgacagcctggaacagcactccacacccccaggtgagcatctgacagcctggaacagcaccccacaaccccaggtgagcatctgacagcctggacatgcacccacacccccaggtgagcatctgatggtttgcagcaacaccgacacccacaggtgagcatctgacagcctggaacagcacccacacgcccaggtgagcatctgacagcctggaacagcagcctgcaccaccaggtgagcatctgacagcctggaacagcaccaacacccccaggcgagcatctgacggcctggaacagcacccacacccccaggtgagcatcagacagcctggaacaacacccatacccacaggtgagcatctgacatcgtggagcagcaccccacacccacaggtgagcatctgacagcctggagcagcacccacacccccaggtgagcatctgacagcctggaacagcacccacacccccaggtgagaatctgattgtctggagcatcacacacaaccacaggtgagcatcggagagtctggagcagcacccacatcccaaggtgagcatctgacaacctggagcagcacccacacctcgaggtgagcatctgacctcccggagcaggacccatacctccaggcgagcatctgaacccatggagcagcacacacgcccccaggcgagcatctgaccgaacggagcagcaccccctctaccaggcgagcatctgacagcctttaacagcacccacaatccccaggtgagcatctgacagcctggaacagaacccacacccccaggtgaccatctgacagactggaacagcacccacacgcccaggtgagcatctgacagcctggaagagcaagcgcaccccgaggtgagcatctgacagcctggaacagcacccacacccccaggcgagcatctgacagcatgtaacagcacccactcccccaggcgagtatctgacgtcctggagcagcaccccacaccctcaggtgagcatcggagaggctggagcagcacccacacccccaggtgagcatctgacagcctgcagcagcacccacacccccaggtgagcatctgacctcccggagcagcaccccacacccccaggcgagcatctgacacccatggagcagcacccacgcccccaggcgagcatctgaccgaacagagcagcaccccctctaccccctctagagcccaaaaaaaaaaaaaaacactaacaagccctcttaaatgaaaaaaaaaacagctagacagannnnnnnnnn

SEQ ID NO: 19227 - DNA, 1086 bp, Homo sapiens
  misc_feature 1, 8, 1083, 1084, 1085, 1086: n = A,T,C or G
ncgtccgngagaatcacttgaacccaggaggtggaagctgcagtaagctgagattgcaccattgtactgcagcctgggcaacgagcaaaactctgtctcaaaaaaacaaaaaaaagagcagcagcaactgactggttggatcaggaaagactctgagaaaggactcctgacctggctcttccagaatgaggatggattttccatatgaaggagccgggggcaggaccttctgggtagagcgtgaaaagaacacagtatgtgtggagagcgggaaattgtgttgaactgtctagaaaacagagccacaggaatgcgtgttgagggcttgggctgtacagtggagagtgccctccctggccagggagttggacattcatcccaccacaagaccccatgaagagttcctcaacagctctgtgtcctcatcaaacctgtgtttgcagaacagtggaggaagagagctgaaggaggggagaggccctgcacctgccaggccctggcctagactacaagggtgagcactgagccatgctctcggggaaccttcactggagttgagggcagtgagaatgtttaaaaaaaagaagaagaaattatgtatatcagaagttgagaaatgaaaaataagacaagggcaggaagtatgatcttaaatgtaattgcaggaaagtccacctgtcattgagaagctagtacttgcgtgaagaactgtgaaagacgaggagcggagccagttgggttctgggaggagattgttcaggcagagggcacagtaaatgcagagcactgaagcggcggcgtggccgaagcggcggcatggggggtagagtgaggaggctgctgtggctggcaaaggaagtagcaggaggtgacctgaagggtcaccgtcacagcaggaccttgtcagccagtatgaagactgtggcttttactctatgggaagttgtttaagagttttgagctaggggccccataaaacctgccttagggtttaagaagctgcttctgtctgcactgtgaagaagagacttgttaggggttaagttggaggcagagaggccaggaaggagatctcgagaattnnnn

SEQ ID NO: 19228 - DNA, 555 bp, Homo sapiens
  misc_feature 551, 552, 553, 554, 555: n = A,T,C or G
gcgtccgcatgcacacttgtctttaccaagggtggggcgtgggaggaggtttagtttggatagccacgtaaacgcctttccctgtggcctgcgatgttccacaccgtttatgtgtgaactggctgcacccgcgcctcccggacggggctgccagggaggagggcccgggagaccccatccagaccccggcccgcacgctgcagaggtctgctctcagacatgtggtgggctccgtgtcacgggtaaggggtcggggtctagacggcaacagagtgtctctctcttcccgctccctggtgtgcccacctccctgtacagtgtttctgttcaagctgctgcaggggacggggcatttttcctccagactctattttcctgcaaggaagagctgctgtcctttttcttactgaagcccctgattctgtgtctgatgttgctgacgccgtgcttgctttcttgcccgtgtgcaacttcccaatcccagcacacgtgctcacttcccaagggtgaggcgggcaccgtgcctgcgggcggcccaccctcacggaaannnnn

SEQ ID NO: 19229 - DNA, 574 bp, Homo sapiens
  misc_feature 1, 2, 573, 574: n = A,T,C or G
nnccggggaatggctgtcagtcaagttagaggtaaaaaaatttcatgttaagattttggaactggattttatttaaaataatgatgcgaagccattgaaaggtttttggtgtgacaggataaatttaaaatatgaacacaccaacgcatacttcttttaagaaagaacctgattaaatttgggaattttaaaataaaaacaggaagcatatcgtactctaatataataattcaagggtttttattttcctagaagatcaaggtcatgttaataaagggaatatagttttcttatctgtgttaagacactgatgacttgcaaagaaaagtaacacttttgtgatatccttaggtaattcaagaggaaacgcttgagcaattactgatgttgtaaactgggatcagaagacatacatggtatcgtatcccaggcaaggcacagtggctcacacctgtaatcctagcactttgggaggctgaagaaagcagatcacttgaggtcaagagttcgagaccagcctggcttacatggtgaaacccatctctactgaacatacaaaaattagctggacann

SEQ ID NO: 19230 - DNA, 530 bp, Homo sapiens
  misc_feature 528, 529, 530: n = A,T,C or G
cacgcgtccgaaaggaggtttgtggaacttggagagatccaggaggtaacaccaaaaagctgcatttagcaatgcctgcctagccctcctgtacagctcatgttattttgttgccttaggccatcttacaccaaaccattcctatctccatgcttttgtttatgctgttgcctccttttagaagggccacgctccaccgctctgctgtgttgatactaccgacccttcctttagttcctgttcaattcccaagccttctgccaagccttcttggacattcccatcccatgctgactattccttaagctaaaaacccttagagttaatatgatacacttggctacctcattgtttcatatcagtcattcctgtctctagctataatcggctcagccaaggaagatatatttatatggacaatgtctttgtgccttggctgtaaacagtgttgaataattaatctcacttgatgaggtcttacttaatgatagcctccaattattcaccaagacgaggggcaacgatgcnnn

SEQ ID NO: 19231 - DNA, 1042 bp, Homo sapiens
  misc_feature 1, 2: n = A,T,C or G
nncatacccgggtgttaacccagtccggaagatactcgtgttccggctcttcgtaatttgcgccccccgacacctccaaatggctcatgcgccacgggtggcccaaccggcaccctctcacttggccgcatcgcgtcacgcggtagcggtccaccaggcccggctgccgggctgggcgcccggcgtggccacagcggccagataggccgcgtgggccgagcactcggtcagcgacaccaccaggtcgcccagctccaccaggctgtcccccgcctccccgaagcggcccatgttgagctggctctgcacgtcgtgggtgaggatggagagccccttggtgcgcgcgatgatggtgtcccggcactgctcgaaggactcggcgccggcaccagaggaggcggggccctcgaagagcacgggccgcgcctcgctcgacagcagcagcaggtcagccaccagctgcatcttgcccttgcagtggtcgcagacggataccagcctcttccgcggctgcgagctggccccgccgatggcgctcgcaggagccggagaagccgcctcgccagtgggcttcccggcgctgccgctagccatcgcgcccggggggcactggcatgccgctggggagcccgctaccaccgccgctgccgcggccactgccgccgccccggcggccgtcgcgactcagctggccaaggccgcggtgccttccccgcaccatcatgccatccaccgccgcgggcagagggcactgggctgcggcggcgggagcccgggcggcgcggggtgggcccgagggcgagagaacgcggaaggctcttcggggcaaggggaggggctgcagctttcggcctcctagagggcttgcaggaaccatgaaccggggcagagcaaactcactgtccgcgctcctcgtcgccgggctgccaggaaagtcccctcggccgattacaccccctccctctcctagccggcatggcctggcgcggccctcggagcggggagggcgggacggggaagctgggagttgtccttccttcct

SEQ ID NO: 19232 - DNA, 556 bp, Homo sapiens
  misc_feature 556: n = A,T,C or G
ttttggctcactgcaacctccgccttaggggttcaagcaattctcctgcctcagcctccagattgggattacaggcatgtgctcaccgtgtctggctaattttcttgtaattttagtacaaaaggggtttcaccacatgggccagactggtctcaaactcctggcctaaagcgatccacctgcctcgacctcacaaggtgctgcgattacagggattacaggctgggattacaggcataagtcaccacacccagcctaaaaattaaaagtttatactgtattgttcacattgtgatgcaactttccatatgtatttccagaatcaactatgtatcaaggaatattgaaagcataaaatgagatcatggtgaattctctcccattgtcattcttggggtaagggaatgaatggtggggaggagaagctaagaggagaatttgctctgtctcagtgctggattgcctcctgaaacagaatatcaagttttcttatctacatgtgaaaaggctttcaatacttataaataagggtatcacattagttctaaaggatgan

SEQ ID NO: 19233 - DNA, 526 bp, Homo sapiens
  misc_feature 1, 521, 522, 523, 524, 525, 526: n = A,T,C or G
nacgcgtccggtttattcaatataaagaacatttttctgttttagagagaacccatttatttgtgaaagaaacagagttttgttcttatccctataaacactgcatttgctgtttcttctctagctgatgtgacatattagggaagcagcacccgactgggactcaaaagacctgggtttgaaacttttgattactagcttagctgtgtgaaatcaggcagatggtataacttctctcattgatgatgtcaatctttttaaaaattttctagcagtgaaattttaaaaaatgaaatgttaggtgaaacctcaaacttacaacagtggtaaaattggaagggttctggatggagtgagggcagggaggggtaactgggctgaggggcccctcttcagcctcttcctccccttcaacgaagtctgaaaatctctggctaatatgggtgatccctaagatttctttgtactttaacatacgaaagttattctaagattttggatgttttggcttgagtgcaccnnnnnn

SEQ ID NO: 19234 - DNA, 654 bp, Homo sapiens
  misc_feature 1, 2, 3, 4, 5: n = A,T,C or G
nnnnncacaggaagaagaccaacgaggccgccgagcgcagcagtctccccctaacctcaaaagcctcctcagaagtaacctggtatcagtgggctgtgcagattcttatagtcttctttgcctttatatatgaaaataactttgttttatgtttgttttcacataggtggaattatactgactcttactctgtgacttgctttcttcacatgacagtaactcctggactgtttctgtagcagccacacaagtctcctttatattgccaatatctatctttatcccaaagacaagatgaatgttcaaaaacggtaatccaaactcacttctaaaaatgggtgtgtgtttaaagaagagctgctcagctgaggcagttttgctgccgaggggatttgagcaatgtctggggacgtgtggttgtcacaacttgtgagggggctcctggcattgaggaggtagaaggcgggaatgcacaggtcaggcccctgcaacaaggaattgtcaggcccaaaatgccaatggtggcaacactgagaaaatgtgatcggtttaaacctgcttatcttaatggtgtttcaacagccttattaaggggcttgaccaatatgtagtttatcaacaccagcctttggtgtagtggggtgagttgtgctc

SEQ ID NO: 19235 - DNA, 918 bp, Homo sapiens
acccacgcgtccgataaatttgcatcagttgcctaaagaatggggtagttataggaagctcacagagaggaaaaaaactcttcatgtctacattgcttcttgaactgattttatttataaaagaagaattgttgagctagtgatagaagtttcatgaattccctggtactaattatcagttaatgacctctctgaagtctctggagagcgttctgtgtcactaatattggtgaaaatttgaaacaaaaatgctctcccattgtccacatattgcttctttgaatttggtttttcgagccaagaacttagggtgtgagaatatgtttgtggggaaacccacacaaattttatgttagtctctgtacatttaaatttttaccttcctgattacttacgtaagactaaacaatttaagtttctaaaatgccatcactttgcaaataaagtactttataaagtgataaataacaataatggccatcagctccacctataattatatccttgcctggcacccctggaaggacttaggcttctttttttaatcaatgatgggaaggaatgatttattcattcatctgggtgcacagtttacatttggacccacatttgtttttgactagagttgctccttgattttgatcaaataaattacaggcaccagctggccaagagttttaatcaggctttgagatagtgggtcattacatggcaagagcgcccaggacaagagacacgggtgccctgcagtgtgggaacatcatccagggcagggaatatcatccagagagaatgattttgtcttgaattttgcaaatgttgaacagatataaaaataacttcataaatgattaggagaatttattccatctttaatttcataagaaaattattgaataataattgcttaataataat

SEQ ID NO: 19236 - DNA, 544 bp, Homo sapiens
  misc_feature 1, 543, 544: n = A,T,C or G
ncccacgcctccgcaattactaccttaggctagattcccatgaatagaattgctgagtcaaaaggttgacacattttttaaaggttagatacatattagtcaaagtttttaagcaatatgctttctaagcctctttgatctttataattcattgttcctttctaaaaatatataactgtcttctgcgttcaaggataattttttttattaatatggggcttcttgttctacttcctcccctttcgttatttcttcaaaatgtttaacaaactaatacatttccagaacacattatgcttcatcttgtcactatttccagtaccttgtatctcctggactttatgcaatgcgtgtgtgtgcacagatggaatatgttccaccatttggcttaatgacaatttttcacaccactaattttctttctttattttattttttcttttaagcctcacaagaattcaagtaacatatataataagtttggttttcttgatttcaatatatgtaaatttggggggactgcctggcaaggatgaatgatgnn

SEQ ID NO: 19237 - DNA, 582 bp, Homo sapiens
  misc_feature 581, 582: n = A,T,C or G
gcagtgccggcggcgcagttgggaatgggagtgcgcttgcacacgcgccgacgagcgatagcgacgctatgccctctcttgcccaggcgccgggtggcgcggatcaacctgctctcgcagcagcccctgtggtggccgccggtgatgatgcaggaatcgtattcgacggttgccaggttcgcttcgatcaacatcttcgccgaagttccgcgtgaaccgttcggcatcgacatcgtggcgctggcatctgccgctataccaatcatcgaaaccgcgctggaaggtcgggtccagcgccctgcagaagagacgcctccagcaggacaaggtggcctgctcgacgagcaggctacccgagtgtcgttgaacagtatcgccttgggtcttggggcgcccgccgctgaagcaggtgcaatggtggagaacatcatccaggccgcgacgcagggctccgaatacccggttcctcctaagcctgagaaagcgggcaaggaccaggaaatggaggatgtcatgagcaacctggagtcgctgattggggggcgtgcatgagcattgagttgggcatgtgccgtcgtgann

SEQ ID NO: 19238 - DNA, 1060 bp, Homo sapiens
  misc_feature 1, 2, 1059, 1060: n = A,T,C or G
nnctggagggcagtggtgcagtcatggcttactgaggtcccgacctctccaggctcaggtattcctcccacctcagcctcccacgtagctggaactacagataacatgccaccacgcccagctaatttatacatttttttttgtagagatgggtttttgccatgttgactaggccggtcttaaactcctggactcaagcagtctaccagctttggccttcagaagtgattggattacaggtgtgagccaccacacctggtcagaatgatttttaagactctgaagtttccaaaatgtatatgatgacatatagggagcatacttgcttcttgctcttttaaaaaactatcatcatatttggagccaagaaatcagtttatactgtgattacgtgaaaaggaaatccttctatacataaactgagaactgatatgcaaagaagcctactataaaaaaatagccaaaatgtttttgttgtcagaagctaaaggttattttttttttcactaagtaatgtaaaaatcagtatatggaaagtcagagcaacataaaacgttaaaaattttgaaacaaacttttagattcattttgcttaagaatgtatcagggtttataccatttcatcaacattattaccttggggatgactacagtatgtcaaatttcaccccaatgtgacctgaaactgccagaagcatgaaatctctggaatcatctttcaagttaccacattgctgcatatgagttgaaacatttcagtacataaaagaaagatgcacattctaaccctgtatcttcttgaataccttttctaattcacatattattaaagcaagaaacatgtaagccctttcttcctagtccttaggttggcaatactgtggtgtcagtaatttataacatgctttctcatatataataagaagcactggactaaagagtctgctggtttgactcttcacgcaagtcaattcaaattaagtcactgtgcctctctgagcctcagtctccccaggtgtaaaaagggaaaatatggtcaactcttctgcgtccagtgtnn

SEQ ID NO: 19239 - DNA, 461 bp, Homo sapiens
  misc_feature 1, 2, 3, 459, 460, 461: n = A,T,C or G
nnncgaccacgcgtccgcaagacaggagatttcttaaggtcatatagcagatttgcttaaagtcatatagcataactggaagaatatagaatctacccaaagcctatgctctttctactgtattatttgcttataatagagaatgctaatcagaatcacctgaatagtcttgtagagggtcagtacacaagcctaggtcctatccttcagagaggtgaaatggaggcaaatatattctgaaagagtttcccagttgattctgatgagcactcacaattaagaagtgctgcattaagagctgtacatggtggcttatgcctgtaatcccagctattcctgaggctgaggctggaagatcacttgagcctggaagatcacttgagcctgggagttggagaccagcctcggcaacgtagtgagaccatgtctctttttaaaaaaaaaaaacagacgataaannn

SEQ ID NO: 19240 - DNA, 511 bp, Homo sapiens
  misc_feature 510, 511: n = A,T,C or G
ttgggagatatggcaaggtgagaatgtttgggaaaggaagtagagacagacattggatttttgtcagtcaagtttcttttgattttaaattatttattcattacattgtctacatggcagttaatattctaaaactataaacaaaatttaatatagaaaaaatattatgcttttcttttttgcctttgcatgctcttatttcaaaatagatttaaaattcatggcatattatactagaaaacaggtctgtcaatgatctaagcttctatctttagatactaggaaaaaagagaaaaacccaaagcaagcagaagcaaggaaataagaacagaaataaatggaattgacaagaacacttcagaaaatcagtcaaactgaagctgatttttataaagattaatatgtttgataaagataaccatctaactagactgaccaagaaaaacaagggagagagagaacacagatccaagaatcaaagaggctacatcattacaaaatactacagann

SEQ ID NO: 19241 - DNA, 1820 bp, Homo sapiens
  misc_feature 1805, 1806, 1807, 1808, 1809, 1810, 1811, 1812, 1813, 1814,1815, 1816, 1817, 1818, 1819, 1820: n = A,T,C or G
tcgacccacgcgtccggtttcctcaacctggaagtaaagatgcagaggaaagaaaagaatacattcctgattacctgccacccattgtgtcttctcaagaagaagaagaagaagagcaggtgcccactgatggaggcacatcagcagaagccatgcaggttcccttggaagaagatgatgaattggaggaggaagaaattattaatgatgagaatttcctgggcaagagaccactggatagtcctgaagctgaagaactgccagccatgaagcggcctcggctattaagcactaaaggggacacgctagatgttgtgttattggaagctcgagagccactcagctcaataaatactcaaaagatcccaccaatgctttctccagtccatgtacaggacagtacagacttggcacctccctcacccgagccgccaatgttggctccagttgcaaaatcacaaatgccaactgcaaaaccattagaaacaaagtcatttacacctaaaacaaagactaaaactagctctccaggacagaagactaaatcacctaaaaccgcccagtcaccagcaatggtcggaagtcctattcgatcaccaaaaactgtatccaaagaaaagaaatcacctggacgttccaagagccccaagagtcccaagagccccaaggtcacgactcacattccccaaacacctgtgagacctgaaacgcccaacaggactccttcagctacactcagtgaaaaaatcagtaaagagactatccaggtaaaacaaatacagacaccccctgatgctgggaaactgaacagtgagaatcagccgaaaaaggctgtggtagcagataaaacgattgaggcctctatcgatgctgtgattgcacgagcctgtgctgagcgagagccagatcctttcgaattttcttctggatcggaatctgaaggagacatttttactagccctaagagaatttcaggcccggagtgtactactcccaaagcttccacttccgcgaacaatttcacaaagtcaggatccactcctctgcctctttccggtggaacctcaagttccgataactcatggacaatggatgcctccattgatgaggttgtacgtaaagcaaaactgggaacaccttcaaatatgccccccaactttccttatatctcttctccgtcagtgtctcctcccactcccgaacctctccacaaggtgtatgaggagaaaaccaagctgccttcctccgtggaggtaaagaagaagttgaaaaaggaactaaagactaaaatgaaaaagaaagaaaagcagagagatagggagagggaaaaagacaagaacaaggacaaaagtaaggagaaggataaagtgaaagagaaagagaaagacaaggaaactggcagggaaacaaagtatccctggaaggaatttcttaaagaggaagaggcagatccctacaagtttaaaatcaaagaatttgaagatgttgatcccaaagtgaaattgaaagatggacttgtgaggaaggagaaagagaagcataaagataagaagaaagatagagagaaaggcaagaaagataaagataagagagagaaagaaaaagtgaaagataaaggcagagaagataagatgaaagccccagcacccccactggtgttgcccccaaaagagttggccctgcccttgttcagccctgccacagcctccagggtcccagccatgctgccatctttgttgccagtgcttccggaaaaactgtttgaggagaaagagaagccgaaggagaaagaaaagaaaagggannnnnnnnnnnnnnnn

SEQ ID NO: 19242 - DNA, 697 bp, Homo sapiens
  misc_feature 1, 2, 3: n = A,T,C or G
nnnaagccagtttgttccaagtcatatggctatttagtgttgggatctgctctgccattgttcacagctatattcaattgccccgggtgttgtgtatctttccaaaaacgttgaaagggaggttcagaagtattcagttatttgtattattagtcgttttgaaactgagtagaaagactcatttaggaaagttccatatgccttcttgtctgtctatggctggtttgctcaggagaaaagtccacaattatacaattgtactcagagatcatgttatttgtatatctacctgcctcatcggagaggttgtgaatcgtcccagagacaagataatctttttgtttgcattcacctgggctattttggaggctagtttgtcatcttcctgcaggagtaattttatccatgtagttcctagactgttgtctaaatggaatcaagatgggtttgtcagccaccgttgcctaatggggattttaggataaattatcttatctcgtattagcctaagaaatctctgacttgggatttggggtgatttaatacaaaatcattcaaagatttctttctgtcttttctttatggcttttggactgtgtacttatgactttctctgctgtgctcaagtatcttcttagtatctataagtaaaagttacttataaatgtctgtaaaaaaaaaaaaaaaaaaaaaaaaa

SEQ ID NO: 19243 - DNA, 859 bp, Homo sapiens
  misc_feature 859: n = A,T,C or G
gcgtccggagagactattttaatattgttctatatttccaaataaatgtgtctactataagtaaaatagtccctatacattttccaatactaggtaattaaaagtgctaattttaaaacaaatctctccaaattttataaataatctcatttattcttgtggctttacataccatctatgtgctcgaggcggtctaatttatacctctaatctagacctagtctctgaattccagacatatattctgctgcctgattgacatctccatgtcaatatttaataggtgtctaaaagttgtcatgtccaaaatggagctcttgatgtttcccaaaatagtaaatcctacagttttcctcatcccagttaatggaaaatcatcatttctctcatacgctgcttccagtctgtcatcaaatccacctcaagtatattcaaaatttgaccacttctcaccagcaccactgtcattatcctgattcaagcctccatcatctctcatcgttactgtgacctcctgatcattctccttgcttcagccctggcccctgcaggcagcattcagtattagcagtagagttgtttctataaaaatgtagtcagctgggtgtggtgtctcacgctgtaatcccagcactttgggaggccaaggtgggaggatcacttgagctcagtttgaagaccagcctggtcaacatggtgaaaccctgtctctactaaaaatacaaaaattaactgggcatggtggcgggcacctgtaatcccagttactggggaggctgaggcaggagaatcgcttgaacccaggaggcagaggctgcagtgaacccaaatcacactactgctctgcaacctgaacaan

SEQ ID NO: 19244 - DNA, 495 bp, Homo sapiens
  misc_feature 472, 493, 494, 495: n = A,T,C or G
atcgtcgaggtcaaggacggttatggccgtaactacctgctgccgcagaattacgccatcaagtggacgcgcggtgctgaggcccagatcaaggacatcactcgcgcccgtaaggctaaggagatcaagtccaaggaggaggctgagcagatccgctcgcagctggagcacctggtcgtccaggtgactgtccaggtcggcgagaacggtcgtctgttcggggccgtgactcctggcgatattgcgctggcagtcaggaaggccggtggccccgccctcgagaagcggtccatcgagatcaccaagccgatcaagaccatcggcaagcacactgtcggcgtcaagctgcatgacgctattaagggtcacgtcacggtcgagactgttcccgccgcgtgatctgacgtacacgcagacataagggaggggcatccaactgggtgccctccctttgctccgtcaccaccggcgnaagtaaatgacgaagtaatcnnn

SEQ ID NO: 19245 - DNA, 461 bp, Homo sapiens
  misc_feature 1, 2, 3, 269, 270, 271, 272, 273, 274, 275, 276, 277, 278,279, 280, 281, 282, 283, 284, 285, 286, 287, 288, 289, 290,291, 292, 293, 294, 295, 296, 297, 298, 299, 300, 301, 302,303, 304, 305, 306, 307, 308, 309, 310, 311, 312, 313: n = A,T,C or G
  misc_feature 314, 315, 316, 317, 318, 319, 320, 321, 322, 323, 324, 325,326, 327, 328, 329, 330, 343, 344, 345, 346, 347, 348, 349,350, 351, 352, 353, 354, 355, 356, 357, 358, 359, 360, 361,362, 363, 364, 365, 366, 367, 368, 369, 370, 371, 372: n = A,T,C or G
  misc_feature 373, 374, 375, 376, 377, 378, 379, 380, 381, 382, 383, 384,385, 386, 387, 388, 389: n = A,T,C or G
nnnatggtagctttgtgtcatgtacgggcacttccaggattagggtgcaggagaaacgtctcagtgtctccccttccgaatcttggcttctggagggagagatgctggggtgggagtgctccttggtggagtactcaggaccttagtaaaagcagagggggctggagaggcaggcctggcctgcagagccagcatggagaaccctggtgtagggctctccagcctgccattttacagttaagaagaaaggagatatgtatatatatatnnnnnnnnnnnnnnnnnnnnnnnnnnnnnnnnnnnnnnnnnnnnnnnnnnnnnnnnnnnnnngtatacatatatnnnnnnnnnnnnnnnnnnnnnnnnnnnnnnnnnnnnnnnnnnnnnnntatatacgtgtgtgtgtatatgtatatatgtgtatacgtatatatatatgtgtggtgtgtatatatatatat

SEQ ID NO: 19246 - DNA, 1078 bp, Homo sapiens
  misc_feature 1078: n = A,T,C or G
ctgtcttaatctcttgacctcgtgatccacctgcctcggcctcccaaagtgctgggattgcaggcatgacccactgtgcccagccatacttttttttttttttctggggcatttctgaagttaaatatgttgagttctctgcccatttgttcaaattctatggtattatttctggggatggacaaatgttatgaacaattgggtttcaaaatagatttttctatttagcaactttctattcctctaggacctagtattaaggtcattaagatggcttaatgagtcattaagccattaatgagtcattaagatggctgaccaatctgtgccatcttttttagtgacattttgtttatcagggtctctttggggtatttcttggatttatatcttgacagtattacataagcaggaataaaagagacattgagtggaatgtctcgctcaaatataaataaccttataaatacaatctttacttctcagagtcctaaaatcttcttggttagtctggtcttccttgttgatcaaggttctcgtgactaaatggcattagtttgtgttctcacagataggataggaaaaggaattatacatattgattatgtactatatgtcagaccacttatgtaccttgtttggctctatgattctgaattttttatcaccctatcatcacttctgttcagcccttttcttcccttcccaagttgtttattctgtttgatttttgttctctgctggtagtcagataatctcccaaaaataatagttatcattgattggccacttcctgtgtgtcaagaactgttttatactcttcacatagatggttctcttttgatcctcaaccctgtgagcttatcacttaataaatattgttaagctgcaaaaaaaaaaaggatccaaaaaacagcagattaaacaacaaattactggctttatttttctcaccttaaaaagtctagaggtgagcagtccaatgccactagtgcagctccatagtggcctcagggacccagatgtctcctggttttctgctcttccatacttcgtattggtgttcaccctagcatcn

SEQ ID NO: 19247 - DNA, 527 bp, Homo sapiens
  misc_feature 1, 2, 3, 4, 5, 6, 7, 525, 526, 527: n = A,T,C or G
nnnnnnncaacctttgggattcacacaatacttgacaatcacagctctgccatgggggacatcattacacaaagcactcctcaccagtagtcagatggcacttgatagctacaggcatgtgaatattcttttactgtcaacttttgttgtgatttcacctaaaatatgataagctccttgaggataaaggctaagtcttacttcttcgtatttctggtaaccgcttgtaccaaacacctgccaagcattgttgattgcacctatgaggaggtgagaaagtgccaggccgtcatgcccctctatacaaacatgtaacagtagactctggttcatcaggagtaaatgacatgatatgtgatagaccacatacattcgtggctatagataggtgagtaactgtaaccatatccaattgtgagcaaaagtgttttaattggtggttttaaactaatataaaattggctaaatcatcatttttcagctctcgaatcatctgaagacctttttttatttttaaatattaannn

SEQ ID NO: 19248 - DNA, 661 bp, Homo sapiens
  misc_feature 661: n = A,T,C or G
cgacccacgcgtccgcgctcctgtcatctcccttgggtcttcatttaaatgccacaccagagaggccctccctggccaccctaatgaaaacttcaacatcctcaaccctaacatttcctgtcccctgggttattcctccccttggtatttatcaccatttaatgtactatctggccgggcatggtggctcgtgcctgtaatcccagcactttgggaggcccaggcgggcggatcacctgaggttaggagtttgagaccagcctggccaacatggtgaaaccccatctctactaaaaatacaaaaattagccaggcatagaggcatgcgcctgtaatcccagctacttgggaggctgaggcaggagaatctcttgaaaccgggaggcagaggttgcagtgagccaagatcaagccactgcactccagcctgggttgacagagcaagactctgtctcaaaaaacaaaaacaaacaaacaaaccaacaaacaaacaaaaaaacccaacaaacccaccaaacataccatatttggtttctgtaaaaaaataaaaaagagagagagaatttttaaaaaacaaaaaccatactatctaatttacatttttaatctttttatctgtctcctgggattacagcagctttgtcaaatagcaatataatan

SEQ ID NO: 19249 - DNA, 534 bp, Homo sapiens
  misc_feature 1, 530, 531, 532, 533, 534: n = A,T,C or G
ncgacccacgcgtccgctaaggcatgtgagcgccttgtagggcacgttctgtcttctgactacataagcaacacttttgcgaccctaagtcacagcacccacagcttttggcaggatactttaaaacagaaaaaacacatcattgatcctggcaggattttttaagggattgtgcttaagaatgtttaactttggtaatcagagaccaccactggtgtttttctccaaaatcacatctttaagttaattaatacttgaagttaataaataatactgctcagtgtattagtaatgatgccataataccatgtgaatttatgctgattcaaatgttgtttttttcgtttgatactcatatggccttctgtttgaggacttcagattatctagcaactgatttaatctggtcagaaataaactgtgctacagctggaaagcgtgaggcttgagaaagcaagttttggacagggacgtatgaagctcatgttgaaacttaagtgttttaggctgtttgggagcttgaatggagnnnnn

SEQ ID NO: 19250 - DNA, 464 bp, Homo sapiens
  misc_feature 1, 462, 463, 464: n = A,T,C or G
ngtcgggcacggcgggcaacctggttcccctgggcggtagtccggcagctgtgcttcccccttcactgcagtgcgtgttcagttggaaacacggagatttcacctttactccctggctatagggggatggtgagaagggggctgggtgtgaggggatcttcaaggcagaatcttaggctgtcttttaagaattgtgtgccgggacgtggttggaggctgggtgcagaaaggaagaggcaacctgctggaggaggcaaggacaggtcgctctgggcagttttgtgggtgctgctgtgtgaacccctgttgctgtggcctcaccagggaaggctggtctgtggtcagttcctccccctcccctccccttttcattccctcttcctttcccccgacctcccattcccgttccctccccactcctaaggctgaggctgccacacttacctgggttcgacccagtcnnn

SEQ ID NO: 19251 - DNA, 633 bp, Homo sapiens
  misc_feature 1, 2, 3, 472, 473, 474, 475, 476, 477, 478, 479, 480, 481,482, 483, 484, 485, 486, 487, 488, 489, 490, 491, 492, 493,494, 495, 496, 497, 498, 499, 500, 501, 502, 503, 504, 505,506, 507, 508, 509, 510, 511, 512, 513, 514, 515, 516: n = A,T,C or G
  misc_feature 517, 518, 519, 520, 521, 522, 523, 524, 525, 526, 633: n = A,T,C or G
nnnactctttaataattaataagcctcctgggtgattgggctgcaggtggtcctgagaccacactttaagaaacactaatcaagaatcagggccttatgactcttagtcctgtttcttcccaaaggactatgttgcctccctacattcgaaaacattccaaacaatacataagagtctttgtaattcacattagtgctcgtatttactgactcaacaattaattcctgatggagtcattcatggagtaattttcttttactcactcagcctctgtggtttgccaggagctacaaataaaagattaaaacacagtcacacctccaaggaactcatataatagtaacagaagtaactaccatttcttgagcactttatttatacatacgtcatacagtttatctcattcacctatctcattccctgcctttcagtaagcctgtatactattataaccgcatagtttgggaatannnnnnnnnnnnnnnnnnnnnnnnnnnnnnnnnnnnnnnnnnnnnnnnnnnnnnncacatatattctcttcaacttgttctttacatttaatatgtcttaaaagtatttctttgtcagttcttgctttatatatgtctagtatttctttataagggctacan

SEQ ID NO: 19252 - DNA, 497 bp, Homo sapiens
  misc_feature 1, 2, 496, 497: n = A,T,C or G
nnacccacgcgtctcgggaaggctaaggcgcgaggatcccttgagcccaggagttctaggctgcagtgagctatgatcacgccactgcacaccagtatgggcaacagagcgagatcccatctctaaacaaatttaaaacaaacgaacaaatgaaaaatattgctgtcttaaggttgggaaggggcagagacccctttgcttgctcatcaccaagacacttctgtgaggccccagggctctttggagaacgttttgaaaatcacggttctaagtaattatagttactgtgactgaactaatttagccctaagcttcctacaatcaagatagagatacactatggactgcatttctccgcttcagattaaaaaaaaaaagtttagtcagaatgtagttatattttcaggtaaaatgctcaatacattttcagatgaagctgctcaaaattaaagcagtgagtccaagtggtaatctgaaaaaaaaagtacaatttacnn

SEQ ID NO: 19253 - DNA, 818 bp, Homo sapiens
  misc_feature 1, 2, 818: n = A,T,C or G
nnactcagctattccgacctagaattgaccctttcatacagcaccacttggatatgtagaaagagtttgttgtgagatcagatgtaaaacaaataaaagttattcgtgaaatgatatggaagactgggattagaaactgtggcattcaagaagccagttaagctgattctcagaattgacagagattctagagatggtgtagtgcagatggtgtagtgcagggattctcagcctcactgcacatggtaatctcataggaaaattttaacaaggacagatgcagaaattcttattaaactgtcaggactgaagtccagaggtcactatattttaaaaaggtctgcaagtgattgtaacatgcatctatggaggaaaacatcagcgtaggagaaaaagggaaagaaaccaactggagtaaaggctctgtcttgagcactgtgctggctcctgtacattctccatctctttttatcttcatagtaagtgagatggtttgacaaatagggagaccgaagctctgccttcatgtgggacactcaactgcctccttccctgctgttggcagtgcttggatgaatatgcattgtatgcctcttctctcttccaagaagactggtttctctgattactttgcattttaccctggatagagatggtcttaccctcttttgagcttcaaaaaatcaggcttcaggctaattccaacctggtgaatctttctcagcaattctacccccataaaacaatctttacattttaaattcctattcatgtttctaactattcataagattttcgtatgaagagttctggttcan

SEQ ID NO: 19254 - DNA, 536 bp, Homo sapiens
  misc_feature 1, 2, 536: n = A,T,C or G
nnacccacgcgtccttagtatttataaatataatgctgctagataaataagtgattcatattttgtcaaaactattttaaaatttcaatatttaaagtatttgtgaatcactgggtgtcgctaagtggcatcatccatgagatttgattccatgtaccatataattttagattgttcctctctcaccccttttaaactccttcaagcattgctattactggggttgcctttgggaaaacttacttctagatactaccatatatctgaaatagtagaggtggatgttaataaaattcataaaatgatcatgtattactttttttgatttaccactggaaggaaatacagtcatgtgcaatataatgacgttttggtcatcgagacccacatgtgtgacagtggtcccataaggatgctgctgaagaactcctgtcgctgcctagtgacactgtagccatcgtaacgccatagcacgacacgttactcacctgttcatggtgatgctggtgtaaacaaacctgtgctgccagtcatan

SEQ ID NO: 19255 - DNA, 499 bp, Homo sapiens
  misc_feature 1, 2, 3, 4, 5, 6, 7, 499: n = A,T,C or G
nnnnnnnaccgggcccccccctcgaaatacttctagaattaattaacgcgggggtgggcggaaatctctctgcgcctcggcttccctgtttgtaaaagattaactgagattttgacgtaaaacgggtgggacagtatcacatagtaagtgctaaataaatgatagctgttcccttttattatctgactcataattatgaatgtattgaaactaaagttcctttgaaacattaaagaagatccatcaaactggcaactgtatataaggtctgatatcttctggcactcagagggagagtttctggtggaggtggaagtgacttaggagtcatccatgaacataaatgagatcactcgtgtagggaagagttaatgagattagagagccttggacagagccttgcagcccaaacccatgaaagagcagtaatagtgagtgaattaccttctgaggcagtgcaaagtagataagcaagacaaacactctatttctactatan

SEQ ID NO: 19256 - DNA, 1649 bp, Homo sapiens
  misc_feature 1647, 1648, 1649: n = A,T,C or G
cgcccatcgcgtccggcctcgcccctttccgccagcgcccgcaggacccggatgagagcgcacgcttcggggtctccgggaagtcgcggcgccttcggatgtggcggatgcggccgtgagccggcgggggaggtgctgctgctgcctccactgtactcagacccaggtagcacaggattgtccatcctccagcagctcagtgcaacggtgtgaactcagcctgtttcagagcctccacaccatgacctccaagaagctggtgaactcggtggctggctgtgctgatgacgctcttgctggcctggtggcctgcaaccccaacctgcagctcctgcagggccaccgcgtggccctccgttctgacctggacagcctcaagggccgggtggcactgctgtcgggtgggggctctggccatgagcctgcccatgctggtttcatagggaaggggatgctgactggggtcatcgcgggagctgtgttcacctccccggcagtgggcagcatcctggcagccatcagggccgtggcccaggccggcacagtggggacgctccttatcgtgaagaactacactggggatcggctcaacttcggcctggcccgggagcaggcccgggctgaaggcatcccggtggagatggtggtgattggggacgacagcgccttcactgtcctgaagaaggcaggccggcgggggctgtgcggcaccgtgcttatacacaaggtggcaggtgctctggctgaggctggtgtggggctggaggagatcgcaaagcaggtgaacgtggtcaccaaggccatgggtaccctgggggtgagcttatcctcctgcagcgtccctggttccaaacccaccttcgagctctcagccgacgaggtggagctgggcctggggatccacggggaagctggtgtgcgccggataaagatggcaaccgccgatgagattgtgaaactcatgctcgaccacatgacaaacaccaccaacgcgtcccatgtgcctgtgcagcccggctcctcagttgtgatgatggtcaacaacctgggtggcctgtcattcctggaactgggcatcatagccgacgctaccgtccgctccctggagggccgcggggtgaagattgcccgtgccctggtgggcaccttcatgtcagcactggagatgcctggcatttctctcaccctcctgctggtggatgagcctctcctgaaactgatagatgctgaaaccactgcagcagcctggcctaacgtggctgcagtctccattactgggcggaagcggagccgggtagcccctgccgagccccaggaggcccctgattccactgctgcaggaggctcagcctcgaagcggatggcgctggtgctggaacgggtgtgcggactctctggctgaggaacctagatgcctggagggtgagtgaagggatgtggacagacaagccggtgcagaagaataggagggtaagggtccagatgtcagatgccaagtacaatgagtatggcagggaagggaggaagagagatgaggagggagagagaagaaataccaatatggagagagagacaatagagtagtaaagaacaggagagaaaagtatgaaaagaggaaagagaacacgacgagaaagagaaagtcgnnn

SEQ ID NO: 19257 - DNA, 511 bp, Homo sapiens
  misc_feature 1, 2, 504, 505, 506, 507, 508, 509, 510, 511: n = A,T,C or G
nnacccacgcgtccgcaagatatgatgttagtaaagatactttaattgcggggagttctctgttggctggtgaataaggacgttctctttgagttccacctttctttgagaaattttcatgtttcctgtacttttcctctattatatcatggaaacttactaaatcagcctgtgcattccgcccacatattccctcatggtgccttccggtcctagcagctgagccagggccatcaataaatcttcttcttttcccccaagatattcctagttgcttctttactattcattcttgtaattccattcatctgtgtgtatcatttaggatgctgggcagttgcatcgcatttcacctaaggtcacatcctgatgggatttggtgggatcctagagctggctaggaccacttgtgagagctgattgttaaattctccgaaatgacgtgactcagttgttagactgcttaaaggtaaaaatcagtggtgtacttaggtttgttttgtnnnnnnnn

SEQ ID NO: 19258 - DNA, 714 bp, Homo sapiens
  misc_feature 713, 714: n = A,T,C or G
gcgtccggtgaaacctggagctgaagtgaattctcttagagtatattttgaaactgtactaggactttaaacacttttggaatttaaaacagccataaaaattcttgttatactgaaggagttcctgaggcagtgtgcctctcattttaccacctaaagttgcccatagaggtccaaggagacactgctgatagcagaaagtcttccagaaagaaattaggcgacccacaccaagcatgtatggctttgagtcttacagatggctttttaatagtttagtctcttaacctaaggaagtttctgaagttccggtcagagagtctaaaaattcacattttacctaataaatgataatgaggctatttatcttgtctgtctggattttttcacttgacatttaatgaaatatcccatattacctataatttttatttgaaggtaaaaatagactacagaagaatgtgtaaaatttgtatcaatcagcagagcacaaatcaagtttctaccagtattgcttataaatatttcgatcttatttaggcatggttaagctgtttttgatggttgaacttgaaggtttgttgagaattacattttttgtcttaatttttctatttttaagtgtctgaagcgtgggtgttcaaccttttggcttccctgggccacatgggaagaagaattgtcttgggccacacataaaatatgctaacacnn

SEQ ID NO: 19259 - DNA, 555 bp, Homo sapiens
  misc_feature 1, 2, 3, 555: n = A,T,C or G
nnnactgaatcaggagtgattttcaaatgtagagaaaactccagataatgctgtttgcttccggccgctgtaaatcataggtgaaaaccagtagcaagtgctcactcagtgcctcccagaagcggtctgcgggtctcagctgggctgggggcagttttcattgggcaaggcttgggcttagcttcgaagcaggggctgggagaggatggatgggggtgtgagagcagaagaaagacctggctttgcagtgaggcagtcccaagttcaaatctgagctcaccactgacccgtcgtgtgatgggcgccaggtgttaggagactggaactgggtatgtgtgtggcattcggccggccatagtagctgctcagtaaacagaaactgtttctcatcctcatcctcatcctcatgcctgcaaactgtaaaccgtcctacttaacaatgaaagtagaaaagtgtttcaatgtgacaggaaagagtgaagacacagaagcttggaaatgatgatgtgttaaagaatcactttttgctaaaaatcagaactgctaccgtgcggn

SEQ ID NO: 19260 - DNA, 801 bp, Homo sapiens
  misc_feature 1, 2, 794, 795, 796, 797, 798, 799, 800, 801: n = A,T,C or G
nnacgcgtccgccttcgccccctgcctcctcttggctgcggctggtcatcttcccacctccacagtgggccgagctgccaaacaaggggtacacatgtgccccctgacataggccaggtggtctctgccctctgtagctcccatgagagagggctcctcggaccgaaacaggaggccactgcccttgcgcacacaccgtggccgggtcctcctgggcggagcgctttccgtgtgtgggaaagtcaagggcagccccgagcctcgaagcccaggctcccagccccgcgccatgttgcattcccgcctctactccttggtaggctggttgctttgagtggttctttttaattctttctgttggtttctccttttcctttgcctgggttttgctttaacctctctgttgcagagatgcagagcactcagagagcctatttctatcatcgctttcctattctccacctagaaccaggtgactggccgcccgagtggtgtctcttgtgtgtgtggtgcgtccaaagctgtgcaagaaatgcttctgcctaggttttctcgcgccccccccttgccttggcttttcctgcctgcttacacccccgttccctgatctgcccctgggcttctgggcaggttccccgcactgtgcctatcgccggcctgtagtagcaaactgggcaaatgaggggctgtgtctggaatttggagacgtcacattcaaatcttaaaacactgtaatcccagcaatctgggaggctgaggcgggaggattgcttgagtccagagtttgcgaccannnnnnnn

SEQ ID NO: 19261 - DNA, 580 bp, Homo sapiens
  misc_feature 514, 579, 580: n = A,T,C or G
tcgacccacgcgtccgatttgatataaatagttatgttactcatatagaaatctcttccccattacacacatacaaacatttatctatgagtggcttataattgcaaataagatgtaaatcatgctcatgatcattgtcaaaattgtgaaagatttttttctatacctcttttaggttggttttgtttttgtttttgattcccaggtggctttaaagacaagagggaataatattcattcttacttctactcccaagtcactagtttgctgaatttaattgagttaaagaattgtatcagtcttcttggaagtctaatacaaaaccagttcaacactagttattcattctttgctaattcaccagaattgaaggatggataaaatgagaaagagaagtagttcttcatattattaaaataaagagttaaattagacactttgttggactctttggtcttaataatccctactctttttgaggtccaaaagttttgtctttgataaatataattntaatggtatctctagtgagaaactatgtaacttcttcatgtatcaaactgtgaatagtgataggnn

SEQ ID NO: 19262 - DNA, 1965 bp, Homo sapiens
  misc_feature 1, 2, 1965: n = A,T,C or G
nnagtcacccacgcgtccgggaaggcagcggcagctccactcagccagtacccagatacgctgggaaccttccccagccatggcttccctggggcagatcctcttctggagcataattagcatcatcattattctggctggagcaattgcactcatcattggctttggtatttcagggagacactccatcacagtcactactgtcgcctcagctgggaacattggggaggatggaatcctgagctgcacttttgaacctgacatcaaactttctgatatcgtgatacaatggctgaaggaaggtgttttaggcttggtccatgagttcaaagaaggcaaagatgagctgtcggagcaggatgaaatgttcagaggccggacagcagtgtttgctgatcaagtgatagttggcaatgcctctttgcggctgaaaaacgtgcaactcacagatgctggcacctacaaatgttatatcatcacttctaaaggcaaggggaatgctaaccttgagtataaaactggagccttcagcatgccggaagtgaatgtggactataatgccagctcagagaccttgcggtgtgaggctccccgatggttcccccagcccacagtggtctgggcatcccaagttgaccagggagccaacttctcggaagtctccaataccagctttgagctgaactctgagaatgtgaccatgaaggttgtgtctgtgctctacaatgttacgatcaacaacacatactcctgtatgattgaaaatgacattgccaaagcaacaggggatatcaaagtgacagaatcggagatcaaaaggcggagtcacctacagctgctaaactcaaaggcttctctgtgtgtctcttctttctttgccatcagctgggcacttctgcctctcagcccttacctgatgctaaaataatgtgccttggccacaaaaaagcatgcaaagtcattgttacaacagggatctacagaactatttcaccaccagatatgacctagttttatatttctgggaggaaatgaattcatatctagaagtctggagtgagcaaacaagagcaagaaacaaaaagaagccaaaagcagaaggctccaatatgaacaagataaatctatcttcaaagacatattagaagttgggaaaataattcatgtgaactagacaagtgtgttaagagtgataagtaaaatgcacgtggagacaagtgcatccccagatctcagggacctccccctgcctgtcacctggggagtgagaggacaggatagtgcatgttctttgtctctgaatttttagttatatgtgctgtaatgttgctctgaggaagcccctggaaagtctatcccaacatatccacatcttatattccacaaattaagctgtagtatgtaccctaagacgctgctaattgactgccacttcgcaactcaggggcggctgcattttagtaatgggtcaaatgattcactttttatgatgcttccaaaggtgccttggcttctcttcccaactgacaaatgccaaagttgagaaaaatgatcataattttagcataaacagagcagtcggcgacaccgattttataaataaactgagcaccttctttttaaacaaacaaatgcgggtttatttctcagatgatgttcatccgtgaatggtccagggaaggacctttcaccttgactatatggcattatgtcatcacaagctctgaggcttctcctttccatcctgcgtggacagctaagacctcagttttcaatagcatctagagcagtgggactcagctggggtgatttcgccccccatctccgggggaatgtctgaagacaattttggttacctcaatgagggagtggaggaggatacagtgctactaccaactagtggataaaggccagggatgctgctcaacctcctaccatgtacctggacgtctccccattacaacn

SEQ ID NO: 19263 - DNA, 260 bp, Homo sapiens
tcgacccacgcgtccgctcatggaggaagcatagattagaatcatgatttttatctattttaagagaatagaagaacagaaggggttacaatcttgcaatattatgcaactcttctgctctaatatatcaaaaacttgatgatccaagatcatgcagaacagctgagaagaaatcaaagtaaacagtgtaccttgcagccaacagatcctgccaatatgagattagaactctccatcctagcaaaaaaaaaaaaaaaaaa

SEQ ID NO: 19264 - DNA, 1030 bp, Homo sapiens
  misc_feature 1, 2, 1030: n = A,T,C or G
nnacgcgtccgcagggtggcgcacgccagtaatcttagctacttgggaggctgaggcaggagaatctcttgaacttgggaggcggacattgccgtgagctgagatagtgccactgcgctctagcctgggccaaagagtaaagatctgtctcaaaataaataaataaataaaaaataaaaacaacaataaatgactgtgtgtccttaggcaaggcacttagcaactcttgagcttgttccatctgtaaacccaggacgttagtgattctccctctagtggatgaaatgaagcaatgcagatagagccctaatgcagggtacctgcgagtcgctgcagcagctgtggcaattgtcaccttcatccaggcccatcccgctttgagggcctagagagagtgggccagaggttaacccccgattcatctgcctccccacgctgggcatctgggtgtgccagggcattcccccgctggtcagacaggtttttgggccagggcggggctgaccagggttaattagagggaactggctaggaggagctggggagggggctgggcagagtccaggcctccagagcccctgggacacagcaggtgtgtgctgccatgggccggggcttgaactctgccagactcaggcgccaaaaacggcgcttgcgacctcaggtccagaagccccggcagcagctggaggtgagtggtcatcagagatccccccaccccaacccttgccccgggcccacgcgtcctgtctgctcggaaccttccctctaaatctctgggtcctgctcacgcttcctccctcactctcccttgcttttgtgtctgtcttggacacaaggcccccttaggctttctccctaggtgtctgtccctccatcgccatctctctgtgcctgcccagtctcatcggtgcctctctgcctctgtccctctgccctggcccccacagcggctccagcaggagaaccatgagctccggcgaggcctggcagcccgaggagccgagtgggaggcccgggccgtggagcn

SEQ ID NO: 19265 - DNA, 673 bp, Homo sapiens
  misc_feature 1, 2, 626, 673: n = A,T,C or G
nnccgaaagccttaaaaagagtagaatttcacttttcaccttttgtagatgtgcacgtgtagctgtagagctcatacttacgtttcacatggcatagttgatggatatgtaggtgtaaagtttatggtaggagacacggtgtgagaagtgtatctgatgacaaaaaatctgatggaagtgatatatttgacatgaaagtgaacattttcttagttgggtgtttataacttttttttggtaaattgtttttagtttttatccttattttacttatgcttggcaatagatggtcttttttccccaaatcttcttctgaattccaaggaaacactgttttagcatttatttgattactttggttcattcttttctccactcccatttatttgttttccattttgtgacttctataaagcagataaaaatctggaacttctagatctgaccttcatgtcttgtcttttctatggtgcttattctttccatctcctggtcattttggattgggcttatgagagaaatcttggggttgatcttccagctcactaatttgatattcatttgtgtctcttcagttacttagcttgcctgaaaactttttttttcaacaattgtgtacttaattntcataaactttctctttccttgcaacatttttatcagtagaggtaan

SEQ ID NO: 19266 - DNA, 461 bp, Homo sapiens
  misc_feature 457, 458, 459, 460, 461: n = A,T,C or G
gtcacccacgcgtccgtgccctggggcccccctgggcgagcataccctaggcgtcaggcctggaggtctcctcggtgcctcccagctcttctgtgctcctcacactctgctctgtgcacattggctgtatttgtaggttactgccttttatttctcacatttctttttggtgagagtatatcaatcaatcaatcatcctcagacctctatgataacactgtgccccacacacaagaagctactcaattaatgtttgtttgttgaaatgagagaaaatatttgtccttagtacagaaagaagatgaagccaacctctgatagaagcccacccatagactagggtgttgagctgccttccaactaaatgtggaagttaaatcctgaaatgagaggccagttgaagatagataggcatggatcttgggaaggcgtgctcacatattcatgttgaccccannnnn

SEQ ID NO: 19267 - DNA, 606 bp, Homo sapiens
ccacgcgtccggtagttgcagaagcatgttcttgaacttatcagtcctgacctcagatttcatcttcttctggtagatgtagcatacatctctgagtgttattagaggaccagactagagcctcatcgtactccttcagttacttcataatcatccagctctttatattaaatgtttttctgtttaaaatggcagcaatgttttttattttttgaaatggtccctgacagcaacagatcttctcgtgtttaattattgagtctgtgctgattacacagaattaaggatatagtttctaaagtacttccatttttatatattttagcattattctgaaaggcctggaaaaaaactattttttattcgatttgaaagtgaagtgacataggtgggtcgctatagcaagaaattaccctgtatttttccatctctatcatcacaggcatctcacagaattagaagtcggacattattgatggatatattagtcatgaataattaaaatacattaaatataaaatggtcagatacgggcagattttacataactgtcttcaatgttctaaatgtgaataatattgaatgaatgccattaaatatacagtc

SEQ ID NO: 19268 - DNA, 364 bp, Homo sapiens
  misc_feature 1, 2: n = A,T,C or G
nncgtccgcatcctctaagtccccatgatcagagaagaaatatgaaagggaattttaaaatattttgaactgaatgaagatgaaaatgccacagataaaactttgcatggtgtagctacattagttagcttagagggaaatttatatttttaaattcttatattaggaaataagtcttacataaataatctcagcttccacctaagaagttcaaaataaacccacagtaagcagaagaaaggaaataataaagctgagaaaaaatcaataaagtttaaaagagaaaattaatagatatcaatggaacaaaagttgcctttttaaaaatatcaacaaaattgatagacctttagccagaatgatc

SEQ ID NO: 19269 - DNA, 531 bp, Homo sapiens
  misc_feature 531: n = A,T,C or G
tactttttccaaaactaaagaatgcataggacataagttaaaagttcatacataacctggcttcaaatccagttctaccactacctgaaaacatcagtttatttctcatcaatgggttgttataaagtacctagcatagggtattgcttaaatgttaatactcccaatcctgacactaatgtttcagggaagagtgaaagaaatcacattaactccacattatggaacatcttctgtgtcaggctgaatacatctttgtatccatggtcttctggttgtttaaagactagtgtagaagcctgacatgtaaatcggtgattatataagatagtcctgtctcgtaacgtgttgcgctagagaggttaaccattaattattatgggagctcaggagaggcacccactggctgctgggagaagagcaaaaacctatatataaagcaatttttaagattttggttctataaggagtagtgtcgtatccgttagtgtattccaaagtcctatacacatgcaagatcggaaagctcan

SEQ ID NO: 19270 - DNA, 541 bp, Homo sapiens
  misc_feature 541: n = A,T,C or G
gcgtccggccaccatgcccagccaaagttatgttggttggtcaattttagataattaaaaaaaaaaatcctatgtagtaacatcctactaggaaagaagataaactcaagtatccactgagtggtgacctgaaaccaaagagacatggaggggcagccagtcaaaagccactgcactccagcctgggcaacagagcaggactgtgtctggaaaaaaaaaaaatctagaaacatactcaaatgtaaacataagaacttagcatatggtaaagttgtgactgtgagtcagtgcagaaaagaatgaatcaatcagtaaatggtcctgggaaaaccggctatttattttaaaataataacaaaatatgctgtatatcatcaatggattaaagatttatataccttcagcatatgtccttaaatgttctagaataaaatatatatgaatatcaatgtaatattgatgtgaggaaggccttttagacatgacacaaatgtcaaaaagcataaaaggaaagattttgaataaataataagcggagccn

SEQ ID NO: 19271 - DNA, 2434 bp, Homo sapiens
actttcgttcttaattaggtcatgcccgtgtgagccaggaaagggctgtgtttatgggaagccagtaacactgtggcctactatctcttccgtggtgccatctacatttttgggactcgggaattatgaggtagaggtggaggcggagccggatgtcagaggtcctgaaatagtcaccatgggggaaaatgatccgcctgctgttgaagcccccttctcattccgatcgctttttggccttgatgatttgaaaataagtcctgttgcaccagatgcagatgctgttgctgcacagatcctgtcactgctgccattgaagttttttccaatcatcatcattgggatcattgcattgatattagcactggccattggtctgggcatccacttcgactgctcagggaagtacagatgtcgctcatcctttaagtgtatcgagctgatagctcgatgtgacggagtctcggattgcaaagacggggaggacgagtaccgctgtgtccgggtgggtggtcagaatgccgtgctccaggtgttcacagctgcttcgtggaagaccatgtgctccgatgactggaagggtcactacgcaaatgttgcctgtgcccaactgggtttcccaagctatgtgagttcagataacctcagagtgagctcgctggaggggcagttccgggaggagtttgtgtccatcgatcacctcttgccagatgacaaggtgactgcattacaccactcagtatatgtgagggagggatgtgcctctggccacgtggttaccttgcagtgcacagcctgtggtcatagaaggggctacagctcacgcatcgtgggtggaaacatgtccttgctctcgcagtggccctggcaggccagccttcagttccagggctaccacctgtgcgggggctctgtcatcacgcccctgtggatcgtcactgctgcacactgtgtttatgacttgtacctccccaagtcatggaccatccaggtgggtctagtttccctgttggacaatccagccccatcccacttggtggagaagattgtctaccacagcaagtacaagccaaagaggctgggcaatgacatcgcccttatgaagctggccgggccactcacgttcaatgaaatgatccagcctgtgtgcctgcccaactctgaagagaacttccccgatggaaaagtgtgctggacgtcaggatggggggccacagaggatggaggtgacgcctcccctgtcctgaaccacgcggccgtccctttgatttccaacaagatctgcaaccacagggacgtgtacggtggcatcatctccccctccatgctctgcgcgggctacctgacgggtggcgtggacagctgccagggggacagcggggggcccctggtgtgtcaagagaggaggctgtggaagttagtgggagcgaccagctttggcatcggctgcgcagaggtgaacaagcctggggtgtacacccgtgtcacctccttcctggactggatccacgagcagatggagagagacctaaaaacctgaaaaggaaggggacaagtagccacctgagttcctgaggtgatgaagacagcccgatcctcccctggactcccgtgtaggaacctgcacacgagcagacacccttggagctctgagttccggcaccagtagcaggcccgaaagaggcacccttccatctgattccagcacaaccttcaagctgctttttgttttttgtttttttgagatggagtctcgctctgttgcccaggctggagtgcagtggcgaaatccctgctcactgcagcctccgcttccctggttcaagcgattctcttgcctcagcttccccagtagctgggaccacaggtgcccgccaccacacccaactaatttttgtatttttagtagagacagggtttcaccatgttggccaggctgctctcaaacccctgacctcaaatgatgtgcctgcttcagcctcccacagtgctgggattacaggcatgggccaccacgcctagcctcacgctcctttctgatcttcactaagaacaaaagaagcagcaacttgcaagggcggcctttcccactggtccatctggttttctctccaggggtcttgcaaaattcctgacgagataagcagttatgtgacctcacgtgcaaagccaccaacagccactcagaaaagacgcaccagcccagaagtgcagaactgcagtcactgcacgttttcatctctagggaccagaaccaaacccaccctttctacttccaagacttattttcacatgtggggaggttaatctaggaatgactcgtttaaggcctattttcatgatttctttgtagcatttggtgcttgacgtattattgtcctttgattccaaataatatgtttccttccctcattgaacaaaaaaaaaaaaaaaa

SEQ ID NO: 19272 - DNA, 769 bp, Homo sapiens
  misc_feature 766, 767, 768, 769: n = A,T,C or G
acaccaagaccaattgctaaaatcttggattatggaaaatttaagtatgaaagaaagaaaaaacaaaaagttgaaaaagaaaaacaatctttcacaaacaatagagaaattcgtttatcttttggaatcaatttaaatgatataaaaatcaaagcaaaaaaagccaaagaatttttattagataacgacagagtaaaagtggctcttcgtcttagagggcgtgaaaatacaagacctgaacaaggtaaattaattttaaattctttttttgatgaagtaaaatcgattgcaaaattaagtaaagaaatgcaatcagttggtaattttttaactcttcatattgaacgtgataagaaaaaattacccaaatttacttcttcaaaacaaataaaggaattaattgattttgaaaaaactataaaggaagaagaaactaatgcctaaagcaaaaacaaaatcagcacttaaaaaaagaattaaagtaactgcttctggaaaaatcaaacacaaacatgcatatcgttctcatttagcacaaaataaatctacaaagcaaaaaagacagtcaagacacgcaacattaatgtcctcttctgattacaaaagaatgaaagacttaatttaataaatttatcaatatttttaataattaaaaggagattttaccaatgagagtaaaaggtggaactgtcacaagatcaagaagaaaaaaatgattaaaattagctaaaggttattgaggacacaagtcagtaggttataaagnnnn

SEQ ID NO: 19273 - DNA, 550 bp, Homo sapiens
  misc_feature 1, 4, 10, 545, 546, 547, 548, 549, 550: n = A,T,C or G
naancggccnaggtaccaaattatgactgttttagctccaggaacagatttaaaagtaattgaagacgttttaaaatctgtttttgatgctaagaacatcgaaaaaattgaaaaacttgaaagaacagagttagcatacgaaattaaaaaacacaaacaaggaatttttgttttagctaacttaaaatctgaggaaagtttaatcgaagaatttgtcagaagagtaaatattctcaaaaaacaagttttaagatttttagttattaatctagattctgaaagaggaatgcacaaaactttcagacctagaaaaaatgataaacacaaatttttctcttctaaaaaaccaacaacttcaacagaagaaggtaaaagttttcaaaaaccatttgtcaaaaaaccttttgttaaaaaatcagaagaaacagattcttcaaaacaaaatgaacaagacaaagtgctaagaaaaccaaaaactgtaaaaccagcaaaagatcctaaagtagctcacacagcaaaaaaaaaaataaaatagtacctgcccnnnnnn

SEQ ID NO: 19274 - DNA, 602 bp, Homo sapiens
  misc_feature 1, 2, 3, 4, 5, 6, 7, 8, 589, 591, 597, 599, 601, 602: n = A,T,C or G
nnnnnnnnccgaggtacgcggggaaatgcaaaaaaatcaaatcaatttaatagaatacatcagagatgttaaagatttcccaattgaagggattgtatttaaagatatttcaccacttttagcaaatggagaagtgctaaattacacaattaatcaaatggctgagttagctaaagatgcagatgttattataggtccagacgcaagaggtttcttgtttgggacacctactgcagcttttttaaaaaaaccttttattatggtaagaaaacctaaaaaattaccaggagacgttattagttttgagtatgatttagaatatggtaaatcaactctagaaatccaaactaatatgttgaaaaaaggccaaaaagtagcaattattgatgatgttttagctactggcggaacaatgaaagcgattattaacttaatcgaatctcaaggtgctgttgttcataaagtaatctttttacttgaattaggatttttaaacggaattgaaaaacttaaaaaatatgacgttagctcattaattaaagtttagtacctcggccgtccaccgcggggagctccaattcgccctatngnagtcgncncnn

SEQ ID NO: 19275 - DNA, 801 bp, Homo sapiens
  misc_feature 1: n = A,T,C or G
ngataaaattagtcatggatccagtccagtcccaccagagatattttattacaaagctgtcaaatgtgttaattttcctacctagtgtctaaactaaggccatagatcttgtatttgctaaattgcaatgtacaagatagtcatctcagtaaaaggtctattatctaacttgccaaacttgtttactgagagccctaaggaactaaaactgccataatgccgtgcacagcttgaaaagcaattagagtaagcaagattagtttttcctcccttccagttcctcagcaggcctggctgaaggcccaggagggaaggaaatataagaaccaacaataaaaatagcaatagcaataagaagaatgccatcccatggagcacaccataattctggaaccacctctcccggatcaggcttccattgctcacgatgctcacgctgggcagccgcaactctactttgcagaacctcaccaacttgcccaggtattctccccggtcttgaagaaatggctctccacctgaaaagttgatcttctccataccagcttccttaagcaaaagcaatcctctctttgcttcctcaaggggcagcacaaaggatgttttggctgtgtggaaacagaagccgcatttgtagttgcactggcgagtgaagtgatagttgacgctggttggggtggtgggcaaaagagggtcctcttcctcctctttggtctcatctggccctctcaggaccagctgctgctttctcctcttggtagctagcagccagaaggttgccctcagccagcagaacagcgg

SEQ ID NO: 19276 - DNA, 561 bp, Homo sapiens
  misc_feature 1, 561: n = A,T,C or G
nccactaccgcaggcactagatacgaatctaaaattaaaacaaatccaatttattaaacacgcaattttttgagagtttgatcctagctcaggatgaacgctcgctgtgtgcctaatacatgcatgttgaacgggatgtagcaatacattcagtagcgaatgggtgagtaacaggtacctaacctacctttaagactgggataactattggaaacaatagctaataccggatatagttatttatcgcatgatgagtaatagaaaggagcttcacagcttcacttaaaaatgggggtgcggaacattagttagttggtagggtaatggcctaccaagacgatgatgtttagccgggccgagaggctgtacctcggccgcacactgggactgagatacggcccagactcctacgggaggcagcagtaaggaattttccacaatgagcgaaagcttgatggagcgacacagcgtgcaggatgaagttcttcggaatgtaaactgctgttataaggggcatcagatctcgagaattccgctagtagtagtagacaaccgctctan

SEQ ID NO: 19277 - DNA, 282 bp, Homo sapiens
  misc_feature 1, 2, 3, 4, 5, 6, 7, 8, 9, 10, 11, 31: n = A,T,C or G
nnnnnnnnnnncagtcgacggttcgaaagcnggtattttttttttgagcccgggagatccatgtagttttagagcggccgcccgggcaggtacctaacctacctttaagactgggataactattggaaacaatagctaataccggatatagttatttatcgcatgatgagtaatagaaaggagcttcacagcttcacttaaaaatgggggtgcggaacattagttagttggtagggtaatggcctaccaagacgatgatgtttagccgggccgagaggctgt

SEQ ID NO: 19278 - DNA, 2608 bp, Homo sapiens
  misc_feature 1, 2, 3, 4, 5, 6, 7, 8, 9, 10, 11, 12, 13, 14, 15, 16, 17,18, 19, 20, 21, 22, 2607, 2608: n = A,T,C or G
nnnnnnnnnnnnnnnnnnnnnnactattatttgtgagtttgtcctttccacttttagtcttctctgtttgttttttttttttaatttttactcgtttctttattaatatagaaaaggagcccagggcagctggaccagtagtacaaagcaccaggagttaataccattctggtgaaggggatggttttacaaaagtgaaggagcaggcaggagccaccaggttctgaggccaggcccagcctactgcccagaacccctgaaacggctccctgggaaaaagctgacagatgggtcaggggtggattgagctggaaaccatggggacagatggcagggatagagggtcatgcagtgggaaccacccagtggctgataaggacagggaacttgtggctggaggctccccattgggccatgggcaggggcttgcagatggcctcagctctgggggcaggtagagaaactgcagagactgatgggcatggagaacccagacatggccctggggctgaagggcctttccaccctctcttcaccaggagccacctttgctctatactacatatggggcttcagggcccaaggcacaggggaggctcagaggcctccagttgggaggaagatggggcaaggaaggaagcacttgagtgtccctagcttaggcagccggggatgagacacaggcaggacaacagcacccccgcatagtggggctagaatgtgggacagggacgggcttatcctcggccagtgactaggaccagccccatggcaatggtgcctgtctccagccttagcaaatcaagtgtgcaacaagcacagggtgtcggcagacctgggctctagccttacaagctctgccagaacttgaatcacacagagctgtatcaccatggtccagccatgtcctgccttggcctgtttcctcctctgtcaatgagggctttgaataagacctcctaggtcatgaaaaggactctgcaggtgaagggaactccaggacctgctcttggcagttaagcagaccctggatggaactggtatgggatggggtgaagtgggggatggaggaggaaggtgttcttgcatggaacctatccccacaaacactacagagtgaggaaaggccactggaagcccttctttgcccagaggaagaaaggccacagagagagtgaatgtggcttggtgcaatcccttcacatcctccaccatctgggtaacacttggcaaggagtggatgggtggcattgtgcaaccctttatgttcttccctgggggtggcactcaaggcctcttgtggcttctgccttcagccttcagtgtagggtcaagagtgttcttttcactgtcgtcctgttctgggaacagcacaagactctgcctggctggcacatgttagttggtgaggaaaggacagagtgggtgagtaagcagacagggaggtaagagtgactctctggctttctcctcttcctcttcagagagcagctcaatcaactgagtcgcagatctcctccaccacagcattgaagatgtgtggctggtcagcatagacatggtgggaggcacccttaatctccatgtctcggacataggaatccggccgctgcatcttcaccttttttcccgtactggtatctatccaggtgtcggacccgtagatcatagtgataggcacatcttttcgaatcaagtgaattcgctccagcatagggcgccgggcccagccaaaggactccatcatggctttgaatgctgtctcaccactgggattctgtgcgttgcagtggtaaatatactctgatatggtatcatcttcaaagaagtctgcaaacttgcgtttgaagtccggccggaatcgctgcaccagaccaggcccccagggcccagctactcgaagaacagccaatggattggaacgtcctaggacagatgccacggctttgacccaggctgggggtgcacggatctcactggggttagttggtcggaggggaaagccccatgggtccaccaggatgaggtgtttaactctatcagggtacttgattgagtaagaagtggccaggaatcctcccaaactgtgccccaggaggatcatgctggggatccccatggtctcccgccatgtctctatcgatgtcacaaactcatcctcagccccctccgggtcccttgggaatgctggccttgagcttcgcccgaagccaagcagatcgaaggtgtgcagtgtgcggcgggcactcagtgagtccatgttgaggatccagagacccacgccgcccccaaaaccatgcaccatcaccaagggggtgcggtcgttttgctcggggctcacagtcaccgtccagatcttattctggtttgggagggatacatatctggccaggaacttattctggagacactggaggatcctggcttccacattcttcagctgagacatggaagtggggcgccacgtgggcagccagctactcagccagccttgagactgctgctccagatcatcggccatagtaaacaagccttgccaggtcctggcgagcccgcccagcgcctgacgccagcaccagctgacccgtagtcgacgcggccgcgaann

SEQ ID NO: 19279 - DNA, 3556 bp, Homo sapiens
  misc_feature 3410, 3411, 3412, 3413, 3414, 3415, 3416, 3417, 3418, 3419,3420, 3421, 3422, 3423, 3424, 3425, 3426, 3427, 3428, 3429,3430, 3431, 3432, 3433, 3434, 3435, 3436, 3437, 3438, 3439,3440, 3441, 3442, 3551, 3552, 3553, 3554, 3555, 3556: n = A,T,C or G
cgtccgagtcgacccacgcgtccgcctgggcggccgggcctccgcgagtaccgggtcgacttcggagtctgcgagcccagccaggggtgcccgcttcccacccctctccccgagcggcgtccccgtcggggtcgaacctcccccgcgacaggcgcccagccgcctgttcccccaggccttgcctgcggaccgccctgggaacggcgtctgggagccccgaggggctggcgggactcggggcccgggccatgcggcagccgcccccgcccctccgcgaccatccccggcccaagcgggagccgcagcggcgtttctgctcctcgctgcgccggcgaccccggacccggcacccgtgacccctcgcgctgcctgcggcctcgcgccgaggcctgccccgggagagaccgtccatgccgtccaaggcggagaatctgcggccctccgagccggccccgcagccgccggaagggaggacgctccaaggacagcttcccggcgctccgccggcccagcgcgcggggtccccacccgatgctccgggctccgagagccccgcgcttgcctgcagcactccggccacgcccagcggcgaggacccgccagcccgagcagcacccatcgccccgcggccccccgccaggcctcgactggagcgagccctgtccctggacgacaagggctggaggaggaggcgttttcgaggcagccaggaggacctggaagcccggaatgggaccagtccctccaggggctcagtgcagagcgagggccccggggcccccgcccacagctgctccccgccctgcctgagcacctccttgcaggaaatccccaagtcccgcggggtcctgagcagtgagagagggagcccgtcctcggggggtaaccctctctctggggtggccagcagctccccgaacctcccgcacagagacgccgccgtggcggggagctcgcccaggctgcccagcctgctgcccccgcgcccaccgcctgccctgagcctggacatcgcctccgactccctgaggacagcaaacaaggtcgactcggatcttgcagactacaagctccgcgcgcagccgctcctggtgcgggcccacagcagcctgggccccggccggccgcggagccccctggcctgcgacgactgttcccttcgctcggccaaatcctccttcagcctcctggcgcccatccgcagcaaggacgtccgcagcaggagttacctggagggcagcctcctggccagcggggccctgttgggggcggatgagctggcccgctacttcccagaccggaacgtggcactcttcgtggccacctggaacatgcagggccagaaggagctcccgcccagcctggacgagttcctgctcccagccgaggccgactatgcccaggacctgtatgtcatcggggtccaggagggctgttctgacaggcgggagtgggagactcgtctgcaggagacgctgggcccgcactatgtgctgctgtcctcggcggcccacggcgtgctctacatgtcgctcttcatccgcagggacctcatctggttctgctcagaggtggagtgctccacggtgaccacacgcatcgtgtctcagatcaagaccaagggggccttgggcatcagcttcaccttttttggcacttccttcctcttcatcacgtcccacttcacctgtgacgggaaggtggcggagcggctgctggactacaccaggactgtacaagccctggtcctgcccagaaatgtgcccgacaccaacccctatcgctccagcgcagcggacgtcaccacccgcttcgatgaggtgttctggtttggagacttcaacttccgcctgagtggcgggcgcacagtcgtggacgccctcctgtgccagggcctggtggtggacgtgccggcgctgctgcagcacgaccagctcatccgggagatgcggaaagggtccatcttcaagggcttccaggagccggacatccacttcctcccatcatacaagtttgacatcgggaaggacacgtacgacagcacctccaagcagaggacgccctcatacacggaccgcgtcttgtacagaagccgccacaagggtgacatctgtcctgtgagctactcttcctgccccgggatcaagacgtccgaccaccgccctgtgtatggcctcttccgggtgaaagtgaggccggggcgagacaacattccgttggcagctggcaaatttgatagagaactgtacttactaggaattaaaagacggatttcgaaggagattcagaggcagcaagcactacagagtcagaactccagcaccatctgctccgtttcttgaagtttgctgaacgaggactcacagctgcaacgtggggtgattgtattgatcaaaacccactgggaaggacaaagagtttgccgcctttcggggatccgagggactgtggcgaccgtgcctctgtgccagcgtcccaggaaggaagccaaccctgagcgagcctgtcctctgtggcaggtccacacggtgtgggtgggcagggcttggacccccgtctccatggcaggtccatacagcatgggtggcagggtttggacccgcccagcagcaccacggaccccagccactctcgggggcagacgtcagaatccgttcctgagcagctcctgtgccctgggggcagtcacagagccccccaacacccccgtgctctgcaccagcctctccctccacacccgaagcaggcgtccatctgtgtcctcctggcagcccctcaaacacacaccaccccatgtcacacgggtatccagagcaaggctggatctgggctaggtgacccctggggcctcagacctctgagtgggccccagagcccagctgaggaagccacacagcctccaggacgtggcacggttcccctccacttggctgcaagtcgcctgccatggggcgaggaggcctgcaccccagtataagggcctccccagctgagtaagaagctgcttcccctcctctcataggccaagcctattgtgtgaaaccatctcatggtcttggtgacgtagaccatttttgaaaccgtctcatggtcttggtgacgtagaccgtttgcttctttaactccagccgcggaatgacattagtggaaccgggctagggaactgctggaagttcaggatgccaccaccttgaacacctaggccagggatccccaccatgtcccgggtttctttcttcgagagtatagaaccgttcattcttgctttgtgtcccattccatctcttgaaaaaatgtagtctttgaatgtgtgaaaatctagggacattcaatctagtcttttaaattatttttccatatttatatttttaaataaatgcatatattgagtcttaaaaaaaaatataaannnnnnnnnnnnnnnnnnnnnnnnnnnnnnnnngagactagtacaaatgaaacaaaagaaaaaactacaaactaaaaaaggggcgccctttaatctttgtttaaaaaaaaacttaccacactcccccttgaacctggaacannnnnn

SEQ ID NO: 19280 - DNA, 2138 bp, Homo sapiens
  misc_feature 1, 2, 3, 4, 5, 6, 7, 8, 9, 10, 11, 12, 2135, 2136, 2137,2138: n = A,T,C or G
nnnnnnnnnnnncgcaaacaatttgacattgggcattcaaggtgttttcctgttggcaagtttgataaatgcggcccctgtttgtttaaaacgccacctttaaaaaggaattatgttctgcaagccccctaagttgggtttcgtctagggtttttccattcttttacgttgtttaatttcgtctatttatattgtaattttactttttatatttttttttttgttttttgtttttttcttttttttttttttttttttttttttttttttttacttacaaaattaattttattttgcaaaactcaacaaatacacgttcagatctggtttctcttcaaaacatgtgtttgttttttttaacaaacatgcaagttaatttggcatgccaaacatctttctctctagctcgccttggaaaaatttttttcataacacaaacaagggtgcaaatattgtccaaacctatttacatttttaccctctagaattacatacattaatatttattgggaggaaagcaaaactgcaaaacatagtctttggcattcacatttgcttcagcagtataattaaaaccttatatttgttttaaagataaacagtttgaaggaaatttaataaatcttgttttggctctgcaaaggagccactatatcaaagcatttaactggagctgttgagttcctgctggtagaatattacttccagcctatttattagcttgtcttccggtggcccaatacatgcttttttccctctacactgaatgaaagtacaaaaagaaaaccatttcttttctctttttcccccagcatcatgcaaggcaaggcaacaccacaaatacaataactgaatttactttgattatactttagtttcttacacttaaaattattttgtattataatacttacttggttatctaaaatcaacattgttgattttaaacggttataaagccagactttaagaagcatttaaaacaattcatgaactctgtatgaaaggaaataattgcctccagcttattcttttgcatttgaagtaaaagaatttccagtatcatcagtttactagaaaataagacttagggggtccatataatttattcacatctttttatacatcgtaaacaaggataggatacttctgacagtagcctataaagattttttaaaatttatccttcagtatagaataagtgtcaagggagcactttaagcatgattctggtaggtctgttaggagtctattttccagaaaaattttgtaggaaattgttctgattttaaataaactaaattcatagatttgtgttgacagaatatgatttgtgaggtaaagtcactgtattatctccggtctaaagcacaatgtagcatgtgcaaaagaaactaaagagacatgtatttcaaactccaggcagaaaggcagaatataagagtgcatagagaagagagtgcttttcaggtcagatagtgaaggaagacacaatagttacctaaatcaataagctgtaagcaacatataaatatgcaatgccatttcactgaatgtgaacaggatcaattagaaattgtactgtgatatccacatatttttgagaaaaattcccaagccaggcgaatgtggattggaataaagacataggcagtgtataccaccatagcaataatggttagtaagatggtgttaaacatagatcgctcccagggctctaaaacagcacagcagctaatgatttggtattgatagtagagccaggagaaatattccttcacacgcctcaaatccatggttggctccttcaagctgcagtaagtttgtcctaagaaagtccaggtctggttcttcagccttgctccttcgcgaaatgatcctgtgtgggttagttctcctctctgggttgctgtttcctcatctcccagttgggtgtatctccctgcggcttaggtgagcgccgaggctttggctcctccccagctgctgcgagcttcccactgcccccgcgtcctgggagcctcccggagttaggtgttaggccccgccctcaggactcttgctaaaactcaaattctacctggctaattccggtgattaattattgacaaaaggaaaacactcatacgcaaacnnnn

SEQ ID NO: 19281 - DNA, 506 bp, Homo sapiens
  misc_feature 504, 505, 506: n = A,T,C or G
acttttctaggacaatcaggaagtaatcttaaaaaaataattgaagatgttaaaaaatacgttaaaaataaaaaacttgttttaaacatagatgcagtagaaattgaaaaaccagatttagatgcaaaattattagctgaatcaattgcaattaaattagaaaaccgtggatcataccgtatggcacaaaaatttgcaattcgtttagcacaaaaagccggagctaaaggtattaaaactaaagttagcggtcgtttaaatggtgttgatatggctagatcagaaggatattctgaaggtgaaatgaaattacacacacttagacaagatgttagttatgcaacagcaacagcaagaacaacttatggagcacttggagttaaagtttgagtttcattaggcgaagtatttgcaaagcaaaatcaagcatataatgaagaagaaccaacacacaaaaaaggtccaaaaagagcagcaagagttaaaaaagaaagtacctgcccnnn

SEQ ID NO: 19282 - DNA, 603 bp, Homo sapiens
actttgatatctccgccctctcgtgtgttccttgtggagctaaccagaggcaagatgcccgaggaacttcatgtgtatgtctaccaggatttcagatgatctctaataatggaggacctgctattatttgtaaaaagtgcccagaaaacatgaaaggtgttacagaagatggctggaactgcatttcttgccctagtgacttaactgccgaaggaaaatgtcactgtcccattggccatattttagtggaaagagacattaatggaacattgttgtctcaagcaacttgtgagctctgcgatggaaatgaaaactcttttatggtagtaaatgctttaggagacaggcgcgtccgatgtgagccaacatttgctaataccagcaggtcctgtgcatgttccgaacctaacattttaacagggggattatgtttcagcagcacagggaatttttcctgtacgtaaaatttcacctgcacgttatggagaagttggcatgtctttaacttcagaatggtatgcaaagtatttgcaatcatcagcagctgcatgttgggtatatgccaatctaacatcttgtcaagctcttggaaatatgtgtgtg

SEQ ID NO: 19283 - DNA, 387 bp, Homo sapiens
  misc_feature 385, 386, 387: n = A,T,C or G
acgcggggcaattagaaattattgcagaaagaagattcactctcacctgatgaataagtgttcataggtaaaggctacaaaatactaatttgttattatttttaataataatttttgttttgctgagaaagtggatttaccacttttttattttttaatccaaggaggaaaaattatttccaaaccaaatcctaaaaatttttcacgttctaaaccagttcaagaacattgagtaaacagaaatattccatttgtcaaagtttttcttatcggctcagataatgaaaaaattgggataattgaaacaagagaagctattgaaatggcaaaagaacaaaaactcgatgtagtagttctttcaatagataattcaagtggtacctgnnn

SEQ ID NO: 19284 - DNA, 1330 bp, Homo sapiens
  misc_feature 1328, 1329, 1330: n = A,T,C or G
acccctagcagaaacagagtttcgccatgttggtcaggctggtctcgaacttctgtcctcaactgttccacctgcctcagcctccgaaagtgctaggattacacgtgtgagccactgtgcgcggtacgcggggaaccgaggcagcagcggacgtgagcgataatggcggatatggaggatctcttcgggagcgacgccgacagcgaagctgagcgtaaagattctgattctggatctgactcagattctgatcaagagaatgctgcctctggcagtaatgcctctggaagtgaaagtgatcaggatgaaagaggtgattcaggacaaccaagtaataaggaactgtttggagatgacagtgaggacgagggagcttcacatcatagtggtagtgataatcactctgaaagatcagacaatagatcagaagcttctgagcgttctgaccatgaggacaatgacccctcagatgtagatcagcacagtggatcagaagcccctaatgatgatgaagacgaaggtcatagatcggatggagggagccatcattcagaagcagaaggttctgaaaaagcacattcagatgatgaaaaatggggcagagaagataaaagtgaccagtcagatgatgaaaagatacaaaattctgatgatgaggagagggcacaaggatctgatgaagataagctgcagaattctgacgatgatgagaaaatgcagaacacagatgatgaggagaggcctcagctttccgatgatgagagacaacagctatctgaggaggaaaaggctaattctgatgatgaacggccggtagcttctgataatggatgatgagaacacagaattctggatgaatgaagaacaacacaagctgttctggatgaagagaaaatcgcaaatttctgatgatgaagggccaagggctcaaaattgagaacacagggatcaaatattacaagagacggctcttaaaccaagacctgccaaaagacgcgacaaacacagacgagcgtccgaaacaaaacacagaaaggagaagctatggaaaaaagagcaaatgacaagcgagggtcaaaaaaatagggaggacggagaatataggaaggggagacgaacaaaccacgaggggtggggagaaacaacaccaagcagaagggagacgagagatgcaagcacaaacaagagcacgagcgaccataagaagaagaagacaagcaagaagcaaatgagacaaacacacctgacaacgaacaatgataagaagcaaaagcaagtaatcagcttcgccacgcgttgctgtatgcctatgccagcttgcctcttcnnn

SEQ ID NO: 19285 - DNA, 555 bp, Homo sapiens
  misc_feature 533, 534, 535, 536, 537, 538, 539, 540, 541, 542, 543, 544,545, 546, 547, 548, 549, 550, 551, 552, 553, 554, 555: n = A,T,C or G
actaatgttattaatgtggctgacaagtaattagaaaactggaaattaaattttacaaacatttttaaaatcgctacaattaaaaaaattcaagatggttacattatgaatatgaatgaaatgtcattagcgacttcgttaaatgtatatgtaattctatattttccccaaaacccacattttatgaagaatatttatttatttatttatttttgttttttgagatggagtctcgctctgttgccagactggagtgcaatggtgcgatctccgctcactgcaacctccacctcctgggttcaaacgattctcctgcctcagcctcccgagtagctgggactacaggcaccgccaccacgcccggctaatttttgtatttttagtagagacagggtttcaccatgttagccaggatggtctccgtctcttgacctcgtgatccacccgccttggcctcccaaagtgcggggattacagacgcgagctaccgtgcccagccgcaacattgattttttaagtaaagtcgtgaacgnnnnnnnnnnnnnnnnnnnnnnn

SEQ ID NO: 19286 - DNA, 3266 bp, Homo sapiens
  misc_feature 1, 2, 3266: n = A,T,C or G
nngtcgccattgtgacccgagaatttaatatacttgtgccccgcgcgtgttttgttaaccgtccgcccgagtgtcccctcaatttctacccctcgccccttaacccaaagctaaatccaccatctggtattctcccctagagcaccagatgaccatctgaagctggacaagtgtctctaacaataaaacattactgtttacaaaacaaaaagcacaaacataattatggaataaataaaaaacaagggacaaacagccaactgactctacccacttggtgagaagtgatatacttcaactatttttttaatgcttctgaaagtttcttggcccacagaggactagggtgcaatcattccctgtgttagtgagttgggtttaatgcagcttcaaaattagggtaaagggacttggtgaaatgtttacattaaatatttcactcctacccattcttcaggaaaaaaggtgagctcagcaaggctggatgccattaagagatatttactgttttctttttctatagctaaaaaagcaaactttacacgaagaagctcttgattaaggaaatttcaatagattcatatttataaaattttaaacatttggcacagcaaaatttggaaaaaatgggggagaaaaaataggtctggttgttgtccccctttttccacctgctgctggacagtgatgagatgctcacagaagaaaaaggcctggctttgtaccaggctggcgacaggtgctaccaggagtgggctgaggggagaaaaactatctcccactcttttggcccaggcaatgtcaacgacttccacattccctggcccacttcctgagcaaccccaggttcggctctgtataaggaccctcccctcccaaccccaaccccagagtgcagtgcaaatcaaccaacaatttactggtggaatggcaatcaaaggaaacagttaaacaccaaacaatttcttaaagccaaaaaatatttttcatggagttgaacatttttcgagtgtgtttttttcaagtgtaaaagcagtgacattttgttcaaacagaagcagcatctaggaattctggcacttgggttctagggggttacaggtatgcatcatggattcttctccctcgtatttaaaaaggcctcgtgtttctattcctgagttcataccaacacctgctagctctcccctctagcggacagtgggtggccagccagcctccctggttagattgggcaatgccaagcagacatccctcattcacctgctgggcttgctttctgattcagaggtaagtcgaagtgcagagaaagaaacttacaaaagcacaaccaccaaaggcagcctgaacggggagccctgtgcagactgagttgctggagactaccctctcagtcccattcctggggaaaggtaggtcactcatggaatttgaatcaaacatgggggaggacacctgccaagcaatagtatgatggactcaagtcatcccaggccatctactgtctccctcacctgccctaaccttttctgagtccctccctctcttgtgcaagcactgtagtttaaaaaggaaaaaacaccccccaccattaaaagacaaccttcaaatgttactcagtatataaagtttgcttaggctaaggtggagtcagaaatgtctctaattgtagacaccatctctgtgccacccttcctctcatcggatatggagtgatttcttctctcgctgctgcgacgcagatctgagccacagtcaggtaccaatgtacacgacataggcacatgtgcaaacacaaagaaggtgggctgctgcttctttctctctgcccctagtccaggctcctttgcttcacgtaagattaacactttcccattcctctgaagttgctggaaggacatttcccaggaagaaacaattcctcactgcctataaactgtagtctcatgtgggatagtcaattgaacatgagaatcagaacaatctgggcaaatgggtatggcaagaatgggaacaccacaacaggacagatgccaactctcattcatgccaggccttttggcatctgggtgccttctgtgtcttctttccacctcttccttcagtctcaacatccacttgtacccccagctacctcccatgtttccaggtatcattggctcttaactcccacaagcctgccttttggctacccatcccaacaatatcaagagggaatgactaagtatcagctagaaacttagccatgtctcaacattcctggattatctgaaaagctgtcgatgcccttttacaggtttatggtgacagacccgtatcatcttaaagtatgttcatagttaaggcttgacttaagaaaataagagaaccagacataatggaaagacctcttcaataatgttgtcatgcctctcagtgaacgtgctcacagtcacacttggtttggctccccaaacccacaatagaaaaggaaaaatgagtattttgtttttcatctgttttgtatttaaaggcattgggttacttcctcctgccctcttttcttccctgaacaagagtttacaactcctcatggcttcttaataggtgaagtaggtgaaaagtctgagaagctcacagcagggtttgccgtcccaactatgcagctgagaggtcgccagctcctgtgccttcccagccccactataattggcagtatgtttgttcatgtttcctgaaaacattttctttaaaaaggaaaagaaaaaaatgccaaacaacaccaaccaaaaaaaaaaaaaaaaaaaaaagaaggaagaagacaaagagcaacatccaaacattccccaagccccaccccagtaagtctgagattatcttattccttccctgaaataattataaagaagcatttcaggcaaaatacttagtattaatggtctcttactgctcaacctcccaaccatgcccttttcccttttatgtgtatctcttggagtaaaataaattcattaatggctttccacatacaaatacaatagaaaagaaagaagtctggaacctgactatcatgggaccaaaaagtatcttggccctttgggagtttccttgtcagaaagtataagcctcaacaggaaatagaggctccttctcctttgagttcaataccctccctgtgtcctactcaccaggaaaataagtgtgttcatatcccacctaatttacaacagaagataaccccatcccatccccaaaacataaaaatacaagtctatgcccatagaacn

SEQ ID NO: 19287 - DNA, 699 bp, Homo sapiens
  misc_feature 1, 2, 3, 4, 5, 6, 7, 8, 9: n = A,T,C or G
nnnnnnnnncgtggaaacaaactaggtacttttaccaaagaatctactagaactctctgctattcaaaacaaagagctcatacttgttggagtagggaaaaaattagaaatttgaccaaaagatagattcaatcaactacaaagtcaattccaagatgctgataacatcgaaactcttgaaaaagaactattagaatctggagttgaactttaatggatcatatacctgttttgcttgatcaagtgattgatcagcttaatattaaagaagatggtatctatttagatcttactttaggacgtggtggtcattcgagtcaaattttaaaaaaacttactagtggcaagcttatagtctttgataaagacaaacaagcaattgaacaaacaaaagaaaaactcttaaaaatttcttcaaatattgaatttatttgatctgattttaaagattttgatcaagaactaaaaaaacttcaaatcaacaaagtagatggtgtattacttgatttaggagtatcttcacctcagttagatcaagccaatagaggattttcatacaacaaacaagctcgtttggatatgagaatgaatcaagctcaaagcttttcagcttatgagttagtaaatgaatactcaaaagaaaaattagttaatatattcacaaattatggacaagtacctgcccgggcggccgctcca

SEQ ID NO: 19288 - DNA, 1078 bp, Homo sapiens
  misc_feature 1, 2, 3, 4, 5, 6, 1077, 1078: n = A,T,C or G
nnnnnnctgtcgcgctgccttctttgtggcctctccgtctacgctgggtcgggggcgtccttgtttttgctgtttgttttctcctgccttcttgtcgccggtgccgtcttgcttccttgtgttgtcttcctttccctcttgtgcccctgcctacgctctgtgtgacctctccacccttggttctgtgttcatcctccggtcctttgtgtccgtcccccgggttcacgtccctgttcctatatatacttctccgtcctttggaggtgttagtttggcatccgcgagtcagttgtaaatcgctgcattattctttcccttggcgggagttctaggcccaaattaaagcaatgagctcatctttctgggtttgctagtgcctttggagcaacgatcctggtcttcaacgacagtttccagggttccaccacatatcccgcacatctctctccttgtgggttgatgaagctgctcctgtccacatatagcttccagtctactgatgcccaaggctggtcccggagatcaggtctgctggagtaaactgagtccaacacttctacacagttatgcacgacagggctctctgataccaggagcaagatggcagggttcagagtgtttccagtttagtagatcagtggttgaaaagggctgatagatgaaagtctgttgccccctccggatgtggccctggtcatcataatagataggtcctcgcatctccatgagaggcatttgcatagctcgagcacaaccagatctgagacgacccccgcttgactaccttgatctccttccctggcctctggagtctctgatcctcgtgagacctggggcatgttagctcctgaatctggtttctgaggcggctgttggcctcggtaaagtgggggtaggctgggacatagggagaaagaatttctgttgcctttggcagttcctgtacaactggcttctcttgctgtctctgggactccccttttaactctgtgtctgctggcaaagctgctcttactttcacttttggcttttttgcaataagccattaaacagggctggatccggacgcgtgggtcnn

SEQ ID NO: 19289 - DNA, 324 bp, Homo sapiens
  misc_feature 324: n = A,T,C or G
acgcgggggtttaaaaaaatatttaaaaaaatggaggaattatgaacttaaaaagcaaattaagaagctttttaggtgctactgcacttgtgttgccagtagcattttttgcttcttgccaaacaagatttggtcaagtaaatgaccataaattagtgattgctcacacttttaatagtagagaaggaaggtttttagcattagatcaaattgttaagctttgaaatgaaagtgaaaaagttaaaaacaaagaagaaggattttatccaataacactaaatcgacaatttgcgcaaacttatgcagaacaaggtaatgctttan

SEQ ID NO: 19290 - DNA, 682 bp, Homo sapiens
  misc_feature 1, 2, 680, 681, 682: n = A,T,C or G
nncagaggatcccgaagatacacgcattatagcaaaccgacaatgaattgggatgaaaaaccaaagagtgctacattaccaccactgtatcctaaaagccagccaccttttttggcaccagtctttaataaaccaaattaccacaacatctcagagttctttcagctatcctggaagtaaccaagaagcatgcatgtatcccggtaattcaaatccaatttcacagccactgctgaatatccaaaattatcctcaacaaatttctgtttctgatatgcataatgggacagttgtggcctcacacacttcagtagaaagaataacatatgcaaatgttaatggacccaaacaactaactcacaatttgcagatgtcttcaggagttacccaaaatgtatggttgaactcaccaatgaggaatcctgtgcattctcatataggggcaactgtatctcatcaaactgattttggagctaacgtacccaatatgccggcactacagagtcaactgataacatcagatacctattctatgcaaatgcagatgatcccttctaattctacacgacttcctgtagcttaccaaggaaatcagggacttaaccagtctttttcagagcaacaggttgattggacacaacagtgtatatctaagggactgacttacccagattacagannn

SEQ ID NO: 19291 - DNA, 742 bp, Homo sapiens
  misc_feature 1, 178, 742: n = A,T,C or G
nggtcagtgaaatgcttcaattttaaaggaatattttcaaaacacccatataatagaacacataaaagacagccaacaaggaataaaaatttctacaaaatttttgaaagaaaatttaaattttggagaaattagtttacttaattcactacttacagaaaactataaaataaaagtnactttagattctgagaaaaaatttcagtgacctgatgaaattgaaaaattacacacgggaatttatatagccaactttttatcaacaaaagattcagaaaagtaccacggaattttaaaaatagactgtaaaaaaccgtcaattgcagaactaattttgcttgatttacttcaaattgaaggaactcttttaggttttgttgcaatagtaaacgaaattcgatcagtaattcaatcaaagaataatgaattgacaaattctgacataaaaacagccaaagaatatcatttagaacaactaagagcgcttaaaaaaacttcaaattaacaaatataatttataatttatggcactatgaaaaaaaagagactttatttaatatcaactttagcattttcaacaattttattagctatttctcgtggtaaaaatcaaactactcctgtaggcacacaaccaatagataataccaagcctgagattcatcagcgaatagagttctgatttaaataatagaaaaaaagatgaatcacaagaacaaggaaacactatggctggaaatan

SEQ ID NO: 19292 - DNA, 2030 bp, Homo sapiens
  misc_feature 1, 2, 2029, 2030: n = A,T,C or G
nnagtcgaccacgcgtccgctcacgcgtccgatcaatttaaaaagggtagaatattttggaatgacgggttgtagtgttttctagagtgctttagttttgacattttatcagtattttccagaggtaaataaattttggaaggattattacttctctgttggggccctagaacaatttagtcttttatggaaaagctgactatctgggatcatatgctcagtttgtatatttgagatctgagagatcacgttctgaagtcttctcatatttagtacacctctgattctcactagttgaatgcaagaacttgaaaggttcaggtaagtgttttgaaaaattttgactttccaaacttttgccacttgctatctgaaactcaggaatcaaaaaataccgacaggcactgttactttcaaaattctttctataagttgagaatgggacagatttgcagagcaagggaaacttgaacagttacttctagtggtaggaaatgaggtggctaggatattacccagctggtgggtgacttgggcagtgtgttcctgctttcagtggttagcctttagcaaatctgctttagagtgagagtagagggcaggctgttgtattacagtgctcttgtttttgtaaaatttaattcactctactgttattttgtctccttgggtaaagtgttatttaatttttcttcattttttagtaatatataacagtcagtgagagaatttggttttcagagatgtcatccaaagcagattttacagttgtttcctggttataaattgtctcaacaattctcttttagtcatttagattgtttaatatgggaaaaccggggtgtagaacatgttgtaaaattaaattttatttacttttttcttatttccaggtccaagcatctcattttgaaggcctaatcacaaccatagttgggtatatacttttagcaataacactgataatttgtcatggcttggcaactcttgtgaaatttcatagatctcgtcgcttactgggagtctgctatattgttgttaaggtctctttgttagtggtggtagaaattggagtattccctctcatttgtggttggtggctggatatctgttccttggaaatgtttgatgctactctgaaagatcgagaactgagctttcagtcggctccaggtactaccatgtttctgcattggctagtgggaatgggatatgtcttctactttgcctccttcattctactactgagagagcctgaaaatgaatacagtattgaaaatgttggtttacacggagacgggtgatggagatgtgcagggtgtggaggaccaggttgacaattccagtgagaagggaacacaaaagcacaaaggctgaatgctgctcttggtgtactttgttctttgaaagatttgaggaagaggaggaggggtcagggaccaaagcattctcctgaatcatacggtacttcgacctggtgtcctgtggtttataaggaatttgaatgatccagatttcaatccagtacaggaaatgatccatttgccaatatataggcatctccgaagatttattttgtcagtgattgtctttggctccattgtcctcctgatgctttggcttcctatacgtataattaagagtgtgctgcctaattttcttccatacaatgtcatgctctacagtgatgctccagtgagtgaactgtccctcgagctgcttctgcttcaggttgtcttgccagcattactcgaacagggacacacgaggcagtggctgaaggggctggtgcgagcgtggactgtgaccgccggatacttgctgtgagtatgggcagctgactccttggacatgcatgtcatttgtgactatggaataacctttctggaaaaagtatgttccatggcccactcaagaaaaattagttttaataagagacaatttagtaatatttgcaattgcatataatacttctaaatgaaatttttttttcttattgtccatcctttcatggagaatatatacatcnn

SEQ ID NO: 19293 - DNA, 222 bp, Homo sapiens
  misc_feature 222: n = A,T,C or G
acgcgggggcagaagaggaagatttctgaagagtgcagctgcctgaaccgagccctgccgaacagctgagaattgcactgcaaccatgaggtaaatattttcccttcgtattcggtagtgctgttgagtcatcttgtccaatgcaaatcctgagaagctatgttcccaaagagggccagctccatttagtgtttgtttatagccttactatgcctctacctn

SEQ ID NO: 19294 - DNA, 839 bp, Homo sapiens
  misc_feature 1, 2, 40: n = A,T,C or G
nnacatgttggaaaaaaggtatgcataaagccaaagaccntcagattcttgccctgaggaaagtccaaccgttgaccttccttgcccaagaatgaatgattaaaaagttgaaaagctgtgtttgtagatcgttcaggccttcgtctgcaactatcaggaaatatgggtaactctcttccaagaaacttccccactcttttgataagcatctcgaaaatgttgttcgaacatcaatggtggtattcttctgaagatgaagaattaaagcagttctcaaagaaagaagttcagggaagttgaaatacgcatactcggcatccttgaagaaaactatggtgaattgtcctcctttgctaataagatccacaagatagcgttcaaccagatagaagaaatggaggttctgcccaggcttaaatgatatctcacagatacatgtgataagtaatgaatccccatcaatcaaaaaaaattcagattcaacaaaatcattgaataaactggaatattcagcttttggcatttcattcaaaattaactgggacatttcctgtgaaaatgttgtaagaacatttctttccattcttgctgctgcctgtgcctccaacctgaactggcaagtattaaaggtagcaaataccctttattttggtacctctaagtggcagttcttaatgaaaatggcagtccgcggactcaggaccggtggtgtccaaagacccgcgagctgtgcgccccgcggggagggagtgaaacagagacctagcgcagagcccaggtggaagttccaggttaccccagacctggcctaggactcggccccccgcgtacctgcccgg

SEQ ID NO: 19295 - DNA, 525 bp, Homo sapiens
actaggagatattgatcctagtcaattaggcattgtagactgtcatgaccacttaataaaaaattatggacctgaagctcacgagcatccagattttattatgatgtcaaaagatgctgcaattaaagaaatgaatgaatatgtagcaaaaggaggaaaaactgttgttacaatggaccctcctaacgttgggcgtgatgtttatcaaatgttagatattgcaaagaaattagaaggaaaagctaacattattatggcaactggttttcataaagctgcattttatgacaaaggtgcttcttgacttgctttggctccaacagataaaattgtaaaaatggttgtagctgaaatcgaagaaggaatggatgaatataactacagcggaccagttgtaaaaagatctaaatccaaagccggaattattaaagccggaacaggatacgctgctattgatcgtttagaatttaaatctctagaagtagctgcaagatcttctattttaacaggagcacctgttttagt

SEQ ID NO: 19296 - DNA, 1730 bp, Homo sapiens
  misc_feature 1, 1729, 1730: n = A,T,C or G
ncagtgcttagagtgtgagaaaaatggcaaatatgaatagtgattctaggcatcttggcacctctgaggtagatcatgaaagagatcctggacctatgaatatccagtttgagccatcggatctaagatccaaaaggcctttctgtatagagcccacaaacatcgtgaatgtgaatcatgtcattcagagggttagtgaccatgcctctgccatgaacaagagaattcattactacagccggctcaccactcctgcagacaaggcactgattgccccagaccatgtagttccagctccagaagagtgctatgtgtatagtccattgggctctgcttataaacttcaaagttacactgaaggatacggtaaaaacaccagtttagtaaccatttttatgatttggaataccatgatgggaacatctatactaagcatttccttggggcataaaacaggctggatttactactggaatgtgtgtcatcatactgatgggccttttaacactttattgctgctacagagtagtgaaatcacggactatgatgttttcattggataccactacctgggaatatccagatgtctgcagacattatttcggctcctttgggcagtggtcgagtctcctcttctccttggtgtctctcattggagcaatgatagtttattgggtgcttatgtcaaattttctttttaatactggaaagtttatttttaattttattcatcacattaatgacacagacactatactgagtaccaataatagcaaccctgtgatttgtccaagtgccgggagtggaggccatcctgacaacagctctatgattttctatgccaatgacacaggagcccaacagtttgaaaagtggtgggataagtccaggacagtccccttttatcttgtagggctcctcctcccactgctcaatttcaagtctccttcatttttttcaaaatttaatatcctaggcacagtgtctgtcctttatttgattttccttgtcacctttaaggctgttcgcttgggatttcatttggaatttcattggtttataccaacagaattttttgtaccagagataagatttcagtttccacagctgactggagtgcttacccttgctttttttattcataattgtatcatcacactcttgaagaacaacaagaaacaagaaaacaatgtgagggacttgtgcattgcttatatgctggtgacattaacttatctctatattggagtcctggtttttgcttcatttccttcaccaccattatccaaagattgtattgagcagaattttttagacaacttacctagcagtgacaccctgtcttcattgcaggatattcctgattgtgccagatgatggactgtatagccactctctagggctaacctgggttcgtgtcccagcttttggggaccatactctttcgcgtgaacattgtcttccttagcctatatcccatggtggctggatttcttaacatcctactaaatcggtgggagactaggagtgaatccttggccgtttctacccccacacatagcaggactcatcaaatattcaaggacagtggggcatgccttcggatcatattccattatcacaatgtatatactcacaagaaatgctgatgcatcatcatctacagttcaccacttgggcgacaaccgcacgacaacaaatgaccaacacagtcacaacccagatcgann

SEQ ID NO: 19297 - DNA, 813 bp, Homo sapiens
  misc_feature 813: n = A,T,C or G
ccacgcgtccgcatctctgtcatgtgcttatagtcactcctctccatctatgttatactgatcttactccaagcctctttcatgttgcgctttgtaatgaatttccaactgctcaacctttctgatggacaaaccgcccctcatatcttccaagagagacgactgagacatgaactggaggaggggagagacgactaggtgggtgaagtgcatagctggagactcagagcaggggttgtgtataattacagtgcacatggtgtcctgccgcgcggagaagggtgggaagagagcataagcatcccattactgcagcccaacatgtatggaatgatggagcaatgggacaagtacctggaagacttctccacctcgggggcctggctgcctcacaggtatgaagacaaccaccataactgctactcttacgcactcacgttcattaactgcgttctgatggcagaaggtagacagcaactggacaagggtgaatttacggagaagtacgtggtcccgcggacaaggctggcatccaagttcatcacactctaccgggcgatacgggagcatggcttctacgtcactgactgtccccagcagcaggcacaaccccctgagggcggcggtttgtgctgagagctatgtaagcgcagcctggacgctggagggtagggtggttgctacctttaatcagtactatggatttctaaatgcatttaactgtggttaataaaagcgtgtatgggccgggcatggtggctcacacctgtaatcccagcactttgggaagctaagacaggtaggtcacctgan

SEQ ID NO: 19298 - DNA, 248 bp, Homo sapiens
acgcggggccagtggttccccagcggggctcatattcacattccctaagatgacgttctggactctcgggcagagctttgtgagagaaacaaggcaggcttcaagtgatctgcaaccagagtaattgggatttgacaaggactgtgaaaggctgactctccctgttctctttcatgctggcaccgggcagagtgtgggaactactgcctcaatacgatcatagaagccattgagatcccgcagtttat

SEQ ID NO: 19299 - DNA, 808 bp, Homo sapiens
  misc_feature 1, 2, 3, 4, 5, 6, 7, 8, 9, 10, 11, 12, 808: n = A,T,C or G
nnnnnnnnnnnncggaagtcttctagaattaattaacgtgggggctgtgggaggaagaaggctagcgggcgttggccgtatgtgggtgtcttgaggcagtttttcagttctttcatttaccaaagtgacatgcacctactaggtgccaggtgtttagacgtacatacaaccctctgcaaaatctttcagtgtagtcctctgtatgaaaagtttccagccaagaattgccactgcacctgagataagggggatcctggccattaaggaaaccttgccttcgaaactgagccgtgaggaactatacaaaatgggaaattgggacaaatcccagtggctcatgacactaagaagtaaaattacgaactcactgagctggaagtcattcaacgggaattgaataggtaactgcacttttgtgagattataaatataccacggagggtaacgaagctacagaagaatggaagaagacagcctggaagactcaaaccttcctccaaaagtttggcattctgagatgacggtgtcagtgacaggcgaaccacctagtaccgtagaagaagaaggaatacctaaagaaacagacatagaaatcatcccagaaatcccggaaactctagagccactgtcccttccagatgtgctgaggatctcggcagttctggaggacaccacaggccagctctctattctgaactacatcatgcccgttcagtacgaaggggagacagagcatctgcgtgcatgagaaatgaattcttagaaggaacgaattctatgacaaactttccaattggccctcaacaan

SEQ ID NO: 19300 - DNA, 887 bp, Homo sapiens
  misc_feature 1, 885, 886, 887: n = A,T,C or G
natggcatcaaaacaaaaaaagaactcattgtgaataagaaaaaacatctaggcccagtcgaagaatatcagctgctgcttcaggtgacctatagagattccaaggagaaaagagatttgagaaattttctgaagctcttgaagcctccattattatggtcacatgggctaattagaattatcagagcaaaggctaccacagactgcaacagcctgaatggagtcctgcagtgtacctgtgaagacagctacacctggtttcctccctcatgccttgatccccagaactgctaccttcacacggctggagcactcccaagctgtgaatgtcatctcaacaacctcagccagagtgtcaatttctgtgagagaacaaagatttggggcactttcaaaattaatgaaaggtttacaaatgaccttttgaattcatcttctgctatatactccaaatatgcaaatggaattgaaattcaacttaaaaaagcatatgaaagaattcaaggttttgagtcggttcaggtcacccaatttcgaaatggaagcatcgttgctgggaagggagttgttggctccagcagtgcatctgaactgctgtcagccattgaacatgttgccgagaaggctaagacagcccttcacaagctgtttccattagaagacggctctttcagagtgttcggaaaagcccagtgtaatgacattgtctttggatttgggtccaaggatgatgaatataccctgccctgcagcagtggctacaggggaaacatcacagccaagtgtgagtcctctgggtggcaggtcatcagggagacttgtgtgctctctctgcttgaagaactgaacaagaatttcagtatgattgtaggcaatgccactgannn

SEQ ID NO: 19301 - DNA, 979 bp, Homo sapiens
actttttgttttatattcttcaaatcctattgatgaaaaacttaaagatgaattagaaaaatcttatgtaattagacaaaaaccaaaaaaacaaaaacttattttagaaagacttggataatgattgattataaaaaaatgattgaccatactttattaaaaccagaagctacatctaaagatattttaaaacttatttcacaagctaaagaacatggatttagaggagtttgcattaactcttcttgagttaaattagcaaaagaaaaacttgcaaatacagatttagatatcgtttcagtagttggctttccattaggtgcatcaaacacacaaaccaaggtttttgaagcaaaattagcagttgaacatggagctactgaaatagatatggttataaatgtgggtaaattcaaagaaaaagtttatgactacatcttaaatgaaatccaacaagttaaaaaagcaattggaaataaaatattaaaagtaattatagaaacagcgcttttaactaaagatgaaataaaaaaagcagctgaattagtattgattgccaaagctgatttcgttaaaacttcaacaggattttcgtatcgaggagctactgcagaagacatcgaattaatcaaagaagtagtgggtgataaagtaaaaatcaaagcagctggtggaattaaatccattgctgatttagaaaattattataaattaggagctactagatttggtacggcatgatgagttctgagctgcggaggaaccctcatttcctcaaaagtaatttatttttacagcttctggtttcacatgaaattgtttgcgctactgagactgttactacaaactttttaagacatgaaaaggcgtaatgaaaaccatcccgtccccattcctcctcctctctgagggactggagggaagccgtgcttctgaggaacaactctaattagtacctgcccgggcggccgccacccgg

SEQ ID NO: 19302 - DNA, 332 bp, Homo sapiens
  misc_feature 1, 2, 3, 4, 5, 6, 7, 8, 9, 10, 11, 12, 13, 14, 15, 330, 331,332: n = A,T,C or G
nnnnnnnnnnnnnnnccgaggtactgtcgctatgaaaccacacatacgggcaaaagcaggaagagactttgcagacataaaaaccaggtaagttttgagagtcaggtgattgcaagatttttttttctttcattgacacttagctaattttgagccatatttttaaatgtgtgtcttttcagttacttgaaacctcttctcccacctcccatcctttccaaacctcctccaagccaattttccagttggtttaaaagaaatcattagggtgacccccactcccactttctggaacctcaggcagagctcctggtggttcctccctagcannn

SEQ ID NO: 19303 - DNA, 444 bp, Homo sapiens
  misc_feature 1, 2, 3, 4, 5, 6, 7, 8, 9, 10, 11, 12, 13, 14, 15, 16, 17,18, 19, 20, 21, 22, 23, 24, 25, 26, 27, 28, 29, 30, 444: n = A,T,C or G
nnnnnnnnnnnnnnnnnnnnnnnnnnnnnnacttcaactaattcatctgacaatgctgttcatattcatgacgccatttttttgtttgttgttgttgttgttttcctaataataaagaaggagacttagggctgttgggctgatatatgtttgggggtcccacctccccgcctcatccgtacctcggccgaccagtgcaaatatctacccagttagaagagtaaataccatcttagtgttattatcaaaatattctgaactcatgaacctcctcagactgttgctgggactcccagatatcaatactctgagaaccactgatctaatgtttctttagtcagtttctatttgttctctagtataaccaagcataaaagtaatatacttccgcctctctctcccccaactgactttagtcaatagtacctcggccgccaccgcggn

SEQ ID NO: 19304 - DNA, 344 bp, Homo sapiens
aatagctaatgcatgcagggcttaataccgaggtgatgggatacttcatgctaactgggtgttccttagtgtaataattgactgcctgctcccatgtggcctcacagagtcatagcttcttgccccaaatgtttttctggttttctgtggagccatacagaaccataaagagaagttgttgagaaaccggtttgactttcaagtctgatgaggagcctggtttccatgagattttcagctaagttagcatatttttaaaaatttcaaaatgaacagaggaaaggttgacgatctttagagccttctgccaggctgaagtgttctgcatcttccctagacccggt

SEQ ID NO: 19305 - DNA, 1461 bp, Homo sapiens
  misc_feature 1, 1460, 1461: n = A,T,C or G
ngcgtccgccacccctgtacagccacagaatgaggatcttgaggcagggcctgagagagcacgctgcgccgtacttccagcagctgcggcagaccacggctccacgcctgctgcagttccctgagctgaggctggtgcagttcgactcagggaagttggaagctttagctatcttgcttcagaaattgaaatctgaaggacgtcgggtgctgattttatcacagatgattcttatgttggacattttagagatgttcttgaacttccattacctcacctatgtaagaatcgatgaaaatgccagcagtgagcaacggcaggaactgatgaggagtttcaacagagacaggcggattttttgtgccattctctccactcacagccgtaccacaggtataaaccttgtagaggcggacaccgtcgtgttttatgacaatgacctgaatccagtgatggatgccaaagctcaggagtggtgcgataggatcgggagatgcaaagacatccacatatacaggcttgtgagtggcaattccattgaagagaaattgttgaaaaatggaactaaagatctgatccgagaagtggctgctcagggaaatgactactccatggctttcttaactcagcgaaccatccaggagctgtttgacccacgcgtccgtgatgctggcttcccggtcaaagctgaggagtttgtggtgctttctcaggaaccttctgtcacggaaaccattgcacccaaaattgcaagacctttcatagagactttcctcaggccctcaagagtattgagtatctggaggaggatgcccagaagtccgcacaggagggggtgctgggaccacacactgatgctctgtcatcagactctgagaacatgccgtgtgatgaagaaccatcccaattagaggagctagctgacttcatggagcagcttacaccaattgaaaaatatgctttaaattacctggaattattccatacttctattgagcaaaaaaaagagagaaacagtgaggacgcagtgatgactgcagtgagggcatgggagttctggaacctgaagaccctgcaggagagggaggcccggctgcggctggagcaggaggaggcggagctcctgacctacacgcgagaggatggtgtgaccccatatatgattttctttaaggatggtttagaaaatggaaaaatgttacaatgtggcattatttggatctatcacccgtcatcatactggttctgtgtcatcacacacaccgacttagacaatggcggtgtcatctgaaccctcattatgaatggatatgggggggagcctgtttaagaaaactgtcgtgtgtccaataagctttcaaaaaaaaaaaaaaacaaaaaaaaaaaaagggggggaatagggggaagcttgaacaagaaaaaagaagggaatggatgggaaaaaaagatggtaagataann

SEQ ID NO: 19306 - DNA, 825 bp, Homo sapiens
  misc_feature 1, 818, 819, 820, 821, 822, 823, 824, 825: n = A,T,C or G
nagcctaaggaattttatacaatattttttataatttggggacactaaataaactgtgtatcatgtgcctgtgttttcactaccacctggcacacgaggtcaagtgtagaattttccacttgtggtgccattgctcaaaaaattttggattttgaggcatttcgggactcagatttttcagattagggatgctcaacctgtagcttccttactttcttaaacaacaagatgttccaggctcatgatgaacatttcttgcctcagccctggaaccagccatttttgtatggtgcctggtccctattagtggaagtggtatttagagaccacagtttaggtggattttcattgctaatgggatatactttacttctagcccatactacagggcagagctaaaaatgacacatttttagaaagaaaactaaatcataagttcatactggtttttccaatacaacgttacgtttttatgtaacttctttgcttgttttgtttttgtatccctttctcttatgctgcaactcttgatttctaaagatattaacataattatataattgatctgtagtgtatgtttaataatttcagtagcggtactaaattatggctaataataagacaactctatgcagtttaggaatttttagagagatgtacagttataacaccatgttttaaaatcacttgaatgccaggcttggtggcttacctggctgcttgcaatcccagcactttgggaggctgaggagggaggattacttgagcttaggagtttgaaaccagcctggacaacaaagcaagatcctgtcgctacnnnnnnnn

SEQ ID NO: 19307 - DNA, 811 bp, Homo sapiens
  misc_feature 810, 811: n = A,T,C or G
cactttcggtatccattgcctttcttgctagtgatttcatttctttttccacagtgcttatggtttccttcatcaaagtcatatttgacatttgctccatacgttcatcatcaagattatgaactgtacactccagctcctctatcctttgttccaggtgagccttctcattaaatgctgtctcttgagcaatctttagcctctcccttagactatctcgttctgtggtcattcttcgtaaatcagtaaaggctacatctctttcagtctccactcgccggagaatagcatgtgccgttgttgatttaggactcttacagcttttcatcatttctcgtcgaagtcgggtaatttcttcctgtgcctgttcataaagaaggaagatcttgtctctctcagatttaagaaccttgacattaccctgaatttctgccaaatggcgctcatatttttccagcatgcatttaagttcttcacgatctcttgttgttgtcttcaaaagttctacatcacagtttgcaccccgggcagttggtggatgggcgtcttggacttttagacctacttcgcatcatctttctcaaatgttgagcttcactcttatagtgatctttgtctgcttccaaagtcttgacaaaggaatcaagtagatttaagcctttttattgtatcttccaatactataatattattttgctggcaaatgagatcaatcttggcttcttcaagttccttgttggcggaatccaccacaaaatttttctctttttcgagttgctctgctagttggtcaatttaatcaattggacnn

SEQ ID NO: 19308 - DNA, 611 bp, Homo sapiens
  misc_feature 611: n = A,T,C or G
ggaaaggtgggtggggagagggaggcttatttgttgctgcagtgtaactaagtgaaacctaattcatatgactcaaactaaggtatatttggttagatctaggtgagttctactttagaggaaatcctggtaactgttgtttgtttgtaagttatagctgtaattaattttccctgtattcaaagcccccaaaccctgcattcagatactatgcatttagacttccttaggcaaagtcaaggcaacaagctgatgattctaagctattattcaaggagtatctaccatcataaaggtggtttagtcatatagataatatcaatcaataatacaggagatggcaaaaattttttgtgaagagccagatagtagctgagtatgatgacccctaatctcagcactttgggaggctgatgggagagggtcatttaagaccaggagttcaagaccagcctgggcaacattaaaaaactccatttctaccaaaaactttaaaaaaattagccgggtatggtggctcatgcctgtagtcccaactacttgggagaccgaggcgggaggatagcttgagcccagtagtttgaggctgcaatgagccatgatcacaccan

SEQ ID NO: 19309 - DNA, 280 bp, Homo sapiens
  misc_feature 280: n = A,T,C or G
aggtctcccaaagtgctggaatcacaggaatgagccaccacacccagccaaattgggcacaaatttaaaatttgacttttattaatgatatggtaaagagatctagcttggtcatgacacccttgtgttatacggtgacaggcaaatcatttaaaaatatctaaactataatttcctgtagttcacatgaattggatattctgaagcggacgcgtgggtcgacttgtaacctgcccgggcggccgccaccgcggggagctccaattcgccaaaaagtgan

SEQ ID NO: 19310 - DNA, 795 bp, Homo sapiens
  misc_feature 795: n = A,T,C or G
gagtcgacccacgcgtccggtttgctttgtggttggcatttttccctgaaaatcacttctgcaatcttcagtcaatttagaaaaatatgtgtgataatttatatgtaaaaataggtaacttttatgatactattttagtttataaaataaaaaatattaaggaaaattgtgcatttctttacctcatagcatttagttataaattagtctcaaaattactatgacactatttaagatatttgtttttcaatacttcgacccacgcgtccgcatttattaaggcttgtatatgttcaagatccagtgaagactgtcttgggcgtgtataattgatcttaaccacaaggctgagaagttatgtgcagggcttatgatgctacttccaaagtattaaatcctccagagaagcctgtagtgtgggatgcaaactattttaagtgtgaccatgaggtgtttttttgtggaccattttaaagccaatgataggttctaaagcaatctcaacctgagttaggtagaatgggttggttatctgcactctagcggcccttcatagctattgtattctggatttcaattcggcactttatgtattagctaaaaatttcatgaccagatcttttgaagtatacaaagtaaatcttcaaggtgatagtttatccaagtgtaaatgtgttgcactaggtcagcttggaattttgagatgacttttggcatcattgcatacatctggtttgtgtacctgcccgggcggcctcgagcggccgccgccaccgcggtggagtttccaattcn

SEQ ID NO: 19311 - DNA, 483 bp, Homo sapiens
  misc_feature 355, 468, 469, 470, 471, 472, 473, 474, 475, 476, 477, 478,479, 480, 481, 482, 483: n = A,T,C or G
aggtacatatctgcatatacaccattaattttacatcgttgaggtagccaaaactgctcgtaagtgggcttttattaaataatataatgttcttaatagaggaaaaaggaattgaatacatttttaaaaacaaaataacaaaaccaatccattgtcccacaaaagaaaatcagtggagacaaaagcagtttaatttgctggattcttttgtggcttattttttgagtattatttacaaaatgttagactaatttttaagcaatattaataataagcaacatacaactccaagaataatataataaataataaactgcggacgcgtggttcgaagcttgctgcgaaggggcccggncgctcgaggccgcccgggcaggtacccagtaatcacataaattctgcaatcatctggttatttagcttaactgttttttttatttgctgaatttgttgttgtaatttcagtcnnnnnnnnnnnnnnnn

SEQ ID NO: 19312 - DNA, 684 bp, Homo sapiens
  misc_feature 1, 2, 3, 4, 5, 6, 7, 8, 9, 127, 128, 129, 130, 131: n = A,T,C or G
nnnnnnnnnaaagacgaaaggaagtttttcagccctaagcggttattcctaaggtaagcaggctggaattgcaggttttgtcttggaaaattcttccctgaatgactaaaaggttaagattaacaannnnnagtggtcttaattttctcctttaccattagagtacccagtaatcacataaattctgcaatcatctgtttatttagcttaactgtttttttttatttgttgaagttgttgttgttatttcagtctttttcttattgggttgaccagacttggtaaaatctgtaagaaagttccataattatggggaagatttcctctgaattggctaaattcctgtagctgaaaaaaaaaaaaaaaacctgcccgggcggccggccgcccgggcaggttacaagcttcgacccacgcgtccgggaaattttaattaaaaataggtgaacattttaaatgacctaatacatatttagtccacattgaaactttggcattttgtcattgccattaaaattttgatggcattaaaatttgatgccattaaaattttgatcagtaggtagcatttttttcttagctacaattgttttttttaattataagtattaaaaattcatgaagatgattctttttgtaaaacagttttgcataaaaagtaagtctcattttaaagcaactacc

SEQ ID NO: 19313 - DNA, 2597 bp, Homo sapiens
  misc_feature 1664, 1668, 1670, 1671, 2595, 2596, 2597: n = A,T,C or G
ttactcccctaaaagctgtccatcacatttctctttaacaagttttccatgcttggttccttgagctactttagaccaaactttatgggcaggtttaaactaaacctgaggatggtagtttgttttcaagcatcttattcacattttaaaaagctcttcacaacctcttcccatctgcccatttgtcccaagtggaatagctttttttttataacttctgattgcttgattctttgtctttaaagccttcatttaacacccacgcgtccgatggtttttgcaaaaattgaaaatgcatcgatattacagttaattttttcagtgtgtatgtggtattaggcttagaactataacacaggaagtttttagagtatgtccactctggtttactcctttgtaagtattaatacctgataatttacatcctacagccctgcctttttttttttttttcaagtttgtcccagcaagtcttggccctttgcattttcttaatacattttagtacctgcccgggcgcgccatgggcgcccgcgacgacgagtacgactacctctttaaagttgtccttattggagattctggtgttggaaagagtaatctcctgtctcgatttactcgaaatgagtttaatctggaaagcaagagcaccattggagtagagtttgcaacaagaagcatccaggttgatggaaaaacaataaaggcacagatatgggacacagcagggcaagagcgatatcgagctataacatcggcatattatcgtggagctgtaggtgccttattggtttatgacattgctgaacatctcgcatatgaagatgtggagcgatggctgaaagaactgagagatcatgctgatagtaacatgttatcatgctgtgggcaataagagtgatctacgtcatctcagggcagttcctacagatgaagcaagagctttgcagaaaagaatggttgtcattcattgaaacttcggccctagactctacaaatgtagaagctgcttttcagacaattttaacagagatttaccgcatgtttctcagaagccaaatgtcagacagacgcgaaaatgacatgtctccaagcaacaatgtggttcctattcatgttccaccaaccactgaaaacaagccaaaggtgcagtgctgtcagaacatctaaggcatttctcttctcccctagaaggctgtgtatagtccatttcccaggtctgaagatttaacatatatttgtaatccttgtgtccactttgtgtcctattaacttcatacttatgaatttttccatgtcctaagtctcttgattttacgcttcataaaatcatccactggtcccgaatgactgcagctctttttcaatgctatggcttcccataagccttagtttaatacactggatgtttggattcctccagttatcggtgactcttcaccagggaagcctgtcactgcatgtaggccatacatagaacttgagcacttgaagctcagacctatggtcttgatcaaatcaaactaagaagaccttagaaataagctaccattttgccacagagcagcttataggtaatacactcttctctcagtgcagtgtacatttccacaaatctaagaattgccctataaacatagcaggattttgagagcttggaaaanattntnntcccatttttaaaattttccttgggggaaccaattgaatttctaaaatgccttaataggtttatgtagttgagtaaatttggttttttaattttggtaagcatcaaagttgattagagaggggggcactttttctggagaattctcttagtaaacacaaaagatggttacggtttcattagtagtatggttgtggggccataagttaaacagtgctgcctggtaggctgggaactgaagagactctgtggtattccatctcgggtgcctctgttgggcaatgatcaggcagccaaaagatttaaatgatctataataatttccaagcggtagattatgtggcattttatgtgctcaggcaataaatgtggtttaatgctggtagtgtcaaattttgaagtgttaatttggtcttagaaccttccagtaagtgaaatacaactagttttatcaccatatccaccagcaggcatggataattattttaacaatgctaatatttgagtttgcagtatattatagaatatagtccagttaatctttggtttcagtatgtctgaagagtacagtgagaggttaatttctgtcaagtggtacacttaaaggcatgtattctttttagtatgtaaaaatgaaatagtacctttgagtttaaatagaatggatttagcgccttgtagagatctgaaatagtttcttccactacattgtcgaatcatgaagcatttagttctcattcagaaatgtgccctaatatttagttgctttctcgggtaatattaagccttatctgcgttccggcaagtgggactgcggatacatatcaggggggggatcccaaaatttggggggggaaaaaattaaaaattgggtgcgcgcaatgggggaggtgtggctgggtttacacaatagtgggagagaaaannn

SEQ ID NO: 19314 - DNA, 454 bp, Homo sapiens
acaaagaacaaagggaagctaaggaagaaaagatagtcaataaaagatgtctcatctgggcttagtggctcatgcctgtaatcccaacactttgggaggctgaggctcgaggactgcttgagtccaggaatttgggcaagtaggaaattactgaacagctgctatcacagacaaatgcctaacattgtgaagtgctacacaggggaaggagacccacgctaagaggagagcatgcacccagacacagaactcagaggacacagttcaaaacacacatacaagaggcttaggcacctgtgggcgtgtgtgtgctcacagccagcaaaatgaaaaaaaatcccagctctgaaggagaggcaagtgcatggcttccgtacctgcccgggcggccggccgctcgtgatctagatccccggacgcgtgggtcgactcaagctaaaaaaaaaaaaaaagt

SEQ ID NO: 19315 - DNA, 512 bp, Homo sapiens
  misc_feature 1, 495, 496, 497, 498, 499, 500, 501, 502, 503, 504, 505,506, 507, 508, 509, 510, 511, 512: n = A,T,C or G
ncgcccgggcaggtcttcgacccacgcgtccgcacattttgatggtcagtcaataacttaagcagttaccaaaatactaggtatccaaggagcgagaggtgggcgagcataagaaacacatttctcatggcacagctctgccaaagccctgcagaatcatttacacataggtctttggttagtagcccctggcacagaattctgatcttaaacaaatattgtctataatcaagtagagcaatgcaattaaaaaaaaaaagcacaggttttggggccatgctgaaatcccagccttgctatttgctggctgtgtgaccgtggttccttggtctcattatgctttggttcccgtatctataaaacggacgtaataatgtctccctctcattattgtgaagtcgaaatgatgtctgtaaagtgcccaacacagtactaaagggctatttttttcttccctatgaagatgagatttaataaaagtgatattacaaatgnnnnnnnnnnnnnnnnnn

SEQ ID NO: 19316 - DNA, 263 bp, Homo sapiens
ccgggcaggtcaagcttcgacccacgcgtccgtttaagtaacattcagatttgtgtgtgtggagaggttgtagggaacagaattgtaggaaggtgctcacacctgtttttgtttgtttgttttatgtatatatggtgggtagaaaataaggattaatgaatgcagtaaggtatttgagcactcttgtttatcttgtgtaggtgccaaccaaatatttttatagagatgtggttaagcctcttggcatgttcaactgtgtacct

SEQ ID NO: 19317 - DNA, 463 bp, Homo sapiens
ttggagctccccgcggtggcggccgaggtagcttgagtcgacccacgcgtccgttcagatccgtttcagaaacgtgagtctctagctcaggagatttccacaactgtccttagtaacctgatcttattctcatgtttaaccttggcagtgggaagttcttcctggtatcctgcctaatttactggagttggcattaatgccatttccccctaaggcgtggctcttggaccagtatcacctgagaatttgatagacatagacccagagttactgaggcaggtgctctgttttggggaccagcaatcggtgctttagcaagttctttgggtgatagggtttggaaactactgctctaaagcatcatctgttttgactttgccatgcacaatctgaactcactcccgtgaggccctgctcctgatactttaaatcgtcctgtctctttttctgcctctctgtggag

SEQ ID NO: 19318 - DNA, 443 bp, Homo sapiens
  misc_feature 337, 338, 339, 340, 341, 342, 343, 344, 345, 346, 347, 348: n = A,T,C or G
ggtggcggccgaggtcaagcttcgacccacgcgtccggggaggacctaggcaacggcctgagactccgagactctatgttgaagatgcctggactaacctactgaagatacgtggttttaccaacagccagcaccaataggaagatatgaatgaagccatctgagaccagccatctggcagccaaactgccaactgactgcaaatgcatgaatgatcccactgacaccacgtagagcacaaatgagttgcctccactgagcccagcccaaattgttatcctataaaatcataaaaacataaacagttgttttaagtcaaaaaaaaaaaaaaaaaaannnnnnnnnnnnctgcccggggcggccggccgcccgggcaggtacccattaatttgctcagatatagcaggcttaatggttctatattttcaaaagtttttaagaat

SEQ ID NO: 19319 - DNA, 387 bp, Homo sapiens
actttttttttttttttttttctcttatattgaagtaaaatttaaaatttaatactttttattttttaaaagcatgtatggcatcatttcagtcttattaaattctctctgcatccattcacccatccttctttttgtgtgtgtgtgtagtggtctctgtgagagggttcattaatgtcaatcctgatcatttcttcctcaagagatgtcagtagatttgttttttttgctttggacttttatgaattgattgaatttttatgccaattatttttaaagtattacatagaagaacaaatggacagaaaaatttaaatgcaatcaaatcttgttgattttgaagtataggaaataatcttttttttattatactttaagttttagggt

SEQ ID NO: 19320 - DNA, 594 bp, Homo sapiens
  misc_feature 594: n = A,T,C or G
caagcttcgaccccacgcgtccggtttgggtggaattataatattttagataagatttaagaggattctaattctagctacttgataggaatgcgaatgatgataaggcttttagagttagataagagagagggctagcaccctgatattctgtaattgaaacagagtttcaagtcctttggtcaagtattacccttattccttcaggaatagtagatattttaagattacagataggttatcttatctaatttacctacctattgttgaaattatttaatttgcatttaactgtgttttcacacctgcccgggcggccggccgcccgggcaggtacttcataaacttcaaaaggaattccatggaattttaataattcattttccacagttgtctgtttatcatcactttcagaccaccagttcatttcattaataaataatagttctaatgctcatttattgctaaaactatcatctcttattaggcatatttccttcacaaaacactctagggggctaatgttttatctaataaggtatcaatgaaaaaagtgatcggacgcgtcgaagcttgacctcggccgccaccgcn

SEQ ID NO: 19321 - DNA, 942 bp, Homo sapiens
  misc_feature 1, 2, 3, 4, 5, 6, 941, 942: n = A,T,C or G
nnnnnnatacgataggctttttttcattgtttcttctgtctttttttttttttttgttttttttttcttccttcgtgtttatctgtcttatgtggttttcttctattctgttttcattcccttggtgtggtgtcgtattgtttcctgtcttcttgctgcttctgatctttttccgattccgatgttgcttcccgttaccctctgttcacgttgtcgtacgaggttatcgttaatgtcttacgcatgagttctgggatgaattcatcctccacgtcgtgcttatgctccagctgccatccataaaacagtttaattcgctaatgttccatgttggggagtgtcaacaagatacgatttaaagacagtattttccaatacaattaaagacacatacttttgtttaaaattaccagttcttcttgggagtgcaaagggagccttgatgatgtacaacttgtgatgcttttggcaggaattacagaacaaccaatgccattcaagttgtggagattatactagcaggtgaactcgtaaagagaagattctggaatgcctatatctgaaatcagaatcctagtagtttgtagtttgcctcttcctagaacttcaagagactcaaatcataggctacagatgtactttcaagtatatacttatgaatggaaggagaaaataaaagcacgaaaatgcaaatattaaacctttactggcttgggctatattccagtaggtaatttatttgactaacttaactttaacacgattaaatcccttcattttaatcaggtccattaaatttcattcattaaagctatacatactccagaatgtttataagacatttatacctatcatgtttacaaaggcataaattcagtcttcagctgcactacaatgcctcaatataatataatcacagtataaggaatcagaaattctcnn

SEQ ID NO: 19322 - DNA, 300 bp, Homo sapiens
  misc_feature 300: n = A,T,C or G
cttcgacccacgcgtccggaatgagtgagtgcagaactggcaaccagaagacaggaacaaggcctgggaatggagcggaaaggtagctgctatatatagttccttcagccagtaacgattagagccaatagccatctggatgatgaatggctcctaattgccttaaattacggcagttagctaagggtttctgttgctacatgggttaccgtaggccgctgcaccctgcataactgtcctcaggcctgcgtcccctgagtctcagcacttgggcctccacctgcccgggcggccgctctn

SEQ ID NO: 19323 - DNA, 575 bp, Homo sapiens
  misc_feature 1: n = A,T,C or G
ntccggtgaaagtacgtgatttattttagtattgtgaaaaagaataggctattgcatcttctgtattatggtttcctgtgaataatttaccatttctttctgttttccattgaactattcagtggtcggtgaagatggtaagccttatgtgctgatctatatactgtgccaacattaagtaatctcaaaacattgttttgtttaattcaaaacaagtggtaaattacatcccacgttttcaccttgtgtgttttttctttttatagtttcatagtccagcatatgccagtactcttgatgtcataagattagaaaatgtggttaattgtcatcaacccattaagttcttaaatgtcattgaatggagtccttgtcatgttacagaggagcgtaaaattgtggttaaacatttttttaaagattacatggtagagccacagtttgttatgcagaaggaaaatttagcaaatattattttgcttaatagcctttaaaaaatcgtataaatttgatttgtagttttatccccagagtcattagatttttccaaaaaaaaaaaaaaaaagtgcggccgg

SEQ ID NO: 19324 - DNA, 637 bp, Homo sapiens
aggtacaagcttcgacccacgcgtccgctcacttcatcctcccagcaacctattatgatccattgccacaccaacttgctgatgaggaaagtggggcttaaggaaattaaagagctgttgtgggacttccaaagcagaagacagtaggctttcagaaatttgataaaaatagcactttgcatttcttgaatcttgagctaaatggaaattaatactaaacattctccactggtaaaatagagaataaggatattaacagtaaaagaaaagaagaagaaaaggaaatgtgcttccacagatttagaaacataagtaacaatctaagttaaggctttggcacctgcccgggcggccggccgcccgggcaggttcaaagactaccaaagtatgtatttgattttcacatgcaaacaacttaaaaccttataaatctcatgtcaactctgcatgatgccttgaaggaaatgacatacaaagtttgctaactgtgcaaaatattaaattgctaaaacattttacataatgaaataatacatgtaaatgttgaagttgacacatgaaattaacatggcataagaacttatcacatttcagatattttctttagtaacaagtttttgtttttatagttcctggt

SEQ ID NO: 19325 - DNA, 571 bp, Homo sapiens
  misc_feature 1, 2, 3, 4, 5, 6, 7, 8, 410, 568, 569, 570, 571: n = A,T,C or G
nnnnnnnngacacaggaagaagctaaggccagaggcgtcaaggaactcgccatgatcacacagccagtaagtgggtgagctgggattcaagccctggtggtctggacccagagtcgatgctcctcactggttacacttttggagaacaggacagatcagaagcagcagagactccgactcagaggctgccatctccccgagggaacagcccagagtcctctaatctcccactgtcctggtcaaacatctccctcgtccggatccttctaacgcaggagtctcagacgcaaatgccggcaagggccaggcaggtgatgtaagatgcgtggagcagatgccaagccacagggagtggtggagactggggtgaactggaaagcacctcggccccacgtacacagagcgccgcncactcctctccaccaagggaggatgggagactgggcctagagtcaccagatcttcgtgttgttcaagagcagccagaaatccaagtttctatgtgagaacctttgtcaagctggaagcagagtcacagtttttgctgctgcagcatcgaaatctaccnnnn

SEQ ID NO: 19326 - DNA, 496 bp, Homo sapiens
caatctttaaactcgtgaggaaaattaagtctaataaataattttcttcttagccaaacaatcaaatgtgaagctagaataagcattttcaggtaaaaaaaaaaaaaaaaaaagtgcggccggccgcccgggcaggtacataatatacagaggtataatctgtaacatcaataatgtaaagtggggaagggcaaggtggaaaaggagtagaatgcttgtatgtgactaaaattatgttggtatcagtttaaaatatattattataactttagaatgctatacccattcccacagtaattcccatagtaaccaaaaagaaaatatctgtaggatacacacaaaagaaaatcagaagtagatgcaaacttgtcactacaggaaaaaaaaagctatcaaaatagaaaacaataatggagaaaataagacaccaaaagctataagactcacagaaaataaataataaaatggcaaaaagaagcggacgcgtgggtcgaag

SEQ ID NO: 19327 - DNA, 420 bp, Homo sapiens
  misc_feature 1, 2, 3: n = A,T,C or G
nnnaccattagagtacccagtaatcacataaattctgcaatcatctgacctgcccggggcggcccgaaccggccacccgggcaggccctccagctcctctatcctttgttccaggtgagccttctcattaaatgctgtctcttgagcaatctttagcctctcccttagactatctcgttctgtggtcattcttcgtaaatcagtaaaggctacatctctttcagtctccactcgccggagaatagcatgtgccgttgttgatttaggactcttacagcttttcatcatttctcgtcgaagtcgggtaatttcttcctgtgcctgttcataaagaaggaagatcttgtctctctcagatttaagaaccttgacattaccctgaatttctgccaaatcggacgcgtgggtcgaagcttgtac

SEQ ID NO: 19328 - DNA, 439 bp, Homo sapiens
  misc_feature 1, 2, 3, 4, 5, 6, 7, 8, 9, 10, 11, 12, 13, 16, 17, 436, 437,438, 439: n = A,T,C or G
nnnnnnnnnnnnnccnngcccgggcaggttactttactgctgagccacttacaattatttctgaaaaatctcagagaactgaggatagatcagaaaatttaaagaaagcaaataccaaattttcaaaccaggataggaagtgaataccttgtaaatacactttgttaagtgatgataattctgagtaaaaatttagaagattttgagaaaagcatttgaacttctaggggccaataaaataccatgcagaagaatgtttaaaaagtcatgccaaatttgaatccatttgatcctcaacctcatcagatgttatatgccaaactacttattttggcttagataataatcatatagaatgaaactttccacaaatagactgtgtcagtggctggctacttctaacaaggtgcccggacgcgtgggtccgactcaagannnn

SEQ ID NO: 19329 - DNA, 1687 bp, Homo sapiens
  misc_feature 1, 7, 8, 11, 25, 26, 29, 56, 65, 73, 78, 95, 99, 102, 134,147, 167, 168, 184, 187, 194, 204, 207, 217, 225, 229, 231,242, 246, 251, 257, 288, 298, 299, 303, 306, 319, 328, 330,354, 359, 373, 386, 388, 407, 414, 452, 455, 496, 504: n = A,T,C or G
  misc_feature 512, 585, 589, 1687: n = A,T,C or G
naaggannccnccccccatgtgggnnttnttggcccttttaaaaaaccaggccccngtttagggnccaaaccnaaccncgagttccccaaaaaangggngcncccggccctaaaaaaatttcccgccaaggggnttggggttccccnttgggcctttttttattggnngcccccttgtgtgggnaanccctggngccttggganccntgggccttcnttcccccnagancntttttaagggngganccttnggcccngttaacccccctaaggcccctttttaggggnggccccttgnncccnagngttgggggacccnttttgggcntntttttgccaaacaatctcctaggnggaanccttttggtgagantgacctggccccntnagctccccttttaggaganctttctngacgctctgaaccgctccgattttggtgaagggggatntcnaccggtctaccactgctactgcgagatgggctggggggatntactgtgncgcctctncctttccttccctgtcggagtacactcatctttttccttcttgtctttggagcgagatccaatttttctttancttncttgtctctttctcgttctcttctaactctttctctttctctcgttgaagaagtttatctctgtagtgttctacttgctccgaaaactctggcctggttttttaggtcttttcccagattccaattcatcctgaaacttcataactttgagctccaatttcacgaagtttggctcgtttttcctcactgcatttccagagtacttagagaacttagactgcagtccatttccttgctttggattgggattcagagtacaaatggatgttgcttccagaatttggcaatttggagtcatcttgttgcagctgcacttgctgctgctgcatttgcatttgctgcttctgtgcttgcttcagctggttcaaacaagtcccattacaatgttaacagcctgcgcttccaattcagattcatccacagcttcccattttgatggggcaactttaaatataggctcattcttttttgagtcttcagttgcatccaaaggcactccatcaagatcatcatcaagactttttatagggactccatcaagatcatcgatgggagtagcatcaataggaattccatctacatcttccagaggtgcaccatcaagctcttcctcgatgggggcaccatcaaggtcatctggaacatcctatggaaatgtgtactattataacattttcctttgcttgctgaagtcacattgcttgtaagattaatttgtaatccagtacaagccaacataactggatacccacaatctgaggtacaatgtaagaacatattccttcctcccggttgccaaagaagcagtcagttgtgcatttatctaatatttaccaagtgcgtcaagcttcgacccaccgtccggcaatgatgagcaaaaacaagtttggtccccctgttatagagcctggtaaaggtttttgttgttgttttgcaggggtgggggaaccaggaaatcagatcatcacaacaatatatacttatctgtaactatggtaactgctacagcaaaagggcgtatcatactattagcatactaagtttcacttaaagaggtcagagcggcctcgagcggccgccacccggtggagctccaan

SEQ ID NO: 19330 - DNA, 334 bp, Homo sapiens
ccgggcaggtcaagcttcgacccacgcgtccgtgataacttctcctaagtgccaggcattgtattacatgctgggagcacaaagatgaataataacaataggttcacagaaaagatgaattgattgagagaaaaagaaccctccaggagccctcagcgtagtagggggttggtgttggagggtggaggaatggaaaaggccctgaaatgcaggcagagaaatgatgaaacaattcaggggctgtggtgaggttaaatgaatatctttacagcagcctcgaagactgatcaggttactataccctctcttctgtccacgtgcatttcaaaaacct

SEQ ID NO: 19331 - DNA, 226 bp, Homo sapiens
acgatttaaaatctcctcctcctacagcggtcgagtattgaagcaggtctttgaggatgggcgggaattagagtcaccaaaggaggaataccctcacagttttctgcaagagtctcttgaaacaatggatggtgtttatgggtctggggaagaccccacgccccagatgtgctcccctaagctgactgctcataggatcagtgtgtttagagagggtaatgcctac

SEQ ID NO: 19332 - DNA, 432 bp, Homo sapiens
  misc_feature 1, 2, 3, 4, 5, 6, 7: n = A,T,C or G
nnnnnnngcggcatggaaaggcaattacccaaatgactttttaaaagtatgagaatttgcctggctgaacgttttttaattaatgccgtgagttaacattaataactattcatagcttagtgagctgggcttgaggtgggtttaggaaacatttggtatctctggcagggacagatgttgacctggccggtcggcagcttttacaaacctaaggacttcagggtccggttgcgcatgaggaccggggaggacagagctgtttgcaataggtgtgggcttttatagcattgtgagcatttcacgttagcgtaagtgttgctgctgtgcaggtggtctctggggcttacaatcttccccaatgttcttccccacccctcccaccattctggtgaacaagcctcttgggattctttgaaaaaaaaaaaaaaaaaa

SEQ ID NO: 19333 - DNA, 262 bp, Homo sapiens
aggtaccctaaaacttaaagtataatagtaataataaaaaaagaggtgcttttctcctaagtcaacattttagaggaaaagagtcaattcaagcaattatcacatatgtgtaactgaagcacatatgtgtaacttttcaagagtgattagatggtctgttgtctttgaagtgatagtcaaatatcaggtgtgttctagggaggttgtgtaagacttttgcttgtattctcccggacgcgtgagtcgactcaagacctgcccg

SEQ ID NO: 19334 - DNA, 255 bp, Homo sapiens
aggtcttcgacccacgcgtccgctttcttttgttgttaaggacccatgacctgcagtttccctaacattcatttttatacagggcagaggtatgtgtgcgagctcagataccttaaattcatatgcctttaatacaatccaggcagatttctaaatgagggatgcttccccacaaatggagagtgaaagtgggccagcctaaaaggacctccatagcactgtgcatggccagctgtttgtggctgtacctgcccg

SEQ ID NO: 19335 - DNA, 501 bp, Homo sapiens
  misc_feature 1, 500, 501: n = A,T,C or G
ngcaagcttcgacccacccctccgggggagacccctgggctagggagccatttgcaagtccctcagatggcctcaggtgtgggtcatgctccactgcagccatggttactgggaagccaagtggactccatggggctccaagcagtgggagggagctcctgggagacacagtgtggcccagatgccctggtcatggggacatccaagcacaggtgagaaacttgggcagggagggtgcagaggaaatttggaaatggctgagaggctggactcaaggtctcttgggcttgaactgagctcaagcagtccacccacttcagcttcccagggtgctgggattacagtcgtgagccatggcatccggctggactcaaggtctcttgttccctgatcctgggcttggcatggagaagggaggaagctgaagggggcaggtaaaaagatgcctacctgggcactgtagactaaatgaaccctcagactgtgaaagtctcagaaann

SEQ ID NO: 19336 - DNA, 1493 bp, Homo sapiens
  misc_feature 1, 1491, 1492, 1493: n = A,T,C or G
nacccacgcgtacgtgttaatgtcctttttgaatggaaacatgcagccttaaatgcacaaattgggaaagaagaaaggctggaatatcagtgaccctagaccgcgcgtccgattataccctaaaaaagtagaaagatggaataattaggagtaaaattagtgaaatggaaagatatgttatagaaaggaccaagaaacgcaaaagttggttatttgaaaagactgaaaaaattcatgaacctgtgaaaacagtggtcaagaagaaaagagaggcatattttgatctctgttttacatgttactcaatgttcattgctgcctcccttgtccataaagtgcctttagtgtgtatgttactttagattatcttggtgtcatcaagctttactcagcaaagaaccactttgttgtctactttaaaacatagttatctttaaaagaatgggtatctttatagttccatattaatggcgagaaactgcaggtaacagtgccttaccagctggttttgctaacttttctctattttgtaggtggtgtcgggtttgacatcaactgtggtgtccgcttgctaagaaccaatttagatgaaagtgatgtccagcctgtgaaggagcaacttgcccaagctatgttgaccacattcctgtggggtggggtcaaaaggtgtcatcccaatgaatgccaaagacttggaggaggccttggagatgggggtggactggtccttaagagaagggtatgcctgggctgaagacaaggagcactgcgaggagtacggaaggatgctgcaggctgaccccaataaagtttctgcaagggcgaagaaaagaggccttcctcagttggggaccctgggagcaggcaaccattatgcagaaatccaggttgtggatgagattttcaacgagtatgctgctaaaaaaatgggcatcgaccataagggacaggtgtgtgtgatgatccacagtggaagcagaggcttgggccaccaagtagccacagatgcgctggtagctatggagaaggccatgaagagagacaagattatagtcaatgatcggcagttggcttgtgctcgaatcgcttccccagagggtcaagactatctgaagggaatggagctgctgggaactatgcctgggtcaagcgctcttcatgaccttcttaaccgtcaggctttccgccaagggtcttcaaacaacaagccctggatgaactgggacctacatgtgatctaatgaaggttctcaccaacattggcccaaaggggggcagcatggggggggcggaaagggaacgggactgtttgacacacgagagggggtcccccggggtcctccgtaaaaccctccaggggtggaccaaacccggagacgcagggcctggtgggccaggaaccgggagtctcacgggggcaaagggacggacacggaacaatggaggcgggcgtgccacaacacaatatacgcggcaacacggggaagcgcnnn

SEQ ID NO: 19337 - DNA, 751 bp, Homo sapiens
  misc_feature 1, 2, 162: n = A,T,C or G
nnagaggatccaagctccaacaagaacaaggaggcttctctttttttatttgaatatctaaatgcatttaataataataattatttaatttcagagttcactcttgtgccaggctgagtgcagtggtacgatctttggctcactgcaacctccgcctcctgngaggtacgtcattgttttaaacccgacccacgcgtccgattttactctgtgtattcgtttggtgggttatagtttaccaagttgtccaaaatggataattcatgtgagataggcaagagcaagtgttgtatcccaataccatttggtgaaaaagttgaacttcagaaaggataagtagtttgccaagatcacctgtcaacctgcatagtcaaatttgagatggaactcagctactccaatatctgtatttgcagaataattctgttgtgtttattttgttggtggtggtgtttttgagacggagtctcactctgttgcccaggctgcagtgcaatggcacgatctcagctcactgcaacttccacctccttgcttcaagtgattctcctgcctcatcctcctgagtagctggaattagaggcgcctgccaccacgcccagctaatgtttgtatttttagtcgagactaattttcaccagtttggccacactggtcttgaactaatgatgtcaggtgatccacctgcctcggcctttcagtgtgttttatttttaaagcagattactttattgaatagtttgtgttgggt

SEQ ID NO: 19338 - DNA, 527 bp, Homo sapiens
ctatagggcgaattggagctggaccggggcgcccggccagcaacacctggtatgccagatgagaatgacaggagccatccgcaagcagttggcggctttcttagaaggcttctatgagatcattccaaagcgcctcatttccatcttcactgagcaggagttagagctgcttatatcaggactgcccaccattgacatcgatgatctgaaatccaacactgaataccacaagtacctgcccgggcggccggccgcacttttttttttttttttacctgaaaatgcttattctagcttcacatttgattgtttggctaagaagaaaattatttattagacttaattttcctcacgagtttaaagattgcttcagatcttaaacttctaatgaggaaagctgagaagtccaatgccattctgattcttgcaacttacaagtagtctttttttgtctagacgctttcaggaccttcttttttcctcagtcagtgtatccaaaccttcacagtgatatcttttgggtacct

SEQ ID NO: 19339 - DNA, 488 bp, Homo sapiens
  misc_feature 481, 482, 483, 484, 485, 486, 487, 488: n = A,T,C or G
actctacagcatcctgataacagcctctgccctggggaaacagactgtgaccatgcatttctagtccagcatatcctatcagaagaccaaatggcttcatcaaaaacagagtgacaacctcttctctttgcctcttctgctgactctgttaacaggcagcattggggcaggagagcctgcaggcctttcacggctgcttgagttctcacctgtttgtctgagctctgattcctctgccctgtaagcgtaaaggagatgtgctgagtggaaagacctctaaacaggcagccaggaagccagatttcaggtccatctctgcctctaactggcagctttgccttgggtaaatcatcagtgggcaatagtttctctcctgtaaaaggaaaagattgggtttagattgtttctgaagttctctctagatttaacctggaaggagttgaaattgctaaccttactcttaactgcaccattgcccagnnnnnnnn

SEQ ID NO: 19340 - DNA, 366 bp, Homo sapiens
agggcgaattggagctccacgcggtggcggccgaggtcttcgacccacgcgtccgtttacaatatggtgacaacagataactgtaaaaacttctttttcaaatagaaccagcaggagcatgcatggaacacatataccaaacatctttctgataacattaaacatttttaaaagatgttaaatgttcttttcattgtggtgcttcagattcctgattctagaacttgtgtgtgtggaacctgtgtgctaactattctgttggaatttaccagcaaagaattatctaagaattttcaaactaaatgatgggggaaggaactaacatttttgcagtccctggaaatgtaaaatgttgtacctgcccgg

SEQ ID NO: 19341 - DNA, 731 bp, Homo sapiens
acaataaatagcattcccacggtgaccacaagtcttggaatcagttccaggtgtcgtcgtggccgttgacaccgctgccttctgacggtaaatgtattgtagaattcatgttgttatcaggcttcagtttcctcatctctaaaatgagaggattggataagttagtagtttctaatttttacttttaatcagtggcatctcccatttatttttcatttgaaataaaacttttgaattttatcttctacctaaataacatattttgttttatgtttcaagatgaagctcacactgagttggaaaaaaggaaaaagcaaaggatcaaagctgggggaaaatactggaccatgtgcttcacctcatggtgccaaataaagagaaaatggggagaagatagggacagataaagatctatttgctcggattgtgctctcatccttggcaacatgttgacaatgccctggaaataacttgtttttcttgcaacatttctccagtctgattggtcagcctccggaagatgtggcattttgtaactactagttttctcatatgggtttagaagaaattaaaaatgaagccaatacccaaggaagaaatgaaagctggccattggaggcagatcattccagcagagtgagggcagccactgggataatgcgtggtccaggattacacaggctgactttgccaggcccttgtttccggacgcgtgggtcgactcaagctag

SEQ ID NO: 19342 - DNA, 1251 bp, Homo sapiens
actccagaattttcctttaatatttaggactccaatctttacttacaaaatagcttttatttacgtgcacatgatcgtggtttcaaaattttctaagcactatgctaaatttgatcatcaaaacataacagattcccatcttacaaacatagttgctagttgaatgagtaaaagagatttcaaatttcaattcaaggaggcatgtctaaaagaccagaccattcatttgatgaaattgtaaatgccgatcatccaacttaacaggaactgcacatttgttcctttctagttagaaaaaaataaaatgttgccagttaatagagcagatctctctgtggaaatatgtagccgaggttcgagttgtttgcaaataaaatagaaagctcttctgtcttctctttgttaacagtcctcagaggatgagcaggcttttgttagcaaatccggctccagctttgaaacccagcaccaccacctgcttcactgcctggaaaaaaccacggtaaggagacagcatgactgccttcccttgctctctgacagtaattccatttgcttttgggcatacttaatgcttccgagcgtgatttcactgtctgcattactggaattcatgctaaaaaacaaacaaaccaaaaccccacactatttgaaattactttgaaagatgtaatgacatttcaatttggaaagtattttagattcttatttaaaatgttttattcttagctgctgtcttaactctagtctaagaagtcagttaatgcagatgaagagtggtcttccaatagtaaatcctacacaatatcattttctgtgattcttaaaatgcgaattagacagaaaaaaattaatggtgctcgagggtccctagcatctagatcaagagaatagcaatagcaataacaaaaaacagagaacaatggaatataagcatttgtttcattcacaaccataatgaatagagatagataatagaaactattctcattagaaaaatgactcatgtaatcactggtatgcccttgggtgctaaggagtgagtctgtatttctccacttacaagctcttgtttggacctcctcattggcaaatctaccaatttcttaaccagtttgtaaataggagtcataatctatgataatcacagagcagaacaaaatcttcaccatatttggatcatgtcagctcactcactctcgggtgacacatgatttgtattctcagttccaaagtattgcctgttcatgt

SEQ ID NO: 19343 - DNA, 219 bp, Homo sapiens
ggagctccccgcggtggcggccgcccggccaggtacagaaaggacaaatacatcagtagaaaagaagacaatataagggcagattgaaatatatacgtgaacgtcacaaagaccaattactgccatttcaattcaatgaggaaataatgatgtatttaataaatagtgctagaatgctgcattatctgtctaggatgaaaaaaaaaaaaaaaaaaaagt

SEQ ID NO: 19344 - DNA, 535 bp, Homo sapiens
  misc_feature 1, 2, 3, 4, 5, 6, 7, 8, 9, 202, 203, 204, 205, 206, 207,208, 209, 210, 211, 212, 213, 214, 215, 216, 217, 218, 219,220, 221, 222, 223, 224, 225, 226, 227, 228, 229, 230, 231,232, 233, 234, 235: n = A,T,C or G
nnnnnnnnncaggtacccagtaatcacataaattctgcaatcatctgtttatttagcttaactgttttttttatttgttgaagttgttgttgttatttcagtctttttcttattgggttgaccagacttggtaaaatctgtaagaaagttccataattatggggaagatttcctctgaattggctaaattcctgtagctggnnnnnnnnnnnnnnnnnnnnnnnnnnnnnnnnnngccgcccgggcaggtgtacaagcttcgacccacgcgtccgatttccaagaaaaatgacttttgatagcaaatatctaagaaaacacccaattttataccaggaggaatctaattttatatagctgttcttggcaaaagtaaataaattcaagactttaatgaatgggcttagactttagtttctagccaggtctggataattccgatttgagaatagcaagaaaactcatcgagttaatcataagctcacttgagaagatgtagatttcttctacctcatactattaggagaaaatacaa

SEQ ID NO: 19345 - DNA, 3491 bp, Homo sapiens
  misc_feature 1, 2, 3, 4, 5, 6, 7, 8, 9, 10, 11, 12, 13, 14, 15, 16, 3316,3317, 3318, 3319, 3320, 3321, 3322, 3323, 3324, 3325, 3326,3327, 3328, 3430, 3431, 3432, 3488, 3489, 3490, 3491: n = A,T,C or G
nnnnnnnnnnnnnnnncggttcgtgtgtgctttctttcctgttcttcggctgagtggtcctcctgtgtcgcggtggccgtgtctttgtttgtcctgtcccgtttctcttggttggtttgctctgctcggtctctgcggtgggtgctgcgggtgcgtttcttctccttggggtccgttcctgtgccgtggcgtcttgggctggtctgtctcctccgtgtctttgtgttcgctgtctgtcctggtcgctcttgtggtcggttgttgacgtttctttcgcgttggtgtcgtcctttgctgtgtcgttctgcgctgtgcggcccgcgggggtcttctctgtccttcgttgctcgttcgtcgttgtcgtctgtcgcttgcctctcgctgcgccggcgttgtgtcttcctgttcgcttagtggttcgttggcttttgtgtgtgttgtgttcttggcctgggtgtgtgctcttgtttgtgtctgtgcttgcggtggcctcgcttgttcgctctatttcttcggttcgttgttggttctcttttctgttctctttttgttccctgtgtgtgtgcctcgcggtttctttttgttcgtttgttttcgtgtcgtgggtgcgttcgttctctgtgtctctgtgttcctgcgcttgtggtgttgtggtggagcgctgtcgtgtttcgtgctgtgtcctggtggtggtgtcgcgtcggctgtttctgcgttgccttctcttttttttcgttttcttgtctttttttgtggtttttttttttttttttgttttgttgggtttttttttttttttttttttttttttttttttttttttttttttttttttttttttttttttttttttttttttacatgataagattatcttttattagagatcttatattacatattcccaaaaagatataaaatcttccaagagaaaatatcaaaacctgttgattccaaggtgaacaaaatgatcaaaatgaaagcaaacattttcttccagacaaaggaatatcaaaacacttcggcacaagtacaacaaaggcatgggaagatcatgataatgttttacatcacattttacagcattttattttaatcagtatttgtagaaaacaaggatgctgagttcttgaacactgcagtcacaaactcaaactaaaatttccaaaaaaaggaaagaaaacactgaactacttggtcaactgaacatctgtaataataaatgtaacgaaacctaaccaaataaatatgccactgagatcacaactgaagtgtatggtttttagtgtgtgccagagacattaaattatttaatcagtttttgactacaacccaaagcaaagcatcctctctgtttccctgatgatttattctaaaagtaaccttaaaaagcagaaacttgctggttaaagagaatttctgctttacctgtgaactgctggtagcaacacaagctgaataaaaccccagactgacatgggacagatccatcgcaaacaaccagaagtggcaaaaccactgttattgcatcaagattttttttttatttcatctgatcacaatttcgagaatgattaagcacacccacttaaccacagacaaactgaactcccacaggaaggttatacatttaagatgcaatgaaaatactgatctcattcctgggatttgcttctggcaaccctaacatctgtagatgtccacaaaaaggaagtcctttttctttttttagttttttcccaaaatatgtggaagaaaacttacggtacatgtttattgcatgaaattaccccttgtaatatctttatcaacactggtattgtttccttaattattaaaggtgaaggagtttatgaatttaacataacaataatcttaggagctgcatcttgagtgaaaatccagatgataatcaaactaaatggtgaaagagaaattgggtttttatttctctataaagatgttggaatgacaagaggtaaatggaggttgaaagccacagaatatgaaatcaattatctcaaagagaattttcaaaactgtacatactcaaagactcctttctatgctaaaattgaatagtctaaatgtcgctattattttaatgttaaggaaacaataatcccaaataaattttattaaaagcactgtaatggcacatgggctcagaacttcactttaaggttagcacatacaaaagttgagaactgaatgaacaaacatattccttagtaagataaaccatgatgagctacataaaagtgggtttcaaaacaagatcaattttaaagcattctctctttaatatagttaactactgtgaaatggaaacagtagctggattttgcattttacaaaatccttgcttcaagttgcagtttccttggcagcagcacattttaattaacaatattttccttccttgttttgttttctgacatctcagtacattcaaatagtcaaaatgtttagagtaacatcaccacaaatttaatgaaacagatcagaatgtggccagcattgtcaggcaaaaattacacaatttatgcgtcatagaaagtacccaccctctcccagaccccacaacattcccccttccccaaacagtaatatggacactgatttaacaagacttataaaaaaataaggcacatttattttgatatggtaattttaaaatagaaaccccttctcagaacacctgtattcaaatgagctgtgtaaaaagacaccttgtggtacctaaaataggtttatggtacctatggaattgcttctattttagtgaagatggaataaattgcacccatcccacattgtcaagtaatgaaaatatgcctctttttctactgttgaatgattcaaaatcaggtatttctggaaatactcagaaagggtaggaagggaaggagaaggtcaagaggtacatcagaaaaaggtataaaaatcatctacgttaatcataagggtggatggattgcacttttccacttatttcaacacataatttttctaactagtatgaatgattgcaaccattttggccattagcttttacccacaaacattttattccatttcagccaaataggtgtttttgtaaaactgatgatcaacacacagatacttttaagaatctcttcgcaacccccaacacagacataattagttagcatttaacctgagatacaatctgttgagaggctgtctttaaatatttcttcatttgttgcatcaattcatactgatggtggtagttcatgggagaaagtttaaaaaaaaagaatcttgattgatagcatggcttttttaaaannnnnnnnnnnnnactgtactggtaaaagaaaaaagaaaaaacccacagaatcacagaattcatgttctcacagtagccagaagctaaaataatctgcttctttattgcacgtcnnnccaaaaaaggataaaagccaaaattctcaatacaaatgtaaaagtcaggttcacgnnnn

SEQ ID NO: 19346 - DNA, 446 bp, Homo sapiens
  misc_feature 438, 439, 440, 441, 442, 443, 444, 445, 446: n = A,T,C or G
gattcagcaggtctggggtgggactgagagcttgcatctctaacaagctcccagcgaggctgatcctgttgctccagggaccacaccttgagaaccactggttgggcattgatgaggtcaaccaggagaagcagtgtcccctagaactggcaggagagaaaggacaaggctaagaaacagtgaacaggagtcaagtaaatgcagctgccaacaggcgggggtccttgagttcacattcttggttccaggtgacgtttcctgggagtcaacaacccttctcctatgaaaaagaaaagggccagacacagtggcacacggctgtaaccccagcactttgggaggctgaaagcgggaggattgcttgagcccaggagttttagaccaacctgggcaagagtgagactgtgtctcaaaaggaaaaaaaaaaaaaaaaaagtnnnnnnnnn

SEQ ID NO: 19347 - DNA, 267 bp, Homo sapiens; identical to SEQ ID NO: 582

SEQ ID NO: 19348 - DNA, 2273 bp, Homo sapiens
  misc_feature 962, 971, 978, 990, 1015, 1018, 1028, 1043, 1058, 1340, 1435,1644, 1782, 1783, 1804: n = A,T,C or G
ttttaaggtggttcctatggaatctggaatgagtgcagagctcctacccacacatgactgccccgccatttcatcctaggcattctgtgaaggagattggttagtccaaacttgctaacatacgaaaattcacttggaacatgatgagagatttcttattgaggccaagagatgtttccctgtcccagaggaaccattaggagtcgcttttagggtattcagctttgttcatgaaataaggcatctctgagaaagtggccccagggagagaatggaggactgggaggagaagcattaactgagctccaagggtgtgtgggcagagagcttgctatgtgaactcactccttaagaaaatggaagagaaaaagagagtgctagttaaaaaatcgggatgttttagtttggatttagggttttgatacttatgttgaaatactaatgtttctgatcaataaaatcaaactcttaatataccgagtaatgaaaccatagtgtgattgcctcagaataaattgagaagtccaacttcctagttttgtttaattagtttcactttttctactctccccagtatgctagaaatgggaatcgtggcctggaggataagggaaaaaaattggtttaaggaaaggtggaatttttggattaggaaatggtccaggaggggggaaaaaggaggaaattaggaaaaaggtttggcaaggtaaagggttttagatattatggaaacaagaaatggaaaacaggatgatctccatgagaggccttgatcctgagagtaaaaggcttgtgtagataggttagacaatgtcctctagaaaagagaccagggataagtccaggtttccaggaaaaccaagaagcctgcgggtagctgaaggtagagtgctagttgttcatcttaacttacccaatgagctacagagaggacttagcatctgatgtcatcagctttgccnggagagtgntcacggngggtaaagctcnggtaaaggtgtgccttctcagagantgnctccaagcancagagaccacctcancagagaccacctcancagactcagcccagccatacaaggtgccaaagctcctccagagggctgtcttgggcctttgaggcaattgatctccagaaagagtcagaagtcattccagtccaggcccaggtattcagatggtgacccagcaagataatagtatcttgagcaaataatagtatcttgagtgcaaataagcaggaagactgtccttcacaaaaagtggggttacatgattttcagagcctttttttcagagttgagcatcttttcttttaaaagaaataaggggcaagaggnccaattttattccttgaggaaaaatgacacacccttctcccaaaagaaagaaaactctctggccccccaacttcaacactaatttggctccctgnagaagagagaaaatattatttctgtctttattgaagagaaatgggcaatgccaatgtgaaggttactagtcttttttattttctattggtgaagactaatagtgcttatatagaggagattatatatttagagggcacaagaataaaaggggagggataaggaagacagcagtgtgatgataaatggtaattaataaactttgtctgtntcaacaatagggaatggtggggactgtggcaacctgaagcgcccctgttccacccacagtgggtaattttccagtcgactgtggccatgaagtacttcctgatcttcccatttttcaagaaaagctgacaatctgganntttatatgatgaattctgatnttaaaaaatattggcaacaagaacgaaactccgtctcaacaacaacaacaaaaagtttggtatgtttctctcaagaaaaaagcatggtgagtccagacagcagcaaaagcttttgtgaaaaccaattgtgttcatctagatagtaagtaactcctatttttactgttaattttttaaaagagaatttttccctgtggaaactccctgttagtacgtcctaggggagaaagcctgtggaatatggtggttattgatggcgttgcctttgtttcatctttgagtttgccctttgtgggatctagtgggataatgagcactgacagaactcttaacagcgtgctgtatttttgacattgaaaatgttaatgacttgatttgtacataacctctggtaactaggtgaaagtagatcacagctgacatttacaaaatgtttttgtaccttagaatttctgcattaaataaaatg

SEQ ID NO: 19349 - DNA, 979 bp, Homo sapiens
  misc_feature 1, 2, 3, 4, 5, 6, 7, 8, 978, 979: n = A,T,C or G
nnnnnnnnggttaaacctgaatgtgacgccaaagacgcgtcccctggaccacactagtaagggaccgctctgcctgcagcgagtcggccattggaccgccgttaccacatgtgaaaaggattgaaaattaaagcaaaagagcaaccaacaaaaactaagttaacacttacccagtgcagtaagggaattgtaaatacagcctgctaagaggtctgcagacagatgcacctaagatttcagctgttttaggtcacttttctcaaaatatttattatctggcaatggggatgggagtggggaacacctctctgtgaggcaaatggtatctcaacaaataccgacttttcaaggaagaaagctctccacttctctcataaacttatatactaccttaaacagtatgcagtattcggcatattttttaaaaatgagtccagagaaatagaaggatatagttacctcataaagttaactgttagcaacagacgtcttcgtatgtgatttataaatttcttggcaagaacaagatttttagaagaggcttactcacacttaagacagagtgaaaattactctcacagaatgcaaagtatagaataataaacatcaccattacctttaaatgccatacaaacatcctacattgcaggttgcagtatcaggtttccagaatttccaataaggcaatacctacacaaatattgccaggctaaaaatgtagcaaacttgcattcccaaactgggagaatctagcttatttgtaatactttgtgaaaagatactatgaaactaaaaaggtaaccgtggagtggaaactgctactagaaagtctgttatcagtagctacttctacttaagtcctccattctctcccagaagaaacaaaccaaacaaaaagcatctatcaatattaaaacctgcctcaataaaagcctagtgttctaacttagcacctctagtaaatctaatatagctgcnn

SEQ ID NO: 19350 - DNA, 460 bp, Homo sapiens
  misc_feature 1, 398, 437, 459, 460: n = A,T,C or G
ncgagcggccgccgaggtaaaggtacagcctcacatacacagatgcaggtgaagtcaccaaagctgatctctcattcgttctggggacagttagcagcgtagtggtcccactgcagcaaaagtttgaaattcattttcttcaggaaaatacccagccagtccctctcagtggaaaccctggttatgtcgtggggctcccattagctgctggattccagcctcataagggtggagctctcccgtgtcagctcgtagcacagaaggtgaagagcctgctgtggggccagtgcttcccagattacgtggccccttttggaaattcccaggcccaggacatgctggactgggtgcccatccacttcatcacccagtcattcaacagggaagggatttcctgnccagcttcccagggggttttggttattagaagtgaagtnggattaaatacggttccctgcnn

SEQ ID NO: 19351 - DNA, 935 bp, Homo sapiens
  misc_feature 1, 2, 3, 4, 5, 934, 935: n = A,T,C or G
nnnnnactatgcatccaaaggctaccgtggttactcctatgatgacattccagactttgatgactagcacccaccccatagctgaggaggagtcacagtggaactgtcccagctttaagatatctagcagaaactatagctgaggactaaggaattctgcagcttgcagatgtttaagaaaataatggccagattttttgggtccttcccaaagatgttaagtgaacctacagttagctaattaggacaagctctatttttcatccctgggccctgacaagtttttccacaggaatatgtatcatggaagaatagaggttattctgtaatggaaaagtgttgcctgccaccaccctctgtagagctgagcatttcttttaaatagtcttcattgccaatttgttcttgtagcaaatggaacaatgtggtatggctaatttcttattattaagtagtttattttaaaaatatctgagtatattatcctgtacacttatccctaccttcatgttccagtggaagaccttagtaaaatcaaagatcagtgagttcatctgtaatattttttttacttgctttcttactgacagcaaccaggaatttttttatcctgcagccgcaagttttcaaaatgtaaatacttcctctgtttaacagtccttggaccattctgatccagttcaccagtaggttggacagcatataatttgcatcattttgtcccttgtaaatcaagatgttctgcagattattcctttaacggccggacttttggctgttcctaatgaaacatggtggttatattagagtaaggccgttgttgacctgttgatgtatcttctggcatgatccaggcccggtgcctagaaaaaaccctggcgttttggcgcgagggtttcccaaaatgtgcccccaagtttacaaaaaggggtcnn

SEQ ID NO: 19352 - DNA, 1047 bp, Homo sapiens
  misc_feature 1, 2, 1030, 1031, 1032, 1033, 1034, 1035, 1036, 1037, 1038,1039, 1040, 1041, 1042, 1043, 1044, 1045, 1046, 1047: n = A,T,C or G
nnatagagagaattcacctagtggggatgtatgggcaacttccgaaaggtgtcgatttcttccccttagttcttaaagcaccgaattttggttggcaaagacatagatgttatagcaagcatatgtggctgtgttgaacccaaggttacaagattcccgaaattccagagaggatggagaattctaatgtttcggagttacccatggaacaatatgcttaggattacaggaagcagtccttacttacacttcttgtctgttttaggtgtacttgttaattcttatgtcctaattttatttaattctgagttccttacacagcattttagggaaagaatacaggcaggatgacactttgtgttaaagtgttatttttatgtattacctggaatgaggcaggtttttttctgttttctaaaaagagtaaccaagatacctccagggtgtcattgggttccagctgctctcctccacattgaatgatatcttgttaatttataggcacatttgtggtaatttatatgtctatagagtaagtataagagataattcattagtaataggaattaactgaccccttttggatgggggagagcatcaggctggggtcaggtaagtgtaaatggccttctgagcatgctcttctaggctgactcccagccctgacttgaaaccattagcgctaacttgctctgttttgagaaaaactttccaaacttttgcatgagaaactagaaaaaggaatgtatgccacgtaactggattacagaaatgagttaattgtctctgtgataaaaaaaaaaatgaaatattttcttattgaattaatatttttgtcttgaagcattttctagtgatagaatgtatttgtcttttttcctggtggtaccctcttagcatatatctttgctatccttaagatcctaaacaaatcatctttgtcagttaagtatagttgcgcaaaaattgttaaatcctttgtctttattaaagaaaaatttgagtaacattaaaacgcaaaaaaaaaaannnnnnnnnnnnnnnnnn

SEQ ID NO: 19353 - DNA, 461 bp, Homo sapiens
  misc_feature 1, 460, 461: n = A,T,C or G
nctcgaattcaagcttctaacgttttttttttttttttttttaaataagaggcaagtcctaagaaaacacgagagtgtgttggggatttaacacaacaacttcccaaagcctttcagcttaggttatgtctaatgctatgtctaaaggccattaaaagcttagccccatctcctatcactttactatgtgatttcatagatgttcaagtgttcaaagtgctgacctgggggtacatcaacatcacctgagaaaatataagtacaatattcaaaaaataaatcagtcagaaaaatggtcacagttttgcttctactacaagagcagagacaatctcattccatcctattttcccatacacctgagttaatccagattgtgcctatatattggaaagaagtgactaacagaattcatgagggggctattaaaatacatcacgtgcatctgacatgaaaatann

SEQ ID NO: 19354 - DNA, 408 bp, Homo sapiens
caagcttcgacccacgcgtccggaagatcctgcggaaggaatatgtttttgctgactccaaagtaagtgacagcaaacttctaaaatgggctgtgaggtagggaggggacacaagcgttttgaggctcgctgtgtgccagggagtgtatcattagctcactcaattcccagaacaacccatttcacacctgggaaaggtgaacttagagaagttgaggatcatgttccaggttggcctggatttgagccatcactgtctcaggagtagggaggcttcccactttgcccagctgcctcccagcctcgaggccacatcctttatgacccacatctaactcagccccacacctgggggaaaggctttcagcttctctgggctggacttgggaaatctttgggacactcctg

SEQ ID NO: 19355 - DNA, 1057 bp, Homo sapiens
  misc_feature 1, 2, 3, 4, 5, 6, 7, 1041, 1052, 1053, 1054, 1055, 1056,1057: n = A,T,C or G
nnnnnnnggaggtgatgtgcacttagctatgttggttacttgtttagttatctattttggtcgttttgtatgtagtgttttgtttttagattcaagaatgttttgggtttgtagacggtgttgctatgtttatctttgtgttggtttgtggactattcgtgttctttgtgaattattattgtgttatatgtttattatttgttattaatagtatcatgatgtagatgttatgaatgtatttggttaaggtgtattattgtttttgtgatgagtatgttttatgatgttattccgtctgtaggacctacttatgattgtgttccgatgagtggtgtgctgcgcctcgtcgttggtgtttttttttttcgtctgaactgtcgagatattgttgtgttttgcttggcttctgttggttgtttttgttttttttttgatttaaaagattttattttctttatgcaggtaggcagttagaaatttcaaagtctaacaatgacattcttgaagtgggcacagccttttaaactcaggctatgtatacagtaaccttgtggaactggttcagccagatcttcactttcatgaaagcacagggtctgtccttttctttccagagggctcctctcatattccatcgccagtttctgttacaaggcagactgaatcaagccaagatcaacacacactggtacacgtggctcccaaccaattttatatgtatatatatattctacttccaacacccgcattcatcctggttcaatcaaagcctggttttggccaacaataaactcgtcaggagatcgaaggttgtagatgtctgcacgtggcttccttggaggtccagtggtgactccctcttccaaaatccattctgtacccgctggctgctctaacgggcaggacaatagcgtatgaagcctgactgcaactaggagaagtaccacactccgagcaccgcaggacgcgtgggtaaagccccggccttaatggccgaattcccggagtaccaacacaatggcgcgcttccctaaaaagggnttcaagtggcnnnnnn

SEQ ID NO: 19356 - DNA, 5118 bp, Homo sapiens
  misc_feature 1, 2, 3, 4, 5114, 5115, 5116, 5117, 5118: n = A,T,C or G
nnnnctgaccaggactgaggggctttttctctctgtgccccaggcaagttgcactcattatggaattccggcggcccgctaggcaagttgcactcatggcacctccaagtgaagagacgcccctgatccctcagcgttcatgcagcctcttgtccacggaggctggtgccctgcatgtgctgctgcccgctcggggccccgggcccccccagcgcctatctttctcctttggggaccacttggctgaggacctgtgcgtgcaggctgccaaggccagcggcatcctgcctgtgtaccactccctctttgctctggccacggaggacctgtcctgctggttccccccgagccacatcttctccgtggaggatgccagcacccaagtcctgctgtacaggattcgcttttacttccccaattggtttgggctggagaagtgccaccgcttcgggctacgcaaggatttggccagtgctatccttgacctgccagtcctggagcacctctttgcccagcaccgcagtgacctggtgagtgggcgcctccccgtgggcctcagtctcaaggagcagggtgagtgtctcagcctggccgtgttggacctggcccggatggcgcgagagcaggcccagcggccgggagagctgctgaagactgtcagctacaaggcctgcctacccccaagcctgcgcgacctgatccagggcctgagcttcgtgacgcggaggcgtattcggaggacggtgcgcagagccctgcgccgcgtggccgcctgccaggcagaccggcactcgctcatggccaagtacatcatggacctggagcggctggatccagccggggccgccgagaccttccacgtgggcctccctggggcccttggtggccacgacgggctggggctgctccgcgtggctggtgacggcggcatcgcctggacccagggagaacaggaggtcctccagcccttctgcgactttccagaaatcgtagacattagcatcaagcaggccccgcgcgttggcccggccggagagcaccgcctggtcactgttaccaggacagacaaccagattttagaggccgagttcccagggctgcccgaggctctgtcgttcgtggcgctcgtggacggctacttccggctgaccacggactcccagcacttcttctgcaaggaggtggcaccgccgaggctgctggaggaagtggccgagcagtgccacggccccatcactctggactttgccatcaacaagctcaagactgggggctcacgtcctggctcctatgttctccgccgcagcccccaggactttgacagcttcctcctcactgtctgtgtccagaacccccttggtcctgattataagggctgcctcatccggcgcagccccacaggaaccttccttctggttggcctcagccgaccccacagcagtcttcgagagctcctggcaacctgctgggatggggggctgcacgtagatggggtggcagtgaccctcacttcctgctgtatccccagacccaaagaaaagtccaacctgatcgtggtccagagaggtcacagcccacccacatcatccttggttcagccccaatcccaataccagctgagtcagatgacatttcacaagatccctgctgacagcctggagtggcatgagaacctgggccatgggtccttcaccaagatttaccggggctgtcgccatgaggtggtggatggggaggcccgaaagacagaggtgctgctgaaggtcatggatgccaagcacaagaactgcatggagtcattcctggaagcagcgagcttgatgagccaagtgtcgtaccggcatctcgtgctgctccacggcgtgtgcatggctggagacagcaccatggtgcaggaatttgtacacctgggggccatagacatgtatctgcgaaaacgtggccacctggtgccagccagctggaagctgcaggtggtcaaacagctggcctacgccctcaactatctggaggacaaaggcctgccccatggcaatgtctctgcccggaaggtgctcctggctcgggagggggctgatgggagcccgcccttcatcaagctgagtgaccctggggtcagccccgctgtgttaagcctggagatgctcaccgacaggatcccctgggtggcccccgagtgtctccgggaggcgcagacacttagcttggaagctgacaagtggggcttcggcgccacggtctgggaagtgtttagtggcgtcaccatgcccatcagtgccctggatcctgctaagaaactccaattttatgaggaccggcagcagctgccggcccccaagtggacagagctggccctgctgattcaacagtgcatggcctatgagccggtccagaggccctccttccgagccgtcattcgtgacctcaatagcctcatctcttcagactatgagctcctctcagaccccacacctggtgccctggcacctcgtgatgggctgtggaatggtgcccagctctatgcctgccaagaccccacgatcttcgaggagagacacctcaagtacatctcacagctgggcaagggcaactttggcagcgtggagctgtgccgctatgacccgctaggcgacaatacaggtgccctggtggccgtgaaacagctgcagcacagcgggccagaccagcagagggactttcagcgggagattcagatcctcaaagcactgcacagtgatttcattgtcaagtatcgtggtgtcagctatggcccgggccggccagagcctgcggctggtcatggagtacctgcccagcggctgcttgcgcgacttcctgcagcggcaccgcgcgcgcctcgatgccagccgcctccttctctattcctcgcagatctgcaagggcatggagtacctgggctcccgccgctgcgtgcaccgcgacctggccgcccgaaacatcctcgtggagagcgaggcacacgtcaagatcgctgacttcggcctagctaagctgctgccgcttgacaaagactactacgtggtccgcgagccaggccagagccccattttctggtatgcccccgaatccctctcggacaacatcttctctcgccagtcagacgtctggagcttcggggtcgtcctgtacgagctcttcacctactgcgacaaaagctgcagcccctcggccgagttcctgcggatgatgggatgtgagcgggatgtccccgccctctgccgcctcttggaactgctggaggagggccagaggctgccggcgcctcctgcctgccctgctgaggttcacgagctcatgaagctgtgctgggcccctagcccacaggaccggccatcattcagcgccctgggcccccagctggacatgctgtggagcggaagccgggggtgtgagactcatgccttcactgctcacccagagggcaaacaccactccctgtccttttcatagctcctgcccgcagacctctggattaggtctctgttgactggctgtgtgaccttaggcccggagctgcccctctctgggcctcagaggccttatgagggtcctctacttcaggaacacccccatgacattgcatttgggggggctcccgtggcctgtagaatagcctgtggcctttgcaatttgttaaggttcaagacagatgggcatatgtgtcagtggggctctctgagtcctggcccaaagaagcaaggaaccaaatttaagactctcgcatcttcccaaccccttaagccctggccccctgagtttccttttctcgtctctctctttttattttttttatttttatttttatttttgagacagagcctcgctcgttacccagggtggagtgcagtggtagcgatctcggctcacagtgcaacctctgcttcccaggttcaagcgattctcctgcctcagcctcccgagtagctgggattacaggtgtgcaccaccacacccggctaattttttttatttttaatagagatgaggtttcaccatgatggccaggctgatctcgaactcctaacctcaagtgatcctcccacctcagcctcccaaagtgccggactacaggcgcccgccaccacacccggctaattttttgtatttttagtagagacggggtttcaccttgttagccaggatggtttccatctcctgacctcgtgatctgcccgtctcggcctcccaaagtgctgggattacaggcatgagccactgcgcccggccctcatgtagctttaaatgtatgatctgacttctgctccccgatctctgtttctctggaggaagccaaggacaagagcagttgctgtggctgggactctgccttttaggggagcccgtgtatctctttgggatcctgaaagggggcaggaaaggctggggtcccagtccaccctaatggtatctgagtgtcctagggcttcagttttcccacctgtccaatgggaccctttctgtcctcaccctacaaggggcacaaagggatgacaccaaacctggcaggaacttttcacgcaatcaagggaaggaaaggcattcctggcagagggaacagcatgccaagcgtgagaaggctcagagtaaggaggttaagagcccaagtattggagcctacagttttgccccttccatgcagtgtgacagtgggcaagttcctttccctctctgggtctcagttctgtcccctgcaaaatggtcagagcttaccccttggctgtgcagggtcaactttctgactggtgagagggattctcatgcaggttaagcttctgctgctcctcctcacctgcaaagcttttctgccacttttgcctccttggaaaactcttatccatctctcaaaactccagctaccacatccttgcagccttccctcatatacccccactactactgtagccctgtccttccctccagccccactctggccctggggctggggaagtgtctgtgtccagctgtctcccctgacctcagggttccttgggggctgggctgaggcctcagtacagagggggctctggaaatgtttgttgactgaataaaggaattcagtggaacaacttaatccaagcctacgttttcacacnnnnn

SEQ ID NO: 19357 - DNA, 269 bp, Homo sapiens
aggtcaagcttcgacccacgcgtccgcttttcaattttattgtatagtttttgataatgttaatgtctgagatctttatgggtgagtctgctgtcatttctgctatttctcgtagtgatttgcttgtatggtttatgattttttaaaaactgaatgtgtattagaattgtgtctggtaattctttagggacccattgtagatgtatttcttcaaagagcatttgtggttattatatttgggtgcttggggcactgccagtacctgcccg

SEQ ID NO: 19358 - DNA, 256 bp, Homo sapiens
aggtattgaaccaggtcaaaacattgttgaatatcaaacccaatctatttaatctgtaagaaacaaggaccctgagaaagattctgaccaagggtatgtgatcggaaacttgacagataaatgtagtatacttgtaaagccatactgtgaaaaacttggggattatttgaacacaaattatcacctggaaaaagacagaaaacaaggcagaagactgtgcaaagaggttggaatattcaaaacttcagattagaag

SEQ ID NO: 19359 - DNA, 588 bp, Homo sapiens
  misc_feature 1: n = A,T,C or G
nacccacatgctgaccggtgccttgggatttgactagagttgctggctcgaggcccagcacgaggacttaccctggggttttgttaggtttggaagcagctgtccctagggggtgaagtcccccccctttttttttttttacccctgcttctcccacggcttcacctccctatgtgaactgtagactcagatcccaataaagtgctgttgcagctatgatgctaggtggtttctaagcacaggggacaccccacaccccctgcctgaatggatgggtccatccacctcggccgcccgggcaggtcaagcttcgacccacgcgtccgaaattaatgaaatgttttacattcttttaaaaacctttgaaatatggtgtgtattttatgctttagcaaatctcagtttggaccatttcaggtggtcagcaattacacatggctagaactaagagcaatcagttttcttccacagtttttctaaaattttcttgtcaaaaatcttgatggtatgaattactcttttaaaaagtgcacttcaccagcaacagaaaagaaccctggaggggtatgggttttaaagctggtacct

SEQ ID NO: 19360 - DNA, 1013 bp, Homo sapiens
  misc_feature 1, 1012, 1013: n = A,T,C or G
nacctgcccgggcggccggccgcccgggcaggtcaagcttcgacccacgcgtccgaaaaaaaaaaaaaaaagtatgttggagaccgactgggggtgaggggctggcagcaggagacagataacagctcctcagaatgcagagtgatgaaggctggaactaaggccacaactggagagatgttatggagatagtcagctatacttggtgacttatttgatacaggagggaggacatatagagaagactctggcaagcatctttggtgctgatctctagagcactcattaggtggccttgatctttgtagcatatgaggtctttgaagtatcccagggtgggatttcctggaagagggcaatgaaagaagttgaggtggggccctgtcagcagtggtcctatccccagtcagagtaatgggagtgcagtgcagggagcttcaagcagagaggtagagccatagagagctagggagaggccagaacctcccagcttagagcccctcagacttgtatttgcttccagcttcaagtctggatagtcagaagtttgtgacagtgccctccagtaatgaagtggtaactaacctggaagtgctgacaagcaaatgcctccatgggaagaactactgtcgacaggtcctctgtctgtatgatcttgccaaggagttgggctgttcctacacagatgttgctgctcaggatggtgaagccatgctccggaaaatcttggcctctcagcagcctgaccgatgcaaacgagcccaggccttcatcagcacacagggccttaagccagatactgtggctgaactcgtggcagaagaggtgacacgggagttgcttacttcatcacagggaacaggacataagcagatgttcaaccccacagagggaagccagacatttcttcagctgaccactctgtgtcaagaccgcacattggtaggcatgaagttgttggataagatttcctccgttccccatgggatgtcttgccccacagagagagcgnn

SEQ ID NO: 19361 - DNA, 768 bp, Homo sapiens
gcctaatatatttactctctggtcctttacaggaaaagtttgccaacctctggcttagatgatcacctgaggccaaggagcctcgcccttgagcacaagactatgtagtcagtaaagcacaaacaaaattggggctttccctagcaaggttggaaaggcggagaagaaatggatttggataggtagtcaacaatgtctgttttatgttaccacacattttctcgagaaatttcaatcagctctctgagaacagattcatctttaaatgaatgttcataggtaacagcaactcatgcatcaatgttgcaaagtgagctcattttcacattgcttcaggttaggcagaaggtttggtaaagggattaacgtaattgtttccttgttgtttacaaaaagaagtcccagttggcatgccacataaaatcttctgtatctcactcttgtttacatttccaacatcccctgccaccgcaagtaaatgactctattgctccttccatcgtgaaacacttgaaattccctgaatttacgaagacttttcctgctacattgcctttgtccatgctattatttctacttggaacaccctttcttcttgtccacctgggcagtttcttaggtgaaactttaagacctaactcaagtgttactttctttgaaaaaccttatacgaccacatttggggctctatcttactttgttgtcttggcttgggttgcctaaaaagaacctgaacaagggttccccggacgcgtgggtcgaagcttg

SEQ ID NO: 19362 - DNA, 1107 bp, Homo sapiens
tggcggccgaggtcaagcttcgacccacgcgtccggagaaataccatttgcacagtcaatcacttctgaccaagttatcagaaaaaggagaaaagaatgtctccccactaaatgttctagggtggtgagaaatctagggtggttatctaaatcaacaatatttagatattccaatatctaaatattgttggaaatactctcctgaagtgttcattgaactctaagagagacagcttgtgtatcagtggcagggtttaaggttcattttttattcccatattaatcctttaatatttagacaaatttccttctgagtttaaggataaaatgggatgggttctgcctgggcctggccctcatggggacatcaaagggcaatgttgcaaaaaaaaaaaaaaaaaaaaatcagaccatcagattgcatggggggaaccacccccataattaaattacctccacccagtcccacccttgacacctggagattatggggattgcaattcaaggtgagatttgggtggagacatagagccaaagtatattattcaaataagaaatcaaaagagaaattggaaagttcattgagctgaaaatgaaaacacgatatatcagaatcagggagttgcagctaatgtatgcttggaggcaaatttaagcactaagatcctatattataacaaaaaagaaaggtctcaaatcagtgacctgagttttcaccttcagaaactggaaagagaagagcaaattaaacacaatgtaagcagataaagaaaataataaaaagaacagaaatcaatgaaagaaaaaagggaaaattataagaaaaatccaagaaagtaaatgctaatcattttaaacaatcaattaaattgttagacttctagtcagctgatcaagaaaaaagtaaaaaggcacaaattaccaataccaggaatgaaagggtgggtgtcaccaaatcttctacagtaattataaggaaacaatggactactgtaagccatttttttctaataaatttgataacttagatgaaatgaacacattccttggagggcataaactatcaaagttcactcaagaagaaatagataacaagagtatctattg

SEQ ID NO: 19363 - DNA, 265 bp, Homo sapiens
  misc_feature 1, 2, 3, 4, 5, 6, 7, 8, 9, 10, 11: n = A,T,C or G
nnnnnnnnnnnccgcccgggcaggttttcgacccacgcgtccgagctatggacctaaggcagcgagtggattcattagtcctctttcagctgaatgcatgctacagtataagaaaaaagctgctgcctatatgaagtctttgagaaaggtttgttagctgctgttaatatttaaatcagaggaaacatcaggagtcattctagagaatggcaagagtttttctgcagtttatattgttgactttttatacgatattggggtacct

SEQ ID NO: 19364 - DNA, 2236 bp, Homo sapiens
  misc_feature 1, 2, 3, 4, 5, 6, 7, 8, 9, 10, 11, 12, 13, 14, 15, 16, 17,18, 19, 2236: n = A,T,C or G
nnnnnnnnnnnnnnnnnnnacctctggttggagaaatgccaggttaaaggatagcaaatggcttaagcacaatggcacttctggttattcggcagagtgtccagtaagtccataaagttccaccgctataccaccacacatccgctcggggatgagcaagggctgactgattgataagctcttgaaaattcttaagctcactgcatcccttcaggtctccaaggaatgctaagtctgcctccctgccgtgagagacacgaagtgaacttagtgttgggagatggaagctggatggccctcaggggctgacccgcagggtgccagacttcggaatatagcggagagagcttggcatgacttattactccaggctgtagaatcctggaaaagagctaccatgcagcccacacctggtcgactggaggaccaccttagtggaagggggacaatcagggcctctggcctgccatgtgcacaagcataacaattgcttttgtttaacgtgcagatggaatatttgatccatttcaaccaggcatttgcatcttggtatgctgtcttaattgccaaagtttgttttaagtctttaacttctatgatcctttagtaaaatgaatgtttcctttagcacctatttttattagtttttagaccaaagaaagctaaacaccattttatatttaataatgcttcttgtatgatttttataccagataagctaaattttacctttatattagtgtgttattaatgttaaacttaattttaataaaaccttgtagacatatttatccaatttttcatgtttgaccataaggtaagattttatagactctttttaaccttttataatttttgttaaagagcaggttgatgctttaagaaaaacctgttgcatttttactttaatgtctagttcacagaaaaactggatgacacctttttaactttagctaatatgtttacacacagaattttctttacaattaatgttttaaaacttgcttaaacttttaaaacaatttttttaactttttaatgtaggtaaaaatccacatttttatgcccttttataatcttttttaccaaaggtatattttacttttcttatacaccttgcacataaactgtttttttaaaatagtactcaggaggccttattacttttaaattatacaacttttttgcataaatactttttataactttttctttcacgacttttgcagacaatttttcaacatgtcttaactttctgacttattacattttttttttaaacaaccagttaatttatttcaggacaagaatttaccatgtaacactctttttacataaattctgcctctccccgtttttttccttttttttttttctttttgaagataaccattcctttttttttttttaaagcaaactttctttatgcctttggactagactgtctaaggccacaagattagaagttaccataatacatgttacactgttaactttaagcaaacttcacttttgttgaaaaccttgtaagtttgggatttcaattatcctttgctattaagaccttgtttagtctaaattaacttagaattggtatagatggcctttttttctctctactggtctttccttgcctctgccagccgcttatgctgctgttctcttaactacgttggcggggcaagggggtataaaagcagctgtaactttctatgtatggaaactggtctgggtgccttggcttacgggttaccttgtgtcatacctttgaaacaagggacctgtccaggcttccttctgatggccaacccacctctaatgctggccagtctatttcacacaaagttctaagttttcctggtgtcacagtaacactgtaatctcccttaaattctttcttgaatttttttttaacatagttcctagtggggtgggcttatttgcgcctgacccatgtttttttttttttcctgagacaaaataccatgctcacaccacacatactcaccacaagacaaagaacgggtaaagagggcacacacacttttaccgtttataccaaaccaaaatcacgaaattcaaaatccgagtaccaaaaaattcaagccaagtcaaaaccaaaaccacagtatccagcaattcaaatcaaaaacaaaaccccaaaaaaaaaaaaaaaaaaaaaaaaaaaaaaaaaaaaaaaaaaaaaaaaaaaaaaaaaaaaaaaagggcggccgcn

SEQ ID NO: 19365 - DNA, 367 bp, Homo sapiens
actttttttttttttttttttaagtaaagaaggttttataatatagtgaaaacaatacggagatgaaaaccaggagacctgggtcccgcctttgttacaaatgcctttcctaaaagctccagaatggtgcgaggtcaaaacagatgggcagaaaggaagtggtcatcagagcaagagaaagagcaggtgccaggcactcacgtgtgcggtcatatcaggtagagatgatgagtagagatctgccctagaagacactgaattctgagattcaaaggggaaaagttgattttatagccagtgattttatagcccactttcctgccccacccctactctaagaattgcggacgcgtgggtcgaagcttgt

SEQ ID NO: 19366 - DNA, 3033 bp, Homo sapiens
  misc_feature 1, 2, 3: n = A,T,C or G
nnngtgtgctggtagtatgattttttgggggcatgtttggtttattgttggagtttgttggtagtttgtgcggtggcgtggttttacgtggtgtgtgttttactttaagcggggtgcgcttgggtgtgtttgtttgttgtgttttgtgttcaggtcgagttgagggtatgttatgtggcggcggtcgcatgttgtgtgctgtgggtgtgcgatgttggctccaaggcttctggcaggttcgctgcctgtgtgccccgatgaatgtggtgatgcttgtcgcttggctgtatggaatgccatcgtccagccggcagctgctcgtcttcagaaccgtgtgacgagtcatacagtagtttagcaggcaagcatggtcccgctgcttcacagtaatgtcgtatgccgaacttggaacagagttttttggtattttccctcccctccccaccttataaacaaaacatggcattcagttttcagcttactcctgttctgtagcaatttgtaattagcttgtgactttacataggtgcaaacatttccatacattgagccaaagactgcagagtgcaaacaaaattttatctgacttacagtagcatctgacttaataagaaaacaaaaggatttgaacacattggattctaaataaccagaccagttcagatgctcctttttgttcatagtgttccatcattattttgtttctccagcaattttagtggcaggaagtagaatcacaatgataacgtgggaattattttaacatggctttgggacatggcatcggtagaaagctcatctgacagaattaaataaatatatttctgatatttgtgggaaaaagactatcggaattacaacagtagaatttaccttttaaaaggggttttaatgaattaacagttttgatctaaaatctgggaactaacctaatttggggacaagaacctgtatttccaatgtggctgtgggacatttttctttttcctgatctcatatacagtacccaaacaaataaaaactttaaggatgtcttacagtattttttctttcactcagcttcttacagctgcagcttcagttactataatatactctacacacttcaaaattacataggaaatacccagaataactaaataaataaaaggctaaagaaaactggaacagtactgcgtctccatctgagacgcaatcttctacttccagcatcgcagagaagggctaggacaattttttttcaaaagatttatatacaggcttgaatccagaaattaaggttaaaagcataaatattgataatttcaactaaattcagaatggtttcagaaagatatgatacaacaatttagaataaaacaaagcagaagagcatcatattttggtttgcttgagatatatataaggtgcaacaactttttctcttgaggatgctgtgggacaaatgttagtgtagatggtatctgctggcagattaaagtacacactatagcaatatgattttccaaaataaaaaagaatgagagaaatgaaatgaaaatgataacaaaaggtggggtggagagcactaatattggtctgaaatatttgtgctaacgaatgttgttacctgaaaataacaacactcctctccagcagattcagggcatgagaagcacaattattgaaatcaagactttactcagagaatcgacaaggtgagtctaaggaactataaagctttgcaggatttctgctactctcagtgcctaaccgcttaaaaattaagcatttctacaaaaaggtttgttttaaagtatctgaaaacagtcatctccagtaagttgccctcccacccccaaccctgcctaagggaaaagccactgaggtttaggaaaagcagatcaagtaagatattaatcacatagaaaaaaagtaatcttttgttttgctttttttttttttaaaaaaaggtcccaggaatatacagcaatctcgtaaggaactctagtgaaatgtaatcggaggactgaaggagggtgctctggcaaaaatagatctattctaacgtgttctatagaataacaagttagtaccattgtcaaggtgcatgttccgcaccatacaatttttgttgttggttttttgttttggattttagctaattataatcttcaaatcactgctagcgagtggtccaaaactccaacagccaccaacatcgggacccagcaatttcaaacattcactttttgttttgaaatttagaaaatattaataaaacagcatcatagtaaaaatattatgcaaaagtctggaactgctcacttgatttattcctacatgaatggggttaagttgtaacgtttgattaaccttttactaatgccttcttcctccatccccaccaggaatatgcatttttgagcacatcattccgatgctttgctaccctctttacctgctttggaaaaaaaaacaagaagaaaatcctctatttttttttcaatcctgttagtatgttgtacatattttccagcaccggaactgaagtaatatctacaaccatgagaagctaaacctagtatgaatagagtcattttttgtatggctattacgtcaaattacaattagaaaaaaaatcattacaattcagtcaagtataaataagaaagctagataaaaccatgtaaactgtcaccatttagagatctaattcaaaagcttcaaactcgaactagcactgtcaaaattccgccagtttgaaaaccattaaaaattattgctggaatccaataattaaaatttggtagtttgtgctgtgacgcaagagtggggaaatactttgtgctatagaacaaataccctgtaaaatctgtagcctcagactaattttgatttatcactttgcatctgttgctaggaaacaagacactgtgaatgtcaggtggttaagtcaacatgttgaatgttctaagccagttaatccacttggcgctgcttatgtatggttggttttatgttcaaaagcaaccggacgcgtgggtcgactcc

SEQ ID NO: 19367 - DNA, 2787 bp, Homo sapiens
  misc_feature 1, 2787: n = A,T,C or G
nccgttctttatttattaaggggattttccgattggcgcttatggttaaaaaatagctttttttcaaaattttacccgggtatttacacaaaataaacccccaaaattttcattcccaattaaggtggcccacttttttgaaaaaggaatgtggtggggccttttttcaattccccccccctccaaaaagggggattttcccaaagggtttaagttggggtcccccggggttttccccccccccccttgtttaaacacgggccctttatttttaatagccccccccttagggggaattgggcaaaggggcccaaatttgggcccgagccaaaaactttcccaaaataaaaaaggcttgggcccagagggcccccaagtttttttttttttttttttttttttttttttttttttttttttttttttttttttttttttttttttttttttttttttttttctttttttgtcctttttttttttttttgttttttttttgagtttgacaaatttattggtactttagtaaagacattcatctcagtcatttctctctcccagcttgaccttaggttaatatttcatttgggtcaagaaaataatacgtaggagaggtatgttattttaacaaacaggaaaatggacaaaaaattgatagtttgcctacattaaagtaagttaaattcatgtatcgatataattaaatcatgtaagaactaagagttctatatacatttccattgtcttacttgggcttattctaaacttaaatgctagtgaacaaagtgttaggaatatacacaggctgcttctctggagttattaccaactaaaagacctcagcaagcagctaccaccaataaaacagtctgaagctgcctccaaatataatattgtaggagttttcaaggaaatttttatactgtatgcttttgtctgtgactatgcttttaaagatgtgtttaactgtcacatttaaaaaaagttcatatacaatacaaaaatacaaaacaaacaccctacaatacacaaatctaacaaagtatatgtggtgagattccaaaaaatgtttgaagatgcattttctttccttcaatttcagtatctaaaatgtgctttttcagaggccattggtcaatatgtacgcatttaaaataaaccatataattttaccagtaagaaagccgatagttaagttcaattcaaattggagttcataagttagtaatttaaatccttagacaaagttacagaaagtgcatcttcttattttccatcttcatacaatgttaattttttttttggtgtttataccttttaaaaaataaaaacagccaaatacttaagcaatatgtacatttaaatttttggtggtggtttgtgttttaaaagaaacagcttccttacgatttgcctcaagttctggtggaaatgcttacaggaactagctaataaacaaaaaacaagagaagcacattcaaaatactgatttactttggtagcaaatggtttttctttgaagactaatgaagatagacaagacccattaaggtgaagtggactatttcaaatattcaacagtttacataaaaaaaaaatcttttaagagctaagcgtctgtatccacggatagcaatgcaatacctagtttatgatgacttgaaacaaaacaaatgcccataaggaaaaaagctgtattttatctaaatttactttcagtcaatagttcagtaacattttcttcccaatacaatactccctctctctataaggctgttcctgggagccagacaagtttaggtaataagggagttaagagagttaactgcttgcagttttaaatagacagtaactttgcttccctcttaatgtgctaatagttgtgtctaaaaaaatatgcaattcttaaaaaggtaccatttctgatttctttattatctgtaacctttggaaactaatcacatgaaactacaaaattagcaaatgtcttgaaatctgtatataaaacataaattacctctaatttcaaactctcatttattagtgtaccactcaatcttttaaaaaaatgaaaaagaaaaaaaaagcggctccaaagatagtcttataccattctttaaaaaaggaaactgttccttttaactttacacccaccccacaccccaatttcaaaacatcatttaattgtcttggtcatggacatttccaagatgagattttatatttcgctcccacagcttctggttatcagaaaacccatgctttcctttattgaaggagtttggtccagctgatgttggtgtatcccttccaatattcttcatcctcatctttgcttctggaggcatttcctctggttcactatcttcatcttcattaaaagctgctgctactgaaagagtttttggagcaagagttggaacagtttctttaggcttacttgatccaagtttgatggatatggctgatgctttctttgtcgtctgactacctatggcaaatccaaacttggagatctttgtaggctttgttgggaggtcggcagcttcttcttcagctgatcgcttctcagcgctgcgactggaactttcccctccattactggaagaaacagtcttagttttcacaggtttttctgcttcttcttcaggtcctccggcggctccagctcgctgcgacttttcaggcttctcgtctcccgccttcccgtccgccattttccccgccgcggcctgccctgccgcacgcgccacgggttgtggccgttcttttcaacacaggaaacan

SEQ ID NO: 19368 - DNA, 1026 bp, Homo sapiens
  misc_feature 99, 100, 101, 102, 103, 104, 105, 106, 107, 108, 109, 110,111, 112, 113, 114, 115, 116, 117, 118, 119, 120, 121, 122,123, 124, 125, 1020, 1021, 1022, 1023, 1024, 1025, 1026: n = A,T,C or G
cactgatgacaatttattataatctgttagtagcacacagacaaatattagttaaacccggacgcgtgggtcgactaagctagacctgcccgggcggcnnnnnnnnnnnnnnnnnnnnnnnnnnnccccgtgcccaaaaaattcaaaaaattagtttattagcttaatataattaggtcaatggaatcctgttttgatctcaatacttcccatattgcaatatataaatgtgacaaattcagctgttttgtggcatagataagtgtctaagctgggcagttagtctacccgtttatagttcatgttcttcatggctttgcagcatttgtcactttctatgatgtgttcaaagaccagaaaaggccacacttgacctgtcagctggtccttgaacagctgtaggtttttttttttttgagacagagtctccctctgttgtccaggctggagtgcagtagcgcaacctcgactcactgcaacctctgcctccaggttcaagtgattctcctcctcagactcctgagtagctgggattacaggcacatgccaccatgcccggctgatttttatatttttagtagagatggggtttcaccatgttggccaggctggtcttgaactctgtgccctcagtgtgatccacccactgggctcccaaggtgcgggggatttgggcgtgagccacggaccgggcgttgtggtttgacctaatactggggggttatcctctatcgatgctctatcatgcaaatctccggtggtgacggggttgtcattgttgattgattccctatgatttcggaaaaggtctctttggttgcccggttaagtccgttgtggccatctggtcgctggcgttccccttctggctgcatggtttggggcccaccccatttggatagggggccccccggttttgtttgtgggggtcccgtggcggggtcatggtcgggaccttgcccgggtaggtggaactggcttgtgacggcaaatagtgcgctgaaaagcctttaagacccnnnnnnn

SEQ ID NO: 19369 - DNA, 753 bp, Homo sapiens
  misc_feature 1, 2: n = A,T,C or G
nnctatccttaatctgactctgccatggcagcggccaccggttttatgtccccgagccccgtggcctgattactcagttacccattccatcagccgcctgaggaatgaggttgctatttaaccgtagaagaaaaataaaggtagaacctaaggcctggtgatccttagggcacataattagtttctcttttttttttttaagttgaaagtatccagtttatgggtacagttaagagttaataaaaacagcaactattaaatgactaaaagacatcattcctaaaataaaagctccttgaggtcaggaggtttggttttgtttttcttattttgtttactgatgtattccaagaacaaagaacagtgctggcattcagtagatgctcaataagcatttactcagcagacggatggatgagctgatgaacaggttcttcccgtgggttctggaagagctgtaccaaaaccaggcttttttcgaaatacctgcaaaaaaaagtggatgattccaaatccaactgaagtgtctgctctctctccaattcagaacaaccagaagggcctgtctgaattagtaatgcattaaagaaaagtaggattattatattccaattctttccatcagatgtaaaacattattggtagatcacatctgttttaataaatctgtaagaaagacgtgtaattataattatgttaccattgtatgtaaatggcattttaacaagacatattaatacatttttatagagt

SEQ ID NO: 19370 - DNA, 726 bp, Homo sapiens
  misc_feature 1, 2, 3, 4: n = A,T,C or G
nnnngtcgacccacgcgttcgatttttgttttgaatagaccgtgctatcctgtttctttgtatgtcttttgattttttgttgttgttgaaaattgcatatttgaaactaataatgtagagccctggaaatcagaccttttctcttccccaaggtttactgttaccgtttgtattttgtggggttattgttgccagtctctgtgctaagtattagctttttttgttaacttgtggtcttaagtattttctgagcctgcatgtttccctggttatgtgccatgactttctcatttcctctgttgttttcaaatgccctggttatcaaggtctgtctcccaaaatgagaaaaagtataaaataaaggaaataaaaaaaaaaatgtgcggacctgcccgggcggccggccgcccgggcaggtactggtgggtggatgccaggtaaaaaccaggagcaaattaatggccctactctctgaccagagtcccatatttattttaaggaaccttctaataaaaggtgggatacctacttatctccattcatagccctagtaagtagaatttaatctcagagggctgagtcataccatcatcaactctagctccttaatatgtaattggtatctcctctactaccatctgtgctgttagattttgttccctgaaggtagccaaatatgtcactctctcttccttctcccaaattaaccggacgcgtgggtcgaag

SEQ ID NO: 19371 - DNA, 1885 bp, Homo sapiens
aggtcaagcttcgacccacgcgtgcgcaatttttaggcccacaaggagtcaagcacctcaaggagatcttcagtttgaacttggtgtagacacagggatactgatgaatcaatattcaaattagctgttacctacttaagaaagagaggagaccttggggatttcgaggaagggttcataagggagattttagctgagaaataccatttgcacagtcaatcacttctgaccaagttatcagaaaaaggagaaaagaatgtctccccactaaatgttctagggtggtgagaaatctagggtggttatctaaatcaacaatatttagatattccaatatctaaatattgttggaaatactctcctgaagtgttcattgaactctaagagagacagcttgtgtatcagtggcagggtttaaggttcattttttattcccatattaatcctttaatatttagacaaatttccttctgagtttaaggataaaatgggatgggttctgcctgggcctggccctcatggggacatcaaagggcaatgttgcaaaaaaaaaaacctgcccgggcggccggccgcccgggcaggacaggctgctttggtttgtgacctccaggcaggacggccatcctctccagaatgaagatcttcttgccagtgctgctggctgcccttctgggtgtggagcgagccagctcgctgatgtgcttctcctgcttgaaccagaagagcaatctgtactgcctgaagccgaccatctgctccgaccaggacaactactgcgtgactgtgtctgctagtgccggcattgggaatctcgtgacatttggccacagcctgagcaagacctgttccccggcctgccccatcccagaaggcgtcaatgttggtgtggcttccatgggcatcagctgctgccagagctttctgtgcaatttcagtgcggccgatggcgggctgcgggcaagcgtcaccctgctgggtgccgggctgctgctgagcctgctgccggccctgctgcggtttggcccctgaccgcccagaccctgtcccccgatcccccagctcaggaaggaaagcccagccctttctggatcccacagtgtatgggagcccctgactcctcacgtgcctgatctgtgcccttggtcccaggtcaggcccaccccctgcacctccacctgccccagcccctgcctctgccccaagtggggccagctgccctcacttctggggtggatgatgtgaccttccttgggggactgcggaagggacgagggttccctggagtcttacggtccaacatcaggaccaagtcccatggacatgctgacagggtccccagggagaccgtgtcagtagggatgtgtgcctggctgtgtacgtgggtgtgcagtgcacgtgagagcacgtggcggcttctgggggccatgtttggggagggaggtgtgccagcagcctggagagcctcagtccctgtagccccctgccctggcacagctgcatgcacttcaagggcagcctttgggggttggggtttctgccacttccgggtctaggccctgccccaaatccagccagtcctgccccagcccacccccacattggagccctcctgctgctttggtgcctcaaataaatacagatgtcccccaaaaaaaaaaaaaaaaaaaaaaaaaaaaaaaaaaaaaaaaaaaaaaaaaaaaaaaaaaaaaaaaaaaaaaaaaaaaaaaaaaaaaaaaaaaaaaagggggggcccttaaatttttttaaaaaaaaacccccccccccccccccctaaccctaaaaaaaaaaaaaaagccattggggggggaaaacttgtttttggccctttaaaagggtccaaaaaaaaccattccctccaaaa

SEQ ID NO: 19372 - DNA, 662 bp, Homo sapiens
  misc_feature 658, 659, 660, 661, 662: n = A,T,C or G
tcgtgctctcaacagggaaaatataggttcctccgcggtggcggccgaggtactcccatttccctgaaacaagcagccagcaactatctcagaaatgtgtcatttttactggttataattcttaaaaagcttgttttcctaagatatgaaatgcctgccagtatacaaactgttgtaactacttccctttttgcttttagcggggaaaaaatagcttaatgacagcatagaatcatgtagtaaatataattcattttttgaaaggttcagctatatcctcttccatttgtttattttaaatgatctaattgcaaacatgtcatcactcccttgatgtttacctccttgttatgcatttttagcaggctttattgtcacctgagattttttttttctttgacaggccggagtctagatgaaggaaaatgtgttagaagcaccttatccacagatggggacacttggtcattcagcacatgttgagcttaggcaggcatcagggtctggctgcttacctgcttttattcacacctgcctgtttaggtggcctgcactgaacttctagaatgagtccaacctgatcatttactgtctctgaaagaaattatgctaatagagaaaaacggccagttgggatcacttgctgagccaagtaacnnnnn

SEQ ID NO: 19373 - DNA, 1048 bp, Homo sapiens
  misc_feature 1048: n = A,T,C or G
acgtagcagagcagctccctcgctgcgatctattgaaaagcttgagtcgacccacgcgtccgctgcataaaagttatgcaaaaagcattttatgatataccagcaaaaaacatggaaaatgaaattttgaaaagcaatgccacttcaaagatccctcaagtgcctagagggagaaaatgagttaatatgctttgaagaactgtatccagaaaataaaattacaaaggaggagagggataggattccaggacaatctcaaaactattgctttttcctaaattcattgcaaccttaaaatcctagcaagttctttaatgtaaattaacaagctaattctagaattcatatgcatattcaaaagtcgaataattgtcaaggctatcctgtagaatggacagagaggattgaaatttctaaatatcaagacctgttataaagccatagaaataatgaaggtgttaatttggcacaaggatgaaaaaactgactagtggaacagcatacagattcaaaagtagacccacgtgtataccatcacctgagttttgagaaaggtgacattgaagtgtagtgggggaaagggtgttctttccagtaaatgtactttgccaataaaattttgtaatttgataaaaagttatttggaggtggattgcagatctgaatatgaaatgtgaaagctttacaaagaaatcttaggacagttgtaatcttggagtaagcaaaggtttatgagaccaaaaagcattaaccattaaattagaacttaatatttaaattcggagaacttctatttatcaggacagaccaccagtaagaaaaatgacccggaaccatggggggggcgaagattattgcgtcactgtttgtgaacaacagccccggttcagcaacagtgttgggcaacttcattaagcaggcccgatggggaaatttccgcgtggtcaaaaggccacctgggatgggtgagcgtccgacccgcgtttaaaacatggcgtggggtccgaaacagataacccgaggggaaggaggaccaagaagcagcaan

SEQ ID NO: 19374 - DNA, 271 bp, Homo sapiens
attctctgattagattttaaacttttttgatgaaatattgagtcttaactactttaagatgccataatactgaatacagtgctaagcaaaataaatattgactagttctcatttctatctttcaaatatttctaatgctcctcttttatagcatgggctcaggtatcagatggcgtaggtcaagatcttggctctactgtttacttacgggaaatacttttatgttgctaaatctcagttttctcttctgtaagacgggattaaagtacct

SEQ ID NO: 19375 - DNA, 1367 bp, Homo sapiens
  misc_feature 1, 1367: n = A,T,C or G
naacacataacactactgaattataaaaattcaatcataaaagtcaaaatatattacataatatagtttaatgaatcattacatttataataacaaaggccacaatttaattaattggtaagatataatgcaaaaaaaaaaagagaaatgtttgccttatgtatattccctttatttcctttaccttttgtttttccttggacctaaacagagaaaataatgcttatgtatctgaagaaaaggtcagatctattggaaatgacagcccgatacttgagcctcctctttaaaaggtatccagccctgatattttgtgtaaataaaacgtttttaaaacctgttagttaaaacacttaggtgatgggcactgctgcttataaattcatcttttggttgaatcctcactatgctatttggtacctaaaaatattctccaaacccttgctgccagttcctctttgataaatatatagttaattcgaaataaaatccattgcaattcatttatgagttatcttacatatcacaaagaccaattagaattagtcattattcttgatgaagagtctgtttttaatcataaaaatcatgacagttactcagacccaggcatttcaacagagctaacaccaccttcagataggcacaccatgcataactcttgggaagttgagctttgctaaataaaagatatttctgctgatcaaagatgatcaagctttctgtgtattggaacagaaagtaacaaagaggaatgagccaggagaacaaactaattcctttaaataaataaaaaaaaaaatgcaaatgtccttcaccagtaaagcaagcaaatttttaaaatctctgtttttgaaatctactcgtcaaagagttttcagaggcaatgaaaggggaacagatttttcattgtaatagtggaagttgtgtgatagttaggagatatcaacatgcatttttaatcttttccttagatgaaagagatggcttttggcagtgtgttctaaccagaaagaaaggatttgtattactctccaaatctactgtactgtcagcttcactccacctgagaaaaaagaaaaaaaagttgatgctcaaatgctgttattcattaaacactggaggagagccactggggtttgcagtctcatataacgttgtccagatgggtaagttttgatggttggatgaagacatagctataggacgtaataggttggctatacgaatttgaacctaagagagataaggttggcctattgtttaatttgcaagtaaatgcgtgtggttatgacactataaaggagcgccggaaatataaagggatagagacatatgatattgtgtatttctattatatttcggan

SEQ ID NO: 19376 - DNA, 895 bp, Homo sapiens
  misc_feature 895: n = A,T,C or G
acattggattgttaaaagaggagtctagaaaaattaatcctgaaccctaaagaataaatcttaagtggtggatacatgggttgaatagtgtgctccaaaattcacatccacttgaaacttcagagagtggccatatttgtaaataaggtatttgcgggtgtaatcagttaaggatctcaagataaattcatcctgaattataagttgtccttaaatccaattactggtatccttacaagaaggtgagaggagacagaatagagccatctgaaaagggtcagaaattggagtgatgctgccacaaaccaagctacacctggagacatcagaagctggaaaaggcaaggaatgattcttcactagagccttcagagggagtatagacataccagcaccttgatttggaacttctaccttccagaactgtgaaagaatacatatttgtagttttaagtcaataagactatagtaatttgttatggaggcctataacataaatacagagggatttgaagcatgatggcacttgcagaagaaagaaagatatgggcaggcgaccttcactgaacccatcaaatcacaccagggtgtggagaatgactcagatgcgtatattcaaagacacacagttctggttaatggttacagtctctgttggcagcagaatgcctggactgaatcctagcccaccacttcctaaatgtggggcttcggcaaataacatctgtattctgtagtttcttcatttgtaaaatggcattaataccatacctccctcaaagagacattgtggtaattaaatgagagattgcacgttgaactcagaacaatgactggcacatagcactcaatcagatacatattttttaaaaattaaaagaggccatagacaggn

SEQ ID NO: 19377 - DNA, 576 bp, Homo sapiens
  misc_feature 1, 378, 379, 380, 381, 382, 383, 384, 385, 386, 387: n = A,T,C or G
ngggcgaattggagctccccgcggtggcggccgaggtataccctttgcaccttgaaaatataaaataaaataaatttaaaaataaaggtaattttgttcttccatgtcagctgaaaataagtgaagactgggtcagtaataacattgctttgctgaattcagagaattctaataaaatatttttagttgggaagctatctgtattaaaaaaaatgatctaaggctggtaacagtggccatacttataatcccagtgctttgggaggccaaggcagaaaaatcacttgaggccaggagtttgagatcagcctgggcaacatagtaagaccttatctctacccggacgcgtgggtcgactcaagacctgcccgggcggcnnnnnnnnnnactttttttttttttttttaagctgctccttgaggataagggctaactcacaggcagtgcaccaagagccactataaaaagatccttaatgagcaaaatatatcccctattattttcctacaagttgctttttacttgagtaggaacccttgattgatttttgcggacgcgtgggtcgaagcttgacct

SEQ ID NO: 19378 - DNA, 2079 bp, Homo sapiens
  misc_feature 76: n = A,T,C or G
gactgggcttacaaggcccaggcaggacgttatatataggatttcgtgttcgccgtggttggccgaaaacgccccnttcctaagggtgcaacttacggcaagcctgtccatcatggtgttaaccagctaaagtttgctcgaagctttcagtccgttgcagaggagcgagctggacgcccactgtggggctctgagagtcctgaattcttactgggttggtgaagattccacatacaaattgaggttatcctcattgatccattccataaagctatcagaagaaatcctgacacccagtggatcaccaaaccagtccacaagcacagggagatgcgtgggctgacatctgcaggccgaaagagccgtggccttggaaagggccacaagttccaccacactattggtggctctcgccgggcagcttggagaaggcgcaatactctccagctccaccgttaccgctaatataagtaaagtttgtaaaattcatacttaataaacaatttaggacagtcatgtctgcttacaggtgttatttgtctgttaaaactagtctgcagatgtttcttgaatgctttgtcaaattaagaaagttaaagtgcaataatgtttgaagacaataagtggtggtgtatcttgtttctaataagataaacttttttgtctttgctttatcttattagggagttgtatgtcagtgtataaaacatactgtgtggtataacaggcttaataaattctttaaaaggagagaactgaaactagccctgtagatttgtctggtgcatgtgatgaaacctgcagctttatcggagtgatggcaatgctctgctggtttattttcaagtggctgcgttttttttagtttggcaggtgtagactttttaagttgggctttagaaaatctgggttagcctgaagaaaattgcctcagcctccacagtaccattttaaattcacataaaaggtgaaagctcctggttcagtgccatggcttcatggcattcagtgattagtggtaatggtaaacactggtgtgttttgaagttgaatgtgcgataaaattattagccttaagattggtaagctagcaatgaatgctagggtgggaagctggtgagccagtggccattagataaatacctttcaagtgtgagcttagacgtcaaccctaaaatacttaaccgtaatgctaattgtgatcattatgaatcccttcagtcacattagggggaaagtagttggctataagtacgtcattcttagtccagtcagtcttaaaaacatcttgggttacccactctgtccactcccataggctacagaaaaagtcacaagcgcatggtttccaaccatatgtgttttctgcagttatttctcttgttctggccaaacaaccctaaaaatccttaccattccacaaagttggaccatcacttgtgcacccactttgactatgagtataccaccacattgcatttctgtttgcaccatgtcttccaggagactagactactgttgtccagggtcaatttgagtgtaaagaaaatgtagacaaggaattgcccaattttaaattctgactttgctgacttaatttaaatgctcgttctgaaccaattttctcctatcttctctaggggtttcaaaagactcagttaattgatttccaggaagtactcatagcaagttcataaaagttcttgagacctaaatttcttcacaaaaaaagaaaagatcttaagtcatacattttaattgtgtagaggttgttcaactgaaggaataaatgtctattaaactaaaaaaaaaaaaaaaaaagggggggcctttaaatttttttaaaaaaaaaacccccccccccccccctggacctgaaaaaaaaaaaaaaagccattggtggtggtaaactggtttttggcccttaataggggtaaaaaaaaaaccaatccctccccaattttcaaaaaaaaacctttttttccccggctttttagggggggttggcccaacctcacaagggtttttaaaaggggggggaccccggggccccgccccaaaaaaaattctttttccctt

SEQ ID NO: 19379 - DNA, 1042 bp, Homo sapiens
  misc_feature 1: n = A,T,C or G
nggtgcgtgccttgtcttgtcttttgtgtggttgcgttcctatgtgtctctctgtcccgcggtgttttgtcggtcctgttaccctcctcagcccgtgtgtggaatcggcgccgcgatttttaggggcccccctttcctgcccgttccgtggctcagtgccgtttctcctctatgtgcccgcgcccccctgtgttgagaatttttgcgtaggctcccccagtcgtcttcatgatgttaccatttattgtgccaggacagcgaatagcttattggctgttgttacacacatgttacgttccactcttcatagagtgcattcaattgataggatgccttaaatcaatcaactggctcacaacacatttacatattgtcaaagtccatacaaaacatcacaaggatttgattgactctatgcatggtaccatcacacaggaggagggagctaatccagtaacatacattcaaagattaaattgcagatatgcacagtgtatttggcactgttcattaatattataacaccttcctctcaaagacaggcattcttaagcgttagtcacgatataccagaatttgctattcacattaaaaccaccttttaaactttataacagtaaccgattattatagttttaagaaacaaaacacaatgagaactgggaatggaattcaaatcctccaacttcttgctatgctccaagctgccatccataaaacaggtttaattcggtaatttttccattgtggggagtgtcaacaagaaacaatttaaagacagtattttccaatacaaataaagacacatacttttgtttaaaattaccagttcttcttgggagtgcaaagggagccttgatgatgtaccacttgtgatgcttttggcaggaattacacaatatgtaaataatgtgtaaagccagtttttatgattaaggaatcaaatttattgaattttattattgaaagttgaaacttaacatgtatgaacaaaaaccaataaaagaatatatcttttcaaaaaaaaaaaaaaaagggcgac

SEQ ID NO: 19380 - DNA, 1085 bp, Homo sapiens
  misc_feature 1, 2, 3, 4, 5, 6, 7, 8, 9, 10, 11, 12, 13, 14, 15, 16, 17,18, 19, 20, 21, 22, 1084, 1085: n = A,T,C or G
nnnnnnnnnnnnnnnnnnnnnnccagtgctaaaacatcagataagagcctacctgacattttggagaatttgctgtgctgggattgatattccgcattgcctaagagtaaaaaataagacggacgcgtgggtcgaagcttgacctgcccgggcggccggccgcccgggcaggtacaccacaggaggcagaaggaaatcctcaaccttccgaagaaggcgtaagccaggaagcagaaggaaaccccagaggagggccgaatcagcctggccagggatttaaagaggacacacccgttaggcatttggaccctgaagaaatgataagaggagtagatgagcttgaaaggcttagggaagagataagaagagtaagaaacaagtttgtgatgatgcattggaagcaaagacattcacgcagccgtccttatcctgtgtgctttaggccttgaattcatttttgcctaatattaaaatctggccccagctttctttctgttagcattttctgatgtatctttgacctccattttacttttaatcatctgatgaaattttgttttaggtaatttccttggtaccagcatctcattggattttggattttgacccattttccaggtctatttttcaattggaaactttcacacatttgcatgggaatatgttcattccatgttgtaaagtaaaacataacaggttatggcaaagcagcatatttaatatcagctcacatatgtaggataaaattccaaactttgtgtgtgtgcgtgtgtgtatacatacatccatataacatatatcacaaacttaaccaagcttatttctgtgtggtgtgaaattttatttgttttcttctttttgttctttttgcttatatgtactttttaatgaacacgtgtctccccaagattagggtttctccagtcgagccattaattggcccgtttgggcaggggccaacctgtgagaattaaaaaggacccaaaccgggcttccgggaaagggttcgtaaaaaaaaaaaatgggggcgcgaaaaaaggggggaaagaagtaaaaggtgaaacgcagcacatcgcccataagnn

SEQ ID NO: 19381 - DNA, 2538 bp, Homo sapiens
  misc_feature 1, 2, 2536, 2537, 2538: n = A,T,C or G
nnagcctgccctgtgagaccggtgccccgaccgtcggatgtccacacgcggtccccgggctttttttggggaaaccccccccagtcggccccgtttttcttgggccccttgggccatttccattaccctgggccccggcccccacaggagggttaaaaaacttttccagggcccggcccgccccacaaatttttttttgttttgttttttttttttttttttaccagaacatcacataagtttatttcagatgtaacagcaatgttaaaattgacaagtttaattcttaactgcaccaagtaaacttagccatttaagtatttttttaagttattccctccaaaaaactgagggagcttttcttttccaccaccacaccatggtttcccaatagttctctttttggaggacttttcaattgatgagtaaactgctttagatatttcagaacttcattccccaaatgaaagctaatctggacaaactatatattgcatagatttctctacagattctttgctttaaaacctaaatgcaactaacatagtgtaattttaacctatttgccccacagtaaaaactatctgtcctgaaaaatatgatggatatatcctgtgattttccagttaacagaattgttctacttcaaagataattattatcatatatcaaaataaccagctcaacataggacattacttcagtctttactgactcataggcatatgaacttgtgcccagctttttacctcttccacattctcctcctcctccataagtggatggaattatttaactaagtttgatgtaggacaattaaccctttacaaacatttacaattcaggttaagtcactgactaccgtggaaaaagaaactctatatataatgatagggagcctacacactcaattcaaaatttaatattttttcctccttaaataacatgtacttgtcatgaggcagctattaggttttcaataaccacatttagggatacattcataggactgattagatagtccaggtgaaatggttatagaaatagaggcagtgtcatctcagaaaaccatttatatatcaaagtctattttgatatctgggaagtttacaaaaaggctgctgcattcttcaaactacttatgccttctgtaactcaagcactcttctcttgccaagagcaagctgaagcttattcatgaagataaaggtgcttaacgctaaacttttcttctaagcttagatttggattgtttaagaaacgaatacccccaaaaaaccagcaaggtctttctacatttttaccatcttaagattagaaccctataaactcattcatcaactgtcttctttttctgtattattcttggcactcaagattgttgaagtctactgcactttgtactttcacattctcaaataaaaacttaaggttataaagtgtgcataaacattttataaaataattttgtcatttaacatatttggaaatgagactttataccgcaattttacataagaggataaatatgaatgaaacttccttttaaagtcaaatgacagaaagctcaagccctgtgcattattttaaagtctgagaacatttctaaatagtggagatgggactacaaaaggaaaacatgaatatttcagatgtctcccatcttacaaagttatcaatctgtcaaagccactccgtgtgtgccggaaaatgatctggcataaaccagtcctctcagtggaggaggtcacagtgacatttgtattattaacattttacacttctatttttccaagaatagaagcaatatgtttaataattacccctgcctcaaatccttaaactcaatatcacaggcactgagtataagcaaatctgggatgtcctccaacagatgtgcaatagcacagctatgttattctcaaaaatactattttttcctataaaatcaaatgctcagtggccacacttttaacagctggcattagatgacagtaattgaattttttgtgtcacagcccatctaagcttccttttaggtattttttagtatgtccaagagaaaacacctgcttcaggtttatttaggggtagtgacctataaggacatcaactcaatttttaaggttagactattgttgggtttactgaagaaaaaggaacgggaaaaaattaaatcacaacacacctctttaggtcagttaaaggccatatctctagctgggatattaaaaaaaattaatctcaccagcccaaattctaaaagttaatgccactagtaacaatcaacagcaggaaaaacaaacctgctaacaaccagcccactcattagcaaaaaagcagtttaactcaaatacttagaccaaagtataacactaaaccaaactgccccacccaccagcaagaagagaagatataattacttaaaaatcaacataagcttagtatttcttacaaggataacaatgttccaactcccgagagagtgctcagaacgactaaaggtggagtgaaggcaatgtctagggattagtannn

SEQ ID NO: 19382 - DNA, 646 bp, Homo sapiens
  misc_feature 1, 2, 3, 4, 5, 27, 46, 644, 645, 646: n = A,T,C or G
nnnnnactatccagaaagaaaggacanatgggatgtgaagaactanagtgacatagttaaaaatttaaccaaatttaagtgcttcctaaaatttggtgaatgtcttattttttaaaatgataataccaataaggaatgttggcacataattcccatttcattataaaacctctttaatagacgcgtccgaaataattggaaatggcctatagattaaaaagctgagaaagtatatggtaggtagcaaactccccagaagtatgaactctggattagacatctcagaatacatgagcactcatgttggcttgctttgtagctatgaacttaccctgtattattgaaatgtcagcataatgactggaaggtgaaattggtccattttagagcattactattatgctatctgtccatttaaattaataattgcattaaattcattttagaaggtgctattacattagtagtaagaaagtaaattcatatataaatatttgattatcagatggtttacttacagatacttattttcctgtaaaataggagagtttacctgaagaaaaataaaacttttaacttttctgggaaaaaaaaaaaaaaaaaaagtgcggcacctcggccgtttagaactagtggatcccccnnn

SEQ ID NO: 19383 - DNA, 2261 bp, Homo sapiens
  misc_feature 254: n = A,T,C or G
ctgttcttgtactgttcacttgttgattcgtgtttgttgctgttgtcctctgtctttttactgccttgcttgcgtttccttgtcttcgctcgtcgttctgttctgcttctttcgttgtcgtttgtctgctcgtctattccttgtgattttctctgtcggtctgtatgtgcgtctaccgtcgtctctcttgtgtgtactgtcttgcgctgctctcttcgtcatcattcctgtgtttctgcccgctccgccggcgnggcggtcatgaatttcgggggttcgcctggagccccccggtgtatagatgcgccccattgggccctcccgaccctccatctcgggtttggggtgccagagacaccccgggtgtccccccgggggctttttttttaattggggggagaaaacgccacagccccttgatgtccggagccggggttttcctttgggaacaccccttgggccacaggttcaactaacccatccgggggccgccgcgcccccacacgaaattggttttgaaaacctttttccaggcccgagggccccaacaaatgtttttttttttttttttttttttttgaactttaaagatcagatttatttggagaaaacaaaaaacccacaacccaaaggatgggattttacatcaagacatctcccaggtaataagtctacagattacaaatcattttcatagaagatatttttgtacaaattttacatgtattcaggagcgggacattaatcaatccctgtttctattttaataggggggacaaggtaggggagagggaaaaacagttttggatataactatttggaaggagagtagacatgaagagggcaaaccctagcttttcattatctacaatcaatagtttgtttttcttttttaaaaaagaaagaaaaaccctttcaatcttcaatactctttaaaagcccacttcttagctactggccaatccacaccaattatttaaattcacttggtacacacctttgtccactgggtaaattatattcattatgcccactgctgcagcacgcataaaccaacacccctgcatggctgaacagggcctaatctaggactgatgggagaagggcttgcaaaccaagatcaaggtgtttctccgctaatactgtctaccaagctgatccctacaaaaatgcatataaaagcaggcaagtttagctactgtgttgcaagagaaaccaggaccttgttaaatagttctctccattaccatttattctctcaagggaagcttaaaaaaaaaacaacaacaaaacaacacattggtctggccacctcatgaatccaacaagcattagtgtggcatttcagtggagaaggaaacttggggggaaaaatcccatcaaggttgtaagaaaggctcccaatttaactgtccctgtccctatttatccatcatccaagaccatccattattctagagcactctgatcaataaaaggggtccaagcatcaggagcaggcaaggagaaccaaaagacatcaagaaaccgatttgcttgagaaaagcagcgattcttcctttcagagttctccatggctcagaaaatgcccaagacatcatgtatgtgacttagatactgctttttgggaggttaagagtagcatgaagaacttaagatgacgataagagtctaaatttttagtttcaaggtttcaatagaatgtggatatattcaaaactttcaaaaaggacagtgtttagaaagggtaaaactaggacacagaaaacactgggaattaccacgacccccaagtgcttccggctccaggaaataaccattcatgtgtttgctggaggtcacacaattttcccctattacctggtgcaaaatgactcatcacttcccaaaagcttcttttcaaaccacgattttcccatttattttggtccaatgcagtcccattctttatggcctatagtctcactcccaactacccccctggggggttaaaaaaaaaaaaggaattccctctaggctggcccccaaaactcagaattaaataagaggaggggctggcagcctcctggagactagaacaacttgaggctaaatctacctttccaagagtggaaaatttattcagataatgtttgagaattcatatatgccacaataggataaaaactaaaaggtagaaatctcactcttttccttctacctccctcccctactgcccaaccaggttccaggcattatatcactgtcattaccatttctgc

SEQ ID NO: 19384 - DNA, 282 bp, Homo sapiens
acttgttttttcttgctggtaaatagcttttttttaaaaaaaatctaatataaaagaaaccatgtttatattttgttagtgatcaatgactttgtttatatggaaatttgtatattgttggcacacattttgttgaggtttacgtgcatgaaggcctgcaataattagcacaatgaaaactgctttttcttacatgttcatttttttgaaagattgtgacgtagcagagcagctccctcgctgcgatctattgaaagcggacgcgtggtcgaagcttgacct

SEQ ID NO: 19385 - DNA, 582 bp, Homo sapiens
  misc_feature 1, 2, 581, 582: n = A,T,C or G
nnaccatcttttaacaaatggatttcctcacccagtaagtctcatttttttcacatatacttgtagacccaaaggtccttaagttacttaaaaccagtcttatcagtggagatcctggaccatcccctattttcttttaaagtcactttcatttttacaacttgaagccatataccagcatggtttttatacactaaggactctcccagtgatgaaaatgtattcccctccatttgtgcaaggaggtatgtacctgcccgggcggccggccgcactttttttttttttttttaggagtgataggaatttctttaatttctacagaaatccctctaacagtttagtggagaatgaaatagatggctgtgagaattgagagcatgaacgtgtgcagactggtggagaagcccaagttttggcatgagaaatacagtgaaaaatgcagtagagtaaatggagtgaaggacacttgcgagaatgcggatcggtaggacgtggtaagtaactgtggtgaaacggtttttgatcactgagaggtaagcagaagtctcctggagcggacgcgtgggtcgaagcttgann

SEQ ID NO: 19386 - DNA, 862 bp, Homo sapiens
  misc_feature 1, 859, 860, 861, 862: n = A,T,C or G
ncgtccgagccgccctttttttttttgtttggacattgggtacagctttatttatttcttttaggaattgcaggttcctaacaaagtaggggtgaggggggtgttacaaaccagtcactaggcaggaacattagactccaaaagcagagaaatgcttaatttttcttctacctgtttcaccacattcatgtagaactgtagtaaaaaagatggtgaatcaggctgaatcaatctaaataacaacttaaggctcccaaatcacatgaacctaggaccactaaatccaatgtcagacgtgtttaaatggtgcactgctctacatttttctattatgcaaagagctagaaaataatggtagtgtcattatgacattccatgaaaatgaagaaaatctttcaggaaaaattaagaaaataaaaatgtttactaaagaaagaatggtccggctaagtgcttttttttttttttttttttttaaaccaactgaaggccagagaaatgaaaggcatacccgtgaattaaattaatgctttaaaaaaaattgactttacttaaaatacaaacaaacgtcaactaatgaatactttattggcagaaaaaaaagacaacttggctggaaatgctgagtgtcttggactggtctgaaggaagaacatctgaaaggtctgaatgtcaaagtcagaacagtctctggtcaatcctactttgcttaaaatccaacattttacctttcttgtcgacgcggccgcgaattagtagtagtagtagtagtaggcaaccgctctagaggatccaagcttacgtacgcgtgcatgcgacgtcatagctcttctatagtgtcacctaaattcagttcacnnnn

SEQ ID NO: 19387 - DNA, 1444 bp, Homo sapiens
  misc_feature 1, 2, 3, 4, 1444: n = A,T,C or G
nnnnggtctggctctgtgtggtcctgtgcgtcgaacccctggtgtgtgaaagccggtgcccgcggcgttttggggggaacccaccccttctgtgcccggtttctgggaccctttggccgtccaatacccttgggccccggcccaacggagggtttgaaaatttttagggccaaccgcgcacacattttttgttttttctgttttttttaatttttaagcttttattttatcactcttatcaaacacacatcagaaagcattatcaacagtgcatcttatggtaagtcagtttacaacaaaactgaacaaggcaattgtgtttacagaaaaagtcttcagcaaaaaagtatgcaatacagtcaactgaaacgcattgttcacactttttaggaatataggaaagtggaaaataaaagttctttgctattcagcaggaaagagtttaaaagacttgaatggaaatcagaaatttagggatttgagaaaataactttttggtactgacacacatctacatacatagtcccacttagtttttgttttttctttaaaaaaaaaacaaaagctcacaaacaataagacatcacaaataatacagcagaaccacagtgccaagaaatgccaagaccaatatgctactgaaacaactggtagaaatgttacagacaactattcactatgtattgtaatattcttgtagttctgaggtgaaggtaaaccaacaggagagattactccttgtaactggctttggtttaagtgatctttcacatttttttctaaccataccttcttataaaaaatgtagcaattacatgttactgagggaaaatagtactaggttttaatattcacaaccaactactccagctgacacaggatgccatcaaccattaaaatttattgatcatacttagattttctaaggctgatcaacagatagcaaagatggaacccttttgggaaaaaataaaatcccttctaccccagttttgacactgttaagaagttataaaggaatgttaaattatttaagatatttcaaaaaagaattaagaatggaagagtaaattctgctggaaaagatagggcagctttacagtctgcaaagtaaataatctacagaactgacatgattaaatacataactcacatgtcaaaaaggtgcatcacattcaaacagtcaataaataatacaccaattaacaaatgtatcaaaaggaataaggaatgtgaatcgcagaaagtagaagaaataacataagagaataacacaatagaaaaaaggcaaaaaatacattaaatatgacaacaacataaataaaagaacaaaacataattcgacaaacaaaagactaagacgatataaaaaacaaaataatctataaagaggaccataactacgtacttctctttacttttcttctttctttcgtctatgcan

SEQ ID NO: 19388 - DNA, 477 bp, Homo sapiens
  misc_feature 461, 462, 463, 464, 465, 466, 467, 468, 469, 470, 471, 472,473, 474, 475, 476, 477: n = A,T,C or G
ctagcttgagtcgacccacgcgtccgcactatagggatctagatcacgtgcggccggccgcccgggcaaggtacccagtaatcacataaattctgcaatcatctgtttatttagcttaactgtttttttttatttgttgaagttgttgttgttatttcagtctttttcttattgggttgaccagacttggtaaaatctgtaagaaagttccataattatggggaagatttcctctgaattggctaaattcctgtagctgaaaaaaaaaagaaaagaaaaaaacaccagcaaaaaaaaaaaaaaaaaaagcggccggccgcccgggcaggtcaagcttcgacccacgcgtccgcattaatttaattcacgggtatgcctttcatttctctggccttcagttggtttaaaaaaaaaaacagaaaaaaaagccccttgcccggaccatctttctttagtaaacnnnnnnnnnnnnnnnnn

SEQ ID NO: 19389 - DNA, 641 bp, Homo sapiens
  misc_feature 1, 638, 639, 640, 641: n = A,T,C or G
ncaacatgtggatacagtaatatgatcataccctcccttgttcccctctaggccactttcccctttaaatattaacaccatcataatcatctttggagaaagacacctggatctgtcctgaaccttggcaaaaaataaataaataaataaaaatcgacccacgcgtccgattgattaatacctgtcacagatacattttggtttacaaatcaatgaacaatggagggaactctgtccttaatcttggtacgagacaatgaaccccaggtacttaccccagacaacgacgccgcttcaccatgatgatggacaacaggcaactttttttttggagtttcagcttgcttccaacagggacggtgagtgtgaggtttattcccatttctaagacgatagaagttttcagcctaagccgtattcctaggtaagcagctggattgcagttttgtcttggaaattctccttaatgactaaaagttaagattaacaactagctggtcttaatttctccttaccattagagtacccagtaatcacataaattctgcaatcatctgacctgcccggggcggccggccgcccgggcagggacaggtcaggtggaaaggggaagtttgaggagacagtggcaatgaaannnn

SEQ ID NO: 19390 - DNA, 584 bp, Homo sapiens
  misc_feature 1, 2, 3, 4: n = A,T,C or G
nnnnttagagacagggtctcactacattgcctagattggtctcaaactcctgggctcaagcaatcttcctctcttggcctcccaaagtgttgggattgcaggtgtgcgccactaggcccagcttgaaaaatttttaatgcatgtggtaatccacaggagatcacatttagtatatgaccaagttaattaagaagtcaaaaaacacgttaaatttaagcagaataaggctgggttcggtggctcatgttagtttttatccttaaaattgtctgagttcttagaacacagaaaaaacaaatttgaatgcatttctaacagcttaataatttatatgtcccattatgattttagcggaatgttttaaagcaaagcataattcactgcaaagataaacctgaaaaagcaaacaaacttacaaatggtatgttatgacctagacaaaactgattatcaactagtaatactcataattagcacatgcaacagattgagaaattaaatcctgtgctatatactcttaagtattttgtcagatatatctttaaatgttctatcaattgcattccttcggacgcgtgggtcga

SEQ ID NO: 19391 - DNA, 305 bp, Homo sapiens
  misc_feature 174, 300, 301, 302, 303, 304, 305: n = A,T,C or G
cggccgcactttttttttttttttttttacaactcaagctacagataacccagatgaagtggcagtagggccagattgcactgtgctatataaagaggttaaaggtgagaaaagtcaacctgaaatcggacgcgtgggtcgaagcttgacctgcccgggcggccgcctcctttntttacttcaaatttgcgctcataatttatattaaagttcccttttcccgctttcatagattccaaagtttgagaaatgcaacatttttatttgtgaaaaaaaacattcttttccccacggacgcgnnnnnn

SEQ ID NO: 19392 - DNA, 270 bp, Homo sapiens
aggtgtacaagcttcgacccacgcgtccgcatttttctggtgttccctcttacgtgcacaccccttgctcccctttgggttgacttataatctgacttttgtgacagatgttaggaggtggagcaaaggaatttcagaccaatcagttaagagactgctgtggggtaagaaaaaaaattagcctcttaaaattactcttatcaaaggaaaaaaagttggaagcacatgatagtataaccagaaacatgacacagaagaattaagggaaga

SEQ ID NO: 19393 - DNA, 715 bp, Homo sapiens
  misc_feature 1, 2: n = A,T,C or G
nnagctccaccgcggttggcggctcgaggtacacagttacaggcaattttcttaataactccctttactatgtcagacaagctatgtcaagcgtcttctgtatcctctacggggaaaaaaaaaaagttaaccagagccaaatgcttgctttcaaagataacttgccatcctgaaaatataatttttacaattcaataacacctttttgaaaaataaaataatctggcaaaaatgcccatgcattaacaaaccattttttcagtttaatctctttatatgttcaactttgatgtattttaaataaacaaagcaaaattcaactaaaaatacaatctggattccatagccaagggttttatttacaatttcctagtaggaagtctttattttagctttcaatgtgttgaacttataaggaaatttaacgtatacatgagtattatatttatggaatgtgaagatatacagaatggaaatggaaaataatgttaattcgtattgactttgaggaatcttaaaatcatgtagccctgttgcaacaagaaatagtgaacttctgaagaacagaagaacagatcaccttggtgctctactataatgagcaggttgcttaacagaaaactgagcagtgtgagcagtgcagcttggaggaaaacaagagccttattgaagatgatgtattccagattagtgataaacacttgtctaacaatgt

SEQ ID NO: 19394 - DNA, 870 bp, Homo sapiens
  misc_feature 1, 869, 870: n = A,T,C or G
ncacttggatcaaatcagtggcttatccaagacaagagcaactgatgctattcaattgatttatcctatgtatctttgggtgtaactgagcagagattgttagaagtgaggaatgagagaggctgggaagcagacaggaggagtgacttggctgtgaaaagtgctaaaacagataaaagactatactgacaggcaaatggagcctgttatgacactgacattgaaggtgaaaggagaatccagttcacattagccagggtctcagggaccaggttttgaggcagtatttctgcctcttgaggacagggcagagcaggtgggtaaaaagcaaagagaccagggaagggggactaaaagtaagggaaacagcatctgaggaaaggctcctctgactggattttcacaaacattatttattaacctcactaaacaaggataatgggacaaaacaggggcaagctggaaaaccagcaggggtatttggcagccagaaataaaagggagtggtccaggtgtccaagattatcattcaaaaggagtaacattccattgatattaggtttgtgaaattgaatcggacgcgtgggtcgacatagtacgttaaaaaataacaaactaggcactgtggcacatgcctgtatcccagccctttggaggtggaagaattgcttgagcccaggaatttaagaccagactgtagagacctccatctctacaaaaaaataaaaaaaattagccaggcatgatgggacacgtgtggagtccaggttacttgggaggctgaggcaggaggattgcttgagcccaggaggtgggagccgcagtgagctgagattgcaccactgcaccccagtcaagtgagacggacnn

SEQ ID NO: 19395 - DNA, 681 bp, Homo sapiens
  misc_feature 1, 2, 12: n = A,T,C or G
nngtcaactggnaacctcagtaattcagaccccacatccccgaggtacatcaccctgctgagggacatccaggacaaggtcaccacactctacaaaggcagtcaactacatgacacattccgcttctgcctggtcaccaacttgacgatggactccgtgttggtcactgtcaaggcattgttctcctccaatttggaccccagcctggtggagcaagtctttctagataagaccctgaatgcctcattccattggctgggctccacctaccagttggtggacatccatgtgacagaaatggagtcatcagtttatcaaccaacaagcagctccagcacccagcacttctacctgaatttcaccatcaccaacctaccatattcccaggacaaagcccagccaggcaccaccaattaccagaggaacaaaaggaatattgaggatgcgctcaaccaactcttccgaaacagcagcatcaagagttatttttctgactgtcaagtttcaacattcaggtctgtccccaacaggcaccacaccggggtggactccctgtgtaacttctcgccactggctcggagagtagacagagttgccatctatgaggaatttctgcggatgacccggaatggtacctcggccgccaccgcgtggagctccaattcaccctatagtagtcgt

SEQ ID NO: 19396 - DNA, 330 bp, Homo sapiens
cttcgacccacgcgtccggctctccagtttatacatgaagaaactttccgaaagtcttgcagcttgtggagagcagagctggagagcaggctagtctgattttagaagggagttaaccattacataacctgcaggtggcttctccccatacctgccgtgggataatatggctcactttttacttcatttacaatatttaataagtgcgattctagacttgagaagagaatattttctgctaaaatttatccccactagagataatcaccagtgaattaatacactgcagcaccggaaccagtcagcttttttggtaatcattcccttcct

SEQ ID NO: 19397 - DNA, 200 bp, Homo sapiens
  misc_feature 1, 2, 3: n = A,T,C or G
nnnggagctcaccgcggtggcggccgaggtcttcgactacgcgttcgcaactggtgatctaacttctccacttgcatgtctaattggcaaatcaagcctatcatgttccaaacgagttctgaagcaccccctctgccaaatctacgtctcccacagccttccctatttctctacctggtacctgcccgggcggccgctcg

SEQ ID NO: 19398 - DNA, 435 bp, Homo sapiens
  misc_feature 433, 434, 435: n = A,T,C or G
cttgagtcgacccacgcgtccggagatgtatacgccactataggaactataagaaaaagtcaaatggaaatcttataaataaaaaccacagtcactataatgaggaaatactttgataaggtgtcagtgaactcaaaaatcaatcaatagaaactactcaaactaaaactcaaagagaaaaaaaaagatgggagataattattttttaagaattggtcatcaaaatgtagcaacaagtttgccttatcctatatcatttgaattttcaaaaaataagctcattatacaatctttaaaatattttgaatagaactgtttcatgtgttattcgtgaaaattagggaaaaagcagtaaagaaacattctgtgagaaaacctatctaataaactcagaattgaggttcttagaatatagaaaaagaaatgtggcaannn

SEQ ID NO: 19399 - DNA, 767 bp, Homo sapiens
ttttttttttttttttttccaggtaatagtgacaagcccttattctacaagaagagagcacaaaagctctgtttgagaccctctcagaaactgccctgtgtgtctcttcattcagctgctcctgagttgtatcttctacaataaaactgtaagtataatgctttcctgaattctgtgtcattctagtgaatttttgagcttcaggaacgtcatgggaagctcagggatttgcagcctctgagtatgaagcgaggaccatcttgctggagaccatactctttaacttatggggtctgcactaactccagatggttatgagaactgaattgcagtgtaccagtttgagttgaaacggtatgtgacttccccagctgcaccctgggcagtgactgcatgcatcactgagaggtcctgtctacagcagataaaactccacagatcactcctcctgtaatccctctaagtgctccaaggcagcagaaaggcccagtgcattgaggctggaagcaggagcagagactctgggatatagtgcgaaagtctctttcccctgtagttgggctaatctggaaaaactcaaaaacctggcctgattaccgaggtttcttttatggatatttagtatttagataaaatttttacagtattcttgaaatgaacccaattaaacacatagttctcagtcttgaccacacattagaatcatctggtagacttctgtaaactaccaatgcctggccagataaattccggacgcgtgggtcgaa

SEQ ID NO: 19400 - DNA, 1083 bp, Homo sapiens
  misc_feature 1, 2, 3, 4, 5, 6, 7, 8, 9, 10, 11, 12, 1080, 1081, 1082,1083: n = A,T,C or G
nnnnnnnnnnnnaagccccttcccgtacttagtaacagttgtttctgagaaggagattaccagctagcagaatgacctgcatggacgttactgcttaatctgatgctcttatacaattaaaggattggctctgctctcaactgtaatcttagtactgctgaattgtgtactgacactgcaggaaacagctctgttcaacaaagcgctgctacaaaggttctccatgtgcgcctgtacatggacaattaagttttaacaacaaaattagcagaacaactggatgttctggaagttgagatcccttcacttcattttttttccttcccccgctgccaaggagttatcctgtggactgcccgaaagatccgcctgtcaggattgtcttacaagtgttctgagtttctgtgcaaacagcaacttcctccagattaattgttgaggatgtatttacacctagtgtaaaaatgactgttaaactgctgttgagtaaatctcaaaattactgttaaaatgctgctgagtaattctcaattctctcagagaattaattgccttctaacatttgcttccagttgcaagcacctatgatttttaagagactttgtataaaatataccatttctgcatagagaaccaaattgctttcggtacattgtagttttcttagccatttttcaatagtctacacagtgtttatgtttccttttatttgtgtatagtggagtagaggggaggtttttttattcaaatagaagaagctaaaactcaaatgcaatgtcagatctcacaataaactgacccaatttctgaaacccaataaacacatttcatttgtaatattctttattatatagctctatgaaaagtaatttgtgactttcgatcttaaaagagagttttaaaaatacacagtaaattgaaagaaaaactactacatttaaaacagtattttcctgaaaacatagaatgaaaatgcaagtattttgtgcatggcagctgtttttaaggaaccaatgttatatatggtgaattttgtggaagactatggctcttaaaatatttcttataaataacatggcnnnn

SEQ ID NO: 19401 - DNA, 374 bp, Homo sapiens
  misc_feature 374: n = A,T,C or G
acactgtgtaagtggtcaaagatagacatggttttatttacaaggaaatttgctgaagtgtaaattataacacgaagagatgggagggaggggtaaacacctaaatgtctaacaacagagaatggttctctgttgatacaaaattatgatacatcaaaaaagaacaacaatcaaattctctgagaattcccattacagttaaaaggagctcccagccaggtgcggtggctcacgcctgtaatcacagcactttgggaggccgagtcgggtggatcacgaagtcaagagattgagactaccctggccaacactgtaaaaccccgtctctactaaaatacaaaaattagctgggcgtggtggcttgcacctgtagn

SEQ ID NO: 19402 - DNA, 2088 bp, Homo sapiens
  misc_feature 2084, 2085, 2086, 2087, 2088: n = A,T,C or G
ctcatctctaaagccctggtgacactccctgcatgtaaaaagtttctgcctggaatgtgcttttttgtgtatgattaccatcatcttccggctgaagtcttgcccacgctctgcacacttgaatgctccccatcttgaattttctattcctttcaatactttgtctatttctgtaggattttccctctggccttgactagactctatttccactacactgttcctcctccttgagcttactgcatgtcttaggggtgggctggaaaatgccatgggcttagtgcttttttctttctcttgaccttcagctgtgtcactctggaagctttgatcagaaaattgtagttgctgttgcctctgatgtgcaagtccaagattcttgggccgcaggacatgttctgcatatattcctgcacaggggcctggccggcgtcttctctcttctccccagggcacttccccttgcccctcccgcctgatgagttctggtttagaatggagaattcctagtgagaccaggtggctgtagttctccagtgtcacctccctgtacagggccctctgagcagggctcagcagcctccattccttctgggtgaaatccacagtgacatccccaaatgccaagaaagcctgtctcctggctccctgaggtcccatgactgtcttcctgctctccacggagaagggaagcttgcagatggccaatctgtgggaggagggaagtcagagggtggctgggtgcagctgccctccccatgtgtgacagttggtgtgattccaataccaactggggatctggggagggcgcacctgcacaattcccctgtggggatctggccaaaaggtctagggagccaggctccctgcaaatccaggacaagctcatctgggagtgaagtgtgccccaggagctgggtgacgtttgttgcttacatcactgaggggctaaaaggatgaggaacacctgcagatgaggtcttgcatttaaggttagggctcagagttccaggtgttctttgcactggacaggagaatacacaagagctgtctgcctcttctagcctctgtctccccgggtttgaagtcaggataaccacaggtgcagacaaacttgagaaggccacaggcagatggcattggcagttattcagtactgtacaacaccaaagcctttaacaaattaatagcatggggagtgtgagctgtcaggaataaaagtcctcagacacatggttaatctaaggcaatgagtgatccaatgcaatttggatcctgattgcaacaaagaatatgtgaggagtattaacagccagtgaaatctgaacactaattggatattagattatcaaacattaattttgttgttataaaagtattttgggttttaaaaacatgagcccttccttgtatacaaacttttggaacattcatgagtgaaaatgatgtctggatgtgcttaaacaccccttctcaccctcaaaagtcaattgagcattactggccacacttcataatttttagaactgaataatgtgtactgggttcattatattattttctccgtattttttgaaaaaaattccagtagaaatacaggaaaagaactgtaaattaaagtggtgggtgtaatgatttcattagagtattcactatacttttaagtgaatgttttgactaaaaaaataaaattaaaaacacagacatataggggtgaaaagaaggaaatgtgaaggaacaaagatgctatcatgtggtgattatgatgaacacagcatacatccactagccagtaactttgagacagaagtgaacaaatactatggtgttatgaaaagaaaataaaactagggaccccagtccactctgccaaaaggaaaaacattaagctgaaagctaagtcatgcaagaagctgcctttccttttgttcttaaggagatagctacagataaaacgttaaatatctccatagtagctactctatgcacaccgtatcttatgtaaagtgctgatttactgagtgtgagatgaatgcataactattttcctacctgctccttttctcttgtcacaggtggattannnnn

SEQ ID NO: 19403 - DNA, 1668 bp, Homo sapiens
  misc_feature 1, 2, 3, 1668: n = A,T,C or G
nnnacgcggcctattctcttacagctaggacccagcgttctgggcagaatagcaggcagcgcagtagctactgagattataagtggtaggtttatggagctgtgaccacaactctccacaagccagtgctgtctcatgcaagcactctcagtgtccaagtgctgagtgtgtgagtggtctgggctttgcagggtcggccaagctcttggaagagcaggctttgttagctggggagtcatcgctccatgcaggccctgagaatggagcatcctgagtggactggtagagatggggcatgggtcactctgagggtttgagctacttctgctatttttgaaattctggtttgaactgcaggattgtgctgagtttggcacagactaatttctctgttggcagcacatgatgtatcaactcatgtgtcagttggtttgatgccactctggaccttgagagttccaaagggctattgagggagaaacctgacttatggcataaaatggggtactgaatttgggaggctgaggatgctaaatggtgtatgccctgcctctgttttattgctgaattgtgtctctcagtggaggttcttagaggcttttcaacaaaacctatgctgtcagctaaaaggcttttaggacttcataatcatggcacagtatcttttcctttttcttaaaaaaaagaacttttcctttcttttccccacctttttgaaatcgttagccttcatgtgaactgaaagggacttcaaaacattggaagaaaatagtctgaaagctcagagtgtgcttggctcctggtaggtatgaaggcttgataaagaggcatcttttgcactgacaggtgtttgtgtgccagtgtggtgagggcttttgatgacaaagccacttagttttctctagcttacccttccctttgtgcagaggagttaggaaaactctaataaagtaactaaataataaggataaaaagttagcattgttgtttttttcttcatctcctcttttgtgcccatcggatttttgagactcacttttcaggccctaagtaagcaagaggcagaggtgaggaggggagtgtctgtcactgtccctatggcgctggcatatgctgctcttcaaaggtctagcatcagcagcaacatccttcttgaagccaaaggaaaatttagatgagtggcagcgctgtggctgaaggtgggtatggaaaggagaggcactgggtggggatgctaaaatactgccttcctgttccccagaagcgcagtcacttatgttcccctttatggccaagagcccccttaaccctcagcatacagttttctttcccttcgtgggaaccaactgaaattggcaaactgtgaccgtttgtgacgagttatctcagtcctcacatgagttcttacatgagtccctctatgaccttgtgcacctttcccagaaagataaattacataggttacaaccaaaggagcatgtaatgcctacttgttatttcatgtgccttgtaagaaccagagagggacctccttgctgaaccgcctcgaccatggagtaaagagttaggacatctcactgtacagcagtcaccccattgtgggcaaaactatgtcaacccccttggatttttagtaaaaaaaaaaaaaaaaattggcgcggtttacan

SEQ ID NO: 19404 - DNA, 339 bp, Homo sapiens
actggatgacagcaagtgcacacatcaagagaaagttaccattcagaggtgcagtgagttcccttgtccacagtggaaatctggagactggtcagaggtaagatgggagggctgttatttcccctaggtcatctcttacattctagttctggtgctctctatctgtttaagacaaacccttgtgcacctttctcccacccctccctttctcccttgtctcccttgagaaaacaactacagttctctgcctgcaccatgactgtcgtacgcgggggcagtttggcggtcccgcgggtctgtctcttgcttcaacagtgtttggacggaacagatccgggg

SEQ ID NO: 19405 - DNA, 308 bp, Homo sapiens
accgctgtgtccgggtgagtggtcagaatgccgtgctccaggtgttcacagctgcttcgtggaagaccatgtgctccgatgactggaagggtcactacgcaaatgttgcccgtgcccagctgggtttcccaagctatgtgagttcagataacctcagagtgagctcgctggaggggcagttccgggaggagtttgtgtccatcgatcacctcttgccagatgacaaggtgactgcattacaccactcagtatatgtgagggagggatgtgcctctggccacgtggttaccttgcagtgcacagcttgt

SEQ ID NO: 19406 - DNA, 512 bp, Homo sapiens
  misc_feature 1, 2, 3, 4, 5, 6, 7, 8, 9, 10, 11, 12, 13, 14, 15, 16, 17,507, 508, 509, 510, 511, 512: n = A,T,C or G
nnnnnnnnnnnnnnnnncaggttgacccactccgggtgtatttgagcaaaatcttggggcttcccacagtacttggcaagacacgcctggctacgaacaacatgggacaatgggcagcctcgctgcactgcacagaggaaaggaaagaggccttgcagccactgcctgggaaggagcagcacattctgcattaaccaggcatgcctcactcactgcaatccccaaacaagcccaactctccgtgttgattattcttaccatactccaccagaaagcagcatgattttctgtcctcaaatacttcagattccaagagaactgcaccttctagagtctctactgataacctcagccacttacccacttgaagcatcagcacacacttaaaaaggaaacccgctaagcactcctgactcagtctctccaggcctgcgggtgaaggagctgattcccctcacttttcagaagatggggaagaattcagacttcaccccatgccccatcccnnnnnn

SEQ ID NO: 19407 - DNA, 833 bp, Homo sapiens
  misc_feature 1, 2, 828, 829, 830, 831, 832, 833: n = A,T,C or G
nncgtccgagcttggccaatatggtgaaaccctatctctactaaacatacatatattagctgggcatggttgcgcatgcctgtggtcccagctactcaggagactgaggtagaggaatcacttgaactcgggaggcggaggttacagtgagccgagtggtgcacttcagcctgagtgacacagtgagacccctgtctcaaaaaaagaaaaattttttttaaactactaatgcatattcattgaagaaacttatcaaatgcatacttgctagaagaggaaaaataaatcacccatagtcacattctccggagaccatcaccctaggtacatattcttccaacctttcttctgtgcataatcatctaggtgtggtgcttacattttcttttggcagtgttatcttagtatcttccagcatggttttctcacctgatactgtaaccatacttccatatcctcaaatgtgttgttttctaaaataactttttttttctttttttagagacggagtctcacttggccaggtgcggtggttcacgcctgtaatcccagcactttgggaggccgaggcgggtggatcacgaggtcaggagttcgatgaaaccccgtctctactaaaaatacaaaaattagccaggtgtggtggcgcacgcctgtgatcccagctactcgggaggctgacgcaggagaatctcttgaacttgggaggtggaggtcgcagtgagccgtgatcgcgccgctgcactgcagcctgggtgacagagtgagactctgtctcaaaaaaaaaaaaaaagatagggtctcactctgttgccaaggctggagtgnnnnnn

SEQ ID NO: 19408 - DNA, 544 bp, Homo sapiens
  misc_feature 542, 543, 544: n = A,T,C or G
acgcgggacatactccctaggtgtctgtgaggatggtggagggcgatatttctccatgtccgggaggcttcctggagcaggtgctgcctctcgtgactcttgaaagatgcttgtgaataaagcatactgggagctgagctgctgtttagtaattaaaaatcctttccattgtttagagctcagcacctttgtgcattcatattacgcattcattttcgtatcattgttgaatttctcacttctgctactgcaatgtatgtctacagctgacaagtcttccttgggagccctacgtagctcttttttttcttttctttctttttttttttgagacggaatcttgctctgtcacccaggctggagtgcagtggcgcaatctcggctcactgtaagctccacctcccgggttcacgccattctcctgcctcagcctcttgagtagctgggactacaggtgcccaccaccacgcctggctacttttttttgtatttttattagagacggggtttcactgtgttagccaggatagtcttgatctccnnn

SEQ ID NO: 19409 - DNA, 583 bp, Homo sapiens
  misc_feature 582, 583: n = A,T,C or G
acactctgccatgaaggttctggggtggagagggaagcaatgtatatcctacccatggtgattggtccgatggaagtcacatcctgatgggaaaaaaggactgagccagagtggactgtctaaaccaaaatgggataaacaagcatggcatggagccaaaacaaatggctaagtcagaggtcctaatgcagaaggctggacaactaggatggtggggaaagacatgagcttgaaggacttcccaagataaagcagaactaaccagaagagcctgttatagattcatattgggggagttggggtggtttgtgcagggtgcatcaaaaagcactcgcatggaataaacatatcttgcacaggaacatatggcaggtaattgaatagtttgatttgaactatgtaaagacatgatcctgatggtcagcacaggcatggtcacagcagtcacccacacatgaggctaaacagatgcaaggtgaatgaactcagctatagctcagagagaccagctgaggaggagttaagagattggagtctaatcaggataataacacttgtaagaaatcaggtaatccccggtcnn

SEQ ID NO: 19410 - DNA, 1732 bp, Homo sapiens
  misc_feature 1, 1732: n = A,T,C or G
nagttgtgggtcttcctttgcaacgtttcttcttcgctgtgcctctggtcgccatcacaaactgcattaggaaatgagagcgagcatgtggcctggcttcttgatggagatcgtcctcgctcttttcataaagggtcctagatgaacaccgattccctcctgtggtgattggctatggcagccagtgtcccgtgtcctctccatatgaggagtgagggcctgcagatccctccattggccagcctggttctgggagagagatactgaactcagcttggccctggtcccatttcttccagtacccgctggtggtctctgccctcaccagagctggaaggacttgatgtggtttgaccacatcactgtaggattttctcccagatggggatgaccagctgcatcactccccagagtccttccggagaaataaaagcataggcatggcggctaagggaagaaggcataagaaggcagattgaggattgttaagaagactccgcccttgcccccagctctgcctaccatagtattgctcccttttggtcactgatgcacatgactaagaagagttctctcctgagtaactacatgactttggagatctttgtcattctcttcactgcttatcttccagaactcatgattacccacacatgcctttttaccaggcagtaagaaatgcagcccccctaggtagtagcatggtcccctccttggcccactccactcttgccctcaacctctttcaaccaaacattatcacccaccttaagaaattaaaaaataattctgtcccagtctgtctgaacttagtacatgatccaggatgtgatgggatcttagggcttggctggaaggtttctccagtcagccatctagcagagctgcagatctgggctgggctgttggctaaagtgctcttcacagacacctcattcggctcttccttcagcttcttcacttatttcttactcagtcactactcagctccttgtccatgtgtccttgaagccatcctaggtcttattctgattctgaattcttcagtcacccataagcttgtccttaccgggagtcagtgggtgtgtgttcccaggtggacttaaccattcttctcctttatgatcctttcccttgggtggacaagtgtgatttggttgtaaggccatttttcaagttgcctatacattgataaaagaaatcccactaacggaagtagactgcatgccagatttcagtgtctttctccaggggccaaggttggacccagaagtgcatggggtgcttggtgtcgttcagtgatgtagtaaggatacacggttccagacacggcacaagaaatgccttccttggcagttcagcaccttttctacaaatctttattctctgtgagcatgacaccctaccgtttttttcaaccggttgtcgttaaatcctaaaaaataagttgttctacctttctgttctacagacccacagatgcagggcagtcagcggtggcagtgtttgaaccatcaattgggaggggaaggtggtttcctgtgcaggaggggcaggtcagattgcaggatagttgtgctcaggcgcaggtgggcaggcacgctaaacacattggttttccccctcagaccattcccggagtaataaatccagttggagcagcagtgatgagaagaggggatcgacacgttccgatcacaacaccagtacctgcccgggcggccgccacccn

SEQ ID NO: 19411 - DNA, 614 bp, Homo sapiens
acaagaccaccaaactggaaatagagtagcactggactacacgtagtttacgtgcagaaatgtgctgaataattgaatgcaagaatgaatgaatgaccatggaggactatggccttagtcctccatgctcgctctgaaccctcagtcctccatgcccgctctgaaccctcagtcctccatgcccgctctgaaccctcagtcctccatgcccgctctgaaccctcagtcctccatgcccgctctgaaccctcagtcctccatgcccgctctgaaccctcagtcctccatgcccgctctgaaccctcagtcctccatgcccgctctgaaccctggtcacaacagcatttttttctcagtctttgctgttggtcctttctcccccaggcagcttttcctgtatgctgcgcccgtccctcatcctagttaactcctgctcacctccaggtctcacctccagcgcccctcaggctccaagaaagccctcaggactttcttgtaactggagtggacatctctgatgacgtgcactcataagatgcagatgatggccggttttcatttcatatttatgtggccaattactcatggtcagctctcccaggaagcaataatgt

SEQ ID NO: 19412 - DNA, 708 bp, Homo sapiens
acctggaacaagcgattgtctgctcttgccagctaagatcactaacttgtgggaagaaagtattcaagagcctgtcagggtgacttgggtgtttggaaagctaagaaagagaaatgtcaagcatgcaagggtataagatgcttggcttagtatccaaacaaaaatcccatgcaatgccagtgaaaatgcaacaggaagggaagaaataagagagataaagaaaaccaaaccaccaccgcaaaggtgcattttaatgggcagacactgttgctgagtaagaaataaaagaaaggtaagagtccagaaaggaaaaagagaagcataaagaaagactgtagttgaaatgagactgcctgacttggagactacatcacagaaggtgatatggattccaactagaagagactagtcatggtcccagcaggaagcaggacacattcaaaggggtgtaaaaagtttaatatgggatattttaaaagatgtgggcagagtcaagggaatcaatcaaggaaagtaaagatgtctaagactagcagtggatgggagctgttaccacccataggcctgagaagagaaagggagtggtcacctgaaaccaagcaatagctggaggtggagaaggccacccgcaagtgctgtgtccttgggtgaagtcatttctgtctggcagcaagggtcaaagagaataaatgtctttttgtccttagt

SEQ ID NO: 19413 - DNA, 751 bp, Homo sapiens
  misc_feature 1, 2, 3, 4, 5, 6, 7, 8, 9: n = A,T,C or G
nnnnnnnnnccgcccgggcagatacaaaagtgaaatccctaagtcaaactgtggcttataagcagaaatcctggttagtatttcaaagttctcttagcgttttctcctgcgacttaaaagacttaaaaacgtgaaaagacatggacgtaagactccaaacaaaaatacatttctttgaaactaaatagctcttaagtaagaaaaatttctatagatcttcaaatcatcccctaagcaaaatattctctaattaagtatttctgtatttccatctatgttcttcccaggcttggggctgttgatcagacctatttttaggggtaagtttctaggggtcatagaagatacagattttgacctgcttaatgtcaagaggttgcacggttgatttgtccagttgtgaattctatgaatgaagctttttgcttaaataaaacgatattcccctctggctgctgtgagcaccgggagacttgtttcggcagtgcctgggtgctggggcagggccggtggccctggatcatccgctaccaacaggacttgcctgtgtgcatctggtccaccctctctccacacccaacttcatgagatgcacaggggcctgtgtgcagagcagggcgagtctgccaggacagaatgcctgggtctgcttggttgggtctccacatgcgctcaggtaaatctcagtctgtcgctcatgctcgtattcactgtgctgacaagctccaagcttggacagcgtgtttagtgt

SEQ ID NO: 19414 - DNA, 1166 bp, Homo sapiens
acgggagtaaaataaaagggtcggattttgtaggattctaaggaagaggcagtgtgctctgtccacaggctgcaaggtgagaacctaaaagaatgagatatattcccattttggaatggcaatcaaaaagaggatctctctgtcaagtctttacattaatgctgagtaacaatctcaaaagcctgcccattcccctttagacacatgtggcaaaagcagaactgaaggaatggccaaggggcttgaacaagtagagagaccgacagtctttcaaatttcagggaaccccagatacattttgggggagccactgttttcccattttcctgaaaagttcttgcaggtataagaaataggaatagaaattgaataggttctggagccagggctacaaaggccccagctctgatctgtatagactgaaaaccacacatcagatgaaattatatacacaaaaagagagtccttaaaaacagccatttcggtccctctcaaaaccaagagaccaaaatggtcagagggaccaaacagtattgtaggtcatgatggcacctttgcttttgtgtctgtatgagttggggcatcacgggagagtgggagttcaaccttttacacatttgaataacagtatgttgggggacagtaggagggggcgtggaccttgccttgagagctcataagaaataaacttttgttttcccactgatctttcccatttgcagagtttcccaaacaatactcaatggagtagcttactctgtggccatctgagcgcttatttgtgctcacattccgacctacctgattttttccctattttcacttcactttccatagtctaggactctttcctgtgctccaaaatgagcataatattcagctcaggaaagatttcaacttataaagaaaaaaaggaacatggtatgctgtgcttttcctggatgcattcccagccctttgttcagctacgaagagaggacattacacacgggtctgcaaactatttcccaaaacaatttcataaattagccaatggactgccttcttccgaatgcttagcgattattttaaatatgcagactctgaaaaaactactgaatcaaaggcacagggataaaaccatgataccagacactttaaaacgttttccataaggttttgtaagt

SEQ ID NO: 19415 - DNA, 559 bp, Homo sapiens
  misc_feature 1: n = A,T,C or G
nctgaaggggaaagcatggggttttttaccctcaagtatgatgtctgctggattctcagagatggccttgatcaagtggaggcacctactctcctgtcctggcttgcagccatagctcctcaataagcatgaggaattgagatggataatctaagggcgtggggaaggggtaccaggagagatctgagacaaggtatgaagtaaaagatttaagattggaagtggagagtgtcatgggccagtgcctttcggatgggtgacttctggaattcttgttaggcacagcgaggttggtcctgtgggaaaggaagaatatttccggggtgaggagacttcggggtgtgggccgggtgcctttttaaatttggaatggtgtatacaatagggaaaggatgttaactttgcagcagcggggatggtgaatataacctgatagggacccttccattttgttggaaaggggaggaggggtgtgctacccagacccagtctcctggctgtaagggtaagaaagtgaattgggaagaatcctcaggtttggggaggtgagtgtcagtgt

SEQ ID NO: 19416 - DNA, 398 bp, Homo sapiens
  misc_feature 393, 394, 395, 396, 397, 398: n = A,T,C or G
acaaaggttcagtggtgagaagagggagcaaggcctttggaataatgaactccagttgttcctcataggtgcagcagaaatagcgagaggtcaggattatggagattggtaaggcgagatcatccaagggccttttgcttggtaagccattttactttaatcttgagtgccatagggattcattgacggattgatacagggaaatgaaatgattttttttttttttggttgggggagacaagagtcttgctctgttgcccaggctggagtgcagtggcacaacgtcggttcactgcagtgtctgcctcccaggttcaagcaattctcatgcctcagcctaccttgtagctgggattacaggtgcacaccaccacacccagctattttttatannnnnn

SEQ ID NO: 19417 - DNA, 256 bp, Homo sapiens
gccaaggttctttctatttctgtgggataaactccagctccagtttcagaacccactctaattggtttaagccaggaaagggagagggacatgttgctgggaggcccccatctggggcctgagcttggaatcaaatcagaggaaggcaacacatgtaaagtgctgagagtggaaggatgaagagagctagggctttgtgccatcactcgtgctctggacataagtggagctgggattcagcattacctgcccctgt

SEQ ID NO: 19418 - DNA, 358 bp, Homo sapiens
  misc_feature 357, 358: n = A,T,C or G
actagtccaggtgtgagatgaagggggcctggatgaagcagagggtgagagacaaggaagattctgaggaccttgtggctagatgtgggggttaagtcaggttcaactcctaggctggatgaattggcagatggcacatgaactacaagagaatggaaggcagaacctattttgtgggcaaaaaataaattacattttgcaatactgaattgaggggcttcttggaagtccaggtgtagatgtcttacaaaaatagaatattctgggctgggtgcagtggctcacccctgtaatcccagcactttgggaggccaaggtagggggatcacctgaggtcaggagttcgagaccagcctnn

SEQ ID NO: 19419 - DNA, 1404 bp, Homo sapiens
  misc_feature 1399, 1400, 1401, 1402, 1403, 1404: n = A,T,C or G
agggagtcgaccccgcgtccgctctctgtcctcacagaggtacacatggtccgcccagaatactcccatcgggtgtctctgcccacaagccctgggattttggccacctccccatatcctgagactgacagtgctttttttgagccttcccatctgacatctgctgctgatgaaggtgctgttcaagtcagtagaagaaccatttcttcgaattccttctcaccagaggtatttgtgctgcctgttgatgtagaaaaggaaaatgcccacttttatgttgcagatatgattatatcagcaatggagaaaatgaagtgtaacattctgagtcaacagcagacagagagctggagtaaagaagtcagtgggttacttgggagtgatcagcctgactctgaaatgacttttgataccaacataaagcaagagtctgggtcttctacttcttcatacagtggctatgaaggttgtgctgtgttacaggtcagcccagtgactgaaacacgtacttaccatgatgtgaaagagatttgcaaatgcgatgttgatgaatttgttattttagagcttggagattttaatgatatcacagaaacctgtagctgttcctgcagctcctctaagagtgtcacttatgagccagacttcaattctgcagaactattagccaaagagctgtaccgcgtgttccagaagtgctggatactgtcagtagttaattctcagctggcaggttccctgagtgcagctggctcgatagtcgtaaatgaagagtgtgtccgaaaagactttgaatccagtatgaatgtagtacaggaaattaaatttaagtctaggatcagagggactgaagactgggctcctcctagatttcaaatcatatttaatattcatccaccactcaagagggaccttgtggtggcagcccagaattttttctgtgccggctgtggaactccagtagagcctaagtttgtgaagcggctccggtactgcgaatacctagggaagtatttctgtgactgctgcactcatatgcagagtcgtgcatccctgcccgaaaccggatgaagtgtgcggcttccccaaagatcaccgtcgattttcccaagacgtgttgcccagattttggtcccgccttttcaaatgtggggaccttcgcacccggtttgttaaaccaggcggtctccagcagaaagaacggagggcctcatacagagggcaacaccgcgctaccaataaacaaaacggcagtataaacagacgcccctagcttacgcgacagaggggcagccacacaacacacactcgtgcagagagatctccaccactctctgctctctccctcagcagctcactagttcatcacttttattcttgtctgttcacttcgcaagcnnnnnn

SEQ ID NO: 19420 - DNA, 1531 bp, Homo sapiens
actttttttttttttttttaatggcagagctagatgtgagccttggggcagaatcctctggcccctgagctcccattcatttgtaacttgcaagttggggatcatcctaccctaacaagctccagcgaagtgccttaggcattttgggatctgttcagtcctagtaggagaggttgcctttaatgagatccccttttccagtatcattttcaaatagaatatgtgtcttccccaaggtgagaaaccataccagtgtgacttcaaggactgtgaacgaaggttttctcgttcagaccagctcaaaagacaccaaaggagacatacaagtttgtaggttcacttctcattgctggcagctgtgttcccttgggctagggttgatttcatgattctctttgttgttgaatatgaatgagagagtcagccatgtgtttagtttttccagtattttccccccataatctctggagatgttcctcctcttaaataaagaaaaagaaagaaaaggaaacaccccacatttcccctgcaaaccacagaacagtgagatcccactagcagtgggctgatgatacactgagcatcagcaaagaatgagggtgatggagagcggaatccaatttgtcagcgtgtgattcactttttcctgtctcctgacacaagactgagatcttccagctggtgagaagctggacctctgtggttaaggaatggttgttcccaagacagaagcaggtccttgaagattactgtgcagaatcagtgattcttgttgggcctgggggactggggaaatctaagggtgaggcagatgcagacattgcaggcatggcaggaaatgctgggctcctccagctgccggaagtcagccttgtgggcctcactgtgcccacattgttagggccgaggctagaccttctctgtccatttaggtgtgaaaccattccagtgtaaaacttgtcagcgaaagttctcccggtccgaccacctgaagacccacaccaggactcatacaggtaaaacaagtgcgtaaacttttcttcacatttatttttcattatttttttaaactattgtggaatgaaattgtgatgagagggattggaaaagactagtgtaaaagttctaaggtttagactcagttgagagaaggaatagtgcgtggctatctttaaataataaataataacattttttaaagagggggagggtggaaatacagagaaggagaaagatgggaaaagaatggctggagtgtgcagaatgaaaatgaagagataagccaggtccctactgtttccagtttgttgcatcacacattttgttactctctttgatacgataatcaactttacagaaaagcagcagaaattctagcaagccaaatatttattcttctgggagcacatgtttaatggcactattttcagagaactgagtccttgctctgttaaaagttaatgcaccaggagcggtcttggtttctgctggaccagtatcagtgtgtggatattatttccttcatactagt

SEQ ID NO: 19421 - DNA, 1944 bp, Homo sapiens
  misc_feature 1, 1941, 1942, 1943, 1944: n = A,T,C or G
ncaggacacttgtttattttaaataaacaggtaattaagacaaagtcttataagaatttactgactgtacatcagcaagtaacaaagtcttgaggaattttgtcctgtttatccatatattttagccttcatcgtttggcatacaggtagtgacctggattgggataagaaatataaggggataagaaatatagttgtctttgctacttagattcctgacttccacggaaggtcttttgtttcctgttgtctttgtaaagcttccatatacattgtttatcaaaccaactcttcaacgtgattgagttttttgttttttgttttgttttgttttgttttttggtaatttaatgttttatcctgtacttaccacagagaaaagccaataatcacaatatatgttgtcttactgacccataacccattttctgagggtggcaggcattgtgcccccactgtgaggtgggactatatacatatacaaaggaggtgtttaactgggtggcatgtctcagggagatgtaggacttacctgcatatcctggcagtttttgaaatgatagtgactgttctaggcctccgctgatggcatagtcaaacaccagatttccttggagatgattcggaaatgctacatagagaaatggatggtgagctcttactgtgactgtgcccatagtaagtcatcctggaccctctgaatcttatcccacccaatttcatgtgtgaacagtggcatctattcattatatgatgatttgctttagagggcactgtcatttacatctttggtctcttttttgcattagaaagaagcttagcccttagctccctgaagacagctggcaagtctgaaccttccagcaagttgcgaaagcaacttaaaaagcagcaagactctttagatgtcgtggactcttcggtctcctctttatgtctgtctaacacggcatcatctcatgggaccagaaaactatttcagatttattccaaatctccattctaccgagctgcctcaggtaatgaggccctgggaatggaaggaccattgggccagaccaaattcctggaagacaagcctcagttcatcagcagaggaaccttcaacccggaaaagggcaaacaaaaattaaagaatgtgaaaaactcacctcagaaaaccaaagagaccccagaggggacagtcatgtctggccgcagaaaaactgtggacccagactgcacctccaaccaacagctagcactctttggaaataatgaatttatggtctgaaccggcagatgtgtgtccctccgtggctacagagtggtaaacaaatctcacctttggggctgcgtttcatcacctcgtccacaatagtcaatcctaattgtggtcctgcctcttttctaagcatatggctaagactgtatgtggtgaattcctgggcctcctgcagaagcagaaagcctgctggggatggtgccagctgtgccttggctgtgtatttgaattgagatttttactatacaaagccacctagggcctggggattgggtcagttgtagttgcctcttcccccacctcttttcccttcccaaaggtgggtgttgaactaggggggatattgctgtcctgagggaccctctcatttctgacatttgaagaaacgtataaatcctttctttaaccgtgaagcaaaagccttggttgatgtgggatagtcaggaaccaggtagcatttaatttttcccaaacttacttacaaaaaagccatcctctattaagattcggaaaacctctgttttttcgggagcaaaaaaaaggggggctgatacccagggccacttagcgtcccttggaagggccaagggttaaaggagcggaaaacgcggaagccggatgggcctctcggaggaccccaaccgaattggctcggtagatgacaataggccgaacgnnnn

SEQ ID NO: 19422 - DNA, 948 bp, Homo sapiens
aggcccttctatctcaggatgtttgcacttgctatttccttttcttaaaggctcatccctagatatttgcatgactggcttcctaatttggtgtaagcttttgctgagaagttactttaccaactgtcattgaggttttccctgaacatcttaggtaagataacaagctcccctccttttctttcctcacttcttggtattccttatctcgtaactttttttttttggggggatggagtctcgcgtctcgctctgttgtccaggctggagtgcagtggtgcaatctcggctcactgcaacctccacctcccgggttcaagcgattctcctgcctcagcctcccgagtagctgggactacaggcaagtgccaccacacccagctaattttttgtatttttagtagaggtggggtttcactgtgttaggatggtctcgatctcctgaccttttggtccacccacctcggcctcccaaagtgctgggattataggtgtgagccagtgcgcccggcctctcataattttcttaatttttctccatataccatctgaatactaatgtatttatttatttgtttatttctgaatgagactgatatccataaaaatgatctttccttttatactctaactccctgctttctgggcgcttggcttctcaattaaaggctaatttaccagcttctcttgcatctgggtttgtccaaagtttggggccaatgagatgtgaatggaagttgcatgtattatttctagtttgtgccctaaaaaagaatatgtatgtgttacccttgccctcttaccctctccactggctggggtgcagatgtgatggcaggaattggggcaactactttggacccagaggcagaagccctgtgatgaggatggcagaactgctctgttagccctggactgttacatgaaagataaataaacttgtatctt

SEQ ID NO: 19423 - DNA, 729 bp, Homo sapiens
accgggtggcggccgcccgggcaggtactattactaggttcattgtttccagaggggtgaaacggggctttggagaggttaaataacttgcccagggtcacacagctattaagtggtaaagctgggatttacatgagcccagacaaagaacccaagaagctaagctattctcttgtaatacctccaacataggaggcaagaagtgaggtattatacaggttgaggagataaaggggagagaggcctgcagtgctaacaggaggagctgggattcatcctggcttgttctgataggtcagttagtcttagagatacccatgaggtcacctactcaaaatggggctcagagtagccttgtcccattcttgtccagtgggcgcagctacagtcttcctggcctggagtgactggaggctgtccccacgtcccacttcagtgaggcattcatgtgcacccagcacactttctagctttatttgcctggaggggaagattctccagaaccttgttaagatgcacagtgtggtccttggactggcagtgtggcctcggcagtccctgggagcttgttaggaatgcagaatctcaagctcctccctactgaatctaaagctgcattttaacaagatcccagctgtttcgtatgcacatgaaagtttgagcagcactgctctagaaagttacttttatctttactgtgcccaccaaagtaatcaaactttgtgaagt

SEQ ID NO: 19424 - DNA, 629 bp, Homo sapiens
  misc_feature 1, 619, 620, 621, 622, 623, 624, 625, 626, 627, 628, 629: n = A,T,C or G
nggcggccgcccgggcaggtacgcgggatatgaagtgaggttaagtcagatggaatggcagtggactactgtttttggttaataaatcgagatacccttaagagttgtgttctgaacatactgtctttctttccccagttccatgtcacagcacctgcctaataataggtgctcgaaaaacatctgttgaatgaaatgaattcttttgtttgcagtagggcaaagaagggtagagaggagccacttgcacaagccgatatgtaaatgttgcaaaaggttttaggccaagaaaatttcaaaaacccatttgagaggcaattcatgttagggggactatgagatgtttcacacccttggaaatatttaaaagtaactttctactgttttacttatttcccactcctggctgcccctcttgggtggactgcctactgttggagggaatactgtgtgagacacatctttagtaaaacagaaatgtgaaaccaacttgcagaaatcacaagcacactgttaccaaatagtcttgactggctcccttcctgggggacaaatgttttgataatgtctgtcagtagattcagttccccgcgttaattaattctagaagacttccgannnnnnnnnnn

SEQ ID NO: 19425 - DNA, 812 bp, Homo sapiens
  misc_feature 715, 811, 812: n = A,T,C or G
cccacgcgtccgatcgctgcaggagatttccgcgtcgggcagatgaaagcgctctgcaagcccgggtgttatctgcgggccgggtccgcggcttctctggtggcactaggaccgcggcggcgcggccctcgcagccaccgcctcgggcgtgaggcggagcgtagctgttcctggatcctgggcctggctcctcgacccgtccctggaggcggacgcggggacttgacttaaactctggggcccgggaggccgccggttttctccccgcttgccggggtggtcctcttccctttgtcggaccaaagaagtaaacactgtgtggagagggactgacgtgtttggagggaaatgggaatgtacacgataattaaagagtaaagttgtgctcaacgctgtttacttctaattatttcctgattcacaaattaatttttgcaattcacaacttcaagaatacttggactattggattcaatccatagtaatctgcaaaagaagagaagcagaattatacctagaagtctactaatggacagttagtcacccacctacatgttgagattcctgacattcagacaactgacttgtaactgacttataactgacttgtaatacactgctactatatcaaaccgacaatgaattggaatgaaaaaccaaagagtgctacattaccaccactgtatcctaaaagccagcactttgggaagctgangtgggtagattacttgagcccaggaattcaagaccagcctgtgcaacatggtgaaaccctgtttctataaaaaataatctgggctttgtagcatann

SEQ ID NO: 19426 - DNA, 402 bp, Homo sapiens
  misc_feature 1, 2, 3, 4, 401, 402: n = A,T,C or G
nnnnactccaagctctgagaccacctcttctgcaaagccttcctgattctgcaaagaacaggtaggcatttcatccttgggacctcacagcaattcaggacacatttgtgtcccagccctgcttggcttggctgtctccatgaatatacactttgcaacttctgcaccaggcatcataccaagcacacagtaggcactcctgtgttttttgaataagtgactatatcatcaccacatttcaaatgcggaatatatgagctactagaaaagacataagggtagattttacatctttattgtatcctagatatacaagtctattactgccttttcccatgttctgtcaacatagcataaagaatgtggatttacctgttagaaattgaataagcggccgctcnn

SEQ ID NO: 19427 - DNA, 333 bp, Homo sapiens
  misc_feature 333: n = A,T,C or G
ggcaggtactgctggttttctggtgttcctacaagctgcctaggtctcttttgttctcagcagttcccaggcatgcaaaagttgccagttctgtcagcattccaagtcaggtaagacagaaagccatctcttaggcagtccccagaaaagctgaaaggttggatatactttctactcttctcttttcttcatgagagaaaggccatgtgggcattttctcccaataacactgagttctgttgtcttctgtcggctgtgctgcaggttctcaggtgctgcagttagctgctgaactctccgctgttctcagtggaccccaagcatccaaagtan

SEQ ID NO: 19428 - DNA, 364 bp, Homo sapiens
taagatttcctgaagggatccatagccaaaacatgtttgaaggccactgggctcgctaacttctaaaagcaccccagttctagcagacatcctaaggaacattcccaggaaaattccagcctagaacctcctggggtctgacaaccttagagaacagtgctggctttgaatgggcttgggggcagcctcgaaaccctctttccagtctccatgcaggcaggggagctccttaagcaacacataggacatttctgggagaaatgggatccccaacacaatgaacactatagattttaatggtctatatggttaaatacacaaggcccctcatttccaaccccgcctgttcatctgattcatctgt

SEQ ID NO: 19429 - DNA, 975 bp, Homo sapiens
acttcagacattcccccagtggctgaagtggcatatgaattatgaagttggatcatttggaatgaatgtaagagaattgccaagggctcctcctactccagagaggaaacctcatccagggccatgaagccacttcctcaccatctgtgtgctgcttaagctaatgctgcgggaaccatggttccttgggaggaatcaagctgactcttggcatgagattcctgccttcctagggttgagagcggcactgccatggcttctctggacgacccaggggaagtgagggagggcttcctctgccctctgtgcctgaaggatctgcagtctttctatcagcttcactcacattacgaggaagaacactcaggggaagaccgtgatgtcaaagggcaaattaaaagtaagaggcgaggaccttgcctaccccctgctgtcgttgagagctttaactcacgggatagttctcatcagctttggtgttgccacaggaatatgataatagtagtagcaaacagatgactagtgtttgtcatgtgccaggcgttttcagagtttccctgtttattaatttcatttaatcctcacaataactgtgtggctgtaagccgcatttcgaaccagacacagagagattagataacttgtctgaagccactcagagaaacaatctgactttgagtctagtaaatgtaattgctgtgatctggcttgactgttctttaaccaccagcctaacagggtttggagaggaatttctttcctttgctatgatgatggagacacattatgcacccattttacctgtcacaaatttaagacttcccaccatccttccttccccaattggtatcttgccctctatagcccagaaaaaggaaggtcatagttcgaagaacaaaacaacctaaaaaccttggtttttgagcttccaagagctcaggtttgagagagttgtggaaagaatttttcaaaggt

SEQ ID NO: 19430 - DNA, 1407 bp, Homo sapiens
  misc_feature 1229, 1406, 1407: n = A,T,C or G
tatagggagtcgaccacgcgtccgggccgacgtggttgctgcaaagtccattgggaagagaaagcgtgagggctgggcctgcggcgggctttagggagtggtccctggctgtggatagatctgctgatgagtccaggccccggtccattctcctcgcgctgcaaggatgctcctgggatttcggagaggccgcaggagtcatttcaaacacatcatccatggccttttacctgcagccagcgttgctccgaaggcagctgtgccacgcacacctcctccccgcagccccaacccatctccagagagaccaagatctgctctggcagcagccattctggcgacaacattgactgggcggacggttgctattcctcagcctcgccagaggtcccggtctgagagtgatgtgagcagtgttgaacaggacagcttcatcgagccctatgccaccacctcacagctgaggcctcgaccaaattggcagagtgagatgggaagaagatcttctttgccatcctttgaaacactggactatggggacgaagaggacattgaaactcagctgtcatccagcggcaaggaattgggggatgtcagtgcccgggaggacagaggaggccacagtgatgacctgtacgctgtgccacacagaaatcaggtgccattgttacatgaggtgaaacagtgaagacgatgaaaatatttctcatcaagatgggtttccaggactccctcctggaacaacagcggacacaaaaaaaagatggtagaaacctgtcttgcaattcaaaggactgaaaacctccattatgtgaaaaaactccaccttccccgatattactggtcagagcacggtccaagatttccagaaacacccagagaacaacttcggggccttcacaggacccaccaggacctaaacaatatgaatcaaagccttacccttgaactaaacacaatgaaacaagcaatgaaagaactacagttaaaacttaagggaatggaaaaagagaagagaaagctcaaagaggctgagaaggcgtcgtcacaggaagttgctgcacctgaattactttatctgcgaaaacaagctcaagaactggtggatgaaaatgatggattgaaaatgactgtccatcgtttgaatgtagaactcagtcgatactcagtctaaattcaggcatttgtccaaggaagagagcttaaatattgaaggcctcccatccaangggccctataccaccctggtttgttggatataaccgtacctgtcaaccattgttgctggcttaatgaagatatggatgaacgagaaggacgagctcaaatgcacccctctaggggccatgagcatgtttaggatgcgagtcccggaagtggtggacgacattgccaaattggccacnn

SEQ ID NO: 19431 - DNA, 743 bp, Homo sapiens
  misc_feature 1, 2, 3, 4, 5, 738, 739, 740, 741, 742, 743: n = A,T,C or G
nnnnnaccgggcccccccctcggaaatacttctagaattaattaacgcgggttctagttatccttacttattaaacatctgcatgtgccaagcaatgtaatacagggcagaaagcaggaacagctgtgaacaacctaccataaatatataatgtcagggatgataagtgcctgaggaaaaataaagcacagtaaaagtatagagaatgcagagaacaaggtgttatttttatatagagaggtcagagtcgctgcctcttggataaagacattgtttgaacacagacctaaagaaagtgagagcaaggcacgtgaatgcctggggcaatgggaagcccaggtagagggacaataaagtccccaggtcccgatgtaggagggtactggataggagagggaggagggctggcagctgagtagccagaatcaggcagacggtggtagcagaagtcagaggccgagggaatcagggaaaggagttcaaccatggaggaccttgctggccaggttagagactgtggacttttgtctgggtgagacaggaagtcactggagggctgtgacagagctctgaggctgtgaggcactgctctgtcagtgccatgagtggggaaaacaggagcttgctgcactggtagagaccacagataatgatgacttggacagagcagctgggagagaactagttcaataaccctaacacgcctctccattctgcattttccctaaaaatgtaccnnnnnn

SEQ ID NO: 19432 - DNA, 1070 bp, Homo sapiens
  misc_feature 1, 2, 3, 4, 5, 6, 7, 8, 9, 10, 1070: n = A,T,C or G
nnnnnnnnnnatccttccgtctctacgcctcctgccatgtaagacgtgcctgcttcccttactgccacagtaagtttcctgaggcctcctcagccatgcagaactatgagtcaattaaaccttttttttaataaatcacccagttttggtcagttccttgtggcagtgtgagaacagaatattacatgcaccatgcctggcagaaagagtcaaatttctgatgtttccttgctactctgaaaactttcctgacactaaatcctaacagtactaacaatactttccttcatatgtaattctcattactcctcataatcagagtaactttttcccatgtttgtctctcccattgtctgcctcctaatggactatgttttattcatctctgtaacctccaagtgcctggtgtaatgtagacattttcataaagcctcatgaatgaacaatcacagaaagaggccttccatggtgtacaactggactcagtacctgccctatcttgctgaatgttttataatctaataaaactcagataaagacccagatgtcacacctgaacaggaaaagctgaaaggaaaagataattaaaatataaatcaacagaatcaagattttgaaaagacctagaaaacttgaaggattactgaagccaagcaagaggaaatgataggattaaaagtaaaatcttgtgtttagattttttttttttttttcagacggagtctcgctctgtcaccaggctggagtgcaatggcgcaatcttggctcactgcaatctccatctccgggctcaagcaatcctcccacctcagcctccctagtagctgggaccacaggcatgcgccacacgcctggataatttaaaatatatacatatttttgtagagacagggtgctgctttattgcccaggctagtctcaaactcctggcttcaaggcatcctcctgccccagctttccaaagtgctgggattactggtgtgagccacagtgccgggacataaatagttatgctgtattgtttaaggaataatgacaagggggaaggtctacatgttcagtacctgccn

SEQ ID NO: 19433 - DNA, 493 bp, Homo sapiens
  misc_feature 489, 490, 491, 492, 493: n = A,T,C or G
acaaggaaggccttaaagactgccccactctccttgtttcccatcccctgtcccttctacttctcacattcaccactatgtgccctaggacaaaatcaaatgtggaaacatttggtcatgtctactttgtccaagggtgggagttcttgaggaattcaagtgggaactagaacaactttctaccctttccttcccttccttcctccccacctctacctagaagcccatcaatcactttgaacttcttggagaaaaaaggaaacaaaagaaaaagaaaaggagaggctgggtgcggtggctcatgcctataatcccagcacattgggaggccaaggtgggtggatcacttgaggtcaggagtcgagaccagcctggccaaaatggtgaaaacatgtctctactaaaaatacaaaaattcgctgggtgtggtggtgggtgcccataatcccagctacttaggaggctgaagcaggagagttgcttgaaccnnnnn

SEQ ID NO: 19434 - DNA, 293 bp, Homo sapiens
  misc_feature 291, 292, 293: n = A,T,C or G
cgggacactggtgggggagagtccgacgcgcctggctaggagcgccgaccgcagggcctctacggaccttactagaaaaatgaaacctgatgaaactcctatgtttgacccaagtctactcaaagaagtggactggagtcagaatacagctacattttctccagccatttccccaacacatcctggagaaggcttggttttgaggcttcatgcgagaaaggggaatggggaatggctgcttaacggcatgtcttttttttttttgagacggagtcttgctctgtggcccannn

SEQ ID NO: 19435 - DNA, 279 bp, Homo sapiens
gccgggcaggtacacgatgaaacgggggtaaggaaggagaagaaaaacattgaaaggcatttgacagggtaaggttgtattccccagacaaccctgtcaagcagctctgaagggatgatgagcctggactctctggactcctagattatgaactcctgcagtggaccatgtcctattttttggaggcgttggggggaattgtcttacgcagcacccaagcacactgctatgcaatggaccacagataggaagcaagcactgcatttggctcccccgcgt

SEQ ID NO: 19436 - DNA, 625 bp, Homo sapiens
  misc_feature 1, 601, 602, 603, 604, 605, 606, 607, 608, 609, 610, 611,612, 613, 614, 615, 616, 617, 618, 619, 620, 621, 622, 623,624, 625: n = A,T,C or G
ngctgggactataggcaattaataaagtattctttctgattagaaaaatcatatacactaattgaagattattttaaattcagagaaatttttacaagtccaagaacaccatcactccattcatattatgaatatttttattgtatttttacgttggctctttgtggtgtgtgtgtgtaaaatacattttggatcactcaaatgtattttaaagattaatgtctatgcaggctgtccttccctttcccctctgcctgctgagcctaaggccctaagaatactttaaggagtaaagtactaaatcattaattcatcctgagctagtggctttattaatgagtatctcacaaataccacaaaaattcaacctggccatgtggagcaatataaaattatggcatttcttggtatgtttttctctttggcgaggagacaacttgatcttgtgtttccagaagcatgttaattgccctgcttgcagaatctctctggcttgaaaggagattatattcatggcaggctgtgaattttcattttatttcatttatttatttgagacagagtctcactccagcctgtgtgacagagcaagactccgtcnnnnnnnnnnnnnnnnnnnnnnnnn

SEQ ID NO: 19437 - DNA, 1019 bp, Homo sapiens
  misc_feature 1, 2, 1018, 1019: n = A,T,C or G
nnctgttcccttacccttcgtttatttctccgccgctttttcctgtggttgtccacttagttcaccccaaagtgtgggtttcccgtggtgcgctgcggttgtgccgtcgcgctgtttatctgccgctgtgtccttcttatatcgtgctcccatcaggggccctctctgtcacaaacctcgtgtgctgtcttaatcttgtcgggcgcctcctcggggactgtttttttgttgcgccgccccccttcttttgtgtgttgttttatgttgtctttatcttgtgtctagctgttgtttgtcttgttctctgttttcgtttttttttttttttttttcagaaatacaatttttattaaattcagttttaattttttcccattaaacatttttaacttgtacaaaatgactgaatccaaaatagttgttaatataaggatgcgattactttctcaacttaatcttgaacacagctgcatctttctctaaactctacatgttgggtacacagttcccaaagtgaagtgaattcccacaaaggactctgccctcaggactcttgtggtttaatggtgatcacagagaagaaaacattcagttacactggggtgagagtaccatgaggggagaaccggcaaggggtgccattctagcatctgggtgggagagaggaggctgaatgccaggggaaacttcttggaaaaagtgatgctgagttaggacaatttagccaatgagaagggatctggctgttcctggcagtggagacaacatatttaaaggcatgggagaatatctaagatttaccctcccaggacacaacaacacaacaataacaacaacaaaaacaacaaaacaaaaaattgaaaacatatgaaaggacagttttcaagacactggttatcaggcaatgcaggatagtgatccctgagagacaggaatagggtgagcccaacaactgccctcacttagtgaggaagggagacaaaaaacagatgggataagagaaaatgaataccatgann

SEQ ID NO: 19438 - DNA, 1738 bp, Homo sapiens
  misc_feature 1738: n = A,T,C or G
agggagtcgaccccgcgtccgaacagagagaagaggtagcatggttttcccaagagatggtacagataataacatctgatatccacatggggtctggaggtgcaagccaccttcctttcatcccacggtctcacagcagccctggaaagaggctgctctctgttggaggctaagggccagtgttggaaggagctcgggtggaaagtgtggtctgcatgaggggctcccgtgaatagaggagaggggtggcaggtacgagacttgtcaccatgtgacatggcagcttcagaaacttagccactgccaaaaaaagagcaggcagggataatgttgtcccattgtccagtcagagagacctgttgagtctctagtttgccagtccccaagagacctttggagttttgctggagccagacatcctgcttagagatgaggaagatcctgctgttccgtggggagctcttgagacacccgtgccaccacccaccttctcctgattgccacttgctgcccttttcccattaccctctcctgactccataaacatcttcagtcttcccttctccacccccaaaatgccacctggaaggggtgatgggaggttctctggatgaaaggtgtggcagcaatggacattgtaatgagaatgcccgtgtgcctctttaccaacagaaaacttggaatataacgtggagcctcaagaaatctcacaccctgacgtgggacgctatttctcagagtttactggcactcactacatcccaaacgcagagctggagatccggtatccagaagatctgggagtttgtctatgaaacggtgcagaatatttacagtgcaaagaaagagaacatagatgagtaaagtctagagaggacattgcacctttgctgctgctgctatcttccaagagaacgggactccggaagaagacgtctccacggagccctcgggacctgctgcagcaggaaagacatccaccagtagtgctggttgtctcctactaagtttaaataccgtgtgctcttccccagctgcaaagacaatgttgctctccgactacactagtgaattaatctgaaaggcactgtgtcagtggcatggcttgtatgcttgtcctgtggtgacagtctgtgacattctgtcttcatgaggtctcacagtcgacgctcctgtaatcatactttgtatacagtccattccccctggtctgtctgcatatagtctcagaacattacttggctggacagatggggatatgcatttgcaataatttccttctgatactctgaggaacgtggtcggtcccgagtgaggactggatcgacaacaaacccccggaaagtaagacgacctaatccgaaggggcaaagcaaggaggcacaacatgggcaagcaatcctcagcagacggccgcacataaccaagcacacggcgaaccagcacccagggacgcaccaccccacaacaccgcgacaccagcactaaggggacaacctccgctgaagaacgtaacacgcgcgaacccaccccaggtccccaggcagcaatccaccactgaagccacgcacaccacacgacgaacacaacgagcacaacccaacacaaacccgatacaacagccaccagaatggcacggaatagcacccgcacaacacacaagcgcgcgcagaccaagcacacacacggaaccaggcacacacagcgtccgcgaaccacaacacagcaaccaacagcn

SEQ ID NO: 19439 - DNA, 360 bp, Homo sapiens
ccgggcaggtacctgcctctgccagatacccctgagggaagaggatgttctataaccaggccgacaggttagcatttgtgaacacagttctgacgttgttgggagggtttgtttgccagaaacatccccatgcgctactctttcaaccagaggtcaagaagtcctttacttttgtgtcttttttgtttgtttgtttgagacggagtttcactcttgttgcccaggctggagtgcaatggcgcaatctcggcttaccacaacctctgcctcccaggttcaagcaattctcctgcctcagcctcccgagtagctgggatcacaggtgcccaccaccacgcctgctaattttcatacccgcgt

SEQ ID NO: 19440 - DNA, 565 bp, Homo sapiens
actctgtggtatttcacataatattaaccagctgttagcaatgactgatatatacttcccattgaaaatgatgtaaggtctgaaaggattcattttgacaattttatatcacatatttatatttaccttaggtggttctttttaatgttttaatttgggaccacactaatttctaacttggtaactcatctcttaccaaaattaataccaagccaagaaaaatggtttcatgaatagaatctactagtcttttatatcttataatggtagatcactgatgaggtagaactccataagagcttcgctctcacagtaaaaggttttggttgtgcatggattacacctggtgaaagttggttagtattgtctaagtggcttaagacaaatttattttgatttgtattgtgatgactttgcgaagcaccagaatttttcccgcttcgtgtgtgtgtgtgtgtgtgtgttttgagtccaagtctcacaccgttgcccagcccagaggttgcagtgagccgagatcgcaccactgcactccagtctgggtgacagaacgagactctgtctc

SEQ ID NO: 19441 - DNA, 1013 bp, Homo sapiens
  misc_feature 1, 2, 3: n = A,T,C or G
nnnatgttctgacccacctctgccatggtcagctgtggcttttattttaaatttaatttgctcaaccagacacacagtgtagcagacgctattaccgtatttgagtttttggtgctgtagtgagactttgaaattctaggaattgagtagataacacaagtgtgatgtgggaaaggtccctgggaaacaacagtgattctattaggctggtgcacaaataattgtgggttttgccattactgttgtatccacataatagctcagtgcatgcaatttacaaagtaataagtgaaatgctccccatagttgactataacatttcctcatttttctctgaatttgctttttaaaaaactcttccccttgccattcccttccccattccagattgtaactgcttctttccagctgcatcagaagaaggggactttccatgtaggtgttattctcagaaaaggccagaaaagaccaggtcatggtggggatgatttgctccaagcataaaagagaattgtgatggttcaggaagactggaaaataacgagactggaaagaaatgagaagggcttcagaggaatggcacattgaaataaaaggaagtggtaagaacaggaacacaggtggaatgaaaggagcacacagtgggcagggatgattggatagactgtggaataaagataatttgggaaaaaaatgggcagaaaataagagaggtttcatggttccattattgtatattctattcctcctactaggttaacatttcccagaggggttgggtggagacggggaaagcctttttgccctgttgtggtccatgtgcccttctgctggcagatccacttggaacaaatctccatgtgaatacatctcctactcttttcctatttggagtttcctgatgcttttgtctacctcttgtgctggattagagcatccactgccagcatgcattaatgtgataaacaaaataaaagtgaagtcttaagtagaactttgcaaggagtagcagt

SEQ ID NO: 19442 - DNA, 348 bp, Homo sapiens
  misc_feature 1, 343, 344, 345, 346, 347, 348: n = A,T,C or G
nggagctccaccgtgggggcggccgcggtacaaactggcttcttctctttgtcaccagcacctgcttcatagtctctctggagtgccaggaacgggtcatttagattaaatctcccataccgttcctggataaatacctccttcctgcgagcccgcagggcctcgatgacaaggtctctggcctccagctccccttccatcacgctgaggagcatccgcagctcggatttactgagagtatccacatcaaactcttttttcagttttacaagtggaaattagcagtcctcctccccgtttctccttccattgccaggctcagctcctctcaccccaagtaccnnnnnn

SEQ ID NO: 19443 - DNA, 442 bp, Homo sapiens
  misc_feature 442: n = A,T,C or G
acaggtggaaagtgaggtggttttatttctagttcaccattgtccttaggctgtatagacctctggaatcccagcttatgtggagaaggtatcctgttagacttccctcctttggtcagcactgggccttaacttctggcccctcaaagctgctaaaactgaaggccaggcttgcctggcttggcaaaggacgtcgggcagaagcagcttctcctctcctcttgtttctctgtttcccctcaccataggctttggcctgggagtttcctacaattttgtcagctatttgacactgttaaggagacatttagaatatttaaattagagctttggtcgttttcatggggagaattggttgcaaataactcggctgaaatttctataagaaaaaaatctctgttgttattttattattgttctgtctgacagaacctgcccggan

SEQ ID NO: 19444 - DNA, 391 bp, Homo sapiens
aagcaaaagtcagtccctagagcagtagataatgtggaaagagatcagtctttcagaaccgcaaacctatgcctgcctgcttaggtgtaaagtcaaaatgcacggagacactgaacgtaacagtctacgggcccacacaccaggccaggaaacagtcacttcccttcctttgtctcctaagacatgcacgtgttttccctcatttaaagggagcccgaagcactggaaattgggctgaccctctgcctctcatggtgataaacatccccctccacctcactatgacccccaagggggcacacattactatccaccccacctcctgcctctgtgccttccgatatcaaccgggaaaggaaaatctaaaaataaagccagggccagagtgtgt

SEQ ID NO: 19445 - DNA, 623 bp, Homo sapiens
  misc_feature 1, 2, 3, 4, 5, 6, 623: n = A,T,C or G
nnnnnncggagatacttctagcattaattaacgcggggtatggtggctcacatctgtaatcccagcactttgggaggctgaggcgggtggatcacctgaggtcaggagttcgagaccagcctgggcaacatggcgaaaccctgtctccactaaaaatacaaaaactagccaggcatggtggcgcaaacctgtaatcccagctactcaggaggccgagacaggtgaattgcttgaacccaggaggcggaggttgcagtgagctgagatcgcaccactgcactccagcctgggagacagagcaagactccgtcccaaaaaaagtaagagttaaaaaaaaaaactaagagtaactggattcaagtactttagtagaactctaggaactgaccaaacccttttaacaaccaggggagtgcttgatgaaggaagaggctaccgatctttcataagtatgaataagcagcatgcataaaccaattaccttcccctattcctcacaaccaccaccaccacacccaccacctcttgtggcagtggggatagcagcccatgttcctggagttgctaaccggtgccaggagggacagtagggatcatgtccttcaaaatttagggttgtaccn

SEQ ID NO: 19446 - DNA, 726 bp, Homo sapiens
  misc_feature 1, 2, 3: n = A,T,C or G
nnngtagctccaccgcggtggcatgcatcaaggtgacaggtgacggcatggttatggattaactcaccaaggaaatgagtgtggaaagaagaatgcagaaatctgaggactagagcctggagatggggagcttcgagctcagaggaagaagaggatcttcatcacggggagacatcagccttctgagtatctgggactgcaggttatgtgccaccacactcggctaattaaaaaaaattttcttagagacagggtctctctacgttgcccaggctggtctcaaactcctgggctcaagtgatcctcctgcctcagccttccaatgccttgggcttacaggcatgagccaccatgtgcaagaaagatagcattttgacatctgccaaacaacaggttggcatggtctgtcagcaaacagtggtttgtgataactaccttgttaaataaaaagagagttgttcttttcctccctgccctcctcctagttctcaaccaccaaggagctaaaacccttctagagaaccttccagagaactagaagaggagaagcagaatcaatagaagggatcatattcttctctccaccgcaggttccttaagccatggcttaagatgagttctgcattggacctgagactggagttttaagccatatcggactgagtctttaaataaccaaaagggagcagagtgttatggactctgaccatgatgttgtgaagaggt

SEQ ID NO: 19447 - DNA, 929 bp, Homo sapiens
  misc_feature 1, 2, 3, 4, 5, 6, 7, 8, 9, 10, 11, 12, 13, 14, 15, 16, 17,18, 19, 20, 926, 927, 928, 929: n = A,T,C or G
nnnnnnnnnnnnnnnnnnnngataggctcagcagcatttattttctagttttaagaaaatttgattattcttgtatgaggtctaaagtgtgtatctatcagtccaatcaagcttttaaattttcggaaatactaaatttctaaatcataaagcgtcatttaaaaataattaattgtttcagtccaaaaatagcgtgggtcaaactggaattttcaaagtgacgtatctgtggatgatatgcttatggtaccaaaaagactctcaaaaaccaatactcccacgggcaagggaatagccaagtttgttgcggtttccaatgaatgacatcagccctgtgtaggtctcaatcaaaatgggttcagttaacaccatcagtttctttcctcttccagatccagttgaattcttgtgggcattctggatagctggaacaagcttagacatgaacccagacaacttgcaaatttcaaggaatttctcactggtgtatttcataggatgctcagtgaaagtagcataaggaacttcagtggaccatgggttccagcgggacagaagagactgctcctccggactcccccagtagatcctaaggccttctccttgtctcttgtccagggacatcccagggaaggtgaacttgcccaggcagatgcgatagacagcgctcagaggaatccgctgcagctgcacacaactcagcatgatgaagtcgtatttgcagatcaagagagtcttgtctgtgaccagtagaattctctccttctcattgttccagtggtctatctttgtcaagagccagaagccttgaatggtctctccagaagtctcagctacgtgacctttcaagtcttccatggcagtctcaatggcccccggccgtgtagcaaaggagcaattttttctttccgcacgaaccttctcannnn

SEQ ID NO: 19448 - DNA, 232 bp, Homo sapiens
cccgccaggtacgcggggggatactcattagagttgctcggtggagatggaatgatggtggggtgcagttaaacatggctgagtgctttctgcttaaggacctgatgtattaatgctctccaggtcattcatatttgggggaaggaacaaagagggtacctcgcccgctctagctgctaccccaccatcattccatctccaccgagcaactctaatgagtatccccccgcgt

SEQ ID NO: 19449 - DNA, 558 bp, Homo sapiens
actgctatgaatctcacagatgtaataatgagttaaagaagctaggcacaaaagaatattactgtatgattgcaatcatataaagttcaaaccagatcaaactaatcaatgaacgaggagtcaggattctggttatattcagggatagtgatggaagagggctataaggagggtgtctgggtgcaggtcatgttctagatcttgatctgagtgggggttacataggtgtattcacttcatgagaattcagagggctgcacactaatgatctgtataatgctcctctatagtatgtcacacttcaaaaaagtttacagaaacagttccttcctaattttcacagggcctaagagctaaaaacgcagccccagcctgatgtttctctctgctcagggtttctcgtgctgtgcctgtgatagctcttggtgtccatggaaaccagacagagacagcgtggtggggaaacaagccagagggaaactgtagccaagaagctttgcacatgcgacagaggaacagacccccctcccctgctcaccacgagtcttccctccctgt

SEQ ID NO: 19450 - DNA, 388 bp, Homo sapiens
cgcggtggcggccgcccgggcaggtactggtctctgtctttacagctgaagcatcagaggatggagtgaccaggctggttccaatgacagttatacggccatggggagtagacatggagtctaattcagtgcttgaggctaagaatgaagttgtatgcattgtggaaattgttccaggagatcttgcaactttcaagtttgaagtcatgtctgtgacagtccaggaatctgatgcagctgtggaagaccaggtggaagggtgttctgtagaagttgtgcgcctctctgtggccggggtgctgtccacccagtggcctgtataactgtcattggaaccagattggtcactccatcctatgatgcttcagctgtaaagacagagaccagt

SEQ ID NO: 19451 - DNA, 402 bp, Homo sapiens
acccaagagatgcacatatcatgggcctagcaggacagtcagctctttgcaaactggtccacggtatcaggcaggaaagggtgtccctcacagctcttgagccacccccagcagctgggatggatgctggcccctatgtagatactaccaggtgtcccacatgttgcagggcatttctgagcctttgtggcatggggctagcccggcatggggctgattaagttacggttgaggaggtgaagacctctagagagactgtcctggtctgggccctgtccactctgtcaacagctctcagtagccacgcattgtcatgacccaaggtgcaaggcctgtcttggggtagctgctcctagcagcatctgtgggacaaataacgttttcttttcctgatacatgtgt

SEQ ID NO: 19452 - DNA, 522 bp, Homo sapiens
  misc_feature 1, 2, 3, 4, 517, 518, 519, 520, 521, 522: n = A,T,C or G
nnnnactttcagtagaggccaggtttcaccacgctggccaggctggtcctgatcccccggccccaggtgatccgtccacctcagcctcccaaagtgctgggattacaggcgtgagccaccgcacccggctctttttttttttttttaaaatcatgattttaacagaagcctccattcaaggcgagacatgccttttatttctctaattgcgagacacttttctgaatcctcttgtcagttgcaccttttaatacaattgaggtgacactgttcttcatggtgacactggtctttcccaagaggtttcagctaattcagtctatcagattttacatcagattttaaaatttgcttcaaacttgggtgcttgtattcaaattcatgcttcatagaaaaatgcatatcagttcaacagttgactaactgcagccacgttcacagtactgaatagttcatgagtttcgttagtagggtgttagcttgactttccttatgtgataattgtgaccggacgcgnnnnnn

SEQ ID NO: 19453 - DNA, 375 bp, Homo sapiens
  misc_feature 1, 2, 3, 375: n = A,T,C or G
nnncaggtactactgacttacctgccatgggctttctcaagacaagtcctgcaggagaggcacactcacttctagcgtcaactattgaaccagccactgccttcactcctcatctctcagcagcagtggtcactggatccagtgctacatcagaagccagtcttctcactacgagtgaaagcaaagccattcattcttcaccacagaccccaactacacccacctctggagcaaactgggaaacttcagctactcctgagagccttttggtagtcactgagacttcagacacaacacttacctcaaagattttggtcacagataccatcttgttttcaactgtgtccacgccaccttctaaatttccaagtaccn

SEQ ID NO: 19454 - DNA, 618 bp, Homo sapiens
actgtgaaagaactagcactttgagcagagaacaaatgccttacttgagtttcccctggactctatccctattcaaagatgcttggttatacctcaagagggaagcaatccagaccaactcctatgacatgacaggcactcaagcctgatgaggcagaaacctggcagctgtagatgttggaaaggataatttatgtgttcaagtgactaggattctaagggctagatgctagcttcaagcacggctggatctaggaagcccttttgctctcccttttccttggtctacttttctctgtaggcaagttcattcattcttaggcaagttctctgcatgtggcagcaatgatggacactggaatctctgggtattcagagttctttcagtagcagtcctacaagagaagatggtccatttctctcagtccacttctctcgccccacagtggactctgattggcccacttctggggcctgtcactgtagactactgtagaccttctctgtgtcacaattgaccatgcccggactgaccacatggccacttctgcaacccacagcaaccacctaagatgggagaggtagtttcctagttaaaaaaaaaaaaagtacctgccc

SEQ ID NO: 19455 - DNA, 354 bp, Homo sapiens
accttaccaccccatccccagagcattgcatggggtgtttggcacacagtaggtgctcaatgtaaacgtgtgcactgtggcatgttagagccagacaggatctcatccagcccgttctctgcacccctccctcccctctccaagtagccctgctgtgggttcaagtaaagaggggctggggcgctggtctgattgtgtgggtgatttggggagatctcttcctcttccggaaccccaaaaggttgggacaaacacagcaacaagcccagctccctgaatttcagtgattcatttgtgggataaaggagtgaatgataaagtgaaggacgactgtccccgcgtacctgcccgggc

SEQ ID NO: 19456 - DNA, 749 bp, Homo sapiens
  misc_feature 748, 749: n = A,T,C or G
acttttgggggacagatatcacataggggattcatgtcagtgaccaaacgaagtgaccattacagcccttttgaaacctgaggtgtaatttttaaaaatgaactcatgactttaatagtcatagactcaaacctgagttgattattatgaattagtttatgggagtctcaatatgtgaatatgatggagacaagttttggaatacagataaatcaagtcactgtattcactctctctctctctctttgaatagccttatctttgcctatacacacaaacagtgcagccatcaaaattttcaatttacaaaatgttcacagtcatgcttcttccttgactaaacactggggttgctgccagtggtaattggcttgaaaccagctaatttttatatatctatttagtctggatattctagatgagtggcactatagttgcggtgctctagtcactgtgccagagcaccagggaggagggtgcttgctaccactgacagctgtgtgtcatttagcaaattattaacatctctttggtaacatgtgacctcaaagaagtcacctaatttctctgagcccaggcttctcatctgttaaaaatgtctcttcctatttttaggtaagtagtataagtcacatccataaaagattatgtttttaaaaagtctggaaaaagaaagttaatagacagaattccttccctctaagagtctgcagataatgaacagtgcctgcccggccactctagaacnn

SEQ ID NO: 19457 - DNA, 1010 bp, Homo sapiens
  misc_feature 1: n = A,T,C or G
natcggatccgagagaaattaggaaaaggttgttgtgtgaagatctgtagcaaatcctccacgagcagccagattctgacgacggagatgtgttttgccaagataatgtgcattcaacaagttttcttctgaacactgaaaaccacaaagatcacaggaaaagaccttctgtggcccatgtgcttgtttgatatgcatatgtagtgctgagctgctctctgctttgtggctgcagtgacaacaggtatgttccttaggctgctgcatgtgagactcagcatgtttttccaagtcagagcaagaagaaaacaaatgcccacagatgctgcatttgagaactgtatctacattcccaatggtacaactaacactaatttctttcggggggaaaggagattctctttccagatcaagggaaaccatttcctgagcagatgttttttcagtgtctgttttcagagaaacaacatcaatagtgctaaaattgcaagaaggggagagggcatttgggagacatgtgcctccaactgtgcagtcactcagaaaggtctccttccctgtttcatctaatgcgatacccccttctgtgactgagctctcagaagtatctaatctacaaataccttgctttccagatttaaggggctctgcctcatctaatttcctgcgtttggaagcatgtttatttctgtcttctcctataacaacactatcagagttcgatgattctgaaaaacctcttttgcccatagaattctcagggaaacttgctatcacatcagatacaggcccaccgtcttcattatgggatgaaagctttgtcaagtcttgtgcttctttgtttatcttttcatcctcgtcattttcgggtttattctcactatccatcattaataaagtgctgacgatgcttctatctaaggcggctcactggcactcataacctgtttggcgacggaatcgctcctgctcgcccctctgactgactcctccggctcaccgtcccgcgt

SEQ ID NO: 19458 - DNA, 423 bp, Homo sapiens
  misc_feature 1, 423: n = A,T,C or G
naaggtactcttatgagaggaacattaaaatttgcaattataatgcaaagaaacaggagacgatcgtgagaataagcaatgtcacacacatttctctccaaactatatgtatcttgtcctttaaattctttgacgtgtgtgtggggcctgggtggggggtgtgggtgtgtggtgttctaagggccttttctactaattccaataactgggttatctgtgaggctgcttattctcactgtattttactgcttctttgcctttcttgtttttttttttaaccatactcaggtatggttaaaatgtaaatgaaagaacagtgggagcgaagtataatattgtgttgttctgtttcttttatggaggatacaaactctttccactgtctgatggttagggtgaggcaaattaacaagagaaaatgtn

SEQ ID NO: 19459 - DNA, 353 bp, Homo sapiens
  misc_feature 350, 351, 352, 353: n = A,T,C or G
actggggctgcacaggctgtggcaacactggctagtcaaagcctggaaagacctgtgagcttgaactcttctgggttgccattgttctgttggtttcagcagtgagactgagagagcctgttctgtttagaaaagccacagtggttttctaggtaaagtctgcaggagatgtcacttggtgccttttcaatacgagttttccacctgcatttttggaaccattatgggccttttaaaaatttattaataagtctcttaaatattttataatctagcttctgagacaagatgattttaaaacagttatatgctctaaattaaaaatttagagggtgagtgcagtggctcgnnnn

SEQ ID NO: 19460 - DNA, 1145 bp, Homo sapiens
  misc_feature 1, 2, 3, 4, 5, 6, 7, 8, 9, 10, 11, 12, 13, 14, 15: n = A,T,C or G
nnnnnnnnnnnnnnngcgcctttgtctccgcttggtacatgtgcatccttttgtgttgccgcctttccgtggtctatttgagtggattataccagtgatgcctgcttgttcccctgggccctgagtcccttctcagacttccagacccagtatttttagtttacttctgacaattataaattcaagccagaatccaaatttgctgtgaatcatgctggttctagagaatagggtattttcctatacccttcttggtataggcaaaactgccccacagaggctgtgcaatcaggcaaaggcatgctcctcttggccttagtttcaccatttgtaaaacgagtacactgaactcaatgatctcgaatgtccctttagttccaaaactctgtacttttggacatttaagaaatatcctgggctgtacagtttgggtctgtaataaaggaaatgactcaaatgcaatagaggaagcctaaggatgactcagacttccctaatcataaacgacacttcagacatggaccttaacgtcaaaccaggattcatgatcactaaatgactttccttttgtacgtgtgagcaggtggcgttcaccaggggtgagactttattgacagtaagttgcctctgccaaaaaacgccctcatatgtctgctgatgtttgaatttctcctatgcagagttttgtctccagttaaaaatgtaaatactgttgtttcttgttggagctcagaggaaaaaaagataactactctaggatatgtatcaatttgatgctactttattttatttattgagacagggttcttggctctgttgcccaggctggagtgcagcagtgcaatcacagctcactgcagcctcaacctcctgtgcccaatcgatgctcccacctcagcctgccattgctggaactacaggcacatgacaacacgcctggctatttttttttaatttttcagacagggtctccttacattgcccaggctggtctcaaactcctgtacacctgttgttagagtctagtcttgcctattttttttcaatttttattatttttctagagtttggactgaattctaatttttcttggctacaagccttcaaaataatgttttcaatttttttccttctttttttttctc

SEQ ID NO: 19461 - DNA, 443 bp, Homo sapiens
  misc_feature 1, 2, 3, 439, 440, 441, 442, 443: n = A,T,C or G
nnnactcactataggcgaattggagctccccgcggtggcggccgaggtactgactgtctcaaattcttggatagctgtccctcatgtcacctagctgctgagagctttgtgatcctaacaggtgatgactcagaccgacactgcattggtaggaattccacaaataggtgcctcaatgtgcctagattgaaatatcagcctttcccagactgacctgatgggttgacttcaggtgtggtgtaaacacctacattttaatgtaaacatttcagtgtaatcaatgagaactatcattctgctttaatcaccatgagttctgaaataacaaaggatttgtctgacattcattctaagaaattcattcttacctgactaagaaacttttttaacctggcacaataataagaaatgacctgtaagtactgcggccgccaccgcnnnnn

SEQ ID NO: 19462 - DNA, 1125 bp, Homo sapiens
agggcgaattggagctccacgcggtggcggccgaggtaccgctgtgtccgggtgggtggtcagaatgctgtgctccaggtgttcacagctgcttcgtggaagaccatgtgctccgatgactggaagggtcactgcgcaaatgttgcctgtgcccaactgggtttcccaagctatgtgagttcagataacctcagagtgagctcgctggaggggcagttccgggaggagtttgtgtccatcgatcacctcttgccagatgacaaggtgactgcattacaccactcagtatatgtgagggagggatgtgcctctggccacgtggttaccttgcagtgcacagcctgtggtcatagaaggggctacagctcacgcatcgtgggtggaaacatgtccttgctctcgcagtggccctggcaggccagccttcagttccagggctaccacctgtgcgggggctctgtcatcacgcccctgtggatcatcactgctgcacactgtgtttatgacttgtacctccccaagtcatggaccatccaggtgggtctagtttccctgttggacaatccagccccatcccacttggtggagaagattgtctaccacagcaagtacaagccaaagaggctgggcaatgacatcgcccttatgaagctggccgggccactcacgttcaatgaaatgatccagcctgtgtgcctgcccaactctgaagagaacttccccgatggaaaagtgtgctggacgtcaggatggggggccacagaggatggagcaggtgacgcctcccctgtcctgaaccacgcggccgtccctttgatttccaacaagatctgcaaccacagggacgtgtacggtggcatcatctccccctccatgctctgcgcgggctacctgacgggtggcgtggacagctgccagggggacagcggggggcccctggtgtgtcaagagaggaggctgtggaagttagtgggagcgaccagctttggcatcggctgcgcagaggtgaacaagcctggggtgtacacccgtgtcacctccttcctggactggatccacgagcagatggagagagacctaaaaacctgaagaggaaggggacaagtagccacctgagttcctgag

SEQ ID NO: 19463 - DNA, 585 bp, Homo sapiens
  misc_feature 582, 583, 584, 585: n = A,T,C or G
actgaatatgggtttaaccaaatatgtcacaaaactatttcaggagagtagaggagtgggtcaggagaggaaatgtgtaggggtgagggatgatacaagaaagccaaatcctcatcttctatagtagagagtcagcggataaaacctaaaaacaatacatcaagaaatacttacacttatggaaggaaataccagaagttaaaaggggttacttctgggacatcagacaccagactgcagggaagggctgcctcttgtattaacaagcttccagtataatttgctttttaaaaataggtccatgcattattttaataaaaattatgctgggcgtggtggctcaggcctgtaatcccagcactttgggaggctgaggcggtgtggatcacttgaggtcaggagttcgagaccagcctggcctacatggtgaaacgccgtctctactgaaaaatacaaaaattagctaggcgcggtggcaggcgcctgtaatcccagctactcgggaggttgaggcacgagaatcgcttgaacctgggaagcagaggttgcagtgagccgagattgcaccattgtacctgcccnnnn

SEQ ID NO: 19464 - DNA, 806 bp, Homo sapiens
  misc_feature 1: n = A,T,C or G
nccgaggtacttagcagctgtgtgacctagagcacagtgctttgagtttttgagtcttagcttctgtgtctataaaatggggttcacacaactcaccttacagggctgtaagattagattacacagaaaatatattttttggctgtgggggctggaagtgttgctgattagcatttgaaatcccatcctgtgggtgagaaaaccccaccttatgacttggtgggaaacaaagccaacctcccactgatgaagctgaaagtagcagaaccttgcttctactgcctcccttgcagctagaggcaggcacaggactagcctgtcaattggatgcaaatgctccaggccttgaatcacaacctggtgacttgcacccaagtctattactattgtctcttgaattgaaacaggccactctttctctccttcattctacaaatgtgccaagtctgtttttatctcagggaaaagccattaatggtaagtagtggcagtggcagcagtgaccagagcttccatgccagccatggcagaaacctggtggaggcataaatattgaatgccaggggcagcaacggggccggtgggggccaggttttgtggcagcatcggtgaaggtgtcacccaattggctttgtggtgtgattttggctgtggtctggccttccttgctcctgcctgatttctgaggctggttccatagccttatgatgagtgtgtgagctcctcactttcctttcccccaaattttcctacatatactgctcactgtccatttccattgcttgcaatgaaaaaccctgaccggt

SEQ ID NO: 19465 - DNA, 634 bp, Homo sapiens
  misc_feature 1, 2, 3, 4, 5, 6, 7, 634: n = A,T,C or G
nnnnnnncaggtacccataaaaattaaaaactattttaaaaaataaattccatttgagccactccgtcaaaccacccagagtgggtagacgtctttcgtgcctctaagaagccccatctctattctgcgtctcaccttgcagggctgctcatctgaatcctgaagatggtggacacccatctgctaggactgaaatgaataggacagagggaggtgcagagtgaatggaccatactacctgtcatcttggcaacgtgtgattgaataaaacaacttctttagaagtttgatagagtgatttgataatgtaatttacaagtgatcatttctttttagtttcattttcagttgttttttatagacaaagtctcgctctactggctaccggctaggctggagtgcagtgccacactcgtagctcactgcggcctcaagttcctgggctcagcaatcttcccacttcagcctcctgagtagctgggactataggcatgaaccaccatgcccagctaattaaaaaaaaaatgtttttgtggagatgagtcttgctatgttgcccagaatggtcttgaactcccgacctcaagtgattctgtcacctcaacctctcagtcttctttttatttgtgtaccn

SEQ ID NO: 19466 - DNA, 5035 bp, Homo sapiens
  misc_feature 1, 2, 3, 5035: n = A,T,C or G
nnnaattctagaagggagcgcccgtagccagcgcccccgtaaagaaataaggaggcgcccggcttcccgcccaggcccagggccccagtgcagcctggacacagtattcaaagttttggcgtctgagcattgttatgcgttattttcaagctttgctaacggtttttaaacctttgagatgtttccattaattggaaaaacaatcatctttgataactttcctgatccttctgatacatgggaaatcactgagacaattggcaaaggaacttatgggaaagtttttaaagtattgaataagaaaaatggccaaaaagcagcagtcaaaattcttgatccaattcacgatattgacgaagagattgaagcagaatataacatcttaaaagcactttctgaccaccctaatgtggtcagattctatgggatatactttaagaaggataaagtaaatggagacaagctgtggttggttcttgagctctgcagtggaggatcagtgactgaccttgtgaaaggatttctgaagaggggtgaaagaatgagtgagcctctaattgcctatattttacatgaagcactaatgggacttcaacatttgcataacaacaaaactatccacagagatgtgaaaggcaataacattctattgaccacggaaggtggagtgaaactagtagattttggtgtgtctgcacagctcaccagtacccggcaccgtcggaacacatccgtaggaacaccgttttggatggctcctgaggtgattgcatgtgaacagcaattggataccacttatgacgccagatgtgacacttggtccctgggtatcacggccattgagctgggtgatggagatcctccactagctgaccttcatcccatgagagcactcttcaaaataccaaggaatccacccccaaaactaaggcagcctgagctatggtcagcagaattcaatgacttcataagcaagtgcttgactaaagattatgaaaagcgtccaacagtgtcagaacttttacagcataaattcattactcaaattgagggcaaagatgtgatgctacaaaaacaactaacggaattcattggcatccatcaatgcatgggaggcacagaaaaggccagacgtgaacgtattcacacgaagaaagggaacttcaaccgacctctaatatccaatctgaaggatgtagatgatttagcaaccctagaaattttggatgagaatacagtctcagagcaacttgagaagtgttattccagagatcagatctacgtctatgtgggagacatactcattgctcttaacccttttcagagtctgggtctttactccacaaagcattccaaactatatattggatcaaagagaactgccagtcctcctcacatttttgcaatggctgacttaggatatcaatctataataacatataattcagatcagtgcattgttatttctggagaaagtggtgctggaaagactgaaaatgctcatcttttagttcagcagctgacagtgcttggaaaggctaataacagaaccttgcaagagaagattttacaagtgaacaatttggtagaagcctttggcaatgcctgcactattataaatgacaattctagcagatttggaaaatacttagaaatgaaattcacctcttctggagcggtagtgggagcacagatttctgaatatctcctggaaaaatcccgagttatccaccaagctattggagaaaaaaattttcatattttttactacatttatgctggtttggctgaaaagaagaaactagcccattacaaactgcctgaaaataagcctcccaggtacctacaaaatgaccacctcagaacagtacaagacatcatgaataatagtttctataaatcccagtatgaattaattgagcaatgtttcaaagtcataggttttacaatggagcaacttggtagtatatacagcatactcgctgcaatcttgaatgttggcaacattgaattttcttctgtggcaactgaacaccagattgacaagagccacatttctaatcatacagccctggagaactgtgtttctttgctttgcattcgggcagatgagctacaagaagctctcacctcccactgtgtggtcactagaggagaaacaattatacgacccaatactgtagaaaaagctaccgatgtcagggatgccatggctaaaactttatatggacgtctctttagttggatagtcaattgcattaacagtttgttgaagcatgactcatcaccaagtgggaatggtgatgagctgagcattggcattcttgatatatttggttttgaaaatttcaaaaaaaattccttcgagcagctgtgcattaacattgcaaatgaacaaattcagtattattataatcaacatgtgtttgcatgggaacagaatgaatacctaaatgaagatgtggatgctagagttattgaatatgaggataactggcccctcttagatatgtttctgcaaaagccaatgggtttactttccctacttgatgaagaaagtagatttcccaaggccactgaccagactcttgtagaaaaatttgaaggtaacctgaaatcacaatacttctggagacccaaaagaatggaacttagttttggaattcaccattatgcaggaaaggtcctctataatgcaagtggattcttagccaaaaacaagacactagttcctactgacattgtgctacttttgaggtcatccgacaacagtgtaattaggcaactagtcaaccaccctctgaccaaaacaggtaatctgccacattctaaactaaaaatgttaaactatcaaatgaggacttcagaaaaattaatcaacctggcaaagggcgacactggagaagccacacgtcatgccagagagacaaccaacatgaaaacacaaacggttgcatcatattttagatattccctgatggatttgttgtctaaaatggtggtgggccaacctcattttgtccgttgcatcaaaccaaatagtgagcgtcaggcaagaaaatatgacaaagagaaagttctgctacagcttcggtacacaggaattctggaaacagcaagaattcgaagactaggattctcccatcggatactttttgctaactttataaagcggtactaccttctctgctacaagtcgagcgaggagccccgcatgagccctgacacctgtgccaccattttggaaaaagctggtctcgataactgggctcttggaaaaacaaaagtgttccttaagtattatcacgtggagcagttaaatctaatgcgaaaggaagctattgacaagcttattttgattcaagcttgtgtcagagcattcttgtgttcaagaagataccaaaaaatacaggagaaaaggaaagaaagcgctataataatacagtcagctgcaagaggacaccttgtcgggaaacaaagaaaagaaattgttgacatgaaaaacacagcagtaacaaccattcaaacttctgatcaggaattcgactacaagaaaaactttgaaaatacaagggaatctttcgtgaagaaacaagcagaaaatgcaatctctgctaatgaaagattcatttcagctccaaataataaaggaagtgtatctgtagtgaagacttccactttcaaacctgaagaggaaaccaccaatgctgtggagagtaacaacagagtgtatcagactccaaaaaaaatgaataatgtgtatgaggaagaggttaagcaagaattttaccttgtagggccagaagtaagccccaaacagaagtttgtcaaagacctggaagagaacagcaatctaaggaaagtggagaaagaggaagctatgatccagagttactatcagaggtacacagaggagaggaattgtgaagagtcaaaagcagcatatctagaaaggaaggccatatcagaaaggccaagctacccagtgccttggttagctgaaaatgagacttcctttaaaaaaactttggaacctacacttagccaaaggtcaatttatcaaaatgcaaacagcatggaaaaagaaaagaagacatctgtagttacccagagtgcaccgatatgcagccaggaggaaggcagaggccgtctgaggcatgagacagtcaaagagaggcaagttgaaccagtgacacaggcccaggaggaagaagataaagcagcggtattcattcagagcaaataccggggttacaagagaaggcagcagttgaggaaggacaagatgtcttcttttaagcatcagaagattgtcacaacaccaacagaagtagcaagaaacactcataatttgtattcctatcccacaaaacatgaggaaatcaataacatcaagaagaaggataacaaagactcgaaagcaacttcagaaagagaagcatgtggtttggcaattttttcaaaacagatatcaaagttatctgaagaatatttcattctgcagaaaaaattgaatgaaatgattttgtcacagcaactgaagtcactttatctgggtgtctcgcaccataagccaattaatagacgagtttcttctcagcagtgcctctcaggtgtctgtaaaggagaggagccaaaaatattgagacccccaagacgaccccggaaacccaaaacattaaataaccctgaagactccacatactattatctacttcataagtcaatccaagaagaaaaacgaagaccaaggaaagacagtcagggaaaattattagatttggaagatttctattataaggaatttttgcccagtcgttctggaccaaaggaacatagccctagtttaagagaacgaagaccacagcaagaactccagaatcaatgtattaaggctaatgaaaggtgctgggcggcggagagccccgagaaggaggaggagagagagccagcagccaacccctacgacttcaggaggctcctgcgcaaaacctcccagcgccggcgcctcgtccagcagtcctaaccgttcaan

SEQ ID NO: 19467 - DNA, 1386 bp, Homo sapiens
  misc_feature 1385, 1386: n = A,T,C or G
agaaaacgtatgcagatcttaaaagactgtgaaatggaaaagtgtccagactcttgtgcccatgagatggagtctgttgcagatcatgaaccaaataaaagaatattgggcagagtaaatttgtctttaaatgatagccattatggacagcaagataaaggaacatctctcagagaaacacaagaaatgactgaaggatcaagactagaaccaaactctgagtttggcaaagaaagtacctttggaatttcctcaaaagagttgatgtcttgccatgatgaaagctctgtttccctaagaagcctgaaatccattgaaataatgccttctcaagaaaattcagaaactaatgttaacagtgaagaaactgacctgaaaaatctttgtaaaccaaaagatggtgaaatgctttgtgaaaatgtaaaggactgcacagtccttcctgagatgaaggaaatagtatcaagagattggagtaattctagtgacagagacagcgtatgtacctgtgtggaaaagaatgcttgcaaagcttgtcaccctcacgagaattcctgtgacagacatttgcctttgacagtgaaaacagatattaaagtgaaaggagaagaaaccgaagagcatcagaggggacgactgggttacttaactgttggggagcaatctgaggagttggttaccagagaaactggcgatggcgatcccgtgagcaacatctctcagacccattttaaatgccgggggatacttaatcatgctgaaaaacagcagagccctgaggttttggactacatgttgcagaaagaagagaaatatatacgtcaacaaaaagcacatacgatatcgcaacagtgcatatcatctagtctgttgttagatgatgcacaaaatcagaaccaaccgaaggctgacaaagatgagtccaccatgatcaatgaaatcaccctagcaaagctggccaaggacagcattgtggcacagactcagaagttagaagaccagaaggaggaaaggttacatcatccattaaggaaggacactgagtcatgcacaagtccttgccttcttggtgcccctcggaaagcacaagacccctcctctgctgggtgtgatcaaatacatggtgcctttgcgaagaaaggagttcttcccttaaagaagcagccccatcgaacttgtaagaaagtttcctatcaggagcaaatcattgttgggagaaaaataggtaaaatcagaagtcctgcctttttaaagagttcttccaatcccatccccacacaagcgcacagacttctcagtttgtgtactctgtctgcacctacacgattagaacctgaacagcacctaccaagagcttggttagtcacataccaaagcaaatgtcnn

SEQ ID NO: 19468 - DNA, 1405 bp, Homo sapiens
  misc_feature 1, 2, 1405: n = A,T,C or G
nncagacaatcaggcaatttgctggctcacgcaactcaaaagtctaggacaagctggcttcaggtactgctggttcaagccattaaattacatcacaaaggtttggtttctctctatatatttctctgggtcacttttgctatgttggctctatcctgaggcagtctctctcctcgtggtaaccaggtggctctagcagcctcagctttatatctctcaagagtaagtccaccgtcacagagctggcctctgtctcagaagttctgggcaatatctcatgatatcaaattgggtgtgcttgtgccaggctcaaccaagagaaatgggatgtgctgataagtcacatttaggacatgcgacagctggagctggggatggagctagccagccccctgagaatcacatggactctaaatggggatctcaaagcaagatgataagatattattagaagcagcatgaataggtggcagggaacaacaacagcagcaacaataataaatttctgttacataaaaagccagcttgctccccaaggcttgattttccatttcaccttctactgcaggattttcaacctaagcactcttgacatttagggccagataattcttcgttatggggctgtctcgtgaactgtaaaatctttagcaacatccctagcctctacccctgtgatgccagtggcatctccttcttaccccccaccccagttctgactaccaaaaatgtcctctgggagccaaaacggcccccagttgagaaccactgcctactgttacaagtggaaagtggggagcagaggattatcacctcacaattcaccagggaaataatactaaagggggaaagagccactcctagggctgggcttgacaacatttcagcattgggtttgaagccttcattttactctctttctccaatgaacctggggaaggttgtcagaaccccaaagggcccagccaatcctatcagcagaagcaattgtagtctagggtttaaggatcctagggtcaggaagttctaggtctccctcctgttaacactaacacctctgtgttttttgtttgtctgtttgtttgtttgtttttagagacagagtctcactctgttgcacaggctggagtgcagtgctgcagtctcggctcactgcaacctctgcctcttggattcaggtgattctcttgtttcagcctcccggatagctgggactgcaggcgtgcaccaccacgcctggttaattttttgtattgttgggtgaaactcgtctctactaaggatgcagaacttagctgggcgtggttgtgggcacctgtgatcccagctgctcgggaggctgaggcaggagaatcgcttgagatcgggaggcagaggtggcagtgaggtgagatcctgccactgn

SEQ ID NO: 19469 - DNA, 555 bp, Homo sapiens
  misc_feature 456, 457, 458, 459, 460, 461, 462, 463, 464, 465, 466, 467,468, 469, 470, 471, 472, 473, 474, 475, 476, 477, 478, 479,480, 481, 482, 483, 484, 485, 555: n = A,T,C or G
actactgtgtcctttagatcactctgccttgatcactctgtcccgtcactctgctatttcacctgtcagtgaaatacctggtatcgtcctgccaacgtgaagcattgaatgctttatacgtctccatcctgattgtttaggctttgaatgctgagaagtatctgcactttgttggtcaattgtagatggtgctaatttgtggggagtttttcctgcaacttccccctgtgccataatccagaggacctccctctgcccccagtgctgtaggctaggcagctatgggcctggctcagggctgtcgggcaaggattggactctctataggttccgttgggttctggttagatcacagagctcaggcaaggaaaagccgacaatagatcagaaggaagttgagcgctcaggaaggaggagtgggcaggatgcttggtggtgtcagaggattccttcggnnnnnnnnnnnnnnnnnnnnnnnnnnnnnnctcggcccgctctaaaactaggtggatcccccgggcttgcaggaaaattcgatatcaaagcttatacgan

SEQ ID NO: 19470 - DNA, 975 bp, Homo sapiens
agtacccttaagccactgctcctttgtaaagtctttttggattgtcatcatcaagagtcagttgatctccaccttctcagaactcacagggcactctgtctaggcattgctgaccgtctgcagtgtcagatggtgacttctgtatgtgttgtgtttcccgttagactctaaggtttttaaaggcgagactcactcctgcagaagcacataacacaatgccaaactcttatttacggaggtcctggcgcattgtcagcttttggtaaatgcttttcttttgttgaatacttatcttctgtgtgccaagatttgtgttaagtgctagaaaaatgtgggaggtcaccgcagaccctgttctcatggaactgatggtgtgtagtgggtgagattaacataaataaatgatgcgcaaatgaacacaaaattcaaattgatgatgtgtacctgcccgggcggctgctcgacaaagttttgggattacaggcgtgagccaccacgcccggccacacctggctaatttttgtatttcagtagagacaacgtttcacgatgttggccaggctggtctttaactcctgaactcaagtgatctgtccacctcggcctcccaaagtgctgggattataggtgtcagccactgtgcctggcttagcatgtttaataggtaatgtcaaggtatttttcaaagggcttctaccaatttacagtcccatgagataaaaatgaattcctattgctctacatgtccttcatcactaatgtcaacattttttaatgtttagtcatcagatggtatataagagtatttctttgtggtttaaagttgcattttcctaattactaataaagttgaacaccttttgttgtagttactagtaagctgtgtttcctctcttatgaggtctcacttgaagtcttttacagtcatcccttggtatctgtggagaaccggtttcaggatctgcacaaccatgt

SEQ ID NO: 19471 - DNA, 1482 bp, Homo sapiens
  misc_feature 1, 2, 3: n = A,T,C or G
nnnacgcgtccgagcacacgcgcccggacgcctggtcgctcgctggccagggagggcccctctatgatgtctacaacatcgctgaactcaggacacgatcttaagggcaacatatgtaggcatcacctaactgcctggacctgtccttgaagacgacggggagcttactccccgagactcgcccttcctgtgctcttacagatccctctcaacaatccccgcatctccttttagaaagcacttcctgaattatttaaagaaatattttgaatctgccaagtacatttacaaaaacacggatgctggtattttaacagatggagagacaaggaaaggaaaggaaaggcctggcatgggcattgtgaggaatcacaggcaccgaggttgttctctgctgtactgcaagtttgcactttctttaggctaaaaatatagttcctgatttttaaaattcagttatttattcccacttcaaatgacaagttcatatatagaatttacgggagaaacttgagaccatttacggggagaaacttgattctgggaagatagcagagtacaaaccagctgcctcacttctgtttcacagggaggctgatggaaaaaggaagcaagctggacccatcctccctgctcacagagggcactgtggtcacacacagtgcctcctctgccagttcctttattgaaagaggtgtgctggctggccacggtggcttacacctgtaatcccagcactttgggaggccgaggcgagcagatcacgaggtcaggagaccgagaccatcctggctaacatggtgaaaccctgtctctactaaaaatacaaaaaattagccgggtgtggtggtgggcgcctgtagtcccagctacttgggaggctgaggcaggagaatggtatgaaccagggaggcggagcttgcagtgagccgagatcacgctactgcactccagcctgggtgacagcacgagatgccgtcttaaaaaaacaaaaaagaggtgtgctgcttgtcagcatgtattgtcacggacactcaataagtgccattttggactgtcaaatttagatgctttgtttcagaaagataagccagcatttagttttaaatcactttcctggtttgtaacttgatgctgtttagttaaattgctagttttcctaacactacaatattaattcttctcgtggaagtgtactgatttattatttttattccaagtcagcagatttggaagcattgtggtaaagtctaaggttttcatatccatagtgctgtttggtgagtaccggcagtacagttgaggggagcagggaaagcattgcccgtatgaagggggatggttaattcttcatgcttttgatttgagttggggcctataaatggggcaccattatttttgtaatggaaaggggggttaaaattatacagaacctaaatcaaagaagagaatgtaaagtcctttagttacttttaagaattt

SEQ ID NO: 19472 - DNA, 847 bp, Homo sapiens
  misc_feature 1: n = A,T,C or G
ngaaacctgtgtattaaaaaatccatttttaaaagaactcttattcacatactttaagtaaaatgctcaaatgtaaaggacaaatgaaaacaatatgtgataatatgcctttcaagatacagatgcttaggaagttatttaaagaagtaatgaagaagtcagatactctataaatgtgatggcttcaaatgcaagtccataacagacatgttgtattgaagttcagataccacaagcagtattgctgtcaatgctgtttctttttgaacagctcatagtttcaagttccaagcaattgtattactagtgatttcagtgtgtatgttaaaatcatgcaaaagtacttagtacctatatcaaaattgatttagcttctacactcaagtaattataaacaggtttttcttttgggacatttgacagttatgtgaaaggtgagtcttcgttgtgtagtattgtctgttacactgcaggtgtctagaattgctgatagtgttctccctctaaagtaatgtcacccaaccacttgtaaattgacgataataagacaggaaatcaagaaccaatataaataagcaaacatttgaaaataagagctaaaaatcaaaaataatctctctttttgctgataatactttatacctaaataacctaagatttttttttttttttttgagacagagtcttggctctgtcacccaggctggagtgcagtggtgcaatcccggctcactggaacctccgcctcctgggttcaagcgattctcctgcctcagcctcctgagaagctgggattacaggcatgcgccaccgtgcctggctattttttgtatttttagtagagaca

SEQ ID NO: 19473 - DNA, 844 bp, Homo sapiens
  misc_feature 1, 2, 3, 4, 5, 6, 7, 8, 9, 10, 11, 12, 13, 14, 15, 16, 17,18, 844: n = A,T,C or G
nnnnnnnnnnnnnnnnnnggccccccccgcttttgcccttcgtggtccaattgccggagcctccttccgcccatttcataagggcccgtacacatatagggatttacccctattcgacacccgactcgaattctccgactccaggtcggggaatgttttaaatagtggactttctaccggtgatgagaggaaaaaaagacctaacctgatcctgtggtgtgctggagcatttagtacaccttattcacaagcgagaaaaagaagacacgcacgaaggactgtgagaaacagattattttaggtactttggggggaaaaagagttacaatttgcccataaagaatggagagaacagaaatgtagcttttatgctgaaaaacaaaatgcaagggcaatccagtttctaattcctgtgccaaagctgctgttcttgatgacctcggtcaaatcatttaaattctctcaatttgttcatataaaagtgctattaacctgcagttcctcaaatactatccaatcaatgttggctacttgattttcactaaatttaagagatagagccttagaaaagtgatagagaacaccttcaaagtgtaaaatcaaagttctcctttcagcacagagcgatacataaataaatgttattgtaaatgggtatcattactgttaaaaccctgagcctcattacccacctggtaagcaacacaggaagcagaaggacataccaggaatccacagacatggactgcagtcaagatttgcagaaaaatgtgtgtgaccttgggcaaggtatctctctgttttcaaaacagttttattaggcaaataatgtacaataaattan

SEQ ID NO: 19474 - DNA, 999 bp, Homo sapiens
attcacaggtatgcataaaccaaatatacaagaatttaatgacagcattatttgcaaacagtgaaagattctgagcaatcaaaaggttcattactacaggcataggtctataaattactactgtatggaatactatgcagccattaaaataatgaggaagagggagagtgccctgtatgcactgacatggaaaggtttcagtatatggtaaaaagcagctcatcttagaacagattttatagtatgaccccacttgtgtggaaatattttgtgatgtgccactcagtgtatacgtattcatgagtgcatatacaagtgtgtgagaagcaatgtaagtaactgttcacaaggaccccccctttaagaaggcagagggatcgggggatatagagtgaaggatgatttttgctttttcctctatatatataccattctctgaattaggtatgatcattccagggtatgttccttggattttttacactgcttccttctatccttcctgagaatcagatgtgtcctctttaatcagaattgaataaaacagtctgggaaaggttaaggtgaattatggctgggctgaaagaaatgggggccacattaaaaatggaaagaaaaaactaaactggaagtcagaagaccaactttctagtcctggttctgttgttacagtagataggcagacatgtgcagtgcaggagagggccccccaccctgaccaggaatgtcaggtgaccatcaggtgatggtcacatggttgttacaccgtctctctcaaataataactggttgcagccagcaccagggaaaggcagtctccaaatagataggaaaaacctgaaagtgacaatcagcagcttcacaataagatctcaggaattgggcaggtgggctcaagcatgtgcactaagaggcaaagtggcggagtttaattggtaaatgaccttcctgtaggaatgctacgctggtaagggaagaaagcctcaagaaagcatctgt

SEQ ID NO: 19475 - DNA, 266 bp, Homo sapiens
ccgggcaggtacacagtaagtgaagggccaagactgacggctgataggacaggggtgaccagtggtggggagggtagtgggagcagtccatcctggaatctggcattcaaggggcgcattgtctgtggaggatttaaaaataataaaaccaactaaaggcagtctgctttttatggtcaccaggcgccagcaattctaaatttcagtgataaaatattcctcctcactggacacgagaagctggcttctcctattccccagtacct

SEQ ID NO: 19476 - DNA, 810 bp, Homo sapiens
  misc_feature 782, 783, 784, 785, 786, 787, 788, 789, 790, 791, 792, 793,794, 795, 796, 797, 798, 799, 800, 801, 802, 803, 804, 805,806, 807, 808, 809, 810: n = A,T,C or G
tcgacccacgcgtccgatctttggtgacttttcattcacatttcatggataatttggggaggtggcctgccatccctgaagccctacatccccatacacactctgtgcacatccagtgccctgctccaccatggcagtgcccgcaagggggtcccagatgagaagaagctggctaaagggcccttgtcccctctcagactccttcagcgggctggagtcctccctcgctcgatttcgcccgagagcgttaggggtttctaaatgcaggcgcctttgtgttgtaacgaaacttttagtttaagggaaaatctcttttaagccactgattgttctgacttgctgagtttactcagcagccttatgctggctctgccactgcacaataaaaccaaagcaggacagttgcaggtcaagcaagggggaacatgttttgcatttagggagtttgaccactgaagtcaaggagaggagcttgctctgaattgttacacacattaagaaacttctagatgttttagcactttgtgctcaaaggcgaaacctgcaggatttagaaataagtaaattcggggtgctcttcctcggaggttgttttctggctgcggtttatactgctttctcctccgccattcgattagaccctgggctagtagaatcctttgaaactcacttgtgcctactgtgtgccgatgaatttgggaacctctttttactttgcagaaacttttatttctatttatttatttttaaaaaatcaggacacactgaccctccctcgctgnnnnnnnnnnnnnnnnnnnnnnnnnnnnn

SEQ ID NO: 19477 - DNA, 635 bp, Homo sapiens
  misc_feature 1, 2, 3, 4: n = A,T,C or G
nnnnataaattacccaatctggagtatttcttcatagcactatgaaaatggactaatacattatccattttaccatcagatatatttttttgttctaactgtttggagtatttcttttacccaagataagtaaaagctacaactcttagtataaatatgtgtccaagtgcctcataactgctaaccacagggatcctgagctctcatagcttaaacacacagtgtttattttactggtctacttctcctgaagacctaaaagggcctatagcctcagtagttgacaaaacaacatattaaaattcctcactgatcactaacataacctaaaatccctgcttttgacattagcatggcagacatccttagcaggcctaaatagaatggccttataagtggatccaaagggcttctgaatcatgagttagccagatggtcagcatctccagtcctttatgctaacatactttggaaggctacctggaaaccgtcagcaaaagccatgctttaccctccactggggaatgaggtcccagcgggaatgaagtcccaggaatgggaatggtcatagcgcccttagcaagtaaagacgctttaaagggctctcaagcatacatgccccacccttggcaagt

SEQ ID NO: 19478 - DNA, 710 bp, Homo sapiens
acgcgggtgaaaatggaatagttttctaattacagaaagaaaagaagttgaagtgggtttcgccatgttgagcaggctggtctcgaactcctgacctcaggtgatcagctcgcctcagcctcccaaagtgctgggattacaggcatgagccaccacgcctggccaaaaatcttataaataatccccttctaatttcggccagcttaatcacacaccaaattcctttcatgagattaatcttccacaacttctacacttccttaaatctttgattttgtcctatacttctttttttatattagcaatctactttaggacagaaatttactttcctttcctcttgattttgaccaaagtcctctcttatgcaaaatgaaaaattactcttttttcaactttctttaccaaaaatacatcctcataactttttttcacatctctcctacttactggccttcttcccaccttgtttctatttccttcctaaatccatattttgaagcaatctttaaataacccccaacttaaacaaaattgctcttatttaacaaaaaacttatctcaaaaaacctagcacggtcaccaagcgtgctttgcttttctttctctctctctctttctttttttttggaggcggattctcgctctgtcagccatgccggagtgtaaatggcacggtcttggctcgctgcaacctccgcctcccgggt

SEQ ID NO: 19479 - DNA, 1112 bp, Homo sapiens
acagacaagggggcgactggcatgtggtttgtttctggtcttgtagtcggtttggaattttctaagtcagggtggggtggggggactgtgcacgagtcatgtgcagactggaacccatctccccctcggtctgcaagttaaaacaattgggttgtccttctcagcatctgccaatgtctcttactcaatcttggatcaaaagggcgttggaggaggaggctgggagggaaatccagacagttctccgcctctgacatcaggtccagctgttagcatcgtgctgtgggtccctgaacaagaagcaaagtcaggactggtttggccaggtaggtgaggatccagtgttgggtgattctgatccatgcagcccttagaggcgacacagacgtgaactggacattctaggaagaaagagccgactgccgggtgacctgtctagttcacatccactcaccatttccctcctcgttcctattcttagaaataagactctgacgctctcttttatacaggctagtcccctataggcatgtcatggtgattatttgcaatcctcctgactttcctaagaagagatcagacttagcagggttagtcctcatagcccgaggctggacaggaagagaactccatatcctatgtccaagaatatcatccaatccttatgaagcaccagttgttgtgacgcaattttaaaagactggttcaaagtgcctgtctgagactaagcagatctgtgggtcgagccaatgccacacccattgtggtctttaagcttcttttccaaattaaaaaacaaaacaaaacaaaaaaaaaacacctcttacacattaatctccatttaacatagagtgtccatggggtatacagttatggacttggcactgtatccagcagagagcccagagaaatcaaacaatatgatcttggcttttaaggatttatacctttgctggaaaagacccaatttacccaccaaagttcaatgccgttcatttgttgtggttgtacacgcagggaagaccgatgaccaggatgactggccgtcgttttacacacaggaaacagcgtatgaccaagattactggccgtcgttttacacacaggaaaca

SEQ ID NO: 19480 - DNA, 750 bp, Homo sapiens
  misc_feature 726, 727, 728, 729, 730, 731, 732, 733, 734, 735, 736, 737,738, 739, 740, 741, 742, 743, 744, 745, 746, 747, 748, 749,750: n = A,T,C or G
actaggtccccggcaacctccccttcctcctgggaatgctcaaatgggaaggcagcatgaaacggtgaacaggcaatcactggacaaagtcacaagaactgggctttagaaatggttttaccattagcagttgtgacacctcagaagtggcaactctggatctcaataccctaacctataacctcagcataggtaactccacaattctacgaggaaactataggaaattaccattcgcaaaagggaggctgccttctttttttagtgggggggagccaggggcaagcaagtttattaagaaagtaaataaaagaatcctactccataggcagagcagctgaggctgcattctttaacgtaaaagaatcaaccaattgggccacaggctggaagactatttaccagtgaatattactgcctggataattattctctaatgtttcaactccttttttaaagccttactggtgaaaagtataaagtccagtaaaggttgtaatccatcccagaagaatgaacacatcaaccaagcaatgctgatggcaacctcaatgctaaggcttgcctcgaagttcacctattaaccttgggtcctcctgtgctactccaggtaagactataatgtaagtctaccaccaatgcaattccttttgccaaacacatgggcaggaaatcacacttacttatggaggctttaaaattacttaagtaatgtatgccctacannnnnnnnnnnnnnnnnnnnnnnnn

SEQ ID NO: 19481 - DNA, 776 bp, Homo sapiens
  misc_feature 765, 766, 767, 768, 769, 770, 771, 772, 773, 774, 775, 776: n = A,T,C or G
acaaagaaaggacttgatagctattaccttgctgctatgtttgtttcttcggctcaccaatcattcttctgtatacctagcactgcaccaggcgctgaggttagagaaataactaagactgcgcccttcacccctgatggcaggataggcaaggttggcaccatcgtcacagcggaccctcatcgatgccttggtgtgtgcctggcatggcgttgcagcagtttatcacattcaatccttacagcgaccctattaggataggttttggggttttttgtttcattggtttttttgtttgttttttgagacagggtcttactctgttgcccagcctggagtgcagtggtgcaatcatggtcactgcagccttaacctccctgggctcaagtgatcctcccacctcaacttcctgtgtagctgggatacaggcatgtgctaccaagcccagccaattttttgtagagatagggttttgccatgttgcctaggctggtgtcaaactccttggcctaatcggttcttccacctcagtcctccaaagtgctgggattacaggagtgagccaccgcaccggtctggttccacattttaaaggatttttagactgtgtttggatcgagtaatcagtttcagattaggagagtgttaagaaagatagttaagttacagtttgtattgtgcacagtttcttggaaatttagtgccagttatttccctagagagattaaaatggagagaaaagataattcagtctgacaccagtgnnnnnnnnnnnn

SEQ ID NO: 19482 - DNA, 474 bp, Homo sapiens
  misc_feature 453, 454, 455, 456, 457, 458, 459, 460, 461, 462, 463, 464,465, 466, 467, 468, 469, 470, 471, 472, 473, 474: n = A,T,C or G
actcaggccttactgggatttcctttaagacctctgggaggaagtgtcagtagctgggcaggccttcttggcaagcattcctccctgggttgtggcgggggctcccggcctgctgtgtggcagctgcaggctcctggggacctgaaggaaaagcttaaccgttctcccttcccttgcttggcacttagagcactagttccattccagacataccgattatcttgcctacgtggcatagaggcctaggagcctccctgggaggaagaggcaggccaaggtcttgcctggctgcttctagggggaaagatgtagggaggaagctgccttatgcttggatctgcagcctttgcctggacctgtggagcctatgtggccagggtgagggagacagaaattagaacccaatgtattcagctaatcctcttcttgcctttgaacattgccggggagtcnnnnnnnnnnnnnnnnnnnnnn

SEQ ID NO: 19483 - DNA, 506 bp, Homo sapiens
  misc_feature 506: n = A,T,C or G
acttggatgggttttgtgtgtatgtttgtgtgtgcacttgtgtccaccctgttgggcttagtgaactttttgattcagtgatttaaagtttctcatcagatttggaaaattctcaattacttttttctttaaatatttctcttgcccttcccctctctcttcttccaggattccaatttcatcgatgttggaacttttgtctgtgtctcacataactcccatgctctcttttagtcttcttctgtgattcagtttggatattttctgttaacttgcttctgagttttctcattcagatttctgatgtgtgccatctggtttgtaacaaatctaattctcaacttcagacattgtattttgaatttccaggatacccacttggttcttttttatggacaattgtcttctgaatgctttatattttcatacatttatttacctctttcaacatacagacttttctttttttttttttttgaaaaaggtgtcgttctgccacccaggcn

SEQ ID NO: 19484 - DNA, 303 bp, Homo sapiens
acaagaaagaaaacaaataccaagtatttacagatccagagaaagttcacaagaatgggaggatgccagttccaatgctttgtaaagtcaaaaatagccacattgcaaaacaaacaaaaaaaaacgagaacgttcccgagtgtgcctccaaaacataaaggagaaaatcatacagaaaaacctcatgtaagggttggaacttgagcaaccagctatccaaatacagaggggaatcctcgcttagctagggcatggcctgagagaagccccttcctgctttcagagcctacaagtagtccccag

SEQ ID NO: 19485 - DNA, 274 bp, Homo sapiens
acacacagtgatttggggtcctttttcctaaaacagcttctttatcaggactttggaattctgggtgagatagaaacactgaaaacagggcggaagttttttcttctggcttcttagtccatggagggctcagcgtggagaggatatgccgtggcattctccctgggagaccacacatgttcccgacagctcagaccccagaccgcacatgctcctgaccagtcaaaccccagaccgcaggtgctcccgacagctcaaaccccagaccccgcgt

SEQ ID NO: 19486 - DNA, 3511 bp, Homo sapiens
  misc_feature 3498: n = A,T,C or G
ggagtcgacccacgcgtccgcgaagaagtagaagcatcgaaagcgttggagaggtgttaccggaacggcggcgacaagggtgttcccgaactagagtggggcatacataatcttgctgctatgcttcgaagctgtagtctgaatcaacctaagttttaaacagaaggtgaacctctgagaaaatcaagtatattttaaaagaagggatgtgggatcaaggaggacagccttggcagcagtggcccttgaaccagcaacaatggatgcagtcattccagcaccaacaggatccaagccagattgattgggctgcattggcccaagcttggattgcccaaagagaagcttcaggacagcaaagcatggtagaacaaccaccaggaatgatgccaaatggacaagatatgtctacaatggaatctggtccaaacaatcatgggaatttccaaggggattcaaacttcaacagaatgtggcaaccagaatggggaatgcatcagcaacccccacacccccctccagatcagccatggatgccaccaacaccaggcccaatggacattgttcctccttctgaagacagcaacagtcaggacagtggggaatttgcccctgacaacaggcatatatttaaccagaacaatcacaactttggtggaccacccgataattttgcagtggggccagtgaaccagtttgactatcagcatggggctgcttttggtccaccgcaaggtggatttcatcctccttattggcaaccaggacctccaggacctccagcacctccccagaatcgaagagaaaggccatcatcattcagggatcgtcagcgttcacctattgcacttcctgtgaagcaggagcctccacaaattgacgcagtaaaacgcaggactcttcccgcttggattcgcgaaggtcttgaaaaaatggaacgtgaaaagcagaagaaattggagaaagaaagaatggaacaacaacgttcacaattgtccaaaaaagaaaaaaaggccacagaagatgctgaaggaggggatggccctcgtttacctcagagaagtaaatttgatagtgatgaggaagaagaagacactgaaaatgttgaggctgcaagtagtgggaaagtcaccagaagtccatccccagttcctcaagaagagcacagtgaccctgagatgactgaagaggagaaagagtatcaaatgatgttgctgacaaaaatgcttctaacagaaattctgctggatgtcacagatgaagaaatttattacgtagccaaagatgcacaccgcaaagcaacgaaaggtatattttggtgtttctggttttgcttttcctggggtattttggttctgatgactattttggcctttttttgttgtccttgttggatttctaccagatatttgaatattctcttgcatgttttaactcttaaagattagattcgtagacaccatattaaagctatacaaatatttttgttttatctgacctacatgagtacaaattagcaatcatgctgttttcctctaaaatgtattgtggaaaattccaggtgttcagtttatttcacctgattttttttaatagataacatggcattgttgtgtgacttctgatacagtttattttgactaatgaattttgaattatctacctacaatttttagtttaccacttatctcttacagaagcaagtgatttcctacccctagatttttagtaacaccttaaaaatgtattgaaaacaaaaattaagttacatgtcataatctcagaagtagacatacagatatacctgtcgacattttttctcattataaaccaatttcagctcacatcagagttataatttcaaagccagacatgatactggtttaaaatgaatgttatgtttttaatgtttcttctctccccaaaaagcagcaatagtagtagatttaacaataccatagactcatgactatgaaatcgtggctatttgtgttaacatgttgttcctgttgttgatgtgatacaaagctcctgcaaaacagctggcacagtccagtgcactggcttccctcactggactcggtaagtgttttccatatttgtgagagggcctaaagggaaaaatcacacatacattgtctctctgcgtgttctattttgaaactgtattagtcctactcagtttataaaaacctaggtcttagggttatgtcatcctgtctaaaaaggtttgcctatttttttgactaacgcattcacagtgagaaatttataaatgtgatggttaattcatagtttattggggcaggttatattggaagatttccttattgctccaatatatgcattttatatatatataattatatatgaacacctatagtttgtacttaataattcataatttagccatgatagtatctaagctcactttcagaattattgcatacatgccttagggaagaacctatccactaatgcttttaataacttacatagattgtgttgcggcaagtcaagttttaatatagaggaaagggtttatcttatcatagtaaaatagtagtgatgtgttcataatttactatttgcatggtatattatcaaggctgtaaaagcttgaatttgccttttccacatcttcatttcaaattaatttttgtgaggacccagagaagtgggtagaaccaaatgcccatgtggttttgttatggttatttagatcatttcagggtggggagtattttcagcaccataatatttctgtaccagggagattatagtattctaatttttttagggaaaaattgcttagctctagggatttctaaactttgaacaataaaagttaattttagaaatactttcagggtcatcattaagctttagcgtggctttgttactgccctgttaagtagttttgttggttagtatggacagtacagcaaacccattatgattcctttacagtgagaaaaatatgaaatagtccagaaagaataagatattaagtaacctttgcctgaaggttctgtgaactccttaagcgtttgaatgtaaatacttctccccaccccgaataagcgtattcttctgggaaaaggcaatgaaaaaagaaatgaactttcttctcagaccttgaaaagtttttagtgcatagtataatttttttcatatgatagactgagctttatgcacacaggtggactgggtggttatggatcaggagacagtgaagatgagaggagtgacagaggatctgagtcatctgacactgatgatgaagaattacggcatcgaatccggcaaaaacaggaagctttttggagaaaagaaaaagaacagcagctattacatgataaacagatggaaggtgtagtataccttttagacttaattttggtccagttttgtatttctttttattttttaactaacctaaaaatatcaaaggataaaataaaggctatattataaataatatgtgatataactganactaaagtcacaa

SEQ ID NO: 19487 - DNA, 4010 bp, Homo sapiens
  misc_feature 1, 2, 3, 3982, 3983, 3984, 3985, 3986, 3987, 3988, 3989,3990, 3991, 3992, 3993, 3994, 3995, 3996, 3997, 3998, 3999,4000, 4001, 4002, 4003, 4004, 4005, 4006, 4007, 4008, 4009,4010: n = A,T,C or G
nnnccgcccacgcgtccgggcgcgcctcgggacgcaagttcctcgccttctcctgcccgctcgctgggcattatgcggccaagcagccgagccccagtcctcctcctcctcctgctcctccggctcctcctgcggcccgagcggctcagctctcggcaggcggcggcgttgctcagccgagcgcagacgggaccctcgcagcgagacctcagcgactcctaaagtcaaaagttggcggcgggcgccgggctccgcgcgctctccacggccgctgcctcgcgtcgccgccgcagccaaggagggcaggagggaggggggtgggggcagcggagggaggggtgaagcaccatgcagtttgtatcctgggccacactgctaacgctcctggtgcgggacctggccgagatggggagcccagacgccgcggcggccgtgcgcaaggacaggctgcacccgaggcaagtgaaattattagagaccctgagcgaatacgaaatcgtgtctcccatccgagtgaacgctctcggagaaccctttcccacgaacgtccacttcaaaagaacgcgacggagcattaactctgccactgacccctggcctgccttcgcctcctcctcttcctcctctacctcctcccaggcgcattaccgcctctctgccttcggccagcagtttctatttaatctcaccgccaatgccggatttatcgctccactgttcactgtcaccctcctcgggacgcccggggtgaatcagaccaagttttattccgaagaggaagcggaactcaagcactgtttctacaaaggctatgtcaataccaactccgagcacacggccgtcatcagcctctgctcaggaatgctgggcacattccggtctcatgatggggattattttattgaaccactacagtctatggatgaacaagaagatgaagaggaacaaaacaaaccccacatcatttataggcgcagcgccccccagagagagccctcaacaggaaggcatgcatgtgacacctcagaacacaaaaataggcacagtaaagacaagaagaaaaccagagcaagaaaatggggagaaaggattaacctggctggtgacgtagcagcattaaacagcggcttagcaacagaggcattttctgcttatggtaataagacggacaacacaagagaaaagaggacccacagaaggacaaaacgttttttatcctatccacggtttgtagaagtcttggtggtggcagacaacagaatggtttcataccatggagaaaaccttcaacactatattttaactttaatgtcaattgtagcctctatctataaagacccaagtattggaaatttaattaatattgttattgtgaacttaattgtgattcataatgaacaggatgggccttccatatcttttaatgctcagacaacattaaaaaacctttgccagtggcagcattcgaagaacagtccaggtggaatccatcatgatactgctgttctcttaacaagacaggatatctgcagagctcacgacaaatgtgataccttaggcctggctgaactgggaaccatttgtgatccctatagaagctgttctattagtgaagatagtggattgagtacagcttttacgatcgcccatgagctgggccatgtgtttaacatgcctcatgatgacaacaacaaatgtaaagaagaaggagttaagagtccccagcatgtcatggctccaacactgaacttctacaccaacccctggatgtggtcaaagtgtagtcgaaaatatatcactgagtttttagacactggttatggcgagtgtttgcttaacgaacctgaatccagaccctaccctttgcctgtccaactgccaggcatcctttacaacgtgaataaacaatgtgaattgatttttggaccaggttctcaggtgtgcccatatatgatgcagtgcagacggctctggtgcaataacgtcaatggagtacacaaaggctgccggactcagcacacaccctgggccgatgggacggagtgcgagcctggaaagcactgcaagtatggattttgtgttcccaaagaaatggatgtccccgtgacagatggatcctggggaagttggagtccctttggaacctgctccagaacatgtggagggggcatcaaaacagccattcgagagtgcaacagaccagaaccaaaaaatggtggaaaatactgtgtaggacgtagaatgaaatttaagtcctgcaacacggagccatgtctcaagcagaagcgagacttccgagatgaacagtgtgctcactttgacgggaagcattttaacatcaacggtctgcttcccaatgtgcgctgggtccctaaatacagtggaattctgatgaaggaccggtgcaagttgttctgcagagtggcagggaacacagcctactatcagcttcgagacagagtgatagatggaactccttgtggccaggacacaaatgatatctgtgtccagggcctttgccggcaagctggatgcgatcatgttttaaactcaaaagcccggagagataaatgtggggtttgtggtggcgataattcttcatgcaaaacagtggcaggaacatttaatacagtacattatggttacaatactgtggtccgaattccagctggtgctaccaatattgatgtgcggcagcacagtttctcaggggaaacagacgatgacaactacttagctttatcaagcagtaaaggtgaattcttgctaaatggaaactttgttgtcacaatggccaaaagggaaattcgcattgggaatgctgtggtagagtacagtgggtccgagactgccgtagaaagaattaactcaacagatcgcattgagcaagaacttttgcttcaggttttgtcggtgggaaagttgtacaaccccgatgtacgctattctttcaatattccaattgaagataaacctcagcagttttactggaacagtcatgggccatggcaagcatgcagtaaaccctgccaaggggaacggaaacgaaaacttgtttgcaccagggaatctgatcagcttactgtttctgatcaaagatgcgatcggctgccccagcctggacacattactgaaccctgtggtacagactgtgacctgaggtggcatgttgccagcaggagtgaatgtagtgcccagtgtggcttgggttaccgcacattggacatctactgtgccaaatatagcaggctggatgggaagactgagaaggttgatgatggtttttgcagcagccatcccaaaccaagcaaccgtgaaaaatgctcaggggaatgtaacacgggtggctggcgctattctgcctggactgaatgttcaaaaagctgtgacggtgggacccagaggagaagggctatttgtgtcaatacccgaaatgatgtactggatgacagcaaatgcacacatcaagagaaagttaccattcagaggtgcagtgagttcccttgtccacagtggaaatctggagactggtcagaggtaagatgggagggctgttatttcccctaggtcatctcttacattctagttctggtgctctctatctgtttaagacaaacccttgtgcacctttctcccacctctccctttctcccttgtctcccttgagaaaacaactccagttctctgcctgcaccatgactgtcgtactggatgtaactagtctaccagtgacctcagggcactttgggcttggctagatcactcactgttgtagcttctgttgtgattttgaagttgcagtccatcaccttccctcctctttgagccctagctaagtcactgaaaggaaatcatggatttattaatcataaagctatactagctcacatctgaagtcaacatgaagtttcctacttccttgtctttgaaataagagaattagaccccagggagtgacctctctgacttacccatccaactnnnnnnnnnnnnnnnnnnnnnnnnnnnnn

SEQ ID NO: 19488 - DNA, 211 bp, Homo sapiens
  misc_feature 210, 211: n = A,T,C or G
gcaggtacaaatcatacctcccaaggtattgctccattgtgtttttgtgcatttggtttggatttttatggggaattgaagacaagtggatcataaagtgcaaaataaaatgctctagaaatgacagatggggcacaatttccaagaaaattcatctagacagtggcaacactgagaaaaaaaagaaacattcaagaagggagttacagnn

SEQ ID NO: 19489 - DNA, 789 bp, Homo sapiens
acttttttttttttttttttttgctagagatggggttcaccatgttggccaggctggtctcgaactcctggccacaagtgatccacctgtctcagcccccccaaagtgctgggattacaggtgtgagccaccactcctggcccatgtttaggatttataccaatattattaacttagaaataagtttctaataaattattccacccgaacttagggtaactgaattttaatgctgatgtattaagcaggttcttcctggggtcttttgattctcaagggatccttcactgagggtggacttcaaattaataggaagcaggaaggagccacctgcactgttttcttgactggggatgacacctaaacctttctgattgcattacttgccctatttatgactggtctccctcattgtaaaataaagattttggatcacaggagtggttcttgaccttaataagtccagagtgtttattacttttttccaccaatatttattggtaaaataaaccagaaggcatgtctattaagtaataaataatgctttcaaattttaagctaatcagtgaaacatatgttaaaacataatcatcctttgggctattgagatattaactataatgatgagcttccgttatcaccttgtggacctctggggatggagcatcttgaacggagaatcactggattaaataaagagataaaactcaagtattttttaactttaaactttgatgaaaactctccggtaaactggaatactttagacaatttccaaatgactagcgg

SEQ ID NO: 19490 - DNA, 294 bp, Homo sapiens
  misc_feature 289, 290, 291, 292, 293, 294: n = A,T,C or G
actatgagaatttcaaacaaagaatgaagccataaaacaaaaagactgaatatttggctctgcctggctcccaggctttctactattcttgtgacttggcctcaacaaaatctaaagtgacttgttatttgtgggtcagctttgtcccatccttaccagtcatggctttagacaaaagactcagcaccactcaccctctgggacagtctgactgtggtctgaggcccctgcttagatattaggcttcagctcagttcccaagtctcgcttcatgactttctgtgtaccnnnnnn

SEQ ID NO: 19491 - DNA, 720 bp, Homo sapiens
caggtacacacagtcagcatgcgctgtagcaatgtgctttgcagctggaactcctatcaagcatcctaggcaaggcatgcaccccagcgccagagagaatcaggaaggggaaggtgccctgaacctcagacaagaaccccttccagaaaccaccaccaaagccatcactgtgtttccaccctcagacctgtgtctctttagcttcttggtagaggaagaagaggagctgggtgggcagggctcagcagcttctaagtttttgccatgtttatggacaagtgggccagttcagatttggattagatcacctaagagaaggcgtggaaatttgaaagagttttacaacaggaaactggcagagaatgtcgttgctcactaatgccgtgtttctccttttcctgggcacacagccaaattacagcccaaggtctccttgcacctgtgagttctgcccaagcctgtgttggtgggcgagatggaagctacctccagcttaaataatctgttctttttactgttctagtccatggtagatttggatgccatgcgttaaagatggcagtgccacagacccaggggccccaaatgactgcgtggagccgagaccctcacctcttccaacacaatgctctggggatggggagagaagtaaagttttgcatgttaaatcatgaacgttttgtgtctgtttgttctagcagttcacctactctcaccagt

SEQ ID NO: 19492 - DNA, 239 bp, Homo sapiens
  misc_feature 1: n = A,T,C or G
nctccaccgcggtggcggccgaggtactgatgtcctacagtcctctacctgatctacgttcactggaaagtgtgagtctcagcaggaagcaccttgctctcgtgtccggctaattcgagtgctttacgtagtagaggaattgctgacttttgggacatttctggtcttgccaaagttcaccttgtagtaaagcccccaaagatacttcccaaatagatgctctcttgaaaataactcag

SEQ ID NO: 19493 - DNA, 1262 bp, Homo sapiens
  misc_feature 1, 1259, 1260, 1261, 1262: n = A,T,C or G
nagatttaaaatagtcttaactttttgcattatttcaactgttttggaaagcaacatagtatttcctctgaatagagcagtgagttcagaagatccgcttaacctttggtccaaattcctacctcttggatttgtgaggaggaaataattttagatgagcataattatatgcccaaatatttatattgtattgtaatctatactactagtacgaaatgagagaaatggtttagtaaagtataagacatcaacatagtaaagtattctataggtttatgtgttggaattacaaagatgaagaaaagatacaggcaagtatttgatatagtaaattaaaaatagcaagatgtagagtagtcatgtatacagtgatagcaagaacatggatccttaaggacaaaactgaaacataatgcaaaaaaagaaaaatatgcaaattatttttcgtatgatgtaagttgtaaatatttaaatggttatcaattaagagtcttggtgtggcagatgaacatttgctatcactattaccattatgtagttttgagctttaattataaaccacctttttgtttgtattatcttaatcagatctgttagtgaagacgtggctatgagcatttgttttatttgtgtcagctgtgttatgatgggtatatcactatacaattttttttttcttgtgttgggtccttttatagccatgtgatgccaagaggctcaggaactggcatttacagcaatgctgcaccaccacctgtgacttaccagggaaacttatacaggccgcttttgagaggacaagtccagattccaaaacttatgtcaaatatgaggccccaggattcctggcgaggtcctcctccccttttccagcagcaaaggtttgacagaggcgttggggctgaacctctgctcccatggaaccggatgctgcaaacccagaatgcagccttccagccaaaccagtaccagatgctagctgggcctggtgggtatccacccagacgagatgatcgtggagggagacagggatatcccagagaaggaaggaaataccctttgccaccaccctcaggaagatacaattggaattaagcttttgtaaagctttcccaaatcctttcatcattctacagttttatgctatttgtggaaagatttctttctcaagtagtagtttttaataaaactacagtactttgtgtatttcttttaactgtgtatatttctactgatctgatctcactgtttatgttgcnnnn

SEQ ID NO: 19494 - DNA, 950 bp, Homo sapiens
  misc_feature 1, 2, 3, 945, 946, 947, 948, 949, 950: n = A,T,C or G
nnncggtttgtcttttatttatgttagtgatatggaggtttaaaatatttatgcaggctaatctattgattgtcttttgcacatgcggttctccaactttcctctgtctatactaaaatgaacccttactgctctgacgcgggctattctgaataatcagtgtttaaaattatatcccaaagtagggtatcacagggtttcctgatgaggataaatgggcctgaagtgcttatgggcacccactatgtatcatgggaaaacttgcacgtgtgtgtgtgtgtgagagagagagaaaaaaaaatagagaaagttggtgagaaaaggggaggctgtttttgggccgagggttgtttgtttggctttttcatttcttttcccttgatagaagtgagcttactgaaggcagcggggcttccatagattcctgaaacatctgagtgactgaaaccagcggcttgctgagcgagctgtgactacacctggcaaggggtgtgttaggcatgtgttgagtctgtgagaaggcaggcggagcagagactcaggccacatcccatccagttctcaccccttaagttttgctctttgaggctgcaggctgttgctcagcctcacccaggttgagtcctgtgggaggactcataggagcccacagccctattgcagctcaccagctgcactaactgtagcttgaagacgaaggtaacaactagcacttacctggcacttagctgttttgcaaaaccctttcactagggcttttatagatgcttctcacctcaaccttatgagcttaaatactgtttccatctccattaatttggaggaaaccaccactcaatagatgcatcattaaaatccagagcttccgactccagggctgacctgctctacttcagaaagaattccatcattgtgttttctggtcgtagtttcttggtggtaccnnnnnn

SEQ ID NO: 19495 - DNA, 509 bp, Homo sapiens
  misc_feature 1, 2, 3, 4, 5, 6, 7, 8, 9, 10, 481, 482, 483, 484, 485, 486,487, 488, 489, 490, 491, 492, 493, 494, 495, 496, 497, 498,499, 500, 501, 502, 503, 504, 505, 506, 507, 508, 509: n = A,T,C or G
nnnnnnnnnnccgcccggttgtgacgcgggtgtttgcactgacgtagttagcggagcagaggaaacattcataaggaaatatgcgagtagagctcaggagaaaagcaggactagaggcccaagaatcacaggccagaagaagaagctgtagcctcgggaatggaagagctctctgaaggggaaaggggagaacaggaatgtcccaggagccaaggctcatctataagggacttccacatttaggatgtagaagaaggaagcagaagcaggggatgaccagaaatggccccagagatgagatgaaagttaggagagcggggagcaagcctttaggtttcacaagggaaggagggaaagtaggtgttaggtgctgccaagatcagggaaaataagcagaagaccaggccatttcagttgcagtgagccaagatcacgccactgcactccagcctgggtgacagagcgagactctgtctcaaannnnnnnnnnnnnnnnnnnnnnnnnnnnn

SEQ ID NO: 19496 - DNA, 1180 bp, Homo sapiens
  misc_feature 1180: n = A,T,C or G
accacaatcaactcaatcacaacatattacaacaaaacccttcatctttttccttaacccactgtaacacaaagcagagaatacagattagcttttttatttgtctgtttgacttcatctcttacatacctctatttcagtatctatgatattttcctcttcttatctgttcaatgacagtcttcccttttaatattctaaacttgtcaagcacagcaattaaaaaattattctcatgtatatattttatctttagagcatcgcataaagcctgatacataggaagttttagatgcatatttacattgggtagatgaatccaggggaaaagatgaaaccaggtgatgtgttgtagcgaaggtaaaggtgtggcattgtgctctgggaagatatactaccctaaaaagagatatgcctctgaagagggggtgagtcccaggggaaaaagcaagatcccacttacactatgaatagctaagagttagatcgatagaatattattgaacacaagagtcaggctggtgtagtaaaatgagtcagagggctttgcctcttctggccttggcctctattacagtgtattaatactgtctgttcccccgtcctttaccacagtgagatcttgtagaggacagaaaccttagtaaagtcatctttgtgtctatggcccctgcttaatgattagaacatggcaaacactcagcaaatatttttagataaataaatggtctaggacaagttagtagaacgttttgaacctcactttctggtatgtaacatagggataccaataactacattactggctattttagtgattgcattagtccattttcatactgctatgaagaaatactcaagattggataatttataaagaaaaagaagtttactggactcatagttcacttggctggggaggcctcacaatcatggtggaaagcaaaggaggagcaaaggcagcaggcaagagagcatgtgcaggggaactgccctttataaaagcatcagatcttgtgagacttcttcactgtcacaagagcagcacaggataaacccgcccccatgattcaattacctcccaccaggtccctcccatgacacataggcattatgggagccacaatgatgagatttgggtggggacacagcgagaccacatcagtgattaaatgagagn

SEQ ID NO: 19497 - DNA, 251 bp, Homo sapiens
  misc_feature 251: n = A,T,C or G
ccgggcaggtactgcccaagagagacgtctcttactgcctcattaagcatttggagctgttaaacacaaatcaaggcaaccagaaagggcatcttggcttcaggctgggcataaccatcccatttgccacataaaagtctagtggctactctgcaccctttctgggtagaagcagagttagtttggtcatgggggcccctgtgggacagtgttgcccagacaggtacctgccgggcggccgccaccgcggn

SEQ ID NO: 19498 - DNA, 413 bp, Homo sapiens
  misc_feature 413: n = A,T,C or G
actatctcttaggagaaggctgacttgaaggctgtgaaaaactaagaaaacaccaaccattcaacagtatactagaattcctttcaatgcataatagaaacaagaagggattagaaaagcatgtcataatttccagatagcataattatttacattaaagatccaagagactcagacctagtaaaagattttggccacattgtgacatttgagatcacattaaaaaaaaaaaggaaaaatcaagtgatactaacatcaccaattaacatcatcaattagaaaatttatccatcagccgggtgtgggggctcatgcctgtaatgccagcatttcgggaggccgaggtgggtggatcatctgaggtcaggagttcaagaccaacctggccaacatggggaaaccctgactctagn

SEQ ID NO: 19499 - DNA, 738 bp, Homo sapiens
  misc_feature 1, 2, 3, 84, 737, 738: n = A,T,C or G
nnncctaccaagcactctgggagggctgggcggtggcactacggatcctctaatgttcacaaatttaactacgtactcagcganaatacaaaaccaacctccagaccttgatgccttcatagagccatgactccgtcctttagtcagcttgctacatgtaccctaaccctgctgtgtgacgacgtgtaaatgttttttgcaacatgggccctaaatacaagaagatgcttgatctggtctgactgaggatggagtcacgtggccaaattgtggcagaaaaatgggctgcgttggacggactgccaggctgcttggcgatctcccacgaggcacactgtgttcactctcggtgagcagtttgaaggttcttcaaagggaattctcactctgccagactttggccttgtgtggctggactttagaacatcatccaggtataaaatgctacccagctgaattatctaacagctaacttacaggggaggttaccaaggcccagaaaggctcacaggattttagtgctaccccaaactatgaagacagacccccagaaccccactctctggcaccagactttctgccccaggaccacccacatagggttttttttggctacatccacacatccacagcaccccacaaaaaaatgtgtttaagcacacacagaactatcactggcccattctgatcctggaccaaaaattgttaattgacccggccgccaccaaaaatgagcnn

SEQ ID NO: 19500 - DNA, 828 bp, Homo sapiens
  misc_feature 1, 2, 3, 4, 828: n = A,T,C or G
nnnncgaatttggagctacaccccggtggcggccgggcaggtactatctggaacatgtagcttccttcagcactgcagcatgggaagccagagttgatgattcatacaccagcatttacatttttcagcatgaaagtggtatgttcttcaactcacaacccattggccagaaccagtaacatgacttcacctaactgcaaactagctggagaattgtgggagagctcatggatattcagtgataaatgtctttgttataaaagggtggtcatagccaggcacatggctcacgcctgtgatcccagcactttgggaggccgaggctggggatcacctgaggtcgggagttcgagaccagcctggccaaccatggtgaaaccgtgtctctactaaaaatacaaaaattggccgggcgtggtggtgcgcacctgtaatcccagctacttgaaaggctgcggcgggagaattgcttgaacccgggaggcagaggttgcagtgagccgagatcacaccattgcactccagcctgggcaacagagtgagactctgtctccaaaaatgaacagaatcacaatcaagaacaacatatattgtgttggggcgccccattgagccccatgaaaaaaagtttccgacacccatcggtaaggagcgcgccacggacccccagagattgcgggcaacaggcgtccaacttgggccaagaagcaacccggggatcaaacgagggcggattatccccatgaaaaacccgcgcgaaccgcacgtctggacacacaagtggtcgcaccgtccggccaccgagggacagggccattcaatgccgcn

SEQ ID NO: 19501 - DNA, 532 bp, Homo sapiens
  misc_feature 532: n = A,T,C or G
gcccgggcaggacgcgggatggtgtcaacttatgtcaggacccatgggccctccccatgcacacagcactcttggaatctcatccttttccatggctctggctcacacttccacagcatttactcctaaatatgccccctgggttcaagggtgattctcgtgcctcagcctctcaggtaactgggattacaggcatgcaccaccatgcctcgtattttttttgtgtgtgtgtttagtagagacgtgtttcactatgttgtccgggctgatctccaactcctgtagtcaagtgatctgcccgcctcagcctcccaaagtgctgggattatagacatgagccaccacacctgatgtctgatgcttatttattatgtgaccttagcgaagtgtggtagtcattagtgctggtctatctctataccttccccaggcaaggtaggattgcacttcccgctccacttgtgattaggtggagccatgtgactacttttggccgataagttatgagtggaatttaaaataactagtaccn

SEQ ID NO: 19502 - DNA, 1118 bp, Homo sapiens
  misc_feature 1, 2, 3, 4, 5, 6, 7, 8, 9, 1117, 1118: n = A,T,C or G
nnnnnnnnngagtcactcagaggctaggtacgaggctgggggttgaatcggccgaggaagagaattagagaatgaacctggcgggacggatgtctaatcctgcacctagctgggttggtcagtagaacctattttcagactcaaaaaccatcttcagaaagaaaaggcccaggaaggaatgtatgagaggctctcccagatgaggaagtgtactctctatgactatcaagctcaggcctctccctttttttaaaccaaagtctggcaaccaagagcagcagctccatggcctccttgccccagatcagcctgggtcaggggacatagtgtcattgtttggaaactgcagaccacaaggtgtgggtctatcccacttcctagtgctccccacattccccatcagggcttcctcacgtggacaggtgtgctagtccaggcagttcacttgcagtttccttgtcctcatgcttcggggatgggagccacgcctgaactagagttcaggctggatacatgtgctcacctgctgctcttgtcttcctaagagacagagagtggggcagatggaggagaagaaagtgaggaatgagtagcatagcattctgccaaaagggccccagattcttaatttagcaaactaagaagcccaattcaaaagcattgtggctaaagtctaacgctcctctcttggtcagataacaaaagccctccctgttggatcttttgaaataaaacgtgcaagttatccaggctcgtagcctgcatgctgccaccttgaatcccagggagtatctgcacctggaatagctctccacccctctctgcctccttactttctgtgcaagatgacttcctgggttaacttccttctttccatccacccacccactggaatctctttccaaacatttttccattttcccacagatgggctttgattagctgtcctctctccatgcctgcaaagctccagatttttggggaaagctggccaaggatgccgggcgggattgacagcgcccgtgctggacagggggccaacaagctgggccacccgataggcggccagatgaggccagagagggaaggccccaagccccacctgtttggccagtcnn

SEQ ID NO: 19503 - DNA, 452 bp, Homo sapiens
acaaggactttgacagttcttcccaaacagatcctaattttaaacattaggtttgctttgattcttttccttggggctaagagctcacaaagacttaggttctggtcatggctccagaggccacacattccaggacaaagtctctctacagtcaacgccttagtcccacatctgtaaaatcggaataatcatccctgatccagctatcacattgcagtagagtgagactcaaatgagataatggaagacagtgggaatgatcatttccaacttggcctggctgacccattccttgttctaaagtcagctcaggtttcacctcttccaggaagttgacctggcacttcttttaggatggctactgctcctctgggtgccccggggctcagtgtctccccatcaccgcccatggcacactggagtgactggtcctttacttgtttgcttcctgt

SEQ ID NO: 19504 - DNA, 620 bp, Homo sapiens
  misc_feature 1: n = A,T,C or G
natggtggggaagcgcttaagcacgcgggtgctgaccgagcgcagcaccagcacgaacgccaggttcgcgtagcggatgagggtgcggcgcagcaggcggccccgctggtccacgcggtgcacgctagccgagatgacgcacatcagctggtctggcagcgggatgcttgtgtactgggaccaccagcggttcaccacgagagtcacatagaaacccaatacaaaggacaagggaatgaggtctgctgagcggttgcagtaccgggccacctgagcatacacgtacctctgctcctgggtcagcagcagccggtaggtgatgctaagcacagcgtacaaggccccaaagaggaggaattccttgtagaggagcttgtagatgcttcccctccagcggagaagcaggccagagaaacctccgaagcgggcctccgccactttgagagtgtatgaaaccgtcatggtgctgggagcctggggcaggaggtcacaagagttgcccccagggctgtcgtttagttctccagacaacctcccttccactctggtctcacacaccccagccttcaccctgcgtcagtggacaagggggtaggagcctgcagagcagaaaagtacct

SEQ ID NO: 19505 - DNA, 365 bp, Homo sapiens
  misc_feature 1, 2, 3, 4, 5, 337, 338, 339, 340, 341, 342, 343, 344, 345,346, 347, 348, 349, 350, 351, 352, 353, 354, 355, 356, 357,358, 359, 360, 361, 362, 363, 364, 365: n = A,T,C or G
nnnnncaggtacgcggggatgtcttctgagagagtcagggcagctgaagactgggtgagggtgagggaagccgctggtgtcctcctcagtcacccgtgagaggactcctctgtggagctaatcaactgcaaggaagattgttcccagtgtccagacctgaaggagtctggacccatagtgcagtgagatttggggaaggaaggattccggataggggtgagctttctgatgataagcaaatgtgaacacgtgagcagcatcctactttaaagcccctccacatgctctgaaatactaatatcttatgtttatagcacaattttatagctgggaaaannnnnnnnnnnnnnnnnnnnnnnnnnnnn

SEQ ID NO: 19506 - DNA, 862 bp, Homo sapiens
  misc_feature 1, 2, 3, 4, 5, 6, 7, 8, 860, 861, 862: n = A,T,C or G
nnnnnnnnccgcccgggcaggtaccagagcttagcagggaagatggacaacaaaagctctaaatcctcttgcatcgacacgttcaatttgcactgaccaatctgttggcacagtaactgtttataagctaaatttctacattttggctacaagtatcccaaatccaccttttaaaaaatcctaggtagatgccatctggtgttaatgatttgcacaccccttaaattgaaaatattttaaataaatctcacggttttatatagtatcattaatgtgtctattttaaaaagacaatctgagaataacacttcccctaattgttgtcttaataatgaccaagagctgaggaaaaatgattcacactgttagttgttttgttgttttgctcacgggggaagggggtgaagtaactggctgtgcctgggttttgaagctcattagcactagggccacacttgaggaatccagactcctctcaccttaaggttttcctactatagactgtgagagtttcgctggacataattatgttttttaaaatgtatacttttgtcttgcttaacacagcttaaattgatttgcaaatgattccaaaaggaaagaacattttgtaaatgacatgaataacataaggtttaaatgcagcaagtgagtagaatttcatttctgatactgtaacactgaaaagaaagggttaataaatctttagcccagcgtgggaagagcctcagcaaaaaccctgcatccagctaaggcagctgcagggggcagaggagtcagggaagccccaaatcagcattctgagtgctgcgatgggtagctggaacattttaggtacagaaacggacgcgtggtcggcnnn

SEQ ID NO: 19507 - DNA, 935 bp, Homo sapiens
acattattcatatccagcactccctgcggctgctgctggaggagcagttatccaacaaggactgtttcaacctcatcgcgtttggaagcacaattgaaagctggaggcctgagatggttcccgtgagtcacaacaatttacaaagtgcctggcggtaggttatgggcagagacttcgtggggctgtgtctgagggaaggtttgcaggcattgttttctctgtccccctctccaccaagaagtagctctctagagtccctgaccccaaacagccatgggcagaaatcagaaaacagcttccttctgtctgctgctctccccacctggccatcttcactttatgagagtaatgacatcgactccatcacgtctgagatggaaaaggctctcagctactcccaaaaggtatgccctgggcatgggccaatgaccctcagcatggccatctctgcctccgcaggtgggccctgaacctgcggtgtcggggcagcaggaacgttctcagcgccctgcggaaggctgtggaagtagacttcaaggacaaagacaaacaccaatcgcagggaatctacctcttcactgggggcatccccgaccaggacatgcctacactcagtgcctacatggctgaggcctgtggcggctgcgacctccagctgaacgtgtgtctcttctacgtgggcgagccaaagatggacaccacaccccctgcccgctatgccagtcacactgacacagccgccgcctacaaggaggtcacccgggctgcaggtggccgcttccactggtttggagacacaggcatttatgagagcgatgacatcaactccatcatgtctgagatggaaaaggctctcaactactcccaaaagtgtgccttcctcatggcctccctgaagaaccattcaggaaaagtacctgcccgggcggccgctc

SEQ ID NO: 19508 - DNA, 898 bp, Homo sapiens
  misc_feature 1, 2, 3, 4, 5, 6, 7, 8, 9, 10, 11, 12, 13, 14, 15, 16, 17: n = A,T,C or G
nnnnnnnnnnnnnnnnnaatctaatgaacttgaatgtgtatgctgggttcttctgtcaagttggctgctatcatttttccagaagctggatgactctccgaggtgggcaaaggaacacgtacccatgctcccacctcatctacccataaaaggctgggcagggccaggcttctctctggggtgtttgagctcagagagagagaagtaccggttgatgtaagcacagggatggtggggacagggtgaccaaagtgaactgggcacgagatgagtagctggtatatagtgacttggaaggcaaggtgcttgaaatttcctggaaaatctctgcaagtgcacagtagaaactattatcattggttacgtgcttcaagaggactgggcagatgggggggcaggaataagagagccactattcacttgacaaattcttggacattttgatttctgagccatatggatgtgtgtcctatcaaaaagaataagtgaaaatgttcaatagtaagagaacactttgtaaatctctggctgttgctctttgtgattagcctctcagcactcttatttggaataatcagaaaaatacaactatctaaattttgggaggagagtatacttgtggagatttgggaagaaagaaaataagtatggaagtttcccccaataataaaatgaaattcactggaagccatttcaaacatttagaaagttaaccagaaaaatagaaaggtggccgggcgcagtggctcacgcctgtaatcccaccactttgggaggctgaggcatgagaattattggaactggggaggcggaggctgcagtgggctgagattgtgccactgcactccagcctgggcaacagaaaccctgtctcaaaaaaaaaaaaaaagaaaagagt

SEQ ID NO: 19509 - DNA, 308 bp, Homo sapiens
  misc_feature 304, 305, 306, 307, 308: n = A,T,C or G
accctgcccaggtaagatcactcgtgggtaagaacatgaggttctcacccgtaaggcaggatttttatagaaggaaggtaggtctttcaacctatgtcctccttctgttccacaaagtggaaagccacaagccctacaaaagccttgcaagtcccagaggctgcagccgtatttattcttcaggccaagactctcaggacagagagcacccatgcaccccgcaggctgcaggccatctccctgcatttgggactgtcctgaggatggcggcttcatttttgtccctcctacctctgagtaaccnnnnn

SEQ ID NO: 19510 - DNA, 935 bp, Homo sapiens
  misc_feature 1, 2: n = A,T,C or G
nnaaagaatatctggtctctgaggtactgggaaatgaggcaaaagtgtctctcttcactgctagctccttggggaccagcaagcggctctcaagttgcgtggtggcccaactggaaaaaaggcagttcggtgcatcctgggaatatccaggtgaaagtgtgagatttacctagaatagcttctgggcctctggggttttcacgctgtctctggtgaaggtgtccattttagaactgaagcaaaaaggtttcaatccgttccgttttctttgtatagcacttacccagtagctccatacaagtgagcactcagtaattaattttctcctagtccttgcattacactttctttgggatggaaatttctattttatgctccagaatagccatttctaactcacccatatggcctcaaagagttgggacttaaacataagcctataagcactcagattattgagaagtatgcataaaaaatggacaagctgaagatatggacaattttactgatgtttaattgcacaattgttaaaattgcatcactgccatcgaggtcaatttgacttaagtaactctgtttagaaatatgaattatgatataaaaacaattaagcaagcaatacttttatgttatttaaaaccttgctgtataggaaaagctacttttaggccaggcacaatggctcacacctgtaattcccgggcacttggggaagctgaggtgggaagatcgcttgagctcaggaggttgagagcaccctcgggcaacatagcggggacctcatctctactaaaaatacaaaaaattagtcaggcatggtgtcgtgcacctgtagtcccagctgcttgggaggctgaggcaggaggatcacttgagcccaggagattaaggctgcagtgagctgtgatcgtgccactgcactccagcctggatgt

SEQ ID NO: 19511 - DNA, 4283 bp, Homo sapiens
acgtgttagctattatcatcaccctccttgctaggcagagcaggacagtggggaattgatgtttcctcccctccatctcacaggtggggcaggggtgtgctgagaagagaacttgggactcttggcccctgttcaattctctgcttaacctgctaggcaatttgggcctctgaaaattcagtaatcctcatagcaacttagacgtcacctgggcctgtggtccccttcctagcctaggagtcagagcatgaagctccatctgtcacattggtttgttcagagaactacacatgcgttttattttagcagcatacaggttcccacttaggcattgagaggacataggaagctgtttaacttcctagtctttaaggtgtggacgctgaagagcttagctagtaatgacagtatcctgtagcaaaagctatggcatcacatactgattttctaattacttcaacccataaggatgctataatgcttttgtaaattaccgtctaagctatatgaagtaatgcattccatcctgcagtgcagtaaatgttactatactcttgtaagtagtggcatgtgtttccaaagttgaggttaaatccagaaaggctgcgacacaataattagttttataattcttcatgcagactgatggagaagtctttacaattttgacttgcctcttaagacccctctagggttagtttcacatttattttccagtctcttcagtgttagatttctattttaaaaggcgggattatttcataacataactaccatgtgttaggcatcgcagaattgccatctgataatctaaactcaagtacgagaaggcgacgatgaccggactgtgtgccgggagatccgccacaactccacgggctgcctgcggatgaaggaccagtgtgacaagtgccgggagatcttgtctgtggactgttccaccaacaacccctcccaggctaagctgcggcgggagctcgacgaatccctccaggtcgatgagaggttgaccaggaaatacaacgagctgctaaagtcctaccagtggaagatgctcaacacactcctccttgctggagcagctgaacgagcagtttaactgggtgtcccggctggcaaacctcacgcaaggcgaagaccagtactatctgcgggtcaccacggtggcttcccacacttctgactcggacgttccttccggtgtcactgaggtggtcgtgaagctctttgactctgatcccatcactgtgacggtccctgtagaagtctccaggaagaaccctaaatttatggagaccgtggcggagaaagcgctgcaggaataccgcaaaaagcaccgggaggagtgagatgtggatgttgcttttgcacctagcgggggcatctgagtccagctccccccaagatgagctgcagccccccagagagagctctgcacgttcaccaagtaaccagggccccaggcttccagggccccaactccgcccagccttttccccgctctgggatcctgcactctaacattcgactctgctgctcacaagacagttttattgaattagttgcatgcaggagcaattctgttcttcccatgagcagcagagtcgagtgttagagtgcaggatccagagcgggggggctgcagctcatcttggggggagctggactcagatgcccccgtagggtgcaaaagcaacatccacatctcactcctcccggtgctttttgcggtattcctgcagcgctttctccgccacggtctccataaatttagggttcttcctggagacttctacagggaccgtcacagtgatgggatcagagtcaaagagcttcacgaccacctcagtgacaccggaaggaacgtccgagtcagaagtgtgggaagccaccgtggtgacccgcagatagtactggtcttcgccttgcgtgaggtttgccagccgggacacccagttaaactgctcgttcagctgctccagcaaggaggaggtgttgagcatcttccactggtaggactttagcagctcgttgtatttcctggtcaacctctcagcgacctggagggattcgtcgagctcccgccgcagcttagcctgggaggggttgttggtggaacagtccacagacaagatctcccggcacttgtcacactggtccttcatccgcaggcagcccgtggagttgtggcggatctcccggcacacagtccggtcatcgtcgccttctcgtatgaattctgttggcgggtgctggaaggccgggctatggaagtggatgtccatggcctgctgagcctcgtgtatcatctcaaggaagggctggaacatggcgtggaagttcaggggctcgtacggagagaagggcatcaagctgcggacgatgcgggacttgggaaagaagaagtgcggcctccggtggggcaggctgaagggcaggtagtggtaggtatcctgggcctcccggcctgaagaacccctcctggaagagtgtaagccctgcctgaaacagacctgcatgaagttctacgcacgcgtctgcagaagtggctcaggcctggttggccgccagcttgaggagttcctgaaccagagctcgcccttctacttctggatgaatggtgaccgcatcgactccctgctggagaacgaccggcagcagacgcacatgctggatgtcatgcaggaccacttcagccgcgcgtccagcatcatagacgagctcttccaggacaggttcttcacccgggagccccaggatacctaccactacctgcccttcagcctgccccaccggaggcctcacttcttctttcccaagtcccgcatcgtccgcagcttgatgcccttctctccgtacgagcccctgaacttccacgccatgttccagcccttccttgagatgatacacgaggctcagcaggccatggacatccacttccacagcccggccttccagcacccgccaacagaattcatacgagaaggcgacgatgaccggactgtgtgccgggagatccgccacaactccacgggctgcctgcggatgaaggaccagtgtgacaagtgccgggagatcttgtctgtggactgttccaccaacaacccctcccaggctaagctgcggcgggagctcgacgaatccctccaggtcgctgagaggttgaccaggaaatacaacgagctgctaaagtcctaccagtggaagatgctcaacacctcctccttgctggagcagctgaacgagcagtttaactgggtgtcccggctggcaaacctcacgcaaggcgaagaccagtactatctgcgggtcaccacggtgggcttcccacacttctgactcggacgttccttccggtgtcactgaggtggtcgtgaagctctttgactctgatcccatcactgtgacggtccctgtagaagtctccagggaagaaccctaaatttatggagacggcggagaaagcggggaaaacgaaaccgggaggtcaaggtgtctgccagggctgtacaccagtgtggcgccacaggccggcgcacaacggctacggcaccccccatgtatctctctgctgatcgcctctcgcttgatacttgctgcccgcgtccgccgcgccgacggccccagagccagcaaccacccacgcacgaccccacaagcacgccgggcagaccacagatcagacgaagccacaacgcctcacgcgcaccacaccccgacacaccccaccgcaaccacgcagccccacccagccaagacccacagcacacacacgcacaaccggcgagcggcggaggccgcagagaagccacggaggagagcaccgacacggggacagacgagcacagaggagagggggcagcagcccaccacagggcgcggcgcagcgcggcgggcgcaggacgccggggggcgagacgggggcacgaccggcggcacggcgcgggcgacgaggggaggggggggcggcgcagcggcgcgcggcgcgccggaccgagcgcggggcggcacgcggacaggccacgaggagcacgccgacccggacagcagcggggagagacacaggcccagcacgggcgacccgcagcacgaagcacacgacgcacccaccagcagcagaagacccacgcagtgacagcgcagccgcacaacacgaagcgcacgacaagcaaagacgagcggcagcagacaaaccgggccccgacacagagccggagccgcagacggggaggcgaggccgacgcgacaccgcagcgcagcgcgccacacgacagaggagcaca

SEQ ID NO: 19512 - DNA, 2171 bp, Homo sapiens
  misc_feature 1826, 2030, 2170, 2171: n = A,T,C or G
gcactattggagcaagttcttgaatgccaaatgaaggcataaatcagtaagaggcataataaaaggctgagcagtgcttggctttttacgaactgatcctgataggagcagctgttcaacaaagttgccaggtcaccgttacatagtccctgccttctaggggctcactgcctactgggagagacagtctgaaagttggtggagcatgtaactgttggatgaggagtttgagcctgtggactgtgggacccccgaggagggtgtggctactctaggcagaacaatcccacagtttatttatatttaaccttgaaattcattagaggatttttcagcagaggtttggtacttgttaatgttaaggtttgcattctctagaacctcaaggaaagctgtaccgtgcataatgtaccctcttatgttaatgttgtgtactgtgatcctgtttcagggacttgcacttatgaatctgttacagtgagcacagaatcagacctgtgggctcatagtcttcaccctccacccatatatacaagatgaacagagtggaggttaaacaacttgactaaacaacattggcagctccacgcggtggcggccgaggtacctgcccatccactgccttttccatgtatcctggaactgagcatagacctcttcccaggcagagctgacagcaagtaaaggagatcataatcaggggaccaaacaactttgtctaaagtgtgaatgtcacctaaggagaagctgtgagatcagaagggtggggcagaggagcagacaccatgagggagagtccttgggggtacatctgccagactgacactgtctggcctgggcagtggaggggctagcaggaaccacaggtactggtggtgtggctactaccgttacaactgcctgtgcttggacatggaccctctgcaatatgcggcagtttcattcattgccccctacattctacaccaagtagaaatggaaggcaattggatacttcacagacaagatctaagtggagaaggaatgcgtcctgtggctgcagagatccttggagcttggaggggagagcttgagccccactgatgatgacctcccacagctcgccaactcagccctccctaagtccccatcgggggccaattctcactctggggttggggggactccaccatagctcatccatcatagggatgttggtatctactgtgggttgggtagggccgatgtgctgaggatggctcccccacaagcaagagatgtggatttggggagcttcccatcttgtgttgaaggaacataactcagaataataagagccaactataacaaacccacagccaacatcatactgaatgggcaaaagctgcaggcattccccttgaaaagtggcacaggataaggaagccctttctcaccacgtcctattcaatatagtgttgaaagtcctgatcacagcagtcaggcaacagaaataataaagggcatccaaataggaagagaggaagtcaaactatccttgtttgcagacagtatgattctatatctagaaaacccatagcctcagcccaaaaggtccttcatctgataatttcagcaaagtttcaggagacaaaatcagtgtacaaaaatcactaacattcctatacacagtcgccaagccaagagccaaatcaggagcacaatcccattcataattgcaaaaaaaagaattaaatagccagggaatgcgttaaccaaggaagtaaagggtcttctacatgagattcacaaagctggtcaaaggaatcggagatgacgcaacattggaaaattgtcaggtcacaggntagggagaatcttccatacgtgggcgatttacccaaggcatatagaatcaggatgccattaaggtcactacattttcccggaccgtcgaaaagttaagttctcttgggccccaaaggtgggagagcaaggggaccctcgacacggacacgcgggggggcaatactacaagcgacgaagggtgaccgacacacaaccgggcgggnggacagagcagccaagggcagatgagacaagacagaagcagacgcacggttacaagaacaaggggcggctatagaggagggcgcagcagccgcgcagactaagcacagcacacagcaccagaaaaaaacactcgcgagann

SEQ ID NO: 19513 - DNA, 619 bp, Homo sapiens
  misc_feature 596, 597, 598, 599, 600, 601, 602, 603, 604, 605, 606, 607,608, 609, 610, 611, 612, 613, 614, 615, 616, 617, 618, 619: n = A,T,C or G
acctcatctactcctctctacaacaaccttgtgggtgacgttattatctccatttcacaaatgaggccacagaggttctaaagggtaaatgacgatgatgatgagaggtaagtgataaaacaatgtctcctgaccacaaatcctggaatttaaacataagtgtagtaaacatgaactctaggaagcctcctggggcttctccctgtgtctggagcccctgcacatgcccaaaggaagtccttttggttctccgttcagtagagaaagggagcatttcactaaaagggaggtggggaaacaagactggtggtaggggaggccgggctcagtggctcacgcctgtaatcccagcactttgggaggctgaggcaggcagatcacctgaggtcaggagttagagaccagcctgcccaacatggtgaaaccctgtctctattgaaaatacaaaaccagccaggcatggtgggactacctgtaatcccagctactggagaggctgaggcaggagaattgctgaacccagcagctggaggttgcagtgagccgagatccgccattgccctccagcctgggcaacagagcgagactccgtctcnnnnnnnnnnnnnnnnnnnnnnnn

SEQ ID NO: 19514 - DNA, 169 bp, Homo sapiens
aggtacgcgggtaacaggagtctttgctgagtgatcatctgtttattcttttactccacaaatatcgaatgtttacagcgtgcctggcactgagcagggctggggtttcctgaccatatggaccttcctgggtatatctgtggggcttgaatggtgtgtgaccttgtgt

SEQ ID NO: 19515 - DNA, 797 bp, Homo sapiens
  misc_feature 796, 797: n = A,T,C or G
acctgtagtcccatttactttggaggctaaggtgggaggatggcttgtgcccacgacgcgggggtcacagtgagccgagatcacaccactgcactccagcctgggcaatagagccaggccttgtctcataaatgaaatataaaatataaaataaaataaaataaaacgttgttggcaaagatgtattcaaaatagtatgtagaacttacctggaaggtaattttgcaatatttaccaaaatatactttttcatctagtaaggtctccttctcagaatcagtcttaaagccattcaaatacaggtttatgattaaagatttaagtccaaaaatgctcattatagcaatatttataataggaaaaattggggaaaaacaattatacatccaacagtagtaagagtgtgactacattatagtattagtatgtaatggattgtcacagagcaacacacatgtttttgaagaatatttaaggcgtgataaatattaaatgtaaatgtaaattgaaaaaatgatatctgtagattttcattatgcatttctttatgaaatttttgtatatacacaaaagaaaatagtcatgcattgcttcatgacggggacatattctgagaaatgtgctgttagtcggtttcattgtggaaacaaatgttgaacatcatagagtgtccttacacaaacctaggtggtatagcctactccacacctacactatatggtatagcctgttgctcctaggctacaaacctgtagaacatgttactatattgaatactggaggcagggggatgtgnn

SEQ ID NO: 19516 - DNA, 694 bp, Homo sapiens
  misc_feature 676, 693, 694: n = A,T,C or G
actcccaaaaggctatgaaattggggaaaaccccaggtgattcatgcctgcttagctgcagtatgtcagtcgcagtaggtggaaccccaaacccagtgcatagggccagtgtctgctttggtgagatatgagtgtcagagtctcgaaccaagcaacctatcgaaagcctgtgacactcctggccacaggcggctggtagaggcatagtagactattgcccaggtgacgtgacttcacagatgctgggaagcctgctgccccatccaatacaatactgcccactgtgcatagaaaccagattccaaagttagagcttcgttttggccatgagtgcaatttcactgcaatgttttatcttactcaactgccagggtcaatttaggtggtagggctaaatctccttctttatattgttccaaatgatttttcctgatgctgcattcccggaaggaggaagtatgagagtagacagcacttctccctgaggagcctccaactagctaaaggctataatccttgtaatacacaggggagagtggacacccatattgttagttactatgacttaccactctttcaagagcaggttttaggatgggggagcaagagagactgcaccaagaccctggtagggcagtctgggatgctaaaaacaaatataatgcataccacagtncctggagagccccagann

SEQ ID NO: 19517 - DNA, 573 bp, Homo sapiens
  misc_feature 1, 2, 3, 4, 5, 570, 571, 572, 573: n = A,T,C or G
nnnnncaggtactgtgcttagaccaggaacacagggaggtagagggcagcagagcagggactggcttcagagccagacaggtggctatgtgacttaatgtgtctgaaccctggtatcctagtctattaaatggtataacagcagcttctagtatgtaagttccttgtcgggagaaaaactgttttgctcatggctggagccttagcatgttgcatcatattgaacatgtaatagatgctcaataaatatatttttaagaataaataaatgtaaatgaaaattacttcacagtgtttctgtagagattttataagatatggtatacacaatgcataacatagaactgacgctcaaaaatgccagttacttccatcattgtgtcataggcttttatgttcattatcctgctgcatcatcccaagaattccatgaaatacgtattgctttgctcatttttctgcaggagcaaactggagaagagggcagggagtaaaataattcctagagaagagctcatcccttttaaaaacaatatgcccttaagaaaaaaaaaaaaaaaagagaaaagtnnnn

SEQ ID NO: 19518 - DNA, 563 bp, Homo sapiens
acttctaaccctaagggattcctacagcttttctgcatgttaaatagtctgttttagcttattctcttattacttgtcttggtttttactttgaaagtttgcttaataatcatgggaatattttagattttaaaatacaaaatatacaagctaaacttgagagcagtttttagttgtagaaactgtttcttgaagtaattgacttagcgtttgctctgcctctttcttttcttacctaggtaggtagtggggactccttcaattatctgagcaattcaaatctcagaatgtagtgttgggtaaattgagggttctaaaagaatgccagatggtttgaaaggaactgtgagcattccaactagtgcagtcctttgaaagccagctggcagagcctcctgtgctttggaggtaggaaccagacactttgttccatgccagctggcccaagaatagctggccagtggccttgcttttggctggccactcttgggaaagctggcctgggccctccatgtgccctaaggatagtctgataccagagagttgcactggccctccatagt

SEQ ID NO: 19519 - DNA, 348 bp, Homo sapiens
  misc_feature 1, 2, 3, 4, 5, 347, 348: n = A,T,C or G
nnnnnaagcagtcccaaagtgggagtccttaaaacaccatgggcaggtgaatggctgaccaggtggaggtgcacagtgcaccatgacagagcagtggaaatgggtgaatctgagatgcctggaggcgagggggaaagagcacatcacagaggacaacgtccagtgggacacccttttataaaactcacactgctccttctgacacccagtcgcagttgtgggtggccctctgggaccttagtgcctggggaagtggtcatatgctgggccagggctgttgagggtgctcaccggtgaatgagacatcgttcagtctctcaaggggctcacggcctgctggggacacnn

SEQ ID NO: 19520 - DNA, 575 bp, Homo sapiens
  misc_feature 575: n = A,T,C or G
tgtggactgaagggtgactggttccactgtggtctccatgggaacagttgtttctggagtcttccaaggagaatttctcacagtggacctgatctctgggctgatgctgggttccttggagctcatgattttgagagtggtagacatttctgggcttcctggggatgtgcctgctggactgctccccgtctcctctgctggggcaggccacgtggaatttccttgtgctgcctggcttgacatctttatggtggtcactagcgttccatcagttgtttcaaccaaggaggtcttggcaggaactgaaatagagcttgcccatgtttctggagaactctttcttctggctgtgggttctgtgggagaagagacaggtaacaaggatgttggggtctcagatggtgtgaaggttaacgtctgtgtttcagctgttgttccctcttcttctgcaatggtctggcttgaggttaactcaggaggctcctcctgggacatatttagagtggatgttggagaaagtgtcagagctgaagtctgaagatgcaccaatatgttgggctgccttgccatggaan

SEQ ID NO: 19521 - DNA, 414 bp, Homo sapiens
  misc_feature 1, 2, 3, 4, 412, 413, 414: n = A,T,C or G
nnnncttaacgtgaccgttcccactttagaagggaaatctgaagtacccacagccctttctgctggaattccctagaaggggtctgtgccacatacaggaagtagggagggtgtctttgcagcatatttcttctcttggagttaactgcgaacgttgcacggcgacctcttgatccattctgtgaaagccccaagcctgtcatgcaataaagacgtccagtttcaccgcagcagggaggccgcatgaaatattccacttgaacaaaaccacttagcagtttacatcaatgcttaccctgtcgcattgaaagtgatgtgaacccacacccaagagcccccaaaccagcacgttgataccaagtttccccagctgcatccaaatcaataccttcttgccctttcctagtatcannn

SEQ ID NO: 19522 - DNA, 1913 bp, Homo sapiens
ggcttttctctcctgttcccccagctgtgagcaaattaggttctacacacacagttcggatgccaagggtgacaccccattcccttcacaagaggcggttctgtcacaaatcagcactccacccccaccacacctctcagtgaatgaagtgctggtggtctcactcccctggtgacccttagccgtgggatggggtggttacactaaggcttcaagctgagaatggccatcatggcgggaggctgtttgcaaaggcaccttctgtcatcctggggttggctaagtcaactccaccccttcccaataataaagcatcactcaactgtgagatacctcgactacaaaaagcactgtaccacagccctctccccctgggtccatgacaggagcagggagtaaagttgatggcaaacctcatgaaggcttaggatcatggacctggaacatagtgtttgggggccaagcctgcacactttgcctcatgagaactcacccagctctccccttgaaacttggacacactgaaatggatcaaagtgggccatttccacatttgctccagcaaactgtggtctcaggaactaccatgccatttcctctcctggagaagttctaggtattacctccacagcatttccaactgggggactgagcccacttatcagagaagagccgccatccacactggagcaggaacagggagaaatccagacaggaacctcatgtcacttcctagggaatatgggaagaaacatcagcagactttatgatgtcagttgggcctttggaggcattctggaaggtggcctcagcatcactgatgattgacagatgctacagcaaaaggtccctctagcgttgcttgactgctggggaagggacagtgaccggcactttgacccacacaaggataggagctgcctactttgtgtggtaggtgagagcagagcctgggagcccatcctccctctacttggagcaaagttgtgctggtgatgccccattattgggccagttgattagaaaataggcatttcactttcttggaaagccatcggactaagcccagatgtgcatttagagcactcagcattcttctctttgaagcatgggatgtctgtcctccaggaagagatttgatcttaggttgttacctccctttcacttcttttccacctcaattcaatacttaggggttggcttgcctctgcaggtttgatgtgaatgccactgggtactcagaaagctgtcctctggggctgccttgtccagttagataacaagatagcagatgattgtttcttgcaacctctggttccctccggaaactggtgtcaccaacaggaaaggctgtaccaaggtgccctcttctcagacaggctgttctcagagtgcaaatcctgctgcaactaacagcttaataaaacccaaagatctcacaggtccagccactggcccctttatctccaacaatatccacctcaccaaattctagttcagccaaaggattgagacaggctcttccagttcatctcctggtgtccagcctgaccttcacatctggaaggattttgtcgtctgcctcccagttctgggtccactgtaggtctttccatcacaagcctttgggggatctgggaccaggaatttgggccgtttctaccatattctcagcagcctaaggtggtggcctgctgatgtggagactactcaccttgagccatgtggtccccaggacagaaatggtctttgttttgacatacatggacccaaaaggggaggtgaagaaaacacacctccacctggcaagtttttctccctcatctgaggtcagttgcttcaccaacaaagcccaagccaagaactgcagcgttgagggttgtccctcggagtggagtagcccaaggaatctc

SEQ ID NO: 19523 - DNA, 389 bp, Homo sapiens
  misc_feature 1, 2, 17, 389: n = A,T,C or G
nncactatagggcgtantggagctacccgcggtggcggccggccaggattcaaaccagggagttagctccagcactccggctcttaacctcaaccgtctgcctctccacaaacaccaggatcaaccacctagaccaaaaaaacagtctcacaaaccatcaaacattgcacttggtggctcaggaccttagcttcgtcttaaaggtccctgttatgctttttctgagtgccccagtgtggagtggtcttcgtgtttgtgagtgcaggggtcaggggttgtgtcttttcttcttgtccccttccaagaggtgacatgtatccttgatactggaagggcccttaaggtctagcactggctctctgtctcccttcatggcacatcagccaagn

SEQ ID NO: 19524 - DNA, 645 bp, Homo sapiens
acgcgggcactccagcctaggcaacagagccagattctttttttttttttttaaaaagtcttttaaaaaattcttttattgtgctgattttattgtgtcatgaagtgtaatatgcatgtaggtatgtgtcaagtatacagagtgtcaggcatacggtgttcagtcataagcagttctggcctttggccctgcactgtttgttggctttttaggtaggaaccttcttagagtaagactgtcatgctaaaattgtagcaatcaaatgtgccccccatacaactcatttgaggttgagattatgttgctagagtggaggagattggagtgttctaaatgctaacagtttgtcttgcctccttgcccctgccccctgctcctttttgttttcttctactgtaggtcagccccagttgatgctgacagcaggacccagtgttgccgtccctccccaggcaccttttggttatggttataccgcaccaccgtatggacagccacagcctggctttgggtacagcatgtgagatgaagcgctgatcctgtagtcacctattttcgtactgaaacatcgtctttacccacttctcagtttataatgggggaaaacaggcaacgtgttcttgtaacctttatttcatgaaggac

SEQ ID NO: 19525 - DNA, 3144 bp, Homo sapiens
  misc_feature 1, 3143, 3144: n = A,T,C or G
ncgacccacgcgtccgaaacttttcccctcccgttcccggtcccttttgtctttcttggacgcggtggcggcgccgcctgagcggcgactccctctcccctgcccggcttgctgcgcccggtgccctccgagggcaggcgcgcctggactctgcgcccggatggcggcggccctctgtgagcaccggcagcggcgcatcccctgccccgaggcctccggtgcccccccggcgcgggcataggggcgcccccaccctccgtccgcttgcaccccttgccacccgccccctcgcctgactcatccgcccgcggtggccgcccgagccctgggatggggagggagaccgcggctgcccgcggcggccgagattcccgctgacgcccccgaccctgccgccttcttcgtccgcctccagaggcgcccgacgtcccgacagctcctggagtgagaccaggactgagaacagggagaggcgacccgacccccagggcccggtgctcaggacagcacacagagccgctgaaaacgactgaagagagcaagggatttcctgggacatctggctctggagagtaaaaggccaagctatgatagcaactggtggagtgataactggcctggccgccttgaaaaggcaagactctgccagatcacagcagcatgtcaacctcagcccgtctcctgctacccaagagaagaagcccatcaggcgccggccccgggcagatgttgtggttgttcgtggcaaaatccggctttattccccatctggtttttttcttattttaggagtgctcatctccattataggaattgctatggccgttcttggatattggccccaaaaagaacattttattgatgctgaaacaacactgtcaacaaatgaaactcaggtcattcggaatgaaggcggtgtggtggttcgcttctttgagcagcatttgcattctgataagatgaaaatgcttggcccattcaccatggggattggcattttcattttcatttgtgctaatgccattcttcatgaaaaccgtgacaaagagaccaaaatcatacacatgagggatatctattccacagtcattgacattcacacgctaagaatcaaggagcaaaggcaaatgaacggcatgtacactggtttgatgggagaaacagaagtaaaacagaatgggagctcctgtgcctcgagattggcagcaaatacgatcgcctctttctcgggttttcggagcagttttcgaatggacagctccgtggaggaggatgaacttatgttaaatgaaggtaagagttctgggcatcttatgccccctttgctctctgacagctctgtgtctgtctttggcctctatccacctccttccaagacaactgatgataagaccagcggctctaagaaatgtgaaaccaagtcaattgtgtcatcgtccatcagtgcttttacattgcctgtgatcaaacttaataactgtgttattgatgagcccagtatagataacatcactgaagatgctgacaacctcaaaagtaggtcaaggaatttgtcaatggattcccttgtggttcctttgcccaacaccagtgaatccttccagcccgtcagcacagtgctaccaaggaataattccattggggagtcgttgtcgagtcagtacaagtcatctatggctctcggacctggggctggacagctcttgtctcctggggctgccagaagacagtttgggtccaatacatccttgcatttgctctcgtcacactcaaagtccttggacttagaccggggtccctccactctaactgttcaggcagaacaacggaaacatccaagttggcctaggttggatcggaacaacagcaagggatatatgaaactagagaacaaagaagacccgatggataggttgcttgtgccccaagttgccatcaaaaaggactttaccaataaggagaagcttcttatgatttcaagatctcacaataatttgagttttgaacatgatgagtttttgagtaacaacctaaagaggggaacttctgaaacaaggttttaatgttaaaagaatatatcattttacaagggtatatattttaaaacgattttcactggtgtttccttcttaaagtattggctgtaagcctttttaatcaaatggtttgtagtgtattagaattggctgcttagttctgtaatgaagatggttgtatgtttgggttacttgtgactgcagtactctatgttaccacacatgattttatttttctcttcctttgaaagcatgatctcttttattaatatgaatgcaaaatgcttgcatccaaattaaagcttattttctttacttttaagttctttgattgccctattcataaaatgaaatgtccagtatggaaaacatagggtaccaaagtgtggaccaggagtacaaattcagtcccaatactcaatacgtattatagatgactatgagtgcaaaccttaggatgtgattttctgaataattgttctttgtaggatttggttacattatttaaaatgaaaaagatctagttttagtgtgagctcagtaatgttaattggttaagttcattgtgaatcttgagttttagataagtagttatttttttcaatatcacttctgtttttagtgatattatatcaagaaacaacgtattcaagagccatggctgacagtgccagatatacttagggataaacatcaaaatgcaattatagttgctataacgttagatactcggaatcaaaatttatttgcaagctgacttgataaactaaatgaaccaataaaatttgtagaaatgctatcctgaaataattatatacatgaagacaatgttgactaatgaattaagatacattatatactagttaatgctaactagtctcagtacctgtttttagccatctgttactgtccaatagcacctcattcccacattctattttcccccggcattctttagatcctagtatttggaaaaccacgggaccgacttcttttactcatgtcccattcgggtacaaaaatggttcgaactgcggagtaccgggggggggccttataccacacatcgaaaagcgctgggagggtccagaaagataggggccaaann

SEQ ID NO: 19526 - DNA, 1070 bp, Homo sapiens
  misc_feature 1, 2, 3, 4, 5, 6, 1069, 1070: n = A,T,C or G
nnnnnnctacggtttacattttacacctggagtccgctagtgtgcctttagcctatgtttacggtgacaaccataagacacgggctgtgtcactatataagcacggtcctttaataccggtttcctcgatatttcccgctggagttcgatctgatagacctaagtggttcggcctcatatggctgtatcgctcaacgtcttgctcgaataaacctctaaattgtaacttaattactctcaggcctcatcccaagcttgacacatgctctgtaggttgaacacataatcacaaatattctagcaaatgctgccttggttgcagcctgcactgtagacccaagggttttgctgtggctcttcttatctcccttggctcataaagccccagatgatgccagagcttcaattagagccatcatcatcccaggcagggatatctttgagaaatgactcagttcagccccaggcccctgtgactctgcttaaagcacacatttctgctgactcttgtacctggggcagcaggataatcaccaacacactcttaacgagaaacaacacaccaagcacagtggagctgtcctaggcaacactcgcggtctcaggctgcggtgggcgtctgtcctgcatgtggcccagaccaccctgacccccgggcctgcctgcctggccctgcatgctgcacgctcactgtatttgtgcagatcctggccagtacaaagtcgttgctcttgtcttatcttctcttacagagtctccctccctttatagaatgtcaaccaaagagtgccctcctcccctctcagcctcctctttagctagcctccccatctcatcacaacgcatgtctgtgacctttggtaatcatttacagtgccacacggaaccctgtattttgcacacagcaaaacaaacaatgtttagctttatttatggtatttgatgctgtaaatggaaataaatattgttctttataaagctaaaaaaaaaaaactcgagggggggcccggtacccaatttgccctttagtgagtcgtattacaattaactggccgccgttttacaacgnn

SEQ ID NO: 19527 - DNA, 5441 bp, Homo sapiens
  misc_feature 5420, 5421, 5422, 5423, 5424, 5425, 5426, 5427, 5428, 5429,5430, 5431, 5432, 5433, 5434, 5435, 5436, 5437, 5438, 5439,5440, 5441: n = A,T,C or G
ggagtcgacccacgcgtccgatggaattaattctggctccacttgttgctcggcccaggttggggagaggacggagggtggccgcagcgggttcctgagtgaattacccaggagggactgagcacagcaccaactagagaggggtcagggggtgcgggactcgagcgagcaggaaggaggcagcgcctggcaccagggctttgactcaacagaattgagacacgtttgtaatcgctggcgtgccccgcgcacaggatcccagcgaaaatcagatttcctggtgaggttgcgtgggtggattaatttggaaaaagaaactgcctatatcttgccatcaaaaaactcacggaggagaagcgcagtcaatcaacagtaaacttaagagacccccgatgctcccctggtttaacttgtatgcttgaaaattatctgagagggaataaacatcttttccttcttccctctccagaagtccattggaatattaagcccaggagttgctttggggatggctggaagtgcaatgtcttccaagttcttcctagtggctttggccatatttttctccttcgcccaggttgtaattgaagccaattcttggtggtcgctaggtatgaataaccctgttcagatgtcagaagtatatattataggagcacagcctctctgcagccaactggcaggactttctcaaggacagaagaaactgtgccacttgtatcaggaccacatgcagtacatcggagaaggcgcgaagacaggcatcaaagaatgccagtatcaattccgacatcgacggtggaactgcagcactgtggataacacctctgtttttggcagggtgatgcagataggcagccgcgagacggccttcacatacgccgtgagcgcagcaggggtggtgaacgccatgagccgggcgtgccgcgagggcgagctgtccacctgcggctgcagccgcgccgcgcgccccaaggacctgccgcgggactggctctggggcggctgcggcgacaacatcgactatggctaccgctttgccaaggagttcgtggacgcccgcgagcgggagcgcatccacgccaagggctcctacgagagtgctcgcatcctcatgaacctgcacaacaacgaggccggccgcaggacggtgtacaacctggctgatgtggcctgcaagtgccatggggtgtccggctcatgtagcctgaagacatgctggctgcagctggcagacttccgcaaggtgggtgatgccctgaaggagaagtacgacagcgcggcggccatgcggctcaacagccggggcaagttggtacaggtcaacagccgcttcaactcgcccaccacacaagacctggtctacatcgaccccagccctgactactgcgtgcgcaatgagagcaccggctcgctgggcacgcagggccgcctgtgcaacaagacgtcggagggcatggatggctgcgagctcatgtgctgcggccgtgggtacgaccagttcaagaccgtgcagacggagcgctgccactgcaagttccactggtgctgctacgtcaagtgcaagaagtgcacggagatcgtggaccagtttgtgtgcaagtagtgggtgccacccagcactcagccccgctcccaggacccgcttatttatagaaagtacagtgattctggtttttggtttttagaaatattttttatttttccccaagaattgcaaccggaaccattttttttcctgttaccatctaagaactctgtggtttattattaatattataattattatttggcaataatgggggtgggaaccaagaaaaatatttattttgtggatctttgaaaaggtaatacaagacttcttttgatagtatagaatgaaggggaaataacacataccctaacttagctgtgtggacatggtacacatccagaaggtaaagaaatacattttctttttctcaaatatgccatcatatgggatgggtaggttccagttgaaagagggtggtagaaatctattcacaattcagcttctatgaccaaaatgagttgtaaattctctggtgcaagataaaaggtcttgggaaaacaaaacaaaacaaaacaaacctcccttccccagcagggctgctagcttgctttctgcattttcaaaatgataatttacaatggaaggacaagaatgtcatattctcaaggaaaaaaggtatatcacatgtctcattctcctcaaatattccatttgcagacagaccgtcatattctaatagctcatgaaatttgggcagcagggaggaaagtccccagaaattaaaaaatttaaaactcttatgtcaagatgttgatttgaagctgttataagaattaggattccagattgtaaaaagatccccaaatgattctggacactagatttttttgtttggggaggttggcttgaacataaatgaaaatatcctgttattttcttagggatacttggttagtaaattataatagtaaaaataatacatgaatcccattcacaggttctcagcccaagcaacaaggtaattgcgtgccattcagcactgcaccagagcagacaacctatttgaggaaaaacagtgaaatccaccttcctcttcacactgagccctctctgattcctccgtgttgtgatgtgatgctggccacgtttccaaacggcagctccactgggtcccctttggttgtaggacaggaaatgaaacattaggagctctgcttggaaaacagttcactacttagggatttttgtttcctaaaacttttattttgaggagcagtagttttctatgttttaatgacagaacttggctaatggaattcacagaggtgttgcagcgtatcactgttatgatcctgtgtttagattatccactcatgcttctcctattgtactgcaggtgtaccttaaaactgttcccagtgtacttgaacagttgcatttataaggggggaaatgtggtttaatggtgcctgatatctcaaagtcttttgtacataacatatatatatatatacatatatataaatataaatataaatatatctcattgcagccagtgatttagatttacagtttactctggggttatttctctgtctagagcattgttgtccttcactgcagtccagttgggattattccaaaagttttttgagtcttgagcttgggctgtggccctgctgtgatcataccttgagcacgacgaagcaaccttgtttctgaggaagcttgagttctgactcactgaaatgcgtgttgggttgaagatatcttttttcttttctgcctcacccctttgtctccaacctccatttctgttcactttgtggagagggcattacttgttcgttatagacatggacgttaagagatattcaaaactcagaagcatcagcaatgtttctcttttcttagttcattctgcagaatggaaacccatgcctattagaaatgacagtacttattaattgagtccctaaggaatattcagcccactacatagatagctttttttttttttttttttttttaataaggacacctctttccaaacaggccatcaaatatgttcttatctcagacttacgttgttttaaaagtttggaaagatacacatcttttcatacccccccttaggaggttgggctttcatatcacctcagccaactgtggctcttaatttattgcataatgatatccacatcagccaactgtggctctttaatttattgcataatgatattcacatcccctcagttgcagtgaattgtgagcaaaagatcttgaaagcaaaaagcactaattagtttaaaatgtcacttttttggtttttattatacaaaaaccatgaagtactttttttatttgctaaatcagattgttcctttttagtgactcatgtttatgaagagagttgagtttaacaatcctagcttttaaaagaaactatttaatgtaaaatattctacatgtcattcagatattatgtatatcttctagcctttattctgtacttttaatgtacatatttctgtcttgcgtgatttgtatatttcactggtttaaaaaacaaacatcgaaaggcttatgccaaatggaagatagaatataaaataaaacgttacttgtatattggtaagtggtttcaattgtccttcagataattcatgtggagatttttggagaaaccatgacggatagtttaggatgactacatgtcaaagtaataaaagagtggtgaattttaccaaaaccaagctatttggaagcttcaaaaggtttctatatgtaatggaacaaaaggggaattctcttttcctatatatgttccttacaaaaaaaaaaaaaaagaaatcaagcagatggcttaaagctggttataggattgctcacattcttttagcattatgcatgtaacttaattgttttagagcgtgttgctgttgtaacatcccagagaagaatgaaaactggttggaaactaaaggttcattgtgttaagtgcaattaatacaagttattgtgcttttcaaaaatgtacacggaaatctggacagtgctgcacagattgatacattagcctttgctttttctctttccggataaccttgtaacatattgaaaccttttaaggatgccaagaatgcattattccacaaaaaaacagcagaccaacatatagagtgtttaaaatagcatttctgggcaaattcaaactcttgtggttctaggactcacatctgtttcagtttttcctcagttgtatattgaccagtgttctttattgcaaaaacatatacccgatttagcagtgtcagcgtattttttcttctcatcctggagcgtattcaagatcttcccaatacaagaaaattaataaaaaatttatatataggcagcagcaaaagagccatgttcaaaatagtcattatgggctcaaatagaaagaagacttttaagttttaatccagtttatctgttgagttctgtgagctactgacctcctgagactggcactgtgtaagttttagttgcctaccctagctcttttctcgtacaattttgccaataccaagtttcacatctggtgttttacaaaaacatttattcaagccactagaattattcaaatatgaggctatagcagagtaaataactctgaataagagacccggtactagcctaaatccaagagatcggttaggccgcatcagtccaccaacccttagtggggcccaatattatgagaggacagaacaaggggtttaattgaggacctgtttttatggaaatagggccaggggcaggttctaaaatacatggccggggcgcactctacacaatgtattttaaaacgaacaagcatacccccggggggggagaaacnnnnnnnnnnnnnnnnnnnnnn

SEQ ID NO: 19528 - DNA, 1775 bp, Homo sapiens
  misc_feature 1, 1774, 1775: n = A,T,C or G
nccttattatcttccccccctttattccccccctttttttttttttggaaacttttccttaggttccaccaaggtccgaaattaatgtaacaaaaagcagcacacattgtttcctcctgaaggtcccccttttcaaaacctcacctaaaatcgaaagtagttgtcatctcaaccaaatcatcctagagaaaagatcaccatggtgacagggttacttacagctgtatacttatttaaatgctattcatattccttttgagttatttcttcattgcaaattcaattggagatctgtgcaaatctagcaaaatattctttggattacaaaaactatataaaaaaatgaacacaacctgcacattatggaagtattgagaatgtgtaatccttcactgagatgaaagattctaaagtgacattgtccacaaaatgtattccattgaagtgttcagccccatttgatttccatgccaagtaaaatggaagtgagcacttcataaaaaacatttctttgtatgcatgttgactaaatcataaaaatagtacataacatgatatcaagaaatgcttgaaacaaactttcacaataaagtcagaaaaaaactgtaaaaattgtctgcaatccaagaaaaagcacgtgccctgtgtgtagggggaaagagggaaagcacttgcagtgtgactttatgtggtctttccccaagtattgctacgttttgacctttggcccaactgaacaggtgaaatgcccttcacataagtttcaatccccaagaaactagctggaatgcaggggactgtagacacactcctggaccaaatggcatcgactctcagaatccaaaatggtccctgccctcattctgagcttacggccccaagcatattctaaacaaagcttttttaaatgaatcgcccattctcattaaaacataaaatgccacatcattttacaattagttaaaattacaggaggaaaaataagcagtttcaactatcaagagtcttacaatagcctggtaagttcaacagaagaaaaaatagaataacattagagtctgggcaaatttatatttttgactctagtcccccagttccccagtgctcagtgtggggcatagaatgtatacctggaacattagagttctgatagctccattccctcatggattcatctctcataaccatcaaattactgatatacaagataaatgcatactatataacacatattgcaaagtcatagactgacctagttctttcacatccttcttttttagaagatgtgtgtgaagagaagccaggaggttaacaccaagaatgtacaggaaaggctgttacatgatgttacagaatgcttgtcctgaaccaagacactttgtaacaacagtatttgattttaaataacacaatagaagcacagcagacagacacacaacagatcataaatagggttattaacaagatcacaactctataattacgcaatattacatgcgactcattagaatacttcaacgtttgtcttcaatgttaagaatccaacccagaattaccaacaaaatcttttttctatttcaacgacttgcttcctatatctgaagctcatattaaagccacagtacagtgttcatccaatataagtgtgatgccgtaacattctcttacatgtctagaatagctgatacttctatatgtcatcactacaataagacactttgagagacttgtacacaatagatacagttaacaatgacatagaaatagggcgtcnn

SEQ ID NO: 19529 - DNA, 1509 bp, Homo sapiens
  misc_feature 1, 2, 3, 4, 1495, 1496, 1497, 1498, 1499, 1500, 1501, 1502,1503, 1504, 1505, 1506, 1507, 1508, 1509: n = A,T,C or G
nnnnccggacggcgaggggcggggcgagcgcgggacaaagggaagcgaagccggagctgcgggcgctttttctgcccgcggtgtctcagattcattcttaaggaactgagaacttaatcttccaaaatgtcaaaaagaccatcttatgccccacctcccaccccagctcctgcaacacaaatgcccagcacaccagggtttgtgggatacaatccatacagtcatctcgcctacaacaactacaggctgggagggaacccgggcaccaacagccgggtcacggcatcctctggtatcacgattccaaaacccccaaagccaccagataagccgctgatgccctacatgaggtacagcagaaaggtctgggaccaagtaaaggcttccaaccctgacctaaagttgtgggagattggcaagattattggtggcatgtggcgagatctcactgatgaagaaaaacaagaatatttaaacgaatacgaagcagaaaagatagagtacaatgaatctatgaaggcctatcataattcccccgcgtaccttgcttacataaatgcaaaaagtcgtgcagaagctgctttagaggaagaaagtcgacagagacaatctcgcatggagaaaggagaaccgtacatgagcattcagcctgctgaagatccagatgattatgatgatggcttttcaatgaagcatacagccaccgcccgtttccagagaaaccaccgcctcatcagtgaaattcttagtgagagtgtggtgccagacgttcggtcagttgtcacaacagctagaatgcaggtcctcaaacggcaggtccagtccttaatggttcatcagcgaaaactagaagctgaacttcttcaaatagaggaacgacaccaggagaagaagaggaaattcctggaaagcacagattcatttaacaatgaacttaaaaggttgtgcggtctgaaagtagaagtggatatggagaaaattgcagctgagattgcacaggcagaggaacaggcccgcaaaaggcaggaggaaagggagaaggaggccgcagagcaagctgagcgcagtcagagcagcatcgttcctgaggaagaacaagcagctaacaaaggcgaggagaagaaagacgacgagaacattccgatggagacagaggagacacaccttgaagaaacaacagagagccaacagaatggtgaagaaggcacgtctactcctgaggacaaggagagtgggcaggagggggtcgacagtatggcagaggaaggaaccagtgatagtaacactggctcggagagcaacagtgcaacagtggaggagccaccaacagatcccataccagaagatgagaaaaaaaaaaaacaacaagtcaacgcacaataacacgagcggggggacaccagaggctatagacgcgcatgggcacagacagcgcacgcgaacaccactagaaaacagggaagactgaacggccccaatagggagcgaaaccgannnnnnnnnnnnnnn

SEQ ID NO: 19530 - DNA, 3304 bp, Homo sapiens
  misc_feature 1, 2, 3, 4, 5, 6, 3301, 3302, 3303, 3304: n = A,T,C or G
nnnnnncttcctcctgctgctcggcctgcgtgatcctctgaggcggccaccgcgcgccggccgcgctctgcgcacaaaagccaaacgcatccgactctctaaatgtgatttatttcttgctttgagattggagaccactttgcattggccagggtgtcttgggagcccggctggcctccgcggccggcgtcccctgcctccaccctgtgcccgagggggtgtccggtcctgcccatccgatactctggtggaaatgtggctctttgcagcatgtacgtttctccctgattttggttgatgcatatttccccgtttaagtagccgttagggcgcagtatcggcagcttgacacccaccaagcaaaagtttcagcctggaaaaaaaatgggggggaagggtggatgaaaaggagggagagaaggtggaaatggtttttttttttttttttctattttctttcttttttttttttttttttggtcaacagccgtttttctagttccaagttttaaatacatggaaggaagtccgggagaaccatatgaaggagcaggaggagaggaagaaactttttttccttcttttccaggagtagctggaaattaagatcgggttccttttctgccagcttggaagggcaaccccatgactgattgcgattctgaggatgtctatgcaaagttggattcttgttacagtgtatccaatctgaagtattgcacatctgaactgggactgttaacactgatgccaatacagtgtggggtgccagaaagtgtctgctgatatttgtggaaaaaaaatctattttgtttacctactgtatcaaaggggagtctgggggagaatggtagtattttttttttttatcagctgtgaaaaaaatgttacagatctgcacattttcgtgtgtactatggtgtgtgtgtgtatgtgtgtggtgtgtgtgtgttttaagtttagccttttgtttttgttttttggttggcagtaaccgattttaatgactagcttttaaaaatacagtacaaagactttgtaaatgtgattcagggcccccagcacccctgtgtctgcagagtgccttcaaaactcagctgttccagccggtgccaacctgtgaacttcccaccatatcccagaatctgctattccccaaaccacttcccagtttcctttcagtaatctttctgaaggagccaggacaatagggcctgttgtttagtgaatttctttattattttcagcctttaaaatgtaatttccatctcttgcaatgaatttgtttcccttttttttgcttcattttgtttaaattttcaggtatttagctcccctttcatattatttttaaattttttaattacctgttgtagggtgttcctccagaagcaaagagcaaaattttactgttgtgatgtaccaattctaactaattgtaatttttaatttcatgcgtttaatcattgtctcttcattttaagacttttaatacaaatgtcatttttaaagaaacaaacccaaaactattgtttgtgtttctgtgtttcatattcagtgatttaatacagtatcatggctgaggtggatggggcaggtgcatgatactcttcagagctatttgtgaaattttaaagacagaagtgtctcagtgacaagttggatgacactactcccaactttttaaatttggagaaaaccatcaaggtcgaggaagccctgggtatggccattaccatctgattagaagatgaacaggtattttgaatctgatctgacatggaacagtttacctcattgtaggtagggaacaagagaacccatctattaaaattgccttagatctgggaaagtaaccatccttctggcaaagtaggatggcacttttaagtttttcttccttttttccctctgtttatattgcacatcaagtcaaaaacatgtttgggaaagatggttttcaattctgaagttatacctagtgatgttttttgcagtacatttgaatggattgtagacactgcctcaacccttttgaggttttgatttggaaatagatttaaaagaaaacaggctaagataatatccttgttctcatttacaccctgcagtttggaccacatttgacctcataagtttttccttttaacagtaggaggcagtgtgagctttttattttttatttttcttaaggtggtcttagtaatataacatgttcatacatatcaagagagtacttggtataccttaggtctatgaagtgtagctgaaatctgaagagtcttgacaaagggatttacacccttgacaaaaccaaaagaaattaacaggccacaggtttctttaaagctgtgttaacatatcttgccttaaaatgtgtgtgtgtgtttttgctttgctttttttttttgcccaagaggcatctcagtactccagcaatggaggaagaatagagaattttgcctggcaatggtcctactgccattttttttttcccactctgatctcacttaagtttgatatcaaacacaattgggaggcaatagtatcaatatcctaaatgtagaaattaaaagatactgtataattttatgcctttgcaaagattcgttcttgtatttgaataaattcagttgctaaagtagatccaaagtgttaaaaatgctgaagtcatgtcaagtactgtctggagggtttttttaagaaaaggcatttggcatttaactgtctcttgttttatttttaagtttttggaaaccttttgacataaaatgctgccaagtatctaagaaatgtatatactgacagaagatatttgaaagtggaaaattggaaatgaaatatgttgctgggtgcgttaatcacctccgcccaggatttagtcacttgcaggacctctttatagtctaggatggcagagcagaagattttaatatgcttttattaagtgatgtaaaataaatgctttttggattatcaatgaaagcaattttatgtgtgcctgaagcaagaaaatagcgtttttggttttatctcatattttcttggcaaaattgagagaaattaggaacactgctatttttttcttaaaaatgtttttaagaatatgttcgtttctttgactattaagaaccccttgtggtattaggtgtgtgaagagataaggggcatttgtttcaatgaaaaagtttagtgttacgtgaacgtgagtcagggagggcggagttttgttgtaaggcaatcacctgtcaaaacagaaattgggtgggaaaggaagtctttatcttgtggagcaaaagcnnnn

SEQ ID NO: 19531 - DNA, 2189 bp, Homo sapiens
  misc_feature 1, 2: n = A,T,C or G
nnacgagaaatccacgaccaatcccgatcggctcttattagctccccgctccacaagacacctgtgctttggaaatccaccaccaatcccgatcggctcttattagctccccgctccacaagacacctgtgctctggaaatccaccaccaatcccgatcggctcttattagctccccgctccacaagacacctgtgacatcctccagggccacaggagcacgtgctgaccagttttcccttccagttcctgcacaaaaagtgtccagagggctgtttgcaaacactagtgcactttgtagcttttcaccctctgtcccagggaatctaggagagatgaggcccgtcagagtcaagagatgtcatccccccagggtctccaaggcatttccacactattggtggcacctggaggacatgcaccaaggcttgccagagccaacaggaagtgagcccagagcatggcacatgagcatcacccgctgatggtggcctgctgtgcctggtgccaacaggggcatcccggcccgtacccctccagacaggaagcatgggtttgcccacagacctgtcgggtgctcctgtgagtggcctccagatgtctttgtgcataggcacaagtgggccagggctggagggaggtgggaaacctcatcatccggtgggccctgccaatcttaacccagaacccttaggtattcctggcagtagccatgacattggagcaccttcctctccagccagaggctgacctgagggccactgtcctcagatgacaccacccaggagcaccctaggtgaggggtgagggcccccttatgtgaacctcttgcctcttcctttctcccatcagagtggttggatggagccattggcctccttttcttcagcgggcccttcaacctctctgcaccatgttgtctggctgaggagctactagaaaagctgagtggagtctcctttccaacaggatgatgcatttgctcaattctcagggctggaatgagccggctggtcccccagaaagctggagtggggtacagagttcagttttcctctctgtttacagctccttgacagtcccacgcccatctggagtgggagctgggagtcagtgttggagaagaaacaacaaaagccaattagaaccactatttttaaaaagtgcttactgtgcacagatactcttcaagcactggacgtggattctctctctagccctcagcacccctgcggtaggagtgccgcctctacccacttgtgatggggtacagaggcacttgctcttctgcatggtgttcaataggctgggagttttatttatctcttcaaactttgtacaagagctcatggcttgtcttgggctttcgtcattaaaccaaaggaaatggaagccattcccctgttgctctccttagtcttggtcatcagaacctcacttggtaccatatagatcaaaagctttgtaaccacaggaaaaaataaactcttccatcccttaaagaatagaatagtttgtccctctcatgggaattgggctgtatgtatattgttcttcctccttagaatttagagatacaagagttctacttagaacttttcatggacacaatttccacaacctttcagatgctgatgtagagctattgggaaagaacttccaaactcaggaagtttgcagagagcagacagctagagataactcgggacccagagttggtcgacagatgttagatgtatcctagcttttagctataaaccactcaaagattcagcccccagatcccacagtcagaactgaatctgcgttgttgggaagccagcagtggccttgggaaggaagccatggctgtggttcagagagggtgggctggcaagccacttccggggaaaactccttccgccccaggtttcttcttctcttaaggagagattgttctcaccaacccgctgccttcatgctgccttcaaagctagatcatgtttgccttgcttagagaattactgcaaatcagccccagtgcttggcgatgcatttacagatttctaggccctcagggttttgtagagtgtgagccctggtgggcagggttggggggtctgtcttctgctggatgctgcttgtaatccatttggtgtacagaatcaacaataaataatatacatgtataaaaaaaaaaaaaaaaaaaaa

SEQ ID NO: 19532 - DNA, 571 bp, Homo sapiens
  misc_feature 1, 2, 3, 4, 5, 6, 7, 8, 9, 10, 11, 12, 13, 569, 570, 571: n = A,T,C or G
nnnnnnnnnnnnnaaatttccccttttaagggccccccggggagggaaattttttttttttttttttttttttggggaaataacaggggagagcaaatttctaaaaacttggggttttatagtaatttctgattttcatgtttagaaaaagaaatcacattaaaaatatgcttttttaaaattttgagataggatacactataatattattgtagtccagaaaatctgtatactataattcctagggaaaaagagaaaattattagtgtcaaaatacctataattcccacagttacgatatacatttttaaaaattgtttaaatacacaaacaatgatgatgctgtcctactagaaatgacagagccgagcttttactttttttaaaatgcattaacactttcataatcccagttaaaataatattctttttttttttaagacaaggtctcactctgggctgaagtgtagtggagtgaccaagactcactgaatcttcaatctgacaggctcaagtgatcctcccacctctgccttccaaagggctgggactgcaggagcatgcactannn

SEQ ID NO: 19533 - DNA, 443 bp, Homo sapiens
  misc_feature 313, 396, 441, 442, 443: n = A,T,C or G
acactggtaaagagtggcaaggtagcctttgtaaccagatatatctgatctcaaaatcaattttcttaatttaacccacgtcagtcagtcaaatgctaaggctcttcagctacacttggttcctccaccctctaaaaggtgagaactcaagagagctgggttctttgggaccttatcatatttttcccctccctaggccttgatttcccatttggaaaataaatcagtgagggctttctagttaaaaatgccagttgaagccaggcttggtggcatatacatgtagttccagttactcaggaggctgaagtgnggaggatcgcttgagcccaggagtccagtccaggcaacattgcaagatctcatctctaaaaactaaaaaatggaccaggcgcnggtggctcacgcctgtaatcccagcacttcgggaggccgaggcannn

SEQ ID NO: 19534 - DNA, 578 bp, Homo sapiens
  misc_feature 574, 575, 576, 577, 578: n = A,T,C or G
actaatgaattgacaaatggaagaaaatttaaggagagtagcctagagaactcattctagaaactaaataacttaagtcaaaaattatttcctatattgcctcaagccctgcagatagctttgctatgtttgtgtatttgcacattgcactccagcctgggcgacagagactctgtctcaaaaaaataaatggaacaatcacaacagaaacattcccttattcactgaacatttcaaaccctgaaaatgtgtaatgagaaatgacaaatttttaaaagtttaattactaagaagacaaaaaatgtctattatgaatagaccaattctcaattggtagagaactttgaactggaaagaaccctaaagaaatctcctgtctacccctgttattacagattagaaaccgaagtccaggaaggttgagcaggcaagtctccaggctgagttcctgatgtccaggctggaggtgtttcttccctgacccttcccctgcctaccctggccactgagaagggctgaacaggagctaaatctggagggtacaaatgttatttcccttgttctttaagattannnnn

SEQ ID NO: 19535 - DNA, 1021 bp, Homo sapiens
  misc_feature 1, 2, 1019, 1020, 1021: n = A,T,C or G
nnagcttcttcccagtaggtctctgtctgtgaacactttggatgttttaggtgtggcatatacacctccaaccgatgcagaagcaatttatgttactagacatcttttttcgtagaagtactataattataagatttcagatagaacatgcaattagccttttgaaatccaacttctgtgcaaaattttagtatcagaaaatacgagatttgcaggggaaacatcagtaaactaccattaatgtcaatgcccagttttgacttttgttagcctgacactcccaaacagttgtagaatccgatagatgactgatggcaaaagattgtgaacatgtggaagaaaatcagtgggattctggtgctgatgaataggttgccttcagagtattattgacagacagcttgtggaactaattctttatttttgatgttgtgggaattaacacatcaatggtggttatgggaactaccaatgggttcctacaatttttatcagtagtatgtggcatatacaccttcctagtggcagttgccaatgttaatgattattctttttattgcaagtatttcctatgatccttccacactttatttccttaataataataaactttttcagaaagaattgagtagagcaaaaatgacaaagatgtgtagctgtgttcaatttttttttttttttttttgaggcagagtcttgctctgctggagtgcggtggtgcagtctcggctcactgcaacctccacctcccaggttcgagcaattctcctgcctcagtctcctgagtggctggaactacaggtgtgcgccaccacgcccagctaatttttgtaattttagtggagacggagtttcaccatgttggccaggatggtctcgatctcttgacctcatgatccacccgcctcgacctcccaaagtgctgtgattacaggtgtgagccactgcacccggcctgaaatttttttaaggtgaaaatgttttgacaagttcctttttcagaataggtttttgagcannn

SEQ ID NO: 19536 - DNA, 1262 bp, Homo sapiens
  misc_feature 1, 2, 3, 42, 1262: n = A,T,C or G
nnnagcacgacggtaaaacgacggccagtgaattgtaatcgnactcactatagggcgaattggccaagtgagctcgaattgcggccgcatgcataagcttgctcgagtctagagtcgactgggccgaggcggccgacatgtttgttttagcgacggaggaattttttttttttttttttagatttttacatttttattttaaaacagagaatttcatattgattaacacctactactaaacagaatgatgcattaattaaatgccttgtcctaactgttataagctctgttagaaaaataaacatctcaccacaaactacagtgtcagctctttaataaatacataaaacagaagttagtagtcaatcagagttatatgaacaggttcatagtatattatgtgaaagtatcatattctccaatattctgtatcatttaagacaatttaagttacgtataattcaaagccagaaataataagaaatatgttcagtgataatttgcttctttcttagagctattttatattcaaatatttaatttaaaaatatattctatattaaatttatttttacaaacgcagtattcgttaggtgaaacaaaataagtttttatgttactgataagtttaatacatttctaatttttttcagaagttcaagaaaccataatgaagtagctaatgtaaaatagtttaaaagctatgttaaatatacacaaaatgaatttctatattaataagtgcaaatgtatattttcttataatttagaattaaagtactttatactcaatattcttaataaaatttatgtaccatacttgtcattgcgtagacttcttatcaaaatttcacatttatctgtaggaaaatgtaaagttggtaaaaattgtttacacaaatcacacattttccatccttgacaattgcagtgtttttttttaaatattgctgtattagacaattttaactgaagtaggttgtagaggctagaaacctgattaatagagcagtattagacaattctaactgaagtaggttgcagaggctagaagaaacctgattaatagagttagcttacaaagataaattttatgcagaaaagtattccaggtagataaaagagtagtgttattactctcaggtatacataccagggcataggacaattgttattaaattaggggaaagggtatcaagagtggaaacgggaacaatataaaatggggaattggggtaatttgaaagaggaagaggaaacan

SEQ ID NO: 19537 - DNA, 1578 bp, Homo sapiens
  misc_feature 1, 2, 3, 4, 5, 6, 7, 8, 9, 10, 11, 12, 13, 14, 15, 16, 17,18, 19, 1570, 1571, 1572, 1573, 1574, 1575, 1576, 1577,1578: n = A,T,C or G
nnnnnnnnnnnnnnnnnnncaacccccccttttttggaaccctttccccgtcctgccctcctccctccttcgccccccccatgttttaattttcggcccagcccaccatttttttttttttttttttttcactctaaagatactttttatttaaatattttatgatgatacatatacaaatataatcttccaaaaaacaaatgtaaaactaatacaaatcactttttcaggaacaaagaaaatcatttagaaaatgtgattatgctaaaagaggcaggttaggtttccaaggctgctcaaggtggaagcttaagaccaacttttgtttgagtacacaagtgatatttacattttcatatactagtgatatgcctgttgcatacttggcaaaataaaactgatagtaagtctataataataaaagaaacaacaattactaagtaaacaattctagatgatggaagagtaacctccatttaagctacagacttagatgtctaaaaatatgtgtcctgatctgtacacagttagtgggagcacactatataaatcctttgcatgacaccattcaacaatattttttaaaatctacaaaattttaaagtttcacttccctagcaaaatatcttcagtcaagaaattagtctttgaaaattatgaaaattgttgtgggaaatatttatacaaattattactgataatgcacatatattttgaaacattgtttctagaagcaataaaatataacctatttaggagataacccaaatgatttgtaaaaaaattaacttgtagaaaagggaaggatgttgtgtaaaatcaagtcaattatttgaggtttttataatattgagtacttatgtactaagtcacacccagccagtcaataactgagaaatcaaaataaaataataatttcaaagaattacataaatacagggccttttgagatttttggcaattgtaaacaaaaacgaatggtttttacaattcagtgtaattctacgaatatttatttggcacccatgttaggcactgaggctacacagcagtgaaataggcctagttgttctcaactagagaacatagttggttaatgtagctgcactgaattgtagctgtttagaagataatataccctgaggctttttaaagtatactattactataagaagtaaaattattttatacttataaattttgttttggattattcaactgaatttggagtgttcagaattttcatggcggttgagacaaggaagaggtataatgctatttttttttccttttcttttttttttgagacggaatctcactctgttgcccagactggagtgcaatggtgcgatctcggctcactgcaacctccgcctcccgggttcaagtgattctcctgcctcagcctcccaagtagctgggattacaggcgcccaccatcacgcccagctaatttttgtatttttagtagagacggggtttcaccaggttgcctggctgatctcaaactcctgaccacagttgatccacccgcctcggcctctagaagtgctgggattacaggcgttannnnnnnnn

SEQ ID NO: 19538 - DNA, 490 bp, Homo sapiens
  misc_feature 1, 2, 3, 4, 5, 6, 7, 8, 9, 10: n = A,T,C or G
nnnnnnnnnnacttttttttttttttttttttttaaatttccaccggtgccgaggcctcagtggagcctggctggcggcttgttagagcctgcagcctacctgtcctgcataggaatgaagccgggaggagttacatgatatgccctcgttgcaggccggggacacagctaccgcattcagagaccaggaaacagagcaaaagctgttctcagagtgcggctgagcgaggagctacaggggaatggagggggccaagctgcatggaagattgtcccattaacctggctttttaccagggtggtcctctccctaacccctaagaatcacaccctgcatccaaacggcagcaaccccagaaaacgggctaagaactcccccgaacagagctagatctagaaagcccagcacagggagctgagcctgagcagcctctctccaagggtggctctgaactccacatgtgtgtacagacaagggggcgactggcat

SEQ ID NO: 19539 - DNA, 2141 bp, Homo sapiens
  misc_feature 1, 2, 3, 4, 5, 6, 2139, 2140, 2141: n = A,T,C or G
nnnnnnaaaacaggcatcggccgggtccgcggaaaccgtgccccgcggattggaaggccagcaattcaaagggaaaacgcagccaactggctcacggcaaagagtggtcggaagaagcgctgccctacacgaagcaccagacactggagctggagaaggagtttctgttcaatatgtaccttactcgagagcggcgcctagagattagccgcagcgtccacctcacggacagacaagtgaaaatctggtttcagaaccgcaggatgaaactgaagaaaatgaatcgagaaaaccggatccgggagctcacagccaactttaatttttcctgatgaatctccaggcgacgcggttttttcacttcccgagcgctggtcccctccctctgtcttcaggctctgcccaggaactcgcacctgtgctggagccctgttcctccctcccacactcgccatctcctgggccgttacatctgtgcagggctggtttgttctgactttttgtttctttgtgtttgcttggtgctggtttatttgttgttttctgggggaaaaagccatatcatgctaaaattctatagagatagatattgtcctaagtgtcaagtcctgactgggctgggtttgctgtcttggggtcccactgctcgaaatggcccctgtcttcggccgagctggtttcctgcccagcctggggcaaacctagccggaaggccgaggtcccattgttggcgctgaggtgtctggcctgaggtcaatggtgcaaaggagccgccaccgggcatgtctgcctggagtgctgtgctgtgtttaatcaggggatacaggcccctgggtttcttttttctttcttcctttcttccttggccaagagaagggcttacaggcatggacatgcaggttggcaaacgggcttgactttggctgatttaaaaagtgagaaagaaagtaaaaaaggttaatttttccttcctctgtaagatatcccagctttaaaaagaaaaaaaaagaattaccaagagaaggggacttctcttccagtttctgtaaggtcttacattgcctgactaaaatgtttcatttacctctaaatttccatatccttctggctgtagataaataatgtagttttgtttatgcatttggaattagtggatttttttgtcattaaaattgttaccactggtaacatgtgacaagcacaccacaattctccctatcttgtgaagttgtttttttaaatcgccttgaacaaaaagttttttttttgtttgtttttgctttctgaaattcacagaagcctaggaggactggggtaagcggaataaactagagaagggagacattgtttggatttcctttatactgtgaagttacatgcataaaagggtcaaacctgtagatgcagaaaaagaaaaaaactataaatacaaatctgtataaatgtctattattatgaagaattgccaatcttgttttaagcaaatgcattctatcgttattataaatgttagttctagctctatttacttctaatcttaaatcagaataaattaatattgtattgctgctgtgcgtggaaaaagacgatgtttatgttcttatagaataaaagctgtggaatgaagctttttaaaaaaaaaaaaaaaaaaaaaaaaaaaaaaacaagaaaaaaaaaaaaaaaaaaaaaaaaaaaaaaaagaaaaaaaacaaagaaaaggatattcaactcatgagaagaaacaaaagattgaaaagcagctgaccacgacatacaggacgacaagagcgggagctccctatagtgggcgcgatgttaccatagcgacagcatgggcgccgccacttaccaagagtactggtagactttgtgaaacactatgctcgttgcgtatcttttcttagcgagaagagccgccccctatcatagtagtgggtgcagcacacatattggggcacgacgtctccccagcaaacgagtatttcaagcgtacccacggagaaaattgaaccgactgcgcgccgttctacagtcggtggacaacccacaatatcgacatagtacagcacgccgcgcagcgagtactttaggtataaggcaagtgttagttgtcgacagaattttttcaccatggagtgnnn

SEQ ID NO: 19540 - DNA, 962 bp, Homo sapiens
  misc_feature 1, 2, 3: n = A,T,C or G
nnnaaatcctttagggccacctgtacctgcccgggcggccgcccgggcaggtacactgtgaaaactgaatttggagcacagctaggtcggcatccagggacctcttggctggcagtaatttctgggtcacacaaatttgtctttgcttctcagcaatcttcattttcaggaattggatcttttcttccagtagatgtatttcaatttctccatttagtttcatcttctcttggatatttattttttcataaaaaatgcatatttcttcttcccgctctatcagctgaacgccactatggtcaaattcagaggcagaggctaagtgggcattgagaccaccgttttactagtcattgtggttccctctggctttggatgcaagatatacacaacatagcatacttccagaggatcacagatagtcaccaatggctttctagttaaattacatccacactttggaattctctagggataggagggttactgagcctctcaactttgaggctgaccatgtggttggctagccacaatgtctctgaaagtcccaaaggttttcctggggtgggaaagaatgtcattcccaatgcacaaacaaagtgatcccatagtctgattttctgcagatccttttctcgggtcagacttgccaaccaaggcctggccagaagcacacaggcagggggccagggaatgtagttctggtgtgagtctgctctatattaagttgctaggcccattagtttcttctcaagttgaatatttctggttgtgatttccccataaacaggcaaaaatctatcctttgtaatcatgccaggagaaagacccctccttgaatggagaatatggggaggaaacaaagtaagaatgttctaaccccagcagctctggtctgcatggccgatcatgcaccactgatctgagtggcacctgggtgcacactgtttgtccccccgcgt

SEQ ID NO: 19541 - DNA, 863 bp, Homo sapiens
  misc_feature 1, 2, 3, 4, 5, 6, 7, 862, 863: n = A,T,C or G
nnnnnnncatgttcctggggtctccatatctatgtgacctgttatatggtttgccctcttcctcacgggacatgtgcacgagcagctgacagaaaaggaggaagaaatcgtggactggtggagtaaattttatgcttcctcaggggaacatgaaaaatgcggacagtatattcagaaaggctattccaagctcaaggtacctggatctatgctgctatgggtggagaatcgacatcctttgaaactggccacaggcagagctaagaggatgactaaaaggtcccttgggtgggtgctaatgagcagggcccaggaaaacctctgtcttcccggagagccctcttgcatgagtttcggctttgccaagattccagggacttgaggacagctattgagttatggttacgtgactgccacattggggcttggaggcatctggcagatggttgggaatgggctggcaccacactaattaggccacgatgatccagtttgactcagggaaacccagaagtcatagtgctctttgcagaatgacacaagatgtcaacatgctttgttgtgtactttgaacagggattggtttcacaagctgaaaagttgaatctgtcacatgtatgcagcataaaatcacagccgtgagaacatgtatacagcaggaagacaagcgactgagctaggcacggctgactagctctgagctttctgttcatgttttgaattttctaattcttcattcaattttcagcctgtagtgtcctcaagcagaagcagtgctaaagttttcagaacagtgtatatgagaaaaaaaaactttagaatgagaaatatctggtcattgaaataattttccccatcaaann

SEQ ID NO: 19542 - DNA, 623 bp, Homo sapiens
  misc_feature 1, 2, 3, 4, 5: n = A,T,C or G
nnnnngatgatgaaggattgtcataaggagatgctaaatactccccagcgcttcctagccaggtgacatctgggctgggacagatttggtgatggcagggtaaacatagtacttagcgagagcctgtgctcttgaccctgtgagagcagcctcctcattgtaagtagactctggtctgcagcaaactgggctaacctgttactcaaaagagagcagctgtgtgccaccttggaggtgggcatgtgcaaactacgtgctgactgtggctcatgcagagggttttgacggaaaggctctttgcacagccaaggcccctagacaatttcagtatcctgcaaaacccaacctgatgccatgtcttcttccagcaccacccccgcaccccatcctgccttattcacccctaccttgcaaccagaaagtctgataccacattagtcagctgaggatgtttggtgtttcgctagatattcacaacatttctcaaggtaggaacatatcttacctaacagaactgtgcaaacagagcaagtttagatgaaaagtccaaatgaattaaagagagtaattatatgtttaaaagatacataaatatatatatgtgtgtgtatatatatatatgc

SEQ ID NO: 19543 - DNA, 355 bp, Homo sapiens
  misc_feature 352, 353, 354, 355: n = A,T,C or G
acgcgggatttctcagatagttatgcgcagctccaggcaccagattctgtgctgggtgcaggcaggacctggagggcgtcctcaagtgttgatctgcaggactgtcttgatctttccagcagtgtcattgtgggcacgtgacctgagctttctgagcctatttccgcatctgtaaagtgctatccacttccacctcctgggctgtcgtgcagatgtaggaaggaattgcactcacacactcagcatgagacaggcgctcagtaaaagcccgtccaggggatatgagatcagtgagggataggaaagcaaggtgggtagaaacagcaaaacccttcccattgatgatggcagnnnn

SEQ ID NO: 19544 - DNA, 582 bp, Homo sapiens
  misc_feature 1, 582: n = A,T,C or G
ngtaccaagcattggacacacaaaaatacaggcagcttcttccctcaaggaggtcacaggtgggtgtgtccatagcaaagctgggaggaagttgtatgaggagcctgaagacaatggggagctaggggaaagttctgagtagaaaggaacatgtggacaaaggtttgaaatgatgaagactgattaggaagttcatattatgaagcataattcaagctttctctacgatgttcaaatcccatctctcctacttactagataggtgacattgggcaagttacttatctcctctgctcctgtttatttgtttcaaaaacagggacctctctcacagtgtgattatgaagactggacaagaaaatggagttttggttttgaatgcgttaggggtctttgcctttaggcgtgtagtggagacatggtttacacaatttgctgcaccttctggaggtcaggtttagagataaatattctggaggtgtcaatgtggaaatggtatttaagacacaagactgggccgggtgtggtggctcacgcctgtaagcccagcactttgggaggccgaggcgagcagatcacgan

SEQ ID NO: 19545 - DNA, 1937 bp, Homo sapiens
  misc_feature 1919, 1920, 1921, 1922, 1923, 1924, 1925, 1926, 1927, 1928,1929, 1930, 1931, 1932, 1933, 1934, 1935, 1936, 1937: n = A,T,C or G
ctattgttaacatagctagaggtggaaaagggagcaagaccaggtgttgggatgaataattaactaatcgagataacatcagttttcaccataggaacaagtaccatggttgctcttaaagtaagagatgtttcctattttatgtaattttactaagggatagtgttttcttttgtcactgacttaaatgtacctggatgtttctcagccatttggctaagatcgaacacaagtaatacctgggccttttatatctaatctaatgtagaccagcctgttaaaagagaaagacaattggttaaactgctgatgtgttgctttgtcttctcaaaagcttgttctataatacaatatgtaaaaagttgttacagtgtagtaaccgtagataatccctttatgatttgtacctaatggcgaagaccttttattttctgaaaataacgtgtttgttttcattaccgacattagaagccaatatttattaatctatttctcatcctgacatttcagtcagactcttaaaataatcttgctgtgttttgatttaatgtgcttatcaacttagaatattgaattaatgttaatagtgtcattttaggtgaactagacttcattgaaggaggtgggagccttatggagagagagtatatgattatctctatttgtatttaattaccatttcatctaaccattcagaacatatttcaagaataattttaattcaagttgtagataaaacttactataccattttcattttgacgctttccaagaatgagatacacggtattttaaagacaaagattgatcttacatgttactattaaaaaaaacacgttaattttgttctacatttatacttttaatttttctgtggataataagaaatgccaagagtcgattgtgtccatgctggcaagtggcctaataaattgtccttttatttggtggtcctcagagtggcagttaacatcttgctattctgccttgtggacttgaggtggaaaggttcatggaattatatccttgcttttggatgtgcaaactgaggctcagagagtttaagacacatagtcactttcaccaattaaatgatgaagctgccatgtaaacgtatttcatcacactcccgagaccttcttctccagtagtgttttcaagctttttgagcatgcagacactaccatcaaaaaattatgtagagacatacttgagagttacagtttaaagaaaaacaaggtgtaattatttggttattagtagcatttacatatgcttgaaaacttctgctatatatacagtaagattaatttattctaacaatgatcttgataatccccctgattcccagactccttggaatagctccacagctatcagtggttctgccacaggttcagagccttcccagtactgccttcttatttgagaggtgtgctaagagctataaagcagaggcttcaattgtacacagtttggaagtttaggcaaaagtcatttcttccctatattttgtcatgcttatctcctgtctctttctgttttacagattagcaataaactccttaaaacccaaaggtttgggcttctgttcctttcacttgcagtcagacatggagttagtgctagaagacgacagaaggggtaacctgcatggtgacagctactgaggggatggataggaaagcaggctgagtccctggggccagtggttaccaaagccaaggagagagcaaggggagcccagtgggcctggccatggactgctctggaattccgagtgtgaactttcagccaagaaggtagtgtgaaaatattactgtgaggttttaaaagtacacaaataacaattgttttttgtaaaaaaaaaaaaaaaaattaaaaaaaaagatatgccaaaaaaaaaaaccctttagtannnnnnnnnnnnnnnnnnn

SEQ ID NO: 19546 - DNA, 346 bp, Homo sapiens
  misc_feature 341, 342, 343, 344, 345, 346: n = A,T,C or G
acaaggagtagtctaaaacaagtgactttactacttattcttctgcatgtccttaccagcttcttaccttcttcaggttgagcatgagatcagcttcacagcggatgggtccttaagggtttttttccatactagtttcagccttaacaatgagttttcaacccttaaacatgaaaaataaatagtgcgaaagaggggaggatggtagaaatgctttaaaattaccttttgtaaattttactttgtttatgttttaattgtgccttgcttatcaggaagtcctacaaacaaagatctccacggcttctcaggtctcccaaggaacaggttcccctgttccnnnnnn

SEQ ID NO: 19547 - DNA, 1078 bp, Homo sapiens
  misc_feature 1, 2, 1078: n = A,T,C or G
nnacttcggctcggttcccgagacggaatacccaggagtcgagtacttgggcgcatgcggcaaccgtatctcagttctcgcgaggtttcgtcttcccggaagcgttggaggacattccctgttgactgcgtcgcgatgtgtggcgactgtgtggagaaggaatatcccaaccggggtaatacctgcctggagaatggatctttcttactgaactttacaggctgtgcagtgtgcagtaagcgggattttatgctgatcacaaacaaatccttgaaagaagaagatggagaagaaatagttacctatgatcatttgtgtaagaattgtcatcatgtaatagccagacatgagtatacattcagtatcatggatgaatttcaggagtataccatgctgtgtctgttatgcggcaaagccgaagatactatcagtattctccctgatgacccccgacaaatgactctcttattctaaggatccttctacagatctgttataactatattgtgttggtttacaatacagcaagcctgatggtttgtcttatttcattcatactgaaaattctttgcatattttttttctgcttagacttacttattctttgaggaaaaaaggtaatgtaggagctcattgttctctagagctgagctcttctgctaaagttcaaagttcacatcagtgtagccagagtgaagcatctttgttagcagttatgtggtcagaaaacaactagaatgggagcacacctggtgcccagattttggtttccaataaaaggaaccaggactccttagaaaatgaactgattctagaactgggatatgaactgtacaagatgagcctagagtatcttgtgccacagaaaatgagtactgaaattcagaaaaaaatcatagggaatgggattggtagttgatgaactgaggttttgaagggaagtgggcattgggttgcaaataaggtgttgggtttacccaatttttaattagccacattaaatatgtgggacatgtggagggaaaataattaggaacgccaggggcgtaaagatagaaaacaaagggagaataagagn

SEQ ID NO: 19548 - DNA, 747 bp, Homo sapiens
gatatcttctgttttccacatacttaatgtacagtggtggaactgtatctgcaacaaacattctgaatggggaagaagaatgggagatacagttaggatccctaagtctaggtatggggtatattcatgattagggttcttttctatctcctaggaagaattcccttgtatattgttctccgtgactctagagtccaacctctgggaaagttttgatgtttttttttttttttttttttttttcttcatggctacatctgaacagctactgagggatatatatgccaactttgggagttgcacagcttttttgagaccatttcttagatgactagggactgtaatttctcttaatttggaatagccacaagttgttgtagccaaggtttgtgtgtgtttttaatacaattcttaaaattttagtaggcttctcatctgtagatagatttgaaggggtggggttgcccctccacacctgtgggtgtttctcgtaaggtgggacgagagacttaggaaagaaaaagacacagagacaaagaaataaggggacccggggaaccagcattcagcatatggaggatcccgccagcctctgagttcccttagtatttattcatcattcgtgggtgtttctccgagagggggatgtgtcagggtcacaagacaattgtggggagagggtcagcagacaaacacgtgaacaaaggtctttgcatcatagacaaggtaaaggattaagtgctgtgc

SEQ ID NO: 19549 - DNA, 485 bp, Homo sapiens
  misc_feature 483, 484, 485: n = A,T,C or G
gtaactagggagcaagatggggagcgtcagaaacctaactccaggatttgctgggttctccaaactgtagcgggaacctcactcccaggccgatgcccctctagcgtctgcagctctgggccccagggagggaggaaggagccacagagggttcggacaacagcactgactgatgccagagcaggactccattctgttaacctgacaaagcgcacaggctgcgccggcatgtttttcttccactttctacactaatttatcaaactggaaggaagagatcagaacatcaaataaaaatccacagccacagagcaattaactcaagacctaacatgtacctggataaggggactcacaagaattccggtatctacaaggttttaaatggcaatgttttctaactttgtatcttgggttattggtcgtcaatgtttccaaaaataatcactcctctcagttacattttctgatcaattattgaannn

SEQ ID NO: 19550 - DNA, 1104 bp, Homo sapiens
  misc_feature 1, 2, 3, 1093, 1094, 1095, 1096, 1097, 1098, 1099, 1100,1101, 1102, 1103, 1104: n = A,T,C or G
nnnagagacggggtttcaccgtgttagccaggatggtctcaatctcctgacctcgtgatccgcccgcctcggcctcccaaagtgctgggattacaggcgtgagccagtgcgcccggcctacctttttagaggttaattttgcaattaacattaagagtctcaaaaacactcatcacctttgacttagccatttcacctccaataatctagcatactaaaacactctaagatcagatacatttaggtcaataattctttatccaccaattacacaatccaaaaaaattttaaaaactcttttggcagcacaagctgtcctcaataaatgtgatactatttgtagtttctatttataccactcagctggccttcaagccatgcatacttttaatgtaagtagccccagcctacttctctgggcttatttaccaacgcagcctcccacagatgctgtaaacctgacacagatagcccctggccgttccccaaacactgcccacatgcctcccagcagcgcctttgctgatactgtttctgcttcctgacacgccctccttctcgcacgtctaaggcctggcacgggccccatctcttttcgtaaagcttcagccatacctgcctcagaggtaaatttctgacccccatgattcccaggcacattttggtgctgctggttgtacacaacacaatctgaaatgtggttctgcatctcttctccgcacctggctgaggtctcagagagcagaggctatatatttcatggctccctcaatttctaaacacagtgctgtatattgagtggcacctctaggtgactactttgtaccctaaatgttaaactgagggatgagtgaaacaatatcaggattaataaataaacacattcttgaattccatcacttaatagaagtggccatttgaatgctggcaggtaggaagaaaagaggaggacaaagaaccccaaaagttggcatcataactactgccacaagaaaggagaatcaagcagattggttaggtaaagaccagggaaacacaggtcactgcaggactgaagaatcttccaagcttgccagtaatgtaagtttctcannnnnnnnnnnn

SEQ ID NO: 19551 - DNA, 537 bp, Homo sapiens
  misc_feature 532, 533, 534, 535, 536, 537: n = A,T,C or G
atggagtctggctctgtcacccaggctggagtgcagtggtgctatctcggctcactgcaagctccgcttcccaggttcagccattctcctgcctcagccacccgagtagctgggactacaggcacccatcaccacgcctggctaattttgtttttgtatttttagtagagatggggtttcaccatgttagccaggatggtctcgatctcctgaccttgtgatctgcctgcctcggcctcccaaagtgctgggattacaggcgtgagccaccgcgcctggcctttccagggtattcttttaacgtggtcttatttgcctttttgaatttaagaaaatctatcagcatcatataccaccactggaatataaatttgaaagagagtcctgcagattatatacatgaatctacttaggcctaataaccaagcagtcctcagtggcagatcaatgaaaagtgaaattaaaggcaagtgaagggtaggagagattggccagtgttggtgcagcctctgtgggaagtgtctagttcaannnnnn

SEQ ID NO: 19552 - DNA, 450 bp, Homo sapiens
  misc_feature 450: n = A,T,C or G
ggcaggtacccacctcctcggtcacccacagagccaccaaagattccatgtcccagagcttcccatagcagacctgaaaagtccatgacctgagctttggccatggtagtggagtggaacaggaaatagtccagcagaggagtgtgggggaagggggcaggagaggcacaagaataagggagacctggactctgcctttttgggaaaaggaaccaagctcatagcaatttggcttgataacacaatcagatttttccaggtttggcttcctttctgttatactttcatcattgtgatgctgtggtagaaagttaattacagtagtggctcagtcattgaatctttcccctttataatacaacttacttgaaatttaaatcaagaaaaaatttttgacgcttagctaggtttggtggcatgatatgccagggttcagtgggggagcttgcn

SEQ ID NO: 19553 - DNA, 954 bp, Homo sapiens
  misc_feature 1, 2, 3, 4, 5, 6, 7, 8, 9, 954: n = A,T,C or G
nnnnnnnnnacgcgtcggagtgagactccgtctccaaaaaaaaaaaaaaaaaaaccagtctggagctgctgctgccccttcttcctttacttgggccgtcatcctaaagggaatgtactggaattaaacgtcgagtcatattcttccctcttagagcaacaaaatttgaatgtttctctcactttctggaatttttaaaaagcaaactttttaagttattttttcagattttatttctcattagccttttttccttgaactccattttggagtgcaccctgtagttgtaagagcattgtgctgagagcgttccccaaatgagggtctgcagcttgcactgacccctgagttcctcacccaccagccccgtgccgacccgtctaacccgtgtgggggtgctccactcaaataggcccttggcagaaaagattgtccgttctgtccacacactgcctggatacagtctccagctctaggagatggaattggtttgctccatttagaaatagatcaaaactgggcattcagtagatggtaccaatatcttcctgtactgggaaatactacctcccgatgtgactatttacctatgataatctcacagaaggagatatcctagaatgcagtatgatgggaaagttccagaacaactacacattcgcttttacacagccatccaacattagaatcattcaaatttcacgcctctactgggctaattaacatgaacccctggcctctgctcaaactcgaacagtcacacccaagataggcctcccactccacttctgtcttacgcgtgaaattggggccctgtgattcaccagcttattgctaccttgaacagcgcctgtaagtgttcccacgggtatctgcccagggatcacatcactgcccagagcagacagtgcgacaccggcactgggcgaagtgaccccagaaaactgataagan

SEQ ID NO: 19554 - DNA, 381 bp, Homo sapiens
  misc_feature 1, 381: n = A,T,C or G
nacatacaccaggaaagctaagagtcaactcattcatgatattgggagaaaagcaaagcaaaaactgcaacaaaatctcaaaccctttctgcagcagcagatggcaaacagtgatcagaggagaaggacccttccagcattagaagatttccaaaggctgttccagtaggggctgtgggcttctgggagcccagatgccccctgatggtatatttgagttgtgaggtggaggccaggtggcaagagactgcaggccaatgtcaatgaaaagcctgggaggaaaaagagatttctgggagagggagacatcttagtgtgagcaaatgaccagtcgtttagtagagcgggtctaaggataagaagatgtgataagagtaagan

SEQ ID NO: 19555 - DNA, 703 bp, Homo sapiens
  misc_feature 1, 2, 3, 53, 257, 262, 341, 499, 500, 501, 502, 503, 504,505, 506, 507, 508, 509, 510, 511, 512, 513, 514, 515, 516,517, 518, 519, 520, 521, 522, 523, 524, 525, 526, 527, 528,529, 530: n = A,T,C or G
nnngaggaggccctcttttccagtaggaagttagatgggggttctcagaagtngctgattggaaggggacaagcttcgtttcaggggtctgccgttccatcctggttcagagaaggccgagcgtggctttctctagccttgtcactgtctccctgcctgtcaatcaccacctttcctccagaggagaaaattatctcccctgcctgcctgattccatggctgttgtgctgattccaatgctttcacgttggttcctngcgtnggaactgctctcctttgcagccccatttcccaagttctgttcaagttaaacttatgtaagctttccgtggcatgcgggncgcgcacccacgtccccgttggcgtaaagactctgtaatttgggatgccaatccacaggcctgaagaaactgcttgttgtgtatcagtaatcattagtggcaatgatgacattctgaaaagctgcaatacttatacaataaattttacaattctttgnnnnnnnnnnnnnnnnnnnnnnnnnnnnnnnnttcccattcagggatttgtgaccaggtggaatgagggtggtctctgagtcacctggagagctttataaaactccaccttaccctcatccccaatagtgctccccagcctcccaccaagatagctgaatgtcagaacctagagggaagagggtaagatgggtgtggtacctgcc

SEQ ID NO: 19556 - DNA, 1791 bp, Homo sapiens
  misc_feature 1, 2, 3, 4, 5, 6, 7, 8, 9, 10, 11, 12, 13, 14, 15, 16, 17,18, 19, 20, 21, 22, 23, 24, 25, 26, 27, 28, 29, 30, 1791: n = A,T,C or G
nnnnnnnnnnnnnnnnnnnnnnnnnnnnnntttttttggatttgagaacatttttaataaataatgtgacaaaattacttttctgattattggattttcagtatgcaaaattatggctaaaaataaggggcttcttacatgaacataatgaaaacattaatcacatggattgttcccttagtactgcacgccttttctatggaactttttcaaattatctaaatgaacaagtttggttttggtgaacaccagcctttttttttgtggttcagttttgtttggctttgttttccactggggtcagacctgatacttatctatctatgaataaatgtacatttttttcttcaaatagcaccaattataaaatcaatgatattcataaaatgacaaaaaaggatcatagaaatctactagtcagagggcatcatttgtcaattgaaagcaagtaatgcctctattagagattttaaggaaatcttgtaggtttcgacattggccacaacaaacttaaacctctttttttctttaagtccaggaaaagtaagaaccatttggttcatggcccacaataaagtatgcatgttacttcaccatctgtcattattcaaatattccaaatacaaacatagagcattaacaaaacaggttaaaaacgcttctcaacattttttttttcaataagacaaaaaaggttaatagttacaatggtttacaaataaagtttagtgattgtgcttttaaaaccaaaaaaaaaaaaaaaaagagagagagattaaaaacagtgcattacaaaaacaaaaatcaaacttccttaagtggcacttctgaaagttgaactgacactaccagaagaaatttaggccagttaagacagggatgttcttactcaattggtcattaaaaacatccacttgtttgtaatacgtatttataattactttttgatgattgaaaaatagaacaaggttttactaggtttacttatgacaatgactagacaaccagagatccaactggcttagccctacttatccaaaagtacatttccaataagaatatacttcaaatgatttacaatgtttctaccccattcgaattgtttgtggttctgcatttgctatatttttagtttcttccagcaaagggtagtatgaaaaactgattttgaaatcatgttaaaatgaaatatgttttaatttgcattagcagttggctatagaaagattatactttgagagcccttgtgaggttgaatatcaactttctatatttgatcaatatcttgctataaattagcttggcatataagcagtgcaatgccatatctcagcggcaaaatgcaaaagaacagttttgttccctcttgctggctgatgactgaagcaagaagtcaaagcactttgcttgctggaagtaaggtataatggtttgctccaacagcgaggggaataggaaggctctttgtagggttagggatcaaacaacaacaataaaaacccaataaagtttttaaaatgatatcccaataagaggaataaaaacgacaatttgtacactctgattgcactgaacattttatctggcgtcatgtgtcatctgacaggaggcatcttgagtgatgattttcacattagatctcataagcctcttggttgtcttcagctttcagtttcctctaattcttcattattatcttctcctctttcatatcctccaagtacctgcatttctgcaatatttcttcgacctacatttgcttgttctcgttgtctacttcaatatccggan

SEQ ID NO: 19557 - DNA, 592 bp, Homo sapiens
  misc_feature 591, 592: n = A,T,C or G
acccacgcgtccgctctctgtcggggtcccctccatctcgctgctgctgaaggccgcgagggcggcggcgatggcggaggcggcgctgttgctgctgcctgaggcggcggcggagcgggacgctagggaaaagctggctctctgggatcggagaccggacacgacggcgccgctgaccgacaggcagacggactcggtattggagctgaaggcggcggcagagaacttgccggtgccagctgagcttccaattgaagacttgtgcagtttaacatcccagtcactgcccattgaactgacttcagtagtgcctgaatctacagaagacattctcttgaagggcttcacttccttaggaatggaagaagaaagaattgaaaccgcacagcagtttttctcatggtttgcaaagctgcaaactcagatggatcaagatgaaggaactaaatataggagcagtgtgatgctatattgaatgatgtaaacagtgctcttcagcatctggagtctttgcagaaacagtatctttttgtgtccaataagacaggaaccctacatgaagcctgtgaacagctcctaaaagaacagtcnn

SEQ ID NO: 19558 - DNA, 2050 bp, Homo sapiens
  misc_feature 1, 2, 3, 4, 5, 6, 7, 8, 9: n = A,T,C or G
nnnnnnnnnagatttaaaacagcatacatttattatctgaaagtttctgtgggtcaggagtccaaacgtgatttagctgggtcctctgctcagagtttcacaaagctgcaagcaaggcgttggctggggctgggcttttatctgaggttcagatgcttcttccaagatcacatggttgttcacaaaacttatttccttgcagccgtagagctcatggcagcttgcttatttaaggctaataggagagagagtctctgactggttcactctcttttaaaggactagtctgattaggtcaggcccacccaggggatctctttgattaactcaaagtcagctgattagaaaccttatgtatatctgcaacttctcttcacttttgttatataacataacataatatgggagagatgatcccatcacttttgccatattctgttggttagaagcaggttacatgtcccacccacactcaatgggggagaggattataccaaggcatggattattgagaatcactctagaattctgtctatcatagtgtaattatatatctatgtagtgaaaaaaatagatgtttgtaatttggaggtattaaaaagttgaatacaaagaaaaaattatagaactttaaagtcttaattttaacggagatggcacattattttgaagatagagaaaatggctttctatccttttcctatattacacttagtgccttgggcaggatatatgtccaagtatctaaactgtagattatattatatgaacttaaatggaataattaaataagtaattctgaaagacaagtatttaatgacataactggcttgatttgggaaccattttaccatgtgttagcctcagttgtagtaagagaggatcatgtaattatatgtctataagtaagttatatggtttttctcagtgtacattagttcaacgtttctaaaggtttttttttttaaagttttcttttaatacctttgacagactgtgattttcatcagaagtgctaatctttcctcaggatggagagttcaggcatcttttcatgttgttttctcacagttttaaatgacatatctacagaagttcttttatcagtgacttttcccttcctggccccacactatctgagggcatactctgtagctccttttattttattttatttttgtgggcatcagatatattctgaagtcaatactaaagctgttagagtatgacatttactaagaatcctgccattttaggcccttcttcttaaaggacaacaattccattggtatttagtaaaaaacaacatggcttggtaaatttagctctttttcttgacattggcaatgataatacaatgcctgtggtgtataattgtcatggctgacttataaattccctacagatatgtggttacttctctactttccctttctttggcttgggcaactgccacgttgatgcactggagccattcttctgcattcttctcatccttggccttaaagacataggttttattgtctgtgaagatttcgaaagcccgggggagagagcggtccctgcgtttcttggccacagccttcacactctgtactttgctgagttctattgggcagtcgtcagggtcatctttagactttcctttttgaaacagaagttgatttccagccagtgtaaaatagcgtgttttccaccttttgatgaacttccatctgacttgcttctctttaagttttccttctatgagaggctggccatcttgatttacaacagttgctttctcaggattgttgcacatgaagcattgccatgctcctgctgtttcactgaagccaaacacgtcaaagaacctcacttcttccagatggagctgtacctggtccagatccttctgctgtggaaacgtggactccatcatggcagtttcaaagctgtgagcaccccctgcctgggtcttctcccacagagctctgaggaattgcacagaatgactctgaatggacaggggttcaggaaacaggctcgccggacgcgtggtcgactccct

SEQ ID NO: 19559 - DNA, 4350 bp, Homo sapiens
  misc_feature 4327, 4328, 4329, 4330, 4331, 4332, 4333, 4334, 4335, 4336,4337, 4338, 4339, 4340, 4341, 4342, 4343, 4344, 4345, 4346,4347, 4348, 4349, 4350: n = A,T,C or G
tatagggagtcgacccaccggaagtggggctgtgaggctcggagtcgccggaggagccagtatctgtgtcgccgccgcccgcggcgtccccggtttggtgttgcggcgcccaccttcgggaggatcaggctgcttctgatgcttggaagatatcctctcagccacaaagatggtaataaatctttgcctcccacagttcagaccaagaattcactgcaacaagatatcagctgatggttacgaagtagaaaatctcatctctgaagatctcacaaagagaagtcatggtttcaggacagagtatttcattaagccaccagtctatgtgacagtttcatttccctttaatgtggaaatctgtaggatcaacatagacctcacagctgggggaggtcagaacgtcactggcctggaaatgtacacatctgcctcatctagcagagtgtcttggaatacgccccagtgccggaccctgggcccagctgagccatctgtcccagacaaggaggcgttcaccttggtaggcaaagtcttactgaaaaaccagagccaagtggtgtttagccacaggggcttcaaggccaggcccccttttggcgcgatggaagccacactcccctcccctgctgttgtggcccaggagctctggaataaaggggctctttcccttagccacgtggcccacttaaggatctgtatcacccatgtgacaggcggcggtatcccttgtatcaagcggttggaagtgtggggtcagccggccaagacctgctcccaggaagtgatagacagcatcctgctggtcacctcagagaacctgcctcaggatgtggctctgcaggctccagccttgcccatggaaagtgactgtgaccctggggaccagcctgagagccagcaggctccctccagcctgcagaagctggccgagatcattcaggatgtgcctgaggagttcctggatcccatcaccctggagatcatgccttgtcccatgctgctgccctcaggcaaggtcatcgaccagagcacactggagaagtgtaaccgcagtgaagccacatggggccgagtgcccagtgaccctttcacgggggtagcttttactccgcactctcagcccctgcctcacccctccctcaaggcccggattgaccatttcctgctccagcactccatccctggctgccacctgcttgggagagcacagacggcattggcagtgatcccttcttccattgttctgccctctcagaaaaggaagatagagcaggctgaacatgtcccagacagtaactttggtgtaaatgcttcctgtttttctgccacaagccctttggtcttacccactacctcagagcacactgctaagaaaatgaaagccaccaatgagcccagcctgacacatatggactgctcgacaggtccactgtcccacgagcagaagctgtcacaaagcttggaaattgccttggcatccacccttggctctatgccctccttcacggcacggctgaccaggggacagctccagcaccttggcacaagagggagcaacacttcctggaggcctggcaccggctcggagcagcctgggagcatcctgggccccgaatgtgcctcctgcaaaagagtattttctccctacttcaaaaaggagccggtgtaccagctgccctgcggccacctcctgtgccgaccctgcctgggtgagaagcaacgctccctgcccatgacgtgcacagcctgccagcggccggttgctagccaagacgtgctgcgggtccacttctgagtgactgacctccactggaggagacccattgctgggaggagctgagggggaacaggagcagggccacagcacccctgaggtctggccaggccccaggcacagagctgcctgctccctcccggggctcttcttcatcacctcacggtatagcacattgcttctgcgctggtggcaatagggcaacaaagccataggccagagggcggggggatgtccctgcctccctgccaccccccctgcctgagcccaggacccactggagccagccccaccctaggcaggaagacccctgctgagggcccccccgtgcagtccgcatacccccctgtccagcagggcactgtgggtggctcaccctagattgtggcccagatctcaggagtctctgccttcagggtcatccaaaagtggaccttgggagcagtgggggtgtctgtggagtgcatgactcagccccccgactcgcagccttaataaagcgatggttgacgtctgctgtgggtttcctcctggtggagtgcctgtctgtgtcacacactcctgtcgcccacctgcacccacacaagtggagctcacagggtagctgtgtgcagtcactgcagcttgccaggctgtcattcctgtcgacgacctgaaaggacacaaactggaattttcaggtctgtcccctgcatggggactcagaacccaggtttgcaggtgggcatacgtggtgggagggtggagggctccctctggccagtgccagctgtgctcagctggcttcagaaactgctccctgagggggagcgcagcgtttcctcatgcagttggtttcaggaaaaatacttgtttataggctgcatccttttttcagcccaacatttagctttatggagtgccaaagggaaaatatatccatatccctacaacttggtactctatcagattccagccactagaagaacctcagtgagaaaacacacccgcctttccctgttcccttctaagcacgtttgggaaggaacagcctaaagatgctttgtaaagctgtattttacccttgagcttagccgcgggtccctgtgaaccggcacattcctttcctttaggccgtccagagctctagtccacacccaatactttagagatctgggtttggggttagttgctttttttttttttttttttaattgagacagggttggtctctgttgcccaagcttgagggcagtggtgcaatcataactcattgcagcctcgaactcctgggcttaagggatccttctacctcagcctcccaggtagcaggaactataggcatgtgccaccatgcccagctaatttttttattttttgtagagacaaggtcttgctatgttgtccagactggtctcaaactcctgggctcaagcgatactcccagagtgcttggattgcaggcatgagccacttcgcctagccaagcctgcatttttttgagttcctacatcatttgtccacaaagatggcttcagagaggtggtcacatgctttgctctgcttcctcttggcactgaccttgatgcagccttcacatgagatttgagggtccgcatggatggcctgtgccgccctcgctggcgaggctcctgtgtgcccctggctttctgggtctgtgcctctccagaatcttgtcttaccctccggtgtgcttgtgttcttagaaaagccccagcatggccgggcatggtggctcatgcctattatcccagcactttgggaggccaaggtgggtggatcacttgaggtcaggagttcgagaccagcctggccaacatggcaagaccccatctctactaaaaatacaaggattagctgggcatggtggtgtgtgcctgtaatgccagctactcaggaggctgaggcatgagaatcgcttgagccggggaggcagaggttgcagtgagccgagatcgcaccactgtactccagcctgggcgacggagtgagactccctctcaaaaaaagaaaaaagccccagcatgtagcaaaagcatttcttggtgagtgtgggggctggtgattcccaccttcaccctgtcatggtctcagggaacagcctgcttcccaccagcagcttgacacccacagtgtgctctggctgctgggagcccatctctcggagaaaccctgtccacccaaccccgagagccctagcgtgcagtcagcgtcagcacggcgctcccagatgagggccggactgcctccccttaagcagctgtgttggaggtactgcccagaccgctgcaggtccctggggatctgcatttctaacaggctcctgcccccaagactgctctggtggaaaatccagcctgggagcccctggagtggcaggccctgtcctgggtacaggtggagccacccccaggagttgcgtgtgtttttcttaattgaaagacttcccccaaaaggaagtggtcttttcactacccttgccagaaacatgctaggcaccactgggctctgtttctgtcccctagaaaatgggaataaaatttcttttgctgnnnnnnnnnnnnnnnnnnnnnnnn

SEQ ID NO: 19560 - DNA, 616 bp, Homo sapiens
  misc_feature 611, 612, 613, 614, 615, 616: n = A,T,C or G
ggatggatgacagtccaccagaaaaaagttagtggagcggggacaagcagggttgcagagtggaagaaaaatgttcctgtgagaagaaactgtccaaagagtctgaagagaaaagggaacagggtgaatttgaggccctacaagaaaaacaggagaccattcaacaggagacgcccagggagcaggtggctttgtgggcctgatgtccaagaaagaagtcgtggtggtaaacagagactggggattgcaagctactgttgtctttctattgaaaaaatagctgagcaccacactagggaggccttgcaaggacagcccagagaatttgaacttgattctacaggcagtgattttgaacaagaggttttgaagagaacgtgacacacgtcaagctgagctctagggagtgggcagcagcctgcagaagagggactaggctaggagcacagaaagtagcccacggcagaggtagcagaaggaatggaggagtgcccatgtgaggggtactgaggtggcacacttgccagaatcagggcagcctgcttggtctcataccagctggaaccagttcctaccagctcccaagggctaattgttaaactttcaggaannnnnn

SEQ ID NO: 19561 - DNA, 625 bp, Homo sapiens
  misc_feature 1, 625: n = A,T,C or G
ncgtccggccaggcgtgcctggaaatccgctttcgcagcgccccctcgtagccgcctccgcccgcagaaggcgttccctggacagagaagcgggcgcgcgggggcgggcgcgtggggccttgccggagaacctgactctccgcagcagcagtggaagccggagtgacgcgttgtgttgaacaccagttttctggagcgctgtgtgttcttaacagctgagcagtctgtttctccaatcaggtttcaaagccacttcaactgcactggcccctgtgggtcactgctgcaccgccctgacccatgtgggtccctgaggagcgacctgccggggccacctggctggacgaaaaagacacaccttggacttaagccgtgagaaaaaaacttcatcagtaagaagaatgaataaacagactaggttgaatccatacaatggaatgttagcagacaataaaaagaaaatgaactattgatgtcccctactgcacagcagaagctctgaatcgtgttcctgaatgaaagaagtcagagatgaaaagatgggccaggagtccagtttctggaaggccaagaatcgaagtagcaagctgcagccgttttccagacaagcaggatgtggggatgn

SEQ ID NO: 19562 - DNA, 613 bp, Homo sapiens
  misc_feature 542, 568, 570, 575, 593, 594, 613: n = A,T,C or G
gcgtccgcaggctgggggatcccaagggtgcgctccagcccccaacccaggcactgggactctggtggcaccctgggtggcaggcaagccttgaaatcaagtgcacgagccttggaaaggaggaccgggagagttatggcatttatgaatgaagaagagaaagagaatcactcggatgggaaaagttaactggattgttcccacctgcatggatcaccgggtaactgcagtgggaccgagggggcgaggctgcgggctggggatgtgcgggtttccttgtgttgccacgaacccagagagggagaggaagaagatggaaagaaaaaggaaaaagggaaagaaagtaagaggggagagaggggaaaactgaggatgaagagagacaagagaagagagacctgagagagggagagaaagaaagagacagaaagagaaatgaaagtgaggaaaggggaaacaggcagagaaagagagagaaaggggaggaaagagaaagggaaaagaaaggagggagtgaaatcaacagaaaaaagagaaccagnaaggaggagggagggggagagagaananagaanagagagaagagagaacanngagagagagagaaagagan

SEQ ID NO: 19563 - DNA, 5170 bp, Homo sapiens
  misc_feature 1, 2, 3, 4, 5, 6, 7, 8, 9, 10, 106, 5168, 5169, 5170: n = A,T,C or G
nnnnnnnnnnaccagactccggggtccctgtggaagggccacccccaccagagcccgtatgccaccaaggcagtcaacacccagccgcagatcagcacctctcaangtcatcaccacaccacggtggtgcagcccaacggcatgcctgcaacggtgtaccctgctcccatcccccctcctagaggcaacggggtcaccatgggcatggtggctgggaccaccatggccatgtcagcaggtaccctgctgactgctcactccccaactcctgtcgccccccacccggtcactgtgcccacgtaccgggccccaggaacgcccacttacagctatgtgccccctcagtggtgatcacctgcaaatgtttgaggacggagctgtgcagtcacattattggggattccacagctggtgctgcaggccttgcgcctccaaccaggactttcttcttaatgctctcgacacttagctaaacacgactatatcccggcccagcaggccccagcgccgttagtctccagctgactctgtgggttggtcttaaagcaaattctgttttgtggactgcctggcaattttttagctaactgtaatgataaaaagggagtattaatctattctgaatcatatctagttgaatgcatgtttaaaaaaacaaacacaaaaagcttgctcaatctacctgcagtgactgatgcaaaaccatcatatgcaaaatccaaaggaatggaaacgtattttacaacttgtatcactaatgcactgttgtaatgtatgcaaagtcttacagttataagtgttaaagtgaatttcttcatagagcatctgaaatatcttagatgattcttcaaccttttggggttgatgtgggttgccagttagggatgtggacattttagttttcagcgacctgtttctttggcactgactgtcctgggagggagttgcgaggtttgggagagagtagggaagccacagctgcttgggtgcagctggttcatggacatccctttgagtttaggcttggtggagtcagtggaacagggacatgcttaaagctcatcatgaaagattatggtagtgtggccagtgaaatttggggcgaggggggtggtttatgtgtcagcaaagcagtttctctgctatctaaattttcattacagttctcttagagagatgatgtttttatatgtctttattggaaaagtcctatgtaaaactaaattattttcctgggatggaagaaatgtgaaagagaaacagccatgcttgcaggaggtattgtcctctgctttatttagcttagaaaatcattccttttttttttttttcctggagaaatgtttgaatcagctgaaaacaggtaggcattgctgtttttccccaacaaagaagggcaaaggtttcagctgtatgttatgaagaaagtggtatatttaagaatgagttaaaagggaacaaaactttatttaaaattcctccaatttcttgtagaaaggcagggccgtggatatgtctggaaatgtagaaacctgtagctgcttctgggatcacccacctgatggtggtgacttgtctgctgaggccggctggaggggacgcttagagatggggcgagggggaggccagtgtctgttgtctgcgagcctctcctgccatctcttttgcagctgagggcacttggcacaaagcaagcacagacagcagagagggccaggcagtgctggagtgcgtttgctggcagggtttattgtgggagaggaatttgagtttaggatctgaatcttgtacataagaaatgaaaaggcttccctccaccccgcccccaaaatatgcccgtcctgtatccatgagagtgcatgtcggttctcagtgagggtcagagtgggggtgggggatgtaaggcctgggtccctttcagcggcctctagggcaggagcgtgcgtcttcttcccagtgcagtggtggtttgagtgctgtgggctctggtggggagggggctctgctcctcttcatttgctggtagctgggtcagggcactggcgcccagtgaggatgcccactagcattctgccccagttggttggtggggggacacctgaccactgagcctttggtaaccttattttttatagtaagtacttcttataattttctttttcacatcttattttataagaagtttaggaatatttttgcatggatcattgtaaacagcagattctttattcctgatgtctattaacatagaatgtttactgataagtactttaaattgcttcatgagcacttaatccatcttagtgtctatgtgtgggggcagacatttaccgcaggcacacagtttgtgcccctttcttcaagtctctgttggtaattccatctgtttagtggatggttggcaggattagtaggttctaacggttccaggggttcagctgaccaagtagcagagaagtcttttttcccaattgagtgctaatagattaggataaaatactcacaatgttagtgtatgcttttaaaaagccccacacaacaaaatggaaacatacatgtacaactcctgtgagggctggagtcttggggttcaggaggaggttagaagttacaggcatctcttcaggcttgcttggtacttggcacacacaggatggtgttttaaagagtgggctgcaccccccacacgccatttacatcagcttcataaacacttttcttcctccctgtaacttaaccttttttcccttttatgaagttgagaggctttatgaaataagtttgcattgcacatccgtgcagaaatctttctgactttgaaatttttaggacgtcagctgtcagatacgaaaggtagatatcaggtaagaatctggacttaggaaatagtcacaaaactgtcataggttgtaattttatcaacattcgcttctagtaaaattaaagtcaattaagaaatagaacttgggtcaaaattctgttacaaagcttcataatttgtcccgaagcatatggtggagcattctgagaaatttgctttttgtgtgtttgacattcctaatttgggagtccttcagctgaattactattcttttagaagttgagacagcaggtaagcaaaggacctagttcatgtaaacatggacatcatgatggctatttaaaaaatatttgttctacaccttctcccctgaggcttggggagtgtgttcagccgctgcagtttctctgctcatggaggtcttgtttggatctgtgctggcggctgagcatttagtgtgagccagtgacccatgaacttgccgctctgtgagggccagagtcagggccagtcatggtaatgggcctgaaggcacttccagaaccttttatgtctctcgtgagccatctgttaagaacgttcttcttggtgtggtttgtaggcctacctgtcgctattctgggaaaccttcttgagtgctatgcaaatgtgttcacaggcaatgggggtggtcctgagccttggggtgggcacctggtcagtgagtgtcttgcccttccccagctgggcatacagtaccttgctctttctggtggcatcatctggctgtgatgaatgaggtctaggaaataatttgcatgtgtcttgggggacacaacagtaacgagaggaaatacattattacagcaacttgcgacgtactaatacctgtcagtgttggcccccgtaaggtatgtaaggcacctgtgagtgccagtgagtgctggtgaaaggccaacatgtactagttatgtaagtattggtgtctgctttaaaaaaggagacccagacttcacctgtcctttttaaacatttgagaacagtgttactctgagcagttgggccaccttcaccttatccgacagctgactgttggatgtgtccattgtcgccagtttggctgttgcccggacaggacaggacctccattgggcgcagcagcaggtggcaggggtgtggcttgaggtgggtggcagcgtctggtcctcctctctggtgctttctgagagggtctctaaagcagagtgtggttggcctgggggaaggcagagcacgtatttctcccctctagtacctctgcatttgtgagtgttccctctggctttctgaagggcagcagactcttgagtatactgcagaggacatgctttatcagtaggtcctgagggctccaggggctcaactgaccaagtaacacagaagttggggtatgtggcctatttgggtcggaaactgcatgtttcagaaagtttgtctctttttcctactcattatttgaagaagagagagcctgtggggatagccttatcttggtccacaggactgaagtgaagtcacttgggaaggggagacagaggatgagcggcgtctgtgtagggacccccccccgggcctgcagaagggtggtgtgctcccaggactggcatgacaggtgtctcctcctcaccacaggctgtgcccatgagtccctgtgcagaccagtgggcaaggcagctgggccagatctcaggccagccgtttgtgctcctagcagggttgctgtgctggccacacggagaggccctagagagcctcatggattgtaactaaagaagaaacggttcctttttgtttttttaaaaatgatttttaaataccgttttttacaccgttctctcggtactttttttaagctaagtcagcattgtcttccagtgttaaaggcatccctcacctctgcattgaacttacgtatccatgccaaggaatggaatttccatcctgagccagttcagttaggtgtcaattgatactattttaattttttatgcaatctgatgagatgagctcagatttaaaaatctcaaaagcacgtttattgtaacaagaattgttatgtattaatactgcagttttcaataaagattgacttgtgttgcaacaagacaacagaccagaacgagaaaccaagagcgcactacggggggaagacagagatgaaagaacgagacaacgagtagacagcacactgaaagagagagaacgcccacaagaggagaacatacgtgccgagacagaacaaggaagacagcaacgaacgacgtactagggcaggaggcgagccacgagacactaaacaacgaaagcacacgcggcagatcaacaaaannn

SEQ ID NO: 19564 - DNA, 1064 bp, Homo sapiens
  misc_feature 1064: n = A,T,C or G
ccacgcgtccgcacagatccttgagctcacgctgcaggatagtacagttttaccgcagagggaatctggaacagtggaatcatgtgtctgccctgtgtattgcagtttgtattgccacaagctatatttataccagtgtcacccttttcttgtagaatatactaataatctgtgccaactctaccttctcacttttacctctgacgtcattctttttttctgaaagaggtaataattctagttttgatagactctgaggattatgtgaacaggacatttttcatttgtgaatttaatgctatactgtcaaggtacttgcttgtgtctgaactctagtgcacttatgattttgtagaccatgtgaaatttaataagatacgttttttttcctttctttgtgtgtagtgcagcaacagtttggtctgcatttgttagaagtttaactcctaacaacccaaagacctatttaacaattggtgcataaatgaaagtagtactgtatacttgaaactgtttaagtacaagttgaacaaaaattatgaaaaggtatatttgcttctcgggaaagcaaagaagctgctttaaaaaataaaaaggggactaaaaatttgttttgtataaagaggttagccctgcgcacgtaggactgaattcagtgatatccctatacactgccatttagtggataggttattgtacttccattcatactctgggcacttgtgttgtattgttctgttacatactttttttaacctgttttgttttatcatatatgcattaaaagtattatctttatcaacatttgctgctactgtgttaacatttttgttttgcttgccatgaatttcaacttccaccacccagtgaattgatttataaattgctatgctttgctgtttttctgttgctgtggaacttaaagaatgtgaaagctgtcaaagggtattttacgaatcacttttgtgtttgatatagtaaaacaatgtgattcattccaaagtaacagaaggttatttgtaagaaagttaaaggcttgtgaacgaagaaagctaagctgttgn

SEQ ID NO: 19565 - DNA, 1457 bp, Homo sapiens
  misc_feature 1455, 1456, 1457: n = A,T,C or G
gggagtcgacccacgcgtccggactctttcagccctcgcgcccgcccgtttgggaggagaagtctctatgcaattggccccggcccctccaccccccacccccggcataggaggcccccccacctcgcccggctcacacccccaaagggagggacccacattgcacacactgtaagaaatgcactttccgaggaaggggatgggggagcccggacacccagagctccccgagttgggggtgcccgtctggagcgcccccgtcagcccctggcggtgggaggtgagagcgagtggtttaagtgcctgattaccaccacccgcccccccctttgtccagctgggacacggaatggccgcgggcctcctccccctcccctccagcctctccaccagcccctccagtcaaccctcatcgccgtgccccccccagagctagagagatggggcccctgcgtggcccgaggggcagagctgggcgtcacttcgcaagcgtcctgccctgccggggcgcgggggtgggctctggggaagccggtgcgccccccacgcctccgctgccagtgccttacattctggagcgacccccctccctggtgcctcccagcgaagggggaccgccgtttgcactttcatcgcctaccccgacgcggggcccagctgcgggacgtgcatcacggctgggcccccagaggagagaggaggccgacgccagcggtccccgctcggaacggggagggttttcggggggttcggcgtcgcaccttggggccccccgcagccgtgtagggggcctcccatctgcgtaagcgtttttccgttgagccgctccaaaaacactaagctggggacgccaaggttgccacaagacgaaaacagagagaacaatggagcacacaaaacacacagaataaaacaccgcaacgccacaggaaaagacaacacgacacacaaagcccgaacaagacgagacagacgcaaaaggaacaacaaacacacacaaaaacggaaacaaacacagcacacaacaacaaaaacaaaccaaccaagaccaagacgagaaaaaaccaagaacaccgaccagcatgacaaacaggagaaaacgagcaggagcaggaacagacaaaacacaaaaagcaaagaagaaagccaggagagacaaaacgacgaccacacaacgacacacccagagcaagaagaacgaccagaaaaaacgacacagacacaagagggaaggggaaaaagacgagccgcccgaacaccgacagcgagaagaaagcggacacagacacgccccgaaggggcggcgcacaggcgcgcgcccaccgcgcgcagacaccgcaccaagccacaaaaacacacgaccacggacgacgggcgacccgccaaagcagacgccaacgcggcagacaagaggagagcagaacaaaaaagccagaagacgacaagagaccacannn

SEQ ID NO: 19566 - DNA, 1056 bp, Homo sapiens
  misc_feature 1038, 1039, 1040, 1041, 1042, 1043, 1044, 1045, 1046, 1047,1048, 1049, 1050, 1051, 1052, 1053, 1054, 1055, 1056: n = A,T,C or G
ccgcgtccgatagaacagctcaagccttgccacttcgggcttctcactgcagctgggcttggacttcggagttttgccattgccagtgggacgtctgagactttctccttcaagtacttggcagatcactctcttagcaggtaggtgccgcagaccctgcgggttaagaggtggggtggggggcagtgcttgccaaggccctaaactgggagcgctgggtgaggggaacaacccactttggagggttctctgagagatagatacaccccatatcctgggcccagctcgtgcacacagctggaggtccagagacccagtcccctctgctccgtcagccaagttccaagaagttgagcagagaccctctgggagcctggcggggtgcagcggcctcccctgcggggcctgtcacccggccggcgcgtgcaaacgcctctggcgcctctctgcgcggagggagataagcgtctgagccagggaaagcgcgggctaaacccgcctcgccggggcccctgcccgccctccgtgccccgcccgggcggtgcagctggcccgggtgctcacgctcgactctctttctcttttccagggtctgcgcttcgcagccgggatgaagctggtttccgtcgccctgatgtacctgggttcgctcgccttcctaggcgctgacaccgctcggttggatgtcgcgtcggagtttcgaaagaagtggaattgaagtcgttttgtttaacgctgtgtgaatataaagagtagtttgcagctgtgtggtagtggtttaatttgcagccttagctctgtggtgtctggctctagagttacttctttttaccaagcattttcagcctccattttgaaggctgtctacacttaagaagtcttagctgtctaatttttagagaataagattgttcattgcatttctgagtattatgtaacctatttttgcagaaggtactgttacattaagtgcatctgtgtatcctggtttaaaaaaatgtaatcttttttgaaataaaccttcatattctgtatagnnnnnnnnnnnnnnnnnnn

SEQ ID NO: 19567 - DNA, 3045 bp, Homo sapiens
  misc_feature 1, 2, 3, 4, 5, 3040, 3041, 3042, 3043, 3044, 3045: n = A,T,C or G
nnnnncgtccggtcaggtgccggaagaggaaacctctcgctggggctaggagttcggcggggcgcgcgccggcggctgcggagctggcaggtgcgaagcgtctgcacctggcgggcgatggcgcccgatgcgggcgccccgggatagcgtgggcgaggctgcggggccccggcgcgcacgcccgcacctctccccagccctggcgtgggcccagcccggcccaggcagcaatggggttcctgcagctgctggtcgtagcggtgctggcatccgaacaccgggtggctggtgcagccgaggtcttcgggaattccagcgagggtcttattgaattttctgtggggaaatttagatacttcgagctcaataggccctttccagaggaagctattttgcatgatatttcaagcaatgtgacttttcttattttccaaatacactcacagtatcagaatacaactgtttccttttctccgactctcctttccaattcctcggaaacaggcactgccagtggactggttttcatccttagaccagagcagagtacatgcacttggtacttggggacttcaggcatacagcctgtccagaatatggctatcctactctcctactcagaaagagatcctgtccctggaggctgtaatttggagttcgatttagatattgatcccaacatttacttggagtataatttctttgaaacgactatcaagtttgccccagcaaacctaggctatgcgagaggcgtagatcccccaccatgtgacgctgggacagaccaggactccaggtggaggttgcagtatgatgtctatcagtattttctgcctgagaatgacctcactgaggagatgttgctgaagcatctgcagaggatggtcagtgtgccccaggtgaaggccagtgctctcaaggtggttaccctaacagctaatgataagacaagtgtttccttctcctccctcccgggacaaggtgtcatatacaatgtcattgtttgggacccgtttctaaatacatctgctgcctacattcctgctcacacatacgcttgcagctttgaggcaggagagggtagttgtgcttccctaggaagagtgtcttccaaagtgttcttcactctttttgccctgcttggtttcttcatttgtttctttggacacagattctggaaaacagaattattcttcataggctttatcatcatgggattcttcttttatatactgattacaagactgacacctatcaagtatgatgtgaatctgattctgacagctgtcactggaagcgtcggtggaatgttcttggtagctgtgtggtggcgatttggaatcctctcgatctgcatgctctgtgttggactagtgctggggttcctcatctcgtcagtgactttctttactccactgggaaacctaaagatttttcatgatgatggtgtattctgggtcactttctcttgcatagctatcctcattccagtagttttcatgggctgcctaagaatactgaacatactgacttgtggagtcattggctcctattcggtggttttagccattgacagttactggtccacaagcctttcctacatcactttgaacgtactcaagagagcgctcaacaaggatttccacagagctttcacaaatgtgccttttcaaactaatgacttcattatcctggcagtatggggcatgctggctgtaagtggaattacgttacagattcgaagagagagaggacgaccgttcttccctccccacccatacaagttatggaagcaagagagagagcgccgagtgacaaacattctggaccctagctaccacattcctccattgagagagaggctctatggccgattaacccagattaaagggctcttccagaaggagcagccagctggagagagaacgcctttgcttctgtagatgcccaggggcttggtcagtgtgcctcagctttggagttcatgcctggagtggttcaacagtctctggtgcaagtctaataagagatcaggcatatatatctgttctttgcataatattatggtgcccttattgatatatggtaagggtgtactaggggattaggatgattgtaagagaatgagaaagatgaccaaaaggttggtggtagggaggctttttcttatttccaaatacttgagaaattaccttttggtttacaaatctatgatcaacttattccattaaatagatacattaaaaaaattaaaaactgattcttctgcagagcactggtgtttctttttataaccccttgaaacaagtctctcacctgagcctgtctaaactttcggagggagtttattattgagtctttatctgtgacagtatttggagatttagggatttgatacttaggcctttgaattttagaatacaaaaagagaagcaagccagacatggtggctcacacctgtaatcccaatactgggaagccaaggtgggagtatcgcttgagcccaggagtttgagaccgacatgggcaacatgacaagaccccatctctacaaaaaaattaaaaaattagccaggcatggtggcacatgcctactcccagctcccaaggagactgagatgggaggatccctggagccctgaagattgaggctacagtgagccttgattgtgtcactgcactccagcttgggtgacagagaccctgtctcgagaaataaaaaaacagaacaactttatttgtcttactaaaaggcagctggataattatagtgggctgcccttcttagttttattaaattagtcaaaaggttaccgtgggtttttcaggatttgtcaaactttgagggtggggaagtccatgtgaataacctctattcagttaaagttgaaaccaaaggtgcctgattggcctatgtgtaaagggagtgatagaattgttgaaatgagttatacaacaacaggggattcaagcccttataggataagagggtgaggaaagtatgtgacccattgaggcgagagggggaactatatttgannnnnn

SEQ ID NO: 19568 - DNA, 6954 bp, Homo sapiens
  misc_feature 1, 2, 3, 4, 5, 6, 7, 8, 9, 10, 11, 12, 13, 6953, 6954: n = A,T,C or G
nnnnnnnnnnnnncctcatttttaaacaacagtcgcacggaagttcccggcgggacaagggaacgtgggtgcccttgctactcccgtggacgcgggtagattgggacgctggaccgtatctccccgcccccgcccccacgcctcctcaggtgctcagcctgaggccttcgtccaggagcgctgccgctgacccaggctcaggagctgggggcccctgcacagacgcccaggtctcgggacaggcggcgactgcactcacggaagtacgctgagctctcccctgtagaagggcgcctctcctcccccacttcctcctccagctccacagcagcctcccgggccggctcctcctccttccaggtctcctcccagtgccgccgcggctctcaggcctgaggtgcggcgctcaccccggcagtccccagcctcagacgctgcgtggagcggcggagccggagggaagcaaaggaccgtctgcgctgctgtccccgccccgcgcgctctgcgcccctcgtccctggcggtcgctccgaagctcagccctcttgcctgccccggagctgtcccgggctagccgagaagagagcggccggcaagtttgggcgcgcgcaggcggcgggccgcgggcactgggcgcctcgctggggcggggggaggtggctaccgctcccggcttggcgtcccgcgcgcacttcggcgatggcttttccgccgcggcgacggctgcgcctcggtccccgcggcctcccgcttcttctctcgggactcctgctacctctgtgccgcgccttcaacctagacgtggacagtcctgccgagtactctggccccgagggaagttacttcggcttcgccgtggatttcttcgtgcccagcgcgtcttcccggatgtttcttctcgtgggagctcccaaagcaaacaccacccagcctgggattgtggaaggagggcaggtcctcaaatgtgactggtcttctacccgccggtgccagccaattgaatttgatgcaacaggcaatagagattatgccaaggatgatccattggaatttaagtcccatcagtggtttggagcatctgtgaggtcgaaacaggataaaattttggcctgtgccccattgtaccattggagaactgagatgaaacaggagcgagagcctgttggaacatgctttcttcaagatggaacaaagactgttgagtatgctccatgtagatcacaagatattgatgctgatggacagggattttgtcaaggaggattcagcattgattttactaaagctgacagagtacttcttggtggtcctggtagcttttattggcaaggtcagcttatttcggatcaagtggcagaaatcgtatctaaatacgaccccaatgtttacagcatcaagtataataaccaattagcaactcggactgcacaagctatttttgatgacagctatttgggttattctgtggctgtcggagatttcaatggtgatggcatagatgactttgtttcaggagttccaagagcagcaaggactttgggaatggtttatatttatgatgggaagaacatgtcctccttatacaattttactggcgagcagatggctgcatatttcggattttctgtagctgccactgacattaatggagatgattatgcagatgtgtttattggagcacctctcttcatggatcgtggctctgatggcaaactccaagaggtggggcaggtctcagtgtctctacagagagcttcaggagacttccagacgacaaagctgaatggatttgaggtctttgcacggtttggcagtgccatagctcctttgggagatctggaccaggatggtttcaatgatattgcaattgctgctccatatgggggtgaagataaaaaaggaattgtttatatcttcaatggaagatcaacaggcttgaacgcagtcccatctcaaatccttgaagggcagtgggctgctcgaagcatgccaccaagctttggctattcaatgaaaggagccacagatatagacaaaaatggatatccagacttaattgtaggagcttttggtgtagatcgagctatcttatacagggccagaccagttatcactgtaaatgctggtcttgaagtgtaccctagcattttaaatcaagacaataaaacctgctcactgcctggaacagctctcaaagtttcctgttttaatgttaggttctgcttaaaggcagatggcaaaggagtacttcccaggaaacttaatttccaggtggaacttcttttggataaactcaagcaaaagggagcaattcgacgagcactgtttctctacagcaggtccccaagtcactccaagaacatgactatttcaagggggggactgatgcagtgtgaggaattgatagcgtatctgcgggatgaatctgaatttagagacaaactcactccaattactatttttatggaatatcggttggattatagaacagctgctgatacaacaggcttgcaacccattcttaaccagttcacgcctgctaacattagtcgacaggctcacattctacttgactgtggtgaagacaatgtctgtaaacccaagctggaagtttctgtagatagtgatcaaaagaagatctatattggggatgacaaccctctgacattgattgttaaggctcagaatcaaggagaaggtgcctacgaagctgagctcatcgtttccattccactgcaggctgatttcatcggggttgtccgaaacaatgaagccttagcaagactttcctgtgcatttaagacagaaaaccaaactcgccaggtggtatgtgaccttggaaacccaatgaaggctggaactcaactcttagctggtcttcgtttcagtgtgcaccagcagtcagagatggatacttctgtgaaatttgacttacaaatccaaagctcaaatctatttgacaaagtaagcccagttgtatctcacaaagttgatcttgctgttttagctgcagttgagataagaggagtctcgagtcctgatcatatctttcttccgattccaaactgggagcacaaggagaaccctgagactgaagaagatgttgggccagttgttcagcacatctatgagctgagaaacaatggtccaagttcattcagcaaggcaatgctccatcttcagtggccttacaaatataataataacactctgttgtatatccttcattatgatattgatggaccaatgaactgcacttcagatatggagatcaaccctttgagaattaagatctcatctttgcaaacaactgaaaagaatgacacggttgccgggcaaggtgagcgggaccatctcatcactaagcgggatcttgccctcagtgaaggagatattcacactttgggttgtggagttgctcagtgcttgaagattgtctgccaagttgggagattagacagaggaaagagtgcaatcttgtacgtaaagtcattactgtggactgagacttttatgaataaagaaaatcagaatcattcctattctctgaagtcgtctgcttcatttaatgtcatagagtttccttataagaatcttccaattgaggatatcaccaactccacattggttaccactaatgtcacctggggcattcagccagcgcccatgcctgtgcctgtgtgggtgatcattttagcagttctagcaggattgttgctactggctgttttggtatttgtaatgtacaggatgggcttttttaaacgggtccggccacctcaagaagaacaagaaagggagcagcttcaacctcatgaaaatggtgaaggaaactcagaaacttaactgcagtttttaagttatgctacatcttgacccactagaattagcaactttattatagatttaaactttcttcatgaggagtaaaaatccaaggctttactgctgatagtgctaattggcattaaccacaaaatgagaattatatttgtcaaccttctccttataaataagttcagacatacatttaataacatagggtgacttgtgtttttaggtatttaaataataaaatttcaagggatagtttttattcaatgtatataagacaggtagtgcctgatttactactttatataaaatagtacctccttcagttactgtttctgatttaatgtacggaactttatttgttgttgttgttgttgttgttgttgttgttttaaagcagtccaaatttggaccttagcaatcatgtcttttgtataggtacttaatgttaatacatattacactacagtttacttttcagaatactaaagactttataactgcatgaacttggatttttttaatcactcatatggtagaattttataaacacatacatgataccatccaaattcttgcttttaataacaaaggtacaatattttgttttagtatgaaaatctggtagatcctattacacttctgtttatattaaatccacaatattttattacatttttaacttgtataaattttaggtcaaatccttcaagccaacctatactaaaaattagttccataatcacaaatggctcttttgtgtaattgtttaatttcacctgaatatcataatgcttaaagccatatggagttggaaattatttccaaagcatatttattccattgttttagtctggctatttacagtataaaaaaagcatttttattaaaatactgtgtagttctttgagatagttgcttatgcatatagtaagtattacattcttagagtagagcagagtttttagttagtattaatttattttcctccattcatgtacttttccttatatttccaaaactgttactgagaatgggtcaagatcagtgagaaatctttacagttgacaggaacctggaccccttaccccaactttatgagtaatgcttggaataaaaactcttaaggcaactcactgatttacttctagcaatagcatgatgttacaggaatattacctctgtttaagcaaggtaatgtgtaaaatcagtctcggctgtcagaataacttctaaaaggtatttttataagcagttcaagttactgaaaaccttttaaacctttctgaagttcgttagtataaattacttttctaggattattaataaaagccacataggtggcaagttgtagttttatatggctctgtagagtggtgaaccttctagaggaatatatgatttattcacagttcctcaaggcctggggatgatgatcagttatacctatttttgtgcaattacatcatgttgtacattagaaatggagagtttaatagctctttaactgctgtcctcattaggtaatgataaatatttcccttaaataattgactattttgctgtgttttaaaaatgattgaaatttatcttgccatatctcataatttcatgcacaagttgactgagctaatcttgagaatatattcgtaaaataggagcacatttagttgaggtatacaaggtaggactctagacaaaaccttctattttagctttagtgaatttcaaaagtaatgggtcttggagtatagatttttattagtagcttgaaagagcttaatcatatgcagtaagtatttttattaccaataaatttaaaattttttaagaaaaatatttttatcctagggccaagtgttgcctgccaccaatcagtaagttagtctataacaaattttaccctaacagttttaccacctagtaacagtcatttctgaaaatatgttggatagaaagtcactctttggcaaaagtgttagaatttgcttttgtgccatctattccttttatggcatctatcttgaaagtaatcttgtattggagattgaaagatgctgtaatttagaaattaacatgatatcttaaattacctttatgaaatatagttttgtataatagcatagattttccttcaaaaaatgaacatttatatatctacaaaaatatggagaagagtaatttgaaagcctactttctgaagaaaatggtgggattttttttatcatgattaaatatcaaaaaattgccctatgaaaactttaaatctctaaaacatttgaaatactaccatatttgtgatttattgagaataaaaatccattttgaaatgtaaaatttttatgatctgattcagttttaagaaaacatgaatgaactagaagatattaaaaacatttgacattggtaagaaatattgatactgatattgatttttatataggtatttatttcagaattgatattttgagaaaaatacatgtgagtcattttttctgtttctcttttctcttaacgattatcactgtaattctgaatctgaaaggtaaaacaattagtcaaaatattattgccatcattctacctgtgttatgaaactacttattcatagttaattctcattaacacttacatttccataaagaaaactcaagtattaataaaagagactttactggcttaagagggctgtgaaagatttttgatagtgaatcatgaccctaagggagagatttgtgtgataaaagtattgtatataatagatcagcgatttttgtaaggcaaacagaatttgtaagttggcagatcttcctaagttgcaaaatgtaatgatgagcttggtggagaagaatgagtcgttcttggaatacctatgtgcagccactacccatctcaatgtcaccttgtttgcattcttggatagcttgtatatgtagtagtttgatgaataatttaaagaaaaacacctaaaatttgaaaaatgattgtaggatcaaaaaaggcagatgaaattacttaatactcaacagtgttttgggagacgatccttaaccggcgctcgctggtcagacgtcacactcgtccctggacaatgctatttcctcacccgaatttagacnn

SEQ ID NO: 19569 - DNA, 1600 bp, Homo sapiens
  misc_feature 1, 1590, 1591, 1592, 1593, 1594, 1595, 1596, 1597, 1598,1599, 1600: n = A,T,C or G
nccgccggcccaggcgcctccgagttccccgccaggactcggagggccaggagggcgcgacctgggtggatatttttgttggacggcgcaactcttggggtggcccgggagcggcggaaaccgagcgagagaaccaggaggcgctgcgcagaaggaggcccgggggctccgaggcgttgaggggctcgatctgcgttctggggttggcagccgagaggccgcggtccctgagtgccagaggtggtggtgttgcttatcttctggaaccccatgcagccagatcccaggcctagcggggctggggcctgctgccgattcctgcccctgcagtcacagtgccctgagggggcaggggacgcggtgatgtacgcctccactgagtgcaaggcggaggtgacgccctcccagcatggcaacctgcaccttcagctacaccctggaggatcataccaagcagtcgcctttgaggcattccaatttggacaccgggagcggcctttggccggggccttccaaggaccccaggagcaaggcttagtgtagacgtcacacttgcacggtcaagtaccatggattgcaccaggcctgcccaagttcatggcccacaaggtggtgctggcctcatccagccctgtcttcaaggccatgttcaccaacgggctgcgtggagcatgggcatggcaggctggtgtcattgagggtatcaccccaaggtcatggagcgcctcattgaattcgcctacacggctccatctccatgggcgagaagtgtgtcctccacgtcatgaacggtgctgtcatgtaccagatcgacagcgttgtccgtgcctgcagtgacttcctggtgcagcagctggaccccagcaatgccatcggcatcgccaacttcgctgagcagattggctgtgtggagttgcaccagcgtgcccgggagtacatctacatgcatttggggaggtggccaagcaagaggagttcttcaacctgtcccactgccaactggtgaccctcatcagccgggacgacctgaacgtgcgctgcgagtccgaggtcttccacgcctgcatcaactgggtcaagtacgactgcgaacagcgacggttctacgtccaggcgctgctgcgggccgtgcgctgccactcgttgacgccgaacttcctgcagatgcagctgcagaagtgcgagatcctgcagtccgactcccgctgcaaggactacctggtcaagatcttcgaggagctcaccctgcacaagcccacgcaggtgatgccctgccgggcgcccaaggtgggccgctgatctacaccgcgggcggctacttccgacagtcgctcagctacctggaggcttacaaccccagtgacggcacctggctccggttggcggacctgcaggtgccgcggagcggctggccggtgcgtggtgggcggggctgttgtacggcggggcggaggaacaactcgccgagggaaaaccgaatcagcgcctggaggtacacccatgaacaatcagggtcgcctggcccatgaacgggcccgaacgatcccggggggctcgtggcccttagcggggggcccggtgccccaccgnnnnnnnnnnn

SEQ ID NO: 19570 - DNA, 495 bp, Homo sapiens
  misc_feature 1, 494, 495: n = A,T,C or G
ncgtccgcttttaagaccgggaagactttaaaagccagtttacgtacagaagcatggttttagattaactgcctgttggtacagctagaaacattgcagccctatcgcttatttatcttgcatgttgctctgctttgctatgaaaaatatcgttttatgataaaacttgttgaattttgatatgtattcggttatactcttagggaaaataatagaaattagagtgagagaaagtgctatgtatattaggctttcagattttatagatataggcttaagggagggtggaggttctttttttaagttgaatgactacttaaatttgttgatgtgaatttaagttttaaagattattattaattaactcttctctttgtctttgcatttaccttcccagatgttccagcctatcattttacttattctcattcttgtattattttcatcactttcttacacaacaatatttaaacttgtctttcttttaacactgnn

SEQ ID NO: 19571 - DNA, 3051 bp, Homo sapiens
  misc_feature 1, 2, 3, 4, 2905, 2906, 2907, 2908, 2909, 2910, 2911, 2912,2913, 2914, 2915, 2916, 2917, 2918, 2919, 2920, 2921, 2922,2923, 2924, 2925, 2926, 2927, 2928, 2929, 2930, 2931, 2932,2933, 2934, 2935, 2936, 2937, 2938, 2939, 2940, 2941: n = A,T,C or G
  misc_feature 2942, 2943, 2944, 2945, 2946, 2947, 2948, 2949, 2950, 2951,2952, 2953, 2954, 2955, 2956, 2957, 2958, 2959, 2960, 2961,2962, 2963, 2964, 2965, 2966, 3041, 3042, 3043, 3044, 3045,3046, 3047, 3048, 3049, 3050, 3051: n = A,T,C or G
nnnncagggtgagagttccccatctgaggcgtttgttgcagctacctgcacttctagatgctccccaggtgttccccatctgaggcgtttgttgcagctacctgcacttctagattcatcttcttgtgagccctgggcttaggagtcaccatggcaactgaagagttcatcatccgcatccccccataccactatatccatgtgctggaccagaacagcaacgtgtcccgtgtggaggtcgggccaaagacctacatccggcaggacaatgagagggtactgtttgcccccatgcgcatggtgaccgtccccccacgtcactactgcacagtggccaaccctgtgtctcgggatgcccagggcttggtgctgtttgatgtcacagggcaagttcggcttcgccacgctgacctcgagatccggctggcccaggaccccttccccctgtacccaggggaggtgctggaaaaggacatcacacccctgcaggtggttctgcccaacactgccctccatctaaaggcgctgcttgattttgaggataaagatggagacaaggtggtggcaggagatgagtggcttttcgagggacctggcacgtacatcccccggaaggaagtggaggtcgtggagatcattcaggccaccatcatcaggcagaaccaggctctgcggctcagggcccgcaaggagtgctgggaccgggacggcaaggagagggtgacaggggaagaatggctggtcaccacagtaggggcgtacctcccagcggtgtttgaggaggttctggatttggtggacgccgtcatccttacggaaaagacagccctgcacctccgggctcggcggaacttccgggacttcaggggagtgtcccgccgcactggggaggagtggctggtaacagtgcaggacacagaggcccacgtgccagatgtccacgaggaggtgctgggggttgtgcccatcaccaccctgggcccccacaactactgcgtgattctcgaccctgtcggaccggatggcaagaatcagctggggcagaagcgcgtggtcaagggagagaagtcttttttcctccagccaggagagcagctggaacaaggcatccaggatgtgtatgtgctgtcggagcagcaggggctgctgctgagggccctgcagcccctggaggagggggaggatgaggagaaggtctcacaccaggctggggaccactggctcatccgcggacccctggagtatgtgccatctgccaaagtggaggtggtggaggagcgccaggccatccctctagacgagaacgagggcatctatgtgcaggatgtcaagaccggaaaggtgcgcgctgtgattggaagcacctacatgctgacccaggacgaagtcctgtgggagaaagagctgcctcccggggtggaggagctgctgaacaaggggcaggaccctctggcagacaggggtgagaaggacacagctaagagcctccagcccttggcgccccggaacaagacccgtgtggtcagctaccgcgtgccccacaacgctgcggtgcaggtgtacgactaccgagagaagcgagcccgcgtggtcttcgggcctgagctggtgtcgctgggtcctgaggagcagttcacagtgttgtccctctcagctgggcggcccaagcgtccccatgcccgccgtgcgctctgcctgctgctggggcctgacttcttcacagacgtcatcaccatcgaaacggcggatcatgccaggctgcaactgcagctggcctacaactggcactttgaggtgaatgaccggaaggacccccaagagacggccaagctcttttcagtgccagactttgtaggtgatgcctgcaaagccatcgcatcccgggtgcggggggccgtggcctctgtcactttcgatgacttccataagaactcagcccgcatcattcgcactgctgtctttggctttgagacctcggaagcgaagggccccgatggcatggccctgcccaggccccgggaccaggctgtcttcccccaaaacgggctggtggtcagcagtgtggacgtgcagtcagtggagcctgtggatcagaggacccgggacgccctgcaacgcagcgtccagctggccatcgagatcaccaccaactcccaggaagcggcggccaagcatgaggctcagagactggagcaggaagcccgcggccggcttgagcggcagaagatcctggaccagtcagaagccgagaaagctcgcaaggaacttttggagctggaggctctgagcatggccgtggagagcaccgggactgccaaggcggaggccgagtcccgtgcggaggcagcccggattgagggagaagggtccgtgctgcaggccaagctaaaagcacaggccttggccattgaaacggaggctgagctccagagggtccagaaggtccgagagctggaactggtctatgcccgggcccagctggagctggaggtgagcaaggctcagcagctggctgaggtggaggtgaagaagttcaagcagatgacagaggccataggccccagcaccatcagggaccttgctgtggctgggcctgagatgcaggtaaaactgctccagtccctgggcctgaaatcaaccctcatcaccgatggctccactcccatcaacctcttcaacacagcctttgggctgctggggatggggcccgagggtcagcccctgggcagaagggtggccagtgggcccagccctggggaggggatatccccccagtctgctcaggcccctcaagctcctggagacaaccacgtggtgcctgtactgcgctaactcctgattaatacaatggaagtttctgggcatttacaatttcaaaaaaaaaaaaaaaaaaatcgagactagnnnnnnnnnnnnnnnnnnnnnnnnnnnnnnnnnnnnnnnnnnnnnnnnnnnnnnnnnnnnnnggggggccgctaaactattcaaaaaaaaaaaccccccaacctccccccgaaacctaaaccttaaaaaaaatccannnnnnnnnnn

SEQ ID NO: 19572 - DNA, 900 bp, Homo sapiens
  misc_feature 1, 2, 899, 900: n = A,T,C or G
nnctacaggagggtagcctgcccctgctaccctgggagaagcctcagctttctgggcagagtttgtctccctgtcatttatactctcaggctttatacatttacacagtaagttctccctcctggagggttaaaaggaataatttcaacagggtgaaggcctggcacggtggctcacaactgtaatccaaggactttaggaggctgaggtgggtggatcacctgaggtcaggaattagagaccagcctggccaacttggtgaaaccctgtctctactaaaaacaaaaattagccaggtgaggtggcacacacctatagccccagctactgggggaggctgaggcaggagaattgcttgaacctgggaggcagaggttacagtgagctgagatggcaccactgcactccagcctaggtgacaaagcagcaagacgcagtctcaaaacaaaacaacaacaacaaaaaaaaacgggaaaacaggtacagacaatagctgcctggagttgtacagaaacttgattgggtaaccctggacctttccaggctgtggccagcagttgaccctgcctgcctttcctccattgttttcccatgtctgaccttccctgttgcaaagcagtggcctactacagggtctctctggagggagcaaggaggctcagtggccccattcagcaattcgaagtccctttaattgttttgtgcttccaacctgttttgttcccgttcagatttctctcgccttccaataaaaacttccctgtcctgtgcccaaaaaaaaaaaataaaacaaaaacaaaaacaaaagggcgcggcaaaattcacggggcattacaccctttaaaggccaaggatataaacacgcgggaaacgggaagatgttggagcttctggttgann

SEQ ID NO: 19573 - DNA, 3359 bp, Homo sapiens
  misc_feature 3348, 3349, 3350, 3351, 3352, 3353, 3354, 3355, 3356, 3357,3358, 3359: n = A,T,C or G
cgcgtccgcccacgcgtccgggcggctacctggagccggaagcgcggctgcagcagggcgaggctccaggtggggtcggttccgcatccagcctagcgtgtccacgatgcggctgggctccgggactttcgctacctgttgcgtagcgatcgaggtgctagggatcgcggtcttccttcggggattcttcccggctcccgttcgttcctctgccagagcggaacacggagcggagcccccagcgcccgaaccctcggctggagccagttctaactggaccacgctgccaccacctctcttcagtaaagttgttattgttctgatagatgccttgagagatgattttgtgtttgggtcaaagggtgtgaaatttatgccctacacaacttaccttgtggaaaaaggagcatctcacagttttgtggctgaagcaaagccacctacagttactatgcctcgaatcaaggcattgatgacggggagccttcctggctttgtcgacgtcatcaggaacctcaattctcctgcactgctggaagacagtgtgataagacaagcaaaagcagctggaaaaagaatagtcttttatggagatgaaacctgggttaaattattcccaaagcattttgtggaatatgatggaacaacctcatttttcgtgtcagattacacagaggtggataataatgtcacgaggcatttggataaagtattaaaaagaggagattgggacatattaatcctccactacctggggctggaccacattggccacatttcagggcccaacagccccctgattgggcagaagctgagcgagatggacagcgtgctgatgaagatccacacctcactgcagtcgaaggagagagagacgcctttacccaatttgctggttctttgtggtgaccatggcatgtctgaaacaggaagtcacggggcctcctccaccgaggaggtgaatacacctctgattttaatcagttctgcgtttgaaaggaaacccggtgatatccgacatccaaagcacgtccaacagacggatgtggctgcgacactggcgatagcacttggcttaccgattccaaaagacagtgtagggagcctcctattcccagttgtggaaggaagaccaatgagagagcagttgagatttttacatttgaatacagtgcagcttagtaaactgttgcaagagaatgtgccgtcatatgaaaaagatcctgggtttgagcagtttaaaatgtcagaaagattgcatgggaactggatcagactgtacttggaggaaaagcattcagaagtcctattcaacctgggctccaaggttctcaggcagtacctggatgctctgaagacgctgagcttgtccctgagtgcacaagtggcccagtacgacatctattcgatgatggtggggactgtcgtggttttggaggttctcaccctgctcctgctcagcgtcccacaggcactgcgcagaaaggctgagctggaagtcccactgtcatctcctgggttttctctgctcttttatttggtgatcctggttctttcggccgttcacgtcattgtgtgcacctcagctgaaagttcgtgctacttctgtggcctctcgtggctggcggcaggtggggtgatggtgctggcctcggcgctgctgtgtgtgattgtgtctgttctgaccaacgtgctcgtgggtggaaacaccccaaggaagaaccccatgcatcccagctcaaggtggtcagagctagaccttcttattctgttggggacggcgggccacgtcttgagcctgggcgccagcagcttcgtggaggaggagcaccagacctggtacttccttgtgaacaccctgtgtctagctctgagccaagaaacctacagaaactactttctgggagatgacggtgagcctccgtgtggcctctgtgtggaacaagggcatgacggggccacagcagcgtggcaggacgggcctggctgtgatgtcctggagcgagacaaaggccacggaagcccctctacctccgaagtgctcagaggccgcgagaagtggatggtgctggccagtccgtggctaatactggcctgctgccggctgctgcgctccctaaaccagacaggtgtgcagtgggctcaccggcctgacctcggccactggctcaccagctctgaccacaaagccgagctctctgtcctggctgccctctccctcctcgtagtttttgtgctggtgcagagggggtgctcccctgtgtccaaggctgccctggcgctggggctgctgggcgtctactgctaccgggcggccatcgggagtgtccggttcccgtggcggccggacagcaaggacatttccaagggtattattgaagctcgttttgtttatgtctttgtccttggcattctgttcacgggcaccaaagacttacttaaatctcaagtcattgctgcagacttcaaactcaagactgtaggtttatgggagatatatagtggattagttcttctggcagccttgctctttagaccacataatcttccggtcttagcatttagcctcttgattcagactctaatgactaaattcatctggaagcccctgagacacgatgcagctgagattactgtgatgcattattggtttggtcaagcattcttctattttcagggcaactccaacaacattgccaccgtggacatctccgcaggcttcgtgggcttagacacctacgtggaaatcccagccgtgctcctgacagcgtttgggacgtacgcagggcctgtgctgtgggccagccacttagtgcacttcctgagctcagaaacacgcagtggttcagcactgagtcatgcttgcttctgctacgcactgatttgttctattccagttttcacgtacatcgttttggtgacatctctgcgttatcatttatttatatggagtgtattttctccaaaacttctctacgagggaatgcacctgctcattacagctgctgtctgtgtattcttcacggcaatggatcaaaccagactcacacagtcttagactaagctgaacactggaaaaataatacatgcttaaagtctgctgttattctaaaatgaaagatatgaattcaacaaagttgatggataactttctttgactgctctacctgaatttagactaagcagtaaatagtttaataaaagatcactttaatataaaaaaaaaaaaaaaaaaaaaaaaaaaaaaggggactcttcagggacttgtgtactggttatggggtgcagacgggggcttgggggggggggccgggaaaaaaccttggaaaaaaacccttgaacccgaannnnnnnnnnnn

SEQ ID NO: 19574 - DNA, 2537 bp, Homo sapiens
  misc_feature 1, 2515, 2516, 2517, 2518, 2519, 2520, 2521, 2522, 2523,2524, 2525, 2526, 2527, 2528, 2529, 2530, 2531, 2532, 2533,2534, 2535, 2536, 2537: n = A,T,C or G
nacgcgtccgcttatatcaataaagaatgagatacttgactggatttttgtataactgcttcctgcctccttccaaactgactgcaagagagaaatttagctgtttgatttacttagaaccaaatggattacaagtggattattcatcttttgggtatatttttactatctattcaaagccaaagtgattttcatttaattgtaataataactgacaaaaatcagtatgttgtagctaatatgttttatgcatgagaattattcttaaagtttgttctccctgtttattacacagatcaggaatagatttgttcagttcagtatttattggataccctctattggtcaggcattgtgttaagcatatgtgaatcaaaatgaacacaactttttcctttgagtctgatacagtgaaggagataaacacttctacaacttaaatttaattttaatagcagtagaagagaacataaggaatagaggttaattttacccagaagcaggatagagaaaatattacagagaaaatcacatatcacatgggctcgaaagatgtagaggtttttgacaaatgaagaacaaccataacaggtagagggaacaccatgaaccagggcatgaaactgaagtgcataacatattctagagagagaagggtgtgggcatgagttagggctggaaaaacaggttggaaacagataagtaagggtctcaaatgcaatgtcaaagagcttgcagtttattttccaggcaatgagtaggcagccaaaaaaaaaaaagtaaggatgtgttttttttttttcccatggcatcatatttaagaggatggatttaaattgtgtgagaccaaagcatagagactagataagaggcgatcaaaatatttcaaaaagaaataatgaagatccaatgaaggaagtggaaattaaaatagggaagagagtagatggattagagagacatttaagagatggaatcaatagatcctgttactagataatggaagtaagaggtgaggaagagtggaaaagtcattaatgactctaagatttctgcttggctgcttaccaagattggcaacaaagggagggagaaggtttggaaaaagagagaaggataatgagtttgactttacatagaatgaagggcatccagatagaaatctttggttaataattagaaatatagacctagaaattaggaggaaacctgagacagagacaaatatttcaaagcttacaatacagagatgatacctgattctattggagcaggtttgatcatctaggcagaaattaggatgagaaaaaaggagatccaataatacaaccttatagtcacagaagtaagaaaaaaagggtagttgttttgaagaagccaggataggtgtggaaagtactcaaaaagaaatcttcagggataaaataaagtgataatttaaaagaaatcaatggattaaacatattgaaactgttctataggcagtggtcattgagtcagctttcagtgcattaggaagaagatgcataggtgtcaactcttttctgacagcatttactagagaagagaaaaagctggggactacatcttcaaggaagggactttttttggatgagcagttttgagtgtgtttgtcagttaaagagaggaattaggttggttttcatttgggaaaaattgtatatatatttaatgtaagttatcacattgcatcttaaaaatattcttatttaatacatatatttcctacatgtatatgtggtagcatgatagcaaataacatttgtttggtatttccaaaggactttcatgtacattgcctcattttacctttacagctactctgaaatacacaggcattatcccttttattcagctgagaaaactgagcttcattgaggtggaggtcaaaaatcacaaaatttgtgatgaattaagatttgaacatatgttttgtgactccagttttcctttcagattttaaaattaattaaagggatcttcattatacttttattgttaactttttgttaacataatttattcatacattcagtgaaaattttgttgaggtactgggacaggttaaaaaatacagttgtagccctcaggatatttaatatccagtgaaaagtgacagtcagtaaaccaacaatctcaatactttgatatatgttgtgaggttgtgataaccgattcttgtttagtttaattctatatctcccttagaccagtgttaaatttaaataaaacacctcattttttccaattcagggaaggcactaaacataaagcataggatagaaatgttgaactcatccaaaatattattttgtttaatgaaaatgatgaagattaaggaatacttccatgtattgagtaaggttgataattttctaattcttcactgtgcattattttgtttgaagttggtaaatttggagtatcctgcagacacattttgctttatgtactacaacattctacaaccaaataaaaattattttgattatcnnnnnnnnnnnnnnnnnnnnnnn

SEQ ID NO: 19575 - DNA, 446 bp, Homo sapiens
  misc_feature 438, 439, 440, 441, 442, 443, 444, 445, 446: n = A,T,C or G
cgtccggtttattgtctcagattcttcagctgtactggaaatgtggtgccggcatctgcttctgacggagtctcactctgtcgctcaggctggagtgcagtggcatgatctcggctcactgcaacgtccgcctcctgggttcaagccattcttctgcctcagcctcccgagtaggtgggactacagtggccatgtgtctgagatctaaccaagggaacatgggtggaactgatgtaagccactttgacaccacaaaacctcccatgggttctctctcttcttctctggtgtacttgttggatggagaagatgctgagaaatagtgggaagtcctaggggatggaagaacccaggattctgaatactccattggaccttacgtttttggaatcaggatgatgctgggcctcataaaatgagttatggagaagtccctcnnnnnnnnn

SEQ ID NO: 19576 - DNA, 477 bp, Homo sapiens
  misc_feature 476, 477: n = A,T,C or G
gcgtccggtgagcgccccgcccgctcagccgccagatcaaccttagcgctggggcgcgggctggggtcgccaggcggtgcgttctgcccgcgcggggctgagagttaggggccggggccggatccggggccgggggtcgcgccgctagccgccagcagcgcagtccgggccgccaccctgcaccctccgccctgtttctgcacccgtctgggttcttgtgccgccgcccgcaagccttcccgagctcagggtggtgagctgcggagacccgtgataattcgttaactaattcaacaaacgggacccttctgtgtgccagaaaccgcaagcagttgctaacccagtgggacaggcggattggaagagcgggaaggtcctggcccagagcagtgtgacacttccctctgtgaccatgaaactctgggtgtctgcattgctgatggcctggtttggtgtcctgagctgtgtgcaggccnn

SEQ ID NO: 19577 - DNA, 5261 bp, Homo sapiens
  misc_feature 1, 2, 3, 4, 5, 6, 5250, 5251, 5252, 5253, 5254, 5255, 5256,5257, 5258, 5259, 5260, 5261: n = A,T,C or G
nnnnnnatgagctgatagggttcccaggctgcctggagttacataacccattgtgcttccaggacagctcacaatcttaggatttgccctaacaagcaaactcagaaaactgctgaggaaggcacgggagggtggctgtgcgaggtactgccggggctgagctctcatggaggctctctctgttctctgaagtgcctttggagtttatgtctgcacatggcattggtttttcaattcgggcagcccgtcagggctcagcctctgccaggactctgccacggcaagctcattcggacaaacgcctgtgatgtgtgcaacagcaccgatcttccggaagtcgagatcattagcctgctggaggagcagctgccccattataagttaagagccgacaccatctacggttatgaccacgacgactggctccatacacctctcatttctccagatgccaacattgacctcacaaccgagcaaattgaagagacgttaaaatacttccttttatgtgctgaaagagttggccagatgactaagacatataatgacatagatgctgtcactcggcttcttgaggagaaagagcgggatttagaattggccgctcgcatcggccagtcgttgttgaagaagaacaagaccctaaccgagaggaacgagctgctggaggagcaggtggaacacatcagggaggaggtgtctcagctccggcatgagctgtccatgaaggatgagctgcttcagttctacaccagcgctgcggaggagagtgagcccgagtccgtttgctcaaccccgttgaagaggaatgagtcgtcctcctcagtccagaattactttcatttggattctcttcaaaagaagctgaaagaccttgaagaggagaatgttgtacttcgatccgaggccagccagctgaagacagagaccatcacctatgaggagaaggagcagcagctggtcaatgactgcgtgaaggagctgagggatgccaatgtccagattgctagtatctcagaggaactggccaagaagacggaagatgctgcccgccagcaagaggagatcacacacctgctatcgcaaatagttgatttgcagaaaaaggcaaaagcttgcgcagtggaaaatgaagaacttgtccagcatctgggggctgctaaggatgcccagcggcagctcacagccgagctgcgtgagctggaggacaagtacgcagagtgcatggagatgctgcatgaggcgcaggaggagctgaagaacctccggaacaaaaccatgcccaataccacgtctcggcgctaccactcgctgggcctgtttcccatggattccttggcagcagagattgagggaacgatgcgcaaggagctgcagttggaagaggccgagtctccagacatcactcaccagaagcgtgtctttgagacagtaagaaacatcaaccaggttgtcaagcagagatctctgaccccttctcccatgaacatccccggctccaaccagtcctcggccatgaactccctcctgtccagctgcgtcagcaccccccggtccagcttctacggcagcgacataggcaacgtcgtcctcgacaacaagaccaacagcatcattctggaaacagaggcagccgacctgggaaacgatgagcggagtaagaagccggggacgccgggcaccccaggctcccacgacctggagacggcgctgaggcggctgtccctgcgccgggagaactacctctcggagaggaggttctttgaggaggagcaagagaggaagctccaggagctggcggagaagggcgagctgcgcagcggctccctcacacccactgagagcatcatgtccctgggcacgcactcccgcttctccgagttcaccggcttctctggcatgtccttcagcagccgctcctacctgcctgagaagctccagatcgtgaagccgctggaaggttccgccacacttcaccactggcagcagttggcccaacctcaccttgggggcatcctggacccccggcccggtgtggtcaccaagggcttccggacgctggatgttgacctggacgaagtgtactgccttaacgactttgaagaagatgacacaggtgaccacatttctctcccacgcctagctacctccactccagttcagcacccagagacctcagcgcaccatcctgggaagtgcatgtctcagaccaactccaccttcaccttcaccacctgtcgcatcctgcatccttcagatgagctcactcgggtcacaccaagccttaactcagccccaactccagcttgtggcagcaccagccacttgaaatccacgccggtggccacaccatgcactccacggagactgagcctggctgagtccttcactaacacccgtgagtccacgaccaccatgagcacatccctggggctcgtgtggctgttgaaggagcggggcatttctgctgccgtgtacgacccccagagctgggacagggccggccggggctccctcctgcactcctacacgcccaagatggctgtgatcccctctactccgccgaactcgcctatgcagacacccacatcctccccaccctcctttgagttcaagtgcacgagccctccctacgacaatttcctggcttccaagccagccagctccatcctgagggaagtgagagaaaagaacgtccgcagcagcgagagccagaccgacgtgtccgtctccaacctcaacctcgtggacaaagtcaggaggtttggggtggccaaagtggtgaactcagggcgagcccatgtccccaccttgactgaggagcagggacccctcctctgtgggcccccggggccagcaccagcccttgttcccagaggcctggtacctgagggcctgcccctcagatgccccactgtcaccagtgccatcggtgggctgcagctcaatagtggcatccggcggaatcgcagcttccccaccatggtgggatctagcatgcagatgaaagctcctgtgactctcacctcgggcatcttgatgggtgctaagctctccaaacaaactagcttacggtgaggactggaggggggccggttgccctagaggagacccacgttctcctctcttgctcccacctccctctcttccccccacagtgcactccctccctctgcccttctctgtccaccccctcctaagctagacaaatcaacctcgtgcctaatggaggaagtgtggaaactttgtaaaatgtgtacataggacttggagaccttgtgtccgccctgctctttcttccgatcccacaggaagtgcccctgcactgtcatcactctcacgaggacgtcacctgtgctaacctgggggaaggtggggtcctttcttctttccttttgagaagcactgaaactcccaagtgtgttcttatcccatggataggaaaccagtgaattccgtggctggcacaccacgagctgtcacgcggcacgggtcataacacatctgggtgtcatcggacacctcacctcgcccaccctgtaggagcgtaaggagcctccatcctcagccacgtgcagctgacgtggctttcctgatcggagggcttttcttttatgggtggcccagcttcttcaagaccttcactgctctgcctcagtggacagtcgtttcttttttgaggtgtgaccttttgttttcatgccttccccttgaagtcatcctgtgttttgtaatcagctgtcaggccaaatgtctgacccgaaagagaatgtatttacactcatgctgcgttgttcagcagcccctctgtgttctgtgtgatttgttttatttttccttttttttacatatatatgcagggaagtaatggtactggtagtgtatgttttctatgtggttcaaatatgaatttcgaacacaccaagccgctaatgagatagcagcttttttctgggacccagagtcacaaccaaattgatttaagaccggacccaagacacctttaacaataggactgaaaggaaaaaggatagggaaaaagcttattaaagaaatgtgtcaacaccaaatgtagaggggaagaaccacaaccaggcataataccaaaccggttccagggggaaacaaggctttggtattccgctggctccagcgctttttctgaaacccgaggctggccagggtgctgtcaccatgcggtctttgattgcagccattcaatgcccacatgcttttccttcttgtttcagaacagcacatggtcacaacaagatattttctttccctccaaagccttttgtctccttgtgcctctttttatccttaggaaaagatccaggtgcttgtgaaaagaatcatgaatgcaacaagggaggctggtcctgttgctgtcgccgattaagttttaaacttttatttattatttatgtctgccgtattttaaataaacattctcgttccttccagttccagtcatagtgtgtctgtggcattccagtccaaccatgtgacttatttattctaatttgagggctgcactgtacaccatggtgtcctgtgacaccgtgttccagacatttatggaaggaaaacatcccatataaatgaaactgtcatgctgtgtcctccccggcagcagaagatgtgtccttccattgagtgagggtaaccttatgtccaccaaggatactttgagaaagcccctaaggaacaagcctcagtcccacggtttcagactatttattctctgaacacaagagtattggttaattatgttctcagctctccctgctgttgtatgtgtgcattcactgcaagtaacttatatctttttatttgaatgtattttaaagcagtagatagaataacaaaggaatatgaaaaccatggactgaatggaccattttatgtattcagagagagaagccactcatcattgccagaaataccatgtaaaaattggcagttcagaggttgcaatacttagtatagtaaataaataaacggtcaacattgtgcaaccactaccaaaaagtgtgttgtaatgcatcaaaaatcaacacaattttattcactaatgagtatcaataaaataagttcaaatgatggaaaccacactggtattctgatttgtattttgtttttatcttttcatcaaggagacgatctctttatgtaagacttgaaagtgtttagctctttgcaaaattaaatgaaaggcatatctttaaaaaaaaaaaaaaaaaaacnnnnnnnnnnnn

SEQ ID NO: 19578 - DNA, 1283 bp, Homo sapiens
  misc_feature 1, 2, 1279, 1280, 1281, 1282, 1283: n = A,T,C or G
nncgtccggaattccagttgtggatgaaggaaatggtgttatgactgcctcaggttttgtagcaagtcatagggaaccaaaagaggaatcttgttttcctcagaggtcatgccaactccaactcccgttccctaaactgtctctgagccatagactagtaatggactcttcaagctctaccattaggtatcttttaaagaaagctggttattactatttattcatttttttctcttctgtgcagtgcaaaagatatgaaacatcggctaggtttcctgctgcaaaaatctgattcctgtgaacacaattcttcccacaacaagaaggacaaagtggttatttgccagagagtgagccaagaggaagtcaagaaatgggctgaatcactggaaaacctgattagtcatgaatgtgggctggcagctttcaaagctttcttgaagtctgaatatagtgaggagaatattgacttctggatcagctgtgaagagtacaagaaaatcaaatcaccatctaaactaagtcccaaggccaaaaagatctataatgaattcatctcagtccaggcaaccaaagaggtgaacctggattcttgcaccagggaagagacaagccggaacatgctagagcctacaataacctgctttgatgaggcccagaagaagattttcaacctgatggagaaggattcctaccgccgcttcctcaagtctcgattctatcttgatttggtcaacccgtccagctgtggggcagaaaagcagaaaggagccaagagttcagcagactgtgcttccctggtccctcagtgtgcctaattctcacctgaaggcagagggatgaaatgccaagactctatgctctggaaaacctgaggccaaatattgatctgtattaagctccagtgctttatccacattgtagcctaatattcatgctgcctgccatgtgtgagtcacttctacgcataaactagatatagcttttggtgtttgagtgttcatcagggtgggaccccattccagtccaattttcctaagtttctttgagggttccatgggagcaaatatctaaataatggcctggtaggtctggattttcaaaggttgttggcagtttcctccttccaacagttttacctcgggatggttggttagtgcatgtcacatgacatccacatgcacatgtattctgttggccagcacgttctccagactctagatgttaagatgaggttgagctatgatatgtgcttgtgtgtatgtctatgtgtatatannnnn

SEQ ID NO: 19579 - DNA, 1170 bp, Homo sapiens
  misc_feature 1169, 1170: n = A,T,C or G
gacgtggcttggcaacgtccctaccgccgctgcttcccgggaacctggcgccgccggaactgatcgcggcctagtcccgacgcgtgtgtgctagtgagccggagccggcgacggcggcagtggcggcccggcctgcaggagcccgacggggtctctgccatgggggagtgacgcgcctgcacccgctgttccgcggcagcggcgagacatgaggagaccccgcgacaggggcagcggcggcggctcgtgagccccgggatggaggagaaatacggcggggacgtgctggccggccccggcggcggcggcggccttgggccggtggacgtacccagcgctcgattaacaaaatatattgtgttactatgtttcactaaatttttgaaggctgtgggacttttcgaatcatatgatctcctaaaagctgttcacattgttcagttcatttttatattaaaacttgggactgcattttttatggttttgtttcaaaagccattttcttctgggaaaactattaccaaacaccagataattggatcactaaaaattcctggtagaaaagaatttaaagacaaaaagttaaatgatcctaggaaactagtgggaaactgagaaatcataaaattgtactctgaagaaaaagatttcaaaatctaccagcagacaagaatatagataatggaaaacagaatactgtccttttttttgttctttctttttttgagaaaggagtcttggtccattcgcccaggcttgctgtgcgttgacacggatctttgtctcactggcagcttgtgcctcccggggtccaagcgaattctcctggctaaggctcctggagtaagctggaacttcaggggccgcagcaacaaaacccaggtcattttgggatttttcaggtgaacacgggcggttattcaccacattttgccaggcgtggtgttgtaaaactccgtacgccccagggaaacgggcctgccactggggctacaacaggggtctcggctttcaagggcataggcaaaggcccggccccgaaaaagaatgtggtgtgggcactaactacagtacgcgagcgttgtttttattcacaagatttaggtgcgccacactacgtgtattcgctctcttcttcaaggggtcagtagctaatccacagataatgnn

SEQ ID NO: 19580 - DNA, 3653 bp, Homo sapiens
  misc_feature 1, 2, 3653: n = A,T,C or G
nnatcgaccccgcgtccgcggggacaggggaaagagtactgccatgaaagagataggagacacataagaggacagcagaagccctggccctggggaggcttctcggaaggcctggcttcacaggcaggccacagaaggatatcgcgggcacgtgcacccaaagcaagatagtggcttcccttttatatccaatctaatcctgattggatgtccctgaggcccctgctggaaacagccataggagagggcccatggcagtaggggaaagaaggaagaaattccctgcaacaaaacttcagctaaactttgatttgtgtattgtttacataataattttaaagggtacataatgtgtaaagagtttggatagaacctctcttcatactatggttttcgtaaaggatctgttgttgttacggattcattttttccctctatttttataagagcagcagagttgtcttctcaaaacggctgccaagctctgcttcttgggaagatggatgcagtcatgtaggcctgagctgtccgtctttcaccgttaggtgggaggagcgtatgggtggacttgaaggacatggacgtggctggaatgagcacagcattgggtgagcgcacaaggatgaggacatcatgtgatcagttatgggtttgctcgcagggcacccagagattctcaaagaatcctgcagcctctttctgtgctggatttgcttgtcacggagaggcctccctccctttccaccccacccatggggcattatcctgtcactcccagccttgctccacacacacacaggtgggtacaagttccactggaggagaaaaggcaaggatggactttttccccttgtgagaggtttgatacccagaaaatgagctcaaaacctttacattagggttgcttgtaggaactggagcctggaggctgcatctacttcacctgtcactgctgagggagaggaggggagaaaggcccagcaacagcgtacagaggggtcagtcagcaagtccagagagcacatgcagggagatgtttggcccacaccgcacagccccgccatctccagtgggcgatgaaagatgtaggaaaggttgatttcaagatggaaatgacagcgctatccgcacagtatgaattagggatttgctgtgttagttgatttatccatccacacagaggggaggaaaaagacactcgttacttggtgggagattgagaaactgtggtacctaccacaaagtaatagctctgtttatgaagggcaagaaaggctacatttcagaatttgacacagtggagggtattagaggaaatcaaagaggagttgtgtggaaaatcaggttgtgtaaatgaaggtatgaatgctcagccagaggcaagatcagggagatggtacaaggcctgtttgttacatggatgagtcgggtgcctggttgtgtgtgtgtgtgtgtgtgtgtgtgtgtgtgtgtgaagtcacacttgaaattcagaagatcagacctatggaaatcactgccccttttttttttaaaagctaatgaactacatacagacctaaaaggccttaatgaaatccgaacaattttcttttactttcaagatcaaaaacatgcacccaacccagccttggatgccaccaccaggtttttgaagcccttttgagtctaagaaggtgagaacaatgtaaccatagaaagcctttcgtgagcagagaaggcttgaatccacaatttcattcgctgaattaaaaaaaaaaggttcagacctctccttgggtgactaagttctaaagatgcaaatccatgtgcagaaagagatggcattttttagttgattatttttaaccaagtgccattaacattcatcccccacatcccttttctaaacaagcttagtgttacttggggaatgtgttgggatggacgatcacatgtaaggcaggaagaataggtcaaaggttgaaggccaaaggtaagaccagagggtttgcgaatgtgggtttgtaggatactgagaaagtgaataaagaggagaaaaaaccatggtattacacatcttgctgagaaaggaaagcattcggatctgctgcaaaaacacatatatccataaagactcatgttattcagaaaacagattgtgaacacaatcacattcgcatgaatcctttaaaaggaagaagaccttaaagtatctgcaaatctgaatttctatttattccttcactgaatatagaaacaatggttatctgattattagagatattattttggatatgttacttattaacttgctatggctggtaaccatgataaagtctgttattaataacaacataattctttttttaaagaagaaaagcttatttttcattgacagtgtatagatttatctacttagttgtgttttgctattagtgttttaattttttttttaagttgagtgtttgataaattttaagaccctgtccccaccttgttttgagtcctgtgttgactacaggtatatagctcaatttaaaaatcctaaagcaaaagaattttatttataaaagaatcaaacagttgcatgcatgaggctgtgaagtcagatatttagtaataaaagcagcagtgcctttttttgtatttacccattgacccccaccaaatgcaactgttttatattaagaaaatagtaacaattttaaaatctcagagtaaaatctatttcactacatgcttttccccccttgttctgatttaagcagtgtgtacttggcatctctacattgtcctagggacagtggtgttctacaatattatcatgtatgatgttttattggtgctttttattcatagtggcttcttaccagaaacagtaggaagaaacacatgaactgtgtacaagacatgaaacattgctgctgatatgttgttttttcacatgcttttgagttttcactttttaaacgagagccagcaagcaaaatagatgtggctgggtctgcctgtccgggcggctctttgcaccgagctctcaaatcctgtgtattgagggttcctttttggtactcaggattggagctacagctgggcccccctctctcccattcgtttgaagagacactgagggaaacaagggtttcttttgaggtgtccttggctgccttttacgggatgggagccttctccggatcttttgttcttctgcacctcttgtagctactgccggtgcaaggttgtagatgttattccccaggagcctgggcttgggggctgagctgggctgaatgcaaaagcatgcaacagaaggcgggcaaggggaggaaaagcagggcctggcctcattggtcccctggagatgtctgtagcagtcagtccagcttgggcctgggaagcagcctgaccaaggcgctcaggtgtgcctgttacaagaaagaacctgcagaaggataatttgcacatggagctgttataacactaatgttgaatttttttttttacaagagttccccacagatttttgccaacggaagtttaattttagaaaaccctaaatcttactaacgggacacagggtattcacccgggaagaatatgagagacaaaccggattgttattgtgtcaaaaaaaatccccctttaaaattaaccccgggattaagcccaan

SEQ ID NO: 19581 - DNA, 1853 bp, Homo sapiens
  misc_feature 7: n = A,T,C or G
tcccttngtctcgggacgcgcgccattgtgttggtacccgggaattcggccattatggccggggggagcgcagagcggtttggtcgttcgttgggcggtgctggtttttcgctcgtcgactgcggctcttcctcgggcagcggaagcggcgcggcggtcggagaagtggcctaaaacttcggcgttgggtgaaagaaaatggcccgaaccaagcagactgctcgtaagtccaccggtgggaaagccccccgcaaacagctggccacgaaagccgccaggaaaagcgctccctctaccggcggggtgaagaagcctcatcgctacaggcccgggaccgtggcgcttcgagagattcgtcgttatcagaagtcgaccgagctgctcatccggaagctgcccttccagaggttggtgagggagatcgcgcaggatttcaaaaccgacctgaggtttcagagcgcagccatcggtgcgctgcaggaggctagcgaagcgtacctggtgggtctgttcgaagataccaacctgtgtgccatccacgctaagagagtcaccatcatgcccaaagacatccagttggctcgccggatacggggagagagagcttaagtgaaggcagtttttatggcgttttgtagtaaattctgtaaaatactttggtttaatttgtgactttttttgtaagaaattgtttataatatgttgcatttgtacttaagtcattccatctttcactcaggatgaatgcgaaaagtgactgtttcacagacctcagtgatgtgagcactgttgctccaggagtgacaagttactaatatgccagaagcggatgggggatacttcttgcttcacatgatgcatgtttctgtatgttaatgacttgttgggtagctattaaggtactagagttgataaatgtgtacagggtccttttgcaataaaactggttatgacttgatccaagtgtttaacaattggggctgttaagtctgaccatacatcactgtgatagaatgtgggctttttcaagggtgaagatacaagtcttaaccacagtgtaacttacagtttcctttaaaaaaaaaaaaagtaaacctggcagctatagaatacactatgtgcatttataatagctattttatatattgtagtatcaacatttttaaattaaatgttttacattcacaagtgggggggagtctggtcattaaggggtgtgtaattagagtccagtgggtttcttctgacggcactggtctcatagtagtaaaaggctatgcgcatttatacctggcataagtcctcattctaccacatgttaaccctctagctgataatgcaaacactaactgggggatttatttataagggctctagaaaaaacgagttattcacaccagcatcatcttaataacattctgaactagttagtgcagctttcattgtgtgtgtggtggtctcataactaggttgagtttttctcctctgtgaggaaacagtaccgaagtcttttcttgtggcatttgtttataaaacttggtgtgggggaggagcccaaaattccagccagtgaacctcggcaattaagatggtgtggggtaaggtcacatctggtactgtcctgggaaaatcatttatagagatggcttccagtggtgtcaaatttaatgaagtctaagtcactatgtttgttgctacttaccattaactgtgtttcactagggtccaaaaaaaacaaaaaatgttgggctcgccgcgaagattttaaactctgtgggcggccggagtaagttatgtagaacgggaaggggttcacaaaaaggcgcagggaaacagggggttggacagagaac

SEQ ID NO: 19582 - DNA, 1279 bp, Homo sapiens
  misc_feature 1262, 1263, 1264, 1265, 1266, 1267, 1268, 1269, 1270, 1271,1272, 1273, 1274, 1275, 1276, 1277, 1278, 1279: n = A,T,C or G
gcgtccggttttgaaacagaaatgtaggcattagacttcctgggcggcagacaaaccaaagagcggaaattcatgcagcctgcaaagccattgaacaagcaaagactcaaaacatcaataaactggttctgtatacagacagtatgtttacgataaatggtaagctttcacatttgatttcttctgtttttccagtaactgtgaagggaaattggtaggaggtgttgtaacagggcaggacccaaatgggaacggggggatgacattggtttgtcaggtaccgagcaaagagtgaggattttggagtctcccttctgctgctctgatgttttccacatgcttatttctttgccaggcactggagatgcagtcagaagtggaagtggctcttacttctagtctgtgtgtgtataagtcacttaagatggcgtgttgactgcttctttgggaaatgccctgaataggagcatgtaggggatgcttacgaggctggggaaggctcctgggagaaatgacatcttaagctgacagctgtaggtagaatacaagttaggggaaagggaagagaggagggtatttcaggctgtgccaaaggccaaagcaactaaggccagctaaggaagtgaagagtcaaggatggtgactcagaatacaagtgggatcaattataagaggtaagactaaggaggtgaaaaaggcaggacactcaagattgactcaccagtgatcgtgcatttttgtaggtataactaactgggttcaaggttggaagaaaaatgggtggaagacaagtgcagggaaagagggtgatcaacaaagaggactttgtggcactggagaggcttacccaggggatggacattcagtggatgcatgttcctggtcattcgggatttataggcaatgaagaagctgacagattagccagagaaggagcatcattataaactgctgatctactgtttctttgtcaaacgggaggagataacatgagggtcatgagaaatgtttgcagacggagtgaatgccttgaaagtgctgcgaccaggtgctgacacccggaggtctggctgctcaaagtgttagctgacacggaagacacacggactttccctccattccccaaaactccccttccctgactcgtcagctgcataaaaaccctctccttatctctttgtcaaggggatttgagaaatcttgctgtcttgtcttcttgctttggccaaatggaataaacctttctctgtctccagacaccnnnnnnnnnnnnnnnnnn

SEQ ID NO: 19583 - DNA, 3334 bp, Homo sapiens
  misc_feature 3333, 3334: n = A,T,C or G
gcgtccggtcggccctcggtccggcctgcgctctcccgggagcggcggcacgcgcggagcgccgggtgcggccatgcggggaccgggcccgaccccgagcccgaccccgagcccaagcccgagccggagcccgagcgagaccccgagcccgagcccgagcgcgacccccggtgcggcgcggctaccccggcggaggcggcgggcgcggggcgcgctctgaggcccgggggatgcgccgccgcctcgaccatgggcgccgccgcctccaggaggagggcgctgaggagcgaggccatgtcctcggtggcggccaaagtgcgagcagcccgagcgtttggagagtacctgtcccagagtcaccctgagaaccgcaacggcgcagatcacctgctggctgatgcctactctggccacgacgggtcccccgagatgcagccggccccccagaacaagcgccgcctgtccctcgtctccaacggctgctacgagggcagcctctcagaggagcccagcattaggaagcccgcaggcgagggccctcagcctcgagtgtacaccatctctggggagcctgccctgctgcccagccctgaggcggaggccattgagctggcggtggtgaaggggcggcggcagcggcaccctcaccatcacagccagcccctgcgcgccagccctggtggcagccgggaggacgtcagcaggccctgccagagctgggcgggcagccgccagggctccaaggagtgccccggatgtgcccagctggctcctggccccacccctcgggcctttgggctggaccagccacctctgcctgagacctccggtcgccgcaagaagctggagaggatgtacagcgttgaccgtgtgtctgacgacatccctattcgtacctggttccccaaggaaaatcttttcagcttccagacagcaaccacaactatgcaagccatctcggtgttcaggggctacgcggagaggaagcgccggtaacgggagaatgattccgcgtctgtaatccagaggaacttccgcaaacacctgcgcatggtcggcagccggagggtgaaggcccagagcagtgacctgcagagctcccactgcacgctggacgaggccttcgaggacctggactgggacactgagaagggcctggaggctgtggcctgcgacaccgaaggcttcgtgccaccaaaggtcatgctcatttcctccaaggtgcccaaggctgagtacatccccactatcatccgccgggatgacccctccatcatccccatcctctacgaccatgagcacgcaaccttcgaggacatccttgaggagatagagaggaagctgaacgtctaccacaagggagccaagatctggaaaatgctgattttctgccagggaggtcctggacacctctatctcctcaagaacaaggtggccacctttgccaaagtggagaaggaagaggacatgattcacttctggaagcggctgagccgcctgatgagcaaagtgaacccagagccgaacgtcatccacatcatgggctgctacattctggggaaccccaatggagagaagctgttccagaacctcaggaccctcatgactccttatagggtcaccttcgagtcacccctggagctctcagcccaagggaagcagatgatcgagacgtactttgacttccggttgtatcgcctgtggaagagccgccagcactcgaagctgctggactttgacgacgtcctgtgaggggcagaggcctccgcccagtcaccatcaggccactccctctgcaccgggacctggggctgggccgcctcgtgctccccgggactgtgtggctccggtctcgcctggagccacttcagggcacctcagacgttgctcaggttccccctgtgggttccggtcctcgctgcacccgtggccgcagaggctgcagtccctgggggccgggaggatcccgccctgtggcccgtggatgctcagcggccaggcactgacctgccatgcctcgcctggaggctcagctgtgggcatccctccatggggttcatagaaataagtgcaatttctacacccccgaaacaattcaaagggaagcagcatttcttgttaactagttaagcactatgctgctagttacagtgtaggcaccccggcccagcagcccagcagcccacatgtgttcaggaccctccctgcccaccccctccctgccgtatcgatcaccagcaccagggtggcccgtgtgcgtggggccagcgtcgccgggctgcccagcctggctctgtctacactggccgagtctctgggtctgtctacactggccgagtctccgactgtctgtgctttcacttacactcctcttgccaccccccatccctgcttacttagacctcagccggcgccggacccggtaggggcagtctgggcagcaggaaggaagggcgcagcgtcccctccttcagaggaggctctgggtggggcctgctccccatccccccaagcccacccagcactctcattgctgctgttgagttcagcttttaccagcctcagtgtggaggctccatcccagcacacaggcctggggcttggcaggggcccagctggggctgggccctgggttttgagaaactcgctggcaccacagtgggcccctggacccggacgcgcagctggtggactgtagggctcctgactgcccccaggagcctcccaaccttaatgctacccaccgcccacgccaggactgccctgtacaggtgtactataccatggacagcacaaccgcagaaccacggcaccccccatatgcgccaaccccacagggtctgcacgcccctaggcactgatctatcccacaccgcacacgccacccctccttctatatacactaatgctagacaccacagccacatgtcaacaccactcttccgatacacccctcataaatgacccattaacaaccctcctccttcacccctccccccacacaccacaacgcacacaacaaccaaacacaatcccccgcaagaccccccacaacttatctcttatcccccaccgatacatgtctacaactttgctcaccatacacagaccttccttccaaccccaccatctctgccccccctcccccacccccccccccctgcccaccactcatcccttcccaccctccatcccacacctacccccttacgtaaacacactcgcccccaccacccaccttaccatccaccctatacattccacgtcaccctcctccccccacacaactcccctcccccccccacctcctcacctacccccaaaccatcacann

SEQ ID NO: 19584 - DNA, 1382 bp, Homo sapiens
  misc_feature 1, 2, 3, 4, 5, 6, 7, 1378, 1379, 1380, 1381, 1382: n = A,T,C or G
nnnnnnnaaggcccttggatcccccctctagaaggacgagagtcttctgcccggaaggcaccagttctgatgaagccacaatgaggagatcccagcacagacttccccagacctgaggtgacgctacaaacgagcggtgcacagccacacacgcaggtttagagttcgggaggaggagacctaagtcctgtcttcaaaaacaaaagcaggccgggagtggtggctcatgcctgcaattccagcactttggtaggtggacgtgggtggatcatttcagctgggagttcaagaccagcctggccaacaaggcaaaaccccatctctactaaaaatacaaaagttacttgggcgtggtggggggcgcctataatcccagctactagggaggctgaggcaggagaatcacttgaattcaggaggcggaggttacagtgagccgagatcgcgccaatacactccaaaactcggcgacagagtgagactccgtcttaaaagaaaaaacaaaacaaaaacaaagcgagccaccgtggagatccacctgccgctgctcccgcgggggtcacttctctggctcctgcagccggcagcttaggcagcacaacacaatccactaggacattcgggaatggttttaaaaccaaagtggattcatggcgaccccttaataatctcctggactgctttcggacatgctttctggaacaggaggggtgtggagagccagcgtgtggggacttcggtgaccctgggggggtacacaggagggtgtgtgaacacgtgccatcacatatgaccaccactcgcctcgtggggacccaccgaaccatccactctgctcatctgtgcccaccccactgcctctgtatgacgcctcgtaaggacagagacaaaagagctcctaggagaggggagaatgcaggaggctatacgcatggttctcaaagcttctgcaaatataacggcggcctaacatttggtctttggttcaaaatatttccccccttcaccattttttaatgctgcaaagctcatcgcccctctagggacagtgcaaaggatatgtctgggtcccctcaggatcaggttggcctttcttcctctcagccagatgcccaggtaaactggccaccacagactcccccgtgctccgtgaggcttggcaggacctgtgcggcctgggagggagggcagggactcgcctgtgcattccggaggcggctgtgcctggtggcagtgaggcacagccttagggcggaagtcctagctctgctgctgggtgcccttagaccaggcaatcccttcgcgtctcccctccctcctctgtaaaatgagaataacacccatcttgtgggctcctgaagggattaaataacacacnnnnn

SEQ ID NO: 19585 - DNA, 2245 bp, Homo sapiens
  misc_feature 1, 2, 3, 4, 5, 6, 7, 8, 9, 10, 2245: n = A,T,C or G
nnnnnnnnnncaccggctccccaagactgcgagctccccgcaccccctcgcactccctctggccggcccagggcgccttcagcccaacctccccagccccacgggcgccacggaacccgctcgatctcgccgccaactggtagacatggagacccctgcctggccccgggtcccgcgccccgagaccgccgtcgctcggacgctcctgctcggctgggtcttcgcccaggtggccggcgcttcaggcactacaaatactgtggcagcatataatttaacttggaaatcaactaatttcaagacaattttggagtgggaacccaaacccgtcaatcaagtctacactgttcaaataagcactaagtcaggagattggaaaagcaaatgcttttacacaacagacacagagtgtgacctcaccgacgagattgtgaaggatgtgaagcagacgtacttggcacgggtcttctcctacccggcagggaatgtggagagcaccggttctgctggggagcctctgtatgagaactccccagagttcacaccttacctggagacaaacctcggacagccaacaattcagagttttgaacaggtgggaacaaaagtgaatgtgaccgtagaagatgaacggactttagtcagaaggaacaacactttcctaagcctccgggatgtttttggcaaggacttaatttatacactttattattggaaatcttcaagttcaggaaagaaaacagccaaaacaaacactaatgagtttttgattgatgtggataaaggagaaaactactgtttcagtgttcaagcagtgattccctcccgaacagttaaccggaagagtacagacagcccggtagagtgtatgggccaggagaaaggggaattcagagaaatattctacatcattggagctgtggtatttgtggtcatcatccttgtcatcatcctggctatatctctacacaagtgtagaaaggcaggagtggggcagagctggaaggagaactccccactgaatgtttcataaaggaagcactgttggagctactgcaaatgctatattgcactgtgaccgagaacttttaagaggatagaatacatggaaacgcaaatgagtatttcggagcatgaagaccctggagttcaaaaaactcttgatatgacctgttattaccattagcattctggttttgacatcagcattagtcactttgaaatgtaacgaatggtactacaaccaattccaagttttaatttttaacaccatggcaccttttgcacataacatgctttagattatatattccgcactcaaggagtaaccaggtcgtccaagcaaaaacaaatgggaaaatgtcttaaaaaatcctgggtggacttttgaaaagctttttttttttttttttttttgagacggagtcttgctctgttgcccaggctggagtgcagtagcacgatctcggctcactgcaccctccgtctctcgggttcaagcaattgtctgcctcagcctcccgagtagctgggattacaggtgcgcactaccacgccaagctaatttttgtattttttagtagagatggggtttcaccatcttggccaggctggtcttgaattcctgacctcagttgatccacccaccttggcctcccaaagtgctagtattatgggcgtgaaccaccatgcccagccgaaaagcttttgaggggctgacttcaatccatgtaggaaagtaaaatggaaggaaattgggtgcatttctaggacttttctaacatatgtctataatatagtgtttaggttcttttttttttcaggaatacatttggaaattcaaaacaattggcaaactttgtattaatgtgttaagtgcaggagacattggtattctgggcaccttcctaatatgctttacaatctgcactttaactgacttaagtggcattaaacatttgagagctaactatatttttataagactactatacaaactacagagtttatgatttaaggtacttaaagcttctatggttgacattgtatatataattttttaaaaaggttttctatatggggattttctatttatgtaggtaatattgttctatttgtatatattgagataatttatttaatatactttaaataaaggtgactgggaattgttaaaaaaaaaaaaaaaacaggccgctcgaaagccgaattccagcacacggcggccgttactagtggaaccgan

SEQ ID NO: 19586 - DNA, 681 bp, Homo sapiens
  misc_feature 1, 678, 679, 680, 681: n = A,T,C or G
ncggagtcgacccacgcgtccgcttttgcatctggatcatttttctcttgccaccaccatgtaagaagtgcctttcacctcccaccatgaacctgaggcctcccgagtcatgtggaaatcgcccccagccaccccaccccagagggctacgtcctggcagagctgggtttggttagttctgagggctgagctggcccagcagctccagacctccagaccttgcactcacctgtgaacttgactctgcaaactcctccaagatgcgcccaccacactcccagtgaacaacacctacaggagcttggagttctattctcagatacatcagcttccacattcctgtgtgtcccagctggagaagcagaagtcccagaccatgtgctaagcacacgtatggggtcgggatgaaatccaattgtcgtgtgtgaatccatgctggattcatgaagctgaggcccagaggaggaagctttcttaatcaacttctcaacatgggcaaattgtggaactgagttttctgacttcaattctgtttccctgaattcctcccatctgctgggcagcacaggttgttatataaataaggatggctctggggacagcaaggtggtccccacctccactgcccactcctccaggagaacaatctcccaggaggaccagcggcgatggggtacnnnn

SEQ ID NO: 19587 - DNA, 3777 bp, Homo sapiens
  misc_feature 3772, 3773, 3774, 3775, 3776, 3777: n = A,T,C or G
tagggagtcgacccacgcgtccggtcggcctgtgcggcgctgcggcggagcgggccatggcagtggggagggggcgagtgtagtgctgcgcggggcaggcgggaggtgatcgagagaggcagggatgggggcgccggagtggagcggttgcggcggcctgggctgctgactgcgcacttggaatagtagcaggcggcggcggcggaacgccaggcagtgtatgttttaactggaaaaagtcttccatgaaaacgtcacttttaaaaaataagtaatgccatctgttttcctaaaagactgaaatgggggcgaccattcttagggccccgtggttatgaatgtgcttcagtttcataatgcctcctgctatggcagacatccttgacatctgggcggtggattcacagatagcatctgatggctccatacctgtggatttccttttgcccactgggatttatatccagttggaggtacctcgggaagctaccatttcttatattaagcagatgttatggaagcaagttcacaattacccaatgttcaacctccttatggatattgactcctatatgtttgcatgtgtgaatcagactgctgtatatgaggagcttgaagatgaaacacgaagactctgtgatgtcagaccttttcttccagttctcaaattagtgacaagaagttgtgacccaggggaaaaattagactcaaaaattggagtccttataggaaaaggtctgcatgaatttgattccttgaaggatcctgaagtaaatgaatttcgaagaaaaatgcgcaaattcagcgaggaaaaaatcctgtcacttgtgggattgtcttggatggactggctaaaacaaacatatccaccagagcatgaaccatccatccctgaaaacttagaagataaactttatgggggaaagctcatcgtagctgttcattttgaaaactgccaggacgtgtttagctttcaagtgtctcctaatatgaatcctatcaaagtaaatgaattggcaatccaaaaacgtttgactattcatgggaaggaagatgaagttagcccctatgattatgtgttgcaagtcagcgggagagtagaatatgtttttggtgatcatccactaattcagttccagtatatccggaactgtgtgatgaacagagccctgccccattttatacttgtggaatgctgcaagatcaagaaaatgtatgaacaagaaatgattgccatagaggctgccataaatcgaaattcatctaatcttcctcttccattaccaccaaagaaaacacgaattatttctcatgtttgggaaaataacaaccctttccaaattgtcttggttaagggaaataaacttaacacagaggaaactgtaaaagttcatgtcagggctggtctttttcatggtactgagctcctgtgtaaaaccatcgtaagctcagaggtatcagggaaaaatgatcatatttggaatgaaccactggaatttgatattaatatttgtgacttaccaagaatggctcgattatgttttgctgtttatgcagttttggataaagtaaaaacgaagaaatcaacgaaaactattaatccctctaaatatcagaccatcaggaaagctggaaaagtgcattatcctgtagcgtgggtaaatacgatggtttttgactttaaaggacaattgagaactggagacataatattacacagctggtcttcatttcctgatgaactcgaagaaatgttgaatccaatgggaactgttcaaacaaatccatatactgaaaatgcaacagctttgcatgttaaatttccagagaataaaaaacaaccttattattaccctcccttcgataagattattgaaaaggcagctgagattgcaagcagtgatagtgctaatgtgtcaagtcgaggtggaaaaaagtttcttcctgtattgaaagaaatcttggacagggatcccttgtctcaactgtgtgaaaatgaaatggatcttatttggactttgcgacaagactgccgagagattttcccacaatcactgccaaaattactgctgtcaatcaagtggaataaacttgaggatgttgctcagcttcaggcgctgcttcagatttggcctaaactgcccccccgggaggccctagagcttctggatttcaactatccagaccagtacgttcgagaatatgctgtaggctgcctgcgacagatgagtgatgaagaactttctcaatatcttttacaactggtgcaagtgttaaaatatgagccttttcttgattgtgccctctctagattcctattagaaagagcacttggtaatcggaggatagggcagtttctattttggcatcttaggtcagaagtgcacattcctgctgtctcagtacaatttggtgtcatccttgaagcatactgccggggaagtgtggggcacatgaaagtgctttctaagcaggttgaagcactcaataagttaaaaactttaaatagtttaatcaaactgaatgccgtgaagttaaacagagccaaagggaaggaggccatgcatacctgtttaaaacagagtgcttaccgggaagccctctctgacctgcagtcacccctgaacccatgtgttatcctctcagaactctatgttgaaaagtgcaaatacatggattccaaaatgaagcctttgtggctggtatacaataacaaggtatttggtgaggattcagttggagtgatttttaaaaatggtgatgatttacgacaggatatgttgacactccaaatgttgcgcttgatggatttactctggaaagaagctggtttggatcttcggatgttgccttatggctgtttagcaacaggagatcgctctggcctcattgaagttgtgagcacctctgaaacaattgctgacattcagctgaacagtagcaatgtggctgctgcagcagccttcaacaaagatgcccttctgaactggcttaaagaatacaactctggggatgacctggaccgagccattgaggaatttacactgtcctgtgctggctactgtgtagcttcttatgtccttgggattggtgacagacatagtgacaacatcatggtcaaaaaaactggccagctcttccacattgactttggacatattcttggaaatttcaaatctaagtttggcattaaaagggagcgagtgccttttattcttacctatgatttcatccatgtcattcaacaaggaaaaacaggaaatacagaaaagtttggccggttccgccagtgttgtgaggatgcatatctgattttacgacggcatgggaatctcttcatcactctctttgcgctgatgttgactgcagggcttcctgaactcacatcagtcaaagatatacagtatcttaaggactctcttgcattagggaagagtgaagaagaagcactcaaacagtttaagcaaaaatttgatgaggcgctcagggacaagctggactactaaagttgaactggatggcccacacagttccgggacgactacagatccttaaagatccagctgcgtcccatgtatgtgggggtctcagtgcactttcattgtggcttgcctcaattgactgacctgtcgagatgtctacagggacggacactgtgctcgggttaattcaccaggctccaagaacattgaaaccgagacccggttgaaggtccactgctgaatgaggacacctgggtgagcagagaagaatgggagggaaaatggccacnnnnnn

SEQ ID NO: 19588 - DNA, 3245 bp, Homo sapiens
  misc_feature 3228, 3229, 3230, 3231, 3232, 3233, 3234, 3235, 3236, 3237,3238, 3239, 3240, 3241, 3242, 3243, 3244, 3245: n = A,T,C or G
cacgcgtccgcgggaacctggcgccgccggaactgatcgcggcctagtcccgacgcgtgtgtgctagtgagccggagccggcgacggcggcagtggcggcccggcctgcaggagcccgacggggtctctgccatgggggagtgacgcgcctgcacccgctgttccgcggcagcggcgagacatgaggagaccccgcgacaggggcagcggcggcggctcgtgagccccgggatggaggagaaatacggcggggacgtgctggccggccccggcggcggcggcggccttgggccggtggacgtacccagcgctcgattaacaaaatatattgtgttactatgtttcactaaatttttgaaggctgtgggacttttcgaatcatatgatctcctaaaagctgttcacattgttcagttcatttttatattaaaacttgggactgcattttttatggttttgtttcaaaagccattttcttctgggaaaactattaccaaacaccagtggatcaaaatatttaaacatgcagttgctgggtgtattatttcactcttgtggttttttggcctcactctttgtggaccactaaggactttgctgctatttgagcacagtgatattgttgtcatttcactactcagtgttttgttcaccagttctggaggaggaccagcaaagacaaggggagctgcttttttcattattgctgtgatctgtttattgctttttgacaatgatgatctcatggctaaaatggctgaacaccctgaaggacatcatgacagtgctctaactcatatgctttacacagccattgccttcttaggtgtggcagatcacaagggtggagtattattgctagtactggctttgtgttgtaaagttggttttcatacagcttccagaaagctctctgtcgacgttggtggagctaaacgtcttcaagctttatctcatcttgtttctgtgcttctcttgtgcccatgggtcattgttctttctgtgacaactgagagtaaagtggagtcttggttttctctcattatgccttttgcaacggttatcttttttgtcatgatcctggatttctacgtggattccatttgttcagtcaaaatggaagtttccaaatgtgctcgttatggatcctttcccatttttattagtgctctcctttttggaaatttttggacacatccaataacagaccagcttcgggctatgaacaaagcagcacaccaggagagcactgaacacgtcctgtctggaggagtggtagtgagtgctatattcttcattttgtctgccaatatcttatcatctccctctaagagaggacaaaaaggtacccttattggatattctcctgaaggaacacctctttataacttcatgggtgatgcttttcagcatagctctcaatcgatccctaggtttattaaggaatcactaaaacaaattcttgaggagagtgactctaggcagatcttttacttcttgtgcttgaatctgctttttacctttgtggaattattctatggcgtgctgaccaatagtctgggcctgatctcggatggattccacatgctttttgactgctctgctttagtcatgggactttttgctgccctgatgagtaggtggaaagccactcggattttctcctatgggtacggccgaatagaaattctgtctggatttattaatggactttttctaatagtaatagcgttttttgtgtttatggagtcagtggctagattgattgatcctccagaattagacactcacatgttaacaccagtctcagttggagggctgatagtaaaccttattggtatctgtgcctttagccatgcccatagccatgcccatggagcttctcaaggaagctgtcactcatctgatcacagccattcacatcatatgcatggacacagtgaccatgggcatggtcacagccacggatctgcgggtggaggcatgaatgctaacatgaggggtgtatttctacatgttttggcagatacacttggcagcattggtgtgatcgtatccacagttcttatagagcagtttggatggttcatcgctgacccactctgttctctttttattgctatattaatatttctcagtgttgttccactgattaaagatgcctgccaggttctactcctgagattgccaccagaatatgaaaaagaactacatattgctttagaaaagatacagaaaattgaaggattaatatcataccgagaccctcatttttggcgtcattctgctagtattgtggcaggaacaattcatatacaggtgacatctgatgtgctagaacaaagaatagtacagcaggttacaggaatacttaaagatgctggagtaaacaatttaacaattcaagtggaaaaggaggcatactttcaacatatgtctggcctaagtactggatttcatgatgttctggctatgacaaaacaaatggaatccatgaaatactgcaaagatggtacttacatcatgtgagataactcaagaattacccctggagaataaacaatgaagattaaatgactcagtatttgtaatattgccagaaggataaaaattacacattaactgtacagaaacagagttccctactactggatcaaggaatctttcttgaaggaaatttaaatacagaatgaaacattaatggtaaaagtggagtaattatttaaattatgtgtataaaaggaatcaaattttgagtaaacatgatgtattacatcatcttcaaaaatagatatgatggattctagtgaagaccaaaattacttctgtttactttctatcaggaagcatctccattgtaaatatgtatttacatgtttattacaaagacccaaatgaaaaatttttagtccattttttgcatagcctaaagataaaataggaataaaagttctatatttatggattttctgtatataaaactggtttctaattataacttaagtccattaagtaaaatctgtattgccactttaaatgtaactaaattattttgcggagaaactctcacccatgtattgagatacgcaggaataggcagagttacactccccgtttggggttttaagatcaccccccttaagaactttccctggcagttgcacaaaatcatttcgggaacacacacaggcgcgacaaacgctctgaaactcgtcaatcacgaagccnnnnnnnnnnnnnnnnnn

SEQ ID NO: 19589 - DNA, 1301 bp, Homo sapiens
  misc_feature 1295, 1296, 1297, 1298, 1299, 1300, 1301: n = A,T,C or G
agggagtcgacccacgcgtccgcccggcttgtctctctgtcagtggcggctgctgcctgctctggaggcaggctgggcggtggcggccgagactggcgggggtggacgcccgggccgggctgcgcccgcttcttgcagctgtgaattcctttggacaattgatgatatttatcattgtgcccagtttctacaaataaaagatgggtggattattttctcgatggaggacaaaaccttcaactgtagaagttctagaaagtatagataaggaaattcaagcattggaagaatttagggaaaaaaatcagagattacaaaaattatgggttggaagattaattctgtattcctcagttctctatctgtttacatgcttaattgtatatttgtggtatcttcctgatgaatttacagcaagacttgccatgacactcccattttttgcttttccattgatcatctggagcataagaacagtaattattttcttcttttccaagagaacagaaagaaataatgaagcattggatgatttaaaatcccagaggaaaaaaatacttgaagaagtcatggaaaaagaaacttacaagacggctaaattaattcttgaaaggtttgatccggactcaaagaaagcaaaggagtgtgagccgccatctgctggagcagctgtaactgcaagacctggacaagagattcgtcagcgaactgagctcaaagaaacctttctccaacaccagcaagccctaaccagggcctcctccacaagttccagtatctcctggaccaccaaaggacagttctgcccctggtgacccccagaaaggactgttactccagccctatcatcaaatgtgttaccaagacatcttggatcccctgctacttcagtgcctggaatgggtaaaacagagcacttaatgttatttacagtttatactgtttctctggttaccaaataaaacgggccatttttcaagcgtggtattggaaaacggcatttcattttggaaataagcagagcagcttattctgatttaagcaggaggtcccatatacaattagcattaaatcttaaaagctggcacctggtgatactgaaacctatttctggagtcattaactgtatggctccttgtgaaaaggcataaacattgtttttcttgggcacacgacccttcttatattacttgaagcgccgatattaacggggagcacccttgggtcttgttggcccccaatttcgcaaatagaaaccgtcgggggggggaatagacaccggtaaaaaatttaannnnnnn

SEQ ID NO: 19590 - DNA, 2588 bp, Homo sapiens
  misc_feature 1, 2, 3, 4, 5, 6, 7, 8, 9, 2585, 2586, 2587, 2588: n = A,T,C or G
nnnnnnnnngggcgccgaccagacgcggcattttcggaaaatagcgccctgtgcagctgaagcgctttgtgtgtagcggggccgcgtcagcccggccgggtacgaggcgcctcgggtccccgcaccacctcctgctgccttcccgtcgccgctcccgaagcttttccagatgtccctggtagatttgggaaagaagcttttagaagcggcacgagcaggtcaagatgatgaagttcgtattttgatggcaaatggagctccctttactacagactggctgggaacttctccacttcatctagcagcacagtatggtcattattccaccacagaggtactgctgcgagctggtgtgagcagagatgccagaaccaaggtggaccgaacaccattacatatggcagcttctgagggccatgccagcatagtagaggttttacttaagcatggtgctgatgtcaatgcaaaggacatgttaaagatgacagctctccattgggccacagaacacaatcatcaagaggtggtggaacttttaatcaaatatggtgctgatgtacacacgcaaagtaaattttgtaaaactgcatttgatatttcaatagacaatggaaatgaagatttagcagagatattacagattgctatgcagaaccaaatcaacacaaacccagagagtcctgacactgtgacaatacatgctgcaacaccacagtttatcattggacctggaggggtggtgaacctaacagatgaaacgggtgtatctgctgttcagtttggaaactcttctacatcagtattagctacattagctgccttagctgaagcatctgctccattgtccaattcttcagaaactccagtagtggccacagaagaagtagttactgcagaatctgtggatggtgccattcagcaagtagttagttcagggggtcagcaagtcatcacaatagttacagatggaattcagcttggaaatttgcactctattccaaccagtggaattggtcagcccatcattgtgaccatgccagatggacaacaagtattaacagtaccagcaacagacattgctgaagaaactgttataagtgaagaaccaccagctaagagacaatgtatcgaaataattgaaaaccgggtggaatctgcagaaatagaagtaaggagtcttttacccggtgtgctttgccgcagtcatccaaaataaattcaattttttttgtcttttatatttattactgacagtattgttttgatacagaatgaaagtgcgtagtattttcattttgtttatttttgccttatacatatagcaagccctcaataaataaatattgaatgaatgaatgagtgagtgaagaatttgtttataacagtctgtcatcttgataacactggaatgtctttggttcttccacttcatcctttatgttttaaacttacacacaccattcttacacgtcactaaaggaaaataccagtatatattggctaaaattttttttttgttgttcaaaactgaaactcaaatgcctaattgggctaggggtcctcttaaaggaggttgatgtttgtcaaatgggttattttttaaaagcagtagataattgcttatttcaaggcaagtaaatgaatttagactagctgttcataggattcatcattttttcccctctcccaaagtaatttgtaagcgtaaaccagtttgtaggtgtaacaaaaccatagttgcttcacaggtttttttcttgactgactgtaaataaattttgttccatgaacttgataataagttatatcaaatgaaaacaaagttatacttgaataactttgaaagaacaactgcagccactgaacttgaaatcaaatgaactgagttggaatcccacctcttgctctgttagcattgaggcaaggaatcttatctttctgagtttcagttttattgtgtcccaaactggaatttagaataataataatgtctccattttcgggtttttgtgagaattgaaaaagtcagcatagtcatacaatatttatatctgatacgtgtttgtagtaaacttggtgaatatttagtaattttttgtaaaggttcttgttatagaaaggagatttttaaaataagtcactaaaagacaacataagtcaaactaaagacaatgagaaaatacccttcctaaattcatgtaaatataagactggtacatctttcaccacaccacaaatatattattgagtttaaaaaatctggttattggttaaaccggaatatttggtaaaattatgactttaaatattgatgttgggttgttttatttcttcaagatttaaagtgatgtgtaggatgttgaagttcttattcacaaactaacaatttttccattgaatagtatcagtatacttattatttaataatttttgttgtttttctgatatgtcagatgatctttttcagacacataaggtaaaaaaattgtcatgtacttcgctttaactatctaataaagtattattttaaaattaactccaaacccaacgtttcccaatttttttccaaactcagccaggaggannnn

SEQ ID NO: 19591 - DNA, 2238 bp, Homo sapiens
  misc_feature 1, 22, 23, 1852, 1853, 1854, 1855, 1856, 1857, 1858, 1859,1860, 1861, 1862, 1863, 1864, 1865, 1866, 1867, 1868, 1869,1870, 1871, 1872, 1873, 1874, 1875, 1876, 1877, 1878, 1879,1880, 1881, 1882, 1883, 1884, 1885, 1886, 1887, 1888: n = A,T,C or G
  misc_feature 1889, 1890, 1891, 1892, 1893, 1894, 1895, 1896, 1897, 1898,1899, 1900, 1901, 1902, 1903, 1904, 1905, 1906, 1907, 1908,1909, 1910, 1911, 1912, 1913, 1914, 1915, 1916, 1917, 2237,2238: n = A,T,C or G
nctctcaaaactacataatggnnggaggagtatccgaaaaagtccccgcctcccagagaaattgaaggatccagaaagaagtgcttatagcagggaatgtctcccctcacctcctgtatgaacatctctctccttcctccagtataggagggtctgcaaagctaaaggaagagttcctttgttacaagatagaaaagtggtgccactttaaagatgatttctcagtgttctccttagataccaaatacaaaggacgagggatcaagctcagcgaaagtatcaggcatttaaggtatcaggcagcaatgcggggaaaggtgaattttcttcaatcagcataggatggttagggaagagcatttatcactttggttcttatccttcaagccaggggaaaagcaacagtgaggacatcagagacaaaagcatttatagaactaacaaacacaaacgtttgacaagtgagaaagctttattaaagcacacatacatgtcaggggggtgggaaacaaaagagcaagttacagcccgggatcccaagttatgccttccattacaattgcaatccacaccaaatcaatctttgaaaacattcctccattcggttcatacatacagtagaaaccactgtggctgcccttaatccagtgtgcttataggaaatcagttagcagctgactctgttgaaagggatttcctctctgctatacactccttccacacacaactttgggtagaaacgcttatgagaatagaaaggtcagtttgatcaatgagtaccagaagatgaaacttagctcactagacccttctttgaaaagcctcaacacactacacccatgtaatatgtaggtcaaatttaggaaacaatagcaaaaacaggaactgaaagctcatcaagcaggaagtcagaataacagggagactctgtctacattcccttagagcccttaacagtccccagcctggagaaacactgggccaattgagataacacttggctcttctggttgacacagtgggatgtagaccatgctctgtttgataacacaccccagacgcaaacactaagacagatgtggtacatgaggatgaatatatctcatctttcattcgagaaatgaggagctctctctccaatgactgcagtatcagtttaaaatgcagaaaattcagcatgggctgtgagacactttaccctcagtcactctggtcctctgagatcagctagaagctctcactgggcatcctcgtgatttagtcaaaatacattatctaattaaagtgcttttcaaaagcagctccattataagagtcccccaaaggtctagtaaagatatctagaactggaaaaagcttgggaattctgttagcatttcaaagaaaagcattagaccaaagcaaggtggaaactgcttaaaaactagaaaagttaaatttaaaagccaagttccagaagtttatccaggtagaaaataagttaaaagcataaattggagaggagaaagaggaaggaactactcacctctccccaacattcctgtctttactaaccaaccctgcttcccagagccttaaaacccagactggtcctaatgcgaaaggtagccagggcttcctagggaagtaggaacaatgatagcaagacagaagataaaaagttgttttaaaagctgtttttaagttaagtgaaccttataaagacataagaaaaaatggactctgaaaataaactagattatacacaaaaaaaaaaaaaaaaaatgcttattcttgagactgctttaaaaagaagaacaagtctgcatcactctagccagcataatgagatttgcagaaaatacatgtttgnnnnnnnnnnnnnnnnnnnnnnnnnnnnnnnnnnnnnnnnnnnnnnnnnnnnnnnnnnnnnnnnnnaatctttgctcttgatttcttcacttcctctgacctgccctcgccagggctggacctgcagaagaggacagggactcataaacccagcttctgcttggccattgaggaacggagctgcagagtcccttctgcccaagaccctgggtactgtcgcatcttctgccacaggctcacttcttccccagtcgagtccatccagtccaccacttccccattactgatccctgaggagaaacaccagaagaggctaaagaggggccccactctcagcccaccagggaagatgggttgtacagcaagattagccaccccataacagnn

SEQ ID NO: 19592 - DNA, 1214 bp, Homo sapiens
acatggcgaaacccagtctctactaaaaatacaaaaattagctgggcacggtggcacatgcctataatcccagctacttgggtggctagggcaggagaatcgcttgaacccaggaggcagaggctgcagtgagccgagatcgtaccactgcacaccagcctgggcaacagagtgagactctgtctcaaaaaaaaaaatgaacgaatgaatgaatgcatgcatgcatgaatgccttatagcactaagacattattatttgttaattcgcaggaaccattggcactggcaagtggggctctgccagactggtgtgaacaattaaccagcaaatgtccttttctaataccatttgaaactagacagctttatttcacatgtacagcatttggcgcctcaagagcaatagtatggttacagaaccgacgtgaagccactgtggagcgaacgagaaccacaagcagtgttaggcgagatgaccctggagagtttcgagttggtcgtctcaagcatgaaagagtaaaagttccacgtggcgagtcactgatggaatgggctgagaatgtcatgcaaatacatgcagatcggaaatcagttcttgaggtaatctcatataaaattagatttagggaacaggaatgacacttagggaaccagcccaatgtgtatcttcactgcattaaaaactgtggtaggtaaacatgaagaggggttttcctgttctgtaggcagaagccttctcctctggcagagcatctttttcataagaggatgtcagtccacctccttaggggttaggtcttgtgccattaatgagcaacaaagaagatctccactcttgaggtggcaaagtgcttgttctgcttgagggcttctacccatttcataacaaagttggactaaaatagtagtactcacaagggattcttttttacttttacattaaactgtgctgtttgatattttgggagcacctggttttgtaatattgtttcacttgaattgtgcttggtattatatcactggtctgtgttgagacatgttatagcaaatggtagtatgacatttaatatatttagtttagaaatgttactgtggacattgttggttttatttcatatacacagtattccctatatgaggaagagtggaaatacgtctcctgtcacaggggtgaatccaactggtttgtttttaacttttggatcataaactaa

SEQ ID NO: 19593 - DNA, 1656 bp, Homo sapiens
  misc_feature 1, 2, 3, 4, 5, 6, 7, 8, 9, 10, 11, 1656: n = A,T,C or G
nnnnnnnnnnncgcgaattcgcccttcgtctccggaggagccgtgcgtcagcccgggaggccacgttagggttgggggtgcgtgaggaggtgcggccgggcgagaggtccagcgagtgagccaagcgcggcgctactctgggcccctgctccgcgcgttagctggctgggtggctcgctggctcgctagggacaagcaggaatcggagcagcactgccgcctctggcgcgaaggctcaggcgcctcctcccgccacagtcactgtggctcggcgcacgctgccggcggctgccctttccgcctctggggaagaaaaacccgcgggccgctttcgtgcttgaaccatggcctcgggccggaggggctgggacagctcccacgaagacgatctgcccgtgtacctggccaggccgggcaccacggaccaggtcccgcggcagaaatacggcggcatgttctgcaacgtggagggcgccttcgagagcaagacgctggatttcgatgccctcagcgtggggcagcggggcgcgaagactcctcggagcggccagggcagcgaccgaggatcggggagtcggcccgggatcgagggggacaccccgcgcaggggccaaggccgggaagagagcagggagcccgcgcccgcctcccccgcccccgccggggtagagatccggagcgccaccggcaaagaggtgttgcagaacctcggccccaaggacaagagtgaccgtctccttatcaagggaggcagaatcgtcaatgatgatcagtccttttatgctgatatttacatggaagatggcttaataaaacaaattggagacaatctgattgttcctggaggagtgaagaccattgaagccaatgggaagatggtgatccctggaggcatcgatgtccatactcacttccagatgccatataagggaatgaccacagtagatgacttcttccaagggacaaaggcggccttagcaggtggcaccaccatgatcattgaccatgtggtgcctgagcctgagtccagcctgactgaggcctatgagaaatggagagagtgggctgatgggaagagttgctgtgactatgccctgcatgtggacatcacccactggaatgacagcgtcaagcaggaagtgcagaacctcatcaaggacaaaggggttaactccttcatggtttatatggcttataaggattgtatcaagtatctaacacagagctctatgagatcttcacctgcctgggagagctgggggccattgctcaagttcatgctgagaatggggatatcattgcccaggagcaaacccgcatgtggacaatggggataactggcccagaaggccatgtactgagcaggccagaagagctggaagctgaggctgtgttccgtgccatcacccattgccagccaacaccaattggccctctctacgtcacaaaggtcatgagcaagagtgcagcgtgacctcatctcacaagccaggcacaaaaggaatgtagtcttagggtgagccatcaatgccagcctcgggtagatggaaccattatgggcagaccgggcagggggattgggaattccacccggagcgccaatatccggaataccctgtggccgggggaaggcgatgggagccggcctaagcgaan

SEQ ID NO: 19594 - DNA, 1175 bp, Homo sapiens
  misc_feature 1, 2, 3, 4, 5, 6, 7, 8, 9, 10, 11, 12, 13, 1174, 1175: n = A,T,C or G
nnnnnnnnnnnnnaacagaatattttgaattttattttcttatcaaagatccacaccagaaaaaacatgaaatccattctttctattaaaatataattgaaatataattaaatttataaggttaatgattaaaagtagctattgatgaagaattgaagataaattttaaaaatacaaaatcacttgctttataaaaatagataaaagtgaattccatcagcttactgtaattatttcaaattcttgtcttccagtctagcaccatgcctctctgagactggcttctccattgagtgttatgaaatcaacacactaacatttaggatcaacattatcccctatgattggcattgtcatttatccaacctagattatataaattaacaaccaaaatgcaaatctgtcacattaaaaacttcattgacatacacatgattgattcaaaatgcacatatagcagtttagtattgggattgctactttacttgtaacctctgtttggtcatagttgagaaacaacagaaagttgcaactgtaatattatttttatataaattacttatataaatgattttaataaaaaaagtgtgcattttttgcaaccctgtcttattgcacatttgatctgagtattgaaataatatttgatctgttaaatctaataataaaattattcttatttcatttctcttttatttcatttttctaataagtttatttttatgtttgtttttaattatattttacaaaagtattggtctctgacaattggaaattaaaaagcaaaactgtccctcacaacagatggtttgagaaacagtggtataaaatttatctcatattaaagacaaggaaaaaataggatgattaatagtttttcacagaaaattgagttatattgtagctaggtgcccaaagaatgttaataaacatcaaactgcaaagtacagtagtctttaataaagccctatagtgggttggctcttagccctgtcttgttaaaattttaattaataaccaggaggaagagagataaagggcatgtttttaagatttgtagacggcagtaagctaggagtgataactaactgaacagacacaaaatccagggaaaaagtggttttgatcatctgtcatgctgtgtagaagctcagacaacattttaggaactcann

SEQ ID NO: 19595 - DNA, 2285 bp, Homo sapiens
  misc_feature 1, 2283, 2284, 2285: n = A,T,C or G
nagggagtcgacccacgcgtccgtttttttttttgatttataaacatttttaatgactgtgttaaaaaaccatcatacaaaaagaaaagaaagttgttttcaacttaaaaaaaatccttatataatgtaccactcatctgggatatgcttctgggagggggacactccctgcttgggctgcagcagaaggcagtggggagaaagtcttaaagttctgggagtcaggctagcccctcctgcaggtgtcctcattgccacttcttggtccctgtggtcaaggttcaaagtgccaaaagacccactgatcgaacctgagactgttgagatgtcctgttcccaacagagagtatctgaactccagaaacttccctctcaggcctccactcccccctcctttgtactgtgcatcctactctgacttccgtggctggggcagatcaaatgtacattctcagtgtcccctggtaacaacctctcccttgcctctgatttgcgaggcacagacaaagctgacaaggccttcttccaggaggctgctctgctttctcctctcctaccccagcttttggctcctggcttctctggaaagccacaggactccaccagcttctctctgccaacagttcagtcttcagggctggagctgcagggtctgcggaattcctgtccatactcatgtatccacttgttggccacccacttatctcccaccaggacaggacagccagcatgaagtgtgtcactgtccccttcaccactcctgtgcaggttccaccaaaacagtgctgcattcctaaccacaggcacgctgaggttggcatagatgaaggctgtggctcctccagcttccaccgagctcagatagatcataaatgttgcaactcggtttcctgacttcattctgtagagggggctgcttggtgacgtagcatggtcaaagtgaggctcatagtgtcctccgatgccatagttcaccacctgcagatactctgcatagggaggccggacatcaaggcctgtgagggcagcaatgcggtggttgagggtcaccagttttgggtcaacagtgtccttcagccaggcacttttgctgatgcggtactccacttgtaactgcttctcccctgatgccaccactgacctctgtagccatggttctgcaagttctctaattttctgagcctctgagtcactgacgaagtcatggtagagagcaatgtagggctccaggtggatgacctccttccggatgggctggagcagcaggtaggcgttggaattggtctcataggaacagtagaggctagggatctggtagagagtgggctgggaacccagggtctgacatagcccctcgtaggtgtctctggtctgcaggtggggtatattgggcctctggatgacagcctcagctaccacgtggttggggctctctgccaagagcctttcatatttcaagacattcctggccatcctcttattatctgggctgtagagaagaaactcccgagagaggctgagggcacacgaaacatttcctgcccggaaataagcaaaggccaagtgatccaaggcatcttctagacttgcctcatcctctgtcttccactctccgtaagatcctcggaagagactgacagcctcctccagccatggaatggcatggtaataatcccccatgtcataggccaccttgccaacttggaagcagtcatcccctgtgagagaaaagagccgtttggggctgtacaggtcagtgatggcagagccagtgactctctgaaagacacctcgggccaggcctttcacattgagcatgtacacgtcctgcagccgcatcagggcccttgctgctccctcaaggtcctcaaaggctggaaggtcttgctccaccttctcatagccatccttcagagctcggatgttctcactggcctccagactatgtaccacattcctccagtcagactgcaggcgtttgatgagagtaaatgcaagcagagggttagccacaggggttgttgaatcctcatgcaaagaaagtaccttgtcgtagaatctagtcaggtcccgcagccgcgcctcctccccgcgcaggtaccgcctcagcagccccagcagccggcgctcgggcgccagggcgcgcgccacgctggtcagcgccgagaacgtgtcgccccgagccgcagccctttctgggtctcctgtcccgagcgccagcaccgccagcagcgccgccagccgcgccccaggacccatagccagcgctagacggtggtcgannn

SEQ ID NO: 19596 - DNA, 1237 bp, Homo sapiens
  misc_feature 1, 1237: n = A,T,C or G
ncttctatgctccttgctgggtgagggtgtctcttggcttgagcgcttctctctctctccccgatcgtgcttgttgtctttccgtctgactgcttatgtcttcttatagtggtcgtcctccctttttccttgcttctatcgcgcgtctctatggtgtttgtgtctttttttctgccctctcgcgacgctttgtttctctcccctctctatgtttttcctgtcttgcgaagtgccgtattaatactgggcctggtggtgtctcccgggtcttgtatctggggggggttttattatttagagcccgtgttgaacttagtcggccctgtatttaaaggtacaggtaaatggcggtttatggggctcttggtaaactttatggcgtccacacaagggtttaattacccccaggggcccaccacgttgggccccttgcctactgggatatagcccttagatttttccttcggttagcctttgggatgccccgagtgttttttttgtttttgcagcttttctataagtctcaagtgtatttccacatacgacatttgtgttaaaagacattggtatcagctgggcatggtggcgcttgcctgtggtcccagctactccggaggcttaggtgggatgatcatttgagcctgggaggcagaggttgcagtgtgctgaaattgttccacatgatgcacaggacttgcggtacatgatcccggcactttgctccatcacttctttctgacacatgtcttgaacgttcaccgtgcaattcacaatgaactcgggggaggagcagtcgttgttcagctggaattcttcacactggtagcactggatttgcagcgcaaagcctggaagcaagaacaatccgcaaaaagttgccgcgatgcctaggacccacattctcccggagtcccggggccgggagagggcaagcgcatcagaggaggcgacagcagcggaggctgccccggctgcagcggctgtggctgccgaggctgctggggcccgcgctgctgccgcggagacgacggtcgtagcttagaggagccgcaggtgccgctcgcggagcctgcatcgcccgcgctcgggctcccggctgcgggtctctgctcctcccgctcgcgctcccgggccgagcaccgcgcctccggagttggcgcggacgactgaaggaactactggcgatcgggagcacccacaaaagtctcgccttttctccccacctcccggccgctcn

SEQ ID NO: 19597 - DNA, 2827 bp, Homo sapiens
aatggggaggacacccgccacagaattctacccacccgttgggaccaccaagaatcttgggggtcaaggtaaacagctctatatgtccccacatgggcctcattgttatggagccctcttttgtttccccagaccccgaacacatatagagattcctctgcagggttgttttttttttttttttttttgcaaacaaccaaactttatccagaaaagcatatttgtaatcaccactaaacaatgaggcacatcggtcccctctccccaaccaccctcactcttcccaaacccactctctcttttggcttttatagaacactgtagaaatcctttcctgagtctgcaaatggccccagactgggatgggagctgcccagagtagtcttgggctggactgagtgctggtgcccagagagggagacctatgcaactgcctccagtatccaaaagttctgggggcaggtcgggtggccacccctatggcacagggccttgagggagggtgagtgtggtggcggtcttacgtgttcttctcatacctggcagacagagtgagcacaagccgctggaagccaagcgggaaggcacatctagaagggcagtgagctctggaatgctacaggcacgtgtggatggatgaggctccatggcggccaaggagatatctgctcctgagtaaggtcacctgaccacagacagcaccaggggctggggggctaagaaggagatcttgagaaggatggacctgagctaaagatgtaacttagatggtgatctgaaaaaaggaaaaaagaataaacgctggaactcaaatccactgtttagggtacaggagtacacagctaagttccaggtatccagaatcttgtgtccaaatcatagcacaaggagaacaggaattctcttgagttaaggcaaaatcaatcttcacccatctgggctcttccattgcatggtttggaaaggaaggggctgggcagagatcattcctctccccatctccccctactgccagtgaagactctgaaagcttctgcaggccaaggccagaatggtgttgccagcccagggcagcgggccctgagagcggtcggtgtgaccagctctgggaatctccatggcctcagcaacatggaaaccttacaggcccagccagcaggtcaccccagcgccagagagtggttcttctctttggtaagggagacccaccctgtcagctgctccagatcagtgccgggatctcttgcaggtgactttcctttagcctgggaaaaccatctgaataactttggcttcatttctccaacaatgtaaaggaatgttcaaattccccagttcaggtctctggctagaggcagcaatctacttcctcactggggtgggtcccctccctctgctagagaattccctggggaagaaagagaaggcgccccccaaatcttcaaacagaacacagccaatgggttgggcccttcggcatgaatgagagccgggacagcacagggatgctgggaatcttaaggtgggaatactgctccaggcccaggagcagttaatacagcaaactaaattatttctgtaacagcgggacttctcagtctttgataagctaatgagcatctccaagaaagggagacagcaccgttgacaaacccatttggccttgaaaccctcttttaggagaggcggctcctgagccaggggtcctgactcacccacccttttaatgcaaacagcgctggactgcaagtctgggttccaatcttactctggctgttcccaagagcaggctctgggtccccatctgtaagaaggggtggggttcaccttaacattccaccatggtcgtggaactcctaatgcaaacagatatgggggagggtggagatgaggggggcggcagaagcctgtgaggaaggctgggaagagacttgtgtcacggagaggccaggacagttagtgtgtgtttggcactggcctgcaaaaaccttaaggacaaaggcggagtaggtagaggcaagaggagactccacaagtgtaagggtacaacccaccggcttctcctatcggtccccacctcggcggatgggccccaccccaagacaaccgagcacagagagaccggctgggaggagcttcgcaggatgccagcacaatccccagctaaaaccaaactcgtcgctcatcctgggaccagccaaggcctgtcctcagctccgcccgcggcccagcgcctgcgttttacagcaccggaggctggatgaggggccagggaagggagtgctcttccgaccacggggcgggagggaagggggcagccagaagcctggttccaatttgggagcctcccccggatctgcgcggcccctgtccacgtcttagtctcagcagggaagggaagaggaaccgcgaggtttcgcctcggggcggctcgtctgcgagtgtgtgtcagcccctcggatcgcagcctgcgcttgtcccgggagacggcgcgtccggcgcggcggtcgggattctgggctgggattctgggcggcggcggcgctgccgtcgggcgggagctgagcgtcagggttcccgggcgcgggcgacagtggaaacgctggagggcagggagagggtgccagggcgcacccgcgcggggcggcggcgggggaagggattaaggaggctggtctccggggattcccccgccccgatcggggccgcggcgggcgcgggcggcctcacgccacctcctgcttgccctggcagcgacgcccgcagccatagagcgccgaaagcaggtagaggccgtggcagacgccgccgccggacgcgtggtgac

SEQ ID NO: 19598 - DNA, 1337 bp, Homo sapiens
  misc_feature 1, 1337: n = A,T,C or G
ngagtcgacccacgcgtccgcgcgcgcggggccgggacaactggtcttatcacggaggctggggccaggcagcccttcggttcgggtgggcccatggaccccagtccaacgccgagggaataggaccatccaaaagcggaaccttcgcctcagaaaaagggtgcgggacccctcctcaccgtgcggtcacgcgtggaccctgccagcagccaggccatggagctctctgatgtcaccctcattgagggtgtgggtaatgaggtgatggtggtggcaggtgtggtggtgctgattctagccttggtcctagcttggctctctacctacgtagcagacagcggtagcaaccagctcctgggcgctattgtgtcagcaggcgacacatccgtcctccacctggggcatgtggaccacctggtggcaggccaaggcaaccccgagccaactgaactcccccatccatcagagggtaatgatgagaaggctgaagaggcgggtgaaggtcggggagactccactggggaggctggagctgggggtggtgttgagcccagccttgagcatctccttgacatccaagggcctgcccaaaagacaagcaggtgcaggcagcagcagtccagaggcccccctgagatctgaggatagcacctgcctccctcccagccctggctcatcactgtgcggctcaaattcctcaatgataccgaggagctggctgtggctaggccagaggataccgtgggtgccctgaagagcaaatacttccctggacaagaaagccagatgaaactgatctaccagggccgcctgctacaagcaccagcccgcacactgcgttctctgaacattaccgacaactgtgtgattcactgccacgatcacccacagggtcagtgttccaggcccctcagctccttggccccctcggcactgagccacccagccttggtgtcaatgtgggcagctcatggtgcctgtctttgtggtgctgtgggtgtggtctggtacttccgaatcaattaccgcacttcttcacagcacctgacactgtctcccctggtgggagtcaaccgtcttcttcaggcttcctagtattgggatgtatggacgataaggacataggacgcacaatgaaagggactgtctttctacttattggctcccaatttactggcacagtggccaagggcgggaggaggcgtggaaggagtcgatgacactctccatgcaccgcagcagttgggcccttcctcacgtgtcaatgtctcctgcggcaaccgtaagggagatcaacaaagaccaacggaacggagacaggaaggagaacccgtaan

SEQ ID NO: 19599 - DNA, 1157 bp, Homo sapiens
  misc_feature 1, 2, 1122, 1156, 1157: n = A,T,C or G
nncctttggggtgctggaggtgcttctcgtgccttctctcgctctcttcgtcgtgagttcgcggcgccgtgtggtacgcatggagtctagtcggcgtgtccgggtcggtggttggaccgggccttcgtgtgcgggtggggggtgcggcggtggcagtggcacgtgggtggtcgtgcccgttacgttatcctgagccattcctccttggagtccatagctatattcataagggaaactccaatctctaaccaaaaacatcagtgtctggaaaggcttttggaaaatttcatccattgccagacgaccgtattctgtgaagagctgcagctgttgaagatcatcttcttgaatgttctgagataattataaatctgaacagaactagtcatagtgcttagagcaaagatggtagcacagtctttcacagttgactggctgtcaaatgccccctgggtatccatcagaacaactgcaaccttcttcccacctggcttctccacagtgaaaacttcactccagatttgaatcccagtggtttctggatcagatccccctctccaggaaaatcctgttaacggttcttctgggtcacccaaccaatttgaatggccactttccttctgagaatataagtatcgtagcataaaatccagaatgaaggacttgccctttcggaaggcaccagccactgaaaccaccaccacatcaagatctcggatgtggtcctgcaagaggatgctggccaaggctttctcatctagctcaaaggaatgttgatctttctgaaccaaaacaacctgcactggaccaggcttgctgctctccatggcatcatctgctcctcttgaggcagctgctgccactcgctgaggggacaacatggagcctccgccttcaaagcagaagcagcaggggtgcagaggagagggacgggtgcgggcgggaacgaaccgggccctggaagcgggaaacgggcggagcctgggctctagaaaaaactagccagaaggtggggcacgcggagccgcgacggagcgagcgcagcgcggtctgcgtggcccaacggacagcccgaggcgtggcgagcgcaggacgaggctaggcgagcggggcgggaaagcngcacgcggcagaatcccgccaccgcctgccgcgnn

SEQ ID NO: 19600 - DNA, 5930 bp, Homo sapiens
  misc_feature 5928, 5929, 5930: n = A,T,C or G
cgacccacgcgtccgcgccttttccctccggctcgggagcgtctcgcttgcgccccgggcccgcggcgcccgcgcggctgcgagcctcgggtggccgcgtgccggctccaggaagccggagagggcgcggcggccaggatggcgcggcacgggccgtgcggctagacgggagccgagggaaccgccggctcgcgccctccgttctttcccggagccggcttcacgcagggccgggaacggccgtgcctctgggatccgccttcgctgacgccgggcacctacctggacgcgagcgagcgagatgcccaaccccaaaaacagcaaaggcggccgcaaaaacaagcgcgccaacagcagcggcgacgagcaggaaaatggagccggggccctggcagcggcgggcgcggcgggagcggcggccgggggggccctggcggcggcggccggttgcggggcggcggcggcgggcgcgccgggcgccggaggcgcggcgggcgccggaggcgcggggactggcgccgcgaacgctgcggccgccgcgggggctgcggccgcgggcgatgccaaaaacgaagccccatgtgccactcccctgatctgcagcttcggtaggccggtggacctggagaaggacgactaccagaaggtggtgtgcaacaacgagcactgcccctgcagcacctggatgcacctgcagtgcttctacgagtgggagagcagcatcctcgtccagttcaactgcatcggccgcgcgcgcagctggaacgagaagcaatgccgccagaacatgtggacaaagaagggctacgacctggccttccgcttctgctcttgccgctgtggccagggccacttgaagaaggacacagactggtatcaggtgaagcggatgcaggacgagaaaaagaagaagtctggctccgagaagaacacagggaggcctcctggtgaggcggcggaggaggcaaaaaagtgcaggcccccaaacaagccccagaaaggcccaagccacgacctcccccgccggcattccatggaccggcagaactcccaggagaaggcagtgggtgccgcagcctacggtgcccgttcccccggtggctccccgggccagtccccacccacgggctactccatcctctctcctgcccacttcagcggcccccgctcctccagatacctcggggagttcttaaagaacgccatccatctggagcctcacaagaaggccatggctgggggccatgtgttcagaaatgcccactttgattacagccctgcggggttggcagttcacagggggggacacttcgacacccccgtgcagttccttcggcggctggacctctccgaactcctcactcacatccccaggcataagctgaacactttccacgtgcgcatggaagacgatgcccaagtgggccagggggaagacttgcggaagttcattctggccgcgctcagtgccagccacagaaacgtggtaaactgtgccctgtgccaccgggcgctcccggtgttcgaacagttcccactggtggatggaactttgttcctaagcccgtcgagacatgatgagatcgaatatgatgttccttgtcaccttcaagggagactcatgcatctgtatgccgtgtgcgtggactgcctggaaggggttcacaagatcatctgcatcaagtgtaagtcacggtgggatggcagctggcaccagctgggcactatgtacacctacgacatcctggctgcctctccatgttgtcaggcccgcctgaactgtaagcactgtgggaagccggtgatcgacgtgaggatcgggatgcagtacttctccgaatatagcaacgtccagcagtgtccacactgtgggaacctggactaccacttcgtgaagccattttcctccttcaaagttctcgaagcttattgatgaaagctttgctttagtaatagctattttattgatattattactttattacatatcttttatagggaaacattctgtgacattaatttcctttctaatttaaaggagagttactttgttgtatgtgtgccactaaaataggggctgcccttgccctgtcttgattcccgagtgttaatctgtggttttgaccagagcccagatgggtaatcctgtgcatttgggttggggttcactcttaccaagaatctttgatgcagctttaagatggtggggaggatggggtgaatttaggaaaggaatttgtggttataaactaagagcttgataggagttggaaggaaactcttactaaaatgttaactttctaaaaaccttcttttagatcttccttgggcctttggaaaaatatgtgacaagtgaatgtaagtctgtgcctggagagctaatagtgcattagtctatctcagcctagtgttctgcagcacacatgggcaggcagtttactcacactgacaggtgacctgaaagtggcacaagtgctgtttctatcactattgtaatttgccagttcatttttcatgctgaaagtaatatccaaattgtaagacatatgaaagatattagtgttgcaaatatgtttaggtaaactgacctataacagaatatgtgaaatgaatttggaaataatgcaagaaggcagaactcaatcatttaaattgtgtctttgaagttggtaatatagcttttaaggagaacccatgaataacctgatttgggcagtgatgatttattacaggttgcactgttgaagtgtcatttggtgtcaggttcttctcacaggtaaatctttcagccacagaatctaactggtgagcttcagaaccaataattgccacatttattgtcctcaaaattgcttatggccatgtttaaccaattaattctgagtttccaaaatcaaagatttgaccttaagagggaagggaaaaaagtgtgaaaggatgatgaagaaaataattttactatttcttttaaaagtatgttttggaaaatcaatgattttaatgcatagcagtatgtttgaaaaatagaccattctaaaaagcccatgataccttactgttgatgaaaaaggatgatcatatatatagaacttgattagtcagagcattgggcattccaaaatacagcctttggttcagtagattttaatgctttaaatagactgacgtcgcatacccttatagaattggaatatgatttctcaaaaattaatttgataatttcatgtatgatgtgcatatatgctaaaagaatgcagaaaatcattttatgaatagccaaatttggggttgatgtgaacattttatgttactcatttggtttatactttttttttttttttttaactgtgtggtttttcttttcagaagtatttaggcaatattgcacgtgagtttcagttctttttttcttttttttgagatggagtctcactcttgtcacccaggctggagtgcagtagtgcgatctcagctcactgcaacctctgcctcctggattcaagcgattctcctgtcccagcctcccaggtagctgggactataggcacgtgccaccacacccggctaattttttgtatttttagtagagacagcgtttcaccatgttagctaggatggtctagatctcctgaccttgtgatctgcctgcctcggcctcccaaagtgctgggattacaggcgtgagtcactgcgcctggccaagtttcagttctatatgaagtatttgatgttttgtttgaaacaatacagcattaaagaaccaatgttattcactaatatcattcatctttcagtttggatgatttggtttgctgcatctaggtcggtgtttgatcatctgaaaaaacatttcagtgggaagaaatgcataaaatgcctataagaagtagaaagtcattgaactgacagtgtttgatgcaactaaaagaggattgtaagacatagctttctgcaaacttgtctttaatgcacaaagctgtagtggtgaattaactatctccttattgattctctcctgtacccagatgcaaaaagtgctaagtttctcttgtcctcgtaataccatttggattttatttctgaatttaaatagtaaaatatttatgatgctgatctttaacccacctaaaattttatagtgaaacctgctttatattgttgttctgaagcttacaattgacctatacattgcattcagcaagctcctgaatttagaactgccgtcagtgtagtgtatgctgtgttccatgttgcctttttagatggctttctaccccctgaacaataaataggatgaggttttactgtaattgggtaaagtttactcttggacattatttcgatgctaaagtaaggattctgtggatgttacttaaagagaaaagcataagagcatgaagcatatctgggaatatcttttgcctttaagacgattcattcttgtctagagggaaaatctggctgatttgggaataaaatataatcgaatattcaacaccatgaagataaatcttattttggaaatctactgaccttaataccccaagcttgccctgaatactttgattggaattggaatatatcaaaaaaggttagtatttttgttgtagttaggatactaaaaggatattagttacccaagagatccaatttgtttttctgatgaatagtgttcagtaaaatgaagcagtcttaagagtgactaataatttcaaagtgatttttcgtctattcttaatattttttaattatttatttttaagagttttataccttgagcagatacaatgatctgctttagtgagaggacaatttctgattgattgttttctcttcaggccatctcacctcttcattctcttgttacatttgaagcagttgatataatgggtttatactttaaaagatagacatggtgccatgaagttggggagttgggtgaattatcccattctagttacagaggagctttccttaaatgccctttaacttctaggttttgttcaagaagttcattttctgagtaaaagttattttcatatatgttgggggaaaattaactcatctaaaaagaatcttattaggtatttgaactctaaaactaacagataagacagatatgtaccttattagagcaccagaactaatttgctaagtcttttgtttagtcctgcaagactgatgcttaatacacagtctgttctcctgtgtctaggtcaggaactccagtttgcttttctgttttgtgtcctggtagcagctgttgagtaactttcattggaggttgggaaggaagtgaggagaaagtgttcttgtttagtgttttatttcctataataggatgctgcctaacccagttcatctctatgtcctgttcactgaatattccgggtaattgaaagaaaatataatggatgggctccattaaaaccagctcaaaaataaattcttgtcagtaaagatttcttgtcaagatgtcttggattgcacttttgttgaggaaagacagtgtaaatagttaaagaatgttgataaaattgaaacatttggttgtggaattgtgtgtggttttagagggtttctgtttgtgaaatgtatgtattaaaaataataaaattccagaaactaacaaaaaaaaaaaaaaaaaaaaaaaaaaaaaaaaaaaaaaaaaacaaaaaaaaaaaacaaaaaaaaaaaaaaaaaaaaaaaaaaaaaaacaaaacaacaaccagaagcgacaaccagcacggggggggacgctcagaagaaaaagaagtaaaagagaggagggacggggagacggagtggactaaggtgaagacagacgaatatacgaagtagacgggggtggacacaggcggccgccatctcaagtgcagagcctatagcgtcgaccagagaacaccgacaagaagagaattagcatannn

SEQ ID NO: 19601 - DNA, 2301 bp, Homo sapiens
  misc_feature 2291, 2292, 2293, 2294, 2295, 2296, 2297, 2298, 2299, 2300,2301: n = A,T,C or G
cacgcgtccgatagcatctcgtgttttggggatgcctttccttaccagattcttctaaagcccagctgcacccacccttaagtgggagataaggcttctgcccgcgggctctgcgttcgtccacccggccccacgtttgctgtggactaaacaggagccactggactagagtacacttgactctcggctctgcggaccaaaaattccaggactaaggaatagcaaggttaggctgaaacagtccacacagggcttgcggtaaacgtcttttcaggagccactcgcccagtgcagtaagtcgtgtacttagttgactcgagcgctccagggagacgcccgaccctactctgcgccgccccggggcaccagctctgcttcctccaggtccactgaggcaggcacgcccagctctgggacagtcagtaaacaagccacgaaccgcgccagggatcagagaacccagagtccccgcccagctgccggcacagccaatcgcagcgcagccaggcggcggggcggtgccggccgaacccagacccgaggttttagaagcagagtcaggcgaagctgggccagaaccgcgacctccgcaaccttgagcggcatccgtggagtgcgcctgcgcagctacgaccgcagcaggaaagcgccgccggccaggcccagctgtggccggacagggactggaagagaggacgcggtcgagtaggtgtgcaccagccctggcaacgagagcgtctaccccgaactctgctggccttgaggtggggaagccggggagggcagttgaggaccccgcggaggcgcgtgactggttgagcgggcaggccagcctccgagccgggtggacacaggttttaaaacatgaatcctacactcatccttgctgccttttgcctgggaattgcctcagctactctaacatttgatcacagtttagaggcacagtggaccaagtggaaggcgatgcacaacagattatacggcatgaatgaagaaggatggaggagagcagtgtgggagaagaacatgaagatgattgaactgcacaatcaggaatacagggaagggaaacacagcttcacaatggccatgaacgcctttggagacatgaccagtgaagaattcaggcaggtgatgaatggctttcaaaaccgtaagcccaggaaggggaaagtgttccaggaacctctgttttatgaggcccccagatctgtggattggagagagaaaggctacgtgactcctgtgaagaatcagggtcagtgtggttcttgttgggcttttagtgctactggtgctcttgaaggacagatgttccggaaaactgggaggcttatctcactgagtgagcagaatctggtagactgctctgggcctcaaggcaatgaaggctgcaatggtggcctaatggattatgctttccagtatgttcaggataatggaggcctggactctgaggaatcctatccatatgaggcaacagaagaatcctgtaagtacaatcccaagtattctgttgctaatgacaccggctttgtggacatccctaagcaggagaaggccctgatgaaggcagttgcaactgtggggcccatttctgttgctattgatgcaggtcatgagtccttcctgttctataaagaaggcatttattttgagccagactgtagcagtgaagacatggatcatggtgtgctggtggttggctacggatttgaaagcacagaatcagataacaataaatattggctggtgaagaacagctggggtgaagaatggggcatgggtggctacgtaaagatggccaaagaccggagaaaccattgtggaattgcctcagcagccagctaccccactgtgtgagctggtggacggtgatgaggaaggacttgactggggatggcgcatgcatgggaggaattcatcttcagtctaccagcccccgctgtgtcggatacacactcgaatcattgaagatccgagtgtgatttgaattctgtgatattttcacactggtaaatgttacctctattttaattactgctataaataggtttatattattgattcacttactgactttgcattttcgtttttaaaaggatgtataaatttttacctgtttaaataaaatttaatttcaaatgtaaaaaaaaaaaaaaaaaaacttgaggggggggcccggtacccaatttcgcccctatagtggaggtcgtattacaaattcaaactggcccgtccgtttttacaaacgttctgggacttgggaaaaaaacccctggccgtgnnnnnnnnnnn

SEQ ID NO: 19602 - DNA, 4115 bp, Homo sapiens
  misc_feature 1, 2, 4114, 4115: n = A,T,C or G
nnccggcgcaagtcccaggcttggtagcttcattttaagagtaacagaaaatgtcttttttagagggggagggagccgctgggtaatctttggtgaacaaatcttctctctttggtgctgttcgccggctagagaaggaagtgggtgggatggagatggctcacgaagggatgatctggagtctggcttggcatcctcttgggcatattctctgctcaggctcaaatgaccatactagcaaattctggactcgaaaccgaccaggtgatcaaatgcgagatcgatataatctaaaccttttacctggaatgtctgaagatggagtagaatatgatgacctcgaacctaatagcctggcagtaattccaggaatgggaataccagaacaactaaaattagctatggaacaaggaacagatggggaaagatgaatcaaatgaaattgaaatgacaattccaggtttagattggggaatggaggaagtgatgcaaaaggatcagaaaaaagtacctcagaagaaagttccttatgcaaaacccattcctgctcagttccagcaggcttggatgcaaaataaagttccaattcctgctccaaatgaggtgctgaatgacagaaaagaagacattaaattggaagagaagaaaaaaacacaagcagaaattgagcaagaaatggctacattacaatatactaacccacaacttctggagcaacttaaaattgaaagacttgcacagaaacaagttgagcaaattcagcctcctccctcatctggcacccctctcctcggaccccagccttttccaggacaaggtccaatgtctcagattcctcaaggttttcaacagccccatccatctcagcagatgccaatgaacatggctcaaatggggcctccaggtccacagggacagtttaggcctcctggaccccagggacaaatgggaccacaaggtcctccactgcatcagggaggtggggggccacaaggattcatgggaccacaggggccccagggcccgccccaggggttgccacggcctcaggacatgcatgggccccaaggaatgcagaggcatcctggacctcatggccctttgggacctcaagggccacctggaccacaaggtagttctggtcctcaaggtcatatgggtcctcagggtccacctggcccacagggtcacataggcccccaaggcccgcctggccctcagggtcacttgggcccacaggggcctccgggtactcaaggtatgcagggaccacctggtcccagaggaatgcaagggcctcctcatcctcatgggatccaaggcggaccagggtctcaagggatccaaggtcctgtgtctcagggacctctgatgggattgaatccaagaggaatgcaggggcctccaggcccccgggagaaccagggtcctgctccccaagggatgattatgggccacccgcctcaagagatgagaggacctcaccctccaggtggactactgggacacggccctcaggaaatgagaggtcctcaggagatccgaggcatgcaggggcctccaccccaaggatcaatgctgggacctccccaggaattgcgagggcctccaggctcacaaagtcagcaggggccgccccagggctctttaggacctccaccccagggtggcatgcaaggaccccccggacctcagggacagcagaacccagcaagagggccacatccatctcaagggccaataccattccagcaacagaaaacgcctctgctaggtgatgggccccgggcccccttcaaccaggaaggacagagcacaggccccccacccctgataccaggcctagggcagcagggagcacaaggtcgcattccccctctgaaccccggacaaggacctggccccaacaaaggtgactcccgcggccctccaaaccatcacatgggcccgatgtcagagaggcggcatgagcagagcggcgggcctgagcatgggcccgagagggggcctttccggggtggccaggactgcaggggtccccctgataggcgtggccctcacccagacttccccgatgacttcagcagaccagatgacttccaccctgacaagcgctttggccaccggttacgtgaatttgaggggcgaggaggacctttaccgcaagaagagaagtggaggcgagggggccctgggcctccgtttccccctgatcacagggaattcagcgagggggatggccggggtgcagcccgaggccctccgggggcatgggaaggccgcaggcccggagatgaacgtttcccccgggatcccgaggacccacgttttcgagggcgcagagaagaaagtttcagaagaggagccccgccgaggcatgagggccgtgctccccccagaggaagggatggttttcctggtcctgaagactttggtccagaggagaattttgatgcttctgaggaagcggcccgaggacgagatctcagaggtcgaggtcggggtaccccacgaggaggaaggaagggtttacttcccactcctgacgagttccctcgctttgaaggagggcggaagccagattcctgggatggaaacagagagcctgggccaggtcatgaacattttcgtgatactccccgccctgatcatccccctcacgacggtcattccccagccagcagagaacgctcctcttctctccaaggcatggacatggcatccctacctccccgaaagcgcccctggcatgatggcccaggcacttctgagcacagagagatggaggccccaggaggcccttctgaagaccgaggaggcaaaggccgagggggcccaggacctgctcagagagtgcccaaatctgggcgttccagctccttagacggagagcaccacgatggataccacagagatgaaccttttgggggccctccaggcagtggcaccccttctcgagggggccggagtggcagtaactggggtagagggagtaacatgaactctggcccgccgaggcgaggagcttcacggggtggtggaaggggtcggtagaagctggaactgagtaccctgaggcctctctggacagtatgtaagaacttcttgtggactcaccaagagaaacaaaaggaagcctgcaccattgtagccctgaactcttttctgggcacctgaatcccaggaaccctcaatgaggtcttcaagatgaagagactgctgccagctaccagcctggctggccctgtcctgtccaccctcattgccccaactcccatgttgttttgtgaagataaaagctgggatctttttcttttttttaagtctcacaagacatggggcatctccacaaatttaagttcctgtccatttggaaatttgtttctatgtgtacagtttgtcagagaaaaacaaagtttttgtatgaatacagaatgtgatttacgcaagaattgacagaaaactagttgtgaagtgcttgccttaaggaaacctttggtttccatcgcatcccatctgccaaggaatgcacggttgttgctgatgttcatgagcatattaaccactaggttatcctaaattaatctcagctgtgaactttgtgtttttcaacacattctgtcacaccattttggtgacagaaaaatacttgaaaattattctaatgtagtttgtagtaggttcaaatttttattcagacatgctctgacagatggcaaattgtactctgaagagaaaatgccatcttctggatgtccaacgagggagcttcccctgggaagcatctcctaagaatcacagttcacgttgaatcgcctgtcctgatgacgccgaggacttgatgtagtcagcaactacagttccctgtgcctttaattactggaatcacccatgtggtgattagcatggtccaaataggtgttcaacactttggcgacccttaataagtttccactctttcccttcctaccagtgggaacccacggttcgcaggcagtaatctaccacagaggccaaaatatgtccagcgagcctcgcgtcaatacacccttcgccgcaataaacacccgccatctcgcgcacaaagctgcctatcgctatactaccactcagnn

SEQ ID NO: 19603 - DNA, 748 bp, Homo sapiens
  misc_feature 1, 748: n = A,T,C or G
nacccacgcgtccggtgcgcatgcgcggagcgcggcgcgcgcggcggttgggccgttggctgttcggccctgggatccgccgccactccgcgatcagaccgctctgtgccgcgagccgccgtgagcactcggattcaagccggcgccaacgagtccgggggcatcgcccgcagcggccaagctcatggccggctgagcgggacgccgcctccgcctcagccaccgccgccgccgccgcctcctcctcctcagccggcggcggcccgggcccagcaaccatggctgaagactactgggacgggcgcctgcggcgaacaggaggagaaggaggtcgcgcggcctcatcccgggccgccgccccaggcgccgccgcgccggccccgcggctctgaggttgctcgcgcgcccccgccgtcactattccaggtcctcaggatatagccgtgacctaaacacagaaatctaccctggcggagctgatcttctagttgtggcgatcgccatggatcggatgaagaagatcaaacggcagctgtcactgacactccgaggtggcctaggcatagacaagaccaatggtgcccctgagcagataggcctggatgagagtggtggtggtggcggcagtgaccctggagaggcccccacacgtgctgctcctggggaactttgttctgcacggggcccactcagctctgtaccagagattgtgcacgaggacttgaagatggggtctgatggggagagn

SEQ ID NO: 19604 - DNA, 3660 bp, Homo sapiens
  misc_feature 3656, 3657, 3658, 3659, 3660: n = A,T,C or G
acgccgacccacgcgtccggcttcccgaggctccgcaccagccgcgcttctgtccgcctgcagggcattccagaaagatgaggatatttgctgtctttatattcatgacctactggcatttgctgaacgcatttactgtcacggttcccaaggacctatatgtggtagagtatggtagcaatatgacaattgaatgcaaattcccagtagaaaaacaattagacctggctgcactaattgtctattgggaaatggaggataagaacattattcaatttgtgcatggagaggaagacctgaaggttcagcatagtagctacagacagagggcccggctgttgaaggaccagctctccctgggaaatgctgcacttcagatcacagatgtgaaattgcaggatgcaggggtgtaccgctgcatgatcagctatggtggtgccgactacaagcgaattactgtgaaagtcaatgccccatacaacaaaatcaaccaaagaattttggttgtggatccagtcacctctgaacatgaactgacatgtcaggctgagggctaccccaaggccgaagtcatctggacaagcagtgaccatcaagtcctgagtggtaagaccaccaccaccaattccaagagagaggagaagcttttcaatgtgaccagcacactgagaatcaacacaacaactaatgagattttctactgcacttttaggagattagatcctgaggaaaaccatacagctgaattggtcatcccagaactacctctggcacatcctccaaatgaaaggactcacttggtaattctgggagccatcttattatgccttggtgtagcactgacattcatcttccgtttaagaaaagggagaatgatggatgtgaaaaaatgtggcatccaagatacaaactcaaagaagcaaagtgatacacatttggaggagacgtaatccagcattggaacttctgatcttcaagcagggattctcaacctgtggtttaggggttcatcggggctgagcgtgacaagaggaaggaatgggcccgtgggatgcaggcaatgtgggacttaaaaggcccaagcactgaaaatggaacctggcgaaagcagaggaggagaatgaagaaagatggagtcaaacagggagcctggagggagaccttgatactttcaaatgcctgaggggctcatcgacgcctgtgacagggagaaaggatacttctgaacaaggagcctccaagcaaatcatccattgctcatcctaggaagacgggttgagaatccctaatttgagggtcagttcctgcagaagtgccctttgcctccactcaatgcctcaatttgttttctgcatgactgagagtctcagtgttggaacgggacagtatttatgtatgagtttttcctatttattttgagtctgtgaggtcttcttgtcatgtgagtgtggttgtgaatgatttcttttgaagatatattgtagtagatgttacaattttgtcgccaaactaaacttgctgcttaatgatttgctcacatctagtaaaacatggagtatttgtaaggtgcttggtctcctctataactacaagtatacattggaagcataaagatcaaaccgttggttgcataggatgtcacctttatttaacccattaatactctggttgacctaatcttattctcagacctcaagtgtctgtgcagtatctgttccatttaaatatcagctttacaattatgtggtagcctacacacataatctcatttcatcgctgtaaccaccctgttgtgataaccactattattttacccatcgtacagctgaggaagcaaacagattaagtaacttgcccaaaccagtaaatagcagacctcagactgccacccactgtccttttataatacaatttacagctatattttactttaagcaattcttttattcaaaaaccatttattaagtgcccttgcaatatcaatcgctgtgccaggcattgaatctacagatgtgagcaagacaaagtacctgtcctcaaggagctcatagtataatgaggagattaacaagaaaatgtattattacaatttagtccagtgtcatagcataaggatgatgcgaggggaaaacccgagcagtgttgccaagaggaggaaataggccaatgtggtctgggacggttggatatacttaaacatcttaataatcagagtaattttcatttacaaagagaggtcggtacttaaaataaccctgaaaaataacactggaattccttttctagcattatatttattcctgatttgcctttgccatataatctaatgcttgtttatatagtgtctggtattgtttaacagttctgtcttttctatttaaatgccactaaattttaaattcatacctttccatgattcaaaattcaaaagatcccatgggagatggttggaaaatctccacttcatcctccaagccattcaagtttcctttccagaagcaactgctactgcctttcattcatatgttcttctaaagatagtctacatttggaaatgtatgttaaaagcacgtatttttaaaatttttttcctaaatagtaacacattgtatgtctgctgtgtactttgctatttttatttattttagtgtttcttatatagcagatggaatgaatttgaagttcccagggctgaggatccatgccttctttgtttctaagttatctttcccatagcttttcattatctttcatatgatccagtatatgttaaatatgtcctacatatacatttagacaaccaccatttgttaagtatttgctctaggacagagtttggatttgtttatgtttgctcaaaaggagacccatgggctctccagggtgcactgagtcaatctagtcctaaaaagcaatcttattattaactctgtatgacagaatcatgtctggaacttttgttttctgctttctgtcaagtataaacttcactttgatgctgtacttgcaaaatcacattttctttctggaaattccggcagtgtaccttgactgctagctaccctgtgccagaaaagcctcattcgttgtgcttgaacccttgaatgccaccagctgtcatcactacacagccctcctaagaggcttcctggaggtttcgagattcagatgccctgggagatcccagagtttcctttccctcttggccatattctggtgtcaatgacaaggagtaccttggctttgccacatgtcaaggctgaagaaacagtgtctccaacagagctccttgtgttatctgtttgtacatgtgcatttgtacagtaattggtgtgacagtgttctttgtgtgaattacaggcaagaattgtggctgagcaaggcacatagtctactcagtctattcctaagtcctaactcctccttgtggtgttggatttgtaaggcactttatcccttttgtctcatgtttcatcgtaaatggcataggcagagatgatacctaattctgcatttgattgtcactttttgtacctgcattaatttaataaaatattcttatttattttgttacttggtacaccagcatgtccattttcttgtttattttgtgtttaataaaatgttcagtttaacatcccagtggagaaagaagnnnnn

SEQ ID NO: 19605 - DNA, 1103 bp, Homo sapiens
  misc_feature 1098, 1099, 1100, 1101, 1102, 1103: n = A,T,C or G
gcgtccgcccgtcgtccagcccgcggcgagagcgggtatgtgggcggcgggccggagcagctgtcaggctgaagtcctgcgagcgacgcgcggcggggcggcgagaggaaacgcggcgccgggccgggccctggagatggtccccggcgccgcgggctggtgttgtctcgtgctctggctccccgcgtgcgtcgcggcccacggcttccgtatccatgattatttgtactttcaagtgctgagtcctggggacattcgatacatcttcacagccacacctgccaaggactttggtggtatctttcacacaaggtatgagcagattcaccttgtccccgctgaacctccagaggcctgcggggaactcagcaacggtttcttcatccaggaccagattgctctggtggagagggggggctgctccttcctctccaagactcgggtggtccaggagcacggcgggcgggcggtgatcatctctgacaacgcagttgacaatgacagcttctacgtggagatgatccaggacagtacccagcgcacagctgacatccccgccctcttcctgctcggccgagacggctacatgatccgccgctctctggaacagcatgggctgccatgggccatcatttccatcccagtcaatgtcaccagcatccccacctttgagctgctgcaaccgccctggaccttctggtagaagagtttgtcccacattccagccataagtgactctgagctgggaaggggaaacccaggaattttgctacttggaatttggagatagcatctggggacaagtggagccaggtaggaggaacaagggtttgggcgttgctaggctgaaagggaagccacaccattggccttcccttccccagggccccaagggtgtctcatgctacaagaagaggccagagacaggcccaggcttttgggtagaaccggaacaaagagccgaaggccggtggctcgagaccatttgggactgtccccaccgggtccagctcccaccaggtctcgcacggcctacgcgcgggggcgggtcacaaccgtgggggcgccaaaccccggtcagaaagtacccggaacaannnnnn

SEQ ID NO: 19606 - DNA, 1066 bp, Homo sapiens
  misc_feature 1, 2, 3, 1062, 1063, 1064, 1065, 1066: n = A,T,C or G
nnnccgctagcattggaggagtccacatcccctcttcagccgcagcacccctccctcccatcctctagctcttcccgcggtggtcgcctccctccgaccctgctctcccctcctgggccccgcgcaaagccccctctgttccagctcccgggcctcggctgcctccccgccctcccatcccttcctcttcccagggcctggagcgctcccttacattcctgagatgcccttcctcggggctgtccccctttgcctccccagcatcccatttctaggcctttttcaagacccttccagagcggcccctttccagctccctttctcgtttccatttccaactttgcctcttttgcctctttgttcactttgcttccaagctcccctccctctttcccttcgtcttaccctgctttgatctacgcagccccaaactcaagctccccgctttcaggtggtgcgaggttgtttgggggtgcggaagggcctgccagtccatttttcgaggggggcccattgctctgcatcccgtccgtcagtcccttttatagtaagagggctcctcatcccttcctttttgtccccgtggtttcctctgtcttgccatcccttctgtcttctccctccaatactgctttccccacccaaggaccctcagacccgtgaaccccccttctggaatgactgccctttctgttcggggatgctgaacttcgcccgcgtttttcttcgcgagccttttggtcttctgcaagaaaataaaaacgaaaacacaaaacagcatggctgcaaaggagaaactggaggcagtgctaaatgtggccctgagggtgccaagcatgatgctggcggatgtcctgtacagatgggatgtgaggtcctttgtccagcagatgcaaagaagcagcctatagtgataaccctcttttccattataagcattcggctctcaatatacattatgtaggggatatgttaagtgtggggctggtaacattggccaggcagcatctggttgacatttatctatattactggactgctgtgctcctctatgctggacannnnn

SEQ ID NO: 19607 - DNA, 600 bp, Homo sapiens
  misc_feature 1, 2, 3, 600: n = A,T,C or G
nnnccgtagatcgcgagccgccgccctttttttttttttttataagattattagtataaaaggggagagaggttagggccctgggaaaggtgggagatcagccagagacaggtttcccagaacagaatgtctggcctttgtggtgaggagggactgtggtatgagccgcagaagcgggccaggggtaaaccctcctgtgcgtccttccttcagcctggtcctgagggtgaccctttgatcctgggttctccaggtagggctgtgagctgtgagttggatccttttggtgaaatggtctctctcatctggcctgtcactcaatgtggaatagagtgagtgagttctatgggttctaagtcctgctctggaaccataagtaagttatcctctctgggcttcagtttttcatggaaagttgcgttaagaatctagtttaaggccaggcatggtggctcacgcctgtaatcccagcactttgggaggccaaggaaggtggatcatgaggtcaggagatcgagaccatcctggctaacatgatgaaaccgtgtctctactaaaaaatacaaaaaattagctgggcgtggtggaaggcacctgtan

SEQ ID NO: 19608 - DNA, 2696 bp, Homo sapiens
  misc_feature 1, 2525, 2526, 2527, 2528, 2529, 2530, 2531, 2532, 2533,2534, 2535, 2536, 2537, 2538, 2539, 2540, 2541, 2542, 2543,2544, 2545, 2546, 2547, 2548, 2549, 2550, 2551, 2552, 2553,2554, 2555, 2556, 2557, 2558, 2559, 2560, 2561, 2562: n = A,T,C or G
  misc_feature 2563, 2564, 2565, 2566, 2567, 2568, 2569, 2570, 2571, 2572,2573, 2574, 2575, 2576, 2577, 2578, 2579, 2580, 2581, 2582,2583, 2584, 2585, 2586, 2587, 2588, 2589, 2590, 2591, 2592,2593, 2594, 2595, 2596, 2597, 2598, 2599, 2600, 2601: n = A,T,C or G
  misc_feature 2602, 2603, 2604, 2605, 2606, 2607, 2608, 2609, 2610, 2611,2612, 2613, 2614, 2615, 2616, 2617, 2618, 2619, 2620, 2621,2622, 2623, 2624, 2625, 2626, 2627, 2628, 2683, 2684, 2685,2686, 2687, 2688, 2689, 2690, 2691, 2692, 2693, 2694: n = A,T,C or G
  misc_feature 2695, 2696: n = A,T,C or G
ntggggagctgctggccccgggcggctgctccagtctgagcgccctccgctcgccccgagagagacccggccatgcaggagccgctgctgggagccgagggcccggactacgacaccttccccgagaagccgcccccgtcgccaggggacagggcgcgggtcgggaccctgcagaacaaaagggtgttcctggccaccttcgccgcagtgctcggcaatttcagctttgggtatgccctggtctacacatcccctgtcatcccagccctggagcgctccttggatcctgacctgcatctgaccaaatcccaggcatcctggtttgggtccgtgttcaccctgggagcagcggccggaggcctgagtgccatgatcctcaacgacctcctgggccggaagctgagcatcatgttctcagctgtgccgtcggcggccggctatgcgctcatggcgggtgcgcacggcctctggatgctgctgctcggaaggacgctgacgggcttcgccggggggctcacagctgcctgcatcccggtgtacgtgtctgagattgctcccccaggcgttcgtggggctctgggggccacaccccagctcatggcagtgttcggatccctgtccctctacgcccttggcctcctgctgccgtggcgctggctggctgtggccggggaggcgcctgtgctcatcatgatcctgctgctcagcttcatgcccaactcgccgcgcttcctgctctctcggggcagggacgaagaggccctgcgggcgctggcctggctgcgtgggacggacgtcgatgtccactgggagttcgagcagatccaggacaacgtccggagacagagcagccgagtatcgtgggctgaggcacgggccccacacgtgtgccggcccatcaccgtggccttgctgatgcgcctcctgcagcagctgacgggcatcacgcccatcctggtctacctgcagtccatcttcgacagcaccgctgtcctgctgccccccaaggacgacgcagccatcgttggggccgtgcggctcctgtccgtgctgatcgccgccctcaccatggacctcgcaggccgcaaggtgctgctcttcgtctcagcggccatcatgtttgctgccaacctgactctggggctgtacatccactttggccccaggcctctgagccccaacagcactgcgggcctggaaagcgagtcctggggggacttggcgcagcccctggcagcacccgctggctacctcaccctggtgcccctgctggccaccatgctcttcatcatgggctacgccgtgggctggggtcccatcacctggctgctcatgtctgaggtcctgcccctgcgtgcccgtggcgtggcctcagggctctgcgtgctggccagctggctcaccgccttcgtcctcaccaagtccttcctgccagtggtgagcaccttcggcctccaggtgcctttcttcttcttcgcggccatctgcttggtgagcctggtgttcacaggctgctgtgtgcccgagaccaagggacggtccctggagcagatcgagtccttcttccgcacggggagaaggtccttcttgcgctaggtcaaggtccccgcctggagggggccaaacccccagtggctgggcctctgtgttggctacaaacctgcaccctgggaccaagaggcagcagtcatccctgccaccagccagagcacaggaagagcagtgtgatggggcctcagcagcgggtgcccctggctcgggacaggtagcactgctgtccagccacagccccagcccaggcagcccacagtgctgcacgtagccatgggccgcaggagtgcatacaaccctgcatccagggacacggccctgctgggtgacctcaggcctagtccctttcccttgcgtgaaggacacgccccacagaaggctacggggaggactgagaggacagggctggaggcagccaagtaacgtagtcatatcatcgcgctctgatctggtggcatctggctgtgcaaggaagacccggctttgccctcacaagtcttatgggcaccacagggaacatcctggacttaaaaagccagggcaggccgggcacagtggctcacgcctgtaatcccagcactttgggaggccaaagcaggtggattacccaaggccaggagttcaagaccagcctggccaacatggtgaaaccccgtctctactaaaaaatacaaaaaagctgggtgtggtggcacacacccgtagttccagctacttgggaggctgaggcagcattgcttgaacccgggaggtggaggctgcaatgagctgagatcatgccattgcactccagcctgggcaacgagagtgaaactccgtccccaccccctgccaaaaaaaaaaaaaaaaaagccagggcaaaggacctggcgtggccacttcctcctgccccagcccaacctctgggaacaggcagctcctatctgcaaactgtgttcacccttttgtaaaaataaaggaactggacccgtccnnnnnnnnnnnnnnnnnnnnnnnnnnnnnnnnnnnnnnnnnnnnnnnnnnnnnnnnnnnnnnnnnnnnnnnnnnnnnnnnnnnnnnnnnnnnnnnnnnnnnnnngctcgttaacctagccaaaaaaaaaaacttcccacgcgggccctgaatctggaannnnnnnnnnnnnn

SEQ ID NO: 19609 - DNA, 2982 bp, Homo sapiens
  misc_feature 1, 2, 3, 4, 5, 6, 2978, 2979, 2980, 2981, 2982: n = A,T,C or G
nnnnnngcgtttacagcgaggcgcccgtctcggcctcggagttgccgctgttgttccttctgtggtgggctcttgctcctgcgcgtctctggatggtgctgtgtgctgctctcggccccatatatggctgagtcccgcgcgcccaggggggcttgttctgcgcctgttttggcactaggcgccctaggtctccgggatttgcccgatccaatttcgcggggcccatttccaacccccctgggtccggacccaaggactgaatgacgtgcaaagtggcaaagtggctttatgcgcaggctctgggccgagtaccaggagaaggtgcctccggaggaggccgggatgcggctggggctgtctggcacggggaccttcgtggccagccacgtggccttgggacgcccgcgtccagccagggctgaggacccaggccagagcccctcccgcccagcacccgcgacgccagcctggatgctggggtcactaagtgaggtactcgttggttccctggatgggccaccctttctgccctgggaggaggctctggggtgtgcaggagggagccagctaacaggtcagtgttctgggcagaagtggggcacgaagtaacacaggccctgaggacacagggacacaggtgacacgggccttaaaagtggcttgtgacatgagcaacccaggcccctgaaaaggggtgacctgaagacagaggttccccaggtggggtgagggacacccgacgatgcagcacccccccagggaaacgtgaggcttcaagagactcagtgtggggccctcgctctcctcctgggcgagcagggccgcggcgccccagcactggggctgccaggtatcgacccgcgggtcacacgcagggccgcggccgggtgggcgccagggacttcggggcatgcggggcgtcgggccgggcggggtggcagctgcccggcctgcccggccctagctctcttccaggtggaggctgatgaactcctggatacacctgcggaactggagctccgtggggctgcccgccagggcgcccgggggaccaggggcagcctcggcctcgcgcatttcctccgccatgcgcgccagacggagcagtgtcacgatgtcagcgttggccgcctgcactgcgatggccaacgggtcccgctgctcttggtccagggcgtgctggtccgcgccccgcttcaggaacaggcaaacctggccggtgcggcccagcagcgtggcgtggtgcaggggcgcccggccccggctgtctctttggttcacgtccgctccgttttgcagcaggaactcacagacgatcaaggagccccctagcacggcctgcaccagcggcgtcttgccctcatcctccgcgtccgcccagttgacctcggccccgtgggccagcgccgccgccagcgcaggaaggtcgcgggcacgcgctgcgcggtgcgccaagagccccgggtgcagctcgcgcacgtccgccaggccccaggcctcggcctcagtgtccccgtctgcctcaccgctggactcctccgactctgcaccctcctcctcagtgacgctgtccaccacagagcccgagccgaaagccaggacgtccgagctgccatccgagctgcccccaaggccactgtcgctactcagactgcgagggccagcccctgcggcccctgcgtcgaagtaggagaagagcgagtccagctcgtcgggacagaagagggagtctcggcggaacttacgatccagggtgcccactgaggacagagcggccacacagggcagaacgggctcaagccggaccttgcggcgggcagtgggagcgcggggagagctgtggggccgcaggcacttctgcaccctccagcgtcttggggcctccagggctggtgccatgggcgccttccgcagaaacttcttttccacgtatttgtccttgatccaggcctccttgtcctgccgggagctgctggctgtgggtttcctgctgcctgcaccctcacactgggcctcatagatctgattcacagcgctgtttccaagctcacacatcagctttagcagctcaggctcccacgagtccagcgtcagggaccgcaccttggagcagtggacacccaggctcctgtggatgccggagcactcaatgcagagcagcacgcccaggttgatgctggcccagcgggggtccggctggccgcagtcgccgcactggctgttgccggccacactctgcacacgctgcagcacactctcgcccttcacgccacgctcccgagtgtcggtggcggagtcgatgctgctcgtggacggggatgctgtgcggtccagcctctcgctatagcaactgtcagggctctcgcggtaggcggaggcgatgctggcctgcacagcctggacccaggcttgccgcagcttctcggagtcagcctgcagcatgcagctcttggtgggtgacagcacctcgaagcagaacctccgctcgatgtcctcacacggcttcacagagcacaggcggaggtcatccaccaccacggtgagggcatccttgagcttcttctggtagaccagctggctgttctgaatggagaaccagcgccggttccatgtcttgaaagcgttgctggccctcttgaagaggtagcacctccatcaccaccccactgggcgcgtccacgtcaaactccactttggactcatcgtaggagaagtcctggggggatggaacccgccccctcagtgcccaccccaggggccctgctaccctccgtgctttcccggagcacaggtgggggtgaggtccttgtctgaggctgccacacggcccacggaccacacgctcagacgagagaccctctgttcaccacagccacttcttgacctgagcaaggcccccagccctgcaacccgtggggcagacccctcacgttcacagctgggggcccgagagtgccggccccaccccagccctgcannnnn

SEQ ID NO: 19610 - DNA, 5145 bp, Homo sapiens
  misc_feature 1, 2, 3, 4, 5123, 5124, 5125, 5126, 5127, 5128, 5129, 5130,5131, 5132, 5133, 5134, 5135, 5136, 5137, 5138, 5139, 5140,5141, 5142, 5143, 5144, 5145: n = A,T,C or G
nnnncccctcgccactaccgccgccgccgccgccgtgagtcccgcggagccgcgcgcgcccccggctgggccgagccgctggccgacgagcggagcctcaggagccggcggggacgccatgcgagccagcgtctcccttctctcctggacagaaggccgtgtcctgggacttctctgatggcgagaggctgcggctgtaccaggaagaaacatattgccgagtggatgccgccgcgcagcgtgtttgcttgaggcagaagcttcagcatctgctgggataactggaggaagaaatatgaagccttagcggctttacccgggaagcgagtttcgagatggcggctcagcggatccgagcggccaactccaatggcctccctcgctgcaagtcagaggggaccctgattgacctgagcgaagggttttcagagacgagctttaatgacatcaaagtgccttctcccagtgccttgctcgtagacaaccccacacctttcggaaatgcaaaggaagtgattgcgatcaaggactattgccccaccaacttcaccacactgaagttctccaagggcgaccatctctacgtcttggacacatctggcggtgagtggtggtacgcacacaacaccaccgaaatgggctacatcccctcctcctatgtgcagcccttgaactaccggaactcaacactgagtgacagcggtatgattgataatcttccagacagcccagacgaggtagccaaggagctggagctgctcgggggatggacagatgacaaaaaagtaccaggcagaatgtacagtaataaccctttctggaatggggtccagaccaatccatttctgaatgggaacgtgcccgtcatgcccagcctggatgagctgaatcccaaaagtactgtggatttgctcctttttgacgcaggtacatcctccttcaccgaatccagctcagccaccacgaatagcactggcaacatcttcgatgagcttccagtcacaaacggactccacgcagagccgccggtcaggcgggacaaccccttcttcagaagcaagcgctcctacagtctctcggaactctccgtcctccaagccaagtccgacgctcccacatcgtcgagtttcttcaccggcttgaaatcacctgcccccgagcaatttcagagccgggaggattttcgaactgcctggctaaaccacaggaagctggcccggtcttgccacgacctggacttgcttggccaaagccctggttggggccagacccaagccgtggagacaaacatcgtgtgcaagctggatagctccgggggtgctgtccagcttcctgacaccagcatcagcatccacgtgcccgagggccacgtcgcccctggggagacccagcagatctccatgaaagccctgctggaccccccgctggagctcaacagtgacaggtcctgcagcatcagccctgtgctggaggtcaagctgagcaacctggaggtgaaaacctctatcatcttggagatgaaagtgtcagccgagataaaaaatgacctttttagcaaaagcacagtgggcctccagtgcctgaggagcgactcgaaggaagggccatatgtctccgtcccgctcaactgcagctgtggggacacggtccaggcacagctgcacaacctggagccctgtatgtacgtggctgtcgtggcccatggcccaagcatcctctacccttccaccgtgtgggacttcatcaataaaaaagtcacagtgggtctctacggccctaaacacatccacccatccttcaagacggtagtgaccatttttgggcatgactgtgccccaaagacgctcctggtcagcgaggtcacacgccaggcacccaaccctgccccggtggccctgcagctgtgggggaagcaccagttcgttttgtccaggccccaggatctcaaggtctgtatgttttccaatatgacgaattacgaggtcaaagccagcgagcaggccaaagtggtgcgaggattccagctgaagctgggcaaggtgagccgcctgatcttccccatcacctcccagaaccccaacgagctctctgacttcacgctgcgggttcaggtgaaggacgaccaggaggccatcctcacccagttttgtgtccagactcctcagccaccccctaaaagtgccatcaagccttccgggcaaaggaggtttctcaagaagaacgaagtcgggaaaatcatcctgtccccgtttgccaccactacaaagtacccgactttccaggaccgcccggtgtccagcctcaagtttggtaagttgctcaagactgtggtgcggcagaacaagaaccactacctgctggagtacaagaagggcgacgggatcgccctgctcagcgaggagcgggtcaggctccggggccagctgtggaccaaggagtggtacatcggctactaccagggcagggtgggcctcgtgcacaccaagaacgtgctggtggtcggcagggcccggcccagcctgtgctcgggccccgagctgagcacctcggtgctgctggagcagatcctgcggccctgcaaattcctcacgtacatctatgcctccgtgaggaccctgctcatggagaacatcagcagctggcgctccttcgctgacgccctgggctacgtgaacctgccgctcacctttttctgccgggcagagctggatagtgagcccgagcgggtggcgtccgtcctagaaaagctgaaggaggactgtaacaacactgagaacaaagaacggaagtccttccagaaggagcttgtgatggccctactgaagatggactgccagggcctggtggtcagactcatccaggactttgtgctcctgaccacggctgtagaggtggcccagcgctggcgggagctggctgagaagctggccaaggtctccaagcagcagatggacgcctacgagtctccccaccgggacaggaacggggttgtggacagcgaggccatgtggaagcctgcgtatgacttcttactcacctggagccatcagatcggggacagctaccgggatgtcatccaggagctgcacctgggcctggacaagatgaaaaaccccatcaccaagcgctggaagcacctcactgggactctgatcttggtgaactccctggacgttctgagagcagccgccttcagccctgcggaccaggacgacttcgtgatttgaatgggtcccctcccctcctgctgctctggagtgcaagccctcttctgccctgcgtgccctgctgtcaccgcggagctgaagagggaggaaggggcggctgctcagacagatttagggcccgccagctaggctacacccatcatgcgccgccctcctccatcgagggagaggcctgaagggactgcctactgcagctcgttgccaatcacatagctttctatttgttaagtataaatttaaatttaaaatcacttttttaacgaatggggggaagggatctatgagaaaggtggtatctaatttttttatggaccataaaggtttaaaagaaaataggggcacaggctgttgaggtttttatgttgttatagacctttttaaattatgttagagatgtatataggtatttaaaggtcactgggagcgtttctgattcccggccacactttgcatttcaacactcagcccggaaagatgctcgttcggttgttggacctctttcactccctgcgtgtaagaaggtgaatcacgtgggaaaaagtggcttttcagtaaacgggtacagctcattctttctgagaaggccccaggtcctgctccctcctcggatttgattgtcttccgtgctttgcctcactcgtagtaaatgaccatccatagaatatgtgaatctttggtgagcttcagtgggcagagtgaagtcccgcattagcatttaggtgccctgagctgtttctgccaatagattagaaagcagccatgagttgacagtctttagggcccctgccagtgtgcaattagtcattgacaagaacaatgccatttgagagtgaggtggtccctgctgctacgaggccattgtactgttttttccttgaggtcaaagcagtgcttcccatagagtttgctgcctcttctgtggacaggaagaaaacttcatgaccgaatcagagccttggtggccactgactctcgtgcttattgcagatgctgtggttggcctcacaagcaacgccttatgctgatgtgcagaggtgccagctgccatttgccaaactctgcatttcatttcatctaaggcttaacccctcttccttcctggtgtacctgtgtctcctcggaaggaagtcatagtttagatgaaaccattttttgtacaatgtaaagatcatctgagcaagatgagcattttgtaaaaatgaaaatgtgactcacataaaatcaggaacttgacacagtgttgcattaataactttagggtgcagacatgctgtgtgaatctcacaatgcgtcgtagatgtcgcgtgttggaagggagcaggaggaaggactgatactggcaaatcagtagagtgaggtgatccttagcaacgtgccaggacacttcctgtgtgcctgcagttgtcagggaccatttgggatcccgaatctcattctctaaaactgctttcttgaaacatgttacttccttagtataatcaatgtatactcccttactggcctgaaacgttgtatagctacttattcagatactgaagaccaacggactgaaaaaaagaacaaacattagctattttatgctgcaagaaccaggacacacaattcgccaatcatcccaccatataaccttcgattgtgcttctcaactccaccccataatttctcccagagaccatctatcaccttttccccaaagaagaaacaaaaccagttgcaccttaaaccatggatattttttcctcaggggctttaaatagtttcctatgcaacgtgtcttgtagcacaaataaaattctacaaaagttgcagtaaattttatttggatattttaacctgttaagtgtgtgtgtgttttctgtacccaaccagactttaaataaaacaaacatgaaaccnnnnnnnnnnnnnnnnnnnnnnn

SEQ ID NO: 19611 - DNA, 3226 bp, Homo sapiens
  misc_feature 1, 2, 3, 82, 129, 130, 3224, 3225, 3226: n = A,T,C or G
nnngagtgttgcctttacttcttaaggcctgtacggaaaaggttacttcttgctctaaaagctgcgggaattctaaatacgnacttcaccataacgagtcgacccaccgcgttccgcagaggacccaanncccaccagcctgggcccacgggaagccagacctcctcgaaggagcagccagccatctccaacagcagtgcccagcctccgacagccctcccaccaagcaagaggtgaagaaggcaggagagagacacaagctggcaaaggagcggcgagaagagcgggccaagtacctggcggccaagaaggcagtgtggctggagaaggaggagaaggccaaggcgctgcgggagaagcagctccaggagcgccggcgccggctggaggagcaacgtcttaaagccgagcaacgccgtgcagccctggaggaacggcagcggcagaagctcgagaaaaacaaggagcgctatgaagcagccatccaacggtcagtgaagaagacgtgggccgaaatccggcagcagcgctggtcctgggcaggggccctgcaccacagctctccaggacataagaccaatcgcagcctgcagctgagcgcatgggagagcagcatcgtggatcgtctgatgacgcccactctctccttccttgctcggagtcgcagcgcggtcacactgccccgcaacggccgggaccagggtaggggctgcgaccctgggagaggccccacgtggggccgggcaggggccagcctggcgcgcgggccgcaacccgaccgcactcatccctctgcagccgtgccggtgtgcccgcgctcggcctccgccagccccctgacgccgtgcagcgtcacccgaagcgtgcaccgctgcgcccccgccggtgagcgcggggagcgccgcaagcccaacgccgggggcagccccgctccggtgcgccgccggccggaggcctcgccggtgcagaaaaaggagaagaaggacaaggagcgggaaaacgagaaggagaagagtgccctagcccgggagcgcagcctcaagaagcgccagtcgctgcccgcctccccacgtgcccgcctctctgccagcaccgcctctgagctcagccccaaatccaaggccaggccatcctctccctccacatcctggcacaggcctgcctccccctgccccagcccagggccaggccacactctgcctccaaagccaccgtccccccgaggcaccactgcatcccccaaggggcgggttcggaggaaggaggaggcaaaggagagccccagcgccgcagggcccgaggacaagagccagagcaagcgcagggccagtaacgagaaggagtcagcagccccagcctcaccggcaccttcgccggcgccctcgcccaccccagccccgccccagaaggagcagccccccgcggagacccctacagacgctgctgtcttgacctcacccccagcccctgctcccccggtgacccctagcaaaccaatggccggcaccacagaccgagaagaagccactcggctcttggctgagaagcggcgccaggcccgggagcagcgggagcgcgaggagcaggagcggaggctgcaggcagaaagggacaagcgaatgcgagaggagcagctggcacgggaggccgaggcccgggcggagcgggaggcggaggcccggaggcgggaggagcaggaggcacgagagaaggcgcaggccgagcaggaggagcaggagcggctgcagaagcagaaagaggaggccgaagctcggtcgcgggaagaggcggagcggcagcgtctggagcgggaaaagcacttccagcagcaggagcaagagcggcaagagcgcagaaagcgtctggaggagatcatgaagaggactcggaagtcagaagtttctgaaaccaagaagcaggacagcaaggaggccaacgccaacggttccagcccagagcctgtgaaagctgtggaggctcggtccccagggctgcagaaggaggctgtgcagaaagaggagcccatcccacaggagcctcagtggagtctcccaagcaaggagttgccagcgtccctggtgaatggcctgcagcctctcccagcacaccaggagaatggcttctccaccaacggaccctctggggacaagagtctgagccgaacaccagagacactcctgccctttgcagaggcagaagccttcctcaagaaagctgtggtgcagtccccgcaggtcacagaagtcctttaagagggtttgccttggatccgggcacagttgtgagggctcctctgcatcacctaccaggatgtctggaggagaaaaagacagaacaaagatggaagtggcctgggcccctgggggtgggtcctctctgttgtttttaatctgcaccttatagactgatgtctctttggccggagccagatctgcccctcagtgcattcgtgtgctcgcacgcgcagacatcccttctcccccatacacacatatacactcacagcctctctggcctcttcccttggggaggggccacctgtagtatttgccttgatttggtggggtacagtggatgtgaatactgtaaatagcttgtgctcagactcctctgcgtggagagggtgggtgcaggaggcagaccctccccccaaagccccctggggagatcttcctctctctatttaactgtaactgagggggatcccaggtctggggatgggggacaccttgggccacaggatactggttgcttcaggggtacccatgccccctgccctcgcctggaatcagtgttactgcatctgattaaatgtctccagaaataaagaataattctgccaaaaaaaaaaaaaaaaaaaaaacaacacaaaacacacaaacaaaaaacaataaagaaaaacaaaaaacaaaaaaaaaaaaaaaaaaacaacagctatgtgggagacgcgccaaacaggacgcacaagcaacagaacaacaacaaccgagcgtcgggcgcggcgcccggccagagcacatgagcgccgctcacccaaggcggccggggccggcggcccccaacaggagcacagcagacgcaaggcggtggagtgcctccacacaagtcaacgaagcccgccagccagcagtagcgccgcgctcgcacacaaaacacaacgcggggggagcaagcgagtgacgaagtgagtcaacacacagcggcggggcccgagggcggcccannn

SEQ ID NO: 19612 - DNA, 425 bp, Homo sapiens
  misc_feature 369, 423, 424, 425: n = A,T,C or G
gaaacggactttctcatcatgctttcctatggtgggtatgtggggccagctgataccaaccaactggcctgtatctatctatctggatttgacttgaatttttaaaatgtgtatcgtttaaaaaaaaaaatgtttgcaaattttgcacataggatcttgcactgttcattttcagtggggtgagtcttcacactaaaaacacaagcagagctcctgggaaaagagactggaagtggttcaggataaagagatccatggtgggcagggctcttaggtcacagagctctagaagcagctggacttgaacccacaatggcttgtgtaaattcgtaaatttcatggtttctaggaaaagctgcattggggtgngggagacccaagtttgcctcataggcagaggattctccaggaagcatggaaaannn

SEQ ID NO: 19613 - DNA, 1163 bp, Homo sapiens
  misc_feature 1, 2, 3, 4, 5, 6, 7, 1163: n = A,T,C or G
nnnnnnngtctcctaatcttgcaaccctttgtgccaagaaagggcttttatttgttccaccaaacattgacagaagaactgtggaactgcggttggcagacaattttgttacaaatattaaaaggaaagattttgccaatatgaccagcttggtggacctgactctatccaggaatacaataagttttattacacctcatgctttcgctgacctacgaaatttgagggctttgcatttgaatagcaacagattgactaaaattacaaatgatatgttcagtggtctttccaatcttcatcatttgatactgaacaacaatcagctgactttaatttcctctacagcgtttgatgatgtcttcgcccttgaggagctggatctgtcctataataatctagaaaccattccttgggatgctgttgagaagatggttagcttgcatacccttagtttggatcacaatatgattgataacattcctaaggggaccttctcccatttgcacaagatgactcggttagatgtgacatcaaataaattgcagaagctaccacctgaccctctctttcagcgagctcaggtactagcaacctcaggaatcataagcccatctacttttgcattaagttttggtggaaaccccttgcattgcaattgtgaattgttgtggttgaggcgtctgtccagagaagatgacttagagacctgtgcttctcctccacttttaactggccgctacttttggtcaattcctgaagaagagtttttgtgtgagcctcctctcattactcgtcatacacatgagatgagagtcctggagggacaaagggcaacactgaggtgcaaagccaggggagaccctgagcctgcaattcactggatttctcctgaagggaagcttatttcaaatgccacaagatctctggtgtatgatcacggaacacttgacattcttatcaccactgtaaaggatacaggtgcttttacctgccttgcttcccatcctgctggggaagcacacctaatagtggatcttcatataattaagatccctcacttactaaatagtacaaaccatatccatgagcctgatcctggttcttcagatatctcaacttttaccaagtcaggttctaatacaagcagtagtaatggtgatacn

SEQ ID NO: 19614 - DNA, 1094 bp, Homo sapiens
  misc_feature 1, 2, 1094: n = A,T,C or G
nnagaaatcaatttgaatccaaatggtaacaaaatcgacgaaaccattaaatgtaacccttaaaattttagaatatccttggtgactataataatggccttattttctttactcttcacattttaataggtaactattttacaagaataacattgctaggtagaaaaatttctgttcagttaggagttcttattttgctgctgaaatgagtcatgcacaattttaaatctctgtagtttcttcataagctattttactatcttactattttataagccttgtgttgcagtcaagtttttaccacattctatagaccttgtctgtacaccatttatgaaatggaaatttgaatatgacatcttttatgccctctacttacttttaaagcaaaaatattgttgaataggaacacatagcttttatttaaacaatgttttttccccctaaatttcttgtatgaatactcacctttgcttaaaagtgcttgagaaatactgccccccaggaggcatttgacaatgtctggagacattttttgattgtcatgactgcggggggagcatgctctggcatcgggtagctagaggccaggaatgctgctaaacatacgctaaacataccttctaggacagggctgctgtcctacaaggtacaggacagcccctgcaaggaagaatcacctggccccaaatgacagtagcgcccaggttgagagaccctgtcctggtgtgataaatggtgcagagacaagtggctaatggtttatagtaattcaactactccctggaaacagtgtaaactaggctgattacctaaggcaaggctaaccaaagctttcaagttccgtatatgtatgtttagcacttatttaaggaagtactcacctaaaggaggtgagacagagtaaaaggaaggatgtgctataattgtttgtatagcacattgaaaagctagtatttacatatacagtactaactttttttttgtttgtttgtttgagacagagtcttgccctgtcacccaggccctgtctcaaaaaacaaaataaaaaaaaaccgcaaaaaaacaaagggcggcccggacgcgtgggtcgn

SEQ ID NO: 19615 - DNA, 528 bp, Homo sapiens
  misc_feature 1: n = A,T,C or G
nggcatgtagagcttgaaaccttgcatggcttgtttatgacattcttgagaaaagacacttagtgactcttcaggcaggagctggatctgtgcagtcagcttctggatctccaggcccagctgctgctccacttccagagctaagctttcctctgaggccaggctatacaaagcttctgcctcatgcaacagaggaggtaagtccttttggatcaggagcaggaagcaagctgggtcccatgctgccaagtactgctgagctctgcccagcgaagaccgcccgttcgacttctctcccactgctcctccccagtgcccccgggttgcgccctcagcgggggcacgataacgagtggaggcaggctacctgagcgagacgcctgggccatggggcggcgggtccagaacgaacctaacgattcccacttccctgcacggaccaacgcccgccgcagctcggacttcgccccatcgcaagagccgttttctcccagtccgggagtcgcggggacccggacgcgtgggtcg

SEQ ID NO: 19616 - DNA, 2231 bp, Homo sapiens
  misc_feature 2203, 2204, 2205, 2206, 2207, 2208, 2209, 2210, 2211, 2212,2213, 2214, 2215, 2216, 2217, 2218, 2219, 2220, 2221, 2222,2223, 2224, 2225, 2226, 2227, 2228, 2229, 2230, 2231: n = A,T,C or G
gcgtccggcggagggggcgtgcatgcagagtgcgcgtcccgtctgccagccggcttggctagcgcgcggcggccgtggctaaggctgctacgaagcgagcttgggaggagcagcggcctgcggggcagaggagcatcccgtctaccaggtcccaagcggcgtggcccgcgggtcatggccaaaggagaaggcgccgagagcggctccgcggcggggctgctacccaccagcatcctccaaagcactgaacgcccggcccaggtgaagaaagaaccgaaaaagaagaaacaacagttgtctgtttgcaacaagctttgctatgcacttgggggagccccctaccaggtgacgggctgtgccctgggtttcttccttcagatctacctattggatgtggctcaggtgggccctttctctgcctccatcatcctgtttgtgggccgagcctgggatgccatcacagaccccctggtgggcctctgcatcagcaaatccccctggacctgcctgggtcgccttatgccctggatcatcttctccacgcccctggccgtcattgcctacttcctcatctggttcgtgcccgacttcccacacggccagacctattggtacctgcttttctattgcctctttgaaacaatggtcacgtgtttccatgttccctactcggctctcaccatgttcatcagcaccgagcagactgagcgggattctgccaccgcctatcggatgactgtggaagtgctgggcacagtgctgggcacggcgatccagggacaaatcgtgggccaagcagacacgccttgtttccaggacctcaatagctctacagtagcttcacaaagtgccaaccatacacatggcaccacctcacacagggaaacgcaaaaggcatacctgctggcagcgggggtcattgtctgtatctatataatctgtgctgtcatcctgatcctgggcgtgcgggagcagagagaaccctatgaagcccagcagtctgagccaatcgcctacttccggggcctacggctggtcatgagccacggcccatacatcaaacttattactggcttcctcttcacctccttggctttcatgctggtggaggggaactttgtcttgttttgcacctacaccttgggcttccgcaatgaattccagaatctactcctggccatcatgctctcggccactttaaccattcccatctggcagtggttcttgacccggtttggcaagaagacagctgtatatgttgggatctcatcagcagtgccatttctcatcttggtggccctcatggagagtaacctcatcattacatatgcggtagctgtggcagctggcatcagtgtggcagctgccttcttactaccctggtccatgctgcctgatgtcattgacgacttccatctgaagcagccccacttccatggaaccgagcccatcttcttctccttctatgtcttcttcaccaagtttgcctctggagtgtcactgggcatttctaccctcagtctggactttgcagggtaccagacccgtggctgctcgcagccggaacgtgtcaagtttacactgaacatgctcgtgaccatggctcccatagttctcatcctgctgggcctgctgctcttcaaaatgtaccccattgatgaggagaggcggcggcagaataagaaggccctgcaggcactgagggacgaggccagcagctctggctgctcagaaacagactccacagagctggctagcatcctctagggcccgccacgttgcccgaagccaccatgcagaaggccacagaagggatcaggacctgtctgccggcttgctgagcagctggactgcaggtgctaggaagggaactgaagactcaaggaggtggcccaggacacttgctgtgctcactgtggggccggctgctctgtggcctcctgcctcccctctgcctgcctgtggggccaagccctggggctgccactgtgaatatgccaaggactgatcgggcctagcccggaacactaatgtagaaaccttttttttacagagcctaattaataacttaatgactgtgtacatagcaatgtgtgtgtatgtatatgtctgtgagctattaatgttattaattttcataaaagctggaaagcagctgcctgaaaaaaaaaaaaaaaaaaaaaaaaaaaaaaaaaaaaaaaannnnnnnnnnnnnnnnnnnnnnnnnnnnn

SEQ ID NO: 19617 - DNA, 3208 bp, Homo sapiens
gagtcgacccacgcgtccggtgggggtggacgccagggttctgggaacgcgctggcagccctgacgcccggggtccgaaagtctcgggggtgggtatttcccccgacccgcctcgggggcggagtgcggggcagaggggtgggggctggggagaggcgtggcccgagcggtgctggaagcggagccgggacctttggggcccgcgctgagacgcgcccggctgctgccgccgccctcctttcccctcttccctggtttcccttctcctctagacctgttcgctctccgcccctccttgcctccccaacaccccctcaggtcccgttgcctcctggtcctttcagggattcctggtccttccttcccacactagcctccctggggtatcgctgaggcagcctggcctgcacccaggttcccctcacccctgccacatttctctcttctccctcacgccaactttccttttcgcccttctctctctttctcacatcctagagacggtctttaatacgcattaaccctgtgctgccacatctggctcctgccctcattgcctccaatccggactcttcctctcacatcacccccaccacccccaacttgggctcacaacttctcttcactttttccatttccccagttctctgccttccgtctttccctctgtcctcatccttagcccctctgccctgctttgtgtcccacctctccccctccacttcctctcctcccaccctcagtctcacccccgggctgtctcactctctggagcctctccttcctgttctctgtccccagtgctccctaccctcacctcaagacgaccatggccaccatcccagactggaagctacagctgctagcccggcgccggcaggaggaggcgtccgttcgaggccgagagaaagcagaacgggagcgcctgtcccagatgccagcctggaaacgagggctcctggagcgccgccgggccaagcttgggctgtcccctggggagcctagccctgtgctagggactgtagaggctggacctccagacccggatgagtctgcggtccttctggaggccatcgggccagtgcaccagaaccgattcatccggcaggagcggcagcagcagcagcagcaacaacaacggagtgaagagctgctagcagagagaaagcctgggcctctggaggcccgggagcggagacccagccctggggagatgcgggatcagagccccaagggaagagagtcaagagaagagagactaagtccgagggagaccagagagaggaggctggggatagggggagcccaagagttgagcctgaggcctctggaggctcgggactggaggcaaagcccaggagaggtgggagacaggagctcccgactgtcagaggcatggaaatggaggctgagtcctggagaaactccagagcggagtctgagactagcagagtctcgagagcaaagccccaggagaaaagaggtggaaagtagactgagcccaggggaatctgcctaccagaagttgggcctgacagaggcccataaatggagacctgactccagagagtctcaggaacagagtttggtacaactggaggcaacagagtggaggctgaggtcaggagaagaaagacaagactactcggaagaatgtgggagaaaagaagagtggccagttccaggggtagctccaaaagagactgtagagctgtccgagaccctgacaagggaggcccaaggcaacagttccgcaggagtggaggcagcagcagcagaggcctgtggaagatggcgagaggggcatgaagccaacagaagggtggaaatggaccctgaactccgggaaggctcgagaatggacacccagggacatagaggctcaaactcagaaaccagaacctccagagtcagcagagaagcttctggaatctcccggtgtggaggctggagaaggggaggctgagaaggaggaggcgggggctcagggcaggcctctgagagccctgcagaactgctgctctgtgccctcccccctcccaccagaggacgctgggactggaggcctgagacagcaggaagaggaagcagtggagctccagcccccaccaccagcccctctgtctcccccacccccagccccaactgccccccaacctcctggggatcccctcatgagccgcctgttctatggggtgaaggcagggccaggggtgggggccccccgccgcagtggacacaccttcaccgtcaacccccggcggtctgtgccccctgcgaccccagccaccccaacctctccagccacagttgatgctgcagtcccgggggctgggaagaagcggtacccaactgccgaggagatcttggttctggggggctacctccgtctcagccgcagctgccttgccaaggggtcccccgaaagacaccacaaacagcttaagatctccttcagcgagacagccctggagaccacgtaccaatacccctccgagagttcggtactggaggagctgggcccggagcctgaggtccccagtgcccccaaccctccagcagcccaacccgacgacgaagaggatgaggaagagctgctgctgctgcagccagagctccagggcgggctgcgcaccaaggccctgattgtggatgagtcctgccggcggtgaccatcttccaacatagggatatacctccctccttcttataactgaagatcctggagcccggaagattcagggcagacagaccctgataatgagcctgggcagggaagggcaaccaacatcttgtaacttgctttccccaccctgtttctgggggcagagccaattgcccaatttctaaccctaatccaaagtcccaggtttacaagccacgcttacttgctgtgtctgcgtggaattctctcctctgtcccctccagtctcctcattggagtgacctgaaggtgtggcttcctccactttttctcagtattactttgccttagttttccccaagagggaaggctggaactcttaactctgtaccccttgatagttatttaattctgtttctcctagtggttcacaattgaactgaattgagatggtgtcgggtggctaaggagacacctcacctctccttccccattgtgccgcctttatcaattgcctgttttgttttgtttgttttttaactttccataataaaatggagttct

SEQ ID NO: 19618 - DNA, 999 bp, Homo sapiens
  misc_feature 1, 2, 999: n = A,T,C or G
nngagagcgacgcgacatgtggagggtcgagaggttcaagatgttggatgtggcgccccccccgcattgctgttgaagcattgccggcgggggcacggattcccgctgtggaaggctgaccaggcatactgaagccgggagttgagaccgcctggccaacatggcgaaaacccatctttactaaatatacaaaaattagccaggcatggtggcgcaagacagtagtcccagtactcgggaggctgagacaggacaattgcttgaacctaggaggtagaggttgcagtaagccaagatcgtgctactgcactccagcctgggtgacagagtaagactccatctcaaaaaaaaaagaaaaaaattgactttggaacctcagattacatatcagtttgcatacatgctaaacagagaaatgtcctcaaaattcagttactaaaaattactgatatctccatgattagaaccacactgtggttgtgtgtgtagtcaaaggaggagaatttttaatgctatataagcataactgataactgctattacaaataaatattccacaaatttggaaagttattagaggaagaattttttttccttgtaatttccaggtgtttatattagttgggccatagtgaaaattacatggaggaaagaaaataggaaaataagtcacagaaaaagaaaatcaaaacaaatagaaactctggggaacaagtgagttaattaccgctcatgtctcccatccggttctctagctccttgagggttactgtctaatgctccacaaaagtgccttacccagtgcttggtacagagaaggcactgaataaattcacaaaggccgattggttcacccattcttttagagacaacagacacgcaattctgacgaggactcctgttactaaaagacacagcctctgatacaagagagatatccctttgactaaagcattaccagggtccccagggccccctcccactgggcggtacactccn

SEQ ID NO: 19619 - DNA, 854 bp, Homo sapiens
  misc_feature 1, 2: n = A,T,C or G
nnccgcggcgtgatgttgggcggccacagagagattggtgtttttgtgaggcagtgagacctaaggtaacctttatcaaaaggatggagttgggaaaaggaaaactactcaggactggactgaatgcgttgcatcaagcagtgcatccgatccatggccttgcctggaccgatgggaatcaagttgtcctaactgatttgcggcttcacagtggagaggtcaagtttggggactccaaagtcattggacagtttgaatgtgtctgtgggttgtcctgggccccacctgttgcagatgatacacctgttctactcgctgtccagcatgagaagcatgtcactgtgtggcagctgtgtcccagccctatggagtcaagcaaatggctgacgtctcagacttgtgagattagaggatcactacctatccttccccagggctgtgtgtggcacccaaaatgtgctattctgactgtgttgactgctcaagatgtctccattttccctaatgttcactctgatgattcccaggtaaaggcagacatcaacacccagggccgcattcactgtgcatgttggacccaggatggcctgaggctggtggtggcagtaggcagcagcctgcattcttatatttggggacagcgctcagaagactcttcacaggtgctcctcctgcctggtgtttgatgtggacagccacgtctgctccatcacagcaactgtggactcacaggttgctatagctactgagcttccattggataagatctgtggcttaaatgcatctgaaacctttaatatcccacctaacagtaaagacatgactccgtatgctttaccagttattggtgaagt

SEQ ID NO: 19620 - DNA, 3553 bp, Homo sapiens
  misc_feature 3552, 3553: n = A,T,C or G
ccacgcgtccgtctaaatgaccgcgtctggctggccgtggagcctttctgggttggggagaggaaaggaaagtggaaaaaacctgagaacttcctgatctctctcgctgtgagacatgtctgagactcctgctcagtgtagcattaagcaggaacgaatttcatatacacctccagagagcccagtgccgagttacgcttcctcgacgccacttcatgttccagtgcctcgagcgctcaggatggaggaagactcgatccgcctgcctgcgcacctgcgcttgcagccaatttactggagcagggatgacgtagcccagtggctcaagtgggctgaaaatgagttttctttaaggccaattgacagcaacacgtttgaaatgaatggcaaagctctcctgctgctgaccaaagaggactttcgctatcgatctcctcattcaggtgatgtgctctatgaactccttcagcatattctgaagcagaggaaacctcggattcttttttcaccattcttccaccctggaaactctatacacacacagccggaggtcatactgcatcagaaccatgaagaagataactgtgtccagaggacccccaggccatccgtggataatgtgcaccataaccctcccaccattgaactgttgcaccgctccaggtcacctatcacgacaaatcaccggccttctcctgaccccgagcagcggcccctccggtcccccctggacaacatgatccgccgcctctccccggctgagagagctcagggacccaggccgcaccaggagaacaaccaccaggagtcctaccctctgtcagtgtctcccatggagaataatcactgcccagcgtcctccgagtcccacccgaagccatccagcccccggcaggagagcacacgcgtgatccagctgatgcccagccccatcatgcaccctctgatcctgaacccccggcactccgtggatttcaaacagtccaggctctccgaggacgggctgcatagggaagggaagcccatcaacctctctcatcgggaagacctggcttacatgaaccacatcatggtctctgtctccccgcctgaagagcacgccatgcccattgggagaatagcagactgtagactgctttgggattacgtctatcagttgctttctgacagccggtacgaaaacttcatccgatgggaggacaaagaatccaaaatattccggatagtggatcccaacggactggctcgactgtggggaaaccataagaacagaacaaacatgacctatgagaaaatgtccagagccctgcgccactactacaaactaaacattatcaggaaggagccaggacaaaggcttttgttcaggtttatgaaaaccccagatgaaatcatgagtggccgaacagaccgtctggagcacctagagtcccaggagctggatgaacaaatataccaagaagatgaatgctgaaggaaccaacagtccacctcagcgggccagcagcccagggaacccctgcccaccaggattgctggaagtgtgacggagcaggcgggctgaggagagtggaaaaggaagcgacccagaaatggcagggacacttctcttgcagaccaagagggaccctggagcaccttagacaaactacccagcacaggcggggctggaattctggcggagggcatgagcctgggactccatgtcacgtttccttctgatttggaatctctccatctgtaattcctcaccctcacccttccaccgttgttagtatcatggtgtttttgtttttgtttttgttttaagaacctgcagtttgactcttcatcgttcatctaggggaagacatctgatgttgttttcctatggaaatatatatctattatatatatattttttgcaaatctcacaaagtgcggcaagcccagctggtcaggaaagagaatacttgcagaggggttcaggttcctctttttcctgccacgtggatcaggtctgttcctgttactgttgggtcttggctgaaaaaaaaaaatgcttttaaaaaagataaaatgaaaaggagagctctctttttctctctcttgctctgttcttcccttggtcccctctgtcctcccgccctgcctgcagttgagattcagatgccttctgacagagttcagcctcttggagagtcttggggattgttggcacctaaacagaatcagtgacccgggtgctttgtggccagcagcacagaatcaaacccgcatcccagcattgggccacccatctgagggaggccaaaatcatcacagatgctgctgtgctgcagacagatacatgctagtccagagagccgcccctgagatggctgtgagaaccatgtgtctaaggcgtaagataaggatggaaggctgtccaagttatttggaaggcctcggcagcttgggattagcttgggagcgcagcgctgcaaagtggaaaatatgaaaagaccacacaggcccagcagtccagaaactgggcaaaaatattctgcagtggggatttatttttccaaagcaggtaacagaggctagtgagaaagaaaagctcctctctgctccattccaaaggccatcttgtggtcagtttcatgccctcacctgattttcgcggcttcttttttttttcaattcctaaccttttttaaagtttcctggtctccactggacacagagctttggagacggaggatcccagagggcagtctcagttgcaatcagtgtgtgcccagcctgggcagacaggaaattcctcggatacattattttttctttctttcatagctgtgtctcagaaaggacccatttgtggctctttttcacctcaaaataagatcgatggtatcttgtaaaatgagggtagtgccacttcttagtatttttgaaagctgttttagattttttttttttttccttttctagccatctaaattgactcttccaatataggtctcagaaatccaatatttggagtacaatttcttttaatccaaattacacctgccttacaaagcaccccctccttgttcccctctgtttcctctactcagttgggggagaaactcacagctcctccgggatacatatgtgccctcagcagcagctcccaggtgaagttaccagacccctgggcttctccccagctttttctgagttgagtcagacatgtagagtttgggtcacacaggcaagaggaattttccctcggccttactgacaaggacaccaacctagggtgcaaacagatggactatggttcaaggacactggaattgaggagctgatcaaggctctcttcagccttgctcctgtccctgcctcttatcagagcacaggtagacacacggggcatagccagcccactcctactgtcacaggcgccccaccattcaaccttccggggaggttcagggaccttcttttattgagggcgagtgggtctcagtctgcttgaatggtgatgagattctgctggagtctcagcacgctgcaggtgtcttttgagagcattcataggann

SEQ ID NO: 19621 - DNA, 2919 bp, Homo sapiens
atggcccctgacgcttcacacgcttccctgccattcccaaacatccctggaaatccaatgaataccacgcagttagggaaatcattttttcagtggcaagtggagcaggaagaaagcaaattggcaaatgtttcccaagaccagtttctttcaaaggatgcagatggtgacacgttccttcatattgctgttgcccaagggagaagagcactttcctatgttctagcaagaaagatgaatgcacttcacatgctggatattaaggagcacaatggacagagtgcctttcaggtggcagtggctgccaatcagcatctcattgtgcaggatctggtgaacctcggggcgcaggtgaacaccacagactgctggggaagaacacctctgcatgtctgtgctgagaagggccactgccaggtgcttcaggcgattcagaagggagcagtgggaagtaatcagtttgtggatcttgaggcaactaactatgatggcctgactccccttcattgtgcagtcatagcccacaatgctgtggtccatgaactccagagaaatcaacagcctcattcacctgaagttcaggagcttttactgaagaataagagtctggttgataccattaagtgcctaattcaaatgggagcagcggtggaagcgaaggatcgcaaaagtggccgcacagccctgcatttggcagctgaagaagcaaatctggaactcattcgcctctttttggagctgcccagttgcctgtcttttgtgaatgcaaaggcttacaatggcaacactgccctccatgttgctgccagcttgcagtatcggttgacacaattagatgctgtccgcctgttgatgaggaagggagcagacccaagtactcggaacttggagaacgaacagccagtgcatttggttcccgatggccctgtgggagaacagatccgacgtatcctgaagggaaagtccattcagcagagagctccaccgtattagctccattagcttggagcctggctagcaacactcactgtcagttaggcagtcctgatgtatctgtacatagaccatttgccttatattggcaaatgtaagttgtttctatgaaacaaacatatttagttcactattatatagtgggttatattaaaagaaaagaagaaaaatatctaatttctcttggcagatttgcatatttcatacccaggtatctgggatctagacatctgaatttgatctcaatggtaacattgccttcaattaacagtagcttttgagtaggaaaggactttgatttgtggcacaaaacattattaatatagctattgacagtttcaaagcaggtaaattgtaaatgtttctttaagaaaaagcatgtgaaaggaaaaaggtaaatacagcattgaggcttcatttggccttagtccctgggagttactggcgttggacaggcttcagtcattggactagatgaaaggtgtccatggttagaatttgatctttgcaaactgtatataattgttatttttgtccttaaaaatattgtacatacttggttgttaacatggtcatatttgaaatgtataagtccataaaatagaaaagaacaagtgaattgttgctatttaaaaaaattttacaattcttactaaggagtttttattgtgtaatcactaagtctttgtagataaagcagatggggagttacggagttgttcctttactggctgaaagatatattcgaattgtaaagatgctttttctcatgcattgaaattatacattatttgtagggaattgcatgcttttttttttttttctcccgagacagggtcttgctctggcgcccaggctggagtacagtggcatgatcttggctcacttcagccttgacttgggctcaagtgatcctcctacctgagccttctgagtaactgggactacaggtgtgcactcctcgcctggctaattttttattttttgtacaggcaggatcttgccaccttgcccaggctggtcttgaactcctgagctcatgccatctgcctgccttagtctcccaaaatgctgggattacaggagtgagccaccatgcccggctggcagttgcatggaagagaacacctctttatggcttaccctctagaatttctaatttatgtgttctgttgaaatttttgtttttttacctttattgaaacaacaaaaagtcagtattgaaacatatcttcctgttttctgttgtcaaatgatgataatgtgccatgatgttttatatatatcattcagaaaaagttttattttttaataacattctattaacattattttgcttgccgctggcatgcctgaggaatgtatttggctttgattacacactaagtttttgtaataaatttgactcattaaaaaccttttttttttaaaaaaaaaaaaaagaaaatctcattagtgaacttatctttgcagctgagtacttaaattctttttaaaaagataccctttggattgatcacattgtttgacccagtatgtcttgtagacacgttagttataatcaccttgtatctctaaatatggtgtgatatgaaccagtccattcacattggaaaaactgatggttttaaataaactaattcactaatattatttgtcttacatgcattttcttttcctagtgccttatttccctagatagaaaaagtactattgatgattttaaatacctttgagttagttaatttatgttaatttgggttttttggagaacatgtttcctgaaagtatacaagatttaacatcaaaatctatttgctaagtttactaggagaagtctgttaggttttgaaattatcatggaagtttaatagatgctgtcgatcattcacatgtttagatgcttacggacgcgtgggtcgactc

SEQ ID NO: 19622 - DNA, 2255 bp, Homo sapiens
  misc_feature 1, 2, 2250, 2251, 2252, 2253, 2254, 2255: n = A,T,C or G
nncgagcacgagggagccgcgagacaggtgcgcatgcgccctgcgcgtcctgcgagaccgacttggacggagccgagctgaggctcggcttcctgctgatggtcagggttttggcaactccccggtgtgagaggggtagggagtgctcccggcggcgacggggccgagttcaccagccgccggggcagtagtcgaaggcccggcgcggcatgtcctgggtgccgcggtgcgggcagtgaacgcgcgccgggcgggatgggccggcgccgggcgccagagctgtaccgggctccgttcccgttgtacgcgcttcaggtcgaccccagcactgggctgctcatcgctgcgggcggaggaggcgccgccaagacaggcataaagaatggcgtgcactttctgcagctagagctgattaatgggcgcttgagtgcctccttgctgcactcccatgacacagagacacgggccaccatgaacttggcactggctggtgacatccttgctgcagggcaggatgcccactgtcagctcctgcgcttccaggcacatcaacagcagggcaacaaggcagagaaggccggttccaaggagcaggggcctcgacaaaggaagggagcagccccagcagagaagaaatgtggagcggaaacccagcacgaggggctagaactcagggtagagaatttgcaggcggtgcagacagactttagctccgatccactgcagaaagttgtgtgcttcaaccacgataataccctgcttgccactggaggaacagatggctacgtccgtgtctggaaggtgcccagcctggagaaggttctggagttcaaagcccacgaaggggagattgaagacctggctttagggcctgatggcaagttggtaaccgtgggccgggaccttaaggcctctgtgtggcagaaggatcagctggtgacacagctgcactggcaagaaaatggacccaccttttccagcacaccttaccgctaccaggcctgcaggtttgggcaggttccagaccagcctgctggcctgcgactcttcacagtgcaaattccccacaagcgcctgcgccagccccctccctgctacctcacagcctgggatggctccaacttcttgccccttcggaccaagtcctgtggccatgaagtcgtctcctgcctcgatgtcagtgaatccggcaccttcctaggcctgggcacagtcactggctctgttgccatctacatagctttctctctccagtgcctctactacgtgagggaggcccatggcattgtggtgacggatgtggcctttctacctgagaagggtcgtggtccagagctccttgggtcccatgaaactgccctgttctctgtggctgtggacagtcgttgccagctgcatctgttgccctcacggcggagtgttcctgtgtggctcctgctcctgctgtgtgtcgggcttattattgtgaccatcctgctgctccagagtgcctttccaggtttcctttagcttccctgcttcctgggaatcaggagcctggacactgccatctctagagcagagtggaggcctggactccctttgctcactccattcgggtccacagctgaggttgcctctgacaagatgaatgggcactgcctgcccttctagtgaaaaggcttggctatggccctgtgtgactccaggtcccaggaaccttgccttcgtcatctgtggatccatccagaacagcggtatctgaagcccaggccatactccctgcctcctttcttctgcctaccagaggctccagagttgagcttgtccttatctagaaacatgtgaagatgcccaagagcctggaggcactgctgtccttcctgcagaaacagtttctcctcctcccctcagccttgtggccagttcctcttcacatgaagcccctggcatttgctggggaagggactggcctggtacttgctgttagggcaggaaggggcaaaaggaagacttgggtagtaatctgggggttcagatgggtagcactaagccagctggcctaaagatgcaataagttcctaggtagtctacccttaccttgaggaatgggaaaatgaacctcagcccattaggcaggaaaagttgatatttaataaacaaggaaagagtgaactgagaaaaaaaaaaaaaaatcgggtttttcgggggaaacagttgaagggctggaatgttcgacctttgtaagggaatgcggccaagggtatgacnnnnnn

SEQ ID NO: 19623 - DNA, 1889 bp, Homo sapiens
  misc_feature 1889: n = A,T,C or G
ggagtcgacccacgcgtccgcgtacgcggggcgccacgacccacgcgtccgggcctcccaagcgtggggcgacaagctgccggagctgcaatgggccgcggctggggattcttgtttggcctcctgggcgccgtgtggctgctcagctcgggccacggagaggagcagcccccggagacagcggcacagaggtgcttctgccaggttagtggttacttggatgattgtacctgtgatgttgaaaccattgatagatttaataactacaggcttttcccaagactacaaaaacttcttgaaagtgactactttaggtattacaaggtaaacctgaagaggccgtgtcctttctggaatgacatcagccagtgtggaagaagggactgtgctgtcaaaccatgtcaatctgatgaagttcctgatggaattaaatctgcgagctacaagtattctgaagaagccaataatctcattgaagaatgtgaacaagctgaacgacttggagcagtggatgaatctctgagtgaggaaacacagaaggctgttcttcagtggaccaagcatgatgattcttcagataacttctgtgaagctgatgattggatctgctggtggtcatctaagaagaaagtatttgacattcagtcccctgaagctgaatatgtagatttgcttcttaatcctgagcgctacactggttacaagggaccagatgcttggaaaatatggaatgtcatctacgaagaaaactgttttaagccacagacaattaaaagacctttaaatcctttggcttctggtcaagggacaagtgaagagaacactttttacagttggctagaaggtctctgtgtagaaaaaagagcattctacagacttatatctggcctacatgcaagcattaatgtgcatttgagtgcaagatatcttttacaagagacctggttagaaaagaaatggggacacaacattacagaatttcaacagcgatttgatggaattttgactgaaggagaaggtccaagaaggcttaagaacttgtattttctctacttaatagaactaagggccttatccaaagtgttaccattcttcgagcgcccagattttcaactctttactggaaataaaattcaggatgaggaaaacaaaatgttacttctggaaatacttcatgaaatcaagtcatttcctttgcattttgatgagaattcattttttgctggggataaaaaagaagcacacaaactaaaggaggactttcgactgcattttagaaatatttcaagaattatggattgtgttggttgttttaaatgtcgtctgtggggaaagcttcagactcagggtttgggcactgctctgaagatcttattttctgagaaattgatagcaaatatgccagaaagtggacctagttatgaattccatctaaccagacaagaaatagtatcattattcaacgcatttggaagaatttctacaagtgtgaaagaattagaaaacttcaggaacttgttacagaatattcattaaagaaaacaagctgatatgtgcctgtttctggacaatggaggcgaaagagtggaatttcattcaaaggcataatagcaatgacagtcttaagccaaacattttatataaagttgcttttgtaaaggagaattatattgttttaagtaaacacatttttaaaaattgtgttaagtctatgtataatactactgtgagtaaaagtaatactttaataatgtggtacaaattttaaagtttaatattgaataaaaggaggattatcaaattcaaaaaaaaaaaaaaatactctaatgcctgtgtcccttactttggttaattttagaaccattatattctaagttctctaggctcan

SEQ ID NO: 19624 - DNA, 1183 bp, Homo sapiens
  misc_feature 1, 2, 3, 4, 1182, 1183: n = A,T,C or G
nnnnagtcgaccacgcgtccggagaaattgtgtagggaggataaaaagttagaacaaagctaagtaagtaaggtttaaatacttttatgtatttagcaaaagggattcttaagttgctggctaagggggtttattgcttatccagaagatttgaccttgtgaattgacttattcttctccaaggcacttgagagaaaagacaacgatagcagttacatctagaggctattatggattggaggatgagaggggaactgcatgtacctcagcaaggcgtcggtcaacaccgcgaaggttggcaggcttgacaagtggagtttttgaatctataatggttcaagttttgagacaggaagaacagctgagagcaaaagaagaaaaaaggcttcgggagcaggaaagaaaagaagcagaagaagctagtcaaaaggaaatagaagaatgggaaagaaaacttctagctcaagcagctccaacttgtatggagaccatgtgggaaattccagctattgggcatttcctttgtttagctcagcaaattctaaatttgccagaaatagtcttttacgaattggaacgttgtcttctgatgcctcagtgtaatgcttttctatcgaaaataatgacttctctattaagtcctccccatcgcagacctaccttacatcgaagacctactttgccttataggacctgggaagcagcgctgaggcagaaagtacaacagtggtacactgctgtagggcaaactgaaaatcctgataactgtgctgaaaaactggggttgtgtcctcagttttttaaagttcttggagaagttaatccattggaagaaaaaccttttcacgaactacctttttaccaaaaagtgtggctacttaagggtctttgtgactttgtgtatgaaacacaaaaggaagttcaagatgctgtacttggacagcctatccatgaatgcagggaagttattcttggttatgattatttggagaatgcttatgtacattttccacagttctgtggtgcagatgtacggatttataaacagagaccctttcaaggccccagaatttccaattccacccatttacatccaagcggtcctcggctcaacatggcggaacttgcacggcgctagttggacagtcggggaaatcattgaaaatgcggccttctaaaacnn

SEQ ID NO: 19625 - DNA, 3078 bp, Homo sapiens
  misc_feature 1, 2, 3, 28, 3072, 3073, 3074, 3075, 3076, 3077, 3078: n = A,T,C or G
nnnccgaccggcctgggtggagagacanagaagggagaccgggtgggtgggtcgtacgcttagggggccgtggttggtacttcgctgttggggaggctttcaggtcgcccagatcctgcttcccaatgggtgactgggaaaattagcgggtggaaaatctcgaggggtggaggcttttttttttcctccttggccccgccctcttcctgttcggcgactgggacgcctggccctacgagggggaagggaggcttggccgggctatcggagagcgctgtgcgcacgcgcgagcccgagtgcgtgtgtgtgtgtgcacgcgcacgcgcgctcctgctcttaggaagcctgggaaggaccggtgtgctaggagatgatcggggaaagcatagtcccctgtctgtggcaccagacactcccgactgtgcgctgactctccccgcccagccagcagccttttccagagaggctgtggtccatagcctctgttcgttttcactgcaggaccaggcacgaaagttaaaacaaaatgaagattttttctgaatctcataaaacagtgtttgttgtggatcactgcccttatatggcagaatcttgcaggcagcatgtcgagtttgatatgctggtgaagaatagaacccaaggaatcattcctttggcccccatatctaaatcattgtggacttgctcagtagaatcttccatggaatattgtagaataatgtatgatatatttcctttcaaaaagctggtgaattttattgtgagtgactctggagcacatgttttaaattcttggactcaagaagaccaaaatttacaggagctaatggcagcattagccgctgttgggcctcctaatcctcgggcagatccagagtgctgcagtattctgcatggccttgttgcagcagtggaaactctctgcaaaattactgaataccaacatgaggctcgtactctactcatggagaatgcagaacgtgttggaaatagaggacgaataatctgtattactaatgcaaaaagtgatagtcatgtgcgaatgcttgaagactgtgtccaggaaacgattcatgaacataacaagcttgctgcaaattcagatcatctcatgcagattcaaaaatgtgagttggtcttgatccacacctacccagttggtgaagacagccttgtatctgatcgttctaaaaaagagttgtccccggttttaaccagtgaagttcatagtgttcgtgcaggacggcatcttgctaccaaattgaatattttagtacagcaacattttgacttggcttcaactactattacaaatattccaatgaaggaagaacagcatgctaacacatctgccaattatgatgtggagctacttcatcacaaagatgcacatgtagatttcctgaaaagtggtgattcgcatctaggtggcggcagtcgagaaggctcgtttaaagaaacaataacattaaagtggtgtacaccaaggacaaataacattgaattacactattgtactggagcttatcggatttcacctgtagatgtaaatagtagaccttcctcctgccttactaattttcttctaaatggtcgttctgttttattggaacaaccacgaaagtcaggttctaaagtcattagtcatatgcttagtagccatggaggagagatttttttgcacgtccttagcagttctcgatccattctagaagatccaccttcaattagtgaaggatgtggaggaagagttacagactaccggattacagattttggtgaatttatgagggaaaacagattaactccttttctagaccccagatataaaatcgatggaagtcttgaggtccctttggaacgagcaaaagatcagttagaaaaacatacccgttactggcctatgatcatttcacaaaccaccatttttaacatgcaagcggtagttccattagccagtgttattgtgaaagaatctctgacagaagaagatgtgttaaactgtcaaaaaacaatatacaacttagttgatatggaaagaaaaaatgatcctctacctatttccacagttggtacaagaggaaagggccctaaaagagatgaacaataccgtatcatgtggaatgaattagaaacccttgtcagagcccatatcaacaactcagagaaacatcaaagagtcttggaatgtctgatggcatgcaggagcaaacccccagaagaggaagaacgaaagaaacgaggaagaaagagggaagacaaagaggacaagtcagagaaagcagtgaaagattatgaacaggaaaagtcttggcaagactcagagagattaaaaggaatcttagagcgtggaaaagaagaattggctgaagctgagattataaaagattcgcctgattccccagaacctccaaacaaaaaaccccttgttgaaatggatgaaactccacaagtggaaaaatcaaaagggccagtgtcgttattatccttgtggagtaatagaatcaatactgccaattccagaaaacatcaggaatttgctggacgtttgaactctgttaataacagagctgaactatatcaacatcttaaagaggaaaatgggatggagacaacagaaaatggaaaagccagccggcagtgaagagtgacttgaagaactaaatttagcatattgcaaaaatattttgtgcggaattcgatataagtacttttacagcaagatggtatagttatgttgcctggactggtttttacatttttaaaatatttcagctgtcatttttgtactaattataaaattggcacataattcaaaaatatacatttgagatgatttgtcctcccaaattatacaagtttattttatggtataaagtgttctctctggaaatgtttttaaaaaaattcttaggcttctctttgcgaaataaaactattaaaatatttgaaaaaaggggggggcaaagatcccgagggcaatttaggcacccttttgcaaggccaaggagtaaaaaagagcaggtaaaggggaagaggtggggacccccgcgggaggacaccaaagcnnnnnnn

SEQ ID NO: 19626 - DNA, 2619 bp, Homo sapiens
cgacccacgcgtccgcggacgcgtgggcgcgcccgtactggcccgcgccggtccgcccgccgacagctccctgagccagcccgggaggcagccgcgcgcagcgagccggtggcgcaggtgtcggggtcctcgagcgcccagcctgggagcatgattgtggacaagctgctggacgacagccgcggcggagaggggctgcgggacgcggcgggcggctgcggcctcatgaccagcccgctcaacctgagctacttctacggcgcgtcgccgcccgccgccgccccgggcgcctgcgacgccagctgctcggtcttgggcccctcggcgcccggctcgcccggctccgactcctccgacttctcctctgcctcgtcggtgtcctcctgcggcgccgtggagtcccggtcgagaggcggcgcccgcgccgagcgccagccagttgagccccatatgggggttggcaggcagcagagaggcccctttcaaggtgttcgggtaaagaactcagtgaaggaactcctgttgcacatccgaagtcataaacagaaggcttctggccaagctgtggatgattttaagacacaaggtgtgaacatagaacagttcagagaattgaagaacacagtatcatacagtgggaaaaggaaagggcccgattcgttgtctgatggacctgcttgcaaaaggccagctctgttgcattcccaatttttgacaccacctcaaacaccaacgcccggggagagcatggaagatgttcatctcaatgaacccaaacaggagagcagtgctgatctgcttcagaacattatcaacattaagaatgaatgcagccccgtttccctgaacacagttcaagttagctggctgaaccccgtggtggtccctcagagctcccccgcagagcagtgtcaggacttccatggagggcaggtcttttctccacctcagaaatgccaaccattccaagtcaggggctcccaacaaatgatagaccaggcttccctgtaccagtattctccacagaaccagcatgtagagcagcagccacactacacccacaaaccaactctggaatacagtccttttcccatacctccccagtcccccgcttatgaaccaaacctctttgatggtccagaatcacagttttgcccaaaccaaagcttagtttcccttcttggtgatcaaagggaatctgagaatattgctaatcccatgcagacttcctccagtgttcagcagcaaaatgatgctcacttgcacagcttcagcatgatgcccagcagcgcctgtgaggccatggtggggcacgagatggcctctgactcttcaaacacttcactgccattctcaaacatgggaaatccaatgaacaccacacagttagggaaatcactttttcagtggcaggtggagcaggaagaaagcaaattggcaaatatttcccaagaccagtttctttcaaaggatgcagatggtgacacgtgagtattcttttatctcatgttcttaattaggtaagccacacttgttggactagtgagcatataatttttctagggtataacaaggtataccttagttagtggttggctaaccaagatgactggtgtagatagaaaccgccactcagtgatagctagtatgtcaagaaagggttttccttcaaaaaattttttggctgaacagataatctgttctaaattgataaaaatatctgtatcttcttgattaattgagtttggaagaccagcgtagactatgtctatagaacagaaacagttagatcatgattagggataaactgtgagttggtttgtagattgatgttaatctgtcctgatgtctttgtggccttgggcaagttatttaacctccttaggtctcagttccttgacgtgtaaaatgataatacctcttgtataggggttttatgagtattaaaaataatagatttaagttgatcagtatggtgcttgacattcttctttttcttatttctgatagcctaacccatcctgttccaactggggtgtattatcaatgtagcagaaaagacaaattatgctttgtaatgtttcatttgagtgtaccaatatataaaaagggggctaaaggaagatttttttttttttttcaaaagaacaacttagtgaaatcagaagtgattcacccgctttcctttccatgttccccaggttccttcatattgctgttgcccaagggagaagggcactttcctatgttcttgcaagaaagatgaatgcacttcacatgctggatattaaagagcacaatggacagagtgcctttcaggtggcagtggctgccaatcagcatctcattgtgcaggatctggtgaacatcggggcacaggtgaacaccacagactgctggggaagaacacctctgcatgtgtgtgctgagaagggccactcccaggtgcttcaggcgattcagaagggagcagtgggaagtaatcagtttgtggatcttgaggcaactaactatgatggcctgactccccttcactgtgcagtcatagcccacaatgctgtggtccatgaacttcaggtgaatgaggctgttgatttctcgactagttctagatcgcga

SEQ ID NO: 19627 - DNA, 3243 bp, Homo sapiens
  misc_feature 1, 2, 3243: n = A,T,C or G
nncgtccgggccttacgagcccacaggccccggagtagcagcggggaggccgggagcccgcgggccggagccgcccggccgaggcgtgggggctgcggggccggcccatccgtgggggcgacttgagcgttgagggcgcgcggggaggcgagccaccatgttcagccagcagcagcagcagcagctccagcaacagcagcagcagctccagcagttacagcagcagcagctccagcagcagcaattgcagcagcagcagttactgcagctccagcagctgctccagcagtccccaccacaggccccgttgcccatggctgtcagccgggggctccccccgcagcagccacagcagccgcttctgaatctccagggcaccaactcagcctccctcctcaacggctccatgctgcagagagctttgcttttacagcagttgcaaggactggaccagtttgcaatgccaccagccacgtatgacactgccggtctcaccatgcccacagcaacactgggtaacctccgaggctatggcatggcatccccaggcctcgcagcccccagcctcacacccccacaactggccactccaaatttgcaacagttctttccccaggccactcgccagtccttgctgggacctcctcctgttggggtccccatgaacccttcccagttcaacctttcaggacggaacccccagaaacaggcccggacctcctcctctaccacccccaatcgaaaggattcttcttctcagacaatgcctgtggaagacaagtcagaccccccagaggggtctgaggaagccgcagagccccggatggacacaccagaagaccaagatttaccgccctgcccagaggacatcgccaaggaaaaacgcactccagcacctgagcctgagccttgtgaggcgtccgagctgccagcaaagagattgaggagctcagaagagcccacagagaaggaacctccagggcagttacaggtgaaggcccagccgcaggcccggatgacagtaccgaaacagacacagacaccagacctgctgcctgaggccctggaagcccaagtgctgccacgattccagccacgggtcctgcaggtccaggcccaggtgcagtcacagactcagccgcggataccatccacagacacccaggtgcagccaaagctgcagaagcaggcgcaaacacagacctctccagagcacttagtgctgcaacagaagcaggtgcagccacagctgcagcaggaggcagagccacagaagcaggtgcagccacaggtacagccacaggcacattcacagggcccaaggcaggtgcagctgcagcaggaggcagagccgctgaagcaggtgcagccacaggtgcagccccaggcacattcacagcccccaaggcaggtgcagctgcagctgcagaagcaggtccagacacagacatatccacaggtccacacacaggcacagccaagcgtccagccacaggagcatcctccagcgcaggtgtcagtacagccaccagagcagacccatgagcagcctcacacccagccgcaggtgtcgttgctggctccagagcaaacaccagttgtggttcatgtctgcgggctggagatgccacctgatgcagtagaagctggtggaggcatggaaaagaccttgccagagcctgtgggcacccaagtcagcatggaagagattcagaatgagtcggcctgtggcctagatgtgggagaatgtgaaaacagagcgagagagatgccaggggtatggggcgccgggggctccctgaaggtcaccattctgcagagcagtgacagccgggcctttagcactgtacccctgacacctgtcccccgccccagtgactccgtctcctccacccctgcggctaccagcactccctctaagcaggccctccagttcttctgctacatctgcaaggccagctgctccagccagcaggagttccaggaccacatgtcggagcctcagcaccagcagcggctaggggagatccagcacatgagccaagcctgcctcctgtccctgctgcccgtgccccgggacgtcctggagacagaggatgaggagcctccaccaaggcgctggtgcaacacctgccagctctactacatgggggacctgatccaacaccgcaggacacaggaccacaagattgccaaacaatccttgcgacccttctgcaccgtttgcaaccgctacttcaaaacccctcgcaagtttgtggagcacgtgaagtcccaggggcataaggacaaagccaaggagctgaagtcgcttgagaaagaaattgctggccaagatgaggaccacttcattacagtggacgctgtgggttgcttcgagggtgatgaagaagaggaagaggatgatgaggatgaagaagagatcgaggttgaggaggaactctgcaagcaggtgaggtccagagatatatccagagaggagtggaagggctcggagacctacagccccaatactgcatatggtgtggacttcctggtgcccgtgatgggctatatctgccgcatctgccacaagttctatcacagcaactcaggggcacagctctcccactgcaagtccctgggccactttgagaacctgcagaaatacaaggcggccaagaaccccagccccaccacccgacctgtgagccgccggtgcgcaatcaacgcccggaacgctttgacagccctgttcacctccagcggccgcccaccctcccagcccaacacccaggacaaaacacccagcaaggtgacggctcgaccctcccagcccccactacctcggcgctcaacccgcctcaaaacctgatagagggacctccctgtccctggcctgcctgggtccagatctgctaatgctttttaggagtctgcctggaaactttgacatggttcatgtttttactcaaaatccaataaaacaaggtagtttggctgtgccgaaatataaaaaaaactcgtgccggtcgggccgaattcgggacgagctctgatggggatctacaagggggataacgggggggggtaaagccggctaacacaacagccattttggagcccagggagcaagggggaaatacgatttgccggccaagtattgagggaaaaaacagcccggcgcaaggggctaaaacgggggggcccggccctttggggaaaacaaggcgggggggatggtggagccccgaagtttaggan

SEQ ID NO: 19628 - DNA, 4653 bp, Homo sapiens
aatcgggttggttggcttgagatcgcctgtttatatttcccccccttgcgtatatccccgggggtgtccggtgttgaaaaaagccacaaaacgccacagtcaaattacgcatcatggaattggcaatggttaaccgaattgcttggaagacacttgggaccaaagtggaagccgggcttcggtcacattttcccgggggctaattacacccatctgcgtgttgtcaatcacacctttacagcctgtatatcacaacagacttttctacacgaggtttgtgagcaatcaaatgtgaaagaggtaaactagtctcaaagatctaaatgtttgaaacaacgctacctacaccaaactttctcctgtacccaatataaagaatatcactgaaagtaacaatccagaaaattctggaaatgtatgtaatatttgggttgctgaatgaagatataggactttatggattgattgttaatttaactgttaggacgatatatttttctgtttttattttaaggaagagcaaagctgtcaaataagctactatatcagaagggacataaactgaactagtgccattctgacacacaggatcagaaactcctaaaatcacatattcctgaatactgctatcagcaataccactgagactgattcactgctatgttatggtgatgatttgacatgatccattctccttaactaaagctttagcttctgtggttgtctgaggttttggtggccattctggatcaaccaagagctcctgcgccagatacatgtactttgcctttggtgtcttctttctacagcccagggcccagggtaagcagcattttccccaccgatccactgactcctgcggtggctgtgtggtgctgaaccgatactctccttgtttgtctcggttgaacacaactttccaaaggaccatgtcaaggaagaagttctccactgtgatagacacaaaggcattgacaagaacaatgatgagcatagttacacgccactgatatggtacacacactatctgaagaacctggtcaacagaggcaactggatacaacatgatgaataatataaaaatatataaaaaaatcacagaaaaaacaaaaaaataatttttgtagcaaggttgcctgaagggttttccttttgaaaaggcaattgccactatgaggtactgaaaactggaaataaaaaacactgtggtattttcataattttgtatattatgttcatcaagttcggtttcattgtctacgtgtgaagaattccaaaacccgcttcctgttgtattacaagcatctgattttggatgccacacttcataccaaggttgctgtttgacccaaaaaaaacccaaagattgaaatccaatgcagatgataatctgagacaaaacggagaagagaagggccccagatataagacccgaaggtggtctttgtgccacaagttctttccaggcaggatttaaactcattgtaaataccactaccaaaatgattgccagatcaatgaagagaaactggaagtctcctaggttacttaagatagaatacagcagagtaacactgaagtactggataatgctgtacaatgccatgaatttaaacacacagaaggaagttattaaagcagcacggccttccctgataaggtttggcacacaggaaatactaggagtcttagaggtaaagggagatgccactgaagcttcgagctccgataaggaaatgcctccgtgtgccctcttcaaagcaccacaatcatttgcgccatcaccacacatcccaacaaaataatcaacattttgcaatgcttctatcaactgtgtcttctgatcaggtgccatacgggcaaacacggtgccatgcaacatcaacttaggaacaaggtcttgaaaatgctccagtatcactgagaatgattttccattcattgcaaaatgataacgagtcatttgaagatcctctaagctatcatggaccaatttaaccggaatagcctctgggtcaattgctgatggatgactgcactgcgtgagggagtctgcataatgccaatttattttggcaactttcccatcctttggaggtaatgcttcagcaataatcactttatcctgaggtagaatcattccacaatctctggccacagagacagcagtcaacatactgtcacctgtgaccatgacggtgcgaatgttggctttatgcaaatcttcaagtactgcaggggtttcttgctttaatttgttctgcattataattaatcccataaaatccatgttgttctcaattgcatctctgctaatattctgtactttatgccatgtcagttttgactccaattttctgtgtgcaagagcaatcacacggaagccctgtttagtgaagtcttccaaaacgttttgaaaatcgacaggaactgcttcaggtttacagagaccggcaatggcctcgggcgctcctttcatgtaggcgtccattttcctatcccccagcaccctggcaaccacactcatacgttgcaaagcagaagaaaatgggaactggcgaacaattcctatctcataagtagctggaagttcaaacagctccatttcttggtttcctgcaggggtagattcaggaagcagttgtttgggaggacgaaccactgtgggcataattcgattatgaagtgctgtttcttcttcagttgcttcttccagaatccatccaatagcctcaaacattttcagatcaagtggatcaccagagagcactccttcaatttttgtaagtgaatgacaagtagccatacaagcaacaaactgggattttaccaacatctcattgcacacattttcttctggtgaaagaaatcgtgcattttccactcgttgaatcccccaaagatctaaaccatcttcagttagagttccagtcttgtcaaagcaaacaagattgagctgtccacaaatatttattctttgaggactgatacagaaaataccgatttttttcagtcttctctgagcatacacaataccagcagtcattgcagcaggaagtgcagggggcacagtaattgtgataatatcaagagactcgataattatgaccccaacttgtacctcatttaaaatgctattaataatagtgtagataaacccaatgccagcaactgccacaagacatagtagaaacaagtaggcatctctgtagagtttaaaatcagttggtttgggatacaatatggaacgaacaagctgtcctttggaagtactaaatcctgttctaacaactatggctttgacgagttctccagtgtagaaacgagtctgaataacagttgtcccacaaaacaaagtatgtcgtttatgtgtttctggattatataattcatctcctattcctttcacatccactgaaggatttggcaaattagtctttgtcactggaacactttctcctgttaacatgctttcgtttacaatgcaggtaccattaataagcacagcatcacaaggcattattgtcccatttaatggaatgaccatgacatctcctggcacaaggtcggtagaaaagatttcttctatttcttcatttactctacaaactgaaactcttacggtactatgagttgccaccatgtcatgcaacataacatattgctttctaatggaatatagtgagcttacgattgatactatggacataaccacaatagctagagcatagtaatagtattcatcagtgctccacagtataacactgaacagctggaaaatgtaaaatgggttgagaacctctttaattagaagcttaaaaacagaaggcacttttacagcaatttcatttactccataaagcagttttctgtaggcatgcatcccctttgtcagtcctgcactatgcttttcataaattgacgtacaagaaacaccttcatccagtccctttaagaaatcaaaattgtgaatggtatcattccagaaatattttacactatggtgggtgaaataacgaatctgttgtgattcagtctgtgaatatttactgatcctgtgcctattttcttcagtgggattctcaattaaacaaactgcatggccatttgaaagcttattagacatagattttggacttgaaactgggtaagtttccaaagaaagaacgcgaatttttgcacaaaaccacattttgaattcatcagtagtcctcagcagcactacttcacagtctttaattgcagctctgacacaggtcgctttcacccgccactcaggcatccaatagaggaggaggaggagaaacccatcagagcaaatcactcctaaagaaactatggcaagcttccagcgactcaaattgtaaccataaatctccatttcatcttcttgaccctgattgatggtcttcctttcttccctgtccatacctacagtggattaaaggtccagtgcttcaaacaatggaagatcactcctatgtccaaacaccaagattcagggatgtctgtcagatcggggccgctcactggccgccgccgcgccgcctcctccgcggcctccctcgcggccggaccagccccaggggccgcgggggacccggccgccgctgtcgccgccgccgcctcgcctcagcccagcccggacgcgtg

SEQ ID NO: 19629 - DNA, 920 bp, Homo sapiens
  misc_feature 1, 2, 3, 4, 5, 6, 7, 8: n = A,T,C or G
nnnnnnnnctgtctcttgattcatgacatctgttcaaactgccttctctgatgccaaggctattgtgtccaactcctgaggggctgcctcagctacttcctccatcttctgggcagctgcagccaactcttccaggtcgtccttgcccaactctgaggaggggccgtagagtctgtgagtccctggggacaggtcaccctcacagagatcctagcacatccaggctctgtttggcctggtgctctgctaccaggtcccgtagcaactcctcgtttgtcttgggaatgtagccgccccggcctcgagaaggaccccaggcaactgagttgtagatggggtcgttgagaatgggatggcccaagaactgaaggtggactcgaatctggtgtgtgcggcctgtgagtggccggcaccgtaccacactggactggccattgtagcttagcctctggaacactgtctcacagggcttgccccggggatctacacggcacacccctactttgtaagacaccactaagatgggttctttacaggtcacttcctcagtggggaactccccttccacccggcacacgtactccttctccagctgccggtcccgaacctgctcgtgaattctctcagagactgcagctgtcttggcaaacataagcacccctgaggtaaggcggtcaagccgatgcaaggggtgtagctccttgagttggtgctccttgcctaggatgaagataactgtgttgtgtcggaagcggccacaggggtgaacgggaatggaggaaggcttgtctacaaccaccacatcttcgttctcagctagcaggcgaatgggctctgctgtgactggtggctcatgcctgtgcactgtgttccgcaagaaatcattgtccttgagcacgatgttgaggtcctgcaccggc

SEQ ID NO: 19630 - DNA, 957 bp, Homo sapiens
  misc_feature 954, 955, 956, 957: n = A,T,C or G
gagagtggcgggcgaacacaaaagttacgctttgcgtccttccattggcagtttcttccgtctgtctctcggttgcagccgagctgggaatggggaaaacccggagtgtgggatcgtggagggcggacgatgccaagtccagcagagcttgcgctcggggctagaagagagactgagtctcccttctcagtttcattaggtaatgggcgacatggctccgtctccacagcggggctttgctgagcttagcacgcagtctcccggcggggaggaggcgcgcagtgccgggcgccactccgtctccagtacgcgttaggcccgcgttcccaggtgcccgtctggccgctggactgttggcctttccggagcgagttttactttaggaagaagcccgggatcccggtagtttagcctgaagaaacgtggggcagatgctgggcagggcggggataccgcgccaacacccgctgcccagcggtcgccctcctatgcagcggcgaagggacgcccgctgtgtctccgccctgcccccaggcgccccagtggctggaggtggcattctccactggacgggcgcgcctcaatccgggggacttccacagtgctgttcccgaggactacgcgtctcaactctttgtcgggttccctccctcccactgccagtctgtcttcaccgccgcgcagacctggggccgcccttcacagaggaagggctccttgacctcagccaccgtgaccccctcctttgtgtcacattctcagagagttggagggattatgcgtcatcgtaaacagggggacagagcgccttccacctgcggcgcatccattaagttccagttaccctcgagaggattgttttttccacgaaacccagatgcaatgagagcctggcttgtaccatctctaagcatcgaggcttccccctcgtctgggtggtggccttcgggcagnnnn

SEQ ID NO: 19631 - DNA, 2917 bp, Homo sapiens
  misc_feature 2915, 2916, 2917: n = A,T,C or G
gcgtccgtggcggcaaatgggcttgggcggctcctcggcgggtggcggtggtggccgtagcggttcctcctggccctgttaatgtcggggccaggccgggggaggatggcgccctagaacccggccttgctggggtaggggcgggaggggacggggtggggaccggccatgtcggaggtgacccggagtctgctgcagcgctggggcgccagttttaggagaggcgccgacttcgactcttggggccagctggtggaggcgatagacgagtatcagatattagcaagacatctacaaaaggaggcccaagctcaacacaataattctgaattcacagaagaacaaaagaaaaccataggcaaaattgcaacatgcttggaattgcgaagtgcagctttacagtccacacagtctcaagaagaatttaaactggaggacctgaagaagctagaaccaatcctaaagaatattcttacatataataaagaattcccatttgatgttcagcctgtcccattaagaagaattttggcacctggtgaagaagagaatttggaatttgaagaagatgaagaagagggtggtgctggagcagggtctcctgattcttttcctgctagagttcccggtactttattaccaaggttgccatcggaaccaggaatgacattactcactatcagaattgagaaaattggtttgaaagatgctgggcagtgcatcgatccctatattacagttagtgtaaaggatctgaatggcatagacttaactcctgtgcaagatactcctgtggcttcaagaaaagaagatacatatgttcattttaatgtggacattgagctccagaagcatgttgaaaaattaaccaaaggtgcagctatcttctttgaattcaaacactacaagcctaaaaaaaggtttaccagcaccaagtgttttgctttcatggagatggatgaaattaaacctgggccaattgtaatagaactatacaagaaacccactgactttaaaagaaagaaattgcaattattgaccaagaaaccactttatcttcatctacatcaaactttgcacaaggaatgatcctgacatgatgaacctggaacttctgtgaattttaccactcagtagaaaccatcatagctctgtgtagcatattcacccttcaacaggcaggaagcaagccgtacccagaccagtaggccggacggagtccaatgcaaagctgtaccacagaattcagagtccagcacatcacactgacgtataggactccttgggatacaggtttattgtagattttgaaacatgtttttacttttctattaattgtgcaattaatagtctattttctaatttaccactactcctaccctgcttcctggaacaatactgttgtgggtaggatgtgctcatcttcagacttaatacagcaataagaatgtgctagagtttacacatctgttcacttttgctccaatatgctcttttgacttaacgtcaagctttgggttgatgtgggtagggtagtgtcaaactgctttgagaggaatgggaccagttctgctgcctaagaaggtctgtctggatgtttataggcagcacctctgaagtggcctaaattcaccctgatctgatagttttcctgcttagaaagtgtgccttggccagatcagtatcccacatgggagtgttccctaggttgtagctgtgattgtttccagatgaccagattgtttttctgaaaatgagcatatttttagtcatgtcgattagctgttcttctacatcacattgttactctttctgatgatgattctagggttaacattggaaccatctcaaaataattacaaagttttagatgggtttacaatgtcttctaaacaatgtaatctaaaaataattgagtcagatgctaacgagatactgcaggcataactgctgtttttctgacaactgattgtgaaaccttaaaacctgcatacctcttcttacagtgaggagtatgcaaaatctggaaagatattctattttttttatataggtagataggatcgccatttatttcctatttagatatactgacattcatccatatgaaaatatgcaggtcattagcttactataatttacttttgacttaatggggcataaataaaactttcatagtacacatgaggtggatatttgatacacagaacatttgcggtgggctttctgtgggttagatgtaaagcccacatattttaatattcactattttaaatgagcaatgcatgaggggaatgcagtgtcagtacctggcctatttttaaactagtgtaatcaccctagtcataccattcagtatgtttgctttttaaaataagtaaccacaattaagttgttgtagcccttgcacttcaagagatctagtctttactttcagttgtctgttaggtccattctgtttactagacggatgttaataaaaactatgcgagcctgaatgaattctcagccaaatttagtcttgtctctcatcttgattggattaattccaaattctaaaatgattcagtccacaatagctctaggggatgaagaatttgccttactttgcccagttcctaagactgtgagttgtcaaatccctagactgtaagctcttcaaggagcaagaggcgcattttctccgtgtcatgtaatttttctaaggtgtttggcagcactctgtaccctgtggagtactcagtaccttttgtttgatgttgctgacaagacctgaaaaaaaatcccttaaaaaaaaaacccattaaagtgtagcaaaaccgaaaaaaatataaaaacacaggggggggggttagagtaacccgggggccagtttagggacacaatttgggcaggggccaaagggggaaaaagannn

SEQ ID NO: 19632 - DNA, 1238 bp, Homo sapiens
  misc_feature 1, 2, 3, 4, 1226, 1227, 1228, 1229, 1230, 1231, 1232, 1233,1234, 1235, 1236, 1237, 1238: n = A,T,C or G
nnnnccgccgcctgggtcgctcaacttccgggtcaaaggtgcctgagccggcgggtcccctgtgtccgccgcggctgtcgtcccccgctcccgccacttccggggtcgcagtcccgggcatggagccgcgaccgtgaggcgccgctggacccgggacgacctgcccagtccggccgccgccccacgtcccggtctgtgtcccacgcctgcagctggaatggaggctctctggaccctttagaaggcacccctgccctcctgaggtcagctgagcggttaatgcggaaggttaagaaactgcgcctggacaaggagaacaccggaagttggagaagcttctcgctgaattccgagggggctgagaggatggccaccaccgggaccccaacggccgaccgaggcgacgcagccgccacagatgacccggccgcccgcttccaggtgcagaagcactcgtgggacgggctccggagcatcatccacggcagccgcaagtactcgggcctcattgtcaacaaggcgccccacgacttccagtttgtgcagaagacggatgagtctgggccccactcccaccgcctctactacctgggaatgccatatggcagccgagagaactccctcctctactctgagattcccaagaaggtccggaaagaggctctgctgctcctgtcctggaagcagatgctggcatcatttccaggccacgccccacatgggggtctactctcgggaggaggagctgctgagggagcggaaacgcctgggggctcttcggcatcacctcctacgacttccacagcgagagtggcctcttcctcttccaggccacacagccttctccactggcgcgacggcggaagaacggctcatgggtgtccctatgaaccgtgggaattcacacccaagggacagggccccgagtgggagcgaaaatctgcccggcgaccatgacgtatatgccgtcaaacaacaacaggcacccgtgggtgtgcccatcctaacacgggacgaaacgagcggaccctccgcccaagggatcacgccgcagagacccaactcagtggggggacactgcagagacaaccaacacgaatcgtacacgtggcgcacccccgcgacacagaagcaacacagcaacgaagaagcagacacagggcgcaagccgacctagacagagcagaccgcaggacggtacgagcacaaacatctgaagaccgcannnnnnnnnnnnn

SEQ ID NO: 19633 - DNA, 2567 bp, Homo sapiens
  misc_feature 1, 2159, 2567: n = A,T,C or G
ngccgccggggacgcgcaggcgcagcaccacgcgtccgcggccccccgagagaagaggtacggtcgaagccaggagccaggccgagcgggagctgaccaggcttgactcgggtacagaacgaggcaccagtccccttgcgaaccgaagggcctcgcagtggatggaggaggcccagccctgaggtcaacgccaaccaggctagcctggcacggggcctacagggtgggtaggcgggcgtgccgcagccgtccagggccttccctcaggtcccgggcgaggggcctacgctgcggcccggcaacaaggcccgactcggcccctcgggaccagagccccacccgatcggaagcggatcctttaccagggccataggccagtgactaggccgggcctgggcctcccatcggggccggactaggacgaggccccggggaggcccctggcctaccagacccttttctcaggccgacagccgccaggaagatgcaacgtgccctgccaggcgcccgccagcacttgggggccattctggccagcgccagcgtggtggtgaaggctctgtgtgcggcggtactattcctctacctgctctccttcgccgtggacacaggctgcctggcggtcaccccgggctacctctttcctcccaacttctggatctggaccctggccacccatgggctgatggagcagcatgtgtgggacgtggccatcagcctgacaacggtggtggtggccgggcgtttgctggagcccctctggggggccttggagctgctcatcttcttctcagtggtgaatgtgtctgtagggctgctgggggccttcgcctacctcctcacctacatggcttccttcaacctggtctacctgttcactgtccgtatccacggcgccttgggcttcctaggtggcgtcctggtggcactcaagcaaaccatgggggactgtgtggtcctgcgagtgccccaggtgcgcgtcagtgtgatgcccatgctgctgctggcgctgctgctcctgctgcggctcgccacgctgctccagagcccggcgctggcttcctatggcttcgggctgctctccagttgggtatatcttcgcttctaccagcgccatagccggggccgaggggacatggctgaccactttgctttcgccactttcttccctgagatcctgcagcctgtggtgggtttgctggcgaacttggtgcacagcctcctggtgaaggtaaagatatgccagaagacggtgaagcgctacgatgtgggtgccccatcctccatcaccatcagcctgccaggcacagaccctcaagacgccgagcggagaaggcaactggccctgaaggcactcaatgagcggctgaagagagtggaagaccagtccatctggcccagcatggatgatgatgaagaggagtctggggccaaggtggacagccccctgccctcagacaaagctcccacacccccagggaagggggctgccccagaatccagtctaatcaccttcgaggcagctcccccgacgctgtaactccagaccaccttgagtgtggcacctcccctcccaagccccccttgacatcctctcagctactccagggcacctgactgctctgaggagagggaagaaggcctgctggggctttccatggccttctgctgtttctcgccaacactacccaggactcttgctacctggttccaactccagacaaccactatgccaggcccggagcctctgaggcatcggccagtccaggccctcatctgaggtaagaatgtacatcagctggcagccccaagcaagtggctgcagggacactgatgccacagctcctgggccggccctcacatctgaaactggttgccgagagccctgagccaaggcaaggatttgccaaaaatgttctgggggcccagcaaatgcaggagccgacctggggctgcacatccctgcccatccccagaaagactgttcctgtcaggatttgtttccctctgctgtggcggtgactgcttctggaccagaacagctccagctcccaggtattttctacaggaccacttgagtgggcagccaagcccaggctcgcagtatcaataaagcagttctctgaggaatgaaaaatgggctcttgtcaggccacctntgtgcagccccctcatcacgttcaactgcaatgttagacagggacttgattgtctccatggtaactccagctggataagaagcccattgccccagctccccaccaccgccaccaccaccaccacatgcgcactgccaagcagccttccaagagctattgcctcagactcttactccttttttctttccctccaaaccccaatctgggaggccttctgtccctgcctagatctgatgataagggcctctccatcataaggcgctgttcttacccatggtttatctctaagacagaatgctcagttcttgccacccctggagacaactcacccccagctcccagttattgtatgtatctaacccccacagtctggagactccagcacagtagacagttggggggacagan

SEQ ID NO: 19634 - DNA, 1028 bp, Homo sapiens
  misc_feature 1, 2, 3: n = A,T,C or G
nnnagtcgacccacgcgtccggccacagagcccgcagcacgccgccgccgcagcctaggtcacctccagcatctagcacaacgtctgcaatggaacaggcgagctgtgaatatttgtggaatgcatgggtggactaaagacctatcacctcactctagaatgcccagcatgttggagcatgaggaccaagaaccatggtgttcctccactcatcagagccgtatcattttgatgcatgcgccaagaaagaaaattcaatcatcagactgaagcaatcaaactccaaatggtgctgtaaactgaaccacacatagacatgccattcttctaaggacccttagatccaccccaggaggagcgctagctgctgttccccattcgatgccccttttcggccggaagtagccggaaagattcgccgcccaaaatcccctaacagcagttagtgtggcatctccacagcagggagcgttgtaggaaaaggtgtccttgggaagttttcggtttttaaagcatctccggaaaagtttcttgtaaagccctggctcttagagccaggccagcaacctttgatatgcaaatgctggctatcagaaactgggtccacccaaacatggaggccttcttgccctttccccacatgttcctggcaacatggctgcccccacatatccccacatgtgtagaaaatcatggcaccctgcacttgcatattaaaagggtagggtgggagggccagctttttcgcagtttacgtgaatgacatgcctagtcaaacgaatcccctgagccctatgcaaatcaaacaccgcctcctccagcttctgcatatatacctggctggtatctgtggcaaggtggggacctcctcttttggctttggagacccgtccctctgtctgtgtacaggggagcttcttccttctgtcttcccctttccttcttgcctattaaactctccgctcttaaaaccatttaaaaaaaaaaacttaaaataattaaattgggatgaaaaaaaaaaaaaaagg

SEQ ID NO: 19635 - DNA, 833 bp, Homo sapiens
  misc_feature 1, 112, 666, 831, 832, 833: n = A,T,C or G
nagacctaggagaacaatattttcccttctgtcgttttgataattacatcctctgtgctcagtggtggcctattaactcacatgaataccatgggcttgcaaaatggcctcnaatttccatatattggaactgtgagaactttctataatggtgctttagcaataatgatggaggtgcaggcatttcctgaggattaatgaccagctgggaggaaccagtggcccttggctctgcctcccagccagccattaattctaaggaaatgtcttttgctgaggtcgttactgctattataagcttaaaatggaaaaacataataggcatatgagttatttttatgggttgatgcagtttccaatggtgtgtactaatttgagaaaatgaatgtgtatacatacaagagtaagtcagattgttagactcatccctcagtattccatatgttttgtgactgattttacagttctctctacctttctcatttacaaaaaaaaaaaagaaaagaaaatttgattcagcaattcctaaaagtattgtattcagtgacatctttggaaacaccagtttctgttatcaacttcaaataatagtcaagttttatgtatgatctaaagggaaaacaagtttgtttttcaatcctgtgataatttttcttttagaatganggtgttgcaagaaatggaaaattaaaaaaaccactctgtaacaattttgctgtgcttctttgatttttctctgtttttgtttaatgggtaccttatatttgtacctttacatattgaattcatgaggagagttatgcacagcctaattatttgacattcaagggnnn

SEQ ID NO: 19636 - DNA, 4102 bp, Homo sapiens
  misc_feature 4003, 4004, 4005, 4006, 4007, 4008, 4009, 4010, 4011, 4012,4013, 4014, 4015, 4016, 4017, 4018, 4019, 4020, 4021, 4022,4023, 4024, 4025, 4026, 4027, 4028, 4029, 4034, 4035, 4073,4074, 4075, 4076, 4077, 4078, 4079, 4080, 4081, 4082: n = A,T,C or G
  misc_feature 4083, 4084, 4085, 4086, 4087, 4088, 4089, 4090, 4091, 4092,4093, 4094, 4095, 4096, 4097, 4098, 4099, 4100, 4101, 4102: n = A,T,C or G
gcgtccggggccgtgaggcggtggcggtggtggcggtggcggcggcggtggtggtggtggcggcggcggcgaagggggcggagaggaaggagcgcggcgggaccgggccgggacagcgcgtactttgggctccgggattcgctccgcgcccgcggttgtagcagctgccgctgcagccatagcagcaggtcagtcattggcaccatgaactggaataaaggtggtcctggcactaagcgaggatttggctttggaggttttgccatcagtgctgggaaaaaggaggaacccaaactcccacagcagtcccacagtgcctttggggcaaccagctcttcttctggatttggaaagtcagctccaccacagcttccttctttctacaaaattggatctaagcgggccaactttgatgaagaaaatgcctattttgaagatgaggaagaagattctagcaacgttgatttaccttacattcctgctgaaaactcaccaactcgccagcaattccattccaagccagtagattctgacagcgatgatgatcccttggaggcattcatggctgaagtggaggatcaggcagctagagacatgaagaggcttgaagaaaaggacaaggaaagaaaaaacgtaaagggtattcgagatgacattgaagaggaagatgaccaagaagcttattttcgatacatggcagaaaacccaactgctggtgtggttcaggaggaagaggaagacaatctagaatatgatagtgacggaaatccaattgcacctaccaaaaaaatcattgatcctcttccccccattgatcattcagagattgactatccaccatttgaaaaaaacttttacaatgagcatgaagagataaccaacctcactccacagcagttaatagatctccggcataagctcaatcttcgggtctctggtgctgcacctcctagaccaggaagtagctttgctcattttgggtttgacgaacaacttatgcaccagattcggaaatctgaatacacacagcccactccaatacagtgccagggtgtgcctgtggcattaagtggtagagacatgattggtattgccaaaacaggtagtgggaaaactgcagccttcatttggcccatgttgattcatataatggaccagaaggagttggaaccaggtgatggaccaattgcagtgattgtgtgtcctaccagggagctttgccagcagatccatgcagaatgtaagcggtttggaaaagcatataatcttcgatcagtggccgtatatggaggagggagtatgtgggagcaggccaaggcccttcaggagggggcagagattgttgtgtgtaccccaggtcgactgatagatcatgtgaaaaagaaagctaccaatcttcaaagagtctcttaccttgtgtttgatgaagcagatcgaatgtttgacatgggatttgagtaccaagttcgatccatagcaagtcatgttcgtcctgacaggcagactctcttatttagtgcaacttttcggaagaagattgaaaagttggccagagacatcctgatcgaccctattcgagtggtgcagggagatattggagaggcaaatgaagatgtgacacagattgtggagattctccattctggacctagtaaatggaactggcttacccggcgtctggtagaatttacctcttcagggagtgtcctcctctttgttactaaaaaagccaatgctgaagagctagcgaataaccttaaacaggagggtcataatcttgggctgctccatggggatatggatcagagtgagagaaacaaggtcatttcagactttaagaaaaaggacatcccagtcctggtggccacagatgttgcagcccgtggtctggacattccttcaattaagactgtcattaactatgatgtggcacgagacattgatacccacacgcataggattggccgcacaggaagagcgggtgagaaaggtgtggcctataccctactcactcccaaggacagcaattttgctggtgacctggtccggaacttggaaggagccaatcaacacgtttctaaggaactcctagatctggcaatgcagaatgcctggtttcggaaatctcgattcaaaggagggaaaggaaaaaagctgaacattggtggaggaggcctaggctacagggagcggcctggcctgggctctgagaacatggatcgaggaaataacaatgtaatgagcaattatgaggcctacaagccttccacaggagctatgggagatcgactaacggcaatgaaagcagctttccagtcacagtacaagagtcactttgttgcagccagtttaagtaatcagaaggctggaagttctgctgctggggcaagtgggtggactagtgcagggagcttgaattctgttccaactaactcagcacaacagggccataacagtcctgacagccccgtcaccagtgccgccaagggcatcccaggctttggcaatactggcaacatcagtggtgcccctgtgacctacccgtctgccggagcccaaggagtcaacaacacagcttcagggaataacagccgagaagggactgggggcagcaacgggaaaagagagagatatactgagaaccggggcagcagccgtcacagtcacggagagactggcaatcggcatagcgatagtccacgtcacggagatggtggtcgccatggagatggataccgccatccagaaagcagcagccgtcatactgatggccatcggcacggggagaacagacatggaggaagcgcaggccggcatggggagaaccggggtgcaaatgatggtcggaatggggaaagcaggaaagaagcttttaatcgtgagagcaagatggagcccaagatggaacccaaagtggacagcagcaagatggacaaggtggacagcaagacagataagacagctgacggctttgctgtcccagagccgcctaaacgcaagaaaagtcgatgggacagttagaggggatgtgctaaagcgtgaaatcagttgtccttaatttttagaaagattttggtaactaggtgtctcagggctgggttggggtccaaagtgtaaggaccccctgcccttagtggagagctggagcttggagacattaccccttcatcagaaggaattttcggatgttttcttgggaagctgttttggtccttggaagcagtgagagctgggaagcttcttttggctctaggtgagttgtcatgcgggtaagttgaggttatcttgggataaagggtcttctagggcacaaaactcactctaggtttatattgtatgtagcttatattttttactaaggtgtcaccttataagcatctataaattgagttctttttcttagttgtatggccaggcagtccccattttaggagttggcttctgcaaattcaatccattgagctaactgttggggagcaatttggtagttgtagacatttgcagggaagggagatgtctgattctaaatgggagttgatgctcaggtccccagccaggtttgcatccagccctgagacatgtaggaaacacctttcagacccaggctctgaagattcccagaagccacaaggattgaagggaaaaggtgatcctggtaactgttccaggattgctccaggtttgagatggtattgctaaatttaaaattaaacaagagacccaacaacagcttttaaagtgtcttctatttcattgtattttttttaacttgccccaatgatagaaaagtcttttgctgaaatgattttgatgatttttgtttatcgtttataaaaaggaaaagaaatatacaaactttgacttttgtgactttgtgaaggtttctttaagatgtgcattcctttctgcttgctctctagtaaatgttttactaccgggaaaaaaaaaaaaaaaaaaaaaaaaaaaaaaaaaaaaaaaaaaaaaaaaaaaaaaaaaaaaaaannnnnnnnnnnnnnnnnnnnnnnnnnnggggnnaaatgggggggggggtataaaaatttttaaaaaaaaannnnnnnnnnnnnnnnnnnnnnnnnnnnnn

SEQ ID NO: 19637 - DNA, 1240 bp, Homo sapiens
  misc_feature 1, 2, 1239, 1240: n = A,T,C or G
nnacgcgtccgggggccgtctctggctgccgtcccgcccctcccgtccggccgccgccgccgccaccgccgccaccgcctgggggttggttgaggcggacggcggggtccgggccggagtacgtcgttcccgctgcgctaggggaagcgggcagtcagaaaaatgggtaagaagagtcgagtaaaaactcagaaatctggcactggtgctacagcaactgtgtcaccaaaggaaatcttgaacctgaccagtgagctgctgcagaaatgcagcagtccggcgcctggcccaggaaaagagtgggaagagtatgtgcagatccggactctggttgagaaaatacggaaaaagcaaaaaggtctgtccgttacttttgatggaaaaagagaagattactttcctgatctaatgaaatgggcctctgaaaatggggcttctgtcgagggttttgaaatggttaacttcaaagaagagggctttggtttgagagcaacaagagatatcaaggcagaagaattgtttttatgggttccacgaaaattgctaatgactgttgaatctgctaaaaattcagtgttggggcccttatattctcaagaccgaatccttcaagccatgggaaacatcgcactggcctttcatttgctgtgtgagcgagccagccctaactccttctggcagccctatattcaaaccctccccagtgaatatgacactcctctctactttgaagaagatgaagttcggtatcttcagtccacacaagctatacatgatgtcttcagccagtataaaaacacagctcgacagtacgcctacttctataaagtcatccagacccatcctcatgccaacaaactacccttgaaggattctttcacttacgaggactacaggtgggcagtctcttctgttaattgacgaggaaaaacaaattcccacagaggatggtcccgcgtgaccttggtctgattcctttatggggatatgtgtaaccaacaccaaaggcctgatcactaactggttacaacctgtagatgaccgcggtgaatgtgttggtctgcggaattccggggtggagaaacaattaccttttttattggccacggtccacgcgaggttggtgctccacggggtcttcttggcaaaatccccgacgagtgaataagcttgcgcgcgtaagtacgactttaccgagaagcgagtggatgatgcaccccaggtttgagtatttccgann

SEQ ID NO: 19638 - DNA, 1991 bp, Homo sapiens
  misc_feature 1, 2, 3, 4, 5, 6, 7, 8, 9, 14, 17, 35, 38, 1991: n = A,T,C or G
nnnnnnnnnaaacnggncccaaactgttacgaagnganagaggctggatagctcttcataattaatcaggaatgggaggtttgagcaggtttacttgatgagggaaacattatagcctcgccaattcattcattatttcaacaattacttattgaacacctgctacgtggcagacagtaagagcctggatagtttctccccgtttttcaaagtcgctaaacgcgaccagagggcagaggagaggccggtaacctaagaagtccctggctccgcccccctccgcgtttggccttgcctgctcctcccaccaccacttcgctcagaggcggctactggctcaagaggacgacagaagccagtctctgatgcccaccgcattctccagcttcaggcctcaagccctgtagccgagaaggcgaggcctaatgttacaccaccggtctgttccgcctccgtttcggggtccacccgaaaagctttcagatcggatcctcggtgagacggcactcgattaaataggtctgtctctacaggccaaggaggcgggtttggtgcggccactccaaggccaaagcgagaaaatcttactgcgcacgcgcaatagacagccgatggagccaccgatggagccgtccggaggggagcaagagcccggagccgtcaggttcctggacctgccctgggaagacgtgctgctcccacacgtcctgaaccgggtcccgctgcgccagctgctccggctgcagcgcgttagccgggccttccggtcgctggtgcagcttcacctggccgggctgcgtcgcttcgatgccgcgcaggtgagccgggggctgaagccccgcccctgcctgggtaccgccccgcctctagcccagcccccagccccgcagtatgcccttctggacccccttgggccgccggggctgcccggaagggatccacgcaccaaagggcaaatactcggtagcgactcagagggaaagtggggtctctcctgggagagcaggaggctgccagaaaagaactcaggtcaggggtgcataggcggctgaggagtgcgggacgggctgagagttggggtgcctccccgcccgcaggtgggtccgcagatcccgcgggccgcattggcccggctgctgcgggatgccgaggggctgcaggagctggcactggcgccgtgtcacgaatggctgtcagacgaggacctggtgccggtgctggcgcggaatccgcagctgcggagtgtggcgttgggcggctgcgggcaactgagtcgccgggcgcttggggctttggccgagggctgcccacgcctgcagcgcctgtcgctcgcgcactgtgactgggtggacgggctggcgctgcgcggcctcgctgatcgctgcccggccctgggaggagctggatctcaccgccctgcccgcccagctcaaggacgaggccatcgtgtacctggcgcagaggcgcggcgctggtctccgcagcctctctctggccgtcaacgccaacgtgggggacgccgcggttcaagagttggctcggaactgcccagaactccaccaccttgacctcaccggctgcctccgcgtcggaagcgacggtgtcaggtgcctgggcctgatagggcgggaggaggcgcagtcacttagcctctgctggtatggggcgggctgtaggttgttaaaaggccggactgagggttctgaatcttcctgcaaaccacagcacccccattctgaacagaaagggcctctaggattgcctaggccagagagcccatagtttaaaaacttttttcaaccaatgtttacacattgggagatttcacatagaaagtcgacttctggcttttcttcaacaagggggagatcttgcaatcctaggcggagctgaggaccaatcgttgcaacgatggtcctcagctgaggtgtccaacttgaggtgactgtgaatatgaggcctgaggcagatctaactgctgtgaagaggcn

SEQ ID NO: 19639 - DNA, 180 bp, Homo sapiens
  misc_feature 177, 178, 179, 180: n = A,T,C or G
gcgtccgctttcaccttcttggttccacctcaaacatcccttccgaagtgaggctttccctgactggggagcataaagtagcatctctcacatcccatacacccctacaacgaatctatgcaatggccctgctctgccatcgccacctgaaaccatctcaataaacacattttggannnn

SEQ ID NO: 19640 - DNA, 995 bp, Homo sapiens
  misc_feature 1, 969, 978, 985, 994, 995: n = A,T,C or G
ncacgcgtccgagcccctgttggactggaagggaggtaggaggagtggaatgcatgcaaaaaccgagctgatcaaaagacagtgctgtttcatggaagcctcccagaactgagagagagagagagagagagagagagagagagacagtgagaaagaaagaaaaagagagcgcccttgtgcacgcgctaggccaagagcgcgccgctgtgcgcgcgcccgcctagcgaggacagggtctccatgacaaccggcctggccggctagcagtgctctgctcacttggctgcgaggagcgccacgaaaggtcagaggaaggagctgtgggaagctcgcagcaggtatcggagcttaagccagtggatttgggggccctgggctccctagccggctgcggtgtgagaatggagtgggcaggaaagcagcgggactttcagggctctgggtttgcagagagccgaaatgaccatgactgccaacaagaattccagcatcacccacggagctggtggcactaaagcccctcgggggactctgagcaggtctcagtcagtctctccacctccagttctctccccaccaaggagtcccatctacccgctcagtgatagtgaaacctcagcctgcaggtaccccagccactccagctcccgggtgctcctcaaggaccggcaccccccagctccttcaccccagaatcctcaagatccctccccagatacttccccacccacctgtcccttcaagaccgccagcttcggttatttggacagaagcccttcggcgtgcaagagagacgcccaaaaggaaagtgtccaaggcgcagcccaggatgtagcaggggtcgctgcctgcctcccccttgcccagagcacgccattcccggggccagcagctggcccccgggggcgtcttgctgacccgtaccggtacccgcgcccacaggcctgggcattccggagaagatatcancatgggaangtcgccnaaaaggcgnn

SEQ ID NO: 19641 - DNA, 1754 bp, Homo sapiens
  misc_feature 1, 2, 3, 4, 5, 6, 7, 8, 9, 10: n = A,T,C or G
nnnnnnnnnngaggaaaggaaaccagggaaaccttaaatttttaatcccggcggggtgtcttgatccctttaaaaggggaaatgtttaagcaacggcgccaacccccccagattttagacgtgttttcaccccccaaaaaacccactgtcattagttaacaaagttagccctttgaagtaaaacttaatgaggaaggaagtaatgttacctatccttgataccatgaccatttattagatgttttgctaaataaattaccgagagaaaagtttgtcatccccttagtgtgttagctggtggggtacaaaataacctctcatctcaggctattttaaaaaaaaacaatatttgcttctataacaaaaggaaacaaatctaagaatcattcctgtactacaaaagggttaaggcaaaggtagccttttgggctttttaataaatatgacccctataggaaagtcgagggggaaaaacccttgtataaattattttatttattattgtaattagatcttcacaaagttgtcttttcactgtgttttgtcaacgtgaaattaaattgtagttataagcaaaagttggttgcctagggaacaattgtatattcagtttaacagaaataaaagaatatttgtcttaagatgcaagatttgtttttacatagccttttgccatacaattataaaaatttcatttcaaaagcgcgctcggtgtgtgtttgcttcttcttttgcggtttgcttgttgtggtcacgtgctgtcttttgtgtcccgttgtctttgcgttgtgctgcctcgttgcaggcgtgttgccgggtggcgcctgtgctggttcttcgtgttcggcctgttgctgcgggggtttgctgtcggcgtccctttgtgccctatatttctgcctgtgggtccttagggtagcgcgtgtgaagagtccggtgaactacttgttccctggccagccgtcacctttccacgtcatggaagtacaggtttgcacatatacacaacatgatgatagaaatatgatatagtaaattagctttctaaatttcggttctaagtctccttgtcgataccagtagataagtatgcaggcagtaatactactcaaagagatgcagacagcaaagaatatattcaacggttttggaggtagttgagggaaaacaaaagcacttatcagcgttactagaatcaataaggatgttaagctgccaacaactaaattgatgattcgatccttggcggacgtctccccaaacagaggtctgttgtccaggccactggtgccgtaggtcctggtagcaaagtcctccattttggggtttcttcactttccccaagccacttaaaagcaagacagcatgacctcccgaggtctcaggtccacgactgcaagcctcctcctcacggctcccgcatagccgaacccgagtggtcggggaagcgctggcgccagggatgggtgggggctcacacgcggggaacgcgactgctccgccccggccccgcgcacctcctcatcttgagcagctcggcatcccctaggcgctcgcacgctggggggccctggccgcgccggggagagtgggccctgggtccacacccccgccgggatccggtgccgaggcccaggaacgcgggccagatgcgtgggagaggaatcgcgcggtcccgtcgcagcgctgcggatcacctcccggctccttctcaggtcccccgacccggacccgctgcctccgcggacgcgtgg

SEQ ID NO: 19642 - DNA, 617 bp, Homo sapiens
  misc_feature 1, 2, 3, 4, 48, 614, 615, 616, 617: n = A,T,C or G
nnnnaagatatttatgcctccgccacccgaacctgtgctactgtgagnttgccggaagctgcaggagacgaggcccacaggcgcagagggagcctccccgggaatatgcactgccctttggctggtgcaggttcaacctcgggaaaagccaggaagtgccagggacttcctgtctaaggaagagcctcgtgaagctcctccactggggagtcagtggccttcgttgtatctgccccgcttgtccacctcctagagtgaatccccgcctggaggctgggacactaaccaagaagtggcacatggcatatcacgggagcaatgttgccgctgtacggagagtgctggaccgaggggagctgggagcaggtactgcctccatcctgagctgccgtcctttgaagggagaacctggggtagggttcgaggagcctggcgagaactgtgcacctcctcgggaggagcagccccctcctgtgctgctttccccctcccttcaatatgctggggcggagaccctggcctccaaagtgcaattccgggaccccaaatcccagcggacgcaccaggctcagtgggcgtccaggtgttgtgtgcgccctggctcctacaccccnnnn

SEQ ID NO: 19643 - DNA, 1999 bp, Homo sapiens
  misc_feature 1969, 1973, 1981, 1982, 1983, 1984, 1985, 1986, 1987, 1988,1989, 1990, 1991, 1992, 1993, 1994, 1995, 1996, 1997, 1998,1999: n = A,T,C or G
ggggaaaacataatgatgccaatgggtggaatgatgccacctggaccaggaataccacctctgatgcctggaatgccaccaggtatgcccccacctgttccacgtcctggaattcctccaatgactcaagcacaggctgtttcagcgccaggtattcttaatagaccacctgcaccaacagcaactgtacctgccccacagcctccagttactaagcctcttttccccagtgctggacagatggggacacctgtcacaagctcaagtacagcttcatccaattcagaaagtctgtctgcatcttctaaagctctgtttcctagcacagcacaagctcaggcagctgtccaaggacctgttggtacagatttcaaacccttaaatagtacccctgcaacaactacagaacccccaaagcctacattccctgcttatacacagtctacagcttccgcaactagtacaacaaatagtactgcagctaaaccagcggcttcaataacaagtaagcctgctacacttacaacaactagtgcaaccagtaagttgatccatccagatgaggatatatccctggaagagagaagggcacagttacctaagtatcaacgtaatcttcctcggccaggacaggcccccatcggtaatccaccagttggaccaattggaggtatgatgccaccacagccaggcatcccacagcaacaaggaatgagacccccaatgccacctcatggtcagtatggtggtcatcatcaaggcatgccaggataccttcctggtgctatgcccccgtatgggcagggaccgccaatggtgcccccttaccagggtgggcctcctcgacctccgatgggaatgagacctcctgtaatgtcgcaaggtggccgttactgatcttacttcatccagtctaataggtttggagattaaaccttttctcaacttgtgctgtatatatagccaagcttccgtcaataaggcttcattgtgactttaacaaacattatcttcccacataccaggaactatgggacatttatcttacatggggaaacaattattgggaataataaagcaggaacttttcctgaaagtagcatttattactgtatgggttcttttcatgtgcatctaggttttgagaagtgaagtatagtaaattgggtccgtcaatcgtgaaggcgctggaattacattgaccattacgcaaccgtaattacagggcaggtccggaaggctttgcttgcctttcgggcacagtgggccatacacacggaatccacgacggccgacggcatcaggtcccaaaccaaactgggcgcgagggggcaaggggcacaggaacggagcaaatgacaaggcgcagcgtggacacaactaacgggtcgagagagccacagagacggggacaacaaggacccccagggcgggtacatgagcggggcaacacgagcacaacgagaaaacagcctagtataacacgagagcgccacgcgacgagaaacgggcagcaaaaaagacacaaaaagtagatgtccacataataaaattgatagttaccaatgcagttttgatatatcattggattctgtctttgagttgtaggttatttcttagctgcatgttttaaactgaatttgcatagagttgtatgttaatgtttcagttaagagaaaaacttaagatacatgagtcattacataatgggtatgaaatctttataatcacccttccaccctctatggtgtcagtacacatcacgtgtcatagatacttaaaatgtaaatgttaacacttttccttcctgctgagatgtttagagcctagtgccagacccattcatttccttttgattatttttgagactcagtactgcatgcttcttgtgctgttaatgggttattatatattattctaagtgtaatgctgagaatctaaatgtgtctctgttgggatggttaacagntganttggcaannnnnnnnnnnnnnnnnnn

SEQ ID NO: 19644 - DNA, 2866 bp, Homo sapiens
  misc_feature 1, 2866: n = A,T,C or G
ncgcgcgcggtcaggtaggggcctgcggaggcgcgaggcccccggaagcgcctttcccggaaggcagggaggcagcgccggcctccggaggcggcctgggcgatggcggcggagttttgtccataacgtgggcaaccgcgcagctggaggatggcctcactcgggcctgccgcagctggggagcaggcgtcgggggctgaggcggagccgggccccgcggggccgccgccgccgccctcaccgtcctctctggggcccctgctccccctgcagcgggaacctctctacaactggcaggcgaccaaggcgtcgctgaaggagcgcttcgccttcctcttcaactcggagctgctgagcgatgtgcgcttcgtactgggcaagggtcgcggcgccgccgccgctgggggcccgcagcgcatccccgcccaccgcttcgtgctggcggccggcagcgccgtctttgacgccatgttcaacggcggcatggccaccacgtcggccgagatcgagctgccggacgtggagcccgcagccttcctggcgctgctgagatttctatattcagatgaagttcaaattggtccagaaacagttatgaccactctttatactgccaagaaatacgcagtcccagccttggaagcacactgtgtagaatttctcaccaaacatcttagggcagataatgcctttatgttacttactcaggctcgattatttgatgaacctcagcttgctagtctttgtctagatacaatagacaaaagcacaatggatgcaataagtgcagaagggtttactgatattgatatagatacactctgtgcagttttagagagagacacactcagtattcgagaaagtcgactttttggagctgttgtacgctgggcagaagcagaatgtcagagacaacaattacctgtgacttttgggaataaacaaaaagttctaggaaaagcactttccttaatccggttcccactgatgacaattgaggaatttgcagcaggtcctgctcaatctggaattttgtcagatcgtgaagtggtaaacctctttcttcattttactgtcaaccctaaaccccgagttgaatacattgaccgaccaagatgctgtctcaggggaaaggaatgctgcatcaatagattccagcaagtagaaagccgctggggttacagtgggacgagtgatcgaatcagattcacagttaatagaaggatctctatagttggatttggcttgtatggatctattcatggccctacagattatcaagtgaatatacagatcattgaatatgagaaaaagcaaaccctgggacagaatgataccggctttagttgtgatgggacagctaacacattcagggtcatgttcaaggaacccatagagatcctgcccaatgtgtgctacacagcatgtgcaacactcaaaggtccagattcccactatggcacaaaaggattgaagaaagtagtgcatgagacacctgctgcaagcaagactgtttttttcttttttagttcccctggcaataataatggcacttcaatagaagatggacaaattccagaaatcatattttatacataatttagcattataatacatcttggctaaataataccatacaatctagtgtcaaaaacataaatggccacaaaaaagtagtttgagtgttatgaatatttaaaattgtaagataagaaacagtttcttagagcagatagaaaaatgcttatttaaatctttgcatgatttaaaaacagattttccattttcttacaactttaagagaaaagaactgggtttaatggtttaaaaaaaagcacagctttttcaccttcatcttgtataatttcatagattggctgacttagggtctttcaatagtttgggaattgaaagattcttgttatatatagctagtttgggtttgtttttgttttaactattttgaaggttaggtgagatgggcaaataggcttaactattttgaaggttggatgaaaagagatgggtcagtattcctacagaattcttattaactcaaataactaaatttcagaaaattaagaagctgactttatatttggtggtttgaagtatcttgttgttagcatttgtaataatgctaaaaaaggcctaataaaatgcccaagaaaatattcagtgcatttatagagaaggatattttgtagtagtatagtaatgtgttatgtagtacagttttaaagctataaatggaattttgtgtaaattcacaaaaatgtgatataaacaggatctaagactggattccctgtcactaaactgcaccactatacctgtctctctgtgtgggggacactgctgatgattcccaagattgagatgatgacggtgatgacgactgggtgaacagccatcacttcaacattgtgataatccttcacagcaagaaaccgaataaaatactaacatttctaacaactgctctgacattgtaaagagatccaacagaatcactcctgctgaaaaatacgctttctgccacctacacatttctatttaggaagtaaaatttgcttcatggtcatgaccccattagtcagtgttacagctgtgttggggataggaagtatatctggcagattgatatttatacacttttttataaagcagattttaaaatatagtaacatccatttttttcccttgaaagtgattctcttataaaaagcaggggttaggttcatggtggaggatacataattttaatatatgttagagaaaaattctaagtattctttgaagaaatagggaggagaagaagaaaggagagaaaaagaaaggggggaacagcaaataaaggtgaccn

SEQ ID NO: 19645 - DNA, 2792 bp, Homo sapiens
  misc_feature 1, 2, 3, 2791, 2792: n = A,T,C or G
nnnctggaggatcccggtcactgtctacacactttctgcttttctttctttctttgccaaatgttttataataaatctcttaattacatacatttttctacttaagattaaattggaaatactgtattagcaaaagtcttgggactatctaaactcccacacatagataaatctgatttggagagagaaatttaaaatatttaattaaaggtgatacccacattttcaagtttttaaaagagggagatggctttgtatgcttttgtgtagtttagaacagatacacattagtaaaagataccaataatcattagagctcaaggaagttattaggtgcagcctctggagccatactcacgctgcagtgcataatgggaaaattaggagcattaataagaaatttcagtagtgtttgtaaggaaaataagctacttactgagatctgtttcttctattgcatgtttgcttttgagggacagcttctgtcaaaagtgaaatcatcaccagaactgggcctgttaggaagaatagggttttatttactttttatgtcaattaacttcaacaaaaaggccacgctggctgctgtcatgccatctgggtatgcattaaacattaatgatgatcagcactgaggttctatttatcttgatttggctttcataaagtttgtcagaatggtgctggaggaccagaagtgctaaggagaaagaagctatgggccaagttaaagaatttgaatgcaaaggccaggtcaatggagttttcataaactacataatttaccagggtttatctcatcttctcaatacatagatttaacaacatggaatactctgcttttcaagagctgcgtaagctagtcctgagataagatgttcaagagagcatgctaagttgcatgtgctagatgagagacacctttacagcccctgcgctccaaccagaggtgacacaggaagctctgtaaagttcaagtaaagcttgaacacaggaacactacaactgccagatgctgaggagaatcaggaaagcaatgagctagactctttttttagtcaattaagtgggttgttttagatgtatagagtattgatatgagttaacactttttagtagatggcaaagtgggcttgatgttcaaaagtaatgttcgagttagggttcatggtccctttctcagtaattttttcttaataaaagtaaacactggttcaaagacaaatagcaagtattccctcctgtgctatttatagagggctcaattcgtagaaaggcataccctccaatgcaattctgtggctgtcccttacagtggtttcagaatcacgaaaaaacagctagtaaataggatagaaacaataaaagaaagagtttagaagttccctgtgagcaatctgtgtgtcttcagcgagcttgaaccaaagtcttcatatcctgacccactgaattataagcaattgctacttgcccatcttgccaaagtagtccaaacacacttcaatgaggacagttatatttagcaggtcctcacccctgcaagagacagcatatcctcactattattattcatgtgttattggcaaaaacatagcttgcatctttccagaggcagagtttcaaagacagggttttctttgagacataagcacattgcttaagtacataacaaggttattaacacttgcactcaggggaaaggaaatagctattgcaaattaatgtgtgcaacttaataaaataagctgtttgtgtatatgaatttagctctaggtaagcaaaatgcacacatcatataaaaataaattgcaatgatcagaccaagtggctgtgctggacatcaaagaaaagacatgctgttgccatcaggagaactctttcttatatgcgatagccaagatatcttctttaatatgaaaaaagttaatttctgaatttcaaaaagagtaagattagctaattggtcttcctaatttttatgcctttagagtttttagtctattcaagtagaagagtccagcgaggccaaagaagggttacggtgttcaagttctggttgttggagtttttagcccagagtgacatactgaaatcagtaaataattattttataatgacacagcacaactgccttgttatgaatttttcttaaatgcatatatactgtatttaaaattaaaatatagataccaatttaccaaagatacatattactaattctaagcaaaactaaaaaaaaaacccaactcatcataatttaagaatcaaaatgtagtttgtcttaagaatttagtggttatactggaaatgcattttcaactcctatgttctaaagtttatgttcaaatggtgccagtgaatttttatatgaagggaaaatgcctgcttttttttttttttaacagatgtaatttcacttaaccctttgcgctttcccttagttgtcatttaacatacaaaagtgggtgaacttattctttagaaaagaagaggctgctacaaatttgggagggactgtgtaataatgaaatttggggcccaagttgtttagcgtgtcacatggtgaaggaatcgtggaaatattttggacgggaagagttttaaggggggaagtaattgcaagacacattttgtggtgtaagaataacatttccagaaaggggaaggtgtttataaaaggtgcaactcaaaattggtggacctctttgtggaattagaaagatacaagtgtttaaaactgggtcatgtagtgtgccattgaagaaaataagaatatgggtggaaacggaann

SEQ ID NO: 19646 - DNA, 1078 bp, Homo sapiens
  misc_feature 1074, 1075, 1076, 1077, 1078: n = A,T,C or G
cgcgtccggtgagccccagcaaggagatcaagatcgtgtctgcctgaggaagcagagccatgacaatcggaaatctaccagctcaatgtcctgcatgtagactaccggaccgtgagcaatctgattctgacgggcccacggacgattgtcatggaagtcatggaggagttagagtgctgagctcctgggcctcccagccctccagtggcctgtgggtgagggaagccagaatgacacaaagcaatgcaaagacaagattgccatgcaaatggatggtttggacatacgagtcttctccgcacatacatgtctaaagttgagttttatacactgaatgtggaagaaccgggtatcatatcttttttaaaaaatgtcagtgtagaaaacattgggaaaccattttcctacatgatagaactgccttactagatttctatttgtagctctcattcatgttttttatcttagttgcagaaaggtgttgaaatgcttctctagcccaaacagcgacatgctaaagtccccttcttcagagtcaatagagtagttgttaaaggttttaaatgtactttctccaaaattagcatgcagctatttaatagggaatctagatttcaccaagattcaaatcaaagcaacatttaaaggaataagacctgttcactagcattttcaagggggttctaaagcattcaagtgcttaaaagccataaaaaatgacttcttaattcctgcctttagtgtcaacttttaagttaatacaggtttcaattgtggcattaggaaaaaaaacaaaaccttgtgagctatgggggggaaggaagggagagactacctggatatggggtgccctatttctactgacctaaatcatgtgttataaatcagctaagcatcttctgaataacccggattgtgaagtcaactcacacagttggtttcccataattaaatcacccttttgcaaaataacaaaacaacaccgcacaaggacgagacaaaaaaaaagagtggggccccccaaaaaaaaacagggggccggcacaaagaagagagagcgcagagccggcaaannnnn

SEQ ID NO: 19647 - DNA, 4000 bp, Homo sapiens
  misc_feature 1, 4000: n = A,T,C or G
naagccggaggaggccacacccagcccatcacctcctctgaaaaggcagttcccctctgtggtcgtgacggggcacgtgctcagagagctcaagcaagtgtctgctggcagtgagtgcctgagcagaccttggagagccagagccaagtctgacctacagctgggtgggacagaaaatttcgctaccctgccttctacccgcccgagggcgcaggctctttccggggtgctgtggcggctgcagcaagtggaggaaaagattctccagaagagggctcagaacttggccaacagggaatttcacacaaagaacattaaggagaaggcggctcaccttgcctccatgtttggacacggggatttcccgcagaataaactactctctaaaggcctgtctcatactcatcctccatctcctccctctcgccttccgtctcctgatccagctgcttcttcctctccatcaactgttgactctgcttctcctgccagaaagctgacggtagggaaagtgtccagcggaataggggctgcagctgaagtcctggtcaatctgtacatgaatgatcacagacctaaggcccaggccacctctccagacctggaatctatgcgaaagtcatttccccttaacctggggaaggcagcgacacgtgttacttctgtaagaaacgtgtgtacgtgatggaacggctgagcgccgagggccacttcttccaccgggagtgtttccgctgcagcatctgtgccaccaccttgcgcctggccgcctacacctttgactgcgatgaaggcaaattttactgcaagcctcacttcattcactgtaaaaccaatagcaaacaacggaagagacgggcagagttgaagcaacaaagagaggaggaggcaacatggcaagagcaggaagcccctcggagagacactcccaccgaaagttcttgcgcagtggccgccattggcaccctggaaggcagccccccaggtatctccacctccttctttaggaaggtgctgggctggcccctcaggctgccgagggacctgtgtaactggatgcagggactcctgcaagctgctggcctccatatcagggacaatgcttacaactactgctacatgtacgagctcctgagcctggggctgccactcctctgggcgttctctgaggtcctggcagccatgtacagggaatctgagggctccctcgagagcatctgcaactgggtgctcaggtgcttcccagtcaagctccgctgacatggctggctgccccaaagtgccttcacatttccagggaggcttcagatggcagtgcgtttgcagtttgctcaggctctggccaggaagcctagcattctctaagcaattagctcaaagccaaagaatttcacatgggccacctccgcctggccttatcagggtgaacatctactcacggtgctagggccagggatgatatgaaggatcttttctatagctttgtgagccatacttctgggtttacatttcaatttttttaattttaattagcccagagaaagcatttttttctatgagtgtcaatttttctaaacatgggtttgaagcttataaccagttttataaaccccttgaacactgcagtgagttatcaaagccactgcctgcaaagtggatgatttaagattttacacgcatgaaaatgagtgtgccatctcctgaccagtgccttttgacttaggtacccagatgccacttgtcagcagcaggatactttttacaacacgaaagcataattattttagaagaagagagtagaagggcagaatagaattcaacttacagaagcacggagtagtgtgtggttggctgttatctgtccccctgggaggaggactgttttgctcccttgttttgatgttaaacagtagcttaaaggctttcccccccataccaactcacagccaaatgacaaagaaccgtggggtttcaacagattctacaaacatgcattttcccttcccactaatgggcactgcagggaaagcccattggcatttgaccatggagctgatgcagtgccaaagatgagctctttcaactgatggcattttagcccctgtggctcccagcggatcccccagcccgggctgcaggctgagccaaggctgtgcaggttccatattggtcaggccaagtggagtggaagactctgtccacttatgtggtgtcctttgggactgagggggtttgttagcacatcaggctattgctgggaagcgtggcctgcccagtgagcattgcctgtggacatcctgactgcttagctgctccgctgccacacatatgtggtcaaaacagaaaccaatttcacactgccctgggaaaggaatgggtctgacctccaggggaagctctaccatatcttgactggcagggaaggctgggagtggaagctatttatggactgatccaaaggacatatgcatgagtaagggtaaaaatgagcatgcaggtccacctgtgttcttactctgggtatctagaagagtcctcagctctccctactccacgctgcctagacatacacagctgcagggtctggctgaacaatcaaggggccgccagagaaaggccatctacggtgcgcagtgtatctggagttgctgggcccaagatagctctgtggagttatcactagagatgcctctggattaactaagaggtgtgcctgggtgtgggtgaggagtcagaacctttgagagctttgagatgacagtttctatggggcgggaagaaggaggtgcatttctacaaacacttccctgaaatccttgggaaaaacagaggcatggccgtggccaactctgtgggaactggcgcctctgtccttgttggcactgttctcagtccgatgacttgcattgtgttttctccaatttttgctgggattttaatgttcagcatggtgggaggaacccttgattccttttgtttgagtatagaaagtaaatttttgaggtcatgatgtgaacggccatgttattgtgattatcttcagctcaggataggctgagatgctttgtggagtgttccatgaagcccgagtcggaatctctgactgtcgtgtacagccataaggagactggtttgaattactgtggcgagacagggcgtgcctgtcagaaatctgagatgtttgtacgctctgagatgttgaacctttctggtgggcagcaccgacacccaggggtggacccccgaggatgaatgcctctaggcctccgcaacatattcaagaatgaatgggagacgctagagtaaaatgggggcagagaggatatcagggagcaagatgcaaactgtgtgcatccactctcgtaaacaagtagctggtcacaaccagaaaggttcatctctcctaagcaaacagcgactctttcagaggaagtttccctctttcaatcgtggccttattttcaactccggtgccttctcgtgatgttaatcatttccttttttccccacactaagctctcttttctatctttctctctctttccaatcttacgccatggccatcagttcatttcagccttccagtgctacacccacttcttggctgacacacttctgctctaaggtgactggttttcttgccaattttcaaagagtggtactaacccccaacccgctttccgcaccccgtcctctccgccagcagtactggttgcactaactgtgagtgtcttgcatactgatggactcatttggtggcatggttggctaacagcatggcggggggtgttcagctgagaccctgccgtgtattcccggggcgggccggttcccaagaatgccgccccactttccggggacggggagcccacgggtggagacacacattgggggcgttaaaaacgggggcctcgaacatcggcaaacacaccccttgttgggagctaaccagaggaaacaccccggatctctctccgtcttggcgctacacactcactcn

SEQ ID NO: 19648 - DNA, 3289 bp, Homo sapiens
  misc_feature 1, 2, 3, 4, 1664, 3289: n = A,T,C or G
nnnnactcggccaagcgattggtcaggtaggtcttgcccgtgccgctggggcccgagaggacgaggcgccggtgcttcagcaggaggcttatgtagtgctgcatcatcggcttggggatcagcgtctcgaacaccaggctgtcgacgcatttctccttcagacctttgagggagactgatatgttattgacacctcgacggcaaggaggcatctcggggggctctgcatccaacactcgtttcacgtggctgatgctgtagccatggatggactcagtgcttagtcccagggtagaggctgggtccattttagaaatatagtccttgaacacttggaaaacagcttcatccagcatcttccagtcaacttttccactgaccttgctacagcccaggaagaattcctgctgcttcaagtcccctttgatgatgtgctgcgggggcatcctcaaccaccacccggagggtccctccccttggcccagcgatcacctgggacgtctgtgtcgcaaactgggcccgaaggaatgggtgagtgccaggccttagggagcggcgtggggaagataatgcagatgatccagggacctgccctggagtggagcctgatgaggggcctggggctaccttcagtcggtcattctctgctttcagcaggtccacctccaactgcatgttgtgcatggtctcccgaagctgatccagttggtgggcagagttgagggcctccaagcggatgtctgtaagcttcatttccttctcccatagctcagagcgcagctccgatacctccttcttctctggctcctcctcctcatttgcatggaacagcctagtgtggggggctgggtgagcagggccctcggtgacatcagtgcccacggaggacgaggtggaggacttgatggagggtgaagcagtctctgtagaaccatgctgtagtttgggggatgagggggctgaagagtcgggtgtagcatctcctctatatccgagtatgaggaagctgacttgggccccttttttatactgaacgctttgttgaaggaacttcgaagccactcttttttttcttctttttcgcatcagcatccttgctgctgccgatgctggaatggctagtgatgctgttgaggcttgagatgctatctgaggagttttgtctcttgatccgaagttctttgggtgtggtttctgaggcattaagggctccctgaatgactgcctgggcctcagagttctttttcttcagaaagtctatggtttctcgcaaatccagcagctcagtgtccttctcctcggccgtctctgccaggtgtcgcaggcgggatgtcatattcaccaggctctgctcaaaagcagccaccagattagcattggcagaaagctgagacgtcaaggtggccactttttcctgggatgattccagttccctacgaagcttccggatttgtgaggagtaggtggaggaggcactggaggccagggacagcactgagccgtgaacatcgtccgtggggtctatgtcggtaagttggacctttgcactcagagacatgggaagtgcagggggagaaggcagctctgactggtcatcggattcaggcagcccaccaatggtatgggaatgtcgcctctcgttggtctcctcctgggactgaagntggtacttgagccctttcttgggaagagtgttccgatcccgttgattactgtccagttgcccagctctggggcttccactccaagtcagctcttccgtctcttcttctgtgggagcagcagggggagcaggtggggtggggacgggagtactgctggggaaggcactggggaggctcattggcatctggagggactccatgctcctgtgcaggcctgagagtttggggtacatgcgggtctcttttggcacactgaaaccactcattagctccaggccctgggagaagctggctgagttaatattgaggatgggtgccggactgggggtgaagcaggaagggagagggcccccagatgctgagcttgtagcatgcagatctgggacctttgaagcatgggtggtatcactggatgatggtagatccagactgttggagttgaccttgtcaagattggctagtgagggtggtttgacaaagctcttcgctgtggccctgagaggggttggtggcagctctgccagcttggtggctgtggggtggcttgcttggttcttgggagtactttctggggagccaatactcttcaaggagatgttgtctgagtccaaggccactgccttggctttggccttctccttttcccgatctgtctgattgacaggggctggagtggtccgcccactggctaccttggtaggctccttcagtctggaaggcgtaaggcctccctgcttggtgctgaggagactggggtcaatgctgctgctcacagggcgaggtccaccccgcccgccggtcacgctcatagaacttgacttggctggccggggcaggctgcggtactggatgttagaacgggctccaggagccaggaatcctggctctgcactgttggaaacatctaagctagtcttgcgcccatttactggcttgacagggatgcctgaggacttctggatcttgctgagagtggctgaaccaccagtttgcatgacagtggctgtgcctgtggcaggaggaggcttcttgtagccaaaggatcccgaagtggaggggcgagcaatgcccgaggggggcttcttagcatcactcaggcggtcccgaccagcatcagaggaggagcgttggagcccagtattcttcactgcaagcttacccttgtctgtagctttgccctcaggtttgcctgcgactttgagggcactctgggctgtgtgagtgatgggggaagttacagccacaggtggggtcttgcccttcttcagggaaccagggtggcccaggctgatgggctttttcagttctccacccttggatgaatcatcacagctctcaggccgctccctccgccacttagaagtcccaggttccatcttcaggctaccactgtcgtactccagttttttaggggctttctcctctgattcactaaaccagctcagcccactttctgccagtgagcgcttctctgagtctgtgcgtagcactattgttgagttcctgcgagaagcagtgggattaatagtcttgcattcagtgtgtcaaattgatgtactaatgaaaaatacctaaactgtggggaataagaattaaatctatttcaagcacatgcaacttggaan

SEQ ID NO: 19649 - DNA, 951 bp, Homo sapiens
  misc_feature 1, 2, 951: n = A,T,C or G
nncgggtggtggtggctgtagcgcttcggagagactgcctccgcccttccccggcctggagccggagtccgagggggcggccgggggatcagaacccgaggctggggacagcgacaccgagggggaggacattttcaccggcgccgcggtggtcagtaaacatcagtctccaaagataactacatcccttcttcccatcaacaatggctccgaagaaaatgggatccatgaagaacaagaccaagagccacaggatctctttgcaggggatggtatgaatgcatatgtagcctacaaagttacaacacagacaagcttaccattgttcagaagcaaacagtttgcagtaaaaagaagatttagtgactttctgggtctttatgagaagctttccgagaagcactctcagaatggcttcattgtccctccgcccccggagaagagcctcatagggatgacaaaagtgaaagttgggaaggaagattcttcttctgcagaatttcttgaaaaacggagggccgctttagaaaggtaccttcagaggattgtaaatcatcctaccatgttacaggaccctgacgtcagagagttcttggaaaaagaagagctgacgtgccgtgggtacccagacattgagtggtgctggtctcctcaagatgttcaacaaagccacagatgccgtcagcaaaatgaccatcaagatgaatgaatcagacatttggtttgaggagaagctccaggaggtagagtgtgaggagcagcgcttacggaaactgcatgctgttgtagaaactctagtcaaccataggaaaggtaacaagctctgaaatgcacttggagctaggggaaattgttgtctctagtgaactggagatgcgagggcatgctgttccaatcctctcagccatccaagttgaaattctcagcccacctggtccttgatgttctgan

SEQ ID NO: 19650 - DNA, 462 bp, Homo sapiens
  misc_feature 454, 455, 456, 457, 458, 459, 460, 461, 462: n = A,T,C or G
agtcgacccacgcgtccgcggacgcgtggggtgctagtcaccagactgcacccttgccagcgcttcgcagctctcgaagtaaattatcgcacgatggcgggcctcacctaggagaaccaggaaggcaggcaccgctagaacgacgggattgaattttactattgccaaaacaatcacattcaaattcattccacttaaaacctgaaaacattggaccacacaaagtcttactgatttcaggtaaaaacaataattgaagatgtccagcaaaacatcaagcaccaacaatatagcccaggcaaggagaactgtgcagcagataagatgagaagccgccattgaaagaataaaggtttcgaaggcatcagcggacctcatgtactactgtgaggaacatgccaggagtgaccctttgctgattggaataccaacttcagaaaaccctttcaaggannnnnnnnn

SEQ ID NO: 19651 - DNA, 484 bp, Homo sapiens
  misc_feature 483, 484: n = A,T,C or G
gagtcgacccacgcgtccgggcggagggagcgtgactgcgctgcgcagggcgctaggaggcattgtcgccgctcaggcccttttgtgagaagcagaccagcctgggggctggcggcaggacacctgtgtctgcatgctgaagaagatgggtgaggccgtggccagagtagcaaggaaggtcaacgagacggtggagagcggctctgacactctggacctggccgagtgcaagctggtctcctttcccattggcatctacaaggtcctgcggaatgtctctggccagatccacctcatcaccctggctaacaacgagcttaagtccctcaccagcaagttcatgaccacattcagtcagctccgagagctccacctggaggggaacttcctacaccgcctccccagcgaggtcagtgccctgcagcacctcaaggccattgacctgtcccggaaccagttccaggacttccctgagcagcttann

SEQ ID NO: 19652 - DNA, 2658 bp, Homo sapiens
cgacccacgcgtccgttcagtaaccatcaccaccggctacagctgaaggcagctccggcctcctccaatccccccggcgccccggctctgccgctgcacaattcctccgtgactgccaactcccagtccccggcccttctggccggcaccaaccccgttgctgtcgtcgcggatggaggcagttgccccgcacactacccggtgcacgagtgcgtcttcaagggggatgtgaggagactctcctctctcatccgcacgcacaatatcgggcagaaagataatcacggaaatactcctttacaccttgctgtgatgttaggaaataaagaatgtgcccatttacttttggctcacaatgctccagtcaaggtgaaaaatgctcagggatggagccctctggcggaagccatcagctatggagataggcagatgattacagctcttttgaggaagcttaagcagcaatccagggaaagtgttgaagaaaaacgacctcgattattaaaagccctgaaagagctaggtgacttttatctagaacttcactgggattttcaaagctgggtgcctttactttcccgaattctgccttccgatgcatgtaaaatatacaaacaaggtatcaatatcaggcttgacacaactctcatagactttactgacatgaagtgccaacgaggggatctaagcttcattttcaatggggatgcggcgccctctgaatcttttgtagtattagacaatgaacaaaaagtttatcagcgaatacatcatgaggaatcagagatggaaacagaagaagaggtggatattttaatgagcagtgatatttactctgcaactttatcaacaaaatcaatttctttcacgcgtgcccagacaggatggctttttcgggaagataaaacagaaagagtaggaaactttttggcagacttttacctggtgaatggacttgttttagaatcaaggaaaagaagagaacatctcagtgaagaggatattcttcgaaataaggccatcatggagagtttgagtaaaggtggaaacataatggaacagaattttgagccgattcgaagacagtctcttacacctcctcctcagaacactattacatgggaagaatatatatctgctgaaaatggaaaagctcctcatctgggtagagaattggtgtgcaaagagagtaagaaaacgtttaaagctacgatagccatgagccaggaatttcccttagggatagagttattattgaatgttttagaagtagtagctcccttcaagcactttaacaagcttagagaatttgttcagatgaagcttcctccaggctttcctgtaaaattagatatacctgtgtttcccacaatcacagccactgtgacttttcaggagtttcgatacgatgaatttgatggctccatctttactatacctgatgactacaaggaagacccaagccgttttcctgatctttaactgacgtggaaaaggatgccgtctaaccaaggaaagaaaatacagagaccctagaagtggatccaaatagaagggacaaatgctttcagtgaagaaaagggaattacacattgaatcgacacatcagtaatacgatacagtgaaatgggcctctaataagaatttcagcgagttttctgatgtgccattttttgtctttttaaaaatatacatattataaatgtaatagtttgacacattaatgaccctaagacctgcgtatgtgaagcagctatgagtgctgtgatttgtttttaaaaatttttacacttcttgttgaaatatatatgcatataaatatatctatatctatatctatatctaaaacactcctggaccattaacgtaaattaaatgtcttaagagatatggagcccttttaaacttgtcatctttatgcaaggtgacatttataaatattccttcgagctttgttttcataaaatgtaaactatgtaacattatgtatagttcagtaatttgaatgtttgttcaatataatgaactagaaggaatgcaattttctgtagatgaatgaaccaaatggtaaccattaaacaattgcatttatatgttgcaatacatttcagaaggagcgttcactctgcagggaataaggtacctcctttagcaccttagtgcaattcattgtggtgctatttgtttttacctgaatgtttgttactaatcttcctttcatagaacctctatttttttttttttctaaacttgagtttgagtccttgttatggtcatcataaggtaatggttagcatgtttaaagatattcctcttccaaatctcagcactttaaaaaaaaatccaaatttttaaacttgcttcctaataagtacacatcggtctgattattttgtttgtttttagtagaatatggatgcattggtgtcagttttaaaaaacaatacacatattttggacaaccctacatatttaatcctttcaaaataagataaaaacattttatatgctaacagaatatatttgttacaagttaaagtccagaagtatacacaagattgattactcctattattttttttaaatcacaggacacatatggcttcatgtgtctccaaagtgataacatcctgtgttactcattttgtgccgtctaaa

SEQ ID NO: 19653 - DNA, 946 bp, Homo sapiens
  misc_feature 1, 2, 3, 944, 945, 946: n = A,T,C or G
nnnacgcgtgggtcgggctgcgcccgtgggaccggtgaaggttctggcgacccggtacagaggggccaggtgtaagcatctctgaagagagacaaagtctggctgaaaactctgggacaacggttgtttacaacccttatgctgccctttccatagagcagcagaggcagaagctgccggtattcaagcttaggaatcatattttatacttgatagaaaattatcagacagtggtgattgttggtgaaacaggatgtgggaagagcacacagattcctcagtaccttgcagaagccggctggacagctgaaggaagagtggtaggagtgacccagcctcgaagagtggctgctgttacacatgatctttcttcccaaaggttgcagggagagtagctgaagaaaggggtgcagtgctgggccacgaggtgggctactgcatccgctttgatgactgcaccgaccagctggccacgagaattaagtttcttactgatggaatgctggtcagggaaatgatggttgatccgttgttaacaaaatatagtgtcatcatgctggatgaagcccacgagaggaccttgtacactgacattgccattgcttgctaaaaaaagattcagaaaaagcgagggatcttcgattgatgtagcttcaggccactctgggatgcagacgtaagagctggcctcccctttcctcctttctcacaaacattttgtgctatatattcttgggaaagttaactctagcagagctatctcggagaatgcctatttctttatgggacctctggtgtcctagattcaactatcgagggtactctttccgttgggactccacggaacatggacccatatacaccggtgttttcctacactgttcccataacggtttgggggcagaacgggtcgatggctcaaacgacacagatggcaaaccgannn

SEQ ID NO: 19654 - DNA, 1966 bp, Homo sapiens
  misc_feature 1961, 1962, 1963, 1964, 1965, 1966: n = A,T,C or G
gggagtcgacccacgcgtccgccggcttccggcaactgggctggaccgaaaccggcgcggagcaactgaggcccgagccttctcgggacccgggggacgcctaaccccgcgagaaccctgcaaattttcttcctcataattgggagaagactcactggccgaatggcagcagtagatgacttgcaatttgaagaatttggcaatgcagccacttctctgacagcaaacccagatgccaccacagtaaacattgaggatcctggtgaaaccccaaaacatcagccaggatccccaagaggctcaggaagagaagaagatgatgagttactgggaaatgatgactctgacaaaactgagttacttgctggacagaagaaaagctcccccttctggacatttgaatactaccaaacattctttgatgtggacacctaccaggtctttgacagaattaaaggatctcttttgccaatacccgggaaaaactttgtgaggttatatatccgcagcaatccagatctctatggccccttttggatatgtgccacgttggtctttgccatagcaattagtgggaatctttccaacttcttgatccatctgggagagaagacgtaccattatgtgcccgaattccgaaaagtgtccatagcagctaccatcatctatgcctatgcctggctggttcctcttgcactctggggtttcctcatgtggagaaacagcaaagttatgaacatcgtctcctattcatttctggagattgtgtgtgtctatggatattccctcttcatttatatccccaccgcaatactgtggattatcccccagaaagctgttcgttggattctagtcatgattgccctgggcatctcaggatctctcttggcaatgacattttggccagctgttcgtgaggataaccgacgcgttgcattggccacaattgtgacaattgtgttgctccatatgctgctttctgtgggctgcttggcatacttttttgatgcaccagagatggaccatctcccaacaactacagctactccaaaccaaacagttgctgcagccaagtccagctaatgaggaaattctcttttgttttttggagcatggttctttgggaagtggcatccactgcaggaaagcagaatgagcagagccagcagaactgatggagtggcacaaattcccagtgtctggatggtgccacactggcgcctaatcacccgtttaacaagcagaaattaaatgttgctcagcacatgtgtctttcagctcttccttttcacccatggatgatcattgcgagcatgcgctgattggactgaaatgccggggaataggttaggcatgctcagtgccgtccctttgccaccacagtcaaatgacatgcttcactgtggtaccttaatacctgaaatagaaccatggaaaattctgatgtcctctctctgaattatgtacagactacctgggggatcctcttctctccaaatgttagccatcctgaagtagccgaacagtagaaactttggtggggattaaccgggagcttgaaaatttgtctttggtaacctgatactggacagctgaactgaatggctgcaaaataaatacctcacatgatgtctgtgtctgcaaaaaaaaaaaaaaaaaaaaaaaaaaaaaaaaaaaaaaaaaaaaaaaaaaaaaaaccaaaaaaaaaaaaaatccgcccccccccggggggaacctccaatcccccctatatgaagtctttttaccccccctaattgcccgtattttaaaaacgtcgaaattggaaaaaccctgccttaaccaaatttaatccctttgaaaaaaatccccttttccccacctggcgtaaaaccaaaaagcccccccccaatcccctttccaaaaatttgcccaccctaaatggcaaatgaaaattgtacccttaaattttttttaaaaannnnnn

SEQ ID NO: 19655 - DNA, 732 bp, Homo sapiens
  misc_feature 732: n = A,T,C or G
tcgacccacgcgtccggtggcacgatcttggcccactgcaagctccgcctcccaggttcacgctattctcccgcctcgggagctgggacaacaggtgcccgccaccacgctcggctaattttttgtatttttagtacagacggagtttcaccgtgttggccaggatggtctcgatctcctgacctcgtgatgcacctgccttgacctcccaaagtgctgggattacaggcgtgagccactgcgcccggccaataatttttttagtttaagttcatttttgtccccgctgatgaaagttacagcagctgcccagtgcctctgtccacacccacctccctggtgtacttgccccctacagcagcagcccagatcctcccctggattaaaattgcaactggtgccctaacccaaaacttgagaaaaaattctctatcacgtccactcttctggcatttgtagaatctctggccctgggtgtgtctttagctgtagctgttacagatttcttaagcagatttcttaagcagatggacatgtccagattcatgcctaaatatccagttgataactggaaaatgctggttcacggttcttgagtaaagattaataagggatccccatgtgctggggagtgtgcttgcatttgagtggggatatcagaagaaaaagaggggcttgtgtggtaaaccttacttggccaatgcagttggagagccctaattgtgacaagan

SEQ ID NO: 19656 - DNA, 1375 bp, Homo sapiens
  misc_feature 1, 2, 3, 4: n = A,T,C or G
nnnnatgaaagcctgaactagagcagtggaaatgcgaatgtggagcagaggaacgattcaagaaattctgcggtaaaactcatcagacttcatcactgattaaagattgtcttctcctccaaggtctacatgattacctgaagtttaataataatgcaagaagtgtttgtgggaagcagagaagcaagcaactgtatttcttgttctcacctaagcattactggaggataagccacatcagtctacaaagaggttttcatacaaacataataagatgtaaatggaccaaaagtgaagcacattcttgcagtaagcactgttactctccaagcaaccatggtttacatattgggattttgaaacttagcacttctgctcccaagggacttacaaaagtgaacatttgtatgtcccgtattaaaagtactttgaactctgtttcaaaggctgtttttggcaatcaaaatgaaatgatttcacgtttagctcaatttaagccaagttcccaaattttaagaaaagtatcggatagtggctggttaaaacagaaaaacatcaaacaagccatcaaatctctgaaaaaatatagtgacaaatcagcagaaaagagtccttttccagaagagaaaagtcacattatagacaaagaagaagatataggtaaacgcagtctttttcattacacaagttctataaccacaaaatttggagactcattctactttttatcaaatcatattaattcatatttcaaacgtaaggaaaaaatgtctcaacaaaaggaaaatgaacatttccgggacaaatcagaacttgaagataaaaaggtagaagaggggaaattaagatctccagatcctggcatcctggcttataagccaggctcagaatctgtacatacggtggacaagcctacaagtccttctgcgatacctgatgttcttcaagtttcaactaaacaaagtattgctaactttctttctcgtcccacggaaggtgtacaagctttagtaggtggttatattggtggacttgtccccaaattaaagtatgattcaaagagtcagtcagaagaacaggaagagcctgctaaaactgatcaggctgtcagcaaagacagaaatgcagaggagaaaaagcgtttatctcttcagcgagaaaagattatcgcaagggtgagtattgataacaggacccgggcattagttcaggcattaagaagaacaactgacccaaagctctgcattactagggttgaagaactgacttttcatcttctagaatttcctgaaggaaaaggagtggctgtcaaggaaagaattattccatatttattacgactgagacaaattaaggatgaaactcttcaggctgc

SEQ ID NO: 19657 - DNA, 2390 bp, Homo sapiens
  misc_feature 2388, 2389, 2390: n = A,T,C or G
tcgcccacgcgtccggcgagcgagcacccaggccccgccgccgccgccgccaccgctgcccgcctgccgccgcccgcctccgcctgccttctgccgccggccggcgcgtcgtccccacagattgctcatttagaaagtggatgtgtgggataacatgtccaatgtgtccgaggagagaagaaaaaggcagcagaacattaaggaaggactgcagtttatacagtcaccgctgtcatatccaggaacacaggagcaatatgcggtatatttgcgtgctctcgtgagaaatctttttaatgaaggaaatgacgtttatcgggaacatgattggaacaactcgataagccagtacacggaagccttgaatatagctgattatgcaaaatctgaagaaattttaatccccaaagaaataattgaaaaactatatataaatcgtattgcctgctattctaatatgggtttccatgataaagttttggaggactgcaatatagtcctcagtttaaatgccagtaactgcaaagctctgtatcggaaatctaaggctttaagtgatttaggaagatacaaaaaggcttacgatgctgtagcaaagtgctccttagcagtgcctcaggatgagcatgtaataaaactaactcaagaactagctcagaaattgggatttaaaataagaaaagcgtatgtcagagctgagctctcattaaaatcagttcctggggatggggctaccaaggctttgaaccattctgtggaagatattgagccagatttattaactccaaggcaagaagcagttcctgttgtctctttaccggcacccagtttttctcatgaagttggaagtgagctggcctcagttcctgttatgcccttaacttctattttgccactacaagtggaagagagcgctctgccatctgcagtgctggcaaatggaggaaagatgcccttcactatgccagaagcttttctagatgatggagatatggtccttggagatgaactagatgacctgcttgattctgcacctgaaactaatgaaactgttatgccgtcagctttagtcagaggaccccttcagacagccagtgtctctcctagcatgcccttttcggcatcgctgttaggaaccttacccattggtgcgaggtatgctcctccaccctccttctcagaattttatccacctttgacttcatccttagaagatttttgttcttctttaaattcattttcaatgagtgaatccaaacgagatgaatggaccaggtagtttgtttgcttcagagaatttcctgggaatttcaagtcagcctagaaatgactttggaaacttttttggaagtgcagttaccaaaccatcttcatcagtgactccaagacatcccctcgaaggaacccatgaattgagacaagcttgccagatctgttttgtaaaatcaggccctaagttaatggatttcacttaccatgctaacatagatcataagtgtaagaaagatattttaatcggtaggataaagaatgttgaagataaatcatggaaaaaaatacgtccaagaccaacaaaaacaaattatgaaggaccatattatatatgtaaagatgttgctgctgaggaggaatgtagatattcaggccactgcacgtttgcttattgccaagaggagatagatgtgtggacactggagcggaaaggagcattcagccgggaggctttctttggcggcaatggaaagattaaccttactgtgttcaaacttctccaggagcatcttggggaatttatattcctttgtgagaaatgttttgatcataagcctagaatgataagtaaaagaaataaagataattctactgcttgttctcacccggttacaaagcatgagtttgaagacaataagtgccttgtccacattttgcgagagacaacagtaaaatactccaaaatacgttcttttcatggtcagtgtcagcttgatttatgtcgacatgaagttcggtatggctgtttaagggaagatgagtgcttttatgcccatagtcttgtggaactgaaagtctggataatgcaaaatgaaacaggtatctcacatgatgctattgctcaagagtctaaacgatattggcagaatttggaagcaaatgtacctggagcgcaggtacttggtaatcaaataatgcctggatttcttaatatgaaggataaagtttgtgttgcgcccactgtctgagaaaaggggccagttcttggacccggacaaacgcaaatttgtgctggccacccagggttcggggccaaaacgcggggggagagaaggtgttatgacgaaagggggaaaacggttcccaaaaaaacttttggtggcgccatctcgggannn

SEQ ID NO: 19658 - DNA, 4066 bp, Homo sapiens
  misc_feature 4043, 4044, 4045, 4046, 4047, 4048, 4049, 4050, 4051, 4052,4053, 4054, 4055, 4056, 4057, 4058, 4059, 4060, 4061, 4062,4063, 4064, 4065, 4066: n = A,T,C or G
aatgaagttttctgggtaatggcatgaaatgttttccttatgagaagtggtgttgagttacagcgtgcatactgagaacggggaggagagaaacggcagtctcaatctggcccccaccttttcttgggcttgtaggaaggtggacatgggctcccggagacaagacaagtgatatgttgaactgttcggtggctggaatcaactgctcctggagtgacctaaggccagtgtttatcagaacttagccagggccagccaagcaggcacagatgctctgctatgaaatgccacgcaggcagagactgacaagcggtaggaactgagctttccccttggactgctgcttcctgctgtgttcaggggagggggtcactttctggcaactctgctgctgctgctgctgctgctgctacttcagcttcctctccactcaaggtaagcaggctaagggagggcaggctgctagggaaagctttgtaccatgaacaggatccgaaagtttttccgaggaagtgggcgagtcttggcatttatctttgtagcttctgtcatctggctcctctttgacatggcagctctccgcctctcattcagtgagatcaacactcgggtcatcaaggaagacattgtgaggagggagcggataggattcagagttcagccagaccaaggaaaaattttttacagcagcataaaagagatgaaacctcccctaaggggacatgggaaaggggcatggggcaaagagaatgttagaaaaactgaggagagtgtgctcaaggttgaggtggacttggaccaaacccagagggaaagaaaaatgcagaatgccctgggaaggggcaaggttgtgccgttgtggcatcctgcacatctgcagaccctccctgtgacttctaacaagcagaagacagacgggagaggcaccaaacctgaagccttctctcaccaggggacaccaaagcaaacgacagcttcagggggctccaaagacctcattcatagcagcaaaaggaactcaggtagtcaaaatatcagtacacatgggacgtgtcagtttaaaacaggagccccggaagagtcatagtcccagcagtgacacatcaaaactagcagctgaaagggacttgaatgtgaccatcagtcttagtactgatagaccaaagcagcgatcacaggcagtagcaaacgagagggcacaccctgccagcacagcagtgccgaagtctggggaagccatggccttaaacaaaactaagactcagagcaaagaagtcaatgcaaataaacacaaagccaatacgagtcttccttttcctaagttcactgtcaattcaaatcgcttaaggaagcaatctattaatgagacacctttgggaagtttgtcaaaggatgatggagctagaggggctcatgggaagaaactcaatttctctgaaagccatcttgtgattataaccaaagaggaagagcaaaaggcagaccccaaagaggtctctaattctaaaaccaaaacaatatttcctaaagtattgggtaaaagccaaagtaaacacatttccaggaatagaagtgagatgtcttcctcttcacttgctccacatagagtgccactgtcccaaactaaccatgctttaactggagggctagagccagcaaaaatcaacataactgccaaagccccctctacagaatacaaccagagtcatataaaagcccttttacctgaagacagtggaacgcaccaggtgttaagaattgatgtgacactttctccaagggaccccaaagctccagggcagtttgggcgtcctgtagttgtcccccatggaaaggagaaggaggcagaaagaagatggaaagaaggaaacttcaatgtctaccttagcgatttgatcccagtggatagagccattgaagacaccagacctgctggatgtgcagagcagctagttcacaataacctcccaaccaccagtgtcatcatgtgctttgtggatgaagtgtggtccactctcctgagatctgttcacagtgtcatcaatcgctctcctccacacctcatcaaggagattctgctggtagatgacttcagcaccaaagactatctaaaagataatttggataaatacatgtcccagtttccaaaagttcggattcttcgcctcaaagagagacatggcttaataagggccaggctggcaggagcacagaatgcaacaggtgatgtgttgacatttttagattctcatgtggaatgtaacgttggttggttggaacctcttctggaaagagtttatttaagtagaaagaaagtggcctgtccagtaatcgaagtcatcaatgataaggatatgagttacatgacagtggataactttcaaagaggcatctttgtgtggcccatgaactttggttggagaacaattcctccagatgtcattgcaaaaaacagaattaaagaaactgatacaataaggtgccctgtcatggctggtggattgttttctattgacaaaagttacttttttgaacttggaacatacgaccctggccttgatgtttggggtggggaaaatatggagctctcattcaaggtgtggatgtgtggtggtgaaattgagatcattccctgctcccgagtgggccatatattcagaaatgacaatccatattccttccccaaagaccggatgaagacagtggagcggaacttggtgcgggttgccgaggtctggctggatgagtataaggagctgttctatggccatggagaccacctcatcgaccaagggctagatgttggcaacctcacccagcaaagggagctgcgaaagaaactgaagtgcaaaagtttcaaatggtacttggagaatgtctttcctgacttaagggctcccattgtgagagctagtggtgtgcttattaatgtggctttgggtaaatgcatttccattgaaaacactacagtcattctggaagactgcgatgggagcaaagagcttcaacaatttaattacacctggttaagacttattaaatgtggagaatggtgtatagcccccatccctgataaaggagccgtaaggctgcacccttgtgataacagaaacaaagggctaaaatggctgcataaatcaacatcagtctttcatccagaactggtgaatcacattgtttttgaaaacaatcagcaattattatgcttggaaggaaatttttctcaaaagatcctgaaagtagctgcctgtgacccagtgaagccatatcaaaagtggaaatttgaaaaatattatgaagcctgaagtgtaactgatgtttttatatagtaaacccattaaatactgtgaaaataacactgaacttggaaactatatttctcagcggtagtttaaattttcaattttaataacatttgaatggaagattttttataaatcacaatatttggaataccaaaagatgactcaggaaaacagtccaacattggactgaagtccttcttcggaactgggtggcctttgaattgcctgctttccaccctatgctagacctcatcatgcaaatttccctgtgaaagctaacaggtaactggaaatgaagacagaaggacttgagaaagcatgaggatattcccaatgactatgtttggtaataatcagctcttctggcccacaagtaggaatgatcaatgagaacttaacttagtcctttatttggggattttttcatcaaacaaaaatttcttgagttcttatggctagaagacctcagatgcccacagctgtcacgtttgtgaaatccctccagactacatgcatgcttacctaacagtttgaaatagtattgatctactgctggtaaccctgcttgatggcagcattttgatctaaattacataatggtttttcccaatctgaatcagtggaaaaaaatttaagtgaggaagaagaggccttcaaatgcttatttaattctaggtatgaacactatttcagttcattttgtgcttttaaaactacagttttaaagatttatgatannnnnnnnnnnnnnnnnnnnnnnn

SEQ ID NO: 19659 - DNA, 704 bp, Homo sapiens
atagggagtcgacccagcgtccggccaaccgccgaggagcagtgccactattcagcacagtgcgccagggccactggcagattgttgatcttttactcacccatggagctgatgtcaacatggcagacaagcagggccgcactcccctgatgatggctgcttccgaaggccatctaggaaccgtggactttctgcttgcacaaggtgcctccattgctcttatggacaaagaaggattgacagccctcagctgggcttgtttgaagggccatctctcagtagtacgttctctggtggataacggagctgccacagaccatgctgacaagaatggccgtaccccactggatctggcagctttctatggcgatgctgaggtggtccagttcctggtagatcttggggccatgatcgagcacgttgactacagtggaatgcgccctttggatagggcagtggggtgccggaacacttctgttgttgtcactcttctgaagaaaggagccaagataggtccagccacatgggcgatggccacctccaagccagacatcatgatcatcctgttgagcaagctgatggaagagggggacatgttttataagaaaggtaaagtaaaggaagctgcccagcgctaccagtacgccctgaagaagttccctagagaagggtttggtgaggacttgaaaactttccgggaacta

SEQ ID NO: 19660 - DNA, 3470 bp, Homo sapiens
acaatttacgtcctaagggggggctactctaattatcccattcaaatggaatttttttcaaaattggatagaaggaattgaagagttgtaagtagtgattagtctgctaatcagttcttcagatgagatattgaatggtaacactctgagcttaaaactcagcagtgtgtctgtgacctccacgcaaatcagaggaagcaatgcatccacgctgagcctcaccatgtcttcctcccaactctcttcatactctctgtgtcttccagctcttctttctctggccggctctctttcctcttctctctgcatatgtgagaacgcctgggcatcctgggtaacagcagccccagctgccctctcctgttccctgttccaagtcccctgcactgacctttcttgagtctctctggctctgtgcatgtctttgggactctcctcatctggcttttcctctgtgtgtgcctctctgtttgcttatgtctctggctctgtcttccccacccctcccctcacacacacacatactcccaaatgtaaggctctgtggcaggttggaatcggagtaaggcttgagattcactgagttctgtaggtagggaaagaagtcaagggagtggaggttctataaggaattaacagctgaggacggaagggtttgtttcccgtttgaacctaaacgcaagtggaaaagaatactcagaatgtatttttctactttacatctgctggggaaggaaatgtgtcaggaagccgctgcatctggtcatttcatcgcatcagaatcacagcagacgtggaagattccatgtggtggggaataaagaaataactttatgctctcctgaaaaacagcgggagcctatgtgtgtgtgcgacactgtaatctcaaggagattcactcagagctgtctcagtccaactcctgcatgaccagatcttcccttagcatcttttctgtgatgaaatattatcttgtgttagagttaggaataggaactaacctgtaggagcatgtccccaaatggacatttgaatggactaacaaaaacaactggaaagactgaatttccgacacaaaggaatgatgggatcaaaaagaaagcagtgaggagttcttgagtcttgtagtacctattcttattttaacttgcttcatccttgatctacctgagacactaagaaggaaattagttttccaagagctctttgaacctgtctaggactgtagttaaacctatttgccctatgggggttcttcacactcgaaaaactatttccttatcaccaacgacccacccagaaaggccaatgaggccaaatgtaacaatttttaacatttaaatataactattaaaattgcattaattgtgaacagtgaattaaagggttgtcttctccaggagacagtatgtggcacttttcgtaaatttcatttaatatataaaaatttaaatcactcactgcaacatgcatttaaaatcttccaagaaggtagaggtatcattttctgttttgctttgttttaaaacagttgcctcaagcttctgtcttaagagtagtgacttagaatccagatatcttttgttttagaaaaacaagcaaaactatgttgcaagactgacagttgtaatgtttatttgccacagatcaaaggttcacaaagtatatcaaatttacatctacttggggtaccttgatagattattattgtttttcttttatctttcccttcaggaatttggaaactcgttgtcactttttttaattttaaaaatactaaattgtaatagttttcttttgccaaatgtgtgcgtacatattcaaagcaatgaaactatttcaagccatacaaccacaggggtgggaacccttttcacaaattttaatgtgtttgtatgtaaatagatgtttgtatgaaatattttcatgatagaatgaatatatttaaatgaagttgaattattccagtgctacttaaacacattacaaaaattttggtgagaattatctgagtctattgagatgtaatgcagatcaattttgatttttaaaaatcaaaagcctacaataactctgactctcagcaacttcctcggcgttgttgcacctgacgtggagagagctcgtaggcttccccagtgcctcagccgcttcctggtggaagttaggtgctaatggaggtgtgttcaccttttagtgatatcactgcaggcctttgaggggcctgagagtgaatcagaggcattagagacaccggtgcagttatctggagcacaatttctttgcagggcagcagaatcagaagccagacttggccatgtgaacctcgaaactcggtttcccggccgccatcaaccgccacccttactgcctagtcacacacgtcagggaggctgccctcagtggagttggggttgagaccccagggtgggacttcacagttttgccagcaatctctaccttctgacttctgcctcgcagagaggaaggagaggggagcatctggcaaggggcccatttctcagcacagtacatttcctgtctcagctctggaagactatgcacccaagcaccaaacttccaaccagagagagagacgtcctccgataacaaaaatccttgcttcctctgtctgtgactttacacacagttgttcaaagttgttaaatgtcaagagtcaatcacatccctaggacatacctcccaactctcctgactcttatgttattgaaaaaacaaacaaacaaaaactcctttatgatgatattcaacttgagtggggttttttttccactttggtcctggatataatgaaatgatacatattaggataaattttcactgtgtatagtagcaatacgaacacacatgccaatgtatcaacatatctacttggttacattttggtttatgataattaaccttgattcatgtattgggaagctacagggactacgtaatacctgcttatcacataggaaaattatgtccatgattctgagctcccttcttcaaaagtttcctcctgggtgttctatgttctctctttatcctgaaatacatttattaggttgtgaggtatgttgaagaagtagaagccaggggtatgctttcagcatttattgcaaccaaaagttaaccccatcacggttaacgagcatctttggtctcttgtggaatttgaactaaaactatgagccttattcaatatctataattctatgatttttttaaattatgggaaattaatgaaagatgtttacatgaataatgtttgcccttactgtgttatgaatgagttttttgtagtgtgtctgggtgcatgatgcaagagagtaggaaaaatgtttctgaaacaaaacttgacaaatatttgtaatgaaagtaaatttaaagattgctataattgcgctatagaaacaatgcaagtattaaacaaaatatacaatcaaaaaaaaaaaaaaaaaaag

SEQ ID NO: 19661 - DNA, 1651 bp, Homo sapiens
  misc_feature 1, 2, 1642, 1643, 1644, 1645, 1646, 1647, 1648, 1649, 1650,1651: n = A,T,C or G
nncgacccaacgcgttcgcccacgcgtccgggaagctgcgcgagggtcgacagcctccgccacatcctccacctctcttggtccagcgagcgttgccgggccagggtcaagcggagggctccgacggcgcggacggagcgaagcgccgagccatggcgcaccaaacgggcatccacgccacggaagagctgaaggaattctttgccaaggcacgggctggctctgtgcggctcatcaaggttgtgattgaggacgagcagctcgtgctgggtgcctcgcaggagccagtaggccgctgggatcaggactatgacagggccgtgctgccactgctggacgcccagcagccctgctacctgctctaccgcctcgactcacagaatgctcagggcttcgaatggctcttcctcgcctggtcgcctgataactcccccgtgcggctgaagatgctgtacgcggccacgcgggccacagtgaaaaaggagtttggaggtggccacatcaaggatgagctcttcgggactgtgaaggatgacctctcttttgctgggtaccagaaacacctgtcgtcctgtgcggcacctgccccgctgacctcggctgagagagagctccagcagatccgcattaacgaggtgaagacagagatcagtgtggaaagcaagcaccagaccctgcagggcctcgccttccccctgcagcctgaggcccagcgggcactccagcagctcaagcagaaaatggtcaactacatccagatgaagctggacctagagcgggaaaccattgagctggtgcacacagagcccacggatgtggcccagctgccctcccgggtgccccgagatgctgcccgctaccacttcttcctctacaagcacacccatgagggcgacccccttgagtctgtagtgttcatctactccatgccggggtacaagtgcagcatcaaggagcgaatgctctactccagctgcaagagccgcctcctcgactccgtggagcaggacttccatctggagatcgccaagaaaattgagattggcgatggggcagagctgacggcagagttcctctacgacgaggtgcaccccaagcaacacgccttcaagcaggccttcgccaagcccaagggcccagggggcaagcggggccataagcgcctcatccgcggcccgggtgaaaatggggatgacagctaggaggctggagcagggccggccacgtgtggactgtggggctgcccaccttccgctccctgccaccatcctccttcctgggctccaggaaagtgtttctgggaggtcaggagggctggcagctgaacgcacttgcagcgtccgagggccaccgggctggcattttgtgacccttccctgttgctgtccctgcatctcgtctgtgtgcccagggtgtccggggaccctgcctggctggcttaagggggctgggtcaggggcctggcatgaacctggcctcccggggagctgagactagggtcccagcacagcccagaaacctttggccacaagaagtggggtcagtcagggctggggcaggggtcactgcagtttgggatggttgaatgctgtattttctaaagaataaaatatttttaaatcaagaaaaaaaaaaaaaaaannnnnnnnnn

SEQ ID NO: 19662 - DNA, 2407 bp, Homo sapiens
cggaattcccgggtcgagcccccccccccccccctgagaaagccgcgcacctcctcccgccaggcgctttctcggacgccttgcccagcgggccgcccgaccccctgcaccatggaccccgctcgccccctggggctgtcgattctgctgcttttcctgacggaggctgcactgggcgatgctgctcaggagccaacaggaaataacgcggagatctgtctcctgcccctagactacggaccctgccgggccctacttctccgttactactacgacaggtacacgcagagctgccgccagttcctgtacgggggctgcgagggcaacgccaacaatttctacacctgggaggcttgcgacgatgcttgctggaggatagaaaaagttcccaaagtttgccggctgcaagtgagtgtggacgaccagtgtgaggggtccacagaaaagtatttctttaatctaagttccatgacatgtgaaaaattcttttccggtgggtgtcaccggaaccggattgagaacaggtttccagatgaagctacttgtatgggcttctgcgcaccaaagaaaattccatcattttgctacagtccaaaagatgagggactgtgctctgccaatgtgactcgctattattttaatccaagatacagaacctgtgatgctttcacctatactggctgtggagggaatgacaataactttgttagcagggaggattgcaaacgtgcatgtgcaaaagctttgaaaaagaaaaagaagatgccaaagcttcgctttgccagtagaatccggaaaattcggaagaagcaattttaaacattcttaatatgtcatcttgtttgtctttatggcttatttgcctttatggttgtatctgaagaataatatgacagcatgaggaaacaaatcattggtgatttattcaccagtttttattaatacaagtcactttttcaaaaatttggatttttttatatataactagctgctattcaaatgtgagtctaccatttttaatttatggttcaactgtttgtgagactgaattcttgcaatgcataagatataaaagcaaatatgactcactcatttcttggggtcgtattcctgatttcagaagaggatcataactgaaacaacataagacaatataatcatgtgcttttaacatatttgagaataaaaaggactagcaaataaaactcattttgcatttaaaagttggattatattttagtcccaagaagacaaagtcgcagattaacaacactttaaaaatattactcccattttattgtgttagattgcagtacaatgaatgaataaggggatttatttaaaagatcttaactttcttgactgatttaaaaagctaatcaatttattaaagccagaaatgttctcctctgggaaagcaatttctatctatttatctaccaatccccactcacatgtatatgtttgtgtttacatagagatagatggttttaagggttttcctattgttaaattatttcctaagacattgtgggttggagaccactaaacttataaaaaaccaaggaaagtaaagtttttcaaatgtttatactgtttaaggtgtttatttatataaaccatgcatgagaaaccatgcataaatttaataatttaaatttcaccagtaaattatcattgattaaatatggtcataccaatgaaataggttttttctttctctgtaataaaacaatttttctaaattcttatgttttcatagcaagattaacatatttaattacaaattaaatatgcaaaatgacaaatgcgtttaccttttgcttgaacaatctttcatttaaaaatttatcccagttattttgacaaataggtatatgcctgaggactttgaatgatgctgaaagctagaagcaaaccaggtactcttcagtcagggactggttgaagattttatggatgaggagttagcaaaatatctatatatgcatatcttctgactcccaggatacataagaaacacagggcctagaacagtatgaataaacacacatatacacaaacatcacagaagatactaaagatattaaaaatgtttacctatagaggtttggagagaacagaggggtggacagttgtggagataatatttgtgtaaatataactgtgatatagtttttatcttgggcctgtcaactttcggctattcattattcactttactacaagaaagcctttcttagcttccacccatggttccttgcgcctccagattttcttttccggttccctattggaaggtctgcgcaacggcaccccgaaccccgtccccgcccgaagggccaggggccggcataggccaacaggacctctccggtcggccctctcttctgtagcccgtctgtcc

SEQ ID NO: 19663 - DNA, 425 bp, Homo sapiens
  misc_feature 1, 425: n = A,T,C or G
nacgcgtccgatagtctctctacgtggccaggaaaaaaaaaagaaagaaggttggggccagtcacccccacatccctttatggaggcttccagatcatggatcctgtcacgcgcatcccggtgaagagagtccaccaacaggctttgtatggggtctcgctctgttgcccaggctggagtgcagtggttcgatatggctcactgcagcctcagcctccctgggatcaagtgatcctctcacctcagcctcccaagtggcagggaccgcaggaaggcctggacgacggcccggacttcctctcagaagaggaccgcggacttaaagcaataaatgtagatcttcaaagtgatgctgctctgcaggtggacatttctgatgctcttagtgagcgggataaagtaaaattcactgttcacacaaagan

SEQ ID NO: 19664 - DNA, 3820 bp, Homo sapiens
  misc_feature 1, 2, 3815, 3816, 3817, 3818, 3819, 3820: n = A,T,C or G
nncatgggagtatgaaggagatggtaggaggctgctgcgtatgttcggacgagaggggctgggccgagaacccgctggtctactgcgatgggcacgcgtgcagcgtggccgtccaccaagcttgctatggcatcgttcaggtgccaacgggaccctggttctgccggaaatgtgaatctcaggagcgagcagccagggtgaggtgtgagctgtgcccacacaaagacggggcattgaagaggactgataatggaggctgggcacacgtggtgtgtgccctctacatccccgaggtgcaatttgccaacgtgctcaccatggagcccatcgtgctgcagtacgtgcctcatgatcgcttcaacaagacctgttacatctgcgaggagacgggccgggagagcaaggcggcctcgggagcctgcatgacctgtaaccgccatggatgtcgacaagctttccacgtcacctgtgcccaaatggcaggcttgctgtgtgaggaagaagtgctggaggtggacaacgtcaagtactgcggctactgcaaataccacttcagcaagatgaagacatcccggcacagcagcgggggaggcggaggaggcgctggaggaggaggtggcagcatggggggaggtggcagtggtttcatctctgggaggagaagccggtcagcctcaccatccacgcagcaggagaagcaccccacccaccacgagaggggaccagaagaagagtcgaaaggacaaagaacgccttaagcagaagcacaagaagcggcctgagtcgccccccagcatcctcaccccgcccgtggtccccactgctgacaaggtctcctcctcggcttcctcttcctcccaccacgaggccagcacgcaggagacctctgagagcagcagggagtcaaaggggaaaaagtcttccagccatagcctgagtcataaagggaagaaactgagcagtgggaaaggtgtgagcagttttacctccgcctcctcttcttcctcctcctcttcctcctcctctggggggcccttccagcctgcagtctcgtccctgcagagctcccctgacttctctgcattccccaagctggagcagccagaggaggacaagtactccaagcccacagcccccgccccttcagcccctccttctccctcagctcccgagccccccaaggctgacctttttgagcagaaggtggtcttctctggctttgggcccatcatgcgcttctccaccaccacctccagctcaggccgggcccgggcgccctcccctggggactataagtctccccacgtcacggggtctggggcctcggcaggcacccacaaacggatgcccgcactgagtgccacccctgtgcctgctgatgagacccctgagacaggcctgaaggagaagaagcacaaagccagcaagaggagccgccatgggccaggccgtcccaagggcagccggaacaaggagggcactgggggcccagctgccccatccttgcccagtgcccagctggctggctttaccgccactgctgcctcacccttctctggaggttccctggtcagctccggcctgggaggtctgtcctcccgaacctttgggccttctgggagcttgcccagcttgagcctggagtcccccttactaggggcaggcatctacaccagtaataaggaccccatctcccacagtggcgggatgctgcgggctgtctgcagcacccctctctcctccagcctcctggggcccccagggacctcggccctgccccgcctcagccgctccccgttcaccagcaccctcccctcctcttctgcttctatctccaccactcaggtgttttctctggctggctctacctttagcctcccttctacccacatctttggaacccccatgggtgccgttaatcccctcctctcccaagctgagagcagccacacagagccagacctggaggactgcagcttccggtgtcgggggacctcccctcaggagagtctgtcttccatgtcccccatcagcagcctccccgcactcttcgaccagacagcctctgcaccctgtgggggcggccagttagacccggcggccccagggacgactaacatggagcagcttctggagaagcagggcgacggggaggccggcgtcaacatcgtggagatgctgaaggcgctgcacgcgctgcagaaggagaaccagcggctgcaagagcagatcctgagcctgacggccaaaaaggagcggctgcagattctcaacgtgcagctctctgtgcccttccctgccctgcctgctgccctgcctgccgccaacggccctgtccctgggccctatggcctgcctccccaagccggcagcagcgactccttgagcaccagcaagagccctccgggaaagagcagcctcggcctggacaactcgctgtccacttcttctgaggacccacactcaggctgcccgagccgcagcagctcgtcgctgtccttccacagcacgcccccaccgctgcccctcctccagcagagccctgccactctgcccctggccctgcctggggcccctgccccactcccgccccagccgcagaacgggttgggccgggcacccggggcagcggggctgggggccatgcccatggctgaggggctgttgggggggctggcaggcagtgggggcctgcccctcaatgggctccttggggggttgaatggggccgctgcccccaaccccgcaagcttgagccaggctggcggggcccccacgctgcagctgccaggctgtctcaacagccttacagagcagcagagacatctccttcagcagcaagagcagcagctccagcaactccagcagctcctggcctccccgcagctgaccccggaacaccagactgttgtctaccagatgatccagcagatccagcagaaacgggagctgcagcgcctgcagatggctgggggctcccagctgcccatggccagcctgctggcaggaagctccaccccgctgctgtctgcgggtacccctggcctgctgcccacagcgtctgctccacccctgctgcccgctggagccctagtggctccctcgcttggcaacaacacaagtctcatggccgcagcagctgcagctgcagcagtagcagcagcaggcggacctccagtcctcactgcccagaccaaccccttcctcagcctgtcgggagcagagggcagtggcggtggccccaaaggagggaccgctgacaaaggagcctcagccaaccaggaaaaaggctaaatccacccttacccctcctgacccccccaagtggagggaacagatcctggcctgaggggtcctagcctggagcaggcgcctgcgcccagaccctggagagccttgacccagagcctgtgctgaggtccagggagtgtggagagctcctggtgtcgaggactgagactgagaggggagccccctccatctggcccccttccctttccgcactgtccgctttgtgaggctcagaggaaggacagtctgcaagcccgcctaggaggtccatccccagcaaatgttttggaggtccccccagagagcagagtgggccatggcagaacgcagggggttgcctggcccggtccactgaacacggacccagccccgcaactggggcgcacatggcacgagcacgacccggggccctcccccagccgaggcacacccccactgacgaacagccgagcacccaacaccaggcacaccacacccacacccaacacctgccccggacccccggacagcccgcggcacaacannnnnn

SEQ ID NO: 19665 - DNA, 3461 bp, Homo sapiens
  misc_feature 1, 2, 3, 4, 3459, 3460, 3461: n = A,T,C or G
nnnnaaaggtagtcaacaacacaacaaatcggtggggccaccaagctcacttccctcccccccttttccctaggctttcagcggccgtgcctggatttagcccgcctttttttgcaggccacatgaacacctgagaaccgttctcagtttcccccagcttcgccgagaaggattttaacctaccaggcccaaattaaagaaaaatatagaatataaactcacctttatggaaataaaatcgagcctttgtctccccattactctagtcaagctcattaccccagaggacaaagaagggctgcctcttctagaccctcccttctcctttgtcctctgtcccacccagcagggaaacaagctcagaagatcctaacaggatagagttccagtaatgttggaggagggagagggaaagagaagtcaggttctctcccacctccagccattcccaggttgctgccagggcctggtttcatgcagctttgacccagtcctggatcctagggggtggggtagatcaggagctctgagcagaacagtgctcactgattatcctctttccccaactcagtgggcaggtgcagcgtacacccagcagcactctccactgcccacaggcaagggaagaatattgattgattagctacaaggagaagacagtagtgactagtggaaaacaccctggagagggccagaggaacctggctctcaccacatcccctctgttcccagccttggtgagggggcggggaggtcatgtcaacctctctccttggtggtgaagctaaaagcaaggttccttgccagactcaagcccaagtcactgttaaggaaagaggatcaagaaagaagcggtggccctggggggcagccacgctgctgtggacccacaggggccaatggggaagccagcttgcctagacaggtggcacaggctgaaaatagaaaggttaacattcccggagagtacagtaagagaggctgatacctaggggaccaccacccagcctgccctagaagcactgggtgcccctcattgactagagaagacttgagtaaaatgcacctgtggcttcccatccttgtcactcagcgttagctgcccccagtggaaccacctgtgctgaaaggcagctgcagaaaggacatgcaccgaaatgaggagagagaaaggtcagagaatgaagtgtggagggccaggcctgggcccactgctcaaggaagctccccccctccagatgctcccttccatccacctcctcagtgcttgctcagcccaaaggctcctgcctctgaagtgctgggggcccacccaccccagtgtggtcaaggaggcaaggggcaggtgcttgacactgccaagtgccccgagatgactctactgctcacccatttctttgggccctggcagtctcctacttgtccccagcatggagcacctggcagaactggaaggcaggagggtggttggtgagttgaggcacaggaaggccaatcccctctgcaccttttgtgctttggaattccacagccccacacctgcccccagcctagagaagcctgtgggaacacaatgacttggccaccttcaggaaccaagaggagtaaactggactgggcaggagggcacagactggtcccaagctatgggctgactgccggggatggattctgctgccatgtaaacaggcccttggaatgcaacttcctgggccctggaggatggccatgcagccacttttcaaaagtgctttgattctggactatagtatgtgcatggtttggacatgaaaaaaaatgaaactcaggtgaggtgtcctgctcccaactctgcagcctcagggccagcagggggcgcagccaccctctcccgccagctacccacttcaagatgaggctaaggccaagactgaagcggcaactgccagaggtgaacccattcgggaaaaggcatgagcgcaggatgactctgaggacaggagcaacaccaggcttgcataagtatcgaaggccgtggaggttaaggctgcaggcgccctctctattaggttgtgtctgctgtatcctctcgtccttggagctgctcgggtccctgagattgtgtttctgggatgggtcagcagtgccagtgaggtgcctggtggtcaggccagctctttctgtgagtctgagcccgggaggcccatcttctcctctgggcccaccagctgcaggacacctccattctccgccagctccctcttagtcctgtcctgggtgtgagggagcccattggtgggaggagcagtaaggggctcagctcgagggtaactgggggaggcgggtggggggactcccacagacggcttgcgggccacaggtgggggagccttaggtgacttctttggggcctggggtggccgctgctctgagatgctccggagttctgccaccagattccgctggaggtcagcctgggtctcaggggacacgggccgctccagctgcagcttcctagagcccttggagaagatgaaactggccgttgaggcaggggactggggaggccgtggctctgcctcaggcggtccgttgggctgagcacttgagaggccttcactggcggccaggctgcaggccttgagtcggaccgcagcatggagccctgaggagggggcaggcactgggctggcccgccctgacagggcccttcgcagtggtttctggggggccgatggccccagtgctggggtgggagcccctcctggagcacccacggagcgcagccgcaccatctgcaggagcgagggcgtgaccaggggcgcacctacgtcctccctgggaggcccaccacccttgctacagcccaccggttccttctgagggagcttggccacatgccctggggcggaactagcaggagctggggctggcggagctggaggagggtctgggctacccgggggctgaatctgcaaagcagtagctgaggaggacgaagcagccggggagctgacaagctctggggagcctgaagggcctgcaggctcagggctggccacagagaaaaaagcctcctctggtggggggaagtcagccatggacaggtcctgctcctcaggggcagggggtgggggagggggccagttgggatcttggaggggctcctcagcagtctctgaggcagatggtgcctccacaaccacctctggcttcttagtgggtggtgggggtggatgataagatgggggtgggcaaggtgggggtgactggtctttgcagatgacaggagactcctgcagtggagtcaaggttgtctggggagtgggaggggactcagcactggcgtcagtggtagaaacaggcccaggaaccacagcaggggcggctagagcaggggcagctgggtctgcaacacccatcaccccccaacctcctggtcccttcccacctccgctgctttcggacgcgtggtcgacnnn

SEQ ID NO: 19666 - DNA, 1152 bp, Homo sapiens
  misc_feature 1, 1152: n = A,T,C or G
ncctccgcggtgtgcgtcacccagtcttgtccgccgtgcttcatggctgggcctgtgttctgttgctggccggcgttggcgatctgtggtcgctccgcctcgggcggtgcttcgccccccgcgtgtggctttgcgcctggtccctcgtcctctttgtcgagcccccttgcgcgcgggtccctacgctgtttagcctcagtttcgcccagtgcagctgtgtgaaatccttagaatatttgttaaaagtttcgaattctacttttctttgctgcttggcatgtgctttctcctctgcccgtaacccccgttcctccttattttcctgctaacacctactcgtctttcaaagctccatgccactgtctccttgaggaaattgttcctgtgcccccagtaggtaacacaccagacagaggcgagattctctatcccgccccagacaaggagcctttgctttgcagggctccccttgggaccctctcttgccaggagagcctctagagaagccatctagaagggcattcaagactcagcaagctccagctcccagcctggcagactgggtgggggagggcccagctggtgggcgaggctggtttatcgatgttgccgagagccctggggaaatcaaggtgaaaggcagccacgctgctgaggaggcccacccgtttatcaaccagaggggctggggccgggcgaaaagaggcttggctgccagaggcagctgtgaggtgggaggtccacaccactccgtggacctggaggctgggctacacactgtgcagcccgggctgctgcgacagtgtttccaacatggcgctaattctaggtaactaagtttggctttagaaataccgtcactggagccacagggcttgctgacagaaatccccagcacttggcattgggcaaggagcccttagggggtgaagggcaggcttattcagcggccttggtgcagtgggcacacagggcaccggccctgggagcctctgtcttcctcttgcaggccagggttgcctcctgattgtgggttcctgtctgtctctcaggcccccagccagggccagcccaagggagcagggggtgcagagcacaaccaggaggatggagccaatgggtgcctggagcaggggcacagagagggagcgn

SEQ ID NO: 19667 - DNA, 3505 bp, Homo sapiens
cgcgtccggccccaaagccggctgcgagagtcaccgaagatttccggagagccaaggagtcgggaagagccacttactgagcgttgccgaacgtgtacggagatagccgaagaggcggaaggcggggccacaagagcccttcctgcagggaacctcaggcttcagagagccgaaaagttgggaggcgtaaccacttacaggccggaagtgtccggggtggacgcattcgggtagccgaagaagtcccaggattgccgaagaagtcccaggatttccgaagcgagccgaagcatcgcgacagttttcagagacagctgatcggttggagctcttgcgccgagcagtcatggcggcggccagagctactacgccggccgatggcgaggagcccgccccggaggctgaggctctggccgcagcccgggagcggagcagccgcttcttgagcggcctggagctggtgaagcagggtgccgaggcgcgcgtgttccgtggccgcttccagggccgcgcggcggtgatcaagcaccgcttccccaagggctaccggcacccggcgctggaggcgcggcttggcagacggcggacggtgcaggaggcccgggcgctcctccgctgtcgccgcgctggtaaggaatatctgccccagttgtcttttttgtggactatgcttccaactgcttatatatggaagaaattgaaggctcagtgactgttcgagattatattcagtccactatggagactgaaaaaactccccagggtctctccaacttagccaagacaattgggcaggttttggctcgaatgcacgatgaagacctcattcatggtgatctcaccacctccaacatgctcctgaaaccccccctggaacagctgaacattgtgctcatagactttgggctgagtttcatttcagcacttccagaggataagggagtagacctctatgtcctggagaaggccttcctcagtacccatcccaacactgaaactgtgtttgaagcctttctgaagagctactccacctcctccaaaaaggccaggccagtgctaaaaaaattagatgaagtgcgcctgagaggaagaaagaggtccatggttgggtagaagaatgtgtatgacaaccacacacagtgaagctcttttttcaaagtaaatttgaagaaatgctacaagtatgagatgagatctaagtaaaggtgttaagatatttttaagtggtatgtgatcgtgtcattatcatctgcacttcactcaagagcttactatgtgtctaagtcatgttctaggcagaattgggtatttaaagtaaattgaggacaggcttctcccagattgtgacatgtatatctcagatacatgggtgtggcattgaaccacataatgagaacattattctctttttagtccttgtgagacaaggatgaagtctcagttgctgatactcgctgagcttactggccctctaacccagtgtttttttttgttgttgttgtgtacatgttatatttattttgaaaccagtttaatgggatacaaccagcattttaaaaaatgaaatagaatacagcatggaaaatatcagtgtattgttttatgaaactttcacgtgtatatatagaccaaggatatgtgctgagttttgatgtcaaatatatttctctttcagggtcatgatcaaaaaatgaaaagtctgcttaactccaatttctcttttaaaaaagcagacttacagctttcaggcaactgaaattcatgttaacatgtttttatttttattgctttgtatttttgtggttaccttctaagacaagtgattgatctaaagttccttttaagtttataccgctaaacaaactgagttgatttctatcacaggcagtaagtaggtagagcaaaaatggtgaagtgacttgtgaagactgaagtttgatgaagtctggtttaaggcacaggtaaactgagtgtggatgcaaaagtaccaggagctagcttttaaccttgcccagcctcagtttcttttcttagaagaagctatgtttgggtgggaagggaagagagggataagaaaatacctttcttccttgtaaactccaatcaacaaacatattttgagtgccttttgtgtgttccttggcaccctgttgggtattgggtacccttggcaccctgttgggtatttgggtacaatggtgagccagacagacacagcgcctgtccttttgtaagaatatttatttttataaaaaagtataaagtatacagtgggatgttttgatatacattatgaaatgattgctacagctgagctaattaacacccatcacctcacatagttactgtcttgtttcttaatatggacatttgcagctatgaatttccctctgcacactgttgtcatcacacactctcagttttgatattttgtgtttttgttttcattcatctcaaagtattttctaatttcccttgtgatttcttctttgaccccttgattgtttagaaatctgttaatttccacacatttgtaaatgttccaatttttcttttgttattgccagcttcattccattgtgttcagagatgatacagtcagtgcctgttcttatgaagcaaacattctataatagtaggaccagtaccctgtctgtttcattcaccacagtcagcatgccccaagtgcccagcatggggcggatggccaggaatgagtgaaaacttcccttcctgggtagttgtgactagtagagaggaaaaataatataattgcctgcttactgcatgccaggcattgggctgggaatttttatattggatctaaaataactcttaagttaggcattatccccattttatagatggagaaactggccccaaaaggtgggaacttgtccaagacgtcacaggtagcaagaggtacttttacctggctccaaatctgtgttctttccactgacaaatgagatatgggatatggtgcatctttacagtactataataagtattggcgtataacattattttcaaggaactccaagggccacaggagctgacaggtttttcaattaatattcccaacatgaatgagatgcctcattcctcagtttcctcacgtgtactataaggctagtacctgctttgttggggtatggttggctcgtgtgcattaagtcaacaaatccctagttgatagggtttggctgtgtccccatccaaatctcatcttgaattgttcccgtaatccccacgtgacatgggagggacccagtgggaggtaatttaatcctcggggcggctacctccgtgctgttctcgtgatagcgagtgagttctcacgagatctgatggttttataaggggcttttccctcttgttcggcacttcctgctgccacgtggagaagggtgtgtttgtttccccatctgccatgattataagttttctggaggcatccccagccatgctgaactgtggagttattaaacttttcctttataaa

SEQ ID NO: 19668 - DNA, 2320 bp, Homo sapiens
  misc_feature 2313, 2314, 2315, 2316, 2317, 2318, 2319, 2320: n = A,T,C or G
cgacccacgcgtccgtgtcaggctgcgcaggcggccagtccattggctggaagagaccggagccgggctccgggcccgaccagaggagggcggtgctgcagggctggtccgggaggtgacgaccggcttcggagagtctatcatggcagctcggactggtcatacggccttgagaagggtagtctcgggatgccgtccgaagtcggcgacagcggccggggcgcaggcgcccgtgcggaatggcagatatttagcttcctgtggtatactgatgagcagaactcttccactacatacctcaattttgcctaaggagatatgtgcacgaactttcttcaaaatcactgcaccattaataaacaaaaggaaagaatattcagagagaagaattttaggatattcaatgcaggaaatgtatgatgtagtatcgggagtggaggattacaagcattttgttccttggtgcaaaaaatcagatgttatatcaaagagatctggatattgtaaaacaagattagaaattggatttccacctgtgttggagcgatatacatcagtagtaaccttggtgaaacctcatttagtaaaggcatcttgtactgatgggagacttttcaatcatttggagactatttggcgttttagcccaggtcttcctggctacccaagaacttgtaccttggatttttcaatttcttttgaatttcgatcacttctacattcccagcttgccacactcttttttgatgaagttgtgaagcagatggtagctgcctttgaaagaagagcatgtaagctgtatggtccagaaacaaatatacctcgggagttaatgcttcatgaagtccatcacacataaaggcaaaaaagaactggtgccacctgcttctgactttagtttgttcacttttaggaagtattttcatgacatgttttcagaagccagaaagcatttgttaaacgcagctttggttataaacctgcaccattgaaaatttgcacatagaatatagactcacttgtacatagaattatttcttcaagtataattcaaaataatatggacattatcatgttctgcattacaataatgggatgtcatcaccattgctagaatactggcatgattcttctgagcagaagttgaaactgtaaatttaaaccttttaattatcaccttacctgaaagaggttagttaagatattcacacagtatgtattatattaaccatatcacacttaagttattaaattcagactatttgtaacttattgttatagggcctgccgtatggcttaggatatttgagtaatcatatatttaaagtaaaaactttgggctgggcacagtggctcacacctgtaatcccagcacttggggaagctgaggtgggcagatcagttgaggtcaggagttctagaccagcctggtcaacatggcgaaaccccatctctactaaaaatacaaaaattagctgggcgtggtggcacacacctgtaatcccagttacttgggaggctgaggcacaagaatcgcttgaacccgggaggcggaggttgcagttagccaagatcgccctgctgcactccagcctgggcaacagagggagactctgtctccaaaaacaaaaacaaaaactgttagtgaaggttccctgggacttttgatattttaaaaattgttcttatgactagtagataaattcattgccataatgaggctagctcccagataaacagtgtattttcttctttttttttttttttttggtgagtggtccagagctttaagctacttttccagtagtttgccactttctccgaggtagtttggctgctctttcagtaatgctaattgtgtgtcaaattttgtctacaacagtaggcaacagatgaagataagttggttgaatgtctccagcactatgcatccctattttctatttattgtgtacactcactttcagtaatgtgtttcaaactggtattttttaaaaaacaaatcaatgtaaggactgaagttgaagtagcaatgtaataaagttaatttgtttaaaattggtaaaaaaaaaaaaaaaaaaaaacacgaggttgagcccggtacccaattcgccctatagtgagtcgtattacaattcactggccgtcgttttacaacgtcgtgactgggaaaaccctggcgttacccaacttaatcgccttggagcacatccccttttcccacctggcgtaataaccaaaaaggccccacccatcgcccttcccaacagttggccaccctgaatggcaaatggcaaattgtaaccgtaatannnnnnnn

SEQ ID NO: 19669 - DNA, 1729 bp, Homo sapiens
  misc_feature 1719, 1720, 1721, 1722, 1723, 1724, 1725, 1726, 1727, 1728,1729: n = A,T,C or G
gaaagaagtagacatgggagacttttcattttgttctgtactaagaaaaattcttctgccttgggatcctgttgatctatgaccttacccccaacctggtgctctctgaaacatgtgctgtgtccactcagggttaaatggattaagggtggtgcaagatgtgctttgttaaacagatgcttgaaggcagcatgctccttaagagtcatcaccactccctaatctcaagtacccagggacacaaacactgcggaaggcggcagggtcctctgcctaggaaaaccagagacctttgttcacttgttgatctgctgaccttccctccactattgtcctatgaccctgccaaatccccctctgcgagaaacacccaagaatgatcaattaaaaaaaaaataatataataataattcttgtcctcttattttacactcataatgagaaatcacaagttctttcttgatgatctgtgctatagatttctactctgtctcctcaactctgttgatatttggggaaaattctgtttttcatagattctttgagatgctgatggaccagcttcagcatgtttgaggttgtctgaaatggagatcactgtaaaactgtctttttcttttaaattacaagtacactggggttaactgtattgctggaaaaacatcaagaatgacagtcttatatttaaggcaccagtcattgtttccatttttttttttaattcttcccttggattaatattttctactgaaaagaaatgaaatctcagttccactatgataaaagaaacgaatcaccagtgtctgtcagtgcccccactgctcctcctcataccagcattgacactggtagctgaggaaggggactgctcaatttctaatgtgatctattcaagaagccacatataaaaaggcattgagggctcactgtccagagaattgcttttgtaaatgctccacaacgtatgggcaaaagtttaaggactactgcctgatgtaccaggaatcctgagttctgtgaaaatctgttcattccaaatctgttaagcatttccaaacatccagagaatggtttcactgttgagggtgcatgtggcagaatctgtctctctctgcacctgtcttctgttaccatccctggacagtgacagattttaagccagccaccagaattcttttcgagttaaccatttcttagtttctgtaaattcatgacttgtcttactgaactacagcctggtttgtagacttccaacatctacactgctgctcttcaccattggaattcactgtggtatttatagtattggttcagtccgagccacaaggcaataaaaggatatcaagctgtagttctcagctacatcatgggtatagatgctgttattcaggggaaacttgctcatggttggactaacacctggtttgggtacagagactgaaagttttccattccgtgtcacagtttcgttaccctcatggtgtgaaggggcttttgatatattttccttaactaatgggtttattttcctaaatgtggtgattgactgtattggttcgggtgcctttaaagaaagaattttccccttggaactttattgtcgagaagattcttggtaaattcccgtgggaacaaatttctcctgaactttttcttgttttcaaaggccagggggggcgaaaatggacaggctgagggggataacacgcgacaacgtgnnnnnnnnnnn

SEQ ID NO: 19670 - DNA, 2695 bp, Homo sapiens
  misc_feature 2695: n = A,T,C or G
agtcgacccacgcgtccgctctgaccgccgccggctttccacccacctgcccggctcatcacctctgactcctgcgggccttccagccggcgctatctcgcagcccccgaccagctcggcctgctgtcgggcatctctgctgtcctccggctgtagggctacctgcctccctcccggggggtgcactgcgagtccgactctagtgggggcagcgcctagcggactcccaaacccgctcaggtcctgccggcctcaccggcaccgcccaccctccagccggccgcggctctgcgcttgcgcgccggcagcacacagtgttaggggcgcgccctctgctctggacatgcgcgccgtcgcgagcgtctctgggaccggaagtgcgggcgagcgcgggtccccgggtctgacaggagcagcctgtgggcaccgcggcggtagttggaggcgggagagggtccgtagccgcgccgccctgccccgccatgggcctcctgtcggacccggttcgccggcgcgcgctcgcccgcctagtgctgcgcctcaacgcgccgttgtgcgtgctgagctacgtggcgggcatcgcctggttcttggcgctggttttcccgccgctgacccagcgcacttacatgtcggagaacgccatgggctccaccatggtggaggagcagtttgcgggcggagaccgtgcccgggcttttgcccgggacttcgccgcccaccgcaagaagtcgggggctctgccagtggcctggcttgaacggacgatgcggtcagtagggctggaggtctacacgcagagtttctcccggaaactgcccttcccagatgagacccacgagcgctatatggtgtcgggcaccaacgtgtacggcatcctgcgggccccgcgtgctgccagcaccgagtcgcttgtgctcaccgtgccctgtggctctgactctaccaacagccaggctgtggggctgctgctggcactggctgcccacttccgggggcagatttattgggccaaagatatcgtcttcctggtaacagaacatgaccttctgggcactgaggcttggcttgaagcctaccacgatgtcaatgtcactggcatgcagtcgtctcccctgcagggccgagctggggccattcaggcagccgtggccctggagctgagcagtgatgtggtcaccagcctcgatgtggccgtggaggggcttaacgggcagctgcccaaccttgacctgctcaatctcttccagaccttctgccagaaagggggcctgttgtgcacgcttcagggcaagctgcagcccgaggactggacatcattggatggaccgctgcagggcctgcagacactgctgctcatggttctgcggcaggcctccggccgcccccacggctcccatggcctcttcctgcgctaccgtgtggaggccctaaccctgcgtggcatcaatagcttccgccagtacaagtatgacctggtggcagtgggcaaggctttggagggcatgttccgcaagctcaaccacctcctggagcgcctgcaccagtccttcttcctctacttgctccccggcctctcccgcttcgtctccatcggcctctacatgcccgctgtcggcttcttgctcctggtccttggtctcaaggctctggaactgtggatgcagctgcatgaggctggaatgggccttgaggagcccgggggtgcccctggccccagtgtaccccttcccccatcacagggtgtggggctggcctcgctcgtggcacctctgctgatctcacaggccatgggactggccctctatgtcctgccagtgctgggccaacacgttgccacccagcacttcccagtggcagaggctgaggctgtggtgctgacactgctggcgatttatgcagctggcctggccctgccccacaatacccaccgggtggtaagcacacaggccccagacaggggctggatggcactgaagctggtagccctgatctacctagcactgcagctgggctgcatcgccctcaccaacttctcactgggcttcctgctggccaccaccatggtgcccactgctgcgcttgccaagcctcatgggccccggaccctctatgctgccctgctggtgctgaccagcccggcagccacgctccttggcagcctgttcctgtggcgggagctgcaggaggcgccactgtcactggccgagggctggcagctcttcctggcagcgctagcccagggtgtgctggagcaccacacctacggcgccctgctcttcccactgctgtccctgggcctctacccctgctggctgcttttctggaatgtgctcttctggaagtgagatctgcctgtccgggctgggacagagactccccaaggaccccattctgcctccttctggggaaataaatgagtgtctgtttcagcagctaaaaaaaaaaaaaaaaaaaagaaaaagccgcacacaactgtacccacacgacataaaaaaaaaaagaggggggggggcgcaaaaaactcacacgggggggcacaatacccccacttttgaaaagggccccccaaggagaaaaataaagcgggcgcgggaccccggggggaaaaacccgggtgtttgggagacccccctggtgtgatggcaccccaccgaaacgggagaaaggttgggacccctggcggtgatacaan

SEQ ID NO: 19671 - DNA, 2455 bp, Homo sapiens
  misc_feature 1, 2, 2454, 2455: n = A,T,C or G
nnacagtggagcagcattcaaatcaaatatttacatattgcttatcactttttctccattttaataatggaatgaactaaaataaacaagaacaaaagaatagtataattatatcagtaacaagaagactcaaaaaagaaacaggagtacctatccctatctgaattttcaagttccccattggatgaccagactggcaaccatttcaaatcccagtctatttcattgaaatttcttggttaagtttaattttctctgggggcatgatctcacaaagaatactcaagtctttttcttcttatggaatcatcgaaactgctatttatcataatcaccacttatgagcctgggtttgggattttgtgcatgtagttcagtctagtgttggtagcatgacagaaagtggggaaaatgccgcagtttgttgccttgaaacctaagagcaatccttggttttgttgctacattatttttccagaccaacacatctaccaagtaaattttattcactttaatttcataataaagttagtagagtcactcaacttacaactttatttatgtggcttggcaaaaatcactataaggcagctctaaatttgccttgataagctaaataaattacttttataacttactaaagcagaacaaacagtgaaactttctaaaatattctatctggaatagggacaggggatcttttatttataatctcatcagatgagtgagttgttcacagatattttatgtttttttaattttctccaagaatatttatagaattccaaagaatcagaatagtttcaaaataattttcagtgataaaagagtgttgtaattaatcatattacactaaaattgggatacatctaaggaactttatcttactatcagtaggttttgcattgatatttctttttaaataaactactagttctttatattttgacaaaaagaacttaaattttatcaggaactgtaagataaatatctagtgcttataaattttctgtccttaaatttatgtgacagtgcaagatacttttgctcttttcatttaatataggcatcttccattgacattaataaaacttagaaacagtataattagtataacatttactctgaatttgaagatttcctgaaacaaagtttgtacaagaagcccaccttggaattctgaaggcttattttcttgtttgataagcttttcttttaaacttaggttttaagttggggaaagacttaattaactaatatagtattttctaaggttgatcatcttataccacgaatcgttaattttgacagttctactgatccgtaaaagataaccactgcaaattttttcagtataaaatttttcactgcaaaaaaatttcagtagaaaataaggatgcagggccagttacaatagtccttaagagagttaaattatagcacatgttttgacattgtaatatcttttactacttgaacatttaaatttctaaatgagaaaggtatatatattactgtaactgtagaagggaaaagggaaagtattggttctaaaaaatgttagccttcctcgtaaaagtagcacaagcccacttatgaatcactgagaaaaagtgaaaaacttgagttggcaaagatgcagagcagcagtgcagatggcaatgaactctctgaattctcttttaccttatttagaagaatgcagagtaaagggaccttcttggttctgcaggaacttctcaagggatgaggagacagaacccctacttccaagtgctctattgtattacccagatgactgaagcttaagagaaggcagggaagtatacaagcagagccagttctggtacaaacaaagaatttgacagggacaatggaagggtcttcttcaccactccttaccttctatgtgatggaaagactagagcttataaaagtacttccatttttttattctcctgaataccaaaggcaattaaagtcagctacaaatgacttgccagtgtcatgttttattttgttatagatttttaaattatttccttcaagatcaattcttatcccatataatgcttagcttccaagaatattctttactttcttctgtcttttacagctctttgcattttgtagaccttaatactcaaggttaaatattcattgcatttattaagatcttctgcaaaaagcccagaaatggtccttttcaggtgctcttcaaagagctggaaaccttaacttgtggcctttggcacaaatgtgcagatagattcctcagtggggctaatcgaacaaaattggaatttgacccctgtctctttctaattaattcctctcaatttagatcccctttttgttaaccgcatttttcttttactcaccacgttatgtgaacagggaggggcaccagaagttcgaaacaccccgaggaactgggggcaaggttcaaagcann

SEQ ID NO: 19672 - DNA, 2228 bp, Homo sapiens
  misc_feature 2227, 2228: n = A,T,C or G
cgcgtccggaaaccaatacctggtgaatctatggacagtcatacacatacatcaggggaaaatgtgtgtgtacaacccaaatttacagtatgattgtcattctttgactttgttttgtatagcctgactctgttgaacatgaaattattagtactctaggttttggacagcttgagttcatttgaattccttccttaggaataagtttttatatacactgctaaatgtgtgatgagaatcataaaacactaaccagctgaggtagctgtgattcactttccccccaccctaacttgagataaaatgaaggactaggcaagtatttcatgttgtgtgagtggacttcggttccttcagtattgtctaggttattgagtctttctttgcctaatagtggattcccactcttaagataacttttattagtgataaatcagtttagggtatattctgtatgacaggcataaaatgttaagggtgaatgctggccttttccaagaaaaggccaccttaacttgtatgaggaaaaaatcctaactattctcttttttgtatctttttttccgtaactgttttgattgtatattttaaagaaaccacttaatttgtgatgcacgtaatatttgtgtgaacctgagaatatgtcacaataggaaaaagcagaaattatacttaggggacatgttaggggggtaaaaatatttaagcctcgaatgttttactgtcatctccactaactatttttacagaaaaagctaaaaactctgttgtaattattgtaagtttacttatttatacttttaaattaggcttttcatacttaaatttttttgacatttgcttttaatatttgtttcttaatgtggaaattgtgtattttaataatcaaattattaggataatagatatatttttaaacattcacctcattaacaaatagatctttgaatttttattaggttttttggctccagacaactgtttagctttaatgatatttctaaattcccagtgacttattaataaaaacaggaaaaatatttaggtaatgtcataaaatttattttacctttctcattttctgagaaaataaatgaaaaaaaccctagatattgctttattaccaacagtgtgtaggtttttgtacatatggaaatttgacacaaaaaaatagggaatttgtatagagaagtttccctcttataaaaggactcccatttgattgttcgaaactataaaatgcacttttactttaccatatctgaaatgacaaaatatcgccctttggaaaacctgactctttgcacgtgtaattcccagagtctacctcagttaaccaggcttagttttaggcaggaatgaattgaattaaattcagttcatcatctatgcagatttgtttcttttaagcacatccttccctcctgctgttgccctcctcccattaacttttctttttaatcttgaaattgtttaaaatattccatctttctttctctagcaaagtgtttgtattccaaataaggcctctgtgaaatgtctgaattacttttcccgtctttgttatggtcagcttcattatttggatgtattgcattcaaagcagcagttccaaacataacacacatctattttcttagagttttgtaaatacaaactaacctgatgacattaaaaattgtggatcctacatgttcctatgttcattctctaaaaacctgagtaactttatgaaaacacacaaacctggaaaaacatcacatttttgtcacatttttactgacaaatgtatattcatatgatggtacggcagcagggagtggcccccagttaacatggctgtgagtggacacagtgtctcgcaggatcactgcatgttatgatggcttgtaagtgcgttgttaagacttttgtttcagtgtttgtctcccagtatttgaacctaatttaaagaaaaagacgtttccaagttgtatttattaaatgtgtttttccttaccttttgtgctgctactttgctaatctcattagcttagctgtgtttgtgcataggttatatttggtaataaatttatagagtgttggtagtcatcgctttctttgtggttcattttgacctatagtcacgggtgcacttcttgccaccagtgggagcaacaaacccctcactagtaagggatggctttccccagatttttgttctcataaaatcacatattataaaccnn

SEQ ID NO: 19673 - DNA, 3156 bp, Homo sapiens
  misc_feature 1, 2, 3135, 3136, 3137, 3138, 3139, 3140, 3141, 3142, 3143,3144, 3145, 3146, 3147, 3148, 3149, 3150, 3151, 3152, 3153,3154, 3155, 3156: n = A,T,C or G
nnacccacgcgtccggccttttacactgcttccctcttaagatgagtttaggggctgtgataatttctgttgcctcagcattatttcataacacttgtctcttccctgaatttttcacagaagactaactgaaatagttggtaaatttttctgtatgtttcttaccattttccacaaggtgttggcatgtgtagaagaaaatacattaagattggtgatcaagattggttgaatggaatctcaactagtatattaatacattttaaatgttacaatgaactgtaaattcatgggtaaaatatcaggggtaaacttattttagtttctgttatagcaagggggaaatcaattttaaaataccacacaagtattgccatgaaattcggcattaaaatattccattaatacctatcatatgcaatttatggaaaagtaactctgtacctgcttcaaatgcaatagcatataaggctggtttaatttttagatatccagaagaggactatgagtcatttccactctcagaatcagatgtacctcttttctgccttcctatgggagctactattgagtgctgggatcctgaaaccaaatatccacttcccgttttttcaacttttgtcttgacaggttcttcagccaaaaaggtatatggagctgccattcagttttatgaaccttactctcgggaacttctatcagagaaacagcttatgcacctgggcttgttgacgcctgtggagagaaaaatggtctccaaatccatcaatacaaacaaatgcatttgtttactctcacactggcctttttttgaagcttttaggaaatttcttatgtttatctacaaactttctgtgtctggaccacatcctcttcccattgaaaagcacatttcacattttatgcaaaacatcccttttccttcaccacaaagaccatattttgggggagaatatatcgcctaacacaagtatctcagggttggtccccagtgaacttacccagagcaacacaagtcttggcagtagcagcagtagtggagatgtaggaaaactgcattatccaacaggtgaagttccatttccaagaggcatgaaagggcaagactttgaaaaatcagatcatggttcttctcaaaataccagcatgtctagcatctatcagaattgtgcaatggaggttttgatgtccagttgttcacagtgtagagcttgtggagctttagtttatgatgaagaaattatggctggatggacagcagatgactcaaatttgaatacagcttgtccattctgtaaaagcaacttcttgcctcttctcaatatagaattcaaagatttgagaggttctgcaagctttttcctgaaaccaagtacctctggtgacagtttacaaagtggaagcattccattggcaaatgaatccttggagcacaaacctgtatccagtttagcagaacctgacttgatcaactttatggacttcccaaaacataaccagatcataactgaagaaacaggctctgcagttgaaccaagtgatgaaataaagagagccagtggagatgtccaaactatgaaaatttcatctgtgcctaatagtttatcaaagcgaaatgtgtctttgactcgaagtcacagtgttggaggcccattgcagaatattgactttacccagcgaccgtttcatggcatctcaacagttagtcttccaaatagtctgcaggaagttgtggatcctttaggaaaaagacccaatcctccccctgtttctgtgccctacttgagtcctctagtactccgtaaagaacttgaatctttgctagaaaatgaaggtgatcaggtgattcatacatcttctttcatcaatcaacatccaatcattttctggaacctcgtttggtatttcagacgtttggaccttcctagtaacttgccaggacttatcctcacatctgaacattgtaatgaaggtgtacagcttcctctgtcatctctgtcccaggatagcaaacttgtgtatattcagctgttatgggataatatcaaccttcatcaggaaccaagagaacctctgtatgtctcatggaggaattttaattctgaaaagaaatcatctctcctgtcagaggaacaacaagaaacaagcactttagtagaaaccatcaggcagagtattcagcacaataatgttcttaaacccatcaacctactttcacagcaaatgaagccaggcatgaaaagacaaaggagtttatacagagaaatcctcttcttatcattagtgtctctaggaagagagaatattgatattgaggcatttgacaatgaatatggaattgcatacaatagtctgtcttcagagattcttgaaaggttgcagaaaattgatgctccaccaagtgccagtgtcgagtggtgcaggaagtgttttggagcgcctctcatttaaatagagattcactagaatgttgacacacaaggcttggggattagatttcatctggaaacattcaagtttttttttccaaatcgtaagaactggtgaatacggaattgaagtaactcttggggacaatatataatgaattatgattcatattgcattaccttgaaatatgaagtgccatttgaatgtcccagggcttattaatattgaagattttcaacccctgaactgcttttctgcctctgtggaaaactactttgggattcttcagtatttgtagtagtttgatagaaataatgaggaaccatattcattctaggcattgtttatatttgaagttactgagtttgaggaatggcaaattaaatttgcctaacccccaaaacaaatgaaatatctcaattataaaagcaacatggccgggcacggtggctcaggcctgtaatcccagcactttgggaggctgagcaaggtgggtggatcacttgaggccaggagttcgagaccagcctggccaacacggtgagaccctgtctttactaaaaatacaaaaattagccaggcgcaccactgtagtcccagctactcaggctgaggcaggagaatcgcttgaactgaggcagaggctacagtgagtggagatcacgccactgcaactccagcttgggtgacagagtgagaccgtcnnnnnnnnnnnnnnnnnnnnnn

SEQ ID NO: 19674 - DNA, 768 bp, Homo sapiens
  misc_feature 1, 2, 768: n = A,T,C or G
nngcgtccgttccaagttgagattagcatcacttcgtctactaagaatcttaatagatgtaaaaatatcttttaaaacatatggtaggatgggtaaaatttggcaatactatccaggaagtcactaagtacagatgaactgatttagtcctaattccaagaagtgtgattccacctacttgactagaaatttatacctggtaataactccttgtccttgaagattttcaactaaggaaaactgtttttcagcaggacctgattatgcactgctatctaggtagggtcacttatggttttataatatatttaattggattataatattccttttttcttgtctcttggacaaaatcctagctttactgtaatttaaaaagatgagtttaaaatttcaggctttaaaaacataccaaacattgataaaaatgaaatactagataaaagtattttatcaatgttcagttgcctggattcaataactgtattatggttatgtaagataatatacttaggaaatacacattatggtattaaagggttaaagaggtatggtgcatgcaacctgatgatgtatgtagtctgctttctaatgattcagaaaaataaatgtgtgtgtgtgtgtgtgtacacacacagagaatcataaagcaaatgtaattgttaaaaagttgaatctctgtaaaaagtatgtgggagtgtctgtactatgctttctagttttctgtacattctagttattagaaataaaaagttttaaaaacctggn

SEQ ID NO: 19675 - DNA, 1012 bp, Homo sapiens
  misc_feature 1012: n = A,T,C or G
taagatctttgacttaacttttgtatatgatgtaaagtcacgcgtgggtcgacccacgcgtcgcaggtatcccaggcattatttgttgaaatgcctacacttctttatattcccttgactcctctaaccaaggcagttggacctttgactactaccactgccctgaaactgctgtcactgggttactgaggactgggtagcttagttgagtagataatcttttgttgtttcctccttgtaatatacaagccttggcttctgtgacatcatactctcctagatttccccctgtcactgtggcttcttctcagtctctgtccatccctggtgctcctgaaggttctgttctcagccttacacacattacctgggtgatctcattctctgccatgacttcacttgccatatatgtgctgattttccccaaattcctatttctcccgacctttacatctattttatttgcaggtcatatatctaataaggaattgatatccagtgtacatgtagaactcctgtaattcaatacagaaaccaaacagtccaattaataaatggagaagagatttgaatgaacatttttctaaagaacatctcaagctcaagatttcccagataacttttctttcttcaaaatctgcttctgtgtttcctcatctgtaggtggcacagcatacatctgatttcccaagccagaaacctcatagttattcttgactccaggaagaaatattattgagtttttaaaaactcagcttattgactcatggtttatattactaaactgccccgcttagggttttattcacggagttgaacacccttttgtgctgggcacatcccatgatgacacaactgtatcacacggaatcctgtgtcctccaaaatgtccttccttggggcccaaggctgccttttagataaagccttcaccgaggcaacgctacactgtggagcacagcgggaatgaacacgaaggacaagacagcgtggaaatcacatggagacgcgn

SEQ ID NO: 19676 - DNA, 1264 bp, Homo sapiens
  misc_feature 1085, 1249, 1250, 1251, 1252, 1253, 1254, 1255, 1256, 1257,1258, 1259, 1260, 1261, 1262, 1263, 1264: n = A,T,C or G
cgacccacgcgtccggctgacgtccgtgctgaactgagctcaggtgtgtttttcttccaagctttctagcaaggtttctacttaaaatcacctgtgtgcaagcccaaaggacatttcatctattctaagcagaaaggctgttttgttcattacagtgagtgctgttcatctcatggagtgggaggagcactaaaccaggagacagaggacatggatttggtttccagcttaaccagttaggactctgtcctctgcattctggaaccatgatgcctgcctgcctgcctcacagggctgttgtgaggaccagatgagatgatgtatgttcatactttggaatctctaatttaaagtcttaatattttgtcttctgagtgtgaggggataaacctggatgtagactattaagcagcataggagaaaagaacaatagaatctaatggactgggtttgcaatctctctctaaatgcactgcttcagacaaagtgaaatccaaaggtgtgaaaaagtatagctgcaaattggaaaaatgtgtttcaagagtcgtctttttggccaggcatggtggctcacacctgtaatcccagcactttgggaggccgaggtgggcagattgcctgaggtccggagttcaagatcagcctggccaacatgatgaaaccctatctctactaaaattacaaaaattagccaggcgtggtggtacaccgcctgtaatcccaggctactcaggaggctgaggcgcgagacttgtttgaacctgggagatggaggctgcagtgagctgagatcacgccactgtactccaagcctgggcaacagagcaagactctgtctcttaagatattatatttatacttttactgtgggttgggcggggctgggggtcttagatgtcaggttgatgatcctgcagagggaaacttccatgggggcgtggggagagagaggttccatccacaatattgaacccgagaaggcctgtgtccctctgaaggaccatcctccttaactaaggcgctgaagctcaggaggtttatcctatgcctgagaatcaggcggatgaccctaccattttatgggnccagacaatcggctgttccggtataaaaatgacggctcagaacaaaaaaaaaaaaagggggcttaatcctgggaagtacgaacgctgtaagcaatagataatatagagcgcgcaatacgagaacataatgaaacaggtagaacacacattaatttaggatatannnnnnnnnnnnnnnn

SEQ ID NO: 19677 - DNA, 2381 bp, Homo sapiens
  misc_feature 1, 2, 3, 4, 5, 2380, 2381: n = A,T,C or G
nnnnnctggaggcttcgggtgtccattactgtttgatacggcgttccgttcctgcaggttccagatcaatagatgcggacccgcgggccgagcccagccaacgaggcacgattgaccaaccatagaggacttaaaaggaagaaccacagtctcctttgcttgataaaaggagtatgtatttattttctaggtttcttacttccagtcatgacaaaataatggtcatcatcttcctttttctttgcagtaggttttttatctccactatctgcatccttaacagatgagggtggtttcctgattgaagctggggttttgccacttctgggaggccctttagttgaatgctggctcttagcgacagtctgtgctgacttcggtgcagtttgtgttttggtagaagactggggtaggctcacgatggacagtggggtacggccaggagacttcaaggagctgggtcctgtcttctgaaatgcacttttattctgaggctgctttttggtagctgaaactatattcttatcttttgatttctgtgtggcttttacaggagaaactgaggacacagaaactggctgatttaaattcaaggccgatttaagtttctgtgctgggactggctttgcttgtggggctccatcggatggttgagactgtgttcctagacccgtggctatggttttggaactggtttttgtcatttttgcagaggactggaaagaaggtttaggtcttacaggtatatttgctttaggcagcttgggacattttgaggatgaatttgaatgtgcagctaagtgagatactgcattatctctggaagaaatatggttatgtttcaaatacttaggttgagtttttcctgaacacttatttggcaaaagtgtggactcgggcagatctgctgaattctgggctggaataaccttggccttgggggtattgggggatgaaatacattttctcggtgactcagatatacaaggtgcagttcttggtaaagctggtgaagaagtgtttttacctactggatttaatgaagcaagtgaagatgatgcattgtttgaaggagcctgcggtttcttcgttatgccttttgaagacttgagcttgggatgagaagatgctgctggagaatttggcaatttagaacggactgacatagagcccagattacctcctttcagtgaagatgctggcaccaatgcacctggtggacgtccctgtttttctttgctttttggaatactaactggcacgctgggttttgaattttgtttctgaaacatgttaactgctgacaaaggattcatttcaggaggctgaggtgttctggcaggcgaatcaggtacactttcattagaaactcctttttgaaatgctaaaattttttgttctagtgtggcaaactgtaatattcgacaggggtcatatttaagcaaaaatccttgaagagtatcccagcctccaccaacgcgaaccatgacatgttttccatgaagcattcttataaagagtattttatcccctagtcggtaccgtccttcagataaatactcaatagaaaatcgatgagaacaactacaaggagggtcctcagcaatatgtttaacagcttcatgtagctcttcatgccgacagcatgattttggaatgctgatggaatcttcaggcccagaagtattaagcaaagtctcttctaactcaatttctttctcaagttttactaacactggtggctcaaccccgtatcttgacacaattcgaccaatttcaagaagacaaagatacgcctgtcttggatctttgtgcaaaactaaaccttcagattcaaagaggtaagtttcatcaaccccaatgtccctacaccagtgaaggaagtttgcggtattgtcccgagcaaagaatgaacctgatgcagcatctttcttacagggcacttttctcattggaaaattccctgattcttcagagttgcatgttttcaccatgttctgaagagcatcaatcagttgacataatagtactccattatcaagttcttccaataagttttctgccttaactttaatacgtaataaaccatataaccagattgacagatcttcttgcatgggcaacaaagtggcttcatgcctcacagctatccactcatcgtactgacaaacattagccaatcctggtccgtgtctggtagtcagaggactccgaggacttacaggcagatcttctccaaaccatacttgaattgcagggtgcatagtcacctatattgaaatgaaatttgttttcaggcgcaggagggtcacttctcccagcggggcgacaactcggctcaagctgtgcggggccaacacgcccctcggacgcgtggtcnn

SEQ ID NO: 19678 - DNA, 1084 bp, Homo sapiens
  misc_feature 1083, 1084: n = A,T,C or G
ggagtcacccacgcgtccgcgttgcccgcccggggcccgctaccggcccaggccccgcctcgcgagtcctcctccccgggtgcctgcccgcagcccgctcggcccagagggtgggcgcggggctgcctctaccggctggcggctgtaactcagcgaccttggcccgaaggctctagcaaggacccaccgaccccagccgcggcggcggcggcgcggactttgcccggtgtgtggggcggagcggactgcgtgtccgcggacgggcagcgaagatgttagccttcgctgccaggaccgtggtgaagcctctgggcttcctgaagcccttctccttgatgaaggcttccagccgcttcaaggcacaccaggatgcactgccacggctgcccgtgccccctctccagcagtccctggaccactacctgaaggcgctgcagcccatcgtgagtgaggaggagtgggcccacaccaagcagctggtggatgagtttcaggcctcaggaggtgtaggggagcgcctgcagaaggggctggagcgtcgggccaggaagacggagaactggctgtctgagtggtggctcaagaccgcctacctccagtaccgccagcctgtggtcatctactcgagcccaggcgtgatgctacccaagcaggacttcgtggacctgcagggtcagctccgatttggtgccaaactcattgagggtgtgttggatttcaaggtcatgattgacaagagacctgccgtggagtacctgggggggaagcaactgtgcataaccagtactatcagatcttgtctcctgccgagtgcggccccagcatggcccagtcagcacttccgcgagacagaagctccacgccatccggggtacaactaccggttttggcctggatggtcccaggtaggcacccttatgggtacactttggcgggggaaatgtgctctcttcgcgggcgtggttccccacgagtctgggaggagactctaagagggaggtgtggccaaacacgtggctcgtgtgctcaagaggacccaggctgggacctctcgcagtatcaccgcgggcgcgcaccggtgcnn

SEQ ID NO: 19679 - DNA, 2429 bp, Homo sapiens
  misc_feature 2429: n = A,T,C or G
gcgtccggcatgagccactgcacccggccatggttttatattaaaaataataaaaatacggtgaatttctggttgaaatggggaaaggcctgtgatctccgttttcccagtgcttagcgctgactcagagaccctgagtgggacacacgactgcatggagtacagttgggaaacaactgggctagtctgggcctcctgagtctcagaggggagcagggggaagagctctgggcaagtcactgggctgaaccctggccagcccagtgtatgaccctgggtatttcaggtcatggggtgtgagtcctacctcgtgcctcttatcctcctaggtgtggatgtggaagcagccaagcgggcagaagaggaattgctccttcatgacacgaggtgctggctgaatgggggcgccatgccagaggcccggcacccccgcacaggcgcctctgccctgcacgtggctgctgccaaggggctacattgaggtgatgaggttgctccttcaggctggctacgacccagagctccgggacggggacggctggactcccctgcacgcagcggcacactggggcgtggaggatgcctgccgcctgctggccgagcatggcgggggcatggactcactgacccatgcggggcagcgtccctgtgacctggccgatgaggaagtactgagcctgttggaggaactggcccggaaacaggaggaccttcggaaccaaaaagaagcttcccagagccggggccaggagccccaagcgccctctagcagcaaacacagaaggagctctgtgtgtcgtctgagcagtcgcgagaagatttccctccaggacttgtccaaggagcgccggcctggtggggctggggggccccccatccaggacgaggatgagggggaagaaggtcccaccgaaccaccccctgcagaacccagaaccctcaatggcgtctcctccccgccgcaccccagccctaagagtcccgtgcagcttgaagaggcccccttctccaggcgctttggcctcctgaagacagggagttctggtgccctgggtccccctgaaaggcggacagcggagggagcccctggggctgggctgagcgctcggcttctcctcctggctggaagggacctccactcaggccaaggagctccgtcttgccagaattaccccgcacccctccccgaagctgcggagccctctgtcctgtctgaggtcaccaagctcctccttgcttggagaaccttcctcgcctccctccaggattcccggagcctgaatcccccagcgaagccaaacgtccccacagcctccacggcgcccccagcggactcccgggaccgacggaggtcctaccagatgcctgtgcgggatgaggagtcggaatcccaagagaaaagctcgctcccgtcttcatgcgccagatctcggaaggtccacacaggggtgggactcttacagaccggaaggaggcagagaaggctgcagggacggccccagagtcagagaagccggcgcagagccgtggacccttcccgaaggccccgcgtccctggagtggagaactctgccagccctgcccagagagaggcgcccgacgggcagggtccgggaccgcaggcggccagggagcaccgcaaggtcggaaaggagtggagggggcctgcggagaggggaggaggcggagccggctgaccgcagccaggagtccagcaccctggagggcggcccctcggcccgcaggcagcgcgatggcagcgggacctcaacccagaacctgagccagaatcggacagagccagacggaggcttgaggacgctgtatgcagagctgcgcagggagaacgagcggcttcgcgaggcccgtgaccgagaccacgctgcggctggcgcagctcaacggtggagctggagcgggccacgcagaggcaagaacgcttcgctgaagaggcagacctcctggaaactggagagatcgagcgcaggggcccctgggaccgcaaggccgccgcagctggaggaggagctgaaggggctgtatgagctccgggctgaacaaccagcgcctcaggactgagactgcggcgatgaccggtcatccgcaaatctccagtgaccgaagggaacttaccagcaccggacacaacaagaggctatggcaaagaacccttacccgtgaacgcaaagaagggcctccgggcgaaaggcctcaacagccataaacccgggaccccggaatgtagggaacacagaaaccaggcgaacaagagtagccaataggagaatagttgtcctaaccgcagggcaacaccacaggacacagccacagagaccgcgacgtgcacacagcgtcacaacagaagagacaaggaccagaggaccaacaactaccaaatcacgcagatcgctagtcacgacaatgacgcn

SEQ ID NO: 19680 - DNA, 5577 bp, Homo sapiens
  misc_feature 1, 2, 3, 4, 5, 6, 7, 8, 9, 5576, 5577: n = A,T,C or G
nnnnnnnnncacatccagctccttcatgttgctgccgatgtgggattttcctggcttcgtcagccaagcaattggctgcctttgccggaggctttgagaaccaaggcttgaaggccggcaggagcatccagggggaagcttggcttcagggaggacctagcagacgttgggccggagcactagcctcacggagaaggatctgaaagaagccaaggcgcggagccagcagattgcagcccagctgaccacccctcccagctccaattcccgtggcgtccagctcttcaacaggcgccggcagagggtgaacgagttcaccttggagagccacggccagaggggacagaagcccagccaggagtccctcagagtgctcccttcaagcctcccaggccatgcaccggggctcagcctgagttccacctcgctgccggagccaggccctccacggcaccccagtccccagagccccgacagaggggtccctggccacagcatggaggggtactcagaggaggctagcttgctgcggcacctggagaaggtggccagtgaggaggaagaggtaccactggtggtttatctaaaggagaatgcagcactgctgacagccaatgggctgcacctgtcccaaaaccgagaggcccagcagtcctcaccggccccacctccagctgaggtccacagcccagctgcagatgtcaaccaaaaccttgcctcgcccagtgccacgctcaccacaccaacttctaacagcagccacaatccgccagccaccgatgtcaatcagaacccaccggcaactgttgtcccacagagcctgccactttctagcatccaacagaattcctcagaggcccaactcccatctaatggcacagggcctgcttccaaacccagcaccctgtgtgctgatgggcaaccccaggcaccggctgaggaggtgagatgcagcacactcctaattgacaaggtatcaactccagctaccaccaccagcaccttctccagagaagctacgctcatccccagctccaggcccccagcctcagatttcatgtccagctccctgctcattgacatccagcccaacaccctagtggtgtcagcagatcaagagatgtctgggcgagcagctgccaccacgcccaccaaggtctacagtgaggtccacttcacactggccaagcccccatcagtggtcaacaggacggccaggccttttgggatccaggcgccagggggcaccagccagatggagaggagccccatgctagagagacgacattttggggagaaggccccggctccccagccccccagtttgccagacaggagcccccggccacagagacacataatgtcccgcagccccatggtggaaaggaggatgatggggcagcgaagcccggcctcagagagacgccccttggggaacttcactgcaccccccacctacactgagaccttgtccacagcccctctggcttcctgggtgaggtctcctccctcatattctgtcctgtatcccagctccgaccccaagtcttctcatctgaagggccaggcggttcctgccagcaagacgggcattctggaggagtcgatggcccgccggggcagccgcaaatccatgtttactttcgtggagaagcccaaggtgaccccgaatccagacttgctggatctggtacagacagcggatgagaagcggcggcagagggaccagggggaggtaggcgtggaggaggagcccttcgcactgggggccgaggcctccaacttccagcaggagccagcacctcgtgacagggccagccccgcggcggcggaggaggtggtaccagagtgggcctcctgcctcaagtcaccccgcatccaggccaagccgaagcccaaacccaaccagaacctctccgaggcctctgggaagggagctgagctctacgcccgccgccagtcacggatggagaaatatgtcatcgagtcttcaagccacacgccagagctggcccgctgcccatcacctaccatgtccctgccttcctcctggaaataccccactaacgcccccggggccttccgagtggcatcccgaagcccagcccggaccccgcctgcctccctctaccatggctacctgcctgagaacggggtcctgcgcccagagcccaccaagcagccgccataccagctgcgcccctcgctctttgtcctctcacctatcaaggagcctgccaaggtctcaccaagagctgcctcgcccgccaagcccagctccttggacctggtgcccaacctgcccaagggggctctccctccatctcctgccctgcctcggccctcgcgctcctcaccgggcctctacacctcccccggccaggacagcctgcagcccactgccgtgagccctccttacggcggtgacatctcccccgtgtctccctccagggcgtggtctccccgagccaagcaggcccccaggccctccttctctacccggaacgccgggatcgaggctcaggaccgccgggagagcctgcccacctccccaccctggacgccgggcgcgtcccggccccccagcagcctagacggctgggtgagcccgggcccgtgggagccaggtcgcgggagcagcatgagcagccccccgccgctgccgccgccaccgcccatgtctccctcgtggagcgagcgctcggtgtccccgctgcgacctgagaccgaggcgcggccccccagccgccagctgcaggcgcttctggcgcgaaacatcatcaatgcggcccggcgcaagagcgcctccccgcggtcggcgggcgccgagaacccgcggcccttctccccgccgagggcgccaccgcccccgcccccgcccccgcccccgcccccgcgcatgcgctcgccacagcccgcccgccccggctcggctgctgtgccgggggcagccttcgcgcccatcccgcggagcccgttgcccgccggtccttcgtcctgcaccagtccccggagcccgctgcccgcgcctcccaggcccttcctctaccgccgctcgcccacggactccgacgtgtccctcgactccgaggactccggggctaagtctccaggcatcctgggctacaatatctgtccccgcgggtggaatggcagccttcggctcaagcgtggcagcctccccgccgaggcctcctgcaccacctagagccccacccccgaccccaccccgggagggcagagccagaagaaggctcattagacctgggggacccaaagggtctggcctctttgggcagccccagagatgaggggtcagcagaggagagctctggggttggggatgggttagggacgcaagcttgagttctagcccttgctctcattcagctgttgtgtgaccctgggtaagacccttccttgtttgaccctcagctttcccatctgtttaatggtggctttggccaaggcaatccacaaacgtcaaaattccccttcccatcagtacacacaccgatgcacacacactctctctttctctctctctctctctctcacacacacacacacacacacacacacacacacacacactagttagtgccttggatgaggcggggcagtgtgtatatggacccctggacttgctaccttcagggttccatactcgtccctcccctcctggctctgctgtctggagtctggcaagcggggtgtgttcagaaggtcctaggcctgtgtcgcatgtccaggcactggcctgaccatccggctccctggcaccaagtcccaggcaggagcagctgttttccatcccttcccagacaagctctatttttatcacaatgacctttagagaggtctcccaggccagctcaaggtgtcccactatcccctctggagggaagaggcaggaaaattctccccgggtccctgtcatgctactttctccatcccagttcagactgtccaggacatcttatctgcagccataagagaattataaggcagtgatttcccttaggcccaggacttgggcctccagctcatctgttccttctgggcccattcatggcaggttctgggctcaaagctgaactggggagagaagagatacagagctaccatgtgactttacctgattgccctcagtttggggttgcttattgggaaagagagagacaaagagttacttgttacgggaaatatgaaaagcatggccaggatgcatagaggagattctagcaggggacaggattggctcagatgacccctgagggctcttccagtcttgaaatgcattccatgatattaggaagtcgggggtgggtggtggtggtgggctagttgggcttgaatttaggggccgatgagcttgggtacgtgagcagggtgttaagttagggtctgcctgtatttctggtccccttggaaatgtccccttcttcagtgtcagacctcagtcccagtgtccatatcgtgcccagaaaagtagacattatcctgccccatcccttccccagtgcactctgacctagctagtgcctggtgcccagtgacctgggggagcctggctgcaggccctcactggttccctaaaccttggtggctgtgattcaggtccccaggggggactcagggaggaatatggctgagttctgtagtttccagagttggctggtagagccttctagaggttcagaatattagcttcaggatcagctgggggtatggaattggctgaggatcaaacgtatgtaggtgaaaggataccaggatgttgctaaaggtgagggacagtttgggtttgggacttaccggggtgatgttagatctggaacccccaagtgaggctggagggagttaaggtcagtatggaagatagggttgggacagggtgctttggaatgaaagagtgaccttagagggctccttgggcctcaggaatgctcctgctgctgtgaagatgagaaggtgctcttactcagttaatgatgagtgactatatttaccaaagcccctacctgctgctgggtcccttgtagcacaggagactggggctaagggcccctcccagggaagggacaccatcaggcctctggctgaggcagtagcatagaggatccatttctacctgcatttcccagaggactagcaggaggcagccttgagaaaccggcagttcccaagccagcgcctggctgttctctcattgtcactgccctctccccaacctctcctctaacccactagagattgcctgtgtcctgcctcttgcctcttgtagaatgcagctctggccctcaataaatgcttcctgcattttaccagaagaacaaacgcaaaaaacaaaacaacgagaacacaaagaaacaagcaccgggaggacacatagtcgtggggcagcgcgaacaacaagagggcacaacaacgacggggacacgagggcacaacaggacggtgtcaggaggacccacgcattaggggacacgaagggggggaaacaactggcgagcacccccaaaagacggagcgcgaaaacgacgaccgagaacccccgggcacccggaatagann

SEQ ID NO: 19681 - DNA, 2640 bp, Homo sapiens
agggagtcgacccacgcgtccggccccctgcccctcgccgcccgccgcctgcctgggccgggccgaggatgcggcgcagcgcctcggcggccaggcttgctcccctccggcacgcctgctaacttcccccgctacgtccccgttcgcccgccgggccgccccgtctccccgcgccctccgggtcgggtcctccaggagcgccaggcgctgccgccgtgtgccctccgccgctcgcccgcgcgcccgcgctccccgcctgcgcccagcgccccgcgcccgcgcccagtcctcgggcggtcatgctgcccctctgcctcgtggccgccctgctgctggccgccgggcccgggccgagcctgggcgacgaagccatccactgcccgccctgctccgaggagaagctggcgcgctgccgccccccccgtgggctgcgaggagctggtgcgagagccgggctgcggctgttgcgccacttgcgccctgggcttggggatgccctgcggggtgtacaccccccgttgcggctcgggcctgcgctgctacccgccccgaggggtggagaagcccctgcacacactgatgcacgggcaaggcgtgtgcatggagctggcggagatcgaggccatccaggaaagcctgcagccctctgacaaggacgagggtgaccaccccaacaacagcttcagcccctgtagcgcccatgaccgcaggtgcctgcagaagcacttcgccaaaattcgagaccggagcaccagtgggggcaagatgaaggtcaatggggcgccccgggaggatgcccggcctgtgccccagggctcctgccagagcgagctgcaccgggcgctggagcggctggccgcttcacagagccgcacccacgaggacctctacatcatccccatccccaactgcgaccggcaacggcaacttccaccccaagcagtgtcacccagctctggatgggcagcgtggcaagtgctggtgtgtggaccggaagacgggggtgaagcttccggggggcctggagccaaagggggagctggactgccaccagctggctgacagctttcgagagtgaggcctgccagcaggccagggactcagcgtcccctgctactcctgtgctctggaggctgcagagctgacccagagtggagtctgagtctgagtcctgtctctgcctgcggcccagaagtttccctcaaatgcgcgtgtgcacgtgtgcgtgtgcgtgcgtgtgtgtgtgtttgtgagcatgggtgtgcccttggggtaagccagagcctggggtgttctctttggtgttacacagcccaagaggactgagactggcacttagcccaagaggtctgagccctggtgtgtttccagatcgatcctggattcactcactcactcattccttcactcatccagccacctaaaaacatttactgaccatgtactacgtgccagctctagttttcagccttgggaggttttattctgacttcctctgattttggcatgtggagacactcctataaggagagttcaagcctgtgggagtagaaaaatctcattcccagagtcagaggagaagagacatgtaccttgaccatcgtccttcctctcaagctagccagagggtgggagcctaaggaagcgtggggtagcagatggagtaatggtcacgaggtccagacccactcccaaagctcagacttgccaggctccctttctcttcttccccaggtccttcctttaggtctggttgttgcaccatctgcttggttggctggcagctgagagccctgctgtgggagagcgaagggggtcaaaggaagacttgaagcacagagggctagggaggtggggtacatttctctgagcagtcagggtgggaagaaagaatgcaagagtggactgaatgtgcctaatggagaagacccacgtgctaggggatgaggggcttcctgggtcctgttccctaccccatttgtggtcacagccatgaagtcaccgggatgaacctatccttccagtggctcgctccctgtagctctgcctccctctccatatctccttcccctacacctccctccccacacctccctactcccctgggcatcttctggcttgactggatggaaggagacttaggaacctaccagttggccatgatgtcttttcttctttttcttttttttaacaaaacagaacaaaaccaaaaaatgtccaaaaaaaaaaaaaaaaaaaaaaaaaaaaaaaaaaaaaaactccccggggccctataatttagcgggcggcggcggacaaaagcggcggtgaatagagaaatgcgcgcccattggcgccgtcaagagtgttctcctggcacccactttcttctgtgtgtcccacagggtgcggaaaactctctccgcgggctcccccaatatatggaggccgccgcgataattaattcttccataatagccccgccgcggcgttaaaccccgcgcgatctttaggaaacttctgccgcgacacagctgtcccaccccgcagctactatcccccgcccgcccctcactttccccaccccgacgacctaaccttcacaccggtcgtctcccgcctattccctggcctggcagcatcccctttttattctgtcgc

SEQ ID NO: 19682 - DNA, 3201 bp, Homo sapiens
  misc_feature 1, 3199, 3200, 3201: n = A,T,C or G
ncgggagtcacccacgagtgctaggtacgaggcatgggtggttcgggccgcaggcccgctgcggcggactgggcggcggaagttcgacggcgccgggcgagtggctgttgagcggcgccgcgggagttccgcaggtttcccgtgttcgcagcggagccggaggccagctgaacccggccgtgggatcccggataggaggaggaggggacccataggacgcgttaacatggacctggaaaacaaagtgaagaagatgggcttaggtcacgagcaaggatttggagccccttgtttaaaatgcaaagaaaaatgtgaaggattcgaactgcacttctggagaaaaatatgtcgtaactgcaagtgtggccaagaagagcatgatgtcctcttgagcaatgaagaggatcgaaaagtgggaaaactttttgaagacaccaagtataccactctgattgcaaaactaaagtcagatggaattcccatgtataaacgcaatgttatgatattgacgaatccagttgctgccaagaagaatgtctccatcaatacagttacctatgagtgggctcctcctgtccagaatcaagcattggccaggcagtacatgcagatgctacccaaggaaaagcagccagtagcaggctcagagggggcacagtaccggaagaagcagctggcaaagcagctccctgcacatgaccaggacccttcaaagtgccatgagttgtctcccagagaggtgaaggagatggagcagtttgtgaagaaatataagagcgaagctctgggagtaggagatgtcaaacttccctgtgagatggatgcccaaggccccaaacaaatgaacattcctggaggggatagaagcaccccagcagcagtgggggccatggaggacaaatctgctgagcacaaaagaactcaatattcctgctattgctgcaaactgagtatgaaagaaggtgacccagccatctatgccgaaagggctggctatgataaactgtggcacccagcttgttttgtctgcagcacctgccatgaactcctggttgacatgatttatttttggaagaatgagaagctatactgtggcagacattactgtgacagcgagaaaccccgatgtgctggctgtgacgagctgatattcagcaatgagtatacccaggcagaaaaccagaattggcacctgaaacacttctgctgctttgactgtgatagcattctagctggggagatatacgtgatggtcaatgacaagcccgtgtgcaagccctgctatgtgaagaatcacgctgtggtgtgtcaaggatgccacaatgccatcgacccagaagtgcagcgggtgacctataacaatttcagctggcatgcatccacagagtgctttctgtgctcttgctgcagcaaatgcctcattgggcagaagttcatgccagtagaagggatggttttctgttcagtggaatgtaagaagaggatgtcttaggaggagggcacccagaagtatcgagccatagctatccaaagtggtctgcatttctactgtaaaatgcaatttgaaaaaaataaaacgcaaaaaaagaaactgtaaaggaaaccaagagattttgtttaatttttttggccattttttcttcatcaattttttttcggtctcaacttttaaacttggtttaagcatttgatttgtaaaacagtaaataattgtatctttccatagcttttcaaatgtgaaatcatttttggaagcttggatctcattaaacttcatgtctctattccatttgtgccacacacttaaaagttagtgtactgaatggaaagatgagcattcctagttctacacttcttttttccccctcatgtgtaaaatgaaaagaaaactaaatttgccctaataccaaggcgctacgtttattgcctcgtcttattcactgacctttgtaatgatacacagtgaattctttttgacaaagagaaatgcagtgtagtatgcagagctgctgttttaatgcctatgcatttactctttcctgatttaggcagaggtggcattttctttattgcatttctctatttttttaatgtaccctaccttcagtattctctttgtaagttggtgacttgcatctgtggccttgaatattttattatcacatgtggcataacagtatccacactttttagttctttatttttttttttttattttgagcaattctcctgcctcagcctcccaaatagctgggattacaggtgcatgccaccacacccagctaatttttgtatttttagtagagacaggttttcaccatgttagccaggctggtctcaaactcctgacctcagatgatccgcctgccttggcctcccaaagtgctgggattacaggtgtgggagccaccatgcctgacccacacactttttacttgtatagatgatttttggcttggacataaaagccaagccacccatttgcttttaatccaaagaacatgtatagtttttgtacccagagactatgatttatattgattgcacttgcctgccatgatttagataagattttttttgcatggtttttattctttcctaatggatcctgttttataatacttccaagcctgtccatggatatatcaaatgtcttcacttgtatattttcatggctaggtatttctaatgtttattcttccctgtgtacttctacacatagctatgcactatgaaaattaaatggaatgaatgatatgtatattactcaaaataaagtttctttcactttaaaaaaaagaaaaaaaaaaaaaaaaaaaaaaaaaatttgggggggggtgggccgagaaaagggtttttaaaaaccatgtggttgggggggggggcccgtggttaggggcaaggggcaaaggggggtccaagaggaaccggccgcacaggggggttccccccataaaaaagccggggcgcaccgggtttgaacaaccaaaggctcgggcccaggttccacacggggcaggagctagatgacaccccgcgggagagaagaccacacccacaacacagcagagacccccggccgcacccaaacacctaagcggcacacagaaacaccacaagagcaggacgccacaatacatacacacgacgacactgacagcacaccgcagcgtggacagccatgcaggcacagcgaaannn

SEQ ID NO: 19683 - DNA, 1681 bp, Homo sapiens
  misc_feature 1, 2, 3, 4, 1678, 1679, 1680, 1681: n = A,T,C or G
nnnnccgccccttctacctgcctgcgcagtacgtgcgcgagctgcccgcgctgggcaaccctgccgccgccgcgccgccaggtccccacccgagccccgcggcccctgagccgctcgcctacgactaccggtttgtgagcgcggcggcgaccgcgggccccgacggcgcccccgaggagtccggaggccgagccagctccctgtgcggccctgcgcaacgcggcgccgcgacccagcgcagcagcctggcgcccggcctgccagcctgcctgtacctgcggcccgcggcgcccgtgcggcccgcgcagtccctgaacgacctggcctgcgccgccgtctcgcctcccgccggcctcctaggaagcagcggcagcttcaaggcctgcagcgtgcggggctcctgggtgtgcccgcggcctctggcgcgcagcgactcagagaacgtctacgaggtcatccaggacttgcacgtcccgccgcgggaggagagcgcagagcaggtggacgacccaccggagcccgtgtacgcgaacatagagaggcagccccgggccacttcaccgggcgccgctgcagccccccttcccagcccggtgtgggagacgcacacggacgcgggcaccgggcgcccctactactacaacccagacacgggagttaccacctgggagtcgccctttgaggctgccgagggtgccgccagcccagccacctcccctgcctcggtggacagccacgtgagccttgagaccgagtggggccagtactgggatgaggagagccgcagggtgttcttctacaacccgctgacgggcgagacggcctgggaggacgaggccgagaacgagcccgaggaggagttggagatgcagccgggcctgagccctggcagcccaggggacccgcggccccccactcccgagacggactaccccgagtcgctgaccagttaccccgaggaggactattctcccgtgggctctttcgtgggtgaggctggaggacccccacgggaagccatacttctacaatccagaggactcctctgttcgatgggagctgccccaggtccctgtccctgcccctcgaagcatccataaatccagccaggatggtgacaccccagcccaggccagccctccagaggagaagaccaagaccttggacaaggcagggtgctccatcgcaccaatgacggctgacaagggaaagcggtccggaagaagcactggagtgcctcctggactgtgctggagggtggcgtcctgacattcttcaaggactcaaagacctcggctgcaggcggcctgaggcagccttccaagttttccacccctgagtacacagtggagctgaggggggccactctctcctgggcccccaaagacaaatccagtaggaagaatgttgctggagctacggagccgagatggcgtctgtagtacctgatccagcacgactcgggaggcatcatcagcaccttgcataaggcatgctcaggggatccaggagctgtcgcagagttgccccagaagaaagggaaagcagcagagggagctcgcggtcgggagcgctggaagtggagggaagaggggcgggcgaatggcggccgcctgggcctggctggaagatggagcccggaccgggtcccggggcccggcgggggagggacaaacannnn

SEQ ID NO: 19684 - DNA, 1633 bp, Homo sapiens
  misc_feature 1, 1605, 1606, 1607, 1608, 1609, 1610, 1611, 1612, 1613,1614, 1615, 1616, 1617, 1618, 1619, 1620, 1621, 1622, 1623,1624, 1625, 1626, 1627, 1628, 1629, 1630, 1631, 1632, 1633: n = A,T,C or G
nacaaaggcaccaaaccacaaaacgtcacacgtaaacatcatacgtggcaaccacaagccaatcagttggatatttcattcattggtatacatatggactgtaaggtgtctttcaggttgcagaaaagatggaaaaaaggacatgtgcactctgccccaaagatgtcgaatataatgtcctgtactttgcacaatcagagaatatagctgctcatgagaattgtttgctgtattcttcaggacttgtggaatgtgaggatcaggatccacttaatcctgatagaagttttgatgtggaatcagtaaagaaagaaatccagagaggaaggaagttgaaatgcaaattttgtcataaaagaggagccaccgtgggatgtgatttaaaaaactgtaacaagaattaccactttttctgtgccaagaaggacgacgcagttccacagtctgatggagttcgaggaatttataaactgctttgccagcaacatgctcaattcccgatcatcgctcaaagtgctaaattttcaggagtgaaaagaaaaagaggaaggaagaaacccctctcaggcaatcatgtacagccacccgaaacaatgaaatgtaatacattcataagacaagtgaaagaagagcatggcagacacacagatgcaactgtgaaagttccttttcttaagaaatgcaaggaagcaggacttcttaattacttacttgaagaaatattagacaaagttcattcaattccagaaaaactcatggatgagactacttcagaatcagactatgaagaaatcgggagtgcactttttgactgtagattgttcgaagacacatttgtaaattttcaagcagcaatagagaaaaaaattcatgcatctcaacaaaggtggcagcagttgaaggaagagattgagctacttcaggacttaaaacaaaccttgtgctcttttcaagaaaatagagatcttatgtcaagttctacatcaatatcatccctgtcttattagggattaccatttcctaagccaagagtcatgtcaaattgcaatcaggctcaaaaccagagaccaggctgtgaaatccacacatctttagaactagtcgtctcctcttggcctcagcagctcttccctgttcttactggttgacattttgatcactctttgcacactcttgtgttttttgctcactgtcacactcccagcacctagtatgctcagtaaatgtttgtggaataagtgcataaaatgttcttaacctttgattctacttacagcccatgatagcctcttagatataataaatttggattatactactttacaacaagaaaaaaaacaaactcgggactaaaaaacggagtgagaaaaaagggcaggaagacacaaattgacaacaacagtaacagagacacgaaacatcgacacaagagacaaaagcgggacccataaggaacggataaactagaaacaccgggtaacggtaagaacgacgacacaaacagaagaggaacacaccaaacaacgagagacaacaaacaaagacgaaaagaacgatacaaaacacaccaaaacccagagaggtcagcgaacatgaacacgaatnnnnnnnnnnnnnnnnnnnnnnnnnnnnn

SEQ ID NO: 19685 - DNA, 3395 bp, Homo sapiens
  misc_feature 1, 2, 3395: n = A,T,C or G
nnagaggcgcgggtgaattgctgcgggaagtgggaaactgtaagtgggaaactggaagtggaatctggtgctccggaaagagacgtccgaaagcggctctgggtctagattgagggatactccccctttccaccatgggcaagaagggcaaagttggcaagagccgacgagacaagttttatcacttggcgaaggagacgggttaccgttcccgatctgctttcaagctgatccagctcaatcgccgctttcagttcctgcagaaagcccgagccttgctggacctgtgtgctgcgccagggggatggctgcaggtagctgccaagtttatgcctgtatccagccttattgtgggagtggacctggttccaatcaagcctctccccaatgtggtgactctccaggaggacatcacaacagaacgttgtaggcaggccctgaggaaggagctgaagacctggaaggttgatgttgtgctcaatgatggggcccccaacgttggggctagctgggtccatgatgcttactcacaagcccatttgacactgatggctctacgtttggcttgtgactttttggcccgtggtggcagcttcatcacaaaggttttccgttctcgtgactatcagcctctgctatggatctttcagcagctgttccgccgtgtccaggccaccaagccccaagcctctcgccatgaatctgcagagatctttgtagtctgccaaggattcctggcccctgacaaggttgacagtaaattctttgaccccaaatttgcctttaaggaggttgaagttcaggctaagaccgttactgaattggttactaagaagaagccaaaggctgaaggctatgctgagggtgacctcactctctatcaccgtacctcagtcactgacttcctccgagctgccaaccctgttgacttcctctccaaggccagcgaaatcatggtagatgatgaagagttggcacagcatccagctaccactgaggacatacgggtgtgctgtcaggacatcagagtgttggggcgcaaggagctcaggtcgctactaaactggagaacaaaacttcggcgatatgtggccaagaagctgaaagaacaagcaaaggcactggacatcagcctcagctctggagaggaagatgaaggtgatgaggaggactcaacagctggaaccacaaagcagccctctaaggaggaggaggaagaggaggaggaggaacaactgaaccagaccttggcagaaatgaaggcccaggaggtggcggaattgaagaggaagaaaaagaagctgttgcgtgagcagagaaagcagcgggagcgtgtggagctgaagatggatctgcctggggtttccattgcagacgagggggagactggcatgttctccttgtgcaccatccggggtcaccagttattagaggaagtaacacaaggggatatgagtgcagcagacacatttctgtccgatctgccaagggatgatatctatgtgtcagatgttgaggacgacggtgatgacacatctctggatagtgacctggatccagaggagctggcaggagtcaggggacatcagggtctaagggaccaaaagcgtatgcgacttactgaagtgcaagatgataaagaggaggaggaggaggagaatccactgctggtaccactggaggaaaaggcagtactgcaggaagaacaagccaacctgtggttctcaaagggcagctttgctgggatcgaggacgatgccgatgaggccctggagatcagtcaggcccagctgttatttgagaaccggcggaagggacggcagcagcagcagaagcagcagctgccacagacacccccttcctgtttgaagactgagataatgtctcccctgtaccaagatgaagcccctaagggaacagaggcttcttcggggacagaagctgccactggccttgaaggggaagaaaaggatggcatctcagacagtgatagcagtactagcagtgaggaagaagagagctgggaacccctccgtggtaagaagcgaagccgtgggcctaagtcagatgatgacgggtttgagatagtgcctattgaggacccagcgaaacatcggatactggaccccgaaggccttgctctaggtgctgttattgcctcttccaaaaaggccaagagagacctcatagataactccttcaaccggtacacatttaatgaggatgagggggagcttccggagtggtttgtgcaagaggaaaagcagcaccggatacgacagttgcctgttggtaagaaggaggtggagcattaccggaaacgctggcgggaaatcaatgcacgtcccatcaagaaggtggctgaggctaaggctagaaagaaaaggaggatgctgaagaggctggagcagaccaggaagaaggcagaagccgtggtgaacacagtggacatctcagaacgagagaaagtggcacagctgcgaagtctctacaagaaggctgggcttggcaaggagaaacgccatgtcacctacgttgtagccaaaaaaggtgtgggccgcaaagtgcgccggccagctggagtcagaggtcatttcaaggtggtggactcaaggatgaagaaggaccaaagagcacagcaacgtaaggaacaaaagaaaaaacacaaacggaagtaagcagagctgccaggctcccaggagagcatggggactaggaggaagggtgtggcatggctcagtctggcccccttgattaccggcctagcccctgctcacatcacagctgtctgaagaacagtgaggtggagtgcctagaactcccgtggtggtcctgagcagagaggaggatgtcctcctgcctgcctgaaggtctcccatgaaaacactgctgaactgtgttgacactcatgaccctttttttaaaccgttaaagggaagttcggtgttggagcgatactcaatgtagtcagtctacacctggacgtgtgggccacttaagccctccccacccccatcctattcctaaataaaaccaggataatggaaaaaacaagaaaacaaaagacaaaaaaaaaacgaaaaacaaaagggggcgcgccaaaaagatacccgcgaggacacacagagaagaaacacaagttttagacaaaggtgtcccataagagaagtttataaaggcaggcagacgcgcgcgagtttaaaaaaccgcgatggtgagaaaccggccgtgagaactctgtggacgaggcacccacccgagggggcacaaatgagggagaaaacctgatcgaggattaagccccagaagaacaaccaacacagcagtaatggggaccccggcctactggtcgggagcaaaaggtgccagaatatttaaatacgcacgcgataacn

SEQ ID NO: 19686 - DNA, 423 bp, Homo sapiens
  misc_feature 422, 423: n = A,T,C or G
agtcgacccacgcgtccgcaaggaccatgttgtaccacagcctctgctgagctgagggacacatgtccttggtgaagacctgcacccctggaacctcccaccatcatcacaactgtgggctcatttgcagtggagaaaagaacccgacgtcccacagccagatatacacccagctccatgccagcccttcatgtttaccttttgctttgttaattacatgtcagactcctagagggcctccagactaataggaagcatttctgtaaccaacctgccacccactgattcagaaatggaaatcacattccacaatctatggcttccaccagctagcccaggaaatacttgaaatcagcattccaaaaaaaaaaaaaaaaaaaaaaaaaaaaaaaaaaaaaaaaaaaaaaaaaaaaaaaaaaaann

SEQ ID NO: 19687 - DNA, 2938 bp, Homo sapiens
  misc_feature 1, 2920, 2921, 2922, 2923, 2924, 2925, 2926, 2927, 2928,2929, 2930, 2931, 2932, 2933, 2934, 2935, 2936, 2937, 2938: n = A,T,C or G
ngaggccctgccaatgctggggactttggggaggaatttggtattctggtggccttgctcagctctcattgagatcttttcctatcagaatgttagtgaatatacttcgcagctctttgttcagcaataaggaatattctttcaattcctgctcttcaagccaatttactacacccagttgtctttccagaagttcatcccagcggtaatatgttggtgtttgttcttctttggatttcacatctgttttctggtagaagtgagcactgttcacttgtgcagtcgtcttattttccttcttcctagatgactcagctctttgtaaatgttgtgctcaacttctaggggccagttctagactttggagatgcagtgtctcccaggtgtgcacggacacctggtccgtggaaacaggtgtgatgggcacaggctgctgcccttctgtctggtcgggggattcctcttcttcaagctgctcagctaacccagaagaggggagagagtactccggtggttcccagagcccctcccgttgtgccgcttcgacctgacacctgctcgatgctgacttaggcttcctgccaccaagcaggaaactagaaagagaacatttcagtgtaaggtctgttcccgacagcatggattagcttccgtgttctgaagttgttcttttcatggtgtctgacaccgagggcgttgttcgtccatcaggcgggattggatggagtcttggtgttttgccttctcagggaccaaaaatgtatcattgactccttaacagtgaccttcctcccaaggacatatccgtgttcatttttcataggttttactcatattcataggtagattctgttaatgtgagttggaaagaaaagaccaatttgtacaccagtcacaccacaagacagtttatcatataaaatacctcaattttttgtattcctcatttccacctcacaattgtactggtgatgaattttaagggtctgtcctttagcttataggtgatgtttcacatctggccagattcttatacctccattgtatacttgaaaaggttcagaattacaggaacagcagtgagaatttggcccactaccacgactcatttgtttcattcacattcctcacgtgcaacaacataattatattttaagaaaatgtaactttgttacatcaaaatatgttgtctagtaaaaagttgatattcagtagaacaaggatcatgtaaataaacatctatttcacatgtacccaaaagcatttaaaaagcagaatccagggcccagagcatgagccagggaggaggatgtttttcttcttttctctatttttccctaaattgtgcaaacataggtgagtctcttaacctttctgtgcctcagtttttctacctctaaaggggtgggatggttcttcaaattgtttctaaaacaccggcactttcagcagtgttctggtggcctgagatgagagcaccgtgttcagaagtgcctgggagtggcacagtggaaactccgcttgcacggaccatggagtctgctcaggaccatgctgtaggacacacagcctcatgcgctgagaaagcaaaggaagtgctgggtgtaaagtttgcatgattccatgaagctttagttttcctttttttgttttaaaagaaagggttttatatgttctattgtaaaatatggaaattaaacagggacttcagaaagccgcacagaaagatcaccttctgatggtgtgatgtgctcctgacattcggccgaggtctgtattctgaaaaagatttaatggcctgtgaaacacgtggattctgttgcactggatttgtaataaatgacgctgaacttcctgcttccaagcagctcaaccctgatgctgaactgacaccaggcgaatgtcagggctcccaaaccactagtgccaaagggtcatgttgaaaagttcagaatatttatttgtcagaatataataattgccccccaccttagtatttttgcactttacagaaatttagatactgtttttcagtggcttgagcgttttgccttttcaaaggataactattattttcttgaaaatggaatataatcatgagaggaagaagatgtaaaaaatgtcaaatgttgattggttgtgtaaaagttttgtcatagacatgtattggggagcttccaattagcatacatagacacatgtgtcagtggccaagacctgcttatattttgctttatagatgtagtcatagcatgttgttattgcctcatgtaaataaaaaggctattaagttttccagtaaaaaaaaaaaaaaaaaaaaaaaaaaaaaaaaaaaaaaaaaaaaaaaaaaaaaaaaaaaaaaaagggggggccccccaaaaaaaccccccgggggggcccatcccccccacgtttttctggcgaacaaagggggcccccaaataggggcggcgtgctattaaaaaccacagacgcaggggccggcgtgataacacacggcgcgtcggggaaaacaccggctccgccgggcgacaccctgggagaaagacccccacctccgcgggggccgcgcaacttggcgacccacccacgacgaggatttacgcgcgggcggaacaaccctggcgcagcaaaccggtgacaccacccgcgaaaatgtcgtcgccgcggagaaaaacctcgccccacgcggagtatgatctgagacattttccaggcggggctctctatacacaccggcaccccaccgacacacacgcccacccagcccccgaccacgacgcgcacgccccacccgcccacgccgcccacccacacagcccgttacccaccccaccccacgccaccccccccgcagccccccacaccccctcgccaccaacgcccgacccccaccggcggcagcaagaccccaccaaannnnnnnnnnnnnnnnnnn

SEQ ID NO: 19688 - DNA, 1830 bp, Homo sapiens
  misc_feature 1, 2, 3, 4, 5, 1824, 1825, 1826, 1827, 1828, 1829, 1830: n = A,T,C or G
nnnnncaatagaagggcaccacttggatgaccacaggcacttagttttggctagttttgtctgatagttaagacatccccatcctagcttctgtgagagttaaaaatctcacgcgtccgggcaaggaaggctctgttaatttatagctgtttagaggggaaagcagtgcagaccacttattaagcccgctgaggactagctttctgtctttcatacatttgggaaagataggaatgactgtttcaaagaagagaggtgcacataatttatgcaggcaagtatgatacttatttcattggttttgtgagtcatatatatacatatatatatatacacatatatatatgacttgaaaattaagatttaatactttaatgttttaagtgtggggggtttgggaaggaaggaatgtaatattatggatttagccttaggctttaagttttaggctggcaaaagaaatgttattcagtgggtttgaggtttggactactttcttcaaacttagagaattataacaggatggtgtttactttgttcacctggatgtccccaagactctagcttcttctatcagtggttggtctgatagaagaggtaaaaattgctcttgaaaatgtcctacaatttatgcagtttctttgataatatttttctgtttaaatccctgcttctgtttttggtctgttacctaaatatagttcaagtttaattctgtaagagcaaagaaatgaatttgatgaggaaattaagcatccaatggaggattggtcttgaagaccttaaaggtgctttccaacctgcactgctccagtgaaatgtggtacttttttcttttaaaagcaaccaagagagctgggaatatctgtgtacgcaaagtaattgcattttgtcccttcattttgactttcttagattcataatttgatacagtgcttaaacttccaaggaaattttaaacaattactacattacctgttcaaaataaggcttgttggaaatcctagtccatcaactaatttcaaaaatttatttttgatatgagtagcaacagctggtcatataccctatcccaaaaggaagaactgtcttgaacaagatgaatggaaaattgtggttaattctgaatttcatgtaatgacaacatattctttcataaaactatggcctgtttaagatggaactttgtgtgtgtctgctggggagggtggggtacatgtgtatggcgtgtgttcttgaaatgatgtctctctgaatatccaaaaaagtactgtactgtagaaatgctctttgaaaaagtctatcgactgaccatgatcaatctagcatatgtatgttcagtgggctagccttggtcctcagggacagtgtgtgactctagtggtcttcctaaccagtctcttgcctaaagatatctgggacctctactggctttaatgacaaataatgttatgttgaggttatgcttcctttgttatttgctgattttcctactaaatgtagcatttcaattagatccagctttcacattttgagataattgtaaaaagaatgaaattatgcagaaatggccaatatctcttatcaatctgttcttttggaaaccctcatgtactataaattgtgtacagttaaaaaaatatatatatatatatattcttacatgagtaaaaagcaccctctcccagcaatcgtatgccattggtatttgaagaatattgtgtcggggcctgcgcccacaagaaaattcttacaacacctctttgggcgccgcgcccaactgtatgtactggtcaaggggtcccagaagaccgggacagaaannnnnnn

SEQ ID NO: 19689 - DNA, 870 bp, Homo sapiens
  misc_feature 869, 870: n = A,T,C or G
ggcctgggccgggccgtgacggcggcgctaggacccggcgggccgcgggtgcggcgaggcctgggcggcctgaggagcgcggaccccggcgctcggctcccggcgccatgtgagggggctcgggggccgcggggggccgggcgctccccgccggaggtgtgaacccacatccctgcccccagggccacctgcaggacgccgacacctacccctcagcagacgccggagagaaatgagtagcaacaaagagcagcggtcagcagtgttcgtgatcctctttgccctcatcaccatcctcatcctctacagctccaacagtgccaatgaggtcttccattacggctccctgcggggccgtagccgccgacctgtcaacctcaagaagtggagcatcactgacggctatgtccccattctcggcaacaagacactgccctctcggtgccaccagtgtgtgattgtcagcagctccagccacctgctgggcaccaagctgggccctgagatcgagcgggctgagtgtacaatccgcatgaatgatgcacccaccactggctactcagctgatgtgggcaacaagaccacctaccgcgtcgtggcccattccagtgtgttccgcgtgctgaagaggccccacgacgtttgtcaacccggacccctgaaaccgtgttcatcttctgggggcccccgaagcaagaatgcagaagccccagggcagcctcgtgcgttgtgatccaagcgaagcgggccttggtgttccccaacatggaaagcatatgccgtctctccccggccgcatgcgaaaatttttgacgaacctcttccgggggtgaagacggggcaaggacagggaagaaagttctcattcnn

SEQ ID NO: 19690 - DNA, 1360 bp, Homo sapiens
  misc_feature 1345, 1346, 1347, 1348, 1349, 1350, 1351, 1352, 1353, 1354,1355, 1356, 1357, 1358, 1359, 1360: n = A,T,C or G
gcgtccggccgtcacccctgaacttccccgttcctcttctcggctgcctccttttccgttgtcccttcgcgccccaaaccacatcctggagcgcactctccagcgtggctggcagcggggacggtgcgccggggcgcaggcccaagagtcgcgtgcgcggccccttgcaccatccccccgggcccacccccgggccgcgctgattgggcaggtagggactctgcccagcggaaagttttgggtgccgggaggaagtctaacctttgggagactccaagacagcagctccgaggtcggcgggggtctgggtggccatggaggagccccctgtgcgagaagaggaagaggaggagggagaggaggacgaggagagggacgaggttgggcccgagggggcgctgggcaagagccccttccagctgaccgccgaggacgtgtatgacatctcctacctgttgggccgcgagcttatggccctgggcagcgacccccgggtgacgcagctgcagttcaaagtcgtccgcgtcctggagatgctggaggcgctggtgaatgagggcagcctggcgctggaggagctgaagatggagagggaccacctcaggaaggaggtggaggggcctgccggcagaccagagcccctccggccagaagggggagcgagactaagggcatgttgcttgacaggcaacgccaagaaaactcaagatcgcaagctcctggctcgtgtcaggacgaagctgaacatgctaacaagagtggccctgactcacaaccaacagaatcgcccctgccgcatgacgcacacacaccatgccgtcggctcactatcatcaccacaaaaatgtctaacaacatcacaacacaccacaacgaaaaacaactacttaaacaaaaccatatacactatctaaccatcaccgcgcaacacgaactatcaactccaaagacataaacaaccgccaaatatcacctctactctctattaaaaccaacttaaacaaatgcactgagccaacaacacctccaccttgccacatcaactacaccactccctctacaccaaacatacccttcaacccacctcctccaagagcaacacgaactgcgccagacatgcccaggacaggacgagaacaaaacaagaaagcggcggacacacgaccacacccacccgcgagtcagcggagccaacagtccaaccaccaacgaacagcagtaaacgcaccgcactaccacgcccacacgccgcgcacaccaaaagcccaacctagacatcaaagacgaggtgagcgtcaccaaccgcgcgagaccaacaaaccacacgccgcacccaacccacgannnnnnnnnnnnnnnn

SEQ ID NO: 19691 - DNA, 3823 bp, Homo sapiens
  misc_feature 3822, 3823: n = A,T,C or G
cgacccacgcgtccgcccccgccccccaaccccgcaggaaaacacaggcccctccggctttcgctctcgctctgggaactggaaggacccccgactcccgcgcagggtctggggttgtgcgcgtcgggttgcgtctccaggccgggggcgtcagggagccgggggcggggacgggcgcgggcgcagcggaccgggcggggccgagccgggaagctggtcggtgcgtcagcctcacgcggcgggaaggaaccggtccgaggccccgggctgccggcgcgggcgccgcggcacgtccacaggctgggtcgcgaggtggcgatcgctgagaggcaggagggccgaggcgggcctgggaggcggcccggaggtggggcgccgctggggccggcccgcacgggcttcatctgagggcgcacggcccgcgaccgagcgtgcggactggcctcccaagcgtggggcgacaagctgccggagctgcaatgggccgcggctggggattcttgtttggcctcctgggcgccgtgtggctgctcagctcgggccacggagaggagcagcccccggagacagcggcacagaggtgcttctgccaggttagtggttacttggatgattgtacctgtgatgttgaaaccattgatagatttaataactacaggcttttcccaagactacaaaaacttcttgaaagtgactactttaggtattacaaggtaaacctgaagaggccgtgtcctttctggaatgacatcagccagtgtggaagaagggactgtgctgtcaaaccatgtcaatctgatgaagttcctgatggaattaaatctgcgagctacaagtattctgaagaagccaataatctcattgaagaatgtgaacaagctgaacgacttggagcagtggatgaatctctgagtgaggaaacacagaaggctgttcttcagtggaccaagcatgatgattcttcagataacttctgtgaagctgatgacattcagtcccctgaagctgaatatgtagatttgcttcttaatcctgagcgctacactggttacaagggaccagatgcttggaaaatatggaatgtcatctacgaagaaaactgttttaagccacagacaattaaaagacctttaaatcctttggcttctggtcaagggacaagtgaagagaacactttttacagttggctagaaggtctctgtgtagaaaaaagagcattctacagacttatatctggcctacatgcaagcattaatgtgcatttgagtgcaagatatcttttacaagagacctggttagaaaagaaatggggacacaacattacagaatttcaacagcgatttgatggaattttgactgaaggagaaggtccaagaaggcttaagaacttgtattttctctacttaatagaactaagggctttatccaaagtgttaccattcttcgagcgcccagattttcaactctttactggaaataaaattcaggatgaggaaaacaaaatgttacttctggaaatacttcatgaaatcaagtcatttcctttgcattttgatgagaattcattttttgctggggataaaaaagaagcacacaaactaaaggaggactttcgactgcattttagaaatatttcaagaattatggattgtgttggttgttttaaatgtcgtctgtggggaaagcttcagactcagggtttgggcactgctctgaagatcttattttctgagaaattgatagcaaatatgccagaaagtggacctagttatgaattccatctaaccagacaagaaatagtatcattattcaacgcatttggaagaatttctacaagtgtgaaagaattagaaaacttcaggaacttgttacagaatattcattaaagaaaacaagctgatatgtgcctgtttctggacaatggaggcgaaagagtggaatttcattcaaaggcataatagcaatgacagtcttaagccaaacattttatataaagttgcttttgtaaaggagaattatattgttttaagtaaacacatttttaaaaattgtgttaagtctatgtataatactactgtgagtaaaagtaatactttaataatgtggtacaaattttaaagtttaatattgaataaaaggaggattatcaaattcatatatgataaaagtgaatgttctaagtctctcaaactagcgttttatgtaataatatgtaatataaataaaactatggtaaatgtgacaagcatttaataggaaaatgctaaggaggcctcataaatgacccataattaccaacgtagaatttttcagtacatttagggttgctggatttagcaaataaaaataaagattgcccagttagatttgaatttcagataaacaattagttttttaatattttacatggaatatttggaaaatacttatactaaaaaattatttgtttgaaattcacatttaactgggagtcttgtattttatctggcaatcctaaaatacattggtatgaaacaaatcacttttagaagtatattgctattttgattgggttgtttttgtgtgtagaaacgtacaataacaactcaaaggcacaggagatttctaaacattgtgaaaagttgaatagattatatatttattctcataatactttcactaatactaaataaaatttggggaacactttttatttttatataatttccaatttacagaaaagtttcaaaaatagtacaaagagctctcttacccagattcactaattgttcatacgtgctttatctttcatgctttctctgtacacacacacacacacacaaatttttcctcaatcatttgaaagtcagttataggcatcatgccccttaaaccctaaatacttcagtgtgtaatactgaataattactaaaaatgattttctcagaaaaaaaaactcccacaattctggaactataatactgtaagccttagaataaataatactttcaagttccaatctaaagttctttttgagttttgttgcccgttttatgcttgatgtgtatagtaatagggtaggctatttattttattaaaattttttttagagacaaggttttgctgtgttgcccaagctggaacttgaacgactgggctgaagtgatcttcccacctcagcctcccaagtagctgggaatacaggtgtctgccaccatacccagtttcatttttgttttttatacccgaagttcatttcctttgtctccctaaaactgaactgtaattttgggaggttttcattagtggaagctcttcatttataaagctatttgaaggggtttaggaatttatatcacatggtaattgtagagaaaaagaagctatatacctcaaaatcgtgccctctttacatatgtcttatcaggtataacatgttgaaatgtcacattagtagtaaagtggggtttatttatatagtggttaagaaatgtcagtttacactgctgtatacttcttcttctgtgtccctaaggcctggtacagtgccaagcacatacttggtatccaataaatatttgttggatgaatgtatgcatatgtattcagtatattttaaatgaataatcacagaagtaagtttaataatttgtcctatttttctctgtcacttcctttttctctaaggcaggaaaggaaagacattaaaccattaattaagtcaatcctcttggagactcaaaagactatgaagtgatcactctatttaaaatattaatacagtgtgggttcaaatggccattttttgggtgtccctctctctcatcttatgcttcccttccnn

SEQ ID NO: 19692 - DNA, 1250 bp, Homo sapiens
  misc_feature 1, 2, 3, 4: n = A,T,C or G
nnnnagtcgaccacgcgtccggggtgttggtgcggcgctgttggggtcctccgctggctcatggcgccaggcgtgggaggccgagtccccagtggcgagcactggcccgactcggctgggaggactgccgggactccagagtccgcgaggcgctgcgggcgctgcacgccgccagggaaaacaaagaagaagagttaatcgacaaactggaggtggtcacaatgccttccccatcaccaaaaggactgccagtgaagcaatatgctgtgcagtctcagcttcccgtatatgagtggccggatgtgggatctggagaatatgatgttggagtagtggcttcgtttggccgacttttgaatgaggctcttattcttaaatttccctatggcatattgaatgttcatcccagttgcctcccgagatggcgtggcccagcccctgtaatccatacagtgcttcacggagacacagttactggagtaacaattatgcaaattagacctaaaaggtttgatgtaggcccaattctcaaacaagaaactgttcctgtgccacccaagagcactgcaaaggaattggaagcagtgttgtcaagactgggtgccaacatgctcatttcagttttgaaaaatttgcctgaaagtctgagcaatggaaggcagcagccaatggagggggcgacttacgcccctaagatttctgctggtaccagttgtataaaatgggaggaacaaacttcagaacaaatattcagactttaccgtgccattggaaatataattccgttgcagacgctctggatggcgaataccattaaacttctggatttggtagaagttaacagttcagtccttgctgatccaaaattaacgggacaggctcttattccaggatcagtaatataccacaaacagtcacaaatactattggtttattgcaaggatggttggattggtgttcgatcagtgatgctcaagaaatcactaacagctactgacttctacaatggatatttgcacccctggtaccagaaaaattcccaagctcaaccaagccaatgcagatttcagactctcagacttccaacaaagaagaagcagaaaaaaactgttgcttttgcaacaatgcattgagtagttaggaagaagatggataaaaacctattacatatttgtaatttattaaaaaccttttttcagggagatctcggggttcacacaaaaagggaaaaaaaaaaaaaaaaaaaaaaa

SEQ ID NO: 19693 - DNA, 3077 bp, Homo sapiens
  misc_feature 3073, 3074, 3075, 3076, 3077: n = A,T,C or G
gcgtccgcccgtccgtgcagcttgggcccgcggcggcggcaagggcgggagggagcggtcgccgcgggatttggagctgcctagcctcgcggtcgctttggcagcatgtaagcagctgtttgccaagaacccaggtcactgctaagaaagggtgccttcgggagaagagtgtccagaggataccaatgccagatgcatctggagttacactcagcactcgcagtatgagacattgtgtgccagcatctctttccttctggcaaagactgtagctctccaggtaggaggatcctggaagctgtgagcaccaggagccttgccagaggaggatggggccagatatgaactctctaccatgaacatggttctcggcttatgaaggaattttaagtaaaacagttatttaatttccacatattcaagtcaaaagccttctgtgtgaagtgccagtgattacccctccacaggagttatcaggatttttctggcaccaagtttaattcttcttcgtacttctggtagtgacagatctgcaggacagatttatctgttgaatgctcttgggcaggaaaaccatgtaaaacctctggaagcagcatcaggacagcagagcagagcccccgtcctcactgctcacttgcacagaaactccatctggactcggatgcttttactgaagacccatctagcttcaatcatctttagagtccatccattctggagagacctggcgtttgcagttgcctcctgtggccgtgtttttctgtcattctgttcccaggccttctattcaggcggttgaagggtgtggactttggaatggggtttgctgttcttcgggaacttgcttcctttccctggctggtgctgtcaggaaggaccatctgaaggctgcaatttgttcttagggaggcaggtgctggcctggcctggatcttccaccatgttcctgttgctgccttttgatagcctgattgtcaaccttctgggcatctccctgactgtcctcttcaccctccttctcgttttcatcatagtgccagccatttttggagtctcctttggtatccgcaaactctacatgaaaagtctgttaaaaatctttgcgtgggctaccttgagaatggagcgaggagccaaggagaagaaccaccagctttacaagccctacaccaacggaatcattgcaaaggatcccacttcactagaagaagagatcaaagagattcgtcgaagtggtagtagtaaggctctggacaacactccagagttcgagctctctgacattttctacttttgccggaaaggaatggagaccattatggatgatgaggtgacaaagagattctcagcagaagaactggagtcctggaacctgctgagcagaaccaattataacttccagtacatcagccttcggctcacggtcctgtgggggttaggagtgctgattcggtactgctttctgctgccgctcaggatagcactggctttcacagggattagccttctggtggtgggcacaactgtggtgggatacttgccaaatgggaggtttaaggagttcatgagtaaacatgttcacttaatgtgttaccggatctgcgtgcgagcgctgacagccatcatcacctaccatgacagggaaaacagaccaagaaatggtggcatctgtgtggccaatcatacctcaccgatcgatgtgatcatcttggccagcgatggctattatgccatggtgggtcaagtgcacgggggactcatgggtgtgattcagagagccatggtgaaggcctgcccacacgtctggtttgagcgctcggaagtgaaggatcgccacctggtggctaagagactgactgaacatgtgcaagataaaagcaagctgcctatcctcatcttcccagaaggaacctgcatcaataatacatcggtgatgatgttcaaaaagggaagttttgaaattggagccacagtttaccctgttgctatcaagtatgaccctcaatttggcgatgccttctggaacagcagcaaatacgggatggtgacgtacctgctgcgaatgatgaccagctgggccattgtctgcagcgtgtggtacctgcctcccatgactagagaggcagatgaagatgctgtccagtttgcgaatagggtgaaatctgccattgccaggcagggaggacttgtggacctgctgtgggatgggggcctgaagagggagaaggtgaaggacacgttcaaggaggagcagcagaagctgtacagcaagatgatcgtggggaaccacaaggacaggagccgctcctgagcctgcctccagctggctggggccaccgtgcggggtgccaacgggctcagagctggagttgccgccgccgcccccactgctgtgtcctttccagactccagggctccccgggctgctctggatcccaggactccggctttcgccgagccgcagcgggatccctgtgcacccggcgcagcctacccttggtggtctaaacggatgctgctgggtgttgcgacccaggacgagatgccttgtttcttttacaataagtcgttggaggaatgccattaaagtgaactccccacctttgcacgctgtgcgggctgagtggttggggagatgtggccatggtcttgtgctagagatggcggtacaagagtctgttatgcaagcccgtgtgccagggatgtgctgggggcggccacccgctctccaggaaaggcacagctgaggcactgtggctggcttcggcctcaacatcgcccccagccttggagctctgcagacatgataggaaggaaactgtcatctgcaggggctttcaccaaaatgaagggttagattttatgctgcgctgatgggggtacaagggagggaaaagccagtgtgcgctatggcaggggaagggtgtgcaccggtacggaaccctgatgggcggtgagtgtgtggtccctgatagggggaggggccaccaggggggggaaggcgggaagccctcttaagccaggggaaaagaggttgctaagagaaaggatcgccacttacgtcctgaannnnn

SEQ ID NO: 19694 - DNA, 1917 bp, Homo sapiens
  misc_feature 1, 1915, 1916, 1917: n = A,T,C or G
naggtgtatgaaaacattatagactggtattttcaattttcatttgcaagaaaatgatcagtggaatgaaataactgaagtataacagaagatatattttttaaaacggaaagcctttgcactccagcctgggcgacgagtgaaactccatctcaaaaatatatatatatatcaattaccaactaaaaacataactccagtttggcagtttgcatattataaggagataaatgttaaaacatacttgactactttcagaaatgttctcctggtactttttgcatttctacattcagataaaaagatttgcatgcacctggctaacgccaagggaacttcatttttttcttcactattatgcactttcatggtatagtctttctcagttcttttaatttttgttatttaacatctttaatagcacagcaaacatcttttcagaaattttcagttaaagcctttgaattacttatctttgatttaatttacagccagcattttgccacgttctaaataatatttagctcaactgattcatacgtattaatgaccattctagcaaaggcctacaagtggtgtgggaatcagggaaaggctgcctctttggtatctcaactggtattgattattgctatcaactatttggggagaaaaaatcaaaatgaagccctgtcaaattttagaagtactatctttggtccttcaaacactttgtgatgacaccttaagaaaaataaagttgaagttcaggtcttgccattgccattacagacaaattaggagacttggtttacctgggaacaaatttacttgaatattcagtacctgaaactatgccaaaccaaagagcagctgcagtacattcgttattttaaatgaacaagtttacaaagtttattttcatctatacgtaaggatgatttttttaaaactttttacatattagtggttatgatccaatgtgtcatgagtgaatttaactgtaaggtggtttaaatcaaatatgcaatgtttacttgaattgtatttctattagcagattttgactatgtttacaggacggtttaaattaaggattatcaggcatgtgagatctttcagttatctttaaagtagatgtatattaagggcttagatttaggatctacatattctgggcattgaataggcagtaacttacaaataagttttgcttaccttttgttctagggactagcactgctatcaatggaaagtatttttaactaatctgttattaagaaagtcatatttttgcatttcagccaaaataaagaccgcctgtaataatctgttagaaacagataatacatgtctgaaatccatatgtttcatatgatctaaactgtattttccaatttaaattaaaaatgtaatatagattcagaaaggttcatatttttctaatgacttcattctatattattttgttaggttgcataaagaagcaaggaattgtacttgtattaaaagatgaagaaagctattaggtatatttgtacatgactgcaaatgagtctatgcccgtttaaaagaaaagatggacactattttaaagtgagctttaatatgcttttatataaacaaatttgaagtacagtttagtttggttgtgtttacctaacaagtaccataagccttgtgtttgttcttatttgtataatcctagcctgtgacttaatgttgatgctttgctttgtcttttggctggcctaacctacattgacatgtacacagaacattttaaaactttttttttcaaaagtcataatgaattactttattaataaacaaagtccaaaaacacaaaaatgtggggccccccgagaaattaaacacggtgggggcgccggagaatgacacgtcaacacgcgaaggggtcaacaacgggggctannn

SEQ ID NO: 19695 - DNA, 1759 bp, Homo sapiens
  misc_feature 1758, 1759: n = A,T,C or G
gtgcgtgccgtgcgtgagcgtgcgcgggcgcgtcggccggcgagggagcagcaaacggccggcggcgggtgccgcgcggggggcgggcggcgcggagtaggtggcggcggccatggccgaggcgtcgccgcatcccggacggtacttctgccactgctgctccgtggagatcgtcccgcgcctgccggattatatctgtccaagatgcgagtctggttttatcgaggagcttccggaagagaccaggagcacagaaaatggttctgccccctccacagctcccacagaccagagccggccaccgttggagcacgtggaccagcacctgttcacgctgccgcagggctacggacagtttgctttcggcatcttcgatgacagcttcgagatccccacgttccctcctggggcgcaggctgacgacggcagggaccctgagagccggcgggagagagaccatccgtcccggcaccggtacggcgcccgacagccccgcgcccgcctcaccacgcggcgggccaccggccggcacgaaggcgtccccacgctggaagggatcatccagcagctcgtcaacggcatcatcacgcccgccaccatccccagcctgggcccctggggagtcctgcactcaaaccctatggactacgcctggggggccaacggcctggatgccatcatcacacagctcctcaatcagtttgaaaacacaggccccccaccggcagataaagagaaaatccaggccctccccaccgtccccgtcactgaggagcacgtaggctccgggctcgagtgccctgtgtgcaaggacgactacgcgctgggtgagcgtgtgcggcagctgccctgcaaccacctgttccacgacggctgcatcgtgccctggctggagcagcacgacagctgccccgtctgccgaaaaagcctcacgggacagaacacggccacgaacccccctggcctcactggggtgagcttctcctcctcgtcgtcatcgtcctcctccagctcgcccagcaacgagaacgccacaagcaactcgtgagcccacgtcggccgtcgggaaagcacggggcctttcccacccaccctcagccagcgccacacggcacccacagactgggtgccccggcggcgccacgcttggctggtcagcgctgcaggtcccgcctgttccagggcaggacccgggcccggcccaccggccccctggcttgggaaggcgtgggccacatggtcccctctggggcgtccccagcctccccgtcctctgtctaacctcaccctctaaacgttcagcggtggaaagatttttataattttaaattattactgctttgaaataaacggacgtttgagctcacgtggcggccatgcatggtttgtggcggaagacggggcccagcggctcccccagcgctgaagcacggggttcagcggctcccccagtgctgcaggtgccgccaggacgggccacgtgggcccccagcctccccctcggccgcctccacgacccggagtaggggggctcgggaccatgaggatgaccagcaaaattcaagaacaaaactgctccaacagacttttttaaaggaaaaaatatgtgtatcttgaaagctatttaaaatacactacttacaaagagaaaaacaaaaaaaaaaaacctcgggcactaatcggcgccgaacagggactaaaggcaggacaatggtcgcaccatctgttaaggaaaagcggcccataggggtaatcacnn

SEQ ID NO: 19696 - DNA, 2560 bp, Homo sapiens
  misc_feature 1, 2, 2543, 2544, 2545, 2546, 2547, 2548, 2549, 2550, 2551,2552, 2553, 2554, 2555, 2556, 2557, 2558, 2559, 2560: n = A,T,C or G
nnacgcgtccggaaagggcagagaaatctgttttggatggctggaaaataagtgaaaaggtttttagggaaagctaacaagctttcaaagatttcagatctgccagcattcattcattaaggcatgggattaggccaaaagagcctcctaccaagggagagacaggaaccatgtaaggagatctgtgagaccgcagtggaagagtattgaaatagaagccagacctgtagacgtatttgttaatatgtgtgccaagccaaagtacaggaggaggcttggaggcttggagttgtggtggaagcaggttctgaaaagcagaactctgaagctggctcattctcaccaagtcatctggcccagcctcccgcctccaagcacatcctgcctgcagagggtctggctagctgccttttcagctctcgagggatagagattctacaacctccctctgtcatcagttccagagccactcccctttgcactagaagttcttgctttcaaagaatgagggtgtgagggagggaggggtcaagaaacagagtgacaggggaaacaggcagaacaagtcagggcaaaggaccccagcatgaagagttgtggaggtggaggtggggaagcagcctcacatctcacacttccttccttctcttaaatgtgagcagctgactccaagccttgtggaaactctagaaggtagaaccagccatctggggaagctggccttacagatgccccgtctggcatagtggaggttcctgtgctctgagaacgcagtgtgaatctagacatccactgcagcctgggaagagctgtgttttcttcaaaagtctttaactttcacagtcacccctctaaagaaatgttctctgattgaaggcatgcttctattcctactttattgtgtttcatgcattctgccagagtaattacttttcataccaattcttggatgcagagaaatctctggtagtctaaggggatttcgatccaagtaaagctactatctcctattccatccagacttttccgtctgcctccattctctcagtcacatacctagaagcaagccagaaagcctgtccaaccaaaatcactctccaaagcccaagcactttattgttctccctgtctgttatcgagccaaggtgtatttggcctcattttatgccattagttgtctggctttcatggctctgcaccacattacagtcagagcaggaaggccagcagtggagatagaattatggcagaaacccagagtagaggcctctgctggtgagggagcctgcagcactctccacgctggtgggtcctagcatgcccaacagacccccatcccttcccatcagccttgggccttgagtctcattccaactcatcccctcccctttcccttctttccagtcccaggtgacacttgatgcctctgactcctttgaagagggcatcaagaagtgaaagaacaaagtccttttctgttcgggatctgggcccatcctgggagaggtttttggcagaaatggctgcagtggaaccctctgactgccagggtgaaatagtgctccagcaggctgcggtagactcgctgccagagtgggtcaggactggcccagaggacagggtcgtctcttgagagtcctcccagctccagggcctgattttaaagcagtaacacgaggatataggttatatacaggctcctggaaggcaggtgccgcagctcctgtgacaccccatatgcctgagcaagcttctccagcacaagagatgatgcaagtatgaatgggtacggggggagcttaaaacctgccaacactgagacttgatgccaggggccgtgcacccgctctgccacctgctaggtctgtgcaatggtcagagcagaggtgtgtgatgagttcagctcccaagcacatccacacttaggaagtgttctgtgtgtttttaaataatccttaccatgtaaagattgtattacatttgtatacaaaatttttttgcattttacttttgtaatatttggggttttatagatttttattttatggccaagtatacttttgtaaggaaatgttgaagtcttgagtatttttattcttttaaaaaactatagttagtgtcaactgtgagcactgataaatattattcatgtgtggttttccttctttttaatccagactttttaagaaactgttttggcatagagctttacttaaaatgctgcttcattttacacattgtgaatactgaagattctaaaaaataaagatgcatttaaaatctctgtgctgttccattgtagaaatggtaatgtgcattgctttgccaaagtggtaattaaatgtttaatggtttagaactcctagttcacaacagggcttctcgtcatcacttgcagcgtgtgagcttccaaataagccgccatttctttggaaaacgcacgcacttaggcatggcgatctcctgttccgttaggaaatacggttatgttgacattatggttactgtgcttgtggttttgcaataaacatgtattgaaagcnnnnnnnnnnnnnnnnnn

SEQ ID NO: 19697 - DNA, 4448 bp, Homo sapiens
aacattttctcaagtttattgtaagaacatagcatataatatacagaccatacaaaacgtgttaatcaactgtgatgggtaaggcttcccatgaatagtaggctattagtgcttaagttttgaaggagtcagaagttttatgtggattttcgactgcacagcagtcgggggtcagtgtccctaacccccccactgttcaagggttagctgtactatatgatgagatgtgcaacatggttttgataagaggcagcaagggtttaggacattctgtggcatactggccacatagcgatttgcatcaggtcagatattctaagtctagaaagcctgtgggatagctctagaggaggagcagagatgaagcaacgcaaagatgcccttgttcgtctgcaaaatttagggtctctgagtgagacacagctcaagggggggactgtgagcatttggggaagggggttctgtccaaccaggcaaagcggggagtcatggctatcacagccatcttgccctcacattcaagaacttaccatcatagggacactgaagttatcttctcatatggccatataaagataggatgttatgtattgactatcccacagatgtatgcctcttctggtttatgttgatatggagagaagcgagttcatgtcattcatatcttaattgccctcagtctcacagaaggcgattatgaggccaagagcctgggagatgcagctcctgggtttccagccctcagcccccaaaaccttaggcagcagggattggagcaggtggtctgaggtcccttctagcttcagaagtgtcataatcaaataccaggaatgactctttggttacttttttaacatagtttgcacttaaacccttttcagtagtaagcatcttagagacagactgaaaatgtgatgttcttcttgaaaacaccctttcccatgtcatcagtctgtggtgtttggtgactgtccccttccccactgtgcgagtacttccctcagggctgctctggtgatgctacctggcgtgttttttcttttcagtgccgaagacgcagatgaaattcagcatccagacgatgtgccccatcgaaggcgaagggaacattgcacgtttcttgttctctctgtttggccagaagcataatgctgtcaacgcaacccttatagatagctgggtagatattgcgatttttcagttaaaagagggaagcagtaaagaaaaagccgctgttttccgctccatgaactctgctcttgggaagagcccttggctcgctgggaatgaactcaccgtagcagacgtggtgctgtggtctgtactccagcagatcggaggctgcagtgtgacagtgccagccaatgtgcagaggtggatgaggtcttgtgaaaatctggctccttttaacacggccctcaagctccttaagtgaattgccgtaactgattttaaagggtttagattttaagaatggtgctctttcatgcctattatcagtaaggggacttgtattagagtcagagtctttttatttaggccagttgtcaagtgtcaataaaagcatcatgtaatttatggttttcattttatttaaaattcagcaaaatcatacgccatctaccgtgatgactgccaactccatggcagaccctttctgggattcaaaaaccaattcatcagatcgctgcctctgagggatgtacagattggctggggagctgagtgctacaataaaggaggaagtaccggggaacagtgcagggcaaaggcaggaaagagatctgagctgcctggagatcatctggggtgcggagtacaaagctttgcaagggtgtggttttggaatgacgctaaactgaaggtggagagaacagataaaaaggttggaagttgcacactgtacactgttaagaagttgagcttttatcttagaggcagcagaaggtttggagccaaggaatgaaatgatgaggcgtccttcaggtaatgaacttcagctgcagtgtgaaaggggcaggaagactggcagctgtcaaaactggaacagtccagtgagtatgtgcaggcccgggcttgggcagtgacgagggcagggagcacacatcaatttctgcggtagaaccttctagaggaagaccagacagagggtcaacagagttgaaaggagaaaataattgaggatgaggtccaagtttttagtttcagagactaggcatatggttaatatttaggtaggaaattcaggaaaaggagcttgtggggcaggaagggaaggaacggcagcttggggcactctgacatctttaacaagtcttgtaaaggcttactaaatacaacgaagcattgtaccaactataccctaataaagattaaaaatttacattccagttaactaccttaaaagttaagtccactttcatcccacgcccccatcctttccgtcatccctcacccctttgtcttgagaaaggaggtttagctgcttctttagttctgcaatttctttttcttgctctattatcttcatctgtagggtgaggttaacatttccagaattttggaaaagttcactctgcagcagctgaatggcagatggtctctgcgatgagttccttctcgttaagtgctggatatacttggcttgcactggacaccttttacggagggattccggcaactgaccagttcttaaacctgttagaacttctgctcgctccatttctgttccaaacggctgaaagagctctagcaggaccacacccaagctgtacatatctgacttggcatcatactcagatccttccaactgttcgggtgaagcgtacagacaagtacccactctggacgtatgtgttggtgttctcttcccgtttctgttggtccagtctgtgttcttctgtaggatgtctgtgcaggccagaccaaagtctcctatttttacttgctgatcagggccatgaagaaaaatatttcttggcttcagatctcggtgcacaattcccatgttatgtatgtaaaacacaccttctaccaattcttgaaaaatttttgttgcaacattggccataacataaggacaggcagactcgtccacatactcccggccccgcttgtttctctcgactatccaatcccacagcgagagctcacacagctgcatctggatgtgcagcatcaggtggtactgtgcctctgtctgacccaaaaagttgacattttcttcggaagattcttcggtggatgtgaaactctcctctaggtgggaattacgcctgagtggcagctgctgttccacaattgaactggcagacaaaccagccaagccattttcctggagctccagggtcgactcaagttcaccagattctcttatgactaaattggtggtgtacttcaccgacttgttattctgattttcagtgtcagattctccaaagcgtttttctttttctggggtgggctcagcaaagataatggatgagctgctactttcatcatttttaacaccacattgctctctgtcctcttcctggtcggagagcacttccagagatggcaactcaatggcagctctgtctgctcgtggctgaatcacatgaacatgttctatccacgcggtgtgatagccaacaatattggggtgctgaagacctgccagcaccttcacttcccgtaggaccttcatgcaaactgttttagttgcacccttaatcaggattttttttattgcataatactgaccatctaatttattcctgaccttgtatactcttccgtatccaccttttcctaagatggcaagttcttcaaattcatttaagtaacgtgaagtttgtgcttccaaggctacttcccttgatctgattttctggatacgagaaatatcctcacaaggatcctgacgaactctctctttagcagacctcattaagtgagtaatagctctgttgtgatgtagtctcaatgagctaaactcgtcactacaagtgaaagaagacagcagccccattttgataaacgtctggcaaagtagcttaaacacctgtcttgaacgaagtgggtttggttcatgcacgtggctcaagtgctccagcaaagaaaccagcaagagttggtttgcaactgcaaaagggaaggttggctgttgtaggggttcttttaacacctggatttctgctggaacatcagattcgtcatattcggggtccgggccctcggcgggaaagtcgatggccggcggcgcagccacagccccagccccgtcgccctcctcttcgcgcttgcggaccccggagttgcccccctgcatcgccggccgcgcgcgggccgcagcccagcccgccggccagcccagcactgccacactccgatgctgcagctagcgccgtccgacccggaagtaacccctcaccagacggaaaaccagccggacgcgtgggtcgact

SEQ ID NO: 19698 - DNA, 1704 bp, Homo sapiens
  misc_feature 1610, 1702, 1703, 1704: n = A,T,C or G
actcattgtttactacagtgggggacatcaagggttggaaggattataaagctttaaggctgggcgtggtggctcacgcctgtaatcccagcactttgggaggcgaggtgggcggatcacctgaggtcaggagttcaagaccagcctagccaacatagtgaaactctgtctctactaaaaaatacaaaaattagctgggcgtggtggcgggcgcctgtaatcccagatactcgggaggctaaggcaggagaatcacttgaacccgggaggtgaaggttgcagagagccaagatcacaccactgcactccagcctgggtgaccgagcgagactccgtctcaaaaaaaaaaaaaaaagctttaaaaagctgaattttagaaatatttctagcagtgtcagtgagttcctcttttaatagtgttttaaagtataaatctggtaacatactgttcttgtagttttttgttagttttgtttttcaggttaattacccaaagcctcatccatcctcaaggtttttaaattttatttttttaaaataaattgtgcattgtatttgtgaatttttaaaatattactgttttatttaaatgccatgctgagcaattgttctctgtacatggtaaccaaaacttagagatttcgatcaattttgatcaatgtttagtaaaccaaaacatgtactgtgtacaacggaaataatatggcatattagccaggcatgatggttgcccaagacagttaaattaagctcaattctgtattttattagggctctgttatgtccttcatctgaaatgtacacatttttggtgtatgcttggtactggagattcatatatgcaaatattctcatgcaagaagttccacagtaacaacagcaaaaagaaaaaattagttgtccagccagtgctggaggaaaatgtttctggggaagatgactcagtcattttgtggcgagacaccctttggtaactcccactgaccagtcttgggagccttcctggaatgatcgtgggctgagcggagatgttttttgcaaaatgaaactgaagctgaaagaaaggagaattcgagtgaaccaagagaaatccaaagacctggggaaggaggacttaagatgaaagtgaagcaagagagggaaggggaaatgaagtgaaaatggcgtgagggtgtgagagaggtttgggttaggaaacatgtttttagtgctatttccaaccaggggtcgcaaactcagcagcctgtagaaacaggggtgggaggtgggggggaagctgtgcccacctttaaagagggggccattgctcagccatgcagaaaaaaatggggcaacaagctggaaatcaggttttttttttttaaagtgaaacttgatgatttttaaacaagtaattaaaaaaatgtccaaaacaccatgtgggccaaacatttgtttgagcctgggggccaccagtttgcgaccactgccttacgtagttaacaccctgagtatgtatacagtcatattttttgttttggatatggtagtgttatatatacttgggggcgtgatatttgaagtcatctttatctctcagagttaagctttattgtagaagaaaaaatttntaaaaaaaaaaaaaaaaaaggtacctgcccgggcgggccgctctagaactagttggattcccccgggcttgcaggaatttcgatatcaagcnnn

SEQ ID NO: 19699 - DNA, 2931 bp, Homo sapiens
  misc_feature 1, 2903, 2904, 2905, 2906, 2907, 2908, 2909, 2910, 2911,2912, 2913, 2914, 2915, 2916, 2917, 2918, 2919, 2920, 2921,2922, 2923, 2924, 2925, 2926, 2927, 2928, 2929, 2930, 2931: n = A,T,C or G
nacgcgtccgcccacgcgtccggactagttctagatcgcgagcggccgcccttttttttttttttttggaagtcctaggactgatctccaggaccagcactcttctcccagcccttagggtcctgctcggccaaggccttccctgccatgcgacctgtcagtgtctggcagtggagcccctgggggctgctgctgtgcctgctgtgcagttcgtgcttggggtctccgtccccttccacgggccctgagaagaaggccgggagccaggggcttcggttccggctggctggcttccccaggaagccctacgagggccgcgtggagatacagcgagctggtgaatggggcaccatctgcgatgatgacttcacgctgcaggctgcccacatcctctgccgggagctgggcttcacagaggccacaggctggacccacagtgccaaatatggccctggaacaggccgcatctggctggacaacttgagctgcagtgggaccgagcagagtgtgactgaatgtgcctcccggggctgggggaacagtgactgtacgcacgatgaggatgctggggtcatctgcaaagaccagcgcctccctggcttctcggactccaatgtcattgaggtagagcatcacctgcaagtggaggaggtgcgaattcgacccgccgttgggtggggcagacgacccctgcccgtgacggaggggctggtggaagtcaggcttcctgacggctggtcgcaagtgtgcgacaaaggctggagcgcccacaacagccacgtggtctgcgggatgctgggcttccccagcgaaaagagggtcaacgcggccttctacaggctgctagcccaacggcagcaacactcctttggtctgcatggggtggcgtgcgtgggcacggaggcccacctctccctctgttccctggagttctatcgtgccaatgacaccgccaggtgccctggggggggccctgcagtggtgagctgtgtgccaggccctgtctacgcggcatccagtggccagaagaagcaacaacagtcgaagcctcagggggaggcccgtgtccgtctaaagggcggcgcccaccctggagagggccgggtagaagtcctgaaggccagcacatggggcacagtctgtgaccgcaagtgggacctgcatgcagccagcgtggtgtgtcgggagctgggcttcgggagtgctcgagaagctctgagtggcgctcgcatggggcagggcatgggtgctatccacctgagtgaagttcgctgctctggacaggagctctccctctggaagtgcccccacaagaacatcacagctgaggattgttcacatagccaggatgccggggtccggtgcaacctaccttacactggggcagagaccaggatccgactcagtgggggccgcagccaacatgaggggcgagtcgaggtgcaaatagggggacctgggccccttcgctggggcctcatctgtggggatgactgggggaccctggaggccatggtggcctgtaggcaactgggtctgggctacgccaaccacggcctgcaggagacctggtactgggactctgggaatataacagaggtggtgatgagtggagtgcgctgcacagggactgagctgtccctggatcagtgtgcccatcatggcacccacatcacctgcaagaggacagggacccgcttcactgctggagtcatctgttctgagactgcatcagatctgttgctgcactcagcactggtgcaggagaccgcctacatcgaagaccggcccctgcatatgttgtactgtgctgcggaagagaactgcctggccagctcagcccgctcagccaactggccctatggtcaccggcgtctgctccgattctcctcccagatccacaacctgggacgagctgacttcaggcccaaggctgggcgccactcctgggtgtggcacgagtgccatgggcattaccacagcatggacatcttcactcactatgatatcctcaccccaaatggcaccaaggtggctgagggccacaaagctagtttctgtctcgaagacactgagtgtcaggaggatgtctccaagcggtatgagtgtgccaactttggagagcaaggcatcactgtgggttgctgggatctctaccggcatgacattgactgtcagtggattgacatcacggatgtgaagccaggaaactacattctccaggttgtcatcaacccaaactttgaagtagcagagagtgactttaccaacaatgcaatgaaatgtaactgcaaatatgatggacatagaatctgggtgcacaactgccacattggtgatgccttcagtgaagaggccaacaggaggtttgaacgctaccctggccagaccagcaaccagattatctaagtgccactgccctctgcaaaccaccactggcccctaatggcaggggtctgaggctgccattacctcaggagcttaccaagaaacccatgtcagcaaccgcactcatcagaccatgcactatggatgtggaactgtcaagcagaagttttcaccctccttcagaggccagctgtcagtatctgtagccaagcatgggaatctttgctcccaggcccagcaccgagcagaacagaccagagcccaccacaccacaaagagcagcacctgactaactgcccacaaaagatggcagcagctcattttctttaataggaggtcaggatggtcagctccagtatctcccctaagtttagggggatacagctttacctctagccttttggtgggggaaaagatccagccctcccacctcattttttactataatatgttgctaggtataattttattttatataaaaagtgtttctgtgattcttcggaaaaaaaaaaaannnnnnnnnnnnnnnnnnnnnnnnnnnnn

SEQ ID NO: 19700 - DNA, 712 bp, Homo sapiens
  misc_feature 709, 710, 711, 712: n = A,T,C or G
gcgtccgcgcgacggccgcggcgcgggaccttaggacccgcgggctccagggctactgtccgtccgccactgcccgccagcaggtcctggtctccgctctccaacagctgaaaggccggcgcagtgaacacagaaacgaaaaccaagaaatgccttattccacaaacaaagagttgatacttggcatcatggtgggcactgctggaatcagcttgctgctcttgtggtaccacaaggtccgtaaaccagggatagcaatgaagttacctgaatttctttctctgggtaatacatttaattcaataactttgcaagatgaaatacatgatgaccaaggaacaacagtaatctttcaagaaaggcaacttcagatactggagaagttaaacgaattactgacaaatatggaagaactcaaagaggaaatcagatttcttaaagaagctattccaaagctggaggaatatatacaagatgaacttggagggaaaataactgttcataagataagccctcagcacagagcgagagcagaaagtgaatgagggtatattacagcttatactgacacatgagaacaaagttttccagtccctaagggcatttaacacacgtgtagaggaattaaatttagatgtccttcttcagaggttgatcatttacgtatgagtgagtctgccaagtccgagagttttgaactccttttgannnn

SEQ ID NO: 19701 - DNA, 1515 bp, Homo sapiens
  misc_feature 1, 1296, 1514, 1515: n = A,T,C or G
nctctccgcagctcgcgggcatagttgccctgcctgagcaatgggagccctgcgcctgatctgccgaggtcgggaggaggtgaggctccggcgcacacccaaaccgcgctgcgcccgctccttccgggccccggagatggcgcctccaccgggatgagctagccagcctgggcaataccagaggcggccctcggcgcgcgcaggggaccgagctggtcgccccaaccgggtttgatttctgatgactctggcctgagttccaggatggttttttcttgggaccagacatgaacaaaagttgacctcatgagcacttcaacctctccagctgccatgctcctccggaggctgcggcgactctcctggggcagcactgctgtccagctcttcatcctaacagtggtgacgtttggcctgctggcccccctggcctgtcaccgacttctacactcttacttctatctgcgccattggcatctgaaccaaatgagccaagagttcctgcagcaaagcttgaaagagggtgaggctgccctccactattttgaggagcttccctctgccaatggctcagtgcccattgtctggcaggccaccccccggccctggctggtgatcaccatcatcactgtggacaggcagcctggcttccactacgtcctgcaggttgtgtcccagttccaccggcttcttcagcaatgtgggccccagtgcgaggggcaccaactcttcctgtgcaacgtggagcgtatgtgagccattgatgccaagttgcccctccaggtatttgtcctgggggcaatcggctgtgcgggccgggatgtatggagggaccctcacacaccctggaacaaacggcagtcagcgggcgcccgcgcacaaccaaatcctggtaacacctccaaagaacctgggtcgcagatgggcccgttaccaccaaacaatatagtgtgcaggcctcacacaaccgcagcgtgttgtgcatttacgtttgtgcacgctgcggtcctggtactctctctcgatcaacactatcacacatacaccccgacccacatcgctacaccacaaacacaacatcatcacgacgacacaactcacaccaacgaagccagccgactcagaaccgccatcacctaccccatactatgccacgacgacagacaggaatccacacggcgcgcacagcagcaccgactacggcactcgcgccacgacacgactgctcacgcgtgcctcgcgcgcgcgcgcgccgagcgagcccgacccgtaccgcggagcgacactgcacgggcngctatcgcgcggcgctcgcggcgagcgccgccgagccgtgtccgcgcgcagtagtaccacgtcagttccagctccctgccttgagccgagagcgagcacgggtagcgggtgagcgtagcgctgtacgacgcatcgtcccggcacaaccacgggacacacactatccgaagccactaacaagcgaccaacacacccaacacgacgcacagacaacacann

SEQ ID NO: 19702 - DNA, 5775 bp, Homo sapiens
  misc_feature 1, 2, 3, 4, 5771, 5772, 5773, 5774, 5775: n = A,T,C or G
nnnnctattattctactcttcttgtcttcctactttgtatttctttgtgttctgtcgtctgtcttgtttggtttcttttttttttttctcttctttttgctgcatcctgttcttctgtttctgtgtctgcctttttttttcgtcctcttgtttttctttttctcttctttggtcctgtctctgcgtcgccgttgctgttttgttttttcttgcgtttcctctcttttctcttttttttttttttttctttttttttttttttttttttttctttcttctttttttttttttttttttttttttttttttttagaactttcaagttcttttattataaaagtctgtacaatgaagtgccagacacagcaatgccattatactggtggacatatatatctatatattatttgtatatagatatacagtttttatttgtaccaaagtaaaactatcaccaactgcctaattctaccagctactgctcaactatgacacacaatactgtcacagagcataagtgctgccatgccacttttacatattctactcacagccaaacattaacattgaataacatattgaagcagctgttaattctaaaatgaaaccagtcagaccactgacttataaaaatatggtactcatatagatttagcattataaagaaggaatatattatttaaaacatttaaatagtgcatatggacatttttgcatgtggtatataaaataaaacattcatataagatacacagtgcacataaaattagatgtttggatacactcctatctggagactgaaggaaattatctgaaatgtacactgcatgatggattcaaataaaaatgatacatcttttggtattttcaatttcacttttctaggtatacattatgaataacctagttgtatcaaaaggaaaccacacaaaaagggcaggatttagtgcttttctttattccccaactacacattcactaccaggttttccctcaccccccaccccccagaaaaaggcattgcacacacgggtgaaatgtgaagtactagaactgctatttattatcaaactacttcatgtgcttactatgtaatagtgccagaagtctgaggttcatgcttccctcaccttattaaaggatgttgcaaaattccatttttatatggaataaattgttaatattagctagttaagaaaaccatgcatgagtcattgcatgcaaaacatgggtatagtcaaagtgagacagtcatcaatccaaaaaagcaccagaaaaaaaagttaacacttagattaagcctgacccaaatctgctgttgtactgttagcacaaatgaagtcaccattctgtaacaatgattagcagaatgataccgagacagtacctgaagaaaagccatgcaaagccaaaggaaaaaaagatatgctaagagtatatgacaaggggcataccactacacatcctgtaaacagctgctttaaacagcatgttatgattgaccaaagggtggtcccttaagagggcgttgttgtcgttgttttggtatggattttgctgattaaaataggaggggaaaaaaaaaaagataaccccctgaaggtacatgtgaaaatgcagtggtagagcccttgttaagaacagatttactttaggcataatattttgctgatttaagcccattgattgaacacacaaatctgagcaccatcagagttcctacatactgacatggctattttctcacattatctggaggtgggttggggaatagcgcggatctgatccagacaaatcacaccattgccagcggataaacagtaactcaggaaacagtaactgaagtcccataggcagcatgtggtatgattcagttctgtgtgtgatgtgtggtgtgtgttttcaatatactaagcgaggtcaccttttggtctaccaactgttatcttcatccgggagctgtgtgaccagcgaattgcaaaattttactaacatactacctgtgagaagatgtcactttgggaattaaacagaaaggtgttccatagtacgacttgaaatctcagtttgattttggttttctaggaaaacagagaacacagttgcgtatgtgcacttttataggcttttctttcaaattttcagtcattctgtaagaaaaaggcaacagaagaattcagtatgaagattttcctccaattttcttcagtaatgagaaacaaaaagttggtaataacaaaaagcttgcatttccaaagttcttgaagttgaaaggataaaattccagtcttttgctaaaaggatgtatctgtagtacaaaacaatgaagtaaaccatatgtttgctaaaggtggagaggacagtctgtggttaatatggaacatcacttacgctcccttgagagggcctacttactctcccatcatttgttttgtttagtggcaccacaaccaagtacaaaatgagattctctgagtgcctgacaaaacgaatttaagtaccagccaagtacacacgatgatagcttcaaggaatacaactgactttatgatatgaattttcaaggaacgtatcttatatggattttgaagaatcttgtttgcttataagaacttcaagaagcctaagcttggctttaattttcttgtactctctgtactcctcaagcactggaacacgatcctctttctgggcattccttccattttgttgataaaatgcttcttcaaattcccgcaacgttttgcgtagtttctttttttcagctctggctttccaaagttgttccaataattcaggcatagaagctgctcgagaacttgacaatcggagatccagagccagtttttcttgattttcttcaacatcagattcagagttttctaatgaagactgtacctgtactgcagttttcaacatatcacctaactcagaggacagattaacaccatcttcttcttcctccttgatttcttcaaaaaaatgtgcagtttctccttctatgattggctgtaacatctgaccccttcgcttggtggatggagatccaaggacaggagtgatgctagctcttgtcagcatttgttttacaagcctgtatctatcatagagaggtttaacaatgtgcctttcttccttggtcaccggccttccatgttgactttcatagtaaagaagacttttctgaagagaagctttctcttctaccaaatgatctttggtcattttcttgatatcttctggaagacacctctcaatacgtttttctttcagtcttttaagaataagttcaagggttgcttctttagatggttttttctccttctgaatgaccttgggttcatcttcattctcttcatcttcatggtctagagaagagccaaagctttttggaagtgtgttactacgtggacgtgtctgaggtacaaattctccatcagaatttttgtgttttgcatctttaatttgcttccgcagttttgtaagctctgtcatccattttaatacctttggattggcagcaatatcactgtaggagggcttgctatttctttccctttcaaactgttcctcaaattgtctgattttcttctgaagtttcttgaccagctgataaggtgttctgtcctctctcttttcatcttttgaactaaaggatgatcttcgaattctagtaaaagacagtgctttagatgaggaatccaacttttctggatcatgtaggaaacgctggctttgaccaaaatctaaactgcggtgtgataatactggaggacagtcctcttccaaggggtgatgattcattcttccagcttgtggagacagctgagcttctccagactcagagtcctcctgccaagacttaaaagcaggaaatggctcttcccatttatcaccatcagaaacattcttcagatctaaatgtggaatactgacacacgctgcttccccttgaacaccaacactctgacctcctggtacttctgattcagtgttggcattcaaatcacatatcttgctactagaatccagaatcaagtgtgacaatttatcactgtcaaataacaaatattcttccctctcaagacagccatcttcactatcaccacggtcactgcatggctctaacaatatacctacagactgggtattttcttcattctcaaatacacaatcttgctgcatagcttcattgtctaaattagtgctagccacaggttttgaacagtctctgttactttcactggcattaataatatcatcagcaatatcaatctggttattagatccttccccatcacaatgaatactttctgcttcattattacacaccacactttgctgttgtaaattcttaagatcatgatctatgctgctctgaagatcaaaaaggtgctgttccacagctgctctaattgttctttctaaaatatctgtagaggctggtaggatgctgatgggagatatatgggtgcttgttgccgtaacactatttgattccaggatgttttcagtcatccttaattgtaccacctctggcatgtcatttgatttttctgcaccctcttctggaagttcttcaatatgttccagcttttcatcttcctcttcttcctcagaaagttcattaacctgttcagtaattgaactcaaatcattagatgaaaaatcttcctcttcattctcaaaaaactcatagtagttttccagaagtccagccattatcctgctcactatttcttgctctttcatgtcttccacatctgtgtaaatgtggaagacatctggaccaaagacagcagccaaagaatttgcagaccaaatttcttcatgatgtgatgctacattggctaaaaatctacacagaaactttaacaaactataattaacaggtggaagctgttgcaagaggaacctcaactttcttccaaattcatcttcattattataatcttgagaaagctgcatcaagtgaatatgtaaactgccagggataacaggttcaggaagttcttgaagaaaaaatctaagaaggctaatagctgagggaacatctgcttccttaaccaaatccacctcttctccgctgtcgtatctctgccgaagccactccactgtctcagcatttccattgacttgaaaaagtccttgttgctccagacctccatgttcctcaatatagtccacaacgtggcggactatgaatggaacctcattgtctggatgtcctccctgctgcagctcatcaagtggaattccaaatattttgttagcaagaacggagttgcagttactcaaggaaggggaggagctcttcctcatatcttttttgcagccagaaatcaaagctgtcttttctttcagtacttaaatacctaagtttaaaaaatggcttctgcaccagctaccctcactgagcaagcattcttttgtcatttatggctgtttgagattatggcagaagatcagcctgtagttcctcattgaagaaatgcagaactcgatcagtacttcagcagttaatcgttggaaccgcgatgccccgttccctggccgcggccgcttctccaggacccgcggcgacggcaagagggcgagaactgaggccccaagtggctccgcggccgagaagcctcttcctggggcggccgctgacggggaggttaaagctacggctgtggcgcggggccagcccggtaagcgaccccccggatacccccggcggtggtggcgacgcagacgcggaacagggggagagagtggcgacagannnnn

SEQ ID NO: 19703 - DNA, 437 bp, Homo sapiens
  misc_feature 1, 394, 396, 437: n = A,T,C or G
nacgcctccgaaaaatctttgttgatgctaccttggaagcagtcatctctcagtcttacatttggagaatgtggatggcatgacatcagaattcctttatataatttaacttcagaatagtctgagatcatcgaagcacgatggtcaagggaattccgtttttgttttagagcaaatatgtttgctgtttgtctttcatcacaaacatcagtggagtttcagcaccttacagagctcagtgaaccccctggtcaccatcaaagttagcacacaacaaagccaaccacgtgtccccctcacagatgacaatggctgaactctgagtgaaaccacctgtatggccgggcacagtggctcacgcctgtaatcccagcactttgggaggttgagtggntntggatcacctgaagtcagaagattggcctggccaacatgan

SEQ ID NO: 19704 - DNA, 1679 bp, Homo sapiens
  misc_feature 1, 27, 28, 1679: n = A,T,C or G
nccaagtcacgacgttgtaaacgacgnngccagtgaattgtaatacgactcactatagggcgaattgggtaccgggccccccctcgtgtttttttttttttttgtacttcaaatattgaatttttattcaaaattctttataactttattacaatatagattttgtgttggatagttttgcccactgtaggctaatgtaagtgttctgagcatgtttaaggcaggctaggctaagctatgatgtttggtaggttaggtatattaaatacatttttgacttatgatcatattttcaacttatgatcatattttcaacttatgatgggtttatcaggatgcaaacccatcacataaatggaggggtgtctataaaacattgttagacctataattttgctgttgattattgggaggtggtatggcacagtggttaggggcagaggccttggagttggactacatgggttcaaatcccagcttggctgttttctgtgcagttctaatccagttctgccacaaacttgttgagtggccttaggtgagtcacataagcactctagatatagcttccttattgcaaaatgtctcaagctaagtttagtattctccctccaccccgaccctgcttctgttcctcttccaggctgccccatctcagtaaatggcccatcagccacccagaaggtcaagccagattcatccttcacatcgaatctaccttctaaacacatccacaatccattcccctttctccatccccactgtccccgctccagtccatgccatcaagacttttcatttgcactttgccgcagagctgttaaaatacttttacaaactacaaatttgattgagtcactctgaaaaggtgaatgtggcccttgacctctgcatggtttggtcctggtctgtctctctccactcagttcaggccatcctctcagtgctccagacaagctagccttgcattcctccagctagaaggagccccagggcctttgcacaactcctccctctccctggaatgctcttccccaattgtcttagcttgatggctcacccttcaggtctaggctcaaatgtcagtccttcagggaagtattttctgatccttcaaagaggtcaggtcctggtgacctccttcagagcacctgtcaccacatcactggtgcatgtctgcctccttcccaactactgtttcaagagaggccccttccctgttgttgtctcagaccccttctttccttcaaagcacttatcacaatttgtaactgctttatttctttgttttcttcttagctgtctccccaattctctttgtataatttctatgaagagataagctgaggtctgtcctgctgtattcccaggacccagcactgaacctaggaacagagcagagattctcaaaaagtatctcctgaataaaaagtgtttgtggtggtggcacctctagcagtcaggaactccctctttgcctctgagttttgatcctcaggcagtatttatgctggttaatgagtaattcttctctgggtttatggttcagagtagaataggagacctcaggcagcctggcaacctctggcctcgtgggaaatgccttccagtggaattgcagcaaatttcaactctaacccagggatatcgatctaggcctcattcccacacccagctcn

SEQ ID NO: 19705 - DNA, 1435 bp, Homo sapiens
  misc_feature 1407, 1408, 1409, 1410, 1411, 1412, 1413, 1414, 1415, 1416,1417, 1418, 1419, 1420, 1421, 1422, 1423, 1424, 1425, 1426,1427, 1428, 1429, 1430, 1431, 1432, 1433, 1434, 1435: n = A,T,C or G
ggagtcgaccacgcgtccgatctttgtctgctttcctataactcagtactgtaactcagtactctgaaatagtttcctttgttaatagagtcacttttatagtactgtgcttgaggtcatatacagagtattgtgtccaaatttatcattgcacaaagtgtttttggaaattcttggttactccttagtaaattacctgtaattgggttaaatgctggtagggtttaaaatctgattgctaagtgaattctctataaagtgagttttgatacatagaaacttttcatataattctttaaactcatgtgtcatgtattttcatttatagttttcatattcattaacatatgttgttccttaccatttacagctcagaattctgcaaatgcagattttgcaaactttgatgcatttggacagtctagtggttcgagtaattttggaggtttccccacagcaagtcactctccttttcagcccccaaactacaggtggaagtgctgcatcagtaaatgctaattttgctcattttgataacttccccaaatcctccagtgctgattttggaaccttcaatacttcccagagtcatcaaacagcatcagctgttagtaaagtttcaacgaacaaagctggtttacagactgcagacaaatatgcagcacttgctaatttagacaatatcttcagtgccgggcaaggtggtgatcagggaagtggctttgggaccacaggtaaagctcctgttggttctgtggtttcagttcccagtcagtcaagtgcatcttcagacaagtatgcagctctggcagaactagacagcgttttcagttctgcagccacctccagtaatgcgtatacttccacaagtaatgctagcagcaatgtttttggaacagtgccagtggttgcttctgcacagacacagcctgcttcatcaagtgtgcctgctccatttggagcgacaactttggcactgcatccatgagcatgcccacgggattcggcactcctgctccctacagtcttcccaccagctttagtggcagctttcagcagctggctttccaagccaagcagatttcccttcaaagacagcttttctcaacagcccaatggtgccggttgcgcgcattgggccaacaagccggtagtaaacctttggtcacgttgcgctgcggagatctagaaaacctttgacgggggcccagggattcccccggggctaccacctcttttgccttagcacctcggcgacccttcgcggcaatctcccgcagggggggccacgcaattctaaacataccgcggtttaccatatacgcgacacactagagggtccatatctaccctcctcctctctccgtccctagacatctcctcgactttctttttctcaagaaaagnnnnnnnnnnnnnnnnnnnnnnnnnnnnn

SEQ ID NO: 19706 - DNA, 1531 bp, Homo sapiens
  misc_feature 1, 1531: n = A,T,C or G
nacccacgcgcccccgcctggcccggcggctgcggcgggcgggcaggcgggcaggccggcaggcgggtgcgcggagggctggtgccccgcagcaggtgggcggggtgcggttggcggcggcggctgggccgggggctgccggctgcgctcgggccgtgcgcggcggccgtgcgggcacgccatggacttcaacatgaagaagctggcgtcggacgcgggcatcttcttcacccgggcggtgcagttcacggaggagaaatttggccaggctgagaagactgagcttgatgcccactttgaaaaccttctggcccgggcagacagcaccaagaactggacagagaagatcttgaggcagacagaggtgctgctgcagcccaaccccagtgcccgagtggaggagttcctgtatgagaagctggacaggaaggtcccctcaagggtcaccaacggggagctgctggctcagtacatggcagacgcggccagtgagctggggccgaccaccccctatgggaagacactgatcaaggtggcagaagctgaaaagcaactgggagccgcggagagggattttatccacacggcctccatcagcttcctcacacccttgcgcaacttcctggagggggactggaagaccatctcgaaggagaggcggctcctccaaaaccggcgtctggacttggatgcctgcaaagcgaggctgaagaaggccaaggctgcagaagccaaagccacgacggtgcctgactttcaggagactagacctcgtaattacattctctcggccagcgcctccgcgctctggaatgatgaagtggacaaggccgagcaggagctccgcgtggcccagacagagtttgaccggcaagcagaagtgacccgtctcttgctggagggaatcagtagcactcacgtgaaccacctgcgctgcctccacgagttcgtcaagtctcagacaacctactacgcacagtgctaccgccacatgctggacttgcagaagcagctgggcagatttcccggcaccttcgtgggcaccacagagcccgcctccccacccctgagcagcacctcacccaccactgctgcggccactatgcctgtggtgccctctgtggccagcctggcccctccgggggaggcctcgctctgcctggaagaggtggccccccctgccagtgggacccgcaaagctcgggtgctctatgactacgaggcagccgacagcagtgagctggccctgctggctgatgagctcatcactgtctacagcctgcctggcatggaccctgactggctcattggcgagagaggcaacaagaagggcaaggtccctgtcacctacttggaactgctcagctagctcaaggccaagtccacgcggccgcagtctttacctattcacactcactttttatctcggggttttaatttttgctgggggtttgggtttataacccaataaaccgtcctttgtgtggcgaagtcacctggggcttcttgtcaagggccctgggccttgaan

SEQ ID NO: 19707 - DNA, 2233 bp, Homo sapiens
  misc_feature 2230, 2231, 2232, 2233: n = A,T,C or G
gcggacgcgtgggcgtccgcccacgcctccgcgtccatggcggcggctatcgcggcttcgcgctcggcggtcatgagcgggaaccggcctctggacgaccgggagcgaaagcgcttcacttacttctcgtcgctgagccccatggccaggaagatcatgcaggacaaggagaagatccgcgagaagtacgggcccgagtgggcgcggctgccgcccgcgcagcaggacgagatcatcgaccggtgcctggtggggccgcgcgccccggcgccccgagaccccggggactcggaggagctcacgcgcttccccggcttgcgcgggcccacgggccagaaggtggtgcgcttcggggacgaggatctaacttggcaagatgagcactctgcccctttctcctgggaaacaaagagtcagatggagttcagtatctccgccctatccatccaggagccgagcaacggcaccgccgccagcgagcccagaccactgtccaaagcttcccagggctcccaggccctcaagtcctcccaaggcagcaggtcctccagcctggacgccctgggccccaccaggaaggaggaggaagcgtcattctggaagatcaatgctgagcggtcccgaggggaggggcctgaggccgagttccagtcgctgacccctagccagatcaagtccatggagaagggggaaaaggtcttgcctccctgctaccggcaggaacctgccccgaaggacagggaggccaaggtggaaaggcccagcaccctccgtcaggagcagcgtcctcttcccaacgtgagcaccgaacgtgagagaccccagcctgtccaggccttcagcagtgcactgcacgaggctgccccctcccagctcgaggggaagctgccatctcctgatgtcaggcaggacgatggggaagacaccctgttctcggaacccaagtttgcacaggtcagctcaagtaatgtcgtcttgaagacgggatttgattttctggacaattggtaaaatgtattagaaaaatacaatgaagaaccctaaaatgttttccaaagtggtgtggtggaggaggataaaaagggccaccttttcctatgtattttactggtttcttgacactcttttcttaatcatttggaaactggtcaatactgccagatttttttcttttttggtagaaccagatatatatgctattttcagtgatttgataacagaagttttccatttggaatttttaaggtctgttaataattcaggagatcttgtaaataaaacttctgttcccagctccacccaactttccccctcctcaaaggatgtgtttcaaccatgtcacaaaaatcatataagtgatttccatctccttctccattattccccctcccccctccgctttttaccgtatgggttccttttggtgggtgattgagggtgatgttatcagccatgacatcagcatgctggctgtgaccccggaaagactggcccccagcgacgttctcagccagcgctcgcagctgtccggggcttctctggcagaagccatgtctctcacatcatgtgccagcctccaccctcacgccatttccagggaacagactgcgggtatgtagcagtgtagtctttaacctgctctgatacatattcagagtatggattgttgtttaaaaagagttgcatgtttaaagagttttgtactagcttttcattattttgtatctagattatcaacaatggggctaccactttccttggttttatatccatttcctcttggaagttcttgttgcttatgtgacctgttggttgttccccggactgggcacctgcaggagtcagggcagacggcagatgtggctggaggtcagggctcttctgcttagttgtgttagagtcttccagcatgggactgatgggagcagtgggcattctttatcccaagggctagccaggttgcgtcatgacggaccttccccagccctgaccaccaccagaagtggaagagtggagtttgcggtcaactcagcagtgcccatggagacctgcgtggtgtcagagcagcagtatctcttggagctggtgcagacaccaaggctgcccagtggtacaacgtggtccacctcctaggggaaggcggcaacacaaaggggcgccagaggcgagacaggagctgaggggtgagagaccaaccgggaggccaggtgccacgggcacagacaaggannnn

SEQ ID NO: 19708 - DNA, 599 bp, Homo sapiens
  misc_feature 1, 2, 3, 4, 598, 599: n = A,T,C or G
nnnnagtcgacccacgcgtctggtgatcattggaagccaggtgctcccccttcacttcctgtgtgcggagcacgctcgccctgggagtttcactagaaagaaggttgccatgggccagtgggacagcttggatctcaagtgcacgcggatgccccagaatcccaggatctcagctgagctgtttgtggattattagatctgacttaaaagaatattatccagcaatgcaaatgaacaaactataactacacacagctgcatggataaatgtcagaaacatgacgttgagtgtgagaagccagatgcaaacgaggactcactgtgcaattctgtgcatgtacagtggccaggagaagggagcactggctttgctttcatcaggccaaagatgcctttctttgggaatacgttcagtccgaagaagacacctcctcggaagtcggcatctctctccaacctgcattctttggatcgatcaacccgggaggtggagctgggcttggaatacggatccccgactatgaacctggcagggcaaagcctgaagtttgaaaatggccagtggatagcagagacaggggttagtggcggtgtggann

SEQ ID NO: 19709 - DNA, 696 bp, Homo sapiens
  misc_feature 1, 2, 691, 692, 693, 694, 695, 696: n = A,T,C or G
nnacgcgtccggtgaaactccatctaaaaaaaaaaaaaaaaaaagcacagactctctgtctacactgcttggatttgattcctctctcacctgttagctgtgtagcattgggcaggttacttaacctgtctgtgcttcatctgtgaaacaggaataacagcattattaaggattgttttaggattggatgggttaatagatgtaaagtcttagaactatattgagcatcccatcaaggcattgtattatattgaaacaatggggtttttttctctttattcttttttaaattatataatgaacacttttgatcttaagtatttctaagcacatatgtctcttcattccaagtttccaatttgcaaaggcaggtgtagtatggtacctatatatttatttgtacagtcacaaaaataaaatacagagtcatatatacatactcatatattaagcacttactgtatgccacatgatatattaagacctcatatttatatctcatttctcctttataaaagttccatgaggtaaattttaatcatatccctttacagatgaagaaactgagactgactgggcatggtggcttatgcctgtaatgccaccactttgggaggccaaggtaggaggatcacttgagctcagcattttgagaccagcctgcacaacatagcaagaccccatctctacnnnnnn

SEQ ID NO: 19710 - DNA, 1279 bp, Homo sapiens
ggggtcgacccacgcgtccggttatggagggccacatctgccagagcctggagtctgcgaaggccgggacccggttccccggcccacagtgggggtgtgcaaacccgagagaactgggaagtgccgtcagaagcgataactgacgacgtctaatgtctatctgaccgcagtcgctgaaacctctacaacttagttgaccgtaactgccagagccctgccctgaattcctgtccttactccctctttaagattgcgtacccactgcagagtgctgaagacggggtagccacgaggttgcaaattcgtgaagaatcagcatcatgtttggcagctgagtattggagccaggagcctgccatgaggttttgagaacagagtgctgttttagagctggcagcagcatctcagcccaagagaaggttatattcccagaggatgtcagtcccaaggaccagtagctgccatcagtttggattctgaaaactaactggcatcaacactgggtgtagaaacatgcttgccttatgtatcagaggacatgctcagcagatccaagagatatatttggcaactttttctagcacaaggcacattgggtatcattcattacatttttgagtttttttgggtttttttttttttttttgagacagtcttgctgtattggcccaggctggagtgtgccgcgcacacccacaagccccataggacccctcaagcacgccagggccaaacacaccgccacccccttgacgcggcactacacggcccacaaaacacctggcccacaactcccaggtcgacacacagatctcaatgtccgccagcgcgcgacaagccacgcgcacacaatggcccccggcgccaccaccacaggaccaggcccacgtgtcaccgttgggccccgccaaagccgccccaacaggagtctcacctccagcgacgcacgtcacccacacgagttcacgagcggcacacacacccacgcgccgacagagaacgcaccccgcacacaccgttctctccagcgacacaacccaacacacgcggctcggtgcctcacaccaacaccacaacacgcccactcacgtaggacccacatgactgacgctagtatctacggaaggaggatagcaaaaaataatagatgaatttatcgtacgcatactctcccccacaccccacaacgcaccaccctcaccccatccacgacccactgcacgtacagccccccgcaccgccccacccacccaccacccaccccccctccgtcctgacc

SEQ ID NO: 19711 - DNA, 844 bp, Homo sapiens
  misc_feature 816, 817, 818, 819, 820, 821, 822, 823, 824, 825, 826, 827,828, 829, 830, 831, 832, 833, 834, 835, 836, 837, 838, 839,840, 841, 842, 843, 844: n = A,T,C or G
gtactgattgaaatttggggaaaagtgaataagaagactatctaggacaaaaagccaaagccgaaaatagtatatgagcattctagcccagagactgtcgctactaaaagaatgaaggaaataataaagtgatagacagggaaggatagaaaagacttaacaatatacatatgttccgtctttgctgttttggagaatgatggataagtagtgtttcctgattctgaagcatagctgaacaatttaattgtggtttaccatctttttggttccctcttcagtaattaacctatcgaaaatctgtcctaaatgtttggactggggcacagttccctccatcgctttgggagaaaatcattaatatggcatactgcagattggagggcaggaccactgagggtgtcatagacattagctctatggaattctgctagcaatttccaagtgacagtgaggaattatggatatatgttgaggtcattcagcttcctgagtaccacattccccagctacttagacacgggttaaaatattaagatgtcctagttcaacagcttgaattccattgattgatactgatagtgcctgtccaagacaccagctgaaagacttgttttgtgtacaaaatagttctgaaagtggtgagatacaaaaaggttttagaatccctgccctgttgagagaaattagggggaaatgattacatttagaagctgctagagttatccagtgtttgctggtctttgcaacaaactgtggagaatgggtggtatgtaatgctttggtaggcttcaatccctgataaaagatgatgtnnnnnnnnnnnnnnnnnnnnnnnnnnnnn

SEQ ID NO: 19712 - DNA, 952 bp, Homo sapiens
  misc_feature 1, 2, 3, 812, 818, 891, 897, 899, 902, 945, 946, 947, 948,949, 950, 951, 952: n = A,T,C or G
nnnatagggcgattgggtacgggcccccctcgagtttttttttttttttttttacaatgccatctcttcatattgttccatttaacaaaactgcagcccttcacctatccttaagtcccttggccaatggtacagagccagagtatgctactccctagcaggaaatcaacaggatgacctactaaacaccattcagaagatgctaagacccatgaattgcaacaggaaagaaaagacagagaattagtccgacaggtacatgctgtgccaaaaatgcactacagcccccacccaattctgcctaatcctagctgggctgacaccaacctgatgagacaggcctataagatctcaaactaaaacagaaactcctgaactgggttctttcgagcccaggaagcagcagtaaatcattaaagaacagataagttcttaaggtgagggagagtttcagataaatggaatgctggtagaacacagggcccaaaggagcaaaagttaacctaagcccaggtagaaccttgtttactagagtattaggcatgggtttgggcaactattctaaccagagaaactggcttcagtgagggcaagttggcaatccaaggtatagcatgcatagggctggcaaaattcagggtgactgaagcaaaagcttcagaaccagaaagaccacatctgggggtagagcacaaaactctcaagagatgaatctttgtaagagtgaggcagaactatatagcagttttaggagatctgttggtgcccagcaagagctccaaacgggctatatgcagggatgcaggctgtantctcangagaagaagttcacaaaagtcattcagtccaagacctcaaactgtgttctctactaaaaggaatcaaggttcnctaaananacngctgactccatgtatggtgcagtatattgatcctggaacatcnnnnnnnn

SEQ ID NO: 19713 - DNA, 5716 bp, Homo sapiens
  misc_feature 5644, 5713, 5714, 5715, 5716: n = A,T,C or G
ccacgcgtccgccgaaaacggagaaaccccgggtccggcgagaggggctgtgacagtcggagtcccaagctgcggttcggctgctgccgagaactgcaaggtgtggaatatttctggcttctagtccaatgccaagtgtgtgacctgtggctacatgattccctgaaagataagaacaatgttatgttggggatattggtctctgggccaacctggtatcagcaccaacctgcagggaattgtggctgagccccaggtgtgtgggttcatatctgacagaagtgtcaaggaagtggcctgtgggggaaaccactctgtgttcctgctggaagatggggaagtttacacatgtggtttgaacaccaaggggcaactgggccatgagagggaaggaaacaagccagaacaaattggagctctggcagatcagcatatcattcatgtggcatgtggcgagtcccacagtctggccctcagtgaccgaggccagctgttttcttggggtgcagggagtgatggtcagctaggactcatgactactgaggattctgtggcagtgcccaggttaatacaaaagctgaaccagcaaacaatattacaagtttcctgtggcaactggcattgcttggctcttgcggctgatggccagttcttcacctggggaaagaacagccatgggcagcttggcttagggaaggagttcccctcccaagccagcccacagagggtgaggtccctggaggggatcccactggctcaggtggctgccggaggggctcacagctttgccctgtctctctcaggagctgtttttggctgggggatgaataatgccgggcagctagggctcagtgatgaaaaagatcgagaatctccatgccatgtaaaactcttacgcacgcaaaaagttgtctatattagttgtggagaagaacacacagcagttctcacaaagagtggaggtgtgtttacctttggcgctggttcctgtgggcaacttggacacgactccatgaatgatgaggttaaccctagaagagttctagagctgatgggtagtgaagtaactcaaattgcttgtggcagacaacataccctagccttcgtgccttcttctggactcatctatgcatttggttgtggagcaagaggtcaattaggaactgggcacacttgtaatgttaagtgcccatctcctgtcaagggttactgggctgcccacagtggccagctttcagcccgagctgatcgctttaaatatcatatcgttaagcagatcttctctggaggagaccagacttttgtactttgctccaaatacgagaattattctcctgctgttgacttcaggactatgaaccaagcacattataccagtttaataaatgatgaaaccatagcagtttggagacaaaaactctcagaacacaacaatgcaaatacaatcaatggtgttgttcagatattatcttctgcagcctgttggaatggaagttttcttgaaaaaaaaattgatgaacattttaaaacgagtcccaaaatccctgggattgacctgaactcaactagggtgttatttgagaagttaatgaactctcagcactccatgattctagaacagattttgaacagttttgaaagttgtctgattccccagttgtcaagctcaccaccagatgttgaagccatgagaatctatttaatactacctgagtttcccctactccaggattccaagtattatataacattgactattcccttggctatggccattcttcggctggatacaaaccccagcaaagtactagataactggtggtctcaggtatgcccgaaatatttcatgaagctggtaaacctctataaaggtgcagtcctttatctactgaggggaagaaagacattcttaattcccgtactgtttaacaattatatcacagcagctctcaaactcttggagaagttatataaggtaaatcttaaagtgaagcatgtggaatatgatacattttacattcctgagatttccaatctcgtggacattcaggaagactacctcatgtggttcttgcatcaagcagggatgaaggctagaccatcaataatacaggatactgtaacactttgttcctaccctttcatctttgatgcccaagccaagaccaaaatgttacagacagatgctgaactacagatgcaggtggcagtcaatggagccaacctgcagaatgtcttcatgcttctcaccctggagcctctgctggccagaagccccttcctggtccttcacgttcgcaggaacaaccttgttggagatgccctaagagagctgagcattcattctgatattgatttgaaaaagcctctcaaagtaatctttgatggtgaagaagcagtggatgccggtggtgttacaaaggaattttttcttttgctgttaaaagaacttttgaatcccatctatggaatgtttacctactatcaagattcaaatctcttgtggttttcagacacgtgttttgtagagcacaactggtttcacttgattggtataacctgtggactagctatctacaactccactgtggtcgatctccacttcccattggctctctacaagaagttactcaatgtaaagcctggcttggaagacttaaaggagttgtcacccactgaaggaaggagtctccaagagcttttagattaccccggggaggatgtggaggagactttctgcctcaacttcacgatctgccgagaaagctatggagtgattgaacagaagaagctgatacctgggggagataatgtaactgtgtgcaaggataacaggcaggaatttgtggatgcttatgtgaattatgtcttccaaatctcagttcatgaatggtacacagccttctctagtggcttcctaaaggtgtgtggtggcaaagtacttgagctcttccagccttcagaactgagggctatgatggtggggaacagcaactacaactgggaagaactggaagagactgccatctacaagggagattactcggccacacatcccactgtaaaactattttgggaaacatttcatgagtttccattggaaaagaagaagaagtttctcttgttcctgacaggcagcgatcggattcccatctacggcatggccagtctgcagattgtcatccagtccacagccagcggggaggagtacttgccggtggcccacacttgctacaaccttcttgacctccccaagtacagcagcaaagagattctgagtgcccggctgacccaggcccttgacaactatgaagggtttagtttggcctgaggcttctcagcttgtccagtatttcccttcgttcctcagtgtccacattgaggcctatacagaaaatcatggggagtgatttctatttttttattgtctaagtgggttgggacttttaaatactgagcctggttgatgtgtttctgggattgtatagcagtaaacaacctttttgaaaaattagaggttggggatggggtgaaaaattggcccttgtatgggaggtgtttttgtttttgttttaaaccaaactacccagtattccttgcacttgtgaatgtgttgcactctgctggatgaaatggcagtggatttttaaactttaatttcccaaatgtctctctcagccctgatgttttctcacagtgcttccttgtccttctcttaacttctcattcctctataagaatgatttagactgacctgtccttttttatctgcgcatgcgagaacatcaccttcctctgtacacttggaaatgcctctggcttgttgcagccctcctttaacccaaaggaggaaaggactgcttcagaaactcccaattccaaaaagctgagtctgggtccattattttggcagaactcctaagaatttatgggagcctatataaacatatcttgcttttaaaaagttcttgagggaatagcaactttcccatggctgtgcctatttcctagaccttttaaaagatgtgcagagcagcttagcattcgttgcagctgagcctaattttttcttgctcatccttgtccctttgacaataaggttaattgatagacccaccacctcttgcactctcgcttttggagcaagttgcattaactattttgagtctctatattgtccaagaaaagtagaaataataaatttactttccctttttctatcaccttatgtcctctaccattttctccttcctcccttcccttattttctccttttcgtaccctgtgtcctccctgattttcctttcgtttcttctttattttatcccattctctgttacttgactcagtgctcccttcctctcctctccttctagtggatgcatgcagcctttttttcaatttttatttaaattgcaaaatttttactcagattttttttcctcttccctaattgctaagatttaaggacgttctttattatgaaactttatcacattcgaaatgtttgtttacagtgggattttaggggggattgtgtttaaatcaaatatatgtattttaaaaataatgacatgctcaaccttcctcatcatggagtaagaaaattctacatgattaaagaatccatgtaagtctaattttaaattcctagtaactagagaaaagacttatttatataaaatgaagtatttatgaactgtgataaagcatcaaatcttgatgaaggattgtagatttttgctttttctttttgtttttaaaacttattccaattgctaaattggtagtttttcagtctttataaatacaggattaaaaatatatatacagttatatgaaatgtttattttctatgtgtgtgcatatagttcaatattatgcaataaatttggtgttttaacttaaaactatttcttattgtacttgcagaatggatagcttgcttttagtagaagcattaggtcgtatactcagataatctaatagaaggtcagatttgattcctgcataagaaagtagagccaagtgctgcagaaatggagaagaaagcaggggcaaggagcagatggcattaaggaagaatgaagtttttgaaggttgggatggacgaaaagggtgtttctcatggagagggatgctttagcaaaggctcaaacattggggcatatttaggcaagagccaagaacagtttgaagggaacatcagaggaaataggcaaataatagtaaataatggtaagtaagacttgggagaaagaaggtagatttggggctgaggaactagcctaacactggaactttagtagtagccaagtaggatttgtttcaatgttcagaacttgagggtgataagacctgagccgggtcttaagaaggaaaatgtggatggtctaaatctggaggtattgaggtgggaaggactgaagcagaaagacaggagctgagacagcagtgacagtggcagcagcagaactagagaagagtatctgaggagaggtagggggagtgagtggaggtggtaggagcctgcagggagaaggaggcactaaaggtggatcagagactggttcatttagtgattggtgattgttaggccatttaagcacaccaaaagtttgtgagacacaggaaaaaaaaaaanaaaaagaaaggattttaagtaaattggtaaagcaagtaaaatgtattgttttgccagattaaaaagtgnnnn

SEQ ID NO: 19714 - DNA, 976 bp, Homo sapiens
  misc_feature 1, 975, 976: n = A,T,C or G
nctgccattccctctcttccccctcagtctgtggctctgcctccctgagggggaagagagggaatggcagaggaagaggcagggacaatcaagatttaggaaatgcaggcaagagaggcagagatgaagagatgcagatggaaggctgagaacaatgcaaaaagagagaaagtaaatacacagagagggacagaacaaaaaggtgagaacaagccagtcccgggatgcaaagaaacagaaacctgcctgcagtaacccctagcactaccaccaccatgccacccccaagctgagggaataaactctgcctgtcgggtgccccaccaagggaaataaacatggcctagctgccaagtcatgcctgtagggtgctctctactggcagtttctgggtggtgcatacatctagtctccctagaagagcacagtccagaattgaggaggtacagcagaaacagactgcaggcagagagaggtctcatagagcttggacagggctaggcaccagaaagaacaggcagcgtatccagaagggggcaggaatgggtgaagaggttgtgctctagggcagagctgagctctgatctagaaaaggacagaaaagatacctggaagggctcccgattctgcgtgttggcgtcgtccgaagcggccgtccgttcctctcctcttcctctcgaaggtcggatgtgctcgtcaaaacaggatcagcgcatctcctggccagtctaagacggcagaggtccggggcatggccagaaggatacgttggaccagacctagtaagatctgccacggcagagaccaggggggagggcgaggcctggaacgccgaggactcaaggcatacgtggacaacgaggacacaaaaggggcaacccgggcccaggaccatcgaagcaagaaaaacaggaacaagaacggtgaccggaaacacacatagacgggtgaaacacagaaaacacaaagacaacnn

SEQ ID NO: 19715 - DNA, 574 bp, Homo sapiens
  misc_feature 574: n = A,T,C or G
cgacccacgcgtccgattcaggcatgagccaccgcgcctggtaaaattatatagcttaaaaaaacaaaaacaaaaacacttgctttgaaaagagtctctcagcagcaattttgtccttgcccctacttccacagttccttttcttaccatttcacatctggattactacattggcctctttgcttagactcccaatattcatttgctttccttcaccccattttatggaggactgtcagatcaatcttttaaagataaattttataatgttactactgttgcctattggattagagccctaggggtgctttttgtagtctcactgacagctgacattagtgatttttcaccctcttcttattgctaccctgtgttgatggccagtttccaggtgggcacctgctccacttgctttcatttctgcctaccttggttcattgtagaaggtcctttgcactgtctcactcactctaaatcagggttgtccagtcttttggcttccctggaccacattggaagaatgtgatcttgggccacacataaaatacacgatcactagtgatagctgatgaan

SEQ ID NO: 19716 - DNA, 918 bp, Homo sapiens
  misc_feature 913, 914, 915, 916, 917, 918: n = A,T,C or G
gcgtccggtggggtatgtgtggttcttccaggaaagtgctgaaaatatcacccaggcctctgcgccacgccctgggagagtacactcctgggctcacgcctctgcattccaaggctgacagctagaaatatactttgtaaaataccaacaacttattcacaaatattccaactatctaccagctccaatgagcttgctgaggatgggtatgaccccagtctaaggggaaagaatctaaaacacaagtaaacctgtttaaaggccagatctccagatggagatccaagcagatggcgcctaaggtttgcccttgaaaactaccaaggaagccacagagagggatctttggaccttctggaaaatggtaaggccccaggtagattatggctcctctgccctggaggctgagccgcccctctggttacctcacatcttctggtttcttctgagtgggacttgatctcatttctgcattcacagcaaggtggaactgtctggcaagagcttaaattaggacctgtggtggggactttaataggcaggtggaggtttgagatccagtgagatgccagagattagtcaataggtgaggaaagatttggcccaaatcaaaagagctaaaaaaaaaataataaaataaaaataaaaataaaatagttgaacaaataaggttcatgaaaaaaaaagaaaagaaagaaaaggtaaagaaaagaaatccatgataaaatatcaaactttttaataaaaacaagtctggccctgtacttggatgaccccacctggcttgtctaaccctaatcccagccccagttttaataaaactgtatttacaaaataggcagctgggacgtggaccagagataccaatttgattttttttaaatattacattaaaatattacatcatgtgtcnnnnnn

SEQ ID NO: 19717 - DNA, 801 bp, Homo sapiens
  misc_feature 1: n = A,T,C or G
natagaagtgggagtgaggagacagcaattgattcaaggaaactctgagaaaaaataaaaagaaacttcacttactatctccaaatgttattttgctacctaaggaatgtagacaccatgcatccaaactcccgcctgtcatcggtggatgaacaatacatttttcagcattgacagtaaacaactattcaacttttgcttcattcctctcactaaagagaaggttcattaccttatgaagtagtctagttgtgactgatacctctgttgtgagttctttggttgagcttctttgtatcagtaacaaaaggaagcatcattcagtctttctttgtaacttaatgtaagtctcttttgtacatcctattacttcaaatcattgaagtgaactccattttcacatctgttgggaacaatcatctagcttcttaaatgactcatcttaaaatatgaattttagactgcctaaacattctgagggagtacagtgtgatatagcagaaacaaccggggcttaagaaggatcaaaatgaaaggttttgtgaaggatgtgccagagactgctctctgttcaccaaaaccacattcttctcttcttcctggcatagagccagactagatttccaagctttccttgcaattgagctctcagagttctcgtcattagaatgtgaatgataggccgggcgcagtggctcatgcctgagatcccaacactttgagaggccaaggtgggtggatcacttgaggtccagagttcgagaccagtctggccaacgtggtgaaaccttcatctctact

SEQ ID NO: 19718 - DNA, 3717 bp, Homo sapiens
  misc_feature 1, 3716, 3717: n = A,T,C or G
nggaaagctggtacgcctgcaggtaccggcggaaagctggtacgcctgcaggtaccggtggaaagctggtacgcctgcaggtaccggtggaaagctggtacgcctgcaggtaccggtggaaagctggtacgcctgcaggtaccggtggaaagctggtacgcctgcaggtaccggtggaaagctggcctctgcggctagccggtcgagactcgggcgccgaggcgctgccgcccgcctcgccgccccacgccgaaggaccacgcgcccgccgccgccagcctctcagcgctcccatgatcgcccggtgccttttggctgtgcgaagcctccgcagagttggtggttccaggattttactcagaatgacgttaggaagagaagtgatgtctcctcttcaggcaatgtcttcctatactgtggctggcagaaatgttttaagatgggatctttcaccagagcaaattaaaacaagaactgaggagctcattgtgcagaccaaacaggtgtacgatgctgttggaatgctcggtattgaggaagtaacttacgagaactgtctgcaggcactggcagatgtagaagtaaagtatatagtggaaaggaccatgctagactttccccagcatgtatcctctgacaaagaagtacgagcagcaagtacagaagcagacaaaagactttctcgttttgatattgagatgagcatgagaggagatatatttgagagaattgttcatttacaggaaacctgtgatctggggaagataaaacctgaggccagacgatacttggaaaagtcaattaaaatggggaaaagaaatgggctccatcttcctgaacaagtacagaatgaaatcaaatcaatgaagaaaagaatgagtgagctatgtattgattttaacaaaaacctcaatgaggatgataccttccttgtattttccaaggctgaacttggtgctcttcctgatgatttcattgacagtttagaaaagacagatgatgacaagtataaaattaccttaaaatatccacactatttccctgtcatgaagaaatgttgtatccctgaaaccagaagaaggatggaaatggcttttaatacaaggtgcaaagaggaaaacaccataattttgcagcagctactcccactgcgaaccaaggtggccaaactactcggttatagcacacatgctgacttcgtccttgaaatgaacactgcaaagagcacaagccgcgtaacagcctttctagatgatttaagccagaagttaaaacccttgggtgaagcagaacgagagtttattttgaatttgaagaaaaaggaatgcaaagacaggggttttgaatatgatgggaaaatcaatgcctgggatctatattactacatgactcagacagaggaactcaagtattccatagaccaagagttcctcaaggaatacttcccaattgaggtggtcactgaaggcttgctgaacacctaccaggagttgttgggactttcatttgaacaaatgacagatgctcatgtttggaacaagagtgttacactttatactgtgaaggataaagctacaggagaagtattgggacagttctatttggacctctatccaagggaaggaaaatacaatcatgcggcctgcttcggtctccagcctggctgccttctgcctgatggaagccggatgatggcagtggctgccctcgtggtgaacttctcacagccagtggcaggtcgtccctctctcctgagacacgacgaggtgaggacttactttcatgagtttggtcacgtgatgcatcagatttgtgcacagactgattttgcacgatttagcggaacaaatgtggaaactgactttgtagaggtgccatcgcaaatgcttgaaaattgggtgtgggacgtcgattccctccgaagattgtcaaaacattataaagatggaagccctattgcagacgatctgcttgaaaaacttgttgcttctaggctggtcaacacaggtcttctgaccctgcgccagattgttttgagcaaagttgatcagtctcttcataccaacacatcgctggatgctgcaagtgaatatgccaaatactgctcagaaatattaggagttgcagctactccaggcacaaatatgccagctacctttggacatttggcagggggatacgatggccaatattatggatatctttggagtgaagtattttccatggatatgttttacagctgttttaaaaaagaagggataatgaatccagaggttggaatgaaatacagaaacctaatcctgaaacctgggggatctctggacggcatggacatgctccacaatttcttgaaacgtgagccaaaccaaaaagcgttcctaatgagtagaggcctgcatgctccgtgaactggggatctttggtagccgtccatgtctggaggacaagtcgacatcaccatgtgttactggcctggaaactgaagggagttttgcaagtgaaaatttagatttctattgacatccttttgttttctaattttaaaaattataaagatgtaaatggaattataaatactgtgacctaagaaaagacccactagaaagtaattgtactataaaatttcataaaactggatttgatttctttttatgaaagtttcatatgaatgtaacttgattttttactattataatctagataatatgatataagagggctaagaatttttaaattgaatcatatatatgatataatttgatccttcttgtatcttgaagttttgtacttgggatttctggactgataaatgaatcatcacattcttctggtaaatattttcttggagctctgtgtcaactttgatcctttgtctcccaggaaggtgtgacctctcctttgcctgcatacctcaaggccaggggaatatgcctcagtgatgcatttatctttgtatatcaggccgcatgattcccaactttctgccacacttaaattacgttcctccatttcagttttgtcttttctgtctaaagttcagtcaaagagtatcaaaaaattatgtttcagctagactggtgtaatgtataagtttttgtatcttgtattagaggatttcgtagcttttattagaggctcatttccacctcagcatacaagatcgttagtcttttggcatgtgtgccaattagaatactaaagcaagtccaagcacatttttctcttctcacgtttctaataagtgttagggactttgcctcttttacttaccacgtccccaaaagtgtcaggtagacatgtcacaaatggctctgtagagagccatgggaagagagaggaggtggatgtggaaccataaagggttcagaaactccataagaggagtgggtttggatagaagcatttgaggacagtgctccaaggcttatgtgtatgatgaaacttaacacgggaagagactctgcagtagactgtgcgccggtgatgcgatttgaagggaactgggttcatccttaactctccttttgtgagctcaattcattgcggagatcggtaatccgatttctggggactcactctggacagaggtatagttaaaaaactgaccgcagtcaaggtcaggaacaggagatgaccgggaatcccgtctcaaaggaaaactctacgcgcggcggttatagaaaaacagggctctcctagtgttactctcagcaaann

SEQ ID NO: 19719 - DNA, 799 bp, Homo sapiens
  misc_feature 1, 2, 3, 4, 5, 780, 781, 782, 783, 784, 785, 786, 787, 788,789, 790, 791, 792, 793, 794, 795, 796, 797, 798, 799: n = A,T,C or G
nnnnncaccatgcggcccaggcgatctcgcactcctgacctcgagtcatccaccctgcctcagcccccctgggtgctgggattacaggcacgagccactgcgcccatgtagggtttccctttcctgatttgtgaaataagactgtcccagtaggcacccactgatgcctcctcttcctcttctaaatctcagggttcgtcattgtgccaatgcccgatgttttcacccctccgtcttaaagcattgttgcaatttcatcacctagatgacataacagccttacaaaaggacagggaggagtgtctgttcctactctcacatagcggaggaaagttagagcctctcagtctctgtttatgaggactcattaatctcaaataattgatgcatttttcatacattagggtctctgtccatgtgtcttcctgatattgttatagaaatggcttcaggctgctggtaacagatgctgcggaaaaagaatgccttaaacaaagccaggcacggtgactcacgcctgtaatcccagcactttgggaggctggggtgggaggatcacttgagcctaggagttagacacctacccagcctgggcaacacagtgagacctcatctctacaaaaaacaaataattggctagatgtcgtggcgcacagctgtggtctcagctacttaggaggctgaggcgggaggattatttgagcctgggaggtcaaaactgcaatgagctaagattgcgctactgcactccgggctgggagacggagtaagaccctgccnnnnnnnnnnnnnnnnnnnn

SEQ ID NO: 19720 - DNA, 2139 bp, Homo sapiens
  misc_feature 2129, 2130, 2131, 2132, 2133, 2134, 2135, 2136, 2137, 2138,2139: n = A,T,C or G
cccacgcgtccggaggatgttatcctgctatcaacaaggaattgctctacagtcaataacaggcagtcagcgtattgaaatagaagagttacagaatgaggaagaagaactaagtccacctctcatggagtacaatataaatgtgaaatcacaccctgagatacagtttgcagaaattaataaacgcgtccgctcaatacccagtgaatcttcaacagaatctcttaaagatctccaggaagtataagctctcattaatgtttgagttagaagaacttattctgggcctttaatttgttgcatgtgctgtacttaaagcatcccagataattttagcttatattttcatagtgtttatacagagcttgaattggaatggtcctttccttccttgcctcagtacttccttccataatctttcctgccataaccatttattttgccaccatttcttaaacacttatgtggcaggcattatgctagactgtaatatgttttttttaatcccagttgaagtggatgtgggaaggtattagaaagtagaagaaagtatagtctaaaatagagaggaaagaaaggaagagaaaagtgggatatttcaaaaccatttgcgcagaggtagaatgaaattcgtccagaatggaatctccgtatttctttacaaataagtggtaacagttattatatagtcactaaattatccttagatctttcatcttataggcatgaatatgttgctttttaaaaagtgtcttcctcctttgttacatccatgtgtgtaagtgagcatctgtgaacttttatcagtaacctacttattgacattatgtgttgttcctttattcatcagtgattatttaaggacagaagactaggattaaaataaaaatgataaaaacaaaaataattgtttccatagaatctagaaagaaatacctataatattagaaaacaaaagatctcagtggtgagaggaaatatattttgcaaaataacccattgggcaatttgaattacatatttaataaataattttttacctactaggttaagagtaaacaaaggaaaaagaagaagactaagaataaaaagaataaagactcaaaagaagaccaagtcccatatgtggtagaaaaggaagagcagttgaggaaagaacaagcaaatccacactcagtcggtagacttataaaagatgatgcaagtgatgttcaagaggattctgcaatggaagacaagttctatagcctggatgaattgcatattctggacatgatagagcagggctcagctggcaaagtaactacagactatggagaaactgaaaaggaaaggcttgctcgtcaaaggcagctttataaattgcactatcagtgtgaagatttcaaaagacagttgagaacagtgacttttcggtggcaagaaaaccaaatgcagattaaaaagaaagacaaaattatcgcatctcttaatcaacaagttgcttttggaatcaataaggtttccaaattacagcgtcaaatccatgctaaagataatgaaatcaagaaccttaaagagcaactttctatgaaaagatctcagtgggaaatggaaaaacataatctggaaagcacaatgaaaacatacgtaagcaaactgaacgcagaaactagcagagctttaacagccgaggtgtatttcttacagtgtcgtagggattttggtttgcttcatctagagcagactgaaaaggaatgtctcaatcagcttgccagggtgactcacatggcagcaagcaacctagaatcacttcaattaaaggctgcggtagacagttggaatgccattgtggcagatgttgaaacaagattgcattcctcaggtatttttagtcttcttctaccagacacagtacaatgaacaaattaacaaagtccagcaagggtttgccttgagatacttgcctgcagtccaggttctcctcccaccacccagtctgagaaatggatgcggcggttttggaagaacccgttgaagaaatcttttttaccctcatttggctcaaaaccgcagggcggagaattggacagggcaaaccccctaaggtgccgggctctccactggaaaccccacggtggggccccacnnnnnnnnnnn

SEQ ID NO: 19721 - DNA, 538 bp, Homo sapiens
  misc_feature 1, 2, 3, 4, 533, 534, 535, 536, 537, 538: n = A,T,C or G
nnnnacgcgtccgagtcaacagtggtagtcaaattcagggttggtaagtttttccatagaaggccagatggtaaatattgtaggcttgcagaccatgtgggctccacgactcaactctgccacagtagtttgaaagcagccacaaacagccttggtgtgactttgttccagtaaactttctttatagaatgggagaaaatatttgcaaacaatgcattcaacaatggcctgatgtccagaattcatgaggaacttaaaaaactcaacaacaaaaatcaccaaataacatttaaaagtgggcaaaagatatgaatagtcatttttcaaaagaagacatacgaatggccaacaagcatatgaaaaaatactcaacatctctagtcttcagagacatgcaaattaaaaccacaattagatatcatctcacagcagccagaatggcttttattaaaaagacaaaaaataacagatgttggtgaggatgtggagaaaaggatcacttatatggagatgtaaattagtacaacctctannnnnn

SEQ ID NO: 19722 - DNA, 1475 bp, Homo sapiens
atagggagtcgacccacgcgtccgccctcacccgtgacacctcccatatcccccccctcaaccggaaggctgactgcccggagaatgccaccatgtctctgaagcatctcaccaagaagctgctaaaccgggatatccaggtagcatctccccacatcccccgcccccatcttggacatggctctcgttgatgcccctagccagactctgatctcagaagtcctgtggttgtagagatccaggtgggctgctgtgatgggaagagctccatctgtacacaggataataattcctgttgtctacctcatagaatgtttcaaagtgtgctttggaaaagggaaaaagtcctaagtagatataaaaccctaactaaggaagaaagcaggtagcagtggtggtccaagagaccgtgtagtggatgcaaggaccgctcgtattttacacgctatatttcagcaaagggtggcccatctggcaggaagatggggacatatgtcacatatagagcagttaaggaactagggaaagtggaagactcagaagacctgtctttgacctggtatgttctatctctacagaacctaatatggcttatacatactgccacagaaaggactgaggtagacagtggcaaagacttcctaggagttgaacccctgaaattacataaggagtaggaccccaccagaattctgtctttgtaggctgctgactgcagaagaaactgtgtagcggaggcagggggaagaggagtacagagagtacactgggaaggaagaaacggtttcttttctcttcatgctcttgtcttccttgcttgctcaggttgggaagagcggacattcctctgtggaagatgcccaggccaccatggagctatataagttggttgaagtcgagtgggaagagcacctagcccggaatccccctacagactagtggcagtggggacgctggtgatatgaggaggcagaggcagcacccaggagaaacagggcagtggaccaatggacagctccaccagctccacatctttggaagctagatttggggagagagaagctctaccccagacttaatacccattgaaatttcacctcaggtgttgtgtcctgtgtctggttaagtgtcccatgaaaggggaaagccttcacgtcagaacccaacccgctctcagaagaagagctcccagaagaaatcctctaaaaagaaccatcctcagaagaatgccccacagaactccacccaagctcattcagagaataaatgctccggagcatcccagaagttgccacggaagatggtggcaattgactgtgagatggtgggcacaggaccaaaggggcatgttagttccttggctcgatgtagcattgtcaactacaacggagatgtgctttatgacgagtacattcttcccccctgccacattgtggactaccgaaccaggtggagtggtatccggaagcagcaca

SEQ ID NO: 19723 - DNA, 744 bp, Homo sapiens
  misc_feature 1, 2, 3, 4, 5, 744: n = A,T,C or G
nnnnnagtaactaatcttatcattactgttagaaggtggggaatggtagaacattgcttttgggtcatgctaaccatgttcccgcatggctggtgattatgtcctgggttgggttctgcacggtagcctgctttgggttagggacagtcacacctggtctgtcctgacttctttctgggccctcctaaccaaaccaggggaggggagaaggacccaattcttttcctttggtgcacgtagcctggacccgttatggacagaggccaaaggaagataacagtgtggtgtccagagatgccaagtggttgatgggcagttctttgagcaaccttgtttatgagcctattgatatgcagatatagaggcatccaatactattgactaatttaaaatcttattcagtgagtcaacactctaaataagcaatggagatggttccattcatttttttgcaagtatcatttttataaacataaatttcctgagatttttgttttcatcttagcctctgtggagctgcttcgtggttatgataagtgctgtgtgatgctcaccttgggaggtctgcgacatatattgaagtcatctctaacctgaagtactgacagactttctggaagaaaaggcttgtaggaggaaacttcagaattctattaaatggtgtaaatgatgaaattatagttgatatatgctagagcatcagtgctgggtattttagaagggatggagtcatcattggctaan

SEQ ID NO: 19724 - DNA, 879 bp, Homo sapiens
  misc_feature 1, 2, 3: n = A,T,C or G
nnnccgcggacgcgtggggcagtttttctctgactctaattgatgcactggacaccttgctgattttggggaatgtctcagaattccaaagagtggttgaagtgctccaggacagcgtggactcctactttgagtacttggtgaaaggagccatcctgcttcaggataagaagctcatggccatgttcctagagtataacaaagccatccggaactacacccgcttcgatgactggtacctgtgggttcagatgtacaaggggactgtgtccatgccagtcttccagtccttggaggcctactggccttgttcctagagcctcattggagacattgacaatgccatgaggaccttcctcaactactacactgtatggaagcagtttggggggctcccggaattctacaacattcctcagggatacacagtggagaagcgagagggctacccacttcggccagaacttattgaaagcgcaatgtacctctaccgtgccacgggggatcccaccctcctagaactcggaagagatgctgtggaatccattgaaaaaatcagcaaggtggagtgcggatttgcaacaaaagatcgctttggctgctttgtgaagaatagattgaaagggtcaaaggtgagagccatctcacatccatgcaggaaccaagcaggcaagatataaatatgaaagtagaagaaaatagtctggaagaaaatcccctgaaaagcctacagtgttgggatcaaagatctgcgagaccacaagctggacaaccgcatggagtcgttcttcctggccgagactgtgaaatacctctacctcctgtttgacccaaccaacttcatccacaacaatgggtccaccttcgacgcggggatca

SEQ ID NO: 19725 - DNA, 565 bp, Homo sapiens
  misc_feature 564, 565: n = A,T,C or G
ccacgcgtccgggagtgcacccacaagatctaacagctgtttcagagctgctcattttagagtgattggtagggagttggtggctcagaggtcctaatcagaatgtgtcctgggttctgaatgactagcagactatcattaaccaaataaattatgggattttgtcttaattatatacatatacatatacacacacatacacatacacatacatgtgtatatatcccctaaaacttaataaagctcaaataataaaatcagatttcttaagtattccaatcccctttaaaatgtaaatcagattttataattcttttgttcaaaactgtccattggctcccatttcacttaaatcaaaagctagtttttacaataagctaagatagcaaacattattatctatttacttatgagttacttatgtaactcagcatccaataacactgtaggtgctcaataaaatagttgctgaatggataactttcactatttggatgagatccaacagaaaaggtcgacccacgtcaacgtgcacatgcaccaggagtcagctttgacacaacnn

SEQ ID NO: 19726 - DNA, 893 bp, Homo sapiens
  misc_feature 1, 893: n = A,T,C or G
nagcactttgggaggccgaggcgggtggattgctggaggccaggagtttgagaccagcctggccaacatggtgaaaccccgtctctactaaaaatacaaaaattagctgtgtttcagacagagcttagtgcagccagttcttgatggctgtgcaatgctttccttttaagagtggagttagcctcgtcataaagcgtgtttttgagtctgttcgaacgggtcaacaacgaagggaagtttcaggcagatcttgtatgcctggccctggtggctgctttcatttccttccagtatcagtgctaaacaggaatgaacatgttcaagccccgtctcacccacctctggcatcttcgccctaactctgccctagaagacctttccttccgtatcgtcaagaaaactgaagttgctgtttcactccttctcccacccagaaacttcgctgcatcttcctggatccctagctccttgcacccatgatcctgtctccttcctcagcccggcttctggctgagcagcctgcacttgctgtcttcactcctacacgctgcccccactcctacacgctgcccctgcgtgcttctcacttctctacccttccagccctgcactctggggacctgtgcgtatgtttgtgtgattatcaatctgttgaacccaggaggtcgaggctgcagtgaggcataatcacgccactgcactccagcctgggtaatagagcaagatcctgtctttaaaataataattatgattgggtatggtggcacacatctgtagtcccagctactcgggaggctgaggcacaagaattgcttgagacccagaggcggaggttggagtgagctaggatggtgccactgcattcccacctgggcggcagagtgagactgtcn

SEQ ID NO: 19727 - DNA, 1322 bp, Homo sapiens
  misc_feature 1305, 1306, 1307, 1308, 1309, 1310, 1311, 1312, 1313, 1314,1315, 1316, 1317, 1318, 1319, 1320, 1321, 1322: n = A,T,C or G
atagggagtcgacccacgcgtcaagtaagctgggtgttaatcggcgaggggctgcagtcgcaccggtcccagagtaataagggagagacactcccgagcgccgtaaatagagtccaagtgggcggagagccgtcccgcgccgcccgctcatgtctctacagagccgactgtccggccgcctggcacagctgcgcgcggcggggcagctgctcgtccccccgcgcccccggcccggacacttggcgggtgccacgaggacccgcagcagcacgtgcggtcccccggcgttcctgggcgtgttcggccgccgtgcgcggacctcggcgggagttggggcgtggggggcggcggcggtggggcggacagccggggtgcgcacttgggcccccctggccatggcggcgaaggtggacctgagcacctccaccgactggaaggaggcgaaatcctttctgaagggcctgagtgacaagcagcgggaggaacattacttctgcaaggactttgtcaggctgaagaagatcccgacatggaaggagatggcgaaaggggtggctgtgaaggtggaggagcccaggtataaaaaggacaagcagctcaatgagaaaatctccctgctccgcagcgacatcaccaagctggaggtggacgccatcgtcaacgccgccaacagctccctgctcggaggcggtggcgtggacggctgcattcatcgggccgccggccccctgcttaccgacgagtgccggaccctgcagagctgtaagactggcaaggccaagatcaccggcggctatcggctcccggccaagtacgtcatccacacagtggggcccatcgcctacggggagcccagcgccagtcaggctgccgagctccgcagctgctacctgagcagtctggacctgctgctggagcaccggctccgctcggtggcgttcccctgcatctccaccggcgtgtttggctacccctgtgaggcggccgccgagatcgtgctggccacgctgcgagagtggctggagcagcacaaggacaaggtggaccggctgatcatctgcgtgttcctcgagaaggacgaggacatctaccggagccggctcccccactacttccccgtggcctgaggctcccgcagcccaccctgaccgggactgacccgccttcgggaccccgctcccagctctgagaggtcgccaaagcctgcagcctggcctgggcctggccaccccttctttccctccgcgccccgcccccgaggagcctaataaagatctcgttgtggcaaaaaaaaacctcgtgccnnnnnnnnnnnnnnnnnn

SEQ ID NO: 19728 - DNA, 902 bp, Homo sapiens
  misc_feature 1, 901, 902: n = A,T,C or G
natcacaccactgcagtccagcctgggtgacagagcaagactctacctcaaaaataaaaataatcaatatagtttcaatgaagcaaagcatctcaggtaacaatttgagcataactttaaccataacttatgatagcataataacattcattagtaattcagtagccgtatgtgccaggctgtgttaggtgctttatatattgtttaatttttaaaaacttgtggagtgtacagattggtaaggtgacattgtatcacaaagctagtctttgagtccaaagttttgtggttttatgttatgatatacttttatcatggaattgtcttattaaatgttttgccagtggttcttaaagtgtgtttctgacaccagtagcattgacttcacttagaaacctgttagaaatacaaattatttggccccacccaacacttgagtcacaaactttgcagatggggctcaatctgttttaacaagcgcttcatgtaattttgatgcaggcctaagtttttgagccactgcagtatgcatttctatttttaagcaaagatcttggtctttctttttggacattgtagaaataacatgaactgtttttgtgttttgttggtttggtttaagctcctgatcttgtggttatgtggaaagatgtatcaggagaagcttcgcatggacatggatctgaaataacccattaattagtatcttctgaactcaatggttccagtcagagattggataaatcctgttggtgggtaagttaactcggtatggcggagacttggaaaatatggttttcatttgatggtggaataggttgttcgttacaaaaaaaggggggaataacgggggaagccttgaagcaaggaaaaagggaaagggaagtgaggtgggcactann

SEQ ID NO: 19729 - DNA, 447 bp, Homo sapiens
  misc_feature 1, 2, 447: n = A,T,C or G
nncgtccgctctggtaagcaggcggtacttctccttggatgtctcagccacagtgcctatcagggtactgagggagagcacacatggcccgaggccctcggagccctcggaggctgagtcaaaagagtctccctcgaattggtgggcctttagaagacttggcttcttcactggagagctataaagtaaacaccacactgagggccctcgtcccaggaaggccttcagagcattttcatttctgaacacgtcccctcatctttcaagattttctggtcctctaaagctgagaaactacaagcactgaaatgagatgagttttgataaggatggtaatgagcacaaaagcgttattcacattactcactgactttaatataattttgaaatatttcatacttttgaaaaacaaaatatcctgggcgacagagtgagactccatctgan

SEQ ID NO: 19730 - DNA, 877 bp, Homo sapiens
  misc_feature 41: n = A,T,C or G
ccgcaatggagctctcggagtctgtgcagaaaggcttccanatgctggcggatccccgctccttcgactccaacgccttcacgcttctcctccgggcggcattccagagtctgctggacgcccaggcggacgaggccgtgttagatcatccagacttgaaacatatcgacccagtggttttaaaacattgtcatgcagcagctgcaacttacatactagaggcaggaaagcaccgagctgacaagtcaactctaagcacttatctagaagactgtaaatttgacagagagcgaatagaactgttttgcacggaatatcagaataataagaattccctagaaatcctactgggaaggtaggtactgtataaggtgtcaagctgaggcacttttcacttgcaggtatgaatggagagtgttggtgtgaaacaagatcttcgggatcttgacccaaagaaaaggagccaaagggcatgtcaagcaattgaagttaagctcatgtttttaaagatcgtttattgagatgattttgaaatgctcctttaccattcataatttaaaaataaagtttaacaatggtttaaattcagaatggattaaaatggagttgggggtggaaagtagagccattcttagtaaatataaataactgaaaagttcttctgaggagactatgtacgaagttatcattgcatctttcagtataggcagatctctccctcatataacggatgtttcttggcgcttggaatatcagataaaggtaaagtttaagaaacttctctagcgggggatttagggaacttcttaaaacctagagttaaaagctgttgcgtgtttgttgtgttattttagaccaatcaacttcataggatgta

SEQ ID NO: 19731 - DNA, 902 bp, Homo sapiens
  misc_feature 1, 2, 901, 902: n = A,T,C or G
nnacccacgcgtccgaaaattcacagggtgtgttggcacacgcctgtaatgccagctactcaggtggctgaggcataagaattgcttgagcctgggaggcagagattgcactgagccgagatcgcgccactatactccagcctgggcaacagacatcctgtctcaaataaattaaattacattaaatgtttaagaagaagtctaaataagtttcatatgctgccctccctcagataatgagggaacctggggtacttctgggctactctgggggacaaagtataactattcaaatggcaagttgaattagtacagtctaggagccttggagatggcttcttgaaagaggtagaacctgaaattctccttccttgagggacggccaggatttggccagatggaaaggcaagtggaaggctttgcagggacaagcaatgtaagcagaacctaaaaatgggaaggaacaaaagtgaaggggaatgattgtgggtcaggggccaatagcgatgtgacattcagcctatagaaccatagggcagaggtgacagttgctggaatagatgggagctcagtttaaggaagatcgccaagccagacatcgctgttagatggatgtaatggggaataaactgccattgtcaactcaaaagtaaccagggccaggtgtgggggctcacacctgtaatcccaatactttgggaggccgaggcaggtggattacttgaggtgaggagtttgagaccagcctagccaacatggtgaaacaccgtctctcttaaaaatacaaaaatcagccggacatggtggcaggcacttgtagtcccagctactcagaaggctgaggcaggagaatcatgtgaacccaaaaggcagaggttgcagtgagccagctcacactacnn

SEQ ID NO: 19732 - DNA, 836 bp, Homo sapiens
  misc_feature 1, 2, 3, 4, 5, 6, 7, 8, 9, 10, 813, 814, 815, 816, 817, 818,819, 820, 821, 822, 823, 824, 825, 826, 827, 828, 829, 830,831, 832, 833, 834, 835, 836: n = A,T,C or G
nnnnnnnnnncggaagtcttctagaattaattaacgcgggggggtggaaagttctctattgtttgaaataataacgaaacattaaaggctctaaagtcagctaaccaatagtcctaaaaatagaatggctcaaaaagattgtccaattttggaaaactaacatttcaaaaagttgtttcattttttatgaatcctaagatttccatatcctagaaaactaacatctcagaaaaaaaaaaaaaaaagatggtaaaacacaattgccatcatctatgcctgttccggaaaaatacagagaagaagagagtgtttggtttttttaaccaggatttggaaagccattatttatctctgtgatagaataacaatatgttttggatggagggtaattctaggggaaattatatttctgaacaacaatgttggtttgtgcaggaaaatcaccaaagaacatgactagaaagtgtatagctacagtttccctcttttaaatgggaatagcaaaacatataaagaatattgataggccgggtgcggggctcacgcctgtaatcccagcactttgggaggccgaggcgggcagatcaagaggtcaggagatcgagaccatcatggctaacacggtgaaaccccgtctctactaaaaaatacaaaaaattagccgggcgtggtggtgggcgcctgtagtcccagctactcgggaggctgaggcaggagaatggcgtgaatccgggaggtggagcttgcagtgagccgagatcgcgccactgcactccagcctgggtgacagagcgagagactctgcctcaaacnnnnnnnnnnnnnnnnnnnnnnnn

SEQ ID NO: 19733 - DNA, 645 bp, Homo sapiens
  misc_feature 1, 2, 644, 645: n = A,T,C or G
nnacccactctctggcttggccaggtttaaattaataaaaatgaagatgaaaataagttgtcagatttaggatgtattttagaaacccaactgataatttgccaactaattggatgcagagagtaagagggagactcaagaacacctctaagatttttaccctgatcaatgggataggtgaaagtacattaatggagattgagaatcctggtggaggtacaagtttaggggtactgaagagtgcttttggacatgtgaattcttagaagcctactagattctccaaatggagacataaaacataattgaatacaaaagtcaggagttcaggagagggctgagctaaagatacaaatttgatagacatgagcatttaaaaaaaactgcatgaaaatactaaagataggctgtcctgcctatggaatagccattctttgatccctttactttcttaataaacttggtttcaccttactctatggacttcccccaaattctttcttgtgtgaggtccaaaaactctctgttggggtctagatcagacccttttccagaaacatcttcctgatgaaccacaaagggattatactaaagagaccccccaaccccgaggaaattgtctgcagcaccaattatccatgacnn

SEQ ID NO: 19734 - DNA, 510 bp, Homo sapiens
  misc_feature 1, 508, 509, 510: n = A,T,C or G
ngcatgtggatgggcttccttgcttggaatctgctctcttctccctttatcctactttgcagaacttctgaagtagctttaagccgctgtctggctctgtgaccctgggagagccacttgctttgttaaacatcgattttcctgtctgtaaagtgaagggacaggaccctttcagctgacacattctgtgaaataagattttatttttacattttgataaagcatattaggggctttatagtaggatgtgatttaaggaatttgcttattctaattgagacacaatggtggggagtgggggtcggggactacacaggtgcattttctgaacatttataaaatgaaaaagatggaggcttggctagaatggttaatccccttttcattcctctaattctatgacaatttttcttaaaaaaccaaacacaaccaaaataagagtggacagttgagaattacctttaggttcccatgaccctgaagactgtatttggccttggatccattnnn

SEQ ID NO: 19735 - DNA, 541 bp, Homo sapiens
  misc_feature 1, 541: n = A,T,C or G
nccacttgcctggctcaaacttcaggacctggggaagaaatggtctggctctgcggccttcaaaccatctggatctctggctcctcagctattccttgaagcttttccatgatgccccctgaaggtggctcaggggctgggggaggctcccctggggcttcagacagcacatagtagacaatctcttgctggccttgggcattggtctgattcaccacgtggatgacagaactggggttgtcctgagaggctgagagggctgtcccttcgctacccttgccctcctcttcctcttccttacgtcctggctcccctggcactgtttctagaataatgccctgcaggctgctctcgttcagcgacgttcccaggcccgatccctcttgtggttgccgcagcagttgctgtgtcagctctacactctcgtagcgaaccagctgcagccgcatatagccatcttcatgttccttgtacctggtgaggtaggagcataaagggcagcaaacccaggcagggggatacagaaatggccgcggacgcn

SEQ ID NO: 19736 - DNA, 1489 bp, Homo sapiens
  misc_feature 1, 2, 1424, 1474: n = A,T,C or G
nngaggtagttgaattaaactggggtactacacgaagggaaatggcaggaatatgcatttctttcccagcttttatatagatgtgcctgcatatgacactctttagagttcctttcaccttttctttgttttggaagggggcggggaggcaggaggagtgcagttttaagcctagcctatactactaccaacttattatggtactttaaattacagcatggacggtctatatcggagtctcccaccaggctgtctctgactaaatcagcctataagatcatcccttgggattaaacaaacacctgttctgtagggaatgtgtttcctgaatcttggtactcagacttttgtcaagagtaaataacatttcaaaagatgaatggaaaaatgattaagagagcatttctgctttcagcattaactgctaatggattaaaattttaatctgtatagcatttcctggagttaaagctcaagtactttccacatccattgcaaacttttcaggaacccttctaatttttttttttttttttttttttgagacggagtcttgctctgtcgcccaggctggagtgtagtggcatgatctcagctcactgcaggctctgcctcccgggttcgtgccattctcctgccctgcctcccaaatagctgggactgcaggcgtccaccaccactcctggctatttttttgtatttttggtggagacggggtttcaccgtgttggccaggatggtcttgatctcctgacctcgtgatccacctgcctcggcctcccaaagtgctgggattgaacccttctaattttaaagaaccttgttattagaaaatctcagcctaatacaatctgaagttaagagttttagcagcattgtttttctaagtagatttagctatagattttcttctggccaaacaaggaagagtatatgcccttgtaaatgagtcttgttttgtttatttaaatagtcagtcaaaacgtagaaatcagtatacgtaaaataaaatgcatgagactattaaatcttttcatatactctacaaataaaatgaaatctgtgtgtggtcctggttgactgggcatctaaagggaatcagaaaagagattgtgaaaagttatatatatatcctcttccttattttagttttgctttttcctattttccataattaagtgccgtttacaaagtggcatcaaaaaattgaagcaggccaggcatggtggctcatgcctgtaatcccagcagtttgggaggctgagggcaggtggatcacttgagatcgggggttcgtgaccagcctggccaacatggtgaaagcccatctctgctggaaatataaaaattagccgggcgtggtggcatgtgcctgtagtcgcagctacttgggaggctaagacaggagaattgcttgagcctgngaggtggaggttgcaatgggctgagatcgcgccactgcactccagcctgngcaacagtgagacac

SEQ ID NO: 19737 - DNA, 1499 bp, Homo sapiens
cgcgtccgtccacgcgtccggggacggaatctcactctgtcgcccaggctggagtgcggtggcattatcttggctcactgcggccctcactcctgggttcaagcgattctcctgcctcagcctcctgagtggctgggattgcaggcacgcgccaccacgcccagctgatttttgtatttttagtagagacggggtttcaccatattggccaggctggtttcgaactgctgacctggtggtccgcctgcctcggcctcccagagtgctgggattacaggcgtaagccaccacgcctggccaagaaaatcaagatttacctggtttatgtgttgaccagctatacacagagaattctagatttttttctaaaaattattatcaaacccccaatttcaccagtagaaaaagagatcttaagatttctgtgttttttttttccagcataactcagttacttatggctgggagaaaatatgtagggagataatctaatacctaattcgaaggaagaaaatatctaattctaagtcttgagttcttctcatcagaccatagcaggatttaacatttaacatttttcagaagcttctaatagacttcattcagttttttgtccacagcagtggcatttaaattactgtactttaagacatggaattgctggaggcttggaaacttgagtgcaatttccctagtacgacctccaaggagaatagagcaaaacagtggtaggaaaaactctcaaaattttacccaattgtatgttttctacattgtcagtatctagttttatatagttaatatgtacttctaaaatttctgacagtgtttggtgtataaaacagaccaagctcaagatgtaaagaagattgagaaattccacagtcaactaatgcgacttatggtagccaaggaagcccgcaatgttaccatggaaactgagtgaatggtttgaaatgaagactttgtcgtgtacttaggaagtaaatatcttttgaattagagaaagtgttgggacagaaagtactttatgtaactaagtgggctgttcagaagcttagaggtcattttttgtaattttctttttaattactttagagagctagggatgcaaatgttttcagttagaaagcctttatttacttttggaaattgaacaagaaatgcatctgtcttagaaactggagattatttgatgttaggtaaaacatgtaattgtttctctggcaaatttgtatcagtaatttgaaaatgagatattaggaaaaaccaattcttcttaaatttagttccatctttctttaaagaaccttaatgttaccattttgtgcgatcaggtttttcggcgcttaaaagttgctgttggtgccccatcatttacacttggtgtgcgattatccccccataggttgggctgggtcatccggggccatatgtaagggtcccaatctgagatggggcaaaatgtgtcgcttcccaaacgggaagaggcacgaaga

SEQ ID NO: 19738 - DNA, 947 bp, Homo sapiens
  misc_feature 946, 947: n = A,T,C or G
cgacaattagcaagtattccttcttcatatattatgtcagaagagtttgagaagaaatggtattaattcttctttaaatgttaggttgactcaccagttaatgcagctattggtcataaatgtttcttgttaatcactttcgattactaattcaatctgctaggttataggtctattcagattttctctttcttcttgagccacttggtagttgtgtctttctagtgattcgtccatttcatccaggacagctaatttgttgttagacagttgttcacagtatactcctgtaatcctttgtatttctgtaaagttggtagtaatggctctgctttcatttattattttaataattagtcttccatcttttgctcagtcaatatagtgaaaggcttgatctttcaaataatctatgtttattcattctactgctctccaaacttctattttattgatttatgctctaattatgctctctattatttctttcatactgctagctttggatttagtcttatttgtcttcttccactgcctttaggtatagagtgaaggatgttgatttcagatttttcttaaatgtagttatttatatccataaattttcctttgaactctactttcactgcattcaataagtttcggtatgtctgtggctattttaatttatctcaagatattttatactttgcctgtgatttattttcttcactcactggtagtgcagaactgtttgttaatttccccatttcgggcaatttcccggtttcccttattactggtggttccttcctggggcggcaatcattttggtgtttccccttctcacaggtggcgcctttgggcggaagatggcccctaaaaccttacgaagggataatcgggggggggccgttggataccggtgtgcgggctgttccagggggggcccaaaagggcgcgcaann

SEQ ID NO: 19739 - DNA, 1542 bp, Homo sapiens
  misc_feature 1, 2, 1541, 1542: n = A,T,C or G
nnagtcgaccacgcgtccgcttaccaaagttatttctataagctcaagagtgtggggttggtaagttcttccagctgaagccactttttccttatagttaatacaaatgactatttttactttaaaaggcacagctgtcctggtgggaaatgaacacctccaccagttcaggatgactaatgaaagcaattagcttgaacatttagaaaaaattcatatatgatctaaatttttatattatcatttctgtgccttctaattcctgcatcctgttcaaaacatctttccagacattaacttacacattgtataaaaccgaccaaaatgatttcctaaagttcatgcaaaaaaaaaaaaaaaacaacctaattttctgttaatataaaagaaacttcagtttactgaccgtgaaacagactatgtactgacatccagggtaaagtaaaagacttttaaatattggtcattaaaggacaggagctaagctagcaaagcaaaacatctttagcactttgcagatctcaagcagttaaccaggctctgattcccttccactgttttatgaattaattccagttcttttcatgtatctttgaacctaagattatgaagtaatttccctattagggactagaatgacttcagttttttcatttgataaaaatcagaactgctacctttcccttttttaatgatgcaaaatgtagatgagtgcattaaggtttgtaagatctttatcattttatgtcattcattgaaaattgaaatgttcattctttttaatgttttcctatttccttttgcctagcatttgactttggtgttttaagttctgtagttccatgacatcattgtttgctgttgtgttacagagagagaaggaacctcacctgtggctcagctcaccccacatccgtttctcattacgtgtaaataaactgtcagagctgatgttacagcttttacagtttaaagcattcccctcgtctctagttccttttttcttgtttacatgttttgggcactttccctcattcaccaccttccagggtttcatagaaaataacttgttacaaaatcagttcaattctaatgtggacatagtggcatgttcataattagacccatataggggacactgagctttaaatcgttgattctaaactctatacattaaaaaaattcagcccaggcccctcaaagcctgagaaaatttaatttgctcttaatttaatgttccaaaactcactcttggaaaaatgcctgttggaaaactacaggtgggtcacatgtgggggctgtctccgtgacactcaggattccagtcagaacctaatcctcatatctattgcctacaaaaatagaccaagaatgttgctgctcttttataatcctttaaatatttaacattcaagttttctttgtcttaaattcagcctcttcctaaaaggaaaaaaaaaaaaaaaaaaaaaattttgtgggggctggccgaaaagttttaaacaatttgtggggggggccaaggaaaggaatggtaaggnn

SEQ ID NO: 19740 - DNA, 1055 bp, Homo sapiens
  misc_feature 1030, 1031, 1032, 1033, 1034, 1035, 1036, 1037, 1038, 1039,1040, 1041, 1042, 1043, 1044, 1045, 1046, 1047, 1048, 1049,1050, 1051, 1052, 1053, 1054, 1055: n = A,T,C or G
ccacgcgtctgggtttctcgcctttgaaacattttttccccttttgtagtgacagtgccactaaatagtcagcttttgtcagtcccccaggaaagtgctatcctatggcctaactagccaagccttttttctttcatttaaaagaaattagctttaatttttacctttaattacttattcaaataagacagaaatatattttccttgcaataattaaaacattgcatataggccataaatttccttattttctctgaacgatcctgattccagtcatcttgttgaataccctagttctaataattgactcttgcttttctagagaaatatttccaaatgatgctagttttgtctcttcctttcaaagttgtataccacttctttttcttgtcattttgcattgcctgggacctccagaataatgtttcatgaagtagcatgtatccatatctggttcttgactttttcatcattataattgttttctatgggttacttatcagtttaagaatgcttaattcctagatgaactaagagtgtttattacatgttgagatttatggtatgctttttcttcctcaagataatgcattttttgtattatctgttaatgtgataggttatccatttgtgtattttcaatcattgaacaacccttgatttttttggataaactctatttggtcattatgcatcattctataaaccctgctgaatttttcatttgccaacatcttatttcagattcttttaatctgtgtccaacaatgagatttgttttcttttgcaatttgttttgaatttttggtatcagagctatactaaccttataatggaaaatacatatttctcaaacttttacactgatatattcatagtatttttttataatttgaaaaatcttgtcagtatctgtattaaggcctccatttcagttctgctatttcatattgccttaggttgtctatttgtctctttaatgaacccgattttgattttgtcatttttaaaataaacacatttatgctannnnnnnnnnnnnnnnnnnnnnnnnn

SEQ ID NO: 19741 - DNA, 1324 bp, Homo sapiens
  misc_feature 1, 2, 1314, 1315, 1316, 1317, 1318, 1319, 1320, 1321, 1322,1323, 1324: n = A,T,C or G
nnacagccgagaagcagaaacacgacgggcgggtgaagatcggtcactacattctgggtgacacgctggtggtcggcaccttcgtcaaagtgaaggtgggcaaacgatgaaattgacctggcgtaaagtagctgtgaggatactcaatcgacggaagattcgggagccttgagtgtggtaggaaaaatccgcggagaatattcagaagctcaagcgttttcaggcatcctcgatataattaacactgtagccaggtcatcagtacaccatcgtgatattttcatggtgatggaatatgtctcaggaggagagctatttgattatatctgtaagaatggaagggtaagctgttctgctttaattctgtatgtattttgtaactcccctttatcctttactagcatcaaaatgtcagcaaccaattttaagaggtctatttaataaccagttcccttagtcatatatttgtttagaatcataaactatgtagaactagaaaggatcttaaagattatctccttagcctgtttatacagatgtggatactgagcctcgcggcttatatgattgctcacagtaacgtgatttattaatgacggaattggcttgagcccccagaactcataatcctcagacttatgcttccagggtatacaaatactttgaatatgtatcttaatgtaattaatcgttacaaaatatattattattacttaaagatctaggccttgctagtcaattctagccacatttaaattgcattcattttttggtttcagaaatctgatgtacctggagtagtaaaaacaggctccacgaaggaggtaggaattagatataaagaatttacagctggaaggaactttgtaggacattttgaacactaccttaagttacagatacaaaaactcaacactgccctctgcccatactttttctcatacccaggttatgtggtatgcaaaagcccctttgtgggagagctgtagctagccctgaaaagagagcttttctctcaattttaagttatttacattactcattcatttgttctatatagcatgtctatttacttttatcaaaatcaaacttattaaccaagttaattttgattttactatttcttaacatgattcatttctatttcaggtactcccctttactcctgcttctccttaccaaaaaaaaaaaaaaaaaaaaaaattcgagggggggcccggtacccaattggccttatagagaggagtataaaattttaagtggccgtgtttaaaacaacgggatgggggaaaaacagcgtggtgccacccaaannnnnnnnnnn

SEQ ID NO: 19742 - DNA, 501 bp, Homo sapiens
  misc_feature 1, 2, 481, 482, 483, 484, 485, 486, 487, 488, 489, 490, 491,492, 493, 494, 495, 496, 497, 498, 499, 500, 501: n = A,T,C or G
nnccgattgtcatctattttacttttacatatgtgataaacctaacactacatggtcatttttgtttaaacagtcaattaccttttaaagggatttgaataataagtacaaaatctaatacattaactgtgtagttagcatttctggtgctcttctttcttttctgtagatccatacttccatctggcattattttcctactgccagaaggacttcctttaacatttcttgtagtgtagatctgctggtgatgaattctttcagcttttgtaattcttttgtctttgaaaggtattttccctgagtataggttaatagctttttcctttcagtactctaaagatgttgctccaggccaggcgcggtggctcactcctgtaatcccagcactttgggagtctgaggtgggcagaacacttgaggtcaggagtttgagaccagcctggccaacatggtgaaaccccgttgctactaaacatannnnnnnnnnnnnnnnnnnnn

SEQ ID NO: 19743 - DNA, 535 bp, Homo sapiens
  misc_feature 535: n = A,T,C or G
gtgacatgctggctgctagtcagctcccaccatgattgtcagcttccgagccctcactagaagcagataccaccccaccaccatgtttcctttaaagcctgcagaactgtgaaccaattaaaactcttttctttataaattatccagcctcaagtatttatagcaacacaataatggcctaacacaacctacaactctctatatgtatttgtgtgtatttaaaacatgcaggaaataacacagaatccaaggcacccaaaactcattaaaaaatggaatcaagaattcatatgccattatgaaattagccagtcctaaaatctgacctctctgcattttcacattattctcctctctctatccctgccttcctccctcccttcctccaactgtcagaattgtcctgtaatcaaacatgttcacatcacagcttttcattttctatttccaatcaattgaccagtctagaccaagtagcatcctggatccgtattacatattcctagacagtaagccagattttttttttcacacn

SEQ ID NO: 19744 - DNA, 665 bp, Homo sapiens
  misc_feature 1, 2, 3, 4, 5, 6, 665: n = A,T,C or G
nnnnnnattcacgtgggaaaaaaaaaaaaacctataaataattctgtcaaacagactatctttcctagatctaacttgctttagaaaatgtatataggaaattgcattaacatccctttagcaggagacaattcttaaacttaaattaaactgaaaaagccacagaaaaaagggtttgacaccctaaagccagtgtccaaatgaacgctacggttgacctcataggtgtgttatgaatgtttaccctgacctcctagaagaaaaggaaaaagaaaggaaagagagagggagaaggtgagggaaggggggaagaaaagaaaggagagagaagacagagaaaaaacagggagggaggaagctggggaaggaaaaagaccatttgctgactccgttgttttatttcccagaatgattcaatacctcaagaagatttcactccagaagtgtacagagttttcctcaacaacctttgccctcgacctgaaattgataacatcttttcagaattgtaagagtacacattttaagccatatctttttcagcttgcattgattctcaggtggctagagcaggacttggagtggtaattggagatggaagaacatcatacactgtgtctaaaagcaatattcctgtgtgatgttttggtaggatcacacaatcn

SEQ ID NO: 19745 - DNA, 940 bp, Homo sapiens
  misc_feature 1, 939, 940: n = A,T,C or G
naaggaaagcgaatatgctaaagacgacgactgaccgaggacagtagttgtcctttgttcaacatgttgttccccctgctcttcctgctccggggtgtgccacccctgtcgattggaataggctctcgccctgaatttccctctctatacgggtgccatttcataatctagtgtgcgcttttcttccggtctggataggatggctgtctacttttgttgggtaaaaaacgattgaagggtaacgcagtctttggctcaacagccgaaatccttcgatacgacatatcatctttattataatcctgcatcttgaatgtaaattccgaatctgtgtcactttcaaaaccttcacgcccccctctcaacgtgatatcagaggagcagcttgtcaatgacctcgagcccaaagagtccaagctttcaaaggaatcttctctcttatggtgccttggaggagcaagaaattctccacgttcaggacaccagatgtcaccgtagccactgtccctgccacttcttttcaggaagctggagtcttcgagtgccttcgtcagtgcttgtcctaaaagattctcaaacgctttcaaattaagatggggaccattatagtacgggttgctttgtgcttttcttcccagccagtacaatgttatcaaaacatttttcactctcctgtcagtctcttcttgcctgcccccacacccagcttccagcccatgcctccatggttaacagggaatctgaaattcttcaaggggcttgagcagaggtaactgcccagttcaaactccaccctgctaccagaataagtatccgccttgctttgttgcccagaacaactgcaactcatgagtgattctgtccccagccctctacttcctgaggccacttcccagagcaatgcatggattcttcctacagaccccacccttcaaaagnn

SEQ ID NO: 19746 - DNA, 2119 bp, Homo sapiens
tacatgaaggatttggctgctttatataaatatagaaacaagcccagtggattactccactaaaggtgactaagcaaatgttacagttcagaagttccgcaaagagacaaatcattgagaataatttagcgcagccctggacgaacccccaatctgtcgctttcccagaactccttgggctctctcaagacccagcaattcaggtgttaacataaccctgtccagtggtatggccagtgtcttagtccaatcttttgccataccagtcattacatattttgaataccaacttggtggaggaatttcagctccctttcagcagtagcctagtgggcaccacatctctattcttcattccccattccagcttgatgctgaagggatgaggcttccagactccaaacccctctcagagtcttcatctgcttgttgcattttttcattcagctcctgaaggaatgccaagacatgcaaagcctcagaatctgctccatttttagaaagtcgcattttggcaattttttgcagtttgtctttcatcttttctttctcccttgatttctggtttatttttacaccctctataaagtggtggatggccttgtcttcacacttcatttggtacagctgaaagttgccataccgcagatggagcagttgtttcgctacaggagtaagctctttactgaattccttttggaagtaatactctgcgtcttcatactgatctgctagagcatggaggctggcaagaatggaacagacacggaagagattatcattggcctcatcagctttcttcagatgagccacagcgtgtcctattagttccagtaactttcttttcccatacattccattctctcttagattcattacttggaagacttttgccctatagcagcacccaatttggcaatgcaggtaggcattgtttggtatgtattctaaagcctttttaagcagttcaatcgctttgtctggctcatcttttcttcgataaaacttggctgcactgcgaagaacatctgttacacctggggctttctccaaggcttcttcaactaacttctctccttcaccttcctcttcaccttcttcacgcatcttatgaagcttcagagccaggaggactttaaggtacctcggccgcccgccgaggtaccaaatgaagtgtgaagacaaggccatccaccactttatagagggtgtaaaaataaaccagaaatcaagggagaaagaaaagatgaaagacaaactgcaaaaaattgccaaaatgcgactttctaaaaatggagcagattctgaggctttgcatgtcttggcattccttcaggagctgaatgaaaaaatgcaacaagcagatgaagactctgagaggggtttggagtctggaagcctcatcccttcagcatcaagctggaatggggaatgaagaatagagatgtggtgcccactaggctactgctgaaagggagctgaaattcctccaccaagttggtattcaaaatatgtaatgactggtatggcaaaagattggactaagacactggccataccactggacagggttatgttaacacctgaattgctgggtcttgagagagcccaaggagttctgggagagggaccagattggggggtaggtccacgggcttggtgatagaattatttctcgattgacttcttgagtgcaatttgaactgtaacatttgcttagtcacctttagtggagtaatctactgggcttgtttctatatttatataaagcagccaaatccttcatgtaatattgaagtccatttttgcaatgttgttccatacttggagtcattttgcatcccatagaggttagtcctgcatagccagtaatgtgctaagttcatccaaaagctggcggaccaaagtctaaatagggctcagtatcccccatcgcttatctctgcctccttcctcctccttcccagtctatcatcaaccttgagtattctacacaatgtgaattcaagtgcctgattaattgaggtggcaacatagtttgagacgagggcagagaacaggaagatacatagctagaagcgacgggtacctcccccgctgtccacaagaagactttcag

SEQ ID NO: 19747 - DNA, 2110 bp, Homo sapiens
  misc_feature 1, 2, 3, 4, 2107, 2108, 2109, 2110: n = A,T,C or G
nnnngccatgagattcaacagtcaacatcagtctgataagctacccgacaaggtggtacagccatggagatgtcacgatggtaggcaaaacaagcagacagtcaggcaggatttgataaaaaaacaaaaacaaaaacaaaccaaaaaaacccaggcatttctggcctgttaagatcgaacccctattctattctattctgacattgtgcgttttgtttttttaaaggaaaaaagtaaaattgtttattttcctcccaagcaaaacaaaatgaacaagttcaatcaaaaacatcccaatggaaaaaaatcacactaagaataaaacacttacagaacggcaagaaaactgggttaacatataaatttgtgtctgttgaaaccagagtacatgctagaaaacattaacacagatacgacagagtgtggtttttttttagaaatgggtaatttctctctccagtatcctttcacttgtatgagatatttctcctctcctgttttcacaaaccaagaaatccccaggtaggccaatcccagaggtgccatttagcagtatgcagcagcccagtttcagcataacaaaacatgccttggtagtggctctctcatgcaaataaaagaaagcttaagaaattcttgttgtaggtggattaggcaaggctgccattcagctggtataagctaaaagtaaaaaatcaaaacgctcaagaaaacggacacaattttggaatgattaaagatgtctttataaagtttttttcaagacttcattctaaatacacagaataaaaaatggtgtcagctcacttgtaagacaccaaccagattttccttatactgtctcaaaatttaaagatcaatttccccagagggtgtgcaatgcatcataaaatggcccttttttgaggatgggagaggaagggttgggcaggatggaatattaaattgtaacatgataaacatgcaagactgttatcccatctagataatttatatacacattttgagtgacttaggaaaacaaagcaatcatttgtgacaagcctaaaaagcttgacatatttaacatacttaggaactttttttgtgcggtgggaattctctaattgtatcatgtgggccttttgaaagtaccaacagaagcccagtctgttccaagtttgctgctgaacctcacattccaccctaaggaaaccacaagggggattgcatccgagggtggataccctctacctcacccccgaagggaaaaagtatgtccgctccaaagtgttggactgaactgcctttccgggaaaaagtgtgtaaaaattgatcacccacggttggaaaaagggaattcttccctcccggctgggagtccccccccattttaaggcgaggacccctccaccccaatttcggccggttaaacctttctcccacttagttaggtttcctcctcctgaggtccaccccctgctggaattcctgttggcataacccttgtgcccacaggagtttatgatagataggatgtgagtaccaccccccctggccaacgagcccatcttgtccaacaatcgccggagccagacccggtgtctcccccgtggtgtgcccccacttcgccttttgtggtgaaactctctgcccttgaggccccccggtaactcccgagaaaggcttccgcaagaagagatgggggcccaagcccgggagcacgcacacaccccggaactcacgaaggcacgggaatttggaataaggaaagaaggagaaataaaaatattataaaaatcacgaggggaccgccgagaaattccggggagccccctgtttaaggtataaaaaaaaaaaaaaaaaaagaaaatttaactccatctaaccaccccccttaaaaaccaaaatctctcccaccaacatgtctgggagaaaccaagagctgtaaatcagaaaccgcttccagcaaaagagttagtcctcagagtaaggtcagctcagctgatactgtactctggtatggcacaaagaataaaatgaatgacttctcagaagtcccacatttatcaccactagttcctgtaagaactggtttgaaccaattaataaggatatgacttatgcnnnn

SEQ ID NO: 19748 - DNA, 1113 bp, Homo sapiens
  misc_feature 1110, 1111, 1112, 1113: n = A,T,C or G
acgcggtgctttccaaacagcataagaagtgattgagcctttagtatactgaaggaagggctccctcgagttctggtgtgaagagataaatcaccagaaaaatgatggcatcaaaacaaaaaaagaactcattgtgaataagaaaaaacatctaggcccagtcgaagaatatcagctgctgcttcaggtgacctatagagattccaaggagaaaagagatttgagaaattttctgaagctcttgaagcctccattattatggtcacatgggctaattagaattatcagagcaaaggctaccacagactgcaacagcctgaatggagtcctgcagtgtacctgtgaagacagatacacctggtttcctccttcatgccttgatccccagaactgctaccttcacacggctggagcactcccaatctgtgaatgtcatctcaacaacctcagccagagtgtcaatttctgtgagagaacaaagatttggggcactttcacaattaatgaaaggtttacgaatgaccttttcaattcatcttctgctatatactccaaatatgcaaatggaattgaaattcaacttaaaaaagcatatgaaagaattcaaggttttgagtcggttcaggtcacccaatttcgcccagtgtaatgacattgtctttggatttgggtccaaggatgatgaatataccctgccctgcagcagtggctacaggggaaacatcacagcaagtgtgagtcctctggggtggcaggtcatcagggagacttgtgtgctctctctgcttgaagaactgaacaagaatttcagtatgaatgtagccatgcaatgaggcagtggtgttcatccttcgcgcaaaccttctgcatcatcggaaaccttacaggggggatcgcctcgggggcgcatctggacaatttctccctgtcgggcccccttcggggctcatcccacgggggtgtcccgttgcgacactcctacccacaccgtgagcttgggggaaatgtgcgcctaaaaaaaaacgggtgcgcacctcattttatgcggagcgaccacaggagtttacatcacgggggacacaatgtgtcatggctcattttcctctctgnnnn

SEQ ID NO: 19749 - DNA, 502 bp, Homo sapiens
  misc_feature 500, 501, 502: n = A,T,C or G
gcgtccgggtaaacaaaacaaagatcgtttgttctggaaacaggtaaaatggtaatcaaatagattgtgttccaggagtgcaaaggtggcttaatattcacaaatcagttgctattgtacaccacctgtagaaaagtaatctggcatgcagaacattcttatggtaaagttaatgttcatttatgatcttagcaaatgatggattgaaagggacttccttaattgcataaacagacttcaacaaacagtatgatgaaatagtgaacatttctcctaagattataaaaataagacaaggatatctgctgtcaatgattttattcagcattgttcagaaggacctaaccagaaaactaatgcaagaaacagaaacaaaaggcataaagattagaaaagaagtaaaattttaaaaaagaaaaagaatataaatctctatttgcatatgccatgagtaaatttggtaagttccctgcataaaagttatgcaaaaagcattttannn

SEQ ID NO: 19750 - DNA, 514 bp, Homo sapiens
  misc_feature 508, 509, 510, 511, 512, 513, 514: n = A,T,C or G
accactctatccatcgcggatagagaaactgaagctctctaaagaccctgcagctgggaggtggcagagtcaatggcagccctcagccctatctgccctgacatggcattcctcccatttctcaccaccgaaccctctaaaataacaatgtgtggggtccttggctgagagacttcccttttgggaatcaatctgaatgtatgatgacaaagaaaacaacttttgctttatacaaccttctggttagattcaggcaccaagcaggacacttctttgtggcgctccaagaatctttcaaattcttcatcaccaataacaaatctttctgcttctcttagagcatcttctccacaattctcaccctcaattaagaggcactggaacactttccagcggacagggtttagtgctttgatctgttccgtcatgtcctcttccacgttgaaacgattaatgacagaatttatcttggaagcgactctataatccctacaccacctcctcagcnnnnnnn

SEQ ID NO: 19751 - DNA, 1175 bp, Homo sapiens
  misc_feature 1111, 1172, 1173, 1174, 1175: n = A,T,C or G
acgccaccatgcctggctaatttttgtatttttagtggagacggggtttcaccatgttggccaggctgttctcgaactcctgacctcgtgatccacccacattgtcctcccaagtgctgggattacaggcgtgagccactgtgccatgaggattagtaaagtgcactcatgttaagtaaaaaatttgttttatgtttatgctgattatatgaaggtcatcatagcttagacacaatcaaaacccatggggaacatctttagaattcatttttctcttttcttacaaaaaaagtaaataggtaaaatggaaaatagaagacaacctatcctatcctggatgagacacacacatatttaaattgaattatagacttaaaatttaagtaggaatattttttttcctgagaaacaaagtcacaaaaaccaaaactttcagaatcaccaagtcttgaaaatagattatgaagcagactttttggatggtgcttaatgacatcaggcgacatttaaatgccacctagtgaggaacactgaaattgcagctaaattaaaatgaccttttatttgcctggacaacaaaaattttccatgattttgcttttttgaaacaatgataagaaatttttttttaggcaataagatactaagttgtatcaacaaactgcatgggatatttccacaaggagaggattttgttccctgatctagtttacgtgacattttcccttatgcttgctttctctgagctgactcttcttaaactgacctagatggtaccctatttcaactgactcagagttcattcaaaaatatgatatggtgacttggcttcactgacatgaaatccaggcactctctctactcttgctcacattcttccttgcccaaggttccagcgtgattttaggatatcttatgccaacccagtgtaacgtcacttctcagagatgtagggccaaccagctactcaactacactcctattcttttgcttgacagcctcatgtggccagatgataggcgaacaaagcaatgcaagcactgcctccatgtcaactccatcatcaaatggaaagcgtatctttgttttgctcaggatctttgaagagaanaggacacaacaggtaccacacacataggtagccagcattcatggaacaggcaccgtgggcnnnn

SEQ ID NO: 19752 - DNA, 3155 bp, Homo sapiens
  misc_feature 1, 2, 3, 4, 5, 6, 7, 8, 9, 10, 11, 12, 13, 14, 15, 16, 17,18, 19, 20, 21, 22, 23, 24, 25, 26, 27, 28, 29, 30, 3154,3155: n = A,T,C or G
nnnnnnnnnnnnnnnnnnnnnnnnnnnnnnttttttttaaaagtgtaatttcctttttatttgcatctgtttatgactgaaaaaatgactagttattatgaagacactactgttgaagatggatattttaacatggagtttcaacaaaattacttcttgagacagagctgatgtgttttttaaataacgtgattttaagcatatatttgaacaaaactaaaacatttagtattatgaatatgaaaaaagatcagtaaatcaatgtactcttctaggctgaattaaggtagactatttaaggtttcaaaaaagtttggctggggcagaataagttttacaaaacccatgccatccaaaattaagatgacatgtagcagcaagaagtattccaatgtctcataaccagttctcgcaagcaatgtgtattccttactttaaggaagtgtcaaacaaatagaaaaatctggaagaatttactaagtgtaataaattagaggtaaatcgtaataaaagaatttatgtctcacaaaaatattcacaagtgggagttttcttctaccaacttctcagagtccttctagccccctcttcacttctgaaagatgggatttaccaaaatctggtttacatttaacttttcagggacacatgacctgaaaagaaagatgtcagataatactgacattgcctcatgcactttctttgtatcagtccttcttctgtaagtaatcagaattgggtccaaatggcatagaatcaaacattatgtatcatgccaaataccacttcctgcccaacaaaatttcatttttctccagtaatgaagaggtggacattcttgttggactgtagcatctgtgccgcccgctccacaccaaccacggcagctaacctctgggcatcatatttggagtagagaacagtgcaggtccacgtggcctcttctcctctgttggtggctctcagcatattacagatttcactgtaaaagtgtggatatgtcggcagttcatagaaaatcaggttcctgatgccttttattgtataccttttgtagaaatggaagcgctctgtgaaaagtagaaactgtttctctccttgaaggaagaagtgtctggccctggagacaccagacttctgcgtgtactcgcagatgtgggtaaaattcaattcctccttcttgaagtaatttcgaagacgcacgaagtcaaagtaggaggggatatagatgagcgtgtgagacatgactgcatcacgatactgtggcaaaatcttgttcacaaaaaagttaaacctggcatcaatcactgaagctaggttttcagcttccatcctctggaagacatgtgggagctgcaccaggacatgactgatagagcctgtcattgggacattcctcacggccacctggccttgcatgttgacacagtacttgttgaacactgagttgatctgggcatcctgaagggccccaaatagcagtgtctggcgatagtacttggaccaattattgaggctccacatccgcactcgagaaaagtctaccccatgtgagtccaggggtagtaggttcatgtgattcatcaaatgcaggacatgctcccagttctgcatcaggtaaatgtcagcttgatcaatgatgagaagctcgatagaagacagaaagtcaaaatctctcttcttctctccttctccaccaatgatggtcctcaagcccaggggggaagcaatgaggatatccgaggagtaaaacggggcatagagtcggatgcttctctgaagtattgccactccaatcctgaagtggtcatcaatattgcccacaaatacggcttcataatcctcaggcctcttcaagttgggtggtctctcctcgggatctgatccatattctccctgaaacctctttttgttgctcacaatgattttcttcttgctgtcaccctcgaggaggctgatgaagagctgcaccacccgcaaagcagcttcccggaatggcaccactatcagtaccttgggccttgttaacccttggtctctgaagtcatcatcatcacccactccaaacttctggcttcggcgtctgctattgttgccaagcacctgggcattggctttgaggatgtgatttatcacatgcaggcaatacacatggcggatctcttccccgttcttcagagcagtcctttccgggtagaacaggtcccggtaagaattcataattaagaagagttctttctggaggggggtgaatgggctgcttgatttttggggaccagataggaactggctgttggtcttagtccaggtggattccagaggcttctggagatgaagtgactttaagtcaatatcctttgggggtttaaatgtttccaacttctgaaacttagaggaaaagaaaagctggcccagaataggccatttaagctcgtgggtagttttgggatttgtggcaacagcctgaattgctttttctttcagttctttgttcacatgttgaagaaatggatcttgagaggctttcaaagaagagttgtctccactttcctcttccagaaaattggtttccaggctgaacagtgactcgtgttttgcatctgtgaactcttcaggggatgtttgtgatgtgcccggtggctcttccccatcttcttttccctcagggtcagcagataaagctacattctctggactttcagtagactctgcagccatctcttcttccacactgacatcgctaccaccatcttcatcgttcatttctgcatcatctacaatactgtcttcttcctcttcctcctcctcatcttcctcttcttcctcagaaacattctttaatgtagcaagtagtctgtggtagccagaaacttgttctggttcactctctgagtcgctttcagaatctgaagaatctgaactctctgacagttgacaaatctgtggctttgcttcctttctggaaaccctgtcatagaagggatgctcctcgccgaaatctcgaagatgtttcttctgctttttagttagggtgttgagtagctggctctggctccggctcccgcgtttgcccatagcgaaaacgtcaagtttgcccacttgcaagagtcgcggttttccaccaggaagttgtccagtcaacacaagcacgacnn

SEQ ID NO: 19753 - DNA, 2729 bp, Homo sapiens
  misc_feature 1, 2, 2625, 2663, 2665, 2707, 2720, 2721, 2722, 2723, 2724,2725, 2726, 2727, 2728, 2729: n = A,T,C or G
nncgacccacgcgtccggcatcttcacagttcagagagtctctgagatcttacgctgcaactccctggccactggagccccagcattacctttccttcatggaatttgagatcacatttcggccagactcaggagatggtgtcctcctgtacagctatgacacaggcagcaaagacttcctgtccatcaacttggcagggggccacgtggagttccgctttgactgtggctctgggaccggtgtcctcaggagtgaagatcccctcaccctgggcaactggcacgagcttcgtgtatctcgcacagcaaagaatggaatcttacaggtggataagcagaagatagtggagggaatggcagagggaggcttcacacagattaagtgcaacacagacattttcattggcggagtccccaattatgatgatgtgaagaagaactcgggtgtcctgaagcctttcagcgggagcatccagaagatcatcctgaatgaccgaaccatccatgtgaagcatgacttcacctccggagtgaatgtggagaatgcggcccacccctgtgtgagagccccttgtgcccatgggggcagctgccggcccaggaaggagggctatgactgtgactgccccttgggctttgaggggcttcactgccagaaagcgatcatagaagccattgagatcccgcagtttatcggccgcagttacctgacgtatgacaacccagatatcttgaagagggtgtcaggatcaagatcaaatgtgttcatgaggtttaaaacaactgccaaggatggccttttgctgtggaggggagacagccccatgagacccaacagcgacttcatttccttgggccttcgggatggagccctcgtgttcagctataacctgggcagtggtgtggcatccatcatggtgaatggctccttcaacgatggtcggtggcaccgagttaaggccgttagggatggccagtcaggaaagataaccgtggatgactatggagccagaacaggcaaatccccaggcatgatgcggcagcttaacatcaatggagctctgtatgtgggtggaatgaaggaaattgctctgcacactaacaggcaatatatgagagggctcgtgggctgtatctctcacttcaccctgtccaccgattaccacatttccctcgtggaagatgccgtggatgggaaaaacatcaacacttgtggagccaagtaacaccagctggccttgtccaagggacagagccttctattctgagaatcccaggggccctcagaccctgcctgatgctatatgcagaggcccagggaccaggtgtgtttcctctcaccaagaagaaagtacacactgatgagaaactgagaaccaagacaggcatccctgggtggcctttcctgctgacactccacgagctgacccagcagaattctctgtgtaggaagcatcggactttgtccattgaatatgtagcggctgccagagatcacacatcaatgcaaattccagagcctgtctgctatagctcagtgactgtgttgtgattcatagtacattaaaaagagagagagagagaaagaatcccacagggcactattaaaatacttctctccttccctgactcatgacactcttcctgacagcagaatgactgtgtgaccttgaacttcacatttcccacattggcccttggattgttcggattaaccccttccactcctcactggctggttcactgtgttctgactagtccataaaaataaagatggaaggagatcaaacacagaatcataatcataatgcggcccccttccccagagcttacctcgaatgtgaaatccctacttcttataatgcagagttaaggagctgagcccccatgattttgtagctgtacttttgtatgtgtatatttttatagctgcagattgtccacacagtatacttttggaagtttgggtggatgactctgaattcttgcacacctttcctaaaaatttctcccaagagagacttgtttgggccttttgtggtgtcagtggaatggataggtaacttgggtgggcaacttggggagctgaccattctcttttggtaaatgttgacggctcaagaggatgaatatgaagctttccaagataagcagattaaaaggaacatgtgttaccgaggtaggtcactgtcatttttgttttaagagttggggggagtatctatagtaaacttgaataaaggggacaaagctagaacttattcattcattcattcacttatggagttgttactgattttgcggaggtcaggttcataccaatggacactaatacaatcagtgttcccaaggctgtgcaggggtggggggacatgctgtcaggatggtctgagcatctgggtgagaaccagagaaacaggacttcttccttctgtaccatgagctgtgtccctttactatgcaagcacatgaccccagagacagctggtttcactggcagatccccatgatggacttactaagggaaaggtgagatgaacactgcccccaaggagggggtgaaatatgatctaacttatgcaagagcctataattagtcccagtcttcgactctacatttgtttntgcagcatttcattcagcaaagacttttttggggtttntncaaggcacagtttttaggcacataatgtaattcttaaaaagntggttaaaactannnnnnnnnn

SEQ ID NO: 19754 - DNA, 2522 bp, Homo sapiens
  misc_feature 2517, 2518, 2519, 2520, 2521, 2522: n = A,T,C or G
acgcggggattgctgatggatcagtgagcctgtgttcatgccagtgagctgctgtggctcagatactgatactttctttccaaacagcataagaagtgattgagccacaagtatactgaaggaagggctccctcgagttgtggtgtgaagagataaatcaccagtcacagactatgcacccgactgctgctgttcagtccagggaaaatgaaagttggagtgctgtggctcatttctttcttcaccttcactgacggccacggtggcttcctggggaaaaatgatggcatcaaaacaaaaaaagaactcattgtgaataagaaaaaacatctaggcccagtcgaagaatatcagctgctgcttcaggtgacctatagagattccaaggagaaaagagatttgagaaattttctgaagctcttgaagcctccattattatggtcacatgggctaattagaattatcagagcaaaggctaccacagactgcaacagcctgaatggagtcctgcagtgtacctgtgaagacagctacacctggtttcctccctcatgccttgatccccagaactgctaccttcacacggctggagcactcccaagctgtgaatgtcatctcaacaacctcagccagagtgtcaatttctgtgagagaacaaagatttggggcactttcaaaattaatgaaaggtttacaaatgaccttttgaattcatcttctgctatatactccaaatatgcaaatggaattgaaattcaacttaaaaaagcatatgaaagaattcaaggttttgagtcggtcaggtcacccaatttcgcaatgctgtccttccacttgcagagaccccaatcctggagccatcctgtgctataatttcttttattgagaaatggaagcatcgttgctgggtatgaagttgttggctccagcagtgcatctgaactgctgtcagccattgaacatgttgccgagaaggctaagacagcccttcacaagctgtttccattagaagacggctctttcagagtgttcggaaaagcccagtgtaatgacattgtctttggatttgggtccaaggatgatgaatataccctgccctgcagcagtggctacaggggaaacatcacagccaagtgtgagtcctctgggtggcaggtcatcagggagacttgtgtgctctctctgcttgaagaactgaacaagaatttcagtatgattgtaggcaatgccactgaggcagctgtgtcatccttcgtgcaaaatctttctgtcatcattcggcaaaacccatcaaccacagtggggaatctggcttcggtggtgtcgattctgagcaatatttcatctctgtcactggccagccatttcagggtgtccaattcaacaatggaggatgtcatcagtatagctgacaatatccttaattcagcctcagtaaccaactggacagtcttactgcgggaagaaaagtatgccagctcacggttactagagacattagaaaacatcagcactctggtgcctccgacagctcttcctctgaatttttctcggaaattcattgactggaaagggattccagtgaacaaaagccaactcaaaaggggttacagctatcagattaaaatgtgtccccaaaatacatctattcccatcagaggccgtgtgttaattgggtcagaccaattccagagatcccttccagaaactattatcagcatggcctcgttgactctggggaacattctacccgtttccaaaaatggaaatgctcaggtcaatggacctgtgatatccacggttattcaaaactattccataaatgaagttttcctatttttttccaagatagagtcaaacctgagccagcctcattgtgtgttttgggatttcagtcatttgcagtggaacgatgcaggctgccacctagtgaatgaaactcaagacatcgtgacgtgccaatgtactcacttgacctccttctccatattgatgtcaccttttgtcccctctacaatcttccccgttgtaaaatggatcacctatgtgggactgggtatctccattggaagtctcattttatgcctgatcatcgaggctttgttttggaagcagattaaaaaaagccaaacctctcacacacgtcgtatttgcatggtgaacatagccctgtccctcttgattgctgatgtctggtttattgttggtgccacagtggacaccacggtgaacccttctggagtctgcacagctgctgtgttctttacacacttcttctacctctctttgttcttctggatgctcatgcttggcatcctgctggggtacggatcatctcggttcatccatggcagcattgagaggggggggttgcgggagggggcccctttttggttcctgtggtcgccctgcactcaagagggtgggtgctgccgggacccccgtttgccccggcggggtcggggcgccaccagggcggggaggaggccccggcgctcctgcgtgggaggtggaacnnnnnn

SEQ ID NO: 19755 - DNA, 1326 bp, Homo sapiens
  misc_feature 1, 2: n = A,T,C or G
nnagcgttgctggaaaagagggtcctgattcagatcccaagagagggttcttggatctcatgcaggaaagaattcaaggcaggttctgtgtatggtgaaagaagcaaatttattagaaacgactttgttacagggtagggcatcctcagaaaggagaaggaggaatgcgccattctttgttagtgtcttcgttgataagaaattctaaggagctgtcattaaaattggaatgtgcagatgtgctcactaaaggtagggggtattggtgctgttaaatcaagtttagcctaaagctgcctccttacatattttaagtttggcctaaaatttctctgtacatggtgaactataacctaaaaggatgtgtaaacagactgcaacctactcttgtgccaatcactgagtttcggccaatcaaaggtggccaactgttcaaatctcgttcaaataaggccaatgctgagctataaccagtctggctgtttctgtacctcactttcattttcagtacatcattttccttttcctgtccataaatcttcttccaccacgtggctgtgttcaagactctctgaacctactctggctcaggaggcttctagatttgtgaattgtctgctcagttaaactccattaaattcaatttggccaagaattttcttcttaacagtggtattgatgaccattaatccttcaacctaaacctgctcattaatgctgcctttaagtgggctgaacttttaggacacctggacattttgtaggcttagtgggagatgttttgtatggccttaaatattctgcaattataattggtggtcagcttagactgtggctattttcagacccaagtattaagcctgtaggttccttttgagtgcctagctacttgctttaagatggagtcactctagccatcttttattaaaccagaagcctggtaagcagaggttactttaacaatatgcaagagtgtgggaatgtttgctgagacaggagacacaagaggtgggcaggtcttagggatttaggagttgggttcaaggcaccccctcaagctttgatagttatctatggaaggtcgttgccttgattttgacctggtaggaaggcagacttcaaatgcttgccccagctggacttttcccagatgtctgcctcatcctcttactctaaccaacactgactctggtcaaaacctgcaagcatgatctgcggaccagcagctcatcatggagctggctagaaatatgaaatcctgggctctaactcagacctcctgagtcaggatctgcattttaacaaggttccaggtgatttatgtgt

SEQ ID NO: 19756 - DNA, 788 bp, Homo sapiens
acaacaagcgtttgtaatgtttcccaaatattagctttgaaatccaaatgtcaagcaattaaagttcaaaaaactataaatgtaattgttaataaaacaatggatgaaaaaagtcattgaaatttttttctacttggattaagaacataaattaaaagtgcaactgcaaaaataatattagtttgataagtaaaataaaacaaactagatatattttgaaaataaaaaacaaatgaaacaaaataaaatttaggtaaagaaaattcaacgtaatttgttgtagctatattttttgtaataattacaaaagtagaaataatagctcataaagcaaaaacaaaatttattctatgttctttttttcagtcaattcagaattttagcttcatatttgaagcatttttttctaattttgtttgtgaatttgaatttgtttgcggattttgatttgccataaaaatattatattttatttaattatattaatcttcgtcagctttaattgctctttctttaacaatttgatctgaaatttgttttggtgttatttcatagtgatcaaattgcatttgataagttccacgacctgatgtcatagaccttaattgtgttgagtatccaaacatttcagctaaaggaacattagctcttatggtattagctccatctccacgtgtttcttgttcttttacttgtccacgacgacgagataaatctcccataacatctcctgaatattcagctggcacaaaaactgatacatccataattggttctagtaaaacagt

SEQ ID NO: 19757 - DNA, 4713 bp, Homo sapiens
  misc_feature 1, 2, 4690, 4691, 4692, 4693, 4694, 4695, 4696, 4697, 4698,4699, 4700, 4701, 4702, 4703, 4704, 4705, 4706, 4707, 4708,4709, 4710, 4711, 4712, 4713: n = A,T,C or G
nnacccacgcgtccgcggatacaagagttggtaagctcgctgcagtgggtggagagaggcctctagacttcagtttcagtttcctggctctgggcagcagcaagaattcctctgcctcccatcctaccattcactgtcttgccggcagccagctgagagcaatgggaaatggggagtcccagctgtcctcggtgcctgctcagaagctgggttggtttatccaggaatacctgaagccctacgaagaatgtcagacactgatcgacgagatggtgaacaccatctgtgacgtcctgcaggaacccgaacagttccccctggtgcagggagtggccataggtggctcctatggacggaaaacagtcttaagaggcaactccgatggtacccttgtcctcttcttcagtgacttaaaacaattccaggatcagaagagaagccaacgtgacatcctcgataaaactggggataagctgaagttctgtctgttcacgaagtggttgaaaaacaatttcgagatccagaagtcccttgatgggttcaccatccaggtgttcacaaaaaatcagagaatctctttcgaggtgctggccgccttcaacgctctgagcttaaatgataatcccagcccctggatctatcgagagctcaaaagatccttggataagacaaatgccagtcctggtgagtttgcagtctgcttcactgaactccagcagaagttttttgacaaccgtcctggaaaactaaaggatttgatcctcttgataaagcactggcatcaacagtgccagaaaaaaatcaaggatttaccctcgctgtctccgtatgccctggagctgcttacggtgtatgcctgggaacaggggtgcagaaaagacaactttgacattgctgaaggcgtcagaaccgttctggagctgatcaaatgccaggagaagctgtgtatctattggatggtcaactacaactttgaagatgagaccatcaggaacatcctgctgcaccagctccaatcagcgaggccagtaatcttggatccagttgacccaaccaataatgtgagtggagataaaatatgctggcaatggctgaaaaaagaagctcaaacctggttgacttctcccaacctggataatgagttacctgcaccatcttggaatgttctgcctgcaccactcttcacgaccccaggccaccttctggataagttcatcaaggagtttctccagcccaacaaatgcttcctagagcagattgacagtgctgttaacatcatccgtacattccttaaagaaaactgcttccgacaatcaacagccaagatccagattgtccggggaggatcaaccgccaaaggcacagctctgaagactggctctgatgccgatctcgtcgtgttccataactcacttaaaagctacacctcccaaaaaaacgagcggcacaaaatcgtcaaggaaatccatgaacagctgaaagccttttggagggagaaggaggaggagcttgaagtcagctttgagcctcccaagtggaaggctcccagggtgctgagcttctctctgaaatccaaagtcctcaacgaaagtgtcagctttgatgtgcttcctgcctttaatgcactgggtcagctgagttctggctccacacccagccccgaggtttatgcagggctcattgatctgtataaatcctcggacctcccgggaggagagttttctacctgtttcacagtcctgcagcgaaacttcattcgctcccggcccaccaaactaaaggatttaattcgcctggtgaagcactggtacaaagagtgtgaaaggaaactgaagccaaaggggtctttgcccccaaagtatgccttggagctgctcaccatctatgcctgggagcaggggagtggagtgccggattttgacactgcagaaggtttccggacagtcctggagctggtcacacaatatcagcagctctgcatcttctggaaggtcaattacaactttgaagatgagaccgtgaggaagtttctactgagccagttgcagaaaaccaggcctgtgatcttggacccagccgaacccacaggtgacgtgggtggaggggaccgttggtgttggcatcttctggcaaaagaagcaaaggaatggttatcctctccctgcttcaaggatgggactggaaacccaataccaccttggaaagtgccggtaaaagtcatctaaaggaggcgttgtctggaaatagccctgtaacaggcttgaatcaaagaacttctcctactgtagcaacctgaaattaactcagacacaaataaaggaaacccagctcacaggagcttaaacagctggtcagccccctaagcccccactacaagtgatcctcaggcaggtaaccccagattcatgcactgtagggtgctgcgcagcatccctagtctctacccagtagatgccactagccctcctctcccagtgacaaccaaaagtcttcagacattgtcaaacgttcccctgggttcacagatctttctgcctttggcttttggctccaccctctttagctgttaatttgagtacttatggccctgaaagcggccacggtgcctccagatggcaggtttgcaatccaagcaggaagaaggaaaagatacccaaaggtcaagaacacagtgattttattagaagtttcatccgcaaattttcttccatttcattgctcagaaatgtcatgtggttacctgtaacttgaaggtggctacaaagatgactgtggacgtgggttgcactggccacccaaggatgtctgccacacctctccaaagccctccctacctaccaagatatacctgatatattccaccaggatatcctccctccagatatacttggttctctccaccaggttctttctttaaagcaggatttctcaactttgatacttactcacatttggggctagacagttctttgtttggaggctctcttgtgcattgtaggatgttgagcagcatctctggcctgtacccagtagatgccacccagttgtgacaattaaaagtgtcttgagactttatcatgtgtcttctgccctaggtgagaacccttgcactagaggaaccctacaccccaaccctggggggaatgtagggaagaggtggccaagccaaccgtggggttagctctaattattaagatatgcattataaataaataccaaaaaattgtctctggcaatagttaccttcccagatacaggtccccccttttttcccctaactcttttaagcaatgattgtaactattaggagacattgctctcccacgtatgtttttctttttagacaatgcagacaccaggaagttgtggagctaggatccatcctattgtcaatgagatgttctcatccagaagccatagaatcctgaataataattctaaaagaaacttctggagatcatctggcaatcgcttttaaagactcggctcaccgtgagaaagagtcactcacatccattcttcccttgatggtccctattcctccttcccttgcttcttggacttcttgaaatcaatcaagactgcaaaccctttcataaagtcttgccttgctgaactccctctctgcaggcagcctgcctttaaaaatagttgctgtcatccactttatgtgcatcttatttctgtcaacttgtattttttttcttgtatttttccaattagctcctcctttttccttccagtctaaaaaaggaatcctctgtgtcttcaaagcaaagctctttactttccccttggttctcataactctgtgatcttgctctcggtgcttccaactcatccacgtcctgtctgtttcctctgtatacaaaaccctttctgcccctgctgacacagacatcctctatgccagcagccagccaaccctttcattagaacttcaagctctccaaaggctcagattataactgttgtcatatttatatgaggctgttgtcttttccttctgagcctgcctttctccccccacccaggagtatcctcttgccaaatcaaaagactttttccttgggctttagccttaaagatacttgaaggtctaggtgctttaacctcacataccctcacttaaacttttatcactgttgcatataccagttgtgatacaataaagaatgtatctggattttgtgcctagttcctagcacacagcttcaaaaattctagagtttcctgataggagtgtcttttgtattcataacaagcccttttcacccatccctgggtttatgctaacaaggttacccatggtgggcccttagtttcaaggaaggagttggccaagccagaaagaccaagcatgtggttaaagcattggaattttcagccccatcccacccccaatctccaaggaggtgatggggctggaaattgagttcaattttaacatggccagtgatttaagcaatgctgcctatgtaaagaaaccccaataaaaactctggacagtgaggcttggggagcttcctgattggcagacattccaatgtactaggaaggtagcgcatcttgattccacagggacaaaggctcctgagctctgggcccttccagtgcttgccaccctacatactctttgtctggctcttcatttgtattctttataataaaatggtgattgtaagtagannnnnnnnnnnnnnnnnnnnnnnn

SEQ ID NO: 19758 - DNA, 2377 bp, Homo sapiens
  misc_feature 1, 2, 3, 21, 33, 52, 2284, 2289, 2356, 2357, 2358, 2359,2360, 2361, 2362, 2363, 2364, 2365, 2366, 2367, 2368, 2369,2370, 2371, 2372, 2373, 2374, 2375, 2376, 2377: n = A,T,C or G
nnncgcgttctgccgcctccngcttgtggtgcntcttgaactgcgtcccgcngtctaggtaagtttaaagctcaggtcgagaccgggcctttgtccggcgctcccttggagcctacctagactcagccggctctccacgctttgcctgaccctgcttgctcaactctacgtctttgtttcgttttctgttctgcgccgttacagatccaagctctgaaaaaccagaaagttaactggtaagtttagtctttttgtcttttatttcaggtcccggatccggtggtggtgcaaatcaaagaactgctcctcagtggatgttgcctttacttctaggcctgtacggaagtgttacttctgctctaaaagctgcggaattctaatacgactcactatagggagtcgacccacgcgtccgcagcagcggaggctggacgcttgcatggcgcttgagagattccatcgtgcctggctcacataagcgcttcctggaagtgaagtcgtgctgtcctgaacgcgggccaggcagctgcggcctgggggttttggagtgatcacgaatgagcaaggcgtttgggctcctgaggcaaatctgtcagtccatcctggctgagtcctcgcagtccccggcagatcttgaagaaaagaaggaagaagacagcaacatgaagagagagcagcccagagagcgtcccagggcctgggactaccctcatggcctggttggtttacacaacattggacagacctgctgccttaactccttgattcaggtgttcgtaatgaatgtggacttcaccaggatattgaagaggatcacggtgcccaggggagctgacgagcagaggagaagcgtccctttccagatgcttctgctgctggagaagatgcaggacagccggcagaaagcagtgcggcccctggagctggcctactgcctgcagaagtgcaacgtgcccttgtttgtccaacatgatgctgcccaactgtacctcaaactctggaacctgattaaggaccagatcactgatgtgcacttggtggagagactgcaggccctgtatacgatccgggtgaaggactccttgatttgcgttgactgtgccatggagagtagcagaaacagcagcatgctcaccctcccactttctctttttgatgtggactcaaagcccctgaagacactggaggacgccctgcactgcttcttccagcccagggagttatcaagcaaaagcaagtgcttctgtgagaactgtgggaagaagacccgtgggaaacaggtcttgaagctgacccatttgccccagaccctgacaatccacctcatgcgattctccatcaggaattcacagacgagaaagatctgccactccctgtacttcccccagagcttggatttcagccagatccttccaatgaagcgagagtcttgtgatgctgaggagcagtctggagggcagtatgagctttttgctgtgattgcgcacgtgggaatggcagactccggtcattactgtgtctacatccggaatgctgtggatggaaaatggttctgcttcaatgactccaatatttgcttggtgtcctgggaagacatccagtgtacctacggaaatcctaactaccactggcaggaaactgcatatcttctggtttacatgaagatggagtgctaatggaaatgcccaaaaccttcagagattgacacgctgtcattttccatttccgttcctggatctacggagtcttctaagagattttgcaatgaggagaagcattgttttcaaactatataactgagccttatttataattagggatattatcaaaatatgtaaccatgaggcccctcaggtcctgatcagtcagaatggatgctttcaccagcagacccggccatgtggctgctcggtcctgggtgctcgctgctgtgcaagacattagccctttagttatgagcctgtgggaacttcaggggttcccagtggggagagcagtggcagtgggaggcatctgggggccaaaggtcagtggcagggggtatttcagtattatacaactgctgtgaccagacttgtatactggctgaatatcagtgctgtttgtaatttttcactttgagaaccaacattaattccatatgaatcaagtgttttgtaactgctattcatttattcagcaaatatttattgatcatctcttctccataagatagtgtgataaacacagtcatgaataaagttattttccacaaaataaaaaaaaaaaaggacggcaggtagantagtntagtccaacctcgggggggcccgcccccggggggagaaaccccttttcccccccgaggggggtgtcnnnnnnnnnnnnnnnnnnnnnn

SEQ ID NO: 19759 - DNA, 2066 bp, Homo sapiens
  misc_feature 1, 2, 3, 2062, 2063, 2064, 2065, 2066: n = A,T,C or G
nnnacgcgtccgacgaggcctcctgacggggaaagggaaagtggaaccggggcggcgcgggggccggcggctgccgcgatctctccctggtagcgggaggctgagcgggcggcgcgacgcgggggccgacgggggcgccgggtggccgcgccggaagtgccttgcgcggcagaggaagcgcagggacagagcggagcaggccgagccggcggaaagggtctttgctgctgcgcccgggcaggggctgccgcggccccaggtcccgcttcgagacgcggcgcggtccaggcgggaggcgactccctaggaagggacccggggcgggaggaggaagtgaggccgcgcggaaggaaggcggcgagccccggggccccgaggccttggccgcgtcacagcacccacatggcctctggagtgggcgcggccttcgaggaactgcctcacgacggcacgtgtgacgagtgcgagcccgacgaggctccgggggccgaggaagtgtgccgagaatgcggcttctgctactgccgccgccatgccgaggcgcacaggcagaagttcctcagtcaccatctggccgaatacgtccacggctcccaggcctggaccccgccagctgacggagagggggcggggaaggaagaagcggaggtcaaggtggagcaggagagggagatagaaagcgaggcaggggaagagagtgagtcggaggaagagagcgagtcagaggaagagagcgagacagaggaagagagtgaggatgagagcgatgaggagagtgaagaagacagcgaggaagaaatggaggatgagcaagaaagcgaggccgaagaagacaaccaagaagaaggggaatccgaggcggagggagaaactgaggcagaaagtgaatttgacccagaaatagaaatggaagcagagagagtggccaagaggaagtgtccggaccatgggcttgatttgagtacctattgccaggaagataggcagctcatctgtgtcctgtgtccagtcattggggctcaccagggccaccaactctccaccctagacgaagcctttgaagaattaagaagcaaagactcaggtggactgaaggccgctatgatcgaattggtggaaaggttgaagttcaagagctcagaccctaaagtaactcgggaccaaatgaagatgtttatacagcaggaatttaagaaagttcagaaagtgattgctgatgaggagcagaaggcccttcatctagtggacatccaagaggcaatggccacagctcatgtgactgagatactggcagacatccaatcccacatggataggttgatgactcagatggcccaagccaaggaacaacttgatacctctaatgaatcagctgagccaaaggcagagggcgatgaggaaggacccagtggtgccagtgaagaagaggacacatgaaggcttgctacccccagtggaaaatcatcccctccccttgtgtgtatgtgacagcgtgtatgtaacggcttctgatttctgtgaaagctgctcagcaacaaacgtacttccaccagatgtgtccccagatccacagcaggcacatatctctccaagggatgaccagttttatgcttactgtgtgcttctcatcccctggttgtggtaggtcaaggaaaagagcccctttgatccaccaggagcaattaagaaaggtccttcaggtaatccctcaatggctgctttgaacttactcaggaaagccagcccccataatattgtattaccaaacagtatcgctttgttaggaaggatctggaataatcttgaagggaagtcagagttttctccctgcctattaacaaaacccaattttgttcatattgaagcatgaaataatgagagcagtagggccaattaactctgtggacggcctaaaagtcgttctaattggaaattgtgggccgaataatgggctggaaagttgggaagaaaaggcggtgagaataaaggttggaaagggtcaaaaaaaaagaaagaaaaaaaaaaaagggtctgggcttttttgggagatgagagatatgannnnn

SEQ ID NO: 19760 - DNA, 2763 bp, Homo sapiens
  misc_feature 2522, 2523, 2524, 2525, 2526, 2527, 2528, 2529, 2530, 2531,2532, 2533, 2534, 2535, 2536, 2537, 2538, 2539, 2540, 2541,2542, 2543, 2544, 2545: n = A,T,C or G
cggaagtcttctagaattaattaacgcgggggcgcagctcttagtcgcgggctgactggtgtttatccgtcactcgccgaggttccttgggtcatggtgccagcctgactgagaagaggacgctcccgggagacgaatgaggaaccacctcctcctactgttcaagtacaggggcctggtccgcaaagggaagaaaagcaaaagacgaaaatggctaaattcgtgatccgcccagccactgccgccgactgcagtgacatactgcggctgatcaaggagctggctaaatatgaatacatggaagaacaagtaatcttaactgaaaaagatctgctagaagatggttttggagagcaccccttttaccactgcctggttgcagaagtgccgaaagagcactggactccggaaggtaacccctcgccctttccagaagccagagagaccaagtgttatgtaagaagtagtgtcggctgtgtagaaccactgactacacaggccgaagttactgagaacttggacagaaaaaatagccagcaagtgttcaaactactgaggaaaaaaaaaaattagatatgctgcacttaagaatactagggcaggttaaaagagctgtttaagtaagtatcagagtgctgtggagactcggaagtgtttaagctgcttaagtaagtataagtgctgtggagacccggaagagttagatataatgtcatttgttgtaattcagtttcataaaatggttcttgtttgaccctaacgtaacagtttttgtaattgtgttaaatcacatttttttctttaatttgtcccaatcttcaggttacagtctctagcttcgccatgtacatggcccttccgtgtacatggatgggcggggaggtaactaaaagatcctttacacaataaagtagatgatcatgataaatgaggtaaggtcctattatcacacacttcaaacacggtagatcagaaacccactatgatactcgcttcctgtctgtttgctaaggaatataaaatggctagaaagtttaatttgaaacctttgcctccatttggaatagtagacaccagttaagagggtgtcagatgcctttttttttttttttttttttggctggtccctgttgattggtcagaagacagctcagctaaaaggggaagttgtctgggtggttgctttttttctgacgtctgttcctcaggctggaagaaatgagcagaaaacaagggatgagtactttttagagtatgtgcatgttacgtaatacctgtttctgggcaatgctgcttcttctgactcaacaaatggggagagcaaattgaaaatgcgtaaattggaaggcaagttctgaaattaaacgttgtactttggcctgatgttctgacctttaaggaagcaagagtttgtaaacttccaaatatttactattctgaactgccgtgtaaacctgacgtattcccaagtcaacataccagtataccaataggatgtgaataatgtgtgtgttgagtttaaaaccataggcagttttgctctggcaagtaatgaaagcgttctcgcttcctgagtgtgagctccagcagactgcagagtggccagtccacagttgtagcctgacttcagtgagttctgatgtgtgctttttgcaaatacatgttctcagaacagtgagatcatccagcagtggcctggactgcactcacataaaaatcatgagacagccatggctacttgtttctgtaatacatgcatgtgtgttttttaaaacctatgataggcctctgattctgcagctgcaacttttatggaatgttttccttctccacatctcatgtgatgctcttattacaggacacagcattgttggttttgccatgtactattttacctatgacccgtggattggcaagttattgtatcttgaggacttcttcgtgatgagtgattatagaggctttggcataggatcagaaattctgaagaatctaagccaggttgcaatgaggtgtcgctgcagcagcatgcacttcttggtagcagaatggaatgaaccatccatcaacttctataaaagaagaggtgcttctgatctgtccagtgaagagggttggagactgttcaagatcgacaaggagtacttgctaaaaatggcaacagaggagtgaggagtgctgctgtagatgacaacctccattctattttagaataaattcccaacttctcttgctttctatgctgtttgtagtgaaataatagaatgagcacccattccaaagctttattaccagtggcgttgttgcatgtttgaaatgaggtctgtttaaagtggcaatctcagatgcagtttggagagtcagatctttctccttgaatatctttcgataaacaacaaggtggtgtgatcttaatatatttgaaaaaaacttcattctcgtgagtcatttaaatgtgtacaatgtacacactggtacttagagtttctgtttgattcttttttaataaactactctttgannnnnnnnnnnnnnnnnnnnnnnnggggggcccctaaaactatttaaaaaaaaaaccccccccccccccccccgaacccgaaaaaaaaaaaaaagcccatgggggggggaaacctggtttttggcccctaaaaggggtcccaaaaaaaccattcccccccaaatttccaaaaaaaaacctttttttccccggcttccaagggggggggggcccaaccccaaaagggtttttaaaaggggggg

SEQ ID NO: 19761 - DNA, 429 bp, Homo sapiens
  misc_feature 429: n = A,T,C or G
gcgtatcgttagggttgccctctttaacccttctctttttggagtggcgttcgcgcctctcctctttctcagactctagctggtccaagcaccggagctttctgggagagggcgatggagaaggggacagacagcggccggcccggggggtgtccgaacaggcaggttggtgggttaaggtcttaatcttgactcgagatctctccccggagttcacagagtaggcgacgaagccgaagcagctggagcgcgacccggaggagtctgacttctcgttgtcttcataattttcattcgttgctttcttcatggacttgcggctgggggaggatccccgctggtcgccgagcaggcgggcgggtaaaggtaggccgcgagagcgaggttaggagaggagaggaggccgcagtactgctcacacgctccgcn

SEQ ID NO: 19762 - DNA, 4537 bp, Homo sapiens
  misc_feature 4489: n = A,T,C or G
acttgttgcatttattgctgttgaaatgggacttgtgctcgctgatgggattccaatagaggggttcaactgcactaatgaattgatactctctctcattatcttctattctccatgtaaccatattttccaaatcctttgcctcaagaggctttaaacacatgtaaaggctgaggttctgttgccgaagtgaagcaaataactgagacaacttaatgagacagtttatagattgttcaggaaaacaaatatgcctttgaaatcactaagtcatttcagtttttattccagggtcaaagcactgacatctgcattatttagaagcggcttttcaaaacttttttgcgcataactcacagtaaaaaaaaatacattttatattgcaactcaagtctataaattctttcattccttcaacatattgaacacctactatatgcccaatatattttatgtggaatacagtagtgaacgaagtaaaagaggaagaaaggaaaggaggaagagaaagaaataaaccaaaattcttgctctctaagactttacatactagtggaacagaccatagaccaaataagtaagccagatgcagtggctcacacctgtaatctcagcactttaggaggccaaggtgggaggatcgagaggactgcttgaggccaagagttcaagaccagcctgggcaacatagcaagatgctgtctctacaaaaatcaaaaaaaaaaaaaaattagctgggcatggtggcatgtgcctgtagtctcagctacttgggaggctaagggttgaggattgcttgagcccagggattcaaggagtcttgcagtgagctatgattataccactgcactccagcctggatgacagagcaggactgtctcttaaaaaaccaacacaatacaaagtaaaatataggaacacacagaaacagaatattcatgaggcaaaaccacctatttctatatgcagtacactcagatgtttttgattttttcggaaaaaatgctggtcaatcctgttaaaccattaagttggcttctcaactcagtaatgggttgaggcttttgcactttgaaaaacactagtctagacaatttctgacatgggcagagcatgtgcttgttctcaccttatggagggaggaacatacaaagatattaactgagttcctcaaattcacccatgatctgagggaagcaatgctgacctccacctgagggcttcccagtccactgctgccctttccctcaccctctgcagtgcctgctcttctcctctcattctgaaaccttgctctgcacgtggagcagctcttccttcccttgtcaggtaaaaatcacatgaatacttctaagcctagccagaccgcactgcgttccaggatgcctctctcaggccactactgcattctggctcgcttgattgattgatttagagacagggtctcactctgttgccaagttgtgcaatcatggcccactgcagcctcaacctcccaggctcaagcaatcctcccacctcagcctcccgagtggctgggactctatgcatgcaccagcacacccagccaatctttttcccttttctctaattttttagtagagacaggggtctcactatgttgcccaggctgtggcttgctttataactattggtgtaccagaataggatcctctgcacggtgacctcctaaaagagcaggtaccagtcacctttgtgtcccccaaagcacagtactttatctgtaggtattaataaatacataggaaattgaattgaatttgtaactcaaagcagaggggtggagagaagtgcttcctagccaggaatacaggatttaggccatatctatttaaaagaagactaacaaacagactagaaacgataacactggtaaaaagatctctttacctgagctacaaaagtcatacattaggtagaggcttcaatagtgtagaaaatatactaatgtgttatctccttagagacagatttagaaccatgtcagttatgttgcagatgacagagaacagaaacctagtgaaatcaactcaagacaatgagggctaccataaggaggcccaaggagtagttggatggacctgaggaaggacaggagccagaggccccctgaggagctctgcgccgcagaagtaaggctatcctcgctgcaatggtgaccattacaatggggacagttgccacctcatcaaaatgaaggaaatcagttcaaattctaaaaaaaacctacatggcacagccaattctagaattgtccactcttgcttcacttggtttgagtaggatggggctgtgtgtttgaaaacatctaaggaagaaaggggggaacaaactctctgaaaagaaagtagaactttcactaaatattgacccaaactggaattttcagttttacgctaccaccagagaggatgggactcaaggccaagataaggtcagttacaaaaagttatataaaatactgtatctgtgatacagtgtaaaatatcatttcaatcctattaaaagttaaaaaaaatgtagattttagctaaatgacctctaagtttcagggatctacaaacccatgcgtgtataaatatatcacgaaaatctgtacaagatatttcatagaattctctatctcatggttttcagactttattttgaatcagattctaattctgtaggactagggtagggtagtgggactgcatacttaaataagcaccccagatactgctaaagatgggtcatgttgagagactttcttaacctaatcccttcctacttaattaaaaaggagctcgacttgcataagttttctttttctttttttctttgagacaaagactcactgtcacccaggctggagtgcagtgacaccgtctcagctcactgcaacccctgcctcccaggttcaagcgattctcctgcctcagcctcccgagtagctgggactacaggcgtgtgccaccacacatggctaactttttatacttttagtagagacagggtttcaccatgttggccaggctggtctcaaactcctgatctcaagcgattctcctgcctcagcctcctgagtagctgggattacaggcatgaggcaccgtgcccagccaaaaagttttcagttagaacaaaaatggaaaacagaaccacacaaactcatcatttatgtggtaacactaaataagaggatgtacaaattaaaaacctaccacattccctattatttttaattgcatctagtcacaacatttataagagcatatgtttataaaagatggttaagactggttagtaatttattcttgaggtttgttttaaagtgaaaaagggggaagtagttataagtccagaaagaatatttcaggatgatacatgttgactataaacgcaaaaggtatactgatagcaatcctataaacagcaaatatggatgcaattgatttaagcctattagttcattttttaaaagcagccttgtttctttaaagttaagtactataaatgattcttgaaaatctactgtggacatgatatattcagtcaaacttgctaggagttggggaatgacttcgtgaccatccagttcacagtctgattgagagttaaacagcattacaaaaaagttacagtcacggtacataatcaattccttggacgatacagcttccacagctctcatcatcctggttattcttctttcagctttcacttacacattcctttctttcagacaaacaaaaaatatcaaagttcaccaaaattcttaaagtcacagttcatgtagcactgaatgatagtagctttggcatttgatattacaaagtcacttttccatcgcaaatgttttcttcattctgggtcaaggcgaggtaaaacaggaagaataaggttcccaaatgcagagtcttgagtgatgaagtatccagatgaatgtgcatgagcatgctgcaaagctgccttctgttgggctgcaatatgctgctgctcagcgtgatcccggaagtccttattaagagagggtctcgagagtgcaatgctagctccaggatgatttgttgaagactggttctgcataagtagttttcttttctctttgtccagttctgccaagattgcaactctatttttgttttgaaaacatttgtaatcctagtgctttgggaagttgaggcaggaggatcacctgaggccaggagttcaagatcagcctgggcaacacagcgagaccttgtcttgtcctgaagagtttgctgccattttcctattttgtttcaagtatgtccagtggcaattggtcagcacttcacaatcacctgggacccgaggacaccgggaccgcctctccttacaatcgctgctcttaaagggggcgcgaccacttaggcaagaggagctcaactcgcggcactacaaccttcccgcccccgctgcgcttccgcctcctgactgacgtgcgccccagggagcggaaacnccgcctcccgccgggacccaacggccaccgccggacgcgtgggtcgac

SEQ ID NO: 19763 - DNA, 448 bp, Homo sapiens
  misc_feature 448: n = A,T,C or G
acgcggggagagcgagcttcggagaagcagtggtgggttccatgtggtggtggagtaggaggcaggtctccgcggtggtttccacaagaaaaatggcacaatgtttctcagaagacaattacataagaatcagcatactttagattcacagcaaataatcagacaattgatgaaaatacttacccaaacactaattgtagactgtgccttctgaatatgtttgtcataaacttggagtaaggaatcctcacaggcactggacaattcaaaaaacgtaaagttgtttgttagaatactggtgcttttggatagaaaccctcatccatatcctggtaaggcttgaagttgcacaggagttttcatttgtcaaaacccagaaaaccataagctttagatttgggaattttatattgcattatatgtgacctttctttttaaaaaatgagcn

SEQ ID NO: 19764 - DNA, 1327 bp, Homo sapiens
acgcgggggtaactgaaaatccacaagacagaatagccagatctcagaggagcctggctaagcaaaaccctgcagaacggctgcctaatttacagcaaccatgaggccacttaaggatgcagcaagaaggagccatctgcaatccaggaagaaattccttgccaggaaccaaattggttgtcaccttcatctaggacttctagcctcgagaacttacaaatggtgatgatcatcaggtcaaggatagtctggagcaattgagatgtcactttacatgggagttatccattgatgacgatgaaatgcctgatttagaaaacagagtcttggatcagattgaattcctagacaccaaatacagtgtgggaatacacaacctactagcctatgtggaacacctgaaaggccagaatgaggaagccctgaagagcttaaaagaagctgaaaacttaatgcaggaagaacatgacaaccaagcaaatgtgaggagtctggtgacctggggcaactttgcctggatgtattaccacatgggcagactggcagaagcccagacttacctggacaaggtggagaacatttgcaagaagctttcaaatcccttccgctatagaatggagtgtccagaaatagactgtgaggaaggatgggccttgctgaagtgtggagaaaagaattatgaacgggccaaggcctgctttgaaaaggtgcttgaagtggaccctgaaaaccctgaatccagcgctgggtatgcgatctctgcctatcgcctggatggctttaaattagccacaaaaaatcacaagccattttctttgcttcccctaaggcaggctgtccgcttaaatccagacaatggatatattaaggttctccttgccctgaagcttcaggatgaaggacaggaagctgaaggagaaaagtacattgaagaagctctgaccagtatatcttcacaggcctatgtctttcaatatgcagccaagttttatcgaagaaaagggtctgtgggataaagctcttgagcttctttaaaaatgggccttgggagacaacacccacttctggccttcctggcattcaccaaatggggggctttgctacagggcacaaatgatccaaatcaaggaagctacaaactggcagcctagaggggcaagatagggaaactgtggacagattggttcaattggctatatgcaaattttgaaaagactataatgttaaagcgaaccatttggagatgggcctatgttgacctggctgaaacgtatgcagaaataggccaccacagaaaggctgaggaacatttttcagaaagggttac

SEQ ID NO: 19765 - DNA, 3655 bp, Homo sapiens
  misc_feature 1, 2, 3, 3648, 3649, 3650, 3651, 3652, 3653, 3654, 3655: n = A,T,C or G
nnnagtcgacccacgcgtccggaccaggtgtgggcttgggtggttggttaccgccttttgcactagcagtagcaaggaaggggggtgggcgctctttctttttctcttagaagagggtttagcacaggttttttcgttctcacttccacaccaccttaccgcctcccgaccccccctctccccctccccacctatcgtcatgacggcctctccggattacttggtggtgctttttgggatcactgctggggccaccggggccaagctaggctcggatgagaaggagttgatcctgctgttctggaaagtcgtggatctggccaacaagaaggtgggacagttgcacgaagtgctagttagaccggatcagttggaactgacggaggactgcaaagaagaaactaaaatagacgtcgaaagcctgtcctcggcgtcgcagctggaccaagccctccgacagtttaaccagtcagtgagcaatgaactgaatattggagtagggacttccttctgtctctgtactgatgggcagcttcatgtcaggcaaatcctgcatcctgaggcttccaagaagaatgtactattacctgaatgcttctattccttttttgatcttcgaaaagaattcaagaaatgttgccctggttcacctgatattgacaaactggacgttgccacaatgacagagtatttaaattttgagaagagtagttcagtctctcgatatggagcctctcaagttgaagatatggggaatataattttagcaatgatttcagagccttataatcacaggttttcagatccagagagagtgaattacaagtttgaaagtggaacttgcagcaagatggaacttattgatgataacaccgtagtcagggcacgaggtttaccatggcagtcttcagatcaagatattgcaagattcttcaaaggactcaatattgccaagggaggtgcagcactttgtctgaatgctcagggtcgaaggaacggagaagctctggttaggtttgtaagtgaggagcaccgagacctagcactacagaggcacaaacatcacatggggacccggtatattgaggtttacaaagcaacaggtgaagatttccttaaaattgctggtggtacttccaatgaggtagcccagtttctctccaaggaaaatcaagtcattgtccgcatgcgggggctccctttcacggccacagctgaagaagtggtggccttctttggacagcattgccctattactgggggaaaggaaggcatcctctttgtcacctacccagatggtaggccaacaggggacgcttttgtcctctttgcctgtgaggaatatgcacagaatgcgttgaggaagcataaagacttgttgggtaaaagatacattgaactcttcaggagcacagcagctgaagttcagcaggtgctgaatcgattctcctcggcccctctcattccacttccaacccctcccattattccagtactacctcagcaatttgtgccccctacaaatgttagagactgtatacgccttcgaggtcttccctatgcagccacaattgaggacatcctggatttcctgggggagttcgccacagatattcgtactcatggggttcacatggttttgaatcaccagggccgcccatcaggagatgcctttatccagatgaagtctgcggacagagcatttatggctgcacagaagtgtcataaaaaaaacatgaaggacagatatgttgaagtctttcagtgttcagctgaggagatgaactttgtgttaatggggggcactttaaatcgaaatggcttatccccaccgccatgtaagttaccatgcctgtctcctccctcctacacatttccagctcctgctgcagttattcctacagaagctgccatttaccagccctctgtgattttgaatccacgagcactgcagccctccacagcgtactacccagcaggcactcagctcttcatgaattacacagcgtactatcccagtgtttgaaagatgtatggtgatcttgaaacctccagacacaagaaaacttctagcaaattcaggggaagtttgtctacactcaggctgcagtattttcagcaaacttgattggacaaacgggcctgtgccttatcttttggtggagtgaaaaaatttgagccagtgaagccaaatcgtaacttacagcaagcagcatgcagcatacctggctctttgctgattgcaaataggcatttaaaatgtgaatttggaatcagatgtctccattacttccagttaaagtggcatcataggcgtttcctaagttttaagtcttggataaaaactccaccagtgtctaccatctccaccatgaactctgttaaggaagcttcattttcgtatattcccgctcttttctcttcatttccctgtcttctgcataatcatgccttcttgctaagtaattcaagcataagatcttggaataataaaatcacaatcttaggagaaagaataaaattgttattttcccagtctcttggccatgatgatatcttatgattaaaaacaaattaaattttaaaacacctgaagatatattagaagaaattgtgcaccctccacaaaacatacaaagtttaaaagtttggatctttttctcagcaggtatcagttgtaaataatgaattaggggccaaaatgcaaaacgaaaaatgaagcagctacatgtagttagtaatttctagtttgaactgtaattgaatattgtggcttcatatgtattattttatattgtacttttttcattattgatggtttggactttaataagagaaattccatagtttttaatatcccagaagtgagacaatttgaacagtgtattctagaaaacaatacactaactgaacagaagtgaatgcttatatatattatgatagccttaaacctttttcctctaatgccttaactgtcaaataattataaccttttaaagcataggactatagtcagcatgctagactgagaggtaaacactgatgcaattagaacaggtactgatgctgtcagtgtttaacactatgtttagctgtgtttatgctataaaagtgcaatattagacactagctagtactgctgcctcatgtaactccaaagaaaacaggatttcattaagtgcattgaatgtggctatttctctaagttactcatattgtcctttgcttgaatgcaatgccgtgcagatttatgtggctgctatttttattttctgtgcattactttaacaccttaaagggagaagcaaacatttccttcttcagctgactggcaatggccctttaactgcaataggaagaaaaaaaaaaaggtttgtgtgaaaattggtgataactggcacttaagatcgaaaagaaatttctgtatacttgatgccttaagatgcccaaagctgcccaaagctctgaaagactttaagataggcagtaatgcttactacaatactactgagtttttgtagagttaacatttgataataaaacttgcctgtttaatctcaaaaaaaaaaaaaaaaaaaaaaaaaaaaaaaggtacccaaatcgcccttagtggagccgtttacaattaatgggccgtcgtttacaacnnnnnnnn

SEQ ID NO: 19766 - DNA, 1923 bp, Homo sapiens
  misc_feature 1919, 1920, 1921, 1922, 1923: n = A,T,C or G
tgggaagtgaggtgtgggcagccggcggcggtctgatgaattcagtggcagtgaattgagaccggagggaatctggcccctagaggctggtacttgggcccgaaacccccatctccggcggagagaccgtccgaggtaattgtctgccacgagtgcacattctgaaaacaggagattttagttcctaaaaatgggaagaacctacattgtagaagagactgttggccagtatctttcaaacataaatctccaaggaaaggcttttgtctctggccttttaataggacagtgttcgtcacaaaaggattatgtgattcttgccactagaacgccacccaaagaggagcaaagtgagaacctcaaacatcccaaagctaagttggataacttggatgaagaatgggccacagaacatgcctgccaggtatccagaatgctaccagggggacttttagttcttggagtatttattattactactttagaactggcaaatgattttcaaaatgccctgcgtagactaatgtttgctgtggaaaagtctataaatagaaagagattgtggaatttcacagaggaggaagtctcagaacgagtgacacttcacatttgtgcttctacaaaaaaaatattttgtcgaacttatgatatccatgatccaaagagttcagcaagaccagcagattggaagtatcaaagtggattatcatcctcatggctttctttagagtgtacagttcacattaatattcacatcccactttctgctacttctgtcagctatactctggagaaaaatacaaagaatggacttacacgctgggccaaggaaatagaaaatggtgtttatttgattaatggacaagttaaagatgaagattgtgacctattagaaggacagaaaaaatcttctagaggaaatactcaagcaactagtcattcttttgatgtcagagtgctaacgcagttgctcctgaattcagaccacagatccacagccacagtccagatatgtagcggttctgtaaaccttaagggtgctgtgaaatgcagagcttatatccacagcagtaaacccaaagttaaagatgctgtgcaggcagtaaagagggatatattgaacacagttgctgatcgttgtgaaatgctatttgaggatctgcttttgaatgaaattccagaaaaaaaagattctgaaaaagagttccacgtcctcccttatcgagtctttgttccccttcctggatccactgtaatgttgtgtgattataaatttgacgatgagtcagctgaagaaatcagggaccattttatggagatgttggatcacacaattcaaatagaagatttggaaattgcagaggaaacaaacacagcttgtatgagttcttctatgaatagtcaagcttcattggacaacacagatgatgaacaaccaaaacaaccaattaaaactacaatgttattgaaaattcagcaaaacataggtgtgattgcagcatttacagttgcagtccttgctgcgggtatctcctttcattacttcagtgattagggtgaggcacaaagagtttcttgatcatccagagaacattgacagacaattatgaataataaagatgttaacaatccatctgtatttaaaacactagcagccagatctgctgccatgatgcctatttggtgtgtttctgattaaaatgaaatcacaagctgcaaaaaacccccccccccccttgcttagcctgctttacattgtaggtggcccgcatttccagaaataacgttatgcatctagatggaagctgcatgtaacaaatcattattatctatttttaaaagcttcacaatgatgggatatgatcatagattttagtcttactaaatctgatcacatattaatcaggacattaaaaacnnnnn

SEQ ID NO: 19767 - DNA, 2088 bp, Homo sapiens
gccgcctgggcaggtacgcgggggctgactctcttttcagactcagcccacttgcacccaagtgaattaacagccttgttgctcacacaaagcctgtttaggtggtcttctatatggacatgcgtgacacttggtgccaaaatctgggccagggggactcctttgtgagaccggccccctgtcctggccctcactccgtgaagagatccacctgcgacctcgggtcctcagaccagcccaaggaacatctcaccaatttcaaatcggatctcctcggcttagtggctgaagactgatgctgcccgatcgcctcagaagccccctggaccatcacagatgccgagcttcgggtaactcttacggtggaggattcccagccatatgaagacaccctagctggacgatcagtccttgtcaaaagtctgacccctcaaactctacagcctcaatggaccagaccctacccggtcatttatagcacaccaactgccgtccatctgcaggaccctctccattgggttcaccattccagaataaagccatgcccatcagacagccagcttgatctctcctcttcctcctggaagccacaagattaggccgagagccgatcagacaaacaacctacaacccttaagctcctggcagcgcccagccaaggccatgcttccatgcaacactccttccaaatggccatcccagcatgcttccaagcaggcttcatccgttcctctggaccctcatctcttaagacctgccgcctataaaaaggattatatcttgagaccctatcctctaaaattttttccacacccaaaacaaaaaatctctgggtcaaaagtctaaaacgcttaggctggcaaccatcagatccttgcccatggtgtcctcaagcctactctcatgaaatggacaacagtacacgcatatggggccagttccacatatttggcaaccagaccagcatccaggacaacacaaagtatgttgtttgttgttagagggcttgggacatttcactctttgccagcctcagcttaatccaggagacaaagattattttccttattatctcttctgcataggatctgcaatcagaactattgaacttctccattcagaccgccactcacacctatgggaaaagggtaatgtatcatcggcttagcaacagggaatactattcgtatgatggaaaatggggacaaaaggctttggtacataaaacattattccttccttggcctaaaaactcatcgccacctacattaaagctaatatgcctgattactgtttttagagaacttattttattagggcagttccaagctcaaaaatacgctaactggcaccttgttagctacataaaaatgcaccctagacccgaaacttactagactcattataaaattttctttaaggtgtccacgcagtccctggtcacacttgaagcagtccggagaaatatcagccctaccccagtaatccccagaaggaacttacacttttttttaatcttttcctacaacttcatattttataaataaaaagacaaaaatgtcaggcctgtgagctgaagcttagccattgtaacccctgtgacctgcacatatccgtccaggtggcctgcaggagccaagaagtctggagcagccgaaaaaccacaaagaagtgaaacagccagttcctgccttaactaattaacccaccttacgacattccaccattatgacttgtccaccattatgacttgttcctgccctgccccaactgatcaatcaaccctgtgacattcttctcctggacaatgagtcccatcatctctccaccatgcaccttgtgaccccctcctctgctgaggataaccacctttaactgtaactttccacgcctacccaagccctataaagctgcccctctcctatctcccttcactgactctcttttcggactcagcccacttgcacccaagtgaattaacagccttgttgctcacacaaagcctgattgggtgtcttctatacggacacgcgtgacaggaaccttaacccaaaggcagtctgatgaggtgtctaagataaaagtagc

SEQ ID NO: 19768 - DNA, 2254 bp, Homo sapiens
ggtccgactcggtccactagtaacggccgccatgtgctggaattcgcggccgcgcagagcacagcatcgtcgggaccagactcgtctcaggccagttgcagccttctcagccaaacgccgaccaaggaaaactcactaccatgagaattgcagtgatttgcttttgcctcctaggcatcacctgtgccataccagttaaacaggctgattctggaagttctgaggaaaagcagctttacaacaaatacccagatgctgtggccacatggctaaaccctgacccatctcagaagcagaatctcctagccccacagaatgctgtgtcctctgaagaaaccaatgactttaaacaagagacccttccaagtaagtccaacgaaagccatgaccacatggatgatatggatgatgaagatgatgatgaccatgtggacagccaggactccattgactcgaacgactctgatgatgtagatgacactgatgattctcaccagtctgatgagtctcaccattctgatgaatctgatgaactggtcactgattttcccacggacctgccagcaaccgaagttttcactccagttgtccccacagtagacacatatgatggccgaggtgatagtgtggtttatggactgaggtcaaaatctaagaagtttcgcagacctgacatccagtaccctgatgctacagacgaggacatcacctcacacatggaaagcgaggagttgaatggtgcatacaaggccatccccgttgcccaggacctgaacgcgccttctgattgggacagccgtgggaaggacagttatgaaacgagtcagctggatgaccagagtgctgaaacccacagccacaagcagtccagattatataagcggaaagccaatgatgagagcaatgagcattccgatgtgattgatagtcaggaactttccaaagtcagccgtgaattccacagccatgaatttcacagccatgaagatatgctggttgtagaccccaaaagtaaggaagaagataaacacctgaaatttcgtatttctcatgaattagatagtgcatcttctgaggtcaattaaaaggagaaaaaatacaatttctcactttgcatttagtcaaaagaaaaaatgctttatagcaaaatgaaagagaacatgaaatgcttctttctcagtttattggttgaatgtgtatctatttgagtctggaaataactgatgtgtttgataattagtttagtttgtggcttcatggaaactccctgtaaactaaaagcttcagggttatgtctatgttcattctatagaagaaatgcaaactatcactgtattttaatatttgttattctctcatgaatagaaatttatgtagaagcaaacaaaatacttttacccacttaaaaagagaatataacattttatgtcactataatcttttgttttttaagttagtgtatattttgttgtgattatctttttgtggtgtgaataaatcttttatcttgaatgtaataagaatttggtggtgtcaattgcttatttgttttcccacggttgtccagcaattaataaaacataaccttttttactgcctataaaaaaaaaaaaaaaaaaaaaaaaaaaaaaaaaaaaaaaaaaaaaaaagaggggggagagcgagcccaaaaagaaaccgaggaggggcgcacaagaagggcaccaccgatgctggcaaaaggggcgcccaaaaagggagggcaaaataaaaagaacgagcccgcgtggccgccaggctactattctaccaaacaaacgcccccagaaacgaaagtggggcgacaaaacacggagcggacaaaccacgtaggggccaacatcccactgtgaggagagaaatgagagacacacactatacacctttcttgtgggggcggaaggacaccaacactactggcgggacacaaaaattccccacaacagacagacacgcaagcggaacaaacactaatcactcaacacaaccaccgcagccgcccccacatagcaggcgggacgacgaccacactcatactagccagacaacaacctgtaccaaacaagaggcggcggctgatatcaaacagcgggcgggggacaaaacaccacaaacacaaggcgaggcggagcaaataagcgtagcccgcgagcgcgacggagcgaagaagaaaaaacaaagaatgcgcgggcgccacacaacgcagcagggaggcgaagcacaaatagagacagcc

SEQ ID NO: 19769 - DNA, 1030 bp, Homo sapiens
  misc_feature 1030: n = A,T,C or G
tcctgccaatttcagtttctagtttcactttcccttttgtaacgtcagctgaaggggggcaaaaggaaccagaggccacttgtatatataggtctcttcagcatttattgggggcagaagaggaagatttctgaagagtgcagctgcctgaaccgagccctgccgaacagctgagaattgcactgcaaccatgagtgagaacaataagaattccttggagagcagcctacggcaactaaaatgccatttcacctggaacttgatggagggagaaaactccttggatgattttgaagacaaagtattttaccggactgagtttcagaatcgtgaattcaaagccacaatgtgcaacctactggcctatctaaagcacctcaaagggcaaaacgaggcagccctggaatgcttacgtaaagctgaagagttaatccagcaagagcatgctgaccaggcagaaatcagaagtctggtcacctggggaaactatgcctgggtctactatcacatgggccgactctcagacgttcagatttatgtagacaaggtgaaacatgtctgtgagaagttttccagtccctatagaattgagagtccagagcttgactgtgaggaagggtggacacggttaaagtgtggaggaaaccaaaatgaaagagcgaaggtgtgctttgagaaggctctggaaaagaagccaaagaacccagaattcacctctggactggcaatagcaagctaccgtctggacaactggccaccatctcagaacgccattgaccctctgaggcaagccattcggctgaatcctgacaaccagtacctttaaagttcctccggtctgaaggtttctaggatggtgagacgtgacgcgacggtgaaggaagaagttgtgacgaagctgggaagccccgcggtactgctgtccccgagcgccatttacgcaaaagagaccgcagatgacgctcaagctgaatccacagcccgtgccgcggctcgcgaactcccaactcaaaggttgcacacatcgcan

SEQ ID NO: 19770 - DNA, 1139 bp, Homo sapiens
  misc_feature 1137, 1138, 1139: n = A,T,C or G
accttaaagtcctcctggctctgaagcttcataagatgcgtgaagaaggtgaagaggaaggtgaaggagtcgagcggccgcccgggcaggtacttttttttttttttttttttttttttatgttttatcatatttaggttatttattaatgaaaatatatgacattttcaggaatacaaattttgcaccctgatgacctcaaatgcgtgcaacaagatgtttaatacagaaaataacacaaaaactgttgttacagtggttagaatttttaactttaaaaaaccatgaatttgtattgttttaattgcacaataaaataatgttgatatatacttaagcttaaattaattccaacaggcaaacattttccaacccagagtgtggctgatgctgggtcagctgactctattttggttcacaccaactttgatgtctaggctattcagcatctacctagaaaatctcaatcgttccaagcataccgtgaattttgtgatttctcagaagattttcggagttaaaagaagtgtttatatcacttaatatccaacatttctaaaggggggaaaaccccaccatctattatcaatgacatttcccaagtccttgcaccaggcccttagtcaccaggttcccacgttttgttgctttcctaccgtctcaaaccaggttcatgaaagcatttgaacagagttcagtcttcattttacaaaaaaaaaaattcctaatagtggctaaaatactgcaaatttctccattcgattacaatctacaaagataaaccagcattcctttctctttctctcttttggttacttttcccctatccctactggtggaacatttattttttcacacaggttttaaagaaatacattatgttggtttctagtgtattgtacagaatccattctcattctttactggctacattatgactcatgaggcagggcagcagtacaggtgcactctcggtatactggctgaaagtcttctggtacacatggcttttggtacccgtcgcttcgggctatgtatcttccggtactctgccctcgtctcaaagtatgtggccacctcaattaatcaggcagttgatttcacatggtgtcgaatactcagggttgatgatagacnnn

SEQ ID NO: 19771 - DNA, 1372 bp, Homo sapiens
tacatgttattccatgtacactgaaaacaatataggaaatatatacatctaagacttctactttgtacagtctttcattaaataagaatacttacacatacattttcagatatttctaccttcctgtatgtgtttggaattgtatgtaggtagccactgaaagaatttgggccccttgggaggatggcagtggaagtccatgaagtaaagagcattccttaaaaagcagatttgattgcataccttttagttatttgagattctgagaattctgataaaccccaaagcagaaagattccttatacccttggaagatgggaaaggtgagggaaatatttgaagcagggtcagaacatccactaagaacatagcacctcagtagagcttacattatagtgccagggtagagttattactgaatagcttaggatgatgaacattaaccttcctacaggagtagtagcagctgatttggtgaccatgattggtcaccttttagtgtaactgcaaactaagaaaaattatggcttgacatatactccatgtagggaagtgaggggagcaaaatcgatgcagtgcttccaaggatggaccacacagaggctgcctctcccatcacttccctacatggagtatatgtcaagccataattgttcttagtttgcagttacactaaaaggtgaccaatgatggtcaccaaatcagctgctactactcctgtaggaaggttaatgttcatcatcctaagctattcagtaataactctaccctggcactataatgtaagctctactgaggtgctatgttcttagtggatgttctgaccctgcttcaaatatttccctcacctttcccatcttccaagggtataaggaatctttctgctttggggtttatcagaattctcagaatctcaaataactaaaaggtatgcaatcaaatctgctttttaaagaatgctctttacttcatggacttccactgccatcctcccaaggggcccaaattctttcagtggctacctacatacaattccaaacacatacaggaaggtagaaatatctgaaaatgtatgtgtaagtattcttatttaatgaaagactgtacaaagtagaagtcttagatgtatatatttcctatattgttttcagtgtacatggaataacatgtaattaagtactatgtatcaatgagtaacaggaaaattttaaaaatacagatagatatatgctctgcatgttacataagataaatgtgctgaatggttttcaaaataaaaatgaggtactctcctggaaatattaagaaagactatctaaatgttgaaagatcaaaaggttaataaagtaattataactaagaaaaaaaaaaa

SEQ ID NO: 19772 - DNA, 805 bp, Homo sapiens
  misc_feature 798, 799, 800, 801, 802, 803, 804, 805: n = A,T,C or G
acaatcttgagaaggatttgaaggacaagtttgtggccctgaccatagatgatatctgcttctcgctcaacgacaactcaccaaacatcagatattctgagaacgccgtgaggattgagccaaactccgtgagtctggaagactggttggacttctccagcaccaatgtggagaaggctgacaagcagcggaacaactccctgatgctgacagccctggtggattcgaatcctgtcccagacagccaattatctgcgcaagcagtgtgatgtggtgcacacggcattcaagaatgggctgaaggatacaaaggatgccagggacaagctggctgatcatctggccaaggtcatggaagagattgcttcccaggagaaaaatattacagctcttgaaaaggccatccttgaccaagaagggccagccaaggtggctcatacgcgcttggagaccaggacacaccggccgaacgtggagctgtgtcgtgatgtcgcacaatataggctaatgaaggaggttcaagagatcacccacaatgtcgcaagattgaaggaaactttagcccaagctcaggcagagctgaaagggctgcatcgcagacagcttgccctgcaggaggagatccaggtcaaagagaacaccatttatatcgacgaagtgctgtgtatgcagatgaggaaatccatcccacttcgggatggggaagaccatggggtctgggctgggggcctccgccctgatgctgtctgctaatagtagggctagttccaattctcattaaaccacattgtaaacagnnnnnnnn

SEQ ID NO: 19773 - DNA, 1642 bp, Homo sapiens
cgacccacgcgtccgcaagtgctgggattacaggcgtgagctactgcacccggcctgctttctttttagtgaaaaggatctgtgggagcttttattcccatggctgccttcctcaagtcaacctctttccccggaaatggcatcatctctggactgttgtttctccttcttccttctcctccttctcctcctcctcctcctccaccatgcccggctgatttttgtatttttagtagagacagggtttcactatatgggccaggcagatctcgaactccaaacctcgtgatccacctaccttggcctctgaaagtgctgggataccgtggcctctgaaagtgctgggattacaggcatgagccaccgcgcccggccccgttgtttcccttctaagaaacgcagtggtctctgaagcctgcaggggcaggccagccctgcactgaacgcctgttcttgccaggtggcagaaggttgctgctcatttgagcagtacctgtcacccctcctcccactgctgcggctgttaactcatcttcaggtctcacaccttctgcacataaataagctatttttaaaagttattatttttttactctttcttttctttggagagggtaccaaaggatagctgttctgtttaagtagggacctctcatggcctacaggctttgacatctgagaatcaaactggagaacattccgaagccgttcttataagtgtctccatctctacctgggctgaaatggaatgtgcaaatgtagcccagcctggtccttgggtgttgccagttgattgatgactgggagccaaagtggcatctcctttgacctaaacgggcgatgatgaaataaaactcaacagcctttctctcatcttgcattgtgagatgcgaaatagagcgtgtctctctgcctctcattttaggctgaggccgtccaaagcggccatgccccatgtttccactagatggcgctgacacttcaggcatcaaccctcatggcctctcagccttgcaaaggcagccacttaaagtcggtgtcctgtgtggggcaccaagctgagctgcagacacccagtaggcgcgaggcaaatgcgtcccattttaagaggcttgtatttatgagctctttgcttcctccctcccactaactttaaagaattgctctccatctcctttggcaaagttcctttgccctttgtcttatttttgtgaaaccctccaaggtatttccagtccatttgcatccaatctggcatctttacggagagcggtctcatatgctattgttgttaacgtggactagtatttatgtgttgagaacactggctgtttgtcaggaaaagtgtgccaaaacaaagagtacggccggccctggaaatgcatcagcaaaacccatttcccccgtgcactcattctgagcttccttccttcatttctgtcattactgctgagaactggactgtgcccagctgacctttcccttcttggcctcattttggtgcggcggtcggcaggtggccggccgccgttgattggtttatggggggtccaaaaactcgcgttgcggggcgggggacccttgtattcttgtcggcccggttgtttcgagggtaaatcaaacgagggggtgggggcgcgcc

SEQ ID NO: 19774 - DNA, 474 bp, Homo sapiens
  misc_feature 1, 2, 3, 303, 304, 305, 306, 307, 308, 309, 310, 311, 312,313, 314, 315, 316, 317, 318, 319, 320, 321, 322, 323, 324,325, 326, 327, 328, 329, 330, 331: n = A,T,C or G
nnncccctccaggttactaaagggtgcatgtcccctgcttgaacactgaagggcaggtggtgggccatggccatggtccccagctgaggagcaggtgtccctgagaacccaaacttcccagagagtatgtgagaaccaaccaatgaaaacagtcccatcgctcttacccggtaagtaaacagtcagaaaattagcatgaaagcagtttagcattgggaggaagctcagatctctagagctgtcttgtcgccgcccaggattgacctgtgtgtaagtcccaataaactcacctactcatcaagnnnnnnnnnnnnnnnnnnnnnnnnnnnnncagtatttcacttttctcgatcactaaacatatgcatatatttttaaaaatcagtaaaagcattactctaagtgtagacttaataccatgtgacatttaatccagattgtaaatgctcatttatggttaatgacattgaaggt

SEQ ID NO: 19775 - DNA, 1430 bp, Homo sapiens
  misc_feature 1, 2, 3, 4, 5, 6, 7, 8, 9, 10, 11, 12, 13, 14, 15, 16, 17,18, 19, 20, 21, 1172, 1430: n = A,T,C or G
nnnnnnnnnnnnnnnnnnnnncatggaccaatgacagccagtggttttaattaataccattttgaatatctgagttccactggggtaaggggatgaatcaaacaaggcctcagaagaaaagttgtctgggaatgcaggaaggttttgcagaggagatgaagtttcagttgcaaccctgctgcgtgggcttcaatttcaccacctcgtgatccgcccgtctcggcctcccaaagtgctgggactgcaggcgtgagccaccgcgcccggccaacgtcattttcttttcaggagtcccttctgttatttagcaagacacactactacaatggagaaaaaagatgccccctccttcaagccctgagatcttcaggactttggcgaaaagtctgcgcccgaagagacccaggaaggattcttggaatcgtagtccaaaggcatcccgccttctgcgcagactcacaagtccctgtggacggaattcttgaagtgtagcgccgctcagtccttccaccggaagtgtccgatcggaatcagccctgtccgagagctgtcctactgatcctgaatttggggtcactgatggctacagaaccaaagaaagctgcagcccagaactctccagaggatgaaggacttctgatagtgaagatagaagaggaagaatttatccatgggcaggacacttgcttacagagaagtgaactccttaagcaggagctctgcaggcagctttttaggcagttctgctaccaggattctcctggacctcgcgaggcactgagccgcctccgggagctctgctgtcagtggctgaagccagagatccataccaaggaacagattctggaactgctggtgctagagcagttcctgaccatcctgccaggagatttgcaggcctgggtacatgaacattacccagagagtggagaggaggcagtgaccatactagaagatttggagagaggcactgatgaagcagtactccaggttcaagcccatgaacatggacaagaaatattccagaaaaaagtgtcacctcctggaccagcacttaatgtcaagttacagccagtggagaccaaggcccattttgattcatcagaaccccagctcctatgggactgtgataatgagagtgaaaacgtagatccatgccaaagcggagattnttggacaatgattcccgagaattattcggagaatcccggtactattcgaagctcgcggttcccgactcggaggtcgcgcggcgcagtccgggcaccgatccgggttccacaaccctgcccggggttgggtgactccccccatttggcggggatttcccgggggggagatgccgttccccttttgttgtccgcccggggttttcactttgggccctttcctcctcgtgctggggtccggcgctttgtcggtgttctccn

SEQ ID NO: 19776 - DNA, 1233 bp, Homo sapiens
  misc_feature 1, 2, 3, 4, 5, 1232, 1233: n = A,T,C or G
nnnnnagttcatgcgaatatacagatctgtcactcaaatacaacctattagactcaaacagttatttgtatacccacgttcacagaacattattcacataccaaatacagaagcaacccagtgtccattaatggatgaactgataaacaaatacggtatttacatactacggcatatttggcctttaagaggaaagaaattctaatacatgctacaacatgaatgaactttgaagacattatggtaaatgaaataagaatgaatccatttagatatctagagtagtcaatgcatagagactgaatgctggttaccagaggctgaggagagaggaggtaatgggtggttattgtttaatgaatacataatttcagtttgggaagatgaagagttctgtagacggatggtggtggtggttgcacaatagtatgaatatacttaatgccacagaattgaacacttaaaaactggttaaagtggtgaattttacgatatgcatatttaatcacaataaaaaatgcttattaaaagatgtactagttatgaaatagcatacctcatctgtttcaaactgggtgtggctaacaatgaggtagaaaagcagcaagcaggtacagagatttataatggctgctctaggtcctatcgggtaaagggatcagcagatgtgaagtcaagagtctcctgtaagatttgactttcttggaaacatattttaatcctgggcctcctctttccaaatcacctatttcttttagtctttttgcagtgatactgtgtgttgcttctaacagaggttcagtttcacagcctttccctcaagtgtcttatcctaaaagtaaaacctagatgatctaaggtggtggttttcaacagggtgcaattttgcctcctatactcgcaacacccagggacagttggctatgtctggagacatttttgggttgtcacaactggaagtagggtggggagtggtgctaatgacatcaagtgggcataagccaattatgctgctagaaatcctacaatgcacaggataggctcccacaaacaaagacttaaccaaccccaaatactaacaatgcttggtttgagaaaccctgttctaaggtttttctaagttgcttgatttatggtagaaactgatcataagttaaaagtttcctccttttggattgcttgagcccaggagtttgaggctatggtgcattatgattatgcctgtgaatagnn

SEQ ID NO: 19777 - DNA, 4004 bp, Homo sapiens
  misc_feature 1, 2, 3: n = A,T,C or G
nnnaaaggccgagccgcgagctggaccagccgtgcaaatctctagaagatgacggtgttctttaaaacgcttcgaaatcactggaagaaaactacagctgggctctgcctgctgacctggggaggccattggctctatggaaaacactgtgataacctcctaaggagagcagcctgtcaagaagctcaggtgtttggcaatcaactcattcctcccaatgcacaagtgaagaaggccactgtttttctcaatcctgcagcttgcaaaggaaaagccaggactctatttgaaaaaaatgctgccccgattttacatttatctggcatggatgtgactattgttaagacagattatgagggacaagccaagaaactcctggaactgatggaaaacacggatgtgatcattgttgcaggaggagatgggacactgcaggaggttgttactggtgttcttcgacgaacagatgaggctaccttcagtaagattcccattggatttatcccactgggagagaccagtagtttgagtcataccctctttgccgaaagtggaaacaaagtccaacatattactgatgccacacttgccattgtgaaaggagagacagttccacttgatgtcttgcagatcaagggtgaaaaggaacagcctgtatttgcaatgaccggccttcgatggggatctttcagagatgctggcgtcaaagttagcaagtactggtatcttgggcctctaaaaatcaaagcagcccactttttcagcactcttaaggagtggcctcagactcatcaagcctctatctcatacacgggacctacagagagacctcccaatgaaccagaggagacccctgtacaaaggccttctttgtacaggagaatattacgaaggcttgcgtcctactgggcacaaccacaggatgccctttcccaagaggtgagcccggaggtctggaaagatgtgcagctgtccaccattgaactgtccatcacaacacggaataatcagcttgacccgacaagcaaagaagattttctgaatatctgcattgaacctgacaccatcagcaaaggagactttataactataggaagtcgaaaggtgagaaaccccaagctgcacgtggagggcacggagtgtctccaagccagccagtgcactttgcttatcccggagggagcagggggctcttttagcattgacagtgaggagtatgaagcgatgcctgtggaggtgaaactgctccccaggaagctgcagttcttctgtgatcctaggaagagagaacagatgctcacaagccccacccagtgagcagcagaagacaagcactctgagaccacactttaggccaccggtgggaccaaaagggaacaggtgcctcagccatcccaacagtgtcgtcagagggtccccagggcattttcatggcaagtacccctctgcccccactccagcagtgcttcccaaagtgtgctctgtcacctgctttgcaatcggcttccattagcgcatgttttattttggtgtgacggttggccctcctaaacacggactttcctcaggctggttcaagacggaaaaggactttcttctgttttcttccaaagtgcaaccacagtggagagcccacggtgggcttagcctgcctaggcccttccatttctcttctttgaccgtgctaggaattccaggaaagtgcattcctgccctggtgaccttttcctatgtctaggctcctccacaggtgctgctattttgtgagctccggctcctgtttagcttttatttcagttctaacctcagtccagaaacatatgtgaggttgtttccctcttcagccacggctacaataccggaaaatgctagtttttatttatttttttaagtagtgcttcctaaatggtttgcatgagagccacctggggtacatgttgaaaacttatttggggtctaccccaaacctaataacccaaatttggggatggggcccaggaatatgcatttttaaaaagtcatctgcccttcccaggtgattctgtaagttgtccctcaactgtacttggagaaatcgtgttttaaagcagtagtccacaaagtattctgctcatgtgcccccaaaagtattttgaaaaatcatgtataccctcacccatctaagttgatatctaaaattttatctaagttggtatctaaaatttttcatgggaagttaaatagttgacaaagtatgtatttgctggtgtcgtgtaaatattggtattttaaaataaaaactgttacatcactattttaaacatatccagtacaatttaaatatcacaacaatttgacacccttcattcatttataaaaataaatgagctagttctttagtagttaaacatttcaaattggcttttctccttctgtatttccataccacttttcagccaagaatcctatcataatgtaatctattatgcccgacatcttttaatcattcaccccattacttcttgtcaacaaaaaatataaatggaaattttttttttagctcttgctttaagtgtttgtttgttatctcagtccagaaccaatattatcgtaattaattattggtatataatgaaaacggtattaattcttggatgattaaaagtttttttattagaatgttctttatcctaattagttcatttatccaagaatacatgaatgtgatttacagctgagatggggttcaacctcagctgtattccttgtttctgtatagatgtaagcacataaattcgatggaatagaattacgttaacaatgtttttacagttctttggattcctttggcattttgacaaagatcacagtgctctatcatcaagaattattaatgatgatctatcaactaacaaacaacttgattagattctcctttagtctgttgaaagcagagaactgaaatccacctgatttaccatggctttgccagccagtcattagcaccatttacttttactatcgctgacattttcctttgttcagtggccctgaggttcttacactctagggggcagtgcaccacaggaagatagatcaatgagggaggattgcgagggggaaggggaggaagcagagctggcaggccttagctacaggctctctctcaggcagatcccttttaagatacatacaccatgcccacacatcccatggagagagaccaatgctttagtagattacagaacagctatgaaaagtccatgaatgaagatcacaaaaaggaaggctttcttatttcatactgtattcttcagggtggtaaaatttctgcttttggcaaaaacataacagacggttccaaacatcagcataaagatcactcatccaataccacccacaggtagggaggaaggatgctgtagtatatgaaaacaaaagttttcacctgagctgagagcatttagcatatcgtggttctgtaacaatatcaaggaccagtgcagaatctggctttcttttctgataggctaccagtgtgtgtttatgtgtgctcattttgtggttctaatcataatggtacatataattagggaaggatatggaagccactttagaatcttattcatttttaaatataaatatgccttgtttcaaactttgttttcttgattcaggctttctttcctgtgagggcttggtttccttattgttgactgctttgttctttgccttgtccttccctataaagcctgcatggaagacgtttaatagtgcaactaaaagagagtcagctgagtgaggcttgtcagccaaagctggaatgctgagctatctggaggagatcctaataacccaatttggggatggggcccaggaatctgcattgggaagtcggccacccttcccaggtgattgtttagtacaaactttttgacagattaatttcactcaaatgcaaagattaatcccagcactttgggaggccaaggaaggtggatcacctgaggtcaggagctcgagac

SEQ ID NO: 19778 - DNA, 652 bp, Homo sapiens
acttctacagagatcctgaagagattgaaaaagaagagcaggctgctgctgagaaggcagtgaccaaggaggaatttcagggtgaatggactgctcccgctcctgagttcactgctactcagcctgaggttgcagactggtctgaaggtgtactcttggtttatcaatgggacgttccagcaatccacacaagagctctttatccccaacatcactgtgaataatagcggatcctatatgtgccaagcccataactcagccactggcctcaataggaccacagtcacgatgatcacagtctctggaagtgctcctgtcctctcagctgcggccaccgtcggcatcacgattggagtgctggccagggtggctctgatatagcagccctggtgtattttcgatatttcaggaagactggcagattggaccagaccctgaattcttctagctcctccaatcccattttatcccatggaaccactaaaaacaaggtctgctctgctcctgaagccctatatgctggagatggacaactcaatgaaaatttaaagggaaaaccctcaagcctgaggtgtgtgccactcagagacttcacctaactagaaacaggcaaactgtcaaaccatggtgagaaattgacgactttacacta

SEQ ID NO: 19779 - DNA, 303 bp, Homo sapiens
  misc_feature 1, 2, 3, 4, 5, 6: n = A,T,C or G
nnnnnngcatacagactgactcctaaactgatgaaagtttgtaaagaaaaggatttttcccctgaagcattgaaaaaagcaaatatcacctttgagtactgccctggaatatgggctgccccccacagctggctggggcatgggcattgatcgagtcgccatgtttctcacggactccaacaacatcaaggaagtactatgtatcaatgagtaacaggaaaattttaaaaatacagatagatatatgctctgcatgttacataagataaatgtgctgaatggttttcaaaataaaaatgaggt

SEQ ID NO: 19780 - DNA, 2087 bp, Homo sapiens
  misc_feature 2086, 2087: n = A,T,C or G
tcgacccacgcgtccgatttcagactggcaccacctcctctggctgtttccgaggccatctagaggccagagcccagtcagattaactgaaagtaaagagaggactgcgggagtttgggacctttgtgcagacgtgctcatgctcgttcgtgtagagggcgggagagaggaaaggaaggagggcattgggagctgaggccccacctttcatttcagaaaagtgcacaggcagagcgggctgagtcacaggcacaggtgaggaactcaactcaaactcctctctctgggaaaacgcggtgcttgctcctcccggagtggccttggcagggtgttggagccctcggtctgccccgtccggtctctggggccaaggctgggtttccctcatgtatggcaagagctctactcgtgcggtgcttcttctccttggcatacagctcacagctctttggcctatagcagctgtggaaatttatacctcccgggtgctggaggctgttaatgggacagatgctcggttaaaatgcactttctccagctttgcccctgtgggtgatgctctaacagtgacctggaattttcgtcctctagacgggggacctgagcagtttgtattctactaccacatagatcccttccaacccatgagtgggcggtttaaggaccgggtgtcttgggatgggaatcctgagcggtacgatgcctccatccttctctggaaactgcagttcgacgacaatgggacatacacctgccaggtgaagaacccacctgatgttgatggggtgataggggagatccggctcagcgtcgtgcacactgtacgcttctctgagatccacttcctggctctggccattggctctgcctgtgcactgatgatcataatagtaattgtagtggtcctcttccagcattaccggaaaaagcgatgggccgaaagagctcataaagtggtggagataaaatcaaaagaagaggaaaggctcaaccaagagaaaaaggtctctgtttatttagaagacacagactaacaattttagatggaagctgagatgatttccaagaacaagaaccctagtatttcttgaagttaatggaaacttttctttggcttttccagttgtgacccgttttccaaccagttctgcagcatattagattctagacaagcaacacccctctggagccagcacagtgctcctccatatcaccagtcatacacagcctcattattaaggtcttatttaatttcagagtgtaaattttttcaagtgctcattaggttttataaacaagaagctacatttttgcccttaagacactacttacagtgttatgacttgtatacacatatattggtatcaaaggggataaaagccaatttgtctgttacatttcctttcacgtatttcttttagcagcacttctgctactaaagttaatgtgtttactctctttccttcccacattctcaattaaaaggtgagctaagcctcctcggtgtttctgattaacagtaaatcctaaattcaaactgttaaatgacatttttatttttatgtctctccttaactatgagacacatcttgttttactgaatttctttcaatattccaggtgatagatttttgttgttttgttaattaatccaagatttacaatagcacaacgctaaatcacacagtaactacaaaaggttacatagatatgaaaagattggcagaggccattgcaggatgaatcacttgtcacttttcttctgtgctgggaaaaataatcaacaatgtgggtctttcatgagcagtgacggatagtttagcttactatgtttcccccccaattcaatgatctataacaacagagcaaagtctatgctcatttgcagactggaatcattaagtaatttaataaaaagattgtgaaacagcatattacaagtttgaaaattcagggctggtgaaaaaaatcaactctaaatgatgataattttgtacagttttatataaaactctgagaactagaagaaattattaactttttttcttttttaattctaattcccttgtcatatggggaggagacnn

SEQ ID NO: 19781 - DNA, 1654 bp, Homo sapiens
  misc_feature 1648, 1649, 1650, 1651, 1652, 1653, 1654: n = A,T,C or G
tcgacccacgcgtccgccacgcgtccgcgcggtcattttgagcccctgtctggatgacttcttgcggctgttctacccctccccctccccgcggtaccttgcacttttctccctccctgccccctctcgagtccaccctccgggccttctgcccctgatcgcttggttttccttgcagtcgcctgctgctgtcgtcgggaggaaagatgaatgggagggctgattttcgagagccgaatgcagaggttccaagaccaattccccacatagggcctgattacattccaacagaggaagaaaggagagtcttcgcagaatgcaatgatgaaagcttctggttcagatctgtgcctttggctgcaacaagtatgttgattactcaaggattaattagtaaaggaatactttcaagtcatcccaaatatggttccatccctaaacttatacttgcttgtatcatgggatactttgctggaaaactttcttatgtgaaaacttgccaagagaaattcaagaaacttgaaaattccccccttggagaagctttacgatcaggacaagcacgacgatcttcaccacctgggcactattatcaaaagtcaaaatatgactcaagtgtgagtggtcaatcatcttttgtgacatccccagcagcagacaacatagaaatgcttcctcattatgagccaattccattcagttcttctatgaatgaatctgctcccactggtattactgatcatattgtccaaggacctgatcccaaccttgaagaaagtcctaaaagaaaaaatattacatatgaggaattaaggaataagaacagagagtcatatgaagtatctttaacacaaaagactgacccctcagtcaggcctatgcatgaaagagtgccaaaaaaagaagtcaaagtaaacaagtatggagatacttgggatgagtgaaaaattacatcattggacatgaaggagtttcaacatccagcttcatctaggtggtcatgattacctgcatgctttgagctcagcagcagtcttcataaacacatttaaaacaagatcctgggtttttgtggtttgacttctatggtgttttaaaaaaacacagatttttagtgttaatattgtgtaaatgtactcaccttagggattcatttgaatgatggtattataccatgattgtatacagtttgtgaaattgttgcaagggcaaagataactcttaaaaaaccgtcgagattacaatgctctagaatcagcatataagaaaataaatgatatctgcatgttgaattggggtggatggggggagcaagcataatttttaagtgtgaagctttgcatcaagaaattattaaaaagctttttttctccagtattttctgtattatcttaatgtttatggcaaataaaatgtaaaggaacatgcaaaaaaaaaaaaaaaaaaaaaaaaaggagagagaaaacagagaaaagagaaaaagaggagaaaaaacaacacaagaaaagagcaaggaagaaagaaagaaacagaagagaagaagaaaaagaaagagaagaagaagaaacaagagaaaagagaagaaagaaaacagaaagaagaggacagacaggaagaagaagaagaaagaagaagaggaaatgcagcnnnnnnn

SEQ ID NO: 19782 - DNA, 4436 bp, Homo sapiens
  misc_feature 4243: n = A,T,C or G
acccacgcgtccgggagaccactgagacgagcgggagcgcggagcagcagcctctgctgccctgactttttaagaaatctcaatgaactatttgtagagaatcactgatccggcctgcaagcattttgcacggcaaaaatatcgatcagtgttaagtgaagatcacattttatatgcgatcttgacttttttgtcttacattatatttttatagattttgttataaacatggtgctgggaaaggtgaagagtttgacaataagctttgactgtcttaatgacagcaatgtccctgtgtattctagtggggataccgtctcaggaagggtaaatttagaagttactggggaaatcagagtaaaatctcttaaaattcatgcaagaggacatgcgaaagtacgctggactgaatctagaaacgccggctccaatactgcctatacacagaattacactgaagaagtagagtatttcaaccataaagacatcttaattgggcacgaaagagatgatgataattccgaagaaggcttccacactattcattcaggaaggcatgaatatgcattcagcttcgagcttccacagacaccactcgctacctcattcgaaggccgacatggcagtgtgcgctattgggtgaaagccgaattgcacaggccttggctactaccagtaaaattaaagaaggaatttacagtctttgagcatatagatatcaacactccttcattactgtcaccccaagcaggcacaaaagaaaagacactctgttgctggttctgtacctcaggcccaatatccttaagtgccaaaattgaaaggaagggctataccccaggtgaatcaattcagatatttgctgagattgagaactgctcttcccgaatggtggtgccaaaggcagccatttaccaaacacaggccttctatgccaaagggaaaatgaaggaagtaaaacagcttgtggctaacttgcgtggggaatccttatcatctggaaagacagagacgtggaatggcaagttgctgaaaattccaccagtttctccctctatcctcgactgtagtataatccgcgtggaatattcactaatggtatatgtggatattcctggagctatggatttatttcttaatttgccacttgtcatcggtaccattcctctacatccatttggtagcagaacctcaagtgtaagcagtcagtgtagcatgaatatgaactggctcagtttatcacttcctgaaagacctgaagcaccacccagctatgcagaagtggtaacagaggaacaaaggcggaacaatcttgcaccagtgagtgcttgtgatgactttgagagagcccttcaaggaccactgtttgcatatatccaggagtttcgattcttgcctccacctctttattcagagattgatccaaatcctgatcagtcagcagatgatagaccatcctgcccctctcgttgaaggaacacttggttgaatcaagttgatgtgggttccgaactgtatctcttccggctgaggacagagaagtatcttggagacacgtttcagaggaagtggaattacttttgcccagaaaaatggcgaatacatgaaacaaccagtgatcatgctttagaagcctacagcaacattctgagactgctccaacatgcttgaagatctaagcttttctcttttaaaactggcacatactcagagcagtcttcttagcctatggtcgtacgtgtcaagacatcacgttgtaaagagggatgatttccttcttttgatttgaaaatttgcacatgctcaatgcttacattgtgcggttcgacgtcactacagcttctttattttttttttttttttctatttttgccagactcttgatactcttaaaacttgtttgtggtcagcacaacaaggaacaaaacaaagctttgaaaaaactttaacatgaaaaaacgcactgacatttttttttatttaatatagcctggactttacctgcgtatgcacatgctcagaattgtctactaggctgactatgtatcacctcttcagcttggatccaattgtggatttatttacaaacatcaaatgccttcaagccaatcctttttgctgtatgttttgcagcctactgtagtagatacgcaacagataatgtgggaaaaaaagagataagaggaggaagctaataagagactgtcaagattgtataccttcttggtttcttttaagaatttgttgcctttctactattacagcaaagcagcattttgttactgactgcctaaaatcacttaatctcaggtgaacgcatcacttgccaaactgttggaatgctatttgtgttttgttgcactgtttttttcgtttgtttgtttgtttatttggttggctttttggagagggaaatttggaaacgggacatacacaaaagttacacacccacattccctttttatcatgacatacaagaagaaactagcagagctaagaatggagtgaagaaaggcagtatggcaggcaccagcaaagagttgagggctgttgctcttaaaaattattttttttattattattttgaaagtatggaagttttccattcactggggaaaggagggaaaagtgcatttatttttatacagagttacttaattacctccaaaacacatatgttggaaatcgcttttgctggtgcaaagtatattaatgagcaggaatacatacattgaggttatgaatagagagctcaatttgtacctttgctgtcttgctcaagcttggtatggcatgaaaactcgactttattccaaaagtaacttcaaaatttaaaatactagaacgtttgctgcgataaatcttttggatttttgtgtttttctaatgagaatactgtttttcattacctaaagaacaatttgctaaacatgagaaatcactcactttgattatgtatagattacataggaagaacaatcacatcagtaagttatagtttatattaaaggtaattttctgttggctcataacaaatataccagcattcatgatagcatttcagcattttccaaggtaccaagtgtacttattttgttgttgttgttgttgttgtattttagaaggaattcagctctgatgtttttaaagaaaaccagcatctctgatgttgcaacatacgtgtaaaatgggtgttacatctatcctgccatttaaccccacagttaataaagtggctgaaaataatagtagctctggcttggtgcttgacctggttaaatactgtcttaaagctcatacaaaacaaataggcttttccataagtggcctttaagaaaacatggaagacaattcatgtttgacaaatgctgacagggtgaagaaagcccagtgtaaaaatgaatcgcgttttaagtgattcggttaaagagtttgggctcccgtagcaaactaatactagataataaggaaatgggggtgaaatatttttttattgttgaatcattttgtgaatgtccccctcaaaaaaagctaatggaatatttggcataaagggcatttggtggttttatttttgtttgagggggattgtcagaaaatcccttttctctcttacgtctaactgactagggaacaattgttgatatgcatagcattggaatacttgtcattatatactcttacaaataacacatgaagcaagaatgaccaatattctgataattggcactggatcacaaaatgtgataaaactttaaatgtataaaactttatcaaataaagttttattttcccctttaaaatgtatttctttagaggcattacttttttaaaaatattggtcaattcctgacataagatgtgaggttcacagttgtattccagtattcaagatagattcctgatttttcaattaggaaaagtaaaatccaaaatgttagcaaaacaaagtgcaatattaaatgtttgctttatagattatattctatggctgtttgtaatttctctttttttccttttttatttggtgctgaatatgtccttgtaggctctgttttaagaaaacaatatgtgggaaatgatttaatttttcctattgctcttccttgtggaaaataaagtgttttgtttttttctgttttgtataaaaaaaaaaaaaaaaaaaaaaaaaaaaaaaaaaaaaaaaaaaaaaaaaaaaaaaaaaaaaaaaaaaaaaaaaaaaaaaagaaaaaaaaaaaaaaangccgcccccccccgggggggacccccatttccccctttagggagtctttttccccccccccatggcccgttttttaaaaacgtgggaacgggaaaaacccgggctttcccaaattaattcccttggaaaaaattccccttttccccagttggcttaaaaccaaaaaggccccacccattcccctttccaaaaa

SEQ ID NO: 19783 - DNA, 3469 bp, Homo sapiens
tatagggagtcgacccacgcgtccgctcaagtgtttctgagaatctgggtgatttataagaaacccttagctgaatgcagggtggggagaacgaaagacaaaagcatcttttttcagaagggaaactgaaagaaagaggggaagagtattaaagaccatttctggctgggcaggggactctcagcagctcaactgcccagcgtgaccagtggccacctctgcagtgtcttccacaacctggtcttgactcgtctgctgaacaaatcctctgacctcaggccggctgtgaacgtagttcctgagagatagcaaacatgcccaacagtgagcccgcatctctgctggagctgttcaacagcatcgccacacaaggggagctcgtaaggtccctcaaagcgggaaatgcgtcaaaggatgaaattgattctgcagtaaagatgttggtgtcattaaaaatgagctacaaagctgccgcgggggaggattacaaggctgactgtcctccagggaacccagcacctaccagtaatcatggcccagatgccacagaagctgaagaggattttgtggacccatggacagtacagacaagcagtgcaaaaggcatagactacgataagctcattgttcggtttggaagtagtaaaattgacaaagagctaataaaccgaatagagagagccaccggccaaagaccacaccacttcctgcgcagaggcatcttcttctcacacagagatatgaatcaggttcttgatgcctatgaaaataagaagccattttatctgtacacgggccggggcccctcttctgaagcaatgcatgtaggtcacctcattccatttattttcacaaagtggctccaggatgtatttaacgtgcccttggtcatccagatgacggatgacgagaagtatctgtggaaggacctgaccctggaccaggcctatagctatgctgtggagaatgccaaggacatcatcgcctgtggctttgacatcaacaagactttcatattctctgacctggactacatggggatgagctcaggtttctacaaaaatgtggtgaagattcaaaagcatgttaccttcaaccaagtgaaaggcattttcggcttcactgacagcgactgcattgggaagatcagttttcctgccatccaggctgctccctccttcagcaactcattcccacagatcttccgagacaggacggatatccagtgccttatcccatgtgccattgaccaggatccttactttagaatgacaagggacgtcgcccccaggatcggctatcctaaaccagccctgctgcactccaccttcttcccagccctgcagggcgcccagaccaaaatgagtgccagcgaccccaactcctccatcttcctcaccgacacggccaagcagatcaaaaccaaggtcaataagcatgcgttttctggagggagagacaccatcgaggagcacaggcagtttgggggcaactgtgatgtggacgtgtctttcatgtacctgaccttcttcctcgaggacgacgacaagctcgagcagatcaggaaggattacaccagcggagccatgctcaccggtgagctcaagaaggcactcatagaggttctgcagcccttgatcgcagagcaccaggcccggcgcaaggaggtcacggatgagatagtgaaagagttcatgactccccggaagctgtccttcgactttcagtagcactcgttttacatatgcttataaaagaagtgatgtatcagtaatgtatcaataatcccagcccagtcaaagcaccgccacctgtaggcttctgtctcatggtaattactgggcctggcctctgtaagcctgtgtatgttatcaatactgtttcttcctgtgagttccattatttctatctcttatgggcaaagcattgtgggtaattggtgctggctaacattgcatggtcggatagagaagtccagctgtgagtctctccccaaagcagccccacagtggggcgggtctcgcgagagacccaaagcagccccacagtggagcctttggctggaagtccatgggccaccctgttcttgtccatggaggactccgagggttccaagtatactcttaagacccactctgtttaaaaatatatattctatgtatgcgtatatggaattgaaatgtcattattgtaacctagaaagtgctttgaaatattgatgtggggaggtttattgagcacaagatgtatttcagcccatgccccctcccaaaaagaaattgataagtaaaagcttcgttatacatttgactaagaaatcacccagctttaaagctgcttttaacaatgaagattgaacagagttcagcaattttgattaaattaagacttgggggtgaaactttccagtttactgaactccagaccatgcatgtagtccactccagaaatcatgctcgcttcccttggcacaccagtgttctcctgccaaatgaccctagaccctctgtcctgcagagtcagggtggcttttcccctgactgtgtccgatgccaaggagtcctggcctccgcagatgcttcattttgacccttggctgcagtggaagtcagcacagagcagtgccctggctgtgtccctggacgggtggacttagctagggagaaagtcgaggcagcagccctcgaggccctcacagatgtctaggcaggcctcatttcatcacgcagcatgtgcaggcctggaagagcaaagccaaatctcagggaagtccttggttgatgtatctgggtctcctctggagcactctgccctcctgtcacccagtagagtgctccagaggagacccagatacatcaaccaaggacttccctgagatttggctttgctcttccaggcctgcacatgctgcgtgatgaaatgaggcctgcctagacatctgtgagggcctcgagggctgctgcctcgactttctccctagctaagtccacccgtccagggacacagccagggcactgctctgtgctgacttccactgcagccaagggtcaaaatgaagcatctgcggaggccaggactccttggcatcggacacagtcaggggaaaagccaccctgactctgcaggacagagggtctagggtcatttggcaggagaacactggtgtgccaagggaagcgagcatgatttctggagtggactacatgcatggtctggagttcagtaaactggaaagtttcacccccaagtcttaatttaatcaaaattgctgaactctgttcaatcttcattgttaaaagcagctttaaagctgggtgatttcttagtcaaatgtataacgaagcttttacttatcaatttctttttgggagggggcatgggctgaaatacatcttgtgctcaataaacctccccacatcaatatttcaacctcgtgccaattcttggcctcgagggccaaattccctat

SEQ ID NO: 19784 - DNA, 753 bp, Homo sapiens
acaggtaagatatactggagtcacagagcaatatgcattaacaggatacaacagttcataaaaactgagtaactatgcacacaaatttcttaaacagccacctaaagagaaaatgcacagatgtatggtggaaaaaactgtatctaacactgaaactactacaggactccatcaatgagtccaacttttagtgataaaaaactactgtacactacatgaagaaccatatgtttataattatccaaataaaaatgaagttattaaacttcaagataatatggtaatttgcattgaaccgatgattttacaaaattctgcaaaggtcaaaattttaaaagatggctgaacagtaattgcagcatctaataaaaacgcagctcattacgagcaaacggttttaattaaaaattcaaaaggaataatcctgacaggagaaataaaaaaatagatgtcaaaagaagataaaattattttcaaaggagtagtaactcaagtttttaacacccaagaatacgaagtagagtttgaaaatggacacaaagttatggctcacgttgctggaaaaatgaagctacatcgtattaaaataattgttggagatcatgtgcaagtagaactttctggatatgatcttagcaaaggtagaataatttatcgttataaataatttatcatttacataggagaaatatgaaagtaagagcaagtattaaaaagatttgcaatgactgtaaaattatcaaacgtaaaagt

SEQ ID NO: 19785 - DNA, 369 bp, Homo sapiens
  misc_feature 196, 369: n = A,T,C or G
acaggagcaaccttctttccaccattactgggaattccaccactatttgctcccccagcccagaatcatgattcttcttcattccattcaaggacttcgggaaaaagtaatcgaaatggtcccgaaaaagggtaaatgggtcaataaatggaagtaatacatcatctgtaattggtatcaacacatctgtactttntttttttttttttttttatctaaaagcaacataattatttttcttgcgattttttcaagaactctttttaattgtctaacacctgattctagtgtatagcttctgattataaattcaattgttttgttgttgattttaaaatgttttttatctaataggttttcagaaattan

SEQ ID NO: 19786 - DNA, 910 bp, Homo sapiens
  misc_feature 1, 2, 905, 906, 907, 908, 909, 910: n = A,T,C or G
nngctggagagaggcctctagacttcagtttcagtttcctggctctgggcagcagcaagaattcctctgcctcccatcctaccattcactgtcttgccggcagccagctgagagcaatgggaaatggggagtcccagctgtcctcggtgcctgctcagaagctgggttggtttatccaggaatacctgaagccctacgaagaatgtcagacactgatcgacgagatggtgaacaccatctgtgacgtcctgcaggaacccgaacagttccccctggtgcagggagtggccataggtggctcctatggacggaaaacagtcttaagaggcaactccgatggtacccttgtcctcttcttcagtgacttaaaacaattccaggatcagaagagaagccaacgtgacatcctcgataaaactggggataagctgaagttctgtctgttcacgaagtggttgaaaaacaatttcgagatccagaagtcccttgatgggttcaccatccaggtgttcacaaaaaatcagagaatctctttcgaggtgctggccgccttcaacgctctgagtaagcattgctgggtgtcaggagagaaaagccaaagaagcgggtgccagacagctctgtgcaacctctaggccatgagtgggatagataccactgctgctttaaaaaatgggagaccatagaccctcaggagagaagaatcccttctaccctggactcgctctcttctctggaactaacttctcccccataccctgattgtctttggagaaaatgttctggattctagaatctaaggcagagccttttaagccatactgtgactaaatcgcctgggactcgtgaatgggacaccgccagggtctgagtcacgccggattattcatccgcccatctagcannnnnn

SEQ ID NO: 19787 - DNA, 604 bp, Homo sapiens
  misc_feature 1, 2, 3, 4, 5, 6, 7, 8, 9, 10, 11, 12, 13, 14, 15, 16, 17,18, 19, 20, 21, 22, 23, 24, 25, 26, 27, 28, 29, 30, 604: n = A,T,C or G
nnnnnnnnnnnnnnnnnnnnnnnnnnnnnntttttgccttcaacaaaaaaggaatttattggctcacataagtgaaagctgagaaatagatctcaattcaggtccaatttgatccagaagttcccaagggctccaatagactccctctcaccctggtacctgcccgggcggccggccgcccgggcaggtgtcaagcttcgacccacgcgtccgtcttagcctacaagggggctcttatgtacatagttgttaatacatccaattaatgatgtctgacatgctatttttgtagggagaaaatatgtgctaatgatattttgagttaaaatatcttttggggaggatttgctgaaaagttgcacttttgttacaatgcttatgcttggtacaagcttatgctgtcttaaattattttaaaaaaataaatactgtctgtgagaaaccagctggtttagaaaagtttagtatgtgacgataaactagaaattacctttatattctagtattttcagcactccataaattctattacctaaatattgccacactattttgtgatttaaaaattcttactaaggaataaaaactttacctcggccgctcn

SEQ ID NO: 19788 - DNA, 1012 bp, Homo sapiens
  misc_feature 769, 777, 779, 782: n = A,T,C or G
tggtaccccacccgggtgggaaaatcgatgggcccgcggccgctgtgttgttgttgtacagtaccttaaaaacttttattttagtccttcctggcccatgctaaaacttatatctagaaatacggcaaaacaaaatgaaacagatctctccttgtacataaaacagctaaaaatttggcctctttattgatcttatgtcatgtatttggcttgaaaaaaaaacaacaacaaaacaaacagttacaagggttaaacaaactaaatttttcttctaaatctctaaatgctcatagacagccaacttgcagggcatacacagtgccttgagagtcggtcccacagaaaatacttatgtaaatgaaacaagaaggatgctatttgtttttcattacataaacattacctgaacttaactaatcaatccacttatttgataaaaatcatctaggaccaaaagcactatcaagtttgctggctgccattttcactctaatcatacccaaaaggcttagaaataattcaaaactagaaagaggcccaagtagtaaggctacctatggctcttgctacaaaacagttgccagtctgatgtgtgtgtgtctagaaagaatgatagaaaataaagagttcttgagttcaagagaacttcccagaaggaggtggtgggccaagaaatccacctgcctgcttggtggcggctcgtgaaggggcaaggccgagaatcttctgaatgttctgtcgaatcgacatagtacactgagaacccggncggcctcnancgnccgccacttttttttttttttttttttacctagcccatgttaccaatctaaatgaactgtctatgcatagaaaactgctttatgcctaagataattactgggatttaagaaagtgagaaaaaagaataggtgggattgagaaattaggtaaaaacagaagaggccaactaaacccaagtgctgcccttcaagggctctagtaaccggacgcgtgggtcgaagcttgacct

SEQ ID NO: 19789 - DNA, 341 bp, Homo sapiens
  misc_feature 313, 314, 315, 316, 317, 318, 319, 320, 321, 322, 323, 324,325, 326, 327, 328, 329, 330, 331, 332, 333, 334, 335, 336,337, 338, 339, 340, 341: n = A,T,C or G
caagcttcgacccacgcgtccggccacattttcaatttagccatttttctcttattcacctttttctgctaattactctgtaattccactaagaaaagtcaatagataattccaataatgacttcactcctgagaattttattagctgctaacgcttgtctcatcataagcactcatatgttcattgagtaaatatttattgagtatttgctatggtccaggcactgtgctaagtattgaggataaaatggtgattgaaacattttcccttcttgattttaacatctacaaaataaaaagtatgttaatatcnnnnnnnnnnnnnnnnnnnnnnnnnnnnn

SEQ ID NO: 19790 - DNA, 531 bp, Homo sapiens
accaaaagcctcactcacaattatttttgagatagctcccaatgagtttaatcactgctatgccaggtgtgtgaggctgctgtgggacaacaatcttgattcctagaagagtcataaatttctagggactacaggctcctgccaccatgcctggctaatttttgtagagatggggtttcaccatgttgcccaagctggtcttgaacttctgagctcaagcgatccacctgcctcagcctcccaaagtgctgggattacaggtgtgggccatcacgcttgccctagagtaatattctctattatcaaggtagaaagttcaacatatattcattagatctactttatagatactgttactcagatcacttatatcgttatatgtattttttgtcttcttaacttcagtcttggatgagagagaggtgttttaaatttctctgttatttctaggtttctattcatttttccttgcataatttgttatgcaaatgttatgtgctcggacgcgtgggtcgaagcttgacctgcccg

SEQ ID NO: 19791 - DNA, 482 bp, Homo sapiens
  misc_feature 468, 469, 470, 471, 472, 473, 474, 475, 476, 477, 478, 479,480, 481, 482: n = A,T,C or G
cttcgacccacgcgtccgcagatcagacgtggcgacccgctgaatttaagcatattagtcagcggaggaaaagaaactctgaatccgaccagtgtaggtgattacattagcctttgaagtcaacacaaagtttaaaacacctgcccgggcggccggccgcccgggcaggtgtacaagcttcgacccacgcgtccggctgaagacatccctagggcaggtagcagaatacctaattcaacctagagaggcacaggctgcacgagagtctctcagataaagccccattgaaaataaatttacaatctaaaatttaaaaacccgttaaaaaagcagcacagcatgaggagtcagtagatacactgaaagcaagattagatcttcaagactttcaaactataaaatttagaaaattataataaattatgaaatagaggccctttcatgtcaaaagtccatgaaagaaagaannnnnnnnnnnnnnn

SEQ ID NO: 19792 - DNA, 2121 bp, Homo sapiens
  misc_feature 1, 2, 3, 4, 5, 6, 2075, 2076, 2115, 2116, 2117, 2118, 2119,2120, 2121: n = A,T,C or G
nnnnnnggtcgagcggagggcgcgcagctccaccgttgccaagacgccgcgtaaacacccgagcgcgcgcagccaggtgcgctccttggggctgctggctgctgcgtttgcggcgggaggtggtggccgcggtcccacgagaaggggtatttttcgtcagccaagatgggttccaaaaggagaaatttgagctgtagtgaaaggcatcagaaattagtagatgaaaactactgcaaaaaattacatgtccaagctctaaaaaacgtcaacagtcaaatcaggaatcaaatggtgcagaatgaaaatgataaccgtgttcagcgcaagcaatttctcagattattacaaaatgaacaatttgagttggatatggaagaggccattcaaaaggcagaagaaaacaagagattgaaagaactccagctcaaacaagaagaaaaactggctatggaattggcaaaactgaaacatgaaagtctaaaggacgaaaagatgaggcaacaagtaagagaaaacagcattgagcttagagaattggagaagaaattaaaagcagcttacatgaataaagaaagggcagctcagattgctgaaaaggatgccattaaatatgaacaaatgaaacgtgatgctgaaatagccaaaaccatgatggaagaacacaagagaataataaaggaagagaatgctgcagaagacaaacgaaacaaagcgaaagcacagtactatcttgacttagagaaacaacttgaagaacaagaaaaaaaaaagcaggaagcttatgagcagctgctaaaagagaaactcatgattgatgaaattgttaggaagatctatgaagaagatcagttggaaaaacaacaaaagttagaaaaaatgaatgcaatgcgaaggtatatagaagagtttcagaaagagcaggctctctggagaaaaaagaaacgtgaggagatggaagaagaaaacagaaaaatcatagagtttgctaacatgcagcagcaaagagaagaagatcggatggcaaaagttcaagaaaatgaggagaaaaggctacagcttcagaatgcgttgacacagaaattagaagaaatgctgcggcaacgtgaagatttggaacaagtgcgacaagaattataccaggaagaacaagctgaaatatataagagcaagctaaaagaagaagcagaaaagaaattgagaaagcaaaaagagatgaagcaagattttgaagaactaaggcccttgaaggaattagtgctacaggctgcaaaagaggaagagggagacctttagaaaaactatgctagctaaatttgctgaggatgatcgaatagaattaatgaatgctcagaaacaaagaatgaagcagctggaacacaggagggctgtggaaaaacttattgaagagcgtcgccaacaattccttgcagacaaacaacgtgaactagaagagtggcagttgcagcaaaggcggcaaggatttattaatgcaattattgaagaagaaaggctaaaacttcttaaagagcatgctacaaacttactaggctatctccctaaaggagtatttaaaaaagaggatgatattgatctgcttggtgaagagttcaggaaagtatatcaacaaaggagtgaaatttgtgaagagaaatgatatcatcaaaattgggtaaagcatagattttttgtatgttaccactagatgtcagcataacttttgttttacagttcagtggcattaggtatccattgtctgtttggattttgtaaatcatcactgaatttcataacttgtaaacaattatcagatacaaattaattttaatcaagctgttatttttgtactgataatttcaaaatccgatttctacaacactacagagcactgtttgcatccccatcctcaagacagtatatttaccttgactaatacagaactctaccccaaagtgaactgccttctgtctgtgtttacgaactttacttacttgatttagccagggaaataaatatttggaattttcaaaaaacagaacccccccccccccccccaagggcggggaaaatggaaaaannaataaaaaaatccccggaaaaccccccaaaaaccgaaannnnnnn

SEQ ID NO: 19793 - DNA, 843 bp, Homo sapiens
  misc_feature 843: n = A,T,C or G
caagcttcgacccacgcgtccggtttgggtggaattataatattttagataagatttaagaggattctaattctagctacttgataggaatgcgaatgatgataaggcttttagagttagataagagagagggctagcaccctgatattctgtaattgaaacagagtttcaagtcctttggtcaagtattacccttattccttcaggaatagtagatattttaagattacagataggttatcttatctaatttacctacctattgttgaaattatttaatttgcatttaactgtgttttcacacctgcccgggcggccctcttacctgcttctgaccttatgctcaagaactcccctaactctggccagagctcagctttggcaactctgaccgttgagcagctctcatcccgggtttcctttacgtctctttctgatgacaccagcacagcgggctccatggaggcctctgtccagcagccatcccagcagcagcagctcctgcaggaactgcagggtgaggaccacatctctgctcagaactatgtgatcatctaaaaaagggggagctggcctccaccctgtgttccatggattcggaacaagatttcagacatctgcatgagtgacaaactttctgaacaccaccaccaccaacccccttctactgcctactttaaaaaaattaatagttttctatggaactgatctaagattagaaaaattaattttctttaatttcattatggacttttatttacatgactgtaagactataagaaaatctgatggcagtgacaaagtgctagcatttattgttatctaataaagaccttggagcan

SEQ ID NO: 19794 - DNA, 1764 bp, Homo sapiens
  misc_feature 1763, 1764: n = A,T,C or G
gtccgcaccgtctcaaattatatatatatattaagatggagtcttgctttgtcaccagctggagtgcaagtggcatgatctcggctcactgcaacctccacctccctggttcaagcgattctcctgcctcgagcctcctgagtagctgggactgcgggcatgcaccaccacgcccagctaattttttgtatttctagtagagacagggtttcgccatgttggcaaggatagtctcgatttcttgacttcgtgatccgcccgccttggcctcccaaagtgctgggattacaggtgtcagccaccgcacccggcctcaaatacatttttttaatggccttgtctttcctggttttaggcccttttccacaatttctgatggaaatacagaaaccttgccatcattcttactgctggtttgcatctcatttatggtgtatctgggatttcttctcatgaacagaaagattcagtggctgttatatgccttgtcaatttaatgtattgccctatcctctttttgatcaaagatagagactaagactgggaattatgacagaaaaagtcatatttttctttaaatgattttgaaatgttaaaataggccaatatgagtcaaagtgcaaattttttggtgagtaggttgacaaaaaaaaaaaaaaatccaggaaaaaaagtgcaaatttttataggtcctaattcttttgtttgcctaatgaagtgttccctctattttattgtttttatatgctacaaagtcccatcttctgcagttatggaaacagtgtggctgtatgttttaggaattatttcataatctgtagcacttttcactttaagtgcaatgaatagtccagcttcattcactgtattactaatacgcttccctatgacttttttttttttttgagatggagtttcgctcttgttgcccaggctggagtgcagtggcgcgatctcagcttactggaatctctgcattcccagttcgggtgattctcctgcctcagcctccctagtagtggggattacaggtgtcagccaccgcacccggcctcaaatacatttttttaatggccttgtctttcctggttttaggcccttttccacaatttctgatggaaccgcagaaaccttgccatcattcttactgctggtttgcatctcatttatggtgtatctgggatttcttctcatgaacagaaagattcagtggctgttatatgccttgtcaatttaatgtattctagttttgacattttatgatagatttgctctctagaaggaaacgtctttatttaggagggcaaaaattttggtcatagcattcacttttgctattccaatctacaactggaagatacataaaagtgctttgcattgaatttgggataacttcaaaaatcccatggttgttgttagggatagtactaagcatttcagttccaggagaataaaagaaattcctatttgaaatgaattcctcatttggaggaaaaaaagcatgcattctagcacaacaagatgaaattatggaatacaaaagtggctccttcccatgtgcagtccctgtccccccccgccagtcctccacacccaaactgtttctgattggcttttagctttttgttgtttttttttttccttctaacacttgtatttggaggctcttctgtgattttgagaagtatactcttgagtgtttaataaagtttttttccaaaagtaaaaaaaaaaaaaattcctgcggccgcaagcttattccnn

SEQ ID NO: 19795 - DNA, 1617 bp, Homo sapiens
  misc_feature 1, 2, 3, 4, 5, 6, 1614, 1615, 1616, 1617: n = A,T,C or G
nnnnnncaatggatgaaagtaaaccggcaaactatttttgtttggactttgttgacttttgtgaggaaaccatatgacagctttaatatctaattttaaaattcagagcaggaaatgaggcaatcccgtacacaggccaagaaaaaaaccgtatcaaaatgtaaatatcaattccacattacggccagttaaagaacaatgggaagaccaagaaggagatggcagtgacagaagaaaggagaaggggaaataatgggcactaagaaagcagaaagagacatatttggagggagatggctaccgaaatctgggcttttcttagatcctctccaaggaaagttatcactggaaatacccaaggccctgattgtatgcactgtgctagggagaaagacattcagatgctgaaataaaaaactagggaattagtaaaaattggatctctaagacaaataaattgatcaaactataataataatcaaacttctaataatgtataacctctccagagatgaactccaagaacagctcaatggtttgttgaaaaaaaaaaaaagagacccctggtttatgcactttcctccccaagggagacatggggttgatccatcgggtcttcttcaattgcacagttggcaggctggccattcccatggagggtcattctccttttaaagaatggttaggtaaccttcagcagccatagggcactttagacataaagagacaaagccatcactgacccagcccagccacgagaattcctgagttggaagaaccagggtgttcacctcccactcaacagagaattccctttaaggacagagcgctctctcatgtgtggtggcccttgcctctgttgggcggctttgatggctagaaggtgttcctttaacttgagctaaaacagcctttctctcttccactcattgatcttagcctgccctccagcatgaaaagaaaacctcttcaaatgactggcttgcttggaaagatctgagagcagccacatacaggaacaactctcctcgtgacaagcagcaaaacaagtggtgagtggaaaagagcaggccctgaacagcaccagtcaatatgcttggcctctctggtctcttttcactttgtcggtttgggagcctgggcctctgccaggatgcttatctgtaggagttccaagagaatcaggagatggggatgcttttgggaaatgatgcctggggctccctagaagagaagctggaaagctacccacagaaaggccaaatagaatttctgaaagccccaggttagtggaagcctaaagagcatgtcaggccaggttgccatactgcttccaaagctgcaaccatcatcacagtggcagatttgtcagctaaaagagcaatgggggaaacactttgctaagaatccaggcttgctctaaaagggaaatatgctcaggaccataagactaattttctgtaagtttaacatttgtttagcttgccattttttcttaatgggcaaaacatacatatattcctcttaactgttttcagagggtccacctttcaatatgcactgcatccttccaggcctgcggcctctggaactggatagttggggaaagtgaannnn

SEQ ID NO: 19796 - DNA, 245 bp, Homo sapiens
caagcttcgacccacgcgtccgctatcaccctatagaagaactaatgttagtataagtaacatgaaaacattctcctccgcataagcctgcgtcagattaaaacactgaactgacaattaacagccaggagtgttaagcgttcagtgatgtggggtgaaaagttactacctgtcaaggtttgtgttaccctcctgtaaatggtgtacataatgtagtgttggtaattattttggtacctgcccgg

SEQ ID NO: 19797 - DNA, 883 bp, Homo sapiens
  misc_feature 878, 879, 880, 881, 882, 883: n = A,T,C or G
acatctgtagcctatgacttgagtctcttgaacttctaggaagaggcaaactacaaactactaggattctgatttcagatataggcattccagaatcttctctttacgagttcacctgctagtataatctccacaacttgaatggccttggttgttctgtaattgctgccaaaatcatcacaagctgtacctgcccgggcggccggccgcccgggcaggtcaagcttcgacccacgcgtccggatgggaattcaggtatgaaagaaaacaggcaaggaggcactgagggagaaagacacagactttatcgctctgtggctcattgttactggaatattctaaaactcttgttcacatgctattatgacttataaagcagcaacagctgaggcgcaccaggacacagcttccatttctttaacgtctgttcccttaacatcgctgaaatgatttactgttgaagagatgccttgcggtgtggccagctgtgaggagaaagcagctggcagtgttaggacattagtccaccttcagcgcagggtctctggccgggtctgactcagaaaccttggtactcgccccttggccacagtgcccagacccatgtaacccactggctcctgcattaacccagaaatacctcgcttctatctgtgcacttagctgggaacttacccactgtaatcacctaaataaagtgtttataaacatgaaaaaaaaaaaaaaaaaactcgagggggggcccggtacccaattcgccctatagtgagtcgtattacaattcactggccgtcgttttacaacgtcgtgaactggaaaaccctggcgtttccccaacttaatcgcttgcagcacatcccccttttgccaactggcgnnnnnn

SEQ ID NO: 19798 - DNA, 874 bp, Homo sapiens
  misc_feature 1, 2, 3, 4, 5, 851, 852, 853, 854, 855, 856, 857, 858, 859,860, 861, 862, 863, 864, 865, 866, 867, 868, 869, 870, 871,872, 873, 874: n = A,T,C or G
nnnnncgagagtcttctagaattaattaacgcggggagggagaaagaaaaataatcaaaaacatttgacccacgcgtccgtgaacttttatcaaggcttttgctcttttagacttgagtttatctttataattaaggagaatggtttttaaaatttagttcctctgacaccccaaaattatcaaaataaattatgttgtagtgaatctgtgttttgaaagtcattgataggacttatatgagtcaaaattttatggattataaactaggctttatctggttggaaataattgcaatacaagaagcaactttattaaattagacctaaagtcacaatcttcttctttgctgctttttaaaaattacctattacctttaaaagatcccaaatttagaagaggaattaaaataaaagttaatgcaataaaacacttccacaatattctattacttcaacctctaatcaatgaaaacattaatggactactcttactacgcctggtagggatgtgtttgggacataaaacagtttaaaaccttcaaaagacaatgactcaatattttcttgttagacaagtactattagcacctacagcacatttgaaggtctaatggcaatctttatgaaaagcattctgcatttcagcattattttgacctgtacattacacttttcccttccctcatcttagtgaagtagagagattactgatctatttctttatcttaatcattcctccctaaccccaagacaaagaatacaaattagaatttacaaaatgtattgtgcccatggaaatacatagttttgttactgtactcatagatatttactacccttgttaatttcannnnnnnnnnnnnnnnnnnnnnnn

SEQ ID NO: 19799 - DNA, 2307 bp, Homo sapiens
  misc_feature 1, 2, 3, 4, 2282, 2283, 2284, 2285, 2286, 2287, 2288, 2289,2290, 2291, 2292, 2293, 2294, 2295, 2296, 2297, 2298, 2299,2300, 2301, 2302, 2303, 2304, 2305, 2306, 2307: n = A,T,C or G
nnnnagtcgacccacgcgtccggtttttgtttttattattttatcattatttttgtcttttttccaaatattttacatcggctgttggttgaatccatggatactgagggccaactatatactgctttcctcaagaaaatttcttagttgttgaaaaactttgatgtttatgaaaaaaaggttaagataatgggaattttattcaaaaagttattaagttgaatacccactatgtgcacagtacagtgctagacacagtgttaaggatgtgattctctcttttaaggcacttatattctaataggataagaaacatacaagtaattgtgattagataaaacatgtagtaagttctttttgactcgttccttcttacctcctgctaatcagttaccatgctctctaaggtttaccttctaactatctcttgaatcttcccccttctttatgcccacttaatgcagatccttgtcatttctctcctgggttcaaaaaggtaattatttgagtgccccttaagtgtcaggccctgtgctagacactgaggatacagtggtaacagtatttgccttcagagagctcagtcttcacagtaaaggcagacactaaataagaagtcacagcagaacagaggttgctaaactgtggcctggagctaagaatgggttctgcatttttaaagggatataagaaaaaggagagtgatagcgtgtgacccacagagcgcagaatacttgctgtgtggcccttcaccgaaaaaatttgcctattcttgtgacagtgttatgaggaaaataacaaaatccattctctgttatacactcattctgcagaaacactcgatgtatgtgatcctatattttctggtcaccagcactcttcccagtccagtctcttaccattaccatttctcacgtccttgaacctcagccaccttgatctacttccagatctacagattcgtcactctttctcgcggccagggagtggcatgtgctgcagcctgaaaagccactatttcttccctggctcccttgattcttcatctgactgcctcctgtgtatccttccttactcagctgggggaatcctttcttccagaaaacactccttccttcagtctgagtgaggcagccttctgtagcatcctgtcttccatttagcttagctcttacagccttgtatgaggaatgggctttttattggtctgtgtgctcctcgaggctaggatgggaccatatcttattcacttttgtgtccccattgcctggtacatacctccttcgtgaatgttgaatgaatgaatgaaatgccatatgacgcgtccgctggaagttcagaagagggacaaataacattttattgggtgtatgaaaatgtgggtccatggttttaagagtcagggaaaagttcatcactatttaaagtgttccttaagtgttacttttcaagggcagaaactgggcagaatgccagagagacacaactagaactttttgagccaacagagacctttgtgtaagttgttagttggatccatcagcctcgctatcctaagcattcttctcttattttactttctaagcacagctgtgttaggactaacccattcacagcctggtcaccaatgttctatcagcatcacagaatactgtctcatggtgtctagcttgatgaacttggttaggatactctctctgttactcagctttgtcatctgtaacatggggactaatacaaggactaaaaccttctattagccattatccttcttgccatctaccccatgttaaagccaggctgatttgttcttggatcttaagtgtgacaaagcctgcgggaaggaaccacattctgaaggtttgtgggctgtgtgagatccagagaacccaagggggtttttttgctcttgacaaacgaatgttaggtatgacctatgatgatacaacttctgcaaaattgaggaccagcctatttcttcattagaaatgcaggaaacctggccgggcgcaggggctgacgcctgtaatctcagcactttgggaggcagaggtgggcggatcacaaggtcaggagattgagaccatcctggctaactcggtgaaaccccgtctctactaaaaatacaaaaaattagctgggcgtggtggtgggcgcctgtagtcccagctactatggaggctgaggcaggagaatggcatgaacctgggaggcggagcttgcagtgagccgagattgcgccactgcactccagcctgggcaaaagagcaagactccgtctnnnnnnnnnnnnnnnnnnnnnnnnnn

SEQ ID NO: 19800 - DNA, 670 bp, Homo sapiens
  misc_feature 1, 2, 3, 68, 78, 108, 109, 110, 111, 112, 113, 114, 115,116, 117, 118, 119, 120, 121, 122, 123, 124, 125, 126, 127,128, 129, 130, 131, 132, 133, 134, 135: n = A,T,C or G
nnngaatgtaaaatataaaaggtataggtttttttttttaaaagaaaccaataaactttcaaagagantccctcattnaccattaaaaattaaaaaaaaagtgcggcnnnnnnnnnnnnnnnnnnnnnnnnnnnnttaaatagagatgaggttttgctatgttgcccaggctggtctcctggactcaagcaatctcccacttcaggctaccaaagtgctgggatttacaggcatgagccacctctcccagtctcagttattattttaataaatgagactgaacgtcctcttataaggctcactcccttgttcctactacatttgctctgtttaagtatctctttaaattcttcagttaagcggacgcgtgggtcgaagacctgcccgggcggccggccgcccgggcaggtattaacaggtgcttgcagtttgttgacttttttgaaaaaatcaagttgtaaacttttattacaaattaaaaatgaagttcttaaaaatctcaacttgaccagatatgaaacaatttaaaaacctttaaaggcgtattgagaaaaaccaggcttttttaaaaaacacgtttgttattaccaaaaagagacgtctttaggtaaaaataataaaaaccccatgctgcatagataatgcagatagctctacggacgcgtgggtc

SEQ ID NO: 19801 - DNA, 496 bp, Homo sapiens
  misc_feature 1, 2: n = A,T,C or G
nngcccgggcggccggccgcacttttttttttttttttttccaaaacaaaacatgcttagcatgcacacttttaccacttttttcgagtggaaagtttattggcaatattaaatttcaccctagataggatatgagaatgttttgataaatcacaatttatagtatattaatgccatgtgagaattttgtttcccaagtaagagctcacatggaacttggtcattaaaccttaaagaaacctttctcacatatctataggcctcaaattgaaataatctataaatgaatttgtagatttctttttagtttaattcctgagtatacagggcaaaagcttatatcctttatataaacttctgctttggtctaaaactgatatatcttcacgttgaggtttcatctgaaatgcaccacgtttgctgacttgcttcaatatgaatttgtatggctataaaattgtgccctaactcaagctatttttatgttcacctgaat

SEQ ID NO: 19802 - DNA, 1434 bp, Homo sapiens
  misc_feature 1, 2: n = A,T,C or G
nnattatgtcgcccctgtcctacgaggttggcacctagatggagaccgccttgccgtcctcaagcgttcggaccattcgcctgttccgtgcgtccctgaagtcgttaccttggaccttggcttgaaatgattccaaccatttgtgtgtgtatgagtggcacccattgttgggtttttgacagttctgatgttaagattaagtcatgtgccgattgccgcaaacgggtgtgttgctcagtctgcgtcctgaaagagtggtgagcgcaacccagatctcacggttctttctagaggataattagataagtaacacttgatcattaagccggatcatcccactcattcatgttgttctatgttccatgaactctaatagcccaacttatacatggcactccaaggggatgcttcagccagaaagtaaagggctgaaaaagtagaacaatacaaaagccctcgtgtggtgggaactgtggcctcactcttacttgtccttccattcgaaaacagtttggcacctttccatgacgagaatctctacaggtaggttaaaatacttttctgtgctattcagccagaaatagtttttgtgctggatatgattttaaaacagattttgtctgtcaccagtgcaaaaacattacagatgtctgggctaatacaaaacacataagaatctacaactttatatttaatactctattcaaatttaactcaaagtaatgcaaaataattagaagtaaaaacttaattcttctgagagctctatttggaaaagcttcacatatccacacacaaatatgggtatattcatgcacagggcaaacactgtattctgaagcataaataaactcaaagtaagacatcagtagctagataccagttccagtattggttaatggtctctggggatcccattttaagcactctcagatgaggatcttgctcagttgttagactatcattagtttgattaagcaactgaagtttacttcataaattactttttcctatatccaggactctgcctgagaaattttatacattcctccaaaggtaagtattctccaaaggtaagtatttgactattaacacaaaggcaatgtgattattgcataatgacactaaatattatgtggcttttctgttaggtttataagttttcaatgatcagttcaagaaaatgcagatcatatataactaaggttttacaccagtggttgacaaactatgggccgcccgggcaggtacaagattcgacccacgcgtccgccaatatctacaatcaaccaacaagtcattattaccctcactgtcaacccaacacaggcatgctcataaggaaaggttaaaaaaagtaaaaggaactcggcaaatcttaccccgcctgtttaccaaaaaaaaaaaaaaaaaaaagtgcggcctcgagcggcc

SEQ ID NO: 19803 - DNA, 2510 bp, Homo sapiens
  misc_feature 675, 676, 677, 678, 679, 680, 681, 682, 683, 684, 685, 686,687, 688, 689, 690, 691, 692, 693, 694, 695, 696, 697, 698,699, 700, 701, 702, 703, 704, 705, 706, 707, 708, 709, 710,711, 712, 713, 714, 715, 716, 717, 718, 719, 720, 721: n = A,T,C or G
  misc_feature 722, 723, 724, 725, 726, 727, 728, 729, 730, 731, 732, 733,734, 735, 736, 737, 738, 739, 740, 741: n = A,T,C or G
cttcgacccacgcgtccggcatgatgagtccttttgcttttaggcttttgacttctggttttagactttctttagcttctgttgttagacaacattgtgcaagcttggtttttataagtttgcatggattaaactgaacttaatgaaattgtccctccccccaaattctcagcacaatttttaggcccacaaggagtcaagcacctcaaggagatcttcagtttgaacttggtgtagacacagggatactgatgaatcaatattcaaattagctgttacctacttaagaaagagaggagaccttggggatttcgaggaagggttcataagggagattttagctgagaaataccatttgcacagtcaatcacttctgaccaagttatcagaaaaaggagaaaagaatgtctccccactaaatgttctagggtggtgagaaatctagggtggttatctaaatcaacaatatttagatattccaatatctaaatattgttggaaatactctcctgaagtgttcattgaactctaagagagacagcttgtgtatcagtggcagggtttaaggttcattttttattcccatattaatcctttaatatttagacaaatttccttctgagtttaaggataaaatgggatgggttctgcctgggcctggccctcatggggacnnnnnnnnnnnnnnnnnnnnnnnnnnnnnnnnnnnnnnnnnnnnnnnnnnnnnnnnnnnnnnnnnnngggctctcaggtttaccactctctccccatcttcccaggtttaggaggcaggcctctccctttcctaccctcccacccgaaggtgagtcactagagtgttacaagcttactggcagggaacactacaaattaacaaacagtaagttaccaaaaggggatacacccttataaaagggtacagaaagaacctaagaagcagggaactgttacacgctgaacaactgacaggcaaagggtgaggcacaagtgctctctccaccccccagctctaggcactagttcttcctgtaacttgctccactagctcccggccaggcccgggcaactttccactctgaggcatctgccttacaatgctttaagtctaaagtactagctttatagcagccagaggagctttagtcacactttcaagctgagctccaaaagggcagctgataacattaccatacaaccaggatttctgctgacatgtgcatcccccctgccaccttcactggaaccttttttccctgcccttccttaaatcactactcataagctatgatttattttttcggtaaataatattcaaactaaatccggaatgcagtgaaagacctggtgagaccccccctcctcatcttttacacacttgagaagacaaactttcccacatttctaaacagttatggcgtgtacctttggtgagtgaaacagttgccggtggtaggcctagctgacggtttaagccaagtcactggcaataaaacccagaaagaaaaaaagggacaaaatcctatttcatccaggaatgattcagcaagagctgttctttcattttcttaccaaatgcttaggaactagacttttaaggacatataaaatcacctgaaatatcatcaaaagctaggccacaaagggtactgaggagaggaggggaagaaatttacaatgaccttaaaaattagctgccggcacaggtttccttgttagccaattatcagcagggctttagtcactctccacccacattttaatccccatgtggaaaaatcccaacatgaaatattcttctgaacatttggacgctcacaataagtcacaggacaaacacacacacaaacacacacacaagtaaactaatgtttaatgtatcagaatactcaaaatgctaactaccacccagcagccaagcagctcatcatcccagtgttcgcagctgtaatttaatcttgtgtttgctagccactatacattttgttgtaagacatctgggtttaagctctactaactattcaggtgggttaccaccgcatcactactgtgcatgtgtgcctgtgtgtggttataaaggagacatctagataaatggacataacttagttacccaaaccatctccatggcctattaattcaacatcacaaataccccgtttcatccgaagttctgagttctgtataaagaactcaatgttaaagagtacatgcatgttcaggcttaaggccacaggctgttcaagaatcagggacgcgtagtctgtcactagccaaccgtttgaccttgagcaagtcacttcaccttcataggcttggggcacacatctgtgatgtctaaaccccccaagattagctcaggaagtaaacttttttctttttcttttaaggcaggatagacaaataatgagctttaaagtgcatgtttacagaaatgatcaagggtttaacaatgaaaaaaaagtttagtcctcttacccagactccctctttggaatgcacaggacatgtac

SEQ ID NO: 19804 - DNA, 611 bp, Homo sapiens
ctactcaagtagtctttaccccctactcaagtagggggtaaagtgtagaacaaggagtttgatctgtgttcaactgattgtgaaccatcaattgagataactcactaccttcaggccagccagttacatacttttgaaaagccaagagtgaagcagggttgtttttcatccaattcttggtctttttgttaaaggcagcaataagatagggtggtttcgggcaatcacttagctaattggctctctatagtcatacctggataatatttgtagtcatacctggataatatttaaaggaagaaactaaacatagtccttaagtaggaacaactacaattttaacaactattataaaacagtgatggctatactcttgaaatgtagatacaagcctacatgtaagagttttataaaatcagttcagtgcataaattgataataaacttgaagaaaaccggacgcgtgggtcgaagcattaaactatcagatacatattttgagcagtttactcgatttaactctgatccacagtccttcatctgaaaaatgcagaatacacatctcacaagttgtgaggatgaaatgcatataacatatggtacactacaagt

SEQ ID NO: 19805 - DNA, 757 bp, Homo sapiens
  misc_feature 757: n = A,T,C or G
cctagcttgagtcgacccacgcgtccggccgctgttcgtatttcttattctacaacaagggtcagcctacaggcaaaacacatcccattgtcatttttttgtaaataaagttgtattggaacatggccactctcatttgttttctattatttatggctgctttcacttacaacctgagtggttgccacagaaactgtatggcctgcaaagtctaaaatatttactatgtagctttttcttttctttttggagacagtgtgccactctattgcccaggctggagtgcggtggtgtgatcatggctcattgcagcctcaaactcctgggctcaagcaatcctcccgcctcggtctcccaagtagttgggactacaggcatgagccaccatacccggctaatttttttaaagtttttggtagaaatggagttttttaatgttgcccaggctggtcttgaactcctggtcttaaatgaccctctcccatcaaggtaccaagattaaggacagagttccctccattgttcattgatttgtaaaccaaaatgtatctgtgacaggtattaatcaattgagaagagttttttatttttatttatttatttattttttgccaaggttcaggacagatccaggtgtctttctccaaagatgattatgatggtgttaatatttaaaggggaaagtggcctagaggggaacaagggagggtatgatcatattactgtatccacatgttgcaggagaaatggagcaggn

SEQ ID NO: 19806 - DNA, 358 bp, Homo sapiens
acccagtaatcacataaattctgcaatcatctgtttatttagcttaactgtttttttatttgttgaagttgttattgttatttcagtctttttcttattgggttgaccagacttggtaaaatctgtaagaaagttccataattatggggaagatttcctctgaattggctaaattcctgtagctgaaaaaaaaagaaaagaaaaaaaccccagcaaaaaaaaaaaaaaaaagtgcggccggccgcacttttttttttttttttttttttttttacttccaataagtacaatatttattaaacatatcttcagttgttttgttacatagtgtgcaacaaattaccggacgcgtgggtcg

SEQ ID NO: 19807 - DNA, 1033 bp, Homo sapiens
  misc_feature 1, 2, 1032, 1033: n = A,T,C or G
nnaaattaaacacataattttgtccccgatcactctcctttccgctttatatactctgccttaaagtgttctccctggtttcgccccccttttttatttttcacccccttacaagacccatctctggggggaaaacgaatatcaatcctcctagcgcaaggcccattccctttcaggagaagtaaccgcactaatttgtttgacttgtgactttgtgaggaaaccatatgacagctttaatatctaattttaaaattcagagcaggaaatgaggcaatcccgtacacaggccaagaaaaaaaccgtatcaaaatgtaaatatcaattccacattacagccagttaaagaacaatgggaagaccaagaaggagatggcagtgacagaagaaaggagaaggggaaataatgggcactaagaaagcagaaagagacatatttggagggagatggctaccgaaatctgggcttttcttagatcctctccaaggaaagttatcactggaaatacccaaggccctgattgtatgcactgtgctagggagaaagacattcagatgctgaaataaaaaactagggaattagtaaaaattggatctctaagacaaataaattgatcaaactataataataatcaaacttctaataatgtataacctctccagagatgaactccaagaacagctcaatggtttgttgaaaaaaaaaaaaagagacccctggtttatgcactttctccccaagggagacatggggttgatccatcgggtcttcttcaattgcacagttggcaggctggccattcccatggagggtcattctccttttaaagaatggttaggtaaccttcagcagccatagggcactttagacataaagagacaaagccatcactgacccagcccagccacgagaattcctgagttggaagaaccagggtgttcacctcccactcaacagagaattccctttaaagcggacgcgtgggtcgaagcttaacctgccgggcggccgccaccgcggggagttccaann

SEQ ID NO: 19808 - DNA, 509 bp, Homo sapiens
  misc_feature 506, 507, 508, 509: n = A,T,C or G
aactatgtatctgaaacacttctatttggcaattttataacaaatcaaattttaaaaagaacaaaagagattgcagattacttcgcagatacagaataaagcaattgatgaagtgcttaagcaaaagaaacaacaaaaaaagaaaacacactgcttttctttttaaaaataaaatcacattgctatagatcaaatggataatacccttattaaacaaccattccagaatgtcttatagtagcagtgcttttatttgcacttcacttaattttataagactcattttcatgtatatagctctttacccccattgttaacgaataaagtctctcataatttttacacttttaaattttttaaagcaaatgagaaatgatttatgtatcgtggaacctttcccattttggaaccaaaggttttaattctatatttttgtctaatatttctttaaaaaatttagtgtaaaaactgctggcggacgcgtgggtcgaagcttgacctgcccnnnn

SEQ ID NO: 19809 - DNA, 501 bp, Homo sapiens
  misc_feature 499, 500, 501: n = A,T,C or G
cttcgacccacgcgtccggggtttcaaactgaataactcattgttgggtctggatctgtaaaaaggttttgtcactgatgggcaatatggagagaatgtaaaaatatctaacttcaaacagaaaaaagaaacaactggaatgaaaagctataaacaatagttcagaagattggcgtagaggatttacctacagaacttcaggagattcctaagaaggccttcagtgatcttttcatcaatatcatcaggccttatcattgtttcacatttgcttctctttaccatagggaatataataattatttactggttaacttcctagggagattgcctgcggcttatttaagatccaaattttaaagtaataatttctgttgaagctgcttgtgaggtggttgggtgggcagatagagtgaagccagggacacacactaaatgagcccgggatgtaggcaggttttgatgttttgcttgcttttatccctaacattttatcccnnn

SEQ ID NO: 19810 - DNA, 1118 bp, Homo sapiens
acgcgtccgacctagcttgagtcgacccacgcgtccggcatttgaatgcattttgtttggtattgtatttattcaataaagtatttaattagtgctaagtgtgaactggaccctgttgctaagccccagcaagcaatcctaggtagggtttaatccccagtaaaattgccatattgcacatgtcttaatgaagtttgaatgttaaataaaacctgcccgggcggccggccgcccgggcaggtcctttttttttttttttttttttgtaacatcttttatttgtatacaattataaattacaaacttgttttattaggttttttaaaatttatttttcgtcaacttagtcccttttatttaccagcagtttgctctgacagaataaattacaaactattgttttgtttaatccctttaaccatcatgtcaggcacacaggttggagaatattagctcccattttatggacagagtggaaacactgtacccatatttagtgtaagacagagctgggatataagccttgggcttccatagtcacaactgcttttttgcataactttgtaatacatcattttaaagtaatctgatttcacaatgttttacagtataggagtaacatctatagcatctcttcttggcaggttacctctggagagaaccaatctaattacctcatacgctggcacttttttttttttttttttttgagacagagttttgcttttgttgcccaaggtggagtggcaatggcgtgatctcggctcactgcaacctctgcctccctgggttccaagcaattctctttggcctcaaggctcccaagcagccaagtgggttcttaagggaccgggggaatacgaggggtgcacagctggtttccaggtttaacctgaggctggggactagtctctgggccatggctccacgaatggcgcacgctgggggggcactcacctggaagaagaatagcggaaagacccctcgtgggcgggggcccttgtggaaaaaccccaggcgtatcagacctcctgttcgggttaaatccccaaaagccggtaggggtcatggcataccatgggcgcaaggctcgttcggaaccaaaatcggggaacaaa

SEQ ID NO: 19811 - DNA, 649 bp, Homo sapiens
  misc_feature 1, 2, 3, 4: n = A,T,C or G
nnnnggccctcgaggccaagaattcggcacgagacagaacctacatgtgtcatttcactgctttaaaacctcttgcctcctacatgcctacagagaccctttgtaaatagtctctgagatccttcctttaacccattccccttccctgcacatacaaacgctgcttctctttactccctggactgcaggcctcttgataaatttgagtctctgaacacactgttctttctgtttggaatgtcctttcacccccattttgttgcccagaaaattcctactcatctataagccccgttcacgtggcaccttttttgatgaggcatccctagttcccctgtcccattttcttatagcatctagtagacctctgtgtctcacactcatcctcagtaccacggttgtcccctgaaaggtgttgtgtccctcaccagactgggagcacctcaagggcagaacccatgtcatgttcctttttgtatttccagacctgaaactgccagtaaataaaccctaaaagtagaaagaaaaaaaaaaaaaaaaaaagtgcggccgccgcactttttttttttttttttttggggaaaaccaaacatgctttatttcatttttttcacaatttatttaaacatctcacatatacaaaataggt

SEQ ID NO: 19812 - DNA, 1311 bp, Homo sapiens
  misc_feature 796, 797, 798, 799, 800, 801, 802, 803, 804, 805, 806, 807,808, 809, 810, 811, 812, 813, 814, 815, 816, 817, 818, 819,820, 821, 822, 823, 824, 1309, 1310, 1311: n = A,T,C or G
cttgagtcgacccacgcgtccggagctgctcaatagtgagaatcaggtgatataatgcatgtggaaaaagaatgtgaaaaatctaacactttagattgtatacagtgttttttaaaaagacacaaaaaaactgtcaacatgagaaacataagcaaagttttactcaagacaaacatccacgagtcacaacttcagttattcccagtcttcaaaataacagaagggcaaagcaaagtaaacatgcaaaagcaaactaaaatctgattcttcttattagaaagaagagtgaatttctgcaattattttacatttgagaatttaatgtgatcaggtcataggtattctcacaacaaaatttgaagcatttgcttgactttatttcacctgttgaaacaaaagcagttctcagtatccaagtttattgctttactaaccaatgtctctgttttttgctttacaaacatggtattggttctcacaaattagttcaacttcccggtgcattcataaacatatacccacgtttagttttccttccagtgcacaaagtttccccagtaacctaaaagtactaaatgttctacattttgtgacttgtgttctttactttttggaatataaaaataatccttaaagtttaatttaaactgggagcagtgaattaaaaaaaaaatgtaagcttgaaactattgaaaagatcatgaaaatgcagagtattttttaggatgaagctcttcaaaaagaagaaaatttggtgaatctctgtactatagaaatggctgtatcaattggaggnnnnnnnnnnnnnnnnnnnnnnnnnnnnntttgccaatatagaaaagataactacgtcaaatagtaccttcatacagtgtatttaatttcctcattaggtacagctgaatagagtgtaacctgaattcatattaaaattgaaagagtggattgtaatagtcttttagcttaaagctaataatagtatctatgacagtgttaagtgtgttggtgtgaataatgagtatgatagggtgaaatgtgcaggcatctgcatagatggctctaagtctaaacagtcaaaaatgcagaagtcatggcccacaaaaggctgctgcactaccttaatgctcccatagttactgcatctgtctctgggagcatcttgccctcagagaaaccacctctgattttctgaatgtgttcactaggataataaacacttgatttcattttcaaatgatttgcatactaatcagcttgtattacaatgtgtcatggcataagacagtgatcttctggagtgatcttcgcnnn

SEQ ID NO: 19813 - DNA, 1900 bp, Homo sapiens
  misc_feature 169, 170, 171, 172, 173, 174, 175, 176, 177, 178, 179, 180,181, 1897, 1898, 1899, 1900: n = A,T,C or G
agggcgaattggagctccacgcggtggcggccgaggtacttcaaagttattgcacatacacttgtttactttgtatgttttgcaggattaaactttgtataatctttttacaaaatttttttttcagtatgcaagcttgcaagatgaaaataaaacctgtttgcctgannnnnnnnnnnnnaaaaaaaaaaagtgcggccggccgcccgggcaggtcttgagtcgacccacgcgtccgccggagagaattgtaatacgactcactatagtgatctagatcacgagcagccgcacttttttttttttttttttttttgacgaattcaggagtcctttattagccggcagccgagagacagctagcgctcaaaattctcttggccccgaagaaggagctagattttcttttatactttggtttagacaggggagagggggagtctagttgaaacaatcttacagaagtaaagtaggcaaaaagttaaaaggataaacggttacaggaaagtaaacagttccaggtgcagaggctttaagtctatcctaaggtgatggacgccgggctttgggcgttatcaaccggacacaaacgcaggggctctgggtgctattaaccgggcgaattcctgggaactgcggatatagcttgccacagtatcttatcagttaattgcattcttgatgtgctgggagtcagcttgcacaagttaagtccttgaggaagggggtgggtaaggggctgcgagtgaaggagtcacgatggagtccgtctggctctcttagctaaggaagagtcacttcaggttaaaacaaggtagggtatcacactagaagcctcacatcattaagcttcagtcaggcaggcattcctttaaaaagtgtttactgagtaccttctctatgtcagtcactatttggggcataaaggactcacttctccgcaaaaacaaactctgatcccccggtctcctcgagtcacggagcttgcaagctagtgggaaaaattgggaactggtgcaaagaatgactgcaaaataaattgtggtcatcttgaagacatatgcgtgcatgtgtgcgtgaagctttttaaatagagaagctttaagtgggggaaatttgctgacattacacgatttcttctcttagtgcaaatgtatacagcctgtctttttgaaggggtcacggtagataattatgctctgttaacctcatttgttgtcagggaaaattaaaactaagggtagtgtcagtaggaatcttggttcctgccagttttgttgtttgttagcatatcttcctttacaggtagtatagtttcattttcgtaaaaatgctgcataaacgtagctgggtatgttactcattgcagtgcctgctgatttcgctggaccccaccctgcttttgctgcccaatgcgatagcatatgggacagagctaaattcctactcagctgtaactctgcttattttcaggaaaaagaatgcctgtgtttcgaagttccttcttaggacgaaaccagctgaagctggcgaaatccaagatggcgcctctgaagagcctctggctttatcatcatcctgttctcatgctaaacaacactcccaccagcgccgtgacaactgacggtcgccatgacaacgactctgaaacttcccagctctcacaagctaagttgatttcagatcttccaattccatagccattgaatacagcctgcactgcttgacacactccctttcggtttcgtgcattggcctcaccacgcaacaggaaacaaccctttttgggataaccgggactcccggtaacatttccatatatacatatcttaatgtatgcaagggcgtcctctcgctttccctgttcatccgggagcgcggcgccatctccctccannnn

SEQ ID NO: 19814 - DNA, 498 bp, Homo sapiens
  misc_feature 1, 2: n = A,T,C or G
nnagtctagcgatatcaccaggcgactttatgaaatgggcaggttatagacaatatgctccttaaggtccctttcagtcccgttctatggatctgtgtagtttcgcttcttttttcaatatgctcagaattaggacaccaatgttaatggaagataaggaaactataccacctatcccttatagaagatttgtgcactaactaatatgagccctggaagatcaagccagtagaagatagaagatctatccctgctttatactttggatcatttatttgtgaagatcacaactttcaaagttttattatttcttaggtcttcatggaagttcggggaaattaactggatctacttctagtctaaataagctcagtgttcagagttcagggaatcgcagatctcagtcatcttccctgttggatatgggaaacatgtctgcctctgatctcgatgttgctgacaggaccaaatttgataaggtaaactaaaataacaagt

SEQ ID NO: 19815 - DNA, 688 bp, Homo sapiens
  misc_feature 1, 2, 3, 683, 684, 685, 686, 687, 688: n = A,T,C or G
nnnagcaacacatagaggaaactgatgttccaaatgtttctggtgtttcagtgtatgtgtcttctagaaagtaggagattttatttttaaaacctatctatgtttaaaccctattttgaaagaaaatttcattttccttgcctacaaatctgaaagctgtacatcctaagtaaaaatctatgcccaaagtgctgggattacaggcgtgagccaccgcgcccggccgaaagccaactcttatgcctagaaatatgtgcacctatgaccaagcccatgaattatacaggaattatgtaattatgagtgatgtacttcaaagttattgcacatacacttgtttactttgtatgttttgcaggattaaactttgtataatctttttacaaaatttttttttcagtatgcaagcttgcaagatgaaaataaaacctgtttgcctgatcaaaaaaatgaaaaataaaaacaaagaaagtgcggccttgagcggccgcccgggcaggtactctataagaggtgtgggtgtctgtttggtcaggatgttagaaagtgctgataagtagcatgatcagtgtatgcgaaaaggtttttaggaagtatggcaaaaatgttgtatcggactatgatggtgacatgatatagtcagctgccttttaagaggacttatcagtccagtgttaagcgannnnnn

SEQ ID NO: 19816 - DNA, 1488 bp, Homo sapiens
  misc_feature 1, 2, 3, 1485, 1486, 1487, 1488: n = A,T,C or G
nnngcttgctttgtgccgccactgttcatctctccgtcctccctcctctgcgatggtttgggtctcgagtgcccgttttgctgccctcgtgtgtcgcgagggtgttgcgcctcgttcaggtcttcagtgccgtgttgctgcgttagcctctgcttttccttgtctcgtcgctcccctccttgtggctgattacgcggatggcgagtcgtgctttactctcgtctatgcgtacagtactatctcttaaaggggccggcccccccctctttttttgtttttcttgttcttttttttttaggaggacaacacatttagttttatttcaatcaaatcacacaacactttcttttccaactgctgcaaagtgcatctacaatatgctattacagatccacttttaaaaggtttcctgtgacattacagcaagcctcttttttcaaacagaggaataatcccaaattcttcctcaaataaactccattccagtaaatggtaaatacataaaaattacagtaagccagacacttaaaaggacagccaagaagtcttccaacagtttattagaaagaatgtagacatttaaaaaaatccccactgtcatgaacataaattgaggttttcagcccgggtataagctgaatcaaaaaaaggaaataaaaaatccaatagtgtattaaacatttttcactcatttgccatactgacagtgcaaatacaaatctggactaaatgtacagactctcaagcaacaatgtacagctttcttcgtcctccatgctaagagatgtaaaagcttaagggtcaaacaataccaattgtataggcttcaaaaaccatctaagttagggcattctctagttttagctaagatacacctggaacactgacaagtcatcacttacatagaataatgtgaagtaaattttttgaaaaataaattttagtggaacaatcctgaaggataacaccagaagaatagcaggttaccagtaaggtgtcagccaatttgttccagtcacttttgaatccatgttctataatctaaaatttattctctttccctaagctgagagcttcctatcatgtcagtatctatgttatgaagaaaaggagacttaggtgagatgtttttatttatcgcaactgctgcattaattgcctaggacctcaacagcttcatgaaagtctgggaaatgttcatgcataaggttattgccttagctgacttaaaattgccccatacaatggtacatatcaacccttagtgaagccttttaaaaaacaacaggttgaaaaatgggttaaagtgggcaaatacagcatatctgcctttagagctatcaactcaggaattctctcaattatgaaatctccaatgatgaaaaacataggaagagacaggtacaataacaaccaacaaaaacacagagaagcacaagaaaccctataaacaaaacagggcaaaatagagacaaaacaagacannnn

SEQ ID NO: 19817 - DNA, 1242 bp, Homo sapiens
cgctacgcatcttcgctcgtgctgtcgctgcttctgtggtttttatttgtgcgtccctggatcttgtttctgtcttgtttcttgctggttgctcgttccttttgctgtgtttttgcttggtgttttgcctgtgtgtttgtggttgtctccctggcttagtcttgatgtacttccggtttgttgtggttccgttttcgcctgtgtcgttgctacttattctcttgtgtcttttattatctgtttacttgggtgcttgtgtgttcggtctctgtggtctcgtgccgctggatgtggtgtgagtgtcgtgcggctctactatttttttttttttttttgtttttctttttttttttgttttccttttcgccctggcctttgctcacatgttctttcctgcgttatcccctgattctgtggataaccgtattaccgccttacgcgtgtaaaacgacggccagtagatctgtaatacgactcactatagggcgctagctcgccgcagccgaacgaccgagcgcagcgagtcagtgagcgaggaagcggccgcataacttcgtatagcatacattatacgaagttatcagtcgacggtaccggacatatgcccgggaattcggccattacggccggggatcccctcgaccgctcgcgtcgcatttggccgcctccctaccggccctctgctgccagctccaagcccagccctcagccatggcatgccccctggatcaggccattggcctcctcgtggccatcttccacaagtactccggcagggagggtgacaagcacaccctgagcaagaaggagctgaaggagctgatccagaaggagctcaccattggctcgaagctgcaggatgctgaaattgcaaggctgatggaagacttggaccggaacaaggaccaggaggtgaacttccaggagtatgtcaccttcctgggggccttggctttgatctacaatgaagccctcaagggctgaaaataaatagggaagatggagacaccctctgggggtcctctctgagtcaaatccagtggtgggtaattgtacaataaattttttttggtcaaatttaaaaaaaaaaaaattcactggccgtcgttttacaacgtcgtgactgtgccctggcgtacccaactaatcgccttgcacacatccccctttgccagctggcgtatagcgaagagcccgcaccgatcgcccttccaacagttgcgcagcctgatggcgtggctg

SEQ ID NO: 19818 - DNA, 3441 bp, Homo sapiens
  misc_feature 1, 2, 3438, 3439, 3440, 3441: n = A,T,C or G
nncgacccacgcgtccggcggcgcagcaccgcgggctccccgcccgccgctgccgggagtgggacggggccggccgtgagctgcgcaccggctgcgggagccggccggctgctgcagcccatccgcgccacggtgccctaccagctcctgcggggcagccagcacagccccacgcgccccgccgccgccgccgcgctcggcagtctcccagggcccagcggggcccgtggccctagcccgtccagcccgactccaccgccggccactgccccggccgagcaggcgccgcgggccaagggccgcccgagacggtccccagagagccaccggaggagcagctcacctgagagacggagccccggctcgcccgtgtgcagagcggacaaggcaaaatctcagcaagttcggacctctagtacaataaggcgaacctcctctttggatacaataacaggaccttacctcacaggacagtggccacgggatcctcatgttcactacccttcatgcatgaaagacaaagctactcagacacctagctgttgggcagaagagggtgcagaaaagaggtcacatcagcgttctgcgtcatgggggagtgctgatcaactaaaagagatcgccaaactgaggcagcaactacaacgcagtaaacagagtagtcgtcacagtaaggagaaagatcgccagtcacctcttcatggcaaccatataacaatcagtcacactcaggctactggatcaaggtcagttcctatgccactgtcaaatatatcagtgccaaaatcatctgtttcgcgtgtgccctgcaatgtagaaggaataagtcctgaattagaaaaggtattcattaaagaaaataatgggaaggaagaagtatccaagccgttggacataccagatggtcgaagagctccacttcctgctcattaccggagcagtagtactcgcagcattgacactcagactccttctgtccaggagcgcagcagtagctgcagcagtcattcaccctgtgtctcccctttttgtcccccggaatcccaggatggtagcccttgctcaacagaagatttgctctatgatcgtgataaagacagtgggagtagctcaccgttacccaagtatgcttcatctcccaaaccaaacaacagctacatgttcaaacgggagcccccagagggatgtgagcgagtgaaggtctttgaggaaatggcgtctcgtcagcctatctcggcccctctcttttcatgtcctgacaaaaacaaggttaatttcatcccaaccggatcagctttctgtcctgtaaaacttctaggccccctcttacctgcttctgaccttatgctcaagaactctcctaactctggccagagctcagctttggcaactctgaccgttgagcagctctcatcccgggtttcctttacgtctctttctgatgacaccagcacagcgggctccatggaggcctctgtccagcagccatcccagcagcagcagctcctgcaggaactgcagggtgaggaccacatctctgctcagaactatgtgatcatctaaaaaagggggagctggcctccaccctatgttccatggattcggaacaagatttcagacatctgcatgagtgacaaactttctgaacaccaccaccaccaataatacttatcagcatcataaagtatctcttaaacactgatcttggcagggacggaactcctattcagcagtttttgtggaaagcagtaatgcttgcaaaacgtgtgtgtcattcagcattttaagtggagactatgcatttcatagtatatttgacagattagtactgtgtcctgtgttttgttccagattcttcagtataaataagctctatatcaaaaagttgcctgtctaaatagaaaatgtcttgctgtgttttgtcctatggaaaatactgtaattcaggattatgtttacaattgatccaggtgtttgtttctaacttctgtaatacatacaatgcaaaaaaaaaaaaaaaaaatggccacaacagttgcacagtgcccaccctatggcctagcttcaggtacttcagttgaagtctaaactcaggtaacttggaatgtatatcatattgggatattaaatatttcacagctaaaaagctaaagagggaacatcactcttttgcctttccttattttatgcatttccctttcctcattacattccacattcttagaataagaagtgcattcaatcctaggagaatgataatcctggacatgggtgaacatgaggagaaccagcaaaatctgtggtgtttgacatcactttgtcatgtggttacaagtaaaacaactgttgcattcactgtttcaacatgtgtacatgtggcttttttaaaagttcaggtgttgctcagtaaaggactgtgacaatgttgcaaataaagtgttcagtactggactgtacataaacattccacattgtgtgtgatgaaatttaaagacaagaatgtctagagttaatttcaaaataagtgaagtgtttgacggaatggttgagatttttttgtttatgttagccatcagggtcataactgttaccattttatctaaagacatatttatatttagtttctcccttggaaattctttattttgcaggtgaaaaagtgacatactttttgttattgtcttcctcaagcagtttaggtgcatgatcttcatttacatagaatacttgggtctcagaattgatgcaacataagcaggtttttttggtgacttacaagagcaatagtttgaagctatctcatttaagcctctcataatgcataatcatgagtagttttgaaatttgcaacctgtgaggtagagcataaactcaagaaaatagccttgaacttgcagacttttgacacaagttctccacaaagtgtgaagagagccccaggcattcctgattggtcaatgggagagcctaactttcattgttttcttcagtacaaagagtatccaaaagctaagtttttgtattccactactttcagttcaataaaacctagagttgtttcatctgcgcctaaagtgtatggcacaattttcttaagaattaggggaaccaggtgcctacagttaaaggaacgtttcagttcctttcattcattcctgggtttttcttttattttctaagaaggttgaagaaggatgagtgatagagaagaaagcaacaccattgatttttttttttaagaaatgatatatatatgtatatgtttgtgtgtgtgtgagagtaggtagcggcgtgtactcagggcaaatacatggggagagatctcaaatctttttttccaaccaaaggtgtggaaacatttcccccgaaggggattctgggtccttaaaaaacggggttttggagaaagggtcgacaagggcgagattagattcaacnnnn

SEQ ID NO: 19819 - DNA, 1091 bp, Homo sapiens
  misc_feature 1, 2, 3, 4, 5, 6, 7, 8, 9, 10, 11, 12, 13, 14, 15, 16, 17,18, 19, 20, 21, 22, 23, 24, 25, 26, 27, 28, 29, 30, 1089,1090, 1091: n = A,T,C or G
nnnnnnnnnnnnnnnnnnnnnnnnnnnnnntttttttttggatttcataaaatgattttaatagaaaagtacaagatatgaacaaaaataaataatctttatctcatttctagcccagcaaattgtacactgcatataaaaatggtctaagatgcaattttcctccattccttttttgcttttaaaatactgagacagcattttaattcaatattctaggttcaaactgatacattaaaaaaaaatcataccaacctttaatcattctacatccattttttaaagttagctaacaagatgatgtttcactaaaataaaatatccaatcatcagattaaagtgtaaagtttgtgtgaacagggaaattagatcatttctctaagttttaattcctatgtttctgaatgtttcttgaattaaaaattcatttcatcatcttactttcaaaacacggcatctctctttcaccattccacagagagagaaaagactagaaaatactttaaaaaaaataaatattttaaaagtatagcttacagtgacaatgtagtattttagacctgtgccttcgtgcctatttgcattaaatacatgcttcaagttataactaccttttctatctctctatatattgtgggccactaagtgtttgtggactgatgctgctaacgatctcttggagttagctagtaccggtctcttattcagagtatttactctgctatagcgtcatatttgataattctagtggcttgaataatgttttgtaaaaacaaattgaaacttggtattggcaaaattgtacgagaaaagagctagggtaggcaactaaaacttacacagtgccagtctcaggaggtcagtagctcacagaactcaacagataaactggattaaaacttaaaagtcttctttctatttgagcccataatgactattttgaacatggctcttttgctgctgcctatatataaattttttattaattttcttgtattgggaagatcttgaatacgctccaggatgagaagaaaaaatacgctgacactgctaaatcgggtatatgtttttgcaataaagaacactggnnn

SEQ ID NO: 19820 - DNA, 613 bp, Homo sapiens
  misc_feature 1, 2, 3, 4, 5, 6, 7, 8, 603, 604, 605, 606, 607, 608, 609,610, 611, 612, 613: n = A,T,C or G
nnnnnnnnccgttttgccttcaacaaaaaaggaatttattggctcacataagtgaaagctgagaaatagatctcaattcaggtccaatttgatccagaagttcccaagggctccaatagactccctctcaccctgcctggtactgcctcaggctggttcctttatattagaaaaacgagctgcagcaagttcagaatgtgactcctcccagcacactatctccaacaagatgtcttcaattgctcctgaaaaagcctaggcaaacatctttatctcagtagtctggtctgggtcaggtgcctacccctgaaccattgctactggggaagtggggcactgctaaaaggtaactgggttaatctagaaagccgagggtgtgacaatgccacccaaaccacatgcacaattgtttgcaggggtgggggtgggggtggtatggtgggagaaggaagtaggtgctggatcgggcagccacagcacacacaaacaagaaattaaagtcagtcacaacatatccaataaaatattaaaagtactcaagctcactagtaatcaagaaccccaaaaaaactacgtaatttgttgctctccggttaaaaagannnnnnnnnnn

SEQ ID NO: 19821 - DNA, 5368 bp, Homo sapiens
  misc_feature 1, 2, 3, 4, 5, 5368: n = A,T,C or G
nnnnnactgccaaggctccttctcaagctgcttgagtcaatgaggatgtagaaactgagatccagtgagatgaagtgattttcccaaagatacatagatgaagttgaagcttagctctttaacccaggtctgctggcgtccaggtagacgcaccctctgaagatggtgactccctcctgagaagctggaccccttggtaaaagacaaggccttctccaagaagaatatgaaagtgttactcagacttatttgtttcatagctctactgatttcttctctggaggctgataaatgcaaggaacgtgaagaaaaaataattttagtgtcatctgcaaatgaaattgatgttcgtccctgtcctcttaacccaaatgaacacaaaggcactataacttggtataaagatgacagcaagacacctgtatctacagaacaagcctccaggattcatcaacacaaagagaaactttggtttgttcctgctaaggtggaggattcaggacattactattgcgtggtaagaaattcatcttactgcctcagaattaaaataagtgcaaaatttgtggagaatgagcctaacttatgttataatgcacaagccatatttaagcagaaactacccgttgcaggagacggaggacttgtgtgcccttatatggagttttttaaaaatgaaaataatgagttacctaaattacagtggtataaggattgcaaacctctacttcttgacaatatacactttagtggagtcaaagataggctcatcgtgatgaatgtggctgaaaagcatagagggaactatacttgtcatgcatcctacacatacttgggcaagcaatatcctattacccgggtaatagaatttattactctagaggaaaacaaacccacaaggcctgtgattgtgagcccagctaatgagacaatggaagtagacttgggatcccagatacaattgatctgtaatgtcaccggccagttgagtgacattgcttactggaagtggaatgggtcagtaattgatgaagatgacccagtgctaggggaagactattacagtgtggaaaatcctgcaaacaaaagaaggagtaccctcatcacagtgcttaatatatcggaaattgaaagtagattttataaacatccatttacctgttttgccaagaatacacatggtatagatgcagcatatatccagttaatatatccagtcactaatttccagaagcacatgattggtatatgtgtcacgttgacagtcataattgtgtgttctgttttcatctataaaatcttcaagattgacattgtgctttggtacagggattcctgctatgattttctcccaataaaagcttcagatggaaagacctatgacgcatatatactgtatccaaagactgttggggaagggtctacctctgactgtgatatttttgtgtttaaagtcttgcctgaggtcttggaaaaacagtgtggatataagctgttcatttatggaagggatgactacgttggggaagacattgttgaggtcattaatgaaaacgtaaagaaaagcagaagactgattatcattttagtcagagaaacatcaggcttcagctggctgggtggttcatctgaagagcaaatagccatgtataatgctcttgttcaggatggaattaaagttgtcctgcttgagctggagaaaatccaagactatgagaaaatgccagaatcgattaaattcattaagcagaaacatggggctatccgctggtcaggggactttacacagggaccacagtctgcaaagacaaggttctggaagaatgtcaggtaccacatgccagtccagcgacggtcaccttcatctaaacaccagttactgtcaccagccactaaggagaaactgcaaagagaggctcacgtgcctctcgggtagcatggagaagttgccaagagttctttaggtgcctcctgtcttatggcgttgcaggccaggttatgcctcatgctgacttgcagagttcatggaatgtaactatatcatcctttatccctgaggtcacctggaatcagattattaagggaataagccatgacgtcaatagcagcccagggcacttcagagtagagggcttgggaagatcttttaaaaaggcagtaggcccggtgtggtggctcacgcctataatcccagcactttgggaggctgaagtgggtggatcaccagaggtcaggagttcgagaccagcccagccaacatggcaaaaccccatctctactaaaaatacaaaaatgagctaggcatggtggcacacgcctgtaatcccagctacacctgaggctgaggcaggagaattgcttgaaccggggagacggaggttgcagtgagccgagtttgggccactgcactctagcctggcaacagagcaagactccgtctcaaaaaaagggcaataaatgccctctctgaatgtttgaactgccaagaaaaggcatggagacagcgaactagaagaaagggcaagaaggaaatagccaccgtctacagatggcttagttaagtcatccacagcccaagggcggggctatgccttgtctggggaccctgtagagtcactgaccctggagcggctctcctgagaggtgctgcaggcaaagtgagactgacacctcactgaggaagggagacatattcttggagaactttccatctgcttgtattttccatacacatccccagccagaagttagtgtccgaagaccgaattttattttacagagcttgaaaactcacttcaatgaacaaagggattctccaggattccaaagttttgaagtcatcttagctttccacaggagggagagaacttaaaaaagcaacagtagcagggaattgatccacttcttaatgctttcctccctggcatgaccatcctgtcctttgttattatcctgcattttacgtctttggaggaacagctccctagtggcttcctccgtctgcaatgtcccttgcacagcccacacatgaaccatccttcccatgatgccgctcttctgtcatcccgctcctgctgaaacacctcccaggggctccacctgttcaggagctgaagcccatgctttcccaccagcatgtcactcccagaccacctccctgccctgtcctccagcttcccctcgctgtcctgctgtgtgaattcccaggttggcctggtggccatgtcgcctgcccccagcactcctctgtctctgctcttgcctgcacccttcctcctcctttgcctaggaggccttctcgcattttctctagctgatcagaattttaccaaaattcagaacatcctccaattccacagtctctgggagactttccctaagaggcgacttcctctccagccttctctctctggtcaggcccactgcagagatggtggtgagcacatctgggaggctggtctccctccagctggaattgctgctctctgagggagaggctgtggtggctgtctctgtccctcactgccttccaggagcaatttgcacatgtaacatagatttatgtaatgctttatgtttaaaaacattccccaattatcttatttaatttttgcaattattctaattttatatatagagaaagtgacctattttttaaaaaaatcacactctaagttctattgaacctaggacttgagcctccatttctggcttctagtctggtgttctgagtacttgatttcaggtcaataacggtcccccctcactccacactggcacgtttgtgagaagaaatgacattttgctaggaagtgaccgagtctaggaatgcttttattcaagacaccaaattccaaacttctaaatgttggaattttcaaaaattgtgtttagattttatgaaaaactcttctactttcatctattctttccctagaggcaaacatttcttaaaatgtttcattttcattaaaaatgaaagccaaatttatatgccaccgattgcaggacacaagcacagttttaagagttgtatgaacatggagaggacttttggtttttatatttctcgtatttaatatgggtgaacaccaacttttatttggaataataattttcctcctaaacaaaaacacattgagtttaagtctctgactcttgcctttccacctgctttctcctgggcccgctttgcctgcttgaaggaacagtgctgttctggagctgctgttccaacagacagggcctagctttcatttgacacacagactacagccagaagcccatggagcagggatgtcacgtcttgaaaagcctattagatgttttacaaatttaattttgcagattattttagtctgtcatccagaaaatgtgtcagcatgcatagtgctaagaaagcaagccaatttggaaacttaggttagtgacaaaattggccagagagtgggggtgatgatgaccaagaattacaagtagaatggcagctggaatttaaggagggacaagaatcaatggataagcgtgggtggaggaagatccaaacagaaaagtgcaaagttattccccatcttccaagggttgaattctggaggaagaagacacattcctagttccccgtgaacttcctttgacttattgtccccactaaaacaaaacaaaaaacttttaatgccttccacattaattagattttcttgcagtttttttatggcatttttttaaagatgccctaagtgttgaagaagagtttgcaaatgcaacaaaatatttaattaccggttgttaaaactggtttagcacaatttatattttccctctcttgcctttcttatttgcaataaaaggtattgagccattttttaaatgacatttttgataaattatgtttgtactagttgatgaaggagttttttttaacctgtttatataattttgcagcagaagccaaattttttgtatattaaagcaccaaattcatgtacagcatgcatcacggatcaatagactgtacttattttccaataaaattttcaaactttgtactgttaaaaaaaaaaaaaaaaaccagacaccagaaaacaggaaaacaacaaccacaacacccagaaacaacaaaaaaaaaaacaggcgcaaagccaacgaacgaagacacagcacacaagaacagcaacatacaccaaagggagggacgagcacactaagcatacccgggggaggaaacaaaaactcgacccagttgagaaaggccgccccaagcgaagcgttataaaagacagcccgcgccaaaccgaggagtgacacgcagctctgtgacaaccccatgtgggagcccaccacacagagccgcgaacatggtgcgcaccan

SEQ ID NO: 19822 - DNA, 1311 bp, Homo sapiens
  misc_feature 1, 2, 3, 4, 5, 6, 7, 8, 9, 10, 11, 12, 13, 14, 1311: n = A,T,C or G
nnnnnnnnnnnnnnaaagcagtattattttataaccaattctaaaattcagctttaaaaatattgaacataccagggtcatatcttagaattgtatataaaacaacatgtaacccattcatgaaaaacgtttttaagtattgctttttgctgctatgttctgcattgagcctagttttgccattgtcccctgaatgtagtattatctatagattatacataactacatctattgcttttggtggtaaatcaagatttagttgtaattttccagctgtgaaaatgttgccttctacccacgcgtccgggtttcatgaatggaaacctaagtaaaactaagctcattagtgacagacttgttttcttcttgttattcctccagcaactccctcaccaccacgcctccctgcctaccatccccggaagggtgcttattctttaacaaagagaatctaaaaaaaaaaaaaagtgcggccggccgcccgggcaggtgagaaaacagaccatatttactcacataattcgccttctacctttcacctgcttatgtaataatttaacactgtagaggggacatggaggtgacggagtatttagtgggttccttgctcctggctgtgcagttcacaggccccacaggccttggccccagcatccccagcagggacagtggaagtgtcagagcagtaaatgccaccacttccctctcagcctctccctgtccccgccagccacctgcctcacccacggctctaaccaagcccaccgagcaactgacgctgccagtctaacaacggggacaaagcaaagagaaagggataacagacaccctcccatttccttctccaaatgtctgtggatgaggggaaggcagattagatgaggaaatataatatttaagatgaaaaagtagcaatcaggttcaggtacaatgctacctgaatgagtcgaaaagcagagtaatttatatttgatcttaaacctcagggaactggactgattagcatactaaaccattgtaactatggactgagaaaaagacatcaatcatcgtacagcgacgttccaggaggctgggttagtttgatcacatgctttcacacaaatgtggatcgcatatgtaaataaatacctatcaggtccctttaaaattaacacattctaaataatagaactattttggtgttgtgactcattctgcagatacagttcagaatacatacttctctattacatcttgtactctcacagcagcactccatcatcacacaatacccaacacacacccacacacacactgaccagagtaacn

SEQ ID NO: 19823 - DNA, 682 bp, Homo sapiens
  misc_feature 1, 2, 3, 4, 5, 6, 678, 679, 680, 681, 682: n = A,T,C or G
nnnnnnttaccaacgtgctttcaaaatcttttgaaacaatttttctgaaatttatttctaaaagtcagagacaaaactttagaagtgacacatttatactaagcatacatgcgtgagcaaaaaaaataagcacagaatacaaaaatgaaatagtaaaattttaatacagtattctgaatacaagtagaataccactagataagaattgtatttacctaagaaatctatgatagtgtgggtggagataaaccagtttaggatagccacttcactattcacattttaatcagtgctgaccagaagctaaagcaatttcttttaggctaagattggcaaaaaatcatagacccaattttccttgttatgaatcaaatgaacatgttttaaggtgatttgccctcatttaacggtagctggagtaagtcaaaccacagagagcccttacaaagactaagcaccaaatgatgaactgtttgtggcttttgttttgggccatcttaagttttgtgttttccattaacattcatgtgcaaattcttacaggcaaaagttttaacgtgtaagtttcagcttggagatcttgccaactgtacttacaacagttttaaagcaatgataccttcggacaatctcaagctaatgggtaacctttaagaggcggaacttttaaggtttccnnnnn

SEQ ID NO: 19824 - DNA, 3356 bp, Homo sapiens
gtcgacccacgcgtccgaggaggtggaggaggaggcggctcgggagagcgagcagcgagctggctggatcgccgagcgcgagtgagggagccgagccgcccgccgccgccgcctccgcctcccctccgcgaacaggagcccgggccggggcccggcacgccgccccagcccgtccctcggcgtcaggccgcgagggtagcgcgcgcgagcgagcgagggggagggagagcgagcgagcgccgggaggaggcggccggaccgagcgggcgcccgcgcgtgtggcgtgaggggaagccgcttgcccgcccccttcgccttcccttctctccccctccccgctcccccccccgaccgcggagcagcaccatgtcggcgccggcggccaaagtcagtaaaaaggagctcaactccaaccacgacggggccgacgagacctcagaaaaagaacagcaagaagcgattgaacacattgatgaagtacaaaatgaaatagacagacttaatgaacaagccagtgaggagattttgaaagtagaacagaaatataacaaactccgccaaccattttttcagaagaggtcagaattgatcgccaaaatcccaaatttttgggtaacaacatttgtcaaccatccacaagtgtctgcactgcttggggaggaagatgaagaggcactgcattatttgaccagagttgaagtgacagaatttgaagatattaaatcaggttacagaatagatttttattttgatgaaaatccttactttgaaaataaagttctctccaaagaatttcatctgaatgagagtggtgatccatcttcgaagtccaccgaaatcaaatggaaatctggaaaggatttgacgaaacgttcgagtcaaacgcagaataaagccagcaggaagaggcagcatgaggaaccagagagcttctttacctggtttactgaccattctgatgcaggtgctgatgagttaggagaggtcatcaaagatgatatttggccaaacccattacagtactacttggttcccgatatggatgatgaagaaggagaaggagaagaagatgatgatgatgatgaagaggaggaaggattagaagatattgacgaagaaggggatgaggatgaaggtgaagaagatgaagatgatgatgaaggggaggaaggagaggaggatgaaggagaagatgactaaatagaacactgatggattccaaccttcctttttttaaattttctccagtccctgggagcaagttgcagtctttttttttttttttttttttccctcttgtgctcagtcgccctgttcttgaggtctcttttctctactccatggttctcaatttatttggggggaaataccttgagcagaatacaatgggaaaagagtctctacccctttctgttcgaagttcatttttatcccttcctgtctgaacaaaaactgtatggaatcaacaccaccgagctctgtgggaaaaaagaaaaacctgctcccttcgctctgctggaagctggagggtgctaggcccctgtgtagtagtgcatagaattctagctttttttcctcctttctctgtatattgggctcagagagtacactgtgtctctatgtgaatatggacagttagcatttaccaacatgtatctgtctactttctcttgtttaaaaaaagaaaaaaaaacttaaaaaaatggggttatagaaggtcagcaaagggtgggtttgagatgtttgggtgggttaagtgggcattttgacaacatggcttctcctttggcatgtttaattgtgatatttgacagacatccttgcagtttaagatgacacttttaaaataaattctctcctaatgatgacttgagccctgccactcaatgggagaatcagcagaacctgtaggatcttatttggaattgacattctctattgtaattttgttcctgtttatttttaaattttctttttgtttcactggaaaggaaagatgatgctcagttttaaacgttaaaagtgtacaagttgctttgttacaataaaactaaatgtgtacacaaaggatttgatgcttttctctcagcataggtatgcttactatgaccttccaagtttgacttgtataacatcactgtcaaactttgtcaccctaacttcgtattttttgatacgcactttgcaggatgacctcagggctatgtggattgagtaatgggatttgaatcaatgtattaatatctccatagctgggaaacgtgggttcaatttgccattggtttctgaaagtattcacatcatttgggataccagatagctcaatactctctgagtacattgtgcccttgatttttatctccaagtggcagtttttaaaattggccttttacctggatataaattaattgtgcctgccaccaccatccaacagacctggtgctctaatgccaagttatacacgggacagttgctggcatgtcttcattggctatataaaatgtggccaagaagataggctctcagtaagaagtctgatggtgagcagtaactgtccctgctttctggtataaagctctcaaatgtgaccatgtgaatctgggtgggataatggactcagctctgtctgctcaatgccattgtgcagagaagcaccctaatgcataagctttttaatgctgtaaaatatagtcgctgaaattaaatgccactttttcagaggtgaattaatggacagtctggtgaacttcaaaagctttttgatgtataaaacttgataaatggaactattccatcaataggcaaaagtgtaacaacctatctagatggatagtatgtaatttctgcacaggtctctgtttagtaaatacatcactgtataccgatcaggaatcttgctccaataaaggaacataaagatttaaaaaaaaaaaaaaaaaaaaaaaaaaaacaaacacaaaaagaacaaacaaaaaaaaaaaaaaaaaagaaaaaaaaacaaaaaaaagaaaggaggggagacagaaacaaaaaaaaaaaacaaggaggaaccacaaaaaacaagagaagacacacccacacaagaagagaccgcgaccacgcacctcaacgaaaagcgcagaagagcatgcagaagcagagaacactacacgcaaagctaacaacccacagtcgagtgacaagaacacgaacacaggaaggcgcagcgataagcgaacaaacacaacaaataatgactaagacaacaagagactaggctgactcttgttcaccaccgtaaagagaggacgcaccgacagcgtaacacatgcagcagcactgagtgacgcagccagtcacaagtaggcgcaccaaca

SEQ ID NO: 19825 - DNA, 550 bp, Homo sapiens
  misc_feature 118, 119, 120, 121, 122, 123, 124, 125, 126, 127, 128, 129,130, 131, 132, 133, 134, 135, 136, 137, 138, 139, 140, 141,142, 143, 144, 145, 146, 147, 148, 149, 150, 151, 152, 153,154, 155, 156, 157, 158, 159, 160, 161, 162, 163, 164: n = A,T,C or G
acttatacagtcctaattttagtggtcaaagagcaaatcattatcagacatatatttacacagtaatttcaagcaatcgggaaataatctattccctccctttggaacataaacaaannnnnnnnnnnnnnnnnnnnnnnnnnnnnnnnnnnnnnnnnnnnnnncccccctaaacaatggatttcctcacccagtaagtctcatttttttcacatatacttgtagacccaaaggtccttaagttacttaaaaacagtcttatcagtggagatcctggaccatcccctattttcttttaaagtcactttcatttttacaacttgaagccatataccagcatggtttttatacactaaggacactcccagtgatgaaaatgaattcccctccatttgtgcaaggaggtatgtacctgcccgggcggccggccgcactttttttttttttcttttttgcaactttcatttaaatgaaatattcagaattttgattaaaataaataataaattacacaagtttacaagtaacagttaaatatttagggacatgt

SEQ ID NO: 19826 - DNA, 1179 bp, Homo sapiens
cgcggccgcgtacgacacggctgcgagcaagacgacagaagggcacggaggtgcatcctgagctctacgtggacaagtcgcggggagataaactgaagatcaacatcgatgtactttttccgcacatgccttgtgcctatctgagtattgatgccatggatgtggccggagaacagcagctggatgtggaacacaacctgttcatgcaacgactagataaagatggcatccccgtgagctcagaggctgagcggcatgagcttgggaaagtcgaggtgacggtgtttgaccctgactccctggaccctgatcgctgtgagagctgctatggtgctgaggcagaagatatcaagtgctgtaacacctgtgaagatgtgcgggaggcatatcgccgtagaggctgggccttcaagaacccagatactattgagcagtgccggcgagagggcttcagccagaagatgcaggagcagaagaatgaaggctatccaggtgtatggcttcttggaagtcaataaggtggccggaaacttccactttgcccctgggaagagcttccagcagtcccatgtgcacgtccatgacttgcagagctttggccttgacaacatcaacatgacccactacatccagtactttgtgaaggtggtgcccactgtgtacatgaaggtggacggagaggctcaacaggaaaggggaaggagcaggggtggggctgatggtggctggagccaggtcctagccctagccctggcccaggctcccctcccaccccaggtactgaggacaaatcagttctctgtgaccagacatgagaaggttgccaatgggctgttgggcgaccaaggccttcccggagtcttcgtcctctatgagctctcgcccatgatggtgaagctgacggagaagcacaggtccttcacccacttcctgacaggtgtgtgcgccatcattgggggcatgttcacagtggctggactcatcgattcgctcatctaccactcagcacgagccatccagaagaaaattgatctagggaagacaacgtagtcaccctcgggtgcttcctctgtctcctctttctccctggcctgtggttgtcccccagcctctgccaccctccacctcctcggtcagccccagccccaggttgataaatctattgattgattgtgatag

SEQ ID NO: 19827 - DNA, 1380 bp, Homo sapiens
caaagcttcgacccacgcgtccggtctattttgattttggggggtaatcagcattattcttcagaaggggacctgttttcttcaagggaagaaacactcttattcccaaactacagaataatgtgttaaacatgctaaatagttctatcaggaaaacaaatcactgtatttatctccgcaggctatttgttcagagaggccttttgtttaaatataaatgtttaaatataaatgtttgtctggattggctataacatgtctttcagcattaggcttttaagaaacacagggttttgtattctttactaaagatatcagagctcttaatgttgcttagatgagggtgactgtcaagtacctgcccgggcggccggccgcccgggcaggtcttcgacccacgcgtccgggcaattatcaaaaacacttggaaaaagatttttattcctacttttaaacatacatcaaaatctaaaataaaactaggcaccttcagctgggcctggtggctcatgcctgtaatcccagcactttgggaggctgaagtgggcagatcactggatgtcagaagttcgagaccagcctggcctacatggcgaaaccccctctctactaaaaatacaaaaattagccgggcttggtggtggggacctgtaatcccagctactcgggaggctgaggcaggagaatcacttgaacctgggaggtggaggttgcagttagctgagatcacaccactgcactccagcctgggccacagagcaagactccatcttagaacaaaaaacaaacaaacaaacaaacctcatgcaccttcaagaaaatacaaacaagtatttatctaattaagaaagaattttctaagtataaaaggaatgaaagaaaccataaaagaaaacaattggcagaattggttaggttcaagttaaatatatttggagttaatacctttacatataaagataaaatatatgtcaaaatataaacaaaagagaaaatcatttcacaaaacaaaaagatgcagatggccaataaagaccagtaattctattaatttacttttttatgcccagcttgtcaataacagagatcaccagtaattttaaagatgtaagtaaaaatataatttttttgcccatcacattggtttaaatgtattaccacaacatcagcagtaatatattcaatgatgataatactggcataaacagggcattctcataccatactagtggacatatagctaaaaaagcacttatactaaatagatcaatttctaggaattcatgccaaggaaataattggaaataagaatacatatttatatacatatttgaaattaaaaaacattagtggtctcaaatttggaaatgtgtgatatgt

SEQ ID NO: 19828 - DNA, 1955 bp, Homo sapiens
  misc_feature 1, 2, 60, 1954, 1955: n = A,T,C or G
nngatgacagtcttcaagaaacagatgttaatatggagtcagtttttgactatagtatanattctgtacatgatgagaaaatggaagagcaaactgaaattcttcaaaatggcttcaatcctgaagaagataaatgcaataactgtgatcaagagttaaataaaaagccccaggacgaaacaaaggagagcacttcatgccctgtggtacaaaaaagagcagctctactgtatcctttgacatagagcatccctctgtttctctttatagggtatagttatatgccaagcagtaaccaaggagtaactcaataatttaaggtttttctttccttttccaattgttttttgtttctgtttgaaaatagattatgttcaatgctacgttaagtaaggtttacttaaacctgtttaatttaactaggctgggcatgggtggctcatgcctgtagtcccagcactttttgaggccgaggtgggaggattgtctgagcccaggagtctgagaccagcctgggcaacatggcgagacccccatctctacatcagatttaaaaaaaaaaaaaagaagaagctatactaacacggaagctctatcaattctgaagatcagtattctgaataaataccaattaaagtattccacatgatctccaatgattaggagagtgtttggtgatagagctcttttagagatgtaaaacttttgtataaatttagaaaactaacattgacaaaggaagttactcataagttcaatagaatagcttctatttgttgaagtacgattttcctttagtcctaagtaatgcaattcttcattcagcatatagcgagacatttcttctgcctcatttgaaagacatcccagcacagcatatcacgctgtttcttaagtatttgtatttcctgtacctgaagtgtagcgaaaatgctactatgactcttcctggaatacacccacctaccttgaaccagattatggattggatatgtctacttctggatgcgaattttactgttgttgtaatgatgccagaagcaaagaggctactgataaatctttacaagcttgtaaaatctcaggtttgtgattacgcgtgggtcgaagcttgtacaaaaacccaagtatcacctgaattacaattattcttaaaatttgtccttaaatagcttactcttggaagatttgtttctatgtagacattatggtaaaagttactctgaaactcttttctttagatatctgtttattctgagctcaacaagattgaagtaagttttcgggagctacagaaattaaatcaagaaaagaataatagaggattatattcaattgaagtgctggagctcttctgatattatcaattctccttcatagacattttataaagctcttttatgtgaactcttgcttcatccaggcaagaacggtgttttgtttgcgaccatctcagtgtcaagagaaacgtgtcagtgagtacctggaccatcacttaactgatgctccggggtaggactgcaggtttcacatgaacctgttctaggctgtggacattggtgtggagaggttctgcaattttttaaaaatatgtaactgggttgattttaagtaaaattatttgtgtattgataaaagtctaatttcttataaaaaaaaaaaaaaaaaaaaaaaaaaaaaaaaaaaaaaagcggggatatatggggggggaaaaaaaagacggagatcataacagaaaagggggacccctgcgagctaataaggacgggctaccccgagaccccagtctttctgttgacacaaggcgtgtaaaatgcgcggcggtccaccataaaggagaagcgccgcagtaccctcgcgaatacaacacaggatacccgggttaaatgaacccgaaaaacgcccacacacccaacgcccgagcaacacgcaccaccgaacaccgcaagcacann

SEQ ID NO: 19829 - DNA, 348 bp, Homo sapiens
  misc_feature 1, 2: n = A,T,C or G
nntgcccgggcggcctgaggtttattcccatttctaagacgatagaagttttcagcctaagccgtattcctaggtaagcagctggattgcagttttgtcttggaaattctccttaatgactaaaagttaagattaacaactagctggtcttaatttctccttaccattagagtacccagtaatcacataaattctgcaatcatctgacctgcccgggcggccggccgcactttttttttttttttttttaataacaaacacttatccaacacttagtatgtggcaggcactgtttcaagcactttacacatacaaactcatcccggacgcgtgggtcgaagcttgtac

SEQ ID NO: 19830 - DNA, 1161 bp, Homo sapiens
  misc_feature 1, 2, 1156, 1157, 1158, 1159, 1160, 1161: n = A,T,C or G
nnagccaggttatagaatgggggaattgatctagtatcggtggttaaacaagcaggaagagcgcctggtccccagaaagaagaggggaaatccccatccgttttggcggctaatgaagggtccatttcttaaagatgtgtgagtgaataaaacactaggtgaattcgagaccgcttctttgttttttgtttcttgaatctgaatatacaagaacattcattatcaaatgttcatcatcaatactacaaagaacgagacacaagtcgcaagaaacaatggaaaatgttaataaagctgaaagaatcgttgagtatttttttgtttcttttaaagttttttttaaatttgagtttctgtagtttcatcttttttggtatcgaagtcaggtttttctgggcagaaaaacaaagagcaggaaagagagagacagagagaaagatgtgtgagaaaagacaaccagcaaataaagaatcaccaccatagcaaaataaaacataaattgaaagaaggtgccacttggcaaatgtactgcacgggcgtcaattccatgccagagggaggatgaattagggatgaaaaggaggagataaggaagagttacaaggtgggcaaacccagggtctagtatcgtttctcaggggaaattcgctgtcggggaaaatggagcactcccacatctattagaaaatgaagaaatcctggggtgcatcttgctctctgtaggactggcctcatgtgaattcccaggaagctgtgtttccagaggcatgctctttccaaacccatcctgctgctctcagtgttctcctgcttcgcctaatgtggacagatctcacggatgccacgttggaagtcggaagtgatagtgggcttgccgggggtgccgggggaggtgctgggtatagagaagactaagtgaaatgctggttggggaaaatgctgtgaaaggtgatcatcagtgaaaactacggcccggagagaaactgcctgtgcaaatgtagccctgttctgatcttttgcattaacttaacatggcaattattcaggccacatctggagtcactcttcttgtttccaagagaacccttttgtctctctttcgtactttgccctaagtcaagcaaatgtgattcaaccatgttcttgcgtgggtagnnnnnn

SEQ ID NO: 19831 - DNA, 416 bp, Homo sapiens
acactgtaaatagcctttaccaaacgtgtttgacaaggaccataattaacatcacttagtgaattgtgataaagaaaaaaaagccatgatttattcgatgtgattggcttgtttttatgtggcgccaagaacgaacctgtttagcagctgtaaccaatggtacgcgggggaggcgaacaatggcggagctgggcgaagccgatgaagcggagttgcagcgcctggtggccgccgagcagcagaaggcgcagtttactgcacaggtgcatcacttcatggagttatgttgggataaatgtgtggagaagccagggaatcgcctagactctcgcactgaaaattgtctctccagctgtgtagaccgcttcattgacaccactcttgccatcaccagtcggtttgcccagattgtacct

SEQ ID NO: 19832 - DNA, 765 bp, Homo sapiens
  misc_feature 765: n = A,T,C or G
actttgggagaccacccccagctatggttccatacacttatactgcgcccagctacaggttgatacacttggggcaaactatctgataaaatagagaaaaaaatcttatttactatagcattacataataaatttctgagaaaaaaattaaccagggatgtaaaaaacctttacaataaaaaataaataaaaaaggaagatccaaataaattttaaaatattttatgtctttggattgaaagaataaatattaataaagtgccatattatccaaagtgatctatagattcaatacacttcctatcaaaattgcagtatttttttcacagtaatggaaattcaattctaaaatttacatgaaactaaaataaactttgaatagccaaaacagtcttgaggaaaaggaacaaggcagaagaatatcatacttacaatttcaatctatatttgaagactttatagaaataaaaacagaatggactgtgcagaaaaataaacaaaaaatgcaagataaactaatactctcacgcatttcagacctgatgcaaaaagaggacttaaaaaaatagttttagtttctcaaaattatgcagatatttgtgtgtccccaaaacaatggaaaagcagccagactgtgcagcctctcattctctcttttttttttgtgagatggagtctcgctctgttgcccattgtcaatgcttcttcttctttttttttttgtttgagacggagtctcgctctgttgccaggctggagtgcagn

SEQ ID NO: 19833 - DNA, 922 bp, Homo sapiens
  misc_feature 1, 919, 920, 921, 922: n = A,T,C or G
nccgggctcgttgctacgcgtcgccgttgtcgctgtgtccattgtcttgcgctgtgcccactgtgtatgtcgcgcgcattgggtttcttcgcggcctcagggtttggcactcacaaatctcttgggtcggtccgcgactgccagaactgtttccgggaatccgtggcctggatacattgaactgtgataaccgtgcagcaccgtgggtccgatcacccattccagactgcaggaaaagttgaatgtaggttgagtatgggtaacacaatgggaccctctccgcatgcctggccatgtgatgacagtacctggatttcgtcttctgtagttatgtcctaatatactcagctagagtccgtctgtgccccagtacagctcgtgaggacgtaaattgctggtgacaacgagaactgcttggcagggaccttagcagctgaaatgaagctgaaagacccctcaccacttgttttcacaatactggccacaaaagtaatgatgggaggacagctttgtagaaaggacattatccagctaatagcaactttgtggatcccaatccgagatttccctgctgaaagacaagaagtatctcatatgaaagtgctgtagcagtatttgtatactccagaataagcttctgtaattcttagctgccaatgtgttcaggcgtgatgactcggtttctgtttctcgtgaacatcaatactagggtctgtataatttcaatgcatgccaccagctcatcaaccctttggctttgattttgtagtgcattcttatccctagactccggcaagtactcatgaagtttgtttactatgaaatagaaaaggtcactggtctcagatggaaatgcagaaatcacccgtcttctgcgtcgctcacgctgggagctgtagaccggagctgttcctattcnnnn

SEQ ID NO: 19834 - DNA, 5370 bp, Homo sapiens
gcggccgcggcgggtgctgggagccagcgcctgcctcgccgccgccctcgctgcctgccactccgtcttggcccgttctccgcaccgtgcagaggcggcgggctggggagggagcggcgccagcacgaggttcccagccgctgggaagcccctagacgcgccgaggggccgggctacgagcggctgagaaaatgatgcatcctgttgccagcagtaatccagctttctgtgggcctggcaagccttcctgcctcaatgaagatgccatgagagctgctgatcagtttgacatatattcctcccagcaaagcaaatacagccacacagtcaaccacaaaccaatggtttgtcagaggcaagacccattaaatgaaacacacttgcagactacaagtggcagaagcatagaaataaaagatgaactaaagaaaaagaagaatctcaaccgatctggtaagcgtggccggccttcgggaaccaccaaatcagcaggataccggaccagcacaggcagacccctgggaaccaccaaagcagctggatttaagacaagtccaggcagacctttggggacaactaaagctgcgggatacaaagtcagcccaggcagacctccaggtagcattaaagctctatcccgtcttgccgatcttggttatggctgtggcactgctgcttttccttaccctatgatgcatggcagagcagttcatggggtagaggaaactagcagtgaagtcaaaccacccaatgagtgaatgaggcaggaaaagagggccaggtttagaaggaagattgtgaataatcccaaagcttcttggttttattttgatatacataattttatggcctgggctttccaaatttgttttcctgtttggtttttttcctgcttttgctcaaaaactgccatatgctgacagatgcactcagggcatgagcagcggcattgtatttgtacataggttcaagtgtaacacctaactaaatcatttttccttttcctttagagttatggtcatgtctcatgtttcattactactttggggctgttctaaatagatgctttatgtgataaacaactgaaaccattatacctattagtttgtgaagtaagcctacagtataataaagacactaacgtatttttaactgatggagcaaaaaagcaaactaatgaatcaggattacttgaggtaatggctgtgtgagtttttgtaacatttattttcacaagatgggacacatatttgtatgctttggcatttacatccacttcaaatgttaaaaaacttatttttaatgttttaggtttaagcagcttgtaatttattgatctacatggcattaattgatttaaccattatacctgaaataattcttcagtgtttgcctttgagcagtgataggttgtgtattttttaattgcctaagagcatatataccaaacactacaaacaattcatatttacagaaaatttaaactattttataaaaactgcacattacatttttggtgaaatatagtgcattctgaggatagcatatttcatataatagaaaaagaagcattctctaggtttgcatgtagctatagtcactatattttgcctttcatatagaaagttttaaagtattatgtttaaaaacatttattggctgggtgtggtggctcacacccagcactttgggaggccgagggcaggcggatcacttgaggtcagcagttcaagactagcctggccaacatggtgaaaccccatctctactaaaaatataaaaattagccaggcgtggtggcgggcgcctgtaatccaagctactggggaggctgaggcaggagaattgcttaaatccaggaggcggaggttgcagtgagccaagattgtgccactgcactccagcctgggtgacagagtaagactccgtctcaaataaataaataaataaataaataaataaataaataaaaccatttattgatgttgctcatttatttggaacgtttttagtttttctcagaaattgtcccattgcattagcacttactgtgttttcaggttgatatctaccaaaggacacaaattgaatggtagactgtaaaactggtataaacagaatgcagtttcccgaccatcagaacccaaatattaagaagcatataggaatccatctatgcatgaaacatgtaaaaaatatgttggttagtttaattaaaaatcttattgtgggtccagtgagaccatctcatccaaaagattttttttcccccaatgatgtttgctttagaagcaagatagaaaggaaaaaaagtattaggtagatatgtatagtagggacagagggaaatctttcttctttcctttctgaaagtaatacttcttgttacacattttatttattgagtttgttctaaataaaatattataaacttcagacttgaaaaaattccacttaactttaaagttacaatgtttgtatttgggattttaaatgcctttgagattaaaatgtagaattgcaggacccaaaaacttttaaaataattaaaattttaaaagagcacatgttgtgttttttgggcttgctattaatgcaaactctgattgcaaatggatgtcatgtttcataccttttttatcaggaaaaaagcagcaagccttcaggtgttccagtgatgcctgacacaattgagctggactttatgctgctctttacagtaagaggtgttgcattgtatgtggggactatgtgcactggcgtctaagacagtgacctcaacaatattagctttgcacaaaccatagagaacgatgttggatggttacataatcagttataacattctggcagctaaattgctacaagagctttttcttgcaaaagcttaaaatacaagatttttaataatttactcagaacagtataacttctgacacacacaaatgcttgcctctttattcatatgttcgttacctactctgtacatgtatctgtcatttagctgtttctcaagatgatgttcagcagttggctgcttagaaatctttttcaagccagtttctaaagacatttgtttaatgttctaccatagaataatgcacaccattgtcaaagatttgattattgtgttttatagtaagtccatttgacatttatttccctttcagtttattttccttccttattttgttatacatactcttccctttctcccctgcctttcgtacattcattcctcttcctctaccctccagcacatctacttactggtgctgtgctgtgtgtcagaagataaaacaggtgtattattgtataatgaattttgtatacatgtttatgaaatggtgagatcaactaaaggaggcatgttcataacagtgtttattatcagcagctatgtcccaggaaaaaaaaatgggaggggcaaatggctacagttgtaaatggataacatcatttagaaagccgaatttactgttcatctgagcggttacctggagtattatatctatgcactggtgagcatctcctgattccacttacttttctccctgtgaacagtttaccggtgccatgctgaagagaaagacatctaagtgataacatgaatgaagtcttaaaatttaaagtatttttactgctatataaactaaagactacattgtgcatattttgttaacactgtctcttgttatgataaacactgaaatagcatgttaaacagttgcctatactttaatataatcagttggggaaaactggccttttctcccccactgtatgattgtttcttgaaaggtaaattgctaattttatacagtgtaattctgttcttcacaaaataggtttcattattctatatttaaactgttggtcagaaaatgatctgcaattcaagtaagtctgcattacttttttctttaaaaagtactttaacatgccttatttattatattagcaaatgagctaataacagatgaaattttcattttttgacagatataaccttgcataagtagtatttagggtgattttgatactatctttagagttttgcattggatattaaaaaatatattggcacaatgtattggaagaaaatgagtagtatctggtttaatttttaatatttagggacattttaaaaaatcaatgttttaattagactaaaaattctttatattttttatttactttttaaagaaacatctgtcaaagtaatattgattccaaactgatgtttgtgtgaatttacatgtctattttcatgaactaagaatagagtttctttgagttgaggagaaaaaaatatatatgtgggtccatttattaggttaaagttgacccattcagtgtaaaaataaccatagtgtgtgagctaaagaaaaaaaaaagtaaatttctcctttatattctaagaagctttaaaagaacaattcaggggttattgataactgctactctgtcggtcattgtctctatatgcagtaaaattttatggtccctttataggaatataaagaattcaaaacagtttttcaaaagattttttttccttggacataaaaaattttgatgctattctatttttgtttttattacagcttaactgtatgctgttaaactctaggatgtatctgaatctttccttttttcccccctcctccaaatatataaatctgtgctctcacatgtaatgtatttaatttttggaaaatttaatgctatatagtaaatcaagtgtgtgatttaaagtaatcagatcactttgattcttttaagttttcagaatttcttttttccacaggtaattttggagaaaataattaccaattaactgataataagcacgctgtcctctgctgtaaaaagtctgaatagatactgtgtatgtttttatgtccatgaacttgagctactcgtgtgcaattatgtgtatgggaatggagtagtgttcatgatttgtatctacatcatcatatggatgtatatttattaataaagtcattactttaaaaccaaaaaaaaaaaaaaaaaaaaaaaaaaaaaaaaaaaaaaagaaaaaaaaaaaaaaaaaaaaaaaaaaaaaaaaaaaaaaaaaaaaaggggggggggggcaaaaaaatccccccagagggaggccaacaatattagtaagacaaccacagcatggtagaaaaagaagaggggcgcccccaaaaagagggacgcgaaataaaacaaagaaagagaacacgagcgcagggaatgtaataaaacacgcgcggggaggcgaaaaaacaagctaccaacgaggagaccccacttagggaaaacagcacacactactctgggggggaggaaaaaagtggcggcgcaaccacaccg

SEQ ID NO: 19835 - DNA, 3090 bp, Homo sapiens
  misc_feature 488, 525: n = A,T,C or G
ttcatagcgctggaagccaccaccacccccgcggccccggaagccaccaccacctcggttgtcaaagcgcttttcagggggtggcccagccttgcggccttcctcgttgtactgcctcactagcttgtccgcttcctcccgctgcagctcaatgaacagaacctcatccaggaagtccccaacatctggcaacgtgaagttggctaggaggaaggaagtgccccaaagagaacaagaagaagaggtcagtaccttctgaagtctggtcccctccacccagaagagtggccttccagaagggagaaggtgaagaaaactggaatagtgaataagaaagacaaagacagaagggcgggcgcggtggctcacgcctgtaatcccagcactttgggaggccgaggcgggtggatcacctgaggtcaggagttcgagaccagcctggccaacatggtgaaacccgttctttactaaaaatacaaaaaagaatnagctgggccaggtgtggtggtgtgtgcctgtaatccnagctactcaggaggctgagatgggagaattgcttgaacccgggagacagaggttgcagtaagctgagatcacaccactgcactccagctgggcaacagagcaagactccatctcaaaaaataaaaagaaaaagattcagttcctaggtgttgggggaggagggataaatcaaactccatcctgtgctacagcccttttgactccctgacattgatttgaggaaagagaaggggcatcaacgttggaagggcctcctcactttcttccgccgcttaggtttggcttctcccttgggtactgtgctgttgggcttagaggctgcagcggctccaggggcaggctgaggagctgcaaagaagttcccattgggcatctgccctgggggtacttgaaagatccgactcaagaaatcctgaagatcagcaggaggggcatctggggtggctctctgccgccctctggtgcctggaatccgagaaccaaatgagatgtgataggggactctgtgggtatctggggagatacctacacgctggcatccagcccactctgtgatgtcatacacctttccatccatcagtgcaaagtaggtgatcttgaggcccaacatgcttgactctgcccaaaagtctccttcctcagcaggatgcagcctattacactcagcacagtatctggcactcttaggttcccggtccatttcaaacctcctatgctttccttggcatcggctacacatcatagtattcattgcctccttgaggtcatcttgcagcttggacagaaactcatttactgaccggctcagctcattctctgccattcgtttcatctcatactcctttcgcttttcagcattgctgacaatgtcccaagctgctcgcaaaaccttgaaggcctcctcagcccggggatgatgatttttgtcaggatgaaccatcactgccagctgtctataggccttcttcagttcaacatctgatgctgtggcctcaacccccagtacatggaaagggtttagctcatcctcaggaaccccagccatggtcaagagtcgagccacttcctcttcaggctggcagtagcgcccactagctacaggtgcattcccctgcctattaatattctgcttgacccaaggcaactccagccagccccactgaactattcttaccagccgctgccatggcctgctatctctcagcagagtcaagcaacgctgcaaggctggagaatccagccaagagaagagccaggtagccttatccctccagcctaaccggtcacctagtcccaccagaaaccgccatcccaactgtagaaagcccaaaaagagggccagagccaggagcagcaaagcacccagcagcttaagaaaacgagtaaacagtcctactccacagtaaaacccctggcttagaaactgaaacatgacctgggcccagccccctaaccgccctgtccacactcccatccaaactcgaaaaaggtccaaatcactgcttttcagttgcctgcaggcatagatgagatggccacaagtttctacgtactctcccaccaataccagcagttcaatcagccaccacagccaccaccccagcagccaccgccaccacccagctacagccctgctcggaaccccccaggggccagcacctacaataagaacagcaacatccctggctcaagcgccaataccagcacccccaccgtcagcagctacagccctccacagagctttggcttttttccctccactttccagccgagttacagccagccaccctacaaccagggaggttacagccagggctacacagccccaccgcctccacctccaccaccacctgcctacaactatgggagctacggcggttacaacccggccccctataccccaccgccaccccccaccgcacagacctaccctcagcccagctataaccagtatcagcagtatgcccagcagtggaaccagtactatcagaaccagggccagtggccgccatactacgggaactacgactacgggagctactccgggaacacacagggtggcacaagtacacagtagccagtgtgacccagaggctcccggaggcccctggccggcttcctccaccagcgcctgcctcggcccctcctctgcccccgccagatcccgtggtgctggggatggggtcatcccagggctgcctccctccagcccactgcctgaagcagtagagcagcccgtagttcttgagcagtgcgtcatggttgtgcgagtttgtgtcaaacttgctgtaggtctgcttgaggatctgcccagtccggcggctgccgtcttccagcctccccatcagcgtttggatgccttcctctaggtcctttaggaggtgatagtcatcgctgtccgaggtgtcatacaccaggttgttggcgaacatactcctgaggaaccgcacgggctccagccacgactcgatgaacagcagggagatgcggagcagctctagaatggatttctgttgcgtttcctccatgttggagggtgtcggattagaatctgggacaaccctc

SEQ ID NO: 19836 - DNA, 1844 bp, Homo sapiens
  misc_feature 1, 1843, 1844: n = A,T,C or G
nactagattagtctgatctaggagaagattcatgcggcagatcgtcagccgcttcctccaggcacgccccggctgagcctcaagggaatacccactctggtgtacagacacgactggaactatgaacatctctttatggacatcaagaacaaaatggcacaggtgatcccgataaacctgatcctgtgcacggggctttctgccttctcagtgtgtttccctctgtgttaggcctactccagccttgccccgggtgtttgctgtgagcccacagtttctgcggcctcccttacagagagcaagcaagacagcaaatcagcaagttttcttgtagagtaaaagcagattgacatcttgtgggtttgattcttaggaatgatgttgatgcatggccatgcctgctgaagcgggaagtccatggaaccgatttgttcctgctctccgcatgcgggtactgataggtagacctgtgtgtctccatggcctccaggaactgcctgcacaccgtgcgcccaagtgtcagctgttagagagttggccccccgcatgtggcttgggcagtgaaggggctcggctctcttaccaggtggtgagatgccagaaacccagcccacagacatccctctcctgcttttcatttcccaggactccctccccagctcggtcattagtgccatcagtggacagctgcagtcctacagcgatgcctgtgaagtgctgtctgtcgtagaagtcactctggggtttctgagcacagctggtggggatccaaacatgcagctggatgtgtatactcaagacatcctgcaaatgggtgatcagacgattcgcgtgttaaaggccttaaacagatgccagttaaaacacaccattgccctctggcagttcctgtctgctcataagtctgaacagctgctgcggctgcacaaagagccatttggggaaatcagttcaaggtacaaagcggatctgagcccggaaaatgctaagctcctcagcacattcctaaatcagactggcctagacgccttcctgctagagctgcacgaaatgataatcttgaaactaaagaacccccaaacccaaaccgaggagcgcttccgccctcagtggagcctgagagacactctcgtaagttacatgcaaactaaagaaagtgaaattcttcctgaaatggcatctcagttcccagaagagatactgctcgccagctgtgtctcagtgtggaaaacagctgctgtgctgaaatggaatcgagaaatgagatagaattatttcctcagctatctttggatgactttggagagaagactcctctctcctcgtctgcggcgtggacttgatcatggactggtgcctttgcattcagaaggagagctgtcagcgtagcaccgaattcaagaccaaggcgtgctacctgagctgacagctttttgaaagccgagctgtttctgaaccatgtacatacatgttctgaaactttctcatcattttatgagtactgttcattgagagatgacaatgaagattagatgaaattggaaataaaccaacattgtttacattccaggagacttgtagctcagccacacacgcagtaatgacctgtgcccgttcgcctctggcactgcccacccctctttttttttttcttctaattctgtactcacaaaagagaatctcattttcttctttcttccattcccttaaattctgagtactgtacatatatttctgggttcccacgatgatgtgaaaaactaccagactgttttttgtcttctcacaaagacaagaaaaatcagggcattttgtgagtgccttaagatcaaactaacaagann

SEQ ID NO: 19837 - DNA, 1107 bp, Homo sapiens
  misc_feature 1, 2, 1107: n = A,T,C or G
nnagcgttggatgatagagaacgaagaatttcccattccctctacagtgggattgaggggcttgatgaatcgcccagcagaaatgctgccctcagtaggataatgggtgagtcaggtaaataccagctgtcccctacagtgaatatgccccaagatgacactgtcattatagaagatgacaggttgccagtgcttcctccacatctctctgaccagtcctcttccagctcccatgatgatgtggggtttgtgacggcagatgctggtacttgggccaaggctgcaatcagtgattcagccgactgctctttgagtccagatgttgatccagttcttgcttttcaacgagaaggatttggacgtcagagtatgtcagaaaaacgcacaaagcaattttcagatgccagtcaattggatttcgttaaaacacgaaaatcaaaaagcatggatttaggtatagctgacgagactaaactcaatacagtggatgaccagaaagcaggttctcccagcagagatgtgggtccttccctgggtctgaagaagtcaagctcgttggagagtctgcagaccgcagttgccgaggtgactttgaatggggatattcctttccatcgtccacggccgcggataatcagaggcaggggatgcaatgagagcttcagagctgccatcgacaaatcttatgataaacccgcggtagatgatgatgatgaaggcatggagaccttggaagaagacacagaagaaagttcaagatcagggagagagtctgtatccacagccagtgatcagccttcccactctctggagagacaaatgaatggaaaccaagagaaaggtgataagactgatagaaaaaaggataaaactggaaaagaaaagaagaaagatagagataaggagaaggataaaatgaaagccaagaagggaatgctgaagggcttgggagacatgttcagccttgccaaactgaagcccgagaagagatgaacaacaaagcgattcaaaacatgtcttgaacagcacatattgcacagttgttgttttttttaaacaaacaataaatttacttttaatgaaaaaaaaaaaaaaagggcggccgcn

SEQ ID NO: 19838 - DNA, 513 bp, Homo sapiens
ccacgcgtccggtggagttcctgtgggaccctgcaaagaggacatctgtgtttattcaggtgcactgtattagcacagagttcactatgaggaaacatggtggagaaaagggggtgccattccgagtacaaatagataccttcaaggagaatgaaaacggggaatatactgagcacttacactcggccagctgccagatcaaagttttcaagcccaaaggtgcagacagaaagcaaaaaacggatagggaaaaaatggagaaacgaacacctcatgaaaaggagaaatatcagccttcctatgagacaaccatactcacagaggtaaaaagatttcttttggtgacaatttcagttcataatttttaatcttaaaaattcatcacttccaaactggtcagaatttacttctcctaagccttgagggacacagtatcacatggattctgtgtccagcggccttaacaggaagattgctttagaatttggcacgaaccatgccactgtctctgtg

SEQ ID NO: 19839 - DNA, 691 bp, Homo sapiens
  misc_feature 687, 688, 689, 690, 691: n = A,T,C or G
gcgtccgcaacaacaaaaaataccctgagatactattttttcacctattgaactggtaaaaacccataagttaggcagcccgctttgttgccaaggccgtggggaagcatgcgttcttgtacattgctagtggaagggctcattgattcaaccctcctggagaacagtttgacagtatctttcaaaattacaaacacattttccctttgacccaacaatctcacttctgggaatttaacctacgtattaaaaaatgagaaatgcacagagttattcactggagagcggtctgcagtagcaagacactggaaactactcaagtgcccatcagtgctggatttgtatttaacattatgtttcacccagacaacagctcagagaactgggcaatggctgctcatgtgttgagccggggcatacaggatgaagagggacaatgagagggaatgaattctattctagacaccctgagtctgaggagcctatggaaatgtccaggaggcaactaaatgaaacagcctgtggtagacagaataatggccccaaagatgtctacagcctaatcccaggagcctgtgaaaatgttcccttcgcatggtaaagggatgtggcagatatgattaagctaaggatcttgagatggagagtttatccaggattatccaggtgtgcccagtataatcacannnnn

SEQ ID NO: 19840 - DNA, 1227 bp, Homo sapiens
  misc_feature 1, 2, 1222, 1223, 1224, 1225, 1226, 1227: n = A,T,C or G
nnaggtacgaaacacacagggtcctgggcaacacggaggactaacagtaacaccgccacgccggcagcaaagctcattttggtccccgccccgttcctctttctctttttaactccttccctctttgcggattctagaacggaacctttttttaattcttcccagtagaaacgtaggaacaatttcgtgaacgcaatccggagtgcccaacatggcggcggccgtaaggtgcatgggtagagccttgatacatcatcaaaggcatagcctttccaagatggtttatcagacatcactttgttcttgttctgtaaacatccgagtgcccaacagacattttgctgctgctacaaagtctgcaaagaaaacaaaaaaaggtgctaaagaaaaaacaccagatgagaaaaaagatgaaatagaaaaaataaaagcatatccctatatggaaggcgaacctgaggatgatgtctatttaaaacgcttatacccgagacagatatatgaggtggagaaagctgttcacttacttaagaaatttcaaattcttgactttactagtccaaagcaaagtgtttatcttgatttgacactggatatggcactgggaaagaagaaaaacgtggagccatttaccagtgttcttagtttgccatacccatttgcttccgaaatcaataaagttgctgtatttacagagaatgcatcagaggtcaaaatagcggaagaaaatggagctgcatttgcaggaggcactagtctgatacagaagatttgggatgatgaaattgttgcagacttttacgtagctgttccagaaataatgcctgaacttaatcgattaaggaagaaactgaataaaaaatatccaaagctttctcgaaattccattggccgtgacatccccaaaatgcttgaatttttaaaaatgggctgaaattaggtagatgaagaaagggcgaactttctccagaccaaatagcacttggattgtcagtgccagatagctgccaatctgcagcagaaatgaagtgtgggcacagaccgctgaatttgggccgcgcgggggacgaagacgccgccccaaaaagacccggcggagggtcctcaaaagaccgtgctaagaaacaagaagaacacacatgtgggagaatcgtggcgagaaaaaatatgtgtgtatgacaaaggaattgtagactgcgagtgtatatttattattatgagnnnnnn

SEQ ID NO: 19841 - DNA, 493 bp, Homo sapiens
  misc_feature 488, 489, 490, 491, 492, 493: n = A,T,C or G
acccctgtttaacaaggggtaggggccttctgagactgtttcctctacagagtaagggttcgttcagccttttccgtggcctgccaagaactcaactccatgttccctcacttcctgtaattgaccttgtccaggactttctgaccttggagaattcacctttgctctttctgctgcttcgtgcattcttccaccaaatgtctaactgactggctcctttccaaactcaaggctttgccaaatgccaccagctcagggaggcctttcctggccatgacacttgaagttgcaacactcccccgcagtctcccgtgccccagatgtaagttccatgagggcaagccctgtgcttttaccaccatatccccagcatcttgagctgtgcctggcccaagaaatatttgttgaatgaatgaatttaaaggggatattatgaaggcttacacattctcaatggtttacaggttataatgtgcttcgctacacannnnnn

SEQ ID NO: 19842 - DNA, 393 bp, Homo sapiens
cggtggcggccgcccggcaggtacttttttttttctttttcttttttttttttttttagtttttggggtcgtgtctcactcctgttgcgcatgcctgtaatcccagctactcaggaggctgaggcaggataattgcttgaacccgggaggtggaggttgcagtgagccgagatcatgccactgcactccagcctgggcaacagagtgagactttgtctcaaaaaaaaaaaaaaaaaaaaagatctggcggatgaaaataaccagaatgaaaatagctagaaaactcagcaagcaggaagctccctttctcacccttttgttcccttgccgatagaatcagtcactattagaaaaaatgaaagacgctctgtttaaaacaatgatgacagcagt

SEQ ID NO: 19843 - DNA, 484 bp, Homo sapiens
  misc_feature 484: n = A,T,C or G
ttggagctcaccgcggtggcggccgcccgggcaggacgcggggcgagaaatagggggcgcgtgtttggaaatcgatagaaaagataaagggaccgagctgctgtcagcctggcttactgatctgcgtccgtttcaccacggattcagttactaagcatttttttctttttttggtacgcgggctttgcaacgtgagtggcattggctcagtgatttccatgagcatctctaccagaaaacattgcctcgatgaggtgtggtggaagcccggcagccccttctaatcggctaggcttgagaaagcgtgtactaatattttaagacaaacggaagggaagatactgagttttctagataaggaaatacaagatttcaggactgttactagtcctaattctggagaacaatcagaaaagaaaagaaatagagaagtttcagttgcgtgactcatctcttaaagggaagtacctcggccgccaccgcn

SEQ ID NO: 19844 - DNA, 1431 bp, Homo sapiens
  misc_feature 1, 2, 3, 4, 1413, 1431: n = A,T,C or G
nnnnacatgctgacccaccaggaactagcctccgatggggagattgaaactaaactaattaagggtgatatttataaaacaaggggtggtggacaatctgttcagtttactgatattgagactttaaagcaagaatcaccaaatggtagtcgaaaacgaagatcttccacagtagcacctgcccaaccagatggtgcagagtctgaatggaccgatgtagaaacaagggtaggggaaaaattaaatatttgtctgcctactaaaattaggtttgtcatgttttaaaccccacagctctagatttttatgctctttgaaaatgctgaggtataatctcacattgccagtgcaccatgtaggcctattcctagaatatacaagacatccacttcatcaggaactcccttgcaagtgttattcctgaggagaatctcttggaaagaacgtgggaaggtaggggtcaggaggctaagctatggccttagccaccaactctctttgcaaacttatctaaaatgagataagttacctggatgacctaaagacctttctggctcacaacatttgtggcctgtgccagaaataaattacgagtgactggtgttttaacgtaagagtctttgctgaactagaaagcaatattgcatttcacctaggtgtggagcctgctaaataactgtgttttatagactattgagaggagctgatctttttcctcttgtcatttttctctcagtgttctgtggctgtggagatgagagcaggatcccagctgggacctggatatcagcatcacgcacaacccaagcgcaaaaagccatgaactgacagtcccagtactgaaagaacattctcatttgtgtggatgatgtctcgaaagccatgccagaagcagtcttccaggtcatcttgtagaactccagctttgttgaaaatcacggacctcagctacatcatacactgacccagagcaaagctttccctatggttccaaagacaactagtattcaacaaaccttgtatagtgtatgttttgccatatttaatattaatagcagaggaagactccttttttcatcactgtatgaattttttataatgtttttttaaaatatatttcatgtatacttataaactaattcacacaagtgtttgtcttagatgattaaggaagactatatctagatcatgtctgattttttattgtgacttctccagccctggtctgaatttcttaaggttttataaacaaatgctgctatttattaagtgcaagaaggcgctttacatgtttgcgcagattcagactttcgtaataaagatgtaaaagagtgaccaatagtacccacagtaggatgggggtgtgcgttcggtgcagacatattagctatgtgacattcaggagatgccaanaagattttaaatcggaan

SEQ ID NO: 19845 - DNA, 946 bp, Homo sapiens
  misc_feature 1, 2, 3, 946: n = A,T,C or G
nnnacgagagagtgctgcgataacgaaacttcttgcctccgcgtttatctcggctctcttgtgcccttacccacccttctgtcttggaatatcccattccacgggacggttttccccccatggtgaacagagcccatctcacgccatcaggcaatccaaccaagtgcctgctattgccgacctaccgaatctggactaatgtgaagaacgtctgacttcacgcttcccatcagaagtgctgtacataggagtatggtacaagatttgtcttgctcacctcttaccaaatccaagaatggtttctatccagtgaatggcaaattcatctgataggtaagggaataatgggtcaaaatggtagcaaacacttctttcaaatttctactaaaagacttgctgttgtttttcttataaaggggcaatttcatcaacatacatcttttaaaggaatctctagaaatttgagtgactttttggccataatcctgtttgatatatttttggtcagctgctcaaaacaaacattctccttgtaaggttatctatctgaaagatactaattcatttaaagcagctgcaggtgaacaacctaaagatgacatgatttgggagaagaggaaggcagatttactgaactgacaagtgacccaaagcataattaggtttgtgcacatggtagcatggaggttccacacctaccttctacagcgtattaaaataagaatattgtctttgaaacatcttctagcacctttttaataaaacaaaatttcccatcttcaattctatttttttcccaaatctacctttaaaaaattgtctttcaaaatacaccatagacgaggtgggtggatcacttgaggtcaggagttcgagaccagcctgaccacaaggtgaaatctcatctctacaggcgtgagccaccgcgcccggcctcaccccgcgn

SEQ ID NO: 19846 - DNA, 1242 bp, Homo sapiens
  misc_feature 1, 2, 1108, 1146, 1172, 1208, 1232, 1242: n = A,T,C or G
nngcagcttacagcatcttagtttagactgtctttgcttcatcatctgaaggtaaaattttccagatacggcagacggctttcagagtacaataaacagggaatgagaactatttacatggaagtttctttctcatgatgcggtggagaagcctcggccacttggttctgccagatgttcctggggttactgtaaatgggaaggacaggcagagctaaacaaggtaggagaatcgccccccttttttgaatgtttaaagagtttgctgcagtatgctgcattccatgtgtgctgcttacgggagccagggaaactggattccactaattcaattgtaatacttgcgggggaccctggagttttacgtaacattttgatttgagaaaaagaaatggcaaagcttgaatctatgccgcctgtttggggtgaggcaagaaatcgagtttttatgcaaagaatcgattcatttattatattattttttaaaaaccatttgaattctttggagcaatcttattttcttgctgtgaaaaattgttatattgccatagctagttcccaaatagataaagtttacatggatcctattatttgaaaacagacttgcaattaaggattaaaaaaaaattcatggtaaataatcatcggttgaatgtttggccaaacgtatgtgtctatttattaaaaattagggacctacctagctctacaatgctacagctttaattgagtttcaaaagcacattttaaacaacctagcaagaggtagctttctggcaagttttcgatactgtagttcaatgtttacatttcttttcctggcatgtctgagcctttgtttccagcttaaaagtggaaccattatattcaaaagtaaagctgggttaataatgcttactgcaattatctgatctttatgcatttttaatgagaacacacagccagcagaataatttaatgagggcaggctagcttttaaagctgtgttttcactatgccgaaccatatcaactttctcgctgagaagcagcagtgagaaatgatggagaagatttatttttaacacacttggcccaggagaaggaaggattatttgctaagaatcttntgccttttccgtttaattctgccagcatgaggaatgtnttttgtaggcccggaacaggttcaanaatgtgacattttggatgtgcacctgacgagaaaantgcttccacccacccctgaagtcncagacatcan

SEQ ID NO: 19847 - DNA, 1028 bp, Homo sapiens
  misc_feature 1022, 1023, 1024, 1025, 1026, 1027, 1028: n = A,T,C or G
actgccaggcatgctcctgccttgggcagagtgtatatgtgtgagtgcacctgcccttcccacagcctagaacgttcctcctccagacagcacatatggcctgctctctcacttccttaaggtctttattcaaaagtgactttctcagtgaagccctgtctgctcaccctgcgtaaaatttcagctcttctttctatctctcttcccagattttttttctccttcatgttcgttggtgtctaaggtttatcatctatttcgctaatggtcagtagaatgtaacctccacgtaagcaaggagttttgtctgttttgttcatgtctatgtccttagtgcctggagcattccctagtatgcagtaggtgctcaataaatgtcagttggattaatggctgaaagaaaggtcaccgctataaggatggagtcagagaacaaacacagttaattcctggtccactgtttttgcttccactaaattgtatttggtctacggcttctccgcttgccctggaaccctgctcagaacactgctcccttctccttcttcttctccctccggataaattctgccattcttttcagcatcattcacatctcacctattataagaacttgttcttccgcagcctattgctccgtctccaccatccaggagtaccttattgatagcactgagcacagaggaaccccacagaattctggctgggctgtagccaccatgcccacccaagccaagtcatccgaagcctaggatcaggaagaaaggcatcagcatcactgactctcagcgcccgtcatggtgctcacgcacaaagtgatggtggaagtgaactgaaattgacatgataatcaatcgtctcccgaggccatgaagaaaataaacagcatccctaggagtatgtgaagaactatttattagagagaataccatcatcgccacagcattccctttccacatctcattgccagttttcattctgtcaacacctcagtgaatttatgaagaaagaatagaaatagnnnnnnn

SEQ ID NO: 19848 - DNA, 430 bp, Homo sapiens
acgcgggtgctttcatagccgcggacacaacttgggcccacagttaacgaggaggaaggcagagcgtgctgagcagagcaccaaggaagagagctcggctagccgggaaggtccgaatggatttatttggtgaggccaaggaacccactgcctccacggtgttcctccaggaggctcctcccttcactaaggcagcaaggagtgcactggtgaggggaagaattgttgtcatcctttctctacgactccaagagaaactttatactggaggaagaatattctaccactttgggatgcttccaaagaaatgggataccaaaggagtgaacttcaggtcattggaagtggccaagctggaggcgacctatggagacatgaccttcagttcttcctgagatcgataaagcaaaaaaaaaaaaaaaaaaaaagt

SEQ ID NO: 19849 - DNA, 391 bp, Homo sapiens
  misc_feature 1, 2, 3, 4, 5, 6, 391: n = A,T,C or G
nnnnnnaatattttttttttttccggtaataattgaaggctttgagaagcctcagtgcattaggatattgttaatgcgcaacatggagagactttaaaacaaatgctagggattagagtatagatcagatagctggcaaatctataggaagggaaaagtaattttaaacacacagcatttgtttcctgctgctctatcacaatagctaggtttttaaataagtaggctttataccaagccataaaaatgaattgctggggctctttgggactagggaaggcgggaaattttagatattgctgttggcttagtgaaaatgcatgcttacccggtcacctgtggctccagcaggaccaggggcacctacagcaccaggagcaccctagtaccn

SEQ ID NO: 19850 - DNA, 484 bp, Homo sapiens
  misc_feature 483, 484: n = A,T,C or G
acaaagaccaattccttcctaacctggattccactgtccttggtgaaaactactttgatggaacctaccagatgctttatcttttggttaaaggaactatacctgttgaaattcacactgccacagtgatatttgtttctttccaattatctgttgcaacagaagatgacttttatacctctcacaatctggttaaaaatcttgccttgttcctaaagataccaagtgacaaaatccgtatcagcaaaataagagggaagagtctgaggaggaagagatccatgggattcataattgaaatagagattggagaccctcctattcagttcataagcaatggcaccacaggtcagatgcagttatctgaactccaggaaattgctggttctcttggacaagctgtaattttaggaaacatcagtagtttccttggatttaacatttcgtccatgtttattactaatgcccctccccagcccaagnn

SEQ ID NO: 19851 - DNA, 471 bp, Homo sapiens
  misc_feature 1, 2, 3, 468, 469, 470, 471: n = A,T,C or G
nnnggagctccaccgcggtggcggccgaggtacgcggggagagtcactcctgccttcaccatgaagtccagcggcctcttccccttcctggtgctgcttgccctgggaactctggcaccttgggctgtggaaggctctggaaagtgtaagttggagtcactctggtctaatctgggctgcagggtcagaggtggggtctccttgtggtgtgggtgtgtccccttctgtaggctctgatccctcagcttagtttcgggagacctccctgagggtggaatacatgtctggctgggctccaaggtttgtgtggcagtttgagcttctggaaatgcttcctctatgcagccatgctgtcagcccaggtcccactctctctctctctctctctctctctctctctctcatactctgccttcttcttcacctgtctgcgactcttaaaaaaaaaaaaaaaaaagtacctgcccnnnn

SEQ ID NO: 19852 - DNA, 514 bp, Homo sapiens
actcttaatccaagacaaaagaatagctcctttcagagttctcatcatttcttcaccccagccttaatgggtatattccttttccccaggtgtccagagttttccagaattgtcccaaggctcagtccacaccagttcttctccagtgtgctctcctgagaggccaggcacactcaacaattatctagatgagttcccacttctttccaagtgaaggttctgctatcctagcatagtcagaataagttaaattatgtctcttaagaggcactgttccactccttttcaaggtgtgtggcatatttgaaatatgtgacttaaaagtctacagtctcttaccaaaagccttgggccaaatacatgtcaaaattcagaattttccagattttagaaaagtgacccatataccattacattgcataaaaccctgagcaatgtatggggaagcacctgtgaccaaacattagatttttgcagtgaaacatatgaatattttcattcatatatgtatatc

SEQ ID NO: 19853 - DNA, 1333 bp, Homo sapiens
  misc_feature 1, 2, 3, 1333: n = A,T,C or G
nnngattgtcagttttgtctttcacatactatgcacctattgactctgatccctgatattcattgtatgatgaatgaaggatcatagagcatctacgtagtactacgcatgcgtcatcattagtcgattgaatgcaagtagtgcctctattatagatttaaaggaaatctagtgggtttcgactttggccacaacaaacttaaacctctttttttctttaagtccaggaaaagtaagaaccatttggttcatggcccacaataaagtatgcatgttacgtcaccatctgtcattattcaaatattccaaatacaaacatagagcattaacaaaacaggttaaaaacgcttctcaacattttttttttcaataagacaaaaaaggttaatagttacaatggtttacaaataaagtttagtgattgtgcttttaaaaccaaaaaaaaaaaaaaaaggagagagagattaaaaccagtgcattccaaaaccaaaaatcaaacttccttaagtggcacttctgaaagttgaactgacactaccagaagaaatttaggccagttaagacagggatgttcttactcaattggtcattaaaaacatccacttgtttgtaatacgtatttataattactttttgatgattgaaaaatagaacaaggttttactaggtttacttatgacaatgactagacaaccagagatccaactggcttagccctacttatccaaaagtacatttccaataagaatatacttcaatgattgaaatgaagccaaaataaaataccaccagggtttgcaaagagtaaatatttacaatgtttctaccccattcgaattgtttgtggttctgcatttgctatatttttagtttcttccagcaaagggtagtatgaaaaactgattttgaaatcatgttaaaatgaaatatgttttaatttgcattagcagttggctatagaaagattatactttgagagcccttgtgaggttgaatatcaactttctatatttgatcaatatcttgctataaattagcttggcatataagcagtgcaatgccatatctcagcggcaaaatgcaaaagaacagttttgttccctcttgctggctgatgactgaagcaagaagtcaaagcactttgcttgctggaagtaaggtataatggtttgctccaacagcgaggggaataggaaggctctttgtagggttagggatcaaacaacaacaataaaaacccaataaagtttttaaaatgatatcccaataagaggaataaaaacgacaatttgtccactctgagtgcactgacattttatctggcgtcatgtgn

SEQ ID NO: 19854 - DNA, 2321 bp, Homo sapiens
  misc_feature 2320, 2321: n = A,T,C or G
ccgcgctcgagcgtgcttggcgcctgcgctggacgactcggccggtagtggagatgtccggccggtctaagcgggagtctcgcggttccactcgcgggaagcgagagtctgagtcgcggggcagctccggtcgcgtcaagcgggagcgagatcgggagcgggagcctgaggcggcgagctcccggggcagccctgtgcgcgtgaagcgggagttcgagccggcgagcgcgcgcgaggccccggcttctgttgtcccgtttgtgcgggtgaagcgggagcgcgaggtcgatgaggactcggagcctgagcgggaggtgcgagcaaagaatggccgagtggattctgaggaccggaggagccgccactgcccgtacctggacaccattaacaggagtgtgctggactttgactttgagaaactgtgttctatctccctctcacacatcaatgcttatgcctgtctggtgtgtggcaagtactttcaaggccggggtttgaagtctcacgcctacattcacagtgtccagtttagccaccatgttttcctcaacctccacaccctcaagttttactgccttccagacaactatgagatcatcgattcctcattggaggatatcacgtatgtgttgaagcccactttcacaaagcagcaaattgcaaacttggacaagcaagccaaattgtcccgggcatatgatggtaccacttacctgccgggtattgtgggactgaataacataaaggccaatgattatgccaacgctgtccttcaggctctatctaatgttcctcctctccggaactactttctggaagaagacaattataagaacatcaaacgtcctccaggggatatcatgttcttgttggtccagcgttttggagagctgatgagaaagctctggaaccctcgaaatttcaaggcacatgtgtctccccatgagatgcttcaggcagttgtactttgcagtaagaagacttttcagatcaccaaacaaggagatggcgttgactttctgtcttggtttctgaatgctctgcactcagctctggggggcacaaagaagaaaaagaagactattgtgactgatgttttccaggggtccatgaggatcttcactaaaaagcttccccatcctgatctgccagcagaagaaaaagagcagttgctccataatgacgagtaccaggagacaatggtggagtccacttttatgtacctgacgctggaccttcctactgcccccctctacaaggacgagaaggagcagctcatcattccccaagtgccactcttcaacatcctggctaagttcaatggcatcactgagaaggaatataagacttacaaggagaactttctgaagcgcttccagcttaccaagttgcctccatatctaatcttttgtatcaagagattcactaagaacaacttctttgttgagaagaatccaactattgtcaatttccctattacaaatgtggatctgagagaatacttgtctgaagaagtacaagcagtacacaagaataccacctatgacctcattgccaacatcgtgcatgacggcaagccctccgagggctcctaccggatccacgtgcttcatcatgggacaggcaaatggtatgaattacaagacctccaggtgactgacatccttccccagatgatcacactgtcagaggcttacattcagatttggaagaggcgagataatgatgaaaccaaccagcagggggcttgaaggaggcgtctagggctttgctcccaagggctgtggctgatgatggtaaataagaacacagaagctgtagctgaacacaggctggctggtgggcttcctaggccagcccagcttgtatgggttctggctacaccagagcaccaagagcccacttgcctgggatggccccacactgtcactcagctgttctttgatcatttttttctagattgatgctcctttctcccatgcattgagctcccatctagcttcagcagggcagaacccttctccagatgtgtgtaacttatgtcttgagtatctgggagtagttgaagaacagataattccttccaaacatcaagccttgggattcttggagcaagcagaaagccagtaacttcgctctgttagaggtggaggattttcctatggttccccccatttcctgatttgtatttttagatggattaaatagtctcctgtttttaaaccaaaaaaaaaaaaaaaaaaaaaaaaaaaaaaaaaaaaaaaaaagggcggccgctagactagtctagagaaaaaacctcccacacctccccctgaann

SEQ ID NO: 19855 - DNA, 1014 bp, Homo sapiens
  misc_feature 317, 318, 319, 320, 321, 322, 323, 324, 325, 326, 327, 328,329, 330, 331, 332, 333, 334, 335, 336, 337, 338, 339, 340,341, 342, 343, 898, 914: n = A,T,C or G
cggggaccctaaggccgccattgtcctgtccttctcccgcgtaccagacccgacaggaccagtgcatctataacaccacctacctgaatgtccagcgggaaaatgggaccatctccagatacgtgggaggccaagagcatttcgctcacttgctgatcctcagggacaccaagacctacatgcttgcttttgacgtgaacgatgagaagaactgggggctgtctgtctatgctgacaagccagagacgaccaaggagcaactgggagagttctacgaagctctcgactgcttgcgcattcccaagtcagatgtcgtnnnnnnnnnnnnnnnnnnnnnnnnnnnccttggtttatattttctttctatactagattttaaggaaagactgcttgcttctgagaaagaattctcggagttgattctctgctccatttgctcctttctcaacctctttagtcctcgttctctgcagtaagaagctagtgacaactggaatttagctcccagtgggctttcttccgggtggtgcctggacaggctgctcctgctgctaaggcttctggagctgttattgaagatgtcagcttctgccactgtggtctgctttttggagtctgcattggttttgcctcgatctctatcattcttctcattattttcatgaatgaatagtgacttccttctctctggggatcgatgttttttctttagtgacttcatctcctttggcaagtgatatgaagaaggaacatagatatttgttcctttggctaaatatttggaggctagtgacagacaaggccgacgtgactcatgtataccatgatcttcatggtgctctttaacacctttcatgaaagcttctataatagggctcttttctggtggcaccctttngggtttagattctttnggtgaggatagtttcctttcaaactgctctgtcccagtgatagacaatctacttcctccatatttgatgtttgattttggtggtgcggaagtatgtagtc

SEQ ID NO: 19856 - DNA, 687 bp, Homo sapiens
  misc_feature 687: n = A,T,C or G
acgcgggggcactcagggagctcagattttgagacagtagctggccgatgctcccagctgaataaagcccttccttctacaaaaaaagaaaaagaaaaaagaagacaggatatctgaaattaagactgcagatggagtagtttctgaaaatgacagggtccaaggtgtgaccacgggaccaagtggctgaactggaatgaagttaagaagcagtaagaaacatccgataatatggtgatcagttcaacagaatgacatattcaccatgtccccaaggaggagatgactgagatttcaaattctcaagcagcctcaatgcagccagagatttaagagggctatgtgtccagaaggagactctgggcaaacgcagaatggattcagattactcaaattcctgtcagatttcttaacctggtgggctataccaaacccaaaaactttaagcagcctctacttttgcttattttctcctaagcccaaccttggctttcttttgaatctctatgagcggagacatggctccttaagaaaggagacacttcaatcctgttataggctaaactgtgtcccccaaaaatttatgcattgtggccctaacccccagtatttccaaatgcctatatttggagatagagcctttaagttaaatgaggtcattagtgtgggttctaatccaatatgacn

SEQ ID NO: 19857 - DNA, 1421 bp, Homo sapiens
gctccaccgcggtggccgagcggccgcccgggcaggtacgcgggggagaaatacacacttctgagaaactgaaacgacaggggaaaggaggtctcactgagcaccgtcccagcatccggacaccacagcggcccttcgctccacgcagaaaaccacacttctcaaaccttcactcaacacttccttccccaaagccagaagatgcacaaggaggaacatgaggtggctgtgctgggggcaccccccagcaccatccttccaaggtccaccgtgatcaacatccacagcgagacctccgtgcccgaccatgtcgtctggtccctgttcaacaccctcttcttgaactggtgctgtctgggcttcatagcattcgcctactccgtgaagtctagggacaggaagatggttggcgacgtgaccggggcccaggcctatgcctccaccgccaagtgcctgaacatctgggccctgattctgggcatcctcatgaccattggattcatcctgttactggtattcggctctgtgacagtctaccatattatgttacagataatacaggaaaaacggggttactagtagccgcccatagcctgcaacctttgcactccactgtgcaatgctggccctgcacgctggggctgttgcccctgcccccttggtcctgcccctagatacagcagtttatacccacacacctgtctacagtgtcattcaataaagtgcacgtgcttgtgaaacacaaaaaaaacacacacaccgcccaccctctctttcaaatggctatcattgatcataataacacccccacctccttgtcttaatatatttatctctgtaaaactagctcaaccacagaagggacatctagaaacagcaatattgatttggtttggcctgtttgtttttaaggactttccagttgctgaattctgaacatccaatccgagtccttggaattctgcagacttctctggggtggagtggcctcaccggaggcttggttctgttttctctgtggcaattggctatgattcacagatgtgtttccagaacagcccaactgtgggtctcagggaagtaaactgcctcttaggtcatcctgcctgtgacccacagttgggctgttctggaaacacatctgtgaatcatagccaattgccacagagaaaacagaaccaagcctccggtgaggccactccaccccagagaagtctgcagaattccaaggactcggattggatgttcagaattcagcaactggaaagtccttaaaaacaaacaggccaaaccaaatcaatattgctgtttctagatgtcccttctgtggttgagctagttttacagagataaatatattaagacaaggaggtgggggtgttatatgatcaatgatagccatttgaaagagagggaggagt

SEQ ID NO: 19858 - DNA, 2724 bp, Homo sapiens
ctcagcggtgccctcccgcttggatgttccgggaaagtgatgtgggtaggacaggcggggcgagccgcaggtgccagaacacagattgtataaaaggctgggggctggtggggagcaggggaagggaatgtgaccaggtctaggtctggagtttcagcttggacactgagccaagcagacaagcaaagcaagccaggacacaccatcctgccccaggcccagcttctctcctgccttccaacgccatggggagcaatctcagcccccaactctgcctgatgccctttatcttgggcctcttgtctggaggtgtgaccaccactccatggtctttggcccggccccagggatcctgctctctggagggggtagagatcaaaggcggctccttccgacttctccaagagggccagggcactgggagtacgtgtgtccttctggcttctacccgtaccctgtgcagacacgtacctgcagatctacggggtcctggagcaccctgaagactcaagaccacttcgagaacggggaatactggccccggtctccctactacaatgtgagtgatgagatctctttccactgctatgacggttacactctccggggctctgccaatcgcacctgccaagtgaatggccggtggagtgggcagacagcgatctgtgacaacggagcggggtactgctccaacccgggcatccccattggcacaaggaaggtgggcagccagtaccgccttgaagacagcgtcacctaccactgcagccgggggcttaccctgcgtggctcccagcggcgaacgtgtcaggaaggtggctcttggagcgggacggagccttcctgccaagactccttcatgtacgacacccctcaagaggtggccgaagctttcctgtcttccctgacagagaccatagaaggagtcgatgctgaggatgggcacggcccaggggaacaacagaagcggaagatcgtcctggacccttcaggctccatgaacatctacctggtgctagatggatcagacagcattggggccagcaacttcacaggagccaaaaagtgtctagtcaacttaattgagaaggtggaatcctcctatccctgaactcgggggaatggaatctcgctgatcttccaggactagctccctgatcattccagcccctctgaacaacagggccccaggaaaatctccaggtcctattctgtcctccttcccttttacttgaagcagtttcttgactggtggcaagttatggtgtgaagccaagatatggtctagtgacatatgccacataccccaaaatttgggtcaaagtgtctgaagcagacagcagtaatgcagactgggtcacgaagcagctcaatgaaatcaattatgaagaccacaagttgaagtcagggactaacaccaagaaggccctccaggcagtgtacagcatgatgagctggccagatgacgtccctcctgaaggctggaaccgcacccgccatgtcatcatcctcatgactgatggattgcacaacatgggcggggacccaattactgtcattgatgagatccgggacttgctatacattggcaaggatcgcaaaaacccaagggaggattatctggatgtctatgtgtttggggtcgggcctttggtgaaccaagtgaacatcaatgctttggcttccaagaaagacaatgagcaacatgtgttcaaagtcaaggatatggaaaacctggaagatgttttctaccaaatgatcgatgaaagccagtctctgagtctctgtggcatggtttgggaacacaggaagggtaccgattaccacaagcaaccatggcaggccaagatctcagtcattcgcccttcaaagggacacgagagctgtatgggggctgtggtgtctgagtactttgtgctgacagcagcacattgtttcactgtggatgacaaggaacactcaatcaaggtcagcgtaggaggggagaagcgggacctggagatagaagtagtcctatttcaccccaactacaacattaatgggaaaaaagaagcaggaattcctgaattttatgactatgacgttgccctgatcaagctcaagaataagctgaaatatggccagactatcaggcccatttgtctcccctgcaccgagggaacaactcgagctttgaggcttcctccaactaccacttgccagcaacaaaaggaagagctgctccctgcacaggatatcaaagctctgtttgtgtctgaggaggagaaaaagctgactcggaaggaggtctacatcaagaatggggataagaaaggcagctgtgagagagatgctcaatatgccccaggctatgacaaagtcaaggacatctcagaggtggtcacccctcggttcctttgtactggaggagtgagtccctatgctgaccccaatacttgcagaggtgattctggcggccccttgatagttcacaagagaagtcgtttcattcaagttggtgtaatcagctggggagtagtggatgtctgcaaaaaccagaagcggcaaaagcaggtacctgctcacgcccgagactttcacatcaacctctttcaagtgctgccctggctgaaggagaaactccaagatgaggatttgggttttctataaggggtttcctgctggacaggggcgtgggattgaattaaaacagctgcgacaacaaaaaaaaaaaaaaaagtacct

SEQ ID NO: 19859 - DNA, 460 bp, Homo sapiens
ccaccgcggtggcggccgaggtaccttaacttgagttacagggctggtccctctcttttcattttttatcccagtaggtgagaccgtccctgctgtgttcggtggctgtggagttgatggcatctttgctccaggtgacacctgcatgctggccagctgagcggcatagagctgctgcaaaacagggaagacaaacattgatctctttaaatgcagctgaaattgagtttcaaaagaaaaaacttaccatattgttagatttctcagacagccttgtaatttctttttcactatttttaaaaaagggagctaagagaaggcaaataataaaacagaaagaaaaaggacaggtatgggagccatagttctgtttctggtccttctagcaacaactttatgatcctggacaaaggatttgatctctttagaattcaagtttttttttttaattgtacctgcc

SEQ ID NO: 19860 - DNA, 515 bp, Homo sapiens
  misc_feature 1, 2, 3, 4, 514, 515: n = A,T,C or G
nnnnacaaacacctgctaaagacatagcttaataaatatttgttgaatgttgttgaatgaagagcattttcctgctcataaatttctcattacttaacgaatgtagaataaattccttactctggcagactggaatatgtagttacagtttattctagaatttttgcattccccttcttctggttcacttggagaagttcttttccatcctaagtgacccaggtgagtccagtgtcctgctgatttcactgcagggcaggcatgtgatccaggctggccacagtggtcagtgtggacaactgacccttgttcatctgtggagtctaacaaagtagtgcccccttatcctcggtggttatgttccaagatgcccagtggatgcctgaaaccgtggcaggggtctccaagtcagcaaactttttcttaaggggccataaagtaaatagtttagacattgcaggccaagaggcaaaactgagaatattatttagctacttatataaccatttaaaann

SEQ ID NO: 19861 - DNA, 1305 bp, Homo sapiens
  misc_feature 1305: n = A,T,C or G
actatagggagtcgacccacgcgtccgagagtgtctaatcctgcagtcatggcgcaggaagaggaagatgttagagattacaatttgactgaagaacagaaggcgatcaaggccaagtatccgccagtcaataggaagtacgagtatttggatcatacagcagatgtccagttacacgcatggggagatactctggaggaagcatttgagcaatgtgcaatggccatgtttggttacatgacagatactgggacagtggagcccctccaaacagtagaagtagaaacccaaggagatgacttacagtctcttctgtttcactttttggatgaatggctttataagttcagtgctgatgaattcttcataccccgggaagtgaaagtacttagcattgatcaaagaaatttcaaattacgatcaattgggtggggagaagaattttcattgtccaagcaccctcagggaacagaagtcaaagcaataacatattcagcaatgcaggtctataatgaagagaacccggaagtttttgtgatcattgacatttaagacaccaaaaaataaaagactcctacgaagaactgtttttgttttcctcttccttttgagaagacactatgaattaaattctacagcttttttttgatatatggaaattgtagaacagaaatattttagttaaagtgtgactttcagaaagggaaaatcagggcacagccttggtctgtgttccccaaatattcacactttaaagaattcttcaaccccccaagggacagttatggtccttgtgattctctgctgtggcagtaggtgtgcctcatgcccttccagtgcaatgcaagccctccagcctcaccccagagaggatcactgatgtcagcagcagcctgaggctgaatccaggttgaaaagaagaataacttgaaaaaatatatttccacacacagaatgtgtttttcttccaagtgggttaagacatatatttggttactttatattataggacaaagggagtcttcgctctgtagcccaaagggttgaaagcgcagtggtgtgaagctacggatcatagaaagctccacttccggggttcaagcaattttcatacctcaggctcccgaatgagggggatttaggcaccgcaaacatgccggttacttatgatactcaaagaacacggttaaactgttacgatgaggtatgaatctgactttgtgaacgcactgacttcagttatcggataagataaatcctgcggccagaaattcaatcaaagaagagagataatgaagacagtcn

SEQ ID NO: 19862 - DNA, 590 bp, Homo sapiens
actatctatttggccttggaaagttactctctaagtcagggcttcttttcttcaactttggtgtgagactccgctggagagccggttagaaaaacacaagtctcgggccccaccccgcagagcccctcattctctagttctgggttggggcccaggagtctgcttttctagcaagcgcccagatgtcactgatgcttacagctctcagaccacagttggagcagtgatttttaaaagtcttttcatttgtaaagagttgttctccatgctccaaatgactgtgacgactgagaaaatgcatgtatgtaaagtctgcagctggtgacattgtacacactcagcagatggcctttggtgttactgttattttatttttactaattattttttacacctacaaatcaggatctgctacaatcgcttgatatttgaaaattgggcctaacccactatgccactcttctgtcatgaaataacaatcttctatttaaactagtaaacttaatagtttaaaatacttggtagtttaatagtttaagtagagccactgaaagatggctcacacctttcagctcagtttttttgtacct

SEQ ID NO: 19863 - DNA, 579 bp, Homo sapiens
  misc_feature 1, 2, 579: n = A,T,C or G
nngcagtgagaactgctgagtgtgagcatgtctggtggaacatcctggtgcttgtgtcatgtgtataatcatgtgcatgtgtgtgtgagtggatgtggatgtgtggacagccaggaaggccaaggagagggagagcatacagactaatgcctagaacggtgtagcagagccaggacagtgtgtccctggcttaccccaggggaaagagggggacactgggccagaaacttaagctcctggactctgctgaatctctgtgcattcaaggggagatatgtgcatgaagtcattgcagtgtgacgcctaggtactcatcagatcacccacgtcatctaatgcactcccatcacattccagactcagtgctgccatcagctccctaggagctctccctccaggaagggaatgtgtccaccgtcagacactcagacccagcatgtggggacagaggctgatggcctgtctggccattcctctcagttcctctcctcactagcttgtgtccttgtgcaagtcacttaccctctctgaggttcagttccctcctctttgaagtgggtttaataatagtacctgccn

SEQ ID NO: 19864 - DNA, 10438 bp, Homo sapiens
  misc_feature 1, 10431, 10432, 10433, 10434, 10435, 10436, 10437, 10438: n = A,T,C or G
ncatatgtatctctgaaaagacaaacccccgaggtgtgaatgtgatttaaaggccgtaagtctgtaacttggtcagggagttagaggaaggggaccctggataacctcgtgatttcattcagaggtgaggaaaatggttaggttgaagagaatatactgtctcttaaagaaagggacattgaaacgtggcacaattaagaaaaccagagtagtgttttcatgataatctatactcacaacaaatactctgataggtgaatactgctgaacagtttatgtagtgacttttgttgtaggggtgggtttagagttctttttatgtaggtttttaaatgattttattttgaactgaatctccatttgcacagcacagcagacacacaagaactacagcgcattaaaaacagcatgtgtgctggcgggggcctggctttctcattagaaaaaaatatgtttgacaggttatgaagggtaaaacaaaaataattgcaagaactaccgtgcccttctgaccccatgggggccttccctatcccatgattccattttggggagtagaggtagggagggggcagcagttacaagtgctttgagctgtcaactcacattttactttgacctggttgggcaagaaaggagagacaaacttccctagtcaggtatctaggaagaagcctcagctactgtttctgtttaaggtctctggggtagctcttggagccaacagagaatagatggggtaggaatagggatcctggccctatccctttggattttgagttatacctgggtataggaagcagcttcttcgcaatgcctgtgggatctgaggatgacagaaaaacctaagctgtggggtggggcaaatgctataaagtaccagtaggttctggtcatcaatgtggtcctccctcctctctacattattaacccttaaggtgaagcaatggagaagaaaattaattaacctgaactgtcttggacagaaccctttcctctccctctccactagctccaaggcttattaagtacctaatgtcaacaacatggccccattccccttgcccagatggacccttcccacccctgtctatacccagagagcaggaggcaggactgattagctccactggatcccagatgcttgaggttctcattctttgagggtcactttcgaaagctgttttctgggataaacaaagtacgccttcgcagtttcctgcctgatccttcctccagcaagtaggtcacatcaatggcattttttccagggattttttcaaggagattgagcaagatctggttgagtcgttcccgttggttatgccgtcgttcctcaggggtacaggttgactggggttcttgactactttcctctgtttttttttcaccctcactgacgttagcagtggccccttcccgttctggctcctccaggctgggtatctcattggctgcttgctcttgactggctagaacctcttcaatcaagggtagagcatcatcctcctggcccaagtcttttaggggtggctttgagcgctcagacttccaggatgatcgtcctccattcctcttgtagttgtctgggacgtaatgaggcgagaaatcttttttgggagtgagcttcttggggaagtgatcaaaagcatagggtttggtgcagacaggatagcggttccggtggatcttgtaaaacaggtgtgctgacttgtcaagccgataatcacagatgtacacatcttgctcctttactcctttgggtctccctttacaatacgtataaaggtccaacacacagcaggtccccactacagcctccaagggaatgatctcatagagtggcacccgaaatagttcattatgatagaaccgacgggatggagagtggtgtgtttcgtggggacggaaataatggtgaccaaaggcaaaccgttcctctttttcattcttccaaagcttctcaatgcgaaagatgtcaagtttatctcggttaatgtgagataacagtcgataggactgacggaccgggtggccatcaggggtgcgccgactatccctcatcagatacacacagtcaccctgacgaagcagcaagtcatctcggagcaaacagatgaagtagacacagccaggttgggcatagtggggccgagggatcatgggaacctccctgtccacaggccttgggtcacactgctcacaaaggtagtgctccacatctgagttcactcccatacaatcacagtgctgccataccatgcacttgtcacactggatcatgagaccttcatcgttgtagaggccacagatacagcgaataacatcgtcgtccttctcatgcccattctccttttcagagactgaggtctcactgctgtctgcctcacttgctgtctctcccacaatctcatcaatctgggctgatgcctcatgccgggcattgtaataggcctttcgtagacgacaaacatctctcccaactggggatttacgcccatagtacttctcagcattccgaaagactttgagcatgtcagcatcaaaagcttccactgtcttatagtaaccagtgaggatctgcttctctatggtgataagatctaggggatcagagatcttctcataataatcagcattctttttctttgggggaaggttcaaaagtggagctgccagtgcttgccgggaagaatctttataagagatgataccatcacaaatttctttgaagatctgggctaggcgggctgcccgagccacttcaatattttcctctgcagctgccaaccgtcttgttcgaacagatcgagctgtctgcagggcagagaactgggtcatgaagacatcagacttgatattcccatcatctcggcagatcccattccaacgggtatataatgatgctgagtgaatattatcactggtgtgctttacttcctcctgtttttgacgaatcttctcccagtttcggaccaagaatacatgatgctttaacacaaagttcctttcacgattggacattggcttcatctgtaattggggggtcaatctagttggggtgttgatattttcactgggttcctcagagagatggcctctccttttcttcagcttgtgcttagactttctcttctcttttgaccgtccagattttttgtgtgtggccatgggctggctgtttttgctgctggtgagtccattcacacgctgactcttgcctccgatgattcctcgacatttctcaaagccacacttacaaagttgctgtttttccacattgaaggaatgaaagttataatcataagtgagttcagtcccagctggcatgtctttaagagcatagagtccaatccggtatactccattaacagaccatttctgcatttcacaatttgggtcacagctatggttgatgaatcgggcctcatttcccatgcggtaactgtcaatcaccatcccactatccaggttcaggcagtagtggtcactgtgattatgatactgctcaatcatcctgttcctgaactcctgttcactgacgacctcccctaggtattcaatgatgaactgcccagcttttaggggctctttggttctgattccccaacctttttcctcagctcgaaatcgttctagacattgcacccattcatgcctctgtatcctctggttacagcattgctcgccacatgggcaagtgttgggggaacactcagcaaagatcattctattgaggcagtcatcaacacagcccttcctggtgtcatcatctggcttcttacagttacaggtggtagcttcgtaaccagaaaggggtttgacatcaacgtagacatttgaacgaattttcttatatagtgggacatctggctttttgtatagctgattgtgtttccactgccaaaggatatcataaggaagctggaagtcaattctcttttgtcttagatactttcctgaaacaaaaaacacaacatgaatgggcgctggaaataatccatattcatgctctcctggagtatactccagcttctctttctttaattggatcaatcgactctttgggtctgtagttttgtaaacgtcagaatacagccctgctttctgatacttcttctttgggggacgtgggggcttcttttcccttgggatgagagaaagcacaggctgcaaggtactttcaggttcagaaggtttagctggggtttcagaaggactgggaatctcaactggtgcttcattaaagcttttattattctcttgctcttcttcctctggtaatggcttctgcttttttctggtctgttcttccaatagccaaccttttctcttcaacccctttttatgttctgggttcagatttacactctgaacaacagcctcaattacatctgtaactgtgtcaggactgaggtgcagtgctgctccttcctcgtctctgttcaattctgggttgacaaactgagcagcctggaatgcttgcattgatacgacagcctgaaggggacatttccgaggtcgacctggcctacgtttcacaaagttattccctgtcctggcctgcctttgaagttttttggcttttaagattttattgacatggtctaggtttttctttgtggccaagattttgtcgtaattgcacattttccgagcttggcgttgcatagcttccactacacttctcttgatatgatggggggaacagctgcttgtcaacttttcagataggagtgagatgctattattgcaagagtcacttgcgactgcaggcactaaaaggctgtctggttttcccagggttcggtccttgctgtggctacggcctggactggaagaaggtggtgcagaggcagttgcaatcacagcatcaatacttttctccatgggctcttggtcctcattttgtaccatccgctgcagcagactatccacagagtcatccccagaagcaactaatcttggacttcgagagggaactccgtttactgttgaagaagtactctcagatgaagaccttttccgggtagggctacaatttgtgctctctgatggccgctgggagggtttatcagaggttggctgggagcctgccaaagtctgtactgccctttcgttagaaggcagtgactcctttctgtgaagccgatttagtgaagtgtcctgtgcagaaaagagtccagggctgtcagttaatttcttccggccactggagttagggtttgaaactctgcagctgcctattgcacttgtgaaaaggtttgtatgttcatcactgctggctggctcagagttgggagtgaatcctccaagggataagcttggagaactttctgaacagtcaatctgtaaaggtgtctgcaatcccaaggccaatggactagattctgaaggctctcggtggacccactgttcctctctgtttattaagctttttgaaggagagagatgagggcaggacatgtgacaacggtgcttttccttatgcttatatcgctctccaacagcatcctttccaaatctatagcgcttcaaagattccaggacagatcgggaagagccagtgtccatagaaacctggggttgttcagaagaacggtgttctctgtgtttgtgacggtgcctgtgtttgtgctcaaccatccaaccataggccatctcaggaggaacactggggtaggtactcatggaaaggaggggagtcctgctggttgtaagaaaggcctcctgtcgaagtagcttatgctttttcttatggtatttggcaggattgagaagtaaatgaccagcatgcatataggaaggaggtggaagtggcgtggtgaaagaaggagatggaggaggtggataaagagtgggaggataccttccatagtaacctaatcctatgggagcagctgtaaggggtgaaggagagtaaggcataccataagatggatagaatccagtactagaaagaggaaaactaaggctgtgcataaaaggcatttcagccattgcctccctcatcttagggggtctccctcttttcttttttaagtcaggttttcgaatgtagtgcaaagggtctaaggggaaagaaggatgtgtatagaaactattaaagttgattcgaaagatagttggcagaagatctcgggggataaaatgatgacttcgatgagtgatccgaatttcacttaggcgacttattagttcctccagctctgcaataaagtctggatcctgtctatttcgaagctggggatatttctttttccgttttcgtttctgccttttcatcttgtcatagctgaggtaatcatgattcctgcgcttacatttgtgtttatgtttttctttaagactgcttagcactgtagaggtttcagggggaatcagagaaacatgctcaaaagaatgcctcctctttttttgcccacaaaatttctctgccctgtctgatgtgctgttattatctgttccaattccactatcactgggaatggtctcatcactatgagactcactgattggggaaggagtagcttcttttagagatgtgagttcactcaagtgcgaaggagaatttggcaacaaagtaggaggagataaccgcctcctcccctttgaggccttcttcattgcaagagtctgaatcatactgccctgtctggagtgtaaatgcaaatatggcactgaactgggttcaacaaaacctgcatcactacttacagggctctgacctccactagtcccagaagactgagagcaaataggtgatggaagaatctcagaactactagcagatgaaggcagtaatgggggaagaatctgtcctaatgctgacccagctgcctgttgagctgtttgctcaagaacagcaaggctagtaggactaccagaaagaataccatttaagacagtttttggtttgcgacctcttctctttcctatataaatggttcctttcttgctgacatttatctgttggcccaatttagagccaaatgtggcagcaagacttgataccgtattatggagtttggattgcactttccctttattacttgattctacagaacttgaaagaatctgattcaacagtttctttctctttaaagtcttcattttatttattttgcggataattgttttcattaattgtccattgtttctcttggtaatttttttatctggttccatctcaaggtcactcatactacagacacttggcctatgactgtcatctaggtcatctggatcctgaagttgatcctcgctctcaaagaaatcactgctacttctatggttgtcactttcagattctagcttgcttggactttcagtggcaacaaatggagccactgacagtacaggtggcttcatcttgactggtgacctcatttgcctcttaggcctgcctctcttttttggaaaaggagacacagacagaccttgtttgaaggaagggatttcaatttctggctgtaaaattgggggttcttgttcttccttagactgtaaagaaaacactttagaagcagggatttttaaagtccttttaggtggcccttccagttgaggcatctccttagatttaggccttcctcttttgggcttataaatatcagacaaaaggtcactagagacacacatactggaggatagtttgtgagtagcaaaagacttatgagatggtttttcactatcagctaagagagcaagagatggagctgtggatttgctcaactttggcaatcggcgtttaaggaagtcatgatctacaaatgaagggggtccaatgtttttcataaacttggctggctcagaattactatttgatagtgagctacatgaaacgtttttaaaaagctctgatctttctaattctagcccttttggagaccggcatgtgcttcttgccaccactttagtccaccgaggttttcttccttttcttttttttaatggtttggactgcaaactagtacttaggctttcagcaacttggcagtgtttgtctgatgcagatactgcacccagttttaaaaaaggcttattactaaataaactagtgaagttaacaactgaaggagtaatagtatgaatgctggattcagaagtcaaacttggcttttttccaagggaagagcttattcttggaatatctatatgggtagtttttgaatcatttacctctttatcaatccctttacattcaatacttatactatgaccaactgacctatgaccaacgttcaagtgggtactttcagaagtaaactggttctttccaacagattcagaaatttcttcgattagttctgtagtagaacttaaaagtaatggattaggagccaactgtgaagaagtttcagggggacttctggttaaaggattaacagatacagtaggtgatggggaagggagattgctttctcctactgcactgaatggggatttagcggtagatacatcagaagcacctcccattttaaagtccggagaagtgcaatatacaggaggctgcttttcatgctttgaggtttcataagatcccttttcactggatgagaaactgtcttgctgaatgcatgttccttcattaaacatttctttctccaaattaatgatttcttttcgtactgagaacttttccaatatgctttctttattctgccgtacaacattcttttcaaaagttttgctggtggcactatctttcagggattcagaaagttcctgactttcctgattattgatgtttgtactacaagaagccttaagcggttcctgagtggggagcagtgcttcggctttaaggtttatggcatctttactgatcagacctgccaaaggacaactcattagtttctttccaatgtccttattaaccaatcccattgctgaacttgctacaatcttctttgcacagtccttggccactaggccaacagtagaacccaatttctttcccaaatctttattaaccagtccaaccacagtgccaagtcctaacttcttgccagactctttatgcactaaacctggaacaataccaattcctagcttctttcctgaatctttgcttagcagtcctactgtagtgatagttcctggctttttgcctaagtttttattaatgaataccgctgtagtgccagttcccagttttttcacagagtccttattgaccaatcctactgctgcattaaacactggctttttcccaggatctttagttaccaatccaactgctgtgctgatggttggcttttttattaagtccttatgtattattccagctacagagccaacacctgctttcctgatcaaatccttgctaaccaatcctgctgtagtgccagttcctaacttcttcggttttgtcttggaagacttggaaggaggacaggtagcaatcagctgtgccaacttttctgttacactagttcctccattaagtaatgctctgtcctttaaatcaggatcccggctaccaagaagagtagatggcgttgcattaatataatctgccatttctgagtgtactggagacagcttcttagacaaaggattgttttctccctgtgaatgaagacggatgacttcttcagactggcattcaatggctgcaacatcatctgctttcttgtacaactttgaagggtctcgttttgaaggacagtgttcattcttttcatccgtcatctttccacttttaagtgctttccttgggtgcttaatagttgtttttatggcaggtcgacatacatagttctccaagttctttggaggttttttagttctcttagcctggaggccaattttcaattttaaatttccctctgaaaagtttgtttctttcactgaaaactgttgctgtgcatcagtcaaaccatcatctttcccagcttcgatgtttctttctcgattccgtttgcgaaggtcctcttcctcctttgtgtttttttctagctctacttctctcttactgaccaatgtgccagtactgatggcagaaggactctttcttgaaaaaccttcggaatcagaacccaatcctaacatagcagtatttctagggtccatcacaagcgtatgttattgccaaggaatcttatgaaaattttacagaactgtgttccataaaaaacaaggatctccaaaactcgaaaccagcatctttctcgtgtcggaggccgaggccgaggccgagagcgatgagagtgcagggaagtggggaagagggggtggccgccaggctcctccgcttccctgggtccacggcggatccctcccgcttgtcaggaggcggccagcgggtaagctgactggcggaaatgcgagagaggagaagggaaaggtggaaggctaaagggggcaaactgaggggaggcgggtcccgcaaccgacactgggatcgtctcccctcgcaaagcgaannnnnnnn

SEQ ID NO: 19865 - DNA, 572 bp, Homo sapiens
  misc_feature 571, 572: n = A,T,C or G
acatgcaagttgcatgattataatgagtgatcctgggatttaagttgattatgacaggaacagaaggaacttggagattagggacaatgaaaaggtggtagtgaaaggagtgttggagttaagttactagatgtctggaagacagactgtggtggtcagataatgagatagattatggaggggttacagtttttggtaataacgagagagatctaaggtatgactgagagtgaatggatgagaatagcagagaacaaggtcagtggaaaactactcttcaaagaacctatagtcagggtgttgaaagattaaaaattgctaagaattaaatcaggagtagtgctgcgggaaatgaaatgagcagtgaactaaacttactgagaaatgagaggggatgacccaggggtttgtagattttgtagatgatagcaatgaagagaagagatattatttgatggtacggaactcaaagctgagagttttaagggaagataggagacgtgtctagaagtagtaatgaggagcaagaacatcatctaccccatctccaggaccagttaataggaggacnn

SEQ ID NO: 19866 - DNA, 1524 bp, Homo sapiens
  misc_feature 1, 2, 1505, 1506, 1507, 1508, 1509, 1510, 1511, 1512, 1513,1514, 1515, 1516, 1517, 1518, 1519, 1520, 1521, 1522, 1523,1524: n = A,T,C or G
nnagtcacccacgcgtccggcgctgcgctgctggggggcgcgggcgaggatggcggcggagaacgaggccagccaggagagcgccctgggcgcctactcgccagtggactacatgagcatcaccagcttcccgcggctgcccgaggacgagccggcgcccgcggccccgctgaggggccgcaaggacgaggacgcctttctgggagaccccgacaccgacccggactccttcctgaagtctgcacggctgcagcggctgccatcgtcgtcgtcggagatgggcagccaagacgggtcgccgctacgcgagacgcgcaaagacccgttctccgccgcagcggccgagtgctcctgccgccaggatgggctcacggtcatcgtcacggcctgtctcaccttcgctaccggtgtcaccgtggcgctggtcatgcagatctacttcggggacccccagatcttccagcagggtgccgtggtgaccgatgctgcccgctgcacttcactgggcatcgaggtgctcagtaaacagggatcttctgtggacgcagcggtggcagcagccttgtgtttgggtatcgtggctccacacagttctggcctgggcggtgggggcgtgatgctggtacatgacatccgacgaaatgagagccacctaattgatttccgggagtccgcaccaggggccctcagggaagagaccctgcaaagatcctgggagaccaaggtggggaccctggtgagaagagagagttcaggggagtctctcttcattgcccttctgctaacccaagcattaatttgctaagtatttaccaggggagtgggaaaaagagttgagcaggattctcttaggctatgagagagtcaggcagcccccaagataaaataatgaactagaaaatctggaaccttacttctctgggaatcttacctatctggcacgtgggaaggaagaaaaaaggctactgagtaccctgaaatgtcacgaagttgatgcaatgaaactcacacatctcactctgagccagttgactataactttcccagcccttgatatattggaagattagaggggaattgccagaagtaaaccaactgtctgctgaaagaaaaagaagatatcgaataacttggaaaaatgggtacttagtgcggtggcaaaagccaaacacacccctgagtcttcagagctcagagtaatggtggggtgaaactgaataggttaaatgaaggtcctttgtccaccgttttaaaaggtagggttgcctgggcacagtggctcacacctgtaatcccaacactctgggaagccaaggcaggaggattgcttgaggccaggagtttgagaccagcctgagtgacatagtgagactttgtctctacaaaaaatgctttgaaattagccaggcacagtagcatgcaccaaggatcgcttgacttgagcccaggagttggaggccacagtgagctatgaccatgccactgtactccagcctgggtaacannnnnnnnnnnnnnnnnnnn

SEQ ID NO: 19867 - DNA, 741 bp, Homo sapiens
  misc_feature 1, 2, 3, 16: n = A,T,C or G
nnncagaccttcaccnttccccagagtagcccaccctccctggggcccaactgaagtggaagggtggggcactgtgtctcctagaggccctgctttctccctatggtaaggccttaaactacattgaacacaagtcccacactagcaaggctgtactcatgcccacagagcatgccttgactcatggccaaagcactacttctttcccatctggctctcttactttttgtgtccataatttaataaaaattggaggtaaaaaatatttccacaggacacataccagactcactgaagggtacttgacagacatatggtaaatgaataagacaaaggctctgatggcttctcacagccctgtggatcaaactcagattcttttctagaaccccaaggccctgtcagtctcactagcctctctccagacacaccagcctttttctacctttccaacatcccaagttccttttctcttacaggactacatacactctctcttctgccagaaaccatgttctaccagctaatttccactcaacttttaagtctcagctgatatgttacttccaaagagaggcctccactgaaccccaagcctggggttcacagcacctgtctccataactacataataatctctctgatgtttaggctgggcatggtggctcacgcctgtaatgccagcactttgggaggccaaggcgggtggatcacttgaggtcaggagcttgagaccagtct

SEQ ID NO: 19868 - DNA, 445 bp, Homo sapiens
  misc_feature 1, 2, 3, 4, 440, 441, 442, 443, 444, 445: n = A,T,C or G
nnnnacctggtgacccttgctggtgctttcatgttttgtgccgaggcaattagactttgtgctgaatttgtttgtgctgccacctcagggaaggggtggaatgtgcagcgtggtttccatttgacattgttttccctgagagatgggagggctgaacgttacctcttgacaagtcttagtggacagaggggcccggatacccaagcgccttagttcttagggctgggtattagttcattttcacactgctgataaagacatactcgatactgggaagaaaaagaggtttaattggactcccacatggctggggaggtctcagaatcactgcaggaggtaaaaggcacttcttacatggcggcagcaagagaaaatgagaaagatgcaaaagcagaaacccctgataaagccaacagatattgtgagacttattcagtccnnnnnn

SEQ ID NO: 19869 - DNA, 744 bp, Homo sapiens
acctaccctttactttttccccaagaccatctcagggtggagcattctgtctaagagaagaaagataaggaggctcccacccacctctcccaagagcagacattaaacatctttgtgctttgaagagagtgaattttggatagtcttgtgattctcagactaacttccagaattatactttaaccccttccagatatggtccgcctttggcattgtgtgtacctgtgatggggcgtgtggtttccggttgtctcacctttaattgtcaacctccagtgttgactctagaaatatgaggaaagcttttcagtttttaaaattgccatttaaatttagtctattaaaaacaaacctagaggtcttggtgcagttgatttcagagtttattaatttagtggtcccaaaagtattacatcttttatattctggaagaaaagaactgtgaacaaattagaaccccggaacactctgacgtccatggacgcattccagaaaagtggcaagagatgagtctttcctcctccaggaagcattttggtagaatttccatagagcattgtctgtgagtgactgatcccaacatgtatgttactaagccccaaaacgaacttcaaactgggtgtggtggcacgtgcctttagtcccagctacccgggaggctgcggcaagaggattgcttgagcccaggagttcgagtccaacctgggcaaaagagtgagaccccatctctaaaaccaaaaaggt

SEQ ID NO: 19870 - DNA, 270 bp, Homo sapiens
ccgggcaggtactgtggaggtcccaggagtgctggtgatgggcacaaagttccgatgggtgaaaccattgacatagagactgcctctgtccaggaggtaggggcccagctcgatgatgccatgggtcagtttgctcagctcccagtatagctgctctctgtccagtccagggtttagagggtcaaggcggtgagtgcagatggtgtccacgccggtggctgccccacgtttttcaggcctgagcaaggtcagtctgcagccagagtacct

SEQ ID NO: 19871 - DNA, 710 bp, Homo sapiens
  misc_feature 1, 2, 3, 4, 5, 6, 7, 8, 9, 10, 11, 710: n = A,T,C or G
nnnnnnnnnnnactccacctccggcctcaattttttccttactaatccagcactgtcttaatgggggactttatcgatgccttaaaggaacccccgccactgcgccttgccacctattctgttttgaacttcattttcctaacaacatcctgaattactgagcttttgtatcacttcatgttaaagttttcattcttatgtaccaaagtactaatttgaatttgtaatgagtctgatggtatatttcaattttttgctttgagggactggctgctacattgcagaatatcttatatccctgactgctttccactaaatgtcagtggtgaccccaatccaattattatgacaactgaacatgcttatgcatccctcatgcctttattttttattttgggaaatctttcagcttcagtttttgctgatatttatgtgattctttgttctgcaattcaaatttctgggagccaaacagtctccttggttcagattactgttttttgactagagcttctcacttcagattctgtcataagattatggcttaacctatggttgtcctttgatttggtgccatatgaaataaaacattattttctatggctatgtattaagaattttgtgcaattctgtttttcttagaaggctgagggtgtgttgtcagacaccatgactgatgtgacaggtgtattttattatgcggccgccan

SEQ ID NO: 19872 - DNA, 3421 bp, Homo sapiens
  misc_feature 1, 2, 3, 4, 5, 3401, 3402, 3403, 3404, 3405, 3406, 3407,3408, 3409, 3410, 3411, 3412, 3413, 3414, 3415, 3416, 3417,3418, 3419, 3420, 3421: n = A,T,C or G
nnnnncaggtacgcgggggagtttcacgcgcgtatgctttgcccgccatggccgcagtcaaggagcctttggagttccatgccaagcggccttggcgccccgaggaggcagtagaagatccggacgaggaggatgaggataatactagtgaagccgagaatgggttctccctggaggaagtgttacggctcggaggcaccaagcaagattaccttatgctggctactttggatgagaatgaggaagtgatagatggaggcaaaaaaggagcaatcgatgaccttcagcaaggtgaattggaagcatttattcaaaatcttaatttggcgaagtatacaaaagcttccttaattgaagaagatgaaccagctgaaaaagaaaattccagcaaaaaagaagtaaaaatacctaaaataaataataaaaatacagcagaaagtcaaaggacatcagttaataaggtgaaaaataagaataggccagaaccacattctgatgagaatggcagtaccacaccgaaagtaaagaaagataaacagaacatctttgaattttttgagagacagactttgttacttaggcctggaggcaaatggtatgatctggagtacagcaatgaatattctttgaaaccccagcctcaggatgttgtatctaagtacaaaacccttgctcagaagctgtatcagcatgaaatcaacttattcaaaagtaagacgaatagtcaaaagggagcctcttctacctggatgaaggcaattgtgtcatcggggacactaggtgacaggatggcagccatgattcttcttattcaggatgatgccgttcacacacttcagtttgtagaaactcttgtgaaccttgttaaaaagaagggcagcaaacagcagtgccttatggccttggatactttcaaagagttgcttatcacagaccttttgccagacaatcggaagctgaggattttcagccagcgtccttttgacaaactggaacagttgtccagtggcaacaaggactcaagagatagaagactgatattatggtattttgaacaccagctgaaacacttagtggctgaatttgtgcaggtcttagaaactttaagtcatgatacattagtaaccactaaaactcgagcccttaccgtggctcatgagctgctttgtaacaagcctgaggaagaaaaggctcttcttgtgcaagtggtaaataaactgggagatcctcagaacagaattgccacaaaagcatcccatctgttagagacattactttgtaaacatcccaatatgaaaggagttgtgtctggtgaagtagaaaggctactcttccgctcaaatatcagctccaaagctcaatattatgcaatttgctttttaaatcaaatggctctgtcccatgaagaaagtgaattggctaacaaattaataactgtttacttttgcttttttcggacttgtgtcaaaaaaaaagatgttgaatcaaaaatgcttagcgcccttttaacaggtgtgaatagggcatacccttattcccagactggtgatgacaaagtaagggagcagattgacacactgtttaaagtgttgcatattgtgaattttaataccagtgtccaggctttaatgttgcttttccaagtaatgaattctcagcagacaatatcggatcgatattacacagcattatacaggaagatgttggatccagggttgatgacgtgttccaagcaagctatgtttcttaaccttgtctacaaatctctgaaagctgacattgtgttgcgccgggtgaaggcttttgtgaagaggttacttcaagttacttgtcaacagatgccaccatttatatgtggagctttatatcttgtgtctgagatccttaaagcaaaaccaggtttaagaagccaactagatgatcatccggagtctgatgatgaagaaaattttattgatgcaaatgatgatgaagacatggaaaaattcactgatgcagacaaagaaacagagatagtgaaaaaacttgagacagaggaaacagttcctgaaactgatgtagaaaccaaaaaaccagaggttgcttcctgggtgcactttgataatttgaaaggtgggaaacagttaaataaatacgatccattcagtagaaaccctctgttctgtggagctgaaaatacaagtctttgggaactcaaaaagttatctgtgcattttcatccctccgtggccctttttgcaaagaccatccttcagggaaactatattcagtattcaggggacccactgcaggatttcactctaatgagatttttggatcgatttgtataccgaaatccaaagccccataaaggcaaagaaaacacagatagtgttgtgatgcagccgaaaagaaaacattttattaaggatattcgtcatcttcctgtgaacagtaaggagttccttgcaaaagaagaaagccaaataccagtggatgaagtgtttttccacaggtattataaaaaagttgctgttaaagagaaacaaaaacgggatgcagatgaagaaagtatagaagacgtggatgatgaagaatttgaagagctgattgacacatttgaagatgataactgtttcagctctggaaaggatgatatggattttgctggaaacgtgaaaaagagaacaaaaggagctaaggataacacattagatgaagattcagaaggtagtgatgatgaacttggtaacctggatgacgatgaagtttctttaggaagtatggatgatgaagaatttgctgaagttgatgaagatggaggaacattcatggatgtgttagatgatgaaagtgagagcgttccagaacttgaagtccactccaaagtcagtactaagaaaagcaagagaaaaggtacagatgattttgactttgctggctcatttcaagggccaagaaaaaagaaaagaaacttaaatgattccagcctatttgtatctgctgaagagtttggccatctattggatgaaaatatgggatccaagtttgataacattggcatgaatgccatggctaacaaagataatgcaagtctcaaacagcttagatgggaggctgaacgtgatgactggctacacaacagagatgcaaaaagtatcatcaagaaaaagaaacattttaaaaagaagaggattaaaaccactcaaaaaactaaaaaacaaaggaaatgagttattaatgtaaattatagattaaaattctacttacatctaatttttgctgttcaaccatgttttttgatctagctctctgattccatacattccagacttctcagtggatttgtaataaactataaataaaaatagctctcatttataaagtcatgtggaaacattgttaaaattaaatgtattgannnnnnnnnnnnnnnnnnnnn

SEQ ID NO: 19873 - DNA, 875 bp, Homo sapiens
  misc_feature 1, 2, 872, 873, 874, 875: n = A,T,C or G
nncactatagggctgattggagctccccgcggtggcggccgccgggcaggaccatgggcaaataagagcagcctcttggcattctgggtagggagcctgagccaaactctaaagctgtctttataaagggaggtcatgtgatggccagaaattgcctttgcttcatggtgcacttggtggggagtcaggtgtggggtgctgggtttcacatcatcccattttcttttctgccttcagacctgcaatgcttcttttgcaacccgagaccgtctgcgctcccacctggcctgtcatgaagacaaggtgccctgccaggtgtgtgggaagtacttgcgggcagcatacatggcagaccacctgaagaagcacagcgaggggcccagcaacttctgcagtatctgtaaccgaggtaatctgcccactgtttcctcacttccagaggatgggcctgagcgtgtatgggaggcctaggggtgtctcaatcacactgccttcagactccactctttgcacagccaccccctacttcccactgaatgataaacaccttcatcacccaactagctatttgctacctcttccttcccaagaagcttggggtgcttagaatgggaagtcccaggagaccagcaggtcaaaacagaaggagagaggttcttcccaagcttgggcccataactctcacctgctactcagatggcaggatggatgcattttgcagacaccactgaaccactgaggttggtgggggagttagtaggtcccaaagtgagagaaaaagaggttggtccggcttgagagcttttgctggttgattcactggcatatgaaattcagcagccagggaaggaggttgagtctgaaggcagtcnnnn

SEQ ID NO: 19874 - DNA, 1193 bp, Homo sapiens
  misc_feature 1, 2, 3, 4: n = A,T,C or G
nnnngtagtatgactgacttgttttatactgtgtatcaatcttataattttgatacacatataggtgaagacacaaagaatatgtaaatccgaaaagacgatgatgattctcaccgtagtcttttattactgcgcggctgtgttctcttgtgaccacgactatatgagagcattacctgtctcggctacttcatttggtcacttttctgtgctcttcttgctttttgagcccagtaagcgtgtttttggacactttatattggttgcattttatcttcatctgtgacagttgctgccttgctctcctgtatcctctttcggctttttctggtggggtctccatgccattctgctgtttcggatactccttgtgtcctggcccggtactccaggactgcacttgtggcacattctgggattctattcgggtgtgtcaactccaacctgcatgtgtcatataatctatgaccttatgtaatggagtggtcaacttgtgttcataggctggcaatgagcatgtttataatatagtggatgacaagtacttttcgaagtaacctggacatgttgcaggtcaggggaatggaagtattgctatggactgaactgtgcccccaaaattcatatgttgaagccctgagctctgacatgattgtatctgaagtcctaaagccaggaatgaggaaggctgtgaatgtccattgttccatacaagaatgactcttctcttggctatttagagatcatgagggatactgccccagtttccacaggccagatggtctccaacaaaagccacgggggagtcacccctgcctggcagatctatcgggtcaggaccaccgcccagggggtcctggagaggacagtataggaccaaagaggattattcatgagcctaagatctcatgaaacgtgccttgctaagttttagacttgcataggaccatcatccccctgctcccccatccttttttattttttattgatagggtttcactctgtcatccaggctggagtgcagtacgatcacaactcactgtagcctcgaactcccatgctcaagccaccatgcccaactaattatttttattatttttgtagaaataaggtctccctatgttgcccaggctggtctcgaactcctggactcaagcaatcctcccacctcagcctcccaaagtgccggacgc

SEQ ID NO: 19875 - DNA, 4539 bp, Homo sapiens
  misc_feature 1, 4511, 4512, 4513, 4514, 4515, 4516, 4517, 4518, 4519,4520, 4521, 4522, 4523, 4524, 4525, 4526, 4527, 4528, 4529,4530, 4531, 4532, 4533, 4534, 4535, 4536, 4537, 4538, 4539: n = A,T,C or G
ncttccggaggaaggtgggagtcaatcattttgacaagtctcctgaaaggaacagctagcaggaactgaaacctttttccatttggtctcgtggcaaaggcagagattgctccagcagctccacacaaaatgatgtgctcacgggtgccctctgaacagtcttctggtacctctctcttgcctaaagacggtgccccattttcttgggattccttggatgaggatggattggatgactccttgctggagctgtcagagggagaagaagatgatggtgatgtaaattacacagaggaagagattgatgcactgttgaaggaagatgacccatcatatgagcagtcttctggggaagatgatggtgggcatgttgagaagggagaaagagggagtcaaattctacttgatactccccgagagaaaaattcatcgtacagcctgggaccagtagctgagactcctgacctcttcaaactacctcagctaagtacatcaagtggtcatggaccagctcatactaaaccattaaacagacgctctgtactagaaaagaatcttataaaagtaactgttgcaccatttaatccaacagtttgtgatgctctgcttgataaggacgagactgattcgtccaaagatactgaaaaactctcttcccttggagaagagatgagagaagatggtcttagcccaaatgaaagcaaactttgtactgaatctgaagggatcagccccaataactctgcctggaatgggccccagctctcttcttcaaacaataactttcaacagactgtctctgataaaaatatgcctgacagtgagaaccctacgtctgtattctctcggatctcagaccattcagagactcctaatatggagttatcctgcagaaatggtggttcacacaagtcaagttgtgaaatgagatctctggttgtttccacctcatcaaacaaacaggatgttcttaacaaggattctgggaagatgaaaggccatgagagaagactaggcaaagtcattcctgttctacaaactaagaccaggactaatgttccgacgttttcacagtcaaatctagaacagcagaagcagctttatctcaggagtctcattgctcatatagaagacccagaggacactaaccaaggatgaatccctagaagtggatatcctaggtatctcgggggagctttgtgccttgatggatcaagttcatcatatgcagcactcaaaatggcagcatccttcggacctcaccacgcgaaactacgcccgccgacagaaacatctgcaaagatacagtctgactcagtgggttgacaggaacatgcgaagccaccatcggttccagcgtctcccagacttctcgtacagttaatttgtgtcatcccatcagcaatgaaggtccctatccagggtcctgcttggagcagcatttcatgttcttttgctgttttgtgctttgccgattttggattttatttttcacaaaatttttatttaaaaaactcgtcaccttttggaaatgcccattgccgacttgaatttttttgtatgaagtccctcctgattttgtgtgtgtgtgtctgtgtttaagcaagcgttcggttggtatagtttttttttgtttttttaatttaaattgaaggtagctgcctcctgaaagccagcattaagccagaacacccaggttcaagcaaaagacccacctctctgcagaggcaaagtctactttctggtacctcaaagaaatcattgttcaatcttccataaggaagagattctttaccaggctgtgagccagtgttagataacttgtgaatggatataagttacttttaacaacccctcttacttttttatttgaatcctctgaatacctgtcagtattttaaagttggcaatccaggacattataagtaggatggagcaggagaagaatcctattgaaaggacaaattaaaatagtaaatcctctcctctcccttctgtaggtactagctgccttgatttttttttgtgggtgggggggattttttcattccttattgaacttattttgcacaatagtgtttacaaatcttatacatcttactttgacagaagacttataataccttgtggtcttgagactggttgtctcctttgcctttcttcaaggattttcctttttctttttaccccccagtgaccactctgctctttaggattctagtggcagtattcttgtaacctgttagacgtggatatacctcttcaggatggcctccttgctgtctttattgaagagctgcccacccagagtcttgactctagggcaggctagtgctattgtggtgtcagttgatatttagtttcatttgctgaaccccaaatttgagtgttagttagggagcctccattctgtgggagagtgtggaaaggcactcttttttctccatattagttaacaagaggtgtctttaggccctggatgttaccatctcatttggtcaagcccctgatacctagtttcacatggatgctaacgtggatgtaatatagttgtgacagcctatgcacaaaagcattacctgatcttaaggtttggtattctaaccaaagttgacagactgtgcgtctgtcttaatggatgtcttaggagttggttattctctctttttttttgagacggagtttcgctgttgttgcccaggctggagtgcaatggcgtatctccactcaccacaacctccgcctcctgggttcaagggattctcctgtcttagcctcctgagtagctgtgattacaggcatgcgccaccatgcctggctaatttcatattttttagtagagacaggatttctccatgttggtcaggctggtcttgaactcctgacctcaggtgatctgcccacctcggcctcctaaagtgctgggattacaggcatgagccactgcacctggccggttattctctctttacagatagctatagacatcattttaggaagtgttgcagtctggcatttgtgctattgttcattctctgtgaaggctgttcatagttgctatagcctgtgtttagttttgtgatttcatcaatcccatctttctgtgtgagtaatgcattctaaacatcctaccccactttagaaacggacgtggggaacgcttggtcatttaagccaacaataaatttaggtgaatgtccctaagtgtttactgtttttatccagtcaaggatttgcttttccttgaacatttgttttaaattctggggccaaaatgcaaaggagaagttctattcaaaggcagtagttgaaatctattattttagttagcctacttggcatttactacatcggtcacttctccaggctgccctaaattaggttgatggagtgagacatgccaaacatccacctttgggaccatagcatagttaaaattaaatgtagttggaatagctagcattgcagctacagtagggaactgtagtctagttccctacagaaaacccaaggagtgaagggacaggattttgcctaggcaaaaatctaagactcgtgccctcctggtacatggggttttaagactgaatgtgtaataggagcactgcctttgccaaatcaaatgagtgacaggttaactagaaaatgtgacaatcacatttcctcttagctcaaataattctgtttttccaaagctttagcagcttaattaaatctgttggactgggggaggagagagctgttctctagtggttaacatggtattctttaagaagaaaaaacaaagccaaagaaaactcattatctggcatgttcgccttaaagatggtactgggtagaatctggagttttcatctcttttcaaagctgcatatctctcatatttggtattggcctctaagtctaatattgcagttggaattcttgctgtattattttttaagcaagtgttaggtgcatttaactgctttcttcatccatgacgacattcccaccatgggggtcttgacaaagcagagtaaaaatatgctgtttacattgtttacttacaagtaaggagcctgaaataacctgtagtttcgaatgcaggccctgatttactggcgttgtcagtttcaattatgaaactgaagtttggtgcctcctctttatcatgttttttcccttgtagcagttgtgtttaatgtcattaaaaagaaataaaagttctttgtcagtgaaaaaaaaaagaaacaaaagaaaaagacagaaagaagaaaaagacagacaacaaaaacaagaaagacacaaacaacaaaggagaggacgaagaaaaaaaacataaacgggagaacaacaagggagaaacaagagaaaagaaaaaggcgagaacgagaagcaaagaaacaaagaagcaacaacagcgaagcacagggaagagaaaagaccagacgagatcagaggaagacagaagacaaaacaaagaaacaaagaagaacaggacagaaaagagagaaggaagacgaaagacnnnnnnnnnnnnnnnnnnnnnnnnnnnnn

SEQ ID NO: 19876 - DNA, 880 bp, Homo sapiens
  misc_feature 1, 2, 3, 4, 5, 6, 880: n = A,T,C or G
nnnnnncttctaaatcaaccctcccccctttcacccccccaataatgtggaaagaatttgttcccacccgttaaattaaaggtttttatccgttgttccctaggttccccccttaacaaagggttatttaaaagaactattcttccaacaacagttatgaatataaaaaggactataataagtaacccatagctatacccacaaaatgaacattaaaaatgcagcgacttgtatggtaaaaatacatagaaatttgcctatacttctttaaacaagtgcctttataaaagtataaaatttataaaaggtgctattttcatgaattttgtgttttcctgatacttcagccagaccaacatgcaaacgttacaaatagagcaactgaacactggccatcaattacctttgaatttaaacagtacattccagcgcagtctgggccccaaagcagtttcacccttacctaacttacctaactcttaatatagcctaaactcactgaaaaataagctaacttcatttcaccttttgtagcatacacgtagactcagagtatatactgaaatataatttgaaagctgatcattaaaaaaatcaagaacctcaatattaaaatattaactctgagtatcttaaaattgcatagaaaatgtaggtcatggtttattaaagttttacttaaataatcagataaatagggctggcgaggtggctcatgcctataatcccagcagtttgggaggctgaggcaggcggatcacctgaggtcaggagttcgaaaccagcctggccaacatggcgaaaccccgtctctgctaaaaatacaaaaattagctgggcgtggtggtgggcacctgtaatcccagctactcaggaagcn

SEQ ID NO: 19877 - DNA, 2756 bp, Homo sapiens
ctctggaagctagaggaaccagacctcatcagtccaacatcaaagacaccatcggaacagcagcgcccgcagcacccaccccgcaccggcgactccaccatgccgccgaagttcgaccccaacgagatcaaagtcgtatacctgaggtgcaccggaggtgaagtcggtgccacttctgcccttggccccccaagatcggccccctgggtctgtctccaaaaaaagttggtgatgacattgccaaggcaacggggtgactggaagggcctgaggattacagtgaaactgaccattcagaacagacaggcccagattgaggtggtgccttctgccctctgcccctgatcatcaaagccctgcaaggaaccaccaagagacagaaagaaacagaaaaacattaaacacagtgggaatatcacttttgatgagattgtcaacattgctcgacagatgcggcaccgatccttagccagagaactctctggaaccattaaagagatcctggggactgcccagtcagtgggctgtaatgttgatggccgccatcctcatgacatcatcgatgacatcaacagtggtgctgtggaatgcccagccagttaagcacaaaggaaaacatttcaataaaggatcatttgtgcttaactggctgggcattccacagcaccactgttggatgtcatcgatgatgtcatgaggatgcggcccattcaacattacaggcccactggactgggcagtccccaggatctctttaatggttcccagagagttctctggctaaggatcggtgccgcatctgtcgagcaatgttgacaatctcatcaaaagtgatattcccactgtgtttaaatgtttttctgtttctttctgtctcttggtggttccttgagggctttgatgatcagggcagaggcagaaggcaccacctcaatctgggcctgtctgttctgaatggtcagtttcactgtaatcctcaggcccttccagtcacccgttgccttggcaatgtcatcaccaactttttttggagacagacccagggggccgatcttgggggccagggcagaagtggcaccgacttcacctccggtgcacctcaggtatacctagggcgtgcgggctcccaagccgccacaggtggtccagtcctccctccccacctacacgtgaagaagctaaggcccagaaaggctgaggcttggccggggcggcgcaacaccgggaaggtctctgggaggcagcggctttaagagccccatacggggaaagctttgcacgcgcggcagggccgagggatgctccatcccgcagccccggccacaaccagagcacgcaccgactttgatctcgttggggtcgaacttcggcggcatggtggaggcggctggtgtcggatgaacccggattcgggacgaccgaaggaagttgcaccttggcctcctccgagccgccgaagttcgaccccaacgagatcaaagtcgtatacctgaggtgcaccggaggtgaagtcggtgccacttctgccctggcccccaagatcggccccctgggtctgtctccaaaaaaagttggtgatgacattgccaaggcaacgggtgactggaagggcctgaggattacagtgaaactgaccattcagaacagacaggcccagattgaggtggtgccttctgcctctgcccctgatcatcaaagccctcaagggaaccaccaagagacagaaagaaacagaaacagaaaaacattaaacacagtgggaatatcacttttgatgagattgtcaacattgctcgacagatgcgggcaccgatccttagccagagaactctctggaaccattaaagagatcctgggggactgcccagtccagtcggggctgtaatgtttgatggccgccatcctcatgacatcatcgatgacatcaacagtggtgctgtggaatgcccagccagttaagcacaaaggaaaacatttcaataaaggatcatttgacaacctgggtggaacacaaaacaaaaaaaaaaaaacaaacaaacaaaaacacaccaaagcaccacacacaaccacgtgcaccacagcagcagaacagcacaccaaacaccgtgggcggggcgccagcccacacgaaaccactaaacacccggccgggcggcggggacacccaagaatagacgaacatcgccccagcgtcaccacgagaccccgcgccacacgcggggtgccccccatacaacacccgcgccgggggcaccgcgcgagttcatcaccccagggcggcccgggagacggcggacaaacggcggccgcagtaatccccgccgcgcggggtgacacacaacagagcagcaaacacaaccaacaaacccaaacaacctacaatacgacgaagacacggcccaccaacacgcgagaccaacaacgcagcgcagaagcgcgaggaaacgagcgacgcgcagtagtgaaacagcaccgcgacgcgaacacaacgaagaaccggcacccagccgccacccccggggcgagacgggcgcgaggggccgagagacgaccaccaggccagcgacaggacgcgaacgcccaccgcaccccgggccgcaagcgccaacgcccgcagcgcgccaccgacaccgaaaagacaggcctccgccagacccccacgccacaacgcacgcagagcggggagacagggaacccgaaaccaagccgaacaggagcacgccgcgacgcacaccacgcaccgacaccagcggcta

SEQ ID NO: 19878 - DNA, 1002 bp, Homo sapiens
  misc_feature 1, 784, 785, 786, 787, 788, 789, 790, 791, 792, 793, 794,795, 796, 797, 798, 799, 800, 801, 802, 803, 804, 805, 806,807, 808, 809, 810, 811, 812, 813, 814: n = A,T,C or G
ncagctgtggtctgaaagtaccatttctgcatttattttagcccatggaataactgtgctgagaaaccacagagtcaatcagattcaaaatgttaaaatccttcctgcttggagttttccgtcttcacatcaaagcatttcatgcccgtcagcaactttttaatgcatttgctcctcgtttgcacaatttccatttaaagactttccttggctgacttctctgatgaggtttcctgcttgccaggagagcacgctaatgcagaaattacaaagggggcttcacgtcccttttccggaggacctgatatttcagataatttccagcttcagttttggagaaacgactgttctttgcaccaggggaaaataaactgattttcagtgtaagcaacctttctgcaagtagaatggggactgttgggaatggagacgaagacttcacttcatgttattcatttccttaccaggaacagggttcacggcttatgtggatgatctcattttgtcctcacagcatcctcctcacagagggtgggtgctattattagcaccattttaaagaggaggaatctgagtcccagaggccaagtagttgggccaaagttgtagggctaccaagcagaaaaccagctccagcatgctaaaccactttccagcacaaggctgaacttttcccttctcaagtatttgcagttcgtgctactgagcctactccttggacagcgtccctcagctgcttttgcttgcaatcgttctcatacccgactacacacatccccgcgtnnnnnnnnnnnnnnnnnnnnnnnnnnnnnnncggagtctcactctgtcgcccaggttggagtgcagtggcgcaatctcagctcactacaagctccgcctcctgggttcacgccattctcctgccttcagcttcgggagtagctgcactacaggcggccgccaccacgcctggctaattttttgtattttttagtagagacggggtttcactacccgcgt

SEQ ID NO: 19879 - DNA, 331 bp, Homo sapiens
acttttttttttttttttttggttaggttaacagaaacaatggggttatttccggtagtggcaacagcacgaactagttttcttgtggactaatggcccgagagttcctgcgatttgtggattatttcccttagatgcaatcgaccatttcgttccaataagaattaatgctaccacggggcttacaaagaacccctcaagtcttccaaatctgcccatgacatcaacctctgctgcgtaatcggacctgcacccaacccaggtttttagtcactcaagcgcgctgtgctacagacccagggaaaagcactgaagctctgcggacgcgtgg

SEQ ID NO: 19880 - DNA, 831 bp, Homo sapiens
  misc_feature 1, 30, 31, 47, 68, 72, 77: n = A,T,C or G
nattaaatgctttaagcaaatgacaacatnntagcacctaccccttncactttttccggcattagaanaatnaatancctcggtctgtggcacgaaaaattttaattgaaaattaatgcttgttaacttttttcatataatatttattattattagaagaacttacaatgtgttcaggtagtgtttatacactggacttgtgtaattacttgtgtaataaccatgaacaaaatgcaaggtttaacctttggttctgcccatgaagcatgtaatctttcttacacattaaaatcactgaatgtgttctcctttttggtttcattttgttcttgtgagagtatgaggatttcaaaatgttaaagatgaaaagtggcgtctagtttctgacagtttgtacagttggatgcattacatttttagatttgaagttttggttatgttagtgttatgagtgatctttgtggtggttttcttcccctggaaacctgttgctcgtggcgctatgcccacggtgcccgagttcttgtcctgtgtccagatatgcagacaaatgaagggtgaagaagaagaagaggagctttatttagtgttagaacagctcagaaggagacccacagtgagcagctcccctgtgtcggcgggcaggtcgtccctcaagtgttcagctctcagcagagaaaaggccctggagagggtgactcctctcagctctcagcagagaagcagccctggagaaggtagcttctgttcgcaggcagattgtccagaggtcctgctgctctcagacggggccctggagaggatagcttctatccataggcaggttgttct

SEQ ID NO: 19881 - DNA, 2469 bp, Homo sapiens
  misc_feature 1, 2, 3, 4, 5, 6, 7, 8, 2467, 2468, 2469: n = A,T,C or G
nnnnnnnnccgcccgggcttggcaccgggccaggcaagatggcggccatggagaccgagacggcgccgctgaccctagagtcgctgcccaccgatcccctgctcctcatcttatcctttttggactatcgggatctaatcaactgttgttatgtcagtcgaagacttagccagctatcaagtcatgatccgctgtggagaagacattgcaaaaaatactggctgatatctgaggaagagaaaacacagaagaatcagtgttggaaatctctcttcatagatacttactctgatgtaggaagatacattgaccattatgctgctattaaaaaggcctgggatgatctcaagaaatatttggagcccaggtgtcctcggatggttttatctctgaaagagggtgctcgagaggaagacctcgatgctgtggaagcgcagattggctgcaagcttcctgacgattatcgatgttcataccgaattcacaatggacagaagttagtggttcctgggttattgggaagcatggcactgtctaatcactatcgttctgaagatttgttagacgtcgatacagctgccggaggattccagcagagacagggactgaaatactgtctccctttaactttttgcatacatactggtttgagtcagtacatagcagtggaagctgcagagggccgaaacaaaaatgaagttttctaccaatgtccagaccaaatggctcgaaatccagctgctattgacatgtttattataggtgctacttttactgactggtttacctcttatgtcaaaaatgttgtatcaggtggcttccccatcatcagagaccaaattttcagatatgttcacgatccagaatgtgtagcaacaactggggatattactgtgtcagtttccacatcgtttctgccagaacttagctctgtacatccaccccactatttcttcacataccgaatcaggattgaaatgtcaaaagatgcacttcctgagaaggcctgtcagttggacagtcgctattggagaataacaaatgctaagggtgacgtggaagaagttcaaggacctggagtagttggtgaatttccaatcatcagcccaggtcgggtatatgaatacacaagctgtaccacattctctacaacatcaggatacatggaaggatattataccttccattttctttactttaaagacaagatctttaatgttgccattccccgattccatatggcatgtccaacattcagggtgtctatagcccgattggaaatgggtcctgatgaatatgaagagatggaagaagaggaggaggaggaagaggaggaagacgaggatgatgattcagcagatatggatgaatcagatgaagatgatgaagaggagagacggaggagagtctttgatgttcccattcgcagacgccgctgctcacgccttttttagcaagccttctgctgatggaagcactaggatgattctaggctgttaaatagatttctcaataatgtaaataactaaattgttctctgcatatagcaggaaaactagcatgaaatattgtttcaggccctgggttctatgtgacactacattaggaattggattgtttgggtttgctttgtgtttttgaggtagaggaagaaatgggaatcttttttttctcttccaggagtcagtggaagaatagttctctagctaaggaacggacatacctttgttttaaaatattttatacttacaaaaatctagaaatggagagggaactgttttgaataaggatttaaaatacctgcacaaggatagagagaaactatgtgactcattctgtgaaaagacttcttgcagttgtgagttatttagaaatgatcaaaatttgtaattaggctaatccatttagtgattcctaatattttgtactcacagagaactaattgactaaacaacttgaacgctagtggtttgtccttagacaatctgtctttgaatttaaagtctttatcgctaagaccttgactttaaatttttcatcactacaaccttgaatttaatttcaggtcttcaacatgatgaccttggatttaatttaaagtcttcaacactatgcgctttatcatattattcacagatgcatttttgaaatgtagtatgtaaaagtatgtaacgtgctgtttattaacaaaagattgttcacaacatctcatgtagtttaaatttgtaaatactgcttctgttttgtttctcctttatacacttgactgtctttgtgataagtgacatgaattttatgttaggattaagtatgttttcctgaaacttggattttttttgtaattatataattgagagttaagaatgaaatccttcaagtgttaaaaactcacattttaaaagcaaattttggttccaattctgtattttgtataattgcttattttccataaactaatattagtcannn

SEQ ID NO: 19882 - DNA, 547 bp, Homo sapiens
  misc_feature 1, 2, 3, 4, 5, 6, 7, 8, 9, 10, 547: n = A,T,C or G
nnnnnnnnnnactttttttttttttttttttttttttaaagatccagactaagacacatcaacaagaaatttccaaataccaggtcaagaatacttcacatgtttctggagggaaagaaaacagttcatatacagtgaatcaggaattacaattgcatcagacttatcaacagcatcgggaagataatgtgaaaataccttcaaaactctcgagggacacaagaagatgctgcctggccacaggagcgagactgctggcctccaatcagtcttctgggcaggcctctgatgcaattacagggctaaggaaccacggtaaccaatgtgccattggctgtgctaaaacccagtggccccaggaagaatcctgttgacactggcttggaacatgaggcttaaggttgaagttgagcaggaccctgtggagaggctaaagcaactccatccttggattcccaccaccatgttgacttctgattgaccccagttcctggaaggcttctaaggtttctcttatctattgttccttatgtaagagaaagtaccn

SEQ ID NO: 19883 - DNA, 921 bp, Homo sapiens
  misc_feature 1, 2, 3, 4, 5, 6, 7, 8, 9, 10, 11, 12, 13, 14, 15, 16, 17,18, 19, 20, 21, 22, 23, 24, 25, 26, 27, 28, 29, 30: n = A,T,C or G
nnnnnnnnnnnnnnnnnnnnnnnnnnnnnntttttttttggcatataatccagtttattaaatacagatgatgggccagacatggtgatagagaaatacagattaagaaaccagatcaaatcctttttaaggaattatctagtggaaaatatctcaactctcttctttacactactattcattatcttacacttcaaatcttcacctttccattttgacagtcgctcttctacttcagtctcctgaagacatctctccaacagaagttacataaaaatactaatcttcaaggggctttctaaaatattttcatcacgtcattaaaatcttctttcactaggcaatggttctgtctctatgggggctggcaggcagggcaaatgaattcctaccaataaggcgggcctagttggttcatgtcaattccaaagcaagaggatggttgaagaagggtattgaatgagtagataacaaatatttggagagagatttggaggaacccttctactgtgagagttacctgaatctcggtgtccatgatggtctagggggcttccgaggtgatcgggcagtgtcagtcttcagctgctaaaccgagaagatctgggaaggagtcagtcagagagccttgggccagagttccaggggctctgggagtggctgccaggtgagttgaacagtccgattttcagtggggtcctacacagatgggaggcggcttaggaggaatcccgggctctgggcattccttggcccggtggccagatttcccacacttgtagcaagctcctgggagaggaggttctggaggaatgcctggctgctgcggttcaggcgtttggaagttcttgtgtgtccccgcgtaccctggggtttgtctcacagtggaggcaagcaattgcaatttttttctattattgt

SEQ ID NO: 19884 - DNA, 898 bp, Homo sapiens
  misc_feature 1, 2, 870, 871, 872, 873, 874, 875, 876, 877, 878, 879, 880,881, 882, 883, 884, 885, 886, 887, 888, 889, 890, 891, 892,893, 894, 895, 896, 897, 898: n = A,T,C or G
nnactaagtcttctaaatctggtgtgtattttacacttgcagcacatctcaaatgaaatagcaacatttcacatgcacaagactcacatatcttctgatggctatcttgtcgaatagcacaattctaggaagttcaaaagggggaacaattgcttctcaaattgatgaaggtagagaagaatggtatcagagaaactgattaagcagggacctgggaatctgagttgagttccggggcatgtttgttccctagcaccatgacctacatggcagtgtctcttctcatactattttaagagtccctggtaagtaggttctgtgttcatattcctaacagtgagccccctatgcccctgtcctatggcgttaaagaaatctttatatgttgaatgaataaatgaaagaagaatttaaaaaatagttatctacagcttggtagaccctgtgttggtatttgcatatagtctctaatacttatattgtgacaaactttcaaggagctactaacatcaccattttataagagagaaatgtgaaatacagggtggttaggggatttcccaaggttacagacttagaaggaaggaagggaggccgggctcacacctgtaatgccagcactttgggaggccaaggtgggtagatctcttgaggtcaggagttcaagaccagcctggccaacatggtggatccctgtctctactaaaaatacaaaattagctgggcatgatggtgggtgcctgtaatcccagttacttcggaggctgaggcaggagaatcacttgaacctgggaggcggagattgcactgagctaagattgtgccactgcactcctgcccagaggacaaagtgagcctccatctcaaaannnnnnnnnnnnnnnnnnnnnnnnnnnnn

SEQ ID NO: 19885 - DNA, 447 bp, Homo sapiens
  misc_feature 445, 446, 447: n = A,T,C or G
acgcgggaggccaagctggactgcataaagattggtatggccttagctcttagccaaacaccttcctgacaccatgagggccagcagcttcttgatcgtggtggtgttcctcatcgctgggatgctggttctagaggcagctgtcacgggagttcctgttaaaggtcaagaccctgtcaaaggccgtgctccattcaatggacaagatcgagcggccgcgggcaggtacttcatgagacaaaatggaaaaaggagaattaaattaaaatgcacaactaatatttatctactacagacataatatttctcagttgtgaactaattactatgcttggaaaatgctagcatcctcataaatattttggttctattgggatacaaaatctgatttcgcaaactttgcaaaggcacattttggctgggcacagtggctcaggcctgtaannn

SEQ ID NO: 19886 - DNA, 579 bp, Homo sapiens
  misc_feature 1, 2, 3, 4, 5, 6, 7, 8, 9, 10: n = A,T,C or G
nnnnnnnnnnccgcccgggcagcgactctgtggcatttatcttcactctgatgagggctcagacttgataacgcccgtggtgccccatccctataggagctggtgagattgcagcctgctgcctcccctccatcagccacagctattggatttcccacccagaatctttaggtaaatgaggtaagtcctgatttttaaaacttcttttgaatctggaatccaaacacctgagtggaaagagaagcctgctttaaactggacagatgaaactagaacagactcttggagacggctggcaggaagtgaagctcaccttacctgggcttacctcactgggtcaaatcagaattttattttggagggcaggttggctactttggatattatctgtgaatttcctgcattgtctggacttctaatctctgtgaatttaaaagccccctcgtttccctatgcctgggtggcaaaaccattcccctgggttgaattcttctggaacaaataggcagctagagataggtggctctgatatagctcagagaagaagtggttggctaagtagctgttagggctcagagt

SEQ ID NO: 19887 - DNA, 335 bp, Homo sapiens
ggaggtaagttataaaatggcggaggcgaagcttctagaagtttggaggggcacccggagggcgcttggcccaccgtgaggaattgtcttagaagaaagaaggcaagccaccattttacccacgtaaatatatgaatatatttctgacattgaggtgttccagaagatgataaagaaatgatagcagctccagaaataccaactgattttaatctactacaggagtcagaaacacatttttcttctgacacagattttgaagatatcgaaggaaaaaaccaaaagcaaggacagaaaaaaaaaaaaaaaaaagtcctgcccgggcggccgccacc

SEQ ID NO: 19888 - DNA, 3873 bp, Homo sapiens
  misc_feature 1, 2, 3, 4, 5, 6, 7, 8, 9, 10, 11, 12, 13, 14, 15, 16, 17,18, 19, 20, 21, 22, 23, 24, 25, 26, 3873: n = A,T,C or G
nnnnnnnnnnnnnnnnnnnnnnnnnnggtttgaaaattaaagtttattaggatatattaatgtatgatattatagtattactcatcacatgtaagctttacatctgaagcaattcatgcttactgggagggaagtttgagtacttacttagcttttcctgctattcctaggtaaaggccctcctgtggtcattctgaacagaagagtgagcttactgcaaaccacaggctggacagtagagggtgcatatcctcactgagtggagctcagaaaagaattaggattctgcacacatttattccagactcagttcccactgttggtttttatattgagattattttaaaatcttttcgaaatataatttatttgctctttaagtatgggtggggtgttaagctaaatttaaattgttctgtgaggcacaggcattatacttaagcatgaacctaatgaagccctgaacataccaacaggtagcagtccagttaagctctttataaggccacatgcctaagctccaaagggaatcttaattttttattggggagacatttcgttactacatttagtggactttgttagattataacaagcacaatagatttgtgatgaacattttttatttttttccccctgaaaagctttatgatacaacagctctgttttcctgagagatggcctttagggtagatgagcctcagtataagcccagagcatttctctaaggctaccaaggcttgaggaattctgtacttactcccactgtcaccctgctcttcatcccccagctcaggtaaggggaacgcagggaaggctgaagagtgctagctgcggaagcactgaattagggtgtcctcagccctccattcccaactggaagccagtagttcacttagtgtatatagcagagcctcaaaagcacaagcattttgagtgtcgtttttctgtgccctccagcgatgagatggcaaatggtgggaaagtgtcagctgtgtgaaaagatagtgattgtttggttttgctaggacagttttaatgttgataaaaattgtttatacatttctgagaagtacagaccagaagaactgaattcttgttctgtcttcttcataggtagttgtgtgatgctgaagttaagacagattgctgatgtagaacccgattttcctttttgtctgatgtgtgtgtataatttcaaatttgcttcactaggatgctattttactaatgcgttcctgtgaatcctttccttggaatcttagggggcctcttgtagaggcatttgtctgttagcaaatgtcacttagaggcaagtgactttgagatccctgtgaccaccaccctcctgcttatgtgggatgaagctgtgtttctgtcctctgagttggattagactattacatgctggtgaagtaagctggcctggaaattgtctaccattaggaatgctgtttctgtgagaaatggtgctctttttccaaaaagaatatagccacatttggaatatattcactttcataaattggacacttcctgcagtgactcctgccctagctgcctcacggagttggtgtgaggcctaaattagtcaattttcctgaaaatgcttttgaaactgtaaaactgaaggtccttccccaatccctccagcctgaggaaagtctgaaatgtaatttagtttgaagttggcacacacttttataggactgtgaatcaaatgaagaaaacccctagataacattaaaccctttcattctcagaatcgatgatgcaaccaacttggtccagctgtatcacgtgctccatccagatggccagtcggctcaaggggccaaggatcaggctgctgagggaataaatttaatcaggtatttttttttcatattggttgttttgtggtggtaattgagctgggaaaaattcagaattgggtcataattaatggtaactaaacagatttgtgaatatgggacatctgtggtcttgaaaacatcagtatgatttgtccccatatttcttcagcctggacaatagaaacagacaggggaggggggtaaagtgcagtaaagtaggctgagtgatgtggtgctagcagctggagtccagagaagttctgacagtgcagggagcagcccctttgttctttggagcactggaagggctgagctgcatctgaggtgttcaagccaccaacaggacagggtagaggactaagtagcacatgtcctccagagcagcttcctgtctttgtgtggtcacatcacatcgggggaaatgggcatgtgtcaagaagtggagagtgtgatgcttgtatatcatcaagccttagctgtattgtcattttggagctgcatacctctcaaaaccatgggcttatgtacatttatctgtaagtgctgagagttgagatgatattttcaggaagggaaggggaggagattgtataattaatttcatctcttctaatgctcagaatatacatggttttgtggaactggcttctatcctagtaatactgtttgcatgctgcaaagctaaggaaacaatgacctgtgatgacatcctaggaagagtagagagaaactacagtactgattttctttatgaacctgataaagcgcaatgtttttggagaaaatattctttaaagtcaaaagttagtttggtaactcttagcctccagatttctctctaacctaatggtttttgttttgatctcgaaggaagtattaatattaatacaatgtcagggtcttaattggatacttctggtgtttagaattagtattgcttgaaatgtgttgggtattgtttttctgtccatgtgtgtttattaattattgtataatcgggggaaaaattgtgaaatctgaaagccctttttaagtaggactctttgctactacagaaatgctaatgatgtcttaaaactgaaaaactttataaatagcatatgtcctattgttttaaaattttctttttaatttaaacaggtctttgcaaaaacagaagcacagaagggagcctatatagaactaacactgcagacttatcaagaagcactcagtcgccattctgcagcttcctaaaaatattttaaaaatacatttattttactaaatactgactacatttctctgttaatattgagctaaatgttaaaaaatggctagattaaaagatatcaatttgtagttctccctacaaagcaaaaattattaccctactcacttttcgtaggctacaaggatatttgagtgcctggttatgaatttctcaaatcatgttagatgagcgtacggttaaaaagtctggtgtgtttttgtgttaccaaatagggcaaacgttaacttagacagacccccagcttaatgaggtcagaggaacagaggtttcacatcctgactccagaaatgggtagctgctagacaaaatcggggcaagacctgtggaatgatgcaatgaggtcaagaaaaagggtttagagaattacagcctggatattcagctctaagaaaaatgtgattgacaaccattcgccacatgcagactgtagttatacacaacgaaaagacagtggggctgatccctaggcaggtgctagtcgcggctcagccttctcatactcgacgccctactttccattattcagaaacggaaaacatactacacttccttacattccaacaggtttctatgacgaatatgcttctaacataccatgaacataaaattaaagccaaatctttattcacatacaccaaccacaaccccaccgattcaactgctccaccataaccctccttaccataccctggcattacgcccagtagaacaaaagcttacaaatcaaaactaaaaattcccacn

SEQ ID NO: 19889 - DNA, 934 bp, Homo sapiens
acttttttttttttttttttttttgcttctggtaaaaagaagcatgttacaattttcccccccaattcacataggactctaagaacatattttaaatcagtgcttccatacaggaacgaaatccactattttagaattctaaatcttgttgaaaagcaaccttatctgaagagtaaacaagaagattcaaagttaagtatcagtgcagtccagagcccctaaatgaataaaactgaatgtatcttaaaaataggatttgcacaccagtaagagacttgtttacgattctggggaggagggaagaaactgtaagagggagagaaaagggaagaaaaacaagaagaaaaataataggaaaaaaaaaaaagaaagaaagtttgtttagctcaaagtcaatgcaaacataatgcaactcgtaatcaagctgggttcatgctgttccagcgggtattgcgtggaaggcctcatcaccaacagacacagatttctgaggctccatactcaccagtgagttcttccagagcaggctgtccagtcttggtgaagtggctgggctccacgctcacacctgttgagcttgactcggcagtaacattcccttcagtgtccgtctgagaccttcacacacaaaccgaagcagacacacttgtcatgagaggcaactaccacatctggaccactgtggtctaaccacagccctcaccatcacctcctgtagcaagaagcttcagaacagagtggaccagcagactgacgctaaataattcattagccgtatgtggagcaatgtcctaagaacagagagagccgctgaactgtaaaagataaacttttcattgcccagatggagggtctgcaatccctcactggggaatgcttctctgaacctccgtcaggatgctaggtctagccagacacatgctggagggtacct

SEQ ID NO: 19890 - DNA, 788 bp, Homo sapiens
  misc_feature 1, 2, 3, 781, 782, 783, 784, 785, 786, 787, 788: n = A,T,C or G
nnnaattgagcttagtgatattaacttggtaaattaagccagtttgtctctttgctttatctgtcttgtggaatctgtatcagtggaaattaaatagtctttacatttgatgaaccctgtttaggtgttggaaatacccatctatttgttaaaaaggcaaggtcccatgatttagtgaatgggggatacagacagcctttattcaagtaactgaataaacaaaagaattagagagtgtgatgagtttgaataaaaaatatagttcataaaaaccagaaatgtgatagagcatagtggctggaagaaagttacccaagtggcttgggtagtcaatgaagttgactccaacatgcagtagtacgcgggtcctaagatagagattaagtcatggtttaaatgaggaacaatcagtaaatcagattctgtcctcttctctgcataccgtgaatttatagttaaggatccctttgctgtgagggtagaaaacctcaccaactgcaccagtgaggaagaagactgcgtggattcatggggagcctcacagcagccacgcagcaggctctgggtggggctgccgttaaggcacgttctttccttactggtgctgataacaacggggaaccgtgcagtgtgcattttaagacctggcctggaataaatacgttttgtctttccctaaaaaaaaaaaaaaaaaaaaaaaagaaaaaaatagtaagaaaaagtagagaaagaaagaaaaagaaaaaaaaaattaaggggcggccgtttgactaggttagannnnnnnn

SEQ ID NO: 19891 - DNA, 3552 bp, Homo sapiens
  misc_feature 3552: n = A,T,C or G
cgcgtccgcccacgccgacccacgcgtccggcagctctgggggagctcggagctcccgatcacggcttcttgggggtagctacggctgggtgtgtagaacggggccggggctggggctgggtcccctagtggagacccaagtgcgagaggcaagaactctgcagcttcctgccttctgggtcagttccttattcaagtctgcagccggctcccagggagatctcggtggaacttcagaaacgctgggcagtctgcctttcaaccatgcccctgtccctgggagccgagatgtgggggcctgaggcctggctgctgctgctgctactgctggcatcatttacaggccggtgccccgcgggtgagctggagacctcagacgtggtaactgtggtgctgggccaggacgcaaaactgccctgcttctaccgaggggactccggcgagcaagtggggcaagtggcatgggctcgggtggacgcgggcgaaggcgcccaggaactagcgctactgcactccaaatacgggcttcatgtgagcccggcttacgagggccgcgtggagcagccgccgcccccacgcaaccccctggacggctcagtgctcctgcgcaacgcagtgcaggcggatgagggcgagtacgagtgccgggtcagcaccttccccgccggcagcttccaggcgcggctgcggctccgagtgctggtgcctcccctgccctcactgaatcctggtccagcactagaagagggccagggcctgaccctggcagcctcctgcacagctgagggcagcccagcccccagcgtgacctgggacacggaggtcaaaggcacaacgtccagccgttccttcaagcactcccgctctgctgccgtcacctcagagttccacttggtgcctagccgcagcatgaatgggcagccactgacttgtgtggtgtcccatcctggcctgctccaggaccaaaggatcacccacatcctccacgtgtccttccttgctgaggcctctgtgaggggccttgaagaccaaaatctgtggcacattggcagagaaggagctatgctcaagtgcctgagtgaagggcagccccctccctcatacaactggacacggctggatgggcctctgcccagtggggtacgagtggatggggacactttgggctttcccccactgaccactgagcacagcggcatctacgtctgccatgtcagcaatgagttctcctcaagggattctcaggtcactgtggatgttcttgacccccaggaagactctgggaagcaggtggacctagtgtcagcctcggtggtggtggtgggtgtgatcgccgcactcttgttctgccttctggtggtggtggtggtgctcatgtcccgataccatcggcgcaaggcccagcagatgacccagaaatatgaggaggagctgaccctgaccagggagaactccatccggaggctgcattcccatcacacggaccccaggagccagccggaggagagtgtagggctgagagccgagggccaccctgatagtctcaaggacaacagtagctgctctgtgatgagtgaagagcccgagggccgcagttactccacgctgaccacggtgagggagatagaaacacagactgaactgctgtctccaggctctgggcgggccgaggaggaggaagatcaggatgaaggcatcaaacaggccatgaaccattttgttcaggagaatgggaccctacgggccaagcccacgggcaatggcatctacatcaatgggcggggacacctggtctgacccaggcctgcctcccttccctaggcctggctccttctgttgacatgggagattttagctcatcttgggggcctccttaaacacccccatttcttgcggaagatgctccccatcccactgactgcttgacctttacctccaacccttctgttcatcgggagggctccaccaattgagtctctcccaccatgcatgcaggtcactgtgtgtgtgcatgtgtgcctgtgtgagtgttgactgactgtgtgtgtgtggaggggtgactgtccgtggaggggtgactgtgtccgtggtgtgtattatgctgtcatatcagagtcaagtgaactgtggtgtatgtgccacgggatttgagtggttgcgtgggcaacactgtcagggtttggcgtgtgtgtcatgtggctgtgtgtgacctctgcctgaaaaagcaggtattttctcagaccccagagcagtattaatgatgcagaggttggaggagagaggtggagactgtggctcagacccaggtgtgcgggcatagctggagctggaatctgcctccggtgtgagggaacctgtctcctaccacttcggagccatgggggcaagtgtgaagcagccagtccctgggtcagccagaggcttgaactgttacagaagccctctgccctctggtggcctctgggcctgctgcatgtacatattttctgtaaatatacatgcgccgggagcttcttgcaggaatactgctccgaatcacttttaatttttttcttttttttttcttgccctttccattagttgtattttttatttatttttatttttatttttttttagagatggagtctcactatgttgctcaggctggccttgaactcctgggctcaagcaatcctcctgcctcagcctccctagtagctgggactttaagtgtacaccactgtgcctgctttgaatcctttacgaagagaaaaaaaaaattaaagaaagcctttagatttatccaatgtttactactgggattgcttaaagtgaggcccctccaacaccagggggttaattcctgtgattgtgaaaggggctacttccaaggcatcttcatgcaggcagccccttgggagggcacctgagagctggtagagtctgaaattagggatgtgagcctcgtggttactgagtaaggtaaaattgcatccaccattgtttgtgataccttagggaattgcttggacctggtgacaagggctcctgttcaatagtggtgttggggagagagagagcagtgattatagaccgagagagtaggagttgaggtgaggtgaaggaggtgctgggggtgagaatgtcgcctttccccctgggttttggatcactaattcaaggctcttctggatgtttctctgggttggggctggagttcaatgaggtttatttttagctggcccacccagatacactcagccagaatacctagatttagtacccaaactcttcttagtctgaaatctgctggatttctggcctaagggagaggctcccatccttcgttccccagccagcctaggacttcgaatgtggagcctgaagatctaagatcctaacatgtacattttatgtaaatatgtgcatatttgtacataaaatgatattctgtttttaaataaacagacaaaacttgaaaaaaaaaaaaaaaaaaaaaaaaaaaaaaaaaaaaaaaaaaaaaaaaaaaaaaaaaaaaaaaaaaaaaaaaaaaaaaaagggcgggccgcn

SEQ ID NO: 19892 - DNA, 485 bp, Homo sapiens
  misc_feature 1: n = A,T,C or G
ncgtatacgatcactataggcgaattggactccaccgcggtggcggccgagggactggttcttttttttttttgctgattaattggatgcctggagacaattccatttcaattaccttattggcatgacgagatatacaagggctgccaatgtcaatacattaagactgagcgtgctggagcagcagccagggttcagggcactgctgtgtcatctgcgccacggtgcacaaaggcagcttcaaaagcatttcagcatgatcgcttccctctctccgctcctggggagagaaggatcctgcacaccacaggcaaatcatgctgaaattgaggtggtgcctttgggactcccatcccatcacagtcttgggattctctagctgagatctactagagcctgtggaagcaagaatggtcatttatcacatggagctgggtgcatggtgtggggcccaagggagaaagggtagcccctgccactcgagt

SEQ ID NO: 19893 - DNA, 266 bp, Homo sapiens
  misc_feature 1, 264, 265, 266: n = A,T,C or G
nactccacccggtggcggccgcccggcaggtacctgtggatattggttgaacaaacaggtgggcaaagtgaggaagataagaagtccatccgttcagtttccccactgcggagggaataacactgtctttccacaggtcacagactgggatgagcaacgggctgaaggcacgtttcccgggaagatctgaactggctgcatctccctttcctctgtcctccatccttctcccaggatggtgaagggggacctggtcctgcccgnnn

SEQ ID NO: 19894 - DNA, 1925 bp, Homo sapiens
  misc_feature 1, 2, 1922, 1923, 1924, 1925: n = A,T,C or G
nncgcgcaataaccctcattaaagggaacaaaagctggagctccaccgcggtgccggccgctctagaactagtgaatcccccgggctgcaggaattcgattcccttccccacaagtgagccactgccccacttcagagggtaagagccaaaagcctcattgtgaaaggcactggacttggaccagggacaccatcagggccttggttttctcacgcataaaatggagagtggattaatcgccaaagattcttctgatctgacattttgaaattgtgagagaaactagatgactgtaaacttggtcacaggcctggttctggcagttctttgcggacttttttctagcattatgccaaataaacatgcagtctcagtgtgctctcgcatgtatgaatatctagtcctttctgtggttctcacccaagacataaaaactaggactcagagcacatacaaaaccagttatgtttcggaaagagggaaaagagtccccgagcccggatcttgtgctgcttttctcactgacgtgttgccttttttctttacctcagcacagctattgatatgttagaggcaggtcccttaatattcattctaaatgaggtaccgacttacttgaaattgggccttaaggagtgagaactcaaaaatccaaatggcttgtccaggactcagccatgcacaccttgagcagcgccggcaggaggcacggaaggaactgtgctccgttctcctcactgtcatggtgccaccagtgtctgatgaagggcagagtgacccagactgcaggcagtaactgacttcacacagtccctggcatttagtcatctgtgattgttttatcactctggactgtgcagagccacctgccaccgagatctgcattccgactgcctatgaacgggtgtgggggccgggggctggcttgctgaagtcttcaacttgcactcggagctcctttgatacctcagagctggctgtcaggtggcagctcacacccagactcactggccacacctcagcagggggggagtcgagtgtcagtctctttctgtgaaggctttttttttcctttggcctgggaatttttcccatttttatgaaggggttttaaattgtttcattttgtgtgctgtgcttcaaagccttaactgtcaaatcttgcattatcttgtttgtacagaaatatactggcctagcagaggcaaaaaaaaaaaaaatgaattttattttacttgtcacacctgtcttaataaactggagttttgctgctaaagaactcttctctctgggggcagagcttctatttatggcacatagacatcagctaggcttttgggaatcgtttgtgttctttgtggaaatgtcctttagaagcacccatgaagtagtgtgttcagactgtgcacacagaaaacaggctctgccttcacatgtgagacggtggacttttcctctggacaaaatgacagcatcctggcgactccacagtggagctgagcgccactccctgtagccgatctgggactgaaacgcttacacctctgcctcagaaggagtcccccatgccctgcctgaaatgacttcactggacacagcggggctgcagctaacggggtacaggtaggagctaactaacttcacccctgagtccacttgcggggtaagagataaacagtaacccttccaggagcccactgacgttggagtgctaaaaatgccccttcagggggaaaactgcattttctcttccaaaaaggaaaggttcttccagggcgagaaacctgtggtcttagaaccacagcaagaagagggaggcatgcttggccttgcaccggaagactcactttgtctgccctgcgccagctcacctcaccctgcagttcccgttccgccatggatgctcattaacaacctgaannnn

SEQ ID NO: 19895 - DNA, 766 bp, Homo sapiens
  misc_feature 1, 2, 3, 4, 5, 6, 290: n = A,T,C or G
nnnnnngcagctattgaaggactttagctcttcggattccttggggttggggcaaggggacttgttaggaaacgtgctcagcgagcaaactgttgttgtgcactggtaaacagtttgcttttcagacacgcctggataaaacttgagctgtcctctgcagaggtgcctcttgtgtgttcagcgaacggtgggctgaacggtcatctttcagcagattagctgaaagaacatctattgctgggctcagttgttcagagatctgcgcaccctttgtgcaagagcagggaaantttgtgttatgacaatggctgacagaatgtttaattaaagctgcaattggcagtaactaaattctccgaggtttctttcctctcctctttgctactgaaaggtgcagaaatgcttttgacagcatctttcctactgacagatgaattgttttgacaggagaatttgaaaccttcaactgaagacacattcagatgtcaggcctggtacagggcgatcgtgttcatagaaataagtgagatgctttagatgtgtgtgcatgtcagctgccacctgaaagaaaggcctcattaaagattttcactgattaactctttgattgttcttgggatctcagatgggaattcacgctgcttgctgcagagctcttgggctaagtgtattttcttaattactgagaaatgcgtgttatcagtaagcagtgaaaagtcttgaaaaaactaagtaattttaaaaaaaaaaaaaaaaaaaaaaaggt

SEQ ID NO: 19896 - DNA, 3016 bp, Homo sapiens
  misc_feature 1, 3009, 3010, 3011, 3012, 3013, 3014, 3015, 3016: n = A,T,C or G
nctcggtacaccgtacaaggccccgcgcgtttccggctcctgctcagaagcttgtccaccttgattctgcccgtagcaggtgaacctggtgtggtgcgcgcactgcgggtcctgattggctgtgcacgccacggtgaaaaacttgagcgtctactccgagtcctgcaagctcctagtgtctcctctgggtggacgcctaggcgcacggccgttacttctctttcacctgtggattcgtcagtttctcgttcgtttcaggaggcgatcccgcgccctgggtgcggtgaggccgctgggacagcggaggtgcctcccgacgcgaagcagcgagctgaggcggcggccagcggggaagatgagcggcagcagcgccaggtccagccacctgtctcagcccgtcgtgaagagcgtgcttgtgtaccgcaacggggaccccttctacgcggggcgccgcgtcgtcatccatgagaagaaggtgtccagcttcgaagtcttcctgaaggaggtgaccggcggcgttcaggcaccctttggggccgtcaggaacatctacaccccgcggactggccaccgaatccggaagctagaccagatccagagcgggggcaattacgtggctggaggccaggaagccttcaagaaactcaattacttggacataggagaaatcaagaaaagaccaatggaagttgttaatacagaggtaaaaccagtaatccatagcaggatcaacgtgtcagctcgctttagaaaaccgcttcaggagccgtgcactatcttcttgattgcaaatggagacctcataaacccagcttctcgcctccttatccccagaaaaaccttgaatcagtgggatcatgtactacaaatggtcacagaaaaaatcactctgaggagcggggctgttcacaggctttatactttagaaggaaaacttgttgagagtggagcagagttggagaatgggcagttttatgtggctgttggcagagataagtttaagaaactgccttacggtgagttactttttgacaagtcaacgatgagaaggccttttggtcagaaagcttcttcactacctcctattgtaggatccagaaagtctaaagggagtggaaatgatcgccactctaagtcaacagttggatccagtgacaactcatctcctcagcccctgaagaggaaagggaaaaaagaagacgtgaattcagaaaaactgacgaaattgaaacaaaatgtaaaattaaagaattcacaagaaaccattccaaatagtgatgaaggcattttcaaagctggagcagagaggtctgaaacacggggggcagcagaagtccaagaagatgaagatactcaggttgaggttccagtcgatcagaggccagcagaaatagtagacgaggaagaagatggagagaaggcaaacaaggatgcagaacagaaagaagacttttcaggaatgaatggtgaccttgaagaggaaggaggtagggaggctacagatgcccctgagcaagtcgaggagattctggatcacagtgagcagcaggcacgccctgctcgtgtaaatggaggcaccgatgaggagaatggtgaggagctgcagcaggttaataatgagcttcaactggtcctagacaaggaaagaaagtctcaaggagctggcagtggacaagatgaggctgatgtagaccctcaaagaccaccaaggccagaagtaaaaattaccagtccagaagaaaatgaaaacaaccaacaaaacaaggactatgctgccgtggcttagaagatttttaaaaagagagtatatggatcgcaagaaaaatgaagggttatcatacttgaaagataagcacatagttattgctgaatataatgtgacactatggtcgaatactacctacgaattataacattagaagcctagtggaaagaccagataactttaaatggctactaaaggataattacttacttttattgcatgtgttttaaaagtcatatagaaatattaaataagacggacagaggagaatttgcactggaagacaattgccacttgtaaaggatgaaaaataggatcactcttattgtacgctttattataagtttagaaggcagtttattctaaataatttttctctaggaaggcgtagaattttaaagaactggtaataggaaagcatgtactattttcttaaagcaataaactcttgaatgaacagattgcgatttactttcagacataatttggagatggcagtagatcaaaatgtgtccatgacttgttaacatgcctttccttcttcctccttagccaaaatccacctttgaactacaaagacagagcaaggcgttcattttggtgggaggaagcattggttcagagtgttagtgactagtatcgccatgccgtcacttaaatgctttcaggcttgcatgcttgtggctccaatggcgcacactcaggaaggaattgtaaaggagcacccagttatattataaagcctggatgtatggtttgcagataatggaaatcctgtggattttcactgatccagtctatctttaccaatagtatctctctcttctcccttatgttattagagaacctgatattggctattcccaaggattaaattattttcaaatagttttcaacaaaaataaaagtgtattaggaagaaaaaagtagacttatatgaagagtttgtgactgctcaatttaacttgttttttgccttatttctattaagactgttttactatgtttttgccctagggatatcagcaaatatttatttttcctagcatgatatagttagaatttcaagcagatttctttgtaattagaaggcatctgatagaaattgtaaaactttagaagttattataatgaaaccaattcctgaatcacaacttcatggactgactaaattgatttatagttgccttgtgaggtatgtatggggaaaacataaaaacataattaaaacataatttcgtccnnnnnnnn

SEQ ID NO: 19897 - DNA, 926 bp, Homo sapiens
  misc_feature 926: n = A,T,C or G
actttttggtgttttttggaaaagttacatttagatctattctgaagctgttcatttttaacaaataaaatgttacaggtttcacatgatttattcgcaaaaaaaaaaaaaaaaaaaagtactgtctgtgaacagcaaggaaaatatgattacacctaagagatgaaattggcataggcgagaagtcagaaaaataatctatacagcttgcatggttggggagttaggagaggccaaggccacgtgcacgtagagcaagaggtagaagaggcccgggggctagagcgcaccctggtggatagtgtgagaatttcacactggctcaagccttgaagaccaccccaggggtgcgccttagcaacgcacttatgcaagaccccaacaactggcccttgaaaggagcttttcactggtgggatgtggccctgcttgtattcagaaccatagttttaacaagccagcattaaatccacaagtctttgccaaagcactttaagcctcttgacatttattggaattaatttacctgcaaggaagttcatatatctagctttgttaaccctacattcgggaaaatgtttccatgagataactaaaacccgcatgaatgatacaatactgtgacaaaacccaaaggtggcataattagcataaaactcccaaattttttttgcaattaccatcgtctagtaactggttgtttcattaggtaaaagtggatggaatcagtggaattatatgtatgatatgaaatgctctttggcatcaattaaatttttattttgaagaaaaaataaaggacaaggaaagcatcctattccaagactccaaggagattatatttttaattccacaccacagaaaatgcaaacaaatttctaattacacttcatgcatggagatctgtagaggaaaaataaattggn

SEQ ID NO: 19898 - DNA, 3611 bp, Homo sapiens
ggagctggagtaacaagatggcgtcttccgcggagtgacaggggtccctctgggccggagccggcggcagtggtggcagcggtatcgccgccctagctcaccgcgccccttttccagcccgcgacgtcgccgcgcaagcgaggcagcggcggccgccgagaaacaagtggcccagcctggtaaccgccgagaagcccttcacaaactgcggcctggcacccgaaccccggtaaaggccttcgtgttccgtttcctgccgccctcctctcgtagccttgcctagtgtaggagccccgaggcctccgtcctcttcccagaggtgtcggggcttggccccagcctccatcttcgtctctcaggatggcgagtagcagcggctccaaggctgaattcattgtcggagggaaatataaactggtacggaagatcgggtctggctccttcggggacatctatttggcgatcaacatcaccaacggcgaggaagtggcagtgaagctagaatctcagaaggccaggcatccccagttgctgtacgagagcaagctctataagattcttcaaggtggggttggcatcccccacatacggtggtatggtcaggaaaaagactacaatgtactagtcatggatcttctgggacctagcctcgaagacctcttcaatttctgttcaagaaggttcacaatgaaaactgtacttatgttagctgaccagatgatcagtagaattgaatatgtgcatacaaagaattttatacacagagacattaaaccagataacttcctaatgggtattgggcgtcactgtaataagttattccttattgattttggtttggccaaaaagtacagagacaacaggacaaggcaacacataccatacagagaagataaaaacctcactggcactgcccgatatgctagcatcaatgcacatcttggtattgagcagagtcgccgagatgacatggaatcattaggatatgttttgatgtattttaatagaaccagcctgccatggcaagggctaaaggctgcaacaaagaaacaaaaatatgaaaagattagtgaaaagaagatgtccacgcctgttgaagttttatgtaaggggtttcctgcagaatttgcgatgtacttaaactattgtcgtgggctacgctttgaggaagccccagattacatgtatctgaggcagctattccgcattcttttcaggaccctgaaccatcaatatgactacacatttgattggacaatgttaaagcagaaagcagcacagcaggcagcctcttccagtgggcagggtcagcaggcccaaacccccacaggcaagcaaactgacaaaaccaagagtaacatgaaaggtttctaatttctaagcatgaattgaggaacagaagaagcagagcagatgatcggagcagcatttgtttctccccaaatctagaaattttagttcatatgtacactagccagtggttgtggacaaccatttacttggtgtaaagaacttaatttcagtataaactgactctgggcagcattggtgatgctgtatcctgagttgtagcctctgtaattgtgaatattaactgagatagtgaaacatggtgtccggttttctattgcattttttcaagtggaaaagttaactaaatggttgacacacaaaaattggtggagaaattgtgcatatgccaattttttgttaaaaccttttgttttgaactatactgctttgagatctcatttcagaagaacggcatgaacagtcttcagccacagttgtgatggttgttaaatgctcacaattgtgcattcttagggtttttccatccctggggtttgcaagttgttcacttaaaacattcttaaaatggttggcttcttgtctgcaagccagctgatatggtagcaaccaaagattccagtgtttgagcatatgaaagactctgcctgcttaattgtgctagaaataacagcatctaaagtgaagacttaagaaaaacttagtgactactagattatccttaggactctgcattaactctataatgttcttggtattaaaaaaaaagcatatttgtcacagaaatttagttaacatcttacaactgaacatgtatgtatgttgcttagataaatgtaatcactgtaaacatctatatgatctgggattttgtttttattttgaaatgggagcttttttgtttacaagttcattaaaaactaaaaactgtttctgtaaggaaatgagattttttttaaacaacaaaaaatgccttgctgactcactattaaataaaaatctccccaattttttgatagactacttcaagccatttgttacatggtattcctttgcaagtcaatttaggtttcgtgttataacttttcctctttttttaagaaaaatgaaaaaagtaattcttttgtctgaaggggaaaggcattctttcatttttttcttttttttttttttatgacttgcaggcacaatatctagtactgcaactgccagaacttggtattgtagctgctgcccgctgactagcagctggactgattttgaataaaaatgaaagcattaaagggtttccctacaaaacatttttctttaaaatacttttgaaatggctataagcagttgactttcacccttggagagcatcacactgtgtgaggttcagtgattgttgaccctccccagcccctcctgcttctttaagttatctgtgtgcgtgcgcttcctctcaatcttctttgcacgctcatttctttttctctgacccatgagaaaggaaaacttactgatgataatttttaaatagtgtaatttattcatttatagcatgtcaggataaattaaaagaacatttgtctggaaatgctgccgggagcctattgtgtaaatgtaggtattttgtaaaataaccttgaaattgtaaattgacacgtgtttggtcagattgtgtcaagtttaatttgttttgttttcttttttcttttttttatttgaaaactactttagcaataattaattccatgattatcacattcagtattacggtactaatatcccttaatggcagaatgtgataatcatggaattaagggatattagtaccgtaatactgaagaaattttattaagtctgaacttctggggtaggcagcttctttgtttcttttctatccacccttgtcggttgaggtatttgtttcttgactaataaaccctttgatacttttagccagaaatcagtctcataaagctatttttgagtatagtttgtgtaaaataaaaatgtttagctttggtaataacttccaagctgaactccctctagcaagatatttttcagtgcttttatttactatgcacttagactatgcactttttctgaaatatttttgtaacacttttttgtatttttgccatttgaaaaggttgtggtgtagttggtctgtaattaagttgcagatttaaaactgctgttagctttgtaaatcaaaatataaggtgttttttgtcctggtatatcgtcattccatctgcagctggagctggaatcccattgatcttctagctaccattcattttcttcac

SEQ ID NO: 19899 - DNA, 820 bp, Homo sapiens
  misc_feature 1, 2, 3: n = A,T,C or G
nnnaatacgactcattataggaaatttggccctcgaggccaagatttcggcacgaggttttttctcatctactgcttcaagcaagattataccaccctcctggctccaactgccaaccctgccaacacaggttaggataaatagtagcacctttccccaagtgtgttcaccaaatgtgttctcacccaggtactttcaaacacctcatgaggctggccagagatgacaccactgccccggatgcaagggggcagccttgctttggaccccgttctgaatctcaggcttcatctattaggcacactgagcagaaacactcctccctgccacttccgagttgcagcaaaaagggtctaactatgatttaaagcaaataattttaaacttcaaattttcattactgtcatacttatgaggaccaaataatgtaatgactaagacatcaaattacatgtaatatgaataaaaccagtaagaaaatgatagttacttataattggatcaacatacaaaaagaacgtcatttggccaaagtaaaacggttaaaaaaatagtgtctataaaatcaccatataaaatcttagtatgtacaaaattctgaatggtttcatctactgttgagttgtttaaacttggctgtgggttcatgcaagttcctccttaagaactttggttaaaactgttatgtggatacactttaaaaaagtgaaccagaatggattaactgtgctttccatgaaacattacaactttcaagcagctttttccacattgatggtttataagaagctgttgcaaagattgctaataggtatactaa

SEQ ID NO: 19900 - DNA, 706 bp, Homo sapiens
  misc_feature 1, 2, 3, 4, 5, 706: n = A,T,C or G
nnnnncaggtacaaaacaaattcaaagggttaagaatttcaagttggtagcttcagagcattaagccccaaatgtggggtcccttctgagcccaggattatgtgtgactgcactggtcacattgccatgaagccagccctggtggttggtagaggggtgggcactggacctaagcagggccaatcagagccattcctggaaatggatatataaatattaggaatgcaaagttatttattttgttagagtttgaacaacgtgatctgtagaaaaccagtcacatttccttaaggatgcatcaataaatatgagctaaatgtaataattagaactttggtttccaagcagattccatgctctaattccctggatagtgaatataataagatgatatatccatgaataagttactttacattgccaaagggacagatgtaaataaggctactaatcagttgaccttaaaataaaggttatcctggattatccatgtaggtccagtgcaatcacatgagcccttagaaacagaggcagaagtagtagttagggaagtgcagcatatgaagtgagagatccaaaggacaagaaggatgcaacacattgttacagcctttgaagattcaggggccatgggcagaggaaagcaggctgcctctagaaggtaagaataaccttcaatcaaagatcagcaaggaaacaagtaccn

SEQ ID NO: 19901 - DNA, 1403 bp, Homo sapiens
  misc_feature 1, 2, 1400, 1401, 1402, 1403: n = A,T,C or G
nnccggcttttaactggcgctctgacacaccctcaaagggtcagagtactgggagaacagaagacttcacaatttaatgcctcagtttttaaaaaaggatccttacacttcatgtctcctagccatcagaagaggaatgagacagcaaaagttcaaacggcctgtttcaagttttctgatataaaacgatgacattttcaggaaaatcctgggtcattccggctgcttttttgagaagtccctgaagagatcaataacagcacgagggaacctggcaaggaagctattcctataatccaggaaagagatgaggaaggcttggaccaagtggtagaggtgtcaggtagtcaaatgctgggtatattttgaagatacaccccataggatttgctccacattgaatgtggaatgctggaagatagataaagtgtacctgtcacatactttttgcgttttatttattttcttagaagtaagtacacaaagagatgctacctaggagaagggtattcttttcactattctttcaaattttctgtatgttcgaacattttcatagtagaaagttggggggaaaatctgtttcataaacatttcctcagcagcagtccagtctattgcattttaattggttgtgatatcattgttttatgcaatacgttctcaacaagtatatcctccggcaaactgaacaaggaccaagtctgttctgcctacagctctgcttcctcatagctgctttccagaacgtgactcttgcaaattatcaagaaaggggaactaatctaagggatccagatcaaacagcctcatgaagacttattttatgtttctaatataaagatagaagttttcagaaaagccctgctacacagaggatcagagcaggggtgggcctgctgggctgcagctgggattctgagcatcctttcccggaggcacggaaagtgagtgagtgagcccagtgaggaagaagttgaagctttgatatgagtaaacaagtatctctacctgaaatgattaaagactggaccaaagagcatgtgaaaaaatgggtaaatgaagaccttaagattaatgagcaatacgggcaaattctgctcagtgaagaagtaacaggattagtcctgcaggaattaactgagaaggaccttgtagaaatggggctaccatggggtccagcacttttgataaaacgttcatacaacaaattgaatagtaagtcccctgaaagtgacaatcatgatccgggacaattagataattcaaaaccgtccaaaacagaacaccagaaaaatccaaaacacagcaaaaggaagaagaaaattcactgtcatctactattgattatgtcccgagcagatcggctttcaccaggaggatctctctggcacagaaannnn

SEQ ID NO: 19902 - DNA, 5612 bp, Homo sapiens
  misc_feature 1, 2, 3, 5477, 5481, 5486, 5562, 5575, 5610, 5611, 5612: n = A,T,C or G
nnnctacgtatgtgtgacttcatgacagagctacattctgagaaatttgtcattaggtgatttcatcattgtgtgaacatcatgaagtgtacccaatatgccggcactacagagtcaactgataacatcagatacctattctatgcaaatgcagatgatcccttctaattctacacgacttcctgtagcttaccaaggaaatcagggacttaaccagtctttttcagagcaacaggttgattggacacaacagtgtatatctaagggactgacttacccagattacagaccacctccaaagctataccgttactcaccacaaagctttttaccagattctaccattcaaaaacaaaactttataccacatacatcattgcaagttaaaaatagtcagcttccaaattctgtattaactttaccatcaaggcagacctcagctgtaccatcacagcagtatgccacgcaaactgacaaaagacctcctcctcctccttacaactgtagatatggaagccagcctttgcaaagtactcagcatattactaaacacttgtctatggaagttcctcagagtcgagaaatgctgtcatctgaaataaggaccagctttcaacagcagtggcaaaaccctaatgaaaatgtcagcacaattggaaatttcactaacttgaaagtaaataccaacaacaaacagccttttaacagtcccattagatcttctgtggatggtgttcagactcttgctcaaactaatgaagagaaaataatggattcttgcaatccaacttcaaatcaagtactggacacaagtgttgcaaaagaaaagctagtaagggatattaaaacattagtagagataaaacagaagttttcagaacttgcaaggaaaattaaaatcaataaagatcttttgatggcagcaggttgtattaaaatgactaatacttcttatagtgaaccagctcagaattctaaattgtctctaaaacaaactgccaaaatccagtctggaccccagataactccagtaatgccagagaatgcagagagacaaacaccaacagtagtggaatctgcagaaacaaataagactcaatgtatgttgaattctgacattcaggaagtcaattgcagaaggtttaaccaagttgattctgttttaccaaatcctgtctattctgaaaagcggccaatgccagacccatctcatgatgtgaaagttctcacttcaaagacatcagctgttgagatgacccaggcagtattgaatactcagctttcatcagaaaatgttaccaaagttgagcaaaattcaccagcagtttgtgaaacaatttctgttcccaagtccatgtccactgaggaatataaatcaaaaattcaaaatgaaaatatgctacttctcgctttgctttcacaggcacgtaagactcagaagacagtattaaaagatgctaatcaaactattcaggattctaaaccagacagttgtgaaatgaatccaaatacccaaatgactggtaaccaactgaatttgaagaacatggaaactccaagtacttctaatgtaagtggcagggttttggacaactccttttgcagtggacaagaatcctcaacaaaaggaatgcctgctaaaagtgacagtagctgttccatggaagtgctagcaacctgtctttccctgtggaaaaagcaaccttcagatactgcaaaagaaaaggagtgtgataaactcagaacaaacacaacagcagttggaatttcaaagcctgctaacatccacgttaagagtccttgttcagttgtgggaaattcaaattctcagaataaaataagtaatccctcacagcagacagctttgtcgatggtaatgcacaattatgagtcttcaggtataaatataacaaagggaacagaacttcagatagctgtagtgtcaccgttagttctgtcagaggtcaaaacattgtctgtcaaaggaataacacctgcagtgttacctgaaacagtgtatcccgttattaaagaaggcagtgtttgtagtttacaaaatcaattggcagaaaatgcaaaggcaactgctgctttgaaagttgatgttagtggaccagtagcaagtacagcaacatcaaccaagatttttccactaactcagaaggaaaagcagaatgagtcaactaatggtaattcagaagtcacacctaatgtcaatcaaggaaagcataacaaattagagtcagctatccattctcctatgaacgatcagcaaatctcacaggagtcaaggaatagtactgttgtgagtagtgatacattacagattgacaatatttgttctctggttgaaggtgatacctcttacaattcccaaatagcaaagatattcagctctcttcccttgaaaatggttgagccacagaaaccttctctacccaatcagcaagggattggcagcagagaaccagaaaaacaattagataataccactgaaaataaagactttggttttcaaaaagataaccctgtacagtgcacagatgtttcacataaaatatgtgatcagtcaaagtcagagccacccttagagtcatcttttaacaatcttgaaacaaacagagttattctagagaaaagtagtttggagcatgccactgaaaaaagcacagctaacgatacgtgctcgtcagctgctattcaggaggatatttaccctcaggaaatagatgcatccagcaactatactccccaagatcctgcaagaaatgaaatccacagtgataaggcacctgtcttatacctacatgaccagctgtcagaacttctaaaagagtttccttatggcattgaggctgtgaatacacgtgaaggttctgtgggccagcaaactacataccagacctcagaagatcaaactgctgataaaaccagtcctgactccaaagacccagcagatcaaatacaaattacaatattaagctcagagcaaatgaaagaaatatttcctgaacaggatgatcaaccctatgtagtagacaagttggcagaacctcagaaagaagagcccatcacagaagtagttagccagtgtgacctgcaggcacctgcagctggacaaagtcgtgattctgtgatactggactctgagaaagatgatatccactgctgtgcattgggctggctctccatggtttacgaaggagtaccccagtgtcagtgtaattccatcaagaactcatcttcagaggaagagaaacaaaaagagcagtgttctcctttggataccaacagttgtaaacaaggagagagaacttctgatagagatgtcactgttgttcaatttaagagccttgtaaataatccaaagactcctccagatgggaaaagtcattttcctgaactacaagacgacagtagaaaagatacacccaaaacaaaacataaaagcttaccaaggacagaacaagaattagttgctggtcagttttcatctaaatgtgataaactaaatcccttgcaaaatcacaaaagaaaaaaattgaggtttcacgaggtaacctttcactccagtaataaaatgacagcatcttatgaacaagcttctcaggaaacccgacagaagaaacatgtaacacagaactcacgtccactaaaaacaaaaacagcttttttgccaaataaagatgtgtataagaagcatagttctttgggacagtcattatcaccagaaaagataaaattgaaactcaaatcagttagcttcaaacaaaaacgaaagttagaccaagggaacgtattagatatggaagtaaagaaaaagaaacatgataaacaagaacagaaaggaagtgtgggagctacattcaaattaggtgactctttgtcaaacccaaacgaaagagccattgttaaagaaaagatggtatcaaatactaagtctgtagacacgaaagcgagttcatctaaatttagtagaattctaactcctaaggagtatttacaaaggcagaagcataaagaagctctgagtaataaagcatcgaagaaaatctgtgtgaaaaacgtgccatgtgattctgaacatatgagaccaagtaaacttgccgtgcaggttgaaagttgtgggaaatcaaatgagaaacacagcagcggcgtgcagacctctaaagaatcattaaatggcttgacaagccatggtaaaaacctcaaaatccaccattctcaggagtctaaaacatacaacattctaaggaatgttaaagaaaaagttggtgggaagcagcctgataaaatatggattgataagactaaattagacaaattaaccaatataagcaacgaagctcaattcagccaaatgcctccccaagtaaaggatcaaaagaaattatatctgaatagagttgggtttaaatgcactgaacgtgaaagcatttctctcaccaaattagaaagttcacccaggaagcttcataaagataagagacaggaaaataaacataagacctttttaccggtgaaaggtaacacagaaaaatcaaacatgctggagtttaaattatgtccagatatcttactaaagaatacaaactctgtggaagaacggaaggatgtaaagcctcatcctaggaaggagcaagcccctctgcaagtttcaggaataaaaagtacaaaagaagactggttaaaatttgttgctacaaagaaaaggacacagaaagacagccaagagagagataatgttaattcaagactctcgaagagaagcttcagtgcagatggatttgagatgctacaaaacccagtaaaagattcaaaagaaatgtttcaaacctacaaacagatgtacctggagaagagaagcagaagccttggtagcagtcctgtaaaataattacaagatgtggttttgtaattgccactgggaaatttctttccttttctgttcaaaatatttcgctgaaactaatgagaaatgccatgataaagatttctcagagtttggttcccactttcattgtatttcattgaaagtgcttaattaaaatggcttgagaactttgggtagccatgtgtaagaaatggatggtattcaccggggaaacaaggtatttgaatttctactttattgaaccagatttaccattattttaaaaggaatgcttatacaaatcaatttgaaattctacccatcttgagggaggaccgttcctcagttaaggacttgtttatttaaatgggactgtaaatatgttttggtttctaagctatattagcaaaatttatttttcaaaaatgcccactgtgatgtgaatgtcaaaatatattcttaagtgttttataactaattgtaaactttttttcagaagtcttattttatacttgtgaaactgaacacaattttgggacaacgtttaaacattacttttcatacttgaaataaacatttattttttaaaaaactaaaaaaaaanaaanaaaanaaaaaagcatgcgggcgcatttgagcttacttggccaattcgccctttagggaggcggataccattactggcccgnctttacaacgggngaatgggaaacacctggcgtccccactttatcgcnnn

SEQ ID NO: 19903 - DNA, 1524 bp, Homo sapiens
  misc_feature 1, 1522, 1523, 1524: n = A,T,C or G
ngagtcgacccacgcgtccggttaaagcagatatcttctaggtgaaaagttaaagtcatttattagaggagatagtgctgtgatattcttcaaactgacgcccaacacaagaccagaatctaaacgatcggctttgggctcacggatggagagataattttgaaatggatgatcacattttacactggggccatagaggcaaggaatgtagaacacagtaattacaagtttagtctagataaaacactctccatcctgtttaagtcagcagaggttagcttgctcagatctccacttttaattggttttggacttgggtttttagggggtggagggccatgttcaaattagaagaatcactgaaaaccgtgagctgagagggcaaactaggaaacggttatttgcagaagcttttatggggctttggtcaaacatttatacctgtggaacaaaagttttttttttaaactaacatgttgaaaattttgggtcttgccagtgaaggaaattctatgtgcaaggaagattaatggcattaagtatgtgcatcttaaccattgtatttttactatctgtcaagaatatgtggcctttttttgtagaaaggttatactttatcagctgtttaataaagtagatatatcttgttgcttttgtagcggagaaactgagttcctatttttccctccaaatttggatccttatctgatcattaatacttattgtttggttgtttttagccttcagttaaaagaaagtcagtggaatcaaacaaaattgtaaggcaagttttaaaatagaaatagacattttgaaaatatctttaatgacttggcagccttttgacaaatgtttgtagtgtcttgaagaaagtcaagttatttatttaaaagcatgcaaactctctctgctagctaaaccttgtcatttaacaataaatgatgcttttgctgataaatgattctttttatgcagactagcaaatgaaataggagatgatgtctgaaggcagatgaacattcagctgcctaatgcttccatctattataatttggttaaaaacaacaaactccccaaaataatcccccaaaccaccttaaattcgtcagttccagcacattgtcaatggattcactgtccttattctctgttttctttctttcccttctgtagcccaaaaaggtcagtggttgagtggcttttttggctatggatctttctcagagattatgcagccctgggcacagactgtggtggttggtagagccaggctaggaggaatacctgtgggagttgttgctgtagaaacccgaacagtagaactaagtatcccagctgatccagcaaacctggattctgaagccaagataatccagcaggctggccaggtttggttcccagattctgcgtttaagacgtatcaggccatcaaggacttcaaccgggaagggctgcctctgatggtctttgccaactggagaggcttctctggtggaatgaaagatatgtacgaccaagtgcnnn

SEQ ID NO: 19904 - DNA, 381 bp, Homo sapiens
  misc_feature 1, 2, 3, 4, 5, 6, 7, 312, 379, 380, 381: n = A,T,C or G
nnnnnnncgagatcatgtatacaaagaaaaaaaagaagtcatgctgtgtggcccattataatttttttcaaagactttgtcacaagtctgtctatattagacattttggagggaccaggcaatgtaagacaccgaatcctccatctcttcagtgtgcctgatgtcccctcatgatatgctgttgcttttttttctcctgcgccgagggcagtgggttctgtgtccacctttgtgctttgcgaggccgggccaaaaaatttgaaagcctgccacggctgaccagagcaggtgcttcaggagctctgccttagncgtcgtgttccagtattttctcgggggctggggccccctcgtatgaaagctcgttgccttctcctannn

SEQ ID NO: 19905 - DNA, 429 bp, Homo sapiens
  misc_feature 429: n = A,T,C or G
acgcggggcttgcatctctggggccaaggagtggtgggtgagatcttccatggccctggcatgggtgatataagcgggaccggtaaggtggtggagctcttaccagaccctgcagaaccctctccgtggtgttgaacttcctggaaccagggtgttgcatgttttcctcataatgcaggttggtgatggtgaagttgagggtgaacggcaccaggagagggccagcagttgtggggctggggagggaggatggagtccctgacccaaggtccactgtggaggtcccaggagctgaaaaaagtcctcatcagtgaaagcagaaagcactctcatggcagaaacggcaagaagatagactattatgaggtctgctgcatgtgggcttgagctgggtctgtctttggagctggggcagaggggagcttgagn

SEQ ID NO: 19906 - DNA, 3790 bp, Homo sapiens
  misc_feature 3786, 3787, 3788, 3789, 3790: n = A,T,C or G
cgtccgggcggcagaggagcggcggcggtggcggcgctgcagcagcgggcgggactggtatggtggttccacagggcagaccccgctgcactcacagggaggaggaggcggcagcggcggaggaaggcggcgcaccccgagaggtggattgtctcattgttagtgctgaatcttcttgcctacttgtatctgggaatttaactttgaagaggaagagtccgggctgtgcaatattcttcaagaagaaaaatttactttggttcagaaacacactgttgaatttaatcagctagccatggcaaattctgaggggtctgaagctatgctgaacagagtcatgacaaaagataacattggggttgcagtactgctagaacttcggaaggaatcgattgaaatgccgtctggaaagccacatcttggaacagaaaaacaacttattcttgtggctaacgcccacatgcattgggaccctgaatactctgatgtgaagttggtacaaactatgatgttcctctcagaagtgaagaacattattgataaagcctctcgcaacctcaaatccagtgttttgggagaatttggaactattccacttgtgttatgtgcagatcttaattctttgccagactctggtgttgtagaatatttgagcacaggtggagtagaaacaaatcacaaagactttaaggagttgaggtataatgaaagtctcacaaacttcagctgtcatgggaagaatggaaccaccaatggaaggatcactcatggtttcaagttacagagtgcctatgagagtggcctgatgccttacacgaattacacatttgatttcaagggtataatagactacattttctattctaaacctcagctgaacaccttaggcatcctgggccctctggaccaccactggctggttgagaataacatcagtggctgcccgcaccccctcatcccctctgaccacttctcactttttgcacaactggagctcttactgcctttcctgccccaagtcaacggcatccaccttcctggcaggaggtagtcaagcaccttcagaggacagccttgattcacttgtaaacttgtgaaaatctgaacataggggagtgaggtatggccactgaggatttttgcttgcttaagaatgatttggactttcaatctgattatttgataaggatatagtatgaaagccaggtgctagcaacagacaaattctgagcccaatatgctttatactgctagacagggattggtgtgtttgcacctgtctttcatttgtcataagagattttcctatttcttctacccaatagaatattttcatgcctggaaataggaaaatgtgtgaacagcgtattctcttcacacagaaatctgtagcactgcttttttgaggccagtagcaacatccagagatcattcttccatactttactccctcctttttcagacttgtttgtaaagtacagaatctgaatttagcctttatgattgtatatgatccacagaagacctgatttatgaaattttgtactaaaatcatttggaaatgattgtattgtaaactgaggctaaatttttttttaaacctgtttcatgtgttataaaggccagcttgtaaaagaagctgcaacagactttctctgctcatgatttgcactcttagggttttgttagcccttttgtactactttctttttaaattgagaacatggttctttacatataaatctgcttcaaccttaggatgttttcagaccagaggcaacttattcatgaatttttatgaaaactatctactaggacagataagctgaacagtgatgatctgtagacatttatggactgaatgtaatggttgatatatgtacattctgatatttttaaatctttaactttttaaagttaaaaacctacagctgcttaggtccagcttcttaactctttttgagacacttcctgtcctatctccactgtgcctgcctaaatttgttctcaccaagcactgcctgtgcatgcagagaaaatctgtgcatcctcttttatatttttaaaatactgtttaacatttgtgagaattttatgaaaatgcttttgtatgagctgtggctttttcccattgtgaagcattgaatatcacattttggaacatgttatagggtgagtccctggatctttgctcaccagatccaagcactgcttctcggtgtcattgcagtgtgctgcttgtcacccagaatactactatcatgtgaattctttttgtcgtcagtgtcttttccttagtctttttgttgttgttgttgttgttgttttaatcattccttttttaagaagaagtaattttccatttatgaagcagtatgaattagatgtattttcaaaacaggtccctaagacaattcttcagatcatttttaaaatgactaagtcattttagtatgtcaagcaagataaaaattacatcataccgtctattttgcccatagtgccatttagagatgaaaaccagctttaactttgcaaagtgaacatgtacatggtctgctctcatttattcattcttctctcaaaagtcaaatgaatgcagagggagcttggtcaaactgcttttgtttcaactgcaggcaggggagcaaaaggacgccatgtgagcattaggaaaaaaaatactcactcttactaacaatttttatacagaaaatgagtcattttggaaatgattcttatgtttttttttttctccttttagaaaattctccaaaaggttttgatgttgaatcttggtcttggacctgttttttcctttgagggttttttgttttttgttttttctaggatttcattgtgatgttttggttttgttttttgctttttgtttaagttgtgctgacaccaaacacatccagtttataatcagtacattggaaagctggtattgatgtagaaccagtgcataactttttatggggttttgttattggtttttttttgtaaagtgtgaataaaaggtatgtttactcatttttcctgaacactgtgttggtaatgtgcatcatgacaatttccagtgaaggtgagctggagctggttggactaatgagactgaggaagcagcttttcctacgatctgcattatgtaatcacaggtccagagagctttatggaagcgggagaggaggagcacttactcatgttgtatttgttaatggaggatgtcatcttttcatagatgctggaactagagtgcacttgttagatgctaaaggtttgagctttacacaaaatgtcttcatctgtatttgttattgtctacaatatatttgaatttggggcagcatattaagatgtaatggcctgttatgtcttgaaaatacttgttttgcctcttccaggcatactgcattctgtggatcagtttgaacagcttctccaccttatttggacagtgataaattgaaccaagagtgtagatttacaagtgtaaccttcaaaagaggaagaactatttggggtctgtaggtaatgaacagtcacaccaaaatagactatgatgcttttgttaagaaaggtttcatgttttagatattttccgtgtcctaaataattttcaataatctataatccctaaaatgcaataaaaactagtatgttttcaaaaaaaaaaagtcgacgcggccgcgaatttagtagtagtaggcggccgctctagaggatccaagcttacgtacgcgtgcatgcgacgtcatagctcttctatagtgtcacctaaannnnn

SEQ ID NO: 19907 - DNA, 526 bp, Homo sapiens
  misc_feature 1, 506, 507, 508, 509, 510, 511, 512, 513, 514, 515, 516,517, 518, 519, 520, 521, 522, 523, 524, 525, 526: n = A,T,C or G
ncgtctgcatcaatgctcttgcatcttgagcttttaaaaaattgccattcaaaccagcaatttgctgacaaggttcacgcgctatgaccatgactgcagttgatcctggggagtggcttgccggtctgcctggggatggcagccgcgtgcgttccctgtgctgtcctgtagggttgtggtggctttctgatattcaggttggtcccttttccttctttttggatgggctttcgaggttgggagaggaagctcagggatggaactgactaaacatatgtgagatgtttccttgtttgctgctcatggaggtttcatttctgaagtcttttcttgggagggaaaaggatgtgtggatatatgaggtgactctagaaccctcattttatggatgaagaaactgtgattcacagagggagagtgatttgtccagtgtcacgtggggagctggccggggagccagacctcctgtaccttttattgcagggtttattttatatatatttgcnnnnnnnnnnnnnnnnnnnnn

SEQ ID NO: 19908 - DNA, 666 bp, Homo sapiens
accctgagaagcatggggcagtagaaagagcatgtgggctttagagttcaaaccaagtcaggctcaaacatagttctgtgataagccctgagcaagttacccgggtcttccatttcccccttctggagaagtcctttggaggatgagtccttctggaggatgagtccttctggaggatgaagtccttctggaggatgagttcgttgtaagaataaaatgagaatgtaagacacctagaggatgcccgagtaaaaaatgacagttgctagtagtagtaatttgtagggctcattatctagaataattttgtttgacgttactaattaaaatgaactcttaaagaaaagcagtgtatttagactcttgtagttaagaaaaattacaccacagagccctttttactttttaaattcatttttacattttaaattcattgcatgtattcattatgattcccgttgctactattttttagacttgacaactacattttatttcttttcttccataaaaggtgttttacagctttcaccacagctgcatcagcttatagttactatcattatggccggaagactgttcaggtgataaaagactgatgaaagtcatccctcactgttagtaaggaagcagtatacatcaatgggaacagggcccatggaaatg

SEQ ID NO: 19909 - DNA, 1616 bp, Homo sapiens
  misc_feature 1601, 1602, 1603, 1604, 1605, 1606, 1607, 1608, 1609, 1610,1611, 1612, 1613, 1614, 1615, 1616: n = A,T,C or G
gcgtccgaacggagtggcggcggcatttcctggtgtctgagcctggcgcggaggctatgggcagccaggaggtgctgggccacgcggcccggctggcctcctccggtctcctcctgcagactaacgctgctttactcaaccaccctcttcctggccagagaggccttccgcagagcatgtctcagtgggggcacccagcgagactggagccagaccctcaacctgctgtggctaacagtccccctgggtgtgttttggtccttattcctgggctggatctggttgcagctgcttgaagtgcctgatcctaatgttgtccctcactatgcaactggagtggtgctgtttggtctctcggcagtggtggagcttctaggagagcccttttgggtcttggcacaagcacatatgtttgtgaagctcaaggtgattgcagagagcctgtcggtaattcttaagagcgttctgacagcttttctcgtgctgtggttgcctcactggggattgtacattttctctttggcccagcttttctataccacagttctggtgctctgctatgttatttatttcacaaagttactgggttccccagaatcaaccaagcttcaggccgtgggtttaatcggccgaggagattgttaccaatattacaagaaatggagcgtttataaactggaaagaggctaaactgacttggagttttttcaaacagtctttcttgaaacagattttgacagaaggcgagcgatatgtgatgacatttttgaatgtattgaactttggtgatcagggtgtgtatgatatagtgaataatcttggctcccttgtggccagattaattttccagccaatagaggaaagtttttatatattttttgctaaggtgctggagaggggaaaggatgccacacttcagaagcaggaggacgttgctgtggctgctgcagtcttggagtccctgctcaagctggccctgctggccggcctgaccatcactgtttttggctttgcctattctcagctggctctggatatctacggagggaccatgcttagctcaggatccggtcctgttttgctgcgttcctactgtctctatgttctcctgcttgccatcaatggagtgacagagtgtttcacatttgctgccatgagcaaagaggaggtcgacaggtacaattttgtgatgctggccctgtcctcctcattcctggtgttatcctatctcttgacccgttggtgtggcagcgtgggcttcatcttggccaactggctttaacatgggcattcggatcacgcagagcctttgttcatccaccgtactaccgaaggagcccccacaggccctggtggcctgcacctatcgcaatctgctcgggacattgcctcaggggggggtacgcggtccgaaggatctctgctggagcaaggtggcagcagatggcacatgcggggggccccggggacacccggaggtcccccaaacacgacatcccgaccaggtgccaaccgaaagggtcggggggaccggccgccgggtgggggcactcacccgccggggacccaaggacgaacccgggggcgcaaatattacgcannnnnnnnnnnnnnnn

SEQ ID NO: 19910 - DNA, 1277 bp, Homo sapiens
  misc_feature 1251, 1252, 1253, 1254, 1255, 1256, 1257, 1258, 1259, 1260,1261, 1262, 1263, 1264, 1265, 1266, 1267, 1268, 1269, 1270,1271, 1272, 1273, 1274, 1275, 1276, 1277: n = A,T,C or G
ccacgcgtccggctccgcgctctggaggctcaggcgccgcgtggggcccgcacctctgggcagcagcggcagccgagactcacggtcaagctaaggcgaagagtgggtggctgaagccatactattttatagaattaatggaaagcagaaaagacatcacaaaccaagaagaactttggaaaatgaagcctaggagaaatttagaagaagacgattatttgcataaggacacgggagagaccagcatgctaaaaagacctgtgcttttgcatttgcaccaaacagcccatgctgatgaatttgactgcccttcagaacttcagcacacacaggaactctttccacagtggcacttgccaattaaaatagctgctattatagcatctctgacttttctttacactcttctgagggaagtaattcaccctttagcaacttcccatcaacaatatttttataaaattccaatcctggtcatcaacaaagtcttgccaatggtttccatcactctcttggcattggtttacctgccaggtgtgatagcagcaattgtccaacttcataatggaaccaagtataagaagtttccacattggttggataagtggatgttaacaagaaagcagtttgggcttctcagtttcttttttgctgtactgcatgcaatttatagtctgtcttacccaatgaggcgatcctacagatacaagttgctaaactgggcatatcaacaggtccaacaaaataaagaagatgcctggattgagcatgatgtttggagaatggagatttatgtgtctctgggaattgtgggattggcaatactggctctgttggctgtgacatctattccatctgtgagtgactctttgacatggagagaatttcactatattcagagcaagctaggaattgtttcccttctactgggcacaatacacgcattgatttttgcctggaataagtggatagatataaaacaatttgtatggtatacacctccaacttttatgatagctgttttccttccaattgttgtcctgatatttaaaagcatactattcctgccatgcttgaggaagaagatactgaagattagacatggttgggaagacgtcaccaaaattaacaaaactgagatatgttcccagttgtagaattactgtttacacacatttttgttcaatattgatatattttatcaccaacatttcaagtttgtatttgttaataaaatgattattcaaggannnnnnnnnnnnnnnnnnnnnnnnnnn

SEQ ID NO: 19911 - DNA, 1674 bp, Homo sapiens
  misc_feature 1, 2, 3, 4, 5, 7, 9, 10, 15, 20, 22, 23, 24, 1646, 1647,1648, 1649, 1650, 1651, 1652, 1653, 1654, 1655, 1656, 1657,1658, 1659, 1660, 1661, 1662, 1663, 1664, 1665, 1666, 1667,1668, 1669, 1670, 1671, 1672, 1673, 1674: n = A,T,C or G
nnnnncnannttttnaaaancnnnaaagttaactggtaagtttagtctttttgtcttttatttcaggtccgggatccggtgatccaaatctaagaactgctcctcagtgagtgttgcctttacttctaggcctgtacggaagtgttacttctgctctaaaagctgcggaattctaatacgactcactatagggagtcgacccacgcgtccgctttggcctgggactctgcccctctacctcagcacagaatcgccccgggtcctactacagaatcaatccttgaacactgcctccacgtcgccggctcaatctgggcgagaacccagacttccaccgcagccccgcaatctgcagacctcagcggcagcgcaggtggcagacctgcctcctttgcctgtgagtcatggcagctcccatgaatggccaagtgtgtgtggtgactggtgcctccaggggtattggccgtggcattgccttgcagctctgcaaagcaggcgccacagtttacatcactggccgccatctggacacccttcgcgttgttgctcaggaggcacaatccctcgggggccaatgtgtgcctgtggtgtgcgattcaagccaggagagtgaagtgcgaagcctgtttgagcaagtggatcgggaacagcaagggcgtctagatgtgctggtcaacaatgcttatgcaggggtccagacgatcctgaacaccaggaataaggcattctgggaaacccctgcctccatgtgggatgatatcaacaacgtcggactcagaggccactacttttgctcagtgtatggggcacggctgatggtaccagctggccaggggctcatcgtggtcatctcctccccaggaagcctgcagtatatgttcaatgtcccctatggtgtgggcaaagctgcgtgtgacaagctggctgctgactgtgcccacgagctgcggcgccatggggtcagctgtgtgtctctgtggccggggattgtgcagacagaactgctgaaggagcatatggcaaaggaggaggtcctgcaggatcctgtgttgaagcagttcaaatcagccttctcatctgcggaaaccacagaattgagtggcaaatgtgtggtggctttggcaacagatcccaatatcctgagcctgagtggtaaggtgctgccatcctgtgaccttgctcgacgctatggccttcgggatgtggacggccgccccgtccaagactatttgtctttgagctctgttctctcacacgtgtccggcctgggctggctggcctcctacctgccctccttcctccgtgtgcccaagtggattattgccctctacactagcaagttctaaccctcctggtctgacactacgtctctgcttgtcttctcatttggacttggtggttcgtcctgtctcagtgaaacagcagcctttcttgtttacccatacccttgatatgaagagaagccctctgctgtgtgtccgtggtgagttctggggtgcgcctaggtcccttctttgtgccttggttttccttgtccttctttttactttttgccttagtattgaaaaatgctcttggagctaataaaagtctcatttctctttcaaaaaaaaaaaaaaaaaaaaaaaaaaaaaaaaaaaaaaaannnnnnnnnnnnnnnnnnnnnnnnnnnnn

SEQ ID NO: 19912 - DNA, 2353 bp, Homo sapiens
  misc_feature 1, 2, 2350, 2351, 2352, 2353: n = A,T,C or G
nnaccatgatcgaagtggtctcgatagcgtcgcatccatattcagaaacgtcattagagcccccagccaccctgactccccaccattccctcccacggcaaacgcacaaaacgtcttgagggagattttgacaagtcacccattccaggtgccacaggcaggggatgtttagtaatccaggatttctctgagaactgggatatgtggcctttttttttttctttttatcttttatctggaaactgggtttgggtcaaccccaggagtatttgcagaaggcccagcacagtggggggtattggctgcagggcagggaaggcattgccgactagataaccgtgtgagcttggactgagcgttggtggttcttcccaaaggaaaggaatttctcccggcctgccaggtctctgggccttcagcgcgggtcctggtgctgcggccacaccaccctggggtgctcattgacagagctgccataatgaacttgaaaggacgggaatcacgagggaagctggggctcccctgcccacaggagaggatccccgttcttcaagcttctctgctcagtgtctactaacgaccgacatttgctaatgtaaataatagtaaattattgagaattctaattcttttacacagtctgtttttaatctattttaattaaataaaatctatgactctaatgttgcataacaatgtttatttagttttacatttgtttacaatttcttataaacacttcattataattgttttatacaaacaacagtttaaatttacttatgtttatcatttatttgcttactagtttttcaatttcagataatccttttagaatcatttcccttcttgaagatcatccttttgtagtctctttactgaagttgtgctgaggataacatctgtttttcatctgagcatctgtttgtttcagtttcgcttgttgcaaattctaagctaatagtttttctcagaattctaccctcttttgggtacattgttgctgttaggaagcctactaagtatttgactgtcttgctttcactgatctttttctccccatggttgcttttaaaatcttgtatttggtatcttgtcatttacaataccttgagtctaggcctggattttatttaaatatatgtttggtatatattgtgcttcctgaatttatgaattcatgtttttccaacaaatttgtaaaattgtgttatctttcaagtactgcctctcctttattctctaaattttctctttctaggactcctagtctttataattcttccctcgaactctcttaactttccaatgttttctagctccttgtttctcctcactgctcactgggtaatttctttagatccagcttatagtttagttcacttgtctcttcagctgagtctaataaaatattcaacatgtctgagggcttttttcttatttcaataaatatttctcatttttaggagctctatttggttctttttcagatctgcctgtggttccaacttcattccttatgttggtgatgaaaccttgaagaactgagttcaatgtttattttttctatagctttcttgtcatgttagtttgtttcaacttgtgcctgtgatctctagtcataaaatactactacttgataataatctgtaggaatcttggaactaaattaggaatgtttccctcttgcttctgccaggagctagagcactgcaaactgaggaccactgaaccttctttaactgtcctctctagggcagcatctcagattccgatgtcttcttgtttctgatttgaggcaaactgcatatgacaatgttgctattggtatctgccatccagacaaccataatccacttgtatggcagaggaaaaatgtcgaagtatggttcttgaaaattctcctacttccagtgaacctattaaaagcagattttattcaggatctagttgttttataatatctagtctaacatacttgctggaagcaaaagtcttaattttatatattaaatatattataacagttatacagtaacctgagaaagcacgtattttatgtcatttcttactaatgggacttctctggaaaggttccctaccccttgatcagaacaaaacacacagtatacaggaactgagtgcacattagaaagctcctagaggatgaacttatcctaaagttgttgtctcatttggtagaaatttttctggtgctctattattaagatgttacatcaacattcactgttcaaattattattcttttttttttaaatttacttatgtattttagagacaatgtctcattttgtcacccaggctggagtacagtgatgtgatcactcgnnnn

SEQ ID NO: 19913 - DNA, 734 bp, Homo sapiens
  misc_feature 734: n = A,T,C or G
acctccaggcacagctaattttactttttattttcttgagacaggtctcactctgttgcccaggctggtcttgtactcttggcctcaagtgatcctccagccatgagccactgtaaatgtctgggaatgccaacttgaagcccagctggtcagaagttctagaggcccagacttgcaactggtgtctgaagggatggcagtcttggggactgagccctcaacctgagggatctgatgctatttccaggcagatagtgtcagaattaaattggaggatacgcagttagtgtctgctgcagaactgattgcttgcttgctggtagggggaaatccccacatatctgggggtcattgaagtctttggtgttgactcttactgtgtttgttgttttcatgtgagagcagaggaaaagcaaggaaatgttttcctctggtcagttttccagaccagtctttacagaaacacacacagagcttcaaacaacactacacttacacagccctaaaagttagtaagtacctctttcagttctgcactccaagcacttcaatgatttcagccttactgtagtcctggtgttgatttttaacatccatctctcagcaacacatggaaaacgaacaccaggtcaacggaaaagggagccggggtcctggcagaagcgtagtgccagccgcaatagggcggcgtgggtgcaacggaggggagcgccggcagcagcaccggacgcggn

SEQ ID NO: 19914 - DNA, 1174 bp, Homo sapiens
  misc_feature 1171, 1172, 1173, 1174: n = A,T,C or G
ttctagagcggccggccgggcaggtactatggcagttttgcctcaggtgctgaacatttctcagccctggctaaaagggagcagcacagggagagaaacaggataggaaagcagaatggcgagcagcctatggcccagggcctgtaatcccttcccaagactagctgctcagggtggtgcagggacaggaccagaccctgcgcctatttcctgccttctttcccctatagggaactctgtaggctgagccactgtcctgctcttatgacattatatcttgtgcctttctcctcagcagtgagcagtgagctactcctggcccaggccctaggggaaatggatcagtctttgaggtttctatttggggaggggagtacttaagatgagtcaaaagacactttcctctgttccattccccatctcagggactcctgaatattcagcctctccaggctggtgtcttctagtttcccccactgggaatgctggctgggagagccatgactaccagacttttcctcaggctccttggcatgttagtctgaattgttcttgagcactgtactactgacccaacaactgtgactagctggccacgccattcagggctggtgtggcatttatgtgtgtgtgtgtgtgtgtgtgtttttcctgtttgcccagcagtgcattgtgggttccaagagtgggtagtgtgtgtatgtgtgtgtgtcagagggagacctggcaggcacctctttgagagtagctgtggtcagagctgtttggtcagtgcattatgttgaatgaggtccaggaacccagagccacccagcagacaccactgtggcttgccagctgccaagatggagaagcatgtgcccctgtagagcgtctccccagaacagacccgagccactcgcttcctctgtgctgtgacaacattggtgccccggcgagaacgggcggtgttcaccaagaagccccacggggcgccccatatatattatcacagaaaagacgctactgtgatacaaaccatgacggcgacccgagacctactacgcaacgatgctgatattacaagacaccatacaacagaggagagacgaacacaaaacacactatacaggagaaaatcctagctaaaagaagagctgcggtcaaaacaacagacaaaggagcgagtaannnn

SEQ ID NO: 19915 - DNA, 1877 bp, Homo sapiens
  misc_feature 1863, 1864, 1865, 1866, 1867, 1868, 1869, 1870, 1871, 1872,1873, 1874, 1875, 1876, 1877: n = A,T,C or G
cgacccacgcgtccgggtgggcggaactcctagcggacacctcgtggagtccggccggaagagcaaccgagatgaaggtgaagatgctgagccggaatccggacaattatgtccgcgaaaccaagttggacttacagagagttccaagaaactatgatcctgctttacatccttttgaggtcccacgagaatatataagagctttaaatgctaccaaactggaacgagtatttgcaaaaccattccttgcttcgctggatggtcaccgtgatggagtcaattgcttggcaaagcatccagagaagctggctactgtcctttctggggcgtgtgatggagaggttagaatttggaatctaactcagcggaattgtatccgtacaatacaagcacatgaaggctttgtacgaggaatatgtactcgcttttgtgggacttcttttttcactgttggtgatgacaaaactgtgaagcagtggaaaatggatgggccaggctatggagacgaggaagagccattacatacaatattaggaaagacagtgtatactgggattgatcatcactggaaagaagctgtttttgccacatgtggacagcaagtagacatttgggatgaacaaagaactaatcctatatgttcaatgacctggggatttgacagtataagtagtgttaaatttaacccaattgagacatttctcttgggaagttgtgcatctgacaggaatatagtactgtacgatatgaggcaagctactcctttgaaaaaggttatcttagatatgagaacaaatacaatctgttggaaccctatggaagctttcatttttacagcagcaaatgaagattataacttatatacttttgatatgcgtgcactggacactcctgtaatggtccatatggatcatgtatctgcagtgcttgatgtggattactctcccactgggaaggagtttgtgtctgctagtttcgataaatctattcgaatctttcctgtagacaaaagtcgaagcagggaggtatatcatacaaagagaatgcaacatgttatctgtgtaaaatggacttctgacagcaagtatattatgtgtggatctgatgaaatgaacattcgcctgtggaaagctaatgcttctgaaaaattgggtgtgcttacatcacgagaaaaagcagccaaggattataaccagaaattgaaggagaaatttcagcattatcctcatataaaacgtatagctcgtcatcgacatctaccaaaatctatctatagccagattcaggaacagcgcatcatgaaagaagctcgtcgacgaaaggaagtgaatcgtattaaacacagcaagcctggatctgtgccacttgtgtcagagaagaagaaacacgtagtggcagttgtaaaataattggtattcctaacaatcctgatgtataattatttgttacttttgatttgagaactctacaaataaaagtgctgggactagattaattgcaaacattttagttatatgtgtagagctttattgttactccttttagctaccctgaaaaatgatccttaaaggtggcctagttggtaagactgttttatccttaatctgcattcttctttcattgtagaatacagtatttgcactcattttttcttgtttttattacagatatacttactttctctttgatctatatggtgaacctatacattcaaatgagcttagaacaaatctctagttactttaaaattactgaatagatgcgaggtttcgggatcccctacattacaagggggatttgacagaattttaaggctaaaaaggggggataacaaaaggataattaaaaaaagggggaataagnnnnnnnnnnnnnnn

SEQ ID NO: 19916 - DNA, 1360 bp, Homo sapiens
  misc_feature 1, 2, 1360: n = A,T,C or G
nnatagggcgggttggagctccacgcggtggcggccgaggtactcttcctgccttcccccatatactgaagtttgagaggctgggaaggtgcggaatgggaaaaggagcagctgcttatgttcagtttaacattctctgggtttctccatctaggtcttgagttcattctcttcctgtccttttggcttccttgtttaacctggtccctgtttcaaggagagaagcctcatcagtgccaagtctgtgggaagaccttctctcagagtggaagcaggaatgtgcatttgagaaagcatcacctgcagctgggagcagctgggccgcctgcatgagtagtcggacactgtgactcatgctattgttaaggctctgacccaaaacggggtaagaatccagccacctggtgaggttccttgactgcaataccattctatctgggacgtgataaataagtgctgctaaagatccccacgttcctgtcttccagtgcctgatgttgacaacattcacctggtgtccagtccagtcaagggaggacaatcatatgaagttgtctgttcgtaactgcagtaaatccacaagaagtttactaacacaaggagattataacttgaaaggacggacatgagcgtgggtgcctgactcctggaagagcaactctatctgatctcaaaatgcgtatactggaacaggatgccttagcccacaacagaaccagaatgaatctttgaaggcacaagactctgcttttgccactcttcctctgttcctggtatagaagatggatgtaggagagcttcttttctaactaccatctgatcagacaaggaatgaagcaatgactgtgggctgggaaactgtacctacctctcttcccactgcaaatttctgggatagaccaaaagtgaatttgattatgtgttggctgaagttcttcattctgactgttgaggggaggttttcctttgaagagttttcatcccagactcagctgtcttttcacatggatgaaataattcctgctaccaacaacagagcttcaccaggaagttgagttttcaagatgccttgttgctttgaagaagggagtgatgtcaattctcttgttacattctccctttagcaacctgagtaagagactctctgccactgggctgcaaaaaaataaattacttgaatctccccttggcccaggctgaggtactatcttgtcctatacacttctacttggtcactttgctttcttcgttaatggaacatacagtagcatgttaagagggatttcatgtttttgttttctttcaagttaaaaataacatgatggcaatacctcccgtttccttaaataaacaaacaccn

SEQ ID NO: 19917 - DNA, 3247 bp, Homo sapiens
atctgagggcaagaagaacgatttgcagaagctcccagttttcttggctgtggcacagtcgctttgagggccaggttccttcggcttcctcccgactcccctgcttccccccgtaggattcccgttggtatcgtccgagccccacctccctcctcttcgcccccgcacgccgaaaacaggggcctctcacgtgacccctgcgcgctcccgcgggggagcgtagtctcggaggcggcgccgcaggggattgaggggttgactgagcgttgcgagccttagctttctcccgaacgccagcgctgaggacacgatgtcgcggctctcccgctcactgctttgggccgccacctgcctgggcgtgctctgcgtgctgtccgcggacaagaacacgacccagcacccgaacgtgacgactttagcgcccatctccaacgtaacctcggcgccggtgacgtccctcccgctggtcaccactccggcaccagaaacctgtgaaggtcgaaacagctgcgtttcctgttttaatgttagcgttgttaatactacctgcttttggatagaatgtaaagatgagagctattgttcacataactcaacagttagtgattgtcaagtggggaacacgacagacttctgttccgtttccacggccactccagtgccaacagccaattctacaggtacaacaaataacactgtgactccaacctcacaacctgtgcgaaagtctacctttgatgcagccagtttcattggaggaattgtcctggtcttgggtgtgcaggctgtaattttctttctttataaattctggcaaattctaaagaacgaaattaccacactctgtaaacagacccattgaattgataaggactggtgattcatttgtgtaactcactgaagccaaaatactatcttttaagatgtcccacacggaagacgctattccaggatctttaaatttccatggatgcatataggatgtttgggagcataatccgtgaagaaaaaatcgattaaatcattgtgttcaacaggaatatttaaaatattctgcatgaatcctgtggctgtctcattttaaatagctgctgctgtgggattatattttttttccttaacatgccaaatataactttctgaaagtgatggaaaatgttgtcttgtgcagacaacatcatggctcttggcagtttaaatttagtaattttaatttagtgaacagaattgagaagaacgtgccaaatgagaatcaattaggtggatttttggctgtcatttcaaaagtggaataaatttattaatttagtagtactaaatggtatccttagattaaaattttgtgcttgataacagctgttttttctacattagaaataagatgtcacacaaggaactacattccagatttaaagaaatgaaaggataccattagtgtgtataacagattattgttcatacttgtaaagcatcttatgtcattgagaatataaagaacagtgccttagaagacagtgaaaggtaagctctagcttaatgtctatgatttgttctttgacattaaggaaggtaaggattggtcagaggatgtaacttgatgtgagcagtagtaaacctgttttagatatcatactgttaatattttattgaaaatttatttcagagcggagaaacttaagctaaagtctgttatacagaattgaaagccttcgtatcttgaacctcccaacatttttcttatggctgttgaaaagtatagggctaaattgatttaattacactttcctttgtactttaacttctatagttttctcctttagagggtcgtcttcagttttagaggtttacttctcccttgcctttgactcattggactagtgcagaggctttaagtagtttaaaatgggcttttgcttttctaggtcattaacgttttttatttagtttctttagccaatagtggctgagtttcgcacttgattttcaatattttatagtaagaaatgacaaactgctttgtttcatttcataaacaaactctgcatttagataactattaaaggttgttaagatgaagatttactgtttctttgttactcgttggtacagctgtttgttttacttgcacatttgtacatatacttaatgttttcaagtgccttaattgtttaaaatctctggcttcaaagtttcttggggaaaggtcggtttacctcacattttttgtttccattagtaatattctaggtacctcacaaaatgtattatggtgccatggctgttagtttttagtgagtgctgtaggattaattcgaaaataggcagaattccattcctcccaaggtggcaaaaattagctatactgatgtaattgtcatttacctgggtatgaattccctgacacacattcatgtcaacatatgtagcaaattttgtgaaaacataacaatttgaagcttctgtaattttgagcactgctctaacaacaagcataatataaaattagttagattttgcaagtctacaaatgagctcttgcaacagaacttcacagcctttttacttttttcccctaactttaggcaatgtaggtatcttgagccattaattttggggtttttttaaaatccagaaggtatatagaaaccttttcagatttttcatctgattggttcttgcagatgttcttctatcaaataccttattttaccttacagatatttgttgcacaggcagatactgctgtatttagacatttctatttcagttcattaaaaactgcaaaaccaatctgtatcatgtaccaaactgacttaaaataaatctacatgtttatgaaaaacaaaaaaacaggaacaaaaaaacacaaacaaaaaaacaacaaaaatacagcaaaaaaaaaaaaaaaaaaaaacaaaaaaaaagggaggcgcgcacagagagcacacgacaacaaacgagttcttcaaaaacaaccaacgccaaacgagcagaacacaccaacatgataggccggcggcagcagtcgcacccaagagacgctctccaaccaacaaaccgtgggagcaggcgcaccaccaggaagtaaccgaagacaagcaaaagacgccgtgtgcgaacacgcgccgcggagacaagcgcggggtgggccaccgaagaaaaaaggcggaggcagaaaggcgtacgaacgaacaataaagtgcgccaggatgactaaaaagccgcgggggcgataaaaaacccgcgc

SEQ ID NO: 19918 - DNA, 3401 bp, Homo sapiens
  misc_feature 3313, 3331, 3364, 3378, 3391, 3399, 3400, 3401: n = A,T,C or G
gggagtcgacccacgcgtccgcgcgcgcggacgcttgctgtcgggccgagcagctcggcccttcaaacttaacccccagcggccttgcggatgctgactaggggaggggaccgaactagcttaacccgagtcggccgtgttgcagaatcggggcagggggttgcctaacccgagttcgtcctgccgcagagccgtgctaggcactgaggcggtgacaggcccagcccgggctgcgggccagcggacgcccaggttggtaggggcgtggggcagcgcttggtgtccgatgcgcgcatgcgcagggtctacgcgggaagctggaagtggtgctcaggacctcagcaccctgctgtgcctggaggagagcatggaagagcaggatgagaagcccccagagcccccgaaggtctgtgcacaggattctttccttcctcaagagattatcatcaaagtcgagggagaagacactgggtctctgaccatcccatctcaggaaggagtgaacttcaaaattgtgactgtggacttcacacgggaggaacagggtacttgcaaccctgctcagaggaccctggacagagatgtgatcctggagaaccacagggacctagtctcttgggacttggcaactgcagttggaaaaaaagattcaacttcaaagcagaggatttttgatgaagaaccagctaatggagtgaagatagaaaggtttacaagggatgatccttggttatcttcatgtgaagaagtggatgattgtaaagaccagttggagaagcaacaggaaaaacaagagatacttttgcaggaagtggcattcactcaaaggaaagcagttattcatgagagagtctgcaaaagtgatgaaactggggagaagagtggtctgaattccagtctattttcatccccagttatacccataagaaaccattttcataaacatgtatcacatgctaaaaaatggcatcttaatgctgctgtaaacagtcatcagaagattaatgagaatgagacactatatgaaaataatgaatgtggaaaaccccctcagagcattcaccttattcagtttacaagaactcaaacaaaagataaatcctatggatttagtgaccgtattcaatctttttgccatggtacacccctacatatacatgaaaaaattcatggaggaggaaaaacctttgattttaaagaatgtgggcaggttttgaaccccaaaatatcccataatgaacaacagagaattccttttgaagagagtcaatataaatgtagtgaaacctctcatagttcctcccttactcaaaacatgagaaataattctgaagagaaaccttttgaatgtaatcagtgtgggaaatccttcagctggagctcgcatcttgttgcacatcagagaactcacacaggggagaaaccttatgaatgtagtgaatgtggaaaatccttcagccggagctcgcaccttgtttcccatcagagaactcatactggagagaaaccttacaggtgtaatcaatgtgggaaatcctttagccagagttatgtccttgttgtgcatcaaagaactcatactggggagaagccttatgaatgcaatcagtgtggaaagtcattcaggcagagctataaacttattgcacatcaaagaacacataccggagagaagccctatgaatgtaatcaatgtgggaaatcatttatccagagctataaacttattgcacatcaaagaattcatactggggaaaaaccctatgaatgcaatcagtgtgggaaatcctttagtcaaagttataaacttgttgctcatcagagaactcacacaggagaaaaaccctttgaatgtaatcagtgtgggaaatccttcagctggagctctcagcttgttgcacatcaaagaactcacactggagagaaaccgtatgaatgtagtgaatgtggaaaatcttttaaccgcagttctcaccttgttatgcatcagagaattcacactggggaaaaaccgtatgaatgtaatcagtgtgggaaatccttcagccagagttatgttcttgttgtacatcagagaactcatactggagaaaagccctatgaatgcagtcaatgtgggaagtccttcagacagagttcatgccttactcaacatcagagaactcatactggagagaaaccatttgaatgtaatcagtgtggaaaaacatttagcttgagtgctcgacttattgtgcatcaaagaactcatactggagagaaaccctttacatgtattcagtgtggaaaagctttcattaatagctataaacttattaggcatcaggcaactcatactgaagagaaactctatgaatgtaactagtttgtaaatcagctgggatttcttcctttttatttcattcttttaaaaaatttattttaaggtagtacatgtagttggaagaactactataaaaacaatatatgtgggaaaacttccagccctctgttaattgtgtgtctcaaatttgttctggaaaagaaagggggaaagtctatgaacgacttttcaacctggcaattccatatacaatgttaaacttgattcttatgacatattcctatgaaaataataaatactggcacttttccttgcagaaagcactcagacctgaatcagagaaaatcatatgccaaagccaactgccagtgttagacctctttttccataaagagtaaatggaatgctaacactagtgggcttattgagaaaatttaaaggttgctgtagtgtttagaacttaggctggaaaaccatattttagtgcatcattttactacatgatcttccaattagatagcttgtaatctgttccttacagcacttgctgttgttacatgtgaagattttataaattttaggaaagtgtctatgatatatagtgaaaagtgtgggaaaagaatatagaaataatattcacttctaaaaccattatgataaaatatttgtgtatggattagaatagaaagggattatggatgtatctattcaatttctcagtttatgttgggccttcctttttggaatgtacgctgttatgctatgataaatgatataatgagtaaaaattattcaaagccaaaaatgaaatacaaaggatttccttctttgactatttaggggaagactaaggcaacccaaattggcaaaggatccctcaggggttaatgagggtttttggtttggggaataggcctgagcccggtttaccacttaggggcaccggattcctagggaacattcctcattggaaaataaaatggggttccnggggaaattggggtaacntaggaaattttttggcccagaaatggggtttcntattggagggaacntgaggattgcctngggggagnnn

SEQ ID NO: 19919 - DNA, 507 bp, Homo sapiens
  misc_feature 501, 502, 503, 504, 505, 506, 507: n = A,T,C or G
ccgcgtccggcgccggggagcagtccgctacggagctccagcccttctctgagacggggaccaggggatggcagccatgcacctgacagcctggccccagaagtcggtgacctttgaggacgtggctgtgtacttcacccaggcggaatgggatggcctgtcccctgcacagaggaccctgtacagggatgtgatgctggagaattatgggaatgtggcctccctgggatttccacttctcaaacctgctgtgatctcacaactggagggaggaagtgagctggggggctcatctccactggctgcaggaacaggcctccagggcctccagactgatggagtctcgctctgtcgcccaaactggagtgcagtggcaagaacttggctcaccgcaacttccgtttcccgggttcgagcaattctcctgcctcatcctcccgagtagctggaactacagtagatattcagactgacaatgatttgacaaaggaatgtatgaannnnnnn

SEQ ID NO: 19920 - DNA, 1270 bp, Homo sapiens
  misc_feature 1267, 1268, 1269, 1270: n = A,T,C or G
cgcgtccgttttctcctggcaccctgtattcatggccttggcgttctgcctctgcatggctgaagccatcctactcttctcacctgaacactccctgttcttcttctgctcccgaaaagcacggatccggctccactgggcagggcagaccctagccatcctctgtgcagctctgggcctgggcttcatcatctccagcaggacccgcagtgagctgcctcatctggtgtcctggcacagctgggtgggagccctgacactgctggccactgctgtccaggcactgtgtgggctctgcctcctttgtccccgggcagccagggtctcaagggtggctcgcctcaagctctaccatctgacatgtggactggtggtctacctgatggctacagtaacggtgcttctgggcatgtactcagtatggttccaggcccagatcaaaggtgcggcctggtacctgtgcctggcactgcccgtctatccagccctggtgatcatgcaccagatttccagatcctacttgccgaggaagaaaatggaaatgtgagttcctgcgaacgctgaatctaggtgggacgcttgccttgaacatcatggttcctttggtgatctataagggatctatttaagaagtggtcaggttttcgcacttcttggctggtccagggactgcagaaaccaaagctgctattgttgaggaataattcagtgggtcaaaatggggagatgtactgggtatgagtggaaggtgatggagagcctgatcctgaagcctctacttgatgagagacagagttttgggtggtgatagtgatgtgctggtggtcatttcttgcttgtgtgcctgatgaaaaactgggttcctgtaagttatgaatggcatccagggatatttgggttacttttaagaaagcagtgtgatgtagtggagagagcccatggatctttattttatgggatatggtcctctttaggctctgttgtactacctttaggtacattccatatcttaagaccactgtttctttatctgtgaaatgtttctatactatctctaagtcccttccttctctaatatacagcgtctgtcaggtcgatgtctctagaactactctcccagctgtggacctacgtggaccacttagcagactcagggggtagttctttactcgtccctttactacctcaggaaccggggtattatctactagtgaattcgcgaccgcctgcaggtcgacctatatgggagactccctacgcgttgtannnn

SEQ ID NO: 19921 - DNA, 2674 bp, Homo sapiens
  misc_feature 1, 21: n = A,T,C or G
nagtcgacccacgcgtccggngcgagggtcggggtgatctgctggatctccggcagcatcctgcagtccggcccaggagagaagtggggaggcggcggtgggggcggggcggcgtccggctctgagagagctgggggaggagcgcggcggcgacggcggcggtggctctagaaggggaggtggaggatctcctttcctcttctcagacccgggagcgtccgggacgcggagcccggagctggggcgacgaggcgattgcgggggcctgggctagctgctggctaccaatattctactttctgtctctatgaatgtgactaccctggttacctcatataatctccctggaaaaggagacatgaatgtctgcaatgatacttcctgacaagaagttgatacaagaaaaggaaaggagattaacagctagtgagcagaatttcgaacagcaggatttcgtattttttgcttccaactgcacacttccgttgcccacttttaaatcagagatacctacactcaaaacccagacaaggcaaaaggatacttttcttgtatattttttgagatcgaagaaacgacaatgtccaggaaacagaaccagaaggattcatcaggattcatttttgatttgcagtccaataccgtactggcccagggaggagcttttgagaacatgaaagagaagataaatgcggtacgtgcaatagttcctaataagagcaacaatgaaattatcctggttttgcagcactttgataactgtgtggacaaaacagtacaagcattcatggaaggtagtgccagtgaagtactcaaagaatggacagtaacaggcaagaaaaagaacaaaaagaagaaaaacaaaccgaaacctgccgcagaaccaagtaacggcatcccagattccagtaaatcagtttccattcaagaggaacagtctgcgccttcctcagagaaaggtggtatgaatggctaccatgtcaatggtgccatcaatgacactgagtctgtggactcactcagtgaaggtttggagacactttcaatagatgccagagaattggaggatcccgagtctgccatgctagatacgctggatagaacaggatccatgctgcagaatggtgtctctgattttgagaccaagtctttgactatgcactctattcacaattctcaacaacccaggaatgctgccaaatctctctcaagacctaccacagaaactcagttttcaaatatggggatggaagatgttcccctcgccaccagtaaaaagctaagttccaatattgaaaaatctgtaaaagacctccagcgctgcacagtgtctcttgcacggtatcgagttgtagttaaagaagagatggatgcctccattaagaaaatgaaacaagcctttgctgaattggagagctgtttaatggatcgagaagtggcgttgcttgctgaaatggacaaagtgaaagctgaagcaatggaaattttgctcagccgacaaaagaaggctgaacttctaaagaagatgactcatgtggctgttcaaatgtcagagcagcaattggttgagctcagagctgatatcaagcactttgttagtgaacgtaaatatgatgaggatctgggacgagtagcccggttcacctgtgatgtagagaccctaaagaagagcattgattcatttggacaagtgtctcatccaaagaacagctattcgaccagatcccgatgtagctcagttacatctgtgtccttgagtagcccaagtgatgcctctgctgcttcctcttccacctgtgcctctcctcccagccttacaagtgctaacaagaaaaactttgcaccgggagagactcctgcagccatagcaaactccagtggccagccctaccagccacttcgggaggtattgccagggaacagacgaggaggacagggctataggccacaaggccaaaagtccaatgaccccatgaaccaagggcggcatgacagtatgggtcgttacagaaacagctcgtggtattcatctggttccaggtatcagagtgctccatctcaggcaccaggaaacaccattgaaagaggccagactcactctgcagggaccaatggaactggagtcagcatggagcccagccctcccacgccttcattcaaaaaggggctcccccagcgcaaacccaggacctctcagactgaagccgtgaactcttgagagaaaatccagttggcctctctcctctatccacacaattcaacttgataactggactttaggaaacttacagttagatgtaataacaaaaagaagtttatgcgtatcactttttgtgccattctaagtatttttggtttcttgtctccttatttcctctttaccatttttggaggggaagctattttttttccttgatctttcccagtgatatggattgaatctggttggtcatttccaccaggaatcagaggcagctgttaccaggtttcggccttccagttgatccctccactgtccaggctgtctcaggaggaggtgaatcagagctagtctgtcacctttccaatctaagccgaagccacaggtgcctgacaggttcccttctaacaactatttgaccaagagaggcaatcaggggggttgtatactgcactggattcgccagagaaggga

SEQ ID NO: 19922 - DNA, 870 bp, Homo sapiens
  misc_feature 870: n = A,T,C or G
gcgtccgccacgcgtccgaacaagtggccaacccaggtttttaacccaagtctagtggtcatcctattctttccacaccaacatgccaaaagccttacctcgaaagaaaatataatttgcaagaagcatcacagtgccggggtctatattctcgatcaggttgttaattttcccatgggttttttgactgataaagtcattgatctgcttctgagccatttccaaattctgaaagttggtaaggatggtttcggcactgtaaaagttcttggcatcttccaaaaacttacgctgtggctgcagcctctggtcaatgaacagcgtgttcccaatgctcagtttgaggtcctgggtcttctgggtcagctcgtggatgatgtaatggaagccctcatgaagatctttttctggcatctttctgaagttgaacccctgcttgatctcgtccagggtgctgtcctgggcacccaggcacagcatggagaaagctgtagagatgctcaagggggataggaagatgttcctgccagggttgtaaaaggccagcttcttgagcagcttaaagcctaagtccatgttctgccttgcaagctccttggctgccatcctttgcttccatccttggacctcgctcaaagctttataattccttggtgagaagctcggctttagaagacctttcaccgtgaggagaacagccagaaaaatggccaggcctagtgtggggttcattttccttgaagaatatcctgttgagtagtagacctgtggtcagcagaaaaaaagaacatgatgaccccattgcctacatgttacccagaggaagaccagatgaaagaagaaatacagtgactattatgtgttgtacan

SEQ ID NO: 19923 - DNA, 3360 bp, Homo sapiens
  misc_feature 3356, 3357, 3358, 3359, 3360: n = A,T,C or G
gacccacgtgcgcgtggcgcccccgcgcgggccggcccccgcgtccgggctgggcacggggccgcggggagcagctcgggactgaaccgagaggtgccgaaggaaccggcgggccgcttgatcccgctgcagacgtaggagatgcctgggacaaggaggccaccttctcagggcaaaagaaaaagaaggtgacaggcgttgagaccaccgaagggaacccatggctaggatcagtttttcctacctctgcccagcctcctggtacttcactgtgcccacagtgagtccatttctccgtcagcgggtggcattcctgggactcttcttcatatcctgtctccttttacttatgttaatcatagactttcgacattggagtgcttcattaccacgagataggcaatacgaaaggtatttggctcgagtaggggagcttgaagctactgacactgaagacccaaatctgaattatggacttgttgttgactgtggcagcagtggttcccggatttttgtttatttctggccaagacataatgggaacccccatgacttgctggacatcaaacagatgagagaccgcaacagccaaccagtggttaaaaaaatcaagccaggaatctctgcaatggcagacactccagaacatgccagtgattaccttcgtcctctgctgagctttgctgctgctcatgtgcctgtgaagaagcacaaggagacccctctttacatcctctgcacagcaggcatgaggcttctccctgagaggaagcagttggctatcttggctgacctagtgaaagatttacccctggagtttgacttcctcttttcacagtctcaagcagaagtgatctctgggaagcaggaaggggtttatgcatggattggaatcaactttgttttgggaagattcgaccacgaggatgaatcagatgctgaggctacccaggaattggcagcaggacggagaaggacagtagggatactggatatgggaggagcctctctccaaattgcttatgaagttcctacctcaacctctgtccttcctgcaaagcaggaagaagctgccaagatcctgctggctgagttcaacctgggctgtgatgtgcaacacactgaacacgtgtacagggtttatgtcacaacttttctgggtttcggaggcaactttgcccggcagcgctacgaagaccttgttctgaatgaaactcttaacaaaaacagattgcttggtcagaagacaggtctgagtcccgacaatccatttctggatccctgcctgccagtgggactcacagatgtggtggagaggaacagccaagtcttacatgtccgaggaagaggagactgggtgtcttgtggggcaatgctgagccccctgctggctcgctccaacaccagccaggcctcactcaatggcatatatcaatcgcctattgacttcaacaacagcgagttctacggcttctctgagtttttttattgtacagaggatgtgttgcgcattggtggccgctaccatgggccaacatttgccaaggctgctcaggattactgtggcatggcttggtcggtactaactcagagattcaagaatggcctcttttcatcacatgcagatgagcatcgactcaaatatcagtgttttaaatcggcttggatgtaccaagtcttacatgaaggattccactttccctatgactacccaaacctgcggacagcccagctggtgtatgaccgagaggttcagtggacgctgggagccattctatataaaacacgattcttaccactcagggatcttcggcaggaaggtgtccgacaagcccatggtagctggttccgtctctcctttgtatacaaccactatctcttctttgcctgtatcctggtggtgctactggccatcttcctataccttctgcggctacgccgaattcaccaccgacaaacacgagcctcagctccattggacttgctgtggcttgaagaggtggtgcccatgatgggagtacaggtggggccgtgaggctggaccaggactagagaagcttgagcacccccgagttgctgctcattgaattcctccactttcttatatagcctcagatgctgtgatgtctgaccttgtggatatttgcccttggaatttctactttactttctaccgtaattccttctccgtacccaggtcttctctgagagaagctataatttaatctgtgaggaactaaatgacaggagattggtgctaatacgggggaccaagctttgtccaagtgaagcaggcttcgactccttctgagaggtctggtgtgttcctagaatctcaccttttcttcccttgctaaagcatgaagtttggcatttggcacactggaagcctggttgaaatgaaatttgtagcatctgatacaaagccagagacattctagcaagtgcagcagccccttctttctctgtaacagagatatcatttatgtggagatccacaacctttaacagggatccaagatctttgcagttcaatcgaccacataggaatttccaggcaccaaaatgatataacttccttgcttccttgacaaagaagccatcatgggtgtgatccaagatccctgtcgtagtgttgatgatgttagtacatgattttaaaggttagaaccccttctaaatgaatggtctgtggaagattttagtatcttatctgatgcctggtatgatgaggatagaaaatttttccatttttatgtgcctcacaggctgtttgggcattaattttgctttttgagccttaagtgtgttagtaggatggagaaactgtgatggggactgggaacctggatttgtctgattttaggtcactgttccctgggcctgtttttgtgagcccttacacaggaagatataaagagagttctttcatttcactgctaaaatcagtatgtagtatggggaatgtatttgggttgtttttaaagaaaaggggaacagaatcaggagagtgggcaaaggcaataaaatcaaagttcttattaattatttctgagaaatagaagtttctcaatttatgactcttggaatgtctgaaagggagcaaatttggaatagatcaatctgttaataagccatctggcaactttcagaacctctattaagagactgctgagtcacaaacagcacttccattaatgaagcgagaggaaaagccataataattacatcttcacccactacccttccagagctttgcttctcctccacatttagccattaaattgcatgaggatttctctccaaaaaaaaaaaaataaaaaagggcggccgctaacaaagtctagagaaaaaannnnn

SEQ ID NO: 19924 - DNA, 1971 bp, Homo sapiens
  misc_feature 1, 2, 3, 1943, 1944, 1945, 1946, 1947, 1948, 1949, 1950,1951, 1952, 1953, 1954, 1955, 1956, 1957, 1958, 1959, 1960,1961, 1962, 1963, 1964, 1965, 1966, 1967, 1968, 1969, 1970,1971: n = A,T,C or G
nnncctgctgctcggtctctgtctatactggctgctaaggaggccctcgggggtggtcttgtgtctgctgggggcctgctttcagatgctgcccgccgcccccagcgggtgcccgcagctgtgccggtgcgaggggcggctgccgtccggcgaggcgctcaacctcaccgaggcgccccacaacctgtccggcctgctgggcttgtccctgcgctacaacagcctctcggagctgcgcgccggccagttcacggggttaatgcagctcacgtggctctatctggatcacaatcacatctgctccgtgcagggggacgcctttcagaaactgcgccgagttaaggaactcacgctgagttccaaccagatcacccaactgcccaacaccaccttccggcccatgcccaacctgcgcagcgtggacctctcgtacaacaagctgcaggcgctcgcgcccgacctcttccacgggctgcggaagctcaccacgctgcatatgcgggccaacgccatccagtttgtgcccgtgcgcatcttccaggactgccgcagcctcaagtttctcgacatcggatacaatcagctcaagagtctggcgcgcaactctttcgccggcttgtttaagctcaccgagctgcacctcgagcacaacgacttggtcaaggtgaacttcgcccacttcccgcgcctcatctccctgcactcgctctgcctgcggaggaacaaggtggccattgtggtcagctcgctggactgggtttggaacctggagaaaatggacttgtcgggcaacgagatcgagtacatggagccccatgtgttcgagaccgtgccgcacctgcagtccctgcagctggactccaaccgcctcacctacatcgagccccggatcctcaactcttggaagtccctgacaagcatcaccctggccgggaacctgtgggattgcgggcgcaacgtgtgtgccctagcctcgtggctcaacaacttccaggggcgctacgatggcaacttgcagtgcgccagcccggagtacgcacagggcgaggacgtcctggacgccgtgtacgccttccacctgtgcgaggatggggccgagcccaccagcggccacctgctctcggccgtcaccaaccgcagtgatctggggccccctgccagctcggccaccacgctcgcggacggcggggaggggtagcacgacggcacattcgagcctgccaccgtggctcttccaggcggcgagcacgccgagaacgccgtgcagatccacaaggtggtcacgggcaccatggccctcatcttctccttcctcatcgtggtcctggtgctctacgtgtcctggaagtgtttcccagccagcctcaggcagctcagacagtgctttgtcacgcagcgcaggaagcaaaagcagaaacagaccatgcatcagatggctgccatgtctgcccaggaatactacgttgattacaaaccgaaccacattgagggagccctggtgatcatcaacgagtatggctcgtgtacctgccaccagcagcccgcgagggaatgcgaggtgtgattgtcccagtggctctcaacccatgcgctaccaaatacgcctgggcagccgggacgggccggcgggcaccaggctggggtctccttgtctgtgctctgatatgctccttgactgaaactttaaggggatctctcccagagacttgacattttagctttattgtgtcttaaaaacaaaagcgaattaaaacacaacaaaaaaccccaccccacaaccttcaggacagtctatcttaaatttcatatgagaactccttcctccctttgaagatctgtccatattcaggaatctgagagtgtaaaaaaggtaccaatcattgattttttttttttttgtaaactaaaatgtttaaaataaaatagcatttacagttaaaaannnnnnnnnnnnnnnnnnnnnnnnnnnnn

SEQ ID NO: 19925 - DNA, 2083 bp, Homo sapiens
  misc_feature 1, 2, 1208, 1215, 1216, 1221, 1229, 1232, 1234, 1235, 1236,1243, 1244, 1248, 1252, 1256, 1257, 1302, 1311, 1335, 1339,1340, 1352, 1354, 1359, 1361, 1363, 1371, 1375, 1377, 1504,1508, 1618, 1621, 1626, 2080, 2081, 2082, 2083: n = A,T,C or G
nncgacccacgcgtccgaaggcaggataatgcagtggggggcatggtggagaggggaaagggccccttgactgaggggctctgctcccaggtcctcagaacaggagcagatggagcaggcgatccgtgctgagctgtggaaagtgttggatgtcagtgacctggagagtgtcacttccaaagagatccgccaggctctggagctgcgcctggggctccccctccagcagtaccgtgacttcatcgacaaccagatgctgctgctggtggcacagcgggaccgagcctcccgcatcttcccccacctctacctgggctcagagtggaacgcagcaaacctggaggagctgcagaggaacagggtcacccacatcttgaacatggcccgggagattgacaacttctaccctgagcgcttcacctaccacaatgtgcgcctctgggatgaggagtcggcccagctgctgccgcactggaaggagacgcaccgcttcattgaggctgcaagagcacagggcacccacgtgctggtccactgcaagatgggcgtcagccgctcagcggccacagtgctggcctatgccatgaagcagtacgaatgcagcctggagcaggccctgcgccacgtgcaggagctccggcccatcgcccgccccaaccctggcttcctgcgccagctgcagatctaccagggcatcctgacggccagccgccagagccatgtctgggagcagaaagtgggtggggtctccccagaggagcacccagcccctgaagtctctacaccattcccacctcttccgccagaacctgagggtggtggggaggagaaggttgtaggcatggaagagagccaggcagccccgaaagaagagcctgggccacggccacgtataaacctccgaggggtcatgaggtccatcagtcttctggagccctccttggagctggagagcacctcagagaccagtgacatgccagaggtcttctcttcccacgagtcttcacatgaagagcctctgcagcccttcccacagcttgcaaggaccaagggaggccagcaggtggacagggggcctcagcctgccctgaagtcccgccagtcagtggttaccctccagggcagtgccgtggtggccaaccggagcggcctgcagggccagcaggagcaggtgcggggccctgggcagggagagccctgcatttcancgtggannagagngcggaggntgngnnntcacgcnngcgnacangacnntggagaggagggcgaggcagaagccctcacacatgcccacgcacncctgatacngaagaggatccacaactctccgcncaanncccctcactacngntgccncncncatccctntcancnccgccccatacccccccccctcccacccctgtcactacagcctcacctcctacagccttaagtcccaggcccatgtctgcctgtccaagggctcaagactttctaactgggatgtggtagagggacntganaggtacctttgggggcaacagcaccctagtttcattctcaactctagccctgcacactcacctgtggcacggaatgaaaacagagcttcccgtgcaaaaagggtcacgcntcncaccnccgccccctccctgcacctcctgtcctctcccagttcattcctggaaccagccaggccaggcaaccagtggcccccaaaggcaggcaggatcctcaggccccagccgcgggaggctggaagggctggcagatcgcttccctcatccacctccaccggtccaggtctttgctgctgtccccagacctcctgtgacaccacgccagatcacagggcaccaggccagagatagtcttctttttgtcctttctggcctctggctagtcagtttttcatagccttacagtatctggctttgtactgagaaataaaacacattttcataaaaaaaaaaaaaaagggcggccgcaacacattttcataaaaaaaaaaaaaaagggcgggccgctagactagtctagagaaaaaacctcccacacctccccctgaacggaaacataaaagggggcttcaaannnn

SEQ ID NO: 19926 - DNA, 3119 bp, Homo sapiens
  misc_feature 1, 2, 3, 4, 5, 6, 7, 8, 3119: n = A,T,C or G
nnnnnnnnccaccacaccttgcaccagattgtcacagcccaagccagcaagcacagccctgaagccaggtaccgcctggactttggggaatcccaggattgggtactggaagctgaggatgagggtgaagagtacagccctctggagggcctgccaccctttatctcactgcgggaggatcagctgctggtggccgtggccttaccccaggccagaaggaaccagagccagggcaggagaggtgggagctaccgcctcatcaagcagccaaggaggcaggataaggaagccccaaagagggactggggggctgatgaggacggggaggtgtctgaagaagaggagttgaccccgttcagcctggacccacgtggcctccaggaggcactcagtgcccgcatccccctccagagggctctgcccgaggtgcggcacccactgtgtctgcagcagcaccctcaggacagcctgcccacagccagcgtcatcctctgtttccatgatgaggcctggtccactctcctgcggactgtacacagcatcctcgacacagtgcccagggccttcctgaaggagatcatcctcgtggacgacctcagccagcaaggacaactcaagtctgctctcagcgaatatgtggccaggctggagggggtgaagttactcaggagcaacaagaggctgggtgccatcagggcccggatgctgggagccaccagagccaccggggatgtgctcgtcttcatggatgcccactgcgagtgccacccaggctggctggagcccctcctcagcagaatagctggtgacaggagccgagtggtatctccggtgatagatgtgattgactggaagactttccagtattacccctcaaaggacctgcagcgtggggtgttggactggaagctggatttccactgggaacctttgccagagcatgtgaggaaggccctccagtcccccataagccccatcaggagccctgtggtgcccggagaggtggtggccatggacagacattacttccaaaacactggagcgtatgactctcttatgtcgctgcgaggtggtgaaaacctcgaactgtctttcaaggcctggctctgtggtggctctgttgaaatccttccctgctctcgggtaggacacatctaccaaaatcaggattcccattcccccctcgaccaggaggccaccctgaggaacagggttcgcattgctgagacctggctggggtcattcaaagaaaccttctacaagcatagcccagaggccttctccttgagcaaggctgagaagccagactgcatggaacgcttgcagctgcaaaggagactgggttgtcggacattccactggtttctggctaatgtctaccctgagctgtacccatctgaacccaggcccagtttctctggaaagctccacaacactggacttgggctctgtgcagactgccaggcagaaggggacatcctgggctgtcccatggtgttggctccttgcagtgacagccggcagcaacagtacctgcagcacaccagcaggaaggagattcactttggcagcccacagcacctgtgctttgctgtcaggcaggagcaggtgattcttcagaactgcacggaggaaggcctggccatccaccagcagcactgggacttccaggagaatgggatgattgtccacattctttctgggaaatgcatggaagctgtggtgcaagaaaacaataaagatttgtacctgcgtccgtgtgatggaaaagcccgccagcagtggcgatttgaccagataaatgctgtggatgaacgatgaatgtcaatgtcagaaggaaaagagaattttggccatcaaaatccagctccaagtgaacttaaagagcttatatatttcatgaagctgatccttttgtgtgtgtgctcctggtgttaggagagaaaaaagctctatgaaagaatataggaagtttctccttttcacaccttatttcattgactgctggctgctttaaaaaaaaaaaaaaaggatccattgtaccgttgtcttcatcactgggaaatgattattacatagtacagaagattctttgtttttctccactgagcacttaacaattgctttctctctggcctggacattctctggcagcacctccaggatacataaattcaatggatcaatttatttgtcttcaaatggccttaacttggattgtctgtttggccaaccagaaaattaaagagtgaagcagatgtaatggcctgacattccaaaaactctgaattgggtttattagcacaaatgttgtgttcatttgttgagccatatctcagaagaaggaaagggagctacagaaaggaggtttaggattgcagagaagatgcaagagcacttggcccaattctccagctcaacccagcagctgaaaagcttcaagagatctaggaaaagacattttcatgttaatgagaatttccaccatgtagagaatttccttcctactgagaatctacctctattccccctgccctagctcttctctaactggttaaccataaccataaccagattcccttgcaatcgatttctctttagtcgtggtgttagaagtaccagcacaatttgagcattcccattaacaaaggtgttcacagttgagaaactctcctgccgggcgcggtggctcatgcctgtaattccagcacttgggaggcagagttgggaggatcacctgatgtcaggggtttgagaccagcctggtcaacattgcaaaacttgtctctactaaaaatacaaaaattagctgggcatggtggcgcatacctgtaatcccagctacttgggaggctgaggcaagagaatcgcttgaaccaaggaggcagaggttgcagtgaagctgagatcatggccatgtgcactccaactgggtgacagagtgggaatccctctcaaaaaaaaaaagaagaaaaccctcgatgcccgtacagggttgcctggcgggaaaagggacccttctaaaagcaccttttcggggaaagccagccggccaatcttgagggacatggggtgccgaagaggcttcgcttttgtgcccatgccgttgtccatggacn

SEQ ID NO: 19927 - DNA, 295 bp, Homo sapiens
  misc_feature 295: n = A,T,C or G
acgcgggggggtttccctgctatgttttgtcacacatcattgctgggagagttcagtgctatccaagtgactccccggggagaggacaactggaaatttatgcctggtgtcttcctggactccgacctatgcacctttttccttggatgattttaacctgtctccttttgctgcaatgaaccataaccatgagtatatcagcttttctaatttttgtgagtccctcaagtgaattatcaaacctaaggtagttttgggacccccatcacaaaaagtcaaacaggggcagggcaan

SEQ ID NO: 19928 - DNA, 2184 bp, Homo sapiens
  misc_feature 1, 2, 3, 4, 2183, 2184: n = A,T,C or G
nnnncctacctcgccagctgcccactttttcccgctttcgtggttcccctcccccaggtcctccaagccgttcttcccgccctttcccccccttctttttttcccctcttgcgccctctacaaagcggggcacaattgcgcccctggatattttcccccccctcttttttttttgttgttgtgtttgtttgacaaaagcatgttgaaatgtattagaatcagaacctgtacaaaaaaaaaaaaattaaaatataacctgaaactgttcaagttcagaagtctagttaagtctttttctcttgccaggagaatgccatcatcagagggctctgggtcatcagccaaggaggggtgaaaagacagaagcagcaacaggtccttcagcagacagaggggcatcgatgccaccatccctacccaggtgcagccaggaggagttaaagatcttgggagagcaagcattagccggcagttccagtgggcagctggggcctacacaccgaaaacaaggctgagtagtcagaggcagcaggaagagtggccaggagagaacgccaagccggaaggaaccatttctgccacccagcagacccacagcaccctctgtctgtgctcagataccagaggttagtcaacccagcgctctcaactaattggagatcggagctgggcttaagaggctgaaaacccgtgggtttagtaaacacagcccagcatcacgtccctccacggcctgaactggagctgccaacaagggatgaggcaggagagggaaagcagcgcatcttgacgcctggctagaaatcactgcaccatcgtgaggactgtggtaccaggggctggagaggagtgccccctcctcacaaggggaggggcctccttcacaatcatccctgggggctggttaaagctgcctccggcttataaccagcctgacaaaatgacgtggagcaaaagaaaaactgggagggagacaagcccttacacagagacaagaacctcctggagggaagctgggcagtgtctgaccctgttttgggatggcattggtggagcccctgagtctgaagggaacaactggggaaggagggagtgggtgagggggagtaacagtttttctggaacagtaccaacagggtggggaggcgctggtgaggggacgggcaggtctggaactcactgcaggtagagaggggaggaaatgggcccttggtgtcccctccccacctgacccaggcctggtgagtgccagctgccccagccggccctagtggcggctggagaccagacctttcactttggacatcttcttggtgggctgcctctgctcagcgtgagggggacactcccgttcagccagctgctgctccatctcctgagccgaggaggatgcggtggctttgagtgtcttcttgatgttggtaacctctgcttctacctgctgctgagttcggttgtggttctctttgtactggttggctctcagaacttgctgctcgatgcccagtagaactgcttcacagccatcacaccattcatgcagggtcttgacaatattattgatatccttctttcggatgtcacggccaatgcagaaatccacttccagcagctggtttcgctggtccagcttgccctggatgatgtcagtgtagacagcctcaatgataaggtcttctagttcccggagattccgcatctccaggtctttcagcaacacggagtaggggatacacttcattcttgatgccaagctcacgatggtaagatgcttcagcttgttctgctgagctgtgctcagttctggcaggctctccttgttggctatgtaatctgggtatgtcccataggcaaacaggttcaacaactgcaaataagcagcattagctccttccgcaagctcctgcacgttggccagctccagaagttctccaaagacatacactccgggagcctctaagacctggcttatgagagcagtgagggctgagccactggtacctttggctagtaaaataaactgctccaggagattacttgagggtttctgttcccctgccattctctggccttgaaatctgtccacgccacctctcggtcctcttagtcgctggctcggcctcccggcgcctgcccgcaggttgtcaagcgtccatgatcagtccgcggccgcgtgggtgacnn

SEQ ID NO: 19929 - DNA, 387 bp, Homo sapiens
  misc_feature 1, 2: n = A,T,C or G
nntttttttttttttttctttctgttccttggactagataatctgaaatcaactgtcttcagttttgcagactcttgtgccagctaaaatgttctgttgagccccagaagctaattttcttttcagttattatgattttcagctttagaatttatttttttaatataatttctacctcttttttatattctccatttggtgagacattcacatactttcttccagttttttttagacgtagtttccttgagttctttgagcatatttaaaatagttgatttaaagtatttgtctagttactccaccatctgagtttcctcagggaaaatttctattgcctccttttttcctgtgtgtggtcggtccatacggacgcgtgggtcgaag

SEQ ID NO: 19930 - DNA, 510 bp, Homo sapiens
  misc_feature 493, 508, 509, 510: n = A,T,C or G
ggcggccgcccgggcaggtaccacctgaagaccctcacactcaacttcaccatctccaatctccagtattcaccagatatgggcaagggctcagctacattcaactccaccgagggggtccttcagcacctgctcagacccttgttccagaagagcagcatgggccccttctacttgggttgccaactgatctccctcaggcctgagaaggatggggcagccactggtgtggacaccacctgcacctaccaccctgaccctgtgggccccgggctggacatacagcagctttactgggagctgagtcagctgacccatggtgtcacccaactgggcttctatgtcctggacagggatagcctcttcatcaatggctatgcaccccagaatttatcaatccggggcgagtacctgatcagtttccacattgtcaactggaacctcagtaatccagaccccacatcctcagagtacatcacctgctgagggacanccaggacaaggtcannn

SEQ ID NO: 19931 - DNA, 4379 bp, Homo sapiens
  misc_feature 1, 2, 4378, 4379: n = A,T,C or G
nncacgcgtccggctaatgaatcttggggccggtgtcgggccggggcggcttgatcggcaactaggaaaccccaggcgcagaggccaggagcgagggcagcgaggatcagaggccaggccttcccggctgccggcgctcctcggaggtcagggcagatgaggaacatgactctcccccttcggaggaggaaggaagtcccgctgccaccttatctctgctcctctgcctcctccctgttcccagagctttttctctagagaagattttgaaggcggcttttgtgctgacggccacccaccatcatctaaagaagataaacttggcaaatgacatgcaggttcttcaaggcagaataattgcagaaaatcttcaaaggaccctatctgcagatgttctgaatacctctgagaatagagattgattattcaaccaggatacctaattcaagaactccagaaatcaggagacggagacattttgtcagttttgcaacattggaccaaatacaatgaagtattcttgctgtgctctggttttggctgtcctgggcacagaattgctgggaagcctctgttcgactgtcagatccccgaggttcagaggacggatacagcaggaacgaaaaaacatccgacccaacattattcttgtgcttaccgatgatcaagatgtggagctggggtccctgcaagtcatgaacaaaacgagaaagattatggaacatgggggggccaccttcatcaatgcctttgtgactacacccatgtgctgcccgtcacggtcctccatgctcaccgggaagtatgtgcacaatcacaatgtctacaccaacaacgagaactgctcttccccctcgtggcaggccatgcatgagcctcggacttttgctgtatatcttaacaacactggctacagaacagccttttttggaaaatacctcaatgaatataatggcagctacatcccccctgggtggcgagaatggcttggattaatcaagaattctcgcttctataattacactgtttgtcgcaatggcatcaaagaaaagcatggatttgattatgcaaaggactacttcacagacttaatcactaacgagagcattaattacttcaaaatgtctaagagaatgtatccccataggcccgttatgatggtgatcagccacgctgcgccccacggccccgaggactcagccccacagttttctaaactgtaccccaatgcttcccaacacataactcctagttataactatgcaccaaatatggataaacactggattatgcagtacacaggaccaatgctgcccatccacatggaatttacaaacattctacagcgcaaaaggctccagactttgatgtcagtggatgattctgtggagaggctgtataacatgctcgtggagacgggggagctggagaatacttacatcatttacaccgccgaccatggttaccatattgggcagtttggactggtcaaggggaaatccatgccatatgactttgatattcgtgtgcctttttttattcgtggtccaagtgtagaaccaggatcaatagtcccacagatcgttctcaacattgacttggcccccacgatcctggatattgctgggctcgacacacctcctgatgtggacggcaagtctgtcctcaaacttctggacccagaaaagccaggtaacaggtttcgaacaaacaagaaggccaaaatttggcgtgatacattcctagtggaaagaggcaaatttctacgtaagaaggaagaatccagcaagaatatccaacagtcaaatcacttgcccaaatatgaacgggtcaaagaactatgccagcaggccaggtaccagacagcctgtgaacaaccggggcagaagtggcaatgcattgaggatacatctggcaagcttcgaattcacaagtgtaaaggacccagtgacctgctcacagtccggcagagcacgcggaacctctacgctcgcggcttccatgacaaagacaaagagtgcagttgtagggagtctggttaccgtgccagcagaagccaaagaaagagtcaacggcaattcttgagaaaccaggggactccaaagtacaagcccagatttgtccatactcggcagacacgttccttgtccgtcgaatttgaaggtgaaatatatgacataaatctggaagaagaagaagaattgcaagtgttgcaaccaagaaacattgctaagcgtcatgatgaaggccacaaggggccaagagatctccaggcttccagtggtggcaacaggggcaggatgctggcagatagcagcaacgccgtgggcccacctaccactgtccgagtgacacacaagtgttttattcttcccaatgactctatccattgtgagagagaactgtaccaatcggccagagcgtggaaggaccataaggcatacattgacaaagagattgaagctctgcaagataaaattaagaatttaagagaagtgagaggacatctgaagagaaggaagcctgaggaatgtagctgcagtaaacaaagctattacaataaagagaaaggtgtaaaaaaagcaagagaaattaaagagccatcttcacccattcaaggaggctgctcaggaagtagatagcaaactgcaacttttcaaggagaacaaccgtaggaggaagaaggagaggaaggagaagagacggcagaggaagggggaagagtgcagcctgcctggcctcacttgcttcacgcatgacaacaaccactggcagacagccccgttctggaacctgggatctttctgtgcttgcacgagttctaacaataacacctactggtgtttgcgtacagttaatgagacgcataattttcttttctgtgagtttgctactggctttttggagtattttgatatgaatacagatccttatcagctcacaaatacagtgcacacggtagaacgaggcattttgaatcagctacacgtacaactaatggagctcagaagctgtcaaggatataagcagtgcaacccaagacctaagaatcttgatgttggaaataaagatggaggaagctatgacctacacagaggacagttatgggatggatgggaaggttaatcagccccgtctcactgcagacatcaactggcaaggcctagaggagctacacagtgtgaatgaaaacatctatgagtacagacaaaactacagacttagtctggtggactggactaattacttgaaggatttagatagagtatttgcactgctgaagagtcactatgagcaaaataaaacaaataagactcaaactgctcaaagtgacgggttcttggttgtctctgctgagcacgctgtgtcaatggagatggcctctgctgactcagatgaagacccaaggcataaggttgggaaaacacctcatttgaccttgccagctgaccttcaaaccctgcatttgaaccgaccaacattaagtccagagagtaaacttgaatggaataacgacattccagaagttaatcatttgaattctgaacactggagaaaaaccgaaaaatggacggggcatgaagagactaatcatctggaaaccgatttcagtggcgatggcatgacagagctagagctcgggcccagccccaggctgcagcccattcgcaggcacccgaaagaacttccccagtatggtggtcctggaaaggacatttttgaagatcaactatatcttcctgtgcattccgatggaatttcagttcatcagatgttcaccatggccaccgcagaacaccgaagtaattccagcatagcggggaagatgttgaccaaggtggagaagaatcacgaaaaggagaagtcacagcacctagaaggcagcgcctcctcttcactctcctctgattagatgaaactgttaccttaccctaaacacagtatttctttttaacttttttatttgtaaactaataaaggtaatcacagccaccaacattccaagctaccctgggtacctttgtgcagtagaagctagtgagcatgtgagcaagcggtgtgcacacggagactcatcgttataatttactatctgccaagagtagaaagaaaggctggggatatttgggttggcttggttttgattttttgcttgtttgtttgttttgtactaaaacagtattatcttttgaatatcgtagggacataagtatatacatgttatccaatcaagatggctataatgggctttctcagagataaaacttgacccccgtgtcaaattgacatcacactctgcatgtctgcgtaatgaaggtacgatgcaactataaccagtgcaatatgacactgacactatattaaattcaataatacnn
